United States Patent Application Publication US 2025/0121052 A1 - sequence listing, part 2

SEQ ID NO: 9250 - protein, 10 aa, Severe acute respiratory syndrome coronavirus 2
  REGION 1..10: note = Table B: HLA-DQA1*03:02-B1*03:03M HLA-DQA1*05:01-B1*03:01L HLA-DRB1*13:03L HLA-DRB1*01:02L HLA-DRB1*08:77L HLA-DRB1*11:02L HLA-DQA1*01-B1*05L HLA-DQA1*05:05-B1*03:19M HLA-DQA1*05:01-B1*02:01L HLA-DQA1*05:05-B1*03:116L
  REGION 1..10: note = CONT. FROM ABOVE: HLA-DRB1*09:01L HLA-DPA1*03:01-B1*105:01L HLA- DQA1*03:01-B1*03:02L HLA-DPA1*01:03-B1*104:01L HLA-DRB1*10:01L H LA-DRB1*16:01L HLA-DQA1*02:01-B1*03:03L HLA-DRB1*15:03L
ATEVPANSTV

SEQ ID NO: 9251 - protein, 10 aa, Severe acute respiratory syndrome coronavirus 2
  REGION 1..10: note = Table B: HLA-DQA1*03:02-B1*03:03H HLA-DQA1*05:01-B1*03:01L HLA-DRB1*13:03L HLA-DRB1*08:77L HLA-DPA1*03:01-B1*04:02L HLA-DRB1*11:02L HLA-DRB1*14:02L HLA-DRB1*11:01L HLA-DQA1*05:05-B1*03:19M HLA-DQA1*05:01-B1*02:01L
  REGION 1..10: note = CONT. FROM ABOVE: HLA-DRB4*01:01L HLA-DPA1*01:03-B1*04:01L HLA-D QA1*05:05-B1*03:116L HLA-DRB1*09:01M HLA-DPA1*01:03-B1*04:02L HL A-DQA1*03:01-B1*03:02M HLA-DPA1*01:03-B1*104:01L HLA-DPA1*01:02- B1*04:01L HLA-DRB1*07:01L HLA-DRB1*10:01L HLA-DRB1*16:01L
  REGION 1..10: note = CONT. FROM ABOVE: HLA-DQA1*02:01-B1*03:03L HLA-DRB1*15:03L
TEVPANSTVL

SEQ ID NO: 9252 - protein, 11 aa, Severe acute respiratory syndrome coronavirus 2
  REGION 1..11: note = Table B: HLA-DQA1*03:02-B1*03:03L HLA-DRB1*01:03L HLA-DRB1*08:77L HLA-DQA1*05:05-B1*03:19L HLA-DPA1*01:03-B1*04:01L HLA-DQA1*02:01-B1*03:03L
EVPANSTVLSF

SEQ ID NO: 9253 - protein, 15 aa, Severe acute respiratory syndrome coronavirus 2
  REGION 1..15: note = Table B: HLA-DQA1*03:02-B1*03:03L HLA-DRB1*13:02L HLA-DRB1*13:03L HLA-DRB1*04:04L HLA-DRB1*08:04L HLA-DRB1*14:01L HLA-DRB1*11:04L HLA-DRB1*14:02L HLA-DRB1*11:01L HLA-DQA1*05:05-B1*03:19L HLA-DQA1*05:01-B1*02:01L
  REGION 1..15: note = CONT. FROM ABOVE: HLA-DRB3*01:01L HLA-DPA1*01:03-B1*104:01L HLA- DRB1*10:01L HLA-DRB1*08:03L
STVLSFCAFAVDAAK

SEQ ID NO: 9254 - protein, 10 aa, Severe acute respiratory syndrome coronavirus 2
  REGION 1..10: note = Table B: HLA-DQA1*03:02-B1*03:03L HLA-DQA1*05:01-B1*03:01L HLA-DRB1*04:03L HLA-DRB1*13:02L HLA-DRB1*13:03L HLA-DRB1*01:03L HLA-DRB1*04:05L HLA-DQA1*01:02-B1*06:02L HLA-DRB4*03:01NL HLA-DRB1*08:77L HLA-DPA1*01:03-B1*03:01L
  REGION 1..10: note = CONT. FROM ABOVE: HLA-DPA1*03:01-B1*04:02L HLA-DRB1*03:01L HLA-D RB1*14:01L HLA-DRB1*14:02L HLA-DQA1*01-B1*05L HLA-DQA1*05:05-B1* 03:19L HLA-DQA1*05:01-B1*02:01L HLA-DRB4*01:01L HLA-DPA1*01:03-B 1*04:01L HLA-DQA1*05:05-B1*03:116L HLA-DPA1*01:03-B1*04:02L
  REGION 1..10: note = CONT. FROM ABOVE: HLA-DRB1*12:01L HLA-DPA1*02:01-B1*13:01L HLA-D PA1*03:01-B1*105:01L HLA-DQA1*03:01-B1*03:02L HLA-DPA1*01:03-B1* 104:01L HLA-DQA1*05:05-B1*03:01L HLA-DPA1*01:02-B1*04:01L HLA-DR B1*10:01L HLA-DRB1*16:01L HLA-DQA1*01:03-B1*06:01L
  REGION 1..10: note = CONT. FROM ABOVE: HLA-DRB1*08:02L HLA-DQA1*02:01-B1*03:03L HLA-D RB1*15:03L
AFAVDAAKAY

SEQ ID NO: 9255 - protein, 10 aa, Severe acute respiratory syndrome coronavirus 2
  REGION 1..10: note = Table B: HLA-DQA1*03:02-B1*03:03L HLA-DQA1*05:01-B1*03:01L HLA-DRB1*04:03L HLA-DRB1*13:02L HLA-DRB1*13:03L HLA-DRB1*01:03L HLA-DRB1*04:02L HLA-DRB1*04:05L HLA-DRB1*01:02L HLA-DRB4*03:01NL HLA-DRB1*08:77L HLA-DPA1*01:03-B1*03:01L HLA-DRB1*14:01L
  REGION 1..10: note = CONT. FROM ABOVE: HLA-DRB1*11:04L HLA-DQA1*01-B1*05L HLA-DQA1*05 :05-B1*03:19L HLA-DQA1*05:01-B1*02:01L HLA-DRB1*12:01L HLA-DPA1* 03:01-B1*105:01L HLA-DQA1*03:01-B1*03:02L HLA-DRB1*14:54L HLA-DQ A1*05:05-B1*03:01L HLA-DRB1*14:17L HLA-DPA1*01:02-B1*04:01L
  REGION 1..10: note = CONT. FROM ABOVE: HLA-DRB1*16:01L HLA-DQA1*01:03-B1*06:01L HLA-D RB1*04:08L HLA-DQA1*02:01-B1*03:03L HLA-DRB1*15:03L
AVDAAKAYKD

SEQ ID NO: 9256 - protein, 10 aa, Severe acute respiratory syndrome coronavirus 2
  REGION 1..10: note = Table B: HLA-DQA1*03:02-B1*03:03L HLA-DQA1*05:01-B1*03:01L HLA-DRB1*04:03L HLA-DRB1*13:02L HLA-DRB1*13:03L HLA-DRB1*01:03L HLA-DRB1*04:02L HLA-DQA1*01:02-B1*06:02L HLA-DRB4*03:01NL HLA-DRB1*08:77L HLA-DPA1*01:03-B1*03:01L
  REGION 1..10: note = CONT. FROM ABOVE: HLA-DPA1*03:01-B1*04:02L HLA-DRB1*03:01L HLA-D RB1*14:01L HLA-DRB1*11:02L HLA-DRB1*14:02L HLA-DQA1*01-B1*05L HL A-DQA1*05:05-B1*03:19M HLA-DQA1*05:01-B1*02:01L HLA-DRB4*01:01L HLA-DPA1*01:03-B1*04:01L HLA-DQA1*05:05-B1*03:116L
  REGION 1..10: note = CONT. FROM ABOVE: HLA-DPA1*01:03-B1*04:02L HLA-DRB1*12:01L HLA-D PA1*02:01-B1*13:01L HLA-DPA1*03:01-B1*105:01L HLA-DQA1*03:01-B1* 03:02L HLA-DPA1*01:03-B1*104:01L HLA-DQA1*05:05-B1*03:01L HLA-DR B1*14:17L HLA-DPA1*01:02-B1*04:01L HLA-DRB1*10:01L
  REGION 1..10: note = CONT. FROM ABOVE: HLA-DRB1*16:01L HLA-DQA1*01:03-B1*06:01L HLA-D QA1*02:01-B1*03:03L HLA-DRB1*15:03L
VDAAKAYKDY

SEQ ID NO: 9257 - protein, 14 aa, Severe acute respiratory syndrome coronavirus 2
  REGION 1..14: note = Table B: HLA-DQA1*03:02-B1*03:03L HLA-DRB1*01:03L HLA-DRB1*04:04L HLA-DRB3*02:01L HLA-DRB1*14:01L HLA-DRB1*08:01L HLA-DQA1*05:01-B1*02:01L HLA-DRB1*04:10L HLA-DPA1*01:03-B1*104:01L HLA-DPA1*01:02-B1*04:01L
  REGION 1..14: note = CONT. FROM ABOVE: HLA-DRB1*07:01L
DAAKAYKDYLASGG

SEQ ID NO: 9258 - protein, 14 aa, Severe acute respiratory syndrome coronavirus 2
  REGION 1..14: note = Table B: HLA-DQA1*03:02-B1*03:03L HLA-DQA1*05:01-B1*03:01L HLA-DRB1*13:02L HLA-DRB1*13:03L HLA-DRB1*04:04L HLA-DQA1*01:02-B1*06:02L HLA-DPA1*01:03-B1*03:01L HLA-DPA1*03:01-B1*04:02L HLA-DRB1*14:01L HLA-DRB1*08:01L
  REGION 1..14: note = CONT. FROM ABOVE: HLA-DQA1*05:01-B1*02:01L HLA-DRB1*04:10L HLA-D PA1*01:03-B1*04:02L HLA-DPA1*01:03-B1*104:01L HLA-DQA1*05:05-B1* 03:01L HLA-DRB1*14:17L HLA-DRB1*07:01L HLA-DQA1*01:03-B1*06:01L
AKAYKDYLASGGQP

SEQ ID NO: 9259 - protein, 11 aa, Severe acute respiratory syndrome coronavirus 2
  REGION 1..11: note = Table B: HLA-DQA1*03:02-B1*03:03L HLA-DRB1*04:03L HLA-DRB1*13:02L HLA-DRB1*13:03L HLA-DRB1*04:02L HLA-DRB4*03:01NL HLA-DRB1*08:77L HLA-DRB3*02:01L HLA-DRB1*11:03L HLA-DQA1*05:01-B1*02:01L HLA-DRB1*09:01L HLA-DRB1*12:01L
  REGION 1..11: note = CONT. FROM ABOVE: HLA-DRB1*12:02L HLA-DQA1*03:01-B1*03:02L HLA-D RB1*07:01L HLA-DRB1*16:01L HLA-DQA1*02:01-B1*03:03L HLA-DRB1*15: 03L
KDYLASGGQPI

SEQ ID NO: 9260 - protein, 10 aa, Severe acute respiratory syndrome coronavirus 2
  REGION 1..10: note = Table B: HLA-DQA1*03:02-B1*03:03L HLA-DQA1*05:01-B1*03:01L HLA-DRB1*04:03L HLA-DRB1*13:02L HLA-DRB1*13:03L HLA-DRB1*01:03L HLA-DRB1*04:02L HLA-DRB1*01:02L HLA-DRB4*03:01NL HLA-DRB1*08:77L HLA-DRB3*02:01L HLA-DRB1*11:03L HLA-DRB1*11:04L
  REGION 1..10: note = CONT. FROM ABOVE: HLA-DQA1*05:05-B1*03:19L HLA-DQA1*05:01-B1*02: 01L HLA-DRB1*09:01L HLA-DRB1*12:01L HLA-DRB1*12:02L HLA-DRB1*07: 01L HLA-DRB1*16:01L HLA-DQA1*02:01-B1*03:03L HLA-DRB1*15:03L
YLASGGQPIT

SEQ ID NO: 9261 - protein, 10 aa, Severe acute respiratory syndrome coronavirus 2
  REGION 1..10: note = Table B: HLA-DQA1*03:02-B1*03:03L HLA-DQA1*05:01-B1*03:01L HLA-DRB1*04:03L HLA-DRB1*13:03L HLA-DQA1*01:02-B1*06:02L HLA-DRB4*03:01NL HLA-DQA1*05:05-B1*03:19L HLA-DQA1*05:01-B1*02:01L HLA-DRB1*12:01L
  REGION 1..10: note = CONT. FROM ABOVE: HLA-DQA1*03:01-B1*03:02L HLA-DQA1*05:05-B1*03: 01L HLA-DRB1*14:17L HLA-DRB1*16:01L HLA-DQA1*01:03-B1*06:01L HLA -DQA1*02:01-B1*03:03L
LASGGQPITN

SEQ ID NO: 9262 - protein, 12 aa, Severe acute respiratory syndrome coronavirus 2
  REGION 1..12: note = Table B: HLA-DQA1*03:02-B1*03:03L HLA-DQA1*01:02-B1*06:02L
ASGGQPITNCVK

SEQ ID NO: 9263 - protein, 10 aa, Severe acute respiratory syndrome coronavirus 2
  REGION 1..10: note = Table B: HLA-DQA1*03:02-B1*03:03L HLA-DQA1*05:01-B1*03:01L HLA-DRB1*13:03L HLA-DQA1*01:02-B1*06:02L HLA-DRB1*01:02L HLA-DQA1*05:05-B1*03:19L HLA-DQA1*05:05-B1*03:116L HLA-DPA1*03:01-B1*105:01L HLA-DQA1*03:01-B1*03:02L
  REGION 1..10: note = CONT. FROM ABOVE: HLA-DRB1*16:01L HLA-DQA1*02:01-B1*03:03L HLA-D RB1*15:03L
HTGTGQAITV

SEQ ID NO: 9264 - protein, 11 aa, Severe acute respiratory syndrome coronavirus 2
  REGION 1..11: note = Table B: HLA-DQA1*03:02-B1*03:03L HLA-DQA1*03:01-B1*03:02L HLA-DQA1*01:03-B1*06:01L HLA-DQA1*02:01-B1*03:03L
GTGQAITVTPE

SEQ ID NO: 9265 - protein, 10 aa, Severe acute respiratory syndrome coronavirus 2
  REGION 1..10: note = Table B: HLA-DQA1*03:02-B1*03:03L HLA-DRB1*04:03L HLA-DQA1*05:01-B1*02:01L HLA-DQA1*03:01-B1*03:02L HLA-DQA1*01:03-B1*06:01L HLA-DQA1*02:01-B1*03:03L
QAITVTPEAN

SEQ ID NO: 9266 - protein, 11 aa, Severe acute respiratory syndrome coronavirus 2
  REGION 1..11: note = Table B: HLA-DQA1*03:02-B1*03:03L HLA-DRB1*04:02L HLA-DQA1*01-B1*05L HLA-DRB1*12:01L HLA-DQA1*01:03-B1*06:01L
AITVTPEANMD

SEQ ID NO: 9267 - protein, 11 aa, Severe acute respiratory syndrome coronavirus 2
  REGION 1..11: note = Table B: HLA-DQA1*03:02-B1*03:03L HLA-DRB1*04:02L HLA-DRB1*04:05L HLA-DRB4*03:01NL HLA-DRB1*04:10L HLA-DRB1*14:54L HLA-DRB1*16:01L HLA-DQA1*01:03-B1*06:01L
ITVTPEANMDQ

SEQ ID NO: 9268 - protein, 12 aa, Severe acute respiratory syndrome coronavirus 2
  REGION 1..12: note = Table B: HLA-DQA1*03:02-B1*03:03L HLA-DQA1*01-B1*05L
VTPEANMDQESF

SEQ ID NO: 9269 - protein, 12 aa, Severe acute respiratory syndrome coronavirus 2
  REGION 1..12: note = Table B: HLA-DQA1*03:02-B1*03:03L HLA-DRB1*04:03L HLA-DQA1*01:01-B1*05:01L HLA-DQA1*01-B1*05L HLA-DRB1*12:01L HLA-DQA1*03:01-B1*03:02L HLA-DRB1*16:01L HLA-DQA1*01:03-B1*06:01L HLA-DQA1*02:01-B1*03:03L
TPEANMDQESFG

SEQ ID NO: 9270 - protein, 12 aa, Severe acute respiratory syndrome coronavirus 2
  REGION 1..12: note = Table B: HLA-DQA1*03:02-B1*03:03L HLA-DRB1*04:03L HLA-DQA1*01-B1*05L HLA-DQA1*05:01-B1*02:01L HLA-DQA1*03:01-B1*03:02L
ANMDQESFGGAS

SEQ ID NO: 9271 - protein, 14 aa, Severe acute respiratory syndrome coronavirus 2
  REGION 1..14: note = Table B: HLA-DQA1*03:02-B1*03:03L HLA-DQA1*05:01-B1*03:01L
MDQESFGGASCCLY

SEQ ID NO: 9272 - protein, 10 aa, Severe acute respiratory syndrome coronavirus 2
  REGION 1..10: note = Table B: HLA-DQA1*03:02-B1*03:03L HLA-DQA1*05:01-B1*03:01L HLA-DRB1*04:03L HLA-DRB1*13:02L HLA-DRB1*13:03L HLA-DRB1*01:03M HLA-DRB1*04:02L HLA-DRB1*04:05L HLA-DQA1*01:02-B1*06:02M HLA-DRB1*01:01L HLA-DRB1*01:02L HLA-DRB4*03:01NL HLA-DRB1*08:77L
  REGION 1..10: note = CONT. FROM ABOVE: HLA-DPA1*01:03-B1*03:01L HLA-DPA1*03:01-B1*04: 02L HLA-DRB1*03:01L HLA-DRB1*14:01L HLA-DRB1*11:02L HLA-DRB1*11: 03L HLA-DRB1*14:02L HLA-DQA1*01:01-B1*05:01L HLA-DRB1*08:01L HLA -DRB1*11:01L HLA-DQA1*01-B1*05L HLA-DQA1*05:05-B1*03:19M
  REGION 1..10: note = CONT. FROM ABOVE: HLA-DQA1*05:01-B1*02:01M HLA-DRB4*01:01L HLA-D PA1*01:03-B1*04:01L HLA-DQA1*05:05-B1*03:116L HLA-DPA1*01:03-B1* 04:02L HLA-DRB1*12:01L HLA-DPA1*02:01-B1*13:01L HLA-DPA1*03:01-B 1*105:01L HLA-DQA1*03:01-B1*03:02L HLA-DPA1*01:03-B1*104:01L
  REGION 1..10: note = CONT. FROM ABOVE: HLA-DQA1*05:05-B1*03:01L HLA-DPA1*01:02-B1*04: 01L HLA-DRB1*10:01L HLA-DRB1*16:01M HLA-DQA1*01:03-B1*06:01L HLA -DRB1*08:02L HLA-DQA1*02:01-B1*03:03M HLA-DRB1*15:03L
HIDHPNPKGF

SEQ ID NO: 9273 - protein, 16 aa, Severe acute respiratory syndrome coronavirus 2
  REGION 1..16: note = Table B: HLA-DQA1*03:02-B1*03:03L HLA-DPA1*03:01-B1*04:02L HLA-DRB1*03:01L HLA-DRB1*11:02L HLA-DRB1*09:01L HLA-DQA1*01:03-B1*06:01L
LKGKYVQIPTTCANDP

SEQ ID NO: 9274 - protein, 16 aa, Severe acute respiratory syndrome coronavirus 2
  REGION 1..16: note = Table B: HLA-DQA1*03:02-B1*03:03L HLA-DRB1*09:01L HLA-DQA1*01:03-B1*06:01L
KGKYVQIPTTCANDPV

SEQ ID NO: 9275 - protein, 11 aa, Severe acute respiratory syndrome coronavirus 2
  REGION 1..11: note = Table B: HLA-DQA1*03:02-B1*03:03L HLA-DQA1*01-B1*05L HLA-DQA1*05:01-B1*02:01L HLA-DQA1*03:01-B1*03:02L HLA-DQA1*02:01-B1*03:03L
IPTTCANDPVG

SEQ ID NO: 9276 - protein, 11 aa, Severe acute respiratory syndrome coronavirus 2
  REGION 1..11: note = Table B: HLA-DQA1*03:02-B1*03:03L HLA-DQA1*05:01-B1*03:01L HLA-DRB1*13:03L HLA-DRB1*04:05L HLA-DQA1*01:02-B1*06:02L HLA-DPA1*03:01-B1*04:02L HLA-DRB1*14:01L HLA-DQA1*01-B1*05L HLA-DQA1*05:05-B1*03:19L HLA-DQA1*05:01-B1*02:01L
  REGION 1..11: note = CONT. FROM ABOVE: HLA-DQA1*05:05-B1*03:116L HLA-DPA1*02:01-B1*13 :01L HLA-DPA1*03:01-B1*105:01L HLA-DQA1*03:01-B1*03:02L HLA-DPA1 *01:02-B1*04:01L HLA-DRB1*16:01L HLA-DQA1*01:03-B1*06:01L HLA-DQ A1*02:01-B1*03:03L HLA-DRB1*15:03L
DPVGFTLKNTV

SEQ ID NO: 9277 - protein, 10 aa, Severe acute respiratory syndrome coronavirus 2
  REGION 1..10: note = Table B: HLA-DQA1*03:02-B1*03:03L
REPMLQSADA

SEQ ID NO: 9278 - protein, 12 aa, Severe acute respiratory syndrome coronavirus 2
  REGION 1..12: note = Table B: HLA-DQA1*03:02-B1*03:03L HLA-DQA1*05:01-B1*03:01L HLA-DRB1*04:03L HLA-DRB1*13:02L HLA-DRB1*01:03L HLA-DRB1*04:02L HLA-DRB1*04:05L HLA-DRB4*03:01NL HLA-DRB1*08:77L HLA-DRB3*02:01L HLA-DPA1*01:03-B1*03:01L HLA-DPA1*03:01-B1*04:02L
  REGION 1..12: note = CONT. FROM ABOVE: HLA-DRB1*14:01L HLA-DQA1*01-B1*05L HLA-DQA1*05 :05-B1*03:19L HLA-DQA1*05:01-B1*02:01L HLA-DPA1*01:03-B1*04:01L HLA-DRB1*04:10L HLA-DRB1*12:01L HLA-DRB1*12:02L HLA-DQA1*03:01-B 1*03:02L HLA-DRB1*14:54L HLA-DQA1*05:05-B1*03:01L
  REGION 1..12: note = CONT. FROM ABOVE: HLA-DRB1*14:17L HLA-DPA1*01:02-B1*04:01L HLA-D RB1*07:01L HLA-DRB1*16:01L
EPMLQSADAQSF

SEQ ID NO: 9279 - protein, 13 aa, Severe acute respiratory syndrome coronavirus 2
  REGION 1..13: note = Table B: HLA-DQA1*03:02-B1*03:03L HLA-DRB1*04:02L HLA-DRB1*01:02L HLA-DPA1*01:03-B1*03:01L HLA-DRB1*12:01L HLA-DRB1*14:17L HLA-DRB1*16:01L
PMLQSADAQSFLN

SEQ ID NO: 9280 - protein, 12 aa, Severe acute respiratory syndrome coronavirus 2
  REGION 1..12: note = Table B: HLA-DQA1*03:02-B1*03:03L HLA-DRB1*04:03L HLA-DRB1*04:05L HLA-DRB1*01:02L HLA-DPA1*01:03-B1*03:01L HLA-DQA1*01:01-B1*05:01L HLA-DQA1*05:01-B1*02:01L HLA-DPA1*01:02-B1*04:01L HLA-DRB1*04:08L HLA-DRB1*15:03L
LQSADAQSFLNR

SEQ ID NO: 9281 - protein, 10 aa, Severe acute respiratory syndrome coronavirus 2
  REGION 1..10: note = Table B: HLA-DQA1*03:02-B1*03:03L HLA-DQA1*05:01-B1*03:01L HLA-DRB1*11:02L HLA-DQA1*05:05-B1*03:19M HLA-DQA1*05:01-B1*02:01L HLA-DQA1*03:01-B1*03:02L HLA-DPA1*01:03-B1*104:01M HLA-DRB1*16:01L
  REGION 1..10: note = CONT. FROM ABOVE: HLA-DQA1*02:01-B1*03:03L
ADAQSFLNRV

SEQ ID NO: 9282 - protein, 12 aa, Severe acute respiratory syndrome coronavirus 2
  REGION 1..12: note = Table B: HLA-DQA1*03:02-B1*03:03L HLA-DPA1*03:01-B1*105:01L
VSAARLTPCGTG

SEQ ID NO: 9283 - protein, 10 aa, Severe acute respiratory syndrome coronavirus 2
  REGION 1..10: note = Table B: HLA-DQA1*03:02-B1*03:03L HLA-DQA1*05:01-B1*03:01L HLA-DRB1*04:01L HLA-DRB1*04:03L HLA-DRB1*13:02M HLA-DRB1*13:03M HLA-DRB1*01:03L HLA-DRB1*04:02L HLA-DRB1*04:04L HLA-DRB1*04:05L HLA-DQA1*01:02-B1*06:02L HLA-DRB1*01:01L HLA-DRB4*03:01NL
  REGION 1..10: note = CONT. FROM ABOVE: HLA-DRB1*08:77L HLA-DRB3*02:01L HLA-DRB1*14:01 L HLA-DRB1*11:03L HLA-DRB1*11:04L HLA-DRB1*14:02L HLA-DQA1*01:01 -B1*05:01L HLA-DRB1*08:01L HLA-DRB1*11:01L HLA-DRB5*01:01L HLA-D QA1*01-B1*05L HLA-DQA1*05:05-B1*03:19L HLA-DQA1*05:01-B1*02:01L
  REGION 1..10: note = CONT. FROM ABOVE: HLA-DPA1*01:03-B1*04:01L HLA-DPA1*01:03-B1*04: 02L HLA-DRB1*12:01M HLA-DRB1*12:02L HLA-DPA1*03:01-B1*105:01L HL A-DQA1*03:01-B1*03:02M HLA-DRB1*14:54L HLA-DQA1*05:05-B1*03:01M HLA-DRB1*14:17L HLA-DPA1*01:02-B1*04:01L HLA-DRB1*10:01L
  REGION 1..10: note = CONT. FROM ABOVE: HLA-DRB1*16:01L HLA-DQA1*01:03-B1*06:01L HLA-D RB1*08:02L HLA-DRB1*08:03L HLA-DQA1*02:01-B1*03:03L
TGTSTDVVYR

SEQ ID NO: 9284 - protein, 10 aa, Severe acute respiratory syndrome coronavirus 2
  REGION 1..10: note = Table B: HLA-DQA1*03:02-B1*03:03L HLA-DQA1*03:01-B1*03:02L HLA-DQA1*01:03-B1*06:01L HLA-DQA1*02:01-B1*03:03L
GTSTDVVYRA

SEQ ID NO: 9285 - protein, 10 aa, Severe acute respiratory syndrome coronavirus 2
  REGION 1..10: note = Table B: HLA-DQA1*03:02-B1*03:03L HLA-DQA1*05:01-B1*03:01L HLA-DRB1*13:02L HLA-DRB1*13:03L HLA-DRB1*01:03L HLA-DQA1*01:02-B1*06:02M HLA-DRB4*03:01NL HLA-DRB1*08:77L HLA-DPA1*01:03-B1*03:01L HLA-DPA1*03:01-B1*04:02L
  REGION 1..10: note = CONT. FROM ABOVE: HLA-DRB1*03:01L HLA-DRB1*14:01L HLA-DRB1*14:02 L HLA-DRB5*01:01L HLA-DQA1*01-B1*05L HLA-DQA1*05:05-B1*03:19L HL A-DQA1*05:01-B1*02:01L HLA-DRB4*01:01L HLA-DPA1*01:03-B1*04:01M HLA-DQA1*05:05-B1*03:116L HLA-DPA1*01:03-B1*04:02L
  REGION 1..10: note = CONT. FROM ABOVE: HLA-DRB1*12:01L HLA-DPA1*02:01-B1*13:01L HLA-D PA1*03:01-B1*105:01M HLA-DQA1*03:01-B1*03:02L HLA-DPA1*01:03-B1* 104:01L HLA-DQA1*05:05-B1*03:01L HLA-DPA1*01:02-B1*04:01L HLA-DR B1*10:01L HLA-DRB1*16:01L HLA-DQA1*01:03-B1*06:01L
  REGION 1..10: note = CONT. FROM ABOVE: HLA-DRB1*08:02L HLA-DQA1*02:01-B1*03:03L HLA-D RB1*15:03L
TSTDVVYRAF

SEQ ID NO: 9286 - protein, 12 aa, Severe acute respiratory syndrome coronavirus 2
  REGION 1..12: note = Table B: HLA-DQA1*03:02-B1*03:03L HLA-DRB1*04:02L HLA-DRB1*04:05L HLA-DPA1*03:01-B1*04:02L HLA-DRB1*12:01L HLA-DQA1*03:01-B1*03:02L HLA-DRB1*14:17L HLA-DQA1*01:03-B1*06:01L HLA-DRB1*04:08L
  REGION 1..12: note = CONT. FROM ABOVE: HLA-DQA1*02:01-B1*03:03L
DVVYRAFDIYND

SEQ ID NO: 9287 - protein, 12 aa, Severe acute respiratory syndrome coronavirus 2
  REGION 1..12: note = Table B: HLA-DQA1*03:02-B1*03:03L HLA-DQA1*05:01-B1*03:01L HLA-DRB1*13:02L HLA-DRB1*04:02L HLA-DRB1*04:04L HLA-DQA1*01:02-B1*06:02L HLA-DRB1*08:04L HLA-DPA1*03:01-B1*04:02L HLA-DRB1*14:01L HLA-DRB1*11:04L
  REGION 1..12: note = CONT. FROM ABOVE: HLA-DQA1*01:01-B1*05:01L HLA-DRB1*11:01L HLA-D QA1*05:01-B1*02:01L HLA-DPA1*01:03-B1*04:01L HLA-DRB1*04:10L HLA -DPA1*01:03-B1*04:02L HLA-DRB1*12:01L HLA-DRB3*01:01L HLA-DPA1*0 2:01-B1*13:01L HLA-DPA1*03:01-B1*105:01L HLA-DRB1*14:17L
  REGION 1..12: note = CONT. FROM ABOVE: HLA-DRB1*10:01L HLA-DQA1*01:03-B1*06:01L HLA-D RB1*08:03L
VVYRAFDIYNDK

SEQ ID NO: 9288 - protein, 10 aa, Severe acute respiratory syndrome coronavirus 2
  REGION 1..10: note = Table B: HLA-DQA1*03:02-B1*03:03L HLA-DQA1*05:01-B1*03:01L HLA-DQA1*01:02-B1*06:02L HLA-DRB1*01:02L HLA-DQA1*05:05-B1*03:19L HLA-DQA1*05:05-B1*03:116L HLA-DPA1*02:01-B1*13:01L HLA-DPA1*03:01-B1*105:01L
  REGION 1..10: note = CONT. FROM ABOVE: HLA-DQA1*03:01-B1*03:02L HLA-DPA1*01:02-B1*04: 01L HLA-DRB1*16:01L HLA-DQA1*01:03-B1*06:01L HLA-DQA1*02:01-B1*0 3:03L HLA-DRB1*15:03L
RAFDIYNDKV

SEQ ID NO: 9289 - protein, 10 aa, Severe acute respiratory syndrome coronavirus 2
  REGION 1..10: note = Table B: HLA-DQA1*03:02-B1*03:03L HLA-DRB1*04:03L HLA-DRB1*13:03L HLA-DRB1*01:03L HLA-DRB1*04:02L HLA-DRB1*04:05L HLA-DRB1*01:02L HLA-DRB4*03:01NL HLA-DQA1*01-B1*05M HLA-DQA1*05:01-B1*02:01L HLA-DRB1*04:10L HLA-DRB1*12:01L
  REGION 1..10: note = CONT. FROM ABOVE: HLA-DQA1*03:01-B1*03:02L HLA-DRB1*14:54L HLA-D RB1*14:17L HLA-DRB1*16:01L HLA-DQA1*01:03-B1*06:01L HLA-DRB1*04: 08L HLA-DQA1*02:01-B1*03:03L HLA-DRB1*15:03L
FDIYNDKVAG

SEQ ID NO: 9290 - protein, 10 aa, Severe acute respiratory syndrome coronavirus 2
  REGION 1..10: note = Table B: HLA-DQA1*03:02-B1*03:03L HLA-DQA1*05:01-B1*03:01L HLA-DRB1*04:01L HLA-DRB1*04:03L HLA-DRB1*13:02L HLA-DRB1*13:03M HLA-DRB1*01:03L HLA-DRB1*04:05L HLA-DQA1*01:02-B1*06:02H HLA-DRB1*01:01L HLA-DRB1*01:02L HLA-DRB4*03:01NL HLA-DRB1*08:77L
  REGION 1..10: note = CONT. FROM ABOVE: HLA-DPA1*01:03-B1*03:01L HLA-DPA1*03:01-B1*04: 02L HLA-DRB1*03:01L HLA-DRB1*14:01L HLA-DRB1*11:03L HLA-DRB1*11: 04L HLA-DRB1*14:02M HLA-DQA1*01:01-B1*05:01L HLA-DRB1*08:01L HLA -DRB1*11:01L HLA-DRB5*01:01L HLA-DQA1*01-B1*05L
  REGION 1..10: note = CONT. FROM ABOVE: HLA-DQA1*05:05-B1*03:19L HLA-DQA1*05:01-B1*02: 01M HLA-DRB4*01:01L HLA-DPA1*01:03-B1*04:01M HLA-DQA1*05:05-B1*0 3:116L HLA-DRB1*09:01L HLA-DPA1*01:03-B1*04:02L HLA-DRB1*12:01L HLA-DPA1*02:01-B1*13:01M HLA-DPA1*03:01-B1*105:01M
  REGION 1..10: note = CONT. FROM ABOVE: HLA-DQA1*03:01-B1*03:02L HLA-DPA1*01:03-B1*104 :01L HLA-DQA1*05:05-B1*03:01L HLA-DPA1*01:02-B1*04:01L HLA-DRB1* 07:01L HLA-DRB1*10:01L HLA-DRB1*16:01L HLA-DQA1*01:03-B1*06:01M HLA-DRB1*08:02L HLA-DRB1*08:03L HLA-DQA1*02:01-B1*03:03M
  REGION 1..10: note = CONT. FROM ABOVE: HLA-DRB1*15:01L HLA-DRB1*15:03M
DIYNDKVAGF

SEQ ID NO: 9291 - protein, 14 aa, Severe acute respiratory syndrome coronavirus 2
  REGION 1..14: note = Table B: HLA-DQA1*03:02-B1*03:03L HLA-DRB3*02:01L HLA-DRB1*11:02L HLA-DRB1*11:03L HLA-DRB1*14:02L HLA-DRB1*13:01L HLA-DPA1*01:03-B1*104:01L HLA-DRB1*07:01L HLA-DRB1*08:03L
NDKVAGFAKFLKTN

SEQ ID NO: 9292 - protein, 10 aa, Severe acute respiratory syndrome coronavirus 2
  REGION 1..10: note = Table B: HLA-DQA1*03:02-B1*03:03L HLA-DQA1*01-B1*05L HLA-DQA1*05:01-B1*02:01L HLA-DQA1*03:01-B1*03:02L
FQEKDEDDNL

SEQ ID NO: 9293 - protein, 10 aa, Severe acute respiratory syndrome coronavirus 2
  REGION 1..10: note = Table B: HLA-DQA1*03:02-B1*03:03L HLA-DRB1*11:02L HLA-DQA1*05:05-B1*03:19M HLA-DPA1*01:03-B1*104:01L
QEKDEDDNLI

SEQ ID NO: 9294 - protein, 12 aa, Severe acute respiratory syndrome coronavirus 2
  REGION 1..12: note = Table B: HLA-DQA1*03:02-B1*03:03L HLA-DQA1*05:01-B1*02:01L
DDNLIDSYFVVK

SEQ ID NO: 9295 - protein, 15 aa, Severe acute respiratory syndrome coronavirus 2
  REGION 1..15: note = Table B: HLA-DQA1*03:02-B1*03:03L HLA-DRB1*04:04L HLA-DPA1*01:03-B1*03:01L HLA-DRB3*01:01L HLA-DPA1*03:01-B1*105:01L HLA-DPA1*01:03-B1*104:01L HLA-DRB1*07:01L
VVKRHTFSNYQHEET

SEQ ID NO: 9296 - protein, 10 aa, Severe acute respiratory syndrome coronavirus 2
  REGION 1..10: note = Table B: HLA-DQA1*03:02-B1*03:03L HLA-DQA1*05:01-B1*03:01L HLA-DRB1*13:03L HLA-DRB1*01:03L HLA-DQA1*01:02-B1*06:02L HLA-DRB1*08:77L HLA-DPA1*01:03-B1*03:01L HLA-DRB1*03:01L HLA-DRB1*14:02L HLA-DQA1*01-B1*05L HLA-DQA1*05:05-B1*03:19L
  REGION 1..10: note = CONT. FROM ABOVE: HLA-DQA1*05:01-B1*02:01L HLA-DRB4*01:01L HLA-D PA1*01:03-B1*04:01L HLA-DQA1*05:05-B1*03:116L HLA-DPA1*01:03-B1* 04:02L HLA-DPA1*02:01-B1*13:01L HLA-DPA1*03:01-B1*105:01L HLA-DP A1*01:03-B1*104:01L HLA-DPA1*01:02-B1*04:01L HLA-DRB1*10:01L
  REGION 1..10: note = CONT. FROM ABOVE: HLA-DRB1*16:01L HLA-DQA1*01:03-B1*06:01L HLA-D RB1*08:02L HLA-DQA1*02:01-B1*03:03L HLA-DRB1*15:03L
SNYQHEETIY

SEQ ID NO: 9297 - protein, 10 aa, Severe acute respiratory syndrome coronavirus 2
  REGION 1..10: note = Table B: HLA-DQA1*03:02-B1*03:03L HLA-DRB1*04:03L HLA-DRB1*13:03L HLA-DRB1*04:02L HLA-DQA1*01-B1*05L HLA-DQA1*05:01-B1*02:01L HLA-DQA1*03:01-B1*03:02L HLA-DRB1*14:17L HLA-DRB1*16:01L HLA-DQA1*02:01-B1*03:03L
NYQHEETIYN

SEQ ID NO: 9298 - protein, 10 aa, Severe acute respiratory syndrome coronavirus 2
  REGION 1..10: note = Table B: HLA-DQA1*03:02-B1*03:03M HLA-DQA1*05:01-B1*03:01M HLA-DRB1*04:01L HLA-DRB1*04:03L HLA-DRB1*13:02L HLA-DRB1*13:03L HLA-DRB1*01:03L HLA-DRB1*04:02L HLA-DRB1*04:04L HLA-DRB1*04:05L HLA-DQA1*01:02-B1*06:02L HLA-DRB1*01:01L HLA-DRB1*01:02L
  REGION 1..10: note = CONT. FROM ABOVE: HLA-DRB1*08:77L HLA-DRB3*02:01L HLA-DPA1*01:03 -B1*03:01L HLA-DPA1*03:01-B1*04:02M HLA-DRB1*14:01L HLA-DRB1*11: 02L HLA-DRB1*14:02M HLA-DQA1*01:01-B1*05:01L HLA-DRB1*08:01L HLA -DRB1*11:01L HLA-DQA1*01-B1*05L HLA-DQA1*05:05-B1*03:19M
  REGION 1..10: note = CONT. FROM ABOVE: HLA-DQA1*05:01-B1*02:01L HLA-DRB4*01:01L HLA-D PA1*01:03-B1*04:01L HLA-DQA1*05:05-B1*03:116M HLA-DRB1*09:01L HL A-DPA1*01:03-B1*04:02L HLA-DRB1*12:01L HLA-DPA1*02:01-B1*13:01L HLA-DPA1*03:01-B1*105:01L HLA-DQA1*03:01-B1*03:02M
  REGION 1..10: note = CONT. FROM ABOVE: HLA-DPA1*01:03-B1*104:01L HLA-DPA1*01:02-B1*04 :01L HLA-DRB1*07:01L HLA-DRB1*10:01L HLA-DRB1*16:01L HLA-DQA1*01 :03-B1*06:01L HLA-DRB1*08:03L HLA-DQA1*02:01-B1*03:03M HLA-DRB1* 15:03M
YQHEETIYNL

SEQ ID NO: 9299 - protein, 10 aa, Severe acute respiratory syndrome coronavirus 2
  REGION 1..10: note = Table B: HLA-DQA1*03:02-B1*03:03L HLA-DQA1*03:01-B1*03:02L
QHEETIYNLL

SEQ ID NO: 9300 - protein, 13 aa, Severe acute respiratory syndrome coronavirus 2
  REGION 1..13: note = Table B: HLA-DQA1*03:02-B1*03:03L HLA-DRB1*01:02L
EETIYNLLKDCPA

SEQ ID NO: 9301 - protein, 14 aa, Severe acute respiratory syndrome coronavirus 2
  REGION 1..14: note = Table B: HLA-DQA1*03:02-B1*03:03L HLA-DRB1*08:77L HLA-DRB3*02:01L HLA-DRB1*03:01L HLA-DRB1*11:02L HLA-DQA1*05:01-B1*02:01L HLA-DRB1*09:01L HLA-DPA1*01:03-B1*02:01L HLA-DPA1*01:03-B1*104:01L
  REGION 1..14: note = CONT. FROM ABOVE: HLA-DRB1*07:01L HLA-DQA1*01:03-B1*06:01L
ETIYNLLKDCPAVA

SEQ ID NO: 9302 - protein, 10 aa, Severe acute respiratory syndrome coronavirus 2
  REGION 1..10: note = Table B: HLA-DQA1*03:02-B1*03:03L HLA-DQA1*05:01-B1*03:01L HLA-DRB1*14:01L HLA-DQA1*05:05-B1*03:19L HLA-DQA1*05:05-B1*03:116L HLA-DRB1*09:01L HLA-DQA1*03:01-B1*03:02L HLA-DPA1*01:03-B1*104:01L
  REGION 1..10: note = CONT. FROM ABOVE: HLA-DRB1*16:01L HLA-DQA1*02:01-B1*03:03L HLA-D RB1*15:03L
RIDGDMVPHI

SEQ ID NO: 9303 - protein, 10 aa, Severe acute respiratory syndrome coronavirus 2
  REGION 1..10: note = Table B: HLA-DQA1*03:02-B1*03:03L HLA-DQA1*01-B1*05L HLA-DQA1*05:01-B1*02:01L HLA-DQA1*03:01-B1*03:02L
IDGDMVPHIS

SEQ ID NO: 9304 - protein, 10 aa, Severe acute respiratory syndrome coronavirus 2
  REGION 1..10: note = Table B: HLA-DQA1*03:02-B1*03:03L HLA-DQA1*01-B1*05L HLA-DQA1*03:01-B1*03:02L
KYTMADLVYA

SEQ ID NO: 9305 - protein, 10 aa, Severe acute respiratory syndrome coronavirus 2
  REGION 1..10: note = Table B: HLA-DQA1*03:02-B1*03:03L HLA-DQA1*05:01-B1*03:01L HLA-DQA1*01:02-B1*06:02L HLA-DPA1*03:01-B1*04:02L HLA-DRB1*14:02L HLA-DQA1*05:05-B1*03:19L HLA-DQA1*05:05-B1*03:116L HLA-DPA1*03:01-B1*105:01L
  REGION 1..10: note = CONT. FROM ABOVE: HLA-DQA1*03:01-B1*03:02L HLA-DQA1*02:01-B1*03: 03L HLA-DRB1*15:03L
YTMADLVYAL

SEQ ID NO: 9306 - protein, 10 aa, Severe acute respiratory syndrome coronavirus 2
  REGION 1..10: note = Table B: HLA-DQA1*03:02-B1*03:03L HLA-DQA1*03:01-B1*03:02L
HFDEGNCDTL

SEQ ID NO: 9307 - protein, 10 aa, Severe acute respiratory syndrome coronavirus 2
  REGION 1..10: note = Table B: HLA-DQA1*03:02-B1*03:03L HLA-DQA1*05:01-B1*03:01L HLA-DRB1*04:01L HLA-DRB1*04:03L HLA-DRB1*13:02L HLA-DRB1*13:03M HLA-DRB1*01:03M HLA-DQA1*01:02-B1*06:02H HLA-DRB1*01:01L HLA-DRB4*03:01NL HLA-DRB1*08:77M HLA-DPA1*01:03-B1*03:01M
  REGION 1..10: note = CONT. FROM ABOVE: HLA-DPA1*03:01-B1*04:02L HLA-DRB1*03:01M HLA-D RB1*14:01L HLA-DRB1*11:03L HLA-DRB1*11:04L HLA-DRB1*14:02M HLA-D RB1*08:01L HLA-DRB1*11:01L HLA-DRB5*01:01L HLA-DQA1*01-B1*05L HL A-DQA1*05:05-B1*03:19M HLA-DQA1*05:01-B1*02:01M HLA-DRB4*01:01L
  REGION 1..10: note = CONT. FROM ABOVE: HLA-DPA1*01:03-B1*04:01M HLA-DQA1*05:05-B1*03: 116L HLA-DRB1*09:01L HLA-DPA1*01:03-B1*04:02M HLA-DRB1*12:01L HL A-DPA1*02:01-B1*13:01L HLA-DPA1*03:01-B1*105:01M HLA-DQA1*03:01- B1*03:02L HLA-DPA1*01:03-B1*104:01L HLA-DQA1*05:05-B1*03:01L
  REGION 1..10: note = CONT. FROM ABOVE: HLA-DPA1*01:02-B1*04:01L HLA-DRB1*10:01L HLA-D RB1*16:01L HLA-DQA1*01:03-B1*06:01L HLA-DRB1*08:02L HLA-DQA1*02: 01-B1*03:03M HLA-DRB1*15:01L HLA-DRB1*15:03M
DTLKEILVTY

SEQ ID NO: 9308 - protein, 13 aa, Severe acute respiratory syndrome coronavirus 2
  REGION 1..13: note = Table B: HLA-DQA1*03:02-B1*03:03L HLA-DRB1*13:03L HLA-DRB1*01:03L HLA-DRB1*01:02L HLA-DPA1*03:01-B1*04:02L HLA-DRB1*14:01L HLA-DRB1*11:01L HLA-DPA1*01:03-B1*04:02L HLA-DRB1*12:01L HLA-DPA1*01:02-B1*04:01L HLA-DRB1*04:08L
  REGION 1..13: note = CONT. FROM ABOVE: HLA-DQA1*02:01-B1*03:03L HLA-DRB1*15:03L
DDDYFNKKDWYDF

SEQ ID NO: 9309 - protein, 12 aa, Severe acute respiratory syndrome coronavirus 2
  REGION 1..12: note = Table B: HLA-DQA1*03:02-B1*03:03L HLA-DRB1*04:03L HLA-DRB1*04:05L HLA-DPA1*02:01-B1*13:01L HLA-DRB1*16:01L
KKDWYDFVENPD

SEQ ID NO: 9310 - protein, 12 aa, Severe acute respiratory syndrome coronavirus 2
  REGION 1..12: note = Table B: HLA-DQA1*03:02-B1*03:03L HLA-DRB1*04:03L HLA-DRB1*04:05L HLA-DPA1*03:01-B1*04:02L HLA-DRB1*04:10L HLA-DPA1*02:01-B1*13:01L HLA-DPA1*03:01-B1*105:01L HLA-DRB1*16:01L HLA-DRB1*04:08L HLA-DRB1*15:03L
KDWYDFVENPDI

SEQ ID NO: 9311 - protein, 10 aa, Severe acute respiratory syndrome coronavirus 2
  REGION 1..10: note = Table B: HLA-DQA1*03:02-B1*03:03L HLA-DQA1*01-B1*05L HLA-DQA1*05:01-B1*02:01L HLA-DQA1*03:01-B1*03:02L
YDFVENPDIL

SEQ ID NO: 9312 - protein, 10 aa, Severe acute respiratory syndrome coronavirus 2
  REGION 1..10: note = Table B: HLA-DQA1*03:02-B1*03:03L HLA-DQA1*05:01-B1*03:01L HLA-DRB1*04:03L HLA-DRB1*13:02L HLA-DRB1*13:03M HLA-DRB1*01:03L HLA-DRB1*04:02L HLA-DRB1*04:04L HLA-DRB1*04:05L HLA-DQA1*01:02-B1*06:02L HLA-DRB1*01:01L HLA-DRB4*03:01NL
  REGION 1..10: note = CONT. FROM ABOVE: HLA-DRB3*02:01L HLA-DRB1*14:01L HLA-DRB1*11:04 L HLA-DRB1*14:02L HLA-DQA1*01:01-B1*05:01L HLA-DRB1*08:01L HLA-D RB5*01:01L HLA-DQA1*01-B1*05L HLA-DQA1*05:01-B1*02:01L HLA-DPA1* 01:03-B1*04:02L HLA-DRB1*12:01L HLA-DRB1*12:02L HLA-DRB3*01:01L
  REGION 1..10: note = CONT. FROM ABOVE: HLA-DPA1*03:01-B1*105:01L HLA-DQA1*03:01-B1*03 :02M HLA-DRB1*14:54L HLA-DQA1*05:05-B1*03:01L HLA-DRB1*14:17L HL A-DPA1*01:02-B1*04:01L HLA-DRB1*16:01L HLA-DQA1*01:03-B1*06:01L HLA-DRB1*08:02L HLA-DRB1*08:03L HLA-DQA1*02:01-B1*03:03L
DFVENPDILR

SEQ ID NO: 9313 - protein, 10 aa, Severe acute respiratory syndrome coronavirus 2
  REGION 1..10: note = Table B: HLA-DQA1*03:02-B1*03:03M HLA-DQA1*05:01-B1*03:01L HLA-DRB1*04:01L HLA-DQA1*01:02-B1*06:02L HLA-DRB1*01:02L HLA-DRB1*08:77L HLA-DPA1*03:01-B1*04:02L HLA-DRB1*14:01L HLA-DRB1*11:02L HLA-DRB1*14:02L HLA-DQA1*05:05-B1*03:19M
  REGION 1..10: note = CONT. FROM ABOVE: HLA-DQA1*05:01-B1*02:01L HLA-DPA1*01:03-B1*04: 01L HLA-DQA1*05:05-B1*03:116L HLA-DRB1*09:01L HLA-DPA1*01:03-B1* 04:02L HLA-DPA1*02:01-B1*13:01L HLA-DPA1*03:01-B1*105:01L HLA-DQ A1*03:01-B1*03:02M HLA-DPA1*01:03-B1*104:01M
  REGION 1..10: note = CONT. FROM ABOVE: HLA-DPA1*01:02-B1*04:01L HLA-DRB1*10:01L HLA-D RB1*16:01L HLA-DQA1*01:03-B1*06:01L HLA-DRB1*08:03L HLA-DQA1*02: 01-B1*03:03M HLA-DRB1*15:03L
FVENPDILRV

SEQ ID NO: 9314 - protein, 10 aa, Severe acute respiratory syndrome coronavirus 2
  REGION 1..10: note = Table B: HLA-DQA1*03:02-B1*03:03L HLA-DQA1*05:01-B1*03:01H HLA-DRB1*04:01L HLA-DRB1*13:02L HLA-DRB1*13:03L HLA-DRB1*01:03L HLA-DRB1*04:02L HLA-DRB1*04:05L HLA-DQA1*01:02-B1*06:02L HLA-DRB4*03:01NM HLA-DRB1*08:77H HLA-DPA1*01:03-B1*03:01M
  REGION 1..10: note = CONT. FROM ABOVE: HLA-DPA1*03:01-B1*04:02M HLA-DRB1*03:01M HLA-D RB1*14:01L HLA-DRB1*11:02L HLA-DRB1*11:03L HLA-DRB1*11:04L HLA-D RB1*14:02L HLA-DRB5*01:01L HLA-DQA1*01-B1*05M HLA-DQA1*05:05-B1* 03:19M HLA-DQA1*05:01-B1*02:01M HLA-DRB4*01:01H
  REGION 1..10: note = CONT. FROM ABOVE: HLA-DPA1*01:03-B1*04:01H HLA-DQA1*05:05-B1*03: 116M HLA-DRB1*09:01L HLA-DPA1*01:03-B1*04:02M HLA-DRB1*12:01M HL A-DPA1*02:01-B1*13:01L HLA-DQA1*03:01-B1*03:02L HLA-DRB1*14:54L HLA-DPA1*01:03-B1*104:01M HLA-DPA1*01:02-B1*04:01M
  REGION 1..10: note = CONT. FROM ABOVE: HLA-DRB1*10:01M HLA-DRB1*16:01M HLA-DQA1*01:03 -B1*06:01L HLA-DRB1*08:02L HLA-DQA1*02:01-B1*03:03L HLA-DRB1*15: 03M
VENPDILRVY

SEQ ID NO: 9315 - protein, 12 aa, Severe acute respiratory syndrome coronavirus 2
  REGION 1..12: note = Table B: HLA-DQA1*03:02-B1*03:03L HLA-DQA1*05:01-B1*03:01L HLA-DRB1*04:03L HLA-DRB1*04:02L HLA-DRB1*04:04L HLA-DRB1*04:05L HLA-DQA1*01:02-B1*06:02L HLA-DRB1*01:02L HLA-DRB4*03:01NL HLA-DRB1*08:04L HLA-DPA1*03:01-B1*04:02L HLA-DRB1*14:01L
  REGION 1..12: note = CONT. FROM ABOVE: HLA-DQA1*01-B1*05L HLA-DQA1*05:01-B1*02:01L HL A-DRB1*04:10L HLA-DRB1*12:01L HLA-DPA1*03:01-B1*105:01L HLA-DQA1 *03:01-B1*03:02L HLA-DRB1*14:54L HLA-DRB1*14:17L HLA-DRB1*16:01L HLA-DQA1*01:03-B1*06:01L HLA-DRB1*04:08L
  REGION 1..12: note = CONT. FROM ABOVE: HLA-DQA1*02:01-B1*03:03L HLA-DRB1*15:03L
NPDILRVYANLG

SEQ ID NO: 9316 - protein, 10 aa, Severe acute respiratory syndrome coronavirus 2
  REGION 1..10: note = Table B: HLA-DQA1*03:02-B1*03:03L HLA-DQA1*05:01-B1*03:01L HLA-DRB1*13:02L HLA-DRB1*13:03L HLA-DRB1*01:03L HLA-DRB1*04:05L HLA-DQA1*01:02-B1*06:02L HLA-DRB1*01:02L HLA-DPA1*01:03-B1*03:01L HLA-DPA1*03:01-B1*04:02L
  REGION 1..10: note = CONT. FROM ABOVE: HLA-DRB1*14:01L HLA-DRB1*14:02L HLA-DRB1*08:01 L HLA-DQA1*05:05-B1*03:19L HLA-DQA1*05:01-B1*02:01L HLA-DQA1*05: 05-B1*03:116L HLA-DPA1*01:03-B1*04:02L HLA-DRB1*12:01L HLA-DPA1* 02:01-B1*13:01L HLA-DPA1*03:01-B1*105:01L
  REGION 1..10: note = CONT. FROM ABOVE: HLA-DQA1*03:01-B1*03:02L HLA-DPA1*01:03-B1*104 :01L HLA-DPA1*01:02-B1*04:01L HLA-DRB1*16:01L HLA-DQA1*01:03-B1* 06:01L HLA-DRB1*08:03L HLA-DQA1*02:01-B1*03:03L HLA-DRB1*15:03L
RVYANLGERV

SEQ ID NO: 9317 - protein, 14 aa, Severe acute respiratory syndrome coronavirus 2
  REGION 1..14: note = Table B: HLA-DQA1*03:02-B1*03:03L HLA-DRB1*04:01L HLA-DRB1*13:02L HLA-DRB1*01:01L HLA-DRB1*08:04L HLA-DPA1*01:03-B1*03:01L HLA-DRB1*14:01L HLA-DRB1*11:03L HLA-DRB1*11:04L HLA-DRB1*14:02L HLA-DRB1*11:01L
  REGION 1..14: note = CONT. FROM ABOVE: HLA-DQA1*01-B1*05L HLA-DQA1*05:01-B1*02:01L HL A-DRB3*01:01L HLA-DPA1*02:01-B1*13:01L HLA-DPA1*01:03-B1*02:01L HLA-DPA1*01:03-B1*104:01L HLA-DRB1*14:17L HLA-DRB1*07:01L HLA-DR B1*08:02L HLA-DRB1*08:03L
LKTVQFCDAMRNAG

SEQ ID NO: 9318 - protein, 10 aa, Severe acute respiratory syndrome coronavirus 2
  REGION 1..10: note = Table B: HLA-DQA1*03:02-B1*03:03L HLA-DQA1*05:01-B1*03:01L HLA-DRB1*04:03L HLA-DRB1*13:03L HLA-DRB1*01:03L HLA-DRB1*04:02L HLA-DRB4*03:01NL HLA-DQA1*01-B1*05L HLA-DQA1*05:01-B1*02:01L HLA-DRB1*12:01L HLA-DQA1*03:01-B1*03:02L
  REGION 1..10: note = CONT. FROM ABOVE: HLA-DQA1*05:05-B1*03:01L HLA-DRB1*14:17L HLA-D RB1*16:01L HLA-DQA1*01:03-B1*06:01L HLA-DQA1*02:01-B1*03:03L
DAMRNAGIVG

SEQ ID NO: 9319 - protein, 10 aa, Severe acute respiratory syndrome coronavirus 2
  REGION 1..10: note = Table B: HLA-DQA1*03:02-B1*03:03M HLA-DQA1*05:01-B1*03:01M HLA-DRB1*04:01L HLA-DRB1*01:03L HLA-DRB1*04:04L HLA-DQA1*01:02-B1*06:02L HLA-DRB1*01:02L HLA-DPA1*03:01-B1*04:02L HLA-DRB1*14:01L HLA-DRB1*14:02L
  REGION 1..10: note = CONT. FROM ABOVE: HLA-DRB1*08:01L HLA-DQA1*05:05-B1*03:19M HLA-D QA1*05:01-B1*02:01L HLA-DQA1*05:05-B1*03:116M HLA-DRB1*09:01L HL A-DPA1*01:03-B1*04:02L HLA-DPA1*02:01-B1*13:01L HLA-DPA1*03:01-B 1*105:01L HLA-DQA1*03:01-B1*03:02M HLA-DPA1*01:03-B1*104:01L
  REGION 1..10: note = CONT. FROM ABOVE: HLA-DPA1*01:02-B1*04:01L HLA-DRB1*07:01L HLA-D RB1*10:01L HLA-DRB1*16:01L HLA-DQA1*01:03-B1*06:01L HLA-DRB1*08: 03L HLA-DQA1*02:01-B1*03:03M HLA-DRB1*15:03L
AMRNAGIVGV

SEQ ID NO: 9320 - protein, 11 aa, Severe acute respiratory syndrome coronavirus 2
  REGION 1..11: note = Table B: HLA-DQA1*03:02-B1*03:03L HLA-DRB1*04:03L HLA-DRB1*04:02L HLA-DRB1*04:05L HLA-DQA1*01:02-B1*06:02L HLA-DQA1*01-B1*05L HLA-DQA1*05:01-B1*02:01L HLA-DQA1*03:01-B1*03:02L HLA-DRB1*14:17L
  REGION 1..11: note = CONT. FROM ABOVE: HLA-DQA1*01:03-B1*06:01L HLA-DQA1*02:01-B1*03: 03L
IVGVLTLDNQD

SEQ ID NO: 9321 - protein, 12 aa, Severe acute respiratory syndrome coronavirus 2
  REGION 1..12: note = Table B: HLA-DQA1*03:02-B1*03:03L HLA-DQA1*01:02-B1*06:02L HLA-DRB4*03:01NL HLA-DRB1*12:01L HLA-DRB1*14:54L HLA-DRB1*16:01L HLA-DQA1*01:03-B1*06:01L HLA-DQA1*02:01-B1*03:03L
VGVLTLDNQDLN

SEQ ID NO: 9322 - protein, 13 aa, Severe acute respiratory syndrome coronavirus 2
  REGION 1..13: note = Table B: HLA-DQA1*03:02-B1*03:03L HLA-DRB1*11:02L HLA-DRB1*14:02L HLA-DPA1*01:03-B1*04:02L HLA-DQA1*05:05-B1*03:01L HLA-DQA1*01:03-B1*06:01L
VLTLDNQDLNGNW

SEQ ID NO: 9323 - protein, 12 aa, Severe acute respiratory syndrome coronavirus 2
  REGION 1..12: note = Table B: HLA-DQA1*03:02-B1*03:03L HLA-DQA1*05:01-B1*03:01L HLA-DRB1*01:03L HLA-DQA1*01:02-B1*06:02L HLA-DPA1*03:01-B1*04:02L HLA-DQA1*01-B1*05L HLA-DQA1*05:01-B1*02:01L HLA-DPA1*01:03-B1*04:01L
  REGION 1..12: note = CONT. FROM ABOVE: HLA-DPA1*01:03-B1*04:02L HLA-DPA1*03:01-B1*105 :01L HLA-DQA1*03:01-B1*03:02L HLA-DPA1*01:03-B1*02:01L HLA-DQA1* 05:05-B1*03:01L HLA-DPA1*01:02-B1*04:01L HLA-DRB1*16:01L HLA-DQA 1*01:03-B1*06:01L HLA-DRB1*04:08L HLA-DQA1*02:01-B1*03:03L
YDFGDFIQTTPG

SEQ ID NO: 9324 - protein, 11 aa, Severe acute respiratory syndrome coronavirus 2
  REGION 1..11: note = Table B: HLA-DQA1*03:02-B1*03:03L HLA-DRB1*13:02L HLA-DRB1*01:03L HLA-DQA1*05:01-B1*02:01L HLA-DRB1*04:10L HLA-DRB1*12:01L HLA-DRB1*14:54L HLA-DRB1*16:01L HLA-DQA1*02:01-B1*03:03L
GDFIQTTPGSG

SEQ ID NO: 9325 - protein, 12 aa, Severe acute respiratory syndrome coronavirus 2
  REGION 1..12: note = Table B: HLA-DQA1*03:02-B1*03:03L HLA-DQA1*05:01-B1*03:01L HLA-DRB1*13:02L HLA-DRB1*01:03L HLA-DQA1*01:02-B1*06:02L HLA-DRB1*01:02L HLA-DRB1*08:77L HLA-DRB3*02:01L HLA-DPA1*03:01-B1*04:02L HLA-DRB1*14:01L HLA-DRB1*11:03L
  REGION 1..12: note = CONT. FROM ABOVE: HLA-DQA1*05:05-B1*03:19L HLA-DQA1*05:01-B1*02: 01L HLA-DRB1*12:01L HLA-DPA1*03:01-B1*105:01L HLA-DQA1*05:05-B1* 03:01L HLA-DRB1*07:01L HLA-DRB1*16:01L HLA-DQA1*01:03-B1*06:01L HLA-DQA1*02:01-B1*03:03L HLA-DRB1*15:03L
DFIQTTPGSGVP

SEQ ID NO: 9326 - protein, 12 aa, Severe acute respiratory syndrome coronavirus 2
  REGION 1..12: note = Table B: HLA-DQA1*03:02-B1*03:03L HLA-DQA1*05:01-B1*03:01L HLA-DRB1*04:03L HLA-DRB1*13:02L HLA-DRB1*04:02L HLA-DRB1*01:02L HLA-DRB4*03:01NL HLA-DQA1*05:05-B1*03:19L HLA-DQA1*05:01-B1*02:01L HLA-DRB1*12:01L
  REGION 1..12: note = CONT. FROM ABOVE: HLA-DQA1*03:01-B1*03:02L HLA-DRB1*14:54L HLA-D QA1*05:05-B1*03:01L HLA-DRB1*14:17L HLA-DRB1*16:01L HLA-DQA1*02: 01-B1*03:03L
FIQTTPGSGVPV

SEQ ID NO: 9327 - protein, 10 aa, Severe acute respiratory syndrome coronavirus 2
  REGION 1..10: note = Table B: HLA-DQA1*03:02-B1*03:03L HLA-DQA1*05:01-B1*03:01L HLA-DQA1*05:05-B1*03:19L HLA-DQA1*03:01-B1*03:02L HLA-DQA1*05:05-B1*03:01L HLA-DQA1*01:03-B1*06:01L HLA-DQA1*02:01-B1*03:03L
TPGSGVPVVD

SEQ ID NO: 9328 - protein, 10 aa, Severe acute respiratory syndrome coronavirus 2
  REGION 1..10: note = Table B: HLA-DQA1*03:02-B1*03:03L HLA-DQA1*05:01-B1*03:01L HLA-DQA1*05:05-B1*03:19L HLA-DQA1*03:01-B1*03:02L HLA-DQA1*05:05-B1*03:01L
PGSGVPVVDS

SEQ ID NO: 9329 - protein, 12 aa, Severe acute respiratory syndrome coronavirus 2
  REGION 1..12: note = Table B: HLA-DQA1*03:02-B1*03:03L HLA-DQA1*05:01-B1*03:01L HLA-DQA1*01:02-B1*06:02L HLA-DPA1*03:01-B1*04:02L HLA-DQA1*05:05-B1*03:19L HLA-DQA1*05:01-B1*02:01L HLA-DPA1*01:03-B1*04:02L HLA-DRB1*12:01L
  REGION 1..12: note = CONT. FROM ABOVE: HLA-DQA1*05:05-B1*03:01L HLA-DQA1*02:01-B1*03: 03L HLA-DRB1*15:03L
DSYYSLLMPILT

SEQ ID NO: 9330 - protein, 10 aa, Severe acute respiratory syndrome coronavirus 2
  REGION 1..10: note = Table B: HLA-DQA1*03:02-B1*03:03L HLA-DQA1*05:05-B1*03:19L HLA-DRB1*15:03L
YSLLMPILTL

SEQ ID NO: 9331 - protein, 13 aa, Severe acute respiratory syndrome coronavirus 2
  REGION 1..13: note = Table B: HLA-DQA1*03:02-B1*03:03L HLA-DRB1*14:04L HLA-DRB1*13:02L HLA-DRB1*04:04L HLA-DRB1*04:05L HLA-DRB4*03:01NL HLA-DRB3*02:01L HLA-DPA1*01:03-B1*03:01L HLA-DPA1*03:01-B1*04:02L HLA-DRB1*11:02L HLA-DRB1*11:03L
  REGION 1..13: note = CONT. FROM ABOVE: HLA-DRB1*14:02L HLA-DRB1*11:01L HLA-DQA1*05:05 -B1*03:19L HLA-DQA1*05:05-B1*03:116L HLA-DPA1*01:03-B1*04:02L HL A-DRB1*12:02L HLA-DRB3*01:01L HLA-DPA1*02:01-B1*13:01L HLA-DPA1* 03:01-B1*105:01L HLA-DQA1*03:01-B1*03:02L
  REGION 1..13: note = CONT. FROM ABOVE: HLA-DPA1*01:03-B1*02:01L HLA-DPA1*01:03-B1*104 :01L HLA-DQA1*05:05-B1*03:01L HLA-DRB1*07:01L HLA-DRB1*10:01L HL A-DQA1*01:03-B1*06:01L HLA-DRB1*08:02L HLA-DRB1*08:03L HLA-DQA1* 02:01-B1*03:03L
MPILTLTRALTAE

SEQ ID NO: 9332 - protein, 12 aa, Severe acute respiratory syndrome coronavirus 2
  REGION 1..12: note = Table B: HLA-DQA1*03:02-B1*03:03L HLA-DQA1*05:01-B1*03:01L HLA-DRB1*01:03L HLA-DRB1*04:02L HLA-DRB1*04:05L HLA-DQA1*01:02-B1*06:02L HLA-DRB1*01:02L HLA-DQA1*05:05-B1*03:19L HLA-DRB1*04:10L
  REGION 1..12: note = CONT. FROM ABOVE: HLA-DPA1*03:01-B1*105:01L HLA-DQA1*05:05-B1*03 :01L HLA-DRB1*16:01L HLA-DRB1*04:08L
LTRALTAESHVD

SEQ ID NO: 9333 - protein, 10 aa, Severe acute respiratory syndrome coronavirus 2
  REGION 1..10: note = Table B: HLA-DQA1*03:02-B1*03:03L HLA-DRB1*04:03L HLA-DRB1*04:02L HLA-DQA1*03:01-B1*03:02L HLA-DRB1*14:17L HLA-DQA1*01:03-B1*06:01L HLA-DQA1*02:01-B1*03:03L
ALTAESHVDT

SEQ ID NO: 9334 - protein, 10 aa, Severe acute respiratory syndrome coronavirus 2
  REGION 1..10: note = Table B: HLA-DQA1*03:02-B1*03:03L HLA-DQA1*01-B1*05L HLA-DQA1*03:01-B1*03:02L
TAESHVDTDL

SEQ ID NO: 9335 - protein, 12 aa, Severe acute respiratory syndrome coronavirus 2
  REGION 1..12: note = Table B: HLA-DQA1*03:02-B1*03:03L HLA-DQA1*05:01-B1*02:01L HLA-DQA1*02:01-B1*03:03L
AESHVDTDLTKP

SEQ ID NO: 9336 - protein, 10 aa, Severe acute respiratory syndrome coronavirus 2
  REGION 1..10: note = Table B: HLA-DQA1*03:02-B1*03:03L HLA-DQA1*05:01-B1*03:01L HLA-DRB1*04:01L HLA-DRB1*04:03L HLA-DRB1*13:02L HLA-DRB1*13:03L HLA-DRB1*01:03L HLA-DRB1*04:02L HLA-DRB1*04:05L HLA-DQA1*01:02-B1*06:02L HLA-DRB4*03:01NL HLA-DRB1*08:77M
  REGION 1..10: note = CONT. FROM ABOVE: HLA-DPA1*01:03-B1*03:01M HLA-DPA1*03:01-B1*04: 02L HLA-DRB1*03:01M HLA-DRB1*14:01L HLA-DRB1*11:02L HLA-DRB1*11: 03L HLA-DRB1*11:04L HLA-DRB1*14:02L HLA-DRB1*11:01L HLA-DRB5*01: 01L HLA-DQA1*01-B1*05M HLA-DQA1*05:05-B1*03:19M
  REGION 1..10: note = CONT. FROM ABOVE: HLA-DQA1*05:01-B1*02:01M HLA-DRB4*01:01L HLA-D PA1*01:03-B1*04:01L HLA-DQA1*05:05-B1*03:116L HLA-DPA1*01:03-B1* 04:02L HLA-DRB1*12:01L HLA-DPA1*02:01-B1*13:01L HLA-DPA1*03:01-B 1*105:01L HLA-DQA1*03:01-B1*03:02L HLA-DRB1*14:54L
  REGION 1..10: note = CONT. FROM ABOVE: HLA-DPA1*01:03-B1*104:01M HLA-DQA1*05:05-B1*03 :01L HLA-DRB1*14:17L HLA-DPA1*01:02-B1*04:01L HLA-DRB1*10:01L HL A-DRB1*16:01M HLA-DQA1*01:03-B1*06:01L HLA-DRB1*08:02L HLA-DQA1* 02:01-B1*03:03L HLA-DRB1*15:03L
HVDTDLTKPY

SEQ ID NO: 9337 - protein, 10 aa, Severe acute respiratory syndrome coronavirus 2
  REGION 1..10: note = Table B: HLA-DQA1*03:02-B1*03:03L HLA-DQA1*01-B1*05L HLA-DQA1*05:05-B1*03:19M HLA-DQA1*05:01-B1*02:01L HLA-DQA1*03:01-B1*03:02L HLA-DPA1*01:03-B1*104:01L HLA-DRB1*16:01L
VDTDLTKPYI

SEQ ID NO: 9338 - protein, 10 aa, Severe acute respiratory syndrome coronavirus 2
  REGION 1..10: note = Table B: HLA-DQA1*03:02-B1*03:03L HLA-DQA1*01-B1*05L HLA-DQA1*05:05-B1*03:19L HLA-DQA1*03:01-B1*03:02L
YDFTEERLKL

SEQ ID NO: 9339 - protein, 14 aa, Severe acute respiratory syndrome coronavirus 2
  REGION 1..14: note = Table B: HLA-DQA1*03:02-B1*03:03L HLA-DQA1*05:01-B1*03:01L HLA-DRB1*04:01L HLA-DRB1*04:04L HLA-DRB1*01:01L HLA-DRB3*02:01L HLA-DPA1*01:03-B1*03:01L HLA-DRB1*11:02L HLA-DRB1*11:03L HLA-DRB1*11:04L HLA-DQA1*01:01-B1*05:01L HLA-DRB1*04:10L
  REGION 1..14: note = CONT. FROM ABOVE: HLA-DPA1*01:03-B1*02:01L HLA-DPA1*01:03-B1*104 :01L HLA-DQA1*05:05-B1*03:01L HLA-DRB1*14:17L HLA-DRB1*07:01L HL A-DRB1*10:01L HLA-DRB1*15:01L
DRYFKYWDQTYHPN

SEQ ID NO: 9340 - protein, 16 aa, Severe acute respiratory syndrome coronavirus 2
  REGION 1..16: note = Table B: HLA-DQA1*03:02-B1*03:03L HLA-DRB1*11:02L HLA-DRB1*14:02L HLA-DPA1*01:03-B1*04:02L HLA-DPA1*01:03-B1*104:01L
WDQTYHPNCVNCLDDR

SEQ ID NO: 9341 - protein, 10 aa, Severe acute respiratory syndrome coronavirus 2
  REGION 1..10: note = Table B: HLA-DQA1*03:02-B1*03:03L HLA-DQA1*05:05-B1*03:19L
ANFNVLFSTV

SEQ ID NO: 9342 - protein, 10 aa, Severe acute respiratory syndrome coronavirus 2
  REGION 1..10: note = Table B: HLA-DQA1*03:02-B1*03:03L HLA-DRB1*04:03L HLA-DQA1*01-B1*05L HLA-DQA1*03:01-B1*03:02L HLA-DQA1*02:01-B1*03:03L
VFPPTSFGPL

SEQ ID NO: 9343 - protein, 10 aa, Severe acute respiratory syndrome coronavirus 2
  REGION 1..10: note = Table B: HLA-DQA1*03:02-B1*03:03M HLA-DQA1*05:01-B1*03:01L HLA-DQA1*01:02-B1*06:02L HLA-DPA1*03:01-B1*04:02L HLA-DRB1*14:01L HLA-DRB1*14:02L HLA-DQA1*05:05-B1*03:19L HLA-DQA1*05:01-B1*02:01L HLA-DQA1*05:05-B1*03:116L
  REGION 1..10: note = CONT. FROM ABOVE: HLA-DRB1*09:01L HLA-DPA1*02:01-B1*13:01L HLA-D PA1*03:01-B1*105:01L HLA-DQA1*03:01-B1*03:02L HLA-DPA1*01:03-B1* 104:01L HLA-DPA1*01:02-B1*04:01L HLA-DRB1*10:01L HLA-DRB1*16:01L HLA-DQA1*01:03-B1*06:01L HLA-DRB1*08:03L
  REGION 1..10: note = CONT. FROM ABOVE: HLA-DQA1*02:01-B1*03:03L HLA-DRB1*15:03L
KIFVDGVPFV

SEQ ID NO: 9344 - protein, 10 aa, Severe acute respiratory syndrome coronavirus 2
  REGION 1..10: note = Table B: HLA-DQA1*03:02-B1*03:03L HLA-DQA1*05:01-B1*03:01L HLA-DRB1*04:03L HLA-DRB1*04:05L HLA-DQA1*01:02-B1*06:02L HLA-DRB1*01:02L HLA-DPA1*03:01-B1*04:02L HLA-DRB1*14:01L HLA-DRB1*14:02L HLA-DQA1*05:05-B1*03:19L
  REGION 1..10: note = CONT. FROM ABOVE: HLA-DQA1*05:01-B1*02:01L HLA-DQA1*05:05-B1*03: 116L HLA-DRB1*09:01L HLA-DPA1*01:03-B1*04:02L HLA-DPA1*02:01-B1* 13:01L HLA-DPA1*03:01-B1*105:01L HLA-DQA1*03:01-B1*03:02L HLA-DP A1*01:03-B1*104:01L HLA-DPA1*01:02-B1*04:01L HLA-DRB1*10:01L
  REGION 1..10: note = CONT. FROM ABOVE: HLA-DRB1*16:01L HLA-DQA1*01:03-B1*06:01L HLA-D RB1*08:03L HLA-DQA1*02:01-B1*03:03L HLA-DRB1*15:03L
IFVDGVPFVV

SEQ ID NO: 9345 - protein, 12 aa, Severe acute respiratory syndrome coronavirus 2
  REGION 1..12: note = Table B: HLA-DQA1*03:02-B1*03:03L HLA-DQA1*05:01-B1*03:01L HLA-DQA1*01:02-B1*06:02L HLA-DQA1*05:05-B1*03:19L HLA-DPA1*03:01-B1*105:01L HLA-DQA1*03:01-B1*03:02L HLA-DQA1*05:05-B1*03:01L HLA-DQA1*01:03-B1*06:01L
  REGION 1..12: note = CONT. FROM ABOVE: HLA-DQA1*02:01-B1*03:03L
FVDGVPFVVSTG

SEQ ID NO: 9346 - protein, 12 aa, Severe acute respiratory syndrome coronavirus 2
  REGION 1..12: note = Table B: HLA-DQA1*03:02-B1*03:03L HLA-DQA1*05:01-B1*03:01L HLA-DQA1*01:03-B1*06:01L
DGVPFVVSTGYH

SEQ ID NO: 9347 - protein, 11 aa, Severe acute respiratory syndrome coronavirus 2
  REGION 1..11: note = Table B: HLA-DQA1*03:02-B1*03:03L HLA-DQA1*05:01-B1*03:01L HLA-DRB1*13:02L HLA-DRB1*13:03L HLA-DRB4*03:01NL HLA-DRB1*08:04L HLA-DRB3*02:01L HLA-DPA1*01:03-B1*03:01L HLA-DRB1*03:01L HLA-DRB1*14:01L HLA-DRB1*11:04L HLA-DRB1*14:02M HLA-DRB1*08:01L
  REGION 1..11: note = CONT. FROM ABOVE: HLA-DRB5*01:01L HLA-DQA1*05:01-B1*02:01L HLA-D RB4*01:01L HLA-DPA1*01:03-B1*04:01L HLA-DQA1*05:05-B1*03:116L HL A-DRB1*09:01L HLA-DPA1*01:03-B1*04:02L HLA-DRB1*12:02L HLA-DRB3* 01:01L HLA-DRB1*14:54L HLA-DPA1*01:03-B1*104:01L
  REGION 1..11: note = CONT. FROM ABOVE: HLA-DQA1*05:05-B1*03:01L HLA-DRB1*14:17L HLA-D PA1*01:02-B1*04:01L HLA-DRB1*07:01L HLA-DRB1*10:01L HLA-DRB1*04: 08L HLA-DRB1*08:02L HLA-DRB1*08:03L
VPFVVSTGYHF

SEQ ID NO: 9348 - protein, 10 aa, Severe acute respiratory syndrome coronavirus 2
  REGION 1..10: note = Table B: HLA-DQA1*03:02-B1*03:03L HLA-DQA1*03:01-B1*03:02L
RELGVVHNQD

SEQ ID NO: 9349 - protein, 10 aa, Severe acute respiratory syndrome coronavirus 2
  REGION 1..10: note = Table B: HLA-DQA1*03:02-B1*03:03L HLA-DQA1*05:01-B1*03:01L HLA-DRB1*04:03L HLA-DRB1*13:03L HLA-DRB1*04:02L HLA-DRB1*04:05L HLA-DQA1*01:02-B1*06:02L HLA-DRB4*03:01NL HLA-DQA1*01:01-B1*05:01L HLA-DQA1*01-B1*05L
  REGION 1..10: note = CONT. FROM ABOVE: HLA-DQA1*05:05-B1*03:19L HLA-DQA1*05:01-B1*02: 01L HLA-DRB1*12:01L HLA-DQA1*03:01-B1*03:02L HLA-DRB1*14:54L HLA -DQA1*05:05-B1*03:01L HLA-DRB1*14:17L HLA-DRB1*16:01L HLA-DQA1*0 1:03-B1*06:01L HLA-DQA1*02:01-B1*03:03L
LGVVHNQDVN

SEQ ID NO: 9350 - protein, 10 aa, Severe acute respiratory syndrome coronavirus 2
  REGION 1..10: note = Table B: HLA-DQA1*03:02-B1*03:03L HLA-DQA1*05:01-B1*03:01L HLA-DRB1*13:03L HLA-DRB1*04:02L HLA-DQA1*01:02-B1*06:02L HLA-DRB1*14:01L HLA-DRB1*14:02L HLA-DRB1*08:01L HLA-DQA1*01-B1*05L HLA-DQA1*05:01-B1*02:01L
  REGION 1..10: note = CONT. FROM ABOVE: HLA-DQA1*05:05-B1*03:116L HLA-DRB1*09:01L HLA- DPA1*03:01-B1*105:01L HLA-DQA1*03:01-B1*03:02L HLA-DPA1*01:02-B1 *04:01L HLA-DQA1*02:01-B1*03:03L HLA-DRB1*15:03L
GVVHNQDVNL

SEQ ID NO: 9351 - protein, 11 aa, Severe acute respiratory syndrome coronavirus 2
  REGION 1..11: note = Table B: HLA-DQA1*03:02-B1*03:03L
NQDVNLHSSRL

SEQ ID NO: 9352 - protein, 12 aa, Severe acute respiratory syndrome coronavirus 2
  REGION 1..12: note = Table B: HLA-DQA1*03:02-B1*03:03L HLA-DRB1*04:02L HLA-DRB1*04:05L HLA-DQA1*01:02-B1*06:02L HLA-DPA1*03:01-B1*105:01L HLA-DQA1*03:01-B1*03:02L HLA-DRB1*14:17L HLA-DRB1*16:01L HLA-DQA1*02:01-B1*03:03L
FKELLVYAADPA

SEQ ID NO: 9353 - protein, 12 aa, Severe acute respiratory syndrome coronavirus 2
  REGION 1..12: note = Table B: HLA-DQA1*03:02-B1*03:03L HLA-DRB1*04:02L HLA-DRB1*04:05L HLA-DQA1*01:02-B1*06:02L HLA-DRB1*01:02L HLA-DPA1*03:01-B1*04:02L HLA-DRB1*14:01L HLA-DQA1*05:01-B1*02:01L HLA-DRB1*04:10L HLA-DRB1*12:01L
  REGION 1..12: note = CONT. FROM ABOVE: HLA-DPA1*02:01-B1*13:01L HLA-DPA1*03:01-B1*105 :01L HLA-DQA1*03:01-B1*03:02L HLA-DRB1*14:54L HLA-DRB1*14:17L HL A-DRB1*16:01L HLA-DQA1*01:03-B1*06:01L HLA-DRB1*04:08L HLA-DQA1* 02:01-B1*03:03L HLA-DRB1*15:03L
KELLVYAADPAM

SEQ ID NO: 9354 - protein, 10 aa, Severe acute respiratory syndrome coronavirus 2
  REGION 1..10: note = Table B: HLA-DQA1*03:02-B1*03:03L HLA-DQA1*05:01-B1*03:01L HLA-DRB1*04:03L HLA-DRB1*13:03L HLA-DRB1*01:03L HLA-DRB1*04:02L HLA-DRB1*04:05L HLA-DQA1*01:02-B1*06:02L HLA-DRB1*01:02L HLA-DRB4*03:01NL HLA-DRB1*14:01L HLA-DQA1*01-B1*05L
  REGION 1..10: note = CONT. FROM ABOVE: HLA-DQA1*05:05-B1*03:19L HLA-DQA1*05:01-B1*02: 01L HLA-DRB1*04:10L HLA-DRB1*12:01L HLA-DPA1*03:01-B1*105:01L HL A-DQA1*03:01-B1*03:02L HLA-DRB1*14:54L HLA-DQA1*05:05-B1*03:01L HLA-DRB1*14:17L HLA-DPA1*01:02-B1*04:01L HLA-DRB1*16:01L
  REGION 1..10: note = CONT. FROM ABOVE: HLA-DQA1*01:03-B1*06:01L HLA-DRB1*04:08L HLA-D QA1*02:01-B1*03:03L HLA-DRB1*15:03L
LVYAADPAMH

SEQ ID NO: 9355 - protein, 10 aa, Severe acute respiratory syndrome coronavirus 2
  REGION 1..10: note = Table B: HLA-DQA1*03:02-B1*03:03L HLA-DQA1*05:01-B1*03:01L HLA-DRB1*04:03L HLA-DRB1*13:02L HLA-DRB1*13:03L HLA-DRB1*01:03L HLA-DRB1*04:02L HLA-DRB1*04:05L HLA-DRB1*01:02L HLA-DRB4*03:01NL HLA-DRB1*08:77L HLA-DRB3*02:01L HLA-DPA1*03:01-B1*04:02L
  REGION 1..10: note = CONT. FROM ABOVE: HLA-DRB1*14:01L HLA-DRB1*11:03L HLA-DRB1*14:02 L HLA-DQA1*01-B1*05L HLA-DQA1*05:05-B1*03:19L HLA-DQA1*05:01-B1* 02:01L HLA-DRB1*12:01L HLA-DPA1*03:01-B1*105:01L HLA-DQA1*03:01- B1*03:02L HLA-DRB1*14:54L HLA-DRB1*14:17L
  REGION 1..10: note = CONT. FROM ABOVE: HLA-DPA1*01:02-B1*04:01L HLA-DRB1*16:01L HLA-D QA1*01:03-B1*06:01L HLA-DRB1*04:08L HLA-DQA1*02:01-B1*03:03L HLA -DRB1*15:03L
VYAADPAMHA

SEQ ID NO: 9356 - protein, 10 aa, Severe acute respiratory syndrome coronavirus 2
  REGION 1..10: note = Table B: HLA-DQA1*03:02-B1*03:03L HLA-DQA1*05:01-B1*03:01L HLA-DRB1*04:01L HLA-DRB1*04:03L HLA-DRB1*13:02L HLA-DRB1*13:03L HLA-DRB1*01:03L HLA-DRB1*04:02L HLA-DRB1*04:05L HLA-DQA1*01:02-B1*06:02L HLA-DRB1*01:02L HLA-DRB4*03:01NL
  REGION 1..10: note = CONT. FROM ABOVE: HLA-DRB1*08:04L HLA-DRB1*08:77L HLA-DRB3*02:01 L HLA-DPA1*01:03-B1*03:01L HLA-DPA1*03:01-B1*04:02L HLA-DRB1*14: 01L HLA-DRB1*11:03L HLA-DRB1*11:04L HLA-DRB1*14:02L HLA-DRB1*08: 01L HLA-DRB1*11:01L HLA-DQA1*01-B1*05L HLA-DQA1*05:05-B1*03:19L
  REGION 1..10: note = CONT. FROM ABOVE: HLA-DQA1*05:01-B1*02:01L HLA-DQA1*05:05-B1*03: 116L HLA-DRB1*04:10L HLA-DRB1*09:01L HLA-DPA1*01:03-B1*04:02L HL A-DRB1*12:01L HLA-DRB1*12:02L HLA-DRB3*01:01L HLA-DPA1*03:01-B1* 105:01L HLA-DQA1*03:01-B1*03:02L HLA-DRB1*14:54L
  REGION 1..10: note = CONT. FROM ABOVE: HLA-DQA1*05:05-B1*03:01L HLA-DRB1*14:17L HLA-D PA1*01:02-B1*04:01L HLA-DRB1*10:01L HLA-DRB1*16:01L HLA-DRB1*04: 08L HLA-DRB1*08:03L HLA-DQA1*02:01-B1*03:03L HLA-DRB1*15:03L
YAADPAMHAA

SEQ ID NO: 9357 - protein, 12 aa, Severe acute respiratory syndrome coronavirus 2
  REGION 1..12: note = Table B: HLA-DQA1*03:02-B1*03:03L HLA-DQA1*05:01-B1*03:01L HLA-DRB1*01:03L HLA-DQA1*01:02-B1*06:02L HLA-DQA1*05:05-B1*03:19L HLA-DQA1*05:01-B1*02:01L HLA-DPA1*03:01-B1*105:01L HLA-DQA1*05:05-B1*03:01L
  REGION 1..12: note = CONT. FROM ABOVE: HLA-DQA1*01:03-B1*06:01L HLA-DQA1*02:01-B1*03: 03L
AADPAMHAASGN

SEQ ID NO: 9358 - protein, 11 aa, Severe acute respiratory syndrome coronavirus 2
  REGION 1..11: note = Table B: HLA-DQA1*03:02-B1*03:03L HLA-DQA1*05:01-B1*03:01L HLA-DRB1*04:03L HLA-DRB1*13:03L HLA-DRB1*04:02L HLA-DQA1*01-B1*05L HLA-DQA1*05:01-B1*02:01L HLA-DQA1*03:01-B1*03:02L HLA-DRB1*16:01L
  REGION 1..11: note = CONT. FROM ABOVE: HLA-DQA1*02:01-B1*03:03L
DPAMHAASGNL

SEQ ID NO: 9359 - protein, 10 aa, Severe acute respiratory syndrome coronavirus 2
  REGION 1..10: note = Table B: HLA-DQA1*03:02-B1*03:03L HLA-DQA1*05:01-B1*03:01L HLA-DRB1*13:02L HLA-DRB1*08:77L HLA-DRB3*02:01L HLA-DPA1*03:01-B1*04:02L HLA-DQA1*05:01-B1*02:01L HLA-DRB1*09:01L HLA-DRB1*12:01L HLA-DQA1*03:01-B1*03:02L
  REGION 1..10: note = CONT. FROM ABOVE: HLA-DPA1*01:02-B1*04:01L HLA-DRB1*07:01L HLA-D RB1*16:01L HLA-DQA1*02:01-B1*03:03L HLA-DRB1*15:03L
AMHAASGNLL

SEQ ID NO: 9360 - protein, 10 aa, Severe acute respiratory syndrome coronavirus 2
  REGION 1..10: note = Table B: HLA-DQA1*03:02-B1*03:03L HLA-DQA1*03:01-B1*03:02L
MHAASGNLLL

SEQ ID NO: 9361 - protein, 10 aa, Severe acute respiratory syndrome coronavirus 2
  REGION 1..10: note = Table B: HLA-DQA1*03:02-B1*03:03L HLA-DQA1*05:05-B1*03:19L
FSVAALTNNV

SEQ ID NO: 9362 - protein, 10 aa, Severe acute respiratory syndrome coronavirus 2
  REGION 1..10: note = Table B: HLA-DQA1*03:02-B1*03:03L HLA-DRB1*04:03L HLA-DQA1*03:01-B1*03:02L HLA-DRB1*14:17L HLA-DQA1*02:01-B1*03:03L
SVAALTNNVA

SEQ ID NO: 9363 - protein, 10 aa, Severe acute respiratory syndrome coronavirus 2
  REGION 1..10: note = Table B: HLA-DQA1*03:02-B1*03:03L HLA-DQA1*05:01-B1*03:01L HLA-DRB1*04:03L HLA-DRB1*13:03L HLA-DRB1*01:03L HLA-DRB1*04:02L HLA-DRB1*04:05L HLA-DQA1*01:02-B1*06:02L HLA-DRB1*08:77L HLA-DRB1*14:01L HLA-DRB1*14:02L HLA-DQA1*05:05-B1*03:19L
  REGION 1..10: note = CONT. FROM ABOVE: HLA-DQA1*05:01-B1*02:01L HLA-DRB1*12:01L HLA-D PA1*02:01-B1*13:01L HLA-DPA1*03:01-B1*105:01L HLA-DQA1*03:01-B1* 03:02L HLA-DRB1*14:17L HLA-DRB1*16:01L HLA-DQA1*01:03-B1*06:01L HLA-DQA1*02:01-B1*03:03L HLA-DRB1*15:03L
VAALTNNVAF

SEQ ID NO: 9364 - protein, 11 aa, Severe acute respiratory syndrome coronavirus 2
  REGION 1..11: note = Table B: HLA-DQA1*03:02-B1*03:03L HLA-DQA1*05:01-B1*03:01L HLA-DRB1*01:03L HLA-DRB4*03:01NL HLA-DQA1*01-B1*05L HLA-DPA1*03:01-B1*105:01L HLA-DRB1*16:01L
NNVAFQTVKPG

SEQ ID NO: 9365 - protein, 10 aa, Severe acute respiratory syndrome coronavirus 2
  REGION 1..10: note = Table B: HLA-DQA1*03:02-B1*03:03L HLA-DQA1*05:01-B1*03:01L HLA-DRB1*04:03L HLA-DRB1*13:02L HLA-DRB1*13:03L HLA-DRB1*01:03L HLA-DRB1*04:02L HLA-DRB1*04:05L HLA-DQA1*01:02-B1*06:02L HLA-DRB1*01:02L HLA-DRB4*03:01NL HLA-DRB1*08:77L
  REGION 1..10: note = CONT. FROM ABOVE: HLA-DPA1*01:03-B1*03:01L HLA-DPA1*03:01-B1*04: 02L HLA-DRB1*14:01L HLA-DRB1*11:04L HLA-DRB1*14:02L HLA-DQA1*01: 01-B1*05:01L HLA-DRB1*08:01L HLA-DQA1*01-B1*05L HLA-DQA1*05:05-B 1*03:19L HLA-DQA1*05:01-B1*02:01L HLA-DRB1*04:10L
  REGION 1..10: note = CONT. FROM ABOVE: HLA-DPA1*01:03-B1*04:02L HLA-DRB1*12:01L HLA-D PA1*03:01-B1*105:01L HLA-DQA1*03:01-B1*03:02L HLA-DRB1*14:54L HL A-DQA1*05:05-B1*03:01L HLA-DRB1*14:17L HLA-DPA1*01:02-B1*04:01L HLA-DRB1*10:01L HLA-DRB1*16:01L HLA-DQA1*01:03-B1*06:01L
  REGION 1..10: note = CONT. FROM ABOVE: HLA-DRB1*04:08L HLA-DQA1*02:01-B1*03:03L HLA-D RB1*15:03L
VAFQTVKPGN

SEQ ID NO: 9366 - protein, 10 aa, Severe acute respiratory syndrome coronavirus 2
  REGION 1..10: note = Table B: HLA-DQA1*03:02-B1*03:03L HLA-DQA1*05:01-B1*03:01L HLA-DRB1*04:03L HLA-DRB1*01:03L HLA-DRB1*04:05L HLA-DQA1*01:02-B1*06:02L HLA-DRB1*01:01L HLA-DRB1*01:02L HLA-DRB1*08:77L HLA-DPA1*03:01-B1*04:02L HLA-DRB1*11:03L
  REGION 1..10: note = CONT. FROM ABOVE: HLA-DRB1*14:02L HLA-DQA1*01:01-B1*05:01L HLA-D QA1*05:05-B1*03:19L HLA-DQA1*05:01-B1*02:01L HLA-DRB4*01:01L HLA -DPA1*01:03-B1*04:01L HLA-DRB1*12:01L HLA-DPA1*02:01-B1*13:01M H LA-DPA1*03:01-B1*105:01L HLA-DPA1*01:02-B1*04:01L
  REGION 1..10: note = CONT. FROM ABOVE: HLA-DRB1*16:01L HLA-DQA1*01:03-B1*06:01M HLA-D QA1*02:01-B1*03:03L HLA-DRB1*15:03L
AFQTVKPGNF

SEQ ID NO: 9367 - protein, 10 aa, Severe acute respiratory syndrome coronavirus 2
  REGION 1..10: note = Table B: HLA-DQA1*03:02-B1*03:03L HLA-DQA1*05:01-B1*03:01L HLA-DRB1*04:03L HLA-DRB1*13:02L HLA-DRB1*13:03L HLA-DRB1*01:03L HLA-DRB1*04:02L HLA-DQA1*01:02-B1*06:02L HLA-DRB1*01:02L HLA-DRB4*03:01NL HLA-DRB1*08:77L HLA-DRB3*02:01L
  REGION 1..10: note = CONT. FROM ABOVE: HLA-DPA1*03:01-B1*04:02L HLA-DRB1*14:01L HLA-D QA1*05:05-B1*03:19L HLA-DQA1*05:01-B1*02:01L HLA-DRB1*12:01L HLA -DRB1*12:02L HLA-DPA1*03:01-B1*105:01L HLA-DQA1*03:01-B1*03:02L HLA-DRB1*14:54L HLA-DQA1*05:05-B1*03:01L HLA-DRB1*14:17L
  REGION 1..10: note = CONT. FROM ABOVE: HLA-DPA1*01:02-B1*04:01L HLA-DRB1*07:01L HLA-D RB1*16:01L HLA-DQA1*01:03-B1*06:01L HLA-DQA1*02:01-B1*03:03L HLA -DRB1*15:03L
FQTVKPGNFN

SEQ ID NO: 9368 - protein, 14 aa, Severe acute respiratory syndrome coronavirus 2
  REGION 1..14: note = Table B: HLA-DQA1*03:02-B1*03:03L HLA-DRB1*04:05L HLA-DRB1*01:02L HLA-DQA1*01:03-B1*06:01L
VKPGNFNKDFYDFA

SEQ ID NO: 9369 - protein, 15 aa, Severe acute respiratory syndrome coronavirus 2
  REGION 1..15: note = Table B: HLA-DQA1*03:02-B1*03:03L HLA-DRB1*04:03L HLA-DRB1*13:02L HLA-DRB1*01:03L HLA-DRB1*04:02L HLA-DRB1*04:04L HLA-DRB1*04:05L HLA-DRB1*01:02L HLA-DRB1*08:04L HLA-DPA1*01:03-B1*03:01L HLA-DRB1*14:01L HLA-DRB1*14:02L
  REGION 1..15: note = CONT. FROM ABOVE: HLA-DPA1*01:03-B1*04:02L HLA-DRB1*12:01L HLA-D RB3*01:01L HLA-DPA1*01:03-B1*02:01L HLA-DQA1*01:03-B1*06:01L HLA -DRB1*08:03L HLA-DQA1*02:01-B1*03:03L
KPGNFNKDFYDFAVS

SEQ ID NO: 9370 - protein, 12 aa, Severe acute respiratory syndrome coronavirus 2
  REGION 1..12: note = Table B: HLA-DQA1*03:02-B1*03:03L HLA-DRB1*04:03L HLA-DRB1*04:02L HLA-DRB1*04:05L HLA-DQA1*01:02-B1*06:02L HLA-DQA1*05:01-B1*02:01L HLA-DPA1*02:01-B1*13:01L HLA-DPA1*03:01-B1*105:01L HLA-DPA1*01:02-B1*04:01L
  REGION 1..12: note = CONT. FROM ABOVE: HLA-DRB1*16:01L HLA-DRB1*04:08L
NKDFYDFAVSKG

SEQ ID NO: 9371 - protein, 10 aa, Severe acute respiratory syndrome coronavirus 2
  REGION 1..10: note = Table B: HLA-DQA1*03:02-B1*03:03L HLA-DQA1*05:01-B1*03:01L HLA-DRB1*04:03L HLA-DRB1*01:03L HLA-DRB1*04:05L HLA-DQA1*01:02-B1*06:02L HLA-DRB1*01:01L HLA-DRB1*01:02L HLA-DRB1*08:77L HLA-DPA1*03:01-B1*04:02L HLA-DRB1*14:02L
  REGION 1..10: note = CONT. FROM ABOVE: HLA-DQA1*01:01-B1*05:01L HLA-DRB1*11:01L HLA-D QA1*01-B1*05L HLA-DQA1*05:05-B1*03:19L HLA-DQA1*05:01-B1*02:01L HLA-DRB4*01:01L HLA-DPA1*01:03-B1*04:01L HLA-DQA1*05:05-B1*03:11 6L HLA-DPA1*01:03-B1*04:02L HLA-DRB1*12:01L
  REGION 1..10: note = CONT. FROM ABOVE: HLA-DPA1*02:01-B1*13:01M HLA-DPA1*03:01-B1*105 :01L HLA-DPA1*01:03-B1*104:01L HLA-DPA1*01:02-B1*04:01L HLA-DRB1 *10:01L HLA-DRB1*16:01L HLA-DQA1*01:03-B1*06:01M HLA-DQA1*02:01- B1*03:03L HLA-DRB1*15:03L
FYDFAVSKGF

SEQ ID NO: 9372 - protein, 10 aa, Severe acute respiratory syndrome coronavirus 2
  REGION 1..10: note = Table B: HLA-DQA1*03:02-B1*03:03L HLA-DQA1*05:01-B1*03:01L HLA-DRB1*04:05L HLA-DQA1*01:02-B1*06:02L HLA-DRB1*08:77L HLA-DPA1*03:01-B1*04:02L HLA-DQA1*01-B1*05L HLA-DQA1*05:05-B1*03:19L HLA-DQA1*05:01-B1*02:01L
  REGION 1..10: note = CONT. FROM ABOVE: HLA-DRB4*01:01L HLA-DPA1*01:03-B1*04:01L HLA-D PA1*02:01-B1*13:01L HLA-DPA1*03:01-B1*105:01L HLA-DPA1*01:02-B1* 04:01L HLA-DRB1*16:01L HLA-DQA1*01:03-B1*06:01L HLA-DQA1*02:01-B 1*03:03L HLA-DRB1*15:03L
YDFAVSKGFF

SEQ ID NO: 9373 - protein, 14 aa, Severe acute respiratory syndrome coronavirus 2
  REGION 1..14: note = Table B: HLA-DQA1*03:02-B1*03:03L HLA-DRB1*13:03L HLA-DRB1*08:04L HLA-DPA1*01:03-B1*03:01L HLA-DPA1*03:01-B1*04:02L HLA-DQA1*01:01-B1*05:01L HLA-DQA1*05:05-B1*03:19L HLA-DQA1*05:01-B1*02:01L
  REGION 1..14: note = CONT. FROM ABOVE: HLA-DPA1*01:03-B1*04:02L HLA-DRB3*01:01L HLA-D PA1*02:01-B1*13:01L
DFAVSKGFFKEGSS

SEQ ID NO: 9374 - protein, 13 aa, Severe acute respiratory syndrome coronavirus 2
  REGION 1..13: note = Table B: HLA-DQA1*03:02-B1*03:03L HLA-DRB1*13:03L HLA-DRB1*01:03L HLA-DRB1*04:02L HLA-DRB1*04:05L HLA-DRB1*01:02L HLA-DQA1*01:01-B1*05:01L HLA-DRB1*08:01L HLA-DQA1*05:01-B1*02:01L HLA-DPA1*02:01-B1*13:01L
  REGION 1..13: note = CONT. FROM ABOVE: HLA-DRB1*14:17L HLA-DRB1*16:01L HLA-DQA1*01:03 -B1*06:01L HLA-DRB1*04:08L HLA-DQA1*02:01-B1*03:03L
VSKGFFKEGSSVE

SEQ ID NO: 9375 - protein, 10 aa, Severe acute respiratory syndrome coronavirus 2
  REGION 1..10: note = Table B: HLA-DQA1*03:02-B1*03:03L HLA-DQA1*05:01-B1*03:01L HLA-DRB1*04:03L HLA-DRB1*04:05L HLA-DPA1*03:01-B1*04:02L HLA-DRB1*14:01L HLA-DRB1*14:02L HLA-DQA1*01-B1*05L HLA-DQA1*05:05-B1*03:116L HLA-DPA1*02:01-B1*13:01L
  REGION 1..10: note = CONT. FROM ABOVE: HLA-DQA1*03:01-B1*03:02L HLA-DPA1*01:02-B1*04: 01L HLA-DRB1*16:01L HLA-DQA1*01:03-B1*06:01L HLA-DQA1*02:01-B1*0 3:03L HLA-DRB1*15:03L
FFKEGSSVEL

SEQ ID NO: 9376 - protein, 10 aa, Severe acute respiratory syndrome coronavirus 2
  REGION 1..10: note = Table B: HLA-DQA1*03:02-B1*03:03L HLA-DQA1*05:01-B1*03:01L HLA-DRB1*13:03L HLA-DQA1*01:02-B1*06:02L HLA-DQA1*05:05-B1*03:19L HLA-DQA1*05:01-B1*02:01L HLA-DPA1*01:03-B1*04:01L HLA-DPA1*03:01-B1*105:01L
  REGION 1..10: note = CONT. FROM ABOVE: HLA-DQA1*01:03-B1*06:01L HLA-DQA1*02:01-B1*03: 03L HLA-DRB1*15:03L
EGSSVELKHF

SEQ ID NO: 9377 - protein, 13 aa, Severe acute respiratory syndrome coronavirus 2
  REGION 1..13: note = Table B: HLA-DQA1*03:02-B1*03:03L HLA-DRB1*04:01L HLA-DRB1*04:04L HLA-DQA1*01:02-B1*06:02L HLA-DRB1*08:04L HLA-DPA1*03:01-B1*04:02L HLA-DRB1*14:01L HLA-DRB1*11:04L HLA-DQA1*05:01-B1*02:01L HLA-DRB3*01:01L
  REGION 1..13: note = CONT. FROM ABOVE: HLA-DPA1*02:01-B1*13:01L HLA-DPA1*03:01-B1*105 :01L HLA-DPA1*01:02-B1*04:01L HLA-DRB1*10:01L HLA-DRB1*08:03L HL A-DRB1*15:03L
LKHFFFAQDGNAA

SEQ ID NO: 9378 - protein, 10 aa, Severe acute respiratory syndrome coronavirus 2
  REGION 1..10: note = Table B: HLA-DQA1*03:02-B1*03:03L HLA-DQA1*05:05-B1*03:19L
FFAQDGNAAI

SEQ ID NO: 9379 - protein, 12 aa, Severe acute respiratory syndrome coronavirus 2
  REGION 1..12: note = Table B: HLA-DQA1*03:02-B1*03:03L HLA-DRB1*04:01L HLA-DRB1*04:05L HLA-DRB1*01:02L HLA-DRB1*08:04L HLA-DRB3*02:01L HLA-DRB1*11:03L HLA-DRB1*11:04L HLA-DRB1*11:01L HLA-DRB5*01:01L HLA-DQA1*05:05-B1*03:116L HLA-DRB1*09:01L HLA-DRB1*12:02L
  REGION 1..12: note = CONT. FROM ABOVE: HLA-DPA1*02:01-B1*13:01L HLA-DPA1*03:01-B1*105 :01L HLA-DQA1*03:01-B1*03:02L HLA-DQA1*05:05-B1*03:01L HLA-DPA1* 01:02-B1*04:01L HLA-DQA1*01:03-B1*06:01L HLA-DRB1*04:08L HLA-DRB 1*08:03L
FAQDGNAAISDY

SEQ ID NO: 9380 - protein, 12 aa, Severe acute respiratory syndrome coronavirus 2
  REGION 1..12: note = Table B: HLA-DQA1*03:02-B1*03:03L HLA-DQA1*01:01-B1*05:01L HLA-DQA1*03:01-B1*03:02L HLA-DQA1*05:05-B1*03:01L HLA-DQA1*01:03-B1*06:01L
AQDGNAAISDYD

SEQ ID NO: 9381 - protein, 12 aa, Severe acute respiratory syndrome coronavirus 2
  REGION 1..12: note = Table B: HLA-DQA1*03:02-B1*03:03L
GNAAISDYDYYR

SEQ ID NO: 9382 - protein, 13 aa, Severe acute respiratory syndrome coronavirus 2
  REGION 1..13: note = Table B: HLA-DQA1*03:02-B1*03:03L HLA-DRB1*04:03L HLA-DQA1*01:02-B1*06:02L HLA-DPA1*03:01-B1*04:02L HLA-DRB1*08:01L HLA-DPA1*01:03-B1*04:02L HLA-DPA1*03:01-B1*105:01L HLA-DQA1*03:01-B1*03:02L
  REGION 1..13: note = CONT. FROM ABOVE: HLA-DRB1*16:01L HLA-DQA1*01:03-B1*06:01L HLA-D RB1*04:08L HLA-DQA1*02:01-B1*03:03L
ISDYDYYRYNLPT

SEQ ID NO: 9383 - protein, 10 aa, Severe acute respiratory syndrome coronavirus 2
  REGION 1..10: note = Table B: HLA-DQA1*03:02-B1*03:03L HLA-DQA1*01-B1*05L HLA-DQA1*03:01-B1*03:02L HLA-DRB1*16:01L HLA-DQA1*01:03-B1*06:01L HLA-DQA1*02:01-B1*03:03L
DYYRYNLPTM

SEQ ID NO: 9384 - protein, 14 aa, Severe acute respiratory syndrome coronavirus 2
  REGION 1..14: note = Table B: HLA-DQA1*03:02-B1*03:03L HLA-DRB1*04:01L HLA-DRB1*04:03L HLA-DRB1*04:04L HLA-DRB1*01:01L HLA-DRB1*08:04L HLA-DRB3*02:01L HLA-DRB1*03:01L HLA-DRB1*11:02L HLA-DQA1*05:05-B1*03:19L HLA-DQA1*05:01-B1*02:01L
  REGION 1..14: note = CONT. FROM ABOVE: HLA-DRB1*10:01L
YYRYNLPTMCDIRQ

SEQ ID NO: 9385 - protein, 10 aa, Severe acute respiratory syndrome coronavirus 2
  REGION 1..10: note = Table B: HLA-DQA1*03:02-B1*03:03L HLA-DQA1*05:01-B1*03:01L HLA-DRB1*04:03L HLA-DRB1*13:03L HLA-DRB1*01:03L HLA-DRB1*04:05L HLA-DQA1*01:02-B1*06:02L HLA-DRB1*08:77L HLA-DPA1*01:03-B1*03:01L HLA-DPA1*03:01-B1*04:02L
  REGION 1..10: note = CONT. FROM ABOVE: HLA-DRB1*03:01L HLA-DRB1*11:02L HLA-DRB1*14:02 L HLA-DQA1*01-B1*05L HLA-DQA1*05:05-B1*03:19M HLA-DQA1*05:01-B1* 02:01L HLA-DRB4*01:01L HLA-DPA1*01:03-B1*04:01L HLA-DQA1*05:05-B 1*03:116L HLA-DPA1*01:03-B1*04:02L HLA-DRB1*12:01L
  REGION 1..10: note = CONT. FROM ABOVE: HLA-DPA1*02:01-B1*13:01L HLA-DPA1*03:01-B1*105 :01L HLA-DPA1*01:03-B1*104:01L HLA-DQA1*05:05-B1*03:01L HLA-DPA1 *01:02-B1*04:01L HLA-DRB1*10:01L HLA-DRB1*16:01L HLA-DQA1*01:03- B1*06:01L HLA-DQA1*02:01-B1*03:03L HLA-DRB1*15:03L
LFVVEVVDKY

SEQ ID NO: 9386 - protein, 10 aa, Severe acute respiratory syndrome coronavirus 2
  REGION 1..10: note = Table B: HLA-DQA1*03:02-B1*03:03L HLA-DQA1*05:01-B1*03:01L HLA-DQA1*01:02-B1*06:02L HLA-DPA1*01:03-B1*03:01L HLA-DPA1*03:01-B1*04:02L HLA-DRB1*14:01L HLA-DRB1*14:02L HLA-DQA1*01-B1*05L HLA-DQA1*05:05-B1*03:19L
  REGION 1..10: note = CONT. FROM ABOVE: HLA-DQA1*05:01-B1*02:01L HLA-DRB4*01:01L HLA-D PA1*01:03-B1*04:01L HLA-DPA1*01:03-B1*04:02L HLA-DRB1*12:01L HLA -DPA1*02:01-B1*13:01L HLA-DPA1*03:01-B1*105:01L HLA-DQA1*03:01-B 1*03:02L HLA-DQA1*05:05-B1*03:01L HLA-DPA1*01:02-B1*04:01L
  REGION 1..10: note = CONT. FROM ABOVE: HLA-DRB1*16:01L HLA-DQA1*01:03-B1*06:01L HLA-D QA1*02:01-B1*03:03L HLA-DRB1*15:03L
FVVEVVDKYF

SEQ ID NO: 9387 - protein, 10 aa, Severe acute respiratory syndrome coronavirus 2
  REGION 1..10: note = Table B: HLA-DQA1*03:02-B1*03:03L HLA-DRB1*04:03L HLA-DRB1*04:02L HLA-DQA1*01-B1*05L HLA-DQA1*05:01-B1*02:01L HLA-DPA1*03:01-B1*105:01L HLA-DQA1*03:01-B1*03:02L HLA-DRB1*14:17L HLA-DPA1*01:02-B1*04:01L
  REGION 1..10: note = CONT. FROM ABOVE: HLA-DQA1*01:03-B1*06:01L HLA-DQA1*02:01-B1*03: 03L HLA-DRB1*15:03L
VVEVVDKYFD

SEQ ID NO: 9388 - protein, 13 aa, Severe acute respiratory syndrome coronavirus 2
  REGION 1..13: note = Table B: HLA-DQA1*03:02-B1*03:03L HLA-DQA1*05:01-B1*03:01L HLA-DQA1*01:02-B1*06:02L HLA-DQA1*05:05-B1*03:19L HLA-DQA1*03:01-B1*03:02L HLA-DQA1*05:05-B1*03:01L HLA-DQA1*01:03-B1*06:01L HLA-DQA1*02:01-B1*03:03L
DGGCINANQVIVN

SEQ ID NO: 9389 - protein, 10 aa, Severe acute respiratory syndrome coronavirus 2
  REGION 1..10: note = Table B: HLA-DQA1*03:02-B1*03:03L HLA-DQA1*05:01-B1*03:01L HLA-DRB1*04:03L HLA-DRB1*13:02L HLA-DRB1*13:03L HLA-DRB1*01:03L HLA-DRB1*04:02L HLA-DRB4*03:01NL HLA-DRB1*08:77L HLA-DRB1*14:01L HLA-DQA1*05:01-B1*02:01L HLA-DRB1*12:01L
  REGION 1..10: note = CONT. FROM ABOVE: HLA-DQA1*03:01-B1*03:02L HLA-DRB1*14:54L HLA-D QA1*05:05-B1*03:01L HLA-DRB1*14:17L HLA-DRB1*16:01L HLA-DQA1*01: 03-B1*06:01L HLA-DQA1*02:01-B1*03:03L
INANQVIVNN

SEQ ID NO: 9390 - protein, 10 aa, Severe acute respiratory syndrome coronavirus 2
  REGION 1..10: note = Table B: HLA-DQA1*03:02-B1*03:03L HLA-DQA1*05:01-B1*03:01L HLA-DRB1*13:03L HLA-DQA1*01:02-B1*06:02L HLA-DRB1*01:02L HLA-DPA1*03:01-B1*04:02L HLA-DRB1*14:01L HLA-DRB1*14:02L HLA-DPA1*03:01-B1*105:01L HLA-DQA1*03:01-B1*03:02L
  REGION 1..10: note = CONT. FROM ABOVE: HLA-DPA1*01:02-B1*04:01L HLA-DQA1*02:01-B1*03: 03L HLA-DRB1*15:03L
NANQVIVNNL

SEQ ID NO: 9391 - protein, 10 aa, Severe acute respiratory syndrome coronavirus 2
  REGION 1..10: note = Table B: HLA-DQA1*03:02-B1*03:03L HLA-DQA1*05:01-B1*03:01L HLA-DRB1*04:03L HLA-DRB1*13:03L HLA-DRB1*01:03L HLA-DRB1*04:02L HLA-DRB1*04:05L HLA-DQA1*01:02-B1*06:02L HLA-DRB4*03:01NL HLA-DQA1*01-B1*05L HLA-DQA1*05:01-B1*02:01L HLA-DRB1*04:10L
  REGION 1..10: note = CONT. FROM ABOVE: HLA-DRB1*12:01L HLA-DQA1*03:01-B1*03:02L HLA-D RB1*14:54L HLA-DRB1*14:17L HLA-DRB1*16:01L HLA-DQA1*01:03-B1*06: 01L HLA-DQA1*02:01-B1*03:03L
QVIVNNLDKS

SEQ ID NO: 9392 - protein, 10 aa, Severe acute respiratory syndrome coronavirus 2
  REGION 1..10: note = Table B: HLA-DQA1*03:02-B1*03:03L HLA-DQA1*05:01-B1*03:01L HLA-DRB1*04:03L HLA-DRB1*13:02L HLA-DRB1*13:03L HLA-DRB1*01:03L HLA-DRB1*04:02L HLA-DRB1*04:04L HLA-DRB1*04:05L HLA-DRB1*01:02L HLA-DRB4*03:01NL HLA-DRB1*08:04L HLA-DRB1*08:77L HLA-DRB1*14:01L
  REGION 1..10: note = CONT. FROM ABOVE: HLA-DRB1*11:03L HLA-DRB1*11:04L HLA-DRB1*14:02 L HLA-DQA1*01-B1*05L HLA-DQA1*05:01-B1*02:01L HLA-DRB1*04:10L HL A-DRB1*12:01L HLA-DRB1*12:02L HLA-DQA1*03:01-B1*03:02L HLA-DRB1* 14:54L HLA-DRB1*14:17L HLA-DRB1*10:01L HLA-DRB1*16:01L
  REGION 1..10: note = CONT. FROM ABOVE: HLA-DRB1*04:08L HLA-DRB1*08:03L HLA-DQA1*02:01 -B1*03:03L HLA-DRB1*15:03L
IVNNLDKSAG

SEQ ID NO: 9393 - protein, 10 aa, Severe acute respiratory syndrome coronavirus 2
  REGION 1..10: note = Table B: HLA-DQA1*03:02-B1*03:03L HLA-DQA1*05:01-B1*03:01L HLA-DRB1*04:03L HLA-DRB1*13:03L HLA-DRB1*08:77L HLA-DPA1*01:03-B1*03:01L HLA-DQA1*01-B1*05L HLA-DQA1*05:05-B1*03:19L HLA-DQA1*05:01-B1*02:01L
  REGION 1..10: note = CONT. FROM ABOVE: HLA-DRB1*12:01L HLA-DQA1*03:01-B1*03:02L HLA-D RB1*16:01L HLA-DQA1*02:01-B1*03:03L HLA-DRB1*15:03L
NLDKSAGFPF

SEQ ID NO: 9394 - protein, 10 aa, Severe acute respiratory syndrome coronavirus 2
  REGION 1..10: note = Table B: HLA-DQA1*03:02-B1*03:03L HLA-DQA1*05:01-B1*03:01L HLA-DRB1*04:03L HLA-DRB1*13:02L HLA-DRB1*01:03L HLA-DRB4*03:01NL HLA-DRB1*08:77L HLA-DQA1*05:01-B1*02:01L HLA-DRB1*12:01L HLA-DQA1*03:01-B1*03:02L HLA-DPA1*01:02-B1*04:01L
  REGION 1..10: note = CONT. FROM ABOVE: HLA-DRB1*16:01L HLA-DQA1*02:01-B1*03:03L
LDKSAGFPFN

SEQ ID NO: 9395 - protein, 17 aa, Severe acute respiratory syndrome coronavirus 2
  REGION 1..17: note = Table B: HLA-DQA1*03:02-B1*03:03L HLA-DPA1*03:01-B1*04:02L HLA-DQA1*05:01-B1*02:01L
FPFNKWGKARLYYDSMS

SEQ ID NO: 9396 - protein, 13 aa, Severe acute respiratory syndrome coronavirus 2
  REGION 1..13: note = Table B: HLA-DQA1*03:02-B1*03:03L HLA-DRB1*13:03L HLA-DRB1*01:03L HLA-DRB1*04:02L HLA-DQA1*01:02-B1*06:02L HLA-DRB4*03:01NL HLA-DPA1*03:01-B1*04:02L HLA-DRB1*08:01L HLA-DRB1*12:01L HLA-DPA1*02:01-B1*13:01L HLA-DRB1*14:17L
  REGION 1..13: note = CONT. FROM ABOVE: HLA-DRB1*16:01L HLA-DRB1*04:08L HLA-DQA1*02:01 -B1*03:03L HLA-DRB1*15:03L
ARLYYDSMSYEDQ

SEQ ID NO: 9397 - protein, 10 aa, Severe acute respiratory syndrome coronavirus 2
  REGION 1..10: note = Table B: HLA-DQA1*03:02-B1*03:03L HLA-DQA1*01-B1*05L HLA-DQA1*05:01-B1*02:01L HLA-DQA1*03:01-B1*03:02L
SMSYEDQDAL

SEQ ID NO: 9398 - protein, 10 aa, Severe acute respiratory syndrome coronavirus 2
  REGION 1..10: note = Table B: HLA-DQA1*03:02-B1*03:03L HLA-DRB1*04:03L HLA-DRB1*13:03L HLA-DRB1*04:05L HLA-DQA1*01:02-B1*06:02L HLA-DRB1*14:02L HLA-DQA1*01-B1*05L HLA-DQA1*05:05-B1*03:19L HLA-DQA1*05:01-B1*02:01L HLA-DPA1*02:01-B1*13:01L
  REGION 1..10: note = CONT. FROM ABOVE: HLA-DPA1*03:01-B1*105:01L HLA-DQA1*01:03-B1*06 :01L HLA-DQA1*02:01-B1*03:03L HLA-DRB1*15:03L
MSYEDQDALF

SEQ ID NO: 9399 - protein, 10 aa, Severe acute respiratory syndrome coronavirus 2
  REGION 1..10: note = Table B: HLA-DQA1*03:02-B1*03:03L HLA-DQA1*05:01-B1*03:01L HLA-DRB1*13:03L HLA-DQA1*01:02-B1*06:02L HLA-DRB4*03:01NL HLA-DRB1*08:77M HLA-DPA1*01:03-B1*03:01M HLA-DPA1*03:01-B1*04:02L HLA-DRB1*03:01M HLA-DRB1*11:02M
  REGION 1..10: note = CONT. FROM ABOVE: HLA-DQA1*01-B1*05M HLA-DQA1*05:05-B1*03:19H HL A-DQA1*05:01-B1*02:01M HLA-DRB4*01:01M HLA-DPA1*01:03-B1*04:01M HLA-DQA1*05:05-B1*03:116L HLA-DPA1*01:03-B1*04:02L HLA-DRB1*12:0 1L HLA-DPA1*01:03-B1*104:01M HLA-DPA1*01:02-B1*04:01L
  REGION 1..10: note = CONT. FROM ABOVE: HLA-DRB1*10:01M HLA-DRB1*16:01M HLA-DRB1*15:03 L
YEDQDALFAY

SEQ ID NO: 9400 - protein, 11 aa, Severe acute respiratory syndrome coronavirus 2
  REGION 1..11: note = Table B: HLA-DQA1*03:02-B1*03:03L HLA-DQA1*05:01-B1*03:01L HLA-DRB1*04:01L HLA-DRB1*13:02L HLA-DRB1*04:04L HLA-DRB1*04:05L HLA-DQA1*01:02-B1*06:02L HLA-DRB1*01:01L HLA-DRB1*08:04L HLA-DRB1*08:77L HLA-DRB3*02:01L HLA-DPA1*01:03-B1*03:01L
  REGION 1..11: note = CONT. FROM ABOVE: HLA-DRB1*03:01L HLA-DRB1*11:03L HLA-DRB1*11:04 L HLA-DRB1*14:02L HLA-DRB1*11:01L HLA-DQA1*05:05-B1*03:19L HLA-D QA1*05:01-B1*02:01L HLA-DPA1*01:03-B1*04:01L HLA-DRB1*04:10L HLA -DPA1*01:03-B1*04:02L HLA-DRB1*12:02L HLA-DRB3*01:01L
  REGION 1..11: note = CONT. FROM ABOVE: HLA-DPA1*02:01-B1*13:01L HLA-DPA1*03:01-B1*105 :01L HLA-DPA1*01:03-B1*02:01L HLA-DQA1*05:05-B1*03:01L HLA-DRB1* 07:01L HLA-DRB1*10:01L HLA-DQA1*01:03-B1*06:01L HLA-DRB1*08:02L HLA-DRB1*08:03L HLA-DRB1*15:03L
FAYTKRNVIPT

SEQ ID NO: 9401 - protein, 13 aa, Severe acute respiratory syndrome coronavirus 2
  REGION 1..13: note = Table B: HLA-DQA1*03:02-B1*03:03L HLA-DRB1*13:02L HLA-DRB1*08:04L HLA-DPA1*01:03-B1*03:01L HLA-DQA1*05:05-B1*03:19L HLA-DPA1*03:01-B1*105:01L HLA-DQA1*05:05-B1*03:01L HLA-DQA1*01:03-B1*06:01L
  REGION 1..13: note = CONT. FROM ABOVE: HLA-DRB1*15:03L
AYTKRNVIPTITQ

SEQ ID NO: 9402 - protein, 10 aa, Severe acute respiratory syndrome coronavirus 2
  REGION 1..10: note = Table B: HLA-DQA1*03:02-B1*03:03L HLA-DQA1*05:01-B1*03:01L HLA-DQA1*03:01-B1*03:02L HLA-DQA1*02:01-B1*03:03L
RNVIPTITQM

SEQ ID NO: 9403 - protein, 10 aa, Severe acute respiratory syndrome coronavirus 2
  REGION 1..10: note = Table B: HLA-DQA1*03:02-B1*03:03L HLA-DQA1*05:01-B1*03:01L HLA-DQA1*03:01-B1*03:02L HLA-DQA1*02:01-B1*03:03L HLA-DRB1*15:03L
VIPTITQMNL

SEQ ID NO: 9404 - protein, 13 aa, Severe acute respiratory syndrome coronavirus 2
  REGION 1..13: note = Table B: HLA-DQA1*03:02-B1*03:03L HLA-DRB1*11:03L HLA-DPA1*03:01-B1*105:01L HLA-DQA1*05:05-B1*03:01L HLA-DRB1*10:01L
MNLKYAISAKNRA

SEQ ID NO: 9405 - protein, 10 aa, Severe acute respiratory syndrome coronavirus 2
  REGION 1..10: note = Table B: HLA-DQA1*03:02-B1*03:03L HLA-DQA1*05:01-B1*03:01L HLA-DRB1*01:03L HLA-DQA1*05:05-B1*03:19L HLA-DQA1*03:01-B1*03:02L HLA-DRB1*16:01L HLA-DQA1*01:03-B1*06:01L HLA-DQA1*02:01-B1*03:03L
RARTVAGVSI

SEQ ID NO: 9406 - protein, 10 aa, Severe acute respiratory syndrome coronavirus 2
  REGION 1..10: note = Table B: HLA-DQA1*03:02-B1*03:03L HLA-DQA1*05:01-B1*03:01L HLA-DRB1*04:03L HLA-DRB1*13:02L HLA-DRB1*13:03L HLA-DRB1*01:03L HLA-DRB1*04:02L HLA-DRB1*04:05L HLA-DQA1*01:02-B1*06:02L HLA-DRB1*01:02L HLA-DRB4*03:01NL HLA-DRB1*08:77L HLA-DRB3*02:01L
  REGION 1..10: note = CONT. FROM ABOVE: HLA-DPA1*01:03-B1*03:01L HLA-DPA1*03:01-B1*04: 02L HLA-DRB1*14:01L HLA-DRB1*14:02L HLA-DQA1*01-B1*05L HLA-DQA1* 05:05-B1*03:19L HLA-DQA1*05:01-B1*02:01L HLA-DPA1*01:03-B1*04:01 L HLA-DQA1*05:05-B1*03:116L HLA-DRB1*09:01L HLA-DRB1*12:01L
  REGION 1..10: note = CONT. FROM ABOVE: HLA-DPA1*02:01-B1*13:01L HLA-DPA1*03:01-B1*105 :01L HLA-DQA1*03:01-B1*03:02L HLA-DPA1*01:03-B1*104:01L HLA-DPA1 *01:02-B1*04:01L HLA-DRB1*07:01L HLA-DRB1*10:01L HLA-DRB1*16:01L HLA-DQA1*01:03-B1*06:01L HLA-DQA1*02:01-B1*03:03L
  REGION 1..10: note = CONT. FROM ABOVE: HLA-DRB1*15:03L
SIAATRGATV

SEQ ID NO: 9407 - protein, 12 aa, Severe acute respiratory syndrome coronavirus 2
  REGION 1..12: note = Table B: HLA-DQA1*03:02-B1*03:03L HLA-DRB1*04:03L HLA-DRB1*13:02L HLA-DRB1*13:03L HLA-DRB1*01:03L HLA-DRB1*04:02L HLA-DRB1*04:05L HLA-DQA1*01:02-B1*06:02L HLA-DRB1*01:01L HLA-DRB1*01:02L HLA-DRB4*03:01NL HLA-DRB1*08:04L HLA-DRB1*08:77L
  REGION 1..12: note = CONT. FROM ABOVE: HLA-DRB3*02:01L HLA-DPA1*01:03-B1*03:01L HLA-D RB1*14:01L HLA-DRB1*11:03L HLA-DRB1*11:04L HLA-DRB1*14:02L HLA-D QA1*05:01-B1*02:01L HLA-DRB1*09:01L HLA-DRB1*12:01L HLA-DRB1*12: 02L HLA-DPA1*03:01-B1*105:01L HLA-DRB1*14:54L
  REGION 1..12: note = CONT. FROM ABOVE: HLA-DQA1*05:05-B1*03:01L HLA-DRB1*14:17L HLA-D RB1*07:01L HLA-DRB1*10:01L HLA-DQA1*01:03-B1*06:01L HLA-DRB1*04: 08L HLA-DRB1*15:03L
IAATRGATVVIG

SEQ ID NO: 9408 - protein, 11 aa, Severe acute respiratory syndrome coronavirus 2
  REGION 1..11: note = Table B: HLA-DQA1*03:02-B1*03:03L HLA-DQA1*05:01-B1*03:01L HLA-DRB1*04:03L HLA-DQA1*01:02-B1*06:02L HLA-DQA1*05:05-B1*03:19L HLA-DQA1*03:01-B1*03:02L HLA-DQA1*05:05-B1*03:01L HLA-DRB1*14:17L
TRGATVVIGTS

SEQ ID NO: 9409 - protein, 10 aa, Severe acute respiratory syndrome coronavirus 2
  REGION 1..10: note = Table B: HLA-DQA1*03:02-B1*03:03L HLA-DQA1*05:01-B1*03:01L HLA-DRB1*04:03L HLA-DRB1*13:02L HLA-DRB1*13:03L HLA-DRB1*01:03L HLA-DRB1*04:02L HLA-DQA1*01:02-B1*06:02L HLA-DRB4*03:01NL HLA-DQA1*01:01-B1*05:01L HLA-DRB1*08:01L HLA-DRB5*01:01L
  REGION 1..10: note = CONT. FROM ABOVE: HLA-DQA1*05:05-B1*03:19L HLA-DPA1*01:03-B1*04: 02L HLA-DRB1*12:01L HLA-DQA1*03:01-B1*03:02M HLA-DQA1*05:05-B1*0 3:01L HLA-DRB1*14:17L HLA-DRB1*16:01L HLA-DQA1*01:03-B1*06:01L H LA-DQA1*02:01-B1*03:03L
GATVVIGTSK

SEQ ID NO: 9410 - protein, 10 aa, Severe acute respiratory syndrome coronavirus 2
  REGION 1..10: note = Table B: HLA-DQA1*03:02-B1*03:03L HLA-DQA1*05:01-B1*03:01L HLA-DRB1*04:03L HLA-DRB1*13:02L HLA-DRB1*13:03L HLA-DRB1*01:03L HLA-DRB1*04:05L HLA-DQA1*01:02-B1*06:02M HLA-DRB1*01:01L HLA-DRB4*03:01NL HLA-DRB1*08:77L HLA-DPA1*01:03-B1*03:01L
  REGION 1..10: note = CONT. FROM ABOVE: HLA-DPA1*03:01-B1*04:02L HLA-DRB1*03:01L HLA-D RB1*14:01L HLA-DRB1*14:02L HLA-DRB5*01:01L HLA-DQA1*01-B1*05L HL A-DQA1*05:05-B1*03:19L HLA-DQA1*05:01-B1*02:01L HLA-DRB4*01:01L HLA-DPA1*01:03-B1*04:01L HLA-DQA1*05:05-B1*03:116L
  REGION 1..10: note = CONT. FROM ABOVE: HLA-DPA1*01:03-B1*04:02L HLA-DRB1*12:01L HLA-D PA1*02:01-B1*13:01L HLA-DPA1*03:01-B1*105:01M HLA-DQA1*03:01-B1* 03:02L HLA-DPA1*01:03-B1*104:01L HLA-DQA1*05:05-B1*03:01L HLA-DP A1*01:02-B1*04:01L HLA-DRB1*07:01L HLA-DRB1*10:01L
  REGION 1..10: note = CONT. FROM ABOVE: HLA-DRB1*16:01L HLA-DQA1*01:03-B1*06:01L HLA-D RB1*08:02L HLA-DQA1*02:01-B1*03:03M HLA-DRB1*15:03L
ATVVIGTSKF

SEQ ID NO: 9411 - protein, 10 aa, Severe acute respiratory syndrome coronavirus 2
  REGION 1..10: note = Table B: HLA-DQA1*03:02-B1*03:03L HLA-DQA1*05:01-B1*03:01L HLA-DRB1*04:03L HLA-DRB1*13:02L HLA-DRB1*13:03L HLA-DRB1*01:03L HLA-DQA1*01:02-B1*06:02M HLA-DRB4*03:01NL HLA-DRB1*08:77L HLA-DPA1*01:03-B1*03:01L HLA-DPA1*03:01-B1*04:02L
  REGION 1..10: note = CONT. FROM ABOVE: HLA-DRB1*03:01L HLA-DRB1*14:01L HLA-DRB1*14:02 L HLA-DQA1*01-B1*05L HLA-DQA1*05:05-B1*03:19L HLA-DQA1*05:01-B1* 02:01L HLA-DRB4*01:01L HLA-DPA1*01:03-B1*04:01L HLA-DQA1*05:05-B 1*03:116L HLA-DPA1*01:03-B1*04:02L HLA-DRB1*12:01L
  REGION 1..10: note = CONT. FROM ABOVE: HLA-DPA1*02:01-B1*13:01L HLA-DPA1*03:01-B1*105 :01L HLA-DPA1*01:03-B1*104:01L HLA-DQA1*05:05-B1*03:01L HLA-DPA1 *01:02-B1*04:01L HLA-DRB1*10:01L HLA-DRB1*16:01L HLA-DQA1*01:03- B1*06:01L HLA-DRB1*08:02L HLA-DQA1*02:01-B1*03:03L
  REGION 1..10: note = CONT. FROM ABOVE: HLA-DRB1*15:03L
TVVIGTSKFY

SEQ ID NO: 9412 - protein, 12 aa, Severe acute respiratory syndrome coronavirus 2
  REGION 1..12: note = Table B: HLA-DQA1*03:02-B1*03:03L HLA-DRB1*04:03L HLA-DRB1*01:02L HLA-DQA1*05:05-B1*03:19L HLA-DQA1*03:01-B1*03:02L HLA-DRB1*04:08L
VIGTSKFYGGWH

SEQ ID NO: 9413 - protein, 12 aa, Severe acute respiratory syndrome coronavirus 2
  REGION 1..12: note = Table B: HLA-DQA1*03:02-B1*03:03L HLA-DQA1*05:05-B1*03:19L HLA-DQA1*03:01-B1*03:02L
IGTSKFYGGWHN

SEQ ID NO: 9414 - protein, 15 aa, Severe acute respiratory syndrome coronavirus 2
  REGION 1..15: note = Table B: HLA-DQA1*03:02-B1*03:03L HLA-DQA1*05:01-B1*03:01L HLA-DRB1*01:03L HLA-DRB1*04:05L HLA-DRB3*02:01L HLA-DPA1*01:03-B1*03:01L HLA-DRB1*11:02L HLA-DRB1*14:02L HLA-DPA1*01:03-B1*04:01L HLA-DPA1*01:03-B1*04:02L
  REGION 1..15: note = CONT. FROM ABOVE: HLA-DQA1*03:01-B1*03:02L HLA-DPA1*01:03-B1*104 :01L HLA-DQA1*05:05-B1*03:01L HLA-DRB1*08:02L HLA-DRB1*08:03L
GGWHNMLKTVYSDVE

SEQ ID NO: 9415 - protein, 10 aa, Severe acute respiratory syndrome coronavirus 2
  REGION 1..10: note = Table B: HLA-DQA1*03:02-B1*03:03L HLA-DQA1*05:01-B1*03:01L HLA-DRB1*04:03L HLA-DRB1*13:02L HLA-DRB1*13:03L HLA-DRB1*01:03L HLA-DRB1*04:02L HLA-DRB1*04:04L HLA-DRB1*04:05L HLA-DQA1*01:02-B1*06:02L HLA-DRB1*01:02L HLA-DRB4*03:01NL
  REGION 1..10: note = CONT. FROM ABOVE: HLA-DRB1*08:77L HLA-DRB3*02:01L HLA-DPA1*01:03 -B1*03:01L HLA-DRB1*14:01L HLA-DRB1*11:04L HLA-DRB1*14:02L HLA-D QA1*01:01-B1*05:01L HLA-DRB1*08:01L HLA-DRB5*01:01L HLA-DQA1*01- B1*05M HLA-DQA1*05:05-B1*03:19L HLA-DQA1*05:01-B1*02:01L
  REGION 1..10: note = CONT. FROM ABOVE: HLA-DRB1*04:10L HLA-DPA1*01:03-B1*04:02L HLA-D RB1*12:01L HLA-DRB1*12:02L HLA-DPA1*03:01-B1*105:01L HLA-DQA1*03 :01-B1*03:02L HLA-DRB1*14:54L HLA-DQA1*05:05-B1*03:01L HLA-DRB1* 14:17L HLA-DPA1*01:02-B1*04:01L HLA-DRB1*10:01L HLA-DRB1*16:01L
  REGION 1..10: note = CONT. FROM ABOVE: HLA-DQA1*01:03-B1*06:01L HLA-DRB1*04:08L HLA-D RB1*08:03L HLA-DQA1*02:01-B1*03:03L HLA-DRB1*15:03L
TVYSDVENPH

SEQ ID NO: 9416 - protein, 10 aa, Severe acute respiratory syndrome coronavirus 2
  REGION 1..10: note = Table B: HLA-DQA1*03:02-B1*03:03M HLA-DQA1*05:01-B1*03:01M HLA-DRB1*04:01L HLA-DRB1*04:03L HLA-DRB1*13:02L HLA-DRB1*13:03L HLA-DRB1*01:03M HLA-DRB1*04:02L HLA-DRB1*04:04L HLA-DRB1*04:05M HLA-DQA1*01:02-B1*06:02L HLA-DRB1*01:01L HLA-DRB1*01:02L
  REGION 1..10: note = CONT. FROM ABOVE: HLA-DRB4*03:01NL HLA-DRB1*08:77L HLA-DRB3*02:0 1L HLA-DPA1*01:03-B1*03:01L HLA-DPA1*03:01-B1*04:02M HLA-DRB1*03 :01L HLA-DRB1*14:01L HLA-DRB1*11:02L HLA-DRB1*11:03L HLA-DRB1*11 :04L HLA-DRB1*14:02M HLA-DQA1*01:01-B1*05:01L HLA-DRB1*08:01L
  REGION 1..10: note = CONT. FROM ABOVE: HLA-DRB1*11:01L HLA-DRB5*01:01L HLA-DQA1*01-B1 *05L HLA-DQA1*05:05-B1*03:19L HLA-DQA1*05:01-B1*02:01L HLA-DRB4* 01:01L HLA-DPA1*01:03-B1*04:01L HLA-DQA1*05:05-B1*03:116M HLA-DR B1*09:01M HLA-DPA1*01:03-B1*04:02L HLA-DRB1*12:01L
  REGION 1..10: note = CONT. FROM ABOVE: HLA-DPA1*02:01-B1*13:01M HLA-DPA1*03:01-B1*105 :01M HLA-DQA1*03:01-B1*03:02M HLA-DPA1*01:03-B1*104:01L HLA-DQA1 *05:05-B1*03:01L HLA-DPA1*01:02-B1*04:01L HLA-DRB1*07:01L HLA-DR B1*10:01L HLA-DRB1*16:01M HLA-DQA1*01:03-B1*06:01M
  REGION 1..10: note = CONT. FROM ABOVE: HLA-DRB1*08:02L HLA-DRB1*08:03M HLA-DQA1*02:01 -B1*03:03M HLA-DRB1*15:03M
VYSDVENPHL

SEQ ID NO: 9417 - protein, 10 aa, Severe acute respiratory syndrome coronavirus 2
  REGION 1..10: note = Table B: HLA-DQA1*03:02-B1*03:03L HLA-DQA1*05:01-B1*03:01L HLA-DRB1*13:03L HLA-DRB1*08:77L HLA-DPA1*01:03-B1*03:01L HLA-DPA1*03:01-B1*04:02L HLA-DRB1*14:02L HLA-DQA1*01-B1*05L HLA-DQA1*05:05-B1*03:19L HLA-DQA1*05:01-B1*02:01L
  REGION 1..10: note = CONT. FROM ABOVE: HLA-DRB1*09:01L HLA-DQA1*03:01-B1*03:02L HLA-D PA1*01:03-B1*104:01L HLA-DRB1*10:01L HLA-DRB1*16:01L HLA-DQA1*02 :01-B1*03:03L HLA-DRB1*15:03L
YSDVENPHLM

SEQ ID NO: 9418 - protein, 14 aa, Severe acute respiratory syndrome coronavirus 2
  REGION 1..14: note = Table B: HLA-DQA1*03:02-B1*03:03L HLA-DRB1*01:03L HLA-DRB1*04:05L HLA-DRB1*01:02L HLA-DRB1*12:01L HLA-DQA1*05:05-B1*03:01L HLA-DRB1*04:08L
DVENPHLMGWDYPK

SEQ ID NO: 9419 - protein, 14 aa, Severe acute respiratory syndrome coronavirus 2
  REGION 1..14: note = Table B: HLA-DQA1*03:02-B1*03:03L HLA-DQA1*05:01-B1*03:01L HLA-DRB1*01:03L HLA-DRB1*04:04L HLA-DQA1*05:05-B1*03:19L HLA-DPA1*01:03-B1*04:02L HLA-DQA1*03:01-B1*03:02L HLA-DRB1*07:01L HLA-DRB1*16:01L HLA-DRB1*04:08L
FYRLANECAQVLSE

SEQ ID NO: 9420 - protein, 11 aa, Severe acute respiratory syndrome coronavirus 2
  REGION 1..11: note = Table B: HLA-DQA1*03:02-B1*03:03L HLA-DQA1*05:01-B1*03:01L HLA-DRB1*13:03L HLA-DRB4*03:01NL
GSLYVKPGGTS

SEQ ID NO: 9421 - protein, 14 aa, Severe acute respiratory syndrome coronavirus 2
  REGION 1..14: note = Table B: HLA-DQA1*03:02-B1*03:03L HLA-DRB1*01:03L HLA-DQA1*01:02-B1*06:02L HLA-DRB1*01:02L HLA-DRB1*04:08L
SLYVKPGGTSSGDA

SEQ ID NO: 9422 - protein, 12 aa, Severe acute respiratory syndrome coronavirus 2
  REGION 1..12: note = Table B: HLA-DQA1*03:02-B1*03:03L HLA-DQA1*05:01-B1*03:01L HLA-DQA1*05:05-B1*03:19L HLA-DQA1*03:01-B1*03:02L HLA-DQA1*05:05-B1*03:01L HLA-DQA1*02:01-B1*03:03L
VKPGGTSSGDAT

SEQ ID NO: 9423 - protein, 11 aa, Severe acute respiratory syndrome coronavirus 2
  REGION 1..11: note = Table B: HLA-DQA1*03:02-B1*03:03L HLA-DRB4*03:01NL HLA-DPA1*03:01-B1*04:02L HLA-DRB4*01:01L HLA-DRB1*12:01L HLA-DPA1*01:03-B1*104:01L HLA-DRB1*08:02L
GTSSGDATTAY

SEQ ID NO: 9424 - protein, 12 aa, Severe acute respiratory syndrome coronavirus 2
  REGION 1..12: note = Table B: HLA-DQA1*03:02-B1*03:03L HLA-DQA1*03:01-B1*03:02L HLA-DQA1*05:05-B1*03:01L HLA-DQA1*01:03-B1*06:01L
TSSGDATTAYAN

SEQ ID NO: 9425 - protein, 13 aa, Severe acute respiratory syndrome coronavirus 2
  REGION 1..13: note = Table B: HLA-DQA1*03:02-B1*03:03L HLA-DQA1*05:01-B1*02:01L HLA-DQA1*01:03-B1*06:01L HLA-DQA1*02:01-B1*03:03L
SSGDATTAYANSV

SEQ ID NO: 9426 - protein, 10 aa, Severe acute respiratory syndrome coronavirus 2
  REGION 1..10: note = Table B: HLA-DQA1*03:02-B1*03:03L HLA-DQA1*05:01-B1*03:01L HLA-DRB1*13:03L HLA-DQA1*01:02-B1*06:02L HLA-DQA1*05:05-B1*03:19L HLA-DQA1*05:01-B1*02:01L HLA-DPA1*03:01-B1*105:01L HLA-DQA1*03:01-B1*03:02L
  REGION 1..10: note = CONT. FROM ABOVE: HLA-DQA1*05:05-B1*03:01L HLA-DQA1*01:03-B1*06: 01L HLA-DQA1*02:01-B1*03:03L HLA-DRB1*15:03L
ATTAYANSVF

SEQ ID NO: 9427 - protein, 10 aa, Severe acute respiratory syndrome coronavirus 2
  REGION 1..10: note = Table B: HLA-DQA1*03:02-B1*03:03L HLA-DQA1*05:01-B1*03:01L HLA-DQA1*01:02-B1*06:02L HLA-DQA1*05:05-B1*03:19L HLA-DQA1*05:01-B1*02:01L HLA-DPA1*03:01-B1*105:01L HLA-DQA1*03:01-B1*03:02L HLA-DQA1*05:05-B1*03:01L
  REGION 1..10: note = CONT. FROM ABOVE: HLA-DQA1*01:03-B1*06:01L HLA-DQA1*02:01-B1*03: 03L
TTAYANSVFN

SEQ ID NO: 9428 - protein, 10 aa, Severe acute respiratory syndrome coronavirus 2
  REGION 1..10: note = Table B: HLA-DQA1*03:02-B1*03:03L HLA-DQA1*01:02-B1*06:02L HLA-DQA1*05:05-B1*03:19L HLA-DPA1*02:01-B1*13:01L HLA-DQA1*01:03-B1*06:01L HLA-DRB1*15:03L
TAYANSVFNI

SEQ ID NO: 9429 - protein, 13 aa, Severe acute respiratory syndrome coronavirus 2
  REGION 1..13: note = Table B: HLA-DQA1*03:02-B1*03:03L HLA-DRB1*01:03L HLA-DRB1*04:02L HLA-DRB1*04:04L HLA-DRB1*04:05L HLA-DRB4*03:01NL HLA-DPA1*01:03-B1*03:01L HLA-DRB1*14:01L HLA-DQA1*05:01-B1*02:01L HLA-DRB1*04:10L
  REGION 1..13: note = CONT. FROM ABOVE: HLA-DQA1*03:01-B1*03:02L HLA-DPA1*01:03-B1*104 :01L HLA-DRB1*10:01L
NSVFNICQAVTAN

SEQ ID NO: 9430 - protein, 12 aa, Severe acute respiratory syndrome coronavirus 2
  REGION 1..12: note = Table B: HLA-DQA1*03:02-B1*03:03L HLA-DRB1*04:02L HLA-DRB1*01:02L HLA-DPA1*01:03-B1*03:01L HLA-DQA1*05:05-B1*03:19L HLA-DRB1*12:01L HLA-DPA1*03:01-B1*105:01L HLA-DRB1*16:01L HLA-DRB1*04:08L
  REGION 1..12: note = CONT. FROM ABOVE: HLA-DRB1*15:03L
FNICQAVTANVN

SEQ ID NO: 9431 - protein, 10 aa, Severe acute respiratory syndrome coronavirus 2
  REGION 1..10: note = Table B: HLA-DQA1*03:02-B1*03:03L HLA-DQA1*05:01-B1*03:01L HLA-DRB1*13:03L HLA-DQA1*05:01-B1*02:01L HLA-DPA1*03:01-B1*105:01L HLA-DQA1*03:01-B1*03:02L HLA-DQA1*02:01-B1*03:03L
QAVTANVNAL

SEQ ID NO: 9432 - protein, 10 aa, Severe acute respiratory syndrome coronavirus 2
  REGION 1..10: note = Table B: HLA-DQA1*03:02-B1*03:03L HLA-DQA1*05:01-B1*02:01L HLA-DQA1*03:01-B1*03:02L HLA-DQA1*01:03-B1*06:01L HLA-DQA1*02:01-B1*03:03L
AVTANVNALL

SEQ ID NO: 9433 - protein, 10 aa, Severe acute respiratory syndrome coronavirus 2
  REGION 1..10: note = Table B: HLA-DQA1*03:02-B1*03:03M HLA-DQA1*05:01-B1*03:01L HLA-DQA1*01:02-B1*06:02L HLA-DRB1*01:02L HLA-DRB1*08:77L HLA-DPA1*03:01-B1*04:02L HLA-DRB1*14:01L HLA-DRB1*14:02L HLA-DQA1*05:05-B1*03:19L HLA-DQA1*05:01-B1*02:01L
  REGION 1..10: note = CONT. FROM ABOVE: HLA-DPA1*01:03-B1*04:01L HLA-DQA1*05:05-B1*03: 116L HLA-DRB1*09:01L HLA-DRB1*12:01L HLA-DPA1*02:01-B1*13:01L HL A-DPA1*03:01-B1*105:01L HLA-DQA1*03:01-B1*03:02L HLA-DPA1*01:03- B1*104:01L HLA-DPA1*01:02-B1*04:01L HLA-DRB1*07:01L
  REGION 1..10: note = CONT. FROM ABOVE: HLA-DRB1*10:01L HLA-DRB1*16:01L HLA-DQA1*01:03 -B1*06:01L HLA-DRB1*08:03L HLA-DQA1*02:01-B1*03:03L HLA-DRB1*15: 03L
ALLSTDGNKI

SEQ ID NO: 9434 - protein, 10 aa, Severe acute respiratory syndrome coronavirus 2
  REGION 1..10: note = Table B: HLA-DQA1*03:02-B1*03:03L HLA-DRB1*04:03L HLA-DRB1*13:02L HLA-DRB4*03:01NL HLA-DRB1*08:77L HLA-DRB3*02:01L HLA-DQA1*05:01-B1*02:01L HLA-DRB1*12:01L HLA-DRB1*14:17L HLA-DRB1*07:01L HLA-DRB1*16:01L HLA-DQA1*02:01-B1*03:03L
  REGION 1..10: note = CONT. FROM ABOVE: HLA-DRB1*15:03L
LLSTDGNKIA

SEQ ID NO: 9435 - protein, 12 aa, Severe acute respiratory syndrome coronavirus 2
  REGION 1..12: note = Table B: HLA-DQA1*03:02-B1*03:03L HLA-DPA1*02:01-B1*13:01L HLA-DPA1*03:01-B1*105:01L
LSTDGNKIADKY

SEQ ID NO: 9436 - protein, 14 aa, Severe acute respiratory syndrome coronavirus 2
  REGION 1..14: note = Table B: HLA-DQA1*03:02-B1*03:03L HLA-DRB4*03:01NL HLA-DQA1*05:05-B1*03:116L HLA-DPA1*01:03-B1*104:01L HLA-DRB1*15:01L
ADKYVRNLQHRLYE

SEQ ID NO: 9437 - protein, 13 aa, Severe acute respiratory syndrome coronavirus 2
  REGION 1..13: note = Table B: HLA-DQA1*03:02-B1*03:03L HLA-DRB1*04:03L HLA-DRB1*04:02L HLA-DQA1*05:01-B1*02:01L HLA-DRB1*12:01L HLA-DQA1*02:01-B1*03:03L
YRNRDVDTDFVNE

SEQ ID NO: 9438 - protein, 10 aa, Severe acute respiratory syndrome coronavirus 2
  REGION 1..10: note = Table B: HLA-DQA1*03:02-B1*03:03L HLA-DQA1*05:01-B1*03:01L HLA-DRB1*13:03L HLA-DQA1*01:02-B1*06:02L HLA-DRB1*08:77L HLA-DPA1*01:03-B1*03:01L HLA-DRB1*03:01L HLA-DRB1*14:02L HLA-DQA1*01-B1*05L HLA-DQA1*05:05-B1*03:19L
  REGION 1..10: note = CONT. FROM ABOVE: HLA-DQA1*05:01-B1*02:01L HLA-DPA1*01:03-B1*04: 01L HLA-DPA1*02:01-B1*13:01L HLA-DPA1*03:01-B1*105:01L HLA-DPA1* 01:03-B1*104:01L HLA-DRB1*10:01L HLA-DRB1*16:01L HLA-DQA1*01:03- B1*06:01L HLA-DQA1*02:01-B1*03:03L HLA-DRB1*15:03L
DVDTDFVNEF

SEQ ID NO: 9439 - protein, 16 aa, Severe acute respiratory syndrome coronavirus 2
  REGION 1..16: note = Table B: HLA-DQA1*03:02-B1*03:03L HLA-DQA1*01:01-B1*05:01L HLA-DRB1*09:01L HLA-DRB1*08:02L
VDTDFVNEFYAYLRKH

SEQ ID NO: 9440 - protein, 16 aa, Severe acute respiratory syndrome coronavirus 2
  REGION 1..16: note = Table B: HLA-DQA1*03:02-B1*03:03L HLA-DRB3*02:01L HLA-DQA1*05:05-B1*03:116L HLA-DRB1*09:01L
TDFVNEFYAYLRKHFS

SEQ ID NO: 9441 - protein, 13 aa, Severe acute respiratory syndrome coronavirus 2
  REGION 1..13: note = Table B: HLA-DQA1*03:02-B1*03:03L HLA-DQA1*05:01-B1*03:01L HLA-DRB1*01:03L HLA-DRB1*01:02L HLA-DPA1*01:03-B1*03:01L HLA-DPA1*03:01-B1*04:02L HLA-DRB1*03:01L HLA-DQA1*05:05-B1*03:19L HLA-DPA1*01:03-B1*04:02L
  REGION 1..13: note = CONT. FROM ABOVE: HLA-DRB1*12:01L HLA-DQA1*03:01-B1*03:02L HLA-D QA1*05:05-B1*03:01L HLA-DRB1*16:01L HLA-DQA1*01:03-B1*06:01L HLA -DQA1*02:01-B1*03:03L HLA-DRB1*15:03L
ILSDDAVVCFNST

SEQ ID NO: 9442 - protein, 16 aa, Severe acute respiratory syndrome coronavirus 2
  REGION 1..16: note = Table B: HLA-DQA1*03:02-B1*03:03L HLA-DRB1*04:01L HLA-DPA1*01:03-B1*03:01L HLA-DRB1*14:02L HLA-DRB4*01:01L HLA-DRB3*01:01L HLA-DPA1*02:01-B1*13:01L HLA-DPA1*01:03-B1*104:01L HLA-DRB1*07:01L
SDDAVVCFNSTYASQG

SEQ ID NO: 9443 - protein, 10 aa, Severe acute respiratory syndrome coronavirus 2
  REGION 1..10: note = Table B: HLA-DQA1*03:02-B1*03:03L
FNSTYASQGL

SEQ ID NO: 9444 - protein, 10 aa, Severe acute respiratory syndrome coronavirus 2
  REGION 1..10: note = Table B: HLA-DQA1*03:02-B1*03:03L
STYASQGLVA

SEQ ID NO: 9445 - protein, 10 aa, Severe acute respiratory syndrome coronavirus 2
  REGION 1..10: note = Table B: HLA-DQA1*03:02-B1*03:03L HLA-DQA1*05:05-B1*03:19L HLA-DPA1*01:03-B1*104:01L
YASQGLVASI

SEQ ID NO: 9446 - protein, 11 aa, Severe acute respiratory syndrome coronavirus 2
  REGION 1..11: note = Table B: HLA-DQA1*03:02-B1*03:03L HLA-DRB1*04:03L HLA-DPA1*03:01-B1*105:01L
ASQGLVASIKN

SEQ ID NO: 9447 - protein, 15 aa, Severe acute respiratory syndrome coronavirus 2
  REGION 1..15: note = Table B: HLA-DQA1*03:02-B1*03:03L HLA-DRB1*04:01L HLA-DRB1*13:01L HLA-DRB1*09:01L HLA-DPA1*01:03-B1*02:01L HLA-DRB1*10:01L
VASIKNFKSVLYYQN

SEQ ID NO: 9448 - protein, 13 aa, Severe acute respiratory syndrome coronavirus 2
  REGION 1..13: note = Table B: HLA-DQA1*03:02-B1*03:03L HLA-DRB1*13:03L HLA-DRB1*01:01L HLA-DPA1*01:03-B1*03:01L HLA-DRB1*11:03L HLA-DRB1*11:04L HLA-DRB1*14:02L HLA-DQA1*01:01-B1*05:01L HLA-DRB1*11:01L HLA-DQA1*05:05-B1*03:19L
  REGION 1..13: note = CONT. FROM ABOVE: HLA-DPA1*01:03-B1*104:01L HLA-DQA1*05:05-B1*03 :01L HLA-DRB1*07:01L HLA-DRB1*10:01L HLA-DRB1*08:02L HLA-DRB1*08 :03L
IKNFKSVLYYQNN

SEQ ID NO: 9449 - protein, 10 aa, Severe acute respiratory syndrome coronavirus 2
  REGION 1..10: note = Table B: HLA-DQA1*03:02-B1*03:03L HLA-DRB1*04:03L HLA-DQA1*01:02-B1*06:02L HLA-DQA1*01-B1*05L HLA-DQA1*05:05-B1*03:19L HLA-DQA1*05:01-B1*02:01L HLA-DRB1*12:01L HLA-DPA1*02:01-B1*13:01L
  REGION 1..10: note = CONT. FROM ABOVE: HLA-DPA1*03:01-B1*105:01L HLA-DQA1*01:03-B1*06 :01L HLA-DQA1*02:01-B1*03:03L HLA-DRB1*15:03L
SVLYYQNNVF

SEQ ID NO: 9450 - protein, 11 aa, Severe acute respiratory syndrome coronavirus 2
  REGION 1..11: note = Table B: HLA-DQA1*03:02-B1*03:03L HLA-DQA1*05:01-B1*03:01L HLA-DRB1*04:03L HLA-DRB1*13:03L HLA-DRB1*01:03L HLA-DRB1*04:02L HLA-DQA1*01:02-B1*06:02L HLA-DRB4*03:01NL HLA-DQA1*05:05-B1*03:19L HLA-DQA1*05:01-B1*02:01L
  REGION 1..11: note = CONT. FROM ABOVE: HLA-DPA1*01:03-B1*04:02L HLA-DPA1*03:01-B1*105 :01L HLA-DQA1*03:01-B1*03:02L HLA-DQA1*05:05-B1*03:01L HLA-DRB1* 14:17L HLA-DPA1*01:02-B1*04:01L HLA-DRB1*16:01L
YQNNVFMSEAK

SEQ ID NO: 9451 - protein, 14 aa, Severe acute respiratory syndrome coronavirus 2
  REGION 1..14: note = Table B: HLA-DQA1*03:02-B1*03:03L HLA-DQA1*05:01-B1*03:01L HLA-DRB1*01:02L HLA-DRB1*08:04L HLA-DPA1*01:03-B1*03:01L HLA-DPA1*03:01-B1*04:02L HLA-DQA1*03:01-B1*03:02L HLA-DRB1*04:08L HLA-DRB1*15:03L
NVFMSEAKCWTETD

SEQ ID NO: 9452 - protein, 10 aa, Severe acute respiratory syndrome coronavirus 2
  REGION 1..10: note = Table B: HLA-DQA1*03:02-B1*03:03L HLA-DRB1*04:03L HLA-DRB1*13:03L HLA-DRB1*01:03L HLA-DRB1*04:02L HLA-DRB4*03:01NL HLA-DQA1*01-B1*05L HLA-DQA1*03:01-B1*03:02L HLA-DRB1*14:54L HLA-DRB1*14:17L HLA-DPA1*01:02-B1*04:01L HLA-DRB1*16:01L
  REGION 1..10: note = CONT. FROM ABOVE: HLA-DQA1*01:03-B1*06:01L HLA-DQA1*02:01-B1*03: 03L
TETDLTKGPH

SEQ ID NO: 9453 - protein, 10 aa, Severe acute respiratory syndrome coronavirus 2
  REGION 1..10: note = Table B: HLA-DQA1*03:02-B1*03:03L HLA-DQA1*05:01-B1*03:01L HLA-DRB1*13:03L HLA-DRB1*01:03L HLA-DQA1*01:02-B1*06:02L HLA-DRB4*03:01NL HLA-DRB1*08:77L HLA-DPA1*01:03-B1*03:01L HLA-DPA1*03:01-B1*04:02L HLA-DRB1*03:01L HLA-DRB1*11:02L
  REGION 1..10: note = CONT. FROM ABOVE: HLA-DQA1*01-B1*05L HLA-DQA1*05:05-B1*03:19M HL A-DQA1*05:01-B1*02:01L HLA-DRB4*01:01L HLA-DPA1*01:03-B1*04:01L HLA-DRB1*12:01L HLA-DQA1*03:01-B1*03:02L HLA-DPA1*01:03-B1*104:0 1L HLA-DPA1*01:02-B1*04:01L HLA-DRB1*10:01L HLA-DRB1*16:01L
  REGION 1..10: note = CONT. FROM ABOVE: HLA-DQA1*02:01-B1*03:03L HLA-DRB1*15:03L
TDLTKGPHEF

SEQ ID NO: 9454 - protein, 16 aa, Severe acute respiratory syndrome coronavirus 2
  REGION 1..16: note = Table B: HLA-DQA1*03:02-B1*03:03L HLA-DRB1*03:01L HLA-DRB1*11:02L HLA-DRB1*14:02L HLA-DQA1*05:05-B1*03:19L HLA-DPA1*01:03-B1*04:02L HLA-DPA1*01:03-B1*104:01L HLA-DRB1*08:02L
GPHEFCSQHTMLVKQG

SEQ ID NO: 9455 - protein, 12 aa, Severe acute respiratory syndrome coronavirus 2
  REGION 1..12: note = Table B: HLA-DQA1*03:02-B1*03:03L HLA-DQA1*05:01-B1*03:01L HLA-DRB1*04:03L HLA-DRB1*04:02L HLA-DQA1*01:01-B1*05:01L HLA-DRB1*08:01L HLA-DQA1*05:05-B1*03:19L HLA-DPA1*03:01-B1*105:01L HLA-DQA1*05:05-B1*03:01L
SQHTMLVKQGDD

SEQ ID NO: 9456 - protein, 10 aa, Severe acute respiratory syndrome coronavirus 2
  REGION 1..10: note = Table B: HLA-DQA1*03:02-B1*03:03L HLA-DQA1*05:01-B1*03:01L HLA-DRB1*13:03L HLA-DRB1*01:03L HLA-DQA1*01:02-B1*06:02L HLA-DRB1*08:77L HLA-DPA1*01:03-B1*03:01L HLA-DRB1*03:01L HLA-DRB1*14:02L HLA-DQA1*01-B1*05L HLA-DQA1*05:05-B1*03:19L
  REGION 1..10: note = CONT. FROM ABOVE: HLA-DQA1*05:01-B1*02:01L HLA-DPA1*01:03-B1*04: 01L HLA-DPA1*01:03-B1*04:02L HLA-DRB1*12:01L HLA-DPA1*03:01-B1*1 05:01L HLA-DQA1*03:01-B1*03:02L HLA-DPA1*01:03-B1*104:01L HLA-DR B1*16:01L HLA-DQA1*01:03-B1*06:01L HLA-DQA1*02:01-B1*03:03L
  REGION 1..10: note = CONT. FROM ABOVE: HLA-DRB1*15:03L
TMLVKQGDDY

SEQ ID NO: 9457 - protein, 11 aa, Severe acute respiratory syndrome coronavirus 2
  REGION 1..11: note = Table B: HLA-DQA1*03:02-B1*03:03L HLA-DQA1*05:01-B1*02:01L HLA-DPA1*03:01-B1*105:01L HLA-DQA1*03:01-B1*03:02L HLA-DQA1*01:03-B1*06:01L HLA-DQA1*02:01-B1*03:03L
DDYVYLPYPDP

SEQ ID NO: 9458 - protein, 10 aa, Severe acute respiratory syndrome coronavirus 2
  REGION 1..10: note = Table B: HLA-DQA1*03:02-B1*03:03L HLA-DRB1*04:03L HLA-DRB1*04:02L HLA-DQA1*01-B1*05L HLA-DQA1*05:01-B1*02:01L HLA-DQA1*03:01-B1*03:02L HLA-DRB1*14:17L HLA-DQA1*02:01-B1*03:03L
YVYLPYPDPS

SEQ ID NO: 9459 - protein, 10 aa, Severe acute respiratory syndrome coronavirus 2
  REGION 1..10: note = Table B: HLA-DQA1*03:02-B1*03:03L HLA-DQA1*05:01-B1*03:01L HLA-DRB1*04:03L HLA-DRB1*13:02L HLA-DRB1*13:03L HLA-DRB1*01:03L HLA-DRB1*04:02L HLA-DRB1*04:05L HLA-DRB4*03:01NL HLA-DRB1*08:01L HLA-DQA1*01-B1*05L HLA-DQA1*05:01-B1*02:01L HLA-DRB1*12:01L
  REGION 1..10: note = CONT. FROM ABOVE: HLA-DPA1*03:01-B1*105:01L HLA-DQA1*03:01-B1*03 :02L HLA-DQA1*05:05-B1*03:01L HLA-DRB1*14:17L HLA-DPA1*01:02-B1* 04:01L HLA-DRB1*16:01L HLA-DQA1*01:03-B1*06:01L HLA-DRB1*04:08L HLA-DQA1*02:01-B1*03:03L
VYLPYPDPSR

SEQ ID NO: 9460 - protein, 10 aa, Severe acute respiratory syndrome coronavirus 2
  REGION 1..10: note = Table B: HLA-DQA1*03:02-B1*03:03M HLA-DQA1*05:01-B1*03:01L HLA-DRB1*04:01L HLA-DRB1*04:03L HLA-DRB1*13:03L HLA-DRB1*01:03L HLA-DRB1*04:05L HLA-DQA1*01:02-B1*06:02L HLA-DRB1*01:01L HLA-DRB1*01:02L HLA-DRB1*08:77L HLA-DPA1*03:01-B1*04:02L
  REGION 1..10: note = CONT. FROM ABOVE: HLA-DRB1*14:01L HLA-DRB1*11:02L HLA-DRB1*14:02 L HLA-DRB1*08:01L HLA-DQA1*01-B1*05L HLA-DQA1*05:05-B1*03:19M HL A-DQA1*05:01-B1*02:01L HLA-DPA1*01:03-B1*04:01L HLA-DQA1*05:05-B 1*03:116M HLA-DRB1*09:01L HLA-DPA1*02:01-B1*13:01M
  REGION 1..10: note = CONT. FROM ABOVE: HLA-DPA1*03:01-B1*105:01L HLA-DQA1*03:01-B1*03 :02L HLA-DPA1*01:03-B1*104:01L HLA-DPA1*01:02-B1*04:01L HLA-DRB1 *10:01L HLA-DRB1*16:01L HLA-DQA1*01:03-B1*06:01M HLA-DRB1*08:03L HLA-DQA1*02:01-B1*03:03L HLA-DRB1*15:03L
YLPYPDPSRI

SEQ ID NO: 9461 - protein, 10 aa, Severe acute respiratory syndrome coronavirus 2
  REGION 1..10: note = Table B: HLA-DQA1*03:02-B1*03:03L HLA-DQA1*05:01-B1*03:01L HLA-DRB1*13:03L HLA-DRB1*04:02L HLA-DRB1*04:05L HLA-DQA1*01:02-B1*06:02L HLA-DRB1*01:01L HLA-DRB1*01:02L HLA-DRB4*03:01NL HLA-DPA1*01:03-B1*03:01L
  REGION 1..10: note = CONT. FROM ABOVE: HLA-DPA1*03:01-B1*04:02L HLA-DRB1*14:01L HLA-D RB1*08:01L HLA-DQA1*01-B1*05L HLA-DQA1*05:01-B1*02:01L HLA-DQA1* 05:05-B1*03:116L HLA-DPA1*02:01-B1*13:01L HLA-DPA1*03:01-B1*105: 01L HLA-DQA1*03:01-B1*03:02L HLA-DPA1*01:02-B1*04:01L
  REGION 1..10: note = CONT. FROM ABOVE: HLA-DRB1*16:01L HLA-DQA1*01:03-B1*06:01L HLA-D RB1*08:03L HLA-DQA1*02:01-B1*03:03L HLA-DRB1*15:03L
LPYPDPSRIL

SEQ ID NO: 9462 - protein, 19 aa, Severe acute respiratory syndrome coronavirus 2
  REGION 1..19: note = Table B: HLA-DQA1*03:02-B1*03:03L HLA-DPA1*01:03-B1*03:01L HLA-DPA1*01:03-B1*04:02L HLA-DPA1*02:01-B1*13:01L HLA-DPA1*03:01-B1*105:01L HLA-DPA1*01:03-B1*104:01L HLA-DQA1*02:01-B1*03:03L HLA-DRB1*15:03L
PYPDPSRILGAGCFVDDIV

SEQ ID NO: 9463 - protein, 13 aa, Severe acute respiratory syndrome coronavirus 2
  REGION 1..13: note = Table B: HLA-DQA1*03:02-B1*03:03L HLA-DQA1*05:01-B1*02:01L HLA-DPA1*03:01-B1*105:01L HLA-DQA1*03:01-B1*03:02L HLA-DQA1*05:05-B1*03:01L HLA-DQA1*02:01-B1*03:03L
ILGAGCFVDDIVK

SEQ ID NO: 9464 - protein, 10 aa, Severe acute respiratory syndrome coronavirus 2
  REGION 1..10: note = Table B: HLA-DQA1*03:02-B1*03:03L HLA-DQA1*01-B1*05L HLA-DQA1*05:01-B1*02:01L HLA-DQA1*03:01-B1*03:02L
DDIVKTDGTL

SEQ ID NO: 9465 - protein, 10 aa, Severe acute respiratory syndrome coronavirus 2
  REGION 1..10: note = Table B: HLA-DQA1*03:02-B1*03:03L HLA-DQA1*05:01-B1*03:01L HLA-DRB1*04:03L HLA-DRB1*13:02L HLA-DRB1*13:03L HLA-DRB1*01:03L HLA-DRB1*04:02L HLA-DRB1*04:05L HLA-DRB1*01:02L HLA-DRB4*03:01NL HLA-DRB1*08:77L HLA-DRB3*02:01L HLA-DPA1*03:01-B1*04:02L
  REGION 1..10: note = CONT. FROM ABOVE: HLA-DRB1*14:01L HLA-DRB1*11:03L HLA-DRB1*11:04 L HLA-DRB5*01:01L HLA-DQA1*01-B1*05L HLA-DQA1*05:05-B1*03:19L HL A-DQA1*05:01-B1*02:01L HLA-DPA1*01:03-B1*04:01L HLA-DRB1*09:01L HLA-DRB1*12:01L HLA-DRB1*12:02L HLA-DPA1*03:01-B1*105:01L
  REGION 1..10: note = CONT. FROM ABOVE: HLA-DQA1*03:01-B1*03:02L HLA-DRB1*14:54L HLA-D QA1*05:05-B1*03:01L HLA-DRB1*14:17L HLA-DPA1*01:02-B1*04:01L HLA -DRB1*07:01L HLA-DRB1*16:01L HLA-DQA1*01:03-B1*06:01L HLA-DQA1*0 2:01-B1*03:03L HLA-DRB1*15:03L
DIVKTDGTLM

SEQ ID NO: 9466 - protein, 10 aa, Severe acute respiratory syndrome coronavirus 2
  REGION 1..10: note = Table B: HLA-DQA1*03:02-B1*03:03L HLA-DQA1*05:01-B1*03:01L HLA-DQA1*01:02-B1*06:02L HLA-DRB1*08:77L HLA-DPA1*01:03-B1*03:01L HLA-DPA1*03:01-B1*04:02L HLA-DRB1*03:01L HLA-DRB1*11:02L HLA-DQA1*01-B1*05L
  REGION 1..10: note = CONT. FROM ABOVE: HLA-DQA1*05:05-B1*03:19M HLA-DQA1*05:01-B1*02: 01L HLA-DRB4*01:01L HLA-DPA1*01:03-B1*04:01L HLA-DRB1*12:01L HLA -DPA1*03:01-B1*105:01L HLA-DQA1*03:01-B1*03:02L HLA-DPA1*01:03-B 1*104:01L HLA-DPA1*01:02-B1*04:01L HLA-DRB1*10:01L
  REGION 1..10: note = CONT. FROM ABOVE: HLA-DRB1*16:01L HLA-DQA1*01:03-B1*06:01L HLA-D QA1*02:01-B1*03:03L HLA-DRB1*15:03L
TDGTLMIERF

SEQ ID NO: 9467 - protein, 10 aa, Severe acute respiratory syndrome coronavirus 2
  REGION 1..10: note = Table B: HLA-DQA1*03:02-B1*03:03L HLA-DQA1*05:01-B1*03:01L HLA-DRB1*01:03L HLA-DQA1*01:02-B1*06:02L HLA-DRB1*01:02L HLA-DPA1*01:03-B1*03:01L HLA-DPA1*03:01-B1*04:02M HLA-DRB1*14:01L HLA-DRB1*14:02L HLA-DRB1*08:01L HLA-DRB1*11:01L
  REGION 1..10: note = CONT. FROM ABOVE: HLA-DQA1*01-B1*05L HLA-DQA1*05:05-B1*03:19L HL A-DQA1*05:01-B1*02:01L HLA-DPA1*01:03-B1*04:01L HLA-DPA1*01:03-B 1*04:02L HLA-DRB1*12:01L HLA-DPA1*02:01-B1*13:01L HLA-DPA1*03:01 -B1*105:01L HLA-DQA1*03:01-B1*03:02L HLA-DPA1*01:03-B1*104:01L
  REGION 1..10: note = CONT. FROM ABOVE: HLA-DQA1*05:05-B1*03:01L HLA-DPA1*01:02-B1*04: 01M HLA-DRB1*16:01L HLA-DQA1*01:03-B1*06:01L HLA-DRB1*04:08L HLA -DQA1*02:01-B1*03:03L HLA-DRB1*15:03L
TLMIERFVSL

SEQ ID NO: 9468 - protein, 13 aa, Severe acute respiratory syndrome coronavirus 2
  REGION 1..13: note = Table B: HLA-DQA1*03:02-B1*03:03L HLA-DRB1*13:02L HLA-DRB1*04:05L HLA-DPA1*01:03-B1*04:02L HLA-DQA1*05:05-B1*03:01L HLA-DPA1*01:02-B1*04:01L HLA-DRB1*16:01L HLA-DQA1*01:03-B1*06:01L HLA-DRB1*04:08L
IERFVSLAIDAYP

SEQ ID NO: 9469 - protein, 13 aa, Severe acute respiratory syndrome coronavirus 2
  REGION 1..13: note = Table B: HLA-DQA1*03:02-B1*03:03L HLA-DRB1*04:05L HLA-DPA1*02:01-B1*13:01L
LAIDAYPLTKHPN

SEQ ID NO: 9470 - protein, 12 aa, Severe acute respiratory syndrome coronavirus 2
  REGION 1..12: note = Table B: HLA-DQA1*03:02-B1*03:03L HLA-DRB1*01:03L HLA-DRB1*04:05L HLA-DQA1*01:02-B1*06:02L HLA-DRB1*01:02L HLA-DRB4*03:01NL HLA-DRB1*08:04L HLA-DRB1*14:01L HLA-DRB1*12:01L HLA-DRB1*14:54L HLA-DRB1*14:17L HLA-DRB1*16:01L HLA-DRB1*04:08L
IDAYPLTKHPNQ

SEQ ID NO: 9471 - protein, 12 aa, Severe acute respiratory syndrome coronavirus 2
  REGION 1..12: note = Table B: HLA-DQA1*03:02-B1*03:03L HLA-DRB1*04:05L HLA-DQA1*01:02-B1*06:02L HLA-DRB1*01:02L HLA-DRB1*08:04L HLA-DRB1*14:01L HLA-DQA1*05:05-B1*03:19L HLA-DQA1*05:05-B1*03:01L HLA-DRB1*04:08L HLA-DRB1*08:03L
DAYPLTKHPNQE

SEQ ID NO: 9472 - protein, 11 aa, Severe acute respiratory syndrome coronavirus 2
  REGION 1..11: note = Table B: HLA-DQA1*03:02-B1*03:03L HLA-DRB1*13:02L HLA-DRB4*03:01NL HLA-DRB1*08:77L HLA-DPA1*03:01-B1*04:02L HLA-DRB1*14:01L HLA-DRB1*11:01L HLA-DQA1*01-B1*05L HLA-DPA1*01:03-B1*04:01L HLA-DQA1*05:05-B1*03:116L
  REGION 1..11: note = CONT. FROM ABOVE: HLA-DRB1*12:01L HLA-DPA1*02:01-B1*13:01L HLA-D PA1*01:03-B1*104:01L HLA-DQA1*05:05-B1*03:01L HLA-DPA1*01:02-B1* 04:01L HLA-DRB1*10:01L HLA-DRB1*08:02L
YPLTKHPNQEY

SEQ ID NO: 9473 - protein, 11 aa, Severe acute respiratory syndrome coronavirus 2
  REGION 1..11: note = Table B: HLA-DQA1*03:02-B1*03:03L HLA-DRB1*04:03L HLA-DRB1*01:03L HLA-DRB1*04:02L HLA-DRB1*04:05L HLA-DQA1*01:01-B1*05:01L HLA-DQA1*05:01-B1*02:01L HLA-DRB1*12:01L HLA-DPA1*01:02-B1*04:01L HLA-DRB1*16:01L
  REGION 1..11: note = CONT. FROM ABOVE: HLA-DQA1*01:03-B1*06:01L HLA-DQA1*02:01-B1*03: 03L
HPNQEYADVFH

SEQ ID NO: 9474 - protein, 10 aa, Severe acute respiratory syndrome coronavirus 2
  REGION 1..10: note = Table B: HLA-DQA1*03:02-B1*03:03L
NQEYADVFHL

SEQ ID NO: 9475 - protein, 10 aa, Severe acute respiratory syndrome coronavirus 2
  REGION 1..10: note = Table B: HLA-DQA1*03:02-B1*03:03M HLA-DQA1*05:01-B1*03:01H HLA-DRB1*04:01L HLA-DRB1*13:02L HLA-DRB1*13:03M HLA-DRB1*01:03M HLA-DRB1*04:02L HLA-DRB1*04:05L HLA-DQA1*01:02-B1*06:02M HLA-DRB1*01:01L HLA-DRB4*03:01NM HLA-DRB1*08:77H
  REGION 1..10: note = CONT. FROM ABOVE: HLA-DPA1*01:03-B1*03:01M HLA-DPA1*03:01-B1*04: 02H HLA-DRB1*03:01H HLA-DRB1*14:01L HLA-DRB1*11:02M HLA-DRB1*11: 03L HLA-DRB1*11:04L HLA-DRB1*14:02M HLA-DRB1*11:01L HLA-DRB5*01: 01L HLA-DQA1*01-B1*05M HLA-DQA1*05:05-B1*03:19M
  REGION 1..10: note = CONT. FROM ABOVE: HLA-DQA1*05:01-B1*02:01M HLA-DRB4*01:01H HLA-D PA1*01:03-B1*04:01H HLA-DQA1*05:05-B1*03:116M HLA-DRB1*09:01L HL A-DPA1*01:03-B1*04:02M HLA-DRB1*12:01M HLA-DPA1*02:01-B1*13:01L HLA-DPA1*03:01-B1*105:01L HLA-DQA1*03:01-B1*03:02M
  REGION 1..10: note = CONT. FROM ABOVE: HLA-DRB1*14:54L HLA-DPA1*01:03-B1*104:01M HLA- DQA1*05:05-B1*03:01L HLA-DPA1*01:02-B1*04:01M HLA-DRB1*10:01M HL A-DRB1*16:01M HLA-DQA1*01:03-B1*06:01L HLA-DRB1*08:02M HLA-DQA1* 02:01-B1*03:03M HLA-DRB1*15:01L HLA-DRB1*15:03H
QEYADVFHLY

SEQ ID NO: 9476 - protein, 10 aa, Severe acute respiratory syndrome coronavirus 2
  REGION 1..10: note = Table B: HLA-DQA1*03:02-B1*03:03L HLA-DRB1*04:05L HLA-DQA1*01:02-B1*06:02L HLA-DRB1*01:02L HLA-DPA1*03:01-B1*04:02L HLA-DQA1*05:05-B1*03:19L HLA-DPA1*02:01-B1*13:01L HLA-DPA1*03:01-B1*105:01L
  REGION 1..10: note = CONT. FROM ABOVE: HLA-DPA1*01:02-B1*04:01L HLA-DRB1*16:01L HLA-D QA1*01:03-B1*06:01L HLA-DQA1*02:01-B1*03:03L HLA-DRB1*15:03L
EYADVFHLYL

SEQ ID NO: 9477 - protein, 10 aa, Severe acute respiratory syndrome coronavirus 2
  REGION 1..10: note = Table B: HLA-DQA1*03:02-B1*03:03L HLA-DQA1*01:02-B1*06:02L HLA-DRB1*01:02L HLA-DQA1*05:05-B1*03:19L HLA-DPA1*02:01-B1*13:01L HLA-DPA1*03:01-B1*105:01L HLA-DQA1*01:03-B1*06:01L HLA-DRB1*15:03L
DVFHLYLQYI

SEQ ID NO: 9478 - protein, 10 aa, Severe acute respiratory syndrome coronavirus 2
  REGION 1..10: note = Table B: HLA-DQA1*03:02-B1*03:03L HLA-DQA1*03:01-B1*03:02L HLA-DRB1*16:01L HLA-DQA1*02:01-B1*03:03L
KLHDELTGHM

SEQ ID NO: 9479 - protein, 10 aa, Severe acute respiratory syndrome coronavirus 2
  REGION 1..10: note = Table B: HLA-DQA1*03:02-B1*03:03L HLA-DQA1*05:01-B1*03:01L HLA-DPA1*03:01-B1*04:02L HLA-DRB1*14:01L HLA-DQA1*01:01-B1*05:01L HLA-DRB1*08:01L HLA-DQA1*01-B1*05L HLA-DQA1*05:01-B1*02:01L HLA-DQA1*03:01-B1*03:02L
  REGION 1..10: note = CONT. FROM ABOVE: HLA-DPA1*01:02-B1*04:01L HLA-DRB1*16:01L HLA-D QA1*02:01-B1*03:03L
LHDELTGHML

SEQ ID NO: 9480 - protein, 10 aa, Severe acute respiratory syndrome coronavirus 2
  REGION 1..10: note = Table B: HLA-DQA1*03:02-B1*03:03M HLA-DQA1*05:01-B1*03:01L HLA-DRB1*13:03L HLA-DQA1*01:02-B1*06:02L HLA-DPA1*03:01-B1*04:02L HLA-DQA1*01-B1*05L HLA-DQA1*05:05-B1*03:19L HLA-DQA1*05:01-B1*02:01L
  REGION 1..10: note = CONT. FROM ABOVE: HLA-DPA1*01:03-B1*04:01L HLA-DRB1*09:01L HLA-D PA1*01:03-B1*04:02L HLA-DPA1*03:01-B1*105:01L HLA-DQA1*03:01-B1* 03:02L HLA-DPA1*01:03-B1*104:01L HLA-DQA1*05:05-B1*03:01L HLA-DP A1*01:02-B1*04:01L HLA-DRB1*16:01L HLA-DQA1*01:03-B1*06:01L
  REGION 1..10: note = CONT. FROM ABOVE: HLA-DQA1*02:01-B1*03:03L HLA-DRB1*15:03L
DELTGHMLDM

SEQ ID NO: 9481 - protein, 10 aa, Severe acute respiratory syndrome coronavirus 2
  REGION 1..10: note = Table B: HLA-DQA1*03:02-B1*03:03L HLA-DQA1*05:01-B1*03:01L HLA-DRB1*13:03L HLA-DRB1*01:03L HLA-DQA1*01:02-B1*06:02M HLA-DRB4*03:01NL HLA-DRB1*08:77L HLA-DPA1*01:03-B1*03:01L HLA-DPA1*03:01-B1*04:02L HLA-DRB1*03:01L HLA-DRB1*14:02L
  REGION 1..10: note = CONT. FROM ABOVE: HLA-DQA1*01-B1*05L HLA-DQA1*05:05-B1*03:19L HL A-DQA1*05:01-B1*02:01L HLA-DRB4*01:01L HLA-DPA1*01:03-B1*04:01L HLA-DQA1*05:05-B1*03:116L HLA-DPA1*01:03-B1*04:02L HLA-DRB1*12:0 1L HLA-DPA1*02:01-B1*13:01L HLA-DPA1*03:01-B1*105:01L
  REGION 1..10: note = CONT. FROM ABOVE: HLA-DPA1*01:03-B1*104:01L HLA-DQA1*05:05-B1*03 :01L HLA-DPA1*01:02-B1*04:01L HLA-DRB1*10:01L HLA-DRB1*16:01L HL A-DQA1*01:03-B1*06:01L HLA-DQA1*02:01-B1*03:03L HLA-DRB1*15:03L
ELTGHMLDMY

SEQ ID NO: 9482 - protein, 10 aa, Severe acute respiratory syndrome coronavirus 2
  REGION 1..10: note = Table B: HLA-DQA1*03:02-B1*03:03L HLA-DQA1*03:01-B1*03:02L
GHMLDMYSVM

SEQ ID NO: 9483 - protein, 10 aa, Severe acute respiratory syndrome coronavirus 2
  REGION 1..10: note = Table B: HLA-DQA1*03:02-B1*03:03L HLA-DQA1*02:01-B1*03:03L HLA-DRB1*15:03L
HMLDMYSVML

SEQ ID NO: 9484 - protein, 11 aa, Severe acute respiratory syndrome coronavirus 2
  REGION 1..11: note = Table B: HLA-DQA1*03:02-B1*03:03L HLA-DRB1*04:03L HLA-DQA1*01:02-B1*06:02L HLA-DQA1*03:01-B1*03:02L HLA-DRB1*14:17L HLA-DQA1*01:03-B1*06:01L HLA-DQA1*02:01-B1*03:03L
DMYSVMLTNDN

SEQ ID NO: 9485 - protein, 12 aa, Severe acute respiratory syndrome coronavirus 2
  REGION 1..12: note = Table B: HLA-DQA1*03:02-B1*03:03L HLA-DQA1*01:02-B1*06:02L HLA-DRB1*01:02L HLA-DRB1*14:01L HLA-DRB1*11:03L HLA-DQA1*05:01-B1*02:01L
YSVMLTNDNTSR

SEQ ID NO: 9486 - protein, 10 aa, Severe acute respiratory syndrome coronavirus 2
  REGION 1..10: note = Table B: HLA-DQA1*03:02-B1*03:03L HLA-DQA1*05:01-B1*03:01L HLA-DRB1*04:01L HLA-DRB1*04:03L HLA-DRB1*13:02L HLA-DRB1*13:03L HLA-DRB1*01:03M HLA-DRB1*04:02L HLA-DQA1*01:02-B1*06:02L HLA-DRB4*03:01NL HLA-DRB1*08:77M HLA-DPA1*01:03-B1*03:01M
  REGION 1..10: note = CONT. FROM ABOVE: HLA-DPA1*03:01-B1*04:02L HLA-DRB1*03:01L HLA-D RB1*14:01L HLA-DRB1*11:02L HLA-DRB1*11:03L HLA-DRB1*11:04L HLA-D RB1*14:02M HLA-DRB1*11:01L HLA-DRB5*01:01L HLA-DQA1*01-B1*05L HL A-DQA1*05:05-B1*03:19M HLA-DQA1*05:01-B1*02:01M HLA-DRB4*01:01L
  REGION 1..10: note = CONT. FROM ABOVE: HLA-DPA1*01:03-B1*04:01L HLA-DQA1*05:05-B1*03: 116L HLA-DPA1*01:03-B1*04:02L HLA-DRB1*12:01L HLA-DPA1*02:01-B1* 13:01L HLA-DPA1*03:01-B1*105:01L HLA-DRB1*14:54L HLA-DPA1*01:03- B1*104:01L HLA-DQA1*05:05-B1*03:01L HLA-DRB1*14:17L
  REGION 1..10: note = CONT. FROM ABOVE: HLA-DRB1*10:01L HLA-DRB1*16:01L HLA-DQA1*01:03 -B1*06:01L HLA-DRB1*08:02L HLA-DQA1*02:01-B1*03:03L HLA-DRB1*15: 03L
MLTNDNTSRY

SEQ ID NO: 9487 - protein, 12 aa, Severe acute respiratory syndrome coronavirus 2
  REGION 1..12: note = Table B: HLA-DQA1*03:02-B1*03:03L HLA-DRB1*04:03L HLA-DRB1*04:02L HLA-DQA1*01:02-B1*06:02L HLA-DQA1*01-B1*05L HLA-DQA1*05:01-B1*02:01L HLA-DPA1*03:01-B1*105:01L HLA-DQA1*01:03-B1*06:01L HLA-DQA1*02:01-B1*03:03L
TNDNTSRYWEPE

SEQ ID NO: 9488 - protein, 13 aa, Severe acute respiratory syndrome coronavirus 2
  REGION 1..13: note = Table B: HLA-DQA1*03:02-B1*03:03L HLA-DRB1*04:03L HLA-DRB1*04:05L HLA-DRB1*01:02L HLA-DPA1*01:03-B1*03:01L HLA-DPA1*03:01-B1*04:02L HLA-DRB1*12:01L HLA-DPA1*02:01-B1*13:01L HLA-DPA1*03:01-B1*105:01L
  REGION 1..13: note = CONT. FROM ABOVE: HLA-DRB1*15:03L
DNTSRYWEPEFYE

SEQ ID NO: 9489 - protein, 10 aa, Severe acute respiratory syndrome coronavirus 2
  REGION 1..10: note = Table B: HLA-DQA1*03:02-B1*03:03L HLA-DPA1*03:01-B1*04:02L HLA-DQA1*01-B1*05L HLA-DQA1*05:05-B1*03:19L HLA-DQA1*05:01-B1*02:01L HLA-DPA1*02:01-B1*13:01L HLA-DQA1*03:01-B1*03:02L HLA-DPA1*01:02-B1*04:01L
  REGION 1..10: note = CONT. FROM ABOVE: HLA-DRB1*16:01L HLA-DQA1*01:03-B1*06:01L HLA-D QA1*02:01-B1*03:03L HLA-DRB1*15:03L
RYWEPEFYEA

SEQ ID NO: 9490 - protein, 10 aa, Severe acute respiratory syndrome coronavirus 2
  REGION 1..10: note = Table B: HLA-DQA1*03:02-B1*03:03L HLA-DQA1*01:02-B1*06:02L HLA-DPA1*03:01-B1*04:02L HLA-DQA1*01-B1*05L HLA-DQA1*05:01-B1*02:01L HLA-DPA1*01:03-B1*04:01L HLA-DPA1*01:03-B1*04:02L HLA-DPA1*02:01-B1*13:01L
  REGION 1..10: note = CONT. FROM ABOVE: HLA-DPA1*03:01-B1*105:01L HLA-DPA1*01:02-B1*04 :01L HLA-DRB1*16:01L HLA-DQA1*01:03-B1*06:01L HLA-DRB1*15:03L
YWEPEFYEAM

SEQ ID NO: 9491 - protein, 12 aa, Severe acute respiratory syndrome coronavirus 2
  REGION 1..12: note = Table B: HLA-DQA1*03:02-B1*03:03L HLA-DRB1*04:03L HLA-DQA1*01-B1*05L HLA-DQA1*05:01-B1*02:01L HLA-DPA1*03:01-B1*105:01L HLA-DQA1*03:01-B1*03:02L HLA-DPA1*01:02-B1*04:01L HLA-DQA1*01:03-B1*06:01L
  REGION 1..12: note = CONT. FROM ABOVE: HLA-DQA1*02:01-B1*03:03L
EPEFYEAMYTPH

SEQ ID NO: 9492 - protein, 10 aa, Severe acute respiratory syndrome coronavirus 2
  REGION 1..10: note = Table B: HLA-DQA1*03:02-B1*03:03L HLA-DQA1*05:01-B1*03:01L HLA-DRB1*04:03L HLA-DRB1*13:03L HLA-DRB1*01:03L HLA-DRB1*04:02L HLA-DRB1*04:05L HLA-DRB4*03:01NL HLA-DPA1*03:01-B1*04:02L HLA-DQA1*01-B1*05L HLA-DQA1*05:01-B1*02:01L HLA-DRB1*04:10L
  REGION 1..10: note = CONT. FROM ABOVE: HLA-DPA1*03:01-B1*105:01L HLA-DQA1*03:01-B1*03 :02L HLA-DRB1*14:17L HLA-DPA1*01:02-B1*04:01L HLA-DRB1*16:01L HL A-DRB1*04:08L HLA-DQA1*02:01-B1*03:03L
FYEAMYTPHT

SEQ ID NO: 9493 - protein, 10 aa, Severe acute respiratory syndrome coronavirus 2
  REGION 1..10: note = Table B: HLA-DQA1*03:02-B1*03:03M HLA-DQA1*05:01-B1*03:01L HLA-DRB1*13:02L HLA-DRB1*13:03L HLA-DQA1*01:02-B1*06:02L HLA-DRB1*01:02L HLA-DRB1*08:77L HLA-DPA1*03:01-B1*04:02L HLA-DRB1*14:01L HLA-DRB1*11:02M HLA-DRB1*14:02L HLA-DRB1*11:01L
  REGION 1..10: note = CONT. FROM ABOVE: HLA-DQA1*05:05-B1*03:19H HLA-DQA1*05:01-B1*02: 01L HLA-DRB4*01:01L HLA-DPA1*01:03-B1*04:01L HLA-DQA1*05:05-B1*0 3:116L HLA-DRB1*09:01L HLA-DPA1*01:03-B1*04:02L HLA-DRB1*12:01L HLA-DPA1*02:01-B1*13:01L HLA-DPA1*03:01-B1*105:01L
  REGION 1..10: note = CONT. FROM ABOVE: HLA-DQA1*03:01-B1*03:02L HLA-DPA1*01:03-B1*104 :01H HLA-DPA1*01:02-B1*04:01L HLA-DRB1*10:01L HLA-DRB1*16:01L HL A-DQA1*01:03-B1*06:01L HLA-DRB1*08:03L HLA-DQA1*02:01-B1*03:03L HLA-DRB1*15:03L
YEAMYTPHTV

SEQ ID NO: 9494 - protein, 10 aa, Severe acute respiratory syndrome coronavirus 2
  REGION 1..10: note = Table B: HLA-DQA1*03:02-B1*03:03L HLA-DQA1*05:01-B1*03:01L HLA-DRB1*13:03L HLA-DQA1*01:02-B1*06:02L HLA-DRB1*01:02L HLA-DPA1*03:01-B1*04:02L HLA-DRB1*14:01L HLA-DQA1*01-B1*05L HLA-DQA1*05:05-B1*03:19L HLA-DQA1*05:01-B1*02:01L
  REGION 1..10: note = CONT. FROM ABOVE: HLA-DPA1*01:03-B1*04:01L HLA-DRB1*12:01L HLA-D PA1*02:01-B1*13:01L HLA-DPA1*03:01-B1*105:01L HLA-DQA1*03:01-B1* 03:02L HLA-DQA1*05:05-B1*03:01L HLA-DPA1*01:02-B1*04:01L HLA-DRB 1*16:01L HLA-DQA1*01:03-B1*06:01L HLA-DQA1*02:01-B1*03:03L
  REGION 1..10: note = CONT. FROM ABOVE: HLA-DRB1*15:03L
EAMYTPHTVL

SEQ ID NO: 9495 - protein, 10 aa, Severe acute respiratory syndrome coronavirus 2
  REGION 1..10: note = Table B: HLA-DQA1*03:02-B1*03:03L HLA-DQA1*05:01-B1*03:01L HLA-DQA1*01-B1*05L HLA-DQA1*05:05-B1*03:19L HLA-DQA1*03:01-B1*03:02L HLA-DPA1*01:02-B1*04:01L HLA-DRB1*16:01L HLA-DQA1*02:01-B1*03:03L HLA-DRB1*15:03L
MYTPHTVLQA

SEQ ID NO: 9496 - protein, 10 aa, Severe acute respiratory syndrome coronavirus 2
  REGION 1..10: note = Table B: HLA-DQA1*03:02-B1*03:03L HLA-DQA1*05:01-B1*03:01L HLA-DQA1*05:05-B1*03:19L HLA-DQA1*05:05-B1*03:116L HLA-DPA1*02:01-B1*13:01L HLA-DPA1*03:01-B1*105:01L HLA-DRB1*16:01L HLA-DQA1*01:03-B1*06:01L HLA-DRB1*15:03L
YTPHTVLQAV

SEQ ID NO: 9497 - protein, 14 aa, Severe acute respiratory syndrome coronavirus 2
  REGION 1..14: note = Table B: HLA-DQA1*03:02-B1*03:03L HLA-DQA1*05:01-B1*03:01L HLA-DQA1*01:02-B1*06:02L HLA-DRB1*01:02L HLA-DPA1*01:03-B1*03:01L HLA-DPA1*03:01-B1*04:02L HLA-DRB1*14:01L HLA-DQA1*05:05-B1*03:19L HLA-DRB1*12:01L
  REGION 1..14: note = CONT. FROM ABOVE: HLA-DPA1*02:01-B1*13:01L HLA-DPA1*03:01-B1*105 :01L HLA-DPA1*01:03-B1*104:01L HLA-DQA1*05:05-B1*03:01L HLA-DQA1 *01:03-B1*06:01L HLA-DRB1*15:03L
TPHTVLQAVGACVL

SEQ ID NO: 9498 - protein, 10 aa, Severe acute respiratory syndrome coronavirus 2
  REGION 1..10: note = Table B: HLA-DQA1*03:02-B1*03:03L HLA-DQA1*05:01-B1*03:01L HLA-DRB1*14:01L HLA-DRB1*08:01L HLA-DQA1*01-B1*05L HLA-DQA1*03:01-B1*03:02L HLA-DPA1*01:02-B1*04:01L HLA-DRB1*16:01L HLA-DQA1*02:01-B1*03:03L
DHVISTSHKL

SEQ ID NO: 9499 - protein, 12 aa, Severe acute respiratory syndrome coronavirus 2
  REGION 1..12: note = Table B: HLA-DQA1*03:02-B1*03:03L HLA-DQA1*05:01-B1*03:01L HLA-DRB1*13:02L HLA-DRB1*01:03L HLA-DRB1*04:02L HLA-DRB1*04:05L HLA-DRB1*01:02L HLA-DRB4*03:01NL HLA-DPA1*01:03-B1*03:01L HLA-DPA1*03:01-B1*04:02L HLA-DRB1*14:01L HLA-DQA1*01-B1*05L
  REGION 1..12: note = CONT. FROM ABOVE: HLA-DQA1*05:01-B1*02:01L HLA-DRB1*04:10L HLA-D RB1*12:01L HLA-DRB1*12:02L HLA-DPA1*02:01-B1*13:01L HLA-DRB1*14: 54L HLA-DRB1*14:17L HLA-DPA1*01:02-B1*04:01L HLA-DRB1*04:08L HLA -DRB1*15:03L
SHKLVLSVNPYV

SEQ ID NO: 9500 - protein, 15 aa, Severe acute respiratory syndrome coronavirus 2
  REGION 1..15: note = Table B: HLA-DQA1*03:02-B1*03:03L HLA-DRB1*04:01L HLA-DRB1*01:01L HLA-DRB1*08:04L HLA-DRB1*11:03L HLA-DRB1*11:04L HLA-DRB1*14:02L HLA-DRB1*08:01L HLA-DRB1*11:01L HLA-DQA1*01-B1*05L HLA-DQA1*05:01-B1*02:01L
  REGION 1..15: note = CONT. FROM ABOVE: HLA-DPA1*01:03-B1*04:01L HLA-DRB3*01:01L HLA-D PA1*02:01-B1*13:01L HLA-DRB1*10:01L
KLVLSVNPYVCNAPG

SEQ ID NO: 9501 - protein, 14 aa, Severe acute respiratory syndrome coronavirus 2
  REGION 1..14: note = Table B: HLA-DQA1*03:02-B1*03:03L HLA-DQA1*05:01-B1*03:01L HLA-DRB1*04:03L HLA-DRB1*13:02L HLA-DRB1*01:03L HLA-DRB1*04:05L HLA-DRB1*01:02L HLA-DRB1*08:04L HLA-DPA1*01:03-B1*03:01L HLA-DPA1*03:01-B1*04:02L HLA-DRB1*14:01L HLA-DRB1*14:02L
  REGION 1..14: note = CONT. FROM ABOVE: HLA-DRB1*08:01L HLA-DRB1*11:01L HLA-DQA1*05:05 -B1*03:19L HLA-DPA1*01:03-B1*04:02L HLA-DRB1*12:01L HLA-DPA1*02: 01-B1*13:01L HLA-DPA1*03:01-B1*105:01L HLA-DQA1*03:01-B1*03:02L HLA-DPA1*01:03-B1*104:01L HLA-DQA1*05:05-B1*03:01L
  REGION 1..14: note = CONT. FROM ABOVE: HLA-DRB1*16:01L HLA-DQA1*01:03-B1*06:01L HLA-D RB1*04:08L HLA-DQA1*02:01-B1*03:03L HLA-DRB1*15:03L
VNPYVCNAPGCDVT

SEQ ID NO: 9502 - protein, 10 aa, Severe acute respiratory syndrome coronavirus 2
  REGION 1..10: note = Table B: HLA-DQA1*03:02-B1*03:03L HLA-DQA1*05:01-B1*03:01L HLA-DRB1*13:03L HLA-DQA1*01:02-B1*06:02L HLA-DRB1*01:02L HLA-DPA1*03:01-B1*04:02L HLA-DRB1*14:01L HLA-DRB1*14:02L HLA-DRB1*08:01L HLA-DQA1*05:01-B1*02:01L
  REGION 1..10: note = CONT. FROM ABOVE: HLA-DPA1*01:03-B1*04:01L HLA-DRB1*12:01L HLA-D PA1*02:01-B1*13:01L HLA-DPA1*03:01-B1*105:01M HLA-DQA1*03:01-B1* 03:02L HLA-DPA1*01:02-B1*04:01L HLA-DRB1*15:03L
DVTDVTQLYL

SEQ ID NO: 9503 - protein, 10 aa, Severe acute respiratory syndrome coronavirus 2
  REGION 1..10: note = Table B: HLA-DQA1*03:02-B1*03:03L HLA-DQA1*01:02-B1*06:02L HLA-DQA1*05:01-B1*02:01L HLA-DPA1*03:01-B1*105:01L HLA-DQA1*03:01-B1*03:02L HLA-DQA1*01:03-B1*06:01L HLA-DQA1*02:01-B1*03:03L HLA-DRB1*15:03L
DVTQLYLGGM

SEQ ID NO: 9504 - protein, 12 aa, Severe acute respiratory syndrome coronavirus 2
  REGION 1..12: note = Table B: HLA-DQA1*03:02-B1*03:03L HLA-DQA1*05:01-B1*03:01L HLA-DRB1*04:03L HLA-DRB1*13:02L HLA-DRB1*13:03L HLA-DRB1*01:03L HLA-DRB1*04:02L HLA-DRB1*04:04L HLA-DRB1*04:05L HLA-DQA1*01:02-B1*06:02L HLA-DRB1*01:02L HLA-DRB4*03:01NL
  REGION 1..12: note = CONT. FROM ABOVE: HLA-DRB1*08:04L HLA-DRB1*14:01L HLA-DRB1*11:04 L HLA-DRB1*08:01L HLA-DRB1*11:01L HLA-DQA1*01-B1*05L HLA-DQA1*05 :01-B1*02:01L HLA-DRB1*04:10L HLA-DRB1*12:01L HLA-DPA1*02:01-B1* 13:01L HLA-DPA1*03:01-B1*105:01L HLA-DQA1*03:01-B1*03:02L
  REGION 1..12: note = CONT. FROM ABOVE: HLA-DRB1*14:54L HLA-DQA1*05:05-B1*03:01L HLA-D RB1*14:17L HLA-DRB1*10:01L HLA-DRB1*16:01L HLA-DRB1*04:08L HLA-D RB1*08:03L HLA-DQA1*02:01-B1*03:03L HLA-DRB1*15:03L
GLYKNTCVGSDN

SEQ ID NO: 9505 - protein, 11 aa, Severe acute respiratory syndrome coronavirus 2
  REGION 1..11: note = Table B: HLA-DQA1*03:02-B1*03:03L HLA-DPA1*01:03-B1*104:01L
GSDNVTDFNAI

SEQ ID NO: 9506 - protein, 12 aa, Severe acute respiratory syndrome coronavirus 2
  REGION 1..12: note = Table B: HLA-DQA1*03:02-B1*03:03L HLA-DRB1*04:03L HLA-DRB1*04:02L HLA-DRB1*04:05L HLA-DQA1*05:01-B1*02:01L HLA-DQA1*03:01-B1*03:02L HLA-DRB1*14:17L HLA-DRB1*16:01L HLA-DQA1*02:01-B1*03:03L
SDNVTDFNAIAT

SEQ ID NO: 9507 - protein, 14 aa, Severe acute respiratory syndrome coronavirus 2
  REGION 1..14: note = Table B: HLA-DQA1*03:02-B1*03:03L HLA-DQA1*05:01-B1*03:01L HLA-DQA1*03:01-B1*03:02L HLA-DQA1*05:05-B1*03:01L HLA-DQA1*01:03-B1*06:01L HLA-DQA1*02:01-B1*03:03L
VTDFNAIATCDWTN

SEQ ID NO: 9508 - protein, 13 aa, Severe acute respiratory syndrome coronavirus 2
  REGION 1..13: note = Table B: HLA-DQA1*03:02-B1*03:03L HLA-DQA1*01:02-B1*06:02L HLA-DQA1*05:05-B1*03:19L HLA-DQA1*05:01-B1*02:01L HLA-DPA1*03:01-B1*105:01L HLA-DQA1*03:01-B1*03:02L HLA-DQA1*05:05-B1*03:01L HLA-DQA1*02:01-B1*03:03L
DWTNAGDYILANT

SEQ ID NO: 9509 - protein, 11 aa, Severe acute respiratory syndrome coronavirus 2
  REGION 1..11: note = Table B: HLA-DQA1*03:02-B1*03:03L HLA-DQA1*05:01-B1*03:01L HLA-DRB1*13:03L HLA-DRB1*01:03L HLA-DRB1*04:05L HLA-DQA1*01:02-B1*06:02L HLA-DRB4*03:01NL HLA-DRB1*08:01L HLA-DQA1*01-B1*05L HLA-DRB1*04:10L HLA-DPA1*03:01-B1*105:01L
  REGION 1..11: note = CONT. FROM ABOVE: HLA-DQA1*05:05-B1*03:01L HLA-DPA1*01:02-B1*04: 01L HLA-DRB1*16:01L HLA-DQA1*01:03-B1*06:01L HLA-DRB1*04:08L
DYILANTCTER

SEQ ID NO: 9510 - protein, 10 aa, Severe acute respiratory syndrome coronavirus 2
  REGION 1..10: note = Table B: HLA-DQA1*03:02-B1*03:03L HLA-DQA1*05:01-B1*03:01L HLA-DRB1*04:03L HLA-DRB1*04:02L HLA-DQA1*01:02-B1*06:02L HLA-DRB4*03:01NL HLA-DQA1*05:01-B1*02:01L HLA-DPA1*03:01-B1*105:01L HLA-DQA1*03:01-B1*03:02L
  REGION 1..10: note = CONT. FROM ABOVE: HLA-DQA1*05:05-B1*03:01L HLA-DRB1*14:17L HLA-D PA1*01:02-B1*04:01L HLA-DRB1*16:01L HLA-DQA1*01:03-B1*06:01L HLA -DQA1*02:01-B1*03:03L
FAAETLKATE

SEQ ID NO: 9511 - protein, 10 aa, Severe acute respiratory syndrome coronavirus 2
  REGION 1..10: note = Table B: HLA-DQA1*03:02-B1*03:03L HLA-DQA1*03:01-B1*03:02L
AETLKATEET

SEQ ID NO: 9512 - protein, 10 aa, Severe acute respiratory syndrome coronavirus 2
  REGION 1..10: note = Table B: HLA-DQA1*03:02-B1*03:03L HLA-DQA1*05:01-B1*03:01L HLA-DRB1*13:03M HLA-DRB1*01:03L HLA-DQA1*01:02-B1*06:02M HLA-DRB4*03:01NL HLA-DRB1*08:77L HLA-DPA1*01:03-B1*03:01L HLA-DPA1*03:01-B1*04:02L HLA-DRB1*03:01L HLA-DRB1*14:01L
  REGION 1..10: note = CONT. FROM ABOVE: HLA-DRB1*14:02L HLA-DRB5*01:01L HLA-DQA1*01-B1 *05L HLA-DQA1*05:05-B1*03:19L HLA-DQA1*05:01-B1*02:01L HLA-DRB4* 01:01L HLA-DPA1*01:03-B1*04:01L HLA-DQA1*05:05-B1*03:116L HLA-DP A1*01:03-B1*04:02L HLA-DRB1*12:01L HLA-DPA1*02:01-B1*13:01L
  REGION 1..10: note = CONT. FROM ABOVE: HLA-DPA1*03:01-B1*105:01M HLA-DQA1*05:05-B1*03 :01L HLA-DPA1*01:02-B1*04:01L HLA-DRB1*10:01L HLA-DRB1*16:01L HL A-DQA1*01:03-B1*06:01L HLA-DQA1*02:01-B1*03:03L HLA-DRB1*15:03L
ETLKATEETF

SEQ ID NO: 9513 - protein, 12 aa, Severe acute respiratory syndrome coronavirus 2
  REGION 1..12: note = Table B: HLA-DQA1*03:02-B1*03:03L HLA-DQA1*05:01-B1*03:01L HLA-DRB1*04:03L HLA-DRB1*04:02L HLA-DRB1*04:05L HLA-DQA1*01:02-B1*06:02L HLA-DRB4*03:01NL HLA-DRB1*14:01L HLA-DQA1*05:01-B1*02:01L HLA-DRB1*12:01L
  REGION 1..12: note = CONT. FROM ABOVE: HLA-DQA1*03:01-B1*03:02L HLA-DRB1*14:54L HLA-D RB1*14:17L HLA-DRB1*16:01L HLA-DQA1*02:01-B1*03:03L HLA-DRB1*15: 03L
EETFKLSYGIAT

SEQ ID NO: 9514 - protein, 10 aa, Severe acute respiratory syndrome coronavirus 2
  REGION 1..10: note = Table B: HLA-DQA1*03:02-B1*03:03L HLA-DQA1*05:01-B1*03:01L HLA-DRB1*04:03L HLA-DRB1*13:03L HLA-DRB1*04:02L HLA-DQA1*03:01-B1*03:02L HLA-DQA1*05:05-B1*03:01L HLA-DRB1*14:17L HLA-DPA1*01:02-B1*04:01L
  REGION 1..10: note = CONT. FROM ABOVE: HLA-DQA1*01:03-B1*06:01L HLA-DQA1*02:01-B1*03: 03L
LSYGIATVRE

SEQ ID NO: 9515 - protein, 10 aa, Severe acute respiratory syndrome coronavirus 2
  REGION 1..10: note = Table B: HLA-DQA1*03:02-B1*03:03L HLA-DQA1*01:02-B1*06:02L HLA-DQA1*01-B1*05L HLA-DQA1*05:05-B1*03:19L HLA-DQA1*05:01-B1*02:01L HLA-DPA1*02:01-B1*13:01L HLA-DPA1*03:01-B1*105:01L HLA-DQA1*03:01-B1*03:02L
  REGION 1..10: note = CONT. FROM ABOVE: HLA-DPA1*01:02-B1*04:01L HLA-DRB1*16:01L HLA-D QA1*01:03-B1*06:01L HLA-DQA1*02:01-B1*03:03L HLA-DRB1*15:03L
SYGIATVREV

SEQ ID NO: 9516 - protein, 10 aa, Severe acute respiratory syndrome coronavirus 2
  REGION 1..10: note = Table B: HLA-DQA1*03:02-B1*03:03L HLA-DQA1*05:01-B1*03:01L HLA-DRB1*04:03L HLA-DQA1*01:02-B1*06:02L HLA-DQA1*05:05-B1*03:19L HLA-DQA1*05:01-B1*02:01L HLA-DPA1*03:01-B1*105:01L HLA-DQA1*03:01-B1*03:02L
  REGION 1..10: note = CONT. FROM ABOVE: HLA-DQA1*05:05-B1*03:01L HLA-DPA1*01:02-B1*04: 01L HLA-DQA1*01:03-B1*06:01L HLA-DQA1*02:01-B1*03:03L HLA-DRB1*1 5:03L
YGIATVREVL

SEQ ID NO: 9517 - protein, 11 aa, Severe acute respiratory syndrome coronavirus 2
  REGION 1..11: note = Table B: HLA-DQA1*03:02-B1*03:03L HLA-DQA1*05:01-B1*03:01L HLA-DQA1*05:01-B1*02:01L HLA-DPA1*03:01-B1*105:01L HLA-DQA1*05:05-B1*03:01L
GIATVREVLSD

SEQ ID NO: 9518 - protein, 12 aa, Severe acute respiratory syndrome coronavirus 2
  REGION 1..12: note = Table B: HLA-DQA1*03:02-B1*03:03L HLA-DQA1*05:01-B1*03:01L HLA-DRB1*13:02L HLA-DRB1*13:03L HLA-DRB1*01:03L HLA-DRB1*04:02L HLA-DRB1*04:04L HLA-DRB1*04:05L HLA-DRB1*01:02L HLA-DRB4*03:01NL HLA-DPA1*01:03-B1*03:01L HLA-DRB1*14:01L
  REGION 1..12: note = CONT. FROM ABOVE: HLA-DQA1*01:01-B1*05:01L HLA-DRB1*08:01L HLA-D QA1*01-B1*05L HLA-DQA1*05:05-B1*03:19L HLA-DQA1*05:01-B1*02:01L HLA-DRB1*04:10L HLA-DRB1*12:01L HLA-DPA1*02:01-B1*13:01L HLA-DPA 1*03:01-B1*105:01L HLA-DRB1*14:54L HLA-DQA1*05:05-B1*03:01L
  REGION 1..12: note = CONT. FROM ABOVE: HLA-DRB1*14:17L HLA-DPA1*01:02-B1*04:01L HLA-D RB1*16:01L HLA-DRB1*04:08L HLA-DRB1*15:03L
IATVREVLSDRE

SEQ ID NO: 9519 - protein, 10 aa, Severe acute respiratory syndrome coronavirus 2
  REGION 1..10: note = Table B: HLA-DQA1*03:02-B1*03:03M HLA-DQA1*05:01-B1*03:01L HLA-DRB1*13:02L HLA-DRB1*13:03L HLA-DRB1*01:03L HLA-DQA1*01:02-B1*06:02M HLA-DRB1*01:02L HLA-DRB1*08:77L HLA-DRB3*02:01L HLA-DPA1*01:03-B1*03:01L
  REGION 1..10: note = CONT. FROM ABOVE: HLA-DPA1*03:01-B1*04:02L HLA-DRB1*03:01L HLA-D RB1*14:01L HLA-DRB1*14:02L HLA-DRB1*08:01L HLA-DQA1*01-B1*05L HL A-DQA1*05:05-B1*03:19L HLA-DQA1*05:01-B1*02:01L HLA-DPA1*01:03-B 1*04:01L HLA-DQA1*05:05-B1*03:116L HLA-DRB1*09:01L
  REGION 1..10: note = CONT. FROM ABOVE: HLA-DPA1*01:03-B1*04:02L HLA-DRB1*12:01L HLA-D PA1*02:01-B1*13:01L HLA-DPA1*03:01-B1*105:01M HLA-DQA1*03:01-B1* 03:02L HLA-DPA1*01:03-B1*104:01L HLA-DQA1*05:05-B1*03:01L HLA-DP A1*01:02-B1*04:01L HLA-DRB1*10:01L HLA-DRB1*16:01L
  REGION 1..10: note = CONT. FROM ABOVE: HLA-DQA1*01:03-B1*06:01L HLA-DRB1*08:03L HLA-D QA1*02:01-B1*03:03L HLA-DRB1*15:03M
EVLSDRELHL

SEQ ID NO: 9520 - protein, 17 aa, Severe acute respiratory syndrome coronavirus 2
  REGION 1..17: note = Table B: HLA-DQA1*03:02-B1*03:03L HLA-DRB1*01:01L HLA-DPA1*01:03-B1*03:01L HLA-DRB1*11:04L HLA-DQA1*01:01-B1*05:01L HLA-DRB1*11:01L HLA-DQA1*01-B1*05L HLA-DQA1*05:05-B1*03:19L HLA-DQA1*05:01-B1*02:01L
  REGION 1..17: note = CONT. FROM ABOVE: HLA-DPA1*01:02-B1*04:01L
SDRELHLSWEVGKPRPP

SEQ ID NO: 9521 - protein, 10 aa, Severe acute respiratory syndrome coronavirus 2
  REGION 1..10: note = Table B: HLA-DQA1*03:02-B1*03:03L HLA-DQA1*05:05-B1*03:19L HLA-DQA1*03:01-B1*03:02L
WEVGKPRPPL

SEQ ID NO: 9522 - protein, 20 aa, Severe acute respiratory syndrome coronavirus 2
  REGION 1..20: note = Table B: HLA-DQA1*03:02-B1*03:03L HLA-DRB1*08:02L HLA-DRB1*08:03L
KPRPPLNRNYVFTGYRVTKN

SEQ ID NO: 9523 - protein, 11 aa, Severe acute respiratory syndrome coronavirus 2
  REGION 1..11: note = Table B: HLA-DQA1*03:02-B1*03:03L HLA-DRB1*04:04L HLA-DQA1*01:02-B1*06:02L HLA-DRB1*01:01L HLA-DRB3*02:01L HLA-DPA1*03:01-B1*04:02L HLA-DRB1*11:01L HLA-DQA1*05:01-B1*02:01L HLA-DRB1*04:10L HLA-DRB1*12:02L
  REGION 1..11: note = CONT. FROM ABOVE: HLA-DPA1*02:01-B1*13:01L HLA-DPA1*03:01-B1*105 :01L HLA-DRB1*14:54L HLA-DQA1*01:03-B1*06:01L
GYRVTKNSKVQ

SEQ ID NO: 9524 - protein, 12 aa, Severe acute respiratory syndrome coronavirus 2
  REGION 1..12: note = Table B: HLA-DQA1*03:02-B1*03:03L HLA-DQA1*05:01-B1*03:01L HLA-DPA1*03:01-B1*105:01L HLA-DQA1*05:05-B1*03:01L
TKNSKVQIGEYT

SEQ ID NO: 9525 - protein, 10 aa, Severe acute respiratory syndrome coronavirus 2
  REGION 1..10: note = Table B: HLA-DQA1*03:02-B1*03:03L HLA-DQA1*05:01-B1*03:01M HLA-DRB4*03:01NL HLA-DRB1*08:77M HLA-DPA1*01:03-B1*03:01L HLA-DPA1*03:01-B1*04:02L HLA-DRB1*03:01L HLA-DQA1*01-B1*05L HLA-DQA1*05:05-B1*03:19L HLA-DQA1*05:01-B1*02:01L
  REGION 1..10: note = CONT. FROM ABOVE: HLA-DRB4*01:01M HLA-DPA1*01:03-B1*04:01M HLA-D QA1*05:05-B1*03:116L HLA-DPA1*01:03-B1*04:02L HLA-DRB1*12:01L HL A-DQA1*03:01-B1*03:02L HLA-DPA1*01:03-B1*104:01L HLA-DPA1*01:02- B1*04:01L HLA-DRB1*10:01L HLA-DRB1*16:01L HLA-DRB1*15:03L
GEYTFEKGDY

SEQ ID NO: 9526 - protein, 11 aa, Severe acute respiratory syndrome coronavirus 2
  REGION 1..11: note = Table B: HLA-DQA1*03:02-B1*03:03L HLA-DRB1*04:03L HLA-DRB1*13:03L HLA-DRB1*01:03L HLA-DRB1*04:02L HLA-DRB1*04:05L HLA-DRB4*03:01NL HLA-DQA1*05:01-B1*02:01L HLA-DPA1*03:01-B1*105:01L HLA-DQA1*03:01-B1*03:02L
  REGION 1..11: note = CONT. FROM ABOVE: HLA-DRB1*14:54L HLA-DRB1*14:17L HLA-DRB1*16:01 L HLA-DQA1*02:01-B1*03:03L
YTFEKGDYGDA

SEQ ID NO: 9527 - protein, 10 aa, Severe acute respiratory syndrome coronavirus 2
  REGION 1..10: note = Table B: HLA-DQA1*03:02-B1*03:03L HLA-DQA1*05:05-B1*03:19L HLA-DQA1*03:01-B1*03:02L HLA-DPA1*01:03-B1*104:01L
FEKGDYGDAV

SEQ ID NO: 9528 - protein, 12 aa, Severe acute respiratory syndrome coronavirus 2
  REGION 1..12: note = Table B: HLA-DQA1*03:02-B1*03:03L HLA-DQA1*05:01-B1*03:01L HLA-DRB1*04:03L HLA-DQA1*01:02-B1*06:02L HLA-DQA1*05:05-B1*03:19L HLA-DQA1*05:01-B1*02:01L HLA-DPA1*03:01-B1*105:01L
GDYGDAVVYRGT

SEQ ID NO: 9529 - protein, 11 aa, Severe acute respiratory syndrome coronavirus 2
  REGION 1..11: note = Table B: HLA-DQA1*03:02-B1*03:03L HLA-DRB1*04:03L HLA-DQA1*01:02-B1*06:02L HLA-DQA1*03:01-B1*03:02L HLA-DQA1*01:03-B1*06:01L HLA-DQA1*02:01-B1*03:03L
YGDAVVYRGTT

SEQ ID NO: 9530 - protein, 10 aa, Severe acute respiratory syndrome coronavirus 2
  REGION 1..10: note = Table B: HLA-DQA1*03:02-B1*03:03L HLA-DRB1*04:03L HLA-DRB1*04:02L HLA-DQA1*03:01-B1*03:02L HLA-DQA1*02:01-B1*03:03L
DAVVYRGTTT

SEQ ID NO: 9531 - protein, 10 aa, Severe acute respiratory syndrome coronavirus 2
  REGION 1..10: note = Table B: HLA-DQA1*03:02-B1*03:03L HLA-DQA1*05:01-B1*03:01L HLA-DRB1*13:02L HLA-DRB1*13:03L HLA-DRB1*01:03L HLA-DQA1*01:02-B1*06:02L HLA-DRB4*03:01NL HLA-DRB1*08:77L HLA-DPA1*01:03-B1*03:01L HLA-DPA1*03:01-B1*04:02L
  REGION 1..10: note = CONT. FROM ABOVE: HLA-DRB1*03:01L HLA-DRB1*14:01L HLA-DRB1*14:02 L HLA-DRB1*11:01L HLA-DQA1*01-B1*05L HLA-DQA1*05:05-B1*03:19L HL A-DQA1*05:01-B1*02:01L HLA-DRB4*01:01L HLA-DPA1*01:03-B1*04:01L HLA-DQA1*05:05-B1*03:116L HLA-DPA1*01:03-B1*04:02L
  REGION 1..10: note = CONT. FROM ABOVE: HLA-DRB1*12:01L HLA-DPA1*02:01-B1*13:01L HLA-D PA1*03:01-B1*105:01L HLA-DPA1*01:03-B1*104:01L HLA-DRB1*10:01L H LA-DRB1*16:01L HLA-DQA1*01:03-B1*06:01L HLA-DRB1*08:02L HLA-DQA1 *02:01-B1*03:03L HLA-DRB1*15:03L
AVVYRGTTTY

SEQ ID NO: 9532 - protein, 11 aa, Severe acute respiratory syndrome coronavirus 2
  REGION 1..11: note = Table B: HLA-DQA1*03:02-B1*03:03L HLA-DRB1*08:77L HLA-DPA1*03:01-B1*04:02L HLA-DPA1*01:02-B1*04:01L HLA-DRB1*07:01L
VVYRGTTTYKL

SEQ ID NO: 9533 - protein, 13 aa, Severe acute respiratory syndrome coronavirus 2
  REGION 1..13: note = Table B: HLA-DQA1*03:02-B1*03:03L HLA-DRB1*13:03L HLA-DRB1*01:01L HLA-DRB4*03:01NL HLA-DRB1*08:77L HLA-DPA1*01:03-B1*03:01L HLA-DPA1*03:01-B1*04:02L HLA-DRB1*11:03L HLA-DRB1*11:04L HLA-DRB1*14:02L HLA-DRB1*08:01L
  REGION 1..13: note = CONT. FROM ABOVE: HLA-DRB1*11:01L HLA-DQA1*05:05-B1*03:19L HLA-D QA1*05:01-B1*02:01L HLA-DPA1*01:03-B1*04:01L HLA-DRB3*01:01L HLA -DPA1*02:01-B1*13:01L HLA-DRB1*14:54L HLA-DRB1*14:17L HLA-DRB1*1 0:01L
VYRGTTTYKLNVG

SEQ ID NO: 9534 - protein, 10 aa, Severe acute respiratory syndrome coronavirus 2
  REGION 1..10: note = Table B: HLA-DQA1*03:02-B1*03:03L HLA-DQA1*05:01-B1*03:01L HLA-DRB1*04:03L HLA-DRB1*13:02L HLA-DRB1*13:03L HLA-DRB1*01:03L HLA-DRB1*04:05L HLA-DQA1*01:02-B1*06:02M HLA-DRB4*03:01NL HLA-DRB1*08:77L HLA-DPA1*01:03-B1*03:01L
  REGION 1..10: note = CONT. FROM ABOVE: HLA-DPA1*03:01-B1*04:02L HLA-DRB1*03:01L HLA-D RB1*14:01L HLA-DRB1*11:02L HLA-DRB1*14:02L HLA-DRB1*11:01L HLA-D QA1*01-B1*05L HLA-DQA1*05:05-B1*03:19L HLA-DQA1*05:01-B1*02:01L HLA-DRB4*01:01L HLA-DPA1*01:03-B1*04:01L
  REGION 1..10: note = CONT. FROM ABOVE: HLA-DQA1*05:05-B1*03:116L HLA-DPA1*01:03-B1*04 :02L HLA-DRB1*12:01L HLA-DPA1*02:01-B1*13:01L HLA-DPA1*03:01-B1* 105:01L HLA-DQA1*03:01-B1*03:02L HLA-DPA1*01:03-B1*104:01L HLA-D QA1*05:05-B1*03:01L HLA-DPA1*01:02-B1*04:01L HLA-DRB1*10:01L
  REGION 1..10: note = CONT. FROM ABOVE: HLA-DRB1*16:01L HLA-DQA1*01:03-B1*06:01L HLA-D RB1*08:02L HLA-DQA1*02:01-B1*03:03M HLA-DRB1*15:03L
TTYKLNVGDY

SEQ ID NO: 9535 - protein, 10 aa, Severe acute respiratory syndrome coronavirus 2
  REGION 1..10: note = Table B: HLA-DQA1*03:02-B1*03:03L
KLNVGDYFVL

SEQ ID NO: 9536 - protein, 10 aa, Severe acute respiratory syndrome coronavirus 2
  REGION 1..10: note = Table B: HLA-DQA1*03:02-B1*03:03L HLA-DQA1*05:01-B1*03:01L HLA-DRB1*04:05L HLA-DQA1*01:02-B1*06:02L HLA-DRB1*01:02L HLA-DRB1*08:77L HLA-DPA1*03:01-B1*04:02L HLA-DQA1*01-B1*05L HLA-DQA1*05:05-B1*03:19L HLA-DQA1*05:01-B1*02:01L
  REGION 1..10: note = CONT. FROM ABOVE: HLA-DQA1*05:05-B1*03:116L HLA-DRB1*12:01L HLA- DPA1*02:01-B1*13:01L HLA-DPA1*03:01-B1*105:01L HLA-DQA1*03:01-B1 *03:02L HLA-DPA1*01:03-B1*104:01L HLA-DPA1*01:02-B1*04:01L HLA-D RB1*16:01L HLA-DQA1*01:03-B1*06:01L HLA-DQA1*02:01-B1*03:03L
  REGION 1..10: note = CONT. FROM ABOVE: HLA-DRB1*15:03L
DYFVLTSHTV

SEQ ID NO: 9537 - protein, 10 aa, Severe acute respiratory syndrome coronavirus 2
  REGION 1..10: note = Table B: HLA-DQA1*03:02-B1*03:03L HLA-DRB1*14:01L HLA-DQA1*03:01-B1*03:02L HLA-DQA1*02:01-B1*03:03L
VLTSHTVMPL

SEQ ID NO: 9538 - protein, 12 aa, Severe acute respiratory syndrome coronavirus 2
  REGION 1..12: note = Table B: HLA-DQA1*03:02-B1*03:03L HLA-DQA1*05:01-B1*03:01L HLA-DRB1*04:02L HLA-DQA1*01:02-B1*06:02L HLA-DQA1*01:01-B1*05:01L HLA-DQA1*05:05-B1*03:19L HLA-DQA1*05:01-B1*02:01L HLA-DPA1*03:01-B1*105:01L
  REGION 1..12: note = CONT. FROM ABOVE: HLA-DQA1*05:05-B1*03:01L
TSHTVMPLSAPT

SEQ ID NO: 9539 - protein, 10 aa, Severe acute respiratory syndrome coronavirus 2
  REGION 1..10: note = Table B: HLA-DQA1*03:02-B1*03:03M HLA-DQA1*05:01-B1*03:01L HLA-DRB1*13:03L HLA-DRB1*01:03L HLA-DRB1*04:02L HLA-DQA1*01:02-B1*06:02L HLA-DRB1*01:02L HLA-DRB1*08:77L HLA-DRB3*02:01L HLA-DPA1*03:01-B1*04:02L HLA-DRB1*14:01L
  REGION 1..10: note = CONT. FROM ABOVE: HLA-DRB1*14:02L HLA-DRB1*08:01L HLA-DQA1*05:05 -B1*03:19L HLA-DQA1*05:01-B1*02:01L HLA-DPA1*01:03-B1*04:01L HLA -DQA1*05:05-B1*03:116L HLA-DRB1*09:01L HLA-DPA1*01:03-B1*04:02L HLA-DRB1*12:01L HLA-DPA1*02:01-B1*13:01L
  REGION 1..10: note = CONT. FROM ABOVE: HLA-DPA1*03:01-B1*105:01M HLA-DQA1*03:01-B1*03 :02L HLA-DPA1*01:02-B1*04:01L HLA-DRB1*07:01L HLA-DRB1*10:01L HL A-DRB1*16:01L HLA-DQA1*01:03-B1*06:01L HLA-DRB1*08:03L HLA-DQA1* 02:01-B1*03:03L HLA-DRB1*15:03L
TVMPLSAPTL

SEQ ID NO: 9540 - protein, 13 aa, Severe acute respiratory syndrome coronavirus 2
  REGION 1..13: note = Table B: HLA-DQA1*03:02-B1*03:03L HLA-DQA1*01:02-B1*06:02L HLA-DQA1*05:01-B1*02:01L HLA-DQA1*01:03-B1*06:01L
VMPLSAPTLVPQE

SEQ ID NO: 9541 - protein, 10 aa, Severe acute respiratory syndrome coronavirus 2
  REGION 1..10: note = Table B: HLA-DQA1*03:02-B1*03:03L HLA-DQA1*03:01-B1*03:02L HLA-DQA1*01:03-B1*06:01L HLA-DQA1*02:01-B1*03:03L
SAPTLVPQEH

SEQ ID NO: 9542 - protein, 10 aa, Severe acute respiratory syndrome coronavirus 2
  REGION 1..10: note = Table B: HLA-DQA1*03:02-B1*03:03M HLA-DRB1*11:02L HLA-DQA1*05:05-B1*03:19M HLA-DRB1*09:01L HLA-DQA1*03:01-B1*03:02L HLA-DPA1*01:03-B1*104:01L
QEHYVRITGL

SEQ ID NO: 9543 - protein, 10 aa, Severe acute respiratory syndrome coronavirus 2
  REGION 1..10: note = Table B: HLA-DQA1*03:02-B1*03:03L HLA-DQA1*03:01-B1*03:02L
VRITGLYPTL

SEQ ID NO: 9544 - protein, 12 aa, Severe acute respiratory syndrome coronavirus 2
  REGION 1..12: note = Table B: HLA-DQA1*03:02-B1*03:03L HLA-DQA1*05:01-B1*03:01L HLA-DRB1*04:03L HLA-DQA1*01:02-B1*06:02L HLA-DQA1*05:05-B1*03:19L HLA-DPA1*03:01-B1*105:01L HLA-DQA1*03:01-B1*03:02L HLA-DQA1*05:05-B1*03:01L
  REGION 1..12: note = CONT. FROM ABOVE: HLA-DRB1*14:17L HLA-DQA1*01:03-B1*06:01L HLA-D QA1*02:01-B1*03:03L
ITGLYPTLNISD

SEQ ID NO: 9545 - protein, 11 aa, Severe acute respiratory syndrome coronavirus 2
  REGION 1..11: note = Table B: HLA-DQA1*03:02-B1*03:03L HLA-DRB1*04:02L HLA-DRB4*03:01NL HLA-DQA1*05:01-B1*02:01L HLA-DRB1*04:10L HLA-DRB1*16:01L
GLYPTLNISDE

SEQ ID NO: 9546 - protein, 13 aa, Severe acute respiratory syndrome coronavirus 2
  REGION 1..13: note = Table B: HLA-DQA1*03:02-B1*03:03L HLA-DRB1*04:02L HLA-DRB1*04:05L HLA-DRB4*03:01NL HLA-DRB1*14:01L HLA-DQA1*01-B1*05L HLA-DQA1*05:01-B1*02:01L HLA-DRB1*04:10L HLA-DRB1*12:01L HLA-DQA1*03:01-B1*03:02L HLA-DRB1*14:54L
  REGION 1..13: note = CONT. FROM ABOVE: HLA-DRB1*14:17L HLA-DRB1*16:01L HLA-DQA1*01:03 -B1*06:01L HLA-DQA1*02:01-B1*03:03L
YPTLNISDEFSSN

SEQ ID NO: 9547 - protein, 11 aa, Severe acute respiratory syndrome coronavirus 2
  REGION 1..11: note = Table B: HLA-DQA1*03:02-B1*03:03L HLA-DRB1*04:03L HLA-DQA1*01-B1*05L HLA-DQA1*03:01-B1*03:02L
ISDEFSSNVAN

SEQ ID NO: 9548 - protein, 10 aa, Severe acute respiratory syndrome coronavirus 2
  REGION 1..10: note = Table B: HLA-DQA1*03:02-B1*03:03L HLA-DQA1*05:01-B1*03:01M HLA-DRB1*13:03L HLA-DRB1*01:03L HLA-DRB1*04:02L HLA-DQA1*01:02-B1*06:02L HLA-DRB4*03:01NL HLA-DRB1*08:77M HLA-DPA1*01:03-B1*03:01L HLA-DPA1*03:01-B1*04:02M
  REGION 1..10: note = CONT. FROM ABOVE: HLA-DRB1*03:01M HLA-DRB1*14:01L HLA-DRB1*11:02 L HLA-DRB1*14:02L HLA-DQA1*01-B1*05L HLA-DQA1*05:05-B1*03:19M HL A-DQA1*05:01-B1*02:01L HLA-DRB4*01:01M HLA-DPA1*01:03-B1*04:01M HLA-DQA1*05:05-B1*03:116L HLA-DPA1*01:03-B1*04:02L
  REGION 1..10: note = CONT. FROM ABOVE: HLA-DRB1*12:01L HLA-DPA1*03:01-B1*105:01L HLA- DQA1*03:01-B1*03:02L HLA-DRB1*14:54L HLA-DPA1*01:03-B1*104:01L H LA-DPA1*01:02-B1*04:01L HLA-DRB1*10:01M HLA-DRB1*16:01L HLA-DRB1 *08:02L HLA-DQA1*02:01-B1*03:03L HLA-DRB1*15:03M
DEFSSNVANY

SEQ ID NO: 9549 - protein, 10 aa, Severe acute respiratory syndrome coronavirus 2
  REGION 1..10: note = Table B: HLA-DQA1*03:02-B1*03:03L HLA-DQA1*05:01-B1*03:01L HLA-DRB1*04:01L HLA-DRB1*04:03L HLA-DRB1*13:02M HLA-DRB1*13:03M HLA-DRB1*01:03L HLA-DRB1*04:02L HLA-DRB1*04:04L HLA-DRB1*04:05L HLA-DQA1*01:02-B1*06:02L HLA-DRB1*01:01L HLA-DRB1*01:02L
  REGION 1..10: note = CONT. FROM ABOVE: HLA-DRB4*03:01NM HLA-DRB1*08:04L HLA-DRB1*08:7 7L HLA-DRB3*02:01L HLA-DRB1*14:01L HLA-DRB1*11:03L HLA-DRB1*11:0 4L HLA-DRB1*14:02L HLA-DRB1*08:01L HLA-DRB1*11:01L HLA-DRB5*01:0 1L HLA-DQA1*05:05-B1*03:19L HLA-DQA1*05:01-B1*02:01L
  REGION 1..10: note = CONT. FROM ABOVE: HLA-DPA1*01:03-B1*04:02L HLA-DRB1*12:01M HLA-D RB1*12:02L HLA-DRB3*01:01L HLA-DPA1*03:01-B1*105:01L HLA-DQA1*03 :01-B1*03:02M HLA-DRB1*14:54L HLA-DQA1*05:05-B1*03:01M HLA-DRB1* 14:17L HLA-DPA1*01:02-B1*04:01L HLA-DRB1*10:01L HLA-DRB1*16:01L
  REGION 1..10: note = CONT. FROM ABOVE: HLA-DQA1*01:03-B1*06:01L HLA-DRB1*04:08L HLA-D RB1*08:02L HLA-DRB1*08:03L HLA-DQA1*02:01-B1*03:03L HLA-DRB1*15: 01L
FSSNVANYQK

SEQ ID NO: 9550 - protein, 10 aa, Severe acute respiratory syndrome coronavirus 2
  REGION 1..10: note = Table B: HLA-DQA1*03:02-B1*03:03L HLA-DQA1*05:05-B1*03:19L
SSNVANYQKV

SEQ ID NO: 9551 - protein, 10 aa, Severe acute respiratory syndrome coronavirus 2
  REGION 1..10: note = Table B: HLA-DQA1*03:02-B1*03:03L HLA-DQA1*05:01-B1*03:01L HLA-DRB1*04:03L HLA-DRB1*04:02L HLA-DQA1*01:02-B1*06:02L HLA-DQA1*05:05-B1*03:19L HLA-DQA1*05:01-B1*02:01L HLA-DPA1*03:01-B1*105:01L HLA-DQA1*03:01-B1*03:02L
  REGION 1..10: note = CONT. FROM ABOVE: HLA-DQA1*05:05-B1*03:01L HLA-DRB1*14:17L HLA-D PA1*01:02-B1*04:01L HLA-DQA1*01:03-B1*06:01L HLA-DQA1*02:01-B1*0 3:03L
SNVANYQKVG

SEQ ID NO: 9552 - protein, 10 aa, Severe acute respiratory syndrome coronavirus 2
  REGION 1..10: note = Table B: HLA-DQA1*03:02-B1*03:03L HLA-DQA1*05:01-B1*03:01L HLA-DRB1*13:03L HLA-DQA1*01:02-B1*06:02L HLA-DRB1*01:02L HLA-DRB1*14:01L HLA-DQA1*05:01-B1*02:01L HLA-DRB1*12:01L HLA-DPA1*03:01-B1*105:01L HLA-DQA1*03:01-B1*03:02L
  REGION 1..10: note = CONT. FROM ABOVE: HLA-DQA1*05:05-B1*03:01L HLA-DQA1*01:03-B1*06: 01L HLA-DQA1*02:01-B1*03:03L HLA-DRB1*15:03L
NVANYQKVGM

SEQ ID NO: 9553 - protein, 10 aa, Severe acute respiratory syndrome coronavirus 2
  REGION 1..10: note = Table B: HLA-DQA1*03:02-B1*03:03L HLA-DQA1*05:01-B1*03:01L HLA-DRB1*04:01L HLA-DRB1*04:03L HLA-DRB1*13:02L HLA-DRB1*13:03L HLA-DRB1*01:03M HLA-DRB1*04:05L HLA-DQA1*01:02-B1*06:02M HLA-DRB1*01:01L HLA-DRB4*03:01NL HLA-DRB1*08:77L
  REGION 1..10: note = CONT. FROM ABOVE: HLA-DPA1*01:03-B1*03:01L HLA-DPA1*03:01-B1*04: 02L HLA-DRB1*03:01L HLA-DRB1*14:01L HLA-DRB1*11:02L HLA-DRB1*11: 03L HLA-DRB1*14:02L HLA-DQA1*01:01-B1*05:01L HLA-DRB1*11:01L HLA -DQA1*01-B1*05L HLA-DQA1*05:05-B1*03:19L
  REGION 1..10: note = CONT. FROM ABOVE: HLA-DQA1*05:01-B1*02:01L HLA-DRB4*01:01L HLA-D PA1*01:03-B1*04:01L HLA-DQA1*05:05-B1*03:116L HLA-DPA1*01:03-B1* 04:02L HLA-DRB1*12:01L HLA-DPA1*02:01-B1*13:01M HLA-DPA1*03:01-B 1*105:01L HLA-DQA1*03:01-B1*03:02L HLA-DPA1*01:03-B1*104:01L
  REGION 1..10: note = CONT. FROM ABOVE: HLA-DQA1*05:05-B1*03:01L HLA-DPA1*01:02-B1*04: 01L HLA-DRB1*10:01L HLA-DRB1*16:01L HLA-DQA1*01:03-B1*06:01M HLA -DRB1*08:02L HLA-DQA1*02:01-B1*03:03M HLA-DRB1*15:03L
NYQKVGMQKY

SEQ ID NO: 9554 - protein, 12 aa, Severe acute respiratory syndrome coronavirus 2
  REGION 1..12: note = Table B: HLA-DQA1*03:02-B1*03:03L HLA-DQA1*05:01-B1*03:01L HLA-DRB1*13:02L HLA-DRB1*13:03L HLA-DRB1*01:03L HLA-DRB1*04:02L HLA-DRB1*04:04L HLA-DQA1*01:02-B1*06:02L HLA-DRB1*01:02L HLA-DRB4*03:01NL HLA-DRB1*08:04L HLA-DRB1*14:01L HLA-DRB1*11:03L
  REGION 1..12: note = CONT. FROM ABOVE: HLA-DRB1*11:04L HLA-DRB1*08:01L HLA-DQA1*01-B1 *05L HLA-DQA1*05:01-B1*02:01L HLA-DRB1*04:10L HLA-DRB1*12:01L HL A-DRB1*12:02L HLA-DQA1*03:01-B1*03:02L HLA-DRB1*14:54L HLA-DRB1* 10:01L HLA-DRB1*16:01L HLA-DRB1*04:08L HLA-DRB1*08:03L
  REGION 1..12: note = CONT. FROM ABOVE: HLA-DQA1*02:01-B1*03:03L
MQKYSTLQGPPG

SEQ ID NO: 9555 - protein, 13 aa, Severe acute respiratory syndrome coronavirus 2
  REGION 1..13: note = Table B: HLA-DQA1*03:02-B1*03:03L HLA-DRB1*01:03L HLA-DRB1*01:02L HLA-DQA1*01:01-B1*05:01L HLA-DRB1*08:01L HLA-DRB1*11:01L HLA-DPA1*01:03-B1*04:02L HLA-DQA1*03:01-B1*03:02L HLA-DRB1*04:08L
GPPGTGKSHFAIG

SEQ ID NO: 9556 - protein, 10 aa, Severe acute respiratory syndrome coronavirus 2
  REGION 1..10: note = Table B: HLA-DQA1*03:02-B1*03:03L HLA-DQA1*05:01-B1*03:01L HLA-DRB1*13:03L HLA-DRB1*01:03L HLA-DQA1*01:02-B1*06:02L HLA-DRB1*08:77L HLA-DPA1*01:03-B1*03:01L HLA-DPA1*03:01-B1*04:02L HLA-DRB1*03:01L HLA-DRB1*14:01L
  REGION 1..10: note = CONT. FROM ABOVE: HLA-DRB1*11:02L HLA-DRB1*14:02L HLA-DQA1*01-B1 *05L HLA-DQA1*05:05-B1*03:19L HLA-DQA1*05:01-B1*02:01L HLA-DRB4* 01:01L HLA-DPA1*01:03-B1*04:01L HLA-DQA1*05:05-B1*03:116L HLA-DP A1*01:03-B1*04:02L HLA-DRB1*12:01L HLA-DPA1*02:01-B1*13:01L
  REGION 1..10: note = CONT. FROM ABOVE: HLA-DPA1*03:01-B1*105:01L HLA-DPA1*01:03-B1*10 4:01L HLA-DRB1*10:01L HLA-DRB1*16:01L HLA-DQA1*01:03-B1*06:01L H LA-DRB1*08:02L HLA-DQA1*02:01-B1*03:03L HLA-DRB1*15:03L
SHFAIGLALY

SEQ ID NO: 9557 - protein, 11 aa, Severe acute respiratory syndrome coronavirus 2
  REGION 1..11: note = Table B: HLA-DQA1*03:02-B1*03:03L HLA-DQA1*05:01-B1*03:01L HLA-DRB1*04:03L HLA-DRB1*04:02L HLA-DQA1*01:02-B1*06:02L HLA-DPA1*03:01-B1*105:01L HLA-DRB1*14:17L HLA-DPA1*01:02-B1*04:01L HLA-DQA1*01:03-B1*06:01L
IGLALYYPSAR

SEQ ID NO: 9558 - protein, 10 aa, Severe acute respiratory syndrome coronavirus 2
  REGION 1..10: note = Table B: HLA-DQA1*03:02-B1*03:03L HLA-DQA1*01-B1*05L HLA-DQA1*05:05-B1*03:19L HLA-DQA1*05:01-B1*02:01L HLA-DPA1*03:01-B1*105:01L HLA-DQA1*03:01-B1*03:02L HLA-DRB1*16:01L HLA-DQA1*01:03-B1*06:01L
  REGION 1..10: note = CONT. FROM ABOVE: HLA-DQA1*02:01-B1*03:03L HLA-DRB1*15:03L
ALYYPSARIV

SEQ ID NO: 9559 - protein, 10 aa, Severe acute respiratory syndrome coronavirus 2
  REGION 1..10: note = Table B: HLA-DQA1*03:02-B1*03:03L HLA-DQA1*05:01-B1*03:01L HLA-DRB1*04:03L HLA-DRB1*13:02L HLA-DRB1*13:03L HLA-DRB1*01:03L HLA-DRB1*04:05L HLA-DQA1*01:02-B1*06:02M HLA-DRB1*01:01L HLA-DRB1*01:02L HLA-DRB1*08:77L HLA-DPA1*01:03-B1*03:01L
  REGION 1..10: note = CONT. FROM ABOVE: HLA-DPA1*03:01-B1*04:02L HLA-DRB1*03:01L HLA-D RB1*14:01L HLA-DRB1*11:02L HLA-DRB1*11:03L HLA-DRB1*14:02L HLA-D QA1*01:01-B1*05:01L HLA-DRB1*11:01L HLA-DQA1*01-B1*05L HLA-DQA1* 05:05-B1*03:19L HLA-DQA1*05:01-B1*02:01L HLA-DRB4*01:01L
  REGION 1..10: note = CONT. FROM ABOVE: HLA-DPA1*01:03-B1*04:01L HLA-DQA1*05:05-B1*03: 116L HLA-DPA1*01:03-B1*04:02L HLA-DRB1*12:01L HLA-DPA1*02:01-B1* 13:01M HLA-DPA1*03:01-B1*105:01L HLA-DQA1*03:01-B1*03:02L HLA-DP A1*01:03-B1*104:01L HLA-DQA1*05:05-B1*03:01L
  REGION 1..10: note = CONT. FROM ABOVE: HLA-DPA1*01:02-B1*04:01L HLA-DRB1*10:01L HLA-D RB1*16:01L HLA-DQA1*01:03-B1*06:01M HLA-DRB1*08:02L HLA-DRB1*08: 03L HLA-DQA1*02:01-B1*03:03L HLA-DRB1*15:03L
LYYPSARIVY

SEQ ID NO: 9560 - protein, 12 aa, Severe acute respiratory syndrome coronavirus 2
  REGION 1..12: note = Table B: HLA-DQA1*03:02-B1*03:03L HLA-DRB1*13:02L HLA-DRB1*13:03L HLA-DRB1*01:03L HLA-DRB1*04:02L HLA-DRB1*04:04L HLA-DRB1*04:05L HLA-DRB1*01:02L HLA-DRB1*08:04L HLA-DRB3*02:01L HLA-DPA1*01:03-B1*03:01L HLA-DPA1*03:01-B1*04:02L
  REGION 1..12: note = CONT. FROM ABOVE: HLA-DRB1*14:01L HLA-DRB1*11:04L HLA-DRB1*14:02 L HLA-DRB1*08:01L HLA-DRB1*11:01L HLA-DQA1*05:01-B1*02:01L HLA-D PA1*01:03-B1*04:01L HLA-DQA1*05:05-B1*03:116L HLA-DRB1*09:01L HL A-DPA1*01:03-B1*04:02L HLA-DRB1*12:01L HLA-DPA1*02:01-B1*13:01L
  REGION 1..12: note = CONT. FROM ABOVE: HLA-DQA1*03:01-B1*03:02L HLA-DPA1*01:03-B1*02: 01L HLA-DPA1*01:03-B1*104:01L HLA-DRB1*14:17L HLA-DPA1*01:02-B1* 04:01L HLA-DRB1*10:01L HLA-DRB1*16:01L HLA-DRB1*04:08L HLA-DRB1* 08:03L HLA-DRB1*15:03L
IVYTACSHAAVD

SEQ ID NO: 9561 - protein, 12 aa, Severe acute respiratory syndrome coronavirus 2
  REGION 1..12: note = Table B: HLA-DQA1*03:02-B1*03:03L HLA-DRB1*08:04L HLA-DRB1*08:01L HLA-DQA1*03:01-B1*03:02L
VYTACSHAAVDA

SEQ ID NO: 9562 - protein, 11 aa, Severe acute respiratory syndrome coronavirus 2
  REGION 1..11: note = Table B: HLA-DQA1*03:02-B1*03:03L HLA-DRB1*04:03L HLA-DRB1*13:02L HLA-DRB1*13:03L HLA-DRB1*01:03L HLA-DRB1*04:02L HLA-DRB1*04:05L HLA-DRB1*01:02L HLA-DRB4*03:01NL HLA-DRB1*08:04L HLA-DRB1*14:01L HLA-DRB1*11:04L HLA-DRB1*08:01L
  REGION 1..11: note = CONT. FROM ABOVE: HLA-DQA1*01-B1*05L HLA-DRB1*04:10L HLA-DRB1*12 :01L HLA-DQA1*03:01-B1*03:02L HLA-DRB1*14:54L HLA-DRB1*14:17L HL A-DPA1*01:02-B1*04:01L HLA-DRB1*16:01L HLA-DRB1*04:08L HLA-DRB1* 08:03L HLA-DQA1*02:01-B1*03:03L
DKFKVNSTLEQ

SEQ ID NO: 9563 - protein, 10 aa, Severe acute respiratory syndrome coronavirus 2
  REGION 1..10: note = Table B: HLA-DQA1*03:02-B1*03:03L HLA-DQA1*05:01-B1*03:01L HLA-DRB1*04:03L HLA-DRB1*13:02L HLA-DRB1*13:03L HLA-DRB1*01:03L HLA-DQA1*01:02-B1*06:02L HLA-DRB4*03:01NL HLA-DRB1*08:77L HLA-DPA1*01:03-B1*03:01L HLA-DPA1*03:01-B1*04:02L
  REGION 1..10: note = CONT. FROM ABOVE: HLA-DRB1*03:01L HLA-DRB1*14:01L HLA-DRB1*11:02 L HLA-DRB1*14:02L HLA-DRB1*11:01L HLA-DQA1*01-B1*05L HLA-DQA1*05 :05-B1*03:19M HLA-DQA1*05:01-B1*02:01L HLA-DRB4*01:01L HLA-DPA1* 01:03-B1*04:01L HLA-DQA1*05:05-B1*03:116L
  REGION 1..10: note = CONT. FROM ABOVE: HLA-DPA1*01:03-B1*04:02L HLA-DRB1*12:01L HLA-D PA1*02:01-B1*13:01L HLA-DPA1*03:01-B1*105:01L HLA-DPA1*01:03-B1* 104:01L HLA-DQA1*05:05-B1*03:01L HLA-DPA1*01:02-B1*04:01L HLA-DR B1*10:01L HLA-DRB1*16:01L HLA-DQA1*01:03-B1*06:01L
  REGION 1..10: note = CONT. FROM ABOVE: HLA-DRB1*08:02L HLA-DQA1*02:01-B1*03:03L HLA-D RB1*15:03L
FKVNSTLEQY

SEQ ID NO: 9564 - protein, 10 aa, Severe acute respiratory syndrome coronavirus 2
  REGION 1..10: note = Table B: HLA-DQA1*03:02-B1*03:03L HLA-DQA1*01:02-B1*06:02L HLA-DRB1*01:02L HLA-DQA1*05:05-B1*03:19L HLA-DQA1*05:01-B1*02:01L HLA-DPA1*03:01-B1*105:01L HLA-DQA1*03:01-B1*03:02L HLA-DQA1*02:01-B1*03:03L
  REGION 1..10: note = CONT. FROM ABOVE: HLA-DRB1*15:03L
KVNSTLEQYV

SEQ ID NO: 9565 - protein, 10 aa, Severe acute respiratory syndrome coronavirus 2
  REGION 1..10: note = Table B: HLA-DQA1*03:02-B1*03:03L HLA-DQA1*05:01-B1*03:01L HLA-DQA1*01:02-B1*06:02L HLA-DQA1*05:05-B1*03:19L HLA-DQA1*05:01-B1*02:01L HLA-DPA1*03:01-B1*105:01L HLA-DQA1*01:03-B1*06:01L HLA-DQA1*02:01-B1*03:03L
  REGION 1..10: note = CONT. FROM ABOVE: HLA-DRB1*15:03L
VNSTLEQYVF

SEQ ID NO: 9566 - protein, 13 aa, Severe acute respiratory syndrome coronavirus 2
  REGION 1..13: note = Table B: HLA-DQA1*03:02-B1*03:03L HLA-DQA1*05:01-B1*03:01L HLA-DRB1*13:02L HLA-DRB1*13:03L HLA-DRB1*01:03L HLA-DRB1*04:02L HLA-DRB1*04:04L HLA-DRB1*04:05L HLA-DRB1*01:02L HLA-DRB4*03:01NL HLA-DRB1*08:04L HLA-DRB1*08:77L HLA-DPA1*03:01-B1*04:02L
  REGION 1..13: note = CONT. FROM ABOVE: HLA-DRB1*14:01L HLA-DQA1*01-B1*05L HLA-DQA1*05 :05-B1*03:19L HLA-DQA1*05:01-B1*02:01L HLA-DRB1*04:10L HLA-DPA1* 01:03-B1*04:02L HLA-DRB1*12:01L HLA-DRB1*12:02L HLA-DQA1*03:01-B 1*03:02L HLA-DRB1*14:54L HLA-DQA1*05:05-B1*03:01L
  REGION 1..13: note = CONT. FROM ABOVE: HLA-DRB1*14:17L HLA-DPA1*01:02-B1*04:01L HLA-D RB1*10:01L HLA-DRB1*16:01L HLA-DRB1*04:08L HLA-DQA1*02:01-B1*03: 03L HLA-DRB1*15:03L
EQYVFCTVNALPE

SEQ ID NO: 9567 - protein, 13 aa, Severe acute respiratory syndrome coronavirus 2
  REGION 1..13: note = Table B: HLA-DQA1*03:02-B1*03:03L HLA-DQA1*05:01-B1*03:01L HLA-DQA1*05:05-B1*03:19L HLA-DQA1*05:01-B1*02:01L HLA-DQA1*03:01-B1*03:02L HLA-DQA1*02:01-B1*03:03L
YVFCTVNALPETT

SEQ ID NO: 9568 - protein, 10 aa, Severe acute respiratory syndrome coronavirus 2
  REGION 1..10: note = Table B: HLA-DQA1*03:02-B1*03:03L
TVNALPETTA

SEQ ID NO: 9569 - protein, 12 aa, Severe acute respiratory syndrome coronavirus 2
  REGION 1..12: note = Table B: HLA-DQA1*03:02-B1*03:03L HLA-DQA1*05:01-B1*03:01L HLA-DRB1*04:03L HLA-DQA1*01:02-B1*06:02L HLA-DQA1*01-B1*05L HLA-DQA1*05:05-B1*03:19L HLA-DQA1*05:01-B1*02:01L HLA-DQA1*05:05-B1*03:01L HLA-DRB1*16:01L
  REGION 1..12: note = CONT. FROM ABOVE: HLA-DQA1*01:03-B1*06:01L HLA-DQA1*02:01-B1*03: 03L
VNALPETTADIV

SEQ ID NO: 9570 - protein, 12 aa, Severe acute respiratory syndrome coronavirus 2
  REGION 1..12: note = Table B: HLA-DQA1*03:02-B1*03:03L HLA-DQA1*03:01-B1*03:02L HLA-DQA1*01:03-B1*06:01L
ALPETTADIVVF

SEQ ID NO: 9571 - protein, 12 aa, Severe acute respiratory syndrome coronavirus 2
  REGION 1..12: note = Table B: HLA-DQA1*03:02-B1*03:03L HLA-DQA1*03:01-B1*03:02L HLA-DQA1*02:01-B1*03:03L
LPETTADIVVFD

SEQ ID NO: 9572 - protein, 11 aa, Severe acute respiratory syndrome coronavirus 2
  REGION 1..11: note = Table B: HLA-DQA1*03:02-B1*03:03L HLA-DQA1*01:02-B1*06:02L HLA-DPA1*03:01-B1*105:01L HLA-DPA1*01:03-B1*104:01L
TTADIVVFDEI

SEQ ID NO: 9573 - protein, 11 aa, Severe acute respiratory syndrome coronavirus 2
  REGION 1..11: note = Table B: HLA-DQA1*03:02-B1*03:03L HLA-DRB1*04:03L HLA-DRB1*12:01L HLA-DRB1*16:01L
ADIVVFDEISM

SEQ ID NO: 9574 - protein, 12 aa, Severe acute respiratory syndrome coronavirus 2
  REGION 1..12: note = Table B: HLA-DQA1*03:02-B1*03:03L HLA-DQA1*05:01-B1*03:01L HLA-DRB1*13:02L HLA-DRB1*13:03L HLA-DRB1*01:03L HLA-DRB1*04:04L HLA-DRB1*04:05L HLA-DQA1*01:02-B1*06:02L HLA-DRB1*01:02L HLA-DRB4*03:01NL HLA-DRB1*08:04L HLA-DRB1*08:77L HLA-DRB3*02:01L
  REGION 1..12: note = CONT. FROM ABOVE: HLA-DPA1*01:03-B1*03:01L HLA-DPA1*03:01-B1*04: 02L HLA-DRB1*14:01L HLA-DRB1*11:03L HLA-DRB1*14:02L HLA-DQA1*05: 05-B1*03:19L HLA-DRB4*01:01L HLA-DRB1*04:10L HLA-DRB1*09:01L HLA -DPA1*01:03-B1*04:02L HLA-DRB1*12:01L HLA-DRB1*12:02L
  REGION 1..12: note = CONT. FROM ABOVE: HLA-DPA1*02:01-B1*13:01L HLA-DPA1*03:01-B1*105 :01L HLA-DRB1*14:54L HLA-DPA1*01:03-B1*104:01L HLA-DQA1*05:05-B1 *03:01L HLA-DPA1*01:02-B1*04:01L HLA-DRB1*10:01L HLA-DRB1*16:01L HLA-DQA1*01:03-B1*06:01L HLA-DRB1*04:08L HLA-DRB1*08:03L
  REGION 1..12: note = CONT. FROM ABOVE: HLA-DRB1*15:01L
IVVFDEISMATN

SEQ ID NO: 9575 - protein, 12 aa, Severe acute respiratory syndrome coronavirus 2
  REGION 1..12: note = Table B: HLA-DQA1*03:02-B1*03:03L HLA-DQA1*05:01-B1*03:01L HLA-DPA1*03:01-B1*04:02L HLA-DRB1*14:02L HLA-DPA1*01:03-B1*04:02L HLA-DRB1*12:01L HLA-DPA1*02:01-B1*13:01L HLA-DPA1*03:01-B1*105:01L
  REGION 1..12: note = CONT. FROM ABOVE: HLA-DRB1*15:03L
VVFDEISMATNY

SEQ ID NO: 9576 - protein, 12 aa, Severe acute respiratory syndrome coronavirus 2
  REGION 1..12: note = Table B: HLA-DQA1*03:02-B1*03:03L HLA-DPA1*03:01-B1*105:01L HLA-DQA1*02:01-B1*03:03L
VFDEISMATNYD

SEQ ID NO: 9577 - protein, 11 aa, Severe acute respiratory syndrome coronavirus 2
  REGION 1..11: note = Table B: HLA-DQA1*03:02-B1*03:03L HLA-DRB1*04:03L HLA-DRB1*04:02L HLA-DQA1*01-B1*05L HLA-DQA1*05:05-B1*03:19L HLA-DQA1*05:01-B1*02:01L HLA-DRB1*12:01L HLA-DQA1*03:01-B1*03:02L HLA-DRB1*14:17L HLA-DRB1*16:01L
  REGION 1..11: note = CONT. FROM ABOVE: HLA-DQA1*02:01-B1*03:03L HLA-DRB1*15:03L
DEISMATNYDL

SEQ ID NO: 9578 - protein, 13 aa, Severe acute respiratory syndrome coronavirus 2
  REGION 1..13: note = Table B: HLA-DQA1*03:02-B1*03:03L HLA-DRB1*04:02L HLA-DRB1*04:05L HLA-DQA1*01:02-B1*06:02L HLA-DRB1*01:02L HLA-DRB1*14:01L HLA-DQA1*05:05-B1*03:19L HLA-DRB1*12:01L HLA-DPA1*03:01-B1*105:01L HLA-DQA1*05:05-B1*03:01L
  REGION 1..13: note = CONT. FROM ABOVE: HLA-DRB1*16:01L HLA-DQA1*01:03-B1*06:01L HLA-D QA1*02:01-B1*03:03L
ISMATNYDLSVVN

SEQ ID NO: 9579 - protein, 12 aa, Severe acute respiratory syndrome coronavirus 2
  REGION 1..12: note = Table B: HLA-DQA1*03:02-B1*03:03L HLA-DQA1*05:01-B1*03:01L HLA-DRB1*04:05L HLA-DQA1*01:02-B1*06:02L HLA-DQA1*01:01-B1*05:01L HLA-DQA1*01-B1*05L HLA-DQA1*05:05-B1*03:19L HLA-DQA1*05:01-B1*02:01L
  REGION 1..12: note = CONT. FROM ABOVE: HLA-DRB1*04:10L HLA-DPA1*03:01-B1*105:01L HLA- DRB1*14:54L HLA-DRB1*04:08L
ATNYDLSVVNAR

SEQ ID NO: 9580 - protein, 10 aa, Severe acute respiratory syndrome coronavirus 2
  REGION 1..10: note = Table B: HLA-DQA1*03:02-B1*03:03L HLA-DQA1*05:01-B1*03:01L HLA-DRB1*04:03L HLA-DQA1*01-B1*05L HLA-DQA1*05:05-B1*03:19L HLA-DQA1*05:01-B1*02:01L HLA-DQA1*03:01-B1*03:02L HLA-DPA1*01:02-B1*04:01L HLA-DRB1*16:01L
  REGION 1..10: note = CONT. FROM ABOVE: HLA-DQA1*01:03-B1*06:01L HLA-DQA1*02:01-B1*03: 03L
YDLSVVNARL

SEQ ID NO: 9581 - protein, 10 aa, Severe acute respiratory syndrome coronavirus 2
  REGION 1..10: note = Table B: HLA-DQA1*03:02-B1*03:03L HLA-DRB1*04:03L HLA-DRB1*13:03L HLA-DRB1*01:03L HLA-DRB1*04:02L HLA-DRB1*04:05L HLA-DRB4*03:01NL HLA-DQA1*01-B1*05L HLA-DQA1*05:01-B1*02:01L HLA-DRB1*04:10L HLA-DRB1*12:01L HLA-DQA1*03:01-B1*03:02L
  REGION 1..10: note = CONT. FROM ABOVE: HLA-DRB1*14:54L HLA-DRB1*14:17L HLA-DRB1*16:01 L HLA-DRB1*04:08L HLA-DQA1*02:01-B1*03:03L
HYVYIGDPAQ

SEQ ID NO: 9582 - protein, 10 aa, Severe acute respiratory syndrome coronavirus 2
  REGION 1..10: note = Table B: HLA-DQA1*03:02-B1*03:03L HLA-DQA1*03:01-B1*03:02L
YVYIGDPAQL

SEQ ID NO: 9583 - protein, 12 aa, Severe acute respiratory syndrome coronavirus 2
  REGION 1..12: note = Table B: HLA-DQA1*03:02-B1*03:03L HLA-DQA1*05:01-B1*03:01L HLA-DRB1*04:03L HLA-DRB1*13:03L HLA-DRB1*01:03L HLA-DRB1*04:02L HLA-DRB1*04:05L HLA-DRB4*03:01NL HLA-DQA1*01-B1*05L HLA-DQA1*05:05-B1*03:19L HLA-DQA1*05:01-B1*02:01L
  REGION 1..12: note = CONT. FROM ABOVE: HLA-DRB1*12:01L HLA-DPA1*03:01-B1*105:01L HLA- DQA1*03:01-B1*03:02L HLA-DRB1*14:54L HLA-DQA1*05:05-B1*03:01L HL A-DRB1*14:17L HLA-DRB1*16:01L HLA-DRB1*04:08L HLA-DQA1*02:01-B1* 03:03L HLA-DRB1*15:03L
VYIGDPAQLPAP

SEQ ID NO: 9584 - protein, 10 aa, Severe acute respiratory syndrome coronavirus 2
  REGION 1..10: note = Table B: HLA-DQA1*03:02-B1*03:03L HLA-DRB1*13:03L HLA-DRB1*04:02L HLA-DQA1*01-B1*05L HLA-DQA1*03:01-B1*03:02L HLA-DRB1*14:17L HLA-DQA1*02:01-B1*03:03L
GDPAQLPAPR

SEQ ID NO: 9585 - protein, 10 aa, Severe acute respiratory syndrome coronavirus 2
  REGION 1..10: note = Table B: HLA-DQA1*03:02-B1*03:03L HLA-DQA1*05:01-B1*03:01L HLA-DRB1*04:03L HLA-DRB1*13:03L HLA-DRB1*01:03L HLA-DRB1*04:02L HLA-DRB1*04:05L HLA-DRB4*03:01NL HLA-DQA1*01-B1*05L HLA-DQA1*05:01-B1*02:01L HLA-DQA1*03:01-B1*03:02L
  REGION 1..10: note = CONT. FROM ABOVE: HLA-DQA1*05:05-B1*03:01L HLA-DRB1*16:01L HLA-D QA1*01:03-B1*06:01L HLA-DQA1*02:01-B1*03:03L
DPAQLPAPRT

SEQ ID NO: 9586 - protein, 10 aa, Severe acute respiratory syndrome coronavirus 2
  REGION 1..10: note = Table B: HLA-DQA1*03:02-B1*03:03L HLA-DQA1*05:01-B1*03:01L HLA-DQA1*03:01-B1*03:02L HLA-DQA1*01:03-B1*06:01L HLA-DQA1*02:01-B1*03:03L
PAQLPAPRTL

SEQ ID NO: 9587 - protein, 16 aa, Severe acute respiratory syndrome coronavirus 2
  REGION 1..16: note = Table B: HLA-DQA1*03:02-B1*03:03L HLA-DQA1*05:01-B1*03:01L HLA-DRB1*13:02L HLA-DRB1*01:03L HLA-DRB1*01:02L HLA-DRB1*08:04L HLA-DRB1*14:01L HLA-DRB1*11:04L HLA-DQA1*01:01-B1*05:01L HLA-DRB1*11:01L HLA-DRB1*12:01L HLA-DRB3*01:01L
  REGION 1..16: note = CONT. FROM ABOVE: HLA-DPA1*02:01-B1*13:01L HLA-DPA1*03:01-B1*105 :01L HLA-DQA1*05:05-B1*03:01L HLA-DPA1*01:02-B1*04:01L HLA-DRB1* 16:01L HLA-DQA1*01:03-B1*06:01L HLA-DRB1*08:03L HLA-DRB1*15:03L
LPAPRTLLTKGTLEPE

SEQ ID NO: 9588 - protein, 10 aa, Severe acute respiratory syndrome coronavirus 2
  REGION 1..10: note = Table B: HLA-DQA1*03:02-B1*03:03L HLA-DQA1*05:01-B1*03:01L HLA-DRB1*04:03L HLA-DRB1*13:02L HLA-DRB1*13:03L HLA-DRB1*01:03L HLA-DRB1*04:05L HLA-DQA1*01:02-B1*06:02M HLA-DRB4*03:01NL HLA-DRB1*08:77L HLA-DPA1*01:03-B1*03:01L
  REGION 1..10: note = CONT. FROM ABOVE: HLA-DPA1*03:01-B1*04:02L HLA-DRB1*03:01L HLA-D RB1*14:01L HLA-DRB1*11:02L HLA-DRB1*14:02L HLA-DRB1*11:01L HLA-D QA1*01-B1*05L HLA-DQA1*05:05-B1*03:19M HLA-DQA1*05:01-B1*02:01M HLA-DRB4*01:01L HLA-DPA1*01:03-B1*04:01L
  REGION 1..10: note = CONT. FROM ABOVE: HLA-DQA1*05:05-B1*03:116L HLA-DPA1*01:03-B1*04 :02L HLA-DRB1*12:01L HLA-DPA1*02:01-B1*13:01L HLA-DPA1*03:01-B1* 105:01L HLA-DQA1*03:01-B1*03:02L HLA-DPA1*01:03-B1*104:01L HLA-D QA1*05:05-B1*03:01L HLA-DPA1*01:02-B1*04:01L HLA-DRB1*10:01L
  REGION 1..10: note = CONT. FROM ABOVE: HLA-DRB1*16:01M HLA-DQA1*01:03-B1*06:01L HLA-D RB1*08:02L HLA-DQA1*02:01-B1*03:03L HLA-DRB1*15:03L
LTKGTLEPEY

SEQ ID NO: 9589 - protein, 10 aa, Severe acute respiratory syndrome coronavirus 2
  REGION 1..10: note = Table B: HLA-DQA1*03:02-B1*03:03L HLA-DQA1*01:02-B1*06:02L HLA-DRB1*01:02L HLA-DPA1*03:01-B1*04:02L HLA-DRB1*11:02L HLA-DQA1*05:05-B1*03:19M HLA-DQA1*05:01-B1*02:01L HLA-DPA1*01:03-B1*04:01L HLA-DPA1*01:03-B1*04:02L
  REGION 1..10: note = CONT. FROM ABOVE: HLA-DPA1*02:01-B1*13:01L HLA-DPA1*03:01-B1*105 :01L HLA-DQA1*03:01-B1*03:02L HLA-DPA1*01:03-B1*104:01L HLA-DPA1 *01:02-B1*04:01L HLA-DRB1*16:01L HLA-DQA1*01:03-B1*06:01L HLA-DQ A1*02:01-B1*03:03L HLA-DRB1*15:03L
TLEPEYFNSV

SEQ ID NO: 9590 - protein, 10 aa, Severe acute respiratory syndrome coronavirus 2
  REGION 1..10: note = Table B: HLA-DQA1*03:02-B1*03:03L HLA-DQA1*05:01-B1*03:01L HLA-DRB1*13:02L HLA-DRB1*12:01L HLA-DQA1*03:01-B1*03:02L HLA-DRB1*16:01L HLA-DQA1*02:01-B1*03:03L HLA-DRB1*15:03L
RLMKTIGPDM

SEQ ID NO: 9591 - protein, 10 aa, Severe acute respiratory syndrome coronavirus 2
  REGION 1..10: note = Table B: HLA-DQA1*03:02-B1*03:03L HLA-DQA1*05:01-B1*03:01L HLA-DQA1*01:02-B1*06:02L HLA-DPA1*03:01-B1*04:02L HLA-DQA1*01-B1*05L HLA-DQA1*05:05-B1*03:19L HLA-DQA1*05:01-B1*02:01L HLA-DRB1*12:01L
  REGION 1..10: note = CONT. FROM ABOVE: HLA-DPA1*02:01-B1*13:01L HLA-DPA1*03:01-B1*105 :01L HLA-DRB1*16:01L HLA-DQA1*01:03-B1*06:01L HLA-DQA1*02:01-B1* 03:03L HLA-DRB1*15:03L
LMKTIGPDMF

SEQ ID NO: 9592 - protein, 10 aa, Severe acute respiratory syndrome coronavirus 2
  REGION 1..10: note = Table B: HLA-DQA1*03:02-B1*03:03H HLA-DQA1*05:01-B1*03:01L HLA-DRB1*13:03L HLA-DRB1*08:77L HLA-DRB1*11:02L HLA-DQA1*05:05-B1*03:19M HLA-DQA1*05:05-B1*03:116L HLA-DRB1*09:01M HLA-DPA1*01:03-B1*04:02L
  REGION 1..10: note = CONT. FROM ABOVE: HLA-DQA1*03:01-B1*03:02M HLA-DPA1*01:03-B1*104 :01L
AEIVDTVSAL

SEQ ID NO: 9593 - protein, 11 aa, Severe acute respiratory syndrome coronavirus 2
  REGION 1..11: note = Table B: HLA-DQA1*03:02-B1*03:03L HLA-DRB1*04:02L HLA-DRB1*14:01L HLA-DQA1*03:01-B1*03:02L HLA-DRB1*14:54L HLA-DRB1*14:17L HLA-DQA1*02:01-B1*03:03L
IVDTVSALVYD

SEQ ID NO: 9594 - protein, 11 aa, Severe acute respiratory syndrome coronavirus 2
  REGION 1..11: note = Table B: HLA-DQA1*03:02-B1*03:03L HLA-DRB1*04:03L HLA-DQA1*05:01-B1*02:01L HLA-DQA1*03:01-B1*03:02L HLA-DQA1*02:01-B1*03:03L
VDTVSALVYDN

SEQ ID NO: 9595 - protein, 11 aa, Severe acute respiratory syndrome coronavirus 2
  REGION 1..11: note = Table B: HLA-DQA1*03:02-B1*03:03L HLA-DQA1*01:01-B1*05:01L HLA-DQA1*05:05-B1*03:19L HLA-DQA1*05:01-B1*02:01L
DTVSALVYDNK

SEQ ID NO: 9596 - protein, 10 aa, Severe acute respiratory syndrome coronavirus 2
  REGION 1..10: note = Table B: HLA-DQA1*03:02-B1*03:03L HLA-DQA1*03:01-B1*03:02L HLA-DQA1*01:03-B1*06:01L HLA-DQA1*02:01-B1*03:03L
VSALVYDNKL

SEQ ID NO: 9597 - protein, 11 aa, Severe acute respiratory syndrome coronavirus 2
  REGION 1..11: note = Table B: HLA-DQA1*03:02-B1*03:03L HLA-DQA1*05:01-B1*03:01L HLA-DRB1*04:03L HLA-DRB1*01:03L HLA-DRB1*04:02L HLA-DQA1*01:02-B1*06:02L HLA-DRB1*01:02L HLA-DQA1*01-B1*05L HLA-DPA1*03:01-B1*105:01L HLA-DQA1*05:05-B1*03:01L
  REGION 1..11: note = CONT. FROM ABOVE: HLA-DRB1*16:01L HLA-DRB1*04:08L
FYKGVITHDVS

SEQ ID NO: 9598 - protein, 10 aa, Severe acute respiratory syndrome coronavirus 2
  REGION 1..10: note = Table B: HLA-DQA1*03:02-B1*03:03L HLA-DRB1*04:03L HLA-DRB1*13:03L HLA-DRB1*04:02L HLA-DQA1*01-B1*05L HLA-DQA1*03:01-B1*03:02L HLA-DRB1*16:01L HLA-DQA1*02:01-B1*03:03L
GVITHDVSSA

SEQ ID NO: 9599 - protein, 11 aa, Severe acute respiratory syndrome coronavirus 2
  REGION 1..11: note = Table B: HLA-DQA1*03:02-B1*03:03L HLA-DQA1*05:01-B1*03:01L HLA-DRB1*04:03L HLA-DRB1*13:02L HLA-DRB1*13:03L HLA-DRB1*01:03L HLA-DRB1*04:02L HLA-DRB1*04:05L HLA-DRB1*01:02L HLA-DRB4*03:01NL HLA-DRB1*08:04L HLA-DRB1*08:77L HLA-DRB3*02:01L
  REGION 1..11: note = CONT. FROM ABOVE: HLA-DPA1*01:03-B1*03:01L HLA-DPA1*03:01-B1*04: 02L HLA-DRB1*14:01L HLA-DRB1*11:03L HLA-DRB1*11:04L HLA-DRB1*14: 02L HLA-DQA1*01-B1*05L HLA-DQA1*05:01-B1*02:01L HLA-DRB1*04:10L HLA-DRB1*12:01L HLA-DRB1*12:02L HLA-DRB3*01:01L
  REGION 1..11: note = CONT. FROM ABOVE: HLA-DPA1*03:01-B1*105:01L HLA-DQA1*03:01-B1*03 :02L HLA-DRB1*14:54L HLA-DQA1*05:05-B1*03:01L HLA-DRB1*14:17L HL A-DPA1*01:02-B1*04:01L HLA-DRB1*16:01L HLA-DQA1*01:03-B1*06:01L HLA-DRB1*04:08L HLA-DQA1*02:01-B1*03:03L HLA-DRB1*15:03L
VITHDVSSAIN

SEQ ID NO: 9600 - protein, 10 aa, Severe acute respiratory syndrome coronavirus 2
  REGION 1..10: note = Table B: HLA-DQA1*03:02-B1*03:03L HLA-DQA1*05:01-B1*03:01L HLA-DRB1*04:03L HLA-DRB1*13:02L HLA-DRB1*13:03L HLA-DRB1*01:03L HLA-DRB1*04:02L HLA-DRB1*04:04L HLA-DRB1*04:05L HLA-DQA1*01:02-B1*06:02L HLA-DRB1*01:01L HLA-DRB1*01:02L
  REGION 1..10: note = CONT. FROM ABOVE: HLA-DRB4*03:01NL HLA-DRB1*08:77L HLA-DRB3*02:0 1L HLA-DPA1*01:03-B1*03:01L HLA-DRB1*14:01L HLA-DRB1*11:03L HLA- DRB1*11:04L HLA-DRB1*14:02L HLA-DQA1*01:01-B1*05:01L HLA-DRB1*08 :01L HLA-DRB1*11:01L HLA-DRB5*01:01L HLA-DQA1*01-B1*05L
  REGION 1..10: note = CONT. FROM ABOVE: HLA-DQA1*05:05-B1*03:19L HLA-DQA1*05:01-B1*02: 01L HLA-DRB1*04:10L HLA-DPA1*01:03-B1*04:02L HLA-DRB1*12:01L HLA -DRB1*12:02L HLA-DPA1*03:01-B1*105:01L HLA-DQA1*03:01-B1*03:02L HLA-DRB1*14:54L HLA-DQA1*05:05-B1*03:01L HLA-DRB1*14:17L
  REGION 1..10: note = CONT. FROM ABOVE: HLA-DPA1*01:02-B1*04:01L HLA-DRB1*10:01L HLA-D RB1*16:01L HLA-DQA1*01:03-B1*06:01L HLA-DRB1*04:08L HLA-DRB1*08: 03L HLA-DQA1*02:01-B1*03:03L HLA-DRB1*15:03L
DVSSAINRPQ

SEQ ID NO: 9601 - protein, 10 aa, Severe acute respiratory syndrome coronavirus 2
  REGION 1..10: note = Table B: HLA-DQA1*03:02-B1*03:03L HLA-DQA1*01:02-B1*06:02L HLA-DQA1*05:05-B1*03:19L HLA-DQA1*05:01-B1*02:01L HLA-DPA1*03:01-B1*105:01L HLA-DQA1*03:01-B1*03:02L HLA-DQA1*01:03-B1*06:01L HLA-DQA1*02:01-B1*03:03L
VSSAINRPQI

SEQ ID NO: 9602 - protein, 10 aa, Severe acute respiratory syndrome coronavirus 2
  REGION 1..10: note = Table B: HLA-DQA1*03:02-B1*03:03L HLA-DQA1*05:01-B1*03:01L HLA-DQA1*01:02-B1*06:02L HLA-DQA1*05:05-B1*03:19L HLA-DQA1*03:01-B1*03:02L HLA-DQA1*05:05-B1*03:01L HLA-DQA1*01:03-B1*06:01L HLA-DQA1*02:01-B1*03:03L
SSAINRPQIG

SEQ ID NO: 9603 - protein, 10 aa, Severe acute respiratory syndrome coronavirus 2
  REGION 1..10: note = Table B: HLA-DQA1*03:02-B1*03:03M HLA-DQA1*05:01-B1*03:01L HLA-DRB1*13:03L HLA-DQA1*01:02-B1*06:02L HLA-DRB1*01:02L HLA-DPA1*03:01-B1*04:02L HLA-DRB1*14:01L HLA-DRB1*14:02L HLA-DQA1*05:05-B1*03:19L HLA-DQA1*05:01-B1*02:01L
  REGION 1..10: note = CONT. FROM ABOVE: HLA-DPA1*01:03-B1*04:01L HLA-DQA1*05:05-B1*03: 116L HLA-DRB1*09:01L HLA-DPA1*02:01-B1*13:01L HLA-DPA1*03:01-B1* 105:01L HLA-DQA1*03:01-B1*03:02L HLA-DPA1*01:03-B1*104:01L HLA-D PA1*01:02-B1*04:01L HLA-DRB1*10:01L HLA-DRB1*16:01L
  REGION 1..10: note = CONT. FROM ABOVE: HLA-DQA1*01:03-B1*06:01L HLA-DRB1*08:03L HLA-D QA1*02:01-B1*03:03L HLA-DRB1*15:03L
SAINRPQIGV

SEQ ID NO: 9604 - protein, 10 aa, Severe acute respiratory syndrome coronavirus 2
  REGION 1..10: note = Table B: HLA-DQA1*03:02-B1*03:03L HLA-DQA1*05:01-B1*03:01M HLA-DRB1*13:03L HLA-DRB1*01:03L HLA-DQA1*01:02-B1*06:02L HLA-DRB4*03:01NL HLA-DRB1*08:77M HLA-DPA1*01:03-B1*03:01L HLA-DPA1*03:01-B1*04:02L HLA-DRB1*03:01L HLA-DRB1*11:02L
  REGION 1..10: note = CONT. FROM ABOVE: HLA-DRB1*14:02L HLA-DQA1*01-B1*05L HLA-DQA1*05 :05-B1*03:19M HLA-DQA1*05:01-B1*02:01L HLA-DRB4*01:01M HLA-DPA1* 01:03-B1*04:01M HLA-DQA1*05:05-B1*03:116L HLA-DPA1*01:03-B1*04:0 2L HLA-DPA1*02:01-B1*13:01L HLA-DQA1*03:01-B1*03:02L
  REGION 1..10: note = CONT. FROM ABOVE: HLA-DPA1*01:03-B1*104:01L HLA-DPA1*01:02-B1*04 :01L HLA-DRB1*10:01L HLA-DRB1*16:01L HLA-DQA1*01:03-B1*06:01L HL A-DRB1*08:02L HLA-DQA1*02:01-B1*03:03L HLA-DRB1*15:03L
REFLTRNPAW

SEQ ID NO: 9605 - protein, 14 aa, Severe acute respiratory syndrome coronavirus 2
  REGION 1..14: note = Table B: HLA-DQA1*03:02-B1*03:03L HLA-DRB1*04:03L HLA-DRB1*13:02L HLA-DRB1*13:03L HLA-DRB1*04:02L HLA-DRB1*04:04L HLA-DRB1*04:05L HLA-DRB1*08:04L HLA-DRB3*02:01L HLA-DPA1*01:03-B1*03:01L HLA-DPA1*03:01-B1*04:02L
  REGION 1..14: note = CONT. FROM ABOVE: HLA-DRB1*14:01L HLA-DRB1*11:04L HLA-DRB1*14:02 L HLA-DQA1*01:01-B1*05:01L HLA-DRB1*11:01L HLA-DQA1*01-B1*05L HL A-DPA1*01:03-B1*04:01L HLA-DPA1*01:03-B1*04:02L HLA-DRB3*01:01L HLA-DPA1*01:03-B1*02:01L HLA-DPA1*01:03-B1*104:01L
  REGION 1..14: note = CONT. FROM ABOVE: HLA-DQA1*05:05-B1*03:01L HLA-DRB1*07:01L HLA-D RB1*10:01L HLA-DRB1*08:02L HLA-DRB1*08:03L
NPAWRKAVFISPYN

SEQ ID NO: 9606 - protein, 12 aa, Severe acute respiratory syndrome coronavirus 2
  REGION 1..12: note = Table B: HLA-DQA1*03:02-B1*03:03L HLA-DQA1*05:01-B1*03:01L HLA-DRB1*01:03L HLA-DRB1*04:05L HLA-DQA1*01:02-B1*06:02L HLA-DRB1*01:02L HLA-DPA1*03:01-B1*04:02L HLA-DRB1*04:10L HLA-DRB1*12:01L HLA-DPA1*03:01-B1*105:01L HLA-DRB1*14:54L
  REGION 1..12: note = CONT. FROM ABOVE: HLA-DQA1*05:05-B1*03:01L HLA-DPA1*01:02-B1*04: 01L HLA-DRB1*16:01L HLA-DQA1*01:03-B1*06:01L HLA-DRB1*04:08L HLA -DRB1*15:03L
KAVFISPYNSQN

SEQ ID NO: 9607 - protein, 11 aa, Severe acute respiratory syndrome coronavirus 2
  REGION 1..11: note = Table B: HLA-DQA1*03:02-B1*03:03L HLA-DQA1*05:01-B1*03:01L HLA-DRB1*04:02L HLA-DRB1*01:02L HLA-DRB3*02:01L HLA-DPA1*03:01-B1*04:02L HLA-DQA1*05:05-B1*03:19L HLA-DQA1*05:01-B1*02:01L HLA-DRB1*12:01L
  REGION 1..11: note = CONT. FROM ABOVE: HLA-DPA1*02:01-B1*13:01L HLA-DPA1*03:01-B1*105 :01L HLA-DQA1*03:01-B1*03:02L HLA-DRB1*14:17L HLA-DQA1*01:03-B1* 06:01L HLA-DQA1*02:01-B1*03:03L HLA-DRB1*15:03L
FISPYNSQNAV

SEQ ID NO: 9608 - protein, 12 aa, Severe acute respiratory syndrome coronavirus 2
  REGION 1..12: note = Table B: HLA-DQA1*03:02-B1*03:03L HLA-DQA1*05:01-B1*03:01L HLA-DRB1*04:01L HLA-DRB1*13:02L HLA-DQA1*01:02-B1*06:02L HLA-DRB1*01:01L HLA-DRB1*08:04L HLA-DRB1*08:77L HLA-DRB3*02:01L HLA-DPA1*01:03-B1*03:01L HLA-DRB1*14:02L HLA-DRB1*08:01L
  REGION 1..12: note = CONT. FROM ABOVE: HLA-DRB5*01:01L HLA-DQA1*05:05-B1*03:19L HLA-D RB1*09:01L HLA-DRB1*12:02L HLA-DPA1*03:01-B1*105:01L HLA-DQA1*05 :05-B1*03:01L HLA-DRB1*07:01L HLA-DRB1*10:01L HLA-DRB1*08:03L
ISPYNSQNAVAS

SEQ ID NO: 9609 - protein, 12 aa, Severe acute respiratory syndrome coronavirus 2
  REGION 1..12: note = Table B: HLA-DQA1*03:02-B1*03:03L HLA-DRB1*04:01L HLA-DRB1*04:04L HLA-DQA1*01:02-B1*06:02L HLA-DRB1*08:04L HLA-DRB1*08:77L HLA-DRB3*02:01L HLA-DPA1*01:03-B1*03:01L HLA-DRB1*14:01L HLA-DRB1*11:03L HLA-DRB1*11:04L HLA-DRB1*14:02L
  REGION 1..12: note = CONT. FROM ABOVE: HLA-DRB1*08:01L HLA-DRB1*11:01L HLA-DRB5*01:01 L HLA-DQA1*05:05-B1*03:19L HLA-DQA1*05:01-B1*02:01L HLA-DRB1*04: 10L HLA-DRB1*09:01L HLA-DRB1*12:02L HLA-DPA1*03:01-B1*105:01L HL A-DRB1*07:01L HLA-DRB1*08:03L HLA-DRB1*15:03L
SPYNSQNAVASK

SEQ ID NO: 9610 - protein, 10 aa, Severe acute respiratory syndrome coronavirus 2
  REGION 1..10: note = Table B: HLA-DQA1*03:02-B1*03:03L HLA-DQA1*01:02-B1*06:02L HLA-DQA1*05:05-B1*03:19L HLA-DPA1*03:01-B1*105:01L HLA-DQA1*03:01-B1*03:02L HLA-DRB1*16:01L HLA-DQA1*01:03-B1*06:01L HLA-DQA1*02:01-B1*03:03L
  REGION 1..10: note = CONT. FROM ABOVE: HLA-DRB1*15:03L
NSQNAVASKI

SEQ ID NO: 9611 - protein, 10 aa, Severe acute respiratory syndrome coronavirus 2
  REGION 1..10: note = Table B: HLA-DQA1*03:02-B1*03:03L HLA-DQA1*03:01-B1*03:02L HLA-DQA1*01:03-B1*06:01L HLA-DQA1*02:01-B1*03:03L
SQNAVASKIL

SEQ ID NO: 9612 - protein, 12 aa, Severe acute respiratory syndrome coronavirus 2
  REGION 1..12: note = Table B: HLA-DQA1*03:02-B1*03:03L HLA-DRB1*04:02L HLA-DQA1*05:05-B1*03:19L HLA-DQA1*05:01-B1*02:01L HLA-DQA1*05:05-B1*03:01L HLA-DRB1*16:01L
NAVASKILGLPT

SEQ ID NO: 9613 - protein, 12 aa, Severe acute respiratory syndrome coronavirus 2
  REGION 1..12: note = Table B: HLA-DQA1*03:02-B1*03:03L HLA-DRB1*04:02L HLA-DPA1*03:01-B1*04:02L HLA-DQA1*05:05-B1*03:19L HLA-DPA1*01:03-B1*04:02L HLA-DQA1*05:05-B1*03:01L
AVASKILGLPTQ

SEQ ID NO: 9614 - protein, 10 aa, Severe acute respiratory syndrome coronavirus 2
  REGION 1..10: note = Table B: HLA-DQA1*03:02-B1*03:03M HLA-DQA1*05:01-B1*03:01L HLA-DQA1*01:02-B1*06:02L HLA-DRB1*01:02L HLA-DPA1*03:01-B1*04:02L HLA-DRB1*14:01L HLA-DRB1*14:02L HLA-DQA1*05:05-B1*03:19L HLA-DQA1*05:05-B1*03:116L
  REGION 1..10: note = CONT. FROM ABOVE: HLA-DRB1*09:01L HLA-DPA1*02:01-B1*13:01L HLA-D PA1*03:01-B1*105:01L HLA-DQA1*03:01-B1*03:02L HLA-DPA1*01:03-B1* 104:01L HLA-DPA1*01:02-B1*04:01L HLA-DRB1*10:01L HLA-DRB1*16:01L HLA-DQA1*01:03-B1*06:01L HLA-DRB1*08:03L
  REGION 1..10: note = CONT. FROM ABOVE: HLA-DQA1*02:01-B1*03:03L HLA-DRB1*15:03L
KILGLPTQTV

SEQ ID NO: 9615 - protein, 10 aa, Severe acute respiratory syndrome coronavirus 2
  REGION 1..10: note = Table B: HLA-DQA1*03:02-B1*03:03L HLA-DQA1*05:01-B1*03:01L HLA-DRB1*04:03L HLA-DRB1*13:03L HLA-DRB1*01:03L HLA-DRB1*04:02L HLA-DRB1*04:05L HLA-DQA1*01:02-B1*06:02L HLA-DRB1*01:02L HLA-DRB4*03:01NL HLA-DRB1*14:01L HLA-DQA1*01-B1*05L
  REGION 1..10: note = CONT. FROM ABOVE: HLA-DQA1*05:05-B1*03:19L HLA-DQA1*05:01-B1*02: 01L HLA-DRB1*04:10L HLA-DRB1*12:01L HLA-DPA1*03:01-B1*105:01L HL A-DQA1*03:01-B1*03:02L HLA-DRB1*14:54L HLA-DQA1*05:05-B1*03:01L HLA-DRB1*14:17L HLA-DRB1*16:01L HLA-DQA1*01:03-B1*06:01L
  REGION 1..10: note = CONT. FROM ABOVE: HLA-DQA1*02:01-B1*03:03L HLA-DRB1*15:03L
ILGLPTQTVD

SEQ ID NO: 9616 - protein, 12 aa, Severe acute respiratory syndrome coronavirus 2
  REGION 1..12: note = Table B: HLA-DQA1*03:02-B1*03:03L HLA-DRB1*13:03L HLA-DRB1*04:02L HLA-DRB1*04:05L HLA-DRB4*03:01NL HLA-DRB1*04:10L HLA-DRB1*14:54L HLA-DRB1*16:01L HLA-DQA1*02:01-B1*03:03L
GLPTQTVDSSQG

SEQ ID NO: 9617 - protein, 13 aa, Severe acute respiratory syndrome coronavirus 2
  REGION 1..13: note = Table B: HLA-DQA1*03:02-B1*03:03L HLA-DQA1*05:01-B1*03:01L HLA-DRB1*13:03L HLA-DRB1*04:02L HLA-DRB1*04:05L HLA-DRB4*03:01NL HLA-DQA1*01:01-B1*05:01L HLA-DQA1*05:05-B1*03:01L HLA-DRB1*16:01L HLA-DQA1*02:01-B1*03:03L
LPTQTVDSSQGSE

SEQ ID NO: 9618 - protein, 12 aa, Severe acute respiratory syndrome coronavirus 2
  REGION 1..12: note = Table B: HLA-DQA1*03:02-B1*03:03L
QTVDSSQGSEYD

SEQ ID NO: 9619 - protein, 14 aa, Severe acute respiratory syndrome coronavirus 2
  REGION 1..14: note = Table B: HLA-DQA1*03:02-B1*03:03L
TVDSSQGSEYDYVI

SEQ ID NO: 9620 - protein, 11 aa, Severe acute respiratory syndrome coronavirus 2
  REGION 1..11: note = Table B: HLA-DQA1*03:02-B1*03:03L HLA-DPA1*03:01-B1*04:02L HLA-DPA1*01:02-B1*04:01L
SEYDYVIFTQT

SEQ ID NO: 9621 - protein, 12 aa, Severe acute respiratory syndrome coronavirus 2
  REGION 1..12: note = Table B: HLA-DQA1*03:02-B1*03:03L HLA-DRB1*01:03L HLA-DRB1*04:05L HLA-DQA1*01:02-B1*06:02L HLA-DPA1*03:01-B1*04:02L HLA-DQA1*05:01-B1*02:01L HLA-DPA1*01:03-B1*04:01L HLA-DPA1*01:03-B1*04:02L
  REGION 1..12: note = CONT. FROM ABOVE: HLA-DRB1*12:01L HLA-DPA1*03:01-B1*105:01L HLA- DPA1*01:02-B1*04:01L HLA-DRB1*16:01L HLA-DQA1*01:03-B1*06:01L HL A-DRB1*04:08L HLA-DQA1*02:01-B1*03:03L HLA-DRB1*15:03L
YDYVIFTQTTET

SEQ ID NO: 9622 - protein, 12 aa, Severe acute respiratory syndrome coronavirus 2
  REGION 1..12: note = Table B: HLA-DQA1*03:02-B1*03:03L HLA-DRB1*04:02L HLA-DRB1*04:05L HLA-DQA1*05:01-B1*02:01L HLA-DRB1*04:10L HLA-DRB1*16:01L HLA-DQA1*02:01-B1*03:03L
DYVIFTQTTETA

SEQ ID NO: 9623 - protein, 11 aa, Severe acute respiratory syndrome coronavirus 2
  REGION 1..11: note = Table B: HLA-DQA1*03:02-B1*03:03L HLA-DQA1*05:01-B1*03:01L HLA-DRB1*04:01L HLA-DRB1*13:02L HLA-DRB1*04:04L HLA-DQA1*01:02-B1*06:02L HLA-DRB1*01:02L HLA-DRB1*08:77L HLA-DPA1*01:03-B1*03:01L HLA-DRB1*14:01L HLA-DRB1*11:03L
  REGION 1..11: note = CONT. FROM ABOVE: HLA-DRB1*11:04L HLA-DRB1*14:02L HLA-DQA1*01:01 -B1*05:01L HLA-DRB5*01:01L HLA-DQA1*05:05-B1*03:19L HLA-DRB1*12: 02L HLA-DPA1*03:01-B1*105:01L HLA-DQA1*05:05-B1*03:01L HLA-DRB1* 10:01L HLA-DQA1*01:03-B1*06:01L HLA-DRB1*08:03L HLA-DRB1*15:03L
VIFTQTTETAH

SEQ ID NO: 9624 - protein, 10 aa, Severe acute respiratory syndrome coronavirus 2
  REGION 1..10: note = Table B: HLA-DQA1*03:02-B1*03:03L HLA-DRB1*04:03L HLA-DRB1*13:03L HLA-DRB1*01:03L HLA-DRB1*04:02L HLA-DRB1*04:05L HLA-DRB4*03:01NL HLA-DQA1*01-B1*05L HLA-DQA1*05:01-B1*02:01L HLA-DRB1*04:10L HLA-DRB1*12:01L HLA-DQA1*03:01-B1*03:02L
  REGION 1..10: note = CONT. FROM ABOVE: HLA-DRB1*14:54L HLA-DRB1*14:17L HLA-DRB1*16:01 L HLA-DQA1*02:01-B1*03:03L
FTQTTETAHS

SEQ ID NO: 9625 - protein, 11 aa, Severe acute respiratory syndrome coronavirus 2
  REGION 1..11: note = Table B: HLA-DQA1*03:02-B1*03:03L HLA-DQA1*05:01-B1*03:01L HLA-DQA1*01:02-B1*06:02L HLA-DQA1*05:05-B1*03:19L HLA-DPA1*03:01-B1*105:01L HLA-DQA1*03:01-B1*03:02L HLA-DQA1*05:05-B1*03:01L HLA-DQA1*02:01-B1*03:03L
TTETAHSCNVN

SEQ ID NO: 9626 - protein, 13 aa, Severe acute respiratory syndrome coronavirus 2
  REGION 1..13: note = Table B: HLA-DQA1*03:02-B1*03:03L HLA-DRB1*01:02L HLA-DRB1*04:08L HLA-DRB1*15:03L
TETAHSCNVNRFN

SEQ ID NO: 9627 - protein, 10 aa, Severe acute respiratory syndrome coronavirus 2
  REGION 1..10: note = Table B: HLA-DQA1*03:02-B1*03:03L HLA-DQA1*05:01-B1*03:01L HLA-DRB1*04:03L HLA-DRB1*13:03L HLA-DRB1*01:03L HLA-DRB1*04:02L HLA-DQA1*01:02-B1*06:02L HLA-DRB4*03:01NL HLA-DRB1*14:01L HLA-DQA1*03:01-B1*03:02L HLA-DRB1*14:17L
  REGION 1..10: note = CONT. FROM ABOVE: HLA-DPA1*01:02-B1*04:01L HLA-DRB1*16:01L HLA-D QA1*01:03-B1*06:01L HLA-DQA1*02:01-B1*03:03L
NVAITRAKVG

SEQ ID NO: 9628 - protein, 11 aa, Severe acute respiratory syndrome coronavirus 2
  REGION 1..11: note = Table B: HLA-DQA1*03:02-B1*03:03L HLA-DQA1*05:01-B1*03:01L HLA-DRB1*04:03L HLA-DRB1*01:03L HLA-DRB1*04:02L HLA-DRB1*01:02L HLA-DRB1*14:01L HLA-DQA1*05:01-B1*02:01L HLA-DRB1*12:01L HLA-DPA1*03:01-B1*105:01L HLA-DQA1*03:01-B1*03:02L
  REGION 1..11: note = CONT. FROM ABOVE: HLA-DQA1*05:05-B1*03:01L HLA-DRB1*14:17L HLA-D PA1*01:02-B1*04:01L HLA-DRB1*15:03L
VAITRAKVGIL

SEQ ID NO: 9629 - protein, 10 aa, Severe acute respiratory syndrome coronavirus 2
  REGION 1..10: note = Table B: HLA-DQA1*03:02-B1*03:03L HLA-DQA1*05:05-B1*03:19L HLA-DQA1*03:01-B1*03:02L
MSDRDLYDKL

SEQ ID NO: 9630 - protein, 10 aa, Severe acute respiratory syndrome coronavirus 2
  REGION 1..10: note = Table B: HLA-DQA1*03:02-B1*03:03L HLA-DQA1*05:01-B1*03:01L HLA-DQA1*01:02-B1*06:02L HLA-DPA1*03:01-B1*04:02L HLA-DRB1*14:02L HLA-DQA1*01-B1*05L HLA-DQA1*05:05-B1*03:19L HLA-DQA1*05:01-B1*02:01L HLA-DQA1*05:05-B1*03:116L
  REGION 1..10: note = CONT. FROM ABOVE: HLA-DPA1*02:01-B1*13:01L HLA-DPA1*03:01-B1*105 :01L HLA-DQA1*03:01-B1*03:02L HLA-DPA1*01:03-B1*104:01L HLA-DPA1 *01:02-B1*04:01L HLA-DRB1*16:01L HLA-DQA1*01:03-B1*06:01L HLA-DQ A1*02:01-B1*03:03L HLA-DRB1*15:03L
LYDKLQFTSL

SEQ ID NO: 9631 - protein, 13 aa, Severe acute respiratory syndrome coronavirus 2
  REGION 1..13: note = Table B: HLA-DQA1*03:02-B1*03:03L HLA-DQA1*05:01-B1*03:01L HLA-DRB1*13:03L HLA-DRB1*01:02L HLA-DPA1*03:01-B1*04:02L HLA-DQA1*05:01-B1*02:01L HLA-DRB1*04:10L HLA-DPA1*02:01-B1*13:01L HLA-DRB1*15:03L
YDKLQFTSLEIPR

SEQ ID NO: 9632 - protein, 12 aa, Severe acute respiratory syndrome coronavirus 2
  REGION 1..12: note = Table B: HLA-DQA1*03:02-B1*03:03L HLA-DRB1*13:02L HLA-DRB1*01:03L HLA-DRB1*04:04L HLA-DRB1*04:05L HLA-DRB3*02:01L HLA-DPA1*03:01-B1*04:02L HLA-DRB1*14:01L HLA-DRB1*08:01L HLA-DQA1*05:05-B1*03:19L HLA-DQA1*05:01-B1*02:01L
  REGION 1..12: note = CONT. FROM ABOVE: HLA-DPA1*01:03-B1*04:02L HLA-DRB1*12:01L HLA-D PA1*02:01-B1*13:01L HLA-DQA1*05:05-B1*03:01L HLA-DRB1*04:08L HLA -DRB1*15:03L
LQFTSLEIPRRN

SEQ ID NO: 9633 - protein, 11 aa, Severe acute respiratory syndrome coronavirus 2
  REGION 1..11: note = Table B: HLA-DQA1*03:02-B1*03:03L
LEIPRRNVATL

SEQ ID NO: 9634 - protein, 13 aa, Severe acute respiratory syndrome coronavirus 2
  REGION 1..13: note = Table B: HLA-DQA1*03:02-B1*03:03L HLA-DQA1*05:01-B1*03:01L HLA-DRB1*13:02L HLA-DRB1*13:03L HLA-DRB1*01:03L HLA-DRB1*04:04L HLA-DRB1*04:05L HLA-DQA1*01:02-B1*06:02L HLA-DRB1*01:02L HLA-DPA1*01:03-B1*03:01L HLA-DQA1*01:01-B1*05:01L
  REGION 1..13: note = CONT. FROM ABOVE: HLA-DRB1*08:01L HLA-DQA1*05:05-B1*03:19L HLA-D QA1*05:01-B1*02:01L HLA-DRB1*04:10L HLA-DRB1*12:01L HLA-DPA1*02: 01-B1*13:01L HLA-DPA1*03:01-B1*105:01L HLA-DPA1*01:03-B1*104:01L HLA-DQA1*05:05-B1*03:01L HLA-DRB1*07:01L HLA-DRB1*16:01L
  REGION 1..13: note = CONT. FROM ABOVE: HLA-DQA1*01:03-B1*06:01L HLA-DRB1*04:08L HLA-D RB1*15:03L
IPRRNVATLQAEN

SEQ ID NO: 9635 - protein, 11 aa, Severe acute respiratory syndrome coronavirus 2
  REGION 1..11: note = Table B: HLA-DQA1*03:02-B1*03:03L HLA-DQA1*05:01-B1*03:01L HLA-DQA1*01:02-B1*06:02L HLA-DRB1*01:02L HLA-DPA1*03:01-B1*105:01L HLA-DQA1*05:05-B1*03:01L HLA-DRB1*14:17L HLA-DRB1*16:01L HLA-DRB1*15:03L
NVATLQAENVT

SEQ ID NO: 9636 - protein, 11 aa, Severe acute respiratory syndrome coronavirus 2
  REGION 1..11: note = Table B: HLA-DQA1*03:02-B1*03:03L HLA-DQA1*05:01-B1*03:01L HLA-DRB1*13:03L HLA-DRB1*01:03L HLA-DRB1*04:02L HLA-DRB1*04:05L HLA-DRB1*01:02L HLA-DRB4*03:01NL HLA-DQA1*05:05-B1*03:19L HLA-DRB1*04:10L HLA-DRB1*14:54L HLA-DQA1*05:05-B1*03:01L
  REGION 1..11: note = CONT. FROM ABOVE: HLA-DRB1*10:01L HLA-DRB1*16:01L HLA-DRB1*04:08 L HLA-DRB1*15:03L
VATLQAENVTG

SEQ ID NO: 9637 - protein, 10 aa, Severe acute respiratory syndrome coronavirus 2
  REGION 1..10: note = Table B: HLA-DQA1*03:02-B1*03:03M HLA-DQA1*05:01-B1*03:01L HLA-DRB1*13:03L HLA-DQA1*01:02-B1*06:02L HLA-DPA1*03:01-B1*04:02L HLA-DRB1*14:01L HLA-DRB1*14:02L HLA-DQA1*05:05-B1*03:19L HLA-DQA1*05:01-B1*02:01L
  REGION 1..10: note = CONT. FROM ABOVE: HLA-DQA1*05:05-B1*03:116L HLA-DRB1*09:01L HLA- DPA1*03:01-B1*105:01L HLA-DQA1*03:01-B1*03:02L HLA-DPA1*01:02-B1 *04:01L HLA-DRB1*16:01L HLA-DQA1*02:01-B1*03:03L HLA-DRB1*15:03L
TLQAENVTGL

SEQ ID NO: 9638 - protein, 10 aa, Severe acute respiratory syndrome coronavirus 2
  REGION 1..10: note = Table B: HLA-DQA1*03:02-B1*03:03L HLA-DQA1*05:05-B1*03:19L HLA-DQA1*03:01-B1*03:02L HLA-DQA1*02:01-B1*03:03L
AENVTGLFKD

SEQ ID NO: 9639 - protein, 12 aa, Severe acute respiratory syndrome coronavirus 2
  REGION 1..12: note = Table B: HLA-DQA1*03:02-B1*03:03L HLA-DRB1*04:01L HLA-DRB1*13:02L HLA-DRB1*13:03L HLA-DRB1*01:03L HLA-DRB1*04:04L HLA-DRB1*04:05L HLA-DRB1*01:01L HLA-DRB1*08:04L HLA-DRB1*08:77L HLA-DPA1*01:03-B1*03:01L HLA-DRB1*14:01L HLA-DRB1*11:03L
  REGION 1..12: note = CONT. FROM ABOVE: HLA-DRB1*11:04L HLA-DRB1*14:02L HLA-DQA1*01-B1 *05L HLA-DQA1*05:05-B1*03:19L HLA-DQA1*05:01-B1*02:01L HLA-DRB1* 04:10L HLA-DRB1*12:01L HLA-DRB1*12:02L HLA-DPA1*03:01-B1*105:01L HLA-DRB1*14:54L HLA-DRB1*10:01L HLA-DRB1*16:01L HLA-DRB1*04:08L
  REGION 1..12: note = CONT. FROM ABOVE: HLA-DRB1*15:03L
VITGLHPTQAPT

SEQ ID NO: 9640 - protein, 12 aa, Severe acute respiratory syndrome coronavirus 2
  REGION 1..12: note = Table B: HLA-DQA1*03:02-B1*03:03L HLA-DRB1*04:05L HLA-DQA1*01:02-B1*06:02L HLA-DPA1*01:03-B1*03:01L HLA-DQA1*05:05-B1*03:19L HLA-DRB1*12:01L HLA-DPA1*03:01-B1*105:01L HLA-DQA1*01:03-B1*06:01L
  REGION 1..12: note = CONT. FROM ABOVE: HLA-DRB1*04:08L HLA-DRB1*15:03L
ITGLHPTQAPTH

SEQ ID NO: 9641 - protein, 10 aa, Severe acute respiratory syndrome coronavirus 2
  REGION 1..10: note = Table B: HLA-DQA1*03:02-B1*03:03L HLA-DQA1*05:01-B1*03:01L HLA-DRB1*13:03L HLA-DRB1*04:02L HLA-DRB1*14:01L HLA-DRB1*08:01L HLA-DQA1*01-B1*05L HLA-DQA1*05:01-B1*02:01L HLA-DQA1*03:01-B1*03:02L HLA-DPA1*01:02-B1*04:01L
  REGION 1..10: note = CONT. FROM ABOVE: HLA-DRB1*16:01L HLA-DQA1*02:01-B1*03:03L
LHPTQAPTHL

SEQ ID NO: 9642 - protein, 13 aa, Severe acute respiratory syndrome coronavirus 2
  REGION 1..13: note = Table B: HLA-DQA1*03:02-B1*03:03L
HPTQAPTHLSVDT

SEQ ID NO: 9643 - protein, 15 aa, Severe acute respiratory syndrome coronavirus 2
  REGION 1..15: note = Table B: HLA-DQA1*03:02-B1*03:03L HLA-DRB1*14:04L HLA-DRB1*04:01L HLA-DRB1*01:01L HLA-DRB1*11:02L HLA-DRB5*01:01L HLA-DQA1*01-B1*05L HLA-DQA1*05:05-B1*03:19L HLA-DRB4*02:01NL HLA-DRB4*01:01L HLA-DPA1*01:03-B1*04:01L
  REGION 1..15: note = CONT. FROM ABOVE: HLA-DQA1*05:05-B1*03:116L HLA-DRB1*09:01L HLA- DPA1*01:03-B1*04:02L HLA-DPA1*01:03-B1*02:01L HLA-DPA1*01:03-B1* 104:01L HLA-DQA1*05:05-B1*03:01L HLA-DRB1*07:01L HLA-DQA1*01:03- B1*06:01L HLA-DRB1*08:02L HLA-DRB1*15:01L
APTHLSVDTKFKTEG

SEQ ID NO: 9644 - protein, 10 aa, Severe acute respiratory syndrome coronavirus 2
  REGION 1..10: note = Table B: HLA-DQA1*03:02-B1*03:03L HLA-DQA1*01-B1*05L HLA-DQA1*05:05-B1*03:19L HLA-DQA1*05:01-B1*02:01L HLA-DQA1*03:01-B1*03:02L HLA-DRB1*16:01L
VDTKFKTEGL

SEQ ID NO: 9645 - protein, 15 aa, Severe acute respiratory syndrome coronavirus 2
  REGION 1..15: note = Table B: HLA-DQA1*03:02-B1*03:03L HLA-DQA1*05:01-B1*03:01L HLA-DRB1*04:03L HLA-DRB1*13:02L HLA-DRB1*13:03L HLA-DRB1*04:04L HLA-DRB1*08:04L HLA-DRB1*14:01L HLA-DRB1*14:02L HLA-DQA1*01-B1*05L HLA-DQA1*05:01-B1*02:01L
  REGION 1..15: note = CONT. FROM ABOVE: HLA-DQA1*03:01-B1*03:02L HLA-DPA1*01:03-B1*104 :01L HLA-DQA1*05:05-B1*03:01L HLA-DRB1*10:01L HLA-DRB1*08:03L
DTKFKTEGLCVDIPG

SEQ ID NO: 9646 - protein, 10 aa, Severe acute respiratory syndrome coronavirus 2
  REGION 1..10: note = Table B: HLA-DQA1*03:02-B1*03:03L HLA-DQA1*05:01-B1*02:01L HLA-DQA1*03:01-B1*03:02L
VDIPGIPKDM

SEQ ID NO: 9647 - protein, 10 aa, Severe acute respiratory syndrome coronavirus 2
  REGION 1..10: note = Table B: HLA-DQA1*03:02-B1*03:03L HLA-DRB1*04:03L HLA-DRB1*04:02L HLA-DQA1*01-B1*05L HLA-DQA1*05:01-B1*02:01L HLA-DQA1*03:01-B1*03:02L HLA-DRB1*14:17L HLA-DQA1*02:01-B1*03:03L
MNYQVNGYPN

SEQ ID NO: 9648 - protein, 10 aa, Severe acute respiratory syndrome coronavirus 2
  REGION 1..10: note = Table B: HLA-DQA1*03:02-B1*03:03L HLA-DQA1*05:01-B1*03:01L HLA-DRB1*04:03L HLA-DPA1*03:01-B1*04:02L HLA-DQA1*01-B1*05L HLA-DQA1*05:05-B1*03:19L HLA-DQA1*05:01-B1*02:01L HLA-DRB1*12:01L HLA-DPA1*02:01-B1*13:01L
  REGION 1..10: note = CONT. FROM ABOVE: HLA-DPA1*03:01-B1*105:01L HLA-DQA1*03:01-B1*03 :02L HLA-DPA1*01:02-B1*04:01L HLA-DRB1*16:01L HLA-DQA1*01:03-B1* 06:01L HLA-DQA1*02:01-B1*03:03L HLA-DRB1*15:03L
NYQVNGYPNM

SEQ ID NO: 9649 - protein, 10 aa, Severe acute respiratory syndrome coronavirus 2
  REGION 1..10: note = Table B: HLA-DQA1*03:02-B1*03:03L HLA-DQA1*05:01-B1*03:01L HLA-DRB1*04:03L HLA-DRB1*13:03L HLA-DRB1*01:03L HLA-DRB1*04:05L HLA-DQA1*01:02-B1*06:02L HLA-DRB1*01:01L HLA-DRB1*08:77L HLA-DPA1*01:03-B1*03:01L HLA-DPA1*03:01-B1*04:02L
  REGION 1..10: note = CONT. FROM ABOVE: HLA-DRB1*03:01L HLA-DRB1*14:01L HLA-DRB1*14:02 L HLA-DQA1*01:01-B1*05:01L HLA-DQA1*01-B1*05L HLA-DQA1*05:05-B1* 03:19L HLA-DQA1*05:01-B1*02:01L HLA-DRB4*01:01L HLA-DPA1*01:03-B 1*04:01L HLA-DQA1*05:05-B1*03:116L HLA-DPA1*01:03-B1*04:02L
  REGION 1..10: note = CONT. FROM ABOVE: HLA-DRB1*12:01L HLA-DPA1*02:01-B1*13:01M HLA-D PA1*03:01-B1*105:01L HLA-DQA1*03:01-B1*03:02L HLA-DPA1*01:03-B1* 104:01L HLA-DQA1*05:05-B1*03:01L HLA-DPA1*01:02-B1*04:01L HLA-DR B1*10:01L HLA-DRB1*16:01L HLA-DQA1*01:03-B1*06:01L
  REGION 1..10: note = CONT. FROM ABOVE: HLA-DQA1*02:01-B1*03:03L HLA-DRB1*15:03L
YQVNGYPNMF

SEQ ID NO: 9650 - protein, 10 aa, Severe acute respiratory syndrome coronavirus 2
  REGION 1..10: note = Table B: HLA-DQA1*03:02-B1*03:03L HLA-DQA1*05:05-B1*03:19L HLA-DPA1*02:01-B1*13:01L HLA-DPA1*01:03-B1*104:01L
QVNGYPNMFI

SEQ ID NO: 9651 - protein, 13 aa, Severe acute respiratory syndrome coronavirus 2
  REGION 1..13: note = Table B: HLA-DQA1*03:02-B1*03:03L HLA-DQA1*05:01-B1*03:01L HLA-DRB1*04:05L HLA-DQA1*05:01-B1*02:01L HLA-DPA1*02:01-B1*13:01L HLA-DPA1*03:01-B1*105:01L HLA-DPA1*01:02-B1*04:01L
VNGYPNMFITREE

SEQ ID NO: 9652 - protein, 11 aa, Severe acute respiratory syndrome coronavirus 2
  REGION 1..11: note = Table B: HLA-DQA1*03:02-B1*03:03L HLA-DQA1*01-B1*05L
YPNMFITREEA

SEQ ID NO: 9653 - protein, 10 aa, Severe acute respiratory syndrome coronavirus 2
  REGION 1..10: note = Table B: HLA-DQA1*03:02-B1*03:03L HLA-DQA1*05:01-B1*03:01M HLA-DQA1*01:02-B1*06:02L HLA-DRB4*03:01NL HLA-DRB1*08:77L HLA-DPA1*01:03-B1*03:01L HLA-DPA1*03:01-B1*04:02L HLA-DRB1*03:01L HLA-DQA1*01-B1*05L HLA-DQA1*05:05-B1*03:19L
  REGION 1..10: note = CONT. FROM ABOVE: HLA-DQA1*05:01-B1*02:01L HLA-DRB4*01:01M HLA-D PA1*01:03-B1*04:01M HLA-DQA1*05:05-B1*03:116L HLA-DPA1*01:03-B1* 04:02L HLA-DRB1*12:01L HLA-DQA1*03:01-B1*03:02L HLA-DPA1*01:03-B 1*104:01L HLA-DPA1*01:02-B1*04:01L HLA-DRB1*10:01L
  REGION 1..10: note = CONT. FROM ABOVE: HLA-DRB1*16:01L HLA-DQA1*02:01-B1*03:03L HLA-D RB1*15:03L
EEAIRHVRAW

SEQ ID NO: 9654 - protein, 15 aa, Severe acute respiratory syndrome coronavirus 2
  REGION 1..15: note = Table B: HLA-DQA1*03:02-B1*03:03L HLA-DPA1*01:03-B1*04:02L HLA-DPA1*01:03-B1*104:01L HLA-DRB1*07:01L
EAIRHVRAWIGFDVE

SEQ ID NO: 9655 - protein, 14 aa, Severe acute respiratory syndrome coronavirus 2
  REGION 1..14: note = Table B: HLA-DQA1*03:02-B1*03:03L HLA-DQA1*05:01-B1*03:01L HLA-DRB1*13:03L HLA-DRB1*01:01L HLA-DRB3*02:01L HLA-DRB1*11:02L HLA-DRB1*11:04L HLA-DQA1*05:01-B1*02:01L HLA-DRB3*01:01L HLA-DPA1*01:03-B1*104:01L HLA-DQA1*05:05-B1*03:01L
IRHVRAWIGFDVEG

SEQ ID NO: 9656 - protein, 12 aa, Severe acute respiratory syndrome coronavirus 2
  REGION 1..12: note = Table B: HLA-DQA1*03:02-B1*03:03L HLA-DQA1*05:01-B1*03:01L HLA-DQA1*05:05-B1*03:19L HLA-DPA1*03:01-B1*105:01L HLA-DQA1*03:01-B1*03:02L HLA-DQA1*05:05-B1*03:01L
FDVEGCHATREA

SEQ ID NO: 9657 - protein, 13 aa, Severe acute respiratory syndrome coronavirus 2
  REGION 1..13: note = Table B: HLA-DQA1*03:02-B1*03:03L HLA-DRB1*08:01L HLA-DQA1*05:05-B1*03:19L HLA-DPA1*03:01-B1*105:01L HLA-DRB1*04:08L
DVEGCHATREAVG

SEQ ID NO: 9658 - protein, 10 aa, Severe acute respiratory syndrome coronavirus 2
  REGION 1..10: note = Table B: HLA-DQA1*03:02-B1*03:03L HLA-DQA1*05:01-B1*03:01L HLA-DPA1*03:01-B1*04:02L HLA-DRB1*14:01L HLA-DRB1*08:01L HLA-DQA1*01-B1*05L HLA-DQA1*03:01-B1*03:02L
ATREAVGTNL

SEQ ID NO: 9659 - protein, 10 aa, Severe acute respiratory syndrome coronavirus 2
  REGION 1..10: note = Table B: HLA-DQA1*03:02-B1*03:03M HLA-DQA1*05:05-B1*03:19L HLA-DQA1*05:05-B1*03:116L HLA-DRB1*09:01L HLA-DPA1*01:03-B1*04:02L HLA-DQA1*03:01-B1*03:02L HLA-DPA1*01:03-B1*104:01L HLA-DQA1*02:01-B1*03:03L
REAVGTNLPL

SEQ ID NO: 9660 - protein, 10 aa, Severe acute respiratory syndrome coronavirus 2
  REGION 1..10: note = Table B: HLA-DQA1*03:02-B1*03:03L HLA-DQA1*05:01-B1*02:01L HLA-DQA1*03:01-B1*03:02L HLA-DQA1*01:03-B1*06:01L HLA-DQA1*02:01-B1*03:03L
EAVGTNLPLQ

SEQ ID NO: 9661 - protein, 10 aa, Severe acute respiratory syndrome coronavirus 2
  REGION 1..10: note = Table B: HLA-DQA1*03:02-B1*03:03L HLA-DQA1*05:05-B1*03:19L HLA-DQA1*03:01-B1*03:02L HLA-DQA1*02:01-B1*03:03L HLA-DRB1*15:03L
AVGTNLPLQL

SEQ ID NO: 9662 - protein, 10 aa, Severe acute respiratory syndrome coronavirus 2
  REGION 1..10: note = Table B: HLA-DQA1*03:02-B1*03:03L HLA-DQA1*05:01-B1*03:01L HLA-DRB1*13:03L HLA-DQA1*01:02-B1*06:02L HLA-DRB1*08:77L HLA-DPA1*01:03-B1*03:01L HLA-DRB1*03:01L HLA-DRB1*14:02L HLA-DQA1*01-B1*05L HLA-DQA1*05:05-B1*03:19L
  REGION 1..10: note = CONT. FROM ABOVE: HLA-DQA1*05:01-B1*02:01L HLA-DRB4*01:01L HLA-D PA1*01:03-B1*04:01L HLA-DQA1*05:05-B1*03:116L HLA-DPA1*02:01-B1* 13:01L HLA-DPA1*03:01-B1*105:01L HLA-DPA1*01:03-B1*104:01L HLA-D RB1*10:01L HLA-DRB1*16:01L HLA-DQA1*01:03-B1*06:01L
  REGION 1..10: note = CONT. FROM ABOVE: HLA-DQA1*02:01-B1*03:03L HLA-DRB1*15:03L
GTNLPLQLGF

SEQ ID NO: 9663 - protein, 12 aa, Severe acute respiratory syndrome coronavirus 2
  REGION 1..12: note = Table B: HLA-DQA1*03:02-B1*03:03L HLA-DQA1*05:01-B1*03:01L HLA-DRB1*04:03L HLA-DQA1*01:02-B1*06:02L HLA-DQA1*05:05-B1*03:19L HLA-DQA1*05:01-B1*02:01L HLA-DPA1*03:01-B1*105:01L HLA-DQA1*03:01-B1*03:02L
  REGION 1..12: note = CONT. FROM ABOVE: HLA-DQA1*05:05-B1*03:01L HLA-DQA1*01:03-B1*06: 01L HLA-DQA1*02:01-B1*03:03L
LPLQLGFSTGVN

SEQ ID NO: 9664 - protein, 10 aa, Severe acute respiratory syndrome coronavirus 2
  REGION 1..10: note = Table B: HLA-DQA1*03:02-B1*03:03L HLA-DQA1*03:01-B1*03:02L HLA-DQA1*02:01-B1*03:03L
QLGFSTGVNL

SEQ ID NO: 9665 - protein, 12 aa, Severe acute respiratory syndrome coronavirus 2
  REGION 1..12: note = Table B: HLA-DQA1*03:02-B1*03:03L HLA-DQA1*05:01-B1*03:01L HLA-DRB1*04:03L HLA-DQA1*01:02-B1*06:02L HLA-DQA1*05:05-B1*03:19L HLA-DPA1*03:01-B1*105:01L HLA-DQA1*03:01-B1*03:02L HLA-DQA1*05:05-B1*03:01L
  REGION 1..12: note = CONT. FROM ABOVE: HLA-DQA1*02:01-B1*03:03L
FSTGVNLVAVPT

SEQ ID NO: 9666 - protein, 12 aa, Severe acute respiratory syndrome coronavirus 2
  REGION 1..12: note = Table B: HLA-DQA1*03:02-B1*03:03L HLA-DQA1*05:01-B1*03:01L HLA-DRB1*13:02L HLA-DRB1*13:03L HLA-DRB1*01:03L HLA-DRB1*04:04L HLA-DRB1*04:05L HLA-DRB1*01:02L HLA-DRB4*03:01NL HLA-DRB1*08:04L HLA-DRB1*08:77L HLA-DPA1*01:03-B1*03:01L HLA-DRB1*14:01L
  REGION 1..12: note = CONT. FROM ABOVE: HLA-DRB1*11:04L HLA-DQA1*01-B1*05L HLA-DRB1*04 :10L HLA-DRB1*12:01L HLA-DRB1*12:02L HLA-DPA1*03:01-B1*105:01L H LA-DRB1*14:54L HLA-DQA1*05:05-B1*03:01L HLA-DRB1*10:01L HLA-DRB1 *16:01L HLA-DQA1*01:03-B1*06:01L HLA-DRB1*04:08L HLA-DRB1*08:03L
  REGION 1..12: note = CONT. FROM ABOVE: HLA-DRB1*15:03L
VNLVAVPTGYVD

SEQ ID NO: 9667 - protein, 12 aa, Severe acute respiratory syndrome coronavirus 2
  REGION 1..12: note = Table B: HLA-DQA1*03:02-B1*03:03L HLA-DRB1*04:03L HLA-DRB1*04:02L HLA-DRB1*04:05L HLA-DQA1*01:01-B1*05:01L HLA-DQA1*05:01-B1*02:01L HLA-DRB1*04:10L HLA-DQA1*03:01-B1*03:02L HLA-DRB1*14:17L HLA-DRB1*16:01L
  REGION 1..12: note = CONT. FROM ABOVE: HLA-DQA1*01:03-B1*06:01L HLA-DQA1*02:01-B1*03: 03L
VAVPTGYVDTPN

SEQ ID NO: 9668 - protein, 11 aa, Severe acute respiratory syndrome coronavirus 2
  REGION 1..11: note = Table B: HLA-DQA1*03:02-B1*03:03L HLA-DRB1*04:03L HLA-DRB1*04:02L HLA-DQA1*05:01-B1*02:01L HLA-DQA1*03:01-B1*03:02L HLA-DRB1*16:01L HLA-DQA1*02:01-B1*03:03L
VPTGYVDTPNN

SEQ ID NO: 9669 - protein, 10 aa, Severe acute respiratory syndrome coronavirus 2
  REGION 1..10: note = Table B: HLA-DQA1*03:02-B1*03:03L HLA-DQA1*05:01-B1*03:01L HLA-DRB1*04:03L HLA-DRB1*13:02L HLA-DRB1*13:03L HLA-DRB1*01:03L HLA-DRB1*04:02L HLA-DRB1*04:05L HLA-DQA1*01:02-B1*06:02L HLA-DRB4*03:01NL HLA-DRB1*08:77L HLA-DPA1*01:03-B1*03:01L
  REGION 1..10: note = CONT. FROM ABOVE: HLA-DPA1*03:01-B1*04:02L HLA-DRB1*03:01L HLA-D RB1*14:01L HLA-DRB1*11:02L HLA-DRB1*11:03L HLA-DRB1*14:02L HLA-D QA1*01-B1*05L HLA-DQA1*05:05-B1*03:19L HLA-DQA1*05:01-B1*02:01L HLA-DRB4*01:01L HLA-DPA1*01:03-B1*04:01L
  REGION 1..10: note = CONT. FROM ABOVE: HLA-DQA1*05:05-B1*03:116L HLA-DPA1*01:03-B1*04 :02L HLA-DRB1*12:01L HLA-DPA1*02:01-B1*13:01L HLA-DPA1*03:01-B1* 105:01L HLA-DQA1*03:01-B1*03:02L HLA-DPA1*01:03-B1*104:01L HLA-D QA1*05:05-B1*03:01L HLA-DPA1*01:02-B1*04:01L HLA-DRB1*10:01L
  REGION 1..10: note = CONT. FROM ABOVE: HLA-DRB1*16:01L HLA-DQA1*01:03-B1*06:01L HLA-D RB1*08:02L HLA-DQA1*02:01-B1*03:03L HLA-DRB1*15:03L
YVDTPNNTDF

SEQ ID NO: 9670 - protein, 13 aa, Severe acute respiratory syndrome coronavirus 2
  REGION 1..13: note = Table B: HLA-DQA1*03:02-B1*03:03L HLA-DQA1*01:02-B1*06:02L
VDTPNNTDFSRVS

SEQ ID NO: 9671 - protein, 13 aa, Severe acute respiratory syndrome coronavirus 2
  REGION 1..13: note = Table B: HLA-DQA1*03:02-B1*03:03L HLA-DQA1*05:01-B1*03:01L HLA-DRB1*04:03L HLA-DRB1*13:03L HLA-DRB1*04:05L HLA-DQA1*01:02-B1*06:02L HLA-DRB1*01:02L HLA-DRB4*03:01NL HLA-DRB1*14:01L HLA-DRB1*08:01L HLA-DRB1*04:10L HLA-DRB1*12:01L
  REGION 1..13: note = CONT. FROM ABOVE: HLA-DRB1*14:54L HLA-DRB1*14:17L HLA-DRB1*04:08 L HLA-DRB1*15:03L
NTDFSRVSAKPPP

SEQ ID NO: 9672 - protein, 10 aa, Severe acute respiratory syndrome coronavirus 2
  REGION 1..10: note = Table B: HLA-DQA1*03:02-B1*03:03L HLA-DQA1*05:01-B1*03:01L HLA-DRB1*04:03L HLA-DRB1*13:03L HLA-DRB1*01:03L HLA-DRB1*04:02L HLA-DRB1*04:05L HLA-DQA1*01:02-B1*06:02L HLA-DRB4*03:01NL HLA-DQA1*05:05-B1*03:19L HLA-DQA1*05:01-B1*02:01L
  REGION 1..10: note = CONT. FROM ABOVE: HLA-DQA1*03:01-B1*03:02L HLA-DQA1*05:05-B1*03: 01L HLA-DRB1*14:17L HLA-DRB1*16:01L HLA-DQA1*01:03-B1*06:01L HLA -DQA1*02:01-B1*03:03L
VSAKPPPGDQ

SEQ ID NO: 9673 - protein, 10 aa, Severe acute respiratory syndrome coronavirus 2
  REGION 1..10: note = Table B: HLA-DQA1*03:02-B1*03:03L HLA-DQA1*05:01-B1*03:01L HLA-DRB1*13:02L HLA-DRB1*13:03L HLA-DRB1*01:03M HLA-DRB1*04:05L HLA-DQA1*01:02-B1*06:02M HLA-DRB4*03:01NL HLA-DRB1*08:77L HLA-DPA1*01:03-B1*03:01L HLA-DPA1*03:01-B1*04:02L
  REGION 1..10: note = CONT. FROM ABOVE: HLA-DRB1*03:01L HLA-DRB1*14:01L HLA-DRB1*14:02 M HLA-DRB1*11:01L HLA-DQA1*01-B1*05L HLA-DQA1*05:05-B1*03:19L HL A-DQA1*05:01-B1*02:01L HLA-DPA1*01:03-B1*04:01L HLA-DQA1*05:05-B 1*03:116L HLA-DPA1*01:03-B1*04:02L HLA-DPA1*02:01-B1*13:01L
  REGION 1..10: note = CONT. FROM ABOVE: HLA-DPA1*03:01-B1*105:01L HLA-DRB1*10:01L HLA- DRB1*16:01L HLA-DQA1*01:03-B1*06:01L HLA-DRB1*08:02L HLA-DQA1*02 :01-B1*03:03M HLA-DRB1*15:03L
SAKPPPGDQF

SEQ ID NO: 9674 - protein, 17 aa, Severe acute respiratory syndrome coronavirus 2
  REGION 1..17: note = Table B: HLA-DQA1*03:02-B1*03:03L HLA-DRB1*04:03L HLA-DRB1*13:03L HLA-DRB1*04:04L HLA-DRB1*01:01L HLA-DRB1*08:04L HLA-DRB3*02:01L HLA-DRB1*11:03L HLA-DRB1*11:04L HLA-DRB1*11:01L HLA-DRB3*01:01L HLA-DQA1*03:01-B1*03:02L
  REGION 1..17: note = CONT. FROM ABOVE: HLA-DPA1*01:03-B1*104:01L HLA-DQA1*05:05-B1*03 :01L
KPPPGDQFKHLIPLMYK

SEQ ID NO: 9675 - protein, 19 aa, Severe acute respiratory syndrome coronavirus 2
  REGION 1..19: note = Table B: HLA-DQA1*03:02-B1*03:03L HLA-DRB1*08:04L HLA-DRB3*02:01L HLA-DRB1*11:02L HLA-DQA1*01-B1*05L HLA-DRB1*09:01L HLA-DPA1*01:03-B1*104:01L HLA-DRB1*08:02L
PPPGDQFKHLIPLMYKGLP

SEQ ID NO: 9676 - protein, 11 aa, Severe acute respiratory syndrome coronavirus 2
  REGION 1..11: note = Table B: HLA-DQA1*03:02-B1*03:03L HLA-DQA1*05:01-B1*03:01L HLA-DRB1*04:03L HLA-DRB1*04:02L HLA-DQA1*01:02-B1*06:02L HLA-DQA1*01-B1*05L HLA-DQA1*05:01-B1*02:01L HLA-DRB1*12:01L HLA-DQA1*03:01-B1*03:02L HLA-DPA1*01:02-B1*04:01L
  REGION 1..11: note = CONT. FROM ABOVE: HLA-DRB1*16:01L HLA-DQA1*01:03-B1*06:01L HLA-D QA1*02:01-B1*03:03L HLA-DRB1*15:03L
IPLMYKGLPWN

SEQ ID NO: 9677 - protein, 10 aa, Severe acute respiratory syndrome coronavirus 2
  REGION 1..10: note = Table B: HLA-DQA1*03:02-B1*03:03L HLA-DQA1*05:01-B1*03:01L HLA-DQA1*01:02-B1*06:02L HLA-DPA1*01:03-B1*03:01L HLA-DRB1*14:01L HLA-DQA1*05:01-B1*02:01L HLA-DRB1*12:01L HLA-DPA1*03:01-B1*105:01L HLA-DQA1*03:01-B1*03:02L
  REGION 1..10: note = CONT. FROM ABOVE: HLA-DPA1*01:02-B1*04:01L HLA-DQA1*01:03-B1*06: 01L HLA-DQA1*02:01-B1*03:03L HLA-DRB1*15:03L
NVVRIKIVQM

SEQ ID NO: 9678 - protein, 10 aa, Severe acute respiratory syndrome coronavirus 2
  REGION 1..10: note = Table B: HLA-DQA1*03:02-B1*03:03L HLA-DPA1*03:01-B1*04:02L HLA-DQA1*03:01-B1*03:02L HLA-DQA1*02:01-B1*03:03L HLA-DRB1*15:03L
QMLSDTLKNL

SEQ ID NO: 9679 - protein, 12 aa, Severe acute respiratory syndrome coronavirus 2
  REGION 1..12: note = Table B: HLA-DQA1*03:02-B1*03:03L HLA-DRB1*04:02L HLA-DQA1*01:02-B1*06:02L HLA-DPA1*03:01-B1*04:02L HLA-DRB1*14:01L HLA-DQA1*05:01-B1*02:01L HLA-DRB1*12:01L HLA-DPA1*03:01-B1*105:01L HLA-DRB1*14:17L HLA-DRB1*16:01L
  REGION 1..12: note = CONT. FROM ABOVE: HLA-DQA1*01:03-B1*06:01L HLA-DRB1*15:03L
SDTLKNLSDRVV

SEQ ID NO: 9680 - protein, 10 aa, Severe acute respiratory syndrome coronavirus 2
  REGION 1..10: note = Table B: HLA-DQA1*03:02-B1*03:03L HLA-DQA1*03:01-B1*03:02L HLA-DQA1*02:01-B1*03:03L HLA-DRB1*15:03L
NLSDRVVFVL

SEQ ID NO: 9681 - protein, 13 aa, Severe acute respiratory syndrome coronavirus 2
  REGION 1..13: note = Table B: HLA-DQA1*03:02-B1*03:03L HLA-DRB1*01:03L HLA-DRB1*04:04L HLA-DRB1*04:05L HLA-DRB1*08:04L HLA-DRB3*02:01L HLA-DPA1*01:03-B1*03:01L HLA-DRB1*14:02L HLA-DRB1*08:01L HLA-DQA1*05:05-B1*03:19L HLA-DRB1*09:01L
  REGION 1..13: note = CONT. FROM ABOVE: HLA-DQA1*03:01-B1*03:02L HLA-DPA1*01:03-B1*02: 01L HLA-DPA1*01:03-B1*104:01L HLA-DQA1*05:05-B1*03:01L
DRVVFVLWAHGFE

SEQ ID NO: 9682 - protein, 10 aa, Severe acute respiratory syndrome coronavirus 2
  REGION 1..10: note = Table B: HLA-DQA1*03:02-B1*03:03L HLA-DQA1*05:01-B1*03:01L HLA-DPA1*03:01-B1*04:02L HLA-DPA1*02:01-B1*13:01L HLA-DQA1*03:01-B1*03:02L HLA-DPA1*01:02-B1*04:01L HLA-DQA1*01:03-B1*06:01L HLA-DQA1*02:01-B1*03:03L
  REGION 1..10: note = CONT. FROM ABOVE: HLA-DRB1*15:03L
FVLWAHGFEL

SEQ ID NO: 9683 - protein, 10 aa, Severe acute respiratory syndrome coronavirus 2
  REGION 1..10: note = Table B: HLA-DQA1*03:02-B1*03:03L HLA-DQA1*05:01-B1*03:01L HLA-DQA1*01:02-B1*06:02L HLA-DPA1*03:01-B1*04:02L HLA-DQA1*01-B1*05L HLA-DQA1*05:05-B1*03:19L HLA-DQA1*05:01-B1*02:01L HLA-DPA1*01:03-B1*04:02L
  REGION 1..10: note = CONT. FROM ABOVE: HLA-DPA1*02:01-B1*13:01L HLA-DPA1*03:01-B1*105 :01L HLA-DQA1*03:01-B1*03:02L HLA-DPA1*01:02-B1*04:01L HLA-DRB1* 16:01L HLA-DQA1*01:03-B1*06:01L HLA-DQA1*02:01-B1*03:03L HLA-DRB 1*15:03L
WAHGFELTSM

SEQ ID NO: 9684 - protein, 10 aa, Severe acute respiratory syndrome coronavirus 2
  REGION 1..10: note = Table B: HLA-DQA1*03:02-B1*03:03L HLA-DQA1*05:05-B1*03:19M HLA-DPA1*01:03-B1*104:01L
FELTSMKYFV

SEQ ID NO: 9685 - protein, 10 aa, Severe acute respiratory syndrome coronavirus 2
  REGION 1..10: note = Table B: HLA-DQA1*03:02-B1*03:03L HLA-DQA1*05:01-B1*03:01L HLA-DRB1*04:03L HLA-DRB1*13:03L HLA-DRB1*01:03L HLA-DRB1*04:02L HLA-DRB1*04:05L HLA-DQA1*01:02-B1*06:02L HLA-DRB1*01:02L HLA-DRB4*03:01NL HLA-DQA1*01-B1*05L HLA-DQA1*05:01-B1*02:01L
  REGION 1..10: note = CONT. FROM ABOVE: HLA-DRB1*12:01L HLA-DPA1*03:01-B1*105:01L HLA- DQA1*03:01-B1*03:02L HLA-DQA1*05:05-B1*03:01L HLA-DRB1*14:17L HL A-DPA1*01:02-B1*04:01L HLA-DRB1*16:01L HLA-DQA1*01:03-B1*06:01L HLA-DRB1*04:08L HLA-DQA1*02:01-B1*03:03L HLA-DRB1*15:03L
YFVKIGPERT

SEQ ID NO: 9686 - protein, 14 aa, Severe acute respiratory syndrome coronavirus 2
  REGION 1..14: note = Table B: HLA-DQA1*03:02-B1*03:03L HLA-DQA1*05:05-B1*03:19L
TASDTYACWHHSIG

SEQ ID NO: 9687 - protein, 10 aa, Severe acute respiratory syndrome coronavirus 2
  REGION 1..10: note = Table B: HLA-DQA1*03:02-B1*03:03L HLA-DQA1*01-B1*05L HLA-DQA1*05:01-B1*02:01L
GFDYVYNPFM

SEQ ID NO: 9688 - protein, 10 aa, Severe acute respiratory syndrome coronavirus 2
  REGION 1..10: note = Table B: HLA-DQA1*03:02-B1*03:03L HLA-DQA1*01:02-B1*06:02L HLA-DRB1*01:02L HLA-DPA1*03:01-B1*04:02L HLA-DRB1*14:02L HLA-DQA1*05:05-B1*03:19L HLA-DPA1*02:01-B1*13:01L HLA-DPA1*03:01-B1*105:01L HLA-DPA1*01:03-B1*104:01L
  REGION 1..10: note = CONT. FROM ABOVE: HLA-DPA1*01:02-B1*04:01L HLA-DQA1*01:03-B1*06: 01L HLA-DRB1*08:03L HLA-DQA1*02:01-B1*03:03L HLA-DRB1*15:03L
YVYNPFMIDV

SEQ ID NO: 9689 - protein, 11 aa, Severe acute respiratory syndrome coronavirus 2
  REGION 1..11: note = Table B: HLA-DQA1*03:02-B1*03:03L HLA-DRB1*04:03L HLA-DQA1*05:01-B1*02:01L HLA-DQA1*03:01-B1*03:02L HLA-DRB1*16:01L HLA-DQA1*02:01-B1*03:03L
VYNPFMIDVQQ

SEQ ID NO: 9690 - protein, 11 aa, Severe acute respiratory syndrome coronavirus 2
  REGION 1..11: note = Table B: HLA-DQA1*03:02-B1*03:03L HLA-DRB1*04:03L HLA-DRB1*04:02L HLA-DRB4*03:01NL HLA-DQA1*01:01-B1*05:01L HLA-DQA1*01-B1*05L HLA-DRB1*12:01L HLA-DQA1*03:01-B1*03:02L HLA-DRB1*14:17L HLA-DRB1*16:01L
NPFMIDVQQWG

SEQ ID NO: 9691 - protein, 10 aa, Severe acute respiratory syndrome coronavirus 2
  REGION 1..10: note = Table B: HLA-DQA1*03:02-B1*03:03L HLA-DRB1*01:03L HLA-DRB1*04:05L HLA-DQA1*01:02-B1*06:02L HLA-DRB1*01:01L HLA-DRB1*08:77L HLA-DPA1*03:01-B1*04:02L HLA-DRB1*14:02L HLA-DQA1*05:05-B1*03:19L HLA-DRB4*01:01L
  REGION 1..10: note = CONT. FROM ABOVE: HLA-DPA1*01:03-B1*04:01L HLA-DQA1*05:05-B1*03: 116L HLA-DPA1*02:01-B1*13:01M HLA-DPA1*03:01-B1*105:01L HLA-DPA1 *01:03-B1*104:01L HLA-DRB1*16:01L HLA-DQA1*01:03-B1*06:01L HLA-D QA1*02:01-B1*03:03L HLA-DRB1*15:03L
FMIDVQQWGF

SEQ ID NO: 9692 - protein, 12 aa, Severe acute respiratory syndrome coronavirus 2
  REGION 1..12: note = Table B: HLA-DQA1*03:02-B1*03:03L HLA-DQA1*05:01-B1*02:01L HLA-DQA1*03:01-B1*03:02L HLA-DQA1*01:03-B1*06:01L HLA-DQA1*02:01-B1*03:03L
DVQQWGFTGNLQ

SEQ ID NO: 9693 - protein, 13 aa, Severe acute respiratory syndrome coronavirus 2
  REGION 1..13: note = Table B: HLA-DQA1*03:02-B1*03:03L HLA-DQA1*05:01-B1*03:01L HLA-DRB1*13:02L HLA-DRB1*13:03L HLA-DRB1*01:03L HLA-DRB1*04:04L HLA-DQA1*01:02-B1*06:02L HLA-DRB1*01:02L HLA-DRB1*08:04L HLA-DRB1*08:77L HLA-DPA1*01:03-B1*03:01L HLA-DRB1*11:04L
  REGION 1..13: note = CONT. FROM ABOVE: HLA-DRB1*08:01L HLA-DQA1*05:05-B1*03:19L HLA-D QA1*05:01-B1*02:01L HLA-DRB1*12:01L HLA-DRB1*12:02L HLA-DPA1*02: 01-B1*13:01L HLA-DPA1*03:01-B1*105:01L HLA-DQA1*03:01-B1*03:02L HLA-DRB1*14:54L HLA-DQA1*05:05-B1*03:01L HLA-DRB1*10:01L
  REGION 1..13: note = CONT. FROM ABOVE: HLA-DQA1*01:03-B1*06:01L HLA-DRB1*04:08L HLA-D RB1*08:03L HLA-DQA1*02:01-B1*03:03L HLA-DRB1*15:03L
VQQWGFTGNLQSN

SEQ ID NO: 9694 - protein, 10 aa, Severe acute respiratory syndrome coronavirus 2
  REGION 1..10: note = Table B: HLA-DQA1*03:02-B1*03:03L HLA-DQA1*05:01-B1*03:01L HLA-DRB1*04:03L HLA-DRB1*13:03L HLA-DRB1*01:03L HLA-DRB1*04:02L HLA-DQA1*01:02-B1*06:02L HLA-DRB1*01:02L HLA-DRB4*03:01NL HLA-DQA1*01:01-B1*05:01L HLA-DQA1*01-B1*05L
  REGION 1..10: note = CONT. FROM ABOVE: HLA-DQA1*05:05-B1*03:19L HLA-DQA1*05:01-B1*02: 01L HLA-DPA1*01:03-B1*04:02L HLA-DRB1*12:01L HLA-DPA1*03:01-B1*1 05:01L HLA-DQA1*03:01-B1*03:02L HLA-DQA1*05:05-B1*03:01L HLA-DRB 1*14:17L HLA-DPA1*01:02-B1*04:01L HLA-DRB1*16:01L
  REGION 1..10: note = CONT. FROM ABOVE: HLA-DQA1*01:03-B1*06:01M HLA-DQA1*02:01-B1*03: 03L
FTGNLQSNHD

SEQ ID NO: 9695 - protein, 10 aa, Severe acute respiratory syndrome coronavirus 2
  REGION 1..10: note = Table B: HLA-DQA1*03:02-B1*03:03L HLA-DQA1*03:01-B1*03:02L HLA-DQA1*01:03-B1*06:01L HLA-DQA1*02:01-B1*03:03L
TGNLQSNHDL

SEQ ID NO: 9696 - protein, 10 aa, Severe acute respiratory syndrome coronavirus 2
  REGION 1..10: note = Table B: HLA-DQA1*03:02-B1*03:03L HLA-DQA1*05:01-B1*03:01L HLA-DRB1*04:03L HLA-DRB1*04:02L HLA-DQA1*01:02-B1*06:02L HLA-DRB1*01:02L HLA-DQA1*05:05-B1*03:19L HLA-DPA1*03:01-B1*105:01L HLA-DQA1*03:01-B1*03:02L
  REGION 1..10: note = CONT. FROM ABOVE: HLA-DQA1*05:05-B1*03:01L HLA-DRB1*14:17L HLA-D QA1*01:03-B1*06:01M HLA-DQA1*02:01-B1*03:03L
VASCDAIMTR

SEQ ID NO: 9697 - protein, 11 aa, Severe acute respiratory syndrome coronavirus 2
  REGION 1..11: note = Table B: HLA-DQA1*03:02-B1*03:03L HLA-DQA1*05:01-B1*03:01L HLA-DQA1*01:02-B1*06:02L HLA-DQA1*01-B1*05L HLA-DQA1*05:05-B1*03:19L HLA-DQA1*05:01-B1*02:01L HLA-DPA1*03:01-B1*105:01L HLA-DQA1*03:01-B1*03:02L
  REGION 1..11: note = CONT. FROM ABOVE: HLA-DQA1*05:05-B1*03:01L HLA-DRB1*16:01L HLA-D QA1*01:03-B1*06:01L HLA-DQA1*02:01-B1*03:03L
VDWTIEYPIIG

SEQ ID NO: 9698 - protein, 12 aa, Severe acute respiratory syndrome coronavirus 2
  REGION 1..12: note = Table B: HLA-DQA1*03:02-B1*03:03L HLA-DQA1*05:01-B1*03:01L HLA-DQA1*01:02-B1*06:02L HLA-DRB1*01:02L HLA-DQA1*01-B1*05L HLA-DQA1*05:05-B1*03:19L HLA-DQA1*05:01-B1*02:01L HLA-DQA1*05:05-B1*03:01L
DWTIEYPIIGDE

SEQ ID NO: 9699 - protein, 10 aa, Severe acute respiratory syndrome coronavirus 2
  REGION 1..10: note = Table B: HLA-DQA1*03:02-B1*03:03H HLA-DQA1*05:01-B1*03:01L HLA-DRB1*13:02L HLA-DRB1*13:03L HLA-DQA1*01:02-B1*06:02L HLA-DRB1*08:77L HLA-DPA1*03:01-B1*04:02L HLA-DRB1*03:01L HLA-DRB1*14:01L HLA-DRB1*11:02L HLA-DRB1*14:02L HLA-DRB1*08:01L
  REGION 1..10: note = CONT. FROM ABOVE: HLA-DRB1*11:01L HLA-DQA1*01-B1*05L HLA-DQA1*05 :05-B1*03:19M HLA-DQA1*05:01-B1*02:01L HLA-DRB4*01:01L HLA-DPA1* 01:03-B1*04:01L HLA-DQA1*05:05-B1*03:116M HLA-DRB1*09:01M HLA-DP A1*01:03-B1*04:02L HLA-DRB1*12:01L HLA-DPA1*02:01-B1*13:01L
  REGION 1..10: note = CONT. FROM ABOVE: HLA-DPA1*03:01-B1*105:01L HLA-DQA1*03:01-B1*03 :02M HLA-DPA1*01:03-B1*104:01M HLA-DPA1*01:02-B1*04:01L HLA-DRB1 *10:01L HLA-DRB1*16:01L HLA-DQA1*01:03-B1*06:01L HLA-DRB1*08:03L HLA-DQA1*02:01-B1*03:03L HLA-DRB1*15:03L
IEYPIIGDEL

SEQ ID NO: 9700 - protein, 10 aa, Severe acute respiratory syndrome coronavirus 2
  REGION 1..10: note = Table B: HLA-DQA1*03:02-B1*03:03L HLA-DQA1*05:01-B1*03:01L HLA-DRB1*13:03L HLA-DRB1*04:05L HLA-DQA1*01:02-B1*06:02L HLA-DRB1*01:01L HLA-DPA1*03:01-B1*04:02L HLA-DQA1*01-B1*05L HLA-DQA1*05:05-B1*03:19L HLA-DQA1*05:05-B1*03:116M
  REGION 1..10: note = CONT. FROM ABOVE: HLA-DPA1*02:01-B1*13:01M HLA-DPA1*03:01-B1*105 :01L HLA-DPA1*01:02-B1*04:01L HLA-DQA1*01:03-B1*06:01L HLA-DRB1* 08:03L HLA-DRB1*15:03L
YPIIGDELKI

SEQ ID NO: 9701 - protein, 10 aa, Severe acute respiratory syndrome coronavirus 2
  REGION 1..10: note = Table B: HLA-DQA1*03:02-B1*03:03L HLA-DQA1*05:01-B1*03:01L HLA-DQA1*01:02-B1*06:02L HLA-DRB1*14:01L HLA-DQA1*03:01-B1*03:02L HLA-DPA1*01:02-B1*04:01L HLA-DRB1*16:01L HLA-DQA1*01:03-B1*06:01L
  REGION 1..10: note = CONT. FROM ABOVE: HLA-DQA1*02:01-B1*03:03L
VQHMVVKAAL

SEQ ID NO: 9702 - protein, 10 aa, Severe acute respiratory syndrome coronavirus 2
  REGION 1..10: note = Table B: HLA-DQA1*03:02-B1*03:03M HLA-DQA1*05:01-B1*03:01L HLA-DQA1*01:02-B1*06:02L HLA-DPA1*03:01-B1*04:02L HLA-DRB1*14:01L HLA-DRB1*14:02L HLA-DQA1*05:05-B1*03:19L HLA-DQA1*05:01-B1*02:01L HLA-DPA1*01:03-B1*04:01L
  REGION 1..10: note = CONT. FROM ABOVE: HLA-DQA1*05:05-B1*03:116L HLA-DRB1*09:01L HLA- DPA1*01:03-B1*04:02L HLA-DPA1*02:01-B1*13:01L HLA-DPA1*03:01-B1* 105:01L HLA-DQA1*03:01-B1*03:02L HLA-DPA1*01:03-B1*104:01L HLA-D PA1*01:02-B1*04:01L HLA-DRB1*16:01L HLA-DQA1*01:03-B1*06:01L
  REGION 1..10: note = CONT. FROM ABOVE: HLA-DRB1*08:03L HLA-DQA1*02:01-B1*03:03L HLA-D RB1*15:03L
ALLADKFPVL

SEQ ID NO: 9703 - protein, 10 aa, Severe acute respiratory syndrome coronavirus 2
  REGION 1..10: note = Table B: HLA-DQA1*03:02-B1*03:03L HLA-DQA1*05:01-B1*03:01L HLA-DRB1*13:03L HLA-DRB1*14:02L HLA-DQA1*05:05-B1*03:116L HLA-DQA1*03:01-B1*03:02L HLA-DRB1*16:01L HLA-DQA1*02:01-B1*03:03L HLA-DRB1*15:03L
VLHDIGNPKA

SEQ ID NO: 9704 - protein, 10 aa, Severe acute respiratory syndrome coronavirus 2
  REGION 1..10: note = Table B: HLA-DQA1*03:02-B1*03:03L HLA-DQA1*01-B1*05L HLA-DQA1*05:05-B1*03:19L HLA-DQA1*05:01-B1*02:01L HLA-DQA1*03:01-B1*03:02L HLA-DRB1*16:01L
LHDIGNPKAI

SEQ ID NO: 9705 - protein, 13 aa, Severe acute respiratory syndrome coronavirus 2
  REGION 1..13: note = Table B: HLA-DQA1*03:02-B1*03:03L HLA-DQA1*05:01-B1*03:01L HLA-DRB1*04:03L HLA-DRB1*01:02L HLA-DQA1*05:05-B1*03:19L HLA-DQA1*03:01-B1*03:02L HLA-DQA1*05:05-B1*03:01L HLA-DQA1*01:03-B1*06:01L HLA-DRB1*04:08L
  REGION 1..13: note = CONT. FROM ABOVE: HLA-DQA1*02:01-B1*03:03L
IGNPKAIKCVPQA

SEQ ID NO: 9706 - protein, 12 aa, Severe acute respiratory syndrome coronavirus 2
  REGION 1..12: note = Table B: HLA-DQA1*03:02-B1*03:03L HLA-DQA1*05:01-B1*03:01L HLA-DRB1*04:03L HLA-DQA1*01:02-B1*06:02L HLA-DQA1*05:05-B1*03:19L HLA-DPA1*03:01-B1*105:01L HLA-DQA1*03:01-B1*03:02L HLA-DQA1*05:05-B1*03:01L
  REGION 1..12: note = CONT. FROM ABOVE: HLA-DQA1*01:03-B1*06:01L HLA-DQA1*02:01-B1*03: 03L
NPKAIKCVPQAD

SEQ ID NO: 9707 - protein, 15 aa, Severe acute respiratory syndrome coronavirus 2
  REGION 1..15: note = Table B: HLA-DQA1*03:02-B1*03:03L HLA-DRB1*04:03L HLA-DRB1*01:03L HLA-DRB1*04:05L HLA-DRB1*01:02L HLA-DRB1*08:04L HLA-DRB1*14:01L HLA-DRB1*08:01L HLA-DPA1*01:03-B1*04:01L HLA-DPA1*01:03-B1*04:02L HLA-DRB1*12:01L
  REGION 1..15: note = CONT. FROM ABOVE: HLA-DQA1*03:01-B1*03:02L HLA-DRB1*04:08L HLA-D QA1*02:01-B1*03:03L
VPQADVEWKFYDAQP

SEQ ID NO: 9708 - protein, 13 aa, Severe acute respiratory syndrome coronavirus 2
  REGION 1..13: note = Table B: HLA-DQA1*03:02-B1*03:03L HLA-DQA1*05:01-B1*03:01L HLA-DRB1*04:03L HLA-DRB1*13:02L HLA-DRB1*04:05L HLA-DQA1*01:02-B1*06:02L HLA-DRB1*01:01L HLA-DRB3*02:01L HLA-DPA1*03:01-B1*04:02L HLA-DRB1*14:02L HLA-DRB1*08:01L
  REGION 1..13: note = CONT. FROM ABOVE: HLA-DQA1*05:05-B1*03:19L HLA-DQA1*05:01-B1*02: 01L HLA-DPA1*02:01-B1*13:01L HLA-DPA1*03:01-B1*105:01L HLA-DQA1* 03:01-B1*03:02L HLA-DQA1*05:05-B1*03:01L HLA-DRB1*07:01L HLA-DRB 1*10:01L HLA-DRB1*15:01L
VEWKFYDAQPCSD

SEQ ID NO: 9709 - protein, 12 aa, Severe acute respiratory syndrome coronavirus 2
  REGION 1..12: note = Table B: HLA-DQA1*03:02-B1*03:03L HLA-DQA1*05:01-B1*03:01L HLA-DRB1*04:01L HLA-DRB1*13:02L HLA-DRB1*04:04L HLA-DQA1*01:02-B1*06:02L HLA-DRB1*01:01L HLA-DRB3*02:01L HLA-DPA1*01:03-B1*03:01L HLA-DPA1*03:01-B1*04:02L
  REGION 1..12: note = CONT. FROM ABOVE: HLA-DRB1*14:01L HLA-DRB1*11:03L HLA-DRB1*11:04 L HLA-DRB1*14:02L HLA-DRB1*11:01L HLA-DQA1*05:05-B1*03:19L HLA-D QA1*05:01-B1*02:01L HLA-DPA1*01:03-B1*04:02L HLA-DRB3*01:01L HLA -DPA1*02:01-B1*13:01L HLA-DPA1*01:03-B1*104:01L
  REGION 1..12: note = CONT. FROM ABOVE: HLA-DQA1*05:05-B1*03:01L HLA-DRB1*07:01L HLA-D RB1*10:01L HLA-DQA1*01:03-B1*06:01L HLA-DRB1*08:03L HLA-DRB1*15: 01L
WKFYDAQPCSDK

SEQ ID NO: 9710 - protein, 10 aa, Severe acute respiratory syndrome coronavirus 2
  REGION 1..10: note = Table B: HLA-DQA1*03:02-B1*03:03L HLA-DQA1*01-B1*05L HLA-DQA1*03:01-B1*03:02L
SDKAYKIEEL

SEQ ID NO: 9711 - protein, 13 aa, Severe acute respiratory syndrome coronavirus 2
  REGION 1..13: note = Table B: HLA-DQA1*03:02-B1*03:03L HLA-DRB1*01:02L HLA-DQA1*05:05-B1*03:01L HLA-DRB1*04:08L
DKAYKIEELFYSY

SEQ ID NO: 9712 - protein, 12 aa, Severe acute respiratory syndrome coronavirus 2
  REGION 1..12: note = Table B: HLA-DQA1*03:02-B1*03:03L HLA-DRB1*04:03L HLA-DRB1*04:02L HLA-DQA1*05:01-B1*02:01L HLA-DRB1*16:01L HLA-DQA1*02:01-B1*03:03L HLA-DRB1*15:03L
EELFYSYATHSD

SEQ ID NO: 9713 - protein, 10 aa, Severe acute respiratory syndrome coronavirus 2
  REGION 1..10: note = Table B: HLA-DQA1*03:02-B1*03:03L HLA-DQA1*05:01-B1*03:01L HLA-DRB1*04:03L HLA-DRB1*13:03L HLA-DRB1*01:03L HLA-DRB1*04:02L HLA-DRB1*04:04L HLA-DRB1*04:05L HLA-DQA1*01:02-B1*06:02L HLA-DRB1*01:02L HLA-DRB4*03:01NL HLA-DQA1*01:01-B1*05:01L
  REGION 1..10: note = CONT. FROM ABOVE: HLA-DRB1*08:01L HLA-DQA1*01-B1*05L HLA-DQA1*05 :01-B1*02:01L HLA-DRB1*04:10L HLA-DRB1*12:01L HLA-DPA1*03:01-B1* 105:01L HLA-DQA1*03:01-B1*03:02L HLA-DRB1*14:54L HLA-DRB1*14:17L HLA-DPA1*01:02-B1*04:01L HLA-DRB1*10:01L HLA-DRB1*16:01L
  REGION 1..10: note = CONT. FROM ABOVE: HLA-DQA1*01:03-B1*06:01L HLA-DRB1*04:08L HLA-D RB1*08:03L HLA-DQA1*02:01-B1*03:03L HLA-DRB1*15:03L
FYSYATHSDK

SEQ ID NO: 9714 - protein, 10 aa, Severe acute respiratory syndrome coronavirus 2
  REGION 1..10: note = Table B: HLA-DQA1*03:02-B1*03:03L HLA-DQA1*05:01-B1*03:01L HLA-DRB1*04:03L HLA-DRB1*01:03L HLA-DRB1*04:05L HLA-DQA1*01:02-B1*06:02L HLA-DRB1*01:01L HLA-DRB1*01:02L HLA-DRB1*08:77L HLA-DRB1*14:02L HLA-DQA1*01:01-B1*05:01L
  REGION 1..10: note = CONT. FROM ABOVE: HLA-DQA1*05:05-B1*03:19L HLA-DQA1*05:01-B1*02: 01L HLA-DPA1*01:03-B1*04:01L HLA-DPA1*02:01-B1*13:01L HLA-DPA1*0 3:01-B1*105:01L HLA-DRB1*16:01L HLA-DQA1*01:03-B1*06:01M HLA-DQA 1*02:01-B1*03:03L HLA-DRB1*15:03L
YSYATHSDKF

SEQ ID NO: 9715 - protein, 11 aa, Severe acute respiratory syndrome coronavirus 2
  REGION 1..11: note = Table B: HLA-DQA1*03:02-B1*03:03L HLA-DRB1*04:03L HLA-DRB1*13:03L HLA-DRB1*01:03L HLA-DRB1*04:02L HLA-DRB1*04:05L HLA-DQA1*01-B1*05L HLA-DQA1*05:01-B1*02:01L HLA-DRB1*14:17L HLA-DPA1*01:02-B1*04:01L HLA-DRB1*16:01L
  REGION 1..11: note = CONT. FROM ABOVE: HLA-DQA1*01:03-B1*06:01L HLA-DQA1*02:01-B1*03: 03L
YATHSDKFTDG

SEQ ID NO: 9716 - protein, 10 aa, Severe acute respiratory syndrome coronavirus 2
  REGION 1..10: note = Table B: HLA-DQA1*03:02-B1*03:03L HLA-DQA1*05:05-B1*03:19L HLA-DQA1*03:01-B1*03:02L HLA-DPA1*01:03-B1*104:01L HLA-DRB1*16:01L HLA-DQA1*02:01-B1*03:03L
NVDRYPANSI

SEQ ID NO: 9717 - protein, 10 aa, Severe acute respiratory syndrome coronavirus 2
  REGION 1..10: note = Table B: HLA-DQA1*03:02-B1*03:03L HLA-DQA1*05:01-B1*03:01L HLA-DRB1*04:03L HLA-DRB1*13:03L HLA-DRB1*01:03L HLA-DRB1*04:02L HLA-DQA1*01:02-B1*06:02L HLA-DRB1*01:02L HLA-DRB4*03:01NL HLA-DPA1*01:03-B1*03:01L HLA-DPA1*03:01-B1*04:02L
  REGION 1..10: note = CONT. FROM ABOVE: HLA-DRB1*14:01L HLA-DQA1*01-B1*05L HLA-DQA1*05 :05-B1*03:19L HLA-DQA1*05:01-B1*02:01L HLA-DQA1*05:05-B1*03:116L HLA-DRB1*12:01L HLA-DPA1*02:01-B1*13:01L HLA-DPA1*03:01-B1*105:0 1L HLA-DQA1*03:01-B1*03:02L HLA-DPA1*01:03-B1*104:01L
  REGION 1..10: note = CONT. FROM ABOVE: HLA-DRB1*14:17L HLA-DPA1*01:02-B1*04:01L HLA-D RB1*16:01L HLA-DQA1*01:03-B1*06:01L HLA-DQA1*02:01-B1*03:03L HLA -DRB1*15:03L
VDRYPANSIV

SEQ ID NO: 9718 - protein, 10 aa, Severe acute respiratory syndrome coronavirus 2
  REGION 1..10: note = Table B: HLA-DQA1*03:02-B1*03:03L HLA-DRB1*01:03L HLA-DQA1*03:01-B1*03:02L HLA-DPA1*01:02-B1*04:01L HLA-DRB1*16:01L HLA-DQA1*01:03-B1*06:01L HLA-DQA1*02:01-B1*03:03L
RFDTRVLSNL

SEQ ID NO: 9719 - protein, 12 aa, Severe acute respiratory syndrome coronavirus 2
  REGION 1..12: note = Table B: HLA-DQA1*03:02-B1*03:03L HLA-DRB1*13:03L HLA-DRB1*01:03L HLA-DRB1*04:05L HLA-DQA1*01-B1*05L HLA-DQA1*05:01-B1*02:01L HLA-DRB1*04:10L HLA-DRB1*12:01L HLA-DRB1*14:54L HLA-DRB1*16:01L HLA-DQA1*02:01-B1*03:03L
DTRVLSNLNLPG

SEQ ID NO: 9720 - protein, 15 aa, Severe acute respiratory syndrome coronavirus 2
  REGION 1..15: note = Table B: HLA-DQA1*03:02-B1*03:03L HLA-DQA1*05:05-B1*03:19L HLA-DPA1*03:01-B1*105:01L HLA-DRB1*04:08L
LPGCDGGSLYVNKHA

SEQ ID NO: 9721 - protein, 16 aa, Severe acute respiratory syndrome coronavirus 2
  REGION 1..16: note = Table B: HLA-DQA1*03:02-B1*03:03L HLA-DRB1*08:77L HLA-DRB3*02:01L HLA-DQA1*05:01-B1*02:01L HLA-DRB1*12:02L
DGGSLYVNKHAFHTPA

SEQ ID NO: 9722 - protein, 13 aa, Severe acute respiratory syndrome coronavirus 2
  REGION 1..13: note = Table B: HLA-DQA1*03:02-B1*03:03L HLA-DQA1*05:01-B1*03:01L HLA-DPA1*01:03-B1*03:01L HLA-DRB1*14:01L HLA-DRB1*08:01L HLA-DQA1*01-B1*05L HLA-DPA1*03:01-B1*105:01L HLA-DQA1*05:05-B1*03:01L HLA-DQA1*01:03-B1*06:01L
  REGION 1..13: note = CONT. FROM ABOVE: HLA-DRB1*15:03L
YVNKHAFHTPAFD

SEQ ID NO: 9723 - protein, 15 aa, Severe acute respiratory syndrome coronavirus 2
  REGION 1..15: note = Table B: HLA-DQA1*03:02-B1*03:03L HLA-DRB1*04:03L HLA-DPA1*03:01-B1*04:02L HLA-DPA1*01:03-B1*04:01L
VNKHAFHTPAFDKSA

SEQ ID NO: 9724 - protein, 11 aa, Severe acute respiratory syndrome coronavirus 2
  REGION 1..11: note = Table B: HLA-DQA1*03:02-B1*03:03L HLA-DRB1*04:03L HLA-DQA1*05:01-B1*02:01L HLA-DQA1*03:01-B1*03:02L HLA-DQA1*02:01-B1*03:03L
TPAFDKSAFVN

SEQ ID NO: 9725 - protein, 10 aa, Severe acute respiratory syndrome coronavirus 2
  REGION 1..10: note = Table B: HLA-DQA1*03:02-B1*03:03L HLA-DQA1*05:01-B1*03:01L HLA-DPA1*03:01-B1*04:02L HLA-DQA1*05:01-B1*02:01L HLA-DPA1*01:03-B1*04:01L HLA-DPA1*03:01-B1*105:01L HLA-DQA1*03:01-B1*03:02L HLA-DPA1*01:02-B1*04:01L
  REGION 1..10: note = CONT. FROM ABOVE: HLA-DRB1*16:01L HLA-DQA1*01:03-B1*06:01L HLA-D QA1*02:01-B1*03:03L HLA-DRB1*15:03L
AFDKSAFVNL

SEQ ID NO: 9726 - protein, 10 aa, Severe acute respiratory syndrome coronavirus 2
  REGION 1..10: note = Table B: HLA-DQA1*03:02-B1*03:03L HLA-DQA1*05:01-B1*03:01L HLA-DRB1*04:03L HLA-DRB1*13:02L HLA-DRB1*13:03L HLA-DRB1*01:03L HLA-DRB1*04:02L HLA-DRB1*04:05L HLA-DQA1*01:02-B1*06:02L HLA-DRB1*01:01L HLA-DRB1*01:02L HLA-DRB4*03:01NL HLA-DRB1*08:04L
  REGION 1..10: note = CONT. FROM ABOVE: HLA-DRB1*08:77L HLA-DRB3*02:01L HLA-DPA1*01:03 -B1*03:01L HLA-DPA1*03:01-B1*04:02L HLA-DRB1*14:01L HLA-DRB1*11: 03L HLA-DRB1*14:02L HLA-DQA1*01:01-B1*05:01L HLA-DRB1*08:01L HLA -DRB1*11:01L HLA-DQA1*01-B1*05L HLA-DQA1*05:05-B1*03:19L
  REGION 1..10: note = CONT. FROM ABOVE: HLA-DQA1*05:01-B1*02:01L HLA-DRB4*01:01L HLA-D PA1*01:03-B1*04:01L HLA-DRB1*09:01L HLA-DPA1*01:03-B1*04:02L HLA -DRB1*12:01M HLA-DRB1*12:02L HLA-DPA1*02:01-B1*13:01L HLA-DPA1*0 3:01-B1*105:01L HLA-DQA1*03:01-B1*03:02L HLA-DRB1*14:54L
  REGION 1..10: note = CONT. FROM ABOVE: HLA-DPA1*01:03-B1*104:01L HLA-DQA1*05:05-B1*03 :01L HLA-DPA1*01:02-B1*04:01L HLA-DRB1*07:01L HLA-DRB1*10:01L HL A-DRB1*16:01L HLA-DQA1*01:03-B1*06:01M HLA-DRB1*04:08L HLA-DRB1* 08:03L HLA-DQA1*02:01-B1*03:03L HLA-DRB1*15:03M
AFVNLKQLPF

SEQ ID NO: 9727 - protein, 15 aa, Severe acute respiratory syndrome coronavirus 2
  REGION 1..15: note = Table B: HLA-DQA1*03:02-B1*03:03L HLA-DRB1*04:03L HLA-DRB1*13:02L HLA-DRB1*01:03L HLA-DRB1*04:05L HLA-DRB1*08:04L HLA-DRB3*02:01L HLA-DRB1*08:01L HLA-DQA1*01-B1*05L HLA-DPA1*02:01-B1*13:01L HLA-DQA1*03:01-B1*03:02L
  REGION 1..15: note = CONT. FROM ABOVE: HLA-DQA1*05:05-B1*03:01L HLA-DQA1*01:03-B1*06: 01L HLA-DRB1*04:08L
VNLKQLPFFYYSDSP

SEQ ID NO: 9728 - protein, 14 aa, Severe acute respiratory syndrome coronavirus 2
  REGION 1..14: note = Table B: HLA-DQA1*03:02-B1*03:03L HLA-DQA1*05:01-B1*03:01L HLA-DRB1*04:01L HLA-DRB1*13:02L HLA-DRB1*13:03L HLA-DRB1*08:04L HLA-DRB3*02:01L HLA-DPA1*01:03-B1*03:01L HLA-DRB1*11:04L HLA-DRB1*14:02L HLA-DRB1*08:01L HLA-DQA1*05:05-B1*03:19L
  REGION 1..14: note = CONT. FROM ABOVE: HLA-DPA1*01:03-B1*04:02L HLA-DRB3*01:01L HLA-D PA1*02:01-B1*13:01L HLA-DQA1*03:01-B1*03:02L HLA-DQA1*05:05-B1*0 3:01L HLA-DPA1*01:02-B1*04:01L HLA-DRB1*08:03L HLA-DQA1*02:01-B1 *03:03L
LPFFYYSDSPCESH

SEQ ID NO: 9729 - protein, 12 aa, Severe acute respiratory syndrome coronavirus 2
  REGION 1..12: note = Table B: HLA-DQA1*03:02-B1*03:03L HLA-DQA1*05:01-B1*03:01L HLA-DQA1*01:02-B1*06:02L HLA-DQA1*01:01-B1*05:01L HLA-DQA1*05:05-B1*03:19L HLA-DQA1*05:01-B1*02:01L HLA-DQA1*05:05-B1*03:01L HLA-DQA1*01:03-B1*06:01L
  REGION 1..12: note = CONT. FROM ABOVE: HLA-DQA1*02:01-B1*03:03L
ESHGKQVVSDID

SEQ ID NO: 9730 - protein, 12 aa, Severe acute respiratory syndrome coronavirus 2
  REGION 1..12: note = Table B: HLA-DQA1*03:02-B1*03:03L HLA-DRB1*04:03L HLA-DRB1*04:02L HLA-DRB1*04:05L HLA-DRB1*14:01L HLA-DQA1*01-B1*05L HLA-DQA1*05:01-B1*02:01L HLA-DQA1*03:01-B1*03:02L HLA-DRB1*14:54L HLA-DRB1*14:17L
  REGION 1..12: note = CONT. FROM ABOVE: HLA-DRB1*16:01L HLA-DRB1*15:03L
KQVVSDIDYVPL

SEQ ID NO: 9731 - protein, 10 aa, Severe acute respiratory syndrome coronavirus 2
  REGION 1..10: note = Table B: HLA-DQA1*03:02-B1*03:03L HLA-DRB1*04:03L HLA-DQA1*01-B1*05L HLA-DQA1*05:01-B1*02:01L HLA-DQA1*03:01-B1*03:02L HLA-DQA1*01:03-B1*06:01L HLA-DQA1*02:01-B1*03:03L
VSDIDYVPLK

SEQ ID NO: 9732 - protein, 10 aa, Severe acute respiratory syndrome coronavirus 2
  REGION 1..10: note = Table B: HLA-DQA1*03:02-B1*03:03L HLA-DQA1*03:01-B1*03:02L
SDIDYVPLKS

SEQ ID NO: 9733 - protein, 10 aa, Severe acute respiratory syndrome coronavirus 2
  REGION 1..10: note = Table B: HLA-DQA1*03:02-B1*03:03L HLA-DRB1*04:03L HLA-DRB1*04:02L HLA-DQA1*01-B1*05L HLA-DQA1*03:01-B1*03:02L HLA-DRB1*14:17L HLA-DPA1*01:02-B1*04:01L HLA-DQA1*02:01-B1*03:03L
IDYVPLKSAT

SEQ ID NO: 9734 - protein, 10 aa, Severe acute respiratory syndrome coronavirus 2
  REGION 1..10: note = Table B: HLA-DQA1*03:02-B1*03:03L HLA-DQA1*05:01-B1*03:01M HLA-DRB1*01:03L HLA-DQA1*01:02-B1*06:02L HLA-DRB4*03:01NL HLA-DRB1*08:77M HLA-DPA1*01:03-B1*03:01L HLA-DPA1*03:01-B1*04:02L HLA-DRB1*03:01L HLA-DRB1*11:02L
  REGION 1..10: note = CONT. FROM ABOVE: HLA-DRB1*14:02L HLA-DQA1*01-B1*05L HLA-DQA1*05 :05-B1*03:19M HLA-DQA1*05:01-B1*02:01L HLA-DRB4*01:01M HLA-DPA1* 01:03-B1*04:01M HLA-DQA1*05:05-B1*03:116L HLA-DPA1*01:03-B1*04:0 2L HLA-DRB1*12:01L HLA-DQA1*03:01-B1*03:02L
  REGION 1..10: note = CONT. FROM ABOVE: HLA-DPA1*01:03-B1*104:01L HLA-DPA1*01:02-B1*04 :01L HLA-DRB1*10:01L HLA-DRB1*16:01L HLA-DRB1*08:02L HLA-DQA1*02 :01-B1*03:03L HLA-DRB1*15:03L
NEYRLYLDAY

SEQ ID NO: 9735 - protein, 10 aa, Severe acute respiratory syndrome coronavirus 2
  REGION 1..10: note = Table B: HLA-DQA1*03:02-B1*03:03L HLA-DQA1*01:02-B1*06:02L HLA-DPA1*03:01-B1*04:02L HLA-DQA1*01-B1*05L HLA-DQA1*05:01-B1*02:01L HLA-DPA1*01:03-B1*04:01L HLA-DRB1*12:01L HLA-DPA1*02:01-B1*13:01L
  REGION 1..10: note = CONT. FROM ABOVE: HLA-DPA1*03:01-B1*105:01L HLA-DPA1*01:02-B1*04 :01L HLA-DRB1*16:01L HLA-DQA1*01:03-B1*06:01L HLA-DQA1*02:01-B1* 03:03L HLA-DRB1*15:03L
RLYLDAYNMM

SEQ ID NO: 9736 - protein, 13 aa, Severe acute respiratory syndrome coronavirus 2
  REGION 1..13: note = Table B: HLA-DQA1*03:02-B1*03:03L HLA-DQA1*01:02-B1*06:02L HLA-DPA1*01:03-B1*03:01L HLA-DPA1*03:01-B1*04:02L HLA-DQA1*05:05-B1*03:19L HLA-DPA1*01:03-B1*04:02L HLA-DRB1*12:01L HLA-DQA1*05:05-B1*03:01L
  REGION 1..13: note = CONT. FROM ABOVE: HLA-DPA1*01:02-B1*04:01L HLA-DRB1*16:01L HLA-D QA1*01:03-B1*06:01L HLA-DRB1*15:03L
LYLDAYNMMISAG

SEQ ID NO: 9737 - protein, 12 aa, Severe acute respiratory syndrome coronavirus 2
  REGION 1..12: note = Table B: HLA-DQA1*03:02-B1*03:03L HLA-DQA1*05:01-B1*03:01L HLA-DRB1*13:02L HLA-DRB1*01:02L HLA-DQA1*05:05-B1*03:19L HLA-DQA1*05:01-B1*02:01L HLA-DQA1*05:05-B1*03:01L HLA-DRB1*14:17L
DAYNMMISAGFS

SEQ ID NO: 9738 - protein, 11 aa, Severe acute respiratory syndrome coronavirus 2
  REGION 1..11: note = Table B: HLA-DQA1*03:02-B1*03:03L HLA-DQA1*05:01-B1*03:01L HLA-DPA1*03:01-B1*105:01L HLA-DQA1*03:01-B1*03:02L HLA-DQA1*05:05-B1*03:01L HLA-DQA1*02:01-B1*03:03L
ISAGFSLWVYK

SEQ ID NO: 9739 - protein, 10 aa, Severe acute respiratory syndrome coronavirus 2
  REGION 1..10: note = Table B: HLA-DQA1*03:02-B1*03:03L HLA-DQA1*05:01-B1*03:01L HLA-DRB1*04:03L HLA-DRB1*01:03L HLA-DQA1*01:02-B1*06:02L HLA-DRB1*01:02L HLA-DPA1*01:03-B1*03:01L HLA-DPA1*03:01-B1*04:02M HLA-DRB1*14:01L HLA-DRB1*08:01L
  REGION 1..10: note = CONT. FROM ABOVE: HLA-DQA1*01-B1*05L HLA-DQA1*05:01-B1*02:01L HL A-DPA1*01:03-B1*04:01L HLA-DPA1*01:03-B1*04:02L HLA-DRB1*12:01L HLA-DPA1*03:01-B1*105:01M HLA-DQA1*03:01-B1*03:02L HLA-DPA1*01:0 3-B1*02:01L HLA-DPA1*01:02-B1*04:01M HLA-DRB1*16:01L
  REGION 1..10: note = CONT. FROM ABOVE: HLA-DQA1*01:03-B1*06:01L HLA-DRB1*04:08L HLA-D QA1*02:01-B1*03:03L HLA-DRB1*15:03L
WVYKQFDTYN

SEQ ID NO: 9740 - protein, 12 aa, Severe acute respiratory syndrome coronavirus 2
  REGION 1..12: note = Table B: HLA-DQA1*03:02-B1*03:03L HLA-DQA1*01:02-B1*06:02L HLA-DPA1*03:01-B1*04:02L HLA-DQA1*05:01-B1*02:01L HLA-DPA1*01:03-B1*04:01L HLA-DPA1*01:03-B1*04:02L HLA-DPA1*03:01-B1*105:01L HLA-DPA1*01:02-B1*04:01L
  REGION 1..12: note = CONT. FROM ABOVE: HLA-DRB1*16:01L HLA-DRB1*15:03L
KQFDTYNLWNTF

SEQ ID NO: 9741 - protein, 10 aa, Severe acute respiratory syndrome coronavirus 2
  REGION 1..10: note = Table B: HLA-DQA1*03:02-B1*03:03L HLA-DPA1*03:01-B1*04:02L HLA-DQA1*05:05-B1*03:19L HLA-DPA1*01:02-B1*04:01L HLA-DQA1*01:03-B1*06:01L HLA-DQA1*02:01-B1*03:03L HLA-DRB1*15:03L
YNLWNTFTRL

SEQ ID NO: 9742 - protein, 10 aa, Severe acute respiratory syndrome coronavirus 2
  REGION 1..10: note = Table B: HLA-DQA1*03:02-B1*03:03L HLA-DQA1*05:01-B1*03:01L HLA-DRB1*04:03L HLA-DRB1*01:03L HLA-DRB1*04:05L HLA-DQA1*01:02-B1*06:02L HLA-DRB1*01:02L HLA-DQA1*01-B1*05L HLA-DRB1*12:01L HLA-DPA1*03:01-B1*105:01L
  REGION 1..10: note = CONT. FROM ABOVE: HLA-DQA1*03:01-B1*03:02L HLA-DRB1*14:17L HLA-D PA1*01:02-B1*04:01L HLA-DRB1*16:01L HLA-DQA1*01:03-B1*06:01L HLA -DRB1*04:08L HLA-DQA1*02:01-B1*03:03L
TFTRLQSLEN

SEQ ID NO: 9743 - protein, 10 aa, Severe acute respiratory syndrome coronavirus 2
  REGION 1..10: note = Table B: HLA-DQA1*03:02-B1*03:03L HLA-DQA1*05:01-B1*03:01L HLA-DRB1*04:01L HLA-DRB1*04:03L HLA-DRB1*13:02L HLA-DRB1*13:03L HLA-DRB1*01:03M HLA-DRB1*04:05L HLA-DQA1*01:02-B1*06:02M HLA-DRB1*01:01L HLA-DRB1*01:02L HLA-DRB1*08:77L
  REGION 1..10: note = CONT. FROM ABOVE: HLA-DPA1*01:03-B1*03:01L HLA-DPA1*03:01-B1*04: 02L HLA-DRB1*03:01L HLA-DRB1*14:01L HLA-DRB1*11:03L HLA-DRB1*14: 02M HLA-DQA1*01:01-B1*05:01L HLA-DRB1*11:01L HLA-DQA1*01-B1*05L HLA-DQA1*05:05-B1*03:19L HLA-DQA1*05:01-B1*02:01L
  REGION 1..10: note = CONT. FROM ABOVE: HLA-DRB4*01:01L HLA-DPA1*01:03-B1*04:01L HLA-D QA1*05:05-B1*03:116L HLA-DPA1*01:03-B1*04:02L HLA-DRB1*12:01L HL A-DPA1*02:01-B1*13:01M HLA-DPA1*03:01-B1*105:01L HLA-DQA1*03:01- B1*03:02L HLA-DPA1*01:03-B1*104:01L HLA-DPA1*01:02-B1*04:01L
  REGION 1..10: note = CONT. FROM ABOVE: HLA-DRB1*07:01L HLA-DRB1*10:01L HLA-DRB1*16:01 L HLA-DQA1*01:03-B1*06:01M HLA-DRB1*08:02L HLA-DQA1*02:01-B1*03: 03M HLA-DRB1*15:03L
RLQSLENVAF

SEQ ID NO: 9744 - protein, 10 aa, Severe acute respiratory syndrome coronavirus 2
  REGION 1..10: note = Table B: HLA-DQA1*03:02-B1*03:03L HLA-DQA1*05:05-B1*03:19L
SLENVAFNVV

SEQ ID NO: 9745 - protein, 10 aa, Severe acute respiratory syndrome coronavirus 2
  REGION 1..10: note = Table B: HLA-DQA1*03:02-B1*03:03L HLA-DPA1*03:01-B1*04:02L HLA-DQA1*01-B1*05L HLA-DQA1*05:01-B1*02:01L HLA-DPA1*01:03-B1*04:01L HLA-DPA1*01:03-B1*04:02L HLA-DPA1*03:01-B1*105:01L HLA-DPA1*01:02-B1*04:01L
  REGION 1..10: note = CONT. FROM ABOVE: HLA-DRB1*16:01L HLA-DQA1*01:03-B1*06:01L
LENVAFNVVN

SEQ ID NO: 9746 - protein, 11 aa, Severe acute respiratory syndrome coronavirus 2
  REGION 1..11: note = Table B: HLA-DQA1*03:02-B1*03:03L HLA-DQA1*05:01-B1*03:01L HLA-DRB1*04:02L HLA-DRB1*14:17L HLA-DPA1*01:02-B1*04:01L
ENVAFNVVNKG

SEQ ID NO: 9747 - protein, 12 aa, Severe acute respiratory syndrome coronavirus 2
  REGION 1..12: note = Table B: HLA-DQA1*03:02-B1*03:03L HLA-DRB1*13:02L HLA-DRB1*04:05L HLA-DRB1*01:02L HLA-DRB4*03:01NL HLA-DRB3*02:01L HLA-DPA1*01:03-B1*03:01L HLA-DRB1*11:03L HLA-DRB1*11:04L HLA-DRB1*11:01L HLA-DQA1*05:01-B1*02:01L
  REGION 1..12: note = CONT. FROM ABOVE: HLA-DQA1*05:05-B1*03:116L HLA-DPA1*01:03-B1*04 :02L HLA-DRB1*12:02L HLA-DRB3*01:01L HLA-DQA1*05:05-B1*03:01L HL A-DRB1*14:17L HLA-DRB1*04:08L HLA-DRB1*08:02L HLA-DRB1*08:03L
VAFNVVNKGHFD

SEQ ID NO: 9748 - protein, 10 aa, Severe acute respiratory syndrome coronavirus 2
  REGION 1..10: note = Table B: HLA-DQA1*03:02-B1*03:03L
GHFDGQQGEV

SEQ ID NO: 9749 - protein, 12 aa, Severe acute respiratory syndrome coronavirus 2
  REGION 1..12: note = Table B: HLA-DQA1*03:02-B1*03:03L HLA-DQA1*05:01-B1*03:01L HLA-DQA1*05:05-B1*03:19L HLA-DQA1*05:05-B1*03:01L HLA-DQA1*02:01-B1*03:03L
HFDGQQGEVPVS

SEQ ID NO: 9750 - protein, 10 aa, Severe acute respiratory syndrome coronavirus 2
  REGION 1..10: note = Table B: HLA-DQA1*03:02-B1*03:03M HLA-DQA1*05:01-B1*03:01L HLA-DQA1*01:02-B1*06:02L HLA-DPA1*03:01-B1*04:02L HLA-DRB1*14:01L HLA-DRB1*11:02L HLA-DRB1*14:02L HLA-DQA1*05:05-B1*03:19M HLA-DQA1*05:05-B1*03:116L
  REGION 1..10: note = CONT. FROM ABOVE: HLA-DRB1*09:01L HLA-DPA1*02:01-B1*13:01L HLA-D PA1*03:01-B1*105:01L HLA-DQA1*03:01-B1*03:02L HLA-DPA1*01:03-B1* 104:01L HLA-DPA1*01:02-B1*04:01L HLA-DRB1*10:01L HLA-DRB1*16:01L HLA-DQA1*01:03-B1*06:01L HLA-DRB1*08:03L
  REGION 1..10: note = CONT. FROM ABOVE: HLA-DQA1*02:01-B1*03:03L HLA-DRB1*15:03L
GQQGEVPVSI

SEQ ID NO: 9751 - protein, 10 aa, Severe acute respiratory syndrome coronavirus 2
  REGION 1..10: note = Table B: HLA-DQA1*03:02-B1*03:03L HLA-DQA1*03:01-B1*03:02L
GEVPVSIINN

SEQ ID NO: 9752 - protein, 10 aa, Severe acute respiratory syndrome coronavirus 2
  REGION 1..10: note = Table B: HLA-DQA1*03:02-B1*03:03L HLA-DQA1*05:01-B1*03:01L HLA-DRB1*13:03L HLA-DRB1*04:05L HLA-DQA1*01:02-B1*06:02L HLA-DRB1*01:01L HLA-DRB1*01:02L HLA-DPA1*03:01-B1*04:02L HLA-DRB1*14:01L HLA-DRB1*08:01L HLA-DQA1*01-B1*05L
  REGION 1..10: note = CONT. FROM ABOVE: HLA-DQA1*05:01-B1*02:01L HLA-DQA1*05:05-B1*03: 116M HLA-DPA1*02:01-B1*13:01L HLA-DPA1*03:01-B1*105:01L HLA-DQA1 *03:01-B1*03:02L HLA-DPA1*01:02-B1*04:01L HLA-DRB1*16:01L HLA-DR B1*08:03L HLA-DQA1*02:01-B1*03:03L HLA-DRB1*15:03L
VPVSIINNTV

SEQ ID NO: 9753 - protein, 10 aa, Severe acute respiratory syndrome coronavirus 2
  REGION 1..10: note = Table B: HLA-DQA1*03:02-B1*03:03L HLA-DQA1*05:05-B1*03:19L HLA-DQA1*03:01-B1*03:02L HLA-DQA1*01:03-B1*06:01L HLA-DQA1*02:01-B1*03:03L HLA-DRB1*15:03L
IINNTVYTKV

SEQ ID NO: 9754 - protein, 10 aa, Severe acute respiratory syndrome coronavirus 2
  REGION 1..10: note = Table B: HLA-DQA1*03:02-B1*03:03L HLA-DQA1*05:01-B1*03:01L HLA-DRB1*04:03L HLA-DRB1*04:02L HLA-DQA1*01:02-B1*06:02L HLA-DQA1*01-B1*05L HLA-DQA1*05:01-B1*02:01L HLA-DPA1*03:01-B1*105:01L HLA-DQA1*03:01-B1*03:02L
  REGION 1..10: note = CONT. FROM ABOVE: HLA-DPA1*01:02-B1*04:01L HLA-DRB1*16:01L HLA-D QA1*01:03-B1*06:01L HLA-DQA1*02:01-B1*03:03L
TVYTKVDGVD

SEQ ID NO: 9755 - protein, 10 aa, Severe acute respiratory syndrome coronavirus 2
  REGION 1..10: note = Table B: HLA-DQA1*03:02-B1*03:03L HLA-DQA1*01-B1*05L HLA-DQA1*03:01-B1*03:02L HLA-DPA1*01:02-B1*04:01L HLA-DRB1*16:01L HLA-DQA1*01:03-B1*06:01L HLA-DQA1*02:01-B1*03:03L
VYTKVDGVDV

SEQ ID NO: 9756 - protein, 10 aa, Severe acute respiratory syndrome coronavirus 2
  REGION 1..10: note = Table B: HLA-DQA1*03:02-B1*03:03L HLA-DQA1*05:01-B1*03:01L HLA-DRB1*04:03L HLA-DRB1*13:03L HLA-DRB1*04:02L HLA-DRB1*04:05L HLA-DRB4*03:01NL HLA-DQA1*01-B1*05L HLA-DQA1*05:01-B1*02:01L HLA-DRB1*04:10L HLA-DRB1*12:01L HLA-DQA1*03:01-B1*03:02L
  REGION 1..10: note = CONT. FROM ABOVE: HLA-DRB1*14:54L HLA-DRB1*14:17L HLA-DRB1*16:01 L HLA-DQA1*02:01-B1*03:03L
YTKVDGVDVE

SEQ ID NO: 9757 - protein, 10 aa, Severe acute respiratory syndrome coronavirus 2
  REGION 1..10: note = Table B: HLA-DQA1*03:02-B1*03:03L HLA-DQA1*05:01-B1*03:01L HLA-DRB1*13:03L HLA-DRB1*04:02L HLA-DPA1*03:01-B1*04:02L HLA-DRB1*14:01L HLA-DRB1*08:01L HLA-DQA1*01-B1*05L HLA-DQA1*05:01-B1*02:01L HLA-DQA1*05:05-B1*03:116L
  REGION 1..10: note = CONT. FROM ABOVE: HLA-DQA1*03:01-B1*03:02L HLA-DPA1*01:02-B1*04: 01L HLA-DRB1*16:01L HLA-DQA1*02:01-B1*03:03L
TKVDGVDVEL

SEQ ID NO: 9758 - protein, 10 aa, Severe acute respiratory syndrome coronavirus 2
  REGION 1..10: note = Table B: HLA-DQA1*03:02-B1*03:03L HLA-DQA1*05:01-B1*03:01L HLA-DRB1*13:03L HLA-DRB1*01:03L HLA-DQA1*01:02-B1*06:02L HLA-DRB1*08:77L HLA-DPA1*01:03-B1*03:01L HLA-DPA1*03:01-B1*04:02L HLA-DRB1*03:01L HLA-DRB1*14:01L
  REGION 1..10: note = CONT. FROM ABOVE: HLA-DRB1*14:02L HLA-DQA1*01-B1*05L HLA-DQA1*05 :05-B1*03:19L HLA-DQA1*05:01-B1*02:01L HLA-DRB4*01:01L HLA-DPA1* 01:03-B1*04:01L HLA-DQA1*05:05-B1*03:116L HLA-DPA1*01:03-B1*04:0 2L HLA-DPA1*02:01-B1*13:01L HLA-DPA1*03:01-B1*105:01L
  REGION 1..10: note = CONT. FROM ABOVE: HLA-DQA1*03:01-B1*03:02L HLA-DPA1*01:03-B1*104 :01L HLA-DPA1*01:02-B1*04:01L HLA-DRB1*16:01L HLA-DQA1*01:03-B1* 06:01L HLA-DRB1*08:02L HLA-DQA1*02:01-B1*03:03L HLA-DRB1*15:03L
KVDGVDVELF

SEQ ID NO: 9759 - protein, 12 aa, Severe acute respiratory syndrome coronavirus 2
  REGION 1..12: note = Table B: HLA-DQA1*03:02-B1*03:03L HLA-DQA1*05:01-B1*03:01L HLA-DRB1*04:03L HLA-DQA1*01:02-B1*06:02L HLA-DQA1*01:01-B1*05:01L HLA-DQA1*01-B1*05L HLA-DQA1*05:01-B1*02:01L HLA-DPA1*03:01-B1*105:01L
  REGION 1..12: note = CONT. FROM ABOVE: HLA-DQA1*05:05-B1*03:01L HLA-DPA1*01:02-B1*04: 01L HLA-DRB1*16:01L
VDGVDVELFENK

SEQ ID NO: 9760 - protein, 11 aa, Severe acute respiratory syndrome coronavirus 2
  REGION 1..11: note = Table B: HLA-DQA1*03:02-B1*03:03L HLA-DRB1*04:03L HLA-DRB1*04:02L HLA-DPA1*03:01-B1*04:02L HLA-DQA1*05:01-B1*02:01L HLA-DPA1*03:01-B1*105:01L HLA-DQA1*03:01-B1*03:02L HLA-DRB1*14:17L
  REGION 1..11: note = CONT. FROM ABOVE: HLA-DPA1*01:02-B1*04:01L HLA-DRB1*16:01L HLA-D QA1*01:03-B1*06:01L HLA-DQA1*02:01-B1*03:03L
VDVELFENKTT

SEQ ID NO: 9761 - protein, 10 aa, Severe acute respiratory syndrome coronavirus 2
  REGION 1..10: note = Table B: HLA-DQA1*03:02-B1*03:03M HLA-DQA1*05:05-B1*03:19L HLA-DQA1*05:05-B1*03:116L HLA-DRB1*09:01L HLA-DQA1*03:01-B1*03:02L HLA-DPA1*01:03-B1*104:01L
VELFENKTTL

SEQ ID NO: 9762 - protein, 10 aa, Severe acute respiratory syndrome coronavirus 2
  REGION 1..10: note = Table B: HLA-DQA1*03:02-B1*03:03L HLA-DQA1*05:01-B1*03:01L HLA-DRB1*04:03L HLA-DRB1*13:02L HLA-DRB1*13:03L HLA-DRB1*01:03L HLA-DRB1*04:02L HLA-DRB1*04:05L HLA-DQA1*01:02-B1*06:02L HLA-DRB1*01:02L HLA-DRB4*03:01NL HLA-DRB1*08:04L HLA-DRB1*08:77L
  REGION 1..10: note = CONT. FROM ABOVE: HLA-DRB3*02:01L HLA-DPA1*01:03-B1*03:01L HLA-D PA1*03:01-B1*04:02L HLA-DRB1*14:01L HLA-DRB1*11:03L HLA-DRB1*11: 04L HLA-DRB1*14:02L HLA-DQA1*01:01-B1*05:01L HLA-DRB1*08:01L HLA -DRB1*11:01L HLA-DQA1*01-B1*05L HLA-DQA1*05:05-B1*03:19L
  REGION 1..10: note = CONT. FROM ABOVE: HLA-DQA1*05:01-B1*02:01L HLA-DPA1*01:03-B1*04: 01L HLA-DRB1*04:10L HLA-DPA1*01:03-B1*04:02L HLA-DRB1*12:01L HLA -DRB1*12:02L HLA-DRB3*01:01L HLA-DPA1*02:01-B1*13:01L HLA-DPA1*0 3:01-B1*105:01L HLA-DQA1*03:01-B1*03:02L HLA-DRB1*14:54L
  REGION 1..10: note = CONT. FROM ABOVE: HLA-DQA1*05:05-B1*03:01L HLA-DRB1*14:17L HLA-D PA1*01:02-B1*04:01L HLA-DRB1*10:01L HLA-DRB1*16:01L HLA-DQA1*01: 03-B1*06:01L HLA-DRB1*04:08L HLA-DRB1*08:03L HLA-DQA1*02:01-B1*0 3:03L HLA-DRB1*15:03L
FENKTTLPVN

SEQ ID NO: 9763 - protein, 11 aa, Severe acute respiratory syndrome coronavirus 2
  REGION 1..11: note = Table B: HLA-DQA1*03:02-B1*03:03L HLA-DQA1*05:01-B1*03:01L HLA-DRB1*04:03L HLA-DQA1*01:02-B1*06:02L HLA-DQA1*01-B1*05L HLA-DQA1*05:01-B1*02:01L
ENKTTLPVNVA

SEQ ID NO: 9764 - protein, 10 aa, Severe acute respiratory syndrome coronavirus 2
  REGION 1..10: note = Table B: HLA-DQA1*03:02-B1*03:03L HLA-DQA1*05:01-B1*03:01L HLA-DRB1*04:01L HLA-DRB1*04:03L HLA-DRB1*13:02L HLA-DRB1*13:03L HLA-DRB1*01:03M HLA-DRB1*04:05L HLA-DQA1*01:02-B1*06:02M HLA-DRB1*01:01L HLA-DRB4*03:01NL HLA-DRB1*08:77L
  REGION 1..10: note = CONT. FROM ABOVE: HLA-DPA1*01:03-B1*03:01L HLA-DPA1*03:01-B1*04: 02L HLA-DRB1*03:01L HLA-DRB1*14:01L HLA-DRB1*14:02M HLA-DRB1*11: 01L HLA-DQA1*01-B1*05L HLA-DQA1*05:05-B1*03:19L HLA-DQA1*05:01-B 1*02:01L HLA-DRB4*01:01L HLA-DPA1*01:03-B1*04:01L
  REGION 1..10: note = CONT. FROM ABOVE: HLA-DQA1*05:05-B1*03:116L HLA-DPA1*01:03-B1*04 :02L HLA-DRB1*12:01L HLA-DPA1*02:01-B1*13:01L HLA-DPA1*03:01-B1* 105:01L HLA-DQA1*03:01-B1*03:02L HLA-DPA1*01:02-B1*04:01L HLA-DR B1*10:01L HLA-DRB1*16:01L HLA-DQA1*01:03-B1*06:01L
  REGION 1..10: note = CONT. FROM ABOVE: HLA-DRB1*08:02L HLA-DQA1*02:01-B1*03:03M HLA-D RB1*15:03L
KTTLPVNVAF

SEQ ID NO: 9765 - protein, 10 aa, Severe acute respiratory syndrome coronavirus 2
  REGION 1..10: note = Table B: HLA-DQA1*03:02-B1*03:03L
TLPVNVAFEL

SEQ ID NO: 9766 - protein, 10 aa, Severe acute respiratory syndrome coronavirus 2
  REGION 1..10: note = Table B: HLA-DQA1*03:02-B1*03:03L HLA-DQA1*05:01-B1*03:01L HLA-DRB1*14:01L HLA-DQA1*05:05-B1*03:19L HLA-DPA1*02:01-B1*13:01L HLA-DQA1*03:01-B1*03:02L HLA-DPA1*01:03-B1*104:01L HLA-DRB1*16:01L
  REGION 1..10: note = CONT. FROM ABOVE: HLA-DQA1*01:03-B1*06:01L HLA-DQA1*02:01-B1*03: 03L HLA-DRB1*15:03L
NIKPVPEVKI

SEQ ID NO: 9767 - protein, 15 aa, Severe acute respiratory syndrome coronavirus 2
  REGION 1..15: note = Table B: HLA-DQA1*03:02-B1*03:03L HLA-DRB1*14:04L HLA-DQA1*05:05-B1*03:19L HLA-DRB3*01:01L HLA-DPA1*02:01-B1*13:01L HLA-DPA1*01:03-B1*104:01L HLA-DPA1*01:02-B1*04:01L HLA-DRB1*07:01L
  REGION 1..15: note = CONT. FROM ABOVE: HLA-DQA1*01:03-B1*06:01L
KPVPEVKILNNLGVD

SEQ ID NO: 9768 - protein, 12 aa, Severe acute respiratory syndrome coronavirus 2
  REGION 1..12: note = Table B: HLA-DQA1*03:02-B1*03:03L HLA-DQA1*05:01-B1*03:01L HLA-DRB1*04:01L HLA-DRB1*13:02L HLA-DRB1*13:03L HLA-DRB1*01:03L HLA-DRB1*04:02L HLA-DRB1*04:04L HLA-DRB1*04:05L HLA-DQA1*01:02-B1*06:02L HLA-DRB1*01:02L HLA-DRB4*03:01NL
  REGION 1..12: note = CONT. FROM ABOVE: HLA-DRB1*08:04L HLA-DRB1*08:77L HLA-DRB3*02:01 L HLA-DPA1*01:03-B1*03:01L HLA-DPA1*03:01-B1*04:02L HLA-DRB1*14: 01L HLA-DRB1*11:03L HLA-DRB1*11:04L HLA-DRB1*14:02L HLA-DRB5*01: 01L HLA-DQA1*01-B1*05L HLA-DQA1*05:05-B1*03:19L
  REGION 1..12: note = CONT. FROM ABOVE: HLA-DQA1*05:01-B1*02:01L HLA-DRB4*01:01L HLA-D RB1*04:10L HLA-DRB1*09:01L HLA-DRB1*12:01L HLA-DRB1*12:02L HLA-D PA1*03:01-B1*105:01L HLA-DQA1*03:01-B1*03:02L HLA-DRB1*14:54L HL A-DQA1*05:05-B1*03:01L HLA-DPA1*01:02-B1*04:01L HLA-DRB1*07:01L
  REGION 1..12: note = CONT. FROM ABOVE: HLA-DRB1*10:01L HLA-DRB1*16:01L HLA-DQA1*01:03 -B1*06:01L HLA-DRB1*04:08L HLA-DRB1*08:03L HLA-DQA1*02:01-B1*03: 03L HLA-DRB1*15:03L
ILNNLGVDIAAN

SEQ ID NO: 9769 - protein, 12 aa, Severe acute respiratory syndrome coronavirus 2
  REGION 1..12: note = Table B: HLA-DQA1*03:02-B1*03:03L HLA-DQA1*01:02-B1*06:02L HLA-DQA1*05:05-B1*03:19L HLA-DQA1*05:01-B1*02:01L HLA-DQA1*03:01-B1*03:02L HLA-DQA1*05:05-B1*03:01L HLA-DQA1*01:03-B1*06:01L HLA-DQA1*02:01-B1*03:03L
NNLGVDIAANTV

SEQ ID NO: 9770 - protein, 12 aa, Severe acute respiratory syndrome coronavirus 2
  REGION 1..12: note = Table B: HLA-DQA1*03:02-B1*03:03L HLA-DRB1*04:02L HLA-DRB1*12:01L HLA-DQA1*03:01-B1*03:02L HLA-DQA1*05:05-B1*03:01L HLA-DRB1*14:17L HLA-DQA1*02:01-B1*03:03L HLA-DRB1*15:03L
GVDIAANTVIWD

SEQ ID NO: 9771 - protein, 11 aa, Severe acute respiratory syndrome coronavirus 2
  REGION 1..11: note = Table B: HLA-DQA1*03:02-B1*03:03L HLA-DQA1*05:01-B1*03:01L HLA-DRB1*04:03L HLA-DRB1*01:03L HLA-DRB1*04:02L HLA-DRB1*01:02L HLA-DRB4*03:01NL HLA-DQA1*01:01-B1*05:01L HLA-DRB1*12:01L HLA-DRB1*14:17L HLA-DPA1*01:02-B1*04:01L HLA-DRB1*15:03L
IAANTVIWDYK

SEQ ID NO: 9772 - protein, 13 aa, Severe acute respiratory syndrome coronavirus 2
  REGION 1..13: note = Table B: HLA-DQA1*03:02-B1*03:03L HLA-DQA1*05:01-B1*03:01L HLA-DPA1*03:01-B1*04:02L HLA-DRB1*11:01L HLA-DQA1*01-B1*05L HLA-DRB1*13:01L HLA-DRB1*09:01L HLA-DRB1*12:02L HLA-DPA1*02:01-B1*13:01L HLA-DPA1*03:01-B1*105:01L
  REGION 1..13: note = CONT. FROM ABOVE: HLA-DRB1*10:01L HLA-DRB1*08:03L
IWDYKRDAPAHIS

SEQ ID NO: 9773 - protein, 12 aa, Severe acute respiratory syndrome coronavirus 2
  REGION 1..12: note = Table B: HLA-DQA1*03:02-B1*03:03L HLA-DRB1*04:01L HLA-DRB1*04:04L HLA-DQA1*01:02-B1*06:02L HLA-DRB1*01:01L HLA-DPA1*03:01-B1*04:02L HLA-DRB1*08:01L HLA-DRB1*11:01L HLA-DRB5*01:01L HLA-DQA1*01-B1*05L HLA-DQA1*05:05-B1*03:19L
  REGION 1..12: note = CONT. FROM ABOVE: HLA-DRB1*13:01L HLA-DRB1*04:10L HLA-DRB1*09:01 L HLA-DPA1*01:03-B1*04:02L HLA-DRB1*12:02L HLA-DPA1*02:01-B1*13: 01L HLA-DPA1*03:01-B1*105:01L HLA-DQA1*05:05-B1*03:01L HLA-DRB1* 07:01L HLA-DRB1*10:01L HLA-DRB1*08:03L
DYKRDAPAHIST

SEQ ID NO: 9774 - protein, 10 aa, Severe acute respiratory syndrome coronavirus 2
  REGION 1..10: note = Table B: HLA-DQA1*03:02-B1*03:03L HLA-DQA1*05:05-B1*03:19M HLA-DQA1*03:01-B1*03:02L HLA-DPA1*01:03-B1*104:01L HLA-DRB1*16:01L
RDAPAHISTI

SEQ ID NO: 9775 - protein, 10 aa, Severe acute respiratory syndrome coronavirus 2
  REGION 1..10: note = Table B: HLA-DQA1*03:02-B1*03:03L HLA-DQA1*05:01-B1*03:01L HLA-DQA1*05:05-B1*03:19L HLA-DQA1*03:01-B1*03:02L HLA-DQA1*05:05-B1*03:01L HLA-DQA1*01:03-B1*06:01L HLA-DQA1*02:01-B1*03:03L
DAPAHISTIG

SEQ ID NO: 9776 - protein, 10 aa, Severe acute respiratory syndrome coronavirus 2
  REGION 1..10: note = Table B: HLA-DQA1*03:02-B1*03:03L HLA-DQA1*05:01-B1*03:01L HLA-DRB1*13:03M HLA-DRB1*01:03L HLA-DRB1*04:02L HLA-DRB1*04:05L HLA-DQA1*01:02-B1*06:02L HLA-DRB1*01:01L HLA-DRB1*01:02L HLA-DRB4*03:01NL HLA-DPA1*01:03-B1*03:01L
  REGION 1..10: note = CONT. FROM ABOVE: HLA-DPA1*03:01-B1*04:02L HLA-DRB1*14:01L HLA-D RB1*08:01L HLA-DRB5*01:01L HLA-DQA1*01-B1*05L HLA-DQA1*05:01-B1* 02:01L HLA-DQA1*05:05-B1*03:116M HLA-DPA1*02:01-B1*13:01L HLA-DP A1*03:01-B1*105:01M HLA-DQA1*03:01-B1*03:02L
  REGION 1..10: note = CONT. FROM ABOVE: HLA-DPA1*01:02-B1*04:01L HLA-DRB1*10:01L HLA-D RB1*16:01L HLA-DRB1*08:03L HLA-DQA1*02:01-B1*03:03L HLA-DRB1*15: 03L
APAHISTIGV

SEQ ID NO: 9777 - protein, 10 aa, Severe acute respiratory syndrome coronavirus 2
  REGION 1..10: note = Table B: HLA-DQA1*03:02-B1*03:03L HLA-DQA1*05:01-B1*03:01L HLA-DRB1*04:03L HLA-DRB1*13:03L HLA-DRB1*01:03L HLA-DRB1*04:02L HLA-DRB1*04:05L HLA-DRB1*01:02L HLA-DRB4*03:01NL HLA-DRB1*14:01L HLA-DRB1*12:01L HLA-DQA1*03:01-B1*03:02L HLA-DRB1*14:54L
  REGION 1..10: note = CONT. FROM ABOVE: HLA-DRB1*14:17L HLA-DPA1*01:02-B1*04:01L HLA-D RB1*16:01L HLA-DQA1*01:03-B1*06:01L HLA-DRB1*04:08L HLA-DQA1*02: 01-B1*03:03L
SMTDIAKKPT

SEQ ID NO: 9778 - protein, 10 aa, Severe acute respiratory syndrome coronavirus 2
  REGION 1..10: note = Table B: HLA-DQA1*03:02-B1*03:03L HLA-DRB1*04:03L HLA-DRB1*13:03L HLA-DRB1*04:02L HLA-DQA1*01-B1*05L HLA-DQA1*03:01-B1*03:02L HLA-DRB1*14:17L HLA-DRB1*16:01L HLA-DQA1*02:01-B1*03:03L
TDIAKKPTET

SEQ ID NO: 9779 - protein, 10 aa, Severe acute respiratory syndrome coronavirus 2
  REGION 1..10: note = Table B: HLA-DQA1*03:02-B1*03:03L HLA-DQA1*05:01-B1*03:01L HLA-DQA1*01:02-B1*06:02L HLA-DRB1*01:02L HLA-DQA1*05:05-B1*03:19L HLA-DQA1*05:01-B1*02:01L HLA-DQA1*05:05-B1*03:116L HLA-DPA1*02:01-B1*13:01L
  REGION 1..10: note = CONT. FROM ABOVE: HLA-DPA1*03:01-B1*105:01L HLA-DPA1*01:02-B1*04 :01L HLA-DQA1*02:01-B1*03:03L HLA-DRB1*15:03L
DIAKKPTETI

SEQ ID NO: 9780 - protein, 12 aa, Severe acute respiratory syndrome coronavirus 2
  REGION 1..12: note = Table B: HLA-DQA1*03:02-B1*03:03L HLA-DRB1*04:03L HLA-DRB1*04:02L HLA-DQA1*01:02-B1*06:02L HLA-DQA1*05:01-B1*02:01L HLA-DQA1*03:01-B1*03:02L HLA-DRB1*16:01L HLA-DQA1*01:03-B1*06:01L
  REGION 1..12: note = CONT. FROM ABOVE: HLA-DQA1*02:01-B1*03:03L HLA-DRB1*15:03L
APLTVFFDGRVD

SEQ ID NO: 9781 - protein, 10 aa, Severe acute respiratory syndrome coronavirus 2
  REGION 1..10: note = Table B: HLA-DQA1*03:02-B1*03:03L HLA-DQA1*01-B1*05L HLA-DQA1*05:01-B1*02:01L HLA-DQA1*03:01-B1*03:02L HLA-DQA1*02:01-B1*03:03L
FDGRVDGQVD

SEQ ID NO: 9782 - protein, 14 aa, Severe acute respiratory syndrome coronavirus 2
  REGION 1..14: note = Table B: HLA-DQA1*03:02-B1*03:03L HLA-DQA1*05:01-B1*03:01L HLA-DRB1*13:02L HLA-DRB1*08:04L HLA-DPA1*03:01-B1*04:02L HLA-DRB3*01:01L HLA-DPA1*02:01-B1*13:01L HLA-DPA1*03:01-B1*105:01L HLA-DPA1*01:02-B1*04:01L
  REGION 1..14: note = CONT. FROM ABOVE: HLA-DRB1*10:01L
VDGQVDLFRNARNG

SEQ ID NO: 9783 - protein, 12 aa, Severe acute respiratory syndrome coronavirus 2
  REGION 1..12: note = Table B: HLA-DQA1*03:02-B1*03:03L HLA-DQA1*05:01-B1*03:01L HLA-DRB1*04:03L HLA-DRB1*13:02L HLA-DRB1*13:03L HLA-DRB1*01:03L HLA-DRB1*04:02L HLA-DRB1*04:05L HLA-DQA1*01:02-B1*06:02L HLA-DRB1*01:02L HLA-DRB1*08:04L HLA-DRB1*08:77L HLA-DRB3*02:01L
  REGION 1..12: note = CONT. FROM ABOVE: HLA-DPA1*03:01-B1*04:02L HLA-DRB1*08:01L HLA-D QA1*05:01-B1*02:01L HLA-DRB1*12:01L HLA-DRB1*12:02L HLA-DRB3*01: 01L HLA-DPA1*02:01-B1*13:01L HLA-DPA1*03:01-B1*105:01L HLA-DQA1* 03:01-B1*03:02L HLA-DRB1*14:54L HLA-DRB1*14:17L HLA-DRB1*07:01L
  REGION 1..12: note = CONT. FROM ABOVE: HLA-DRB1*04:08L HLA-DQA1*02:01-B1*03:03L HLA-D RB1*15:03L
VDLFRNARNGVL

SEQ ID NO: 9784 - protein, 11 aa, Severe acute respiratory syndrome coronavirus 2
  REGION 1..11: note = Table B: HLA-DQA1*03:02-B1*03:03L HLA-DQA1*01:03-B1*06:01L
NGVLITEGSVK

SEQ ID NO: 9785 - protein, 11 aa, Severe acute respiratory syndrome coronavirus 2
  REGION 1..11: note = Table B: HLA-DQA1*03:02-B1*03:03L HLA-DRB1*13:02L HLA-DRB1*04:04L HLA-DRB1*01:02L HLA-DRB1*14:01L HLA-DRB1*11:03L HLA-DRB1*11:04L HLA-DQA1*01-B1*05L HLA-DQA1*05:01-B1*02:01L HLA-DRB1*12:02L HLA-DRB1*10:01L HLA-DRB1*04:08L HLA-DRB1*08:03L
GVLITEGSVKG

SEQ ID NO: 9786 - protein, 10 aa, Severe acute respiratory syndrome coronavirus 2
  REGION 1..10: note = Table B: HLA-DQA1*03:02-B1*03:03L HLA-DQA1*05:01-B1*03:01L HLA-DQA1*03:01-B1*03:02L HLA-DQA1*02:01-B1*03:03L HLA-DRB1*15:03L
LITEGSVKGL

SEQ ID NO: 9787 - protein, 11 aa, Severe acute respiratory syndrome coronavirus 2
  REGION 1..11: note = Table B: HLA-DQA1*03:02-B1*03:03L HLA-DQA1*03:01-B1*03:02L HLA-DQA1*01:03-B1*06:01L HLA-DQA1*02:01-B1*03:03L
ITEGSVKGLQP

SEQ ID NO: 9788 - protein, 10 aa, Severe acute respiratory syndrome coronavirus 2
  REGION 1..10: note = Table B: HLA-DQA1*03:02-B1*03:03L
GSVKGLQPSV

SEQ ID NO: 9789 - protein, 10 aa, Severe acute respiratory syndrome coronavirus 2
  REGION 1..10: note = Table B: HLA-DQA1*03:02-B1*03:03L HLA-DQA1*05:01-B1*03:01L HLA-DRB1*04:03L HLA-DRB1*13:03L HLA-DRB1*01:03L HLA-DRB1*04:02L HLA-DRB4*03:01NL HLA-DQA1*03:01-B1*03:02L HLA-DRB1*14:17L HLA-DQA1*02:01-B1*03:03L
GLQPSVGPKQ

SEQ ID NO: 9790 - protein, 11 aa, Severe acute respiratory syndrome coronavirus 2
  REGION 1..11: note = Table B: HLA-DQA1*03:02-B1*03:03L HLA-DQA1*05:01-B1*03:01L HLA-DRB1*04:02L HLA-DPA1*03:01-B1*04:02L HLA-DRB1*14:01L HLA-DRB1*08:01L HLA-DRB5*01:01L HLA-DQA1*01-B1*05L HLA-DQA1*05:01-B1*02:01L HLA-DPA1*01:02-B1*04:01L
QPSVGPKQASL

SEQ ID NO: 9791 - protein, 12 aa, Severe acute respiratory syndrome coronavirus 2
  REGION 1..12: note = Table B: HLA-DQA1*03:02-B1*03:03L HLA-DQA1*05:01-B1*03:01L HLA-DRB1*04:03L HLA-DRB1*04:02L HLA-DQA1*01:02-B1*06:02L HLA-DQA1*05:05-B1*03:19L HLA-DQA1*05:01-B1*02:01L HLA-DPA1*03:01-B1*105:01L HLA-DQA1*03:01-B1*03:02L
  REGION 1..12: note = CONT. FROM ABOVE: HLA-DQA1*05:05-B1*03:01L HLA-DRB1*14:17L HLA-D QA1*01:03-B1*06:01L HLA-DQA1*02:01-B1*03:03L
VGPKQASLNGVT

SEQ ID NO: 9792 - protein, 10 aa, Severe acute respiratory syndrome coronavirus 2
  REGION 1..10: note = Table B: HLA-DQA1*03:02-B1*03:03L HLA-DQA1*05:01-B1*03:01L HLA-DRB1*08:01L HLA-DQA1*05:05-B1*03:116L HLA-DQA1*03:01-B1*03:02L HLA-DQA1*02:01-B1*03:03L
KQASLNGVTL

SEQ ID NO: 9793 - protein, 11 aa, Severe acute respiratory syndrome coronavirus 2
  REGION 1..11: note = Table B: HLA-DQA1*03:02-B1*03:03L HLA-DQA1*05:01-B1*03:01L HLA-DRB1*04:02L HLA-DQA1*01:02-B1*06:02L HLA-DQA1*05:05-B1*03:01L
NGVTLIGEAVK

SEQ ID NO: 9794 - protein, 10 aa, Severe acute respiratory syndrome coronavirus 2
  REGION 1..10: note = Table B: HLA-DQA1*03:02-B1*03:03L HLA-DQA1*05:01-B1*03:01L HLA-DRB1*04:03L HLA-DRB1*13:03L HLA-DRB1*01:03L HLA-DRB1*04:02L HLA-DQA1*01:02-B1*06:02L HLA-DRB1*01:02L HLA-DRB4*03:01NL HLA-DRB1*14:01L HLA-DQA1*05:01-B1*02:01L HLA-DRB1*12:01L
  REGION 1..10: note = CONT. FROM ABOVE: HLA-DPA1*03:01-B1*105:01L HLA-DQA1*03:01-B1*03 :02L HLA-DRB1*14:54L HLA-DQA1*05:05-B1*03:01L HLA-DRB1*14:17L HL A-DPA1*01:02-B1*04:01L HLA-DRB1*16:01L HLA-DQA1*01:03-B1*06:01L HLA-DQA1*02:01-B1*03:03L HLA-DRB1*15:03L
TLIGEAVKTQ

SEQ ID NO: 9795 - protein, 10 aa, Severe acute respiratory syndrome coronavirus 2
  REGION 1..10: note = Table B: HLA-DQA1*03:02-B1*03:03L HLA-DQA1*05:01-B1*03:01L HLA-DRB1*04:03L HLA-DRB1*13:03L HLA-DRB1*01:03L HLA-DRB1*04:05L HLA-DQA1*01:02-B1*06:02M HLA-DRB1*01:01L HLA-DRB1*08:77L HLA-DPA1*01:03-B1*03:01L HLA-DPA1*03:01-B1*04:02L
  REGION 1..10: note = CONT. FROM ABOVE: HLA-DRB1*03:01L HLA-DRB1*14:01L HLA-DRB1*14:02 L HLA-DQA1*01-B1*05L HLA-DQA1*05:05-B1*03:19L HLA-DQA1*05:01-B1* 02:01L HLA-DRB4*01:01L HLA-DPA1*01:03-B1*04:01L HLA-DQA1*05:05-B 1*03:116L HLA-DPA1*01:03-B1*04:02L HLA-DRB1*12:01L
  REGION 1..10: note = CONT. FROM ABOVE: HLA-DPA1*02:01-B1*13:01L HLA-DPA1*03:01-B1*105 :01L HLA-DQA1*03:01-B1*03:02L HLA-DPA1*01:02-B1*04:01L HLA-DRB1* 10:01L HLA-DRB1*16:01L HLA-DQA1*01:03-B1*06:01L HLA-DRB1*08:02L HLA-DQA1*02:01-B1*03:03M HLA-DRB1*15:03L
LIGEAVKTQF

SEQ ID NO: 9796 - protein, 10 aa, Severe acute respiratory syndrome coronavirus 2
  REGION 1..10: note = Table B: HLA-DQA1*03:02-B1*03:03L HLA-DRB1*04:03L HLA-DQA1*05:01-B1*02:01L HLA-DQA1*03:01-B1*03:02L HLA-DQA1*02:01-B1*03:03L
IGEAVKTQFN

SEQ ID NO: 9797 - protein, 10 aa, Severe acute respiratory syndrome coronavirus 2
  REGION 1..10: note = Table B: HLA-DQA1*03:02-B1*03:03L HLA-DQA1*05:01-B1*03:01M HLA-DRB1*13:03L HLA-DRB1*01:03L HLA-DRB4*03:01NL HLA-DRB1*08:77M HLA-DPA1*01:03-B1*03:01L HLA-DPA1*03:01-B1*04:02M HLA-DRB1*03:01M HLA-DRB1*11:02L HLA-DQA1*01-B1*05L
  REGION 1..10: note = CONT. FROM ABOVE: HLA-DQA1*05:05-B1*03:19M HLA-DQA1*05:01-B1*02: 01M HLA-DRB4*01:01M HLA-DPA1*01:03-B1*04:01M HLA-DQA1*05:05-B1*0 3:116L HLA-DPA1*01:03-B1*04:02L HLA-DRB1*12:01L HLA-DQA1*03:01-B 1*03:02L HLA-DPA1*01:03-B1*104:01L HLA-DPA1*01:02-B1*04:01L
  REGION 1..10: note = CONT. FROM ABOVE: HLA-DRB1*10:01M HLA-DRB1*16:01L HLA-DRB1*15:03 M
GEAVKTQFNY

SEQ ID NO: 9798 - protein, 13 aa, Severe acute respiratory syndrome coronavirus 2
  REGION 1..13: note = Table B: HLA-DQA1*03:02-B1*03:03L HLA-DRB1*04:01L HLA-DRB1*01:01L HLA-DPA1*01:03-B1*03:01L HLA-DRB1*11:03L HLA-DRB1*14:02L HLA-DPA1*01:03-B1*04:02L HLA-DQA1*05:05-B1*03:01L HLA-DRB1*07:01L
FNYYKKVDGVVQQ

SEQ ID NO: 9799 - protein, 14 aa, Severe acute respiratory syndrome coronavirus 2
  REGION 1..14: note = Table B: HLA-DQA1*03:02-B1*03:03L HLA-DQA1*05:01-B1*03:01L HLA-DRB1*13:02L HLA-DRB1*04:04L HLA-DPA1*01:03-B1*03:01L HLA-DRB1*14:01L HLA-DQA1*05:01-B1*02:01L HLA-DPA1*02:01-B1*13:01L HLA-DPA1*03:01-B1*105:01L
  REGION 1..14: note = CONT. FROM ABOVE: HLA-DQA1*05:05-B1*03:01L HLA-DRB1*15:03L
YYKKVDGVVQQLPE

SEQ ID NO: 9800 - protein, 11 aa, Severe acute respiratory syndrome coronavirus 2
  REGION 1..11: note = Table B: HLA-DQA1*03:02-B1*03:03L HLA-DQA1*03:01-B1*03:02L HLA-DQA1*02:01-B1*03:03L
VDGVVQQLPET

SEQ ID NO: 9801 - protein, 10 aa, Severe acute respiratory syndrome coronavirus 2
  REGION 1..10: note = Table B: HLA-DQA1*03:02-B1*03:03L HLA-DQA1*05:01-B1*03:01L HLA-DRB1*04:01L HLA-DRB1*04:03L HLA-DRB1*13:02L HLA-DRB1*13:03M HLA-DRB1*01:03M HLA-DRB1*04:02L HLA-DQA1*01:02-B1*06:02M HLA-DRB1*01:01L HLA-DRB4*03:01NL HLA-DRB1*08:77M
  REGION 1..10: note = CONT. FROM ABOVE: HLA-DPA1*01:03-B1*03:01L HLA-DPA1*03:01-B1*04: 02L HLA-DRB1*03:01M HLA-DRB1*14:01L HLA-DRB1*11:02L HLA-DRB1*11: 03L HLA-DRB1*11:04L HLA-DRB1*14:02M HLA-DRB1*08:01L HLA-DRB1*11: 01L HLA-DRB5*01:01L HLA-DQA1*01-B1*05L HLA-DQA1*05:05-B1*03:19M
  REGION 1..10: note = CONT. FROM ABOVE: HLA-DQA1*05:01-B1*02:01M HLA-DRB4*01:01L HLA-D PA1*01:03-B1*04:01M HLA-DQA1*05:05-B1*03:116L HLA-DRB1*09:01L HL A-DPA1*01:03-B1*04:02M HLA-DRB1*12:01L HLA-DPA1*02:01-B1*13:01L HLA-DPA1*03:01-B1*105:01L HLA-DQA1*03:01-B1*03:02L
  REGION 1..10: note = CONT. FROM ABOVE: HLA-DPA1*01:03-B1*104:01L HLA-DQA1*05:05-B1*03 :01L HLA-DRB1*14:17L HLA-DPA1*01:02-B1*04:01L HLA-DRB1*10:01L HL A-DRB1*16:01L HLA-DQA1*01:03-B1*06:01L HLA-DRB1*08:02L HLA-DQA1* 02:01-B1*03:03M HLA-DRB1*15:03L
GVVQQLPETY

SEQ ID NO: 9802 - protein, 10 aa, Severe acute respiratory syndrome coronavirus 2
  REGION 1..10: note = Table B: HLA-DQA1*03:02-B1*03:03L HLA-DQA1*05:01-B1*03:01L HLA-DRB1*04:03L HLA-DRB1*13:02L HLA-DRB1*13:03L HLA-DRB1*01:03L HLA-DRB1*04:05L HLA-DQA1*01:02-B1*06:02L HLA-DRB1*01:02L HLA-DRB1*08:77L HLA-DPA1*01:03-B1*03:01L
  REGION 1..10: note = CONT. FROM ABOVE: HLA-DPA1*03:01-B1*04:02L HLA-DRB1*14:01L HLA-D RB1*14:02L HLA-DQA1*01-B1*05L HLA-DQA1*05:05-B1*03:19L HLA-DQA1* 05:01-B1*02:01L HLA-DRB4*01:01L HLA-DPA1*01:03-B1*04:01L HLA-DPA 1*01:03-B1*04:02L HLA-DRB1*12:01L HLA-DPA1*02:01-B1*13:01L
  REGION 1..10: note = CONT. FROM ABOVE: HLA-DPA1*03:01-B1*105:01L HLA-DQA1*03:01-B1*03 :02L HLA-DPA1*01:03-B1*104:01L HLA-DQA1*05:05-B1*03:01L HLA-DPA1 *01:02-B1*04:01L HLA-DRB1*16:01L HLA-DQA1*01:03-B1*06:01L HLA-DQ A1*02:01-B1*03:03L HLA-DRB1*15:03L
VVQQLPETYF

SEQ ID NO: 9803 - protein, 10 aa, Severe acute respiratory syndrome coronavirus 2
  REGION 1..10: note = Table B: HLA-DQA1*03:02-B1*03:03L HLA-DQA1*01:02-B1*06:02L HLA-DPA1*03:01-B1*105:01L
ETYFTQSRNL

SEQ ID NO: 9804 - protein, 10 aa, Severe acute respiratory syndrome coronavirus 2
  REGION 1..10: note = Table B: HLA-DQA1*03:02-B1*03:03L HLA-DQA1*05:01-B1*03:01L HLA-DRB1*13:03L HLA-DRB1*01:03L HLA-DQA1*01:02-B1*06:02L HLA-DRB1*08:77L HLA-DPA1*01:03-B1*03:01L HLA-DPA1*03:01-B1*04:02L HLA-DRB1*03:01L HLA-DRB1*14:01L
  REGION 1..10: note = CONT. FROM ABOVE: HLA-DRB1*14:02L HLA-DQA1*01-B1*05L HLA-DQA1*05 :05-B1*03:19L HLA-DQA1*05:01-B1*02:01L HLA-DRB4*01:01L HLA-DPA1* 01:03-B1*04:01L HLA-DQA1*05:05-B1*03:116L HLA-DPA1*01:03-B1*04:0 2L HLA-DPA1*02:01-B1*13:01L HLA-DPA1*03:01-B1*105:01L
  REGION 1..10: note = CONT. FROM ABOVE: HLA-DQA1*03:01-B1*03:02L HLA-DPA1*01:02-B1*04: 01L HLA-DRB1*16:01L HLA-DQA1*01:03-B1*06:01L HLA-DRB1*08:02L HLA -DQA1*02:01-B1*03:03L HLA-DRB1*15:03L
FTQSRNLQEF

SEQ ID NO: 9805 - protein, 11 aa, Severe acute respiratory syndrome coronavirus 2
  REGION 1..11: note = Table B: HLA-DQA1*03:02-B1*03:03L HLA-DRB1*11:02L HLA-DQA1*05:05-B1*03:19M HLA-DPA1*01:03-B1*104:01L
QEFKPRSQMEI

SEQ ID NO: 9806 - protein, 10 aa, Severe acute respiratory syndrome coronavirus 2
  REGION 1..10: note = Table B: HLA-DQA1*03:02-B1*03:03M HLA-DQA1*05:01-B1*03:01L HLA-DPA1*03:01-B1*04:02L HLA-DRB1*14:02L HLA-DQA1*05:05-B1*03:19L HLA-DQA1*05:05-B1*03:116L HLA-DRB1*09:01L HLA-DQA1*03:01-B1*03:02L
  REGION 1..10: note = CONT. FROM ABOVE: HLA-DPA1*01:02-B1*04:01L HLA-DQA1*02:01-B1*03: 03L HLA-DRB1*15:03L
SQMEIDFLEL

SEQ ID NO: 9807 - protein, 10 aa, Severe acute respiratory syndrome coronavirus 2
  REGION 1..10: note = Table B: HLA-DQA1*03:02-B1*03:03L HLA-DRB1*11:02L HLA-DQA1*05:05-B1*03:19M HLA-DPA1*01:03-B1*104:01L
MEIDFLELAM

SEQ ID NO: 9808 - protein, 10 aa, Severe acute respiratory syndrome coronavirus 2
  REGION 1..10: note = Table B: HLA-DQA1*03:02-B1*03:03L HLA-DQA1*05:01-B1*03:01L HLA-DRB1*04:03L HLA-DRB1*13:02L HLA-DRB1*13:03L HLA-DRB1*01:03L HLA-DRB1*04:05L HLA-DQA1*01:02-B1*06:02M HLA-DRB4*03:01NL HLA-DRB1*08:77M HLA-DPA1*01:03-B1*03:01M
  REGION 1..10: note = CONT. FROM ABOVE: HLA-DPA1*03:01-B1*04:02L HLA-DRB1*03:01M HLA-D RB1*14:01L HLA-DRB1*11:02M HLA-DRB1*11:03L HLA-DRB1*14:02L HLA-D RB1*11:01L HLA-DRB5*01:01L HLA-DQA1*01-B1*05M HLA-DQA1*05:05-B1* 03:19H HLA-DQA1*05:01-B1*02:01M HLA-DRB4*01:01M
  REGION 1..10: note = CONT. FROM ABOVE: HLA-DPA1*01:03-B1*04:01M HLA-DQA1*05:05-B1*03: 116M HLA-DPA1*01:03-B1*04:02L HLA-DRB1*12:01L HLA-DPA1*02:01-B1* 13:01L HLA-DPA1*03:01-B1*105:01L HLA-DPA1*01:03-B1*104:01M HLA-D QA1*05:05-B1*03:01L HLA-DPA1*01:02-B1*04:01L HLA-DRB1*10:01L
  REGION 1..10: note = CONT. FROM ABOVE: HLA-DRB1*16:01M HLA-DQA1*01:03-B1*06:01L HLA-D RB1*08:02L HLA-DQA1*02:01-B1*03:03L HLA-DRB1*15:03L
LAMDEFIERY

SEQ ID NO: 9809 - protein, 11 aa, Severe acute respiratory syndrome coronavirus 2
  REGION 1..11: note = Table B: HLA-DQA1*03:02-B1*03:03L HLA-DQA1*05:05-B1*03:19L
AMDEFIERYKL

SEQ ID NO: 9810 - protein, 10 aa, Severe acute respiratory syndrome coronavirus 2
  REGION 1..10: note = Table B: HLA-DQA1*03:02-B1*03:03L HLA-DQA1*01-B1*05L HLA-DQA1*05:05-B1*03:19L HLA-DQA1*05:01-B1*02:01L HLA-DPA1*01:03-B1*104:01L HLA-DPA1*01:02-B1*04:01L
LEGYAFEHIV

SEQ ID NO: 9811 - protein, 10 aa, Severe acute respiratory syndrome coronavirus 2
  REGION 1..10: note = Table B: HLA-DQA1*03:02-B1*03:03L HLA-DQA1*05:01-B1*03:01L HLA-DRB1*13:03L HLA-DQA1*01:02-B1*06:02M HLA-DRB1*08:77L HLA-DPA1*01:03-B1*03:01L HLA-DRB1*03:01L HLA-DRB1*14:02L HLA-DQA1*01-B1*05L HLA-DQA1*05:05-B1*03:19L
  REGION 1..10: note = CONT. FROM ABOVE: HLA-DQA1*05:01-B1*02:01L HLA-DRB4*01:01L HLA-D PA1*01:03-B1*04:01L HLA-DQA1*05:05-B1*03:116L HLA-DPA1*02:01-B1* 13:01L HLA-DPA1*03:01-B1*105:01L HLA-DPA1*01:03-B1*104:01L HLA-D RB1*16:01L HLA-DQA1*01:03-B1*06:01L HLA-DQA1*02:01-B1*03:03L
  REGION 1..10: note = CONT. FROM ABOVE: HLA-DRB1*15:03L
EGYAFEHIVY

SEQ ID NO: 9812 - protein, 11 aa, Severe acute respiratory syndrome coronavirus 2
  REGION 1..11: note = Table B: HLA-DQA1*03:02-B1*03:03L HLA-DPA1*01:03-B1*03:01L HLA-DRB1*14:02L HLA-DPA1*01:03-B1*04:02L HLA-DRB1*12:01L HLA-DQA1*03:01-B1*03:02L HLA-DPA1*01:03-B1*104:01L HLA-DQA1*05:05-B1*03:01L
YAFEHIVYGDF

SEQ ID NO: 9813 - protein, 10 aa, Severe acute respiratory syndrome coronavirus 2
  REGION 1..10: note = Table B: HLA-DQA1*03:02-B1*03:03L HLA-DQA1*05:01-B1*03:01L HLA-DRB1*04:03L HLA-DRB1*01:03L HLA-DRB1*04:02L HLA-DQA1*01:02-B1*06:02L HLA-DPA1*03:01-B1*04:02L HLA-DQA1*01-B1*05L HLA-DQA1*05:01-B1*02:01L
  REGION 1..10: note = CONT. FROM ABOVE: HLA-DPA1*01:03-B1*04:01L HLA-DPA1*01:03-B1*04: 02L HLA-DPA1*03:01-B1*105:01L HLA-DQA1*03:01-B1*03:02L HLA-DRB1* 14:17L HLA-DPA1*01:02-B1*04:01L HLA-DRB1*16:01L HLA-DQA1*01:03-B 1*06:01L HLA-DRB1*04:08L HLA-DQA1*02:01-B1*03:03L
  REGION 1..10: note = CONT. FROM ABOVE: HLA-DRB1*15:03L
IVYGDFSHSQ

SEQ ID NO: 9814 - protein, 10 aa, Severe acute respiratory syndrome coronavirus 2
  REGION 1..10: note = Table B: HLA-DQA1*03:02-B1*03:03L HLA-DQA1*05:01-B1*03:01L HLA-DRB1*04:03L HLA-DRB1*01:03L HLA-DRB1*04:05L HLA-DQA1*01:02-B1*06:02L HLA-DRB1*01:02L HLA-DPA1*03:01-B1*04:02L HLA-DRB1*14:02L HLA-DQA1*01-B1*05L
  REGION 1..10: note = CONT. FROM ABOVE: HLA-DQA1*05:05-B1*03:19L HLA-DQA1*05:05-B1*03: 116L HLA-DPA1*02:01-B1*13:01L HLA-DPA1*03:01-B1*105:01L HLA-DQA1 *03:01-B1*03:02L HLA-DPA1*01:02-B1*04:01L HLA-DRB1*16:01L HLA-DQ A1*01:03-B1*06:01L HLA-DQA1*02:01-B1*03:03L HLA-DRB1*15:03L
VYGDFSHSQL

SEQ ID NO: 9815 - protein, 11 aa, Severe acute respiratory syndrome coronavirus 2
  REGION 1..11: note = Table B: HLA-DQA1*03:02-B1*03:03L HLA-DPA1*03:01-B1*04:02L HLA-DQA1*01-B1*05L HLA-DQA1*05:01-B1*02:01L HLA-DPA1*03:01-B1*105:01L HLA-DQA1*03:01-B1*03:02L HLA-DPA1*01:02-B1*04:01L HLA-DRB1*16:01L
  REGION 1..11: note = CONT. FROM ABOVE: HLA-DQA1*01:03-B1*06:01L HLA-DQA1*02:01-B1*03: 03L
GDFSHSQLGGL

SEQ ID NO: 9816 - protein, 11 aa, Severe acute respiratory syndrome coronavirus 2
  REGION 1..11: note = Table B: HLA-DQA1*03:02-B1*03:03L HLA-DRB1*04:03L HLA-DRB1*04:02L HLA-DRB1*01:02L HLA-DPA1*03:01-B1*04:02L HLA-DRB1*08:01L HLA-DQA1*01-B1*05L HLA-DQA1*05:05-B1*03:19L HLA-DQA1*05:01-B1*02:01L HLA-DPA1*01:03-B1*04:01L
  REGION 1..11: note = CONT. FROM ABOVE: HLA-DPA1*01:03-B1*04:02L HLA-DRB1*12:01L HLA-D QA1*05:05-B1*03:01L HLA-DRB1*04:08L
DFSHSQLGGLH

SEQ ID NO: 9817 - protein, 10 aa, Severe acute respiratory syndrome coronavirus 2
  REGION 1..10: note = Table B: HLA-DQA1*03:02-B1*03:03L HLA-DQA1*05:01-B1*03:01L HLA-DRB1*13:02L HLA-DRB1*13:03L HLA-DRB1*01:03L HLA-DRB1*04:02L HLA-DRB1*04:05L HLA-DQA1*01:02-B1*06:02L HLA-DRB1*01:02L HLA-DPA1*01:03-B1*03:01L HLA-DPA1*03:01-B1*04:02L
  REGION 1..10: note = CONT. FROM ABOVE: HLA-DRB1*14:01L HLA-DQA1*01:01-B1*05:01L HLA-D RB1*08:01M HLA-DRB5*01:01L HLA-DQA1*01-B1*05L HLA-DQA1*05:05-B1* 03:19L HLA-DQA1*05:01-B1*02:01L HLA-DPA1*01:03-B1*04:01L HLA-DQA 1*05:05-B1*03:116L HLA-DPA1*01:03-B1*04:02L HLA-DRB3*01:01L
  REGION 1..10: note = CONT. FROM ABOVE: HLA-DPA1*03:01-B1*105:01L HLA-DQA1*03:01-B1*03 :02M HLA-DPA1*01:02-B1*04:01L HLA-DRB1*10:01L HLA-DRB1*16:01L HL A-DQA1*01:03-B1*06:01L HLA-DQA1*02:01-B1*03:03L HLA-DRB1*15:03L
SHSQLGGLHL

SEQ ID NO: 9818 - protein, 10 aa, Severe acute respiratory syndrome coronavirus 2
  REGION 1..10: note = Table B: HLA-DQA1*03:02-B1*03:03L HLA-DQA1*05:01-B1*03:01L HLA-DQA1*03:01-B1*03:02L HLA-DQA1*02:01-B1*03:03L
HSQLGGLHLL

SEQ ID NO: 9819 - protein, 10 aa, Severe acute respiratory syndrome coronavirus 2
  REGION 1..10: note = Table B: HLA-DQA1*03:02-B1*03:03L HLA-DQA1*05:05-B1*03:19L HLA-DPA1*01:03-B1*104:01L HLA-DQA1*02:01-B1*03:03L HLA-DRB1*15:03L
SQLGGLHLLI

SEQ ID NO: 9820 - protein, 10 aa, Severe acute respiratory syndrome coronavirus 2
  REGION 1..10: note = Table B: HLA-DQA1*03:02-B1*03:03L HLA-DQA1*05:01-B1*03:01M HLA-DRB4*03:01NL HLA-DRB1*08:77M HLA-DPA1*01:03-B1*03:01L HLA-DPA1*03:01-B1*04:02L HLA-DRB1*03:01L HLA-DRB1*11:02L HLA-DRB1*14:02L HLA-DQA1*01-B1*05L HLA-DQA1*05:05-B1*03:19M
  REGION 1..10: note = CONT. FROM ABOVE: HLA-DQA1*05:01-B1*02:01L HLA-DRB4*01:01M HLA-D PA1*01:03-B1*04:01M HLA-DQA1*05:05-B1*03:116L HLA-DPA1*01:03-B1* 04:02L HLA-DQA1*03:01-B1*03:02L HLA-DPA1*01:03-B1*104:01L HLA-DP A1*01:02-B1*04:01L HLA-DRB1*10:01L HLA-DRB1*16:01L
  REGION 1..10: note = CONT. FROM ABOVE: HLA-DQA1*02:01-B1*03:03L HLA-DRB1*15:03L
KESPFELEDF

SEQ ID NO: 9821 - protein, 12 aa, Severe acute respiratory syndrome coronavirus 2
  REGION 1..12: note = Table B: HLA-DQA1*03:02-B1*03:03L HLA-DQA1*05:01-B1*03:01L HLA-DRB1*04:03L HLA-DRB1*13:03L HLA-DQA1*01:02-B1*06:02L HLA-DRB1*08:04L HLA-DRB1*14:01L HLA-DRB1*11:04L HLA-DRB1*11:01L HLA-DPA1*02:01-B1*13:01L HLA-DQA1*03:01-B1*03:02L
  REGION 1..12: note = CONT. FROM ABOVE: HLA-DPA1*01:03-B1*02:01L HLA-DPA1*01:03-B1*104 :01L HLA-DQA1*05:05-B1*03:01L HLA-DQA1*02:01-B1*03:03L
SPFELEDFIPMD

SEQ ID NO: 9822 - protein, 11 aa, Severe acute respiratory syndrome coronavirus 2
  REGION 1..11: note = Table B: HLA-DQA1*03:02-B1*03:03L HLA-DRB1*04:03L HLA-DRB1*13:03L HLA-DRB1*04:02L HLA-DRB1*04:05L HLA-DRB4*03:01NL HLA-DQA1*01-B1*05L HLA-DQA1*05:01-B1*02:01L HLA-DRB1*14:17L HLA-DRB1*16:01L HLA-DQA1*01:03-B1*06:01L
EDFIPMDSTVK

SEQ ID NO: 9823 - protein, 11 aa, Severe acute respiratory syndrome coronavirus 2
  REGION 1..11: note = Table B: HLA-DQA1*03:02-B1*03:03L HLA-DRB1*13:02L HLA-DQA1*01:02-B1*06:02L HLA-DPA1*01:03-B1*03:01L HLA-DRB1*14:01L HLA-DQA1*05:05-B1*03:19L HLA-DRB1*04:10L HLA-DPA1*03:01-B1*105:01L HLA-DRB1*14:54L
  REGION 1..11: note = CONT. FROM ABOVE: HLA-DQA1*05:05-B1*03:01L HLA-DPA1*01:02-B1*04: 01L HLA-DRB1*10:01L HLA-DQA1*01:03-B1*06:01L HLA-DRB1*04:08L
DFIPMDSTVKN

SEQ ID NO: 9824 - protein, 10 aa, Severe acute respiratory syndrome coronavirus 2
  REGION 1..10: note = Table B: HLA-DQA1*03:02-B1*03:03L HLA-DQA1*05:01-B1*03:01M HLA-DRB1*04:01L HLA-DRB1*04:03L HLA-DRB1*13:02L HLA-DRB1*13:03M HLA-DRB1*01:03M HLA-DRB1*04:02L HLA-DRB1*04:05L HLA-DQA1*01:02-B1*06:02H HLA-DRB1*01:01L HLA-DRB1*01:02L
  REGION 1..10: note = CONT. FROM ABOVE: HLA-DRB4*03:01NL HLA-DRB1*08:77L HLA-DPA1*01:0 3-B1*03:01M HLA-DPA1*03:01-B1*04:02L HLA-DRB1*03:01L HLA-DRB1*14 :01L HLA-DRB1*11:02L HLA-DRB1*11:03L HLA-DRB1*11:04L HLA-DRB1*14 :02M HLA-DRB1*08:01L HLA-DRB1*11:01L HLA-DRB5*01:01L
  REGION 1..10: note = CONT. FROM ABOVE: HLA-DQA1*01-B1*05L HLA-DQA1*05:05-B1*03:19L HL A-DRB4*02:01NL HLA-DQA1*05:01-B1*02:01M HLA-DRB4*01:01L HLA-DPA1 *01:03-B1*04:01M HLA-DQA1*05:05-B1*03:116L HLA-DPA1*01:03-B1*04: 02L HLA-DRB1*12:01L HLA-DPA1*02:01-B1*13:01L
  REGION 1..10: note = CONT. FROM ABOVE: HLA-DPA1*03:01-B1*105:01H HLA-DQA1*03:01-B1*03 :02L HLA-DPA1*01:03-B1*104:01L HLA-DQA1*05:05-B1*03:01L HLA-DRB1 *14:17L HLA-DPA1*01:02-B1*04:01L HLA-DRB1*10:01L HLA-DRB1*16:01L HLA-DQA1*01:03-B1*06:01L HLA-DRB1*08:02L HLA-DRB1*08:03L
  REGION 1..10: note = CONT. FROM ABOVE: HLA-DQA1*02:01-B1*03:03L HLA-DRB1*15:01L HLA -DRB1*15:03M
IPMDSTVKNY

SEQ ID NO: 9825 - protein, 13 aa, Severe acute respiratory syndrome coronavirus 2
  REGION 1..13: note = Table B: HLA-DQA1*03:02-B1*03:03L HLA-DRB1*04:03L HLA-DRB1*04:02L HLA-DQA1*01:02-B1*06:02L HLA-DQA1*05:01-B1*02:01L
DSTVKNYFITDAQ

SEQ ID NO: 9826 - protein, 12 aa, Severe acute respiratory syndrome coronavirus 2
  REGION 1..12: note = Table B: HLA-DQA1*03:02-B1*03:03L HLA-DRB1*13:02L HLA-DRB1*13:03L HLA-DRB1*01:03L HLA-DRB1*04:02L HLA-DRB1*04:04L HLA-DRB1*04:05L HLA-DQA1*01:02-B1*06:02L HLA-DRB1*01:02L HLA-DRB4*03:01NL HLA-DRB1*08:04L HLA-DPA1*01:03-B1*03:01L
  REGION 1..12: note = CONT. FROM ABOVE: HLA-DPA1*03:01-B1*04:02L HLA-DRB1*14:01L HLA-D QA1*01:01-B1*05:01L HLA-DRB1*08:01L HLA-DQA1*05:01-B1*02:01L HLA -DRB1*04:10L HLA-DRB1*12:01L HLA-DRB1*12:02L HLA-DPA1*02:01-B1*1 3:01L HLA-DPA1*03:01-B1*105:01L HLA-DRB1*14:54L HLA-DRB1*14:17L
  REGION 1..12: note = CONT. FROM ABOVE: HLA-DPA1*01:02-B1*04:01L HLA-DRB1*10:01L HLA-D RB1*16:01L HLA-DRB1*04:08L HLA-DRB1*08:03L HLA-DQA1*02:01-B1*03: 03L HLA-DRB1*15:03L
VKNYFITDAQTG

SEQ ID NO: 9827 - protein, 12 aa, Severe acute respiratory syndrome coronavirus 2
  REGION 1..12: note = Table B: HLA-DQA1*03:02-B1*03:03L HLA-DQA1*05:01-B1*03:01L HLA-DRB1*04:01L HLA-DRB1*13:02L HLA-DRB1*01:03L HLA-DRB1*01:02L HLA-DRB1*08:04L HLA-DRB1*08:77L HLA-DRB3*02:01L HLA-DPA1*01:03-B1*03:01L HLA-DRB1*14:01L HLA-DRB1*11:03L
  REGION 1..12: note = CONT. FROM ABOVE: HLA-DRB1*11:04L HLA-DRB1*14:02L HLA-DQA1*05:05 -B1*03:19L HLA-DRB1*04:10L HLA-DRB1*12:01L HLA-DRB1*12:02L HLA-D RB3*01:01L HLA-DPA1*03:01-B1*105:01L HLA-DQA1*05:05-B1*03:01L HL A-DRB1*10:01L HLA-DRB1*04:08L HLA-DQA1*02:01-B1*03:03L
  REGION 1..12: note = CONT. FROM ABOVE: HLA-DRB1*15:03L
NYFITDAQTGSS

SEQ ID NO: 9828 - protein, 10 aa, Severe acute respiratory syndrome coronavirus 2
  REGION 1..10: note = Table B: HLA-DQA1*03:02-B1*03:03L HLA-DQA1*05:01-B1*03:01L HLA-DRB1*04:01L HLA-DRB1*04:03L HLA-DRB1*13:02L HLA-DRB1*13:03M HLA-DRB1*01:03L HLA-DRB1*04:02L HLA-DRB1*04:04L HLA-DRB1*04:05L HLA-DQA1*01:02-B1*06:02L HLA-DRB1*01:01L HLA-DRB1*01:02L
  REGION 1..10: note = CONT. FROM ABOVE: HLA-DRB4*03:01NM HLA-DRB1*08:04L HLA-DRB1*08:7 7L HLA-DRB3*02:01L HLA-DPA1*01:03-B1*03:01L HLA-DRB1*14:01L HLA- DRB1*11:03L HLA-DRB1*11:04L HLA-DRB1*14:02L HLA-DQA1*01:01-B1*05 :01L HLA-DRB1*08:01L HLA-DRB1*11:01L HLA-DRB5*01:01L
  REGION 1..10: note = CONT. FROM ABOVE: HLA-DQA1*01-B1*05L HLA-DQA1*05:05-B1*03:19L HL A-DQA1*05:01-B1*02:01L HLA-DRB1*13:01L HLA-DRB4*01:01L HLA-DRB1* 04:10L HLA-DPA1*01:03-B1*04:02L HLA-DRB1*12:01M HLA-DRB1*12:02L HLA-DRB3*01:01L HLA-DPA1*03:01-B1*105:01L
  REGION 1..10: note = CONT. FROM ABOVE: HLA-DQA1*03:01-B1*03:02M HLA-DRB1*14:54L HLA-D QA1*05:05-B1*03:01L HLA-DRB1*14:17M HLA-DPA1*01:02-B1*04:01L HLA -DRB1*10:01L HLA-DRB1*16:01L HLA-DQA1*01:03-B1*06:01L HLA-DRB1*0 4:08L HLA-DRB1*08:02L HLA-DRB1*08:03L HLA-DQA1*02:01-B1*03:03L
  REGION 1..10: note = CONT. FROM ABOVE: HLA-DRB1*15:01L
ITDAQTGSSK

SEQ ID NO: 9829 - protein, 15 aa, Severe acute respiratory syndrome coronavirus 2
  REGION 1..15: note = Table B: HLA-DQA1*03:02-B1*03:03L
DAQTGSSKCVCSVID

SEQ ID NO: 9830 - protein, 10 aa, Severe acute respiratory syndrome coronavirus 2
  REGION 1..10: note = Table B: HLA-DQA1*03:02-B1*03:03L HLA-DRB1*13:03L HLA-DQA1*01:02-B1*06:02M HLA-DRB1*14:02L HLA-DQA1*05:05-B1*03:19L HLA-DQA1*05:01-B1*02:01L HLA-DRB4*01:01L HLA-DPA1*01:03-B1*04:01L
  REGION 1..10: note = CONT. FROM ABOVE: HLA-DPA1*02:01-B1*13:01L HLA-DPA1*03:01-B1*105 :01L HLA-DQA1*01:03-B1*06:01L HLA-DQA1*02:01-B1*03:03L HLA-DRB1* 15:03L
SVIDLLLDDF

SEQ ID NO: 9831 - protein, 10 aa, Severe acute respiratory syndrome coronavirus 2
  REGION 1..10: note = Table B: HLA-DQA1*03:02-B1*03:03L
LLLDDFVEII

SEQ ID NO: 9832 - protein, 10 aa, Severe acute respiratory syndrome coronavirus 2
  REGION 1..10: note = Table B: HLA-DQA1*03:02-B1*03:03L HLA-DQA1*05:01-B1*03:01L HLA-DQA1*01:02-B1*06:02L HLA-DQA1*01-B1*05L HLA-DQA1*05:01-B1*02:01L HLA-DPA1*03:01-B1*105:01L HLA-DQA1*03:01-B1*03:02L HLA-DPA1*01:02-B1*04:01L
  REGION 1..10: note = CONT. FROM ABOVE: HLA-DQA1*01:03-B1*06:01L HLA-DQA1*02:01-B1*03: 03L
DFVEIIKSQD

SEQ ID NO: 9833 - protein, 10 aa, Severe acute respiratory syndrome coronavirus 2
  REGION 1..10: note = Table B: HLA-DQA1*03:02-B1*03:03L HLA-DQA1*05:01-B1*03:01L HLA-DRB1*04:03L HLA-DRB1*13:03L HLA-DRB1*04:02L HLA-DRB1*04:05L HLA-DQA1*01:02-B1*06:02L HLA-DPA1*03:01-B1*04:02L HLA-DRB1*14:01L HLA-DRB1*08:01L HLA-DQA1*01-B1*05L
  REGION 1..10: note = CONT. FROM ABOVE: HLA-DQA1*05:01-B1*02:01L HLA-DPA1*03:01-B1*105 :01L HLA-DQA1*03:01-B1*03:02L HLA-DPA1*01:02-B1*04:01L HLA-DRB1* 16:01L HLA-DQA1*01:03-B1*06:01L HLA-DQA1*02:01-B1*03:03L HLA-DRB 1*15:03L
FVEIIKSQDL

SEQ ID NO: 9834 - protein, 10 aa, Severe acute respiratory syndrome coronavirus 2
  REGION 1..10: note = Table B: HLA-DQA1*03:02-B1*03:03L HLA-DQA1*05:01-B1*03:01L HLA-DRB1*04:03L HLA-DRB1*04:02L HLA-DRB1*04:05L HLA-DRB1*01:02L HLA-DRB4*03:01NL HLA-DRB1*14:01L HLA-DQA1*01-B1*05L HLA-DQA1*05:01-B1*02:01L HLA-DRB1*04:10L HLA-DRB1*12:01L
  REGION 1..10: note = CONT. FROM ABOVE: HLA-DQA1*03:01-B1*03:02L HLA-DRB1*14:54L HLA-D RB1*14:17L HLA-DPA1*01:02-B1*04:01L HLA-DRB1*16:01L HLA-DQA1*01: 03-B1*06:01L HLA-DQA1*02:01-B1*03:03L HLA-DRB1*15:03L
VEIIKSQDLS

SEQ ID NO: 9835 - protein, 10 aa, Severe acute respiratory syndrome coronavirus 2
  REGION 1..10: note = Table B: HLA-DQA1*03:02-B1*03:03L HLA-DQA1*05:01-B1*03:01L HLA-DRB1*13:03L HLA-DQA1*01:02-B1*06:02L HLA-DRB1*01:02L HLA-DQA1*05:05-B1*03:19L HLA-DQA1*05:01-B1*02:01L HLA-DPA1*02:01-B1*13:01L HLA-DPA1*03:01-B1*105:01L
  REGION 1..10: note = CONT. FROM ABOVE: HLA-DQA1*02:01-B1*03:03L HLA-DRB1*15:03L
EIIKSQDLSV

SEQ ID NO: 9836 - protein, 11 aa, Severe acute respiratory syndrome coronavirus 2
  REGION 1..11: note = Table B: HLA-DQA1*03:02-B1*03:03L HLA-DQA1*05:01-B1*03:01L HLA-DRB1*04:01L HLA-DRB1*13:02L HLA-DRB1*13:03L HLA-DRB1*01:03L HLA-DRB1*04:02M HLA-DRB1*04:04L HLA-DRB1*04:05L HLA-DQA1*01:02-B1*06:02L HLA-DRB1*01:02L HLA-DRB4*03:01NL
  REGION 1..11: note = CONT. FROM ABOVE: HLA-DRB1*08:04L HLA-DRB1*08:77L HLA-DRB3*02:01 L HLA-DPA1*01:03-B1*03:01L HLA-DPA1*03:01-B1*04:02L HLA-DRB1*14: 01L HLA-DRB1*11:03L HLA-DRB1*11:04L HLA-DRB1*14:02L HLA-DQA1*05: 05-B1*03:19L HLA-DRB1*04:10L HLA-DRB1*09:01L HLA-DRB1*12:01L
  REGION 1..11: note = CONT. FROM ABOVE: HLA-DRB1*12:02L HLA-DPA1*03:01-B1*105:01L HLA- DRB1*14:54L HLA-DQA1*05:05-B1*03:01L HLA-DRB1*14:17M HLA-DPA1*01 :02-B1*04:01L HLA-DRB1*07:01L HLA-DRB1*10:01L HLA-DQA1*01:03-B1* 06:01L HLA-DRB1*04:08L HLA-DRB1*08:03L HLA-DQA1*02:01-B1*03:03L
IIKSQDLSVVS

SEQ ID NO: 9837 - protein, 10 aa, Severe acute respiratory syndrome coronavirus 2
  REGION 1..10: note = Table B: HLA-DQA1*03:02-B1*03:03L HLA-DQA1*05:01-B1*03:01L HLA-DRB1*11:02L HLA-DQA1*05:05-B1*03:19M HLA-DQA1*05:01-B1*02:01L HLA-DQA1*05:05-B1*03:116L HLA-DRB1*09:01L HLA-DQA1*03:01-B1*03:02L
  REGION 1..10: note = CONT. FROM ABOVE: HLA-DPA1*01:03-B1*104:01L HLA-DRB1*10:01L HLA- DRB1*16:01L HLA-DQA1*02:01-B1*03:03L HLA-DRB1*15:03L
SQDLSVVSKV

SEQ ID NO: 9838 - protein, 10 aa, Severe acute respiratory syndrome coronavirus 2
  REGION 1..10: note = Table B: HLA-DQA1*03:02-B1*03:03L HLA-DQA1*05:01-B1*03:01L HLA-DRB1*04:03L HLA-DRB1*13:02L HLA-DRB1*13:03L HLA-DRB1*01:03L HLA-DRB1*04:02L HLA-DQA1*01:02-B1*06:02L HLA-DRB4*03:01NL HLA-DRB1*14:01L HLA-DQA1*01:01-B1*05:01L HLA-DRB1*08:01L
  REGION 1..10: note = CONT. FROM ABOVE: HLA-DRB1*12:01L HLA-DQA1*03:01-B1*03:02L HLA-D QA1*05:05-B1*03:01L HLA-DRB1*14:17L HLA-DPA1*01:02-B1*04:01L HLA -DRB1*16:01L HLA-DQA1*01:03-B1*06:01L HLA-DQA1*02:01-B1*03:03L
DLSVVSKVVK

SEQ ID NO: 9839 - protein, 10 aa, Severe acute respiratory syndrome coronavirus 2
  REGION 1..10: note = Table B: HLA-DQA1*03:02-B1*03:03L HLA-DQA1*01:02-B1*06:02L HLA-DQA1*05:05-B1*03:19L HLA-DPA1*02:01-B1*13:01L HLA-DRB1*16:01L HLA-DQA1*01:03-B1*06:01L HLA-DQA1*02:01-B1*03:03L HLA-DRB1*15:03L
VVSKVVKVTI

SEQ ID NO: 9840 - protein, 13 aa, Severe acute respiratory syndrome coronavirus 2
  REGION 1..13: note = Table B: HLA-DQA1*03:02-B1*03:03L HLA-DRB1*01:02L HLA-DPA1*01:03-B1*03:01L HLA-DRB1*14:01L HLA-DQA1*05:01-B1*02:01L HLA-DPA1*02:01-B1*13:01L HLA-DPA1*03:01-B1*105:01L HLA-DRB1*16:01L HLA-DRB1*04:08L
  REGION 1..13: note = CONT. FROM ABOVE: HLA-DQA1*02:01-B1*03:03L
VSKVVKVTIDYTE

SEQ ID NO: 9841 - protein, 12 aa, Severe acute respiratory syndrome coronavirus 2
  REGION 1..12: note = Table B: HLA-DQA1*03:02-B1*03:03L HLA-DQA1*05:01-B1*03:01L HLA-DRB1*13:02L HLA-DRB1*13:03L HLA-DRB1*01:03L HLA-DRB1*04:02L HLA-DRB1*04:04L HLA-DRB1*04:05L HLA-DQA1*01:02-B1*06:02L HLA-DRB1*01:02L HLA-DRB4*03:01NL HLA-DRB1*08:04L
  REGION 1..12: note = CONT. FROM ABOVE: HLA-DPA1*01:03-B1*03:01L HLA-DPA1*03:01-B1*04: 02L HLA-DRB1*14:01L HLA-DRB1*04:10L HLA-DRB1*12:01L HLA-DPA1*02: 01-B1*13:01L HLA-DPA1*03:01-B1*105:01L HLA-DRB1*14:54L HLA-DQA1* 05:05-B1*03:01L HLA-DRB1*14:17L HLA-DPA1*01:02-B1*04:01L
  REGION 1..12: note = CONT. FROM ABOVE: HLA-DRB1*16:01L HLA-DQA1*01:03-B1*06:01L HLA-D RB1*04:08L HLA-DQA1*02:01-B1*03:03L HLA-DRB1*15:03L
VVKVTIDYTEIS

SEQ ID NO: 9842 - protein, 10 aa, Severe acute respiratory syndrome coronavirus 2
  REGION 1..10: note = Table B: HLA-DQA1*03:02-B1*03:03L HLA-DQA1*05:01-B1*03:01L HLA-DRB1*04:03L HLA-DRB1*13:03L HLA-DRB1*01:03L HLA-DRB1*04:05L HLA-DQA1*01:02-B1*06:02M HLA-DRB1*08:77L HLA-DPA1*01:03-B1*03:01L HLA-DPA1*03:01-B1*04:02L
  REGION 1..10: note = CONT. FROM ABOVE: HLA-DRB1*03:01L HLA-DRB1*14:01L HLA-DRB1*14:02 L HLA-DQA1*01-B1*05L HLA-DQA1*05:05-B1*03:19L HLA-DQA1*05:01-B1* 02:01L HLA-DRB4*01:01L HLA-DPA1*01:03-B1*04:01L HLA-DQA1*05:05-B 1*03:116L HLA-DPA1*01:03-B1*04:02L HLA-DRB1*12:01L
  REGION 1..10: note = CONT. FROM ABOVE: HLA-DPA1*02:01-B1*13:01L HLA-DPA1*03:01-B1*105 :01L HLA-DQA1*03:01-B1*03:02L HLA-DPA1*01:03-B1*104:01L HLA-DPA1 *01:02-B1*04:01L HLA-DRB1*10:01L HLA-DRB1*16:01L HLA-DQA1*01:03- B1*06:01L HLA-DQA1*02:01-B1*03:03L HLA-DRB1*15:03L
VTIDYTEISF

SEQ ID NO: 9843 - protein, 10 aa, Severe acute respiratory syndrome coronavirus 2
  REGION 1..10: note = Table B: HLA-DQA1*03:02-B1*03:03L HLA-DPA1*03:01-B1*04:02L HLA-DQA1*01-B1*05L HLA-DQA1*05:01-B1*02:01L HLA-DPA1*03:01-B1*105:01L HLA-DQA1*03:01-B1*03:02L HLA-DPA1*01:02-B1*04:01L HLA-DQA1*01:03-B1*06:01L
  REGION 1..10: note = CONT. FROM ABOVE: HLA-DRB1*15:03L
TIDYTEISFM

SEQ ID NO: 9844 - protein, 10 aa, Severe acute respiratory syndrome coronavirus 2
  REGION 1..10: note = Table B: HLA-DQA1*03:02-B1*03:03L HLA-DQA1*03:01-B1*03:02L
GHVETFYPKL

SEQ ID NO: 9845 - protein, 10 aa, Severe acute respiratory syndrome coronavirus 2
  REGION 1..10: note = Table B: HLA-DQA1*03:02-B1*03:03L
VETFYPKLQS

SEQ ID NO: 9846 - protein, 13 aa, Severe acute respiratory syndrome coronavirus 2
  REGION 1..13: note = Table B: HLA-DQA1*03:02-B1*03:03L HLA-DRB1*04:03L HLA-DRB1*13:02L HLA-DRB1*01:03L HLA-DRB1*04:02L HLA-DRB1*04:04L HLA-DRB1*04:05L HLA-DRB1*01:02L HLA-DRB4*03:01NL HLA-DPA1*01:03-B1*03:01L HLA-DQA1*01:01-B1*05:01L
  REGION 1..13: note = CONT. FROM ABOVE: HLA-DQA1*01-B1*05L HLA-DQA1*05:05-B1*03:19L HL A-DRB1*04:10L HLA-DRB1*12:01L HLA-DQA1*03:01-B1*03:02L HLA-DRB1* 14:54L HLA-DQA1*05:05-B1*03:01L HLA-DRB1*14:17L HLA-DRB1*16:01L HLA-DQA1*01:03-B1*06:01L HLA-DRB1*04:08L
YPKLQSSQAWQPG

SEQ ID NO: 9847 - protein, 12 aa, Severe acute respiratory syndrome coronavirus 2
  REGION 1..12: note = Table B: HLA-DQA1*03:02-B1*03:03L HLA-DQA1*05:01-B1*03:01L HLA-DQA1*01:02-B1*06:02L HLA-DQA1*05:05-B1*03:19L HLA-DQA1*05:01-B1*02:01L HLA-DPA1*03:01-B1*105:01L HLA-DQA1*03:01-B1*03:02L HLA-DQA1*05:05-B1*03:01L
  REGION 1..12: note = CONT. FROM ABOVE: HLA-DQA1*01:03-B1*06:01L HLA-DQA1*02:01-B1*03: 03L
LQSSQAWQPGVA

SEQ ID NO: 9848 - protein, 10 aa, Severe acute respiratory syndrome coronavirus 2
  REGION 1..10: note = Table B: HLA-DQA1*03:02-B1*03:03L
SQAWQPGVAM

SEQ ID NO: 9849 - protein, 11 aa, Severe acute respiratory syndrome coronavirus 2
  REGION 1..11: note = Table B: HLA-DQA1*03:02-B1*03:03L HLA-DQA1*05:01-B1*03:01L HLA-DQA1*05:05-B1*03:19L HLA-DQA1*03:01-B1*03:02L HLA-DQA1*05:05-B1*03:01L
QAWQPGVAMPN

SEQ ID NO: 9850 - protein, 10 aa, Severe acute respiratory syndrome coronavirus 2
  REGION 1..10: note = Table B: HLA-DQA1*03:02-B1*03:03L HLA-DQA1*05:01-B1*03:01L HLA-DQA1*01:02-B1*06:02L HLA-DQA1*05:05-B1*03:19L HLA-DQA1*05:01-B1*02:01L HLA-DPA1*03:01-B1*105:01L HLA-DQA1*03:01-B1*03:02L HLA-DQA1*05:05-B1*03:01L
  REGION 1..10: note = CONT. FROM ABOVE: HLA-DQA1*01:03-B1*06:01L HLA-DQA1*02:01-B1*03: 03L
WQPGVAMPNL

SEQ ID NO: 9851 - protein, 11 aa, Severe acute respiratory syndrome coronavirus 2
  REGION 1..11: note = Table B: HLA-DQA1*03:02-B1*03:03L HLA-DRB1*04:03L HLA-DQA1*01:01-B1*05:01L
QPGVAMPNLYK

SEQ ID NO: 9852 - protein, 12 aa, Severe acute respiratory syndrome coronavirus 2
  REGION 1..12: note = Table B: HLA-DQA1*03:02-B1*03:03L HLA-DQA1*05:01-B1*03:01L HLA-DRB1*04:04L HLA-DRB1*04:05L HLA-DQA1*01:02-B1*06:02L HLA-DRB1*01:02L HLA-DRB1*14:01L HLA-DRB1*11:03L HLA-DRB1*11:04L HLA-DQA1*01:01-B1*05:01L HLA-DRB1*08:01L
  REGION 1..12: note = CONT. FROM ABOVE: HLA-DQA1*05:01-B1*02:01L HLA-DRB1*04:10L HLA-D RB1*12:02L HLA-DPA1*03:01-B1*105:01L HLA-DRB1*14:54L HLA-DRB1*10 :01L HLA-DQA1*01:03-B1*06:01L HLA-DRB1*04:08L HLA-DRB1*08:03L HL A-DRB1*15:03L
LQNYGDSATLPK

SEQ ID NO: 9853 - protein, 10 aa, Severe acute respiratory syndrome coronavirus 2
  REGION 1..10: note = Table B: HLA-DQA1*03:02-B1*03:03L HLA-DQA1*05:01-B1*03:01L HLA-DRB1*04:03L HLA-DRB1*13:02L HLA-DRB1*13:03L HLA-DRB1*01:03L HLA-DRB1*04:02L HLA-DRB1*04:05L HLA-DRB4*03:01NL HLA-DRB1*08:77L HLA-DRB1*14:01L HLA-DRB1*11:04L HLA-DRB1*14:02L
  REGION 1..10: note = CONT. FROM ABOVE: HLA-DQA1*01:01-B1*05:01L HLA-DQA1*01-B1*05L HL A-DQA1*05:05-B1*03:19L HLA-DQA1*05:01-B1*02:01L HLA-DRB1*04:10L HLA-DRB1*12:01L HLA-DPA1*03:01-B1*105:01L HLA-DQA1*03:01-B1*03:0 2L HLA-DRB1*14:54L HLA-DQA1*05:05-B1*03:01L HLA-DRB1*14:17L
  REGION 1..10: note = CONT. FROM ABOVE: HLA-DPA1*01:02-B1*04:01L HLA-DRB1*16:01L HLA-D QA1*01:03-B1*06:01L HLA-DRB1*04:08L HLA-DQA1*02:01-B1*03:03L
YGDSATLPKG

SEQ ID NO: 9854 - protein, 10 aa, Severe acute respiratory syndrome coronavirus 2
  REGION 1..10: note = Table B: HLA-DQA1*03:02-B1*03:03L HLA-DQA1*05:05-B1*03:19L HLA-DPA1*01:03-B1*104:01L
GDSATLPKGI

SEQ ID NO: 9855 - protein, 10 aa, Severe acute respiratory syndrome coronavirus 2
  REGION 1..10: note = Table B: HLA-DQA1*03:02-B1*03:03L HLA-DQA1*05:01-B1*03:01L HLA-DQA1*01:02-B1*06:02L HLA-DQA1*05:05-B1*03:19L HLA-DQA1*05:01-B1*02:01L HLA-DPA1*03:01-B1*105:01L HLA-DQA1*03:01-B1*03:02L HLA-DQA1*05:05-B1*03:01L
  REGION 1..10: note = CONT. FROM ABOVE: HLA-DPA1*01:02-B1*04:01L HLA-DQA1*01:03-B1*06: 01L HLA-DQA1*02:01-B1*03:03L
DSATLPKGIM

SEQ ID NO: 9856 - protein, 10 aa, Severe acute respiratory syndrome coronavirus 2
  REGION 1..10: note = Table B: HLA-DQA1*03:02-B1*03:03L HLA-DQA1*05:01-B1*03:01L HLA-DQA1*03:01-B1*03:02L HLA-DQA1*02:01-B1*03:03L
SATLPKGIMM

SEQ ID NO: 9857 - protein, 10 aa, Severe acute respiratory syndrome coronavirus 2
  REGION 1..10: note = Table B: HLA-DQA1*03:02-B1*03:03L HLA-DQA1*05:05-B1*03:19L
TLPKGIMMNV

SEQ ID NO: 9858 - protein, 13 aa, Severe acute respiratory syndrome coronavirus 2
  REGION 1..13: note = Table B: HLA-DQA1*03:02-B1*03:03L HLA-DRB1*04:03L HLA-DRB1*04:02L HLA-DRB1*04:05L HLA-DRB1*01:02L HLA-DPA1*01:03-B1*03:01L HLA-DRB1*14:01L HLA-DQA1*05:01-B1*02:01L HLA-DRB1*12:01L HLA-DRB1*16:01L
  REGION 1..13: note = CONT. FROM ABOVE: HLA-DRB1*15:03L
LPKGIMMNVAKYT

SEQ ID NO: 9859 - protein, 10 aa, Severe acute respiratory syndrome coronavirus 2
  REGION 1..10: note = Table B: HLA-DQA1*03:02-B1*03:03L HLA-DQA1*05:01-B1*03:01L HLA-DQA1*01:02-B1*06:02L HLA-DPA1*03:01-B1*04:02L HLA-DRB1*14:01L HLA-DRB1*14:02L HLA-DQA1*01-B1*05L HLA-DQA1*05:05-B1*03:19L HLA-DQA1*05:01-B1*02:01L
  REGION 1..10: note = CONT. FROM ABOVE: HLA-DPA1*01:03-B1*04:01L HLA-DPA1*01:03-B1*04: 02L HLA-DRB1*12:01L HLA-DPA1*03:01-B1*105:01L HLA-DQA1*03:01-B1* 03:02L HLA-DPA1*01:02-B1*04:01L HLA-DRB1*16:01L HLA-DQA1*01:03-B 1*06:01L HLA-DQA1*02:01-B1*03:03L HLA-DRB1*15:03L
MMNVAKYTQL

SEQ ID NO: 9860 - protein, 16 aa, Severe acute respiratory syndrome coronavirus 2
  REGION 1..16: note = Table B: HLA-DQA1*03:02-B1*03:03L HLA-DRB1*11:02L
NVAKYTQLCQYLNTLT

SEQ ID NO: 9861 - protein, 12 aa, Severe acute respiratory syndrome coronavirus 2
  REGION 1..12: note = Table B: HLA-DQA1*03:02-B1*03:03L HLA-DQA1*05:01-B1*03:01L HLA-DRB1*04:03L HLA-DQA1*01:02-B1*06:02L HLA-DPA1*03:01-B1*04:02L HLA-DQA1*05:05-B1*03:19L HLA-DQA1*05:01-B1*02:01L HLA-DRB1*12:01L
  REGION 1..12: note = CONT. FROM ABOVE: HLA-DPA1*03:01-B1*105:01L HLA-DQA1*05:05-B1*03 :01L HLA-DRB1*14:17L HLA-DQA1*01:03-B1*06:01L HLA-DQA1*02:01-B1* 03:03L HLA-DRB1*15:03L
YLNTLTLAVPYN

SEQ ID NO: 9862 - protein, 12 aa, Severe acute respiratory syndrome coronavirus 2
  REGION 1..12: note = Table B: HLA-DQA1*03:02-B1*03:03L HLA-DRB1*01:02L HLA-DPA1*01:03-B1*03:01L HLA-DQA1*05:05-B1*03:19L HLA-DQA1*05:01-B1*02:01L HLA-DRB1*12:01L HLA-DRB1*16:01L HLA-DRB1*15:03L
NTLTLAVPYNMR

SEQ ID NO: 9863 - protein, 14 aa, Severe acute respiratory syndrome coronavirus 2
  REGION 1..14: note = Table B: HLA-DQA1*03:02-B1*03:03L HLA-DQA1*05:01-B1*03:01L HLA-DQA1*01:02-B1*06:02L HLA-DQA1*05:05-B1*03:19L HLA-DQA1*05:01-B1*02:01L HLA-DQA1*05:05-B1*03:01L HLA-DQA1*01:03-B1*06:01L
VIHFGAGSDKGVAP

SEQ ID NO: 9864 - protein, 12 aa, Severe acute respiratory syndrome coronavirus 2
  REGION 1..12: note = Table B: HLA-DQA1*03:02-B1*03:03L HLA-DQA1*05:01-B1*03:01L HLA-DRB1*04:03L HLA-DRB1*13:03L HLA-DRB1*01:03L HLA-DRB1*04:02L HLA-DRB1*04:05L HLA-DRB4*03:01NL HLA-DRB1*08:77L HLA-DRB1*14:02L HLA-DQA1*01:01-B1*05:01L HLA-DQA1*05:05-B1*03:19L
  REGION 1..12: note = CONT. FROM ABOVE: HLA-DQA1*05:01-B1*02:01L HLA-DRB1*12:01L HLA-D RB1*14:54L HLA-DQA1*05:05-B1*03:01L HLA-DRB1*14:17L HLA-DRB1*16: 01L HLA-DQA1*01:03-B1*06:01L HLA-DRB1*04:08L HLA-DQA1*02:01-B1*0 3:03L
FGAGSDKGVAPG

SEQ ID NO: 9865 - protein, 10 aa, Severe acute respiratory syndrome coronavirus 2
  REGION 1..10: note = Table B: HLA-DQA1*03:02-B1*03:03L HLA-DRB1*04:03L HLA-DRB1*13:03L HLA-DQA1*01-B1*05L HLA-DQA1*03:01-B1*03:02L
SDKGVAPGTA

SEQ ID NO: 9866 - protein, 11 aa, Severe acute respiratory syndrome coronavirus 2
  REGION 1..11: note = Table B: HLA-DQA1*03:02-B1*03:03L
DKGVAPGTAVL

SEQ ID NO: 9867 - protein, 12 aa, Severe acute respiratory syndrome coronavirus 2
  REGION 1..12: note = Table B: HLA-DQA1*03:02-B1*03:03L HLA-DRB1*04:03L HLA-DRB1*04:05L HLA-DRB1*01:02L HLA-DRB1*11:02L HLA-DRB4*01:01L HLA-DQA1*05:05-B1*03:116L HLA-DPA1*01:03-B1*104:01L HLA-DPA1*01:02-B1*04:01L HLA-DRB1*07:01L HLA-DRB1*10:01L
  REGION 1..12: note = CONT. FROM ABOVE: HLA-DRB1*04:08L
GVAPGTAVLRQW

SEQ ID NO: 9868 - protein, 14 aa, Severe acute respiratory syndrome coronavirus 2
  REGION 1..14: note = Table B: HLA-DQA1*03:02-B1*03:03L HLA-DRB1*01:02L HLA-DRB1*08:01L HLA-DRB1*04:08L
VAPGTAVLRQWLPT

SEQ ID NO: 9869 - protein, 14 aa, Severe acute respiratory syndrome coronavirus 2
  REGION 1..14: note = Table B: HLA-DQA1*03:02-B1*03:03L
APGTAVLRQWLPTG

SEQ ID NO: 9870 - protein, 12 aa, Severe acute respiratory syndrome coronavirus 2
  REGION 1..12: note = Table B: HLA-DQA1*03:02-B1*03:03L HLA-DRB1*04:03L HLA-DRB1*04:02L HLA-DQA1*01:02-B1*06:02L HLA-DRB1*01:02L HLA-DPA1*03:01-B1*04:02L HLA-DRB1*14:01L HLA-DQA1*05:01-B1*02:01L HLA-DRB1*12:01L
  REGION 1..12: note = CONT. FROM ABOVE: HLA-DPA1*02:01-B1*13:01L HLA-DPA1*03:01-B1*105 :01L HLA-DQA1*03:01-B1*03:02L HLA-DPA1*01:02-B1*04:01L HLA-DRB1* 16:01L HLA-DQA1*02:01-B1*03:03L HLA-DRB1*15:03L
AVLRQWLPTGTL

SEQ ID NO: 9871 - protein, 10 aa, Severe acute respiratory syndrome coronavirus 2
  REGION 1..10: note = Table B: HLA-DQA1*03:02-B1*03:03M HLA-DQA1*05:01-B1*03:01L HLA-DRB1*13:02L HLA-DRB1*01:03L HLA-DRB1*04:05L HLA-DQA1*01:02-B1*06:02L HLA-DPA1*03:01-B1*04:02L HLA-DRB1*14:01L HLA-DRB1*14:02L HLA-DRB1*08:01L
  REGION 1..10: note = CONT. FROM ABOVE: HLA-DQA1*01-B1*05L HLA-DQA1*05:05-B1*03:19L HL A-DQA1*05:01-B1*02:01L HLA-DPA1*01:03-B1*04:01L HLA-DQA1*05:05-B 1*03:116L HLA-DRB1*09:01L HLA-DPA1*01:03-B1*04:02L HLA-DPA1*02:0 1-B1*13:01L HLA-DPA1*03:01-B1*105:01L HLA-DQA1*03:01-B1*03:02L
  REGION 1..10: note = CONT. FROM ABOVE: HLA-DPA1*01:03-B1*104:01L HLA-DPA1*01:02-B1*04 :01L HLA-DRB1*16:01L HLA-DQA1*01:03-B1*06:01L HLA-DQA1*02:01-B1* 03:03L HLA-DRB1*15:03L
RQWLPTGTLL

SEQ ID NO: 9872 - protein, 11 aa, Severe acute respiratory syndrome coronavirus 2
  REGION 1..11: note = Table B: HLA-DQA1*03:02-B1*03:03L HLA-DQA1*05:01-B1*02:01L HLA-DQA1*03:01-B1*03:02L HLA-DQA1*02:01-B1*03:03L
LPTGTLLVDSD

SEQ ID NO: 9873 - protein, 10 aa, Severe acute respiratory syndrome coronavirus 2
  REGION 1..10: note = Table B: HLA-DQA1*03:02-B1*03:03L HLA-DRB1*04:03L HLA-DQA1*01:02-B1*06:02L HLA-DPA1*03:01-B1*04:02L HLA-DRB1*14:02L HLA-DQA1*01-B1*05L HLA-DQA1*05:05-B1*03:19L HLA-DQA1*05:01-B1*02:01L HLA-DRB4*01:01L
  REGION 1..10: note = CONT. FROM ABOVE: HLA-DPA1*01:03-B1*04:01L HLA-DPA1*02:01-B1*13: 01L HLA-DPA1*03:01-B1*105:01L HLA-DQA1*03:01-B1*03:02L HLA-DQA1* 01:03-B1*06:01L HLA-DQA1*02:01-B1*03:03L HLA-DRB1*15:03L
LLVDSDLNDF

SEQ ID NO: 9874 - protein, 13 aa, Severe acute respiratory syndrome coronavirus 2
  REGION 1..13: note = Table B: HLA-DQA1*03:02-B1*03:03L HLA-DQA1*03:01-B1*03:02L HLA-DQA1*01:03-B1*06:01L
VDSDLNDFVSDAD

SEQ ID NO: 9875 - protein, 14 aa, Severe acute respiratory syndrome coronavirus 2
  REGION 1..14: note = Table B: HLA-DQA1*03:02-B1*03:03L HLA-DRB1*04:02L HLA-DRB1*04:05L HLA-DQA1*01:01-B1*05:01L HLA-DRB1*04:10L HLA-DRB1*16:01L HLA-DQA1*01:03-B1*06:01L HLA-DQA1*02:01-B1*03:03L
DSDLNDFVSDADST

SEQ ID NO: 9876 - protein, 10 aa, Severe acute respiratory syndrome coronavirus 2
  REGION 1..10: note = Table B: HLA-DQA1*03:02-B1*03:03L HLA-DRB1*04:03L HLA-DRB1*13:03L HLA-DQA1*01-B1*05L HLA-DQA1*05:01-B1*02:01L HLA-DQA1*03:01-B1*03:02L HLA-DRB1*16:01L
DFVSDADSTL

SEQ ID NO: 9877 - protein, 10 aa, Severe acute respiratory syndrome coronavirus 2
  REGION 1..10: note = Table B: HLA-DQA1*03:02-B1*03:03L HLA-DQA1*05:05-B1*03:19L
FVSDADSTLI

SEQ ID NO: 9878 - protein, 14 aa, Severe acute respiratory syndrome coronavirus 2
  REGION 1..14: note = Table B: HLA-DQA1*03:02-B1*03:03L HLA-DQA1*05:01-B1*03:01L HLA-DQA1*01:02-B1*06:02L HLA-DQA1*05:05-B1*03:19L HLA-DPA1*03:01-B1*105:01L HLA-DQA1*03:01-B1*03:02L HLA-DQA1*05:05-B1*03:01L HLA-DQA1*02:01-B1*03:03L
VSDADSTLIGDCAT

SEQ ID NO: 9879 - protein, 12 aa, Severe acute respiratory syndrome coronavirus 2
  REGION 1..12: note = Table B: HLA-DQA1*03:02-B1*03:03L HLA-DQA1*05:01-B1*03:01L HLA-DQA1*01:02-B1*06:02L HLA-DQA1*03:01-B1*03:02L HLA-DQA1*05:05-B1*03:01L HLA-DQA1*01:03-B1*06:01L HLA-DQA1*02:01-B1*03:03L
DSTLIGDCATVH

SEQ ID NO: 9880 - protein, 12 aa, Severe acute respiratory syndrome coronavirus 2
  REGION 1..12: note = Table B: HLA-DQA1*03:02-B1*03:03L HLA-DQA1*05:01-B1*03:01L HLA-DRB1*04:03L HLA-DQA1*05:05-B1*03:19L HLA-DPA1*03:01-B1*105:01L HLA-DQA1*03:01-B1*03:02L
LIGDCATVHTAN

SEQ ID NO: 9881 - protein, 11 aa, Severe acute respiratory syndrome coronavirus 2
  REGION 1..11: note = Table B: HLA-DQA1*03:02-B1*03:03L HLA-DQA1*05:01-B1*02:01L
DLIISDMYDPK

SEQ ID NO: 9882 - protein, 12 aa, Severe acute respiratory syndrome coronavirus 2
  REGION 1..12: note = Table B: HLA-DQA1*03:02-B1*03:03L HLA-DQA1*01:02-B1*06:02L HLA-DRB1*14:01L HLA-DPA1*02:01-B1*13:01L HLA-DPA1*03:01-B1*105:01L HLA-DPA1*01:02-B1*04:01L HLA-DQA1*01:03-B1*06:01L HLA-DRB1*15:03L
IISDMYDPKTKN

SEQ ID NO: 9883 - protein, 10 aa, Severe acute respiratory syndrome coronavirus 2
  REGION 1..10: note = Table B: HLA-DQA1*03:02-B1*03:03L HLA-DQA1*05:01-B1*03:01L HLA-DRB1*13:03L HLA-DRB1*04:05L HLA-DQA1*01:02-B1*06:02L HLA-DRB1*01:02L HLA-DPA1*03:01-B1*04:02L HLA-DRB1*14:01L HLA-DRB1*14:02L HLA-DRB1*08:01L HLA-DQA1*01-B1*05L
  REGION 1..10: note = CONT. FROM ABOVE: HLA-DQA1*05:05-B1*03:19L HLA-DQA1*05:01-B1*02: 01L HLA-DPA1*01:03-B1*04:01L HLA-DQA1*05:05-B1*03:116L HLA-DPA1* 02:01-B1*13:01L HLA-DPA1*03:01-B1*105:01M HLA-DQA1*03:01-B1*03:0 2L HLA-DPA1*01:02-B1*04:01L HLA-DRB1*16:01L
  REGION 1..10: note = CONT. FROM ABOVE: HLA-DQA1*01:03-B1*06:01L HLA-DRB1*08:03L HLA-D QA1*02:01-B1*03:03L HLA-DRB1*15:03L
DMYDPKTKNV

SEQ ID NO: 9884 - protein, 16 aa, Severe acute respiratory syndrome coronavirus 2
  REGION 1..16: note = Table B: HLA-DQA1*03:02-B1*03:03L HLA-DQA1*05:01-B1*03:01L HLA-DRB1*13:02L HLA-DRB1*08:04L HLA-DPA1*01:03-B1*03:01L HLA-DRB1*14:01L HLA-DRB1*11:04L HLA-DRB1*11:01L HLA-DQA1*05:01-B1*02:01L HLA-DRB3*01:01L
  REGION 1..16: note = CONT. FROM ABOVE: HLA-DPA1*03:01-B1*105:01L HLA-DQA1*05:05-B1*03 :01L HLA-DRB1*07:01L HLA-DRB1*08:03L HLA-DRB1*15:03L
DPKTKNVTKENDSKEG

SEQ ID NO: 9885 - protein, 10 aa, Severe acute respiratory syndrome coronavirus 2
  REGION 1..10: note = Table B: HLA-DQA1*03:02-B1*03:03L HLA-DQA1*05:01-B1*03:01M HLA-DRB1*13:03L HLA-DRB1*01:03L HLA-DRB4*03:01NL HLA-DRB1*08:77M HLA-DPA1*01:03-B1*03:01L HLA-DPA1*03:01-B1*04:02M HLA-DRB1*03:01L HLA-DRB1*11:02L HLA-DQA1*01-B1*05L
  REGION 1..10: note = CONT. FROM ABOVE: HLA-DQA1*05:05-B1*03:19L HLA-DQA1*05:01-B1*02: 01L HLA-DRB4*01:01M HLA-DPA1*01:03-B1*04:01M HLA-DQA1*05:05-B1*0 3:116L HLA-DPA1*01:03-B1*04:02L HLA-DRB1*12:01L HLA-DQA1*03:01-B 1*03:02L HLA-DPA1*01:03-B1*104:01L HLA-DPA1*01:02-B1*04:01L
  REGION 1..10: note = CONT. FROM ABOVE: HLA-DRB1*10:01L HLA-DRB1*16:01L HLA-DRB1*15:03 M
KENDSKEGFF

SEQ ID NO: 9886 - protein, 10 aa, Severe acute respiratory syndrome coronavirus 2
  REGION 1..10: note = Table B: HLA-DQA1*03:02-B1*03:03L HLA-DQA1*01:02-B1*06:02L HLA-DPA1*03:01-B1*04:02L HLA-DQA1*05:05-B1*03:19L HLA-DQA1*05:01-B1*02:01L HLA-DPA1*02:01-B1*13:01L HLA-DPA1*03:01-B1*105:01L HLA-DPA1*01:02-B1*04:01L
  REGION 1..10: note = CONT. FROM ABOVE: HLA-DQA1*01:03-B1*06:01L HLA-DQA1*02:01-B1*03: 03L HLA-DRB1*15:03L
YICGFIQQKL

SEQ ID NO: 9887 - protein, 12 aa, Severe acute respiratory syndrome coronavirus 2
  REGION 1..12: note = Table B: HLA-DQA1*03:02-B1*03:03L HLA-DQA1*05:01-B1*03:01L HLA-DRB1*04:02L HLA-DQA1*01:02-B1*06:02L HLA-DRB1*14:01L HLA-DQA1*05:05-B1*03:19L HLA-DQA1*03:01-B1*03:02L HLA-DQA1*05:05-B1*03:01L HLA-DRB1*14:17L
  REGION 1..12: note = CONT. FROM ABOVE: HLA-DQA1*01:03-B1*06:01L HLA-DQA1*02:01-B1*03: 03L
IQQKLALGGSVA

SEQ ID NO: 9888 - protein, 10 aa, Severe acute respiratory syndrome coronavirus 2
  REGION 1..10: note = Table B: HLA-DQA1*03:02-B1*03:03L HLA-DQA1*05:05-B1*03:19L
KLALGGSVAI

SEQ ID NO: 9889 - protein, 10 aa, Severe acute respiratory syndrome coronavirus 2
  REGION 1..10: note = Table B: HLA-DQA1*03:02-B1*03:03L HLA-DQA1*05:01-B1*03:01L HLA-DQA1*01:02-B1*06:02L HLA-DQA1*05:05-B1*03:19L HLA-DRB1*12:01L HLA-DQA1*03:01-B1*03:02L HLA-DQA1*05:05-B1*03:01L HLA-DQA1*01:03-B1*06:01L
  REGION 1..10: note = CONT. FROM ABOVE: HLA-DQA1*02:01-B1*03:03L
LGGSVAIKIT

SEQ ID NO: 9890 - protein, 10 aa, Severe acute respiratory syndrome coronavirus 2
  REGION 1..10: note = Table B: HLA-DQA1*03:02-B1*03:03L HLA-DQA1*05:01-B1*03:01L HLA-DQA1*03:01-B1*03:02L HLA-DQA1*05:05-B1*03:01L HLA-DQA1*01:03-B1*06:01L HLA-DQA1*02:01-B1*03:03L
GGSVAIKITE

SEQ ID NO: 9891 - protein, 12 aa, Severe acute respiratory syndrome coronavirus 2
  REGION 1..12: note = Table B: HLA-DQA1*03:02-B1*03:03L HLA-DQA1*05:01-B1*03:01L HLA-DRB1*13:03L HLA-DRB1*01:02L HLA-DRB1*08:04L HLA-DRB1*08:01L HLA-DRB1*04:10L HLA-DQA1*05:05-B1*03:01L HLA-DRB1*04:08L
SVAIKITEHSWN

SEQ ID NO: 9892 - protein, 10 aa, Severe acute respiratory syndrome coronavirus 2
  REGION 1..10: note = Table B: HLA-DQA1*03:02-B1*03:03L HLA-DQA1*01-B1*05L HLA-DQA1*03:01-B1*03:02L
ITEHSWNADL

SEQ ID NO: 9893 - protein, 10 aa, Severe acute respiratory syndrome coronavirus 2
  REGION 1..10: note = Table B: HLA-DQA1*03:02-B1*03:03L HLA-DQA1*05:01-B1*03:01M HLA-DRB1*13:03L HLA-DRB1*01:03L HLA-DQA1*01:02-B1*06:02L HLA-DRB4*03:01NL HLA-DRB1*08:77M HLA-DPA1*01:03-B1*03:01L HLA-DPA1*03:01-B1*04:02M HLA-DRB1*03:01M HLA-DRB1*11:02L
  REGION 1..10: note = CONT. FROM ABOVE: HLA-DRB1*14:02L HLA-DQA1*01-B1*05L HLA-DQA1*05 :05-B1*03:19M HLA-DQA1*05:01-B1*02:01M HLA-DRB4*01:01M HLA-DPA1* 01:03-B1*04:01M HLA-DQA1*05:05-B1*03:116L HLA-DPA1*01:03-B1*04:0 2L HLA-DRB1*12:01L HLA-DQA1*03:01-B1*03:02L
  REGION 1..10: note = CONT. FROM ABOVE: HLA-DPA1*01:03-B1*104:01L HLA-DPA1*01:02-B1*04 :01L HLA-DRB1*10:01L HLA-DRB1*16:01L HLA-DQA1*02:01-B1*03:03L HL A-DRB1*15:03L
TEHSWNADLY

SEQ ID NO: 9894 - protein, 10 aa, Severe acute respiratory syndrome coronavirus 2
  REGION 1..10: note = Table B: HLA-DQA1*03:02-B1*03:03L HLA-DQA1*05:01-B1*03:01L HLA-DQA1*01:02-B1*06:02L HLA-DPA1*03:01-B1*04:02L HLA-DQA1*05:05-B1*03:19L HLA-DQA1*05:01-B1*02:01L HLA-DQA1*05:05-B1*03:116L HLA-DPA1*03:01-B1*105:01L
  REGION 1..10: note = CONT. FROM ABOVE: HLA-DQA1*03:01-B1*03:02L HLA-DPA1*01:02-B1*04: 01L HLA-DQA1*01:03-B1*06:01L HLA-DQA1*02:01-B1*03:03L HLA-DRB1*1 5:03L
HSWNADLYKL

SEQ ID NO: 9895 - protein, 12 aa, Severe acute respiratory syndrome coronavirus 2
  REGION 1..12: note = Table B: HLA-DQA1*03:02-B1*03:03L HLA-DQA1*05:01-B1*03:01L HLA-DRB1*04:03L HLA-DRB1*13:02L HLA-DRB1*01:03L HLA-DRB1*04:05L HLA-DQA1*01:02-B1*06:02L HLA-DRB1*01:02L HLA-DRB3*02:01L HLA-DPA1*01:03-B1*03:01L HLA-DPA1*03:01-B1*04:02L
  REGION 1..12: note = CONT. FROM ABOVE: HLA-DRB1*14:01L HLA-DRB1*08:01L HLA-DQA1*01-B1 *05L HLA-DQA1*05:05-B1*03:19L HLA-DQA1*05:01-B1*02:01L HLA-DPA1* 01:03-B1*04:01L HLA-DRB1*09:01L HLA-DPA1*01:03-B1*04:02L HLA-DRB 1*12:01L HLA-DPA1*02:01-B1*13:01L HLA-DPA1*03:01-B1*105:01L
  REGION 1..12: note = CONT. FROM ABOVE: HLA-DQA1*03:01-B1*03:02L HLA-DPA1*01:03-B1*104 :01L HLA-DQA1*05:05-B1*03:01L HLA-DPA1*01:02-B1*04:01L HLA-DRB1* 07:01L HLA-DRB1*16:01L HLA-DQA1*01:03-B1*06:01L HLA-DRB1*04:08L HLA-DQA1*02:01-B1*03:03L HLA-DRB1*15:01L HLA-DRB1*15:03L
GHFAWWTAFVTN

SEQ ID NO: 9896 - protein, 12 aa, Severe acute respiratory syndrome coronavirus 2
  REGION 1..12: note = Table B: HLA-DQA1*03:02-B1*03:03L HLA-DRB1*01:02L HLA-DPA1*01:03-B1*03:01L HLA-DRB1*12:01L HLA-DPA1*02:01-B1*13:01L HLA-DRB1*04:08L HLA-DRB1*15:03L
FAWWTAFVTNVN

SEQ ID NO: 9897 - protein, 12 aa, Severe acute respiratory syndrome coronavirus 2
  REGION 1..12: note = Table B: HLA-DQA1*03:02-B1*03:03L HLA-DRB1*04:05L HLA-DQA1*01:02-B1*06:02L HLA-DRB1*14:01L HLA-DQA1*01-B1*05L HLA-DQA1*05:01-B1*02:01L HLA-DRB1*04:10L HLA-DRB1*12:01L HLA-DPA1*03:01-B1*105:01L HLA-DQA1*03:01-B1*03:02L
  REGION 1..12: note = CONT. FROM ABOVE: HLA-DQA1*05:05-B1*03:01L HLA-DRB1*04:08L HLA-D QA1*02:01-B1*03:03L
WTAFVTNVNASS

SEQ ID NO: 9898 - protein, 12 aa, Severe acute respiratory syndrome coronavirus 2
  REGION 1..12: note = Table B: HLA-DQA1*03:02-B1*03:03L HLA-DRB1*13:02L HLA-DRB1*01:03L HLA-DRB1*04:04L HLA-DRB1*04:05L HLA-DRB1*08:04L HLA-DRB1*08:77L HLA-DRB1*14:01L HLA-DRB1*11:03L HLA-DRB1*11:04L HLA-DQA1*01-B1*05L HLA-DQA1*05:01-B1*02:01L HLA-DRB1*04:10L
  REGION 1..12: note = CONT. FROM ABOVE: HLA-DRB1*12:01L HLA-DRB1*12:02L HLA-DQA1*03:01 -B1*03:02L HLA-DRB1*10:01L HLA-DRB1*04:08L HLA-DRB1*08:03L HLA-D QA1*02:01-B1*03:03L HLA-DRB1*15:03L
TAFVTNVNASSS

SEQ ID NO: 9899 - protein, 12 aa, Severe acute respiratory syndrome coronavirus 2
  REGION 1..12: note = Table B: HLA-DQA1*03:02-B1*03:03L HLA-DPA1*03:01-B1*04:02L HLA-DRB1*03:01L HLA-DRB1*11:02L HLA-DRB5*01:01L HLA-DRB4*01:01L HLA-DRB1*09:01L HLA-DPA1*01:03-B1*04:02L HLA-DRB3*01:01L HLA-DRB1*07:01L HLA-DQA1*01:03-B1*06:01L
AFVTNVNASSSE

SEQ ID NO: 9900 - protein, 12 aa, Severe acute respiratory syndrome coronavirus 2
  REGION 1..12: note = Table B: HLA-DQA1*03:02-B1*03:03L HLA-DPA1*03:01-B1*04:02L HLA-DRB1*03:01L HLA-DRB5*01:01L HLA-DRB4*01:01L HLA-DRB1*09:01L HLA-DRB1*07:01L HLA-DQA1*01:03-B1*06:01L
FVTNVNASSSEA

SEQ ID NO: 9901 - protein, 10 aa, Severe acute respiratory syndrome coronavirus 2
  REGION 1..10: note = Table B: HLA-DQA1*03:02-B1*03:03L HLA-DQA1*05:01-B1*03:01L HLA-DRB1*13:03L HLA-DQA1*01:02-B1*06:02L HLA-DRB1*08:77L HLA-DRB1*14:01L HLA-DRB1*14:02L HLA-DQA1*05:05-B1*03:19L HLA-DQA1*05:01-B1*02:01L HLA-DPA1*01:03-B1*04:01L
  REGION 1..10: note = CONT. FROM ABOVE: HLA-DPA1*02:01-B1*13:01L HLA-DPA1*03:01-B1*105 :01L HLA-DQA1*03:01-B1*03:02L HLA-DQA1*01:03-B1*06:01L HLA-DQA1* 02:01-B1*03:03L HLA-DRB1*15:03L
NVNASSSEAF

SEQ ID NO: 9902 - protein, 10 aa, Severe acute respiratory syndrome coronavirus 2
  REGION 1..10: note = Table B: HLA-DQA1*03:02-B1*03:03L HLA-DQA1*05:01-B1*02:01L HLA-DQA1*03:01-B1*03:02L HLA-DQA1*02:01-B1*03:03L
VNASSSEAFL

SEQ ID NO: 9903 - protein, 10 aa, Severe acute respiratory syndrome coronavirus 2
  REGION 1..10: note = Table B: HLA-DQA1*03:02-B1*03:03L HLA-DQA1*05:01-B1*03:01M HLA-DRB1*08:77M HLA-DPA1*01:03-B1*03:01L HLA-DPA1*03:01-B1*04:02L HLA-DRB1*03:01L HLA-DRB1*11:02L HLA-DQA1*01-B1*05L HLA-DQA1*05:05-B1*03:19M
  REGION 1..10: note = CONT. FROM ABOVE: HLA-DQA1*05:01-B1*02:01L HLA-DRB4*01:01M HLA-D PA1*01:03-B1*04:01M HLA-DPA1*01:03-B1*104:01L HLA-DPA1*01:02-B1* 04:01L HLA-DRB1*10:01L HLA-DRB1*16:01L HLA-DRB1*15:03L
SEAFLIGCNY

SEQ ID NO: 9904 - protein, 12 aa, Severe acute respiratory syndrome coronavirus 2
  REGION 1..12: note = Table B: HLA-DQA1*03:02-B1*03:03L HLA-DRB1*04:05L HLA-DRB1*08:04L HLA-DRB1*11:01L HLA-DQA1*05:05-B1*03:19L HLA-DRB1*12:01L HLA-DPA1*03:01-B1*105:01L HLA-DRB1*15:03L
NYLGKPREQIDG

SEQ ID NO: 9905 - protein, 10 aa, Severe acute respiratory syndrome coronavirus 2
  REGION 1..10: note = Table B: HLA-DQA1*03:02-B1*03:03L HLA-DRB1*13:03L HLA-DQA1*05:05-B1*03:19L HLA-DPA1*03:01-B1*105:01L HLA-DQA1*03:01-B1*03:02L HLA-DRB1*15:03L
EQIDGYVMHA

SEQ ID NO: 9906 - protein, 12 aa, Severe acute respiratory syndrome coronavirus 2
  REGION 1..12: note = Table B: HLA-DQA1*03:02-B1*03:03L HLA-DRB1*13:02L HLA-DRB1*08:04L HLA-DRB3*02:01L HLA-DPA1*01:03-B1*04:01L HLA-DRB1*09:01L HLA-DRB1*12:02L HLA-DQA1*03:01-B1*03:02L HLA-DQA1*05:05-B1*03:01L HLA-DRB1*07:01L
IDGYVMHANYIF

SEQ ID NO: 9907 - protein, 10 aa, Severe acute respiratory syndrome coronavirus 2
  REGION 1..10: note = Table B: HLA-DQA1*03:02-B1*03:03L HLA-DQA1*05:01-B1*03:01L HLA-DRB1*04:03L HLA-DRB1*13:02L HLA-DRB1*13:03L HLA-DRB1*01:03L HLA-DRB1*04:02L HLA-DRB1*04:05L HLA-DQA1*01:02-B1*06:02L HLA-DRB1*01:02L HLA-DRB4*03:01NL HLA-DRB1*08:04L HLA-DRB1*08:77L
  REGION 1..10: note = CONT. FROM ABOVE: HLA-DRB3*02:01L HLA-DPA1*01:03-B1*03:01L HLA-D PA1*03:01-B1*04:02L HLA-DRB1*14:01L HLA-DRB1*11:03L HLA-DRB1*08: 01L HLA-DQA1*01-B1*05L HLA-DQA1*05:05-B1*03:19L HLA-DQA1*05:01-B 1*02:01L HLA-DRB1*04:10L HLA-DRB1*12:01L HLA-DRB1*12:02L
  REGION 1..10: note = CONT. FROM ABOVE: HLA-DPA1*02:01-B1*13:01L HLA-DPA1*03:01-B1*105 :01L HLA-DQA1*03:01-B1*03:02L HLA-DRB1*14:54L HLA-DQA1*05:05-B1* 03:01L HLA-DRB1*14:17L HLA-DPA1*01:02-B1*04:01L HLA-DRB1*16:01L HLA-DQA1*01:03-B1*06:01L HLA-DRB1*04:08L
  REGION 1..10: note = CONT. FROM ABOVE: HLA-DQA1*02:01-B1*03:03L HLA-DRB1*15:03L
IFWRNTNPIQ

SEQ ID NO: 9908 - protein, 10 aa, Severe acute respiratory syndrome coronavirus 2
  REGION 1..10: note = Table B: HLA-DQA1*03:02-B1*03:03L HLA-DQA1*05:01-B1*03:01L HLA-DRB1*04:03L HLA-DRB1*13:02L HLA-DRB1*13:03L HLA-DRB1*01:03L HLA-DRB1*04:02L HLA-DRB1*04:05L HLA-DRB1*01:02L HLA-DRB4*03:01NL HLA-DRB1*08:77L HLA-DRB3*02:01L HLA-DPA1*03:01-B1*04:02L
  REGION 1..10: note = CONT. FROM ABOVE: HLA-DRB1*14:01L HLA-DRB1*11:03L HLA-DRB1*14:02 L HLA-DRB1*08:01L HLA-DQA1*01-B1*05L HLA-DQA1*05:05-B1*03:19L HL A-DQA1*05:01-B1*02:01L HLA-DPA1*01:03-B1*04:01L HLA-DRB1*09:01L HLA-DRB1*12:01L HLA-DPA1*02:01-B1*13:01L
  REGION 1..10: note = CONT. FROM ABOVE: HLA-DPA1*03:01-B1*105:01L HLA-DQA1*03:01-B1*03 :02L HLA-DPA1*01:02-B1*04:01L HLA-DRB1*07:01L HLA-DRB1*16:01L HL A-DQA1*01:03-B1*06:01L HLA-DQA1*02:01-B1*03:03L HLA-DRB1*15:03L
FWRNTNPIQL

SEQ ID NO: 9909 - protein, 10 aa, Severe acute respiratory syndrome coronavirus 2
  REGION 1..10: note = Table B: HLA-DQA1*03:02-B1*03:03L HLA-DQA1*05:01-B1*03:01M HLA-DRB1*14:04L HLA-DRB1*04:01L HLA-DRB1*04:03L HLA-DRB1*13:02M HLA-DRB1*13:03M HLA-DRB1*01:03M HLA-DRB1*04:02L HLA-DRB1*04:05L HLA-DQA1*01:02-B1*06:02H HLA-DRB1*01:01L HLA-DRB1*01:02L
  REGION 1..10: note = CONT. FROM ABOVE: HLA-DRB4*03:01NM HLA-DRB1*08:77M HLA-DPA1*01:0 3-B1*03:01M HLA-DPA1*03:01-B1*04:02M HLA-DRB1*03:01M HLA-DRB1*14 :01M HLA-DRB1*11:02M HLA-DRB1*11:03L HLA-DRB1*11:04L HLA-DRB1*14 :02M HLA-DRB1*08:01L HLA-DRB1*11:01L HLA-DRB5*01:01M
  REGION 1..10: note = CONT. FROM ABOVE: HLA-DQA1*01-B1*05M HLA-DQA1*05:05-B1*03:19M HL A-DRB4*02:01NL HLA-DQA1*05:01-B1*02:01H HLA-DRB4*01:01M HLA-DPA1 *01:03-B1*04:01M HLA-DQA1*05:05-B1*03:116M HLA-DRB1*09:01L HLA-D PA1*01:03-B1*04:02M HLA-DRB1*12:01M HLA-DRB1*12:02L
  REGION 1..10: note = CONT. FROM ABOVE: HLA-DPA1*02:01-B1*13:01L HLA-DPA1*03:01-B1*105 :01M HLA-DQA1*03:01-B1*03:02L HLA-DRB1*14:54L HLA-DPA1*01:03-B1* 104:01M HLA-DQA1*05:05-B1*03:01L HLA-DRB1*14:17L HLA-DPA1*01:02- B1*04:01L HLA-DRB1*10:01M HLA-DRB1*16:01M
  REGION 1..10: note = CONT. FROM ABOVE: HLA-DQA1*01:03-B1*06:01L HLA-DRB1*08:02M HLA -DRB1*08:03L HLA-DQA1*02:01-B1*03:03M HLA-DRB1*15:01L HLA-DRB1 *15:03M
NTNPIQLSSY

SEQ ID NO: 9910 - protein, 10 aa, Severe acute respiratory syndrome coronavirus 2
  REGION 1..10: note = Table B: HLA-DQA1*03:02-B1*03:03L HLA-DQA1*05:01-B1*03:01L HLA-DRB1*13:03L HLA-DQA1*01:02-B1*06:02L HLA-DQA1*01-B1*05L HLA-DPA1*03:01-B1*105:01L HLA-DQA1*03:01-B1*03:02L HLA-DPA1*01:02-B1*04:01L
NPIQLSSYSL

SEQ ID NO: 9911 - protein, 10 aa, Severe acute respiratory syndrome coronavirus 2
  REGION 1..10: note = Table B: HLA-DQA1*03:02-B1*03:03L HLA-DQA1*05:01-B1*03:01L HLA-DPA1*03:01-B1*04:02L HLA-DRB1*14:01L HLA-DQA1*05:05-B1*03:19L HLA-DPA1*03:01-B1*105:01L HLA-DQA1*03:01-B1*03:02L HLA-DPA1*01:02-B1*04:01L
  REGION 1..10: note = CONT. FROM ABOVE: HLA-DQA1*02:01-B1*03:03L HLA-DRB1*15:03L
SLFDMSKFPL

SEQ ID NO: 9912 - protein, 10 aa, Severe acute respiratory syndrome coronavirus 2
  REGION 1..10: note = Table B: HLA-DQA1*03:02-B1*03:03L HLA-DQA1*05:05-B1*03:19L HLA-DQA1*03:01-B1*03:02L HLA-DPA1*01:03-B1*104:01L HLA-DRB1*16:01L HLA-DQA1*02:01-B1*03:03L
FDMSKFPLKL

SEQ ID NO: 9913 - protein, 16 aa, Severe acute respiratory syndrome coronavirus 2
  REGION 1..16: note = Table B: HLA-DQA1*03:02-B1*03:03L HLA-DRB1*04:04L HLA-DRB3*02:01L HLA-DRB1*11:04L HLA-DRB1*11:01L HLA-DPA1*01:03-B1*04:02L HLA-DPA1*01:03-B1*02:01L HLA-DPA1*01:03-B1*104:01L
FPLKLRGTAVMSLKEG

SEQ ID NO: 9914 - protein, 13 aa, Severe acute respiratory syndrome coronavirus 2
  REGION 1..13: note = Table B: HLA-DQA1*03:02-B1*03:03L
LRGTAVMSLKEGQ

SEQ ID NO: 9915 - protein, 10 aa, Severe acute respiratory syndrome coronavirus 2
  REGION 1..10: note = Table B: HLA-DQA1*03:02-B1*03:03L HLA-DQA1*05:05-B1*03:19L HLA-DQA1*03:01-B1*03:02L HLA-DPA1*01:03-B1*104:01L
AVMSLKEGQI

SEQ ID NO: 9916 - protein, 10 aa, Severe acute respiratory syndrome coronavirus 2
  REGION 1..10: note = Table B: HLA-DQA1*03:02-B1*03:03L HLA-DQA1*05:01-B1*03:01L HLA-DRB1*04:03L HLA-DRB1*04:02L HLA-DQA1*01:02-B1*06:02L HLA-DRB1*14:01L HLA-DQA1*05:01-B1*02:01L HLA-DRB1*12:01L HLA-DPA1*03:01-B1*105:01L HLA-DQA1*03:01-B1*03:02L
  REGION 1..10: note = CONT. FROM ABOVE: HLA-DRB1*14:54L HLA-DRB1*14:17L HLA-DRB1*16:01 L HLA-DQA1*01:03-B1*06:01L HLA-DQA1*02:01-B1*03:03L HLA-DRB1*15: 03L
VMSLKEGQIN

SEQ ID NO: 9917 - protein, 10 aa, Severe acute respiratory syndrome coronavirus 2
  REGION 1..10: note = Table B: HLA-DQA1*03:02-B1*03:03L HLA-DQA1*05:01-B1*03:01L HLA-DRB1*04:03L HLA-DRB1*13:03L HLA-DRB1*01:03L HLA-DRB1*04:02L HLA-DQA1*01:02-B1*06:02L HLA-DPA1*03:01-B1*04:02L HLA-DRB1*14:01L HLA-DRB1*14:02L HLA-DQA1*01-B1*05L
  REGION 1..10: note = CONT. FROM ABOVE: HLA-DQA1*05:05-B1*03:19L HLA-DQA1*05:01-B1*02: 01L HLA-DQA1*05:05-B1*03:116L HLA-DPA1*01:03-B1*04:02L HLA-DRB1* 12:01L HLA-DPA1*03:01-B1*105:01L HLA-DQA1*03:01-B1*03:02L HLA-DP A1*01:02-B1*04:01L HLA-DRB1*16:01L HLA-DQA1*01:03-B1*06:01L
  REGION 1..10: note = CONT. FROM ABOVE: HLA-DQA1*02:01-B1*03:03L HLA-DRB1*15:03L
SLKEGQINDM

SEQ ID NO: 9918 - protein, 10 aa, Severe acute respiratory syndrome coronavirus 2
  REGION 1..10: note = Table B: HLA-DQA1*03:02-B1*03:03M HLA-DQA1*01-B1*05L HLA-DQA1*05:05-B1*03:19L HLA-DRB1*09:01L HLA-DQA1*03:01-B1*03:02L HLA-DPA1*01:03-B1*104:01L HLA-DQA1*02:01-B1*03:03L
KEGQINDMIL

SEQ ID NO: 9919 - protein, 10 aa, Severe acute respiratory syndrome coronavirus 2
  REGION 1..10: note = Table B: HLA-DQA1*03:02-B1*03:03M HLA-DQA1*05:01-B1*03:01L HLA-DRB1*13:03L HLA-DRB1*01:03L HLA-DQA1*01:02-B1*06:02L HLA-DRB1*01:02L HLA-DPA1*03:01-B1*04:02L HLA-DRB1*14:01L HLA-DRB1*14:02M HLA-DRB1*08:01L HLA-DQA1*05:05-B1*03:19L
  REGION 1..10: note = CONT. FROM ABOVE: HLA-DQA1*05:01-B1*02:01L HLA-DRB4*01:01L HLA-D PA1*01:03-B1*04:01L HLA-DQA1*05:05-B1*03:116M HLA-DRB1*09:01M HL A-DPA1*01:03-B1*04:02L HLA-DPA1*02:01-B1*13:01L HLA-DPA1*03:01-B 1*105:01L HLA-DQA1*03:01-B1*03:02M HLA-DPA1*01:03-B1*104:01L
  REGION 1..10: note = CONT. FROM ABOVE: HLA-DPA1*01:02-B1*04:01L HLA-DRB1*10:01L HLA-D RB1*16:01L HLA-DQA1*01:03-B1*06:01L HLA-DRB1*08:03L HLA-DQA1*02: 01-B1*03:03M HLA-DRB1*15:03M
GQINDMILSL

SEQ ID NO: 9920 - protein, 11 aa, Severe acute respiratory syndrome coronavirus 2
  REGION 1..11: note = Table B: HLA-DQA1*03:02-B1*03:03L HLA-DQA1*03:01-B1*03:02L
NNRVVISSDVL

SEQ ID NO: 9921 - protein, 11 aa, Severe acute respiratory syndrome coronavirus 2
  REGION 1..11: note = Table B: HLA-DQA1*03:02-B1*03:03L HLA-DQA1*05:01-B1*03:01L HLA-DRB1*14:04L HLA-DRB1*04:01L HLA-DRB1*13:02L HLA-DRB1*13:03L HLA-DRB1*01:03L HLA-DRB1*04:02M HLA-DRB1*04:04L HLA-DRB1*04:05L HLA-DQA1*01:02-B1*06:02L HLA-DRB1*01:01L HLA-DRB1*01:02L
  REGION 1..11: note = CONT. FROM ABOVE: HLA-DRB4*03:01NL HLA-DRB1*08:04L HLA-DRB1*08:7 7L HLA-DRB3*02:01L HLA-DPA1*01:03-B1*03:01L HLA-DPA1*03:01-B1*04 :02L HLA-DRB1*14:01L HLA-DRB1*11:03L HLA-DRB1*11:04L HLA-DRB1*14 :02L HLA-DQA1*01:01-B1*05:01L HLA-DRB1*11:01L HLA-DRB5*01:01L
  REGION 1..11: note = CONT. FROM ABOVE: HLA-DQA1*01-B1*05L HLA-DQA1*05:05-B1*03:19L HL A-DQA1*05:01-B1*02:01L HLA-DRB4*01:01L HLA-DPA1*01:03-B1*04:01L HLA-DRB1*04:10L HLA-DRB1*09:01L HLA-DPA1*01:03-B1*04:02L HLA-DRB 1*12:01L HLA-DRB1*12:02L HLA-DPA1*02:01-B1*13:01L
  REGION 1..11: note = CONT. FROM ABOVE: HLA-DPA1*03:01-B1*105:01L HLA-DQA1*03:01-B1*03 :02L HLA-DRB1*14:54L HLA-DPA1*01:03-B1*104:01L HLA-DQA1*05:05-B1 *03:01L HLA-DPA1*01:02-B1*04:01L HLA-DRB1*07:01L HLA-DRB1*10:01L HLA-DRB1*16:01L HLA-DQA1*01:03-B1*06:01L HLA-DRB1*04:08L
  REGION 1..11: note = CONT. FROM ABOVE: HLA-DRB1*08:03L HLA-DQA1*02:01-B1*03:03L HLA -DRB1*15:01L HLA-DRB1*15:03L
VVISSDVLVNN

SEQ ID NO: 9922 - protein, 14 aa, Severe acute respiratory syndrome coronavirus 2
  REGION 1..14: note = Table B: HLA-DQA1*03:02-B1*03:03L HLA-DQA1*05:01-B1*03:01L HLA-DRB1*04:03L HLA-DRB1*13:02L HLA-DRB1*01:03L HLA-DRB1*04:02L HLA-DRB1*04:04L HLA-DRB1*04:05L HLA-DRB1*01:02L HLA-DRB1*08:04L HLA-DPA1*01:03-B1*03:01L HLA-DRB1*14:01L HLA-DRB1*11:04L
  REGION 1..14: note = CONT. FROM ABOVE: HLA-DRB1*08:01L HLA-DRB1*11:01L HLA-DQA1*05:05 -B1*03:19L HLA-DPA1*01:03-B1*04:02L HLA-DRB1*12:01L HLA-DPA1*02: 01-B1*13:01L HLA-DQA1*03:01-B1*03:02L HLA-DPA1*01:03-B1*104:01L HLA-DQA1*05:05-B1*03:01L HLA-DRB1*14:17L HLA-DRB1*16:01L
  REGION 1..14: note = CONT. FROM ABOVE: HLA-DRB1*04:08L HLA-DRB1*15:03L
LPLVSSQCVNLTTR

SEQ ID NO: 9923 - protein, 10 aa, Severe acute respiratory syndrome coronavirus 2
  REGION 1..10: note = Table B: HLA-DQA1*03:02-B1*03:03L HLA-DQA1*05:01-B1*03:01L HLA-DRB1*04:01L HLA-DRB1*04:03L HLA-DRB1*13:02L HLA-DRB1*13:03L HLA-DRB1*01:03M HLA-DRB1*04:02L HLA-DQA1*01:02-B1*06:02M HLA-DRB4*03:01NL HLA-DRB1*08:77L HLA-DPA1*01:03-B1*03:01L
  REGION 1..10: note = CONT. FROM ABOVE: HLA-DPA1*03:01-B1*04:02L HLA-DRB1*03:01L HLA-D RB1*14:01L HLA-DRB1*14:02M HLA-DRB1*11:01L HLA-DQA1*01-B1*05L HL A-DQA1*05:05-B1*03:19L HLA-DQA1*05:01-B1*02:01L HLA-DRB4*01:01L HLA-DPA1*01:03-B1*04:01L HLA-DQA1*05:05-B1*03:116L
  REGION 1..10: note = CONT. FROM ABOVE: HLA-DPA1*01:03-B1*04:02L HLA-DRB1*12:01L HLA-D PA1*02:01-B1*13:01L HLA-DPA1*03:01-B1*105:01L HLA-DQA1*03:01-B1* 03:02L HLA-DPA1*01:03-B1*104:01L HLA-DQA1*05:05-B1*03:01L HLA-DP A1*01:02-B1*04:01L HLA-DRB1*10:01L HLA-DRB1*16:01L
  REGION 1..10: note = CONT. FROM ABOVE: HLA-DQA1*01:03-B1*06:01L HLA-DRB1*08:02L HLA-D QA1*02:01-B1*03:03M HLA-DRB1*15:03L
TTRTQLPPAY

SEQ ID NO: 9924 - protein, 11 aa, Severe acute respiratory syndrome coronavirus 2
  REGION 1..11: note = Table B: HLA-DQA1*03:02-B1*03:03L HLA-DQA1*05:01-B1*03:01L HLA-DRB1*04:03L HLA-DRB1*13:03L HLA-DRB1*01:03L HLA-DRB1*04:05L HLA-DRB1*08:77L HLA-DPA1*03:01-B1*04:02L HLA-DRB1*14:02L HLA-DQA1*05:05-B1*03:19L HLA-DQA1*05:01-B1*02:01L
  REGION 1..11: note = CONT. FROM ABOVE: HLA-DRB4*01:01L HLA-DPA1*01:03-B1*04:01L HLA-D QA1*05:05-B1*03:116L HLA-DPA1*01:03-B1*04:02L HLA-DRB1*16:01L HL A-DRB1*08:02L HLA-DRB1*15:03L
TQLPPAYTNSF

SEQ ID NO: 9925 - protein, 12 aa, Severe acute respiratory syndrome coronavirus 2
  REGION 1..12: note = Table B: HLA-DQA1*03:02-B1*03:03L HLA-DQA1*05:01-B1*03:01L HLA-DRB1*04:03L HLA-DRB1*04:02L HLA-DQA1*01:01-B1*05:01L HLA-DQA1*01-B1*05L HLA-DRB1*14:17L HLA-DRB1*16:01L HLA-DQA1*01:03-B1*06:01L HLA-DQA1*02:01-B1*03:03L
LPPAYTNSFTRG

SEQ ID NO: 9926 - protein, 10 aa, Severe acute respiratory syndrome coronavirus 2
  REGION 1..10: note = Table B: HLA-DQA1*03:02-B1*03:03L HLA-DQA1*05:01-B1*03:01L HLA-DRB1*13:03L HLA-DRB1*01:03L HLA-DQA1*01:02-B1*06:02L HLA-DRB1*08:77L HLA-DPA1*01:03-B1*03:01L HLA-DPA1*03:01-B1*04:02L HLA-DRB1*03:01L HLA-DRB1*11:02L
  REGION 1..10: note = CONT. FROM ABOVE: HLA-DRB1*14:02L HLA-DQA1*01-B1*05L HLA-DQA1*05 :05-B1*03:19M HLA-DQA1*05:01-B1*02:01L HLA-DRB4*01:01L HLA-DPA1* 01:03-B1*04:01L HLA-DQA1*05:05-B1*03:116L HLA-DPA1*01:03-B1*04:0 2L HLA-DRB1*12:01L HLA-DPA1*02:01-B1*13:01L
  REGION 1..10: note = CONT. FROM ABOVE: HLA-DPA1*03:01-B1*105:01L HLA-DPA1*01:03-B1*10 4:01L HLA-DPA1*01:02-B1*04:01L HLA-DRB1*10:01L HLA-DRB1*16:01L H LA-DQA1*01:03-B1*06:01L HLA-DRB1*08:02L HLA-DQA1*02:01-B1*03:03L HLA-DRB1*15:03L
YTNSFTRGVY

SEQ ID NO: 9927 - protein, 12 aa, Severe acute respiratory syndrome coronavirus 2
  REGION 1..12: note = Table B: HLA-DQA1*03:02-B1*03:03L HLA-DRB1*14:01L HLA-DQA1*05:05-B1*03:01L
NSFTRGVYYPDK

SEQ ID NO: 9928 - protein, 12 aa, Severe acute respiratory syndrome coronavirus 2
  REGION 1..12: note = Table B: HLA-DQA1*03:02-B1*03:03L HLA-DQA1*05:01-B1*03:01L HLA-DRB1*04:01L HLA-DRB1*04:04L HLA-DQA1*01:02-B1*06:02L HLA-DRB1*08:04L HLA-DRB1*08:77L HLA-DPA1*01:03-B1*03:01L HLA-DPA1*03:01-B1*04:02L HLA-DRB1*03:01L HLA-DRB1*11:03L
  REGION 1..12: note = CONT. FROM ABOVE: HLA-DRB1*14:02L HLA-DRB1*11:01L HLA-DQA1*05:05 -B1*03:19L HLA-DQA1*05:01-B1*02:01L HLA-DRB4*01:01L HLA-DRB1*04: 10L HLA-DRB3*01:01L HLA-DPA1*02:01-B1*13:01L HLA-DPA1*03:01-B1*1 05:01L HLA-DRB1*07:01L HLA-DRB1*10:01L HLA-DRB1*08:03L
GVYYPDKVFRSS

SEQ ID NO: 9929 - protein, 15 aa, Severe acute respiratory syndrome coronavirus 2
  REGION 1..15: note = Table B: HLA-DQA1*03:02-B1*03:03L HLA-DRB1*04:01L HLA-DRB1*04:04L HLA-DRB1*01:01L HLA-DRB4*03:01NL HLA-DRB1*08:04L HLA-DRB1*08:77L HLA-DRB3*02:01L HLA-DRB1*03:01L HLA-DRB1*11:03L HLA-DRB1*11:04L HLA-DRB1*14:02L HLA-DQA1*01:01-B1*05:01L
  REGION 1..15: note = CONT. FROM ABOVE: HLA-DQA1*05:05-B1*03:19L HLA-DQA1*05:01-B1*02: 01L HLA-DPA1*01:03-B1*04:01L HLA-DRB1*04:10L HLA-DRB1*09:01L HLA -DRB3*01:01L HLA-DRB1*14:54L HLA-DPA1*01:03-B1*104:01L HLA-DRB1* 14:17L HLA-DRB1*07:01L HLA-DRB1*10:01L HLA-DRB1*08:02L
  REGION 1..15: note = CONT. FROM ABOVE: HLA-DRB1*08:03L
YPDKVFRSSVLHSTQ

SEQ ID NO: 9930 - protein, 12 aa, Severe acute respiratory syndrome coronavirus 2
  REGION 1..12: note = Table B: HLA-DQA1*03:02-B1*03:03L HLA-DRB1*04:03L HLA-DRB1*04:02L HLA-DRB1*04:05L HLA-DRB1*01:02L HLA-DPA1*01:03-B1*03:01L HLA-DPA1*03:01-B1*04:02L HLA-DRB1*08:01L HLA-DRB1*11:01L HLA-DPA1*01:03-B1*04:01L
  REGION 1..12: note = CONT. FROM ABOVE: HLA-DPA1*01:03-B1*04:02L HLA-DRB1*12:01L HLA-D PA1*01:03-B1*02:01L HLA-DRB1*16:01L HLA-DRB1*15:03L
VFRSSVLHSTQD

SEQ ID NO: 9931 - protein, 10 aa, Severe acute respiratory syndrome coronavirus 2
  REGION 1..10: note = Table B: HLA-DQA1*03:02-B1*03:03L HLA-DQA1*03:01-B1*03:02L HLA-DQA1*01:03-B1*06:01L HLA-DQA1*02:01-B1*03:03L
SSVLHSTQDL

SEQ ID NO: 9932 - protein, 10 aa, Severe acute respiratory syndrome coronavirus 2
  REGION 1..10: note = Table B: HLA-DQA1*03:02-B1*03:03L HLA-DQA1*05:01-B1*03:01L HLA-DRB1*13:03L HLA-DRB1*01:03L HLA-DQA1*01:02-B1*06:02L HLA-DRB1*08:77L HLA-DPA1*01:03-B1*03:01L HLA-DPA1*03:01-B1*04:02L HLA-DRB1*14:01L HLA-DRB1*14:02L
  REGION 1..10: note = CONT. FROM ABOVE: HLA-DQA1*01-B1*05L HLA-DQA1*05:05-B1*03:19L HL A-DQA1*05:01-B1*02:01L HLA-DPA1*01:03-B1*04:01L HLA-DQA1*05:05-B 1*03:116L HLA-DPA1*01:03-B1*04:02L HLA-DRB1*12:01L HLA-DPA1*02:0 1-B1*13:01L HLA-DPA1*03:01-B1*105:01L HLA-DQA1*03:01-B1*03:02L
  REGION 1..10: note = CONT. FROM ABOVE: HLA-DPA1*01:02-B1*04:01L HLA-DRB1*16:01L HLA-D QA1*01:03-B1*06:01L HLA-DQA1*02:01-B1*03:03L HLA-DRB1*15:03L
SVLHSTQDLF

SEQ ID NO: 9933 - protein, 10 aa, Severe acute respiratory syndrome coronavirus 2
  REGION 1..10: note = Table B: HLA-DQA1*03:02-B1*03:03L HLA-DQA1*01:02-B1*06:02L HLA-DRB1*14:02L HLA-DQA1*05:05-B1*03:19L HLA-DQA1*05:01-B1*02:01L HLA-DPA1*01:03-B1*04:01L HLA-DPA1*02:01-B1*13:01L HLA-DPA1*03:01-B1*105:01L
  REGION 1..10: note = CONT. FROM ABOVE: HLA-DQA1*01:03-B1*06:01L HLA-DQA1*02:01-B1*03: 03L HLA-DRB1*15:03L
STQDLFLPFF

SEQ ID NO: 9934 - protein, 10 aa, Severe acute respiratory syndrome coronavirus 2
  REGION 1..10: note = Table B: HLA-DQA1*03:02-B1*03:03L HLA-DQA1*05:01-B1*03:01L HLA-DQA1*01:02-B1*06:02L HLA-DRB1*01:02L HLA-DPA1*03:01-B1*04:02L HLA-DRB1*14:02L HLA-DQA1*05:05-B1*03:19L HLA-DQA1*05:01-B1*02:01L
  REGION 1..10: note = CONT. FROM ABOVE: HLA-DQA1*05:05-B1*03:116L HLA-DPA1*02:01-B1*13 :01L HLA-DPA1*03:01-B1*105:01L HLA-DQA1*03:01-B1*03:02L HLA-DPA1 *01:03-B1*104:01L HLA-DPA1*01:02-B1*04:01L HLA-DQA1*01:03-B1*06: 01L HLA-DQA1*02:01-B1*03:03L HLA-DRB1*15:03L
DLFLPFFSNV

SEQ ID NO: 9935 - protein, 14 aa, Severe acute respiratory syndrome coronavirus 2
  REGION 1..14: note = Table B: HLA-DQA1*03:02-B1*03:03L HLA-DQA1*05:01-B1*03:01L HLA-DRB1*13:02L HLA-DRB1*04:02L HLA-DRB1*04:04L HLA-DRB1*01:01L HLA-DRB1*01:02M HLA-DRB1*08:04L HLA-DRB3*02:01L HLA-DPA1*01:03-B1*03:01L HLA-DRB1*11:02L HLA-DRB1*11:03L
  REGION 1..14: note = CONT. FROM ABOVE: HLA-DRB1*11:04L HLA-DRB1*14:02L HLA-DRB1*08:01 L HLA-DRB1*11:01L HLA-DQA1*05:05-B1*03:19L HLA-DQA1*05:01-B1*02: 01L HLA-DRB3*01:01L HLA-DQA1*03:01-B1*03:02L HLA-DPA1*01:03-B1*1 04:01L HLA-DQA1*05:05-B1*03:01L HLA-DRB1*07:01L HLA-DRB1*10:01L
  REGION 1..14: note = CONT. FROM ABOVE: HLA-DRB1*08:02L HLA-DRB1*08:03L
LPFFSNVTWFHAIH

SEQ ID NO: 9936 - protein, 14 aa, Severe acute respiratory syndrome coronavirus 2
  REGION 1..14: note = Table B: HLA-DQA1*03:02-B1*03:03L HLA-DRB1*11:02L HLA-DRB1*11:04L HLA-DRB1*14:02L HLA-DRB1*11:01L HLA-DQA1*05:05-B1*03:19L HLA-DPA1*01:03-B1*04:01L HLA-DRB1*09:01L HLA-DRB1*08:03L
FSNVTWFHAIHVSG

SEQ ID NO: 9937 - protein, 13 aa, Severe acute respiratory syndrome coronavirus 2
  REGION 1..13: note = Table B: HLA-DQA1*03:02-B1*03:03L HLA-DRB1*13:02L HLA-DRB1*13:03L HLA-DRB1*08:04L HLA-DRB3*02:01L HLA-DPA1*01:03-B1*03:01L HLA-DRB1*14:02L HLA-DRB1*08:01L HLA-DRB1*11:01L HLA-DQA1*05:01-B1*02:01L
  REGION 1..13: note = CONT. FROM ABOVE: HLA-DPA1*01:03-B1*04:02L HLA-DPA1*02:01-B1*13: 01L HLA-DPA1*01:03-B1*02:01L HLA-DPA1*01:03-B1*104:01L HLA-DRB1* 10:01L HLA-DRB1*08:02L HLA-DRB1*08:03L
VTWFHAIHVSGTN

SEQ ID NO: 9938 - protein, 10 aa, Severe acute respiratory syndrome coronavirus 2
  REGION 1..10: note = Table B: HLA-DQA1*03:02-B1*03:03L HLA-DQA1*05:01-B1*03:01L HLA-DRB1*04:03L HLA-DQA1*01:01-B1*05:01L HLA-DQA1*01-B1*05L HLA-DQA1*05:05-B1*03:19L HLA-DQA1*05:01-B1*02:01L HLA-DQA1*03:01-B1*03:02L HLA-DQA1*05:05-B1*03:01L
  REGION 1..10: note = CONT. FROM ABOVE: HLA-DQA1*01:03-B1*06:01L HLA-DQA1*02:01-B1*03: 03L
DNPVLPFNDG

SEQ ID NO: 9939 - protein, 10 aa, Severe acute respiratory syndrome coronavirus 2
  REGION 1..10: note = Table B: HLA-DQA1*03:02-B1*03:03L HLA-DQA1*05:01-B1*03:01L HLA-DRB1*04:03L HLA-DRB1*13:03L HLA-DQA1*01:02-B1*06:02L HLA-DRB1*08:77L HLA-DPA1*01:03-B1*03:01L HLA-DPA1*03:01-B1*04:02L HLA-DRB1*03:01L HLA-DRB1*11:02L
  REGION 1..10: note = CONT. FROM ABOVE: HLA-DRB1*14:02L HLA-DQA1*01-B1*05L HLA-DQA1*05 :05-B1*03:19L HLA-DQA1*05:01-B1*02:01L HLA-DRB4*01:01L HLA-DPA1* 01:03-B1*04:01L HLA-DPA1*01:03-B1*04:02L HLA-DRB1*12:01L HLA-DPA 1*02:01-B1*13:01L HLA-DPA1*03:01-B1*105:01L
  REGION 1..10: note = CONT. FROM ABOVE: HLA-DQA1*03:01-B1*03:02L HLA-DPA1*01:03-B1*104 :01L HLA-DRB1*16:01L HLA-DQA1*01:03-B1*06:01L HLA-DQA1*02:01-B1* 03:03L HLA-DRB1*15:03L
PVLPFNDGVY

SEQ ID NO: 9940 - protein, 14 aa, Severe acute respiratory syndrome coronavirus 2
  REGION 1..14: note = Table B: HLA-DQA1*03:02-B1*03:03L HLA-DQA1*05:01-B1*03:01L HLA-DRB1*01:03L HLA-DRB1*01:02L HLA-DPA1*01:03-B1*03:01L HLA-DPA1*03:01-B1*04:02L HLA-DRB1*08:01L HLA-DQA1*05:05-B1*03:19L HLA-DQA1*05:01-B1*02:01L
  REGION 1..14: note = CONT. FROM ABOVE: HLA-DPA1*01:03-B1*04:02L HLA-DQA1*05:05-B1*03: 01L HLA-DPA1*01:02-B1*04:01L HLA-DRB1*16:01L HLA-DRB1*04:08L
LPFNDGVYFASTEK

SEQ ID NO: 9941 - protein, 12 aa, Severe acute respiratory syndrome coronavirus 2
  REGION 1..12: note = Table B: HLA-DQA1*03:02-B1*03:03L HLA-DQA1*05:01-B1*03:01L HLA-DRB1*04:03L HLA-DRB1*04:02L HLA-DQA1*01:02-B1*06:02L HLA-DQA1*05:05-B1*03:19L HLA-DQA1*05:01-B1*02:01L HLA-DQA1*05:05-B1*03:01L
NDGVYFASTEKS

SEQ ID NO: 9942 - protein, 10 aa, Severe acute respiratory syndrome coronavirus 2
  REGION 1..10: note = Table B: HLA-DQA1*03:02-B1*03:03L HLA-DQA1*05:01-B1*03:01L HLA-DRB1*04:03L HLA-DRB1*13:03L HLA-DRB1*01:03L HLA-DRB1*04:02L HLA-DRB1*04:05L HLA-DQA1*01:02-B1*06:02L HLA-DRB1*01:02L HLA-DRB4*03:01NL HLA-DRB3*02:01L HLA-DPA1*01:03-B1*03:01L
  REGION 1..10: note = CONT. FROM ABOVE: HLA-DPA1*03:01-B1*04:02L HLA-DRB1*14:01L HLA-D RB1*08:01L HLA-DQA1*01-B1*05L HLA-DQA1*05:05-B1*03:19L HLA-DQA1* 05:01-B1*02:01L HLA-DRB1*04:10L HLA-DPA1*01:03-B1*04:02L HLA-DRB 1*12:01L HLA-DPA1*03:01-B1*105:01L HLA-DQA1*03:01-B1*03:02L
  REGION 1..10: note = CONT. FROM ABOVE: HLA-DRB1*14:54L HLA-DQA1*05:05-B1*03:01L HLA-D RB1*14:17L HLA-DPA1*01:02-B1*04:01L HLA-DRB1*10:01L HLA-DRB1*16: 01L HLA-DQA1*01:03-B1*06:01L HLA-DRB1*04:08L HLA-DQA1*02:01-B1*0 3:03L HLA-DRB1*15:03L
VYFASTEKSN

SEQ ID NO: 9943 - protein, 10 aa, Severe acute respiratory syndrome coronavirus 2
  REGION 1..10: note = Table B: HLA-DQA1*03:02-B1*03:03L HLA-DQA1*05:05-B1*03:19L HLA-DQA1*03:01-B1*03:02L
FASTEKSNII

SEQ ID NO: 9944 - protein, 10 aa, Severe acute respiratory syndrome coronavirus 2
  REGION 1..10: note = Table B: HLA-DQA1*03:02-B1*03:03L HLA-DQA1*05:01-B1*03:01H HLA-DRB1*13:03L HLA-DRB1*01:03L HLA-DRB1*04:02L HLA-DRB1*04:05L HLA-DQA1*01:02-B1*06:02L HLA-DRB4*03:01NM HLA-DRB1*08:77H HLA-DPA1*01:03-B1*03:01L HLA-DPA1*03:01-B1*04:02M
  REGION 1..10: note = CONT. FROM ABOVE: HLA-DRB1*03:01M HLA-DRB1*14:01L HLA-DRB1*11:02 L HLA-DRB1*14:02L HLA-DQA1*01-B1*05M HLA-DQA1*05:05-B1*03:19M HL A-DQA1*05:01-B1*02:01L HLA-DRB4*01:01H HLA-DPA1*01:03-B1*04:01H HLA-DQA1*05:05-B1*03:116L HLA-DPA1*01:03-B1*04:02L
  REGION 1..10: note = CONT. FROM ABOVE: HLA-DRB1*12:01L HLA-DPA1*02:01-B1*13:01L HLA-D QA1*03:01-B1*03:02L HLA-DPA1*01:03-B1*104:01L HLA-DPA1*01:02-B1* 04:01M HLA-DRB1*10:01M HLA-DRB1*16:01L HLA-DQA1*01:03-B1*06:01L HLA-DQA1*02:01-B1*03:03L HLA-DRB1*15:03M
TEKSNIIRGW

SEQ ID NO: 9945 - protein, 12 aa, Severe acute respiratory syndrome coronavirus 2
  REGION 1..12: note = Table B: HLA-DQA1*03:02-B1*03:03L HLA-DQA1*05:01-B1*03:01L HLA-DRB1*04:03L HLA-DRB1*04:02L HLA-DRB1*01:02L HLA-DPA1*01:03-B1*03:01L HLA-DRB1*14:01L HLA-DQA1*01-B1*05L HLA-DQA1*05:05-B1*03:19L HLA-DQA1*05:01-B1*02:01L
  REGION 1..12: note = CONT. FROM ABOVE: HLA-DPA1*01:03-B1*04:01L HLA-DPA1*01:03-B1*04: 02L HLA-DRB1*12:01L HLA-DQA1*03:01-B1*03:02L HLA-DQA1*05:05-B1*0 3:01L HLA-DRB1*14:17L HLA-DRB1*16:01L HLA-DRB1*04:08L HLA-DRB1*1 5:03L
SNIIRGWIFGTT

SEQ ID NO: 9946 - protein, 11 aa, Severe acute respiratory syndrome coronavirus 2
  REGION 1..11: note = Table B: HLA-DQA1*03:02-B1*03:03L HLA-DQA1*01:02-B1*06:02L HLA-DPA1*03:01-B1*04:02L HLA-DQA1*01-B1*05L HLA-DPA1*03:01-B1*105:01L HLA-DQA1*02:01-B1*03:03L
IIRGWIFGTTL

SEQ ID NO: 9947 - protein, 13 aa, Severe acute respiratory syndrome coronavirus 2
  REGION 1..13: note = Table B: HLA-DQA1*03:02-B1*03:03L HLA-DRB1*01:03L HLA-DRB1*04:05L HLA-DRB1*01:02L HLA-DRB1*08:01L HLA-DQA1*01-B1*05L HLA-DRB1*04:10L HLA-DRB1*04:08L
IRGWIFGTTLDSK

SEQ ID NO: 9948 - protein, 11 aa, Severe acute respiratory syndrome coronavirus 2
  REGION 1..11: note = Table B: HLA-DQA1*03:02-B1*03:03L HLA-DRB1*01:03L HLA-DRB1*04:05L HLA-DQA1*05:05-B1*03:19L HLA-DQA1*05:01-B1*02:01L HLA-DRB1*04:10L HLA-DRB1*04:08L
WIFGTTLDSKT

SEQ ID NO: 9949 - protein, 10 aa, Severe acute respiratory syndrome coronavirus 2
  REGION 1..10: note = Table B: HLA-DQA1*03:02-B1*03:03L HLA-DQA1*05:01-B1*03:01L HLA-DRB1*04:03L HLA-DRB1*13:03L HLA-DRB1*01:03L HLA-DRB1*04:02L HLA-DRB1*04:05L HLA-DRB4*03:01NL HLA-DQA1*01-B1*05L HLA-DQA1*05:05-B1*03:19L HLA-DQA1*05:01-B1*02:01L
  REGION 1..10: note = CONT. FROM ABOVE: HLA-DRB1*04:10L HLA-DRB1*12:01L HLA-DQA1*03:01 -B1*03:02L HLA-DRB1*14:54L HLA-DQA1*05:05-B1*03:01L HLA-DRB1*14: 17L HLA-DRB1*16:01L HLA-DQA1*01:03-B1*06:01L HLA-DRB1*04:08L HLA -DQA1*02:01-B1*03:03L
FGTTLDSKTQ

SEQ ID NO: 9950 - protein, 10 aa, Severe acute respiratory syndrome coronavirus 2
  REGION 1..10: note = Table B: HLA-DQA1*03:02-B1*03:03H HLA-DQA1*05:01-B1*03:01M HLA-DRB1*04:01L HLA-DRB1*04:03L HLA-DRB1*13:02L HLA-DRB1*13:03M HLA-DRB1*01:03L HLA-DRB1*04:02L HLA-DRB1*04:04L HLA-DRB1*04:05L HLA-DQA1*01:02-B1*06:02M HLA-DRB1*01:01L HLA-DRB1*01:02M
  REGION 1..10: note = CONT. FROM ABOVE: HLA-DRB4*03:01NL HLA-DRB1*08:77L HLA-DRB3*02:0 1L HLA-DPA1*01:03-B1*03:01L HLA-DPA1*03:01-B1*04:02M HLA-DRB1*03 :01L HLA-DRB1*14:01M HLA-DRB1*11:03L HLA-DRB1*11:04L HLA-DRB1*14 :02M HLA-DQA1*01:01-B1*05:01L HLA-DRB1*08:01M HLA-DRB1*11:01L
  REGION 1..10: note = CONT. FROM ABOVE: HLA-DRB5*01:01L HLA-DQA1*01-B1*05L HLA-DQA1*05 :05-B1*03:19L HLA-DQA1*05:01-B1*02:01M HLA-DRB1*13:01L HLA-DRB4* 01:01L HLA-DPA1*01:03-B1*04:01M HLA-DQA1*05:05-B1*03:116M HLA-DR B1*09:01M HLA-DPA1*01:03-B1*04:02M HLA-DRB1*12:01L
  REGION 1..10: note = CONT. FROM ABOVE: HLA-DRB3*01:01L HLA-DPA1*02:01-B1*13:01L HLA-D PA1*03:01-B1*105:01M HLA-DQA1*03:01-B1*03:02M HLA-DPA1*01:03-B1* 104:01L HLA-DQA1*05:05-B1*03:01L HLA-DPA1*01:02-B1*04:01M HLA-DR B1*07:01L HLA-DRB1*10:01L HLA-DRB1*16:01L
  REGION 1..10: note = CONT. FROM ABOVE: HLA-DQA1*01:03-B1*06:01L HLA-DRB1*08:02L HLA -DRB1*08:03L HLA-DQA1*02:01-B1*03:03M HLA-DRB1*15:01L HLA-DRB1 *15:03M
TTLDSKTQSL

SEQ ID NO: 9951 - protein, 10 aa, Severe acute respiratory syndrome coronavirus 2
  REGION 1..10: note = Table B: HLA-DQA1*03:02-B1*03:03L HLA-DQA1*05:01-B1*03:01L HLA-DRB1*04:03L HLA-DRB1*13:03L HLA-DRB1*04:02L HLA-DPA1*01:03-B1*03:01L HLA-DPA1*03:01-B1*04:02L HLA-DRB1*14:01L HLA-DRB1*14:02L HLA-DQA1*01-B1*05L
  REGION 1..10: note = CONT. FROM ABOVE: HLA-DQA1*05:05-B1*03:19L HLA-DQA1*05:01-B1*02: 01L HLA-DPA1*03:01-B1*105:01L HLA-DQA1*03:01-B1*03:02L HLA-DPA1* 01:02-B1*04:01L HLA-DRB1*16:01L HLA-DQA1*02:01-B1*03:03L HLA-DRB 1*15:03L
TLDSKTQSLL

SEQ ID NO: 9952 - protein, 12 aa, Severe acute respiratory syndrome coronavirus 2
  REGION 1..12: note = Table B: HLA-DQA1*03:02-B1*03:03L HLA-DQA1*05:01-B1*03:01L HLA-DRB1*04:05L HLA-DQA1*01:02-B1*06:02L HLA-DPA1*01:03-B1*03:01L HLA-DQA1*01:01-B1*05:01L HLA-DQA1*05:05-B1*03:19L HLA-DQA1*05:01-B1*02:01L
  REGION 1..12: note = CONT. FROM ABOVE: HLA-DRB1*12:01L HLA-DPA1*02:01-B1*13:01L HLA-D PA1*03:01-B1*105:01L HLA-DQA1*05:05-B1*03:01L HLA-DRB1*16:01L
DSKTQSLLIVNN

SEQ ID NO: 9953 - protein, 12 aa, Severe acute respiratory syndrome coronavirus 2
  REGION 1..12: note = Table B: HLA-DQA1*03:02-B1*03:03L HLA-DQA1*05:01-B1*03:01L HLA-DRB1*13:03L HLA-DRB1*01:03L HLA-DRB1*04:02L HLA-DRB1*04:04L HLA-DRB1*04:05L HLA-DQA1*01:02-B1*06:02L HLA-DRB1*01:02L HLA-DRB4*03:01NL HLA-DPA1*01:03-B1*03:01L HLA-DRB1*11:04L
  REGION 1..12: note = CONT. FROM ABOVE: HLA-DQA1*01-B1*05L HLA-DQA1*05:05-B1*03:19L HL A-DQA1*05:01-B1*02:01L HLA-DRB1*04:10M HLA-DRB1*12:01L HLA-DRB1* 12:02L HLA-DPA1*03:01-B1*105:01L HLA-DRB1*14:54L HLA-DQA1*05:05- B1*03:01L HLA-DRB1*10:01L HLA-DRB1*16:01L
  REGION 1..12: note = CONT. FROM ABOVE: HLA-DQA1*01:03-B1*06:01L HLA-DRB1*04:08L HLA-D RB1*08:03L HLA-DQA1*02:01-B1*03:03L
TQSLLIVNNATN

SEQ ID NO: 9954 - protein, 10 aa, Severe acute respiratory syndrome coronavirus 2
  REGION 1..10: note = Table B: HLA-DQA1*03:02-B1*03:03L
LLIVNNATNV

SEQ ID NO: 9955 - protein, 10 aa, Severe acute respiratory syndrome coronavirus 2
  REGION 1..10: note = Table B: HLA-DQA1*03:02-B1*03:03L HLA-DQA1*05:01-B1*03:01L HLA-DRB1*04:03L HLA-DRB1*13:02L HLA-DRB1*13:03L HLA-DRB1*04:02L HLA-DRB1*01:02L HLA-DRB4*03:01NL HLA-DRB1*08:77L HLA-DRB3*02:01L HLA-DRB1*14:01L HLA-DQA1*05:05-B1*03:19L
  REGION 1..10: note = CONT. FROM ABOVE: HLA-DQA1*05:01-B1*02:01L HLA-DRB1*12:01L HLA-D PA1*03:01-B1*105:01L HLA-DQA1*03:01-B1*03:02L HLA-DRB1*14:17L HL A-DPA1*01:02-B1*04:01L HLA-DRB1*16:01L HLA-DQA1*02:01-B1*03:03L HLA-DRB1*15:03L
LIVNNATNVV

SEQ ID NO: 9956 - protein, 10 aa, Severe acute respiratory syndrome coronavirus 2
  REGION 1..10: note = Table B: HLA-DQA1*03:02-B1*03:03L HLA-DQA1*05:01-B1*03:01L HLA-DRB1*04:03L HLA-DRB1*13:03L HLA-DRB1*04:02L HLA-DRB1*01:02L HLA-DRB1*08:77L HLA-DPA1*03:01-B1*04:02L HLA-DRB1*14:01L HLA-DRB1*14:02L HLA-DQA1*05:05-B1*03:19L
  REGION 1..10: note = CONT. FROM ABOVE: HLA-DQA1*05:01-B1*02:01L HLA-DRB1*12:01L HLA-D PA1*02:01-B1*13:01L HLA-DPA1*03:01-B1*105:01L HLA-DQA1*03:01-B1* 03:02L HLA-DRB1*14:17L HLA-DPA1*01:02-B1*04:01L HLA-DRB1*16:01L HLA-DQA1*02:01-B1*03:03L HLA-DRB1*15:03L
IVNNATNVVI

SEQ ID NO: 9957 - protein, 10 aa, Severe acute respiratory syndrome coronavirus 2
  REGION 1..10: note = Table B: HLA-DQA1*03:02-B1*03:03L HLA-DQA1*05:01-B1*03:01L HLA-DRB1*04:01L HLA-DRB1*04:03L HLA-DRB1*13:02L HLA-DRB1*13:03L HLA-DRB1*01:03L HLA-DRB1*04:02L HLA-DRB1*04:04L HLA-DRB1*04:05L HLA-DQA1*01:02-B1*06:02L HLA-DRB1*01:01L HLA-DRB1*01:02L
  REGION 1..10: note = CONT. FROM ABOVE: HLA-DRB4*03:01NL HLA-DRB1*08:04L HLA-DRB1*08:7 7L HLA-DRB3*02:01L HLA-DRB1*14:01L HLA-DRB1*11:03L HLA-DRB1*11:0 4L HLA-DRB1*14:02L HLA-DRB1*08:01L HLA-DRB5*01:01L HLA-DQA1*05:0 5-B1*03:19L HLA-DQA1*05:01-B1*02:01L HLA-DRB1*04:10L
  REGION 1..10: note = CONT. FROM ABOVE: HLA-DRB1*12:01L HLA-DRB1*12:02L HLA-DPA1*03:01 -B1*105:01L HLA-DQA1*03:01-B1*03:02L HLA-DRB1*14:54L HLA-DQA1*05 :05-B1*03:01L HLA-DRB1*14:17L HLA-DRB1*07:01L HLA-DRB1*10:01L HL A-DRB1*16:01L HLA-DQA1*01:03-B1*06:01L HLA-DRB1*04:08L
  REGION 1..10: note = CONT. FROM ABOVE: HLA-DRB1*08:03L HLA-DQA1*02:01-B1*03:03L HLA-D RB1*15:03L
VNNATNVVIK

SEQ ID NO: 9958 - protein, 10 aa, Severe acute respiratory syndrome coronavirus 2
  REGION 1..10: note = Table B: HLA-DQA1*03:02-B1*03:03L HLA-DQA1*01:02-B1*06:02L HLA-DPA1*03:01-B1*105:01L HLA-DQA1*02:01-B1*03:03L
NNATNVVIKV

SEQ ID NO: 9959 - protein, 16 aa, Severe acute respiratory syndrome coronavirus 2
  REGION 1..16: note = Table B: HLA-DQA1*03:02-B1*03:03L HLA-DRB1*04:04L HLA-DRB1*04:05L HLA-DRB1*14:01L HLA-DRB1*11:02L HLA-DRB1*11:04L HLA-DRB1*14:02L HLA-DRB1*11:01L HLA-DRB3*01:01L HLA-DRB1*10:01L HLA-DRB1*08:02L HLA-DRB1*08:03L
NVVIKVCEFQFCNDPF

SEQ ID NO: 9960 - protein, 17 aa, Severe acute respiratory syndrome coronavirus 2
  REGION 1..17: note = Table B: HLA-DQA1*03:02-B1*03:03L HLA-DRB1*03:01L HLA-DRB1*13:01L
DPFLGVYYHKNNKSWME

SEQ ID NO: 9961 - protein, 10 aa, Severe acute respiratory syndrome coronavirus 2
  REGION 1..10: note = Table B: HLA-DQA1*03:02-B1*03:03L HLA-DQA1*05:01-B1*03:01L HLA-DRB1*01:03L HLA-DQA1*01:02-B1*06:02L HLA-DRB1*08:77L HLA-DPA1*01:03-B1*03:01L HLA-DPA1*03:01-B1*04:02L HLA-DRB1*03:01L HLA-DRB1*11:02L HLA-DRB1*14:02L
  REGION 1..10: note = CONT. FROM ABOVE: HLA-DQA1*01-B1*05L HLA-DQA1*05:05-B1*03:19M HL A-DQA1*05:01-B1*02:01L HLA-DRB4*01:01L HLA-DPA1*01:03-B1*04:01L HLA-DQA1*05:05-B1*03:116L HLA-DPA1*01:03-B1*04:02L HLA-DPA1*02:0 1-B1*13:01L HLA-DPA1*03:01-B1*105:01L HLA-DPA1*01:03-B1*104:01L
  REGION 1..10: note = CONT. FROM ABOVE: HLA-DPA1*01:02-B1*04:01L HLA-DRB1*10:01L HLA-D RB1*16:01L HLA-DQA1*01:03-B1*06:01L HLA-DQA1*02:01-B1*03:03L HLA -DRB1*15:03L
SWMESEFRVY

SEQ ID NO: 9962 - protein, 11 aa, Severe acute respiratory syndrome coronavirus 2
  REGION 1..11: note = Table B: HLA-DQA1*03:02-B1*03:03L HLA-DQA1*05:01-B1*03:01L HLA-DRB1*13:03L HLA-DRB1*01:03L HLA-DRB1*04:02L HLA-DRB1*04:05L HLA-DQA1*01:02-B1*06:02L HLA-DRB1*01:02L HLA-DRB4*03:01NL HLA-DPA1*01:03-B1*03:01L HLA-DPA1*03:01-B1*04:02L
  REGION 1..11: note = CONT. FROM ABOVE: HLA-DRB1*14:01L HLA-DQA1*01:01-B1*05:01L HLA-D QA1*05:01-B1*02:01L HLA-DRB1*04:10L HLA-DRB1*12:01L HLA-DPA1*03: 01-B1*105:01L HLA-DRB1*14:54L HLA-DQA1*05:05-B1*03:01L HLA-DRB1* 14:17L HLA-DPA1*01:02-B1*04:01L HLA-DRB1*16:01L
  REGION 1..11: note = CONT. FROM ABOVE: HLA-DQA1*01:03-B1*06:01L HLA-DRB1*04:08L HLA-D QA1*02:01-B1*03:03L HLA-DRB1*15:03L
SEFRVYSSANN

SEQ ID NO: 9963 - protein, 12 aa, Severe acute respiratory syndrome coronavirus 2
  REGION 1..12: note = Table B: HLA-DQA1*03:02-B1*03:03L HLA-DQA1*05:01-B1*03:01L HLA-DRB1*13:02L HLA-DRB1*01:02L HLA-DPA1*01:03-B1*03:01L HLA-DPA1*03:01-B1*04:02L HLA-DRB1*14:01L HLA-DQA1*05:01-B1*02:01L HLA-DRB1*12:01L
  REGION 1..12: note = CONT. FROM ABOVE: HLA-DQA1*03:01-B1*03:02L HLA-DPA1*01:03-B1*104 :01L HLA-DQA1*05:05-B1*03:01L HLA-DPA1*01:02-B1*04:01L HLA-DRB1* 04:08L
RVYSSANNCTFE

SEQ ID NO: 9964 - protein, 10 aa, Severe acute respiratory syndrome coronavirus 2
  REGION 1..10: note = Table B: HLA-DQA1*03:02-B1*03:03L HLA-DQA1*05:01-B1*03:01L HLA-DPA1*03:01-B1*04:02L HLA-DQA1*01-B1*05L HLA-DQA1*05:05-B1*03:19L HLA-DQA1*05:01-B1*02:01L HLA-DRB1*12:01L HLA-DPA1*02:01-B1*13:01L
  REGION 1..10: note = CONT. FROM ABOVE: HLA-DPA1*03:01-B1*105:01L HLA-DQA1*03:01-B1*03 :02L HLA-DPA1*01:02-B1*04:01L HLA-DRB1*16:01L HLA-DQA1*01:03-B1* 06:01L HLA-DQA1*02:01-B1*03:03L HLA-DRB1*15:03L
TFEYVSQPFL

SEQ ID NO: 9965 - protein, 10 aa, Severe acute respiratory syndrome coronavirus 2
  REGION 1..10: note = Table B: HLA-DQA1*03:02-B1*03:03L HLA-DRB1*11:02L HLA-DQA1*05:05-B1*03:19M HLA-DQA1*05:01-B1*02:01L HLA-DRB1*09:01L HLA-DPA1*02:01-B1*13:01L HLA-DQA1*03:01-B1*03:02L HLA-DPA1*01:03-B1*104:01L
  REGION 1..10: note = CONT. FROM ABOVE: HLA-DQA1*01:03-B1*06:01L HLA-DQA1*02:01-B1*03: 03L HLA-DRB1*15:03L
FEYVSQPFLM

SEQ ID NO: 9966 - protein, 10 aa, Severe acute respiratory syndrome coronavirus 2
  REGION 1..10: note = Table B: HLA-DQA1*03:02-B1*03:03L HLA-DQA1*01:02-B1*06:02L HLA-DRB1*01:02L HLA-DPA1*03:01-B1*04:02L HLA-DRB1*14:02L HLA-DQA1*01-B1*05L HLA-DQA1*05:05-B1*03:19L HLA-DQA1*05:01-B1*02:01L HLA-DPA1*01:03-B1*04:01L
  REGION 1..10: note = CONT. FROM ABOVE: HLA-DPA1*01:03-B1*04:02L HLA-DPA1*02:01-B1*13: 01L HLA-DPA1*03:01-B1*105:01L HLA-DQA1*03:01-B1*03:02L HLA-DPA1* 01:03-B1*104:01L HLA-DPA1*01:02-B1*04:01L HLA-DRB1*16:01L HLA-DQ A1*01:03-B1*06:01L HLA-DRB1*04:08L HLA-DQA1*02:01-B1*03:03L
  REGION 1..10: note = CONT. FROM ABOVE: HLA-DRB1*15:03L
YVSQPFLMDL

SEQ ID NO: 9967 - protein, 12 aa, Severe acute respiratory syndrome coronavirus 2
  REGION 1..12: note = Table B: HLA-DQA1*03:02-B1*03:03L HLA-DRB1*04:03L HLA-DRB1*13:03L HLA-DRB1*01:03L HLA-DRB1*04:02L HLA-DRB1*04:05L HLA-DRB4*03:01NL HLA-DRB1*08:01L HLA-DQA1*01-B1*05L HLA-DQA1*05:01-B1*02:01L HLA-DRB1*04:10L HLA-DRB1*12:01L
  REGION 1..12: note = CONT. FROM ABOVE: HLA-DRB1*14:54L HLA-DRB1*14:17L HLA-DRB1*16:01 L HLA-DRB1*04:08L HLA-DQA1*02:01-B1*03:03L
SQPFLMDLEGKQ

SEQ ID NO: 9968 - protein, 12 aa, Severe acute respiratory syndrome coronavirus 2
  REGION 1..12: note = Table B: HLA-DQA1*03:02-B1*03:03L HLA-DRB1*13:02L HLA-DRB1*01:03L HLA-DRB1*01:02L HLA-DRB4*03:01NL HLA-DRB1*08:04L HLA-DRB1*08:77L HLA-DPA1*01:03-B1*03:01L HLA-DRB1*03:01L HLA-DRB1*14:01L HLA-DRB1*11:04L HLA-DRB1*14:02L HLA-DRB1*08:01L
  REGION 1..12: note = CONT. FROM ABOVE: HLA-DQA1*01-B1*05L HLA-DQA1*05:01-B1*02:01L HL A-DRB1*04:10L HLA-DRB1*12:01L HLA-DRB1*12:02L HLA-DRB3*01:01L HL A-DPA1*03:01-B1*105:01L HLA-DRB1*14:54L HLA-DRB1*10:01L HLA-DRB1 *16:01L HLA-DRB1*04:08L HLA-DRB1*08:03L HLA-DQA1*02:01-B1*03:03L
QPFLMDLEGKQG

SEQ ID NO: 9969 - protein, 10 aa, Severe acute respiratory syndrome coronavirus 2
  REGION 1..10: note = Table B: HLA-DQA1*03:02-B1*03:03L HLA-DQA1*05:01-B1*03:01L HLA-DRB1*13:03L HLA-DRB1*01:03L HLA-DQA1*01:02-B1*06:02L HLA-DRB1*08:77L HLA-DPA1*01:03-B1*03:01L HLA-DPA1*03:01-B1*04:02L HLA-DRB1*03:01L HLA-DRB1*11:02L
  REGION 1..10: note = CONT. FROM ABOVE: HLA-DRB1*14:02L HLA-DQA1*01-B1*05L HLA-DQA1*05 :05-B1*03:19M HLA-DQA1*05:01-B1*02:01L HLA-DRB4*01:01L HLA-DPA1* 01:03-B1*04:01L HLA-DQA1*05:05-B1*03:116L HLA-DPA1*01:03-B1*04:0 2L HLA-DPA1*02:01-B1*13:01L HLA-DPA1*03:01-B1*105:01L
  REGION 1..10: note = CONT. FROM ABOVE: HLA-DPA1*01:03-B1*104:01L HLA-DRB1*10:01L HLA- DRB1*16:01L HLA-DQA1*01:03-B1*06:01L HLA-DQA1*02:01-B1*03:03L HL A-DRB1*15:03L
EFVFKNIDGY

SEQ ID NO: 9970 - protein, 10 aa, Severe acute respiratory syndrome coronavirus 2
  REGION 1..10: note = Table B: HLA-DQA1*03:02-B1*03:03L HLA-DQA1*05:01-B1*03:01L HLA-DRB1*04:03L HLA-DRB1*01:03L HLA-DRB1*04:05L HLA-DQA1*01:02-B1*06:02L HLA-DPA1*01:03-B1*03:01L HLA-DPA1*03:01-B1*04:02L HLA-DRB1*14:02L HLA-DQA1*01-B1*05L
  REGION 1..10: note = CONT. FROM ABOVE: HLA-DQA1*05:05-B1*03:19L HLA-DQA1*05:01-B1*02: 01L HLA-DPA1*01:03-B1*04:01L HLA-DPA1*01:03-B1*04:02L HLA-DPA1*0 2:01-B1*13:01L HLA-DPA1*03:01-B1*105:01L HLA-DPA1*01:02-B1*04:01 L HLA-DRB1*16:01L HLA-DQA1*01:03-B1*06:01L
  REGION 1..10: note = CONT. FROM ABOVE: HLA-DQA1*02:01-B1*03:03L HLA-DRB1*15:03L
FVFKNIDGYF

SEQ ID NO: 9971 - protein, 14 aa, Severe acute respiratory syndrome coronavirus 2
  REGION 1..14: note = Table B: HLA-DQA1*03:02-B1*03:03L HLA-DRB1*04:04L HLA-DRB1*01:01L HLA-DRB4*03:01NL HLA-DRB3*02:01L HLA-DPA1*01:03-B1*03:01L HLA-DPA1*01:03-B1*104:01L HLA-DRB1*07:01L HLA-DRB1*10:01L HLA-DQA1*01:03-B1*06:01L
DGYFKIYSKHTPIN

SEQ ID NO: 9972 - protein, 10 aa, Severe acute respiratory syndrome coronavirus 2
  REGION 1..10: note = Table B: HLA-DQA1*03:02-B1*03:03L HLA-DQA1*05:01-B1*03:01L HLA-DRB1*04:03L HLA-DRB1*13:02L HLA-DRB1*13:03L HLA-DRB1*01:03L HLA-DRB1*04:05L HLA-DQA1*01:02-B1*06:02L HLA-DRB1*01:01L HLA-DRB1*01:02L HLA-DRB4*03:01NL HLA-DRB1*08:77L
  REGION 1..10: note = CONT. FROM ABOVE: HLA-DPA1*03:01-B1*04:02L HLA-DRB1*14:01L HLA-D RB1*11:03L HLA-DRB1*14:02L HLA-DQA1*01:01-B1*05:01L HLA-DRB1*08: 01L HLA-DRB1*11:01L HLA-DQA1*01-B1*05L HLA-DQA1*05:05-B1*03:19L HLA-DQA1*05:01-B1*02:01L HLA-DPA1*01:03-B1*04:01L
  REGION 1..10: note = CONT. FROM ABOVE: HLA-DQA1*05:05-B1*03:116L HLA-DPA1*01:03-B1*04 :02L HLA-DRB1*12:01L HLA-DPA1*02:01-B1*13:01M HLA-DPA1*03:01-B1* 105:01L HLA-DQA1*03:01-B1*03:02L HLA-DPA1*01:02-B1*04:01L HLA-DR B1*07:01L HLA-DRB1*16:01L HLA-DQA1*01:03-B1*06:01M
  REGION 1..10: note = CONT. FROM ABOVE: HLA-DRB1*08:03L HLA-DQA1*02:01-B1*03:03L HLA-D RB1*15:03L
IYSKHTPINL

SEQ ID NO: 9973 - protein, 11 aa, Severe acute respiratory syndrome coronavirus 2
  REGION 1..11: note = Table B: HLA-DQA1*03:02-B1*03:03L HLA-DRB1*04:01L HLA-DQA1*01:02-B1*06:02L HLA-DRB1*01:02L HLA-DRB1*08:04L HLA-DRB1*08:01L HLA-DQA1*05:01-B1*02:01L HLA-DRB1*12:02L HLA-DRB1*10:01L HLA-DQA1*02:01-B1*03:03L HLA-DRB1*15:03L
PINLVRDLPQG

SEQ ID NO: 9974 - protein, 10 aa, Severe acute respiratory syndrome coronavirus 2
  REGION 1..10: note = Table B: HLA-DQA1*03:02-B1*03:03L HLA-DRB1*04:03L HLA-DRB1*13:03L HLA-DRB1*01:03L HLA-DRB1*04:02L HLA-DRB1*04:05L HLA-DQA1*01-B1*05L HLA-DQA1*03:01-B1*03:02L HLA-DRB1*16:01L
VRDLPQGFSA

SEQ ID NO: 9975 - protein, 10 aa, Severe acute respiratory syndrome coronavirus 2
  REGION 1..10: note = Table B: HLA-DQA1*03:02-B1*03:03L HLA-DQA1*05:05-B1*03:19L HLA-DQA1*03:01-B1*03:02L HLA-DRB1*16:01L
RDLPQGFSAL

SEQ ID NO: 9976 - protein, 12 aa, Severe acute respiratory syndrome coronavirus 2
  REGION 1..12: note = Table B: HLA-DQA1*03:02-B1*03:03L HLA-DQA1*01:02-B1*06:02L HLA-DQA1*05:05-B1*03:19L HLA-DQA1*03:01-B1*03:02L HLA-DQA1*05:05-B1*03:01L HLA-DQA1*01:03-B1*06:01L HLA-DQA1*02:01-B1*03:03L
PQGFSALEPLVD

SEQ ID NO: 9977 - protein, 10 aa, Severe acute respiratory syndrome coronavirus 2
  REGION 1..10: note = Table B: HLA-DQA1*03:02-B1*03:03L HLA-DRB1*04:03L HLA-DRB1*13:03L HLA-DRB1*04:02L HLA-DRB1*04:05L HLA-DRB4*03:01NL HLA-DQA1*01-B1*05L HLA-DQA1*05:01-B1*02:01L HLA-DRB1*04:10L HLA-DRB1*12:01L HLA-DPA1*03:01-B1*105:01L
  REGION 1..10: note = CONT. FROM ABOVE: HLA-DQA1*03:01-B1*03:02L HLA-DRB1*14:54L HLA-D RB1*14:17L HLA-DRB1*16:01L HLA-DQA1*02:01-B1*03:03L HLA-DRB1*15: 03L
LEPLVDLPIG

SEQ ID NO: 9978 - protein, 11 aa, Severe acute respiratory syndrome coronavirus 2
  REGION 1..11: note = Table B: HLA-DQA1*03:02-B1*03:03L HLA-DRB1*04:03L HLA-DQA1*01-B1*05L HLA-DQA1*05:01-B1*02:01L HLA-DQA1*03:01-B1*03:02L HLA-DQA1*01:03-B1*06:01L HLA-DQA1*02:01-B1*03:03L
EPLVDLPIGIN

SEQ ID NO: 9979 - protein, 10 aa, Severe acute respiratory syndrome coronavirus 2
  REGION 1..10: note = Table B: HLA-DQA1*03:02-B1*03:03L HLA-DQA1*05:05-B1*03:19L
LVDLPIGINI

SEQ ID NO: 9980 - protein, 10 aa, Severe acute respiratory syndrome coronavirus 2
  REGION 1..10: note = Table B: HLA-DQA1*03:02-B1*03:03L HLA-DQA1*05:01-B1*03:01M HLA-DRB1*13:03M HLA-DRB1*01:03L HLA-DRB1*04:05L HLA-DQA1*01:02-B1*06:02H HLA-DRB1*01:01L HLA-DRB1*01:02L HLA-DRB4*03:01NL HLA-DRB1*08:77L HLA-DPA1*01:03-B1*03:01L
  REGION 1..10: note = CONT. FROM ABOVE: HLA-DPA1*03:01-B1*04:02L HLA-DRB1*03:01L HLA-D RB1*14:01L HLA-DRB1*11:03L HLA-DRB1*14:02L HLA-DRB1*08:01L HLA-D RB5*01:01L HLA-DQA1*01-B1*05L HLA-DQA1*05:05-B1*03:19L HLA-DQA1* 05:01-B1*02:01L HLA-DPA1*01:03-B1*04:01L
  REGION 1..10: note = CONT. FROM ABOVE: HLA-DQA1*05:05-B1*03:116L HLA-DPA1*01:03-B1*04 :02L HLA-DRB1*12:01L HLA-DPA1*02:01-B1*13:01M HLA-DPA1*03:01-B1* 105:01M HLA-DQA1*03:01-B1*03:02L HLA-DPA1*01:02-B1*04:01L HLA-DR B1*10:01L HLA-DRB1*16:01L HLA-DQA1*01:03-B1*06:01L
  REGION 1..10: note = CONT. FROM ABOVE: HLA-DRB1*08:03L HLA-DQA1*02:01-B1*03:03L HLA-D RB1*15:03M
LPIGINITRF

SEQ ID NO: 9981 - protein, 10 aa, Severe acute respiratory syndrome coronavirus 2
  REGION 1..10: note = Table B: HLA-DQA1*03:02-B1*03:03L HLA-DQA1*05:01-B1*03:01L HLA-DRB1*01:03L HLA-DQA1*01:02-B1*06:02L HLA-DRB1*01:02L HLA-DRB1*08:77L HLA-DRB3*02:01L HLA-DPA1*01:03-B1*03:01L HLA-DPA1*03:01-B1*04:02M HLA-DRB1*14:01L HLA-DRB1*11:04L
  REGION 1..10: note = CONT. FROM ABOVE: HLA-DRB1*08:01L HLA-DRB1*11:01L HLA-DQA1*01-B1 *05L HLA-DQA1*05:05-B1*03:19L HLA-DQA1*05:01-B1*02:01L HLA-DPA1* 01:03-B1*04:01M HLA-DPA1*01:03-B1*04:02L HLA-DRB1*12:01L HLA-DPA 1*02:01-B1*13:01L HLA-DPA1*03:01-B1*105:01L
  REGION 1..10: note = CONT. FROM ABOVE: HLA-DQA1*03:01-B1*03:02L HLA-DPA1*01:03-B1*104 :01L HLA-DPA1*01:02-B1*04:01M HLA-DRB1*16:01L HLA-DQA1*01:03-B1* 06:01L HLA-DRB1*04:08L HLA-DQA1*02:01-B1*03:03L HLA-DRB1*15:03L
GINITRFQTL

SEQ ID NO: 9982 - protein, 13 aa, Severe acute respiratory syndrome coronavirus 2
  REGION 1..13: note = Table B: HLA-DQA1*03:02-B1*03:03L HLA-DQA1*05:01-B1*03:01L HLA-DRB1*13:02L HLA-DRB1*01:03L HLA-DRB1*04:02L HLA-DRB1*04:04L HLA-DRB1*14:01L HLA-DQA1*01:01-B1*05:01L HLA-DRB1*08:01L HLA-DQA1*05:01-B1*02:01L HLA-DRB1*04:10L
  REGION 1..13: note = CONT. FROM ABOVE: HLA-DPA1*03:01-B1*105:01L HLA-DQA1*05:05-B1*03 :01L HLA-DRB1*14:17L HLA-DPA1*01:02-B1*04:01L HLA-DRB1*04:08L HL A-DRB1*15:03L
LALHRSYLTPGDS

SEQ ID NO: 9983 - protein, 12 aa, Severe acute respiratory syndrome coronavirus 2
  REGION 1..12: note = Table B: HLA-DQA1*03:02-B1*03:03L HLA-DRB1*13:03L HLA-DRB1*04:02L HLA-DRB1*04:05L HLA-DRB4*03:01NL HLA-DQA1*01-B1*05L HLA-DQA1*05:01-B1*02:01L HLA-DRB1*04:10L HLA-DRB1*12:01L HLA-DQA1*03:01-B1*03:02L HLA-DRB1*14:54L
  REGION 1..12: note = CONT. FROM ABOVE: HLA-DRB1*16:01L HLA-DQA1*02:01-B1*03:03L
RSYLTPGDSSSG

SEQ ID NO: 9984 - protein, 12 aa, Severe acute respiratory syndrome coronavirus 2
  REGION 1..12: note = Table B: HLA-DQA1*03:02-B1*03:03L HLA-DRB1*04:05L HLA-DQA1*01:03-B1*06:01L
SYLTPGDSSSGW

SEQ ID NO: 9985 - protein, 14 aa, Severe acute respiratory syndrome coronavirus 2
  REGION 1..14: note = Table B: HLA-DQA1*03:02-B1*03:03L HLA-DQA1*05:01-B1*03:01L HLA-DRB1*01:03L HLA-DQA1*01:02-B1*06:02L HLA-DQA1*01:01-B1*05:01L HLA-DQA1*05:05-B1*03:19L HLA-DQA1*05:01-B1*02:01L HLA-DQA1*05:05-B1*03:116L
  REGION 1..14: note = CONT. FROM ABOVE: HLA-DQA1*03:01-B1*03:02L HLA-DQA1*05:05-B1*03: 01L HLA-DQA1*01:03-B1*06:01L HLA-DQA1*02:01-B1*03:03L
TPGDSSSGWTAGAA

SEQ ID NO: 9986 - protein, 12 aa, Severe acute respiratory syndrome coronavirus 2
  REGION 1..12: note = Table B: HLA-DQA1*03:02-B1*03:03L HLA-DQA1*05:01-B1*03:01L HLA-DQA1*01:02-B1*06:02L HLA-DQA1*03:01-B1*03:02L HLA-DQA1*05:05-B1*03:01L HLA-DQA1*01:03-B1*06:01L HLA-DQA1*02:01-B1*03:03L
DSSSGWTAGAAA

SEQ ID NO: 9987 - protein, 12 aa, Severe acute respiratory syndrome coronavirus 2
  REGION 1..12: note = Table B: HLA-DQA1*03:02-B1*03:03L HLA-DQA1*05:01-B1*03:01L HLA-DQA1*01-B1*05L HLA-DRB1*12:01L HLA-DPA1*03:01-B1*105:01L HLA-DQA1*05:05-B1*03:01L HLA-DRB1*10:01L
SSGWTAGAAAYY

SEQ ID NO: 9988 - protein, 11 aa, Severe acute respiratory syndrome coronavirus 2
  REGION 1..11: note = Table B: HLA-DQA1*03:02-B1*03:03L HLA-DQA1*05:01-B1*03:01L HLA-DQA1*01:02-B1*06:02L HLA-DQA1*05:05-B1*03:19L HLA-DPA1*03:01-B1*105:01L HLA-DQA1*03:01-B1*03:02L HLA-DQA1*05:05-B1*03:01L HLA-DQA1*02:01-B1*03:03L
WTAGAAAYYVG

SEQ ID NO: 9989 - protein, 12 aa, Severe acute respiratory syndrome coronavirus 2
  REGION 1..12: note = Table B: HLA-DQA1*03:02-B1*03:03L HLA-DQA1*05:01-B1*03:01L HLA-DQA1*05:05-B1*03:01L HLA-DQA1*02:01-B1*03:03L
TAGAAAYYVGYL

SEQ ID NO: 9990 - protein, 12 aa, Severe acute respiratory syndrome coronavirus 2
  REGION 1..12: note = Table B: HLA-DQA1*03:02-B1*03:03L HLA-DRB1*04:03L HLA-DQA1*01:02-B1*06:02L
AAAYYVGYLQPR

SEQ ID NO: 9991 - protein, 10 aa, Severe acute respiratory syndrome coronavirus 2
  REGION 1..10: note = Table B: HLA-DQA1*03:02-B1*03:03L HLA-DQA1*05:01-B1*03:01L HLA-DRB1*04:03L HLA-DRB1*13:03L HLA-DRB1*01:03L HLA-DRB1*04:02L HLA-DQA1*01:02-B1*06:02L HLA-DPA1*03:01-B1*04:02L HLA-DQA1*01-B1*05L HLA-DQA1*05:01-B1*02:01L
  REGION 1..10: note = CONT. FROM ABOVE: HLA-DPA1*01:03-B1*04:02L HLA-DPA1*03:01-B1*105 :01L HLA-DQA1*03:01-B1*03:02L HLA-DRB1*14:17L HLA-DPA1*01:02-B1* 04:01L HLA-DRB1*16:01L HLA-DQA1*01:03-B1*06:01L HLA-DRB1*04:08L HLA-DQA1*02:01-B1*03:03L HLA-DRB1*15:03L
YYVGYLQPRT

SEQ ID NO: 9992 - protein, 10 aa, Severe acute respiratory syndrome coronavirus 2
  REGION 1..10: note = Table B: HLA-DQA1*03:02-B1*03:03L HLA-DQA1*05:01-B1*03:01L HLA-DRB1*04:03L HLA-DRB1*13:02L HLA-DRB1*13:03L HLA-DRB1*01:03L HLA-DRB1*04:05L HLA-DQA1*01:02-B1*06:02L HLA-DRB1*01:01L HLA-DRB1*01:02L HLA-DRB4*03:01NL HLA-DRB1*08:77L HLA-DRB3*02:01L
  REGION 1..10: note = CONT. FROM ABOVE: HLA-DPA1*01:03-B1*03:01L HLA-DPA1*03:01-B1*04: 02L HLA-DRB1*14:01L HLA-DRB1*11:03L HLA-DRB1*14:02L HLA-DQA1*01: 01-B1*05:01L HLA-DQA1*01-B1*05L HLA-DQA1*05:05-B1*03:19L HLA-DQA 1*05:01-B1*02:01L HLA-DRB4*01:01L HLA-DPA1*01:03-B1*04:01L
  REGION 1..10: note = CONT. FROM ABOVE: HLA-DQA1*05:05-B1*03:116L HLA-DRB1*09:01L HLA- DPA1*01:03-B1*04:02L HLA-DRB1*12:01L HLA-DPA1*02:01-B1*13:01L HL A-DPA1*03:01-B1*105:01L HLA-DQA1*03:01-B1*03:02L HLA-DPA1*01:03- B1*104:01L HLA-DQA1*05:05-B1*03:01L HLA-DPA1*01:02-B1*04:01L
  REGION 1..10: note = CONT. FROM ABOVE: HLA-DRB1*07:01L HLA-DRB1*10:01L HLA-DRB1*16:01 L HLA-DQA1*01:03-B1*06:01M HLA-DRB1*08:03L HLA-DQA1*02:01-B1*03: 03L HLA-DRB1*15:03L
YVGYLQPRTF

SEQ ID NO: 9993 - protein, 10 aa, Severe acute respiratory syndrome coronavirus 2
  REGION 1..10: note = Table B: HLA-DQA1*03:02-B1*03:03L HLA-DQA1*05:01-B1*03:01L HLA-DRB1*04:03L HLA-DQA1*01:02-B1*06:02L HLA-DRB1*01:02L HLA-DRB1*14:01L HLA-DQA1*01-B1*05L HLA-DQA1*05:05-B1*03:19L HLA-DQA1*05:01-B1*02:01L HLA-DRB1*12:01L
  REGION 1..10: note = CONT. FROM ABOVE: HLA-DPA1*02:01-B1*13:01L HLA-DPA1*03:01-B1*105 :01L HLA-DQA1*03:01-B1*03:02L HLA-DQA1*05:05-B1*03:01L HLA-DPA1* 01:02-B1*04:01L HLA-DRB1*16:01L HLA-DQA1*01:03-B1*06:01L HLA-DQA 1*02:01-B1*03:03L HLA-DRB1*15:03L
VGYLQPRTFL

SEQ ID NO: 9994 - protein, 10 aa, Severe acute respiratory syndrome coronavirus 2
  REGION 1..10: note = Table B: HLA-DQA1*03:02-B1*03:03L HLA-DPA1*02:01-B1*13:01L HLA-DQA1*01:03-B1*06:01L HLA-DQA1*02:01-B1*03:03L
GYLQPRTFLL

SEQ ID NO: 9995 - protein, 13 aa, Severe acute respiratory syndrome coronavirus 2
  REGION 1..13: note = Table B: HLA-DQA1*03:02-B1*03:03L HLA-DQA1*05:01-B1*03:01L HLA-DRB1*13:03L HLA-DRB1*01:03L HLA-DRB1*04:05L HLA-DRB1*08:04L HLA-DRB3*02:01L HLA-DPA1*01:03-B1*03:01L HLA-DPA1*03:01-B1*04:02L HLA-DRB1*14:02L HLA-DRB1*08:01L
  REGION 1..13: note = CONT. FROM ABOVE: HLA-DQA1*05:05-B1*03:19L HLA-DRB1*12:02L HLA-D PA1*02:01-B1*13:01L HLA-DQA1*03:01-B1*03:02L HLA-DRB1*14:54L HLA -DQA1*05:05-B1*03:01L HLA-DPA1*01:02-B1*04:01L HLA-DQA1*01:03-B1 *06:01L HLA-DRB1*04:08L
TFLLKYNENGTIT

SEQ ID NO: 9996 - protein, 12 aa, Severe acute respiratory syndrome coronavirus 2
  REGION 1..12: note = Table B: HLA-DQA1*03:02-B1*03:03L HLA-DQA1*05:01-B1*03:01L HLA-DRB1*13:03L HLA-DRB1*01:03L HLA-DRB1*04:05L HLA-DRB1*01:02L HLA-DRB4*03:01NL HLA-DRB1*08:04L HLA-DRB1*08:77L HLA-DRB3*02:01L HLA-DRB1*11:03L HLA-DQA1*05:01-B1*02:01L HLA-DRB1*12:02L
  REGION 1..12: note = CONT. FROM ABOVE: HLA-DPA1*03:01-B1*105:01L HLA-DRB1*14:54L HLA- DQA1*05:05-B1*03:01L HLA-DRB1*07:01L
LLKYNENGTITD

SEQ ID NO: 9997 - protein, 12 aa, Severe acute respiratory syndrome coronavirus 2
  REGION 1..12: note = Table B: HLA-DQA1*03:02-B1*03:03L HLA-DQA1*05:01-B1*03:01L HLA-DRB1*13:03L HLA-DRB1*01:03L HLA-DRB1*04:05L HLA-DRB1*01:02L HLA-DRB4*03:01NL HLA-DRB1*08:04L HLA-DRB1*08:77L HLA-DRB3*02:01L HLA-DPA1*01:03-B1*03:01L HLA-DRB1*11:03L HLA-DRB1*14:02L
  REGION 1..12: note = CONT. FROM ABOVE: HLA-DQA1*05:05-B1*03:19L HLA-DQA1*05:01-B1*02: 01L HLA-DRB1*04:10L HLA-DRB1*12:02L HLA-DPA1*03:01-B1*105:01L HL A-DRB1*14:54L HLA-DQA1*05:05-B1*03:01L HLA-DRB1*15:03L
LKYNENGTITDA

SEQ ID NO: 9998 - protein, 10 aa, Severe acute respiratory syndrome coronavirus 2
  REGION 1..10: note = Table B: HLA-DQA1*03:02-B1*03:03L HLA-DQA1*05:05-B1*03:19L HLA-DQA1*03:01-B1*03:02L HLA-DPA1*01:03-B1*104:01L
NENGTITDAV

SEQ ID NO: 9999 - protein, 15 aa, Severe acute respiratory syndrome coronavirus 2
  REGION 1..15: note = Table B: HLA-DQA1*03:02-B1*03:03L HLA-DRB1*04:02L HLA-DRB1*04:05L HLA-DRB1*01:02L HLA-DRB1*14:02L HLA-DRB1*12:01L HLA-DQA1*05:05-B1*03:01L HLA-DRB1*16:01L HLA-DRB1*15:03L
NGTITDAVDCALDPL

SEQ ID NO: 10000 - protein, 14 aa, Severe acute respiratory syndrome coronavirus 2
  REGION 1..14: note = Table B: HLA-DQA1*03:02-B1*03:03L HLA-DPA1*03:01-B1*105:01L HLA-DQA1*05:05-B1*03:01L HLA-DRB1*16:01L HLA-DQA1*01:03-B1*06:01L HLA-DQA1*02:01-B1*03:03L
ITDAVDCALDPLSE

SEQ ID NO: 10001 - protein, 13 aa, Severe acute respiratory syndrome coronavirus 2
  REGION 1..13: note = Table B: HLA-DQA1*03:02-B1*03:03L HLA-DRB1*04:02L HLA-DRB1*04:05L HLA-DQA1*01:02-B1*06:02L HLA-DRB1*04:10L HLA-DPA1*03:01-B1*105:01L HLA-DQA1*03:01-B1*03:02L HLA-DQA1*05:05-B1*03:01L HLA-DQA1*01:03-B1*06:01L
  REGION 1..13: note = CONT. FROM ABOVE: HLA-DQA1*02:01-B1*03:03L
DAVDCALDPLSET

SEQ ID NO: 10002 - protein, 13 aa, Severe acute respiratory syndrome coronavirus 2
  REGION 1..13: note = Table B: HLA-DQA1*03:02-B1*03:03L HLA-DQA1*05:01-B1*03:01L HLA-DRB1*01:03L HLA-DRB1*04:02L HLA-DRB1*04:05L HLA-DRB1*01:02L HLA-DQA1*01-B1*05L HLA-DQA1*05:01-B1*02:01L HLA-DRB1*04:10L HLA-DQA1*05:05-B1*03:01L HLA-DRB1*16:01L HLA-DRB1*04:08L
  REGION 1..13: note = CONT. FROM ABOVE: HLA-DRB1*15:03L
AVDCALDPLSETK

SEQ ID NO: 10003 - protein, 10 aa, Severe acute respiratory syndrome coronavirus 2
  REGION 1..10: note = Table B: HLA-DQA1*03:02-B1*03:03L HLA-DQA1*05:05-B1*03:19L
ALDPLSETKC

SEQ ID NO: 10004 - protein, 12 aa, Severe acute respiratory syndrome coronavirus 2
  REGION 1..12: note = Table B: HLA-DQA1*03:02-B1*03:03L HLA-DRB1*13:02L HLA-DRB1*13:03L HLA-DRB1*04:04L HLA-DRB4*03:01NL HLA-DRB1*08:04L HLA-DPA1*01:03-B1*03:01L HLA-DPA1*03:01-B1*04:02L HLA-DRB1*14:01L HLA-DRB1*11:04L HLA-DRB1*08:01L
  REGION 1..12: note = CONT. FROM ABOVE: HLA-DQA1*01-B1*05L HLA-DRB1*04:10L HLA-DRB1*12 :01L HLA-DRB1*12:02L HLA-DPA1*02:01-B1*13:01L HLA-DPA1*03:01-B1* 105:01L HLA-DRB1*14:54L HLA-DQA1*05:05-B1*03:01L HLA-DPA1*01:02- B1*04:01L HLA-DRB1*10:01L HLA-DRB1*08:03L HLA-DRB1*15:03L
LKSFTVEKGIYQ

SEQ ID NO: 10005 - protein, 12 aa, Severe acute respiratory syndrome coronavirus 2
  REGION 1..12: note = Table B: HLA-DQA1*03:02-B1*03:03L HLA-DQA1*05:01-B1*03:01L HLA-DRB1*04:01L HLA-DRB1*13:02L HLA-DRB1*01:03L HLA-DRB1*04:04L HLA-DRB1*04:05L HLA-DQA1*01:02-B1*06:02L HLA-DRB1*01:01L HLA-DRB1*01:02L HLA-DRB4*03:01NL HLA-DRB1*08:04L
  REGION 1..12: note = CONT. FROM ABOVE: HLA-DPA1*01:03-B1*03:01L HLA-DPA1*03:01-B1*04: 02L HLA-DRB1*14:01L HLA-DRB1*11:03L HLA-DRB1*14:02L HLA-DRB1*11: 01L HLA-DQA1*01-B1*05L HLA-DQA1*05:05-B1*03:19L HLA-DQA1*05:01-B 1*02:01L HLA-DPA1*01:03-B1*04:02L HLA-DRB1*12:01L
  REGION 1..12: note = CONT. FROM ABOVE: HLA-DPA1*03:01-B1*105:01L HLA-DRB1*14:54L HLA- DQA1*05:05-B1*03:01L HLA-DRB1*10:01L HLA-DRB1*04:08L HLA-DRB1*15 :03L
FTVEKGIYQTSN

SEQ ID NO: 10006 - protein, 14 aa, Severe acute respiratory syndrome coronavirus 2
  REGION 1..14: note = Table B: HLA-DQA1*03:02-B1*03:03L HLA-DRB1*13:02L HLA-DRB1*04:05L HLA-DRB4*03:01NL HLA-DPA1*01:03-B1*03:01L HLA-DRB1*14:01L HLA-DRB1*11:03L HLA-DRB1*11:04L HLA-DQA1*01-B1*05L HLA-DPA1*01:03-B1*04:01L HLA-DRB1*04:10L
  REGION 1..14: note = CONT. FROM ABOVE: HLA-DRB1*09:01L HLA-DRB1*12:02L HLA-DRB3*01:01 L HLA-DPA1*02:01-B1*13:01L HLA-DQA1*03:01-B1*03:02L HLA-DRB1*14: 54L HLA-DQA1*05:05-B1*03:01L HLA-DRB1*14:17L HLA-DQA1*01:03-B1*0 6:01L
VEKGIYQTSNFRVQ

SEQ ID NO: 10007 - protein, 12 aa, Severe acute respiratory syndrome coronavirus 2
  REGION 1..12: note = Table B: HLA-DQA1*03:02-B1*03:03L HLA-DRB1*13:02L HLA-DRB1*13:03L HLA-DRB1*04:04L HLA-DRB1*04:05L HLA-DQA1*01:02-B1*06:02L HLA-DRB4*03:01NL HLA-DRB1*08:04L HLA-DPA1*01:03-B1*03:01L HLA-DRB1*11:03L HLA-DRB1*11:04L
  REGION 1..12: note = CONT. FROM ABOVE: HLA-DRB1*14:02L HLA-DRB1*08:01L HLA-DRB1*11:01 L HLA-DQA1*05:05-B1*03:19L HLA-DRB1*09:01L HLA-DPA1*01:03-B1*04: 02L HLA-DRB3*01:01L HLA-DPA1*02:01-B1*13:01L HLA-DQA1*03:01-B1*0 3:02L HLA-DRB1*14:54L HLA-DQA1*05:05-B1*03:01L HLA-DRB1*14:17L
GIYQTSNFRVQP

SEQ ID NO: 10008 - protein, 10 aa, Severe acute respiratory syndrome coronavirus 2
  REGION 1..10: note = Table B: HLA-DQA1*03:02-B1*03:03L HLA-DQA1*05:01-B1*03:01L HLA-DRB1*04:03L HLA-DRB1*13:03L HLA-DRB1*01:03L HLA-DRB1*04:02L HLA-DRB4*03:01NL HLA-DRB1*14:02L HLA-DQA1*01-B1*05L HLA-DRB1*12:01L HLA-DPA1*03:01-B1*105:01L
  REGION 1..10: note = CONT. FROM ABOVE: HLA-DQA1*03:01-B1*03:02L HLA-DRB1*14:17L HLA-D PA1*01:02-B1*04:01L HLA-DRB1*16:01L HLA-DQA1*01:03-B1*06:01L HLA -DQA1*02:01-B1*03:03L
QTSNFRVQPT

SEQ ID NO: 10009 - protein, 12 aa, Severe acute respiratory syndrome coronavirus 2
  REGION 1..12: note = Table B: HLA-DQA1*03:02-B1*03:03L HLA-DQA1*05:01-B1*03:01L HLA-DRB1*13:02L HLA-DRB1*13:03L HLA-DRB1*01:03L HLA-DRB1*04:02L HLA-DRB1*04:05L HLA-DRB1*01:02L HLA-DRB4*03:01NL HLA-DRB1*08:04L HLA-DRB3*02:01L HLA-DPA1*03:01-B1*04:02L HLA-DRB1*14:01L
  REGION 1..12: note = CONT. FROM ABOVE: HLA-DQA1*01-B1*05L HLA-DQA1*05:01-B1*02:01L HL A-DRB1*12:01L HLA-DRB1*12:02L HLA-DPA1*02:01-B1*13:01L HLA-DPA1* 03:01-B1*105:01L HLA-DRB1*14:54L HLA-DRB1*14:17L HLA-DPA1*01:02- B1*04:01L HLA-DQA1*01:03-B1*06:01L HLA-DRB1*15:03L
TSNFRVQPTESI

SEQ ID NO: 10010 - protein, 12 aa, Severe acute respiratory syndrome coronavirus 2
  REGION 1..12: note = Table B: HLA-DQA1*03:02-B1*03:03L HLA-DRB1*13:02L HLA-DRB1*04:02L HLA-DRB1*01:02L HLA-DRB3*02:01L HLA-DPA1*03:01-B1*04:02L HLA-DRB1*14:01L HLA-DQA1*01-B1*05L HLA-DQA1*05:01-B1*02:01L HLA-DRB1*12:01L
  REGION 1..12: note = CONT. FROM ABOVE: HLA-DPA1*03:01-B1*105:01L HLA-DRB1*04:08L HLA- DQA1*02:01-B1*03:03L HLA-DRB1*15:03L
SNFRVQPTESIV

SEQ ID NO: 10011 - protein, 12 aa, Severe acute respiratory syndrome coronavirus 2
  REGION 1..12: note = Table B: HLA-DQA1*03:02-B1*03:03L HLA-DPA1*03:01-B1*04:02L HLA-DRB1*09:01L
NFRVQPTESIVR

SEQ ID NO: 10012 - protein, 12 aa, Severe acute respiratory syndrome coronavirus 2
  REGION 1..12: note = Table B: HLA-DQA1*03:02-B1*03:03L HLA-DQA1*05:01-B1*03:01L HLA-DRB1*13:02L HLA-DRB1*13:03L HLA-DRB1*04:02L HLA-DRB1*04:05L HLA-DRB1*01:02L HLA-DRB4*03:01NL HLA-DPA1*01:03-B1*03:01L HLA-DRB1*14:01L HLA-DQA1*01:01-B1*05:01L HLA-DQA1*01-B1*05L
  REGION 1..12: note = CONT. FROM ABOVE: HLA-DQA1*05:05-B1*03:19L HLA-DQA1*05:01-B1*02: 01L HLA-DRB1*12:01L HLA-DRB1*14:54L HLA-DQA1*05:05-B1*03:01L HLA -DRB1*14:17L HLA-DRB1*16:01L HLA-DRB1*04:08L
VQPTESIVRFPN

SEQ ID NO: 10013 - protein, 10 aa, Severe acute respiratory syndrome coronavirus 2
  REGION 1..10: note = Table B: HLA-DQA1*03:02-B1*03:03L HLA-DRB1*11:02L HLA-DQA1*05:05-B1*03:19M HLA-DPA1*01:03-B1*104:01L
TESIVRFPNI

SEQ ID NO: 10014 - protein, 10 aa, Severe acute respiratory syndrome coronavirus 2
  REGION 1..10: note = Table B: HLA-DQA1*03:02-B1*03:03L HLA-DQA1*05:01-B1*03:01L HLA-DRB1*04:03L HLA-DRB1*13:03L HLA-DRB1*01:03L HLA-DRB1*04:02L HLA-DRB1*04:05L HLA-DQA1*01:02-B1*06:02L HLA-DRB1*01:02L HLA-DRB4*03:01NL HLA-DRB1*14:01L HLA-DQA1*01-B1*05L
  REGION 1..10: note = CONT. FROM ABOVE: HLA-DQA1*05:01-B1*02:01L HLA-DRB1*04:10L HLA-D RB1*12:01L HLA-DQA1*03:01-B1*03:02L HLA-DRB1*14:54L HLA-DRB1*14: 17L HLA-DPA1*01:02-B1*04:01L HLA-DRB1*16:01L HLA-DRB1*04:08L HLA -DQA1*02:01-B1*03:03L HLA-DRB1*15:03L
SIVRFPNITN

SEQ ID NO: 10015 - protein, 10 aa, Severe acute respiratory syndrome coronavirus 2
  REGION 1..10: note = Table B: HLA-DQA1*03:02-B1*03:03M HLA-DQA1*05:01-B1*03:01L HLA-DRB1*04:03L HLA-DRB1*13:02L HLA-DRB1*13:03L HLA-DRB1*01:03L HLA-DRB1*04:02L HLA-DRB1*04:04L HLA-DRB1*04:05L HLA-DQA1*01:02-B1*06:02L HLA-DRB1*01:02L HLA-DRB4*03:01NL
  REGION 1..10: note = CONT. FROM ABOVE: HLA-DRB3*02:01L HLA-DPA1*01:03-B1*03:01L HLA-D PA1*03:01-B1*04:02L HLA-DRB1*14:01L HLA-DRB1*14:02L HLA-DQA1*01: 01-B1*05:01L HLA-DRB1*08:01L HLA-DQA1*01-B1*05L HLA-DQA1*05:05-B 1*03:19L HLA-DQA1*05:01-B1*02:01L HLA-DPA1*01:03-B1*04:01L
  REGION 1..10: note = CONT. FROM ABOVE: HLA-DQA1*05:05-B1*03:116L HLA-DRB1*09:01L HLA- DPA1*01:03-B1*04:02L HLA-DRB1*12:01L HLA-DPA1*02:01-B1*13:01L HL A-DPA1*03:01-B1*105:01L HLA-DQA1*03:01-B1*03:02L HLA-DRB1*14:17L HLA-DPA1*01:02-B1*04:01L HLA-DRB1*07:01L HLA-DRB1*10:01L
  REGION 1..10: note = CONT. FROM ABOVE: HLA-DRB1*16:01L HLA-DQA1*01:03-B1*06:01L HLA-D RB1*08:03L HLA-DQA1*02:01-B1*03:03L HLA-DRB1*15:03L
IVRFPNITNL

SEQ ID NO: 10016 - protein, 15 aa, Severe acute respiratory syndrome coronavirus 2
  REGION 1..15: note = Table B: HLA-DQA1*03:02-B1*03:03L HLA-DQA1*05:01-B1*03:01L HLA-DRB1*13:02L HLA-DRB1*04:05L HLA-DRB1*08:04L HLA-DRB3*02:01L HLA-DPA1*01:03-B1*03:01L HLA-DRB1*14:02L HLA-DQA1*05:05-B1*03:19L HLA-DPA1*01:03-B1*04:02L
  REGION 1..15: note = CONT. FROM ABOVE: HLA-DPA1*02:01-B1*13:01L HLA-DPA1*01:03-B1*104 :01L HLA-DRB1*16:01L HLA-DRB1*04:08L
FPNITNLCPFGEVFN

SEQ ID NO: 10017 - protein, 10 aa, Severe acute respiratory syndrome coronavirus 2
  REGION 1..10: note = Table B: HLA-DQA1*03:02-B1*03:03L
GEVFNATRFA

SEQ ID NO: 10018 - protein, 10 aa, Severe acute respiratory syndrome coronavirus 2
  REGION 1..10: note = Table B: HLA-DQA1*03:02-B1*03:03L HLA-DQA1*01:02-B1*06:02L HLA-DPA1*03:01-B1*04:02L HLA-DQA1*05:05-B1*03:19L HLA-DQA1*05:01-B1*02:01L HLA-DPA1*01:03-B1*04:01L HLA-DPA1*02:01-B1*13:01L HLA-DPA1*03:01-B1*105:01L
  REGION 1..10: note = CONT. FROM ABOVE: HLA-DPA1*01:03-B1*104:01L HLA-DPA1*01:02-B1*04 :01L HLA-DRB1*16:01L HLA-DQA1*01:03-B1*06:01L HLA-DQA1*02:01-B1* 03:03L HLA-DRB1*15:03L
VFNATRFASV

SEQ ID NO: 10019 - protein, 10 aa, Severe acute respiratory syndrome coronavirus 2
  REGION 1..10: note = Table B: HLA-DQA1*03:02-B1*03:03L HLA-DQA1*05:01-B1*03:01L HLA-DRB1*01:03L HLA-DQA1*01:02-B1*06:02L HLA-DPA1*01:03-B1*03:01L HLA-DPA1*03:01-B1*04:02L HLA-DRB1*14:02L HLA-DQA1*01-B1*05L HLA-DQA1*05:05-B1*03:19L
  REGION 1..10: note = CONT. FROM ABOVE: HLA-DQA1*05:01-B1*02:01L HLA-DPA1*01:03-B1*04: 01L HLA-DPA1*01:03-B1*04:02L HLA-DRB1*12:01L HLA-DPA1*02:01-B1*1 3:01L HLA-DPA1*03:01-B1*105:01L HLA-DPA1*01:03-B1*104:01L HLA-DQ A1*05:05-B1*03:01L HLA-DPA1*01:02-B1*04:01L HLA-DRB1*16:01L
  REGION 1..10: note = CONT. FROM ABOVE: HLA-DQA1*01:03-B1*06:01L HLA-DRB1*04:08L HLA-D QA1*02:01-B1*03:03L HLA-DRB1*15:03L
FNATRFASVY

SEQ ID NO: 10020 - protein, 12 aa, Severe acute respiratory syndrome coronavirus 2
  REGION 1..12: note = Table B: HLA-DQA1*03:02-B1*03:03L HLA-DQA1*05:01-B1*03:01L HLA-DRB1*04:03L HLA-DRB1*13:02L HLA-DRB1*01:03L HLA-DRB1*04:05L HLA-DRB1*01:02L HLA-DPA1*01:03-B1*03:01L HLA-DPA1*03:01-B1*04:02L HLA-DQA1*05:05-B1*03:19L
  REGION 1..12: note = CONT. FROM ABOVE: HLA-DQA1*05:01-B1*02:01L HLA-DPA1*01:03-B1*04: 01L HLA-DPA1*01:03-B1*04:02L HLA-DRB1*12:01L HLA-DPA1*02:01-B1*1 3:01L HLA-DPA1*03:01-B1*105:01L HLA-DQA1*03:01-B1*03:02L HLA-DPA 1*01:03-B1*104:01L HLA-DQA1*05:05-B1*03:01L
  REGION 1..12: note = CONT. FROM ABOVE: HLA-DPA1*01:02-B1*04:01L HLA-DRB1*16:01L HLA-D QA1*01:03-B1*06:01L HLA-DRB1*04:08L HLA-DRB1*15:03L
NATRFASVYAWN

SEQ ID NO: 10021 - protein, 12 aa, Severe acute respiratory syndrome coronavirus 2
  REGION 1..12: note = Table B: HLA-DQA1*03:02-B1*03:03L HLA-DQA1*05:01-B1*03:01L HLA-DRB1*04:01L HLA-DRB1*13:02L HLA-DRB1*13:03L HLA-DRB1*01:03L HLA-DRB1*04:02L HLA-DRB1*04:04L HLA-DRB1*04:05L HLA-DQA1*01:02-B1*06:02L HLA-DRB1*01:02L HLA-DRB4*03:01NL
  REGION 1..12: note = CONT. FROM ABOVE: HLA-DRB1*08:04L HLA-DRB1*08:77L HLA-DPA1*01:03 -B1*03:01L HLA-DPA1*03:01-B1*04:02L HLA-DRB1*14:01L HLA-DRB1*11: 03L HLA-DRB1*11:04L HLA-DRB5*01:01L HLA-DQA1*01-B1*05L HLA-DQA1* 05:05-B1*03:19L HLA-DQA1*05:01-B1*02:01L HLA-DRB1*04:10L
  REGION 1..12: note = CONT. FROM ABOVE: HLA-DRB1*12:01L HLA-DRB1*12:02L HLA-DPA1*03:01 -B1*105:01L HLA-DQA1*03:01-B1*03:02L HLA-DRB1*14:54L HLA-DQA1*05 :05-B1*03:01L HLA-DRB1*10:01L HLA-DRB1*16:01L HLA-DQA1*01:03-B1* 06:01L HLA-DRB1*04:08L HLA-DRB1*08:03L HLA-DQA1*02:01-B1*03:03L
  REGION 1..12: note = CONT. FROM ABOVE: HLA-DRB1*15:03L
VADYSVLYNSAS

SEQ ID NO: 10022 - protein, 13 aa, Severe acute respiratory syndrome coronavirus 2
  REGION 1..13: note = Table B: HLA-DQA1*03:02-B1*03:03L HLA-DQA1*05:01-B1*03:01L HLA-DRB1*13:02L HLA-DRB1*13:03L HLA-DRB1*08:04L HLA-DPA1*01:03-B1*03:01L HLA-DRB1*11:04L HLA-DQA1*02:01-B1*03:03L
DYSVLYNSASFST

SEQ ID NO: 10023 - protein, 11 aa, Severe acute respiratory syndrome coronavirus 2
  REGION 1..11: note = Table B: HLA-DQA1*03:02-B1*03:03L HLA-DQA1*05:01-B1*03:01L HLA-DRB1*13:03L HLA-DRB1*01:02L HLA-DPA1*01:03-B1*03:01L HLA-DPA1*03:01-B1*04:02L HLA-DRB1*03:01L HLA-DRB1*14:01L HLA-DRB1*11:03L HLA-DRB1*14:02L HLA-DRB1*11:01L
  REGION 1..11: note = CONT. FROM ABOVE: HLA-DQA1*01-B1*05L HLA-DQA1*05:05-B1*03:19L HL A-DQA1*05:01-B1*02:01L HLA-DRB4*01:01L HLA-DPA1*01:03-B1*04:01L HLA-DQA1*05:05-B1*03:116L HLA-DPA1*01:03-B1*04:02L HLA-DRB1*12:0 1L HLA-DQA1*03:01-B1*03:02L HLA-DPA1*01:03-B1*104:01L
  REGION 1..11: note = CONT. FROM ABOVE: HLA-DQA1*05:05-B1*03:01L HLA-DPA1*01:02-B1*04: 01L HLA-DRB1*10:01L
VLYNSASFSTF

SEQ ID NO: 10024 - protein, 10 aa, Severe acute respiratory syndrome coronavirus 2
  REGION 1..10: note = Table B: HLA-DQA1*03:02-B1*03:03L HLA-DQA1*05:01-B1*03:01L HLA-DRB1*04:03L HLA-DRB1*13:02L HLA-DRB1*13:03L HLA-DRB1*01:03L HLA-DRB1*04:02L HLA-DQA1*01:02-B1*06:02L HLA-DRB1*01:02L HLA-DRB4*03:01NL HLA-DRB3*02:01L HLA-DPA1*01:03-B1*03:01L
  REGION 1..10: note = CONT. FROM ABOVE: HLA-DPA1*03:01-B1*04:02L HLA-DRB1*14:01L HLA-D RB1*08:01L HLA-DQA1*01-B1*05L HLA-DQA1*05:05-B1*03:19L HLA-DQA1* 05:01-B1*02:01L HLA-DPA1*01:03-B1*04:01L HLA-DPA1*01:03-B1*04:02 L HLA-DRB1*12:01L HLA-DPA1*03:01-B1*105:01M
  REGION 1..10: note = CONT. FROM ABOVE: HLA-DQA1*03:01-B1*03:02L HLA-DPA1*01:03-B1*02: 01L HLA-DQA1*05:05-B1*03:01L HLA-DRB1*14:17L HLA-DPA1*01:02-B1*0 4:01M HLA-DRB1*16:01L HLA-DQA1*01:03-B1*06:01M HLA-DRB1*04:08L H LA-DQA1*02:01-B1*03:03L HLA-DRB1*15:03L
YNSASFSTFK

SEQ ID NO: 10025 - protein, 13 aa, Severe acute respiratory syndrome coronavirus 2
  REGION 1..13: note = Table B: HLA-DQA1*03:02-B1*03:03L HLA-DRB1*04:01L HLA-DPA1*01:03-B1*03:01L HLA-DPA1*03:01-B1*04:02L HLA-DRB1*11:03L HLA-DQA1*05:05-B1*03:19L HLA-DPA1*01:03-B1*04:01L HLA-DPA1*01:03-B1*04:02L
  REGION 1..13: note = CONT. FROM ABOVE: HLA-DQA1*05:05-B1*03:01L HLA-DRB1*07:01L
FSTFKCYGVSPTK

SEQ ID NO: 10026 - protein, 10 aa, Severe acute respiratory syndrome coronavirus 2
  REGION 1..10: note = Table B: HLA-DQA1*03:02-B1*03:03L HLA-DQA1*05:01-B1*03:01L HLA-DRB1*04:03L HLA-DRB1*13:03L HLA-DRB1*01:03L HLA-DRB1*04:02L HLA-DRB1*04:05L HLA-DQA1*01:02-B1*06:02L HLA-DRB1*01:02L HLA-DRB4*03:01NL HLA-DRB1*14:01L HLA-DQA1*01-B1*05L
  REGION 1..10: note = CONT. FROM ABOVE: HLA-DQA1*05:05-B1*03:19L HLA-DQA1*05:01-B1*02: 01L HLA-DRB1*12:01L HLA-DPA1*03:01-B1*105:01L HLA-DQA1*03:01-B1* 03:02L HLA-DQA1*05:05-B1*03:01L HLA-DRB1*14:17L HLA-DPA1*01:02-B 1*04:01L HLA-DRB1*16:01L HLA-DQA1*01:03-B1*06:01L
  REGION 1..10: note = CONT. FROM ABOVE: HLA-DQA1*02:01-B1*03:03L HLA-DRB1*15:03L
YGVSPTKLND

SEQ ID NO: 10027 - protein, 10 aa, Severe acute respiratory syndrome coronavirus 2
  REGION 1..10: note = Table B: HLA-DQA1*03:02-B1*03:03L HLA-DQA1*05:01-B1*03:01L HLA-DRB1*04:03L HLA-DRB1*13:03L HLA-DRB1*04:02L HLA-DQA1*01:02-B1*06:02L HLA-DRB3*02:01L HLA-DPA1*01:03-B1*03:01L HLA-DPA1*03:01-B1*04:02L
  REGION 1..10: note = CONT. FROM ABOVE: HLA-DRB1*14:01L HLA-DRB1*14:02L HLA-DQA1*01-B1 *05L HLA-DQA1*05:05-B1*03:19L HLA-DQA1*05:01-B1*02:01L HLA-DPA1* 01:03-B1*04:01L HLA-DQA1*05:05-B1*03:116L HLA-DRB1*09:01L HLA-DP A1*01:03-B1*04:02L HLA-DRB1*12:01L HLA-DPA1*03:01-B1*105:01L
  REGION 1..10: note = CONT. FROM ABOVE: HLA-DQA1*03:01-B1*03:02L HLA-DQA1*05:05-B1*03: 01L HLA-DPA1*01:02-B1*04:01L HLA-DRB1*07:01L HLA-DRB1*16:01L HLA -DQA1*01:03-B1*06:01L HLA-DQA1*02:01-B1*03:03L HLA-DRB1*15:03L
GVSPTKLNDL

SEQ ID NO: 10028 - protein, 10 aa, Severe acute respiratory syndrome coronavirus 2
  REGION 1..10: note = Table B: HLA-DQA1*03:02-B1*03:03L
KLNDLCFTNV

SEQ ID NO: 10029 - protein, 11 aa, Severe acute respiratory syndrome coronavirus 2
  REGION 1..11: note = Table B: HLA-DQA1*03:02-B1*03:03L HLA-DQA1*05:01-B1*03:01L HLA-DRB1*04:03L HLA-DQA1*01-B1*05L HLA-DQA1*05:01-B1*02:01L
TNVYADSFVIR

SEQ ID NO: 10030 - protein, 10 aa, Severe acute respiratory syndrome coronavirus 2
  REGION 1..10: note = Table B: HLA-DQA1*03:02-B1*03:03L HLA-DQA1*01-B1*05L HLA-DQA1*05:01-B1*02:01L HLA-DQA1*03:01-B1*03:02L HLA-DQA1*01:03-B1*06:01L HLA-DQA1*02:01-B1*03:03L
ADSFVIRGDE

SEQ ID NO: 10031 - protein, 11 aa, Severe acute respiratory syndrome coronavirus 2
  REGION 1..11: note = Table B: HLA-DQA1*03:02-B1*03:03L HLA-DQA1*05:05-B1*03:19L
FVIRGDEVRQI

SEQ ID NO: 10032 - protein, 13 aa, Severe acute respiratory syndrome coronavirus 2
  REGION 1..13: note = Table B: HLA-DQA1*03:02-B1*03:03L HLA-DRB1*04:01L HLA-DRB1*13:02L HLA-DRB1*13:03L HLA-DRB1*04:04L HLA-DRB1*04:05L HLA-DRB4*03:01NL HLA-DRB1*08:04L HLA-DRB1*08:77L HLA-DRB3*02:01L HLA-DPA1*01:03-B1*03:01L HLA-DPA1*03:01-B1*04:02L
  REGION 1..13: note = CONT. FROM ABOVE: HLA-DRB1*03:01L HLA-DRB1*11:03L HLA-DRB1*11:04 L HLA-DRB1*14:02L HLA-DQA1*01:01-B1*05:01L HLA-DRB1*08:01L HLA-D RB1*11:01L HLA-DQA1*05:05-B1*03:19L HLA-DQA1*05:01-B1*02:01L HLA -DRB1*04:10L HLA-DRB1*12:01L HLA-DRB3*01:01L
  REGION 1..13: note = CONT. FROM ABOVE: HLA-DPA1*02:01-B1*13:01L HLA-DRB1*14:54L HLA-D RB1*14:17L HLA-DPA1*01:02-B1*04:01L HLA-DRB1*10:01L HLA-DRB1*04: 08L HLA-DRB1*08:03L HLA-DRB1*15:03L
VIRGDEVRQIAPG

SEQ ID NO: 10033 - protein, 11 aa, Severe acute respiratory syndrome coronavirus 2
  REGION 1..11: note = Table B: HLA-DQA1*03:02-B1*03:03L HLA-DRB1*04:03L HLA-DRB1*04:02L HLA-DQA1*05:01-B1*02:01L HLA-DQA1*03:01-B1*03:02L HLA-DRB1*14:17L HLA-DQA1*02:01-B1*03:03L
DEVRQIAPGQT

SEQ ID NO: 10034 - protein, 11 aa, Severe acute respiratory syndrome coronavirus 2
  REGION 1..11: note = Table B: HLA-DQA1*03:02-B1*03:03L HLA-DRB1*04:02L HLA-DRB1*14:17L HLA-DQA1*02:01-B1*03:03L
EVRQIAPGQTG

SEQ ID NO: 10035 - protein, 10 aa, Severe acute respiratory syndrome coronavirus 2
  REGION 1..10: note = Table B: HLA-DQA1*03:02-B1*03:03L HLA-DQA1*05:01-B1*03:01L HLA-DRB1*04:03L HLA-DRB1*13:03L HLA-DQA1*01:02-B1*06:02L HLA-DRB1*01:02L HLA-DPA1*03:01-B1*04:02L HLA-DRB1*14:01L HLA-DRB1*14:02L HLA-DQA1*01-B1*05L HLA-DQA1*05:05-B1*03:19L
  REGION 1..10: note = CONT. FROM ABOVE: HLA-DQA1*05:01-B1*02:01L HLA-DPA1*01:03-B1*04: 01L HLA-DQA1*05:05-B1*03:116L HLA-DRB1*09:01L HLA-DPA1*01:03-B1* 04:02L HLA-DRB1*12:01L HLA-DPA1*02:01-B1*13:01L HLA-DPA1*03:01-B 1*105:01L HLA-DQA1*03:01-B1*03:02L HLA-DPA1*01:03-B1*104:01L
  REGION 1..10: note = CONT. FROM ABOVE: HLA-DPA1*01:02-B1*04:01L HLA-DRB1*10:01L HLA-D RB1*16:01L HLA-DQA1*01:03-B1*06:01L HLA-DRB1*08:03L HLA-DQA1*02: 01-B1*03:03L HLA-DRB1*15:03L
QIAPGQTGKI

SEQ ID NO: 10036 - protein, 10 aa, Severe acute respiratory syndrome coronavirus 2
  REGION 1..10: note = Table B: HLA-DQA1*03:02-B1*03:03L HLA-DQA1*05:01-B1*03:01L HLA-DRB1*04:03L HLA-DRB1*13:03L HLA-DRB1*04:02L HLA-DQA1*05:05-B1*03:19L HLA-DQA1*03:01-B1*03:02L HLA-DQA1*05:05-B1*03:01L HLA-DQA1*01:03-B1*06:01L
  REGION 1..10: note = CONT. FROM ABOVE: HLA-DQA1*02:01-B1*03:03L
IAPGQTGKIA

SEQ ID NO: 10037 - protein, 12 aa, Severe acute respiratory syndrome coronavirus 2
  REGION 1..12: note = Table B: HLA-DQA1*03:02-B1*03:03L HLA-DRB1*04:03L HLA-DRB1*04:02L HLA-DRB1*01:02L HLA-DPA1*01:03-B1*03:01L HLA-DQA1*01:01-B1*05:01L HLA-DRB1*08:01L HLA-DRB1*12:01L HLA-DRB1*16:01L HLA-DRB1*04:08L
APGQTGKIADYN

SEQ ID NO: 10038 - protein, 10 aa, Severe acute respiratory syndrome coronavirus 2
  REGION 1..10: note = Table B: HLA-DQA1*03:02-B1*03:03L HLA-DRB1*04:03L HLA-DRB1*04:02L HLA-DQA1*01-B1*05L HLA-DQA1*05:01-B1*02:01L HLA-DQA1*03:01-B1*03:02L HLA-DPA1*01:02-B1*04:01L HLA-DRB1*16:01L HLA-DQA1*02:01-B1*03:03L
ADYNYKLPDD

SEQ ID NO: 10039 - protein, 10 aa, Severe acute respiratory syndrome coronavirus 2
  REGION 1..10: note = Table B: HLA-DQA1*03:02-B1*03:03L HLA-DRB1*04:03L HLA-DRB1*04:05L HLA-DQA1*01:02-B1*06:02L HLA-DQA1*01-B1*05L HLA-DQA1*05:05-B1*03:19L HLA-DQA1*05:01-B1*02:01L HLA-DPA1*02:01-B1*13:01L HLA-DPA1*03:01-B1*105:01L
  REGION 1..10: note = CONT. FROM ABOVE: HLA-DQA1*01:03-B1*06:01L HLA-DQA1*02:01-B1*03: 03L HLA-DRB1*15:03L
DYNYKLPDDF

SEQ ID NO: 10040 - protein, 11 aa, Severe acute respiratory syndrome coronavirus 2
  REGION 1..11: note = Table B: HLA-DQA1*03:02-B1*03:03L HLA-DRB1*04:02L HLA-DQA1*05:01-B1*02:01L HLA-DQA1*02:01-B1*03:03L
YNYKLPDDFTG

SEQ ID NO: 10041 - protein, 15 aa, Severe acute respiratory syndrome coronavirus 2
  REGION 1..15: note = Table B: HLA-DQA1*03:02-B1*03:03L HLA-DRB1*04:03L HLA-DRB1*01:03L HLA-DRB1*04:05L HLA-DRB1*01:02L HLA-DPA1*01:03-B1*03:01L HLA-DRB1*08:01L HLA-DQA1*05:01-B1*02:01L HLA-DPA1*01:03-B1*04:02L
  REGION 1..15: note = CONT. FROM ABOVE: HLA-DRB1*12:01L HLA-DPA1*02:01-B1*13:01L HLA-D QA1*03:01-B1*03:02L HLA-DPA1*01:03-B1*104:01L HLA-DRB1*16:01L HL A-DRB1*04:08L HLA-DRB1*15:03L
LPDDFTGCVIAWNSN

SEQ ID NO: 10042 - protein, 13 aa, Severe acute respiratory syndrome coronavirus 2
  REGION 1..13: note = Table B: HLA-DQA1*03:02-B1*03:03L
DFTGCVIAWNSNN

SEQ ID NO: 10043 - protein, 10 aa, Severe acute respiratory syndrome coronavirus 2
  REGION 1..10: note = Table B: HLA-DQA1*03:02-B1*03:03L HLA-DRB1*04:03L HLA-DRB1*04:02L HLA-DRB1*04:05L HLA-DQA1*01:02-B1*06:02L HLA-DRB1*01:02L HLA-DRB4*03:01NL HLA-DPA1*03:01-B1*04:02L HLA-DQA1*01-B1*05L HLA-DQA1*05:01-B1*02:01L HLA-DRB1*04:10L
  REGION 1..10: note = CONT. FROM ABOVE: HLA-DRB1*12:01L HLA-DPA1*03:01-B1*105:01L HLA- DQA1*03:01-B1*03:02L HLA-DRB1*14:17L HLA-DRB1*16:01L HLA-DQA1*01 :03-B1*06:01L HLA-DQA1*02:01-B1*03:03L HLA-DRB1*15:03L
VIAWNSNNLD

SEQ ID NO: 10044 - protein, 11 aa, Severe acute respiratory syndrome coronavirus 2
  REGION 1..11: note = Table B: HLA-DQA1*03:02-B1*03:03L HLA-DQA1*05:01-B1*03:01L HLA-DRB1*04:01L HLA-DRB1*13:02L HLA-DRB1*13:03L HLA-DRB1*01:03L HLA-DRB1*04:04L HLA-DQA1*01:02-B1*06:02L HLA-DRB1*01:02L HLA-DRB4*03:01NL HLA-DRB1*08:04L HLA-DRB1*08:77L HLA-DRB1*14:01L
  REGION 1..11: note = CONT. FROM ABOVE: HLA-DRB1*11:03L HLA-DRB1*11:04L HLA-DRB1*08:01 L HLA-DQA1*05:01-B1*02:01L HLA-DRB1*12:01L HLA-DRB1*12:02L HLA-D PA1*03:01-B1*105:01L HLA-DRB1*14:54L HLA-DQA1*05:05-B1*03:01L HL A-DRB1*10:01L HLA-DRB1*16:01L HLA-DQA1*01:03-B1*06:01L
  REGION 1..11: note = CONT. FROM ABOVE: HLA-DRB1*04:08L HLA-DRB1*08:03L HLA-DQA1*02:01 -B1*03:03L HLA-DRB1*15:03L
IAWNSNNLDSK

SEQ ID NO: 10045 - protein, 12 aa, Severe acute respiratory syndrome coronavirus 2
  REGION 1..12: note = Table B: HLA-DQA1*03:02-B1*03:03L HLA-DQA1*05:01-B1*03:01L HLA-DQA1*05:01-B1*02:01L HLA-DQA1*01:03-B1*06:01L
NSNNLDSKVGGN

SEQ ID NO: 10046 - protein, 10 aa, Severe acute respiratory syndrome coronavirus 2
  REGION 1..10: note = Table B: HLA-DQA1*03:02-B1*03:03L HLA-DQA1*05:01-B1*03:01L HLA-DRB1*04:01L HLA-DRB1*04:03L HLA-DRB1*13:02L HLA-DRB1*13:03M HLA-DRB1*01:03M HLA-DRB1*04:02L HLA-DRB1*04:05L HLA-DQA1*01:02-B1*06:02M HLA-DRB1*01:01L HLA-DRB4*03:01NL
  REGION 1..10: note = CONT. FROM ABOVE: HLA-DRB1*08:77M HLA-DPA1*01:03-B1*03:01M HLA-D PA1*03:01-B1*04:02L HLA-DRB1*03:01M HLA-DRB1*14:01L HLA-DRB1*11: 02M HLA-DRB1*11:03M HLA-DRB1*11:04L HLA-DRB1*14:02M HLA-DRB1*11: 01L HLA-DRB5*01:01L HLA-DQA1*01-B1*05M HLA-DQA1*05:05-B1*03:19H
  REGION 1..10: note = CONT. FROM ABOVE: HLA-DQA1*05:01-B1*02:01H HLA-DRB4*01:01M HLA-D PA1*01:03-B1*04:01M HLA-DQA1*05:05-B1*03:116L HLA-DPA1*01:03-B1* 04:02M HLA-DRB1*12:01M HLA-DPA1*02:01-B1*13:01L HLA-DPA1*03:01-B 1*105:01L HLA-DQA1*03:01-B1*03:02L HLA-DRB1*14:54L
  REGION 1..10: note = CONT. FROM ABOVE: HLA-DPA1*01:03-B1*104:01M HLA-DQA1*05:05-B1*03 :01L HLA-DRB1*14:17L HLA-DPA1*01:02-B1*04:01L HLA-DRB1*10:01M HL A-DRB1*16:01M HLA-DQA1*01:03-B1*06:01L HLA-DRB1*08:02L HLA-DQA1* 02:01-B1*03:03L HLA-DRB1*15:03L
NLDSKVGGNY

SEQ ID NO: 10047 - protein, 10 aa, Severe acute respiratory syndrome coronavirus 2
  REGION 1..10: note = Table B: HLA-DQA1*03:02-B1*03:03L HLA-DQA1*05:01-B1*03:01L HLA-DRB1*04:03L HLA-DRB1*13:03L HLA-DRB1*04:02L HLA-DQA1*01-B1*05L HLA-DQA1*05:05-B1*03:19L HLA-DQA1*05:01-B1*02:01L HLA-DQA1*03:01-B1*03:02L
  REGION 1..10: note = CONT. FROM ABOVE: HLA-DRB1*14:17L HLA-DPA1*01:02-B1*04:01L HLA-D RB1*16:01L HLA-DQA1*01:03-B1*06:01L HLA-DQA1*02:01-B1*03:03L
LDSKVGGNYN

SEQ ID NO: 10048 - protein, 10 aa, Severe acute respiratory syndrome coronavirus 2
  REGION 1..10: note = Table B: HLA-DQA1*03:02-B1*03:03L HLA-DQA1*05:01-B1*03:01L HLA-DRB1*04:03L HLA-DRB1*13:02L HLA-DRB1*13:03M HLA-DRB1*01:03L HLA-DQA1*01:02-B1*06:02M HLA-DRB4*03:01NL HLA-DRB1*08:77L HLA-DPA1*01:03-B1*03:01L HLA-DPA1*03:01-B1*04:02L
  REGION 1..10: note = CONT. FROM ABOVE: HLA-DRB1*03:01L HLA-DRB1*14:01L HLA-DRB1*14:02 L HLA-DRB1*11:01L HLA-DRB5*01:01L HLA-DQA1*01-B1*05L HLA-DQA1*05 :05-B1*03:19M HLA-DQA1*05:01-B1*02:01M HLA-DRB4*01:01L HLA-DPA1* 01:03-B1*04:01M HLA-DQA1*05:05-B1*03:116L
  REGION 1..10: note = CONT. FROM ABOVE: HLA-DPA1*01:03-B1*04:02L HLA-DRB1*12:01L HLA-D PA1*02:01-B1*13:01L HLA-DPA1*03:01-B1*105:01M HLA-DPA1*01:03-B1* 104:01L HLA-DQA1*05:05-B1*03:01L HLA-DPA1*01:02-B1*04:01L HLA-DR B1*10:01L HLA-DRB1*16:01L HLA-DQA1*01:03-B1*06:01L
  REGION 1..10: note = CONT. FROM ABOVE: HLA-DRB1*08:02L HLA-DQA1*02:01-B1*03:03L HLA-D RB1*15:03L
DSKVGGNYNY

SEQ ID NO: 10049 - protein, 10 aa, Severe acute respiratory syndrome coronavirus 2
  REGION 1..10: note = Table B: HLA-DQA1*03:02-B1*03:03L HLA-DQA1*05:05-B1*03:19L HLA-DQA1*01:03-B1*06:01L
PFERDISTEI

SEQ ID NO: 10050 - protein, 10 aa, Severe acute respiratory syndrome coronavirus 2
  REGION 1..10: note = Table B: HLA-DQA1*03:02-B1*03:03L
RDISTEIYQA

SEQ ID NO: 10051 - protein, 13 aa, Severe acute respiratory syndrome coronavirus 2
  REGION 1..13: note = Table B: HLA-DQA1*03:02-B1*03:03L HLA-DQA1*05:01-B1*03:01L HLA-DRB1*04:03L HLA-DQA1*01:02-B1*06:02L HLA-DQA1*01-B1*05L HLA-DQA1*05:05-B1*03:19L HLA-DQA1*05:01-B1*02:01L HLA-DPA1*03:01-B1*105:01L HLA-DQA1*05:05-B1*03:01L
  REGION 1..13: note = CONT. FROM ABOVE: HLA-DQA1*02:01-B1*03:03L
DISTEIYQAGSTP

SEQ ID NO: 10052 - protein, 11 aa, Severe acute respiratory syndrome coronavirus 2
  REGION 1..11: note = Table B: HLA-DQA1*03:02-B1*03:03L HLA-DQA1*05:01-B1*03:01L HLA-DRB1*04:03L HLA-DRB1*04:02L HLA-DQA1*05:05-B1*03:19L HLA-DQA1*03:01-B1*03:02L HLA-DQA1*05:05-B1*03:01L HLA-DQA1*02:01-B1*03:03L
EIYQAGSTPCN

SEQ ID NO: 10053 - protein, 12 aa, Severe acute respiratory syndrome coronavirus 2
  REGION 1..12: note = Table B: HLA-DQA1*03:02-B1*03:03L HLA-DQA1*05:01-B1*03:01L HLA-DQA1*01:02-B1*06:02L HLA-DQA1*05:05-B1*03:19L HLA-DQA1*05:05-B1*03:01L HLA-DQA1*01:03-B1*06:01L HLA-DQA1*02:01-B1*03:03L
YQAGSTPCNGVE

SEQ ID NO: 10054 - protein, 14 aa, Severe acute respiratory syndrome coronavirus 2
  REGION 1..14: note = Table B: HLA-DQA1*03:02-B1*03:03L HLA-DPA1*03:01-B1*105:01L HLA-DQA1*02:01-B1*03:03L
QAGSTPCNGVEGFN

SEQ ID NO: 10055 - protein, 13 aa, Severe acute respiratory syndrome coronavirus 2
  REGION 1..13: note = Table B: HLA-DQA1*03:02-B1*03:03L HLA-DQA1*05:01-B1*03:01L HLA-DRB1*01:03L HLA-DRB1*04:02L HLA-DRB1*04:05L HLA-DQA1*01:02-B1*06:02L HLA-DRB4*03:01NL HLA-DQA1*05:05-B1*03:19L HLA-DQA1*05:01-B1*02:01L
  REGION 1..13: note = CONT. FROM ABOVE: HLA-DPA1*01:03-B1*04:02L HLA-DRB1*12:01L HLA-D PA1*01:03-B1*02:01L HLA-DQA1*05:05-B1*03:01L HLA-DRB1*14:17L HLA -DRB1*16:01L HLA-DQA1*01:03-B1*06:01L HLA-DRB1*04:08L
FPLQSYGFQPTNG

SEQ ID NO: 10056 - protein, 11 aa, Severe acute respiratory syndrome coronavirus 2
  REGION 1..11: note = Table B: HLA-DQA1*03:02-B1*03:03L
SYGFQPTNGVG

SEQ ID NO: 10057 - protein, 10 aa, Severe acute respiratory syndrome coronavirus 2
  REGION 1..10: note = Table B: HLA-DQA1*03:02-B1*03:03L HLA-DQA1*05:01-B1*03:01L HLA-DRB1*04:01L HLA-DRB1*04:03L HLA-DRB1*13:02L HLA-DRB1*13:03L HLA-DRB1*01:03L HLA-DRB1*04:05L HLA-DQA1*01:02-B1*06:02M HLA-DRB1*01:01L HLA-DRB4*03:01NL HLA-DRB1*08:77L
  REGION 1..10: note = CONT. FROM ABOVE: HLA-DPA1*01:03-B1*03:01L HLA-DPA1*03:01-B1*04: 02L HLA-DRB1*03:01L HLA-DRB1*14:01L HLA-DRB1*11:02L HLA-DRB1*14: 02L HLA-DRB1*11:01L HLA-DQA1*01-B1*05L HLA-DQA1*05:05-B1*03:19L HLA-DQA1*05:01-B1*02:01L HLA-DRB4*01:01L
  REGION 1..10: note = CONT. FROM ABOVE: HLA-DPA1*01:03-B1*04:01L HLA-DQA1*05:05-B1*03: 116L HLA-DPA1*01:03-B1*04:02L HLA-DRB1*12:01L HLA-DPA1*02:01-B1* 13:01L HLA-DPA1*03:01-B1*105:01L HLA-DQA1*03:01-B1*03:02L HLA-DP A1*01:03-B1*104:01L HLA-DQA1*05:05-B1*03:01L
  REGION 1..10: note = CONT. FROM ABOVE: HLA-DPA1*01:02-B1*04:01L HLA-DRB1*10:01L HLA-D RB1*16:01L HLA-DQA1*01:03-B1*06:01L HLA-DRB1*08:02L HLA-DQA1*02: 01-B1*03:03L HLA-DRB1*15:03L
GFQPTNGVGY

SEQ ID NO: 10058 - protein, 12 aa, Severe acute respiratory syndrome coronavirus 2
  REGION 1..12: note = Table B: HLA-DQA1*03:02-B1*03:03L HLA-DQA1*05:01-B1*03:01L HLA-DRB1*04:03L HLA-DPA1*01:03-B1*03:01L HLA-DRB1*12:01L HLA-DPA1*03:01-B1*105:01L HLA-DQA1*03:01-B1*03:02L HLA-DQA1*05:05-B1*03:01L HLA-DRB1*16:01L
  REGION 1..12: note = CONT. FROM ABOVE: HLA-DQA1*01:03-B1*06:01L HLA-DQA1*02:01-B1*03: 03L HLA-DRB1*15:03L
FQPTNGVGYQPY

SEQ ID NO: 10059 - protein, 11 aa, Severe acute respiratory syndrome coronavirus 2
  REGION 1..11: note = Table B: HLA-DQA1*03:02-B1*03:03L HLA-DQA1*05:01-B1*03:01L HLA-DRB1*04:03L HLA-DRB1*01:03L HLA-DRB1*12:01L HLA-DPA1*03:01-B1*105:01L HLA-DQA1*05:05-B1*03:01L HLA-DPA1*01:02-B1*04:01L HLA-DQA1*01:03-B1*06:01L
  REGION 1..11: note = CONT. FROM ABOVE: HLA-DQA1*02:01-B1*03:03L
PTNGVGYQPYR

SEQ ID NO: 10060 - protein, 10 aa, Severe acute respiratory syndrome coronavirus 2
  REGION 1..10: note = Table B: HLA-DQA1*03:02-B1*03:03L HLA-DQA1*01-B1*05L HLA-DPA1*02:01-B1*13:01L HLA-DQA1*03:01-B1*03:02L HLA-DPA1*01:02-B1*04:01L HLA-DRB1*16:01L HLA-DQA1*01:03-B1*06:01L HLA-DQA1*02:01-B1*03:03L
  REGION 1..10: note = CONT. FROM ABOVE: HLA-DRB1*15:03L
VGYQPYRVVV

SEQ ID NO: 10061 - protein, 10 aa, Severe acute respiratory syndrome coronavirus 2
  REGION 1..10: note = Table B: HLA-DQA1*03:02-B1*03:03L HLA-DQA1*05:01-B1*03:01L HLA-DRB1*04:03L HLA-DRB1*04:05L HLA-DQA1*01:02-B1*06:02L HLA-DPA1*03:01-B1*04:02L HLA-DQA1*01-B1*05L HLA-DQA1*05:05-B1*03:19L HLA-DQA1*05:01-B1*02:01L
  REGION 1..10: note = CONT. FROM ABOVE: HLA-DPA1*02:01-B1*13:01L HLA-DPA1*03:01-B1*105 :01L HLA-DQA1*03:01-B1*03:02L HLA-DPA1*01:02-B1*04:01L HLA-DRB1* 16:01L HLA-DQA1*01:03-B1*06:01L HLA-DQA1*02:01-B1*03:03L HLA-DRB 1*15:03L
GYQPYRVVVL

SEQ ID NO: 10062 - protein, 10 aa, Severe acute respiratory syndrome coronavirus 2
  REGION 1..10: note = Table B: HLA-DQA1*03:02-B1*03:03L HLA-DQA1*05:01-B1*03:01L HLA-DRB1*04:03L HLA-DRB1*04:02L HLA-DRB1*04:05L HLA-DRB4*03:01NL HLA-DQA1*01-B1*05L HLA-DQA1*05:01-B1*02:01L HLA-DRB1*12:01L HLA-DPA1*03:01-B1*105:01L HLA-DQA1*03:01-B1*03:02L
  REGION 1..10: note = CONT. FROM ABOVE: HLA-DRB1*14:17L HLA-DPA1*01:02-B1*04:01L HLA-D RB1*16:01L HLA-DQA1*02:01-B1*03:03L HLA-DRB1*15:03L
SFELLHAPAT

SEQ ID NO: 10063 - protein, 10 aa, Severe acute respiratory syndrome coronavirus 2
  REGION 1..10: note = Table B: HLA-DQA1*03:02-B1*03:03M HLA-DQA1*05:01-B1*03:01L HLA-DRB1*13:02L HLA-DQA1*01:02-B1*06:02L HLA-DRB1*01:02L HLA-DRB1*08:77L HLA-DPA1*03:01-B1*04:02L HLA-DRB1*11:02M HLA-DRB1*14:02L HLA-DRB1*11:01L HLA-DQA1*05:05-B1*03:19H
  REGION 1..10: note = CONT. FROM ABOVE: HLA-DQA1*05:01-B1*02:01L HLA-DRB4*01:01L HLA-D PA1*01:03-B1*04:01L HLA-DQA1*05:05-B1*03:116L HLA-DRB1*09:01L HL A-DPA1*01:03-B1*04:02L HLA-DRB1*12:01L HLA-DPA1*02:01-B1*13:01L HLA-DPA1*03:01-B1*105:01L HLA-DQA1*03:01-B1*03:02L
  REGION 1..10: note = CONT. FROM ABOVE: HLA-DPA1*01:03-B1*104:01M HLA-DPA1*01:02-B1*04 :01L HLA-DRB1*07:01L HLA-DRB1*10:01L HLA-DRB1*16:01L HLA-DQA1*01 :03-B1*06:01L HLA-DRB1*08:03L HLA-DQA1*02:01-B1*03:03L HLA-DRB1* 15:03L
FELLHAPATV

SEQ ID NO: 10064 - protein, 10 aa, Severe acute respiratory syndrome coronavirus 2
  REGION 1..10: note = Table B: HLA-DQA1*03:02-B1*03:03L HLA-DQA1*05:05-B1*03:19L
NFNGLTGTGV

SEQ ID NO: 10065 - protein, 12 aa, Severe acute respiratory syndrome coronavirus 2
  REGION 1..12: note = Table B: HLA-DQA1*03:02-B1*03:03L HLA-DQA1*05:01-B1*03:01L HLA-DQA1*05:05-B1*03:19L HLA-DPA1*03:01-B1*105:01L HLA-DQA1*03:01-B1*03:02L
GLTGTGVLTESN

SEQ ID NO: 10066 - protein, 11 aa, Severe acute respiratory syndrome coronavirus 2
  REGION 1..11: note = Table B: HLA-DQA1*03:02-B1*03:03L HLA-DRB1*04:03L HLA-DRB1*01:03L HLA-DRB1*04:02L HLA-DQA1*01:01-B1*05:01L HLA-DQA1*05:05-B1*03:19L HLA-DRB1*12:01L HLA-DPA1*03:01-B1*105:01L
TGTGVLTESNK

SEQ ID NO: 10067 - protein, 10 aa, Severe acute respiratory syndrome coronavirus 2
  REGION 1..10: note = Table B: HLA-DQA1*03:02-B1*03:03L HLA-DQA1*05:01-B1*03:01L HLA-DRB1*04:03L HLA-DRB1*13:02L HLA-DRB1*13:03L HLA-DRB1*01:03L HLA-DQA1*01:02-B1*06:02M HLA-DRB1*08:77L HLA-DPA1*01:03-B1*03:01L HLA-DPA1*03:01-B1*04:02L
  REGION 1..10: note = CONT. FROM ABOVE: HLA-DRB1*03:01L HLA-DRB1*14:01L HLA-DRB1*14:02 L HLA-DQA1*01-B1*05L HLA-DQA1*05:05-B1*03:19L HLA-DQA1*05:01-B1* 02:01L HLA-DRB4*01:01L HLA-DPA1*01:03-B1*04:01L HLA-DQA1*05:05-B 1*03:116L HLA-DPA1*01:03-B1*04:02L HLA-DRB1*12:01L
  REGION 1..10: note = CONT. FROM ABOVE: HLA-DPA1*02:01-B1*13:01L HLA-DPA1*03:01-B1*105 :01L HLA-DQA1*03:01-B1*03:02L HLA-DPA1*01:02-B1*04:01L HLA-DRB1* 10:01L HLA-DRB1*16:01L HLA-DQA1*01:03-B1*06:01L HLA-DRB1*08:02L HLA-DQA1*02:01-B1*03:03M HLA-DRB1*15:03L
GVLTESNKKF

SEQ ID NO: 10068 - protein, 10 aa, Severe acute respiratory syndrome coronavirus 2
  REGION 1..10: note = Table B: HLA-DQA1*03:02-B1*03:03L HLA-DQA1*05:05-B1*03:19L
TESNKKFLPF

SEQ ID NO: 10069 - protein, 15 aa, Severe acute respiratory syndrome coronavirus 2
  REGION 1..15: note = Table B: HLA-DQA1*03:02-B1*03:03L HLA-DQA1*05:05-B1*03:01L
ESNKKFLPFQQFGRD

SEQ ID NO: 10070 - protein, 18 aa, Severe acute respiratory syndrome coronavirus 2
  REGION 1..18: note = Table B: HLA-DQA1*03:02-B1*03:03L
SNKKFLPFQQFGRDIADT

SEQ ID NO: 10071 - protein, 14 aa, Severe acute respiratory syndrome coronavirus 2
  REGION 1..14: note = Table B: HLA-DQA1*03:02-B1*03:03L HLA-DQA1*05:01-B1*03:01L HLA-DRB1*13:02L HLA-DPA1*03:01-B1*04:02L HLA-DRB1*14:02L HLA-DQA1*05:05-B1*03:19L HLA-DQA1*05:01-B1*02:01L HLA-DPA1*01:03-B1*04:02L HLA-DRB3*01:01L
  REGION 1..14: note = CONT. FROM ABOVE: HLA-DPA1*02:01-B1*13:01L HLA-DPA1*03:01-B1*105 :01L HLA-DQA1*05:05-B1*03:01L HLA-DQA1*01:03-B1*06:01L HLA-DRB1* 08:02L
LPFQQFGRDIADTT

SEQ ID NO: 10072 - protein, 13 aa, Severe acute respiratory syndrome coronavirus 2
  REGION 1..13: note = Table B: HLA-DQA1*03:02-B1*03:03L HLA-DQA1*02:01-B1*03:03L
QQFGRDIADTTDA

SEQ ID NO: 10073 - protein, 10 aa, Severe acute respiratory syndrome coronavirus 2
  REGION 1..10: note = Table B: HLA-DQA1*03:02-B1*03:03L HLA-DQA1*05:05-B1*03:19L
RDIADTTDAV

SEQ ID NO: 10074 - protein, 11 aa, Severe acute respiratory syndrome coronavirus 2
  REGION 1..11: note = Table B: HLA-DQA1*03:02-B1*03:03L HLA-DRB1*04:03L HLA-DQA1*01-B1*05L HLA-DQA1*05:01-B1*02:01L HLA-DQA1*03:01-B1*03:02L HLA-DRB1*16:01L HLA-DQA1*01:03-B1*06:01L HLA-DQA1*02:01-B1*03:03L
IADTTDAVRDP

SEQ ID NO: 10075 - protein, 10 aa, Severe acute respiratory syndrome coronavirus 2
  REGION 1..10: note = Table B: HLA-DQA1*03:02-B1*03:03L HLA-DQA1*05:01-B1*03:01L HLA-DRB1*04:03L HLA-DRB1*04:02L HLA-DRB4*03:01NL HLA-DQA1*01:01-B1*05:01L HLA-DQA1*01-B1*05L HLA-DQA1*05:01-B1*02:01L HLA-DQA1*03:01-B1*03:02L
  REGION 1..10: note = CONT. FROM ABOVE: HLA-DQA1*05:05-B1*03:01L HLA-DRB1*14:17L HLA-D RB1*16:01L HLA-DQA1*01:03-B1*06:01L HLA-DQA1*02:01-B1*03:03L
DTTDAVRDPQ

SEQ ID NO: 10076 - protein, 10 aa, Severe acute respiratory syndrome coronavirus 2
  REGION 1..10: note = Table B: HLA-DQA1*03:02-B1*03:03L HLA-DQA1*05:01-B1*03:01L HLA-DRB1*04:03L HLA-DRB1*13:03L HLA-DRB1*01:03L HLA-DRB1*04:02L HLA-DRB1*04:05L HLA-DRB4*03:01NL HLA-DRB1*14:02L HLA-DQA1*01-B1*05L HLA-DQA1*05:01-B1*02:01L HLA-DRB1*12:01L
  REGION 1..10: note = CONT. FROM ABOVE: HLA-DQA1*03:01-B1*03:02L HLA-DRB1*14:54L HLA-D RB1*14:17L HLA-DRB1*16:01L HLA-DQA1*01:03-B1*06:01L HLA-DQA1*02: 01-B1*03:03L
TTDAVRDPQT

SEQ ID NO: 10077 - protein, 10 aa, Severe acute respiratory syndrome coronavirus 2
  REGION 1..10: note = Table B: HLA-DQA1*03:02-B1*03:03M HLA-DQA1*05:01-B1*03:01L HLA-DRB1*13:02L HLA-DRB1*13:03L HLA-DRB1*04:02L HLA-DRB1*08:77L HLA-DPA1*03:01-B1*04:02L HLA-DRB1*14:01L HLA-DRB1*08:01L HLA-DQA1*01-B1*05L HLA-DQA1*05:05-B1*03:19L
  REGION 1..10: note = CONT. FROM ABOVE: HLA-DQA1*05:01-B1*02:01L HLA-DPA1*01:03-B1*04: 01L HLA-DQA1*05:05-B1*03:116L HLA-DRB1*09:01L HLA-DPA1*01:03-B1* 04:02L HLA-DQA1*03:01-B1*03:02M HLA-DPA1*01:03-B1*104:01L HLA-DP A1*01:02-B1*04:01L HLA-DRB1*10:01L HLA-DRB1*16:01L
  REGION 1..10: note = CONT. FROM ABOVE: HLA-DQA1*02:01-B1*03:03L
TDAVRDPQTL

SEQ ID NO: 10078 - protein, 10 aa, Severe acute respiratory syndrome coronavirus 2
  REGION 1..10: note = Table B: HLA-DQA1*03:02-B1*03:03L HLA-DQA1*05:01-B1*03:01L HLA-DQA1*01:02-B1*06:02L HLA-DRB1*01:02L HLA-DPA1*03:01-B1*04:02L HLA-DRB1*14:01L HLA-DQA1*05:05-B1*03:19L HLA-DQA1*05:01-B1*02:01L
  REGION 1..10: note = CONT. FROM ABOVE: HLA-DQA1*05:05-B1*03:116L HLA-DPA1*02:01-B1*13 :01L HLA-DPA1*03:01-B1*105:01L HLA-DQA1*03:01-B1*03:02L HLA-DPA1 *01:03-B1*104:01L HLA-DPA1*01:02-B1*04:01L HLA-DRB1*16:01L HLA-D QA1*01:03-B1*06:01L HLA-DQA1*02:01-B1*03:03L HLA-DRB1*15:03L
AVRDPQTLEI

SEQ ID NO: 10079 - protein, 10 aa, Severe acute respiratory syndrome coronavirus 2
  REGION 1..10: note = Table B: HLA-DQA1*03:02-B1*03:03L HLA-DQA1*03:01-B1*03:02L
VRDPQTLEIL

SEQ ID NO: 10080 - protein, 12 aa, Severe acute respiratory syndrome coronavirus 2
  REGION 1..12: note = Table B: HLA-DQA1*03:02-B1*03:03L HLA-DQA1*01-B1*05L HLA-DQA1*05:01-B1*02:01L HLA-DQA1*03:01-B1*03:02L HLA-DQA1*01:03-B1*06:01L
DPQTLEILDITP

SEQ ID NO: 10081 - protein, 10 aa, Severe acute respiratory syndrome coronavirus 2
  REGION 1..10: note = Table B: HLA-DQA1*03:02-B1*03:03L HLA-DQA1*05:01-B1*03:01L HLA-DRB1*13:03L HLA-DQA1*01:02-B1*06:02M HLA-DRB1*01:02L HLA-DPA1*03:01-B1*04:02L HLA-DRB1*14:02L HLA-DQA1*05:05-B1*03:19L HLA-DQA1*05:01-B1*02:01L
  REGION 1..10: note = CONT. FROM ABOVE: HLA-DRB4*01:01L HLA-DPA1*01:03-B1*04:01L HLA-D QA1*05:05-B1*03:116L HLA-DPA1*02:01-B1*13:01L HLA-DPA1*03:01-B1* 105:01M HLA-DQA1*01:03-B1*06:01L HLA-DQA1*02:01-B1*03:03L HLA-DR B1*15:03L
EILDITPCSF

SEQ ID NO: 10082 - protein, 15 aa, Severe acute respiratory syndrome coronavirus 2
  REGION 1..15: note = Table B: HLA-DQA1*03:02-B1*03:03L HLA-DQA1*05:01-B1*03:01L HLA-DQA1*01:02-B1*06:02L HLA-DQA1*01:03-B1*06:01L
ITPCSFGGVSVITPG

SEQ ID NO: 10083 - protein, 10 aa, Severe acute respiratory syndrome coronavirus 2
  REGION 1..10: note = Table B: HLA-DQA1*03:02-B1*03:03L HLA-DQA1*03:01-B1*03:02L HLA-DQA1*01:03-B1*06:01L HLA-DQA1*02:01-B1*03:03L
GVSVITPGTN

SEQ ID NO: 10084 - protein, 13 aa, Severe acute respiratory syndrome coronavirus 2
  REGION 1..13: note = Table B: HLA-DQA1*03:02-B1*03:03L HLA-DRB1*04:05L HLA-DRB4*03:01NL HLA-DRB1*04:10L HLA-DRB1*14:54L HLA-DQA1*05:05-B1*03:01L HLA-DQA1*02:01-B1*03:03L
VSVITPGTNTSNQ

SEQ ID NO: 10085 - protein, 12 aa, Severe acute respiratory syndrome coronavirus 2
  REGION 1..12: note = Table B: HLA-DQA1*03:02-B1*03:03L HLA-DRB4*03:01NL HLA-DQA1*02:01-B1*03:03L
VITPGTNTSNQV

SEQ ID NO: 10086 - protein, 12 aa, Severe acute respiratory syndrome coronavirus 2
  REGION 1..12: note = Table B: HLA-DQA1*03:02-B1*03:03L HLA-DRB1*04:03L HLA-DQA1*05:01-B1*02:01L HLA-DQA1*03:01-B1*03:02L HLA-DQA1*02:01-B1*03:03L
ITPGTNTSNQVA

SEQ ID NO: 10087 - protein, 13 aa, Severe acute respiratory syndrome coronavirus 2
  REGION 1..13: note = Table B: HLA-DQA1*03:02-B1*03:03L HLA-DQA1*05:01-B1*03:01L HLA-DQA1*01:02-B1*06:02L HLA-DQA1*05:05-B1*03:19L HLA-DQA1*05:01-B1*02:01L HLA-DQA1*03:01-B1*03:02L HLA-DQA1*05:05-B1*03:01L HLA-DQA1*01:03-B1*06:01L
  REGION 1..13: note = CONT. FROM ABOVE: HLA-DQA1*02:01-B1*03:03L
TPGTNTSNQVAVL

SEQ ID NO: 10088 - protein, 10 aa, Severe acute respiratory syndrome coronavirus 2
  REGION 1..10: note = Table B: HLA-DQA1*03:02-B1*03:03L HLA-DQA1*01:02-B1*06:02L HLA-DQA1*01-B1*05L HLA-DQA1*05:01-B1*02:01L HLA-DPA1*03:01-B1*105:01L HLA-DQA1*03:01-B1*03:02L HLA-DPA1*01:02-B1*04:01L HLA-DQA1*01:03-B1*06:01L
  REGION 1..10: note = CONT. FROM ABOVE: HLA-DQA1*02:01-B1*03:03L
QVAVLYQDVN

SEQ ID NO: 10089 - protein, 15 aa, Severe acute respiratory syndrome coronavirus 2
  REGION 1..15: note = Table B: HLA-DQA1*03:02-B1*03:03L HLA-DRB1*04:01L HLA-DRB1*13:03L HLA-DRB1*04:04L HLA-DRB1*08:77L HLA-DRB1*03:01L HLA-DRB1*11:03L HLA-DQA1*05:05-B1*03:19L HLA-DRB1*04:10L HLA-DRB3*01:01L HLA-DQA1*05:05-B1*03:01L HLA-DRB1*10:01L
VAVLYQDVNCTEVPV

SEQ ID NO: 10090 - protein, 12 aa, Severe acute respiratory syndrome coronavirus 2
  REGION 1..12: note = Table B: HLA-DQA1*03:02-B1*03:03L HLA-DRB1*04:03L HLA-DQA1*05:05-B1*03:19L HLA-DQA1*05:01-B1*02:01L
DVNCTEVPVAIH

SEQ ID NO: 10091 - protein, 10 aa, Severe acute respiratory syndrome coronavirus 2
  REGION 1..10: note = Table B: HLA-DQA1*03:02-B1*03:03L HLA-DQA1*05:05-B1*03:19L HLA-DQA1*03:01-B1*03:02L
TEVPVAIHAD

SEQ ID NO: 10092 - protein, 10 aa, Severe acute respiratory syndrome coronavirus 2
  REGION 1..10: note = Table B: HLA-DQA1*03:02-B1*03:03L HLA-DQA1*03:01-B1*03:02L HLA-DQA1*01:03-B1*06:01L HLA-DQA1*02:01-B1*03:03L
EVPVAIHADQ

SEQ ID NO: 10093 - protein, 10 aa, Severe acute respiratory syndrome coronavirus 2
  REGION 1..10: note = Table B: HLA-DQA1*03:02-B1*03:03L HLA-DQA1*05:01-B1*03:01L HLA-DRB1*13:03L HLA-DPA1*03:01-B1*04:02L HLA-DRB1*14:01L HLA-DQA1*01-B1*05L HLA-DQA1*05:01-B1*02:01L HLA-DQA1*03:01-B1*03:02L HLA-DPA1*01:02-B1*04:01L
VPVAIHADQL

SEQ ID NO: 10094 - protein, 10 aa, Severe acute respiratory syndrome coronavirus 2
  REGION 1..10: note = Table B: HLA-DQA1*03:02-B1*03:03L HLA-DQA1*05:01-B1*03:01L HLA-DRB1*04:03L HLA-DRB1*13:03L HLA-DRB1*01:03L HLA-DRB1*04:05L HLA-DQA1*01:02-B1*06:02M HLA-DRB1*08:77L HLA-DPA1*01:03-B1*03:01L HLA-DPA1*03:01-B1*04:02L
  REGION 1..10: note = CONT. FROM ABOVE: HLA-DRB1*03:01L HLA-DRB1*14:01L HLA-DRB1*14:02 L HLA-DQA1*01-B1*05L HLA-DQA1*05:05-B1*03:19L HLA-DQA1*05:01-B1* 02:01L HLA-DRB4*01:01L HLA-DPA1*01:03-B1*04:01L HLA-DQA1*05:05-B 1*03:116L HLA-DPA1*01:03-B1*04:02L HLA-DPA1*02:01-B1*13:01L
  REGION 1..10: note = CONT. FROM ABOVE: HLA-DPA1*03:01-B1*105:01L HLA-DQA1*03:01-B1*03 :02L HLA-DPA1*01:03-B1*104:01L HLA-DPA1*01:02-B1*04:01L HLA-DRB1 *10:01L HLA-DRB1*16:01L HLA-DQA1*01:03-B1*06:01L HLA-DRB1*08:02L HLA-DQA1*02:01-B1*03:03L HLA-DRB1*15:03L
IHADQLTPTW

SEQ ID NO: 10095 - protein, 12 aa, Severe acute respiratory syndrome coronavirus 2
  REGION 1..12: note = Table B: HLA-DQA1*03:02-B1*03:03L HLA-DQA1*05:01-B1*03:01L HLA-DRB1*04:03L HLA-DRB1*13:02L HLA-DRB1*13:03L HLA-DRB1*01:03L HLA-DRB1*04:02L HLA-DRB1*04:04L HLA-DRB1*04:05L HLA-DQA1*01:02-B1*06:02L HLA-DRB1*01:02L HLA-DRB4*03:01NL
  REGION 1..12: note = CONT. FROM ABOVE: HLA-DRB1*08:04L HLA-DRB1*08:77L HLA-DRB3*02:01 L HLA-DPA1*01:03-B1*03:01L HLA-DPA1*03:01-B1*04:02L HLA-DRB1*14: 01L HLA-DRB1*11:03L HLA-DRB1*11:04L HLA-DQA1*01:01-B1*05:01L HLA -DRB1*08:01L HLA-DRB1*11:01L HLA-DQA1*01-B1*05L
  REGION 1..12: note = CONT. FROM ABOVE: HLA-DQA1*05:05-B1*03:19L HLA-DQA1*05:01-B1*02: 01L HLA-DRB1*04:10L HLA-DRB1*09:01L HLA-DPA1*01:03-B1*04:02L HLA -DRB1*12:01L HLA-DRB1*12:02L HLA-DPA1*02:01-B1*13:01L HLA-DPA1*0 3:01-B1*105:01L HLA-DQA1*03:01-B1*03:02L HLA-DRB1*14:54L
  REGION 1..12: note = CONT. FROM ABOVE: HLA-DQA1*05:05-B1*03:01L HLA-DRB1*14:17L HLA-D PA1*01:02-B1*04:01L HLA-DRB1*10:01L HLA-DRB1*16:01L HLA-DQA1*01: 03-B1*06:01L HLA-DRB1*04:08L HLA-DRB1*08:03L HLA-DQA1*02:01-B1*0 3:03L HLA-DRB1*15:03L
TPTWRVYSTGSN

SEQ ID NO: 10096 - protein, 10 aa, Severe acute respiratory syndrome coronavirus 2
  REGION 1..10: note = Table B: HLA-DQA1*03:02-B1*03:03L HLA-DQA1*05:01-B1*03:01L HLA-DRB1*04:01L HLA-DRB1*04:03L HLA-DRB1*13:02L HLA-DRB1*13:03M HLA-DRB1*01:03M HLA-DRB1*04:02L HLA-DRB1*04:05L HLA-DQA1*01:02-B1*06:02M HLA-DRB1*01:01L HLA-DRB1*01:02L
  REGION 1..10: note = CONT. FROM ABOVE: HLA-DRB4*03:01NL HLA-DRB1*08:77M HLA-DRB3*02:0 1L HLA-DPA1*01:03-B1*03:01L HLA-DPA1*03:01-B1*04:02L HLA-DRB1*03 :01L HLA-DRB1*14:01L HLA-DRB1*11:03L HLA-DRB1*11:04L HLA-DRB1*14 :02M HLA-DQA1*01:01-B1*05:01L HLA-DRB1*08:01L HLA-DRB1*11:01L
  REGION 1..10: note = CONT. FROM ABOVE: HLA-DRB5*01:01L HLA-DQA1*01-B1*05L HLA-DQA1*05 :05-B1*03:19L HLA-DQA1*05:01-B1*02:01L HLA-DRB1*13:01L HLA-DRB4* 01:01L HLA-DPA1*01:03-B1*04:01M HLA-DQA1*05:05-B1*03:116L HLA-DR B1*09:01L HLA-DPA1*01:03-B1*04:02M HLA-DRB1*12:01L
  REGION 1..10: note = CONT. FROM ABOVE: HLA-DPA1*02:01-B1*13:01M HLA-DPA1*03:01-B1*105 :01M HLA-DQA1*03:01-B1*03:02L HLA-DPA1*01:03-B1*104:01L HLA-DQA1 *05:05-B1*03:01L HLA-DRB1*14:17L HLA-DPA1*01:02-B1*04:01L HLA-DR B1*07:01L HLA-DRB1*10:01L HLA-DRB1*16:01L
  REGION 1..10: note = CONT. FROM ABOVE: HLA-DQA1*01:03-B1*06:01M HLA-DRB1*04:08L HLA -DRB1*08:02L HLA-DRB1*08:03L HLA-DQA1*02:01-B1*03:03M HLA-DRB1 *15:03L
RVYSTGSNVF

SEQ ID NO: 10097 - protein, 11 aa, Severe acute respiratory syndrome coronavirus 2
  REGION 1..11: note = Table B: HLA-DQA1*03:02-B1*03:03L HLA-DRB1*04:03L HLA-DRB1*08:04L
YSTGSNVFQTR

SEQ ID NO: 10098 - protein, 10 aa, Severe acute respiratory syndrome coronavirus 2
  REGION 1..10: note = Table B: HLA-DQA1*03:02-B1*03:03L HLA-DQA1*05:01-B1*03:01L HLA-DRB1*04:03L HLA-DRB1*04:02L HLA-DQA1*03:01-B1*03:02L HLA-DQA1*01:03-B1*06:01L HLA-DQA1*02:01-B1*03:03L
GSNVFQTRAG

SEQ ID NO: 10099 - protein, 14 aa, Severe acute respiratory syndrome coronavirus 2
  REGION 1..14: note = Table B: HLA-DQA1*03:02-B1*03:03L HLA-DRB1*04:03L HLA-DRB1*01:03L HLA-DRB1*04:04L HLA-DRB1*08:01L HLA-DRB1*11:01L HLA-DRB1*16:01L HLA-DRB1*15:03L
VFQTRAGCLIGAEH

SEQ ID NO: 10100 - protein, 15 aa, Severe acute respiratory syndrome coronavirus 2
  REGION 1..15: note = Table B: HLA-DQA1*03:02-B1*03:03L HLA-DRB1*15:03L
FQTRAGCLIGAEHVN

SEQ ID NO: 10101 - protein, 11 aa, Severe acute respiratory syndrome coronavirus 2
  REGION 1..11: note = Table B: HLA-DQA1*03:02-B1*03:03L HLA-DRB1*04:01L HLA-DRB1*04:02L HLA-DRB1*04:04L HLA-DRB1*04:05L HLA-DRB1*01:02L HLA-DRB1*11:04L HLA-DQA1*01:01-B1*05:01L HLA-DRB1*04:10L HLA-DRB1*14:54L HLA-DQA1*05:05-B1*03:01L HLA-DRB1*14:17L
  REGION 1..11: note = CONT. FROM ABOVE: HLA-DRB1*04:08L
IGAEHVNNSYE

SEQ ID NO: 10102 - protein, 12 aa, Severe acute respiratory syndrome coronavirus 2
  REGION 1..12: note = Table B: HLA-DQA1*03:02-B1*03:03L HLA-DQA1*05:01-B1*03:01L HLA-DRB1*04:03L HLA-DRB1*01:03L HLA-DRB1*04:02L HLA-DRB1*04:05L HLA-DRB1*01:02L HLA-DRB4*03:01NL HLA-DRB1*14:01L HLA-DQA1*01-B1*05L HLA-DQA1*05:05-B1*03:19L
  REGION 1..12: note = CONT. FROM ABOVE: HLA-DQA1*05:01-B1*02:01L HLA-DRB1*04:10L HLA-D RB1*12:01L HLA-DPA1*03:01-B1*105:01L HLA-DQA1*03:01-B1*03:02L HL A-DQA1*05:05-B1*03:01L HLA-DRB1*14:17L HLA-DRB1*16:01L HLA-DRB1* 04:08L HLA-DQA1*02:01-B1*03:03L HLA-DRB1*15:03L
NSYECDIPIGAG

SEQ ID NO: 10103 - protein, 11 aa, Severe acute respiratory syndrome coronavirus 2
  REGION 1..11: note = Table B: HLA-DQA1*03:02-B1*03:03L HLA-DQA1*05:05-B1*03:19L HLA-DPA1*01:03-B1*104:01L
YECDIPIGAGI

SEQ ID NO: 10104 - protein, 12 aa, Severe acute respiratory syndrome coronavirus 2
  REGION 1..12: note = Table B: HLA-DQA1*03:02-B1*03:03L HLA-DQA1*03:01-B1*03:02L HLA-DQA1*05:05-B1*03:01L HLA-DQA1*01:03-B1*06:01L
IPIGAGICASYQ

SEQ ID NO: 10105 - protein, 11 aa, Severe acute respiratory syndrome coronavirus 2
  REGION 1..11: note = Table B: HLA-DQA1*03:02-B1*03:03L HLA-DRB1*04:04L HLA-DRB1*01:02L HLA-DRB1*08:77L HLA-DRB3*02:01L HLA-DRB1*14:01L HLA-DRB1*14:02L HLA-DRB1*11:01L HLA-DQA1*05:01-B1*02:01L
ASYQTQTNSPR

SEQ ID NO: 10106 - protein, 15 aa, Severe acute respiratory syndrome coronavirus 2
  REGION 1..15: note = Table B: HLA-DQA1*03:02-B1*03:03L HLA-DRB1*04:03L HLA-DRB1*13:03L HLA-DRB1*01:01L HLA-DRB1*03:01L HLA-DRB1*14:01L HLA-DQA1*01:01-B1*05:01L HLA-DRB1*11:01L HLA-DQA1*05:05-B1*03:19L HLA-DRB1*04:10L HLA-DRB3*01:01L
  REGION 1..15: note = CONT. FROM ABOVE: HLA-DPA1*03:01-B1*105:01L HLA-DQA1*05:05-B1*03 :01L
SPRRARSVASQSIIA

SEQ ID NO: 10107 - protein, 10 aa, Severe acute respiratory syndrome coronavirus 2
  REGION 1..10: note = Table B: HLA-DQA1*03:02-B1*03:03L HLA-DQA1*05:01-B1*03:01L HLA-DRB1*04:01L HLA-DRB1*04:03L HLA-DRB1*13:02L HLA-DRB1*13:03M HLA-DRB1*01:03L HLA-DQA1*01:02-B1*06:02M HLA-DRB1*01:01L HLA-DRB4*03:01NL HLA-DRB1*08:77L HLA-DPA1*01:03-B1*03:01L
  REGION 1..10: note = CONT. FROM ABOVE: HLA-DPA1*03:01-B1*04:02L HLA-DRB1*03:01L HLA-D RB1*14:01L HLA-DRB1*14:02L HLA-DRB1*11:01L HLA-DRB5*01:01L HLA-D QA1*01-B1*05L HLA-DQA1*05:05-B1*03:19L HLA-DQA1*05:01-B1*02:01L HLA-DRB4*01:01L HLA-DPA1*01:03-B1*04:01M
  REGION 1..10: note = CONT. FROM ABOVE: HLA-DQA1*05:05-B1*03:116L HLA-DPA1*01:03-B1*04 :02L HLA-DRB1*12:01L HLA-DPA1*02:01-B1*13:01L HLA-DPA1*03:01-B1* 105:01M HLA-DPA1*01:03-B1*104:01L HLA-DQA1*05:05-B1*03:01L HLA-D RB1*14:17L HLA-DPA1*01:02-B1*04:01L HLA-DRB1*10:01L
  REGION 1..10: note = CONT. FROM ABOVE: HLA-DRB1*16:01L HLA-DQA1*01:03-B1*06:01L HLA-D RB1*08:02L HLA-DQA1*02:01-B1*03:03L HLA-DRB1*15:03L
SVASQSIIAY

SEQ ID NO: 10108 - protein, 10 aa, Severe acute respiratory syndrome coronavirus 2
  REGION 1..10: note = Table B: HLA-DQA1*03:02-B1*03:03L
ASQSIIAYTM

SEQ ID NO: 10109 - protein, 12 aa, Severe acute respiratory syndrome coronavirus 2
  REGION 1..12: note = Table B: HLA-DQA1*03:02-B1*03:03L HLA-DQA1*05:01-B1*03:01L HLA-DRB1*01:03L HLA-DRB1*04:04L HLA-DQA1*01:02-B1*06:02L HLA-DRB1*01:02L HLA-DPA1*01:03-B1*03:01L HLA-DRB1*14:01L HLA-DQA1*01-B1*05L HLA-DQA1*05:05-B1*03:19L
  REGION 1..12: note = CONT. FROM ABOVE: HLA-DQA1*05:01-B1*02:01L HLA-DRB1*12:01L HLA-D PA1*03:01-B1*105:01L HLA-DRB1*14:54L HLA-DQA1*05:05-B1*03:01L HL A-DRB1*10:01L HLA-DRB1*16:01L HLA-DQA1*01:03-B1*06:01L HLA-DRB1* 04:08L HLA-DRB1*15:03L
IIAYTMSLGAEN

SEQ ID NO: 10110 - protein, 11 aa, Severe acute respiratory syndrome coronavirus 2
  REGION 1..11: note = Table B: HLA-DQA1*03:02-B1*03:03L HLA-DQA1*05:05-B1*03:19L
YTMSLGAENSV

SEQ ID NO: 10111 - protein, 12 aa, Severe acute respiratory syndrome coronavirus 2
  REGION 1..12: note = Table B: HLA-DQA1*03:02-B1*03:03L HLA-DRB1*04:03L HLA-DRB1*12:01L HLA-DPA1*02:01-B1*13:01L HLA-DQA1*03:01-B1*03:02L HLA-DQA1*05:05-B1*03:01L HLA-DQA1*01:03-B1*06:01L
TMSLGAENSVAY

SEQ ID NO: 10112 - protein, 12 aa, Severe acute respiratory syndrome coronavirus 2
  REGION 1..12: note = Table B: HLA-DQA1*03:02-B1*03:03L HLA-DQA1*05:01-B1*03:01L HLA-DQA1*05:05-B1*03:19L HLA-DQA1*03:01-B1*03:02L HLA-DQA1*05:05-B1*03:01L HLA-DQA1*01:03-B1*06:01L HLA-DQA1*02:01-B1*03:03L
LGAENSVAYSNN

SEQ ID NO: 10113 - protein, 12 aa, Severe acute respiratory syndrome coronavirus 2
  REGION 1..12: note = Table B: HLA-DQA1*03:02-B1*03:03L HLA-DRB1*04:02L HLA-DRB1*04:05L HLA-DRB4*03:01NL HLA-DRB1*14:01L HLA-DQA1*01-B1*05L HLA-DQA1*05:01-B1*02:01L HLA-DRB1*04:10L HLA-DRB1*12:01L HLA-DRB1*12:02L HLA-DQA1*03:01-B1*03:02L
  REGION 1..12: note = CONT. FROM ABOVE: HLA-DRB1*14:54L HLA-DRB1*16:01L HLA-DQA1*02:01 -B1*03:03L
ENSVAYSNNSIA

SEQ ID NO: 10114 - protein, 14 aa, Severe acute respiratory syndrome coronavirus 2
  REGION 1..14: note = Table B: HLA-DQA1*03:02-B1*03:03L HLA-DQA1*05:01-B1*03:01L HLA-DRB1*14:04L HLA-DRB1*04:01L HLA-DRB1*13:02L HLA-DRB1*13:03L HLA-DRB1*01:03L HLA-DRB1*04:04L HLA-DQA1*01:02-B1*06:02L HLA-DRB1*01:01L HLA-DRB1*01:02L HLA-DRB1*08:04L HLA-DRB1*08:77L
  REGION 1..14: note = CONT. FROM ABOVE: HLA-DRB3*02:01L HLA-DPA1*01:03-B1*03:01L HLA-D RB1*14:01L HLA-DRB1*11:03L HLA-DRB1*11:04L HLA-DRB1*14:02L HLA-D RB1*11:01L HLA-DRB5*01:01L HLA-DQA1*05:05-B1*03:19L HLA-DRB4*01: 01L HLA-DRB1*09:01L HLA-DRB1*12:02L HLA-DPA1*03:01-B1*105:01L
  REGION 1..14: note = CONT. FROM ABOVE: HLA-DQA1*05:05-B1*03:01L HLA-DRB1*07:01L HLA-D RB1*10:01L HLA-DRB1*08:03L HLA-DRB1*15:01L HLA-DRB1*15:03L
NSVAYSNNSIAIPT

SEQ ID NO: 10115 - protein, 10 aa, Severe acute respiratory syndrome coronavirus 2
  REGION 1..10: note = Table B: HLA-DQA1*03:02-B1*03:03L HLA-DQA1*05:01-B1*02:01L HLA-DQA1*03:01-B1*03:02L HLA-DQA1*01:03-B1*06:01L HLA-DQA1*02:01-B1*03:03L
SNNSIAIPTN

SEQ ID NO: 10116 - protein, 11 aa, Severe acute respiratory syndrome coronavirus 2
  REGION 1..11: note = Table B: HLA-DQA1*03:02-B1*03:03L HLA-DQA1*01:02-B1*06:02L
NNSIAIPTNFT

SEQ ID NO: 10117 - protein, 10 aa, Severe acute respiratory syndrome coronavirus 2
  REGION 1..10: note = Table B: HLA-DQA1*03:02-B1*03:03L HLA-DQA1*01:02-B1*06:02L HLA-DQA1*05:05-B1*03:19L HLA-DQA1*05:05-B1*03:116L HLA-DPA1*02:01-B1*13:01L HLA-DPA1*03:01-B1*105:01L HLA-DQA1*03:01-B1*03:02L HLA-DPA1*01:03-B1*104:01L
  REGION 1..10: note = CONT. FROM ABOVE: HLA-DQA1*02:01-B1*03:03L HLA-DRB1*15:03L
SIAIPTNFTI

SEQ ID NO: 10118 - protein, 16 aa, Severe acute respiratory syndrome coronavirus 2
  REGION 1..16: note = Table B: HLA-DQA1*03:02-B1*03:03L HLA-DQA1*05:01-B1*03:01L HLA-DRB1*13:03L HLA-DRB1*01:03L HLA-DRB1*04:02L HLA-DRB1*04:04L HLA-DRB1*04:05L HLA-DRB4*03:01NL HLA-DRB1*08:04L HLA-DRB1*08:77L HLA-DRB3*02:01L HLA-DPA1*01:03-B1*03:01L HLA-DRB1*11:03L
  REGION 1..16: note = CONT. FROM ABOVE: HLA-DRB1*11:04L HLA-DRB1*14:02L HLA-DQA1*01-B1 *05L HLA-DQA1*05:05-B1*03:19L HLA-DRB4*01:01L HLA-DRB1*04:10L HL A-DRB1*09:01L HLA-DPA1*01:03-B1*04:02L HLA-DRB1*12:02L HLA-DPA1* 02:01-B1*13:01L HLA-DQA1*03:01-B1*03:02L HLA-DRB1*14:54L
  REGION 1..16: note = CONT. FROM ABOVE: HLA-DPA1*01:03-B1*104:01L HLA-DRB1*14:17L HLA- DRB1*07:01L HLA-DRB1*10:01L HLA-DQA1*01:03-B1*06:01L HLA-DRB1*04 :08L HLA-DRB1*08:03L HLA-DQA1*02:01-B1*03:03L
IPTNFTISVTTEILPV

SEQ ID NO: 10119 - protein, 11 aa, Severe acute respiratory syndrome coronavirus 2
  REGION 1..11: note = Table B: HLA-DQA1*03:02-B1*03:03L HLA-DQA1*05:01-B1*03:01L HLA-DRB1*04:03L HLA-DQA1*01:02-B1*06:02L HLA-DQA1*01-B1*05L HLA-DQA1*05:05-B1*03:19L HLA-DQA1*05:01-B1*02:01L HLA-DRB1*12:01L HLA-DPA1*03:01-B1*105:01L
  REGION 1..11: note = CONT. FROM ABOVE: HLA-DQA1*05:05-B1*03:01L HLA-DPA1*01:02-B1*04: 01L HLA-DRB1*16:01L
ISVTTEILPVS

SEQ ID NO: 10120 - protein, 10 aa, Severe acute respiratory syndrome coronavirus 2
  REGION 1..10: note = Table B: HLA-DQA1*03:02-B1*03:03M HLA-DQA1*05:01-B1*03:01L HLA-DRB1*13:03L HLA-DQA1*01:02-B1*06:02L HLA-DRB1*01:02L HLA-DPA1*03:01-B1*04:02L HLA-DRB1*14:01L HLA-DRB1*14:02L HLA-DQA1*01-B1*05L HLA-DQA1*05:05-B1*03:19L
  REGION 1..10: note = CONT. FROM ABOVE: HLA-DQA1*05:01-B1*02:01L HLA-DPA1*01:03-B1*04: 01L HLA-DQA1*05:05-B1*03:116L HLA-DRB1*09:01L HLA-DPA1*01:03-B1* 04:02L HLA-DRB1*12:01L HLA-DPA1*02:01-B1*13:01L HLA-DPA1*03:01-B 1*105:01L HLA-DQA1*03:01-B1*03:02L HLA-DQA1*05:05-B1*03:01L
  REGION 1..10: note = CONT. FROM ABOVE: HLA-DPA1*01:02-B1*04:01L HLA-DRB1*16:01L HLA-D QA1*01:03-B1*06:01L HLA-DQA1*02:01-B1*03:03L HLA-DRB1*15:03L
VTTEILPVSM

SEQ ID NO: 10121 - protein, 10 aa, Severe acute respiratory syndrome coronavirus 2
  REGION 1..10: note = Table B: HLA-DQA1*03:02-B1*03:03L HLA-DRB1*13:02L HLA-DRB1*13:03L HLA-DRB4*03:01NL HLA-DPA1*01:03-B1*04:02L HLA-DRB1*12:01L HLA-DQA1*03:01-B1*03:02L HLA-DQA1*05:05-B1*03:01L HLA-DRB1*14:17L
  REGION 1..10: note = CONT. FROM ABOVE: HLA-DQA1*02:01-B1*03:03L
TEILPVSMTK

SEQ ID NO: 10122 - protein, 10 aa, Severe acute respiratory syndrome coronavirus 2
  REGION 1..10: note = Table B: HLA-DQA1*03:02-B1*03:03L HLA-DQA1*05:01-B1*03:01L HLA-DRB1*04:03L HLA-DQA1*01:02-B1*06:02L HLA-DQA1*05:01-B1*02:01L HLA-DPA1*03:01-B1*105:01L HLA-DQA1*03:01-B1*03:02L HLA-DRB1*14:17L
  REGION 1..10: note = CONT. FROM ABOVE: HLA-DQA1*01:03-B1*06:01L HLA-DQA1*02:01-B1*03: 03L
EILPVSMTKT

SEQ ID NO: 10123 - protein, 10 aa, Severe acute respiratory syndrome coronavirus 2
  REGION 1..10: note = Table B: HLA-DQA1*03:02-B1*03:03L HLA-DQA1*05:01-B1*03:01L HLA-DRB1*04:03L HLA-DRB1*13:03L HLA-DRB1*04:02L HLA-DRB4*03:01NL HLA-DQA1*01-B1*05L HLA-DQA1*05:01-B1*02:01L HLA-DQA1*03:01-B1*03:02L HLA-DRB1*14:17L HLA-DRB1*16:01L
  REGION 1..10: note = CONT. FROM ABOVE: HLA-DQA1*01:03-B1*06:01L HLA-DQA1*02:01-B1*03: 03L
PVSMTKTSVD

SEQ ID NO: 10124 - protein, 10 aa, Severe acute respiratory syndrome coronavirus 2
  REGION 1..10: note = Table B: HLA-DQA1*03:02-B1*03:03L HLA-DQA1*05:05-B1*03:19L HLA-DPA1*01:03-B1*104:01L HLA-DQA1*02:01-B1*03:03L
TQLNRALTGI

SEQ ID NO: 10125 - protein, 11 aa, Severe acute respiratory syndrome coronavirus 2
  REGION 1..11: note = Table B: HLA-DQA1*03:02-B1*03:03L HLA-DQA1*05:01-B1*03:01L HLA-DRB1*04:02L HLA-DRB1*04:05L HLA-DQA1*01:02-B1*06:02L HLA-DRB4*03:01NL HLA-DPA1*01:03-B1*03:01L HLA-DQA1*01-B1*05L HLA-DQA1*05:05-B1*03:19L HLA-DQA1*05:01-B1*02:01L
  REGION 1..11: note = CONT. FROM ABOVE: HLA-DRB1*04:10L HLA-DRB1*12:01L HLA-DPA1*03:01 -B1*105:01L HLA-DRB1*14:54L HLA-DQA1*05:05-B1*03:01L HLA-DRB1*10 :01L HLA-DRB1*04:08L HLA-DRB1*15:03L
RALTGIAVEQD

SEQ ID NO: 10126 - protein, 10 aa, Severe acute respiratory syndrome coronavirus 2
  REGION 1..10: note = Table B: HLA-DQA1*03:02-B1*03:03L HLA-DQA1*05:01-B1*03:01L HLA-DRB1*04:03L HLA-DRB1*04:02L HLA-DRB1*04:05L HLA-DQA1*01:02-B1*06:02L HLA-DQA1*01:01-B1*05:01L HLA-DQA1*05:05-B1*03:19L HLA-DQA1*05:01-B1*02:01L
  REGION 1..10: note = CONT. FROM ABOVE: HLA-DRB1*04:10L HLA-DQA1*03:01-B1*03:02L HLA-D QA1*05:05-B1*03:01L HLA-DRB1*16:01L HLA-DQA1*01:03-B1*06:01L HLA -DQA1*02:01-B1*03:03L
LTGIAVEQDK

SEQ ID NO: 10127 - protein, 10 aa, Severe acute respiratory syndrome coronavirus 2
  REGION 1..10: note = Table B: HLA-DQA1*03:02-B1*03:03L HLA-DQA1*05:01-B1*03:01L HLA-DRB1*04:03L HLA-DRB1*04:02L HLA-DQA1*01:02-B1*06:02L HLA-DQA1*01:01-B1*05:01L HLA-DQA1*05:05-B1*03:19L HLA-DQA1*05:01-B1*02:01L HLA-DQA1*03:01-B1*03:02L
  REGION 1..10: note = CONT. FROM ABOVE: HLA-DQA1*05:05-B1*03:01L HLA-DRB1*14:17L HLA-D RB1*16:01L HLA-DQA1*01:03-B1*06:01L HLA-DQA1*02:01-B1*03:03L
TGIAVEQDKN

SEQ ID NO: 10128 - protein, 11 aa, Severe acute respiratory syndrome coronavirus 2
  REGION 1..11: note = Table B: HLA-DQA1*03:02-B1*03:03L HLA-DRB1*13:02L HLA-DRB1*13:03L HLA-DRB1*01:03L HLA-DRB1*04:04L HLA-DRB1*08:77L HLA-DRB1*14:01L HLA-DRB1*11:04L HLA-DRB1*12:01L HLA-DRB1*10:01L HLA-DRB1*16:01L HLA-DRB1*04:08L
IAVEQDKNTQE

SEQ ID NO: 10129 - protein, 10 aa, Severe acute respiratory syndrome coronavirus 2
  REGION 1..10: note = Table B: HLA-DQA1*03:02-B1*03:03M HLA-DQA1*05:01-B1*03:01L HLA-DRB1*13:02L HLA-DRB1*13:03L HLA-DRB1*08:77L HLA-DPA1*03:01-B1*04:02L HLA-DRB1*14:01L HLA-DRB1*11:02M HLA-DRB1*11:01L HLA-DQA1*01-B1*05L HLA-DQA1*05:05-B1*03:19H
  REGION 1..10: note = CONT. FROM ABOVE: HLA-DQA1*05:01-B1*02:01L HLA-DRB4*01:01L HLA-D PA1*01:03-B1*04:01L HLA-DQA1*05:05-B1*03:116L HLA-DRB1*09:01L HL A-DPA1*01:03-B1*04:02L HLA-DQA1*03:01-B1*03:02L HLA-DPA1*01:03-B 1*104:01M HLA-DPA1*01:02-B1*04:01L HLA-DRB1*10:01L
  REGION 1..10: note = CONT. FROM ABOVE: HLA-DRB1*16:01L HLA-DQA1*01:03-B1*06:01L HLA-D QA1*02:01-B1*03:03L HLA-DRB1*15:03L
VEQDKNTQEV

SEQ ID NO: 10130 - protein, 10 aa, Severe acute respiratory syndrome coronavirus 2
  REGION 1..10: note = Table B: HLA-DQA1*03:02-B1*03:03L HLA-DQA1*05:01-B1*03:01L HLA-DRB1*13:03L HLA-DRB1*01:03L HLA-DQA1*01:02-B1*06:02L HLA-DRB4*03:01NL HLA-DRB1*08:77L HLA-DPA1*01:03-B1*03:01L HLA-DPA1*03:01-B1*04:02L HLA-DRB1*03:01L HLA-DRB1*11:02L
  REGION 1..10: note = CONT. FROM ABOVE: HLA-DRB1*14:02L HLA-DQA1*01-B1*05L HLA-DQA1*05 :05-B1*03:19M HLA-DQA1*05:01-B1*02:01L HLA-DRB4*01:01L HLA-DPA1* 01:03-B1*04:01L HLA-DQA1*05:05-B1*03:116L HLA-DPA1*01:03-B1*04:0 2L HLA-DRB1*12:01L HLA-DPA1*03:01-B1*105:01L
  REGION 1..10: note = CONT. FROM ABOVE: HLA-DQA1*03:01-B1*03:02L HLA-DPA1*01:03-B1*104 :01L HLA-DPA1*01:02-B1*04:01L HLA-DRB1*10:01L HLA-DRB1*16:01L HL A-DRB1*08:02L HLA-DQA1*02:01-B1*03:03L HLA-DRB1*15:03L
EQDKNTQEVF

SEQ ID NO: 10131 - protein, 10 aa, Severe acute respiratory syndrome coronavirus 2
  REGION 1..10: note = Table B: HLA-DQA1*03:02-B1*03:03L HLA-DRB1*04:03L HLA-DQA1*01-B1*05L HLA-DQA1*05:01-B1*02:01L HLA-DPA1*03:01-B1*105:01L HLA-DQA1*03:01-B1*03:02L HLA-DPA1*01:02-B1*04:01L HLA-DQA1*01:03-B1*06:01L
  REGION 1..10: note = CONT. FROM ABOVE: HLA-DQA1*02:01-B1*03:03L
TQEVFAQVKQ

SEQ ID NO: 10132 - protein, 10 aa, Severe acute respiratory syndrome coronavirus 2
  REGION 1..10: note = Table B: HLA-DQA1*03:02-B1*03:03M HLA-DRB1*08:77L HLA-DRB1*11:02M HLA-DQA1*05:05-B1*03:19H HLA-DQA1*05:01-B1*02:01L HLA-DRB4*01:01L HLA-DPA1*01:03-B1*04:01L HLA-DRB1*09:01L
  REGION 1..10: note = CONT. FROM ABOVE: HLA-DQA1*03:01-B1*03:02L HLA-DPA1*01:03-B1*104 :01H HLA-DRB1*16:01L
QEVFAQVKQI

SEQ ID NO: 10133 - protein, 10 aa, Severe acute respiratory syndrome coronavirus 2
  REGION 1..10: note = Table B: HLA-DQA1*03:02-B1*03:03L HLA-DQA1*05:01-B1*03:01L HLA-DRB1*13:02L HLA-DRB1*13:03H HLA-DRB1*01:03L HLA-DQA1*01:02-B1*06:02H HLA-DRB1*01:01L HLA-DRB1*01:02L HLA-DRB4*03:01NL HLA-DRB1*08:77L HLA-DPA1*01:03-B1*03:01L
  REGION 1..10: note = CONT. FROM ABOVE: HLA-DPA1*03:01-B1*04:02L HLA-DRB1*03:01M HLA-D RB1*14:01L HLA-DRB1*11:04L HLA-DRB1*14:02L HLA-DRB1*08:01L HLA-D RB5*01:01L HLA-DQA1*01-B1*05L HLA-DQA1*05:05-B1*03:19L HLA-DRB4* 02:01NL HLA-DQA1*05:01-B1*02:01M HLA-DRB4*01:01L
  REGION 1..10: note = CONT. FROM ABOVE: HLA-DPA1*01:03-B1*04:01M HLA-DQA1*05:05-B1*03: 116L HLA-DRB1*09:01L HLA-DPA1*01:03-B1*04:02L HLA-DRB1*12:01L HL A-DPA1*02:01-B1*13:01M HLA-DPA1*03:01-B1*105:01M HLA-DQA1*05:05- B1*03:01L HLA-DPA1*01:02-B1*04:01L HLA-DRB1*10:01L
  REGION 1..10: note = CONT. FROM ABOVE: HLA-DRB1*16:01L HLA-DQA1*01:03-B1*06:01L HLA-D RB1*08:02L HLA-DQA1*02:01-B1*03:03L HLA-DRB1*15:01L HLA-DRB1*15: 03M
EVFAQVKQIY

SEQ ID NO: 10134 - protein, 14 aa, Severe acute respiratory syndrome coronavirus 2
  REGION 1..14: note = Table B: HLA-DQA1*03:02-B1*03:03L HLA-DRB1*04:01L HLA-DRB1*08:04L HLA-DRB3*02:01L HLA-DPA1*01:03-B1*03:01L HLA-DPA1*03:01-B1*04:02L HLA-DRB1*03:01L HLA-DRB1*11:03L HLA-DRB1*11:04L HLA-DQA1*05:01-B1*02:01L
  REGION 1..14: note = CONT. FROM ABOVE: HLA-DPA1*01:03-B1*04:02L HLA-DRB3*01:01L HLA-D PA1*01:03-B1*104:01L HLA-DRB1*07:01L HLA-DRB1*10:01L HLA-DRB1*08 :03L
VKQIYKTPPIKDFG

SEQ ID NO: 10135 - protein, 11 aa, Severe acute respiratory syndrome coronavirus 2
  REGION 1..11: note = Table B: HLA-DQA1*03:02-B1*03:03L HLA-DRB1*04:03L HLA-DRB1*04:02L HLA-DQA1*01-B1*05L HLA-DQA1*05:01-B1*02:01L HLA-DQA1*03:01-B1*03:02L HLA-DRB1*14:17L HLA-DQA1*02:01-B1*03:03L
TPPIKDFGGFN

SEQ ID NO: 10136 - protein, 12 aa, Severe acute respiratory syndrome coronavirus 2
  REGION 1..12: note = Table B: HLA-DQA1*03:02-B1*03:03L HLA-DQA1*01:02-B1*06:02L HLA-DPA1*03:01-B1*04:02L HLA-DQA1*01-B1*05L HLA-DQA1*05:01-B1*02:01L HLA-DPA1*01:03-B1*04:01L HLA-DPA1*01:03-B1*04:02L HLA-DQA1*03:01-B1*03:02L
  REGION 1..12: note = CONT. FROM ABOVE: HLA-DPA1*01:02-B1*04:01L HLA-DQA1*01:03-B1*06: 01L
GGFNFSQILPDP

SEQ ID NO: 10137 - protein, 11 aa, Severe acute respiratory syndrome coronavirus 2
  REGION 1..11: note = Table B: HLA-DQA1*03:02-B1*03:03L HLA-DQA1*05:01-B1*03:01L HLA-DRB1*04:03L HLA-DRB1*01:03L HLA-DQA1*01:02-B1*06:02L HLA-DPA1*03:01-B1*04:02L HLA-DQA1*01-B1*05L HLA-DQA1*05:05-B1*03:19L HLA-DQA1*05:01-B1*02:01L
  REGION 1..11: note = CONT. FROM ABOVE: HLA-DPA1*01:03-B1*04:01L HLA-DPA1*01:03-B1*04: 02L HLA-DPA1*03:01-B1*105:01L HLA-DQA1*03:01-B1*03:02L HLA-DQA1* 05:05-B1*03:01L HLA-DPA1*01:02-B1*04:01L HLA-DRB1*16:01L HLA-DQA 1*01:03-B1*06:01L HLA-DRB1*04:08L HLA-DQA1*02:01-B1*03:03L
FNFSQILPDPS

SEQ ID NO: 10138 - protein, 10 aa, Severe acute respiratory syndrome coronavirus 2
  REGION 1..10: note = Table B: HLA-DQA1*03:02-B1*03:03L HLA-DRB1*04:03L HLA-DQA1*01-B1*05L HLA-DQA1*03:01-B1*03:02L HLA-DQA1*02:01-B1*03:03L
SQILPDPSKP

SEQ ID NO: 10139 - protein, 10 aa, Severe acute respiratory syndrome coronavirus 2
  REGION 1..10: note = Table B: HLA-DQA1*03:02-B1*03:03L HLA-DQA1*05:01-B1*03:01L HLA-DRB1*04:03L HLA-DRB1*13:02L HLA-DRB1*13:03L HLA-DRB1*01:03L HLA-DRB1*04:02L HLA-DRB1*04:05L HLA-DRB1*01:02L HLA-DRB4*03:01NL HLA-DRB1*08:77L HLA-DRB1*14:01L HLA-DRB1*11:03L HLA-DRB1*11:04L
  REGION 1..10: note = CONT. FROM ABOVE: HLA-DQA1*01-B1*05L HLA-DQA1*05:01-B1*02:01L HL A-DRB1*04:10L HLA-DRB1*12:01L HLA-DRB1*12:02L HLA-DQA1*03:01-B1* 03:02L HLA-DRB1*14:54L HLA-DRB1*14:17L HLA-DRB1*10:01L HLA-DRB1* 16:01L HLA-DRB1*04:08L HLA-DQA1*02:01-B1*03:03L HLA-DRB1*15:03L
QILPDPSKPS

SEQ ID NO: 10140 - protein, 10 aa, Severe acute respiratory syndrome coronavirus 2
  REGION 1..10: note = Table B: HLA-DQA1*03:02-B1*03:03L HLA-DQA1*05:01-B1*03:01L HLA-DRB1*04:01L HLA-DRB1*04:03M HLA-DRB1*13:02L HLA-DRB1*13:03L HLA-DRB1*01:03L HLA-DRB1*04:02M HLA-DRB1*04:04L HLA-DRB1*04:05L HLA-DQA1*01:02-B1*06:02L HLA-DRB1*01:01L HLA-DRB1*01:02L
  REGION 1..10: note = CONT. FROM ABOVE: HLA-DRB4*03:01NL HLA-DRB1*08:04L HLA-DRB1*08:7 7L HLA-DRB3*02:01L HLA-DPA1*01:03-B1*03:01L HLA-DRB1*03:01L HLA- DRB1*14:01L HLA-DRB1*11:03L HLA-DRB1*11:04L HLA-DRB1*14:02L HLA- DRB1*08:01L HLA-DRB1*11:01L HLA-DRB5*01:01L HLA-DQA1*01-B1*05L
  REGION 1..10: note = CONT. FROM ABOVE: HLA-DQA1*05:05-B1*03:19L HLA-DQA1*05:01-B1*02: 01L HLA-DRB1*13:01L HLA-DRB1*04:10L HLA-DPA1*01:03-B1*04:02L HLA -DRB1*12:01L HLA-DRB1*12:02L HLA-DRB3*01:01L HLA-DPA1*02:01-B1*1 3:01L HLA-DPA1*03:01-B1*105:01L HLA-DQA1*03:01-B1*03:02L
  REGION 1..10: note = CONT. FROM ABOVE: HLA-DRB1*14:54L HLA-DQA1*05:05-B1*03:01L HLA-D RB1*14:17M HLA-DPA1*01:02-B1*04:01L HLA-DRB1*07:01L HLA-DRB1*10: 01L HLA-DRB1*16:01L HLA-DRB1*04:08L HLA-DRB1*08:03L HLA-DQA1*02: 01-B1*03:03L HLA-DRB1*15:01L HLA-DRB1*15:03L
ILPDPSKPSK

SEQ ID NO: 10141 - protein, 19 aa, Severe acute respiratory syndrome coronavirus 2
  REGION 1..19: note = Table B: HLA-DQA1*03:02-B1*03:03L HLA-DQA1*05:01-B1*03:01L HLA-DRB1*04:03L HLA-DRB1*08:04L HLA-DPA1*01:03-B1*03:01L HLA-DPA1*03:01-B1*04:02L HLA-DRB1*14:01L HLA-DRB1*14:02L HLA-DQA1*01:01-B1*05:01L HLA-DQA1*05:01-B1*02:01L
  REGION 1..19: note = CONT. FROM ABOVE: HLA-DRB3*01:01L HLA-DPA1*01:03-B1*104:01L HLA- DRB1*07:01L HLA-DQA1*01:03-B1*06:01L
PDPSKPSKRSFIEDLLFNK

SEQ ID NO: 10142 - protein, 10 aa, Severe acute respiratory syndrome coronavirus 2
  REGION 1..10: note = Table B: HLA-DQA1*03:02-B1*03:03M HLA-DQA1*05:01-B1*03:01L HLA-DQA1*01:02-B1*06:02L HLA-DRB1*01:02L HLA-DPA1*03:01-B1*04:02L HLA-DRB1*11:02L HLA-DRB1*14:02L HLA-DQA1*05:05-B1*03:19M HLA-DQA1*05:01-B1*02:01L
  REGION 1..10: note = CONT. FROM ABOVE: HLA-DPA1*01:03-B1*04:01L HLA-DQA1*05:05-B1*03: 116L HLA-DRB1*09:01L HLA-DPA1*01:03-B1*04:02L HLA-DPA1*02:01-B1* 13:01L HLA-DPA1*03:01-B1*105:01L HLA-DQA1*03:01-B1*03:02L HLA-DP A1*01:03-B1*104:01L HLA-DPA1*01:02-B1*04:01L HLA-DRB1*16:01L
  REGION 1..10: note = CONT. FROM ABOVE: HLA-DQA1*01:03-B1*06:01L HLA-DRB1*08:03L HLA-D QA1*02:01-B1*03:03L HLA-DRB1*15:03L
FIEDLLFNKV

SEQ ID NO: 10143 - protein, 10 aa, Severe acute respiratory syndrome coronavirus 2
  REGION 1..10: note = Table B: HLA-DQA1*03:02-B1*03:03L HLA-DRB1*01:03L HLA-DPA1*03:01-B1*04:02L HLA-DQA1*01-B1*05L HLA-DQA1*05:01-B1*02:01L HLA-DPA1*01:03-B1*04:01L HLA-DPA1*01:03-B1*04:02L HLA-DRB1*12:01L
  REGION 1..10: note = CONT. FROM ABOVE: HLA-DPA1*03:01-B1*105:01L HLA-DPA1*01:02-B1*04 :01L HLA-DRB1*16:01L HLA-DQA1*01:03-B1*06:01L HLA-DRB1*04:08L HL A-DQA1*02:01-B1*03:03L HLA-DRB1*15:03L
IEDLLFNKVT

SEQ ID NO: 10144 - protein, 10 aa, Severe acute respiratory syndrome coronavirus 2
  REGION 1..10: note = Table B: HLA-DQA1*03:02-B1*03:03L HLA-DQA1*05:05-B1*03:19L HLA-DQA1*03:01-B1*03:02L HLA-DPA1*01:03-B1*104:01L
EDLLFNKVTL

SEQ ID NO: 10145 - protein, 12 aa, Severe acute respiratory syndrome coronavirus 2
  REGION 1..12: note = Table B: HLA-DQA1*03:02-B1*03:03L HLA-DQA1*05:01-B1*03:01L HLA-DRB1*13:02L HLA-DRB1*13:03L HLA-DRB1*01:03L HLA-DRB1*04:02L HLA-DRB1*04:04L HLA-DRB1*04:05L HLA-DQA1*01:02-B1*06:02L HLA-DRB1*01:02L HLA-DRB4*03:01NL HLA-DRB1*08:04L
  REGION 1..12: note = CONT. FROM ABOVE: HLA-DPA1*01:03-B1*03:01L HLA-DPA1*03:01-B1*04: 02L HLA-DRB1*11:04L HLA-DRB1*08:01L HLA-DQA1*01-B1*05L HLA-DQA1* 05:01-B1*02:01L HLA-DRB1*04:10L HLA-DRB1*12:01L HLA-DPA1*02:01-B 1*13:01L HLA-DPA1*03:01-B1*105:01L HLA-DRB1*14:54L
  REGION 1..12: note = CONT. FROM ABOVE: HLA-DQA1*05:05-B1*03:01L HLA-DRB1*14:17L HLA-D PA1*01:02-B1*04:01L HLA-DRB1*16:01L HLA-DQA1*01:03-B1*06:01L HLA -DRB1*04:08L HLA-DRB1*08:03L HLA-DQA1*02:01-B1*03:03L HLA-DRB1*1 5:03L
LLFNKVTLADAG

SEQ ID NO: 10146 - protein, 10 aa, Severe acute respiratory syndrome coronavirus 2
  REGION 1..10: note = Table B: HLA-DQA1*03:02-B1*03:03L HLA-DQA1*05:01-B1*03:01L HLA-DRB1*04:03L HLA-DRB1*13:02L HLA-DRB1*13:03L HLA-DRB1*01:03L HLA-DRB1*04:02L HLA-DRB1*04:05L HLA-DQA1*01:02-B1*06:02L HLA-DRB1*01:02L HLA-DRB4*03:01NL HLA-DRB1*14:01L
  REGION 1..10: note = CONT. FROM ABOVE: HLA-DQA1*05:05-B1*03:19L HLA-DQA1*05:01-B1*02: 01L HLA-DRB1*12:01L HLA-DRB1*12:02L HLA-DPA1*03:01-B1*105:01L HL A-DQA1*03:01-B1*03:02L HLA-DRB1*14:54L HLA-DQA1*05:05-B1*03:01L HLA-DRB1*14:17L HLA-DRB1*16:01L HLA-DQA1*01:03-B1*06:01L
  REGION 1..10: note = CONT. FROM ABOVE: HLA-DQA1*02:01-B1*03:03L
VTLADAGFIK

SEQ ID NO: 10147 - protein, 10 aa, Severe acute respiratory syndrome coronavirus 2
  REGION 1..10: note = Table B: HLA-DQA1*03:02-B1*03:03L HLA-DQA1*05:01-B1*03:01L HLA-DRB1*04:03L HLA-DRB1*13:02L HLA-DRB1*13:03L HLA-DRB1*04:02L HLA-DRB4*03:01NL HLA-DRB1*14:01L HLA-DQA1*05:01-B1*02:01L HLA-DRB1*12:01L HLA-DPA1*03:01-B1*105:01L
  REGION 1..10: note = CONT. FROM ABOVE: HLA-DQA1*03:01-B1*03:02L HLA-DQA1*05:05-B1*03: 01L HLA-DRB1*14:17L HLA-DRB1*16:01L HLA-DQA1*02:01-B1*03:03L
TLADAGFIKQ

SEQ ID NO: 10148 - protein, 12 aa, Severe acute respiratory syndrome coronavirus 2
  REGION 1..12: note = Table B: HLA-DQA1*03:02-B1*03:03L
LADAGFIKQYGD

SEQ ID NO: 10149 - protein, 13 aa, Severe acute respiratory syndrome coronavirus 2
  REGION 1..13: note = Table B: HLA-DQA1*03:02-B1*03:03L HLA-DRB1*13:02L HLA-DRB1*01:03L HLA-DPA1*03:01-B1*04:02L HLA-DQA1*05:05-B1*03:19L HLA-DPA1*01:03-B1*104:01L HLA-DQA1*05:05-B1*03:01L
FIKQYGDCLGDIA

SEQ ID NO: 10150 - protein, 13 aa, Severe acute respiratory syndrome coronavirus 2
  REGION 1..13: note = Table B: HLA-DQA1*03:02-B1*03:03L HLA-DRB1*04:03L HLA-DRB1*04:05L HLA-DRB1*01:02L HLA-DPA1*01:03-B1*03:01L HLA-DQA1*01-B1*05L HLA-DQA1*05:01-B1*02:01L HLA-DRB1*12:01L HLA-DPA1*02:01-B1*13:01L HLA-DPA1*03:01-B1*105:01L
  REGION 1..13: note = CONT. FROM ABOVE: HLA-DPA1*01:03-B1*104:01L HLA-DQA1*05:05-B1*03 :01L HLA-DQA1*01:03-B1*06:01L HLA-DQA1*02:01-B1*03:03L
YGDCLGDIAARDL

SEQ ID NO: 10151 - protein, 10 aa, Severe acute respiratory syndrome coronavirus 2
  REGION 1..10: note = Table B: HLA-DQA1*03:02-B1*03:03L HLA-DQA1*03:01-B1*03:02L HLA-DQA1*02:01-B1*03:03L HLA-DRB1*15:03L
VLPPLLTDEM

SEQ ID NO: 10152 - protein, 14 aa, Severe acute respiratory syndrome coronavirus 2
  REGION 1..14: note = Table B: HLA-DQA1*03:02-B1*03:03L HLA-DRB1*13:02L HLA-DRB1*04:02L HLA-DRB1*04:05L HLA-DRB1*01:02L HLA-DRB1*08:04L HLA-DRB1*14:01L HLA-DRB3*01:01L HLA-DQA1*05:05-B1*03:01L HLA-DPA1*01:02-B1*04:01L HLA-DRB1*04:08L
  REGION 1..14: note = CONT. FROM ABOVE: HLA-DQA1*02:01-B1*03:03L
LPPLLTDEMIAQYT

SEQ ID NO: 10153 - protein, 10 aa, Severe acute respiratory syndrome coronavirus 2
  REGION 1..10: note = Table B: HLA-DQA1*03:02-B1*03:03L
DEMIAQYTSA

SEQ ID NO: 10154 - protein, 10 aa, Severe acute respiratory syndrome coronavirus 2
  REGION 1..10: note = Table B: HLA-DQA1*03:02-B1*03:03L
EMIAQYTSAL

SEQ ID NO: 10155 - protein, 12 aa, Severe acute respiratory syndrome coronavirus 2
  REGION 1..12: note = Table B: HLA-DQA1*03:02-B1*03:03L HLA-DQA1*05:01-B1*03:01L HLA-DRB1*01:03L HLA-DQA1*01:02-B1*06:02L HLA-DRB3*02:01L HLA-DPA1*03:01-B1*04:02L HLA-DQA1*05:05-B1*03:19L HLA-DPA1*03:01-B1*105:01L HLA-DQA1*05:05-B1*03:01L
IAQYTSALLAGT

SEQ ID NO: 10156 - protein, 12 aa, Severe acute respiratory syndrome coronavirus 2
  REGION 1..12: note = Table B: HLA-DQA1*03:02-B1*03:03L HLA-DQA1*05:01-B1*03:01L HLA-DQA1*01:02-B1*06:02L HLA-DQA1*05:05-B1*03:19L HLA-DPA1*03:01-B1*105:01L HLA-DQA1*05:05-B1*03:01L HLA-DQA1*01:03-B1*06:01L HLA-DQA1*02:01-B1*03:03L
AQYTSALLAGTI

SEQ ID NO: 10157 - protein, 11 aa, Severe acute respiratory syndrome coronavirus 2
  REGION 1..11: note = Table B: HLA-DQA1*03:02-B1*03:03L HLA-DQA1*05:01-B1*03:01L HLA-DQA1*01:02-B1*06:02L HLA-DQA1*05:05-B1*03:19L HLA-DPA1*03:01-B1*105:01L HLA-DQA1*03:01-B1*03:02L HLA-DQA1*05:05-B1*03:01L HLA-DQA1*02:01-B1*03:03L
YTSALLAGTIT

SEQ ID NO: 10158 - protein, 12 aa, Severe acute respiratory syndrome coronavirus 2
  REGION 1..12: note = Table B: HLA-DQA1*03:02-B1*03:03L
ALLAGTITSGWT

SEQ ID NO: 10159 - protein, 12 aa, Severe acute respiratory syndrome coronavirus 2
  REGION 1..12: note = Table B: HLA-DQA1*03:02-B1*03:03L HLA-DQA1*05:01-B1*03:01L HLA-DRB1*04:03L HLA-DRB1*04:02L HLA-DQA1*05:05-B1*03:19L HLA-DPA1*03:01-B1*105:01L HLA-DQA1*03:01-B1*03:02L HLA-DQA1*05:05-B1*03:01L HLA-DRB1*14:17L
  REGION 1..12: note = CONT. FROM ABOVE: HLA-DQA1*02:01-B1*03:03L
GTITSGWTFGAG

SEQ ID NO: 10160 - protein, 12 aa, Severe acute respiratory syndrome coronavirus 2
  REGION 1..12: note = Table B: HLA-DQA1*03:02-B1*03:03L HLA-DQA1*05:01-B1*03:01L HLA-DQA1*01:02-B1*06:02L HLA-DQA1*05:05-B1*03:19L HLA-DQA1*03:01-B1*03:02L HLA-DQA1*05:05-B1*03:01L HLA-DQA1*02:01-B1*03:03L
ITSGWTFGAGAA

SEQ ID NO: 10161 - protein, 12 aa, Severe acute respiratory syndrome coronavirus 2
  REGION 1..12: note = Table B: HLA-DQA1*03:02-B1*03:03L HLA-DQA1*05:01-B1*03:01L HLA-DQA1*05:05-B1*03:19L HLA-DQA1*05:01-B1*02:01L HLA-DQA1*03:01-B1*03:02L HLA-DQA1*05:05-B1*03:01L HLA-DQA1*02:01-B1*03:03L
SGWTFGAGAALQ

SEQ ID NO: 10162 - protein, 12 aa, Severe acute respiratory syndrome coronavirus 2
  REGION 1..12: note = Table B: HLA-DQA1*03:02-B1*03:03L HLA-DQA1*05:01-B1*03:01L HLA-DQA1*01:02-B1*06:02L HLA-DQA1*05:05-B1*03:19L HLA-DQA1*05:01-B1*02:01L HLA-DPA1*03:01-B1*105:01L HLA-DQA1*05:05-B1*03:01L HLA-DQA1*01:03-B1*06:01L
  REGION 1..12: note = CONT. FROM ABOVE: HLA-DQA1*02:01-B1*03:03L
WTFGAGAALQIP

SEQ ID NO: 10163 - protein, 12 aa, Severe acute respiratory syndrome coronavirus 2
  REGION 1..12: note = Table B: HLA-DQA1*03:02-B1*03:03L HLA-DQA1*05:01-B1*03:01L
TFGAGAALQIPF

SEQ ID NO: 10164 - protein, 10 aa, Severe acute respiratory syndrome coronavirus 2
  REGION 1..10: note = Table B: HLA-DQA1*03:02-B1*03:03L HLA-DQA1*05:01-B1*03:01L HLA-DQA1*05:05-B1*03:19L HLA-DQA1*03:01-B1*03:02L HLA-DQA1*05:05-B1*03:01L HLA-DQA1*01:03-B1*06:01L HLA-DQA1*02:01-B1*03:03L
AGAALQIPFA

SEQ ID NO: 10165 - protein, 10 aa, Severe acute respiratory syndrome coronavirus 2
  REGION 1..10: note = Table B: HLA-DQA1*03:02-B1*03:03L HLA-DQA1*05:05-B1*03:19L HLA-DQA1*02:01-B1*03:03L HLA-DRB1*15:03L
ALQIPFAMQM

SEQ ID NO: 10166 - protein, 10 aa, Severe acute respiratory syndrome coronavirus 2
  REGION 1..10: note = Table B: HLA-DQA1*03:02-B1*03:03L HLA-DQA1*05:05-B1*03:19L HLA-DQA1*01:03-B1*06:01L
MAYRFNGIGV

SEQ ID NO: 10167 - protein, 12 aa, Severe acute respiratory syndrome coronavirus 2
  REGION 1..12: note = Table B: HLA-DQA1*03:02-B1*03:03L HLA-DQA1*01:02-B1*06:02L HLA-DRB1*01:02L HLA-DRB1*14:01L HLA-DRB1*08:01L HLA-DQA1*05:05-B1*03:19L HLA-DRB1*12:01L HLA-DQA1*05:05-B1*03:01L HLA-DQA1*01:03-B1*06:01L
  REGION 1..12: note = CONT. FROM ABOVE: HLA-DRB1*15:03L
AYRFNGIGVTQN

SEQ ID NO: 10168 - protein, 10 aa, Severe acute respiratory syndrome coronavirus 2
  REGION 1..10: note = Table B: HLA-DQA1*03:02-B1*03:03L HLA-DQA1*05:01-B1*03:01L HLA-DQA1*05:01-B1*02:01L HLA-DQA1*03:01-B1*03:02L HLA-DQA1*01:03-B1*06:01L HLA-DQA1*02:01-B1*03:03L
NGIGVTQNVL

SEQ ID NO: 10169 - protein, 12 aa, Severe acute respiratory syndrome coronavirus 2
  REGION 1..12: note = Table B: HLA-DQA1*03:02-B1*03:03L HLA-DRB1*04:03L HLA-DQA1*03:01-B1*03:02L HLA-DQA1*05:05-B1*03:01L HLA-DRB1*14:17L HLA-DQA1*01:03-B1*06:01L
GIGVTQNVLYEN

SEQ ID NO: 10170 - protein, 11 aa, Severe acute respiratory syndrome coronavirus 2
  REGION 1..11: note = Table B: HLA-DQA1*03:02-B1*03:03L HLA-DQA1*05:01-B1*03:01L HLA-DRB1*04:03L HLA-DRB1*04:02L HLA-DQA1*01:02-B1*06:02L HLA-DRB4*03:01NL HLA-DQA1*01-B1*05L HLA-DRB1*14:17L HLA-DQA1*01:03-B1*06:01L
VTQNVLYENQK

SEQ ID NO: 10171 - protein, 11 aa, Severe acute respiratory syndrome coronavirus 2
  REGION 1..11: note = Table B: HLA-DQA1*03:02-B1*03:03L
TQNVLYENQKL

SEQ ID NO: 10172 - protein, 10 aa, Severe acute respiratory syndrome coronavirus 2
  REGION 1..10: note = Table B: HLA-DQA1*03:02-B1*03:03L HLA-DQA1*05:05-B1*03:19L HLA-DPA1*01:03-B1*104:01L
NVLYENQKLI

SEQ ID NO: 10173 - protein, 11 aa, Severe acute respiratory syndrome coronavirus 2
  REGION 1..11: note = Table B: HLA-DQA1*03:02-B1*03:03L HLA-DQA1*05:01-B1*03:01L HLA-DRB1*13:02L HLA-DRB1*13:03L HLA-DRB1*01:03L HLA-DRB1*04:05L HLA-DQA1*01:02-B1*06:02L HLA-DRB4*03:01NL HLA-DPA1*03:01-B1*04:02L HLA-DQA1*05:01-B1*02:01L
  REGION 1..11: note = CONT. FROM ABOVE: HLA-DRB1*12:01L HLA-DPA1*03:01-B1*105:01L HLA- DRB1*14:54L HLA-DRB1*14:17L HLA-DPA1*01:02-B1*04:01L HLA-DQA1*01 :03-B1*06:01L HLA-DRB1*04:08L
VLYENQKLIAN

SEQ ID NO: 10174 - protein, 10 aa, Severe acute respiratory syndrome coronavirus 2
  REGION 1..10: note = Table B: HLA-DQA1*03:02-B1*03:03L HLA-DRB1*04:03L HLA-DQA1*03:01-B1*03:02L HLA-DRB1*14:17L
YENQKLIANQ

SEQ ID NO: 10175 - protein, 10 aa, Severe acute respiratory syndrome coronavirus 2
  REGION 1..10: note = Table B: HLA-DQA1*03:02-B1*03:03L HLA-DQA1*05:01-B1*03:01L HLA-DRB1*13:03L HLA-DRB1*01:03L HLA-DQA1*01:02-B1*06:02M HLA-DRB1*08:77L HLA-DPA1*01:03-B1*03:01L HLA-DRB1*14:02L HLA-DQA1*05:05-B1*03:19L HLA-DQA1*05:01-B1*02:01L
  REGION 1..10: note = CONT. FROM ABOVE: HLA-DPA1*01:03-B1*04:01L HLA-DPA1*02:01-B1*13: 01L HLA-DPA1*03:01-B1*105:01L HLA-DQA1*01:03-B1*06:01L HLA-DQA1* 02:01-B1*03:03L HLA-DRB1*15:03L
ENQKLIANQF

SEQ ID NO: 10176 - protein, 10 aa, Severe acute respiratory syndrome coronavirus 2
  REGION 1..10: note = Table B: HLA-DQA1*03:02-B1*03:03L HLA-DQA1*05:01-B1*03:01L HLA-DRB1*04:03L HLA-DPA1*03:01-B1*04:02L HLA-DRB1*14:01L HLA-DRB1*14:02L HLA-DQA1*05:05-B1*03:19L HLA-DQA1*05:05-B1*03:116L HLA-DPA1*03:01-B1*105:01L
  REGION 1..10: note = CONT. FROM ABOVE: HLA-DQA1*03:01-B1*03:02L HLA-DPA1*01:02-B1*04: 01L HLA-DRB1*16:01L HLA-DQA1*02:01-B1*03:03L HLA-DRB1*15:03L
KLIANQFNSA

SEQ ID NO: 10177 - protein, 12 aa, Severe acute respiratory syndrome coronavirus 2
  REGION 1..12: note = Table B: HLA-DQA1*03:02-B1*03:03L HLA-DQA1*05:01-B1*03:01L HLA-DRB1*13:02L HLA-DRB1*04:04L HLA-DRB1*04:05L HLA-DRB1*01:02L HLA-DRB1*08:04L HLA-DPA1*01:03-B1*03:01L HLA-DRB1*14:01L HLA-DRB1*11:03L HLA-DRB1*11:04L HLA-DRB1*08:01L HLA-DRB1*11:01L
  REGION 1..12: note = CONT. FROM ABOVE: HLA-DQA1*05:05-B1*03:19L HLA-DRB1*04:10L HLA-D RB3*01:01L HLA-DPA1*02:01-B1*13:01L HLA-DPA1*01:03-B1*02:01L HLA -DRB1*10:01L HLA-DRB1*15:03L
LIANQFNSAIGK

SEQ ID NO: 10178 - protein, 10 aa, Severe acute respiratory syndrome coronavirus 2
  REGION 1..10: note = Table B: HLA-DQA1*03:02-B1*03:03L HLA-DQA1*05:05-B1*03:19L HLA-DPA1*03:01-B1*105:01L HLA-DQA1*03:01-B1*03:02L HLA-DPA1*01:03-B1*104:01L HLA-DRB1*16:01L HLA-DQA1*01:03-B1*06:01L HLA-DQA1*02:01-B1*03:03L
  REGION 1..10: note = CONT. FROM ABOVE: HLA-DRB1*15:03L
NQFNSAIGKI

SEQ ID NO: 10179 - protein, 10 aa, Severe acute respiratory syndrome coronavirus 2
  REGION 1..10: note = Table B: HLA-DQA1*03:02-B1*03:03L HLA-DQA1*05:01-B1*03:01L HLA-DRB1*04:03L HLA-DRB1*13:03L HLA-DRB1*01:03L HLA-DRB1*04:02L HLA-DQA1*01:02-B1*06:02L HLA-DRB4*03:01NL HLA-DQA1*05:05-B1*03:19L HLA-DQA1*05:01-B1*02:01L
  REGION 1..10: note = CONT. FROM ABOVE: HLA-DRB1*12:01L HLA-DPA1*03:01-B1*105:01L HLA- DQA1*03:01-B1*03:02L HLA-DQA1*05:05-B1*03:01L HLA-DRB1*14:17L HL A-DRB1*16:01L HLA-DQA1*01:03-B1*06:01L HLA-DQA1*02:01-B1*03:03L
FNSAIGKIQD

SEQ ID NO: 10180 - protein, 10 aa, Severe acute respiratory syndrome coronavirus 2
  REGION 1..10: note = Table B: HLA-DQA1*03:02-B1*03:03L HLA-DQA1*05:01-B1*03:01L HLA-DRB1*04:03L HLA-DRB1*04:02L HLA-DQA1*03:01-B1*03:02L HLA-DQA1*05:05-B1*03:01L HLA-DRB1*14:17L HLA-DQA1*01:03-B1*06:01L HLA-DQA1*02:01-B1*03:03L
NSAIGKIQDS

SEQ ID NO: 10181 - protein, 10 aa, Severe acute respiratory syndrome coronavirus 2
  REGION 1..10: note = Table B: HLA-DQA1*03:02-B1*03:03M HLA-DQA1*05:01-B1*03:01L HLA-DRB1*04:03L HLA-DRB1*13:03L HLA-DRB1*01:03L HLA-DRB1*04:02L HLA-DRB1*04:05L HLA-DQA1*01:02-B1*06:02M HLA-DRB1*01:02L HLA-DRB4*03:01NL HLA-DRB1*08:77L HLA-DRB3*02:01L
  REGION 1..10: note = CONT. FROM ABOVE: HLA-DPA1*01:03-B1*03:01L HLA-DPA1*03:01-B1*04: 02L HLA-DRB1*14:01L HLA-DRB1*14:02L HLA-DQA1*01:01-B1*05:01L HLA -DRB1*08:01L HLA-DQA1*01-B1*05L HLA-DQA1*05:05-B1*03:19L HLA-DQA 1*05:01-B1*02:01L HLA-DPA1*01:03-B1*04:01L
  REGION 1..10: note = CONT. FROM ABOVE: HLA-DQA1*05:05-B1*03:116L HLA-DRB1*09:01L HLA- DPA1*01:03-B1*04:02L HLA-DRB1*12:01L HLA-DPA1*02:01-B1*13:01L HL A-DPA1*03:01-B1*105:01L HLA-DQA1*03:01-B1*03:02L HLA-DPA1*01:03- B1*104:01L HLA-DQA1*05:05-B1*03:01L HLA-DRB1*14:17L
  REGION 1..10: note = CONT. FROM ABOVE: HLA-DPA1*01:02-B1*04:01L HLA-DRB1*07:01L HLA-D RB1*16:01L HLA-DQA1*01:03-B1*06:01L HLA-DRB1*08:03L HLA-DQA1*02: 01-B1*03:03L HLA-DRB1*15:03L
SAIGKIQDSL

SEQ ID NO: 10182 - protein, 10 aa, Severe acute respiratory syndrome coronavirus 2
  REGION 1..10: note = Table B: HLA-DQA1*03:02-B1*03:03L HLA-DRB1*14:17L
KIQDSLSSTA

SEQ ID NO: 10183 - protein, 12 aa, Severe acute respiratory syndrome coronavirus 2
  REGION 1..12: note = Table B: HLA-DQA1*03:02-B1*03:03L HLA-DQA1*03:01-B1*03:02L
IQDSLSSTASAL

SEQ ID NO: 10184 - protein, 12 aa, Severe acute respiratory syndrome coronavirus 2
  REGION 1..12: note = Table B: HLA-DQA1*03:02-B1*03:03L HLA-DRB1*04:04L HLA-DQA1*01:02-B1*06:02L HLA-DRB1*01:02L HLA-DRB1*08:77L HLA-DPA1*01:03-B1*03:01L HLA-DRB1*14:01L HLA-DRB1*11:04L HLA-DQA1*01:01-B1*05:01L HLA-DRB5*01:01L HLA-DQA1*01-B1*05L
  REGION 1..12: note = CONT. FROM ABOVE: HLA-DQA1*05:01-B1*02:01L HLA-DRB1*04:10L HLA-D RB1*10:01L HLA-DRB1*04:08L HLA-DRB1*15:03L
DSLSSTASALGK

SEQ ID NO: 10185 - protein, 10 aa, Severe acute respiratory syndrome coronavirus 2
  REGION 1..10: note = Table B: HLA-DQA1*03:02-B1*03:03L HLA-DQA1*05:01-B1*03:01L HLA-DRB1*04:03L HLA-DQA1*01:02-B1*06:02L HLA-DQA1*05:05-B1*03:19L HLA-DQA1*05:01-B1*02:01L HLA-DPA1*03:01-B1*105:01L HLA-DQA1*03:01-B1*03:02L
  REGION 1..10: note = CONT. FROM ABOVE: HLA-DQA1*05:05-B1*03:01L HLA-DQA1*01:03-B1*06: 01L HLA-DQA1*02:01-B1*03:03L
SSTASALGKL

SEQ ID NO: 10186 - protein, 10 aa, Severe acute respiratory syndrome coronavirus 2
  REGION 1..10: note = Table B: HLA-DQA1*03:02-B1*03:03L HLA-DQA1*05:01-B1*03:01L HLA-DRB1*04:03L HLA-DRB1*04:02L HLA-DQA1*01:02-B1*06:02L HLA-DRB4*03:01NL HLA-DQA1*05:05-B1*03:19L HLA-DQA1*05:01-B1*02:01L HLA-DRB1*12:01L
  REGION 1..10: note = CONT. FROM ABOVE: HLA-DPA1*03:01-B1*105:01L HLA-DQA1*03:01-B1*03 :02L HLA-DQA1*05:05-B1*03:01L HLA-DRB1*14:17L HLA-DRB1*16:01L HL A-DQA1*01:03-B1*06:01L HLA-DQA1*02:01-B1*03:03L
STASALGKLQ

SEQ ID NO: 10187 - protein, 10 aa, Severe acute respiratory syndrome coronavirus 2
  REGION 1..10: note = Table B: HLA-DQA1*03:02-B1*03:03L HLA-DQA1*05:01-B1*03:01L HLA-DRB1*04:03L HLA-DRB1*04:02L HLA-DQA1*01:02-B1*06:02L HLA-DRB4*03:01NL HLA-DQA1*05:05-B1*03:19L HLA-DQA1*05:01-B1*02:01L HLA-DPA1*03:01-B1*105:01L
  REGION 1..10: note = CONT. FROM ABOVE: HLA-DQA1*03:01-B1*03:02L HLA-DQA1*05:05-B1*03: 01L HLA-DRB1*14:17L HLA-DQA1*01:03-B1*06:01L HLA-DQA1*02:01-B1*0 3:03L
TASALGKLQD

SEQ ID NO: 10188 - protein, 10 aa, Severe acute respiratory syndrome coronavirus 2
  REGION 1..10: note = Table B: HLA-DQA1*03:02-B1*03:03L HLA-DQA1*05:01-B1*03:01L HLA-DRB1*04:03L HLA-DQA1*01:02-B1*06:02L HLA-DQA1*05:05-B1*03:19L HLA-DQA1*05:01-B1*02:01L HLA-DQA1*03:01-B1*03:02L HLA-DQA1*05:05-B1*03:01L
  REGION 1..10: note = CONT. FROM ABOVE: HLA-DQA1*01:03-B1*06:01L HLA-DQA1*02:01-B1*03: 03L
ALGKLQDVVN

SEQ ID NO: 10189 - protein, 10 aa, Severe acute respiratory syndrome coronavirus 2
  REGION 1..10: note = Table B: HLA-DQA1*03:02-B1*03:03L HLA-DRB1*13:03L HLA-DRB1*01:03L HLA-DQA1*05:05-B1*03:19L HLA-DQA1*03:01-B1*03:02L HLA-DRB1*16:01L HLA-DQA1*02:01-B1*03:03L
KLQDVVNQNA

SEQ ID NO: 10190 - protein, 11 aa, Severe acute respiratory syndrome coronavirus 2
  REGION 1..11: note = Table B: HLA-DQA1*03:02-B1*03:03L HLA-DRB1*13:03L HLA-DRB4*03:01NL HLA-DQA1*01-B1*05L HLA-DRB1*16:01L HLA-DQA1*02:01-B1*03:03L
LQDVVNQNAQA

SEQ ID NO: 10191 - protein, 10 aa, Severe acute respiratory syndrome coronavirus 2
  REGION 1..10: note = Table B: HLA-DQA1*03:02-B1*03:03L HLA-DQA1*05:01-B1*03:01L HLA-DRB1*13:03L HLA-DQA1*01:02-B1*06:02M HLA-DRB1*01:02L HLA-DRB4*03:01NL HLA-DPA1*01:03-B1*03:01L HLA-DPA1*03:01-B1*04:02L HLA-DRB1*14:01L HLA-DRB1*14:02L
  REGION 1..10: note = CONT. FROM ABOVE: HLA-DRB1*08:01L HLA-DRB5*01:01L HLA-DQA1*01-B1 *05L HLA-DQA1*05:01-B1*02:01L HLA-DPA1*01:03-B1*04:01L HLA-DQA1* 05:05-B1*03:116L HLA-DRB1*09:01L HLA-DRB1*12:01L HLA-DPA1*02:01- B1*13:01L HLA-DPA1*03:01-B1*105:01M HLA-DQA1*03:01-B1*03:02L
  REGION 1..10: note = CONT. FROM ABOVE: HLA-DQA1*05:05-B1*03:01L HLA-DPA1*01:02-B1*04: 01L HLA-DQA1*02:01-B1*03:03L HLA-DRB1*15:03L
DVVNQNAQAL

SEQ ID NO: 10192 - protein, 10 aa, Severe acute respiratory syndrome coronavirus 2
  REGION 1..10: note = Table B: HLA-DQA1*03:02-B1*03:03L HLA-DQA1*05:01-B1*03:01L HLA-DQA1*01:02-B1*06:02L HLA-DPA1*03:01-B1*04:02L HLA-DRB1*14:01L HLA-DQA1*05:05-B1*03:19L HLA-DQA1*05:01-B1*02:01L HLA-DQA1*05:05-B1*03:116L
  REGION 1..10: note = CONT. FROM ABOVE: HLA-DPA1*03:01-B1*105:01L HLA-DQA1*03:01-B1*03 :02L HLA-DPA1*01:02-B1*04:01L HLA-DQA1*01:03-B1*06:01L HLA-DQA1* 02:01-B1*03:03L HLA-DRB1*15:03L
NQNAQALNTL

SEQ ID NO: 10193 - protein, 11 aa, Severe acute respiratory syndrome coronavirus 2
  REGION 1..11: note = Table B: HLA-DQA1*03:02-B1*03:03L HLA-DQA1*01:02-B1*06:02L
NAQALNTLVKQ

SEQ ID NO: 10194 - protein, 10 aa, Severe acute respiratory syndrome coronavirus 2
  REGION 1..10: note = Table B: HLA-DQA1*03:02-B1*03:03L HLA-DQA1*05:01-B1*03:01L HLA-DQA1*03:01-B1*03:02L HLA-DQA1*02:01-B1*03:03L
QALNTLVKQL

SEQ ID NO: 10195 - protein, 12 aa, Severe acute respiratory syndrome coronavirus 2
  REGION 1..12: note = Table B: HLA-DQA1*03:02-B1*03:03L HLA-DRB1*14:04L HLA-DRB1*13:02L HLA-DRB1*13:03L HLA-DRB1*01:03L HLA-DRB1*04:04L HLA-DRB1*08:04L HLA-DRB1*08:77L HLA-DRB3*02:01L HLA-DPA1*01:03-B1*03:01L HLA-DPA1*03:01-B1*04:02L
  REGION 1..12: note = CONT. FROM ABOVE: HLA-DRB1*11:03L HLA-DRB1*11:04L HLA-DRB1*08:01 L HLA-DQA1*01-B1*05L HLA-DQA1*05:05-B1*03:19L HLA-DRB1*12:02L HL A-DPA1*02:01-B1*13:01L HLA-DPA1*03:01-B1*105:01L HLA-DQA1*05:05- B1*03:01L HLA-DPA1*01:02-B1*04:01L HLA-DRB1*10:01L
  REGION 1..12: note = CONT. FROM ABOVE: HLA-DRB1*04:08L HLA-DRB1*08:03L
NTLVKQLSSNFG

SEQ ID NO: 10196 - protein, 12 aa, Severe acute respiratory syndrome coronavirus 2
  REGION 1..12: note = Table B: HLA-DQA1*03:02-B1*03:03L HLA-DQA1*05:01-B1*03:01L HLA-DRB1*13:02L HLA-DRB1*13:03L HLA-DRB1*01:03L HLA-DRB1*04:02L HLA-DRB1*04:04L HLA-DRB1*04:05L HLA-DQA1*01:02-B1*06:02L HLA-DRB1*01:02L HLA-DRB4*03:01NL HLA-DPA1*01:03-B1*03:01L
  REGION 1..12: note = CONT. FROM ABOVE: HLA-DRB1*14:01L HLA-DRB1*11:04L HLA-DQA1*01-B1 *05L HLA-DQA1*05:05-B1*03:19L HLA-DQA1*05:01-B1*02:01L HLA-DRB1* 04:10L HLA-DRB1*12:01L HLA-DRB1*12:02L HLA-DPA1*03:01-B1*105:01L HLA-DQA1*03:01-B1*03:02L HLA-DRB1*14:54L
  REGION 1..12: note = CONT. FROM ABOVE: HLA-DQA1*05:05-B1*03:01L HLA-DRB1*14:17L HLA-D RB1*10:01L HLA-DRB1*16:01L HLA-DQA1*01:03-B1*06:01L HLA-DRB1*04: 08L HLA-DQA1*02:01-B1*03:03L HLA-DRB1*15:03L
VKQLSSNFGAIS

SEQ ID NO: 10197 - protein, 10 aa, Severe acute respiratory syndrome coronavirus 2
  REGION 1..10: note = Table B: HLA-DQA1*03:02-B1*03:03L
SSNFGAISSV

SEQ ID NO: 10198 - protein, 10 aa, Severe acute respiratory syndrome coronavirus 2
  REGION 1..10: note = Table B: HLA-DQA1*03:02-B1*03:03L
SNFGAISSVL

SEQ ID NO: 10199 - protein, 10 aa, Severe acute respiratory syndrome coronavirus 2
  REGION 1..10: note = Table B: HLA-DQA1*03:02-B1*03:03L HLA-DQA1*01:02-B1*06:02L HLA-DQA1*01-B1*05L HLA-DQA1*05:01-B1*02:01L HLA-DPA1*03:01-B1*105:01L HLA-DQA1*03:01-B1*03:02L HLA-DQA1*01:03-B1*06:01L HLA-DQA1*02:01-B1*03:03L
AISSVLNDIL

SEQ ID NO: 10200 - protein, 10 aa, Severe acute respiratory syndrome coronavirus 2
  REGION 1..10: note = Table B: HLA-DQA1*03:02-B1*03:03H HLA-DQA1*05:01-B1*03:01M HLA-DRB1*04:01L HLA-DRB1*13:02L HLA-DRB1*13:03L HLA-DRB1*01:03L HLA-DRB1*04:02L HLA-DRB1*04:04L HLA-DQA1*01:02-B1*06:02M HLA-DRB1*01:01L HLA-DRB1*01:02L HLA-DRB1*08:77L HLA-DRB3*02:01L
  REGION 1..10: note = CONT. FROM ABOVE: HLA-DPA1*01:03-B1*03:01L HLA-DPA1*03:01-B1*04: 02M HLA-DRB1*03:01L HLA-DRB1*14:01L HLA-DRB1*14:02M HLA-DRB1*08: 01L HLA-DRB1*11:01L HLA-DQA1*05:05-B1*03:19L HLA-DQA1*05:01-B1*0 2:01L HLA-DRB4*01:01L HLA-DPA1*01:03-B1*04:01L
  REGION 1..10: note = CONT. FROM ABOVE: HLA-DQA1*05:05-B1*03:116M HLA-DRB1*09:01M HLA- DPA1*01:03-B1*04:02M HLA-DRB1*12:01L HLA-DPA1*02:01-B1*13:01L HL A-DPA1*03:01-B1*105:01M HLA-DQA1*03:01-B1*03:02M HLA-DPA1*01:03- B1*104:01L HLA-DPA1*01:02-B1*04:01M HLA-DRB1*07:01L
  REGION 1..10: note = CONT. FROM ABOVE: HLA-DRB1*10:01L HLA-DRB1*16:01L HLA-DQA1*01:03 -B1*06:01L HLA-DRB1*08:03M HLA-DQA1*02:01-B1*03:03M HLA-DRB1*15: 01L HLA-DRB1*15:03M
SVLNDILSRL

SEQ ID NO: 10201 - protein, 13 aa, Severe acute respiratory syndrome coronavirus 2
  REGION 1..13: note = Table B: HLA-DQA1*03:02-B1*03:03L HLA-DQA1*05:01-B1*03:01L HLA-DRB1*13:02L HLA-DRB1*13:03L HLA-DRB1*01:03L HLA-DRB1*04:04L HLA-DRB1*01:02L HLA-DRB1*08:04L HLA-DQA1*01:01-B1*05:01L HLA-DQA1*05:01-B1*02:01L HLA-DRB1*04:10L HLA-DRB1*12:01L
  REGION 1..13: note = CONT. FROM ABOVE: HLA-DPA1*02:01-B1*13:01L HLA-DPA1*03:01-B1*105 :01L HLA-DRB1*14:54L HLA-DQA1*01:03-B1*06:01L HLA-DRB1*04:08L HL A-DRB1*08:03L HLA-DRB1*15:03L
ILSRLDKVEAEVQ

SEQ ID NO: 10202 - protein, 11 aa, Severe acute respiratory syndrome coronavirus 2
  REGION 1..11: note = Table B: HLA-DQA1*03:02-B1*03:03L HLA-DQA1*05:01-B1*03:01L HLA-DRB1*04:03L HLA-DRB1*13:03L HLA-DQA1*01:01-B1*05:01L HLA-DRB1*08:01L HLA-DRB1*12:01L HLA-DRB1*16:01L HLA-DQA1*01:03-B1*06:01L
DKVEAEVQIDR

SEQ ID NO: 10203 - protein, 10 aa, Severe acute respiratory syndrome coronavirus 2
  REGION 1..10: note = Table B: HLA-DQA1*03:02-B1*03:03H HLA-DQA1*05:01-B1*03:01M HLA-DRB1*04:01L HLA-DRB1*13:02L HLA-DRB1*13:03L HLA-DRB1*01:03L HLA-DRB1*04:02L HLA-DQA1*01:02-B1*06:02L HLA-DRB4*03:01NL HLA-DRB1*08:77M HLA-DPA1*03:01-B1*04:02L HLA-DRB1*03:01L
  REGION 1..10: note = CONT. FROM ABOVE: HLA-DRB1*14:01L HLA-DRB1*11:02L HLA-DRB1*11:04 L HLA-DRB1*14:02L HLA-DRB1*11:01L HLA-DQA1*01-B1*05L HLA-DQA1*05 :05-B1*03:19M HLA-DQA1*05:01-B1*02:01L HLA-DRB4*01:01L HLA-DPA1* 01:03-B1*04:01L HLA-DQA1*05:05-B1*03:116M HLA-DRB1*09:01M
  REGION 1..10: note = CONT. FROM ABOVE: HLA-DPA1*01:03-B1*04:02M HLA-DRB1*12:01L HLA-D PA1*02:01-B1*13:01L HLA-DPA1*03:01-B1*105:01L HLA-DQA1*03:01-B1* 03:02M HLA-DPA1*01:03-B1*104:01M HLA-DPA1*01:02-B1*04:01L HLA-DR B1*07:01L HLA-DRB1*10:01L HLA-DRB1*16:01L
  REGION 1..10: note = CONT. FROM ABOVE: HLA-DQA1*01:03-B1*06:01L HLA-DQA1*02:01-B1*03: 03L HLA-DRB1*15:03L
VEAEVQIDRL

SEQ ID NO: 10204 - protein, 11 aa, Severe acute respiratory syndrome coronavirus 2
  REGION 1..11: note = Table B: HLA-DQA1*03:02-B1*03:03L HLA-DRB1*04:03L HLA-DRB1*13:03L HLA-DRB1*04:02L HLA-DRB4*03:01NL HLA-DRB1*14:01L HLA-DQA1*01-B1*05L HLA-DQA1*05:01-B1*02:01L HLA-DRB1*14:54L HLA-DRB1*14:17L HLA-DPA1*01:02-B1*04:01L HLA-DRB1*16:01L
  REGION 1..11: note = CONT. FROM ABOVE: HLA-DQA1*01:03-B1*06:01L
AEVQIDRLITG

SEQ ID NO: 10205 - protein, 11 aa, Severe acute respiratory syndrome coronavirus 2
  REGION 1..11: note = Table B: HLA-DQA1*03:02-B1*03:03L HLA-DQA1*05:01-B1*03:01L HLA-DQA1*05:05-B1*03:19L HLA-DPA1*01:02-B1*04:01L HLA-DQA1*01:03-B1*06:01L HLA-DRB1*15:03L
VQIDRLITGRL

SEQ ID NO: 10206 - protein, 10 aa, Severe acute respiratory syndrome coronavirus 2
  REGION 1..10: note = Table B: HLA-DQA1*03:02-B1*03:03M HLA-DQA1*05:01-B1*03:01M HLA-DRB1*13:02L HLA-DRB1*13:03L HLA-DRB1*01:03L HLA-DRB1*04:02L HLA-DRB1*04:04L HLA-DRB1*04:05L HLA-DQA1*01:02-B1*06:02M HLA-DRB1*01:02L HLA-DRB3*02:01L HLA-DPA1*01:03-B1*03:01L
  REGION 1..10: note = CONT. FROM ABOVE: HLA-DPA1*03:01-B1*04:02M HLA-DRB1*03:01L HLA-D RB1*14:01L HLA-DRB1*14:02M HLA-DQA1*01:01-B1*05:01L HLA-DRB1*08: 01M HLA-DRB1*11:01L HLA-DQA1*01-B1*05L HLA-DQA1*05:05-B1*03:19L HLA-DQA1*05:01-B1*02:01L HLA-DRB4*01:01L
  REGION 1..10: note = CONT. FROM ABOVE: HLA-DPA1*01:03-B1*04:01L HLA-DQA1*05:05-B1*03: 116M HLA-DRB1*09:01L HLA-DPA1*01:03-B1*04:02L HLA-DRB1*12:01L HL A-DPA1*02:01-B1*13:01L HLA-DPA1*03:01-B1*105:01L HLA-DQA1*03:01- B1*03:02M HLA-DPA1*01:03-B1*104:01L HLA-DPA1*01:02-B1*04:01L
  REGION 1..10: note = CONT. FROM ABOVE: HLA-DRB1*07:01L HLA-DRB1*10:01L HLA-DRB1*16:01 L HLA-DQA1*01:03-B1*06:01L HLA-DRB1*08:03L HLA-DQA1*02:01-B1*03: 03M HLA-DRB1*15:03L
RLITGRLQSL

SEQ ID NO: 10207 - protein, 10 aa, Severe acute respiratory syndrome coronavirus 2
  REGION 1..10: note = Table B: HLA-DQA1*03:02-B1*03:03L HLA-DQA1*05:01-B1*03:01L HLA-DRB1*04:03L HLA-DQA1*01:02-B1*06:02L HLA-DRB1*01:02L HLA-DPA1*03:01-B1*04:02L HLA-DQA1*05:05-B1*03:19L HLA-DPA1*01:03-B1*04:02L HLA-DPA1*03:01-B1*105:01L
  REGION 1..10: note = CONT. FROM ABOVE: HLA-DQA1*03:01-B1*03:02L HLA-DQA1*05:05-B1*03: 01L HLA-DPA1*01:02-B1*04:01L HLA-DRB1*16:01L HLA-DQA1*01:03-B1*0 6:01M HLA-DRB1*04:08L HLA-DQA1*02:01-B1*03:03L
LITGRLQSLQ

SEQ ID NO: 10208 - protein, 14 aa, Severe acute respiratory syndrome coronavirus 2
  REGION 1..14: note = Table B: HLA-DQA1*03:02-B1*03:03L HLA-DPA1*03:01-B1*04:02L HLA-DRB1*08:01L HLA-DPA1*02:01-B1*13:01L HLA-DPA1*01:03-B1*104:01L HLA-DRB1*07:01L
ITGRLQSLQTYVTQ

SEQ ID NO: 10209 - protein, 14 aa, Severe acute respiratory syndrome coronavirus 2
  REGION 1..14: note = Table B: HLA-DQA1*03:02-B1*03:03L HLA-DRB3*02:01L HLA-DRB1*14:02L HLA-DRB1*08:01L HLA-DRB1*11:01L HLA-DQA1*05:05-B1*03:19L HLA-DRB1*09:01L HLA-DRB3*01:01L HLA-DPA1*02:01-B1*13:01L HLA-DPA1*01:03-B1*104:01L
  REGION 1..14: note = CONT. FROM ABOVE: HLA-DRB1*07:01L HLA-DQA1*01:03-B1*06:01L HLA-D RB1*15:01L
TGRLQSLQTYVTQQ

SEQ ID NO: 10210 - protein, 10 aa, Severe acute respiratory syndrome coronavirus 2
  REGION 1..10: note = Table B: HLA-DQA1*03:02-B1*03:03M HLA-DQA1*05:01-B1*03:01L HLA-DQA1*01:02-B1*06:02L HLA-DPA1*03:01-B1*04:02L HLA-DRB1*14:01L HLA-DRB1*14:02L HLA-DQA1*01-B1*05L HLA-DQA1*05:05-B1*03:19L HLA-DQA1*05:01-B1*02:01L
  REGION 1..10: note = CONT. FROM ABOVE: HLA-DQA1*05:05-B1*03:116L HLA-DRB1*09:01L HLA- DPA1*02:01-B1*13:01L HLA-DPA1*03:01-B1*105:01L HLA-DQA1*03:01-B1 *03:02L HLA-DPA1*01:03-B1*104:01L HLA-DPA1*01:02-B1*04:01L HLA-D RB1*16:01L HLA-DQA1*01:03-B1*06:01L HLA-DQA1*02:01-B1*03:03L
  REGION 1..10: note = CONT. FROM ABOVE: HLA-DRB1*15:03L
SLQTYVTQQL

SEQ ID NO: 10211 - protein, 10 aa, Severe acute respiratory syndrome coronavirus 2
  REGION 1..10: note = Table B: HLA-DQA1*03:02-B1*03:03L HLA-DQA1*05:01-B1*03:01L HLA-DRB1*04:03L HLA-DRB1*01:03L HLA-DRB1*04:05L HLA-DQA1*01:02-B1*06:02L HLA-DRB1*01:02L HLA-DPA1*03:01-B1*04:02L HLA-DQA1*01-B1*05L
  REGION 1..10: note = CONT. FROM ABOVE: HLA-DQA1*05:05-B1*03:19L HLA-DQA1*05:01-B1*02: 01L HLA-DRB1*12:01L HLA-DPA1*03:01-B1*105:01L HLA-DQA1*03:01-B1* 03:02L HLA-DPA1*01:02-B1*04:01L HLA-DRB1*16:01L HLA-DQA1*01:03-B 1*06:01L HLA-DQA1*02:01-B1*03:03L HLA-DRB1*15:03L
TYVTQQLIRA

SEQ ID NO: 10212 - protein, 11 aa, Severe acute respiratory syndrome coronavirus 2
  REGION 1..11: note = Table B: HLA-DQA1*03:02-B1*03:03L HLA-DRB1*13:03L HLA-DRB1*01:03L HLA-DRB1*04:02L HLA-DRB1*04:04L HLA-DRB1*04:05L HLA-DRB1*01:02L HLA-DRB4*03:01NL HLA-DPA1*01:03-B1*03:01L HLA-DRB1*14:01L HLA-DQA1*05:05-B1*03:19L
  REGION 1..11: note = CONT. FROM ABOVE: HLA-DQA1*05:01-B1*02:01L HLA-DPA1*01:03-B1*04: 02L HLA-DRB1*12:01L HLA-DRB1*14:54L HLA-DQA1*05:05-B1*03:01L HLA -DRB1*14:17L HLA-DRB1*16:01L HLA-DRB1*04:08L HLA-DRB1*15:03L
YVTQQLIRAAE

SEQ ID NO: 10213 - protein, 12 aa, Severe acute respiratory syndrome coronavirus 2
  REGION 1..12: note = Table B: HLA-DQA1*03:02-B1*03:03L HLA-DRB1*04:02L HLA-DRB1*01:02L HLA-DQA1*01:01-B1*05:01L HLA-DRB1*08:01L HLA-DQA1*05:05-B1*03:01L
VTQQLIRAAEIR

SEQ ID NO: 10214 - protein, 14 aa, Severe acute respiratory syndrome coronavirus 2
  REGION 1..14: note = Table B: HLA-DQA1*03:02-B1*03:03L HLA-DRB1*04:04L HLA-DRB1*08:04L HLA-DRB1*11:04L HLA-DRB1*08:01L
TQQLIRAAEIRASA

SEQ ID NO: 10215 - protein, 10 aa, Severe acute respiratory syndrome coronavirus 2
  REGION 1..10: note = Table B: HLA-DQA1*03:02-B1*03:03L HLA-DQA1*05:01-B1*03:01L HLA-DQA1*01:02-B1*06:02L HLA-DQA1*05:05-B1*03:19L HLA-DPA1*03:01-B1*105:01L HLA-DQA1*03:01-B1*03:02L HLA-DQA1*05:05-B1*03:01L HLA-DQA1*01:03-B1*06:01M
  REGION 1..10: note = CONT. FROM ABOVE: HLA-DQA1*02:01-B1*03:03L
RAAEIRASAN

SEQ ID NO: 10216 - protein, 10 aa, Severe acute respiratory syndrome coronavirus 2
  REGION 1..10: note = Table B: HLA-DQA1*03:02-B1*03:03L HLA-DQA1*05:01-B1*03:01L HLA-DQA1*03:01-B1*03:02L HLA-DQA1*01:03-B1*06:01L HLA-DQA1*02:01-B1*03:03L
AAEIRASANL

SEQ ID NO: 10217 - protein, 10 aa, Severe acute respiratory syndrome coronavirus 2
  REGION 1..10: note = Table B: HLA-DQA1*03:02-B1*03:03L HLA-DQA1*05:05-B1*03:19L HLA-DQA1*03:01-B1*03:02L
AEIRASANLA

SEQ ID NO: 10218 - protein, 12 aa, Severe acute respiratory syndrome coronavirus 2
  REGION 1..12: note = Table B: HLA-DQA1*03:02-B1*03:03L HLA-DRB1*14:04L HLA-DRB1*08:77L HLA-DPA1*01:03-B1*03:01L HLA-DRB1*14:02L HLA-DQA1*01:01-B1*05:01L HLA-DRB5*01:01L HLA-DQA1*01-B1*05L HLA-DQA1*05:01-B1*02:01L HLA-DRB1*09:01L HLA-DRB3*01:01L
  REGION 1..12: note = CONT. FROM ABOVE: HLA-DPA1*01:03-B1*104:01L HLA-DRB1*07:01L
EIRASANLAATK

SEQ ID NO: 10219 - protein, 10 aa, Severe acute respiratory syndrome coronavirus 2
  REGION 1..10: note = Table B: HLA-DQA1*03:02-B1*03:03L HLA-DQA1*05:01-B1*03:01L HLA-DRB1*04:03L HLA-DRB1*13:03L HLA-DRB1*04:02L HLA-DQA1*01:02-B1*06:02L HLA-DRB1*01:02L HLA-DRB4*03:01NL HLA-DRB1*14:01L HLA-DRB1*14:02L HLA-DQA1*01-B1*05L
  REGION 1..10: note = CONT. FROM ABOVE: HLA-DQA1*05:05-B1*03:19L HLA-DQA1*05:01-B1*02: 01L HLA-DRB1*12:01L HLA-DPA1*03:01-B1*105:01L HLA-DQA1*03:01-B1* 03:02L HLA-DQA1*05:05-B1*03:01L HLA-DPA1*01:02-B1*04:01L HLA-DRB 1*16:01L HLA-DQA1*01:03-B1*06:01L HLA-DQA1*02:01-B1*03:03L
  REGION 1..10: note = CONT. FROM ABOVE: HLA-DRB1*15:03L
ASANLAATKM

SEQ ID NO: 10220 - protein, 10 aa, Severe acute respiratory syndrome coronavirus 2
  REGION 1..10: note = Table B: HLA-DQA1*03:02-B1*03:03L HLA-DQA1*05:01-B1*03:01L HLA-DRB1*04:03L HLA-DRB1*13:03L HLA-DRB1*01:03L HLA-DRB1*04:02L HLA-DRB4*03:01NL HLA-DRB1*14:01L HLA-DQA1*01-B1*05L HLA-DQA1*05:05-B1*03:19L HLA-DQA1*05:01-B1*02:01L
  REGION 1..10: note = CONT. FROM ABOVE: HLA-DRB1*12:01L HLA-DPA1*03:01-B1*105:01L HLA- DQA1*03:01-B1*03:02L HLA-DRB1*14:54L HLA-DQA1*05:05-B1*03:01L HL A-DRB1*14:17L HLA-DPA1*01:02-B1*04:01L HLA-DRB1*16:01L HLA-DQA1* 01:03-B1*06:01L HLA-DQA1*02:01-B1*03:03L
ANLAATKMSE

SEQ ID NO: 10221 - protein, 13 aa, Severe acute respiratory syndrome coronavirus 2
  REGION 1..13: note = Table B: HLA-DQA1*03:02-B1*03:03L HLA-DRB1*11:01L HLA-DQA1*01-B1*05L HLA-DQA1*05:05-B1*03:19L HLA-DPA1*01:02-B1*04:01L HLA-DRB1*08:03L
GYHLMSFPQSAPH

SEQ ID NO: 10222 - protein, 10 aa, Severe acute respiratory syndrome coronavirus 2
  REGION 1..10: note = Table B: HLA-DQA1*03:02-B1*03:03L HLA-DQA1*05:01-B1*03:01L HLA-DRB1*04:03L HLA-DRB1*13:03L HLA-DRB1*04:02L HLA-DRB4*03:01NL HLA-DQA1*05:01-B1*02:01L HLA-DQA1*03:01-B1*03:02L HLA-DQA1*05:05-B1*03:01L HLA-DRB1*14:17L
  REGION 1..10: note = CONT. FROM ABOVE: HLA-DQA1*01:03-B1*06:01L HLA-DQA1*02:01-B1*03: 03L
MSFPQSAPHG

SEQ ID NO: 10223 - protein, 10 aa, Severe acute respiratory syndrome coronavirus 2
  REGION 1..10: note = Table B: HLA-DQA1*03:02-B1*03:03L HLA-DQA1*05:01-B1*03:01L HLA-DRB1*01:03L HLA-DRB1*04:05L HLA-DQA1*01:02-B1*06:02L HLA-DRB1*01:01L HLA-DRB1*01:02L HLA-DPA1*03:01-B1*04:02L HLA-DRB1*14:01L HLA-DQA1*01-B1*05L HLA-DQA1*05:05-B1*03:19L
  REGION 1..10: note = CONT. FROM ABOVE: HLA-DQA1*05:01-B1*02:01L HLA-DQA1*05:05-B1*03: 116L HLA-DPA1*02:01-B1*13:01M HLA-DPA1*03:01-B1*105:01L HLA-DQA1 *03:01-B1*03:02L HLA-DPA1*01:03-B1*104:01L HLA-DPA1*01:02-B1*04: 01L HLA-DRB1*16:01L HLA-DQA1*01:03-B1*06:01L HLA-DRB1*08:03L
  REGION 1..10: note = CONT. FROM ABOVE: HLA-DQA1*02:01-B1*03:03L HLA-DRB1*15:03L
SFPQSAPHGV

SEQ ID NO: 10224 - protein, 10 aa, Severe acute respiratory syndrome coronavirus 2
  REGION 1..10: note = Table B: HLA-DQA1*03:02-B1*03:03L HLA-DQA1*05:01-B1*03:01L HLA-DRB1*13:03L HLA-DRB1*04:02L HLA-DRB1*04:05L HLA-DQA1*01:02-B1*06:02L HLA-DRB4*03:01NL HLA-DPA1*03:01-B1*04:02L HLA-DRB1*14:01L HLA-DQA1*01-B1*05L
  REGION 1..10: note = CONT. FROM ABOVE: HLA-DQA1*05:01-B1*02:01L HLA-DQA1*05:05-B1*03: 116L HLA-DPA1*02:01-B1*13:01L HLA-DPA1*03:01-B1*105:01L HLA-DQA1 *03:01-B1*03:02L HLA-DPA1*01:02-B1*04:01L HLA-DRB1*16:01L HLA-DR B1*15:03L
FPQSAPHGVV

SEQ ID NO: 10225 - protein, 10 aa, Severe acute respiratory syndrome coronavirus 2
  REGION 1..10: note = Table B: HLA-DQA1*03:02-B1*03:03L HLA-DQA1*05:01-B1*03:01L HLA-DRB1*04:03L HLA-DRB1*13:03L HLA-DRB1*01:03L HLA-DRB1*04:05L HLA-DQA1*01:02-B1*06:02L HLA-DRB1*08:77L HLA-DRB1*14:02L HLA-DQA1*05:05-B1*03:19L HLA-DQA1*05:01-B1*02:01L
  REGION 1..10: note = CONT. FROM ABOVE: HLA-DPA1*02:01-B1*13:01L HLA-DPA1*03:01-B1*105 :01L HLA-DQA1*03:01-B1*03:02L HLA-DRB1*16:01L HLA-DQA1*01:03-B1* 06:01L HLA-DQA1*02:01-B1*03:03L HLA-DRB1*15:03L
PQSAPHGVVF

SEQ ID NO: 10226 - protein, 10 aa, Severe acute respiratory syndrome coronavirus 2
  REGION 1..10: note = Table B: HLA-DQA1*03:02-B1*03:03L
QSAPHGVVFL

SEQ ID NO: 10227 - protein, 15 aa, Severe acute respiratory syndrome coronavirus 2
  REGION 1..15: note = Table B: HLA-DQA1*03:02-B1*03:03L HLA-DRB1*13:02L HLA-DRB1*01:03L HLA-DRB1*04:02L HLA-DRB1*04:04L HLA-DRB1*04:05L HLA-DRB1*08:04L HLA-DRB3*02:01L HLA-DPA1*01:03-B1*03:01L HLA-DRB1*11:03L HLA-DRB1*08:01L HLA-DQA1*05:01-B1*02:01L
  REGION 1..15: note = CONT. FROM ABOVE: HLA-DRB1*04:10L HLA-DRB1*12:02L HLA-DPA1*02:01 -B1*13:01L HLA-DQA1*03:01-B1*03:02L HLA-DRB1*14:54L HLA-DQA1*05: 05-B1*03:01L HLA-DRB1*14:17L HLA-DRB1*07:01L HLA-DRB1*10:01L HLA -DRB1*16:01L HLA-DRB1*04:08L HLA-DQA1*02:01-B1*03:03L
APHGVVFLHVTYVPA

SEQ ID NO: 10228 - protein, 14 aa, Severe acute respiratory syndrome coronavirus 2
  REGION 1..14: note = Table B: HLA-DQA1*03:02-B1*03:03L HLA-DRB1*04:04L HLA-DRB1*11:04L HLA-DRB1*14:02L HLA-DRB1*11:01L HLA-DRB3*01:01L HLA-DRB1*10:01L HLA-DRB1*08:03L
GVVFLHVTYVPAQE

SEQ ID NO: 10229 - protein, 10 aa, Severe acute respiratory syndrome coronavirus 2
  REGION 1..10: note = Table B: HLA-DQA1*03:02-B1*03:03L HLA-DQA1*05:01-B1*03:01L HLA-DRB1*04:03L HLA-DRB1*13:03L HLA-DRB1*01:03L HLA-DRB1*04:02L HLA-DRB1*04:05L HLA-DQA1*01:02-B1*06:02L HLA-DRB1*01:02L HLA-DRB4*03:01NL HLA-DQA1*01:01-B1*05:01L HLA-DQA1*01-B1*05L
  REGION 1..10: note = CONT. FROM ABOVE: HLA-DQA1*05:05-B1*03:19L HLA-DQA1*05:01-B1*02: 01L HLA-DRB1*04:10L HLA-DRB1*12:01L HLA-DPA1*03:01-B1*105:01L HL A-DQA1*03:01-B1*03:02L HLA-DRB1*14:54L HLA-DQA1*05:05-B1*03:01L HLA-DRB1*14:17L HLA-DPA1*01:02-B1*04:01L HLA-DRB1*16:01L
  REGION 1..10: note = CONT. FROM ABOVE: HLA-DQA1*01:03-B1*06:01L HLA-DRB1*04:08L HLA-D QA1*02:01-B1*03:03L HLA-DRB1*15:03L
VTYVPAQEKN

SEQ ID NO: 10230 - protein, 10 aa, Severe acute respiratory syndrome coronavirus 2
  REGION 1..10: note = Table B: HLA-DQA1*03:02-B1*03:03L HLA-DRB1*04:03L HLA-DRB1*04:02L HLA-DQA1*05:01-B1*02:01L HLA-DRB1*12:01L HLA-DQA1*03:01-B1*03:02L HLA-DRB1*14:17L HLA-DRB1*16:01L HLA-DQA1*02:01-B1*03:03L
YVPAQEKNFT

SEQ ID NO: 10231 - protein, 13 aa, Severe acute respiratory syndrome coronavirus 2
  REGION 1..13: note = Table B: HLA-DQA1*03:02-B1*03:03L HLA-DRB1*04:03L HLA-DRB1*04:02L HLA-DQA1*05:01-B1*02:01L HLA-DQA1*03:01-B1*03:02L HLA-DRB1*14:17L HLA-DQA1*02:01-B1*03:03L
VPAQEKNFTTAPA

SEQ ID NO: 10232 - protein, 11 aa, Severe acute respiratory syndrome coronavirus 2
  REGION 1..11: note = Table B: HLA-DQA1*03:02-B1*03:03L HLA-DQA1*05:05-B1*03:19L HLA-DPA1*01:03-B1*104:01L
QEKNFTTAPAI

SEQ ID NO: 10233 - protein, 13 aa, Severe acute respiratory syndrome coronavirus 2
  REGION 1..13: note = Table B: HLA-DQA1*03:02-B1*03:03L HLA-DQA1*05:01-B1*03:01L HLA-DRB1*04:03L HLA-DRB1*01:03L HLA-DRB1*04:05L HLA-DRB1*01:02L HLA-DQA1*05:01-B1*02:01L HLA-DRB1*12:01L HLA-DPA1*02:01-B1*13:01L HLA-DPA1*03:01-B1*105:01L
  REGION 1..13: note = CONT. FROM ABOVE: HLA-DQA1*03:01-B1*03:02L HLA-DRB1*16:01L HLA-D RB1*04:08L HLA-DRB1*15:03L
EKNFTTAPAICHD

SEQ ID NO: 10234 - protein, 11 aa, Severe acute respiratory syndrome coronavirus 2
  REGION 1..11: note = Table B: HLA-DQA1*03:02-B1*03:03L HLA-DRB1*04:03L HLA-DPA1*03:01-B1*105:01L
FTTAPAICHDG

SEQ ID NO: 10235 - protein, 10 aa, Severe acute respiratory syndrome coronavirus 2
  REGION 1..10: note = Table B: HLA-DQA1*03:02-B1*03:03L HLA-DQA1*05:01-B1*03:01L HLA-DQA1*01:02-B1*06:02L HLA-DQA1*05:05-B1*03:19L HLA-DQA1*05:01-B1*02:01L HLA-DQA1*03:01-B1*03:02L HLA-DRB1*16:01L HLA-DQA1*01:03-B1*06:01L
  REGION 1..10: note = CONT. FROM ABOVE: HLA-DQA1*02:01-B1*03:03L
AHFPREGVFV

SEQ ID NO: 10236 - protein, 13 aa, Severe acute respiratory syndrome coronavirus 2
  REGION 1..13: note = Table B: HLA-DQA1*03:02-B1*03:03L HLA-DQA1*05:01-B1*03:01L HLA-DRB1*04:03L HLA-DRB1*04:05L HLA-DQA1*01:02-B1*06:02L HLA-DQA1*01:01-B1*05:01L HLA-DRB1*16:01L HLA-DQA1*01:03-B1*06:01L
FPREGVFVSNGTH

SEQ ID NO: 10237 - protein, 10 aa, Severe acute respiratory syndrome coronavirus 2
  REGION 1..10: note = Table B: HLA-DQA1*03:02-B1*03:03L HLA-DQA1*05:01-B1*03:01L HLA-DRB1*04:03L HLA-DRB1*13:02L HLA-DRB1*13:03L HLA-DRB1*01:03L HLA-DRB1*04:05L HLA-DQA1*01:02-B1*06:02M HLA-DRB1*01:01L HLA-DRB4*03:01NL HLA-DRB1*08:77L HLA-DPA1*01:03-B1*03:01L
  REGION 1..10: note = CONT. FROM ABOVE: HLA-DPA1*03:01-B1*04:02L HLA-DRB1*03:01L HLA-D RB1*14:01L HLA-DRB1*14:02L HLA-DQA1*01-B1*05L HLA-DQA1*05:05-B1* 03:19L HLA-DQA1*05:01-B1*02:01L HLA-DRB4*01:01L HLA-DPA1*01:03-B 1*04:01L HLA-DQA1*05:05-B1*03:116L HLA-DPA1*01:03-B1*04:02L
  REGION 1..10: note = CONT. FROM ABOVE: HLA-DRB1*12:01L HLA-DPA1*02:01-B1*13:01L HLA-D PA1*03:01-B1*105:01L HLA-DQA1*03:01-B1*03:02L HLA-DQA1*05:05-B1* 03:01L HLA-DPA1*01:02-B1*04:01L HLA-DRB1*07:01L HLA-DRB1*10:01L HLA-DRB1*16:01L HLA-DQA1*01:03-B1*06:01L HLA-DRB1*08:02L
  REGION 1..10: note = CONT. FROM ABOVE: HLA-DQA1*02:01-B1*03:03M HLA-DRB1*15:03L
GVFVSNGTHW

SEQ ID NO: 10238 - protein, 11 aa, Severe acute respiratory syndrome coronavirus 2
  REGION 1..11: note = Table B: HLA-DQA1*03:02-B1*03:03L HLA-DQA1*05:01-B1*03:01L HLA-DRB1*13:03L HLA-DRB1*01:03L HLA-DRB1*04:02L HLA-DRB1*04:04L HLA-DRB1*04:05L HLA-DQA1*01:02-B1*06:02L HLA-DRB1*01:02L HLA-DRB4*03:01NL HLA-DRB1*08:04L HLA-DRB1*14:01L HLA-DRB1*11:04L
  REGION 1..11: note = CONT. FROM ABOVE: HLA-DQA1*01:01-B1*05:01L HLA-DRB1*08:01L HLA-D QA1*01-B1*05L HLA-DQA1*05:01-B1*02:01L HLA-DRB1*04:10L HLA-DRB1* 12:01L HLA-DPA1*03:01-B1*105:01L HLA-DRB1*14:54L HLA-DPA1*01:02- B1*04:01L HLA-DRB1*10:01L HLA-DRB1*16:01L HLA-DRB1*04:08L
  REGION 1..11: note = CONT. FROM ABOVE: HLA-DRB1*08:03L HLA-DRB1*15:03L
FVTQRNFYEPQ

SEQ ID NO: 10239 - protein, 13 aa, Severe acute respiratory syndrome coronavirus 2
  REGION 1..13: note = Table B: HLA-DQA1*03:02-B1*03:03L HLA-DRB1*01:03L HLA-DRB1*04:02L HLA-DRB1*04:05L HLA-DQA1*01:02-B1*06:02L HLA-DRB1*01:02L HLA-DPA1*01:03-B1*03:01L HLA-DPA1*03:01-B1*04:02L HLA-DQA1*01:01-B1*05:01L
  REGION 1..13: note = CONT. FROM ABOVE: HLA-DRB1*12:01L HLA-DPA1*03:01-B1*105:01L HLA- DPA1*01:02-B1*04:01L HLA-DQA1*01:03-B1*06:01L HLA-DRB1*04:08L
VTQRNFYEPQIIT

SEQ ID NO: 10240 - protein, 12 aa, Severe acute respiratory syndrome coronavirus 2
  REGION 1..12: note = Table B: HLA-DQA1*03:02-B1*03:03L HLA-DQA1*01:02-B1*06:02L HLA-DQA1*05:01-B1*02:01L HLA-DPA1*03:01-B1*105:01L HLA-DQA1*03:01-B1*03:02L HLA-DQA1*01:03-B1*06:01L HLA-DQA1*02:01-B1*03:03L
RNFYEPQIITTD

SEQ ID NO: 10241 - protein, 11 aa, Severe acute respiratory syndrome coronavirus 2
  REGION 1..11: note = Table B: HLA-DQA1*03:02-B1*03:03L HLA-DRB1*04:03L HLA-DQA1*01-B1*05L HLA-DQA1*05:01-B1*02:01L HLA-DRB1*14:17L HLA-DQA1*01:03-B1*06:01L HLA-DQA1*02:01-B1*03:03L
FYEPQIITTDN

SEQ ID NO: 10242 - protein, 12 aa, Severe acute respiratory syndrome coronavirus 2
  REGION 1..12: note = Table B: HLA-DQA1*03:02-B1*03:03L HLA-DRB1*04:03L HLA-DQA1*01-B1*05L
YEPQIITTDNTF

SEQ ID NO: 10243 - protein, 12 aa, Severe acute respiratory syndrome coronavirus 2
  REGION 1..12: note = Table B: HLA-DQA1*03:02-B1*03:03L HLA-DRB1*04:03L HLA-DRB1*13:02L HLA-DRB1*04:02L HLA-DRB1*04:05L HLA-DRB4*03:01NL HLA-DRB1*08:77L HLA-DRB1*14:01L HLA-DQA1*01-B1*05L HLA-DRB1*04:10L HLA-DRB1*12:01L HLA-DRB1*12:02L
  REGION 1..12: note = CONT. FROM ABOVE: HLA-DQA1*03:01-B1*03:02L HLA-DRB1*14:54L HLA-D RB1*14:17L HLA-DRB1*16:01L HLA-DRB1*15:03L
EPQIITTDNTFV

SEQ ID NO: 10244 - protein, 12 aa, Severe acute respiratory syndrome coronavirus 2
  REGION 1..12: note = Table B: HLA-DQA1*03:02-B1*03:03L HLA-DRB1*13:02L HLA-DRB1*13:03L HLA-DRB1*04:02L HLA-DRB1*04:05L HLA-DRB4*03:01NL HLA-DRB1*08:77L HLA-DRB3*02:01L HLA-DRB1*14:01L HLA-DRB1*11:03L HLA-DRB1*11:04L HLA-DQA1*01-B1*05L HLA-DQA1*05:01-B1*02:01L
  REGION 1..12: note = CONT. FROM ABOVE: HLA-DRB1*04:10L HLA-DRB1*12:01L HLA-DRB1*12:02 L HLA-DQA1*03:01-B1*03:02L HLA-DRB1*14:54L HLA-DRB1*16:01L HLA-D QA1*02:01-B1*03:03L HLA-DRB1*15:03L
PQIITTDNTFVS

SEQ ID NO: 10245 - protein, 12 aa, Severe acute respiratory syndrome coronavirus 2
  REGION 1..12: note = Table B: HLA-DQA1*03:02-B1*03:03L HLA-DQA1*05:01-B1*03:01L HLA-DRB1*04:01L HLA-DRB1*01:03L HLA-DRB1*04:04L HLA-DRB1*04:05L HLA-DQA1*01:02-B1*06:02L HLA-DRB1*01:02L HLA-DRB1*08:04L HLA-DRB1*08:77L HLA-DRB3*02:01L HLA-DPA1*01:03-B1*03:01L
  REGION 1..12: note = CONT. FROM ABOVE: HLA-DRB1*11:03L HLA-DRB1*11:04L HLA-DRB1*14:02 L HLA-DQA1*01-B1*05L HLA-DQA1*05:05-B1*03:19L HLA-DRB4*01:01L HL A-DRB1*04:10L HLA-DRB1*12:02L HLA-DPA1*03:01-B1*105:01L HLA-DQA1 *03:01-B1*03:02L HLA-DQA1*05:05-B1*03:01L HLA-DRB1*10:01L
  REGION 1..12: note = CONT. FROM ABOVE: HLA-DRB1*04:08L HLA-DQA1*02:01-B1*03:03L HLA-D RB1*15:03L
IITTDNTFVSGN

SEQ ID NO: 10246 - protein, 12 aa, Severe acute respiratory syndrome coronavirus 2
  REGION 1..12: note = Table B: HLA-DQA1*03:02-B1*03:03L HLA-DQA1*05:01-B1*02:01L HLA-DQA1*03:01-B1*03:02L HLA-DQA1*01:03-B1*06:01L
DNTFVSGNCDVV

SEQ ID NO: 10247 - protein, 13 aa, Severe acute respiratory syndrome coronavirus 2
  REGION 1..13: note = Table B: HLA-DQA1*03:02-B1*03:03L HLA-DRB1*04:03L HLA-DQA1*05:01-B1*02:01L HLA-DQA1*03:01-B1*03:02L
NTFVSGNCDVVIG

SEQ ID NO: 10248 - protein, 10 aa, Severe acute respiratory syndrome coronavirus 2
  REGION 1..10: note = Table B: HLA-DQA1*03:02-B1*03:03M HLA-DQA1*05:01-B1*03:01L HLA-DRB1*13:03L HLA-DQA1*01:02-B1*06:02L HLA-DRB1*01:02L HLA-DPA1*03:01-B1*04:02L HLA-DRB1*14:01L HLA-DRB1*14:02L HLA-DRB1*08:01L HLA-DQA1*05:05-B1*03:19L
  REGION 1..10: note = CONT. FROM ABOVE: HLA-DQA1*05:01-B1*02:01L HLA-DPA1*01:03-B1*04: 01L HLA-DQA1*05:05-B1*03:116L HLA-DRB1*09:01L HLA-DPA1*01:03-B1* 04:02L HLA-DRB1*12:01L HLA-DPA1*02:01-B1*13:01L HLA-DPA1*03:01-B 1*105:01L HLA-DQA1*03:01-B1*03:02L HLA-DPA1*01:03-B1*104:01L
  REGION 1..10: note = CONT. FROM ABOVE: HLA-DPA1*01:02-B1*04:01L HLA-DRB1*10:01L HLA-D RB1*16:01L HLA-DQA1*01:03-B1*06:01L HLA-DRB1*08:03L HLA-DQA1*02: 01-B1*03:03L HLA-DRB1*15:03M
VVIGIVNNTV

SEQ ID NO: 10249 - protein, 12 aa, Severe acute respiratory syndrome coronavirus 2
  REGION 1..12: note = Table B: HLA-DQA1*03:02-B1*03:03L HLA-DQA1*05:01-B1*03:01L HLA-DRB1*04:03L HLA-DRB1*13:02L HLA-DRB1*04:02L HLA-DRB1*04:05L HLA-DRB1*01:02L HLA-DRB4*03:01NL HLA-DRB1*08:77L HLA-DRB3*02:01L HLA-DPA1*03:01-B1*04:02L HLA-DRB1*14:01L HLA-DQA1*01-B1*05L
  REGION 1..12: note = CONT. FROM ABOVE: HLA-DQA1*05:01-B1*02:01L HLA-DRB1*04:10L HLA-D RB1*12:01L HLA-DRB1*12:02L HLA-DPA1*03:01-B1*105:01L HLA-DQA1*03 :01-B1*03:02L HLA-DRB1*14:54L HLA-DRB1*14:17L HLA-DPA1*01:02-B1* 04:01L HLA-DRB1*16:01L HLA-DQA1*01:03-B1*06:01L
  REGION 1..12: note = CONT. FROM ABOVE: HLA-DQA1*02:01-B1*03:03L HLA-DRB1*15:03L
IGIVNNTVYDPL

SEQ ID NO: 10250 - protein, 12 aa, Severe acute respiratory syndrome coronavirus 2
  REGION 1..12: note = Table B: HLA-DQA1*03:02-B1*03:03L HLA-DRB1*04:03L HLA-DRB1*04:05L HLA-DQA1*01-B1*05L HLA-DPA1*02:01-B1*13:01L HLA-DQA1*03:01-B1*03:02L HLA-DRB1*16:01L HLA-DQA1*01:03-B1*06:01L HLA-DQA1*02:01-B1*03:03L
IVNNTVYDPLQP

SEQ ID NO: 10251 - protein, 12 aa, Severe acute respiratory syndrome coronavirus 2
  REGION 1..12: note = Table B: HLA-DQA1*03:02-B1*03:03L HLA-DRB1*04:03L HLA-DQA1*01-B1*05L HLA-DQA1*05:01-B1*02:01L HLA-DPA1*03:01-B1*105:01L HLA-DQA1*03:01-B1*03:02L HLA-DRB1*16:01L HLA-DQA1*01:03-B1*06:01L
  REGION 1..12: note = CONT. FROM ABOVE: HLA-DQA1*02:01-B1*03:03L
VNNTVYDPLQPE

SEQ ID NO: 10252 - protein, 10 aa, Severe acute respiratory syndrome coronavirus 2
  REGION 1..10: note = Table B: HLA-DQA1*03:02-B1*03:03H HLA-DQA1*05:01-B1*03:01M HLA-DRB1*04:01L HLA-DRB1*04:03L HLA-DRB1*13:02L HLA-DRB1*13:03L HLA-DRB1*01:03L HLA-DRB1*04:02L HLA-DRB1*04:05L HLA-DQA1*01:02-B1*06:02M HLA-DRB1*01:01L HLA-DRB1*01:02L
  REGION 1..10: note = CONT. FROM ABOVE: HLA-DRB1*08:77L HLA-DRB3*02:01L HLA-DPA1*01:03 -B1*03:01L HLA-DPA1*03:01-B1*04:02M HLA-DRB1*14:01L HLA-DRB1*14: 02M HLA-DRB1*08:01L HLA-DRB1*11:01L HLA-DQA1*01-B1*05L HLA-DQA1* 05:05-B1*03:19L HLA-DQA1*05:01-B1*02:01L HLA-DRB4*01:01L
  REGION 1..10: note = CONT. FROM ABOVE: HLA-DPA1*01:03-B1*04:01L HLA-DQA1*05:05-B1*03: 116M HLA-DRB1*09:01M HLA-DPA1*01:03-B1*04:02M HLA-DRB1*12:01L HL A-DPA1*02:01-B1*13:01M HLA-DPA1*03:01-B1*105:01M HLA-DQA1*03:01- B1*03:02M HLA-DPA1*01:03-B1*104:01L HLA-DPA1*01:02-B1*04:01L
  REGION 1..10: note = CONT. FROM ABOVE: HLA-DRB1*07:01L HLA-DRB1*10:01L HLA-DRB1*16:01 L HLA-DQA1*01:03-B1*06:01L HLA-DRB1*08:03L HLA-DQA1*02:01-B1*03: 03M HLA-DRB1*15:03M
TVYDPLQPEL

SEQ ID NO: 10253 - protein, 10 aa, Severe acute respiratory syndrome coronavirus 2
  REGION 1..10: note = Table B: HLA-DQA1*03:02-B1*03:03L HLA-DRB1*04:03L HLA-DRB1*04:05L HLA-DQA1*01-B1*05L HLA-DQA1*05:01-B1*02:01L HLA-DPA1*03:01-B1*105:01L HLA-DQA1*03:01-B1*03:02L HLA-DRB1*16:01L HLA-DQA1*01:03-B1*06:01L
  REGION 1..10: note = CONT. FROM ABOVE: HLA-DQA1*02:01-B1*03:03L HLA-DRB1*15:03L
VYDPLQPELD

SEQ ID NO: 10254 - protein, 13 aa, Severe acute respiratory syndrome coronavirus 2
  REGION 1..13: note = Table B: HLA-DQA1*03:02-B1*03:03L HLA-DRB1*04:02L HLA-DRB1*04:05L HLA-DQA1*01:01-B1*05:01L HLA-DRB1*04:10L HLA-DRB1*12:01L HLA-DRB1*14:17L HLA-DRB1*16:01L
DPLQPELDSFKEE

SEQ ID NO: 10255 - protein, 10 aa, Severe acute respiratory syndrome coronavirus 2
  REGION 1..10: note = Table B: HLA-DQA1*03:02-B1*03:03M HLA-DQA1*05:05-B1*03:19L HLA-DRB1*09:01L HLA-DQA1*03:01-B1*03:02L HLA-DPA1*01:03-B1*104:01L
PELDSFKEEL

SEQ ID NO: 10256 - protein, 10 aa, Severe acute respiratory syndrome coronavirus 2
  REGION 1..10: note = Table B: HLA-DQA1*03:02-B1*03:03L HLA-DQA1*05:01-B1*03:01L HLA-DRB1*04:03L HLA-DRB1*13:02L HLA-DRB1*13:03M HLA-DRB1*01:03L HLA-DQA1*01:02-B1*06:02M HLA-DRB4*03:01NL HLA-DRB1*08:77L HLA-DPA1*01:03-B1*03:01L HLA-DPA1*03:01-B1*04:02L
  REGION 1..10: note = CONT. FROM ABOVE: HLA-DRB1*03:01L HLA-DRB1*14:01L HLA-DRB1*14:02 L HLA-DRB5*01:01L HLA-DQA1*01-B1*05L HLA-DQA1*05:05-B1*03:19L HL A-DQA1*05:01-B1*02:01M HLA-DRB4*01:01L HLA-DPA1*01:03-B1*04:01L HLA-DQA1*05:05-B1*03:116L HLA-DPA1*01:03-B1*04:02L
  REGION 1..10: note = CONT. FROM ABOVE: HLA-DRB1*12:01L HLA-DPA1*02:01-B1*13:01L HLA-D PA1*03:01-B1*105:01M HLA-DPA1*01:03-B1*104:01L HLA-DQA1*05:05-B1 *03:01L HLA-DPA1*01:02-B1*04:01L HLA-DRB1*10:01L HLA-DRB1*16:01L HLA-DQA1*01:03-B1*06:01L HLA-DRB1*08:02L
  REGION 1..10: note = CONT. FROM ABOVE: HLA-DQA1*02:01-B1*03:03L HLA-DRB1*15:03L
DSFKEELDKY

SEQ ID NO: 10257 - protein, 11 aa, Severe acute respiratory syndrome coronavirus 2
  REGION 1..11: note = Table B: HLA-DQA1*03:02-B1*03:03L HLA-DQA1*05:01-B1*03:01L HLA-DRB1*13:02L HLA-DRB1*13:03L HLA-DRB1*01:03L HLA-DRB1*04:02L HLA-DRB1*04:05L HLA-DQA1*01:02-B1*06:02L HLA-DRB1*01:02L HLA-DRB4*03:01NL HLA-DRB1*08:04L HLA-DPA1*01:03-B1*03:01L
  REGION 1..11: note = CONT. FROM ABOVE: HLA-DRB1*14:01L HLA-DRB1*14:02L HLA-DQA1*01:01 -B1*05:01L HLA-DRB1*08:01L HLA-DQA1*01-B1*05L HLA-DQA1*05:05-B1* 03:19L HLA-DQA1*05:01-B1*02:01L HLA-DRB1*04:10L HLA-DRB1*12:01L HLA-DRB1*12:02L HLA-DPA1*02:01-B1*13:01L
  REGION 1..11: note = CONT. FROM ABOVE: HLA-DPA1*03:01-B1*105:01L HLA-DRB1*14:54L HLA- DQA1*05:05-B1*03:01L HLA-DRB1*14:17L HLA-DPA1*01:02-B1*04:01L HL A-DQA1*01:03-B1*06:01L HLA-DRB1*04:08L HLA-DRB1*15:03L
YFKNHTSPDVD

SEQ ID NO: 10258 - protein, 12 aa, Severe acute respiratory syndrome coronavirus 2
  REGION 1..12: note = Table B: HLA-DQA1*03:02-B1*03:03L HLA-DQA1*05:01-B1*02:01L HLA-DQA1*03:01-B1*03:02L HLA-DQA1*01:03-B1*06:01L HLA-DQA1*02:01-B1*03:03L
NHTSPDVDLGDI

SEQ ID NO: 10259 - protein, 12 aa, Severe acute respiratory syndrome coronavirus 2
  REGION 1..12: note = Table B: HLA-DQA1*03:02-B1*03:03L HLA-DQA1*03:01-B1*03:02L HLA-DQA1*01:03-B1*06:01L
PDVDLGDISGIN

SEQ ID NO: 10260 - protein, 12 aa, Severe acute respiratory syndrome coronavirus 2
  REGION 1..12: note = Table B: HLA-DQA1*03:02-B1*03:03L HLA-DRB1*04:03L HLA-DQA1*05:01-B1*02:01L HLA-DQA1*03:01-B1*03:02L HLA-DQA1*02:01-B1*03:03L
VDLGDISGINAS

SEQ ID NO: 10261 - protein, 10 aa, Severe acute respiratory syndrome coronavirus 2
  REGION 1..10: note = Table B: HLA-DQA1*03:02-B1*03:03L HLA-DRB1*11:02L HLA-DQA1*05:05-B1*03:19M HLA-DRB1*09:01L HLA-DQA1*03:01-B1*03:02L HLA-DPA1*01:03-B1*104:01L HLA-DQA1*02:01-B1*03:03L
GDISGINASV

SEQ ID NO: 10262 - protein, 10 aa, Severe acute respiratory syndrome coronavirus 2
  REGION 1..10: note = Table B: HLA-DQA1*03:02-B1*03:03L HLA-DQA1*05:01-B1*03:01L HLA-DQA1*05:05-B1*03:19L HLA-DQA1*03:01-B1*03:02L HLA-DQA1*05:05-B1*03:01L HLA-DQA1*02:01-B1*03:03L
ISGINASVVN

SEQ ID NO: 10263 - protein, 10 aa, Severe acute respiratory syndrome coronavirus 2
  REGION 1..10: note = Table B: HLA-DQA1*03:02-B1*03:03L HLA-DQA1*05:01-B1*03:01L HLA-DRB1*04:01L HLA-DRB1*04:03L HLA-DRB1*13:02L HLA-DRB1*13:03L HLA-DRB1*01:03L HLA-DRB1*04:02L HLA-DRB1*04:04L HLA-DRB1*04:05L HLA-DQA1*01:02-B1*06:02M HLA-DRB1*01:02L HLA-DRB4*03:01NL
  REGION 1..10: note = CONT. FROM ABOVE: HLA-DRB1*08:77L HLA-DRB1*14:01L HLA-DRB1*11:04 L HLA-DRB1*14:02L HLA-DQA1*01:01-B1*05:01L HLA-DRB1*08:01L HLA-D RB5*01:01L HLA-DQA1*05:05-B1*03:19L HLA-DRB4*02:01NL HLA-DQA1*05 :01-B1*02:01L HLA-DPA1*01:03-B1*04:02L HLA-DRB1*12:01L
  REGION 1..10: note = CONT. FROM ABOVE: HLA-DRB1*12:02L HLA-DPA1*03:01-B1*105:01L HLA- DQA1*03:01-B1*03:02M HLA-DRB1*14:54L HLA-DQA1*05:05-B1*03:01M HL A-DRB1*14:17L HLA-DRB1*16:01L HLA-DQA1*01:03-B1*06:01M HLA-DRB1* 04:08L HLA-DRB1*08:03L HLA-DQA1*02:01-B1*03:03M
INASVVNIQK

SEQ ID NO: 10264 - protein, 10 aa, Severe acute respiratory syndrome coronavirus 2
  REGION 1..10: note = Table B: HLA-DQA1*03:02-B1*03:03L HLA-DQA1*05:01-B1*03:01L HLA-DRB1*04:03L HLA-DRB1*04:02L HLA-DQA1*01:02-B1*06:02L HLA-DQA1*05:05-B1*03:19L HLA-DPA1*03:01-B1*105:01L HLA-DQA1*03:01-B1*03:02L HLA-DQA1*05:05-B1*03:01L
  REGION 1..10: note = CONT. FROM ABOVE: HLA-DQA1*01:03-B1*06:01L HLA-DQA1*02:01-B1*03: 03L
NASVVNIQKE

SEQ ID NO: 10265 - protein, 10 aa, Severe acute respiratory syndrome coronavirus 2
  REGION 1..10: note = Table B: HLA-DQA1*03:02-B1*03:03L HLA-DQA1*05:01-B1*03:01L HLA-DRB1*04:03L HLA-DRB1*04:02L HLA-DQA1*01:02-B1*06:02L HLA-DQA1*05:05-B1*03:19L HLA-DQA1*05:01-B1*02:01L HLA-DPA1*03:01-B1*105:01L HLA-DQA1*03:01-B1*03:02L
  REGION 1..10: note = CONT. FROM ABOVE: HLA-DQA1*05:05-B1*03:01L HLA-DRB1*14:17L HLA-D QA1*01:03-B1*06:01L HLA-DQA1*02:01-B1*03:03L
SVVNIQKEID

SEQ ID NO: 10266 - protein, 10 aa, Severe acute respiratory syndrome coronavirus 2
  REGION 1..10: note = Table B: HLA-DQA1*03:02-B1*03:03L HLA-DQA1*05:01-B1*03:01L HLA-DRB1*04:03L HLA-DRB1*13:02L HLA-DRB1*13:03M HLA-DRB1*01:03L HLA-DRB1*04:02M HLA-DRB1*04:04L HLA-DRB1*04:05L HLA-DQA1*01:02-B1*06:02L HLA-DRB1*01:02L HLA-DRB4*03:01NL
  REGION 1..10: note = CONT. FROM ABOVE: HLA-DRB1*08:04L HLA-DRB1*14:01L HLA-DRB1*11:04 L HLA-DQA1*01:01-B1*05:01L HLA-DRB1*08:01M HLA-DRB1*11:01L HLA-D RB1*04:10L HLA-DRB1*12:01L HLA-DRB3*01:01L HLA-DQA1*03:01-B1*03: 02L HLA-DRB1*14:54L HLA-DQA1*05:05-B1*03:01L HLA-DRB1*14:17L
  REGION 1..10: note = CONT. FROM ABOVE: HLA-DPA1*01:02-B1*04:01L HLA-DRB1*10:01L HLA-D RB1*16:01L HLA-DQA1*01:03-B1*06:01L HLA-DRB1*04:08L HLA-DRB1*08: 03L HLA-DQA1*02:01-B1*03:03L
VVNIQKEIDR

SEQ ID NO: 10267 - protein, 10 aa, Severe acute respiratory syndrome coronavirus 2
  REGION 1..10: note = Table B: HLA-DQA1*03:02-B1*03:03L HLA-DQA1*05:05-B1*03:19L HLA-DRB1*09:01L HLA-DPA1*01:03-B1*04:02L HLA-DQA1*03:01-B1*03:02L HLA-DPA1*01:03-B1*104:01L
KEIDRLNEVA

SEQ ID NO: 10268 - protein, 12 aa, Severe acute respiratory syndrome coronavirus 2
  REGION 1..12: note = Table B: HLA-DQA1*03:02-B1*03:03L HLA-DQA1*05:01-B1*03:01L HLA-DRB1*04:03L HLA-DRB1*13:02L HLA-DRB1*13:03L HLA-DRB1*04:05L HLA-DQA1*01:02-B1*06:02L HLA-DRB1*01:02L HLA-DPA1*01:03-B1*03:01L HLA-DRB1*14:01L HLA-DRB1*08:01L
  REGION 1..12: note = CONT. FROM ABOVE: HLA-DQA1*05:01-B1*02:01L HLA-DRB1*12:01L HLA-D PA1*02:01-B1*13:01L HLA-DPA1*03:01-B1*105:01L HLA-DRB1*14:54L HL A-DPA1*01:02-B1*04:01L HLA-DRB1*16:01L HLA-DQA1*01:03-B1*06:01L HLA-DQA1*02:01-B1*03:03L HLA-DRB1*15:03L
IDRLNEVAKNLN

SEQ ID NO: 10269 - protein, 10 aa, Severe acute respiratory syndrome coronavirus 2
  REGION 1..10: note = Table B: HLA-DQA1*03:02-B1*03:03L HLA-DQA1*03:01-B1*03:02L
NEVAKNLNES

SEQ ID NO: 10270 - protein, 10 aa, Severe acute respiratory syndrome coronavirus 2
  REGION 1..10: note = Table B: HLA-DQA1*03:02-B1*03:03M HLA-DQA1*05:01-B1*03:01L HLA-DRB1*13:02L HLA-DRB1*13:03M HLA-DRB1*01:03L HLA-DRB1*04:02L HLA-DRB1*04:05L HLA-DQA1*01:02-B1*06:02M HLA-DRB1*01:01L HLA-DRB1*01:02M HLA-DRB4*03:01NL HLA-DRB1*08:77L HLA-DRB3*02:01L
  REGION 1..10: note = CONT. FROM ABOVE: HLA-DPA1*01:03-B1*03:01L HLA-DPA1*03:01-B1*04: 02L HLA-DRB1*03:01L HLA-DRB1*14:01L HLA-DRB1*11:04L HLA-DRB1*14: 02L HLA-DRB1*08:01L HLA-DRB1*11:01L HLA-DRB5*01:01L HLA-DQA1*01- B1*05L HLA-DQA1*05:05-B1*03:19L HLA-DQA1*05:01-B1*02:01M
  REGION 1..10: note = CONT. FROM ABOVE: HLA-DRB4*01:01L HLA-DPA1*01:03-B1*04:01M HLA-D QA1*05:05-B1*03:116L HLA-DRB1*09:01L HLA-DPA1*01:03-B1*04:02L HL A-DRB1*12:01L HLA-DPA1*02:01-B1*13:01L HLA-DPA1*03:01-B1*105:01M HLA-DQA1*03:01-B1*03:02L HLA-DPA1*01:03-B1*104:01L
  REGION 1..10: note = CONT. FROM ABOVE: HLA-DQA1*05:05-B1*03:01L HLA-DPA1*01:02-B1*04: 01L HLA-DRB1*07:01L HLA-DRB1*10:01L HLA-DRB1*16:01L HLA-DQA1*01: 03-B1*06:01L HLA-DRB1*08:03L HLA-DQA1*02:01-B1*03:03L HLA-DRB1*1 5:01L HLA-DRB1*15:03M
EVAKNLNESL

SEQ ID NO: 10271 - protein, 10 aa, Severe acute respiratory syndrome coronavirus 2
  REGION 1..10: note = Table B: HLA-DQA1*03:02-B1*03:03L
KNLNESLIDL

SEQ ID NO: 10272 - protein, 10 aa, Severe acute respiratory syndrome coronavirus 2
  REGION 1..10: note = Table B: HLA-DQA1*03:02-B1*03:03M HLA-DRB1*11:02L HLA-DQA1*05:05-B1*03:19M HLA-DQA1*05:05-B1*03:116L HLA-DRB1*09:01L HLA-DQA1*03:01-B1*03:02M HLA-DPA1*01:03-B1*104:01L
NESLIDLQEL

SEQ ID NO: 10273 - protein, 11 aa, Severe acute respiratory syndrome coronavirus 2
  REGION 1..11: note = Table B: HLA-DQA1*03:02-B1*03:03L HLA-DRB1*04:01L HLA-DRB1*11:01L HLA-DRB1*09:01L HLA-DPA1*02:01-B1*13:01L HLA-DRB1*08:03L
SLIDLQELGKY

SEQ ID NO: 10274 - protein, 11 aa, Severe acute respiratory syndrome coronavirus 2
  REGION 1..11: note = Table B: HLA-DQA1*03:02-B1*03:03L HLA-DRB1*14:01L HLA-DPA1*03:01-B1*105:01L HLA-DRB1*14:17L HLA-DQA1*01:03-B1*06:01L
LIDLQELGKYE

SEQ ID NO: 10275 - protein, 12 aa, Severe acute respiratory syndrome coronavirus 2
  REGION 1..12: note = Table B: HLA-DQA1*03:02-B1*03:03L HLA-DPA1*02:01-B1*13:01L HLA-DQA1*05:05-B1*03:01L HLA-DPA1*01:02-B1*04:01L HLA-DQA1*01:03-B1*06:01L
IDLQELGKYEQY

SEQ ID NO: 10276 - protein, 10 aa, Severe acute respiratory syndrome coronavirus 2
  REGION 1..10: note = Table B: HLA-DQA1*03:02-B1*03:03L HLA-DRB1*11:02L HLA-DQA1*05:05-B1*03:19M HLA-DPA1*01:03-B1*104:01M
QELGKYEQYI

SEQ ID NO: 10277 - protein, 10 aa, Severe acute respiratory syndrome coronavirus 2
  REGION 1..10: note = Table B: HLA-DQA1*03:02-B1*03:03L HLA-DQA1*05:01-B1*03:01L HLA-DQA1*01:02-B1*06:02L HLA-DRB1*08:77L HLA-DPA1*01:03-B1*03:01L HLA-DPA1*03:01-B1*04:02L HLA-DRB1*03:01L HLA-DRB1*11:02L HLA-DQA1*01-B1*05L
  REGION 1..10: note = CONT. FROM ABOVE: HLA-DQA1*05:05-B1*03:19M HLA-DQA1*05:01-B1*02: 01L HLA-DRB4*01:01L HLA-DPA1*01:03-B1*04:01L HLA-DQA1*05:05-B1*0 3:116L HLA-DPA1*01:03-B1*04:02L HLA-DRB1*12:01L HLA-DPA1*02:01-B 1*13:01L HLA-DPA1*01:03-B1*104:01L HLA-DPA1*01:02-B1*04:01L
  REGION 1..10: note = CONT. FROM ABOVE: HLA-DRB1*10:01L HLA-DRB1*16:01L HLA-DQA1*01:03 -B1*06:01L HLA-DQA1*02:01-B1*03:03L HLA-DRB1*15:03L
YEQYIKWPWY

SEQ ID NO: 10278 - protein, 10 aa, Severe acute respiratory syndrome coronavirus 2
  REGION 1..10: note = Table B: HLA-DQA1*03:02-B1*03:03L HLA-DQA1*05:05-B1*03:19L
GLIAIVMVTI

SEQ ID NO: 10279 - protein, 10 aa, Severe acute respiratory syndrome coronavirus 2
  REGION 1..10: note = Table B: HLA-DQA1*03:02-B1*03:03L HLA-DQA1*01-B1*05L HLA-DQA1*05:01-B1*02:01L HLA-DQA1*03:01-B1*03:02L
FDEDDSEPVL

SEQ ID NO: 10280 - protein, 10 aa, Severe acute respiratory syndrome coronavirus 2
  REGION 1..10: note = Table B: HLA-DQA1*03:02-B1*03:03L HLA-DRB1*13:03L HLA-DQA1*01-B1*05L HLA-DQA1*05:01-B1*02:01L HLA-DQA1*03:01-B1*03:02L
DEDDSEPVLK

SEQ ID NO: 10281 - protein, 10 aa, Severe acute respiratory syndrome coronavirus 2
  REGION 1..10: note = Table B: HLA-DQA1*03:02-B1*03:03M HLA-DQA1*05:01-B1*03:01L HLA-DRB1*08:77L HLA-DQA1*05:05-B1*03:19M HLA-DRB4*01:01L HLA-DPA1*01:03-B1*04:01L HLA-DQA1*05:05-B1*03:116L HLA-DRB1*09:01L HLA-DPA1*01:03-B1*04:02L
  REGION 1..10: note = CONT. FROM ABOVE: HLA-DQA1*03:01-B1*03:02M HLA-DPA1*01:03-B1*104 :01L HLA-DPA1*01:02-B1*04:01L HLA-DRB1*10:01L HLA-DRB1*16:01L
SEPVLKGVKL

SEQ ID NO: 10282 - protein, 10 aa, Severe acute respiratory syndrome coronavirus 2
  REGION 1..10: note = Table B: HLA-DQA1*03:02-B1*03:03M HLA-DQA1*05:01-B1*03:01M HLA-DRB1*04:01L HLA-DRB1*04:03L HLA-DRB1*13:02L HLA-DRB1*13:03L HLA-DRB1*01:03L HLA-DRB1*04:02L HLA-DRB1*04:04L HLA-DRB1*04:05L HLA-DQA1*01:02-B1*06:02M HLA-DRB1*01:01L HLA-DRB1*01:02L
  REGION 1..10: note = CONT. FROM ABOVE: HLA-DRB1*08:77L HLA-DRB3*02:01L HLA-DPA1*01:03 -B1*03:01L HLA-DPA1*03:01-B1*04:02M HLA-DRB1*03:01L HLA-DRB1*14: 01M HLA-DRB1*14:02M HLA-DQA1*01:01-B1*05:01L HLA-DRB1*08:01M HLA -DRB1*11:01L HLA-DQA1*01-B1*05L HLA-DQA1*05:05-B1*03:19L
  REGION 1..10: note = CONT. FROM ABOVE: HLA-DQA1*05:01-B1*02:01L HLA-DRB4*01:01L HLA-D PA1*01:03-B1*04:01L HLA-DQA1*05:05-B1*03:116M HLA-DRB1*09:01M HL A-DPA1*01:03-B1*04:02M HLA-DRB1*12:01L HLA-DPA1*02:01-B1*13:01L HLA-DPA1*03:01-B1*105:01M HLA-DQA1*03:01-B1*03:02M
  REGION 1..10: note = CONT. FROM ABOVE: HLA-DPA1*01:03-B1*104:01L HLA-DPA1*01:02-B1*04 :01L HLA-DRB1*07:01L HLA-DRB1*10:01L HLA-DRB1*16:01L HLA-DQA1*01 :03-B1*06:01L HLA-DRB1*08:03L HLA-DQA1*02:01-B1*03:03M HLA-DRB1* 15:01L HLA-DRB1*15:03M
RIFTIGTVTL

SEQ ID NO: 10283 - protein, 12 aa, Severe acute respiratory syndrome coronavirus 2
  REGION 1..12: note = Table B: HLA-DQA1*03:02-B1*03:03L HLA-DQA1*05:01-B1*03:01L HLA-DQA1*05:05-B1*03:19L HLA-DPA1*03:01-B1*105:01L HLA-DQA1*05:05-B1*03:01L
TIGTVTLKQGEI

SEQ ID NO: 10284 - protein, 12 aa, Severe acute respiratory syndrome coronavirus 2
  REGION 1..12: note = Table B: HLA-DQA1*03:02-B1*03:03L HLA-DRB1*01:03L HLA-DRB1*04:02L HLA-DRB1*04:05L HLA-DRB1*01:02L HLA-DQA1*01:01-B1*05:01L HLA-DRB1*08:01L HLA-DQA1*05:05-B1*03:19L HLA-DQA1*05:01-B1*02:01L
  REGION 1..12: note = CONT. FROM ABOVE: HLA-DRB1*12:01L HLA-DPA1*03:01-B1*105:01L HLA- DQA1*05:05-B1*03:01L HLA-DRB1*14:17L HLA-DRB1*16:01L HLA-DRB1*04 :08L
IGTVTLKQGEIK

SEQ ID NO: 10285 - protein, 14 aa, Severe acute respiratory syndrome coronavirus 2
  REGION 1..14: note = Table B: HLA-DQA1*03:02-B1*03:03L HLA-DRB1*01:03L HLA-DRB1*04:02L HLA-DRB1*04:05L HLA-DRB1*01:02L HLA-DQA1*01:01-B1*05:01L HLA-DRB1*08:01L HLA-DQA1*05:05-B1*03:19L HLA-DQA1*05:01-B1*02:01L
  REGION 1..14: note = CONT. FROM ABOVE: HLA-DRB1*12:01L HLA-DPA1*03:01-B1*105:01L HLA- DRB1*14:17L HLA-DRB1*16:01L HLA-DRB1*04:08L HLA-DRB1*15:03L
VTLKQGEIKDATPS

SEQ ID NO: 10286 - protein, 10 aa, Severe acute respiratory syndrome coronavirus 2
  REGION 1..10: note = Table B: HLA-DQA1*03:02-B1*03:03L HLA-DQA1*01-B1*05L HLA-DQA1*05:05-B1*03:19L HLA-DQA1*03:01-B1*03:02L
GEIKDATPSD

SEQ ID NO: 10287 - protein, 10 aa, Severe acute respiratory syndrome coronavirus 2
  REGION 1..10: note = Table B: HLA-DQA1*03:02-B1*03:03L HLA-DQA1*05:01-B1*03:01L HLA-DRB1*13:02L HLA-DRB1*13:03M HLA-DRB1*01:03L HLA-DQA1*01:02-B1*06:02M HLA-DRB1*01:02L HLA-DRB4*03:01NL HLA-DRB1*08:77L HLA-DPA1*01:03-B1*03:01L
  REGION 1..10: note = CONT. FROM ABOVE: HLA-DPA1*03:01-B1*04:02L HLA-DRB1*03:01L HLA-D RB1*14:01L HLA-DRB1*14:02L HLA-DRB5*01:01L HLA-DQA1*01-B1*05L HL A-DQA1*05:05-B1*03:19L HLA-DQA1*05:01-B1*02:01L HLA-DPA1*01:03-B 1*04:01L HLA-DQA1*05:05-B1*03:116L HLA-DPA1*01:03-B1*04:02L
  REGION 1..10: note = CONT. FROM ABOVE: HLA-DRB1*12:01L HLA-DPA1*02:01-B1*13:01L HLA-D PA1*03:01-B1*105:01M HLA-DQA1*03:01-B1*03:02L HLA-DQA1*05:05-B1* 03:01L HLA-DPA1*01:02-B1*04:01L HLA-DRB1*16:01L HLA-DQA1*01:03-B 1*06:01L HLA-DQA1*02:01-B1*03:03L HLA-DRB1*15:03L
EIKDATPSDF

SEQ ID NO: 10288 - protein, 11 aa, Severe acute respiratory syndrome coronavirus 2
  REGION 1..11: note = Table B: HLA-DQA1*03:02-B1*03:03L HLA-DRB1*04:03L HLA-DQA1*01:01-B1*05:01L HLA-DQA1*01-B1*05L HLA-DQA1*05:01-B1*02:01L HLA-DRB1*14:17L HLA-DRB1*16:01L HLA-DQA1*01:03-B1*06:01L HLA-DQA1*02:01-B1*03:03L
IKDATPSDFVR

SEQ ID NO: 10289 - protein, 10 aa, Severe acute respiratory syndrome coronavirus 2
  REGION 1..10: note = Table B: HLA-DQA1*03:02-B1*03:03L HLA-DRB1*13:03L HLA-DPA1*03:01-B1*105:01L HLA-DQA1*03:01-B1*03:02L HLA-DQA1*02:01-B1*03:03L
DATPSDFVRA

SEQ ID NO: 10290 - protein, 11 aa, Severe acute respiratory syndrome coronavirus 2
  REGION 1..11: note = Table B: HLA-DQA1*03:02-B1*03:03L HLA-DRB1*04:03L HLA-DRB1*04:02L HLA-DQA1*01-B1*05L HLA-DQA1*03:01-B1*03:02L HLA-DRB1*14:17L HLA-DQA1*02:01-B1*03:03L
TPSDFVRATAT

SEQ ID NO: 10291 - protein, 10 aa, Severe acute respiratory syndrome coronavirus 2
  REGION 1..10: note = Table B: HLA-DQA1*03:02-B1*03:03L HLA-DQA1*05:01-B1*03:01L HLA-DRB1*04:03L HLA-DRB1*13:02L HLA-DRB1*13:03L HLA-DRB1*01:03L HLA-DRB1*04:02L HLA-DRB1*04:05L HLA-DQA1*01:02-B1*06:02L HLA-DRB1*01:02L HLA-DRB4*03:01NL HLA-DRB1*08:77L HLA-DRB3*02:01L
  REGION 1..10: note = CONT. FROM ABOVE: HLA-DPA1*01:03-B1*03:01L HLA-DPA1*03:01-B1*04: 02L HLA-DRB1*14:01L HLA-DRB1*11:03L HLA-DRB1*11:04L HLA-DRB5*01: 01L HLA-DQA1*01-B1*05L HLA-DQA1*05:05-B1*03:19L HLA-DQA1*05:01-B 1*02:01L HLA-DPA1*01:03-B1*04:01L HLA-DRB1*04:10L
  REGION 1..10: note = CONT. FROM ABOVE: HLA-DRB1*09:01L HLA-DRB1*12:01L HLA-DRB1*12:02 L HLA-DPA1*02:01-B1*13:01L HLA-DPA1*03:01-B1*105:01L HLA-DQA1*03 :01-B1*03:02L HLA-DRB1*14:54L HLA-DQA1*05:05-B1*03:01L HLA-DRB1* 14:17L HLA-DPA1*01:02-B1*04:01L HLA-DRB1*07:01L HLA-DRB1*16:01L
  REGION 1..10: note = CONT. FROM ABOVE: HLA-DQA1*01:03-B1*06:01L HLA-DRB1*04:08L HLA-D QA1*02:01-B1*03:03L HLA-DRB1*15:03L
VRATATIPIQ

SEQ ID NO: 10292 - protein, 10 aa, Severe acute respiratory syndrome coronavirus 2
  REGION 1..10: note = Table B: HLA-DQA1*03:02-B1*03:03L HLA-DQA1*05:01-B1*03:01L HLA-DRB1*04:03L HLA-DQA1*01:02-B1*06:02L HLA-DQA1*05:05-B1*03:19L HLA-DQA1*05:01-B1*02:01L HLA-DPA1*03:01-B1*105:01L HLA-DQA1*03:01-B1*03:02L
  REGION 1..10: note = CONT. FROM ABOVE: HLA-DQA1*05:05-B1*03:01L HLA-DQA1*01:03-B1*06: 01L HLA-DQA1*02:01-B1*03:03L
ATATIPIQAS

SEQ ID NO: 10293 - protein, 12 aa, Severe acute respiratory syndrome coronavirus 2
  REGION 1..12: note = Table B: HLA-DQA1*03:02-B1*03:03L HLA-DQA1*05:01-B1*03:01L HLA-DRB1*04:02L HLA-DQA1*05:05-B1*03:19L HLA-DQA1*05:01-B1*02:01L HLA-DRB1*04:10L HLA-DRB1*12:01L HLA-DPA1*03:01-B1*105:01L HLA-DQA1*05:05-B1*03:01L
  REGION 1..12: note = CONT. FROM ABOVE: HLA-DQA1*01:03-B1*06:01L HLA-DRB1*15:03L
ATIPIQASLPFG

SEQ ID NO: 10294 - protein, 11 aa, Severe acute respiratory syndrome coronavirus 2
  REGION 1..11: note = Table B: HLA-DQA1*03:02-B1*03:03L HLA-DQA1*05:01-B1*03:01L HLA-DRB1*04:03L HLA-DRB1*13:03L HLA-DRB1*01:03L HLA-DRB1*08:77L HLA-DPA1*01:03-B1*03:01L HLA-DPA1*03:01-B1*04:02L HLA-DRB1*14:01L HLA-DRB1*14:02L HLA-DQA1*01-B1*05L
  REGION 1..11: note = CONT. FROM ABOVE: HLA-DQA1*05:01-B1*02:01L HLA-DRB4*01:01L HLA-D PA1*01:03-B1*04:01L HLA-DQA1*05:05-B1*03:116L HLA-DPA1*01:03-B1* 04:02L HLA-DRB1*12:01L HLA-DPA1*01:03-B1*104:01L HLA-DQA1*05:05- B1*03:01L HLA-DPA1*01:02-B1*04:01L HLA-DRB1*10:01L
  REGION 1..11: note = CONT. FROM ABOVE: HLA-DRB1*16:01L
IPIQASLPFGW

SEQ ID NO: 10295 - protein, 10 aa, Severe acute respiratory syndrome coronavirus 2
  REGION 1..10: note = Table B: HLA-DQA1*03:02-B1*03:03L HLA-DQA1*05:01-B1*03:01L HLA-DRB1*04:05L HLA-DQA1*01:02-B1*06:02L HLA-DRB1*01:01L HLA-DRB1*01:02L HLA-DPA1*03:01-B1*04:02L HLA-DRB1*14:01L HLA-DQA1*01-B1*05L HLA-DQA1*05:05-B1*03:19L
  REGION 1..10: note = CONT. FROM ABOVE: HLA-DQA1*05:05-B1*03:116L HLA-DPA1*02:01-B1*13 :01M HLA-DPA1*03:01-B1*105:01M HLA-DPA1*01:02-B1*04:01L HLA-DRB1 *16:01L HLA-DQA1*01:03-B1*06:01L HLA-DRB1*08:03L HLA-DQA1*02:01- B1*03:03L HLA-DRB1*15:03L
LPFGWLIVGV

SEQ ID NO: 10296 - protein, 12 aa, Severe acute respiratory syndrome coronavirus 2
  REGION 1..12: note = Table B: HLA-DQA1*03:02-B1*03:03L HLA-DQA1*05:01-B1*03:01L HLA-DRB1*04:02L HLA-DRB1*04:04L HLA-DRB1*04:05L HLA-DQA1*01:02-B1*06:02L HLA-DRB1*01:02L HLA-DRB4*03:01NL HLA-DQA1*01-B1*05L HLA-DQA1*05:05-B1*03:19L HLA-DRB1*04:10L
  REGION 1..12: note = CONT. FROM ABOVE: HLA-DRB1*12:01L HLA-DPA1*03:01-B1*105:01L HLA- DQA1*03:01-B1*03:02L HLA-DQA1*05:05-B1*03:01L HLA-DRB1*16:01L HL A-DQA1*01:03-B1*06:01L HLA-DRB1*04:08L HLA-DQA1*02:01-B1*03:03L HLA-DRB1*15:03L
VALLAVFQSASK

SEQ ID NO: 10297 - protein, 10 aa, Severe acute respiratory syndrome coronavirus 2
  REGION 1..10: note = Table B: HLA-DQA1*03:02-B1*03:03L HLA-DQA1*05:01-B1*03:01L HLA-DRB1*04:03L HLA-DRB1*13:02L HLA-DRB1*13:03L HLA-DRB1*01:03L HLA-DRB1*04:02L HLA-DRB1*04:05L HLA-DRB1*01:02L HLA-DRB4*03:01NL HLA-DRB1*08:04L HLA-DRB1*08:77L HLA-DRB3*02:01L
  REGION 1..10: note = CONT. FROM ABOVE: HLA-DPA1*03:01-B1*04:02L HLA-DRB1*14:01L HLA-D RB1*11:03L HLA-DRB1*14:02L HLA-DRB1*08:01L HLA-DQA1*05:05-B1*03: 19L HLA-DQA1*05:01-B1*02:01L HLA-DRB1*09:01L HLA-DRB1*12:01L HLA -DRB1*12:02L HLA-DPA1*03:01-B1*105:01L HLA-DQA1*03:01-B1*03:02L
  REGION 1..10: note = CONT. FROM ABOVE: HLA-DRB1*14:54L HLA-DQA1*05:05-B1*03:01L HLA-D RB1*14:17L HLA-DPA1*01:02-B1*04:01L HLA-DRB1*07:01L HLA-DRB1*16: 01L HLA-DQA1*01:03-B1*06:01L HLA-DRB1*04:08L HLA-DQA1*02:01-B1*0 3:03L HLA-DRB1*15:03L
VFQSASKIIT

SEQ ID NO: 10298 - protein, 10 aa, Severe acute respiratory syndrome coronavirus 2
  REGION 1..10: note = Table B: HLA-DQA1*03:02-B1*03:03M HLA-DQA1*05:01-B1*03:01L HLA-DRB1*13:02L HLA-DRB1*13:03L HLA-DRB1*01:03L HLA-DRB1*04:02L HLA-DQA1*01:02-B1*06:02L HLA-DRB1*01:02L HLA-DRB1*08:77L HLA-DRB3*02:01L HLA-DPA1*03:01-B1*04:02L HLA-DRB1*14:01L
  REGION 1..10: note = CONT. FROM ABOVE: HLA-DRB1*14:02L HLA-DRB1*08:01L HLA-DQA1*01-B1 *05L HLA-DQA1*05:05-B1*03:19L HLA-DQA1*05:01-B1*02:01L HLA-DPA1* 01:03-B1*04:01L HLA-DQA1*05:05-B1*03:116L HLA-DRB1*09:01L HLA-DP A1*01:03-B1*04:02L HLA-DRB1*12:01L HLA-DPA1*02:01-B1*13:01L
  REGION 1..10: note = CONT. FROM ABOVE: HLA-DPA1*03:01-B1*105:01L HLA-DQA1*03:01-B1*03 :02L HLA-DPA1*01:03-B1*104:01L HLA-DPA1*01:02-B1*04:01L HLA-DRB1 *10:01L HLA-DRB1*16:01L HLA-DQA1*01:03-B1*06:01L HLA-DRB1*08:03L HLA-DQA1*02:01-B1*03:03L HLA-DRB1*15:03L
FQSASKIITL

SEQ ID NO: 10299 - protein, 10 aa, Severe acute respiratory syndrome coronavirus 2
  REGION 1..10: note = Table B: HLA-DQA1*03:02-B1*03:03L HLA-DQA1*05:01-B1*03:01L HLA-DRB1*04:03L HLA-DRB1*01:03L HLA-DRB1*04:02L HLA-DQA1*01:02-B1*06:02L HLA-DRB1*01:02L HLA-DQA1*05:01-B1*02:01L HLA-DRB1*12:01L
  REGION 1..10: note = CONT. FROM ABOVE: HLA-DPA1*03:01-B1*105:01L HLA-DQA1*03:01-B1*03 :02L HLA-DQA1*05:05-B1*03:01L HLA-DPA1*01:02-B1*04:01L HLA-DRB1* 07:01L HLA-DRB1*16:01L HLA-DQA1*01:03-B1*06:01L HLA-DRB1*04:08L HLA-DQA1*02:01-B1*03:03L HLA-DRB1*15:03L
WQLALSKGVH

SEQ ID NO: 10300 - protein, 10 aa, Severe acute respiratory syndrome coronavirus 2
  REGION 1..10: note = Table B: HLA-DQA1*03:02-B1*03:03L HLA-DQA1*05:01-B1*03:01L HLA-DRB1*04:03L HLA-DRB1*13:02L HLA-DRB1*13:03L HLA-DRB1*01:03L HLA-DRB1*04:05L HLA-DQA1*01:02-B1*06:02L HLA-DRB1*01:02L HLA-DRB1*08:77L HLA-DRB3*02:01L HLA-DPA1*01:03-B1*03:01L
  REGION 1..10: note = CONT. FROM ABOVE: HLA-DPA1*03:01-B1*04:02L HLA-DRB1*14:01L HLA-D RB1*14:02L HLA-DQA1*05:05-B1*03:19L HLA-DQA1*05:01-B1*02:01L HLA -DPA1*01:03-B1*04:01L HLA-DRB1*09:01L HLA-DRB1*12:01L HLA-DPA1*0 2:01-B1*13:01L HLA-DPA1*03:01-B1*105:01L
  REGION 1..10: note = CONT. FROM ABOVE: HLA-DQA1*03:01-B1*03:02L HLA-DQA1*05:05-B1*03: 01L HLA-DPA1*01:02-B1*04:01L HLA-DRB1*07:01L HLA-DRB1*16:01L HLA -DQA1*01:03-B1*06:01L HLA-DQA1*02:01-B1*03:03L HLA-DRB1*15:03L
QLALSKGVHF

SEQ ID NO: 10301 - protein, 10 aa, Severe acute respiratory syndrome coronavirus 2
  REGION 1..10: note = Table B: HLA-DQA1*03:02-B1*03:03L HLA-DQA1*05:01-B1*03:01L HLA-DQA1*01:02-B1*06:02L HLA-DQA1*05:05-B1*03:19L HLA-DQA1*05:01-B1*02:01L HLA-DPA1*03:01-B1*105:01L HLA-DQA1*03:01-B1*03:02L HLA-DQA1*05:05-B1*03:01L
  REGION 1..10: note = CONT. FROM ABOVE: HLA-DQA1*01:03-B1*06:01L HLA-DQA1*02:01-B1*03: 03L
VAAGLEAPFL

SEQ ID NO: 10302 - protein, 10 aa, Severe acute respiratory syndrome coronavirus 2
  REGION 1..10: note = Table B: HLA-DQA1*03:02-B1*03:03M HLA-DQA1*05:01-B1*03:01L HLA-DQA1*01:02-B1*06:02L HLA-DRB1*01:02L HLA-DPA1*03:01-B1*04:02L HLA-DRB1*14:01L HLA-DRB1*11:02L HLA-DRB1*14:02L HLA-DQA1*05:05-B1*03:19M
  REGION 1..10: note = CONT. FROM ABOVE: HLA-DQA1*05:01-B1*02:01L HLA-DPA1*01:03-B1*04: 01L HLA-DQA1*05:05-B1*03:116L HLA-DRB1*09:01L HLA-DPA1*01:03-B1* 04:02L HLA-DPA1*02:01-B1*13:01L HLA-DPA1*03:01-B1*105:01L HLA-DQ A1*03:01-B1*03:02L HLA-DPA1*01:03-B1*104:01L
  REGION 1..10: note = CONT. FROM ABOVE: HLA-DPA1*01:02-B1*04:01L HLA-DRB1*10:01L HLA-D RB1*16:01L HLA-DQA1*01:03-B1*06:01L HLA-DRB1*08:03L HLA-DQA1*02: 01-B1*03:03L HLA-DRB1*15:03L
FLQSINFVRI

SEQ ID NO: 10303 - protein, 11 aa, Severe acute respiratory syndrome coronavirus 2
  REGION 1..11: note = Table B: HLA-DQA1*03:02-B1*03:03L HLA-DRB1*04:03L HLA-DRB1*14:01L HLA-DQA1*01-B1*05L HLA-DQA1*05:01-B1*02:01L HLA-DQA1*03:01-B1*03:02L HLA-DRB1*16:01L HLA-DRB1*15:03L
NPLLYDANYFL

SEQ ID NO: 10304 - protein, 13 aa, Severe acute respiratory syndrome coronavirus 2
  REGION 1..13: note = Table B: HLA-DQA1*03:02-B1*03:03L HLA-DRB1*04:03L HLA-DRB1*13:02L HLA-DRB1*01:03L HLA-DRB1*04:02L HLA-DRB4*03:01NL HLA-DRB1*08:77L HLA-DRB3*02:01L HLA-DPA1*01:03-B1*03:01L HLA-DRB1*11:03L HLA-DRB1*14:02L HLA-DQA1*05:05-B1*03:19L
  REGION 1..13: note = CONT. FROM ABOVE: HLA-DRB1*09:01L HLA-DRB1*12:02L HLA-DQA1*03:01 -B1*03:02L HLA-DRB1*14:54L HLA-DQA1*05:05-B1*03:01L HLA-DRB1*14: 17L HLA-DRB1*07:01L HLA-DRB1*10:01L HLA-DQA1*01:03-B1*06:01L HLA -DRB1*04:08L HLA-DQA1*02:01-B1*03:03L
IPYNSVTSSIVIT

SEQ ID NO: 10305 - protein, 12 aa, Severe acute respiratory syndrome coronavirus 2
  REGION 1..12: note = Table B: HLA-DQA1*03:02-B1*03:03L HLA-DQA1*05:01-B1*03:01L HLA-DQA1*01:02-B1*06:02M HLA-DQA1*01:01-B1*05:01L HLA-DQA1*05:05-B1*03:19L HLA-DQA1*05:01-B1*02:01L HLA-DPA1*03:01-B1*105:01L HLA-DQA1*03:01-B1*03:02L
  REGION 1..12: note = CONT. FROM ABOVE: HLA-DQA1*05:05-B1*03:01L HLA-DQA1*01:03-B1*06: 01M HLA-DRB1*04:08L HLA-DQA1*02:01-B1*03:03M
VTSSIVITSGDG

SEQ ID NO: 10306 - protein, 12 aa, Severe acute respiratory syndrome coronavirus 2
  REGION 1..12: note = Table B: HLA-DQA1*03:02-B1*03:03L HLA-DRB1*04:03L HLA-DQA1*05:01-B1*02:01L HLA-DQA1*03:01-B1*03:02L HLA-DRB1*14:17L HLA-DQA1*02:01-B1*03:03L
IVITSGDGTTSP

SEQ ID NO: 10307 - protein, 13 aa, Severe acute respiratory syndrome coronavirus 2
  REGION 1..13: note = Table B: HLA-DQA1*03:02-B1*03:03L HLA-DQA1*05:01-B1*03:01L HLA-DQA1*05:05-B1*03:19L HLA-DQA1*03:01-B1*03:02L HLA-DQA1*05:05-B1*03:01L HLA-DQA1*02:01-B1*03:03L
VITSGDGTTSPIS

SEQ ID NO: 10308 - protein, 10 aa, Severe acute respiratory syndrome coronavirus 2
  REGION 1..10: note = Table B: HLA-DQA1*03:02-B1*03:03L HLA-DQA1*05:01-B1*03:01L HLA-DQA1*01:01-B1*05:01L HLA-DQA1*05:05-B1*03:19L HLA-DQA1*05:01-B1*02:01L HLA-DQA1*03:01-B1*03:02L HLA-DQA1*05:05-B1*03:01L HLA-DRB1*16:01L
  REGION 1..10: note = CONT. FROM ABOVE: HLA-DQA1*01:03-B1*06:01L HLA-DQA1*02:01-B1*03: 03L
DGTTSPISEH

SEQ ID NO: 10309 - protein, 10 aa, Severe acute respiratory syndrome coronavirus 2
  REGION 1..10: note = Table B: HLA-DQA1*03:02-B1*03:03L HLA-DQA1*05:01-B1*03:01L HLA-DRB1*04:03L HLA-DQA1*05:01-B1*02:01L HLA-DQA1*03:01-B1*03:02L HLA-DQA1*05:05-B1*03:01L HLA-DQA1*01:03-B1*06:01L HLA-DQA1*02:01-B1*03:03L
GTTSPISEHD

SEQ ID NO: 10310 - protein, 10 aa, Severe acute respiratory syndrome coronavirus 2
  REGION 1..10: note = Table B: HLA-DQA1*03:02-B1*03:03L HLA-DQA1*05:01-B1*03:01L HLA-DRB1*14:04L HLA-DRB1*04:01L HLA-DRB1*04:03L HLA-DRB1*13:02L HLA-DRB1*13:03M HLA-DRB1*01:03M HLA-DRB1*04:02L HLA-DRB1*04:05L HLA-DQA1*01:02-B1*06:02H HLA-DRB1*01:01L HLA-DRB4*03:01NM
  REGION 1..10: note = CONT. FROM ABOVE: HLA-DRB1*08:77M HLA-DPA1*01:03-B1*03:01M HLA-D PA1*03:01-B1*04:02L HLA-DRB1*03:01M HLA-DRB1*14:01L HLA-DRB1*11: 02M HLA-DRB1*11:03M HLA-DRB1*11:04L HLA-DRB1*14:02M HLA-DRB1*08: 01L HLA-DRB1*11:01L HLA-DRB5*01:01L HLA-DQA1*01-B1*05M
  REGION 1..10: note = CONT. FROM ABOVE: HLA-DQA1*05:05-B1*03:19H HLA-DRB4*02:01NL HLA- DQA1*05:01-B1*02:01M HLA-DRB4*01:01M HLA-DPA1*01:03-B1*04:01M HL A-DQA1*05:05-B1*03:116L HLA-DRB1*09:01L HLA-DPA1*01:03-B1*04:02M HLA-DRB1*12:01M HLA-DRB1*12:02L HLA-DPA1*02:01-B1*13:01L
  REGION 1..10: note = CONT. FROM ABOVE: HLA-DPA1*03:01-B1*105:01M HLA-DQA1*03:01-B1*03 :02L HLA-DRB1*14:54L HLA-DPA1*01:03-B1*104:01M HLA-DQA1*05:05-B1 *03:01L HLA-DRB1*14:17L HLA-DPA1*01:02-B1*04:01L HLA-DRB1*10:01M HLA-DRB1*16:01M HLA-DQA1*01:03-B1*06:01L HLA-DRB1*08:02L
  REGION 1..10: note = CONT. FROM ABOVE: HLA-DRB1*08:03L HLA-DQA1*02:01-B1*03:03L HLA -DRB1*15:01L HLA-DRB1*15:03M
TTSPISEHDY

SEQ ID NO: 10311 - protein, 10 aa, Severe acute respiratory syndrome coronavirus 2
  REGION 1..10: note = Table B: HLA-DQA1*03:02-B1*03:03L HLA-DQA1*01-B1*05L HLA-DQA1*05:01-B1*02:01L HLA-DQA1*03:01-B1*03:02L HLA-DQA1*01:03-B1*06:01L HLA-DQA1*02:01-B1*03:03L
TSPISEHDYQ

SEQ ID NO: 10312 - protein, 12 aa, Severe acute respiratory syndrome coronavirus 2
  REGION 1..12: note = Table B: HLA-DQA1*03:02-B1*03:03L HLA-DRB1*04:03L HLA-DRB1*04:02L HLA-DRB1*14:17L HLA-DRB1*16:01L HLA-DQA1*02:01-B1*03:03L
SPISEHDYQIGG

SEQ ID NO: 10313 - protein, 10 aa, Severe acute respiratory syndrome coronavirus 2
  REGION 1..10: note = Table B: HLA-DQA1*03:02-B1*03:03L HLA-DQA1*05:01-B1*03:01M HLA-DRB1*13:02L HLA-DRB1*13:03L HLA-DRB1*01:03L HLA-DRB1*04:02L HLA-DQA1*01:02-B1*06:02L HLA-DRB4*03:01NM HLA-DRB1*08:77M HLA-DPA1*01:03-B1*03:01L HLA-DPA1*03:01-B1*04:02M
  REGION 1..10: note = CONT. FROM ABOVE: HLA-DRB1*03:01M HLA-DRB1*11:02L HLA-DRB1*14:02 L HLA-DQA1*01-B1*05M HLA-DQA1*05:05-B1*03:19M HLA-DQA1*05:01-B1* 02:01L HLA-DRB4*01:01M HLA-DPA1*01:03-B1*04:01M HLA-DQA1*05:05-B 1*03:116L HLA-DPA1*01:03-B1*04:02L HLA-DRB1*12:01L
  REGION 1..10: note = CONT. FROM ABOVE: HLA-DQA1*03:01-B1*03:02L HLA-DRB1*14:54L HLA-D PA1*01:03-B1*104:01L HLA-DPA1*01:02-B1*04:01M HLA-DRB1*10:01M HL A-DRB1*16:01L HLA-DRB1*15:03M
SEHDYQIGGY

SEQ ID NO: 10314 - protein, 10 aa, Severe acute respiratory syndrome coronavirus 2
  REGION 1..10: note = Table B: HLA-DQA1*03:02-B1*03:03L HLA-DQA1*05:01-B1*03:01L HLA-DRB1*04:03L HLA-DRB1*13:03L HLA-DRB1*01:03L HLA-DRB1*04:05L HLA-DQA1*01:02-B1*06:02M HLA-DRB1*01:01L HLA-DRB1*08:77L HLA-DPA1*01:03-B1*03:01L HLA-DPA1*03:01-B1*04:02L
  REGION 1..10: note = CONT. FROM ABOVE: HLA-DRB1*03:01L HLA-DRB1*14:01L HLA-DRB1*14:02 L HLA-DQA1*01-B1*05L HLA-DQA1*05:05-B1*03:19L HLA-DQA1*05:01-B1* 02:01L HLA-DRB4*01:01L HLA-DPA1*01:03-B1*04:01L HLA-DQA1*05:05-B 1*03:116L HLA-DPA1*01:03-B1*04:02L HLA-DRB1*12:01L
  REGION 1..10: note = CONT. FROM ABOVE: HLA-DPA1*02:01-B1*13:01L HLA-DPA1*03:01-B1*105 :01L HLA-DPA1*01:03-B1*104:01L HLA-DQA1*05:05-B1*03:01L HLA-DPA1 *01:02-B1*04:01L HLA-DRB1*10:01L HLA-DRB1*16:01L HLA-DQA1*01:03- B1*06:01L HLA-DRB1*08:02L HLA-DQA1*02:01-B1*03:03M
  REGION 1..10: note = CONT. FROM ABOVE: HLA-DRB1*15:03L
YQIGGYTEKW

SEQ ID NO: 10315 - protein, 11 aa, Severe acute respiratory syndrome coronavirus 2
  REGION 1..11: note = Table B: HLA-DQA1*03:02-B1*03:03L HLA-DRB1*04:03L HLA-DRB1*04:02L HLA-DQA1*01-B1*05L HLA-DQA1*05:01-B1*02:01L HLA-DQA1*03:01-B1*03:02L HLA-DQA1*01:03-B1*06:01L HLA-DQA1*02:01-B1*03:03L
IGGYTEKWESG

SEQ ID NO: 10316 - protein, 10 aa, Severe acute respiratory syndrome coronavirus 2
  REGION 1..10: note = Table B: HLA-DQA1*03:02-B1*03:03L HLA-DQA1*03:01-B1*03:02L
TEKWESGVKD

SEQ ID NO: 10317 - protein, 10 aa, Severe acute respiratory syndrome coronavirus 2
  REGION 1..10: note = Table B: HLA-DQA1*03:02-B1*03:03L HLA-DRB1*04:05L HLA-DQA1*01:02-B1*06:02L HLA-DPA1*03:01-B1*04:02L HLA-DRB1*14:02L HLA-DQA1*05:05-B1*03:19L HLA-DQA1*05:01-B1*02:01L HLA-DPA1*02:01-B1*13:01L
  REGION 1..10: note = CONT. FROM ABOVE: HLA-DPA1*03:01-B1*105:01L HLA-DQA1*03:01-B1*03 :02L HLA-DPA1*01:02-B1*04:01L HLA-DQA1*01:03-B1*06:01L HLA-DQA1* 02:01-B1*03:03L HLA-DRB1*15:03L
SYFTSDYYQL

SEQ ID NO: 10318 - protein, 10 aa, Severe acute respiratory syndrome coronavirus 2
  REGION 1..10: note = Table B: HLA-DQA1*03:02-B1*03:03L HLA-DQA1*05:01-B1*03:01L HLA-DQA1*01:02-B1*06:02L HLA-DRB1*01:02L HLA-DPA1*03:01-B1*04:02L HLA-DQA1*01-B1*05L HLA-DQA1*05:05-B1*03:19L HLA-DQA1*05:01-B1*02:01L
  REGION 1..10: note = CONT. FROM ABOVE: HLA-DRB1*12:01L HLA-DPA1*02:01-B1*13:01L HLA-D PA1*03:01-B1*105:01L HLA-DQA1*03:01-B1*03:02L HLA-DPA1*01:02-B1* 04:01L HLA-DRB1*16:01L HLA-DQA1*01:03-B1*06:01L HLA-DQA1*02:01-B 1*03:03L HLA-DRB1*15:03L
DYYQLYSTQL

SEQ ID NO: 10319 - protein, 12 aa, Severe acute respiratory syndrome coronavirus 2
  REGION 1..12: note = Table B: HLA-DQA1*03:02-B1*03:03L HLA-DRB1*04:03L HLA-DRB1*04:05L HLA-DQA1*01:02-B1*06:02L HLA-DPA1*03:01-B1*105:01L HLA-DQA1*05:05-B1*03:01L HLA-DRB1*14:17L
QLYSTQLSTDTG

SEQ ID NO: 10320 - protein, 12 aa, Severe acute respiratory syndrome coronavirus 2
  REGION 1..12: note = Table B: HLA-DQA1*03:02-B1*03:03L HLA-DQA1*05:01-B1*02:01L HLA-DQA1*03:01-B1*03:02L
YSTQLSTDTGVE

SEQ ID NO: 10321 - protein, 11 aa, Severe acute respiratory syndrome coronavirus 2
  REGION 1..11: note = Table B: HLA-DQA1*03:02-B1*03:03L HLA-DQA1*05:01-B1*03:01L HLA-DRB1*13:02L HLA-DRB1*01:03L HLA-DRB1*04:05L HLA-DQA1*01:01-B1*05:01L HLA-DQA1*01-B1*05L HLA-DRB1*04:10L HLA-DRB1*14:54L HLA-DQA1*05:05-B1*03:01L
TQLSTDTGVEH

SEQ ID NO: 10322 - protein, 10 aa, Severe acute respiratory syndrome coronavirus 2
  REGION 1..10: note = Table B: HLA-DQA1*03:02-B1*03:03L HLA-DQA1*05:01-B1*03:01L HLA-DQA1*05:05-B1*03:19L HLA-DQA1*05:01-B1*02:01L HLA-DQA1*05:05-B1*03:116L HLA-DPA1*03:01-B1*105:01L HLA-DQA1*03:01-B1*03:02L HLA-DPA1*01:03-B1*104:01L
  REGION 1..10: note = CONT. FROM ABOVE: HLA-DRB1*16:01L HLA-DQA1*02:01-B1*03:03L HLA-D RB1*15:03L
LSTDTGVEHV

SEQ ID NO: 10323 - protein, 10 aa, Severe acute respiratory syndrome coronavirus 2
  REGION 1..10: note = Table B: HLA-DQA1*03:02-B1*03:03L HLA-DRB1*04:03L HLA-DQA1*01-B1*05L HLA-DQA1*05:01-B1*02:01L HLA-DQA1*03:01-B1*03:02L HLA-DRB1*16:01L HLA-DQA1*02:01-B1*03:03L
STDTGVEHVT

SEQ ID NO: 10324 - protein, 10 aa, Severe acute respiratory syndrome coronavirus 2
  REGION 1..10: note = Table B: HLA-DQA1*03:02-B1*03:03L HLA-DQA1*05:01-B1*03:01L HLA-DRB1*13:02L HLA-DRB1*13:03L HLA-DRB1*01:03L HLA-DRB1*04:05L HLA-DQA1*01:02-B1*06:02L HLA-DRB4*03:01NL HLA-DRB1*08:77M HLA-DPA1*01:03-B1*03:01L HLA-DPA1*03:01-B1*04:02L
  REGION 1..10: note = CONT. FROM ABOVE: HLA-DRB1*03:01L HLA-DRB1*14:01L HLA-DRB1*11:02 L HLA-DRB1*14:02L HLA-DQA1*01-B1*05L HLA-DQA1*05:05-B1*03:19M HL A-DQA1*05:01-B1*02:01L HLA-DRB4*01:01L HLA-DPA1*01:03-B1*04:01L HLA-DQA1*05:05-B1*03:116L HLA-DPA1*01:03-B1*04:02L
  REGION 1..10: note = CONT. FROM ABOVE: HLA-DRB1*12:01L HLA-DPA1*02:01-B1*13:01L HLA-D PA1*03:01-B1*105:01L HLA-DQA1*03:01-B1*03:02L HLA-DPA1*01:03-B1* 104:01L HLA-DPA1*01:02-B1*04:01L HLA-DRB1*10:01L HLA-DRB1*16:01L HLA-DQA1*01:03-B1*06:01L HLA-DRB1*08:02L
  REGION 1..10: note = CONT. FROM ABOVE: HLA-DQA1*02:01-B1*03:03L HLA-DRB1*15:03L
TDTGVEHVTF

SEQ ID NO: 10325 - protein, 10 aa, Severe acute respiratory syndrome coronavirus 2
  REGION 1..10: note = Table B: HLA-DQA1*03:02-B1*03:03L HLA-DQA1*05:01-B1*03:01L HLA-DRB1*13:03L HLA-DQA1*01:02-B1*06:02L HLA-DQA1*05:05-B1*03:19L HLA-DQA1*05:01-B1*02:01L HLA-DPA1*02:01-B1*13:01L HLA-DPA1*03:01-B1*105:01L
  REGION 1..10: note = CONT. FROM ABOVE: HLA-DQA1*01:03-B1*06:01L HLA-DQA1*02:01-B1*03: 03L HLA-DRB1*15:03L
DTGVEHVTFF

SEQ ID NO: 10326 - protein, 10 aa, Severe acute respiratory syndrome coronavirus 2
  REGION 1..10: note = Table B: HLA-DQA1*03:02-B1*03:03L HLA-DRB1*04:03L HLA-DRB1*13:03L HLA-DRB1*04:02L HLA-DRB1*04:05L HLA-DRB4*03:01NL HLA-DQA1*01-B1*05L HLA-DQA1*05:01-B1*02:01L HLA-DRB1*04:10L HLA-DQA1*03:01-B1*03:02L HLA-DRB1*14:17L HLA-DRB1*16:01L
  REGION 1..10: note = CONT. FROM ABOVE: HLA-DRB1*04:08L HLA-DQA1*02:01-B1*03:03L
IYNKIVDEPE

SEQ ID NO: 10327 - protein, 10 aa, Severe acute respiratory syndrome coronavirus 2
  REGION 1..10: note = Table B: HLA-DQA1*03:02-B1*03:03L HLA-DRB1*04:03L HLA-DRB1*04:02L HLA-DRB1*04:05L HLA-DQA1*01-B1*05L HLA-DQA1*05:01-B1*02:01L HLA-DRB1*04:10L HLA-DQA1*03:01-B1*03:02L HLA-DRB1*14:17L HLA-DRB1*16:01L
  REGION 1..10: note = CONT. FROM ABOVE: HLA-DRB1*04:08L
YNKIVDEPEE

SEQ ID NO: 10328 - protein, 10 aa, Severe acute respiratory syndrome coronavirus 2
  REGION 1..10: note = Table B: HLA-DQA1*03:02-B1*03:03L HLA-DRB1*04:03L HLA-DRB1*04:02L HLA-DQA1*01:01-B1*05:01L HLA-DQA1*01-B1*05L HLA-DQA1*05:01-B1*02:01L HLA-DQA1*03:01-B1*03:02L HLA-DRB1*16:01L HLA-DQA1*02:01-B1*03:03L
NKIVDEPEEH

SEQ ID NO: 10329 - protein, 10 aa, Severe acute respiratory syndrome coronavirus 2
  REGION 1..10: note = Table B: HLA-DQA1*03:02-B1*03:03M HLA-DQA1*05:01-B1*03:01L HLA-DQA1*01:02-B1*06:02L HLA-DRB1*01:02L HLA-DPA1*03:01-B1*04:02L HLA-DRB1*14:01L HLA-DRB1*11:02L HLA-DRB1*14:02L HLA-DQA1*05:05-B1*03:19L
  REGION 1..10: note = CONT. FROM ABOVE: HLA-DQA1*05:01-B1*02:01L HLA-DQA1*05:05-B1*03: 116L HLA-DRB1*09:01L HLA-DPA1*01:03-B1*04:02L HLA-DPA1*02:01-B1* 13:01L HLA-DPA1*03:01-B1*105:01L HLA-DQA1*03:01-B1*03:02L HLA-DP A1*01:03-B1*104:01L HLA-DPA1*01:02-B1*04:01L HLA-DRB1*10:01L
  REGION 1..10: note = CONT. FROM ABOVE: HLA-DRB1*16:01L HLA-DQA1*01:03-B1*06:01L HLA-D RB1*08:03L HLA-DQA1*02:01-B1*03:03L HLA-DRB1*15:03L
KIVDEPEEHV

SEQ ID NO: 10330 - protein, 10 aa, Severe acute respiratory syndrome coronavirus 2
  REGION 1..10: note = Table B: HLA-DQA1*03:02-B1*03:03L HLA-DQA1*05:01-B1*03:01L HLA-DRB1*04:01L HLA-DRB1*04:03L HLA-DRB1*13:02L HLA-DRB1*13:03L HLA-DRB1*01:03L HLA-DRB1*04:02L HLA-DRB1*04:04L HLA-DRB1*04:05L HLA-DQA1*01:02-B1*06:02L HLA-DRB1*01:02L HLA-DRB4*03:01NL
  REGION 1..10: note = CONT. FROM ABOVE: HLA-DRB1*08:04L HLA-DRB1*08:77L HLA-DRB3*02:01 L HLA-DPA1*01:03-B1*03:01L HLA-DPA1*03:01-B1*04:02L HLA-DRB1*14: 01L HLA-DRB1*11:03L HLA-DRB1*11:04L HLA-DRB1*14:02L HLA-DQA1*01: 01-B1*05:01L HLA-DRB5*01:01L HLA-DQA1*01-B1*05M
  REGION 1..10: note = CONT. FROM ABOVE: HLA-DQA1*05:05-B1*03:19L HLA-DQA1*05:01-B1*02: 01M HLA-DRB4*01:01L HLA-DRB1*04:10L HLA-DPA1*01:03-B1*04:02L HLA -DRB1*12:01L HLA-DRB1*12:02L HLA-DRB3*01:01L HLA-DPA1*02:01-B1*1 3:01L HLA-DPA1*03:01-B1*105:01L HLA-DQA1*03:01-B1*03:02L
  REGION 1..10: note = CONT. FROM ABOVE: HLA-DRB1*14:54L HLA-DQA1*05:05-B1*03:01L HLA-D RB1*14:17L HLA-DPA1*01:02-B1*04:01L HLA-DRB1*10:01L HLA-DRB1*16: 01L HLA-DQA1*01:03-B1*06:01L HLA-DRB1*04:08L HLA-DQA1*02:01-B1*0 3:03L HLA-DRB1*15:03L
IVDEPEEHVQ

SEQ ID NO: 10331 - protein, 10 aa, Severe acute respiratory syndrome coronavirus 2
  REGION 1..10: note = Table B: HLA-DQA1*03:02-B1*03:03L HLA-DRB1*11:02L HLA-DQA1*05:05-B1*03:19M HLA-DPA1*01:03-B1*104:01L
PEEHVQIHTI

SEQ ID NO: 10332 - protein, 11 aa, Severe acute respiratory syndrome coronavirus 2
  REGION 1..11: note = Table B: HLA-DQA1*03:02-B1*03:03L HLA-DRB1*04:01L HLA-DRB1*13:02L HLA-DRB1*13:03L HLA-DRB1*01:03L HLA-DRB1*04:02M HLA-DRB1*04:04L HLA-DRB1*04:05L HLA-DQA1*01:02-B1*06:02L HLA-DRB1*01:02L HLA-DRB4*03:01NL HLA-DRB1*08:77L HLA-DRB1*14:01L
  REGION 1..11: note = CONT. FROM ABOVE: HLA-DRB1*11:03L HLA-DRB1*11:04L HLA-DRB5*01:01 L HLA-DQA1*01-B1*05L HLA-DQA1*05:01-B1*02:01L HLA-DRB1*04:10M HL A-DRB1*12:01L HLA-DRB1*12:02L HLA-DQA1*03:01-B1*03:02L HLA-DRB1* 14:54L HLA-DRB1*10:01L HLA-DRB1*16:01L HLA-DRB1*04:08L
  REGION 1..11: note = CONT. FROM ABOVE: HLA-DRB1*08:03L HLA-DQA1*02:01-B1*03:03L HLA-D RB1*15:03L
VQIHTIDGSSG

SEQ ID NO: 10333 - protein, 10 aa, Severe acute respiratory syndrome coronavirus 2
  REGION 1..10: note = Table B: HLA-DQA1*03:02-B1*03:03L HLA-DQA1*05:01-B1*03:01L HLA-DRB1*13:03L HLA-DQA1*01:02-B1*06:02L HLA-DRB1*01:02L HLA-DRB1*14:02L HLA-DQA1*05:01-B1*02:01L HLA-DRB1*12:01L HLA-DPA1*03:01-B1*105:01L HLA-DQA1*03:01-B1*03:02L
  REGION 1..10: note = CONT. FROM ABOVE: HLA-DQA1*02:01-B1*03:03L HLA-DRB1*15:03L
HTIDGSSGVV

SEQ ID NO: 10334 - protein, 12 aa, Severe acute respiratory syndrome coronavirus 2
  REGION 1..12: note = Table B: HLA-DQA1*03:02-B1*03:03L HLA-DQA1*05:01-B1*03:01L HLA-DQA1*05:01-B1*02:01L HLA-DQA1*03:01-B1*03:02L HLA-DQA1*02:01-B1*03:03L
TIDGSSGVVNPV

SEQ ID NO: 10335 - protein, 10 aa, Severe acute respiratory syndrome coronavirus 2
  REGION 1..10: note = Table B: HLA-DQA1*03:02-B1*03:03L HLA-DQA1*05:01-B1*03:01L HLA-DQA1*01:02-B1*06:02L HLA-DQA1*05:05-B1*03:19L HLA-DQA1*05:01-B1*02:01L HLA-DPA1*03:01-B1*105:01L HLA-DQA1*03:01-B1*03:02L HLA-DQA1*05:05-B1*03:01L
  REGION 1..10: note = CONT. FROM ABOVE: HLA-DQA1*01:03-B1*06:01L HLA-DQA1*02:01-B1*03: 03L
GSSGVVNPVM

SEQ ID NO: 10336 - protein, 12 aa, Severe acute respiratory syndrome coronavirus 2
  REGION 1..12: note = Table B: HLA-DQA1*03:02-B1*03:03L HLA-DQA1*05:01-B1*02:01L HLA-DPA1*03:01-B1*105:01L
SSGVVNPVMEPI

SEQ ID NO: 10337 - protein, 13 aa, Severe acute respiratory syndrome coronavirus 2
  REGION 1..13: note = Table B: HLA-DQA1*03:02-B1*03:03L HLA-DRB1*04:02L HLA-DRB1*04:05L HLA-DRB1*01:02L HLA-DRB3*02:01L HLA-DRB1*04:10L HLA-DRB1*12:02L HLA-DRB1*14:54L HLA-DQA1*05:05-B1*03:01L HLA-DRB1*14:17L
SGVVNPVMEPIYD

SEQ ID NO: 10338 - protein, 13 aa, Severe acute respiratory syndrome coronavirus 2
  REGION 1..13: note = Table B: HLA-DQA1*03:02-B1*03:03L HLA-DRB1*13:03L HLA-DQA1*01:01-B1*05:01L HLA-DRB1*12:02L HLA-DRB1*04:08L
VNPVMEPIYDEPT

SEQ ID NO: 10339 - protein, 13 aa, Severe acute respiratory syndrome coronavirus 2
  REGION 1..13: note = Table B: HLA-DQA1*03:02-B1*03:03L HLA-DRB1*13:03L HLA-DRB1*01:03L HLA-DRB1*04:04L HLA-DRB1*01:02L HLA-DRB1*11:04L HLA-DRB1*12:02L HLA-DRB1*10:01L HLA-DRB1*04:08L HLA-DRB1*08:03L HLA-DRB1*15:03L
NPVMEPIYDEPTT

SEQ ID NO: 10340 - protein, 12 aa, Severe acute respiratory syndrome coronavirus 2
  REGION 1..12: note = Table B: HLA-DQA1*03:02-B1*03:03L HLA-DRB1*04:03L HLA-DQA1*05:01-B1*02:01L HLA-DQA1*03:01-B1*03:02L
EPIYDEPTTTTS

SEQ ID NO: 10341 - protein, 11 aa, Severe acute respiratory syndrome coronavirus 2
  REGION 1..11: note = Table B: HLA-DQA1*03:02-B1*03:03L HLA-DQA1*01-B1*05L HLA-DQA1*05:01-B1*02:01L HLA-DQA1*03:01-B1*03:02L
DEPTTTTSVPL

SEQ ID NO: 10342 - protein, 10 aa, Severe acute respiratory syndrome coronavirus 2
  REGION 1..10: note = Table B: HLA-DQA1*03:02-B1*03:03L HLA-DQA1*01-B1*05L HLA-DQA1*05:01-B1*02:01L HLA-DQA1*03:01-B1*03:02L
SFVSEETGTL

SEQ ID NO: 10343 - protein, 10 aa, Severe acute respiratory syndrome coronavirus 2
  REGION 1..10: note = Table B: HLA-DQA1*03:02-B1*03:03L HLA-DQA1*05:05-B1*03:19L HLA-DQA1*03:01-B1*03:02L HLA-DRB1*15:03L
FVSEETGTLI

SEQ ID NO: 10344 - protein, 11 aa, Severe acute respiratory syndrome coronavirus 2
  REGION 1..11: note = Table B: HLA-DQA1*03:02-B1*03:03L HLA-DRB1*04:03L HLA-DQA1*05:01-B1*02:01L HLA-DQA1*03:01-B1*03:02L HLA-DRB1*16:01L HLA-DQA1*01:03-B1*06:01L HLA-DQA1*02:01-B1*03:03L
VSEETGTLIVN

SEQ ID NO: 10345 - protein, 10 aa, Severe acute respiratory syndrome coronavirus 2
  REGION 1..10: note = Table B: HLA-DQA1*03:02-B1*03:03L HLA-DQA1*05:01-B1*03:01L HLA-DRB1*13:03L HLA-DQA1*01:02-B1*06:02M HLA-DRB1*01:02L HLA-DQA1*05:05-B1*03:19L HLA-DQA1*05:01-B1*02:01L HLA-DPA1*02:01-B1*13:01L HLA-DPA1*03:01-B1*105:01M
  REGION 1..10: note = CONT. FROM ABOVE: HLA-DQA1*05:05-B1*03:01L HLA-DQA1*01:03-B1*06: 01L HLA-DQA1*02:01-B1*03:03L HLA-DRB1*15:03L
ETGTLIVNSV

SEQ ID NO: 10346 - protein, 10 aa, Severe acute respiratory syndrome coronavirus 2
  REGION 1..10: note = Table B: HLA-DQA1*03:02-B1*03:03L HLA-DQA1*03:01-B1*03:02L HLA-DQA1*01:03-B1*06:01L HLA-DQA1*02:01-B1*03:03L
TGTLIVNSVL

SEQ ID NO: 10347 - protein, 10 aa, Severe acute respiratory syndrome coronavirus 2
  REGION 1..10: note = Table B: HLA-DQA1*03:02-B1*03:03L
GTLIVNSVLL

SEQ ID NO: 10348 - protein, 10 aa, Severe acute respiratory syndrome coronavirus 2
  REGION 1..10: note = Table B: HLA-DQA1*03:02-B1*03:03L HLA-DQA1*05:01-B1*03:01L HLA-DRB1*13:02L HLA-DRB1*01:02L HLA-DRB3*02:01L HLA-DPA1*03:01-B1*04:02L HLA-DRB1*14:01L HLA-DQA1*05:01-B1*02:01L HLA-DRB1*12:01L
  REGION 1..10: note = CONT. FROM ABOVE: HLA-DPA1*03:01-B1*105:01L HLA-DPA1*01:02-B1*04 :01L HLA-DRB1*07:01L HLA-DRB1*16:01L HLA-DQA1*02:01-B1*03:03L HL A-DRB1*15:03L
TLAILTALRL

SEQ ID NO: 10349 - protein, 10 aa, Severe acute respiratory syndrome coronavirus 2
  REGION 1..10: note = Table B: HLA-DQA1*03:02-B1*03:03L HLA-DQA1*05:01-B1*03:01L HLA-DRB1*04:03L HLA-DRB1*13:03L HLA-DRB1*01:03L HLA-DRB1*04:02L HLA-DRB1*04:05L HLA-DRB4*03:01NL HLA-DQA1*05:01-B1*02:01L HLA-DRB1*12:01L HLA-DPA1*03:01-B1*105:01L
  REGION 1..10: note = CONT. FROM ABOVE: HLA-DQA1*03:01-B1*03:02L HLA-DRB1*14:54L HLA-D RB1*14:17L HLA-DPA1*01:02-B1*04:01L HLA-DRB1*16:01L HLA-DQA1*01: 03-B1*06:01L HLA-DQA1*02:01-B1*03:03L
IVNVSLVKPS

SEQ ID NO: 10350 - protein, 10 aa, Severe acute respiratory syndrome coronavirus 2
  REGION 1..10: note = Table B: HLA-DQA1*03:02-B1*03:03L HLA-DQA1*05:01-B1*03:01L HLA-DRB1*13:03L HLA-DRB1*01:03L HLA-DQA1*01:02-B1*06:02M HLA-DRB4*03:01NL HLA-DRB1*08:77L HLA-DPA1*01:03-B1*03:01L HLA-DPA1*03:01-B1*04:02L HLA-DRB1*03:01L HLA-DRB1*14:01L
  REGION 1..10: note = CONT. FROM ABOVE: HLA-DRB1*11:02L HLA-DRB1*14:02L HLA-DQA1*01-B1 *05L HLA-DQA1*05:05-B1*03:19M HLA-DQA1*05:01-B1*02:01L HLA-DRB4* 01:01L HLA-DPA1*01:03-B1*04:01L HLA-DQA1*05:05-B1*03:116L HLA-DP A1*01:03-B1*04:02L HLA-DRB1*12:01L HLA-DPA1*02:01-B1*13:01L
  REGION 1..10: note = CONT. FROM ABOVE: HLA-DPA1*03:01-B1*105:01L HLA-DPA1*01:03-B1*10 4:01L HLA-DPA1*01:02-B1*04:01L HLA-DRB1*10:01L HLA-DRB1*16:01L H LA-DQA1*01:03-B1*06:01L HLA-DRB1*08:02L HLA-DQA1*02:01-B1*03:03L HLA-DRB1*15:03L
SLVKPSFYVY

SEQ ID NO: 10351 - protein, 15 aa, Severe acute respiratory syndrome coronavirus 2
  REGION 1..15: note = Table B: HLA-DQA1*03:02-B1*03:03L HLA-DRB1*03:01L HLA-DRB1*13:01L
VKPSFYVYSRVKNLN

SEQ ID NO: 10352 - protein, 19 aa, Severe acute respiratory syndrome coronavirus 2
  REGION 1..19: note = Table B: HLA-DQA1*03:02-B1*03:03L HLA-DRB1*03:01L HLA-DRB1*11:02L HLA-DRB1*14:02L HLA-DQA1*05:05-B1*03:19L HLA-DQA1*05:01-B1*02:01L HLA-DPA1*01:03-B1*104:01L HLA-DRB1*08:02L
PSFYVYSRVKNLNSSRVPD

SEQ ID NO: 10353 - protein, 10 aa, Severe acute respiratory syndrome coronavirus 2
  REGION 1..10: note = Table B: HLA-DQA1*03:02-B1*03:03L HLA-DQA1*05:01-B1*03:01L HLA-DRB1*04:03L HLA-DRB1*13:02L HLA-DRB1*13:03L HLA-DRB1*04:02L HLA-DQA1*01:02-B1*06:02L HLA-DPA1*03:01-B1*04:02L HLA-DRB1*14:01L HLA-DQA1*01-B1*05L HLA-DQA1*05:05-B1*03:19L
  REGION 1..10: note = CONT. FROM ABOVE: HLA-DQA1*05:01-B1*02:01L HLA-DRB1*12:01L HLA-D PA1*03:01-B1*105:01L HLA-DQA1*03:01-B1*03:02L HLA-DQA1*05:05-B1* 03:01L HLA-DPA1*01:02-B1*04:01L HLA-DRB1*16:01L HLA-DQA1*01:03-B 1*06:01L HLA-DQA1*02:01-B1*03:03L HLA-DRB1*15:03L
NLNSSRVPDL

SEQ ID NO: 10354 - protein, 10 aa, Severe acute respiratory syndrome coronavirus 2
  REGION 1..10: note = Table B: HLA-DQA1*03:02-B1*03:03L HLA-DQA1*05:01-B1*03:01L HLA-DQA1*01:02-B1*06:02L HLA-DQA1*05:05-B1*03:19L HLA-DQA1*05:01-B1*02:01L HLA-DPA1*03:01-B1*105:01L HLA-DQA1*03:01-B1*03:02L HLA-DQA1*05:05-B1*03:01L
  REGION 1..10: note = CONT. FROM ABOVE: HLA-DQA1*01:03-B1*06:01L HLA-DQA1*02:01-B1*03: 03L
LNSSRVPDLL

SEQ ID NO: 10355 - protein, 11 aa, Severe acute respiratory syndrome coronavirus 2
  REGION 1..11: note = Table B: HLA-DQA1*03:02-B1*03:03L HLA-DQA1*05:01-B1*02:01L HLA-DQA1*03:01-B1*03:02L
DSNGTITVEEL

SEQ ID NO: 10356 - protein, 10 aa, Severe acute respiratory syndrome coronavirus 2
  REGION 1..10: note = Table B: HLA-DQA1*03:02-B1*03:03L HLA-DQA1*05:01-B1*03:01L HLA-DQA1*01:02-B1*06:02L HLA-DQA1*01:01-B1*05:01L HLA-DQA1*05:05-B1*03:19L HLA-DQA1*05:01-B1*02:01L HLA-DPA1*03:01-B1*105:01L HLA-DQA1*03:01-B1*03:02L
  REGION 1..10: note = CONT. FROM ABOVE: HLA-DQA1*05:05-B1*03:01L HLA-DRB1*16:01L HLA-D QA1*01:03-B1*06:01M HLA-DQA1*02:01-B1*03:03L
NGTITVEELK

SEQ ID NO: 10357 - protein, 10 aa, Severe acute respiratory syndrome coronavirus 2
  REGION 1..10: note = Table B: HLA-DQA1*03:02-B1*03:03L HLA-DQA1*05:01-B1*03:01L HLA-DQA1*01:02-B1*06:02L HLA-DPA1*03:01-B1*04:02L HLA-DQA1*05:01-B1*02:01L HLA-DRB1*12:01L HLA-DPA1*03:01-B1*105:01L HLA-DQA1*03:01-B1*03:02L
  REGION 1..10: note = CONT. FROM ABOVE: HLA-DPA1*01:02-B1*04:01L HLA-DRB1*16:01L HLA-D QA1*01:03-B1*06:01L HLA-DQA1*02:01-B1*03:03L HLA-DRB1*15:03L
TITVEELKKL

SEQ ID NO: 10358 - protein, 10 aa, Severe acute respiratory syndrome coronavirus 2
  REGION 1..10: note = Table B: HLA-DQA1*03:02-B1*03:03L HLA-DQA1*05:01-B1*03:01M HLA-DRB1*13:03L HLA-DRB1*01:03L HLA-DQA1*01:02-B1*06:02L HLA-DRB4*03:01NL HLA-DRB1*08:77M HLA-DPA1*01:03-B1*03:01L HLA-DPA1*03:01-B1*04:02M HLA-DRB1*03:01M HLA-DRB1*14:02L
  REGION 1..10: note = CONT. FROM ABOVE: HLA-DQA1*01-B1*05L HLA-DQA1*05:05-B1*03:19L HL A-DQA1*05:01-B1*02:01L HLA-DRB4*01:01M HLA-DPA1*01:03-B1*04:01M HLA-DQA1*05:05-B1*03:116L HLA-DPA1*01:03-B1*04:02L HLA-DRB1*12:0 1L HLA-DQA1*03:01-B1*03:02L HLA-DPA1*01:03-B1*104:01L
  REGION 1..10: note = CONT. FROM ABOVE: HLA-DPA1*01:02-B1*04:01L HLA-DRB1*10:01L HLA-D RB1*16:01L HLA-DQA1*02:01-B1*03:03L HLA-DRB1*15:03M
EELKKLLEQW

SEQ ID NO: 10359 - protein, 10 aa, Severe acute respiratory syndrome coronavirus 2
  REGION 1..10: note = Table B: HLA-DQA1*03:02-B1*03:03L HLA-DQA1*05:05-B1*03:19L
KLLEQWNLVI

SEQ ID NO: 10360 - protein, 10 aa, Severe acute respiratory syndrome coronavirus 2
  REGION 1..10: note = Table B: HLA-DQA1*03:02-B1*03:03L HLA-DQA1*05:01-B1*03:01L HLA-DRB1*04:03L HLA-DRB1*13:02L HLA-DRB1*01:03L HLA-DQA1*01:02-B1*06:02L HLA-DRB1*01:02L HLA-DRB3*02:01L HLA-DPA1*01:03-B1*03:01L HLA-DPA1*03:01-B1*04:02L
  REGION 1..10: note = CONT. FROM ABOVE: HLA-DRB1*14:01L HLA-DQA1*05:05-B1*03:19L HLA-D QA1*05:01-B1*02:01L HLA-DPA1*01:03-B1*04:01L HLA-DRB1*12:01L HLA -DPA1*03:01-B1*105:01L HLA-DQA1*03:01-B1*03:02L HLA-DQA1*05:05-B 1*03:01L HLA-DPA1*01:02-B1*04:01L HLA-DRB1*07:01L
  REGION 1..10: note = CONT. FROM ABOVE: HLA-DRB1*16:01L HLA-DQA1*01:03-B1*06:01L HLA-D QA1*02:01-B1*03:03L HLA-DRB1*15:03L
FVLAAVYRIN

SEQ ID NO: 10361 - protein, 12 aa, Severe acute respiratory syndrome coronavirus 2
  REGION 1..12: note = Table B: HLA-DQA1*03:02-B1*03:03L HLA-DQA1*05:01-B1*03:01L HLA-DRB1*13:02L HLA-DRB1*01:03L HLA-DRB1*04:02L HLA-DRB1*04:05L HLA-DQA1*01:02-B1*06:02L HLA-DRB1*01:02L HLA-DRB1*08:04L HLA-DPA1*01:03-B1*03:01L HLA-DPA1*03:01-B1*04:02L
  REGION 1..12: note = CONT. FROM ABOVE: HLA-DRB1*14:01L HLA-DRB1*08:01L HLA-DQA1*01-B1 *05L HLA-DQA1*05:05-B1*03:19L HLA-DQA1*05:01-B1*02:01L HLA-DPA1* 01:03-B1*04:02L HLA-DRB1*12:01L HLA-DPA1*02:01-B1*13:01L HLA-DPA 1*03:01-B1*105:01L HLA-DQA1*05:05-B1*03:01L
  REGION 1..12: note = CONT. FROM ABOVE: HLA-DPA1*01:02-B1*04:01L HLA-DRB1*16:01L HLA-D QA1*01:03-B1*06:01L HLA-DRB1*04:08L HLA-DQA1*02:01-B1*03:03L HLA -DRB1*15:03L
VYRINWITGGIA

SEQ ID NO: 10362 - protein, 12 aa, Severe acute respiratory syndrome coronavirus 2
  REGION 1..12: note = Table B: HLA-DQA1*03:02-B1*03:03L HLA-DQA1*05:01-B1*03:01L HLA-DRB1*13:02L HLA-DRB1*01:03L HLA-DQA1*01:02-B1*06:02L HLA-DRB1*01:01L HLA-DRB1*01:02L HLA-DPA1*01:03-B1*03:01L HLA-DPA1*03:01-B1*04:02L HLA-DQA1*01-B1*05L
  REGION 1..12: note = CONT. FROM ABOVE: HLA-DQA1*05:01-B1*02:01L HLA-DRB1*12:01L HLA-D PA1*03:01-B1*105:01L HLA-DQA1*05:05-B1*03:01L HLA-DRB1*14:17L HL A-DRB1*07:01L HLA-DRB1*10:01L HLA-DRB1*16:01L HLA-DQA1*01:03-B1* 06:01L HLA-DRB1*04:08L HLA-DQA1*02:01-B1*03:03L HLA-DRB1*15:03L
RINWITGGIAIA

SEQ ID NO: 10363 - protein, 12 aa, Severe acute respiratory syndrome coronavirus 2
  REGION 1..12: note = Table B: HLA-DQA1*03:02-B1*03:03L HLA-DQA1*05:01-B1*03:01L HLA-DRB1*01:02L HLA-DQA1*05:01-B1*02:01L HLA-DRB1*12:01L HLA-DQA1*02:01-B1*03:03L HLA-DRB1*15:03L
INWITGGIAIAM

SEQ ID NO: 10364 - protein, 10 aa, Severe acute respiratory syndrome coronavirus 2
  REGION 1..10: note = Table B: HLA-DQA1*03:02-B1*03:03L HLA-DQA1*05:01-B1*03:01L HLA-DQA1*01:02-B1*06:02L HLA-DQA1*05:05-B1*03:19L HLA-DQA1*05:05-B1*03:01L HLA-DQA1*01:03-B1*06:01L HLA-DQA1*02:01-B1*03:03L
ITGGIAIAMA

SEQ ID NO: 10365 - protein, 12 aa, Severe acute respiratory syndrome coronavirus 2
  REGION 1..12: note = Table B: HLA-DQA1*03:02-B1*03:03L HLA-DRB1*04:03L HLA-DRB1*04:02L HLA-DRB1*04:05L HLA-DQA1*01:02-B1*06:02L HLA-DPA1*03:01-B1*105:01L HLA-DRB1*14:17L HLA-DRB1*16:01L HLA-DQA1*01:03-B1*06:01L
TRSMWSFNPETN

SEQ ID NO: 10366 - protein, 10 aa, Severe acute respiratory syndrome coronavirus 2
  REGION 1..10: note = Table B: HLA-DQA1*03:02-B1*03:03L HLA-DQA1*05:01-B1*03:01L HLA-DRB1*04:03L HLA-DRB1*13:02L HLA-DRB1*13:03L HLA-DRB1*04:02L HLA-DQA1*01:02-B1*06:02L HLA-DRB1*01:02L HLA-DRB1*08:77L HLA-DRB3*02:01L HLA-DPA1*03:01-B1*04:02L HLA-DRB1*14:01L
  REGION 1..10: note = CONT. FROM ABOVE: HLA-DRB1*14:02L HLA-DQA1*01-B1*05L HLA-DQA1*05 :05-B1*03:19L HLA-DQA1*05:01-B1*02:01L HLA-DPA1*01:03-B1*04:01L HLA-DQA1*05:05-B1*03:116L HLA-DRB1*09:01L HLA-DRB1*12:01L HLA-DP A1*02:01-B1*13:01L HLA-DPA1*03:01-B1*105:01L
  REGION 1..10: note = CONT. FROM ABOVE: HLA-DQA1*03:01-B1*03:02L HLA-DQA1*05:05-B1*03: 01L HLA-DPA1*01:02-B1*04:01L HLA-DRB1*07:01L HLA-DRB1*16:01L HLA -DQA1*01:03-B1*06:01L HLA-DQA1*02:01-B1*03:03L HLA-DRB1*15:03L
WSFNPETNIL

SEQ ID NO: 10367 - protein, 10 aa, Severe acute respiratory syndrome coronavirus 2
  REGION 1..10: note = Table B: HLA-DQA1*03:02-B1*03:03L HLA-DQA1*05:01-B1*03:01L HLA-DRB1*09:01L HLA-DPA1*02:01-B1*13:01L HLA-DQA1*03:01-B1*03:02L HLA-DRB1*16:01L HLA-DQA1*02:01-B1*03:03L HLA-DRB1*15:03L
SFNPETNILL

SEQ ID NO: 10368 - protein, 14 aa, Severe acute respiratory syndrome coronavirus 2
  REGION 1..14: note = Table B: HLA-DQA1*03:02-B1*03:03L HLA-DQA1*05:01-B1*03:01L HLA-DRB1*13:02L HLA-DRB1*13:03L HLA-DRB1*01:03L HLA-DRB1*04:05L HLA-DRB1*01:02L HLA-DRB4*03:01NL HLA-DRB1*08:04L HLA-DRB3*02:01L HLA-DPA1*01:03-B1*03:01L HLA-DPA1*03:01-B1*04:02L
  REGION 1..14: note = CONT. FROM ABOVE: HLA-DRB1*08:01L HLA-DQA1*01-B1*05L HLA-DQA1*05 :05-B1*03:19L HLA-DQA1*05:01-B1*02:01L HLA-DRB1*04:10L HLA-DRB1* 12:02L HLA-DPA1*02:01-B1*13:01L HLA-DPA1*03:01-B1*105:01L HLA-DQ A1*05:05-B1*03:01L HLA-DRB1*04:08L HLA-DRB1*15:03L
NPETNILLNVPLHG

SEQ ID NO: 10369 - protein, 10 aa, Severe acute respiratory syndrome coronavirus 2
  REGION 1..10: note = Table B: HLA-DQA1*03:02-B1*03:03L HLA-DQA1*05:01-B1*03:01L HLA-DRB1*04:03L HLA-DRB1*01:02L HLA-DRB1*14:01L HLA-DRB1*14:02L HLA-DRB1*12:01L HLA-DQA1*03:01-B1*03:02L HLA-DRB1*16:01L HLA-DQA1*02:01-B1*03:03L HLA-DRB1*15:03L
ILLNVPLHGT

SEQ ID NO: 10370 - protein, 10 aa, Severe acute respiratory syndrome coronavirus 2
  REGION 1..10: note = Table B: HLA-DQA1*03:02-B1*03:03L HLA-DQA1*05:05-B1*03:19L
LLNVPLHGTI

SEQ ID NO: 10371 - protein, 10 aa, Severe acute respiratory syndrome coronavirus 2
  REGION 1..10: note = Table B: HLA-DQA1*03:02-B1*03:03L HLA-DQA1*03:01-B1*03:02L HLA-DQA1*02:01-B1*03:03L
LTRPLLESEL

SEQ ID NO: 10372 - protein, 10 aa, Severe acute respiratory syndrome coronavirus 2
  REGION 1..10: note = Table B: HLA-DQA1*03:02-B1*03:03L HLA-DQA1*05:05-B1*03:19M HLA-DQA1*03:01-B1*03:02L HLA-DPA1*01:03-B1*104:01L
LESELVIGAV

SEQ ID NO: 10373 - protein, 10 aa, Severe acute respiratory syndrome coronavirus 2
  REGION 1..10: note = Table B: HLA-DQA1*03:02-B1*03:03M HLA-DQA1*05:05-B1*03:19L HLA-DRB1*09:01L HLA-DQA1*03:01-B1*03:02L HLA-DPA1*01:03-B1*104:01L
SELVIGAVIL

SEQ ID NO: 10374 - protein, 11 aa, Severe acute respiratory syndrome coronavirus 2
  REGION 1..11: note = Table B: HLA-DQA1*03:02-B1*03:03L
VIGAVILRGHL

SEQ ID NO: 10375 - protein, 11 aa, Severe acute respiratory syndrome coronavirus 2
  REGION 1..11: note = Table B: HLA-DQA1*03:02-B1*03:03L
DIKDLPKEITV

SEQ ID NO: 10376 - protein, 12 aa, Severe acute respiratory syndrome coronavirus 2
  REGION 1..12: note = Table B: HLA-DQA1*03:02-B1*03:03L HLA-DRB1*04:03L HLA-DRB1*04:02L HLA-DRB1*04:05L HLA-DQA1*01:02-B1*06:02L HLA-DQA1*01:01-B1*05:01L HLA-DRB1*04:10L HLA-DRB1*14:17L HLA-DRB1*16:01L HLA-DQA1*01:03-B1*06:01L
  REGION 1..12: note = CONT. FROM ABOVE: HLA-DQA1*02:01-B1*03:03L
LPKEITVATSRT

SEQ ID NO: 10377 - protein, 10 aa, Severe acute respiratory syndrome coronavirus 2
  REGION 1..10: note = Table B: HLA-DQA1*03:02-B1*03:03L HLA-DQA1*05:01-B1*03:01L HLA-DRB1*04:03L HLA-DRB1*13:02L HLA-DRB1*13:03L HLA-DRB1*01:03L HLA-DRB1*04:02L HLA-DRB1*04:05L HLA-DQA1*01:02-B1*06:02L HLA-DRB1*01:02L HLA-DRB4*03:01NL HLA-DRB1*08:77L HLA-DRB3*02:01L
  REGION 1..10: note = CONT. FROM ABOVE: HLA-DPA1*01:03-B1*03:01L HLA-DPA1*03:01-B1*04: 02L HLA-DRB1*14:01L HLA-DRB1*11:03L HLA-DRB1*11:04L HLA-DRB1*14: 02L HLA-DRB5*01:01L HLA-DQA1*01-B1*05L HLA-DQA1*05:05-B1*03:19L HLA-DQA1*05:01-B1*02:01L HLA-DPA1*01:03-B1*04:01L
  REGION 1..10: note = CONT. FROM ABOVE: HLA-DQA1*05:05-B1*03:116L HLA-DRB1*09:01L HLA- DPA1*01:03-B1*04:02L HLA-DRB1*12:01L HLA-DRB1*12:02L HLA-DPA1*02 :01-B1*13:01L HLA-DPA1*03:01-B1*105:01L HLA-DQA1*03:01-B1*03:02L HLA-DRB1*14:54L HLA-DQA1*05:05-B1*03:01L HLA-DRB1*14:17L
  REGION 1..10: note = CONT. FROM ABOVE: HLA-DPA1*01:02-B1*04:01L HLA-DRB1*07:01L HLA-D RB1*16:01L HLA-DQA1*01:03-B1*06:01L HLA-DQA1*02:01-B1*03:03L HLA -DRB1*15:03L
EITVATSRTL

SEQ ID NO: 10378 - protein, 10 aa, Severe acute respiratory syndrome coronavirus 2
  REGION 1..10: note = Table B: HLA-DQA1*03:02-B1*03:03L HLA-DQA1*05:01-B1*03:01L HLA-DRB1*04:01L HLA-DRB1*04:03L HLA-DRB1*13:02L HLA-DRB1*13:03M HLA-DRB1*01:03M HLA-DRB1*04:02L HLA-DQA1*01:02-B1*06:02M HLA-DRB1*01:01L HLA-DRB4*03:01NL HLA-DRB1*08:77M
  REGION 1..10: note = CONT. FROM ABOVE: HLA-DPA1*01:03-B1*03:01M HLA-DPA1*03:01-B1*04: 02L HLA-DRB1*03:01L HLA-DRB1*14:01L HLA-DRB1*11:02L HLA-DRB1*11: 03L HLA-DRB1*11:04L HLA-DRB1*14:02M HLA-DRB1*11:01L HLA-DRB5*01: 01L HLA-DQA1*01-B1*05L HLA-DQA1*05:05-B1*03:19M
  REGION 1..10: note = CONT. FROM ABOVE: HLA-DQA1*05:01-B1*02:01M HLA-DRB4*01:01L HLA-D PA1*01:03-B1*04:01M HLA-DQA1*05:05-B1*03:116L HLA-DPA1*01:03-B1* 04:02L HLA-DRB1*12:01L HLA-DRB1*12:02L HLA-DPA1*02:01-B1*13:01L HLA-DPA1*03:01-B1*105:01L HLA-DQA1*03:01-B1*03:02L
  REGION 1..10: note = CONT. FROM ABOVE: HLA-DRB1*14:54L HLA-DPA1*01:03-B1*104:01L HLA- DQA1*05:05-B1*03:01L HLA-DRB1*14:17L HLA-DPA1*01:02-B1*04:01L HL A-DRB1*10:01L HLA-DRB1*16:01M HLA-DQA1*01:03-B1*06:01L HLA-DRB1* 08:02L HLA-DQA1*02:01-B1*03:03M HLA-DRB1*15:03L
TVATSRTLSY

SEQ ID NO: 10379 - protein, 13 aa, Severe acute respiratory syndrome coronavirus 2
  REGION 1..13: note = Table B: HLA-DQA1*03:02-B1*03:03L HLA-DRB1*04:01L HLA-DRB1*04:03L HLA-DRB1*04:02L HLA-DRB1*04:04L HLA-DRB1*08:77L HLA-DRB3*02:01L HLA-DPA1*01:03-B1*03:01L HLA-DPA1*03:01-B1*04:02L HLA-DRB1*14:01L HLA-DRB1*11:03L
  REGION 1..13: note = CONT. FROM ABOVE: HLA-DRB1*11:01L HLA-DQA1*01-B1*05L HLA-DQA1*05 :01-B1*02:01L HLA-DRB1*09:01L HLA-DRB3*01:01L HLA-DPA1*02:01-B1* 13:01L HLA-DPA1*01:02-B1*04:01L
LSYYKLGASQRVA

SEQ ID NO: 10380 - protein, 11 aa, Severe acute respiratory syndrome coronavirus 2
  REGION 1..11: note = Table B: HLA-DQA1*03:02-B1*03:03L HLA-DQA1*05:01-B1*03:01L HLA-DRB1*04:03L HLA-DRB1*13:02L HLA-DRB1*13:03L HLA-DRB1*04:02L HLA-DRB1*04:05L HLA-DQA1*01:02-B1*06:02L HLA-DRB1*01:01L HLA-DRB4*03:01NL HLA-DRB1*08:04L HLA-DRB1*08:77L HLA-DRB1*14:01L
  REGION 1..11: note = CONT. FROM ABOVE: HLA-DRB1*11:03L HLA-DRB1*11:04L HLA-DRB1*14:02 L HLA-DRB1*08:01L HLA-DRB1*11:01L HLA-DQA1*05:05-B1*03:19L HLA-D RB1*12:01L HLA-DRB1*12:02L HLA-DPA1*03:01-B1*105:01L HLA-DQA1*03 :01-B1*03:02L HLA-DRB1*14:54L HLA-DQA1*05:05-B1*03:01L
  REGION 1..11: note = CONT. FROM ABOVE: HLA-DRB1*14:17L HLA-DPA1*01:02-B1*04:01L HLA-D RB1*07:01L HLA-DRB1*10:01L HLA-DQA1*01:03-B1*06:01L HLA-DRB1*04: 08L HLA-DRB1*15:03L
YKLGASQRVAG

SEQ ID NO: 10381 - protein, 11 aa, Severe acute respiratory syndrome coronavirus 2
  REGION 1..11: note = Table B: HLA-DQA1*03:02-B1*03:03L HLA-DRB1*04:03L HLA-DRB1*04:02L HLA-DRB1*14:17L HLA-DQA1*02:01-B1*03:03L
GASQRVAGDSG

SEQ ID NO: 10382 - protein, 12 aa, Severe acute respiratory syndrome coronavirus 2
  REGION 1..12: note = Table B: HLA-DQA1*03:02-B1*03:03L HLA-DRB1*04:03L HLA-DQA1*01-B1*05L HLA-DQA1*05:01-B1*02:01L
ASQRVAGDSGFA

SEQ ID NO: 10383 - protein, 10 aa, Severe acute respiratory syndrome coronavirus 2
  REGION 1..10: note = Table B: HLA-DQA1*03:02-B1*03:03L HLA-DRB1*13:03L
RVAGDSGFAA

SEQ ID NO: 10384 - protein, 12 aa, Severe acute respiratory syndrome coronavirus 2
  REGION 1..12: note = Table B: HLA-DQA1*03:02-B1*03:03L HLA-DQA1*05:01-B1*03:01L HLA-DRB1*04:03L HLA-DRB1*01:03L HLA-DRB1*04:02L HLA-DRB1*04:05L HLA-DRB1*01:02L HLA-DRB4*03:01NL HLA-DQA1*01:01-B1*05:01L HLA-DQA1*01-B1*05L HLA-DRB1*12:01L HLA-DRB1*14:17L
  REGION 1..12: note = CONT. FROM ABOVE: HLA-DRB1*04:08L
VAGDSGFAAYSR

SEQ ID NO: 10385 - protein, 12 aa, Severe acute respiratory syndrome coronavirus 2
  REGION 1..12: note = Table B: HLA-DQA1*03:02-B1*03:03L HLA-DRB1*08:77L HLA-DRB1*11:02L HLA-DQA1*01-B1*05L HLA-DRB1*12:01L
AGDSGFAAYSRY

SEQ ID NO: 10386 - protein, 12 aa, Severe acute respiratory syndrome coronavirus 2
  REGION 1..12: note = Table B: HLA-DQA1*03:02-B1*03:03L HLA-DQA1*01:01-B1*05:01L HLA-DRB1*04:08L
GDSGFAAYSRYR

SEQ ID NO: 10387 - protein, 12 aa, Severe acute respiratory syndrome coronavirus 2
  REGION 1..12: note = Table B: HLA-DQA1*03:02-B1*03:03L HLA-DQA1*05:01-B1*03:01L HLA-DRB1*04:01L HLA-DRB1*13:02L HLA-DRB1*04:04L HLA-DQA1*01:02-B1*06:02L HLA-DRB1*01:02L HLA-DRB1*08:04L HLA-DRB1*08:77L HLA-DRB3*02:01L HLA-DPA1*01:03-B1*03:01L
  REGION 1..12: note = CONT. FROM ABOVE: HLA-DPA1*03:01-B1*04:02L HLA-DRB1*14:01L HLA-D RB1*11:03L HLA-DRB1*11:04L HLA-DRB1*14:02L HLA-DQA1*01:01-B1*05: 01L HLA-DRB1*08:01L HLA-DRB1*11:01L HLA-DRB5*01:01L HLA-DQA1*05: 01-B1*02:01L HLA-DRB1*04:10L HLA-DRB1*09:01L HLA-DRB1*12:01L
  REGION 1..12: note = CONT. FROM ABOVE: HLA-DRB1*12:02L HLA-DRB3*01:01L HLA-DPA1*02:01 -B1*13:01L HLA-DPA1*03:01-B1*105:01L HLA-DQA1*05:05-B1*03:01L HL A-DPA1*01:02-B1*04:01L HLA-DRB1*07:01L HLA-DRB1*10:01L HLA-DRB1* 04:08L HLA-DRB1*08:03L HLA-DRB1*15:03L
IGNYKLNTDHSS

SEQ ID NO: 10388 - protein, 14 aa, Severe acute respiratory syndrome coronavirus 2
  REGION 1..14: note = Table B: HLA-DQA1*03:02-B1*03:03L HLA-DQA1*05:01-B1*03:01L HLA-DQA1*01:02-B1*06:02L HLA-DRB3*02:01L HLA-DPA1*01:03-B1*03:01L HLA-DPA1*03:01-B1*04:02L HLA-DRB1*11:02L HLA-DQA1*05:05-B1*03:19L
  REGION 1..14: note = CONT. FROM ABOVE: HLA-DPA1*01:03-B1*04:02L HLA-DPA1*02:01-B1*13: 01L HLA-DPA1*03:01-B1*105:01L HLA-DQA1*05:05-B1*03:01L HLA-DPA1* 01:02-B1*04:01L HLA-DRB1*08:02L
GNYKLNTDHSSSSD

SEQ ID NO: 10389 - protein, 11 aa, Severe acute respiratory syndrome coronavirus 2
  REGION 1..11: note = Table B: HLA-DQA1*03:02-B1*03:03L HLA-DRB1*04:02L HLA-DRB1*04:05L HLA-DRB4*03:01NL HLA-DQA1*05:01-B1*02:01L HLA-DRB1*14:17L HLA-DQA1*02:01-B1*03:03L
LNTDHSSSSDN

SEQ ID NO: 10390 - protein, 11 aa, Severe acute respiratory syndrome coronavirus 2
  REGION 1..11: note = Table B: HLA-DQA1*03:02-B1*03:03L HLA-DRB1*04:03L HLA-DQA1*01:01-B1*05:01L HLA-DRB1*16:01L HLA-DQA1*02:01-B1*03:03L
TDHSSSSDNIA

SEQ ID NO: 10391 - protein, 10 aa, Severe acute respiratory syndrome coronavirus 2
  REGION 1..10: note = Table B: HLA-DQA1*03:02-B1*03:03L HLA-DQA1*05:01-B1*03:01L HLA-DRB1*13:03L HLA-DRB1*04:02L HLA-DPA1*03:01-B1*04:02L HLA-DRB1*14:01L HLA-DQA1*01-B1*05L HLA-DQA1*05:01-B1*02:01L HLA-DQA1*05:05-B1*03:116L HLA-DRB1*09:01L
  REGION 1..10: note = CONT. FROM ABOVE: HLA-DPA1*03:01-B1*105:01L HLA-DQA1*03:01-B1*03 :02L HLA-DPA1*01:02-B1*04:01L HLA-DRB1*16:01L HLA-DQA1*02:01-B1* 03:03L HLA-DRB1*15:03L
HSSSSDNIAL

SEQ ID NO: 10392 - protein, 10 aa, Severe acute respiratory syndrome coronavirus 2
  REGION 1..10: note = Table B: HLA-DQA1*03:02-B1*03:03L HLA-DQA1*01:02-B1*06:02L HLA-DPA1*03:01-B1*04:02L HLA-DRB1*11:02L HLA-DRB1*14:02L HLA-DQA1*05:05-B1*03:19L HLA-DQA1*05:05-B1*03:116L HLA-DPA1*01:03-B1*04:02L HLA-DPA1*02:01-B1*13:01L
  REGION 1..10: note = CONT. FROM ABOVE: HLA-DPA1*03:01-B1*105:01L HLA-DQA1*03:01-B1*03 :02L HLA-DPA1*01:03-B1*104:01L HLA-DPA1*01:02-B1*04:01L HLA-DRB1 *16:01L HLA-DQA1*01:03-B1*06:01L HLA-DQA1*02:01-B1*03:03L HLA-DR B1*15:03L
FHLVDFQVTI

SEQ ID NO: 10393 - protein, 10 aa, Severe acute respiratory syndrome coronavirus 2
  REGION 1..10: note = Table B: HLA-DQA1*03:02-B1*03:03L HLA-DRB1*08:77L HLA-DRB3*02:01L HLA-DQA1*05:01-B1*02:01L HLA-DRB1*09:01L HLA-DRB1*12:01L HLA-DRB1*07:01L HLA-DRB1*16:01L HLA-DQA1*02:01-B1*03:03L HLA-DRB1*15:03L
DFQVTIAEIL

SEQ ID NO: 10394 - protein, 10 aa, Severe acute respiratory syndrome coronavirus 2
  REGION 1..10: note = Table B: HLA-DQA1*03:02-B1*03:03L HLA-DQA1*03:01-B1*03:02L HLA-DQA1*02:01-B1*03:03L
RTFKVSIWNL

SEQ ID NO: 10395 - protein, 10 aa, Severe acute respiratory syndrome coronavirus 2
  REGION 1..10: note = Table B: HLA-DQA1*03:02-B1*03:03L HLA-DRB1*04:03L HLA-DQA1*01-B1*05L HLA-DQA1*05:01-B1*02:01L HLA-DPA1*03:01-B1*105:01L HLA-DQA1*03:01-B1*03:02L HLA-DPA1*01:02-B1*04:01L HLA-DQA1*01:03-B1*06:01L
  REGION 1..10: note = CONT. FROM ABOVE: HLA-DQA1*02:01-B1*03:03L
DYIINLIIKN

SEQ ID NO: 10396 - protein, 10 aa, Severe acute respiratory syndrome coronavirus 2
  REGION 1..10: note = Table B: HLA-DQA1*03:02-B1*03:03L HLA-DQA1*05:01-B1*03:01L HLA-DRB1*13:02L HLA-DRB1*13:03L HLA-DRB1*01:03L HLA-DRB1*04:05L HLA-DQA1*01:02-B1*06:02L HLA-DRB1*01:02L HLA-DRB1*08:77L HLA-DRB3*02:01L HLA-DPA1*01:03-B1*03:01L
  REGION 1..10: note = CONT. FROM ABOVE: HLA-DPA1*03:01-B1*04:02L HLA-DRB1*14:01L HLA-D RB1*14:02L HLA-DQA1*05:05-B1*03:19L HLA-DQA1*05:01-B1*02:01L HLA -DRB4*01:01L HLA-DPA1*01:03-B1*04:01L HLA-DQA1*05:05-B1*03:116L HLA-DRB1*09:01L HLA-DPA1*01:03-B1*04:02L HLA-DRB1*12:01L
  REGION 1..10: note = CONT. FROM ABOVE: HLA-DPA1*02:01-B1*13:01L HLA-DPA1*03:01-B1*105 :01L HLA-DQA1*03:01-B1*03:02L HLA-DPA1*01:03-B1*104:01L HLA-DQA1 *05:05-B1*03:01L HLA-DPA1*01:02-B1*04:01L HLA-DRB1*16:01L HLA-DQ A1*01:03-B1*06:01L HLA-DRB1*08:03L HLA-DQA1*02:01-B1*03:03L
  REGION 1..10: note = CONT. FROM ABOVE: HLA-DRB1*15:03L
YIINLIIKNL

SEQ ID NO: 10397 - protein, 13 aa, Severe acute respiratory syndrome coronavirus 2
  REGION 1..13: note = Table B: HLA-DQA1*03:02-B1*03:03L HLA-DRB1*14:04L HLA-DRB1*04:04L HLA-DRB1*03:01L HLA-DRB1*11:02L HLA-DQA1*05:01-B1*02:01L HLA-DQA1*05:05-B1*03:116L HLA-DRB1*04:10L HLA-DPA1*01:03-B1*04:02L
  REGION 1..13: note = CONT. FROM ABOVE: HLA-DPA1*01:03-B1*02:01L HLA-DPA1*01:03-B1*104 :01L HLA-DRB1*07:01L HLA-DRB1*10:01L HLA-DQA1*01:03-B1*06:01L HL A-DRB1*08:02L
LIIKNLSKSLTEN

SEQ ID NO: 10398 - protein, 10 aa, Severe acute respiratory syndrome coronavirus 2
  REGION 1..10: note = Table B: HLA-DQA1*03:02-B1*03:03M HLA-DQA1*05:01-B1*03:01L HLA-DQA1*01:02-B1*06:02L HLA-DPA1*03:01-B1*04:02L HLA-DRB1*14:01L HLA-DRB1*14:02L HLA-DQA1*05:05-B1*03:19L HLA-DQA1*05:01-B1*02:01L HLA-DPA1*01:03-B1*04:01L
  REGION 1..10: note = CONT. FROM ABOVE: HLA-DQA1*05:05-B1*03:116L HLA-DRB1*09:01L HLA- DPA1*01:03-B1*04:02L HLA-DPA1*03:01-B1*105:01L HLA-DQA1*03:01-B1 *03:02L HLA-DPA1*01:03-B1*104:01L HLA-DPA1*01:02-B1*04:01L HLA-D RB1*16:01L HLA-DQA1*01:03-B1*06:01L HLA-DQA1*02:01-B1*03:03L
  REGION 1..10: note = CONT. FROM ABOVE: HLA-DRB1*15:03L
SLTENKYSQL

SEQ ID NO: 10399 - protein, 12 aa, Severe acute respiratory syndrome coronavirus 2
  REGION 1..12: note = Table B: HLA-DQA1*03:02-B1*03:03L HLA-DRB1*04:03L HLA-DQA1*01-B1*05L HLA-DQA1*05:01-B1*02:01L HLA-DQA1*03:01-B1*03:02L HLA-DPA1*01:02-B1*04:01L HLA-DQA1*01:03-B1*06:01L HLA-DQA1*02:01-B1*03:03L
LTENKYSQLDEE

SEQ ID NO: 10400 - protein, 12 aa, Severe acute respiratory syndrome coronavirus 2
  REGION 1..12: note = Table B: HLA-DQA1*03:02-B1*03:03L HLA-DRB1*04:03L HLA-DRB1*13:03L HLA-DRB1*04:02L HLA-DRB1*04:05L HLA-DQA1*01:02-B1*06:02L HLA-DQA1*01:01-B1*05:01L HLA-DQA1*05:01-B1*02:01L HLA-DRB1*04:10L
  REGION 1..12: note = CONT. FROM ABOVE: HLA-DPA1*02:01-B1*13:01L HLA-DRB1*16:01L HLA-D QA1*01:03-B1*06:01L HLA-DQA1*02:01-B1*03:03L
ENKYSQLDEEQP

SEQ ID NO: 10401 - protein, 10 aa, Severe acute respiratory syndrome coronavirus 2
  REGION 1..10: note = Table B: HLA-DQA1*03:02-B1*03:03L HLA-DQA1*01-B1*05L HLA-DQA1*05:01-B1*02:01L HLA-DQA1*03:01-B1*03:02L
SQLDEEQPME

SEQ ID NO: 10402 - protein, 10 aa, Severe acute respiratory syndrome coronavirus 2
  REGION 1..10: note = Table B: HLA-DQA1*03:02-B1*03:03L HLA-DQA1*05:01-B1*03:01L HLA-DQA1*05:05-B1*03:19L HLA-DQA1*05:05-B1*03:116L HLA-DRB1*09:01L HLA-DQA1*03:01-B1*03:02L HLA-DPA1*01:03-B1*104:01L HLA-DQA1*02:01-B1*03:03L
  REGION 1..10: note = CONT. FROM ABOVE: HLA-DRB1*15:03L
QLDEEQPMEI

SEQ ID NO: 10403 - protein, 11 aa, Severe acute respiratory syndrome coronavirus 2
  REGION 1..11: note = Table B: HLA-DQA1*03:02-B1*03:03L HLA-DQA1*05:01-B1*03:01L HLA-DRB1*04:03L HLA-DRB1*13:03L HLA-DRB1*04:02L HLA-DQA1*05:01-B1*02:01L HLA-DRB1*14:17L HLA-DRB1*16:01L HLA-DQA1*02:01-B1*03:03L
GTYEGNSPFHP

SEQ ID NO: 10404 - protein, 10 aa, Severe acute respiratory syndrome coronavirus 2
  REGION 1..10: note = Table B: HLA-DQA1*03:02-B1*03:03L HLA-DQA1*05:05-B1*03:19L HLA-DQA1*05:01-B1*02:01L HLA-DQA1*03:01-B1*03:02L HLA-DPA1*01:03-B1*104:01L HLA-DPA1*01:02-B1*04:01L HLA-DQA1*02:01-B1*03:03L
YEGNSPFHPL

SEQ ID NO: 10405 - protein, 11 aa, Severe acute respiratory syndrome coronavirus 2
  REGION 1..11: note = Table B: HLA-DQA1*03:02-B1*03:03L HLA-DQA1*01:03-B1*06:01L
GNSPFHPLADN

SEQ ID NO: 10406 - protein, 11 aa, Severe acute respiratory syndrome coronavirus 2
  REGION 1..11: note = Table B: HLA-DQA1*03:02-B1*03:03L HLA-DRB1*13:02L HLA-DRB1*04:04L HLA-DRB1*08:77L HLA-DRB3*02:01L HLA-DPA1*01:03-B1*03:01L HLA-DPA1*03:01-B1*04:02L HLA-DRB1*03:01L HLA-DRB1*14:01L HLA-DRB1*11:03L HLA-DRB1*11:04L
  REGION 1..11: note = CONT. FROM ABOVE: HLA-DRB1*14:02L HLA-DRB1*08:01L HLA-DRB1*11:01 L HLA-DQA1*05:05-B1*03:19L HLA-DRB4*01:01L HLA-DPA1*01:03-B1*04: 01L HLA-DQA1*05:05-B1*03:116L HLA-DRB1*04:10L HLA-DRB1*09:01L HL A-DPA1*01:03-B1*04:02L HLA-DRB1*12:02L HLA-DRB3*01:01L
  REGION 1..11: note = CONT. FROM ABOVE: HLA-DRB1*14:54L HLA-DPA1*01:03-B1*104:01L HLA- DQA1*05:05-B1*03:01L HLA-DRB1*07:01L HLA-DRB1*10:01L HLA-DRB1*04 :08L HLA-DRB1*08:02L HLA-DRB1*08:03L
SPFHPLADNKF

SEQ ID NO: 10407 - protein, 12 aa, Severe acute respiratory syndrome coronavirus 2
  REGION 1..12: note = Table B: HLA-DQA1*03:02-B1*03:03L HLA-DQA1*05:01-B1*03:01L HLA-DQA1*01:02-B1*06:02L HLA-DPA1*01:03-B1*03:01L HLA-DPA1*03:01-B1*04:02L HLA-DRB1*08:01L HLA-DQA1*05:05-B1*03:19L HLA-DPA1*01:03-B1*04:02L
  REGION 1..12: note = CONT. FROM ABOVE: HLA-DRB1*12:01L HLA-DPA1*02:01-B1*13:01L HLA-D PA1*03:01-B1*105:01L HLA-DQA1*03:01-B1*03:02L HLA-DQA1*05:05-B1* 03:01L HLA-DPA1*01:02-B1*04:01L HLA-DRB1*16:01L HLA-DQA1*01:03-B 1*06:01L HLA-DRB1*04:08L HLA-DQA1*02:01-B1*03:03L
DNKFALTCFSTQ

SEQ ID NO: 10408 - protein, 12 aa, Severe acute respiratory syndrome coronavirus 2
  REGION 1..12: note = Table B: HLA-DQA1*03:02-B1*03:03L HLA-DQA1*05:01-B1*03:01L HLA-DQA1*01:02-B1*06:02L HLA-DRB1*01:02L HLA-DQA1*05:05-B1*03:19L HLA-DQA1*05:01-B1*02:01L HLA-DRB1*12:01L HLA-DPA1*03:01-B1*105:01L
  REGION 1..12: note = CONT. FROM ABOVE: HLA-DQA1*03:01-B1*03:02L HLA-DQA1*05:05-B1*03: 01L HLA-DRB1*16:01L HLA-DRB1*04:08L HLA-DQA1*02:01-B1*03:03L HLA -DRB1*15:03L
TQFAFACPDGVK

SEQ ID NO: 10409 - protein, 10 aa, Severe acute respiratory syndrome coronavirus 2
  REGION 1..10: note = Table B: HLA-DQA1*03:02-B1*03:03L HLA-DQA1*05:01-B1*03:01L HLA-DQA1*01:02-B1*06:02L HLA-DQA1*05:05-B1*03:19L HLA-DQA1*03:01-B1*03:02L HLA-DPA1*01:03-B1*104:01L HLA-DRB1*16:01L HLA-DQA1*02:01-B1*03:03L HLA-DRB1*15:03L
FACPDGVKHV

SEQ ID NO: 10410 - protein, 16 aa, Severe acute respiratory syndrome coronavirus 2
  REGION 1..16: note = Table B: HLA-DQA1*03:02-B1*03:03L HLA-DRB1*08:77L
GVKHVYQLRARSVSPK

SEQ ID NO: 10411 - protein, 13 aa, Severe acute respiratory syndrome coronavirus 2
  REGION 1..13: note = Table B: HLA-DQA1*03:02-B1*03:03L HLA-DQA1*05:01-B1*03:01L HLA-DRB1*04:03L HLA-DRB1*13:02L HLA-DRB1*13:03L HLA-DRB1*01:03L HLA-DRB1*04:02L HLA-DRB1*04:05L HLA-DRB1*01:02L HLA-DRB1*08:04L HLA-DPA1*01:03-B1*03:01L HLA-DPA1*03:01-B1*04:02L
  REGION 1..13: note = CONT. FROM ABOVE: HLA-DRB1*14:01L HLA-DQA1*01:01-B1*05:01L HLA-D RB1*04:10L HLA-DRB1*12:01L HLA-DPA1*02:01-B1*13:01L HLA-DPA1*03: 01-B1*105:01L HLA-DQA1*05:05-B1*03:01L HLA-DPA1*01:02-B1*04:01L HLA-DRB1*16:01L HLA-DQA1*01:03-B1*06:01L HLA-DRB1*04:08L
  REGION 1..13: note = CONT. FROM ABOVE: HLA-DRB1*15:03L
VSPKLFIRQEEVQ

SEQ ID NO: 10412 - protein, 10 aa, Severe acute respiratory syndrome coronavirus 2
  REGION 1..10: note = Table B: HLA-DQA1*03:02-B1*03:03L HLA-DRB1*04:03L HLA-DRB1*04:02L HLA-DQA1*01-B1*05L HLA-DQA1*03:01-B1*03:02L HLA-DPA1*01:02-B1*04:01L HLA-DRB1*16:01L HLA-DQA1*02:01-B1*03:03L
LFIRQEEVQE

SEQ ID NO: 10413 - protein, 10 aa, Severe acute respiratory syndrome coronavirus 2
  REGION 1..10: note = Table B: HLA-DQA1*03:02-B1*03:03L HLA-DQA1*05:01-B1*03:01L HLA-DQA1*01:02-B1*06:02L HLA-DPA1*03:01-B1*04:02L HLA-DRB1*14:01L HLA-DRB1*14:02L HLA-DQA1*01-B1*05L HLA-DQA1*05:01-B1*02:01L HLA-DQA1*05:05-B1*03:116L
  REGION 1..10: note = CONT. FROM ABOVE: HLA-DPA1*03:01-B1*105:01L HLA-DQA1*03:01-B1*03 :02L HLA-DPA1*01:02-B1*04:01L HLA-DRB1*16:01L HLA-DQA1*01:03-B1* 06:01L HLA-DQA1*02:01-B1*03:03L HLA-DRB1*15:03L
FIRQEEVQEL

SEQ ID NO: 10414 - protein, 10 aa, Severe acute respiratory syndrome coronavirus 2
  REGION 1..10: note = Table B: HLA-DQA1*03:02-B1*03:03L HLA-DQA1*05:05-B1*03:19L
EEVQELYSPI

SEQ ID NO: 10415 - protein, 10 aa, Severe acute respiratory syndrome coronavirus 2
  REGION 1..10: note = Table B: HLA-DQA1*03:02-B1*03:03L HLA-DQA1*05:01-B1*03:01L HLA-DRB1*13:03L HLA-DQA1*01:02-B1*06:02M HLA-DRB1*01:02L HLA-DPA1*03:01-B1*04:02L HLA-DRB1*14:01L HLA-DRB1*14:02L HLA-DQA1*05:01-B1*02:01L HLA-DPA1*01:03-B1*04:01L
  REGION 1..10: note = CONT. FROM ABOVE: HLA-DRB1*12:01L HLA-DPA1*02:01-B1*13:01L HLA-D PA1*03:01-B1*105:01L HLA-DPA1*01:02-B1*04:01L HLA-DQA1*01:03-B1* 06:01L HLA-DQA1*02:01-B1*03:03L HLA-DRB1*15:03L
EVQELYSPIF

SEQ ID NO: 10416 - protein, 10 aa, Severe acute respiratory syndrome coronavirus 2
  REGION 1..10: note = Table B: HLA-DQA1*03:02-B1*03:03L HLA-DQA1*01-B1*05L HLA-DQA1*05:01-B1*02:01L HLA-DQA1*03:01-B1*03:02L
VQELYSPIFL

SEQ ID NO: 10417 - protein, 10 aa, Severe acute respiratory syndrome coronavirus 2
  REGION 1..10: note = Table B: HLA-DQA1*03:02-B1*03:03L HLA-DRB1*11:02M HLA-DQA1*05:05-B1*03:19H HLA-DQA1*05:01-B1*02:01L HLA-DQA1*03:01-B1*03:02L HLA-DPA1*01:03-B1*104:01M
QELYSPIFLI

SEQ ID NO: 10418 - protein, 10 aa, Severe acute respiratory syndrome coronavirus 2
  REGION 1..10: note = Table B: HLA-DQA1*03:02-B1*03:03L HLA-DQA1*01:02-B1*06:02L HLA-DQA1*05:05-B1*03:19L HLA-DPA1*02:01-B1*13:01L HLA-DPA1*03:01-B1*105:01L HLA-DRB1*15:03L
ELYSPIFLIV

SEQ ID NO: 10419 - protein, 10 aa, Severe acute respiratory syndrome coronavirus 2
  REGION 1..10: note = Table B: HLA-DQA1*03:02-B1*03:03L HLA-DQA1*05:05-B1*03:19L HLA-DQA1*03:01-B1*03:02L HLA-DPA1*01:03-B1*104:01L
IELSLIDFYL

SEQ ID NO: 10420 - protein, 11 aa, Severe acute respiratory syndrome coronavirus 2
  REGION 1..11: note = Table B: HLA-DQA1*03:02-B1*03:03L HLA-DRB1*13:03L HLA-DRB1*01:03L HLA-DRB1*04:02L HLA-DRB1*04:05L HLA-DRB4*03:01NL HLA-DQA1*01-B1*05L HLA-DQA1*05:01-B1*02:01L HLA-DRB1*04:10L HLA-DRB1*12:01L HLA-DRB1*14:54L HLA-DRB1*14:17L HLA-DRB1*16:01L
  REGION 1..11: note = CONT. FROM ABOVE: HLA-DRB1*04:08L HLA-DQA1*02:01-B1*03:03L
FSLELQDHNET

SEQ ID NO: 10421 - protein, 10 aa, Severe acute respiratory syndrome coronavirus 2
  REGION 1..10: note = Table B: HLA-DQA1*03:02-B1*03:03L HLA-DQA1*05:01-B1*03:01L HLA-DRB1*04:03L HLA-DRB1*13:02L HLA-DRB1*13:03L HLA-DRB1*01:03L HLA-DRB1*04:02L HLA-DRB1*04:05L HLA-DQA1*01:02-B1*06:02L HLA-DRB1*01:02L HLA-DRB4*03:01NL HLA-DPA1*01:03-B1*03:01L
  REGION 1..10: note = CONT. FROM ABOVE: HLA-DRB1*14:01L HLA-DQA1*01:01-B1*05:01L HLA-D QA1*01-B1*05L HLA-DQA1*05:05-B1*03:19L HLA-DQA1*05:01-B1*02:01L HLA-DRB1*04:10L HLA-DRB1*12:01L HLA-DPA1*03:01-B1*105:01L HLA-DQ A1*03:01-B1*03:02L HLA-DRB1*14:54L HLA-DQA1*05:05-B1*03:01L
  REGION 1..10: note = CONT. FROM ABOVE: HLA-DRB1*14:17L HLA-DPA1*01:02-B1*04:01L HLA-D RB1*16:01L HLA-DQA1*01:03-B1*06:01L HLA-DRB1*04:08L HLA-DQA1*02: 01-B1*03:03L HLA-DRB1*15:03L
ITTVAAFHQE

SEQ ID NO: 10422 - protein, 11 aa, Severe acute respiratory syndrome coronavirus 2
  REGION 1..11: note = Table B: HLA-DQA1*03:02-B1*03:03L HLA-DQA1*05:01-B1*03:01L HLA-DRB1*04:01L HLA-DRB1*04:04L HLA-DQA1*01:02-B1*06:02L HLA-DRB1*01:01L HLA-DRB1*03:01L HLA-DQA1*01:01-B1*05:01L HLA-DRB1*08:01L HLA-DRB1*11:01L HLA-DRB5*01:01L
  REGION 1..11: note = CONT. FROM ABOVE: HLA-DQA1*05:05-B1*03:19L HLA-DRB1*13:01L HLA-D RB4*01:01L HLA-DPA1*01:03-B1*04:01L HLA-DRB1*04:10L HLA-DRB1*09: 01L HLA-DPA1*01:03-B1*04:02L HLA-DPA1*02:01-B1*13:01L HLA-DPA1*0 1:03-B1*02:01L HLA-DPA1*01:03-B1*104:01L
  REGION 1..11: note = CONT. FROM ABOVE: HLA-DQA1*05:05-B1*03:01L HLA-DRB1*07:01L HLA-D RB1*10:01L HLA-DQA1*01:03-B1*06:01L HLA-DRB1*08:03L
PYVVDDPCPIH

SEQ ID NO: 10423 - protein, 10 aa, Severe acute respiratory syndrome coronavirus 2
  REGION 1..10: note = Table B: HLA-DQA1*03:02-B1*03:03L HLA-DQA1*05:01-B1*03:01L HLA-DRB1*04:03L HLA-DRB1*13:02L HLA-DRB1*13:03L HLA-DRB1*01:03L HLA-DRB1*04:05L HLA-DQA1*01:02-B1*06:02M HLA-DRB1*01:01L HLA-DRB1*08:77L HLA-DPA1*01:03-B1*03:01L
  REGION 1..10: note = CONT. FROM ABOVE: HLA-DPA1*03:01-B1*04:02L HLA-DRB1*03:01L HLA-D RB1*14:01L HLA-DRB1*11:02L HLA-DRB1*14:02L HLA-DRB1*11:01L HLA-D QA1*01-B1*05L HLA-DQA1*05:05-B1*03:19M HLA-DQA1*05:01-B1*02:01L HLA-DRB4*01:01L HLA-DPA1*01:03-B1*04:01L
  REGION 1..10: note = CONT. FROM ABOVE: HLA-DQA1*05:05-B1*03:116L HLA-DPA1*01:03-B1*04 :02L HLA-DRB1*12:01L HLA-DPA1*02:01-B1*13:01L HLA-DPA1*03:01-B1* 105:01L HLA-DQA1*03:01-B1*03:02L HLA-DPA1*01:03-B1*104:01L HLA-D PA1*01:02-B1*04:01L HLA-DRB1*10:01L HLA-DRB1*16:01L
  REGION 1..10: note = CONT. FROM ABOVE: HLA-DQA1*01:03-B1*06:01L HLA-DRB1*08:02L HLA-D QA1*02:01-B1*03:03L HLA-DRB1*15:03L
VVDDPCPIHF

SEQ ID NO: 10424 - protein, 18 aa, Severe acute respiratory syndrome coronavirus 2
  REGION 1..18: note = Table B: HLA-DQA1*03:02-B1*03:03L HLA-DQA1*05:05-B1*03:116L
YSKWYIRVGARKSAPLIE

SEQ ID NO: 10425 - protein, 10 aa, Severe acute respiratory syndrome coronavirus 2
  REGION 1..10: note = Table B: HLA-DQA1*03:02-B1*03:03L HLA-DQA1*05:05-B1*03:19L HLA-DQA1*03:01-B1*03:02L
VDEAGSKSPI

SEQ ID NO: 10426 - protein, 10 aa, Severe acute respiratory syndrome coronavirus 2
  REGION 1..10: note = Table B: HLA-DQA1*03:02-B1*03:03L HLA-DQA1*05:01-B1*03:01L HLA-DQA1*05:05-B1*03:19L HLA-DQA1*05:01-B1*02:01L HLA-DQA1*03:01-B1*03:02L HLA-DQA1*05:05-B1*03:01L HLA-DQA1*02:01-B1*03:03L
DEAGSKSPIQ

SEQ ID NO: 10427 - protein, 12 aa, Severe acute respiratory syndrome coronavirus 2
  REGION 1..12: note = Table B: HLA-DQA1*03:02-B1*03:03L HLA-DQA1*03:01-B1*03:02L
EAGSKSPIQYID

SEQ ID NO: 10428 - protein, 13 aa, Severe acute respiratory syndrome coronavirus 2
  REGION 1..13: note = Table B: HLA-DQA1*03:02-B1*03:03L HLA-DRB1*04:03L HLA-DRB1*04:05L HLA-DQA1*01:02-B1*06:02L HLA-DQA1*05:01-B1*02:01L HLA-DPA1*02:01-B1*13:01L HLA-DQA1*01:03-B1*06:01L
GSKSPIQYIDIGN

SEQ ID NO: 10429 - protein, 11 aa, Severe acute respiratory syndrome coronavirus 2
  REGION 1..11: note = Table B: HLA-DQA1*03:02-B1*03:03L HLA-DQA1*05:01-B1*03:01L HLA-DRB1*04:03L HLA-DRB1*13:03L HLA-DRB1*01:03L HLA-DRB4*03:01NL HLA-DRB1*08:77L HLA-DPA1*03:01-B1*04:02L HLA-DRB1*03:01L HLA-DRB1*14:01L HLA-DRB1*11:02L HLA-DRB4*01:01L
  REGION 1..11: note = CONT. FROM ABOVE: HLA-DPA1*01:03-B1*04:01L HLA-DQA1*05:05-B1*03: 116L HLA-DPA1*01:03-B1*04:02L HLA-DRB1*12:01L HLA-DPA1*02:01-B1* 13:01L HLA-DQA1*03:01-B1*03:02L HLA-DQA1*05:05-B1*03:01L HLA-DPA 1*01:02-B1*04:01L HLA-DRB1*10:01L HLA-DQA1*01:03-B1*06:01L
  REGION 1..11: note = CONT. FROM ABOVE: HLA-DRB1*08:02L
SPIQYIDIGNY

SEQ ID NO: 10430 - protein, 11 aa, Severe acute respiratory syndrome coronavirus 2
  REGION 1..11: note = Table B: HLA-DQA1*03:02-B1*03:03L HLA-DRB1*04:03L HLA-DPA1*03:01-B1*04:02L HLA-DRB1*12:01L HLA-DQA1*03:01-B1*03:02L HLA-DPA1*01:02-B1*04:01L
PIQYIDIGNYT

SEQ ID NO: 10431 - protein, 10 aa, Severe acute respiratory syndrome coronavirus 2
  REGION 1..10: note = Table B: HLA-DQA1*03:02-B1*03:03M HLA-DQA1*05:01-B1*03:01L HLA-DRB1*04:03L HLA-DRB1*01:03L HLA-DRB1*04:05L HLA-DQA1*01:02-B1*06:02L HLA-DRB1*01:01L HLA-DRB1*01:02L HLA-DRB1*08:77L HLA-DPA1*03:01-B1*04:02L HLA-DRB1*14:01L
  REGION 1..10: note = CONT. FROM ABOVE: HLA-DRB1*11:02L HLA-DRB1*14:02L HLA-DRB1*08:01 L HLA-DRB1*11:01L HLA-DQA1*05:05-B1*03:19M HLA-DQA1*05:01-B1*02: 01L HLA-DRB4*01:01L HLA-DPA1*01:03-B1*04:01L HLA-DQA1*05:05-B1*0 3:116L HLA-DRB1*09:01L HLA-DPA1*01:03-B1*04:02L HLA-DRB1*12:01L
  REGION 1..10: note = CONT. FROM ABOVE: HLA-DPA1*02:01-B1*13:01M HLA-DPA1*03:01-B1*105 :01L HLA-DQA1*03:01-B1*03:02L HLA-DPA1*01:03-B1*104:01M HLA-DPA1 *01:02-B1*04:01L HLA-DRB1*10:01L HLA-DRB1*16:01L HLA-DQA1*01:03- B1*06:01M HLA-DRB1*08:03L HLA-DQA1*02:01-B1*03:03L
  REGION 1..10: note = CONT. FROM ABOVE: HLA-DRB1*15:03M
QYIDIGNYTV

SEQ ID NO: 10432 - protein, 12 aa, Severe acute respiratory syndrome coronavirus 2
  REGION 1..12: note = Table B: HLA-DQA1*03:02-B1*03:03L HLA-DQA1*05:01-B1*03:01L HLA-DQA1*01:02-B1*06:02L HLA-DQA1*05:05-B1*03:19L HLA-DQA1*05:01-B1*02:01L HLA-DPA1*03:01-B1*105:01L HLA-DQA1*03:01-B1*03:02L HLA-DQA1*05:05-B1*03:01L
  REGION 1..12: note = CONT. FROM ABOVE: HLA-DQA1*02:01-B1*03:03L
IGNYTVSCLPFT

SEQ ID NO: 10433 - protein, 13 aa, Severe acute respiratory syndrome coronavirus 2
  REGION 1..13: note = Table B: HLA-DQA1*03:02-B1*03:03L HLA-DPA1*01:03-B1*03:01L HLA-DQA1*05:01-B1*02:01L HLA-DPA1*01:03-B1*04:02L HLA-DQA1*03:01-B1*03:02L HLA-DRB1*15:03L
GNYTVSCLPFTIN

SEQ ID NO: 10434 - protein, 11 aa, Severe acute respiratory syndrome coronavirus 2
  REGION 1..11: note = Table B: HLA-DQA1*03:02-B1*03:03L HLA-DQA1*05:01-B1*03:01L HLA-DRB1*04:03L HLA-DRB1*04:02L HLA-DQA1*01:02-B1*06:02L HLA-DQA1*03:01-B1*03:02L HLA-DRB1*14:17L HLA-DRB1*16:01L HLA-DQA1*01:03-B1*06:01L HLA-DQA1*02:01-B1*03:03L
LPFTINCQEPK

SEQ ID NO: 10435 - protein, 10 aa, Severe acute respiratory syndrome coronavirus 2
  REGION 1..10: note = Table B: HLA-DQA1*03:02-B1*03:03L HLA-DRB1*11:02L HLA-DQA1*05:05-B1*03:19M HLA-DQA1*03:01-B1*03:02L HLA-DPA1*01:03-B1*104:01L
QEPKLGSLVV

SEQ ID NO: 10436 - protein, 10 aa, Severe acute respiratory syndrome coronavirus 2
  REGION 1..10: note = Table B: HLA-DQA1*03:02-B1*03:03L HLA-DQA1*01-B1*05L HLA-DQA1*05:05-B1*03:19L HLA-DPA1*01:03-B1*104:01L HLA-DPA1*01:02-B1*04:01L
YEDFLEYHDV

SEQ ID NO: 10437 - protein, 10 aa, Severe acute respiratory syndrome coronavirus 2
  REGION 1..10: note = Table B: HLA-DQA1*03:02-B1*03:03L HLA-DRB1*04:03L HLA-DRB1*04:02L HLA-DPA1*03:01-B1*04:02L HLA-DQA1*01-B1*05L HLA-DQA1*05:01-B1*02:01L HLA-DPA1*03:01-B1*105:01L HLA-DQA1*03:01-B1*03:02L HLA-DPA1*01:02-B1*04:01L
  REGION 1..10: note = CONT. FROM ABOVE: HLA-DRB1*16:01L HLA-DQA1*01:03-B1*06:01L HLA-D QA1*02:01-B1*03:03L
EDFLEYHDVR

SEQ ID NO: 10438 - protein, 10 aa, Severe acute respiratory syndrome coronavirus 2
  REGION 1..10: note = Table B: HLA-DQA1*03:02-B1*03:03L HLA-DRB1*04:03L HLA-DQA1*01:02-B1*06:02L HLA-DRB1*01:02L HLA-DPA1*03:01-B1*04:02L HLA-DQA1*01-B1*05L HLA-DQA1*05:01-B1*02:01L HLA-DPA1*02:01-B1*13:01L
  REGION 1..10: note = CONT. FROM ABOVE: HLA-DPA1*03:01-B1*105:01L HLA-DQA1*03:01-B1*03 :02L HLA-DPA1*01:02-B1*04:01L HLA-DRB1*16:01L HLA-DQA1*01:03-B1* 06:01L HLA-DQA1*02:01-B1*03:03L HLA-DRB1*15:03L
FLEYHDVRVV

SEQ ID NO: 10439 - protein, 10 aa, Severe acute respiratory syndrome coronavirus 2
  REGION 1..10: note = Table B: HLA-DQA1*03:02-B1*03:03M HLA-DQA1*05:01-B1*03:01L HLA-DPA1*03:01-B1*04:02L HLA-DRB1*11:02L HLA-DQA1*05:05-B1*03:19L HLA-DQA1*05:01-B1*02:01L HLA-DQA1*05:05-B1*03:116L HLA-DRB1*09:01L
  REGION 1..10: note = CONT. FROM ABOVE: HLA-DPA1*01:03-B1*04:02L HLA-DQA1*03:01-B1*03: 02L HLA-DPA1*01:03-B1*104:01L HLA-DPA1*01:02-B1*04:01L HLA-DRB1* 16:01L HLA-DQA1*01:03-B1*06:01L HLA-DQA1*02:01-B1*03:03L HLA-DRB 1*15:03L
LEYHDVRVVL

SEQ ID NO: 10440 - protein, 11 aa, Severe acute respiratory syndrome coronavirus 2
  REGION 1..11: note = Table B: HLA-DQA1*03:02-B1*03:03L HLA-DRB1*04:03L HLA-DRB1*01:03L HLA-DRB1*04:05L HLA-DRB1*01:01L HLA-DRB1*01:02L HLA-DPA1*03:01-B1*04:02L HLA-DRB1*14:02L HLA-DQA1*01:01-B1*05:01L HLA-DQA1*05:05-B1*03:19L
  REGION 1..11: note = CONT. FROM ABOVE: HLA-DQA1*05:01-B1*02:01L HLA-DPA1*01:03-B1*04: 01L HLA-DPA1*01:03-B1*04:02L HLA-DRB1*12:01L HLA-DRB1*16:01L
EYHDVRVVLDF

SEQ ID NO: 10441 - protein, 17 aa, Severe acute respiratory syndrome coronavirus 2
  REGION 1..17: note = Table B: HLA-DQA1*03:02-B1*03:03L HLA-DQA1*05:01-B1*03:01L HLA-DRB1*04:03L HLA-DRB1*13:02L HLA-DRB1*04:05L HLA-DPA1*01:03-B1*03:01L HLA-DRB1*14:01L HLA-DRB1*11:04L HLA-DRB1*08:01L HLA-DRB1*11:01L HLA-DQA1*05:05-B1*03:19L
  REGION 1..17: note = CONT. FROM ABOVE: HLA-DRB1*12:01L HLA-DRB3*01:01L HLA-DPA1*02:01 -B1*13:01L HLA-DPA1*01:03-B1*104:01L HLA-DQA1*05:05-B1*03:01L HL A-DRB1*07:01L HLA-DRB1*16:01L HLA-DRB1*04:08L HLA-DRB1*15:03L
GPQNQRNAPRITFGGPS

SEQ ID NO: 10442 - protein, 12 aa, Severe acute respiratory syndrome coronavirus 2
  REGION 1..12: note = Table B: HLA-DQA1*03:02-B1*03:03L HLA-DRB1*04:02L HLA-DQA1*01-B1*05L
APRITFGGPSDS

SEQ ID NO: 10443 - protein, 13 aa, Severe acute respiratory syndrome coronavirus 2
  REGION 1..13: note = Table B: HLA-DQA1*03:02-B1*03:03L HLA-DQA1*05:01-B1*03:01L HLA-DQA1*01:02-B1*06:02L HLA-DQA1*05:05-B1*03:19L HLA-DQA1*03:01-B1*03:02L HLA-DQA1*05:05-B1*03:01L HLA-DQA1*01:03-B1*06:01L HLA-DQA1*02:01-B1*03:03L
ITFGGPSDSTGSN

SEQ ID NO: 10444 - protein, 13 aa, Severe acute respiratory syndrome coronavirus 2
  REGION 1..13: note = Table B: HLA-DQA1*03:02-B1*03:03L HLA-DQA1*03:01-B1*03:02L
GPSDSTGSNQNGE

SEQ ID NO: 10445 - protein, 12 aa, Severe acute respiratory syndrome coronavirus 2
  REGION 1..12: note = Table B: HLA-DQA1*03:02-B1*03:03L HLA-DQA1*05:01-B1*03:01L
SDSTGSNQNGER

SEQ ID NO: 10446 - protein, 12 aa, Severe acute respiratory syndrome coronavirus 2
  REGION 1..12: note = Table B: HLA-DQA1*03:02-B1*03:03L HLA-DQA1*05:01-B1*03:01L HLA-DQA1*05:05-B1*03:19L
DSTGSNQNGERS

SEQ ID NO: 10447 - protein, 10 aa, Severe acute respiratory syndrome coronavirus 2
  REGION 1..10: note = Table B: HLA-DQA1*03:02-B1*03:03L HLA-DQA1*05:01-B1*03:01L HLA-DRB1*13:03M HLA-DRB1*01:03L HLA-DRB1*04:02L HLA-DRB1*04:05L HLA-DRB4*03:01NL HLA-DPA1*03:01-B1*04:02L HLA-DRB1*14:01L HLA-DRB1*11:03L HLA-DRB1*08:01L HLA-DRB5*01:01L
  REGION 1..10: note = CONT. FROM ABOVE: HLA-DQA1*01-B1*05M HLA-DQA1*05:01-B1*02:01L HL A-DRB1*13:01L HLA-DRB3*01:01L HLA-DPA1*03:01-B1*105:01L HLA-DQA1 *03:01-B1*03:02L HLA-DRB1*14:17L HLA-DPA1*01:02-B1*04:01L HLA-DR B1*10:01L HLA-DRB1*16:01L
RPQGLPNNTA

SEQ ID NO: 10448 - protein, 13 aa, Severe acute respiratory syndrome coronavirus 2
  REGION 1..13: note = Table B: HLA-DQA1*03:02-B1*03:03L HLA-DQA1*05:01-B1*03:01L HLA-DQA1*05:05-B1*03:19L HLA-DPA1*03:01-B1*105:01L HLA-DQA1*05:05-B1*03:01L HLA-DQA1*02:01-B1*03:03L
LPNNTASWFTALT

SEQ ID NO: 10449 - protein, 12 aa, Severe acute respiratory syndrome coronavirus 2
  REGION 1..12: note = Table B: HLA-DQA1*03:02-B1*03:03L HLA-DRB1*04:03L HLA-DRB1*04:02L HLA-DRB1*04:05L HLA-DQA1*01:02-B1*06:02L HLA-DRB1*04:10L HLA-DPA1*03:01-B1*105:01L HLA-DQA1*03:01-B1*03:02L HLA-DRB1*14:17L
  REGION 1..12: note = CONT. FROM ABOVE: HLA-DQA1*01:03-B1*06:01L HLA-DQA1*02:01-B1*03: 03L
TASWFTALTQHG

SEQ ID NO: 10450 - protein, 12 aa, Severe acute respiratory syndrome coronavirus 2
  REGION 1..12: note = Table B: HLA-DQA1*03:02-B1*03:03L HLA-DRB1*13:03L HLA-DRB1*04:05L HLA-DRB1*01:02L HLA-DRB1*08:01L HLA-DQA1*05:05-B1*03:19L HLA-DRB1*04:10L HLA-DRB1*12:01L HLA-DRB1*14:54L HLA-DRB1*10:01L
ASWFTALTQHGK

SEQ ID NO: 10451 - protein, 10 aa, Severe acute respiratory syndrome coronavirus 2
  REGION 1..10: note = Table B: HLA-DQA1*03:02-B1*03:03L HLA-DQA1*05:01-B1*03:01L HLA-DRB1*04:03L HLA-DRB1*13:03L HLA-DRB1*01:03L HLA-DRB1*04:02L HLA-DRB1*04:05L HLA-DQA1*01:02-B1*06:02L HLA-DRB1*01:02L HLA-DRB4*03:01NL HLA-DRB1*14:01L HLA-DQA1*05:05-B1*03:19L
  REGION 1..10: note = CONT. FROM ABOVE: HLA-DQA1*05:01-B1*02:01L HLA-DRB1*12:01L HLA-D PA1*03:01-B1*105:01L HLA-DQA1*03:01-B1*03:02L HLA-DRB1*14:54L HL A-DQA1*05:05-B1*03:01L HLA-DRB1*14:17L HLA-DPA1*01:02-B1*04:01L HLA-DRB1*16:01L HLA-DQA1*01:03-B1*06:01L HLA-DRB1*04:08L
  REGION 1..10: note = CONT. FROM ABOVE: HLA-DQA1*02:01-B1*03:03L HLA-DRB1*15:03L
FTALTQHGKE

SEQ ID NO: 10452 - protein, 10 aa, Severe acute respiratory syndrome coronavirus 2
  REGION 1..10: note = Table B: HLA-DQA1*03:02-B1*03:03L HLA-DQA1*05:01-B1*03:01L HLA-DRB1*04:03L HLA-DRB1*13:02L HLA-DRB1*13:03L HLA-DRB1*01:03L HLA-DRB1*04:02L HLA-DRB1*04:05L HLA-DQA1*01:02-B1*06:02L HLA-DRB1*01:02L HLA-DRB4*03:01NL HLA-DRB1*14:01L
  REGION 1..10: note = CONT. FROM ABOVE: HLA-DQA1*01:01-B1*05:01L HLA-DRB1*08:01L HLA-D QA1*01-B1*05L HLA-DQA1*05:05-B1*03:19L HLA-DQA1*05:01-B1*02:01L HLA-DRB1*04:10L HLA-DRB1*12:01L HLA-DPA1*03:01-B1*105:01L HLA-DQ A1*03:01-B1*03:02L HLA-DRB1*14:54L HLA-DQA1*05:05-B1*03:01L
  REGION 1..10: note = CONT. FROM ABOVE: HLA-DRB1*14:17L HLA-DPA1*01:02-B1*04:01L HLA-D RB1*16:01L HLA-DQA1*01:03-B1*06:01L HLA-DRB1*04:08L HLA-DQA1*02: 01-B1*03:03L
TALTQHGKED

SEQ ID NO: 10453 - protein, 13 aa, Severe acute respiratory syndrome coronavirus 2
  REGION 1..13: note = Table B: HLA-DQA1*03:02-B1*03:03L HLA-DRB1*01:02L HLA-DQA1*05:05-B1*03:19L
DLKFPRGQGVPIN

SEQ ID NO: 10454 - protein, 12 aa, Severe acute respiratory syndrome coronavirus 2
  REGION 1..12: note = Table B: HLA-DQA1*03:02-B1*03:03L HLA-DRB1*04:03L HLA-DRB1*13:02L HLA-DRB1*04:02L HLA-DRB1*04:05L HLA-DQA1*01:02-B1*06:02L HLA-DRB1*01:02L HLA-DRB4*03:01NL HLA-DRB1*08:04L HLA-DPA1*01:03-B1*03:01L HLA-DRB1*14:02L
  REGION 1..12: note = CONT. FROM ABOVE: HLA-DQA1*01:01-B1*05:01L HLA-DRB1*08:01L HLA-D RB1*11:01L HLA-DQA1*05:05-B1*03:19M HLA-DQA1*05:01-B1*02:01L HLA -DQA1*05:05-B1*03:116L HLA-DPA1*01:03-B1*04:02L HLA-DRB1*12:01L HLA-DPA1*03:01-B1*105:01L HLA-DPA1*01:03-B1*104:01L
  REGION 1..12: note = CONT. FROM ABOVE: HLA-DQA1*05:05-B1*03:01M HLA-DRB1*14:17L HLA-D QA1*01:03-B1*06:01L HLA-DRB1*04:08L
FPRGQGVPINTN

SEQ ID NO: 10455 - protein, 14 aa, Severe acute respiratory syndrome coronavirus 2
  REGION 1..14: note = Table B: HLA-DQA1*03:02-B1*03:03L HLA-DQA1*05:05-B1*03:01L HLA-DQA1*02:01-B1*03:03L
GQGVPINTNSSPDD

SEQ ID NO: 10456 - protein, 12 aa, Severe acute respiratory syndrome coronavirus 2
  REGION 1..12: note = Table B: HLA-DQA1*03:02-B1*03:03L HLA-DQA1*05:01-B1*03:01L HLA-DRB1*13:02L HLA-DRB1*13:03L HLA-DRB1*01:03L HLA-DRB1*04:04L HLA-DQA1*01:02-B1*06:02L HLA-DRB1*08:77L HLA-DPA1*01:03-B1*03:01L HLA-DRB1*11:03L HLA-DRB1*11:04L
  REGION 1..12: note = CONT. FROM ABOVE: HLA-DQA1*01:01-B1*05:01L HLA-DRB5*01:01L HLA-D QA1*01-B1*05L HLA-DQA1*05:05-B1*03:19L HLA-DRB1*12:01L HLA-DRB1* 12:02L HLA-DQA1*05:05-B1*03:01L HLA-DRB1*07:01L HLA-DRB1*10:01L HLA-DRB1*16:01L HLA-DRB1*04:08L HLA-DRB1*08:03L
  REGION 1..12: note = CONT. FROM ABOVE: HLA-DQA1*02:01-B1*03:03L
VPINTNSSPDDQ

SEQ ID NO: 10457 - protein, 12 aa, Severe acute respiratory syndrome coronavirus 2
  REGION 1..12: note = Table B: HLA-DQA1*03:02-B1*03:03L HLA-DRB1*04:03L HLA-DRB1*04:05L HLA-DRB1*04:10L HLA-DRB1*12:01L HLA-DQA1*03:01-B1*03:02L HLA-DRB1*16:01L HLA-DQA1*01:03-B1*06:01L HLA-DQA1*02:01-B1*03:03L
INTNSSPDDQIG

SEQ ID NO: 10458 - protein, 14 aa, Severe acute respiratory syndrome coronavirus 2
  REGION 1..14: note = Table B: HLA-DQA1*03:02-B1*03:03L HLA-DQA1*05:01-B1*03:01L HLA-DRB1*04:03L HLA-DRB1*13:02L HLA-DRB1*13:03L HLA-DRB1*01:03L HLA-DRB1*04:02L HLA-DRB1*04:04L HLA-DRB1*04:05L HLA-DQA1*01:02-B1*06:02L HLA-DRB1*01:02L HLA-DRB1*08:04L
  REGION 1..14: note = CONT. FROM ABOVE: HLA-DPA1*01:03-B1*03:01L HLA-DPA1*03:01-B1*04: 02L HLA-DRB1*08:01L HLA-DQA1*01-B1*05L HLA-DQA1*05:01-B1*02:01L HLA-DPA1*01:03-B1*04:01L HLA-DPA1*01:03-B1*04:02L HLA-DRB1*12:01 L HLA-DPA1*02:01-B1*13:01L HLA-DPA1*03:01-B1*105:01L
  REGION 1..14: note = CONT. FROM ABOVE: HLA-DQA1*03:01-B1*03:02L HLA-DPA1*01:03-B1*02: 01L HLA-DPA1*01:03-B1*104:01L HLA-DQA1*05:05-B1*03:01L HLA-DPA1* 01:02-B1*04:01L HLA-DRB1*16:01L HLA-DQA1*01:03-B1*06:01L HLA-DRB 1*04:08L HLA-DRB1*08:03L HLA-DQA1*02:01-B1*03:03L
  REGION 1..14: note = CONT. FROM ABOVE: HLA-DRB1*15:03L
SPRWYFYYLGTGPE

SEQ ID NO: 10459 - protein, 11 aa, Severe acute respiratory syndrome coronavirus 2
  REGION 1..11: note = Table B: HLA-DQA1*03:02-B1*03:03L HLA-DRB1*04:03L HLA-DRB1*13:03L HLA-DRB1*04:02L HLA-DRB1*04:05L HLA-DRB4*03:01NL HLA-DQA1*01-B1*05L HLA-DQA1*05:01-B1*02:01L HLA-DRB1*04:10L HLA-DQA1*03:01-B1*03:02L HLA-DRB1*14:54L HLA-DRB1*14:17L
  REGION 1..11: note = CONT. FROM ABOVE: HLA-DRB1*16:01L HLA-DRB1*04:08L HLA-DQA1*02:01 -B1*03:03L
FYYLGTGPEAG

SEQ ID NO: 10460 - protein, 12 aa, Severe acute respiratory syndrome coronavirus 2
  REGION 1..12: note = Table B: HLA-DQA1*03:02-B1*03:03L HLA-DQA1*05:01-B1*03:01L HLA-DQA1*01:02-B1*06:02L HLA-DQA1*05:05-B1*03:19L HLA-DQA1*05:01-B1*02:01L HLA-DPA1*03:01-B1*105:01L HLA-DQA1*03:01-B1*03:02L HLA-DQA1*05:05-B1*03:01L
  REGION 1..12: note = CONT. FROM ABOVE: HLA-DQA1*01:03-B1*06:01L HLA-DQA1*02:01-B1*03: 03L
YLGTGPEAGLPY

SEQ ID NO: 10461 - protein, 12 aa, Severe acute respiratory syndrome coronavirus 2
  REGION 1..12: note = Table B: HLA-DQA1*03:02-B1*03:03L HLA-DQA1*05:01-B1*03:01L HLA-DQA1*05:05-B1*03:19L HLA-DQA1*05:05-B1*03:01L HLA-DQA1*01:03-B1*06:01L HLA-DQA1*02:01-B1*03:03L
LGTGPEAGLPYG

SEQ ID NO: 10462 - protein, 10 aa, Severe acute respiratory syndrome coronavirus 2
  REGION 1..10: note = Table B: HLA-DQA1*03:02-B1*03:03L HLA-DQA1*05:01-B1*03:01L HLA-DQA1*05:05-B1*03:19L HLA-DQA1*05:05-B1*03:01L HLA-DQA1*01:03-B1*06:01L HLA-DQA1*02:01-B1*03:03L
PEAGLPYGAN

SEQ ID NO: 10463 - protein, 11 aa, Severe acute respiratory syndrome coronavirus 2
  REGION 1..11: note = Table B: HLA-DQA1*03:02-B1*03:03L HLA-DRB1*04:02L
AGLPYGANKDG

SEQ ID NO: 10464 - protein, 10 aa, Severe acute respiratory syndrome coronavirus 2
  REGION 1..10: note = Table B: HLA-DQA1*03:02-B1*03:03L HLA-DQA1*05:01-B1*03:01L HLA-DRB1*13:03L HLA-DRB1*04:05L HLA-DQA1*01:02-B1*06:02L HLA-DRB1*01:01L HLA-DRB1*01:02L HLA-DPA1*03:01-B1*04:02L HLA-DRB1*14:01L HLA-DQA1*01-B1*05L HLA-DQA1*05:05-B1*03:19L
  REGION 1..10: note = CONT. FROM ABOVE: HLA-DQA1*05:05-B1*03:116L HLA-DPA1*02:01-B1*13 :01L HLA-DPA1*03:01-B1*105:01L HLA-DPA1*01:02-B1*04:01L HLA-DQA1 *01:03-B1*06:01L HLA-DRB1*08:03L HLA-DRB1*15:03L
LPYGANKDGI

SEQ ID NO: 10465 - protein, 13 aa, Severe acute respiratory syndrome coronavirus 2
  REGION 1..13: note = Table B: HLA-DQA1*03:02-B1*03:03L HLA-DQA1*05:01-B1*03:01L HLA-DQA1*05:05-B1*03:19L HLA-DQA1*03:01-B1*03:02L
GANKDGIIWVATE

SEQ ID NO: 10466 - protein, 12 aa, Severe acute respiratory syndrome coronavirus 2
  REGION 1..12: note = Table B: HLA-DQA1*03:02-B1*03:03L HLA-DQA1*05:01-B1*03:01L HLA-DQA1*01:02-B1*06:02L HLA-DQA1*05:05-B1*03:19L HLA-DPA1*03:01-B1*105:01L HLA-DQA1*03:01-B1*03:02L HLA-DQA1*05:05-B1*03:01L HLA-DQA1*02:01-B1*03:03L
NKDGIIWVATEG

SEQ ID NO: 10467 - protein, 13 aa, Severe acute respiratory syndrome coronavirus 2
  REGION 1..13: note = Table B: HLA-DQA1*03:02-B1*03:03L HLA-DQA1*05:01-B1*03:01L HLA-DRB1*01:03L HLA-DRB1*04:02L HLA-DRB1*04:04L HLA-DRB1*04:05L HLA-DRB1*01:02L HLA-DRB4*03:01NL HLA-DPA1*01:03-B1*03:01L HLA-DPA1*03:01-B1*04:02L HLA-DRB1*14:01L HLA-DQA1*01-B1*05L
  REGION 1..13: note = CONT. FROM ABOVE: HLA-DQA1*05:05-B1*03:19L HLA-DRB1*04:10L HLA-D RB1*12:01L HLA-DPA1*03:01-B1*105:01L HLA-DRB1*14:54L HLA-DQA1*05 :05-B1*03:01L HLA-DRB1*16:01L HLA-DQA1*01:03-B1*06:01L HLA-DRB1* 04:08L HLA-DQA1*02:01-B1*03:03L HLA-DRB1*15:03L
KDGIIWVATEGAL

SEQ ID NO: 10468 - protein, 12 aa, Severe acute respiratory syndrome coronavirus 2
  REGION 1..12: note = Table B: HLA-DQA1*03:02-B1*03:03L HLA-DQA1*05:01-B1*03:01L HLA-DRB1*01:03L HLA-DPA1*01:03-B1*03:01L HLA-DRB1*14:01L HLA-DQA1*01-B1*05L HLA-DRB1*12:02L HLA-DPA1*03:01-B1*105:01L HLA-DRB1*10:01L HLA-DQA1*01:03-B1*06:01L HLA-DRB1*15:03L
GIIWVATEGALN

SEQ ID NO: 10469 - protein, 12 aa, Severe acute respiratory syndrome coronavirus 2
  REGION 1..12: note = Table B: HLA-DQA1*03:02-B1*03:03L HLA-DQA1*05:01-B1*03:01L HLA-DRB1*04:01L HLA-DRB1*13:02L HLA-DRB1*04:04L HLA-DRB1*04:05L HLA-DQA1*01:02-B1*06:02L HLA-DRB1*01:01L HLA-DRB1*01:02L HLA-DRB1*08:77L HLA-DPA1*01:03-B1*03:01L HLA-DRB1*11:03L
  REGION 1..12: note = CONT. FROM ABOVE: HLA-DRB1*11:04L HLA-DRB1*14:02L HLA-DQA1*05:05 -B1*03:19L HLA-DQA1*05:01-B1*02:01L HLA-DRB1*04:10L HLA-DRB1*12: 02L HLA-DPA1*03:01-B1*105:01L HLA-DRB1*10:01L HLA-DRB1*04:08L HL A-DRB1*15:03L
WVATEGALNTPK

SEQ ID NO: 10470 - protein, 10 aa, Severe acute respiratory syndrome coronavirus 2
  REGION 1..10: note = Table B: HLA-DQA1*03:02-B1*03:03L HLA-DQA1*03:01-B1*03:02L HLA-DQA1*02:01-B1*03:03L
TEGALNTPKD

SEQ ID NO: 10471 - protein, 10 aa, Severe acute respiratory syndrome coronavirus 2
  REGION 1..10: note = Table B: HLA-DQA1*03:02-B1*03:03L HLA-DRB1*04:03L HLA-DRB1*04:05L HLA-DRB1*04:10L HLA-DQA1*03:01-B1*03:02L HLA-DQA1*05:05-B1*03:01L HLA-DQA1*01:03-B1*06:01L HLA-DQA1*02:01-B1*03:03L
EGALNTPKDH

SEQ ID NO: 10472 - protein, 14 aa, Severe acute respiratory syndrome coronavirus 2
  REGION 1..14: note = Table B: HLA-DQA1*03:02-B1*03:03L HLA-DRB1*01:03L HLA-DRB1*04:05L HLA-DRB1*01:02L HLA-DQA1*01:01-B1*05:01L HLA-DRB1*12:01L HLA-DPA1*02:01-B1*13:01L HLA-DQA1*05:05-B1*03:01L HLA-DRB1*16:01L HLA-DRB1*04:08L
TPKDHIGTRNPANN

SEQ ID NO: 10473 - protein, 13 aa, Severe acute respiratory syndrome coronavirus 2
  REGION 1..13: note = Table B: HLA-DQA1*03:02-B1*03:03L HLA-DQA1*01:02-B1*06:02L HLA-DQA1*01:03-B1*06:01L
DHIGTRNPANNAA

SEQ ID NO: 10474 - protein, 10 aa, Severe acute respiratory syndrome coronavirus 2
  REGION 1..10: note = Table B: HLA-DQA1*03:02-B1*03:03L HLA-DRB1*13:03L HLA-DQA1*05:05-B1*03:19L HLA-DQA1*03:01-B1*03:02L HLA-DRB1*16:01L HLA-DQA1*02:01-B1*03:03L
TRNPANNAAI

SEQ ID NO: 10475 - protein, 14 aa, Severe acute respiratory syndrome coronavirus 2
  REGION 1..14: note = Table B: HLA-DQA1*03:02-B1*03:03L HLA-DQA1*05:01-B1*03:01L HLA-DRB1*04:03L HLA-DRB1*01:03L HLA-DQA1*05:05-B1*03:19L HLA-DQA1*05:01-B1*02:01L HLA-DPA1*03:01-B1*105:01L HLA-DQA1*03:01-B1*03:02L HLA-DQA1*05:05-B1*03:01L
  REGION 1..14: note = CONT. FROM ABOVE: HLA-DRB1*04:08L HLA-DQA1*02:01-B1*03:03L
NPANNAAIVLQLPQ

SEQ ID NO: 10476 - protein, 12 aa, Severe acute respiratory syndrome coronavirus 2
  REGION 1..12: note = Table B: HLA-DQA1*03:02-B1*03:03L HLA-DQA1*05:01-B1*03:01L HLA-DQA1*01:02-B1*06:02L HLA-DQA1*05:05-B1*03:19L HLA-DQA1*03:01-B1*03:02L HLA-DQA1*05:05-B1*03:01L HLA-DQA1*02:01-B1*03:03L
NNAAIVLQLPQG

SEQ ID NO: 10477 - protein, 10 aa, Severe acute respiratory syndrome coronavirus 2
  REGION 1..10: note = Table B: HLA-DQA1*03:02-B1*03:03L HLA-DQA1*05:01-B1*03:01L HLA-DRB1*04:03L HLA-DRB1*04:02L HLA-DRB4*03:01NL HLA-DQA1*05:01-B1*02:01L HLA-DRB1*12:01L HLA-DQA1*03:01-B1*03:02L HLA-DRB1*14:17L HLA-DRB1*16:01L
  REGION 1..10: note = CONT. FROM ABOVE: HLA-DQA1*02:01-B1*03:03L
IVLQLPQGTT

SEQ ID NO: 10478 - protein, 10 aa, Severe acute respiratory syndrome coronavirus 2
  REGION 1..10: note = Table B: HLA-DQA1*03:02-B1*03:03L HLA-DQA1*05:01-B1*03:01L HLA-DPA1*03:01-B1*04:02L HLA-DRB1*14:02L HLA-DQA1*05:05-B1*03:116L HLA-DRB1*09:01L HLA-DQA1*03:01-B1*03:02L HLA-DQA1*02:01-B1*03:03L
  REGION 1..10: note = CONT. FROM ABOVE: HLA-DRB1*15:03L
VLQLPQGTTL

SEQ ID NO: 10479 - protein, 12 aa, Severe acute respiratory syndrome coronavirus 2
  REGION 1..12: note = Table B: HLA-DQA1*03:02-B1*03:03L HLA-DRB3*02:01L HLA-DRB1*03:01L HLA-DQA1*01-B1*05L HLA-DPA1*01:03-B1*04:02L HLA-DRB1*12:01L HLA-DPA1*01:03-B1*104:01L HLA-DQA1*05:05-B1*03:01L HLA-DRB1*08:02L
LPQGTTLPKGFY

SEQ ID NO: 10480 - protein, 14 aa, Severe acute respiratory syndrome coronavirus 2
  REGION 1..14: note = Table B: HLA-DQA1*03:02-B1*03:03L HLA-DQA1*05:05-B1*03:19L HLA-DPA1*02:01-B1*13:01L HLA-DQA1*05:05-B1*03:01L HLA-DQA1*01:03-B1*06:01L HLA-DRB1*15:03L
LPKGFYAEGSRGGS

SEQ ID NO: 10481 - protein, 12 aa, Severe acute respiratory syndrome coronavirus 2
  REGION 1..12: note = Table B: HLA-DQA1*03:02-B1*03:03L HLA-DRB1*13:02L HLA-DRB1*08:04L HLA-DRB1*08:77L HLA-DPA1*01:03-B1*03:01L HLA-DRB1*08:01L HLA-DPA1*03:01-B1*105:01L HLA-DRB1*08:03L
GFYAEGSRGGSQ

SEQ ID NO: 10482 - protein, 10 aa, Severe acute respiratory syndrome coronavirus 2
  REGION 1..10: note = Table B: HLA-DQA1*03:02-B1*03:03M HLA-DRB1*13:03L HLA-DRB1*11:01L HLA-DQA1*05:05-B1*03:19L HLA-DRB1*09:01L HLA-DPA1*01:03-B1*04:02L HLA-DQA1*03:01-B1*03:02L
AEGSRGGSQA

SEQ ID NO: 10483 - protein, 13 aa, Severe acute respiratory syndrome coronavirus 2
  REGION 1..13: note = Table B: HLA-DQA1*03:02-B1*03:03L HLA-DRB1*04:03L HLA-DRB1*04:02L HLA-DRB1*04:05L HLA-DRB1*11:01L HLA-DRB1*14:17L
EGSRGGSQASSRS

SEQ ID NO: 10484 - protein, 12 aa, Severe acute respiratory syndrome coronavirus 2
  REGION 1..12: note = Table B: HLA-DQA1*03:02-B1*03:03L HLA-DQA1*05:01-B1*03:01L HLA-DRB1*01:03L HLA-DQA1*01:02-B1*06:02L HLA-DQA1*05:05-B1*03:19L HLA-DQA1*05:05-B1*03:01L HLA-DQA1*01:03-B1*06:01L HLA-DQA1*02:01-B1*03:03L
SRGGSQASSRSS

SEQ ID NO: 10485 - protein, 12 aa, Severe acute respiratory syndrome coronavirus 2
  REGION 1..12: note = Table B: HLA-DQA1*03:02-B1*03:03L HLA-DQA1*05:01-B1*03:01L HLA-DQA1*05:05-B1*03:19L HLA-DQA1*05:05-B1*03:01L HLA-DQA1*02:01-B1*03:03L
STPGSSRGTSPA

SEQ ID NO: 10486 - protein, 15 aa, Severe acute respiratory syndrome coronavirus 2
  REGION 1..15: note = Table B: HLA-DQA1*03:02-B1*03:03L HLA-DRB1*13:02L HLA-DRB1*04:05L HLA-DRB1*01:02L HLA-DPA1*01:03-B1*03:01L HLA-DQA1*01:01-B1*05:01L HLA-DRB1*08:01L HLA-DRB1*12:01L HLA-DPA1*02:01-B1*13:01L HLA-DPA1*03:01-B1*105:01L
  REGION 1..15: note = CONT. FROM ABOVE: HLA-DPA1*01:03-B1*104:01L HLA-DRB1*07:01L HLA- DRB1*04:08L HLA-DRB1*15:03L
TPGSSRGTSPARMAG

SEQ ID NO: 10487 - protein, 12 aa, Severe acute respiratory syndrome coronavirus 2
  REGION 1..12: note = Table B: HLA-DQA1*03:02-B1*03:03L HLA-DQA1*05:01-B1*03:01L HLA-DRB1*13:03L HLA-DRB1*01:03L HLA-DRB1*04:02L HLA-DRB1*04:05L HLA-DQA1*01:02-B1*06:02L HLA-DRB4*03:01NL HLA-DQA1*05:05-B1*03:19L HLA-DRB1*14:54L
  REGION 1..12: note = CONT. FROM ABOVE: HLA-DQA1*05:05-B1*03:01L HLA-DRB1*14:17L HLA-D RB1*16:01L HLA-DQA1*01:03-B1*06:01L HLA-DQA1*02:01-B1*03:03L
TSPARMAGNGGD

SEQ ID NO: 10488 - protein, 12 aa, Severe acute respiratory syndrome coronavirus 2
  REGION 1..12: note = Table B: HLA-DQA1*03:02-B1*03:03L HLA-DQA1*05:01-B1*03:01L HLA-DRB1*13:03L HLA-DRB1*01:03L HLA-DRB1*04:02L HLA-DRB1*04:05L HLA-DRB4*03:01NL HLA-DQA1*05:05-B1*03:19L HLA-DQA1*05:05-B1*03:01L HLA-DRB1*14:17L
  REGION 1..12: note = CONT. FROM ABOVE: HLA-DQA1*02:01-B1*03:03L
SPARMAGNGGDA

SEQ ID NO: 10489 - protein, 11 aa, Severe acute respiratory syndrome coronavirus 2
  REGION 1..11: note = Table B: HLA-DQA1*03:02-B1*03:03L HLA-DQA1*03:01-B1*03:02L HLA-DRB1*16:01L
RMAGNGGDAAL

SEQ ID NO: 10490 - protein, 12 aa, Severe acute respiratory syndrome coronavirus 2
  REGION 1..12: note = Table B: HLA-DQA1*03:02-B1*03:03L HLA-DPA1*03:01-B1*105:01L
GDAALALLLLDR

SEQ ID NO: 10491 - protein, 14 aa, Severe acute respiratory syndrome coronavirus 2
  REGION 1..14: note = Table B: HLA-DQA1*03:02-B1*03:03L HLA-DRB1*13:02L HLA-DRB1*01:03L HLA-DRB1*04:04L HLA-DRB1*11:04L HLA-DQA1*05:05-B1*03:19L HLA-DRB1*04:10L HLA-DPA1*01:03-B1*02:01L HLA-DPA1*01:03-B1*104:01L
DAALALLLLDRLNQ

SEQ ID NO: 10492 - protein, 10 aa, Severe acute respiratory syndrome coronavirus 2
  REGION 1..10: note = Table B: HLA-DQA1*03:02-B1*03:03L HLA-DQA1*05:01-B1*03:01L HLA-DQA1*01:02-B1*06:02L HLA-DPA1*03:01-B1*04:02L HLA-DRB1*14:01L HLA-DRB1*14:02L HLA-DQA1*05:05-B1*03:19L HLA-DQA1*05:05-B1*03:116L HLA-DPA1*01:03-B1*04:02L
  REGION 1..10: note = CONT. FROM ABOVE: HLA-DPA1*03:01-B1*105:01L HLA-DQA1*03:01-B1*03 :02L HLA-DPA1*01:02-B1*04:01L HLA-DRB1*08:03L HLA-DQA1*02:01-B1* 03:03L HLA-DRB1*15:03L
LLLLDRLNQL

SEQ ID NO: 10493 - protein, 12 aa, Severe acute respiratory syndrome coronavirus 2
  REGION 1..12: note = Table B: HLA-DQA1*03:02-B1*03:03L HLA-DQA1*05:01-B1*03:01L HLA-DRB1*01:03L HLA-DRB1*04:02L HLA-DQA1*01:02-B1*06:02L HLA-DQA1*05:05-B1*03:19L HLA-DQA1*05:01-B1*02:01L HLA-DQA1*05:05-B1*03:01L HLA-DRB1*14:17L
  REGION 1..12: note = CONT. FROM ABOVE: HLA-DQA1*01:03-B1*06:01L HLA-DQA1*02:01-B1*03: 03L
MSGKGQQQQGQT

SEQ ID NO: 10494 - protein, 13 aa, Severe acute respiratory syndrome coronavirus 2
  REGION 1..13: note = Table B: HLA-DQA1*03:02-B1*03:03L HLA-DQA1*02:01-B1*03:03L
SGKGQQQQGQTVT

SEQ ID NO: 10495 - protein, 10 aa, Severe acute respiratory syndrome coronavirus 2
  REGION 1..10: note = Table B: HLA-DQA1*03:02-B1*03:03L HLA-DQA1*05:01-B1*03:01L HLA-DRB1*04:03L HLA-DRB1*13:03L HLA-DRB1*01:03L HLA-DRB1*04:02L HLA-DRB4*03:01NL HLA-DQA1*05:05-B1*03:19L HLA-DQA1*05:01-B1*02:01L HLA-DRB1*12:01L
  REGION 1..10: note = CONT. FROM ABOVE: HLA-DQA1*03:01-B1*03:02L HLA-DQA1*05:05-B1*03: 01L HLA-DRB1*14:17L HLA-DPA1*01:02-B1*04:01L HLA-DRB1*16:01L HLA -DQA1*01:03-B1*06:01L HLA-DQA1*02:01-B1*03:03L
TATKAYNVTQ

SEQ ID NO: 10496 - protein, 12 aa, Severe acute respiratory syndrome coronavirus 2
  REGION 1..12: note = Table B: HLA-DQA1*03:02-B1*03:03L HLA-DRB1*04:02L HLA-DQA1*01:02-B1*06:02L HLA-DQA1*01-B1*05L HLA-DQA1*05:01-B1*02:01L HLA-DQA1*01:03-B1*06:01L
ATKAYNVTQAFG

SEQ ID NO: 10497 - protein, 16 aa, Severe acute respiratory syndrome coronavirus 2
  REGION 1..16: note = Table B: HLA-DQA1*03:02-B1*03:03L HLA-DRB1*04:01L HLA-DRB1*04:04L HLA-DRB1*08:77L HLA-DRB3*02:01L HLA-DPA1*03:01-B1*04:02L HLA-DRB1*03:01L HLA-DRB1*11:03L HLA-DRB1*14:02L HLA-DQA1*01-B1*05L HLA-DQA1*05:05-B1*03:19L
  REGION 1..16: note = CONT. FROM ABOVE: HLA-DQA1*05:01-B1*02:01L HLA-DRB1*13:01L HLA-D RB1*09:01L HLA-DPA1*02:01-B1*13:01L HLA-DPA1*01:02-B1*04:01L HLA -DRB1*10:01L
TKAYNVTQAFGRRGPE

SEQ ID NO: 10498 - protein, 12 aa, Severe acute respiratory syndrome coronavirus 2
  REGION 1..12: note = Table B: HLA-DQA1*03:02-B1*03:03L HLA-DQA1*05:01-B1*02:01L HLA-DQA1*03:01-B1*03:02L
GPEQTQGNFGDQ

SEQ ID NO: 10499 - protein, 10 aa, Severe acute respiratory syndrome coronavirus 2
  REGION 1..10: note = Table B: HLA-DQA1*03:02-B1*03:03L HLA-DQA1*01-B1*05L HLA-DQA1*05:01-B1*02:01L HLA-DQA1*03:01-B1*03:02L HLA-DRB1*16:01L
TQGNFGDQEL

SEQ ID NO: 10500 - protein, 12 aa, Severe acute respiratory syndrome coronavirus 2
  REGION 1..12: note = Table B: HLA-DQA1*03:02-B1*03:03L HLA-DQA1*05:01-B1*03:01L HLA-DRB1*13:03L HLA-DRB1*01:03L HLA-DRB1*04:05L HLA-DQA1*01:02-B1*06:02L HLA-DQA1*01:01-B1*05:01L HLA-DPA1*03:01-B1*105:01L HLA-DPA1*01:02-B1*04:01L
  REGION 1..12: note = CONT. FROM ABOVE: HLA-DRB1*04:08L
GNFGDQELIRQG

SEQ ID NO: 10501 - protein, 11 aa, Severe acute respiratory syndrome coronavirus 2
  REGION 1..11: note = Table B: HLA-DQA1*03:02-B1*03:03L HLA-DRB1*04:03L HLA-DQA1*05:01-B1*02:01L HLA-DQA1*01:03-B1*06:01L HLA-DQA1*02:01-B1*03:03L
GDQELIRQGTD

SEQ ID NO: 10502 - protein, 10 aa, Severe acute respiratory syndrome coronavirus 2
  REGION 1..10: note = Table B: HLA-DQA1*03:02-B1*03:03L HLA-DQA1*05:01-B1*03:01M HLA-DRB1*13:03L HLA-DRB4*03:01NL HLA-DRB1*08:77M HLA-DPA1*01:03-B1*03:01L HLA-DPA1*03:01-B1*04:02M HLA-DRB1*03:01L HLA-DRB1*11:02L HLA-DQA1*01-B1*05L
  REGION 1..10: note = CONT. FROM ABOVE: HLA-DQA1*05:05-B1*03:19L HLA-DQA1*05:01-B1*02: 01L HLA-DRB4*01:01M HLA-DPA1*01:03-B1*04:01M HLA-DQA1*05:05-B1*0 3:116L HLA-DPA1*01:03-B1*04:02L HLA-DRB1*12:01L HLA-DQA1*03:01-B 1*03:02L HLA-DPA1*01:03-B1*104:01L HLA-DPA1*01:02-B1*04:01L
  REGION 1..10: note = CONT. FROM ABOVE: HLA-DRB1*10:01M HLA-DRB1*16:01L HLA-DRB1*15:03 M
QELIRQGTDY

SEQ ID NO: 10503 - protein, 12 aa, Severe acute respiratory syndrome coronavirus 2
  REGION 1..12: note = Table B: HLA-DQA1*03:02-B1*03:03L HLA-DRB1*01:03L HLA-DQA1*01:02-B1*06:02L HLA-DRB1*01:02L HLA-DRB4*03:01NL HLA-DRB1*08:04L HLA-DRB1*14:01L HLA-DRB1*08:01L HLA-DRB1*04:10L HLA-DRB1*12:01L HLA-DRB1*14:54L HLA-DQA1*02:01-B1*03:03L
  REGION 1..12: note = CONT. FROM ABOVE: HLA-DRB1*15:03L
GTDYKHWPQIAQ

SEQ ID NO: 10504 - protein, 14 aa, Severe acute respiratory syndrome coronavirus 2
  REGION 1..14: note = Table B: HLA-DQA1*03:02-B1*03:03L HLA-DQA1*05:01-B1*03:01L HLA-DRB1*13:02L HLA-DRB1*13:03L HLA-DRB1*04:02L HLA-DRB1*04:04L HLA-DRB1*08:04L HLA-DPA1*01:03-B1*03:01L HLA-DPA1*03:01-B1*04:02L HLA-DRB1*14:01L HLA-DRB1*11:04L
  REGION 1..14: note = CONT. FROM ABOVE: HLA-DRB1*14:02L HLA-DRB1*08:01L HLA-DRB1*11:01 L HLA-DQA1*01-B1*05L HLA-DQA1*05:05-B1*03:19L HLA-DQA1*05:01-B1* 02:01L HLA-DRB1*04:10L HLA-DPA1*01:03-B1*04:02L HLA-DRB1*12:01L HLA-DPA1*03:01-B1*105:01L HLA-DPA1*01:03-B1*104:01L
  REGION 1..14: note = CONT. FROM ABOVE: HLA-DQA1*05:05-B1*03:01L HLA-DRB1*14:17L HLA-D PA1*01:02-B1*04:01L HLA-DRB1*07:01L HLA-DRB1*10:01L HLA-DRB1*04: 08L HLA-DRB1*08:03L HLA-DRB1*15:03L
DYKHWPQIAQFAPS

SEQ ID NO: 10505 - protein, 12 aa, Severe acute respiratory syndrome coronavirus 2
  REGION 1..12: note = Table B: HLA-DQA1*03:02-B1*03:03L HLA-DRB1*04:03L HLA-DQA1*03:01-B1*03:02L HLA-DRB1*14:17L HLA-DQA1*02:01-B1*03:03L
WPQIAQFAPSAS

SEQ ID NO: 10506 - protein, 10 aa, Severe acute respiratory syndrome coronavirus 2
  REGION 1..10: note = Table B: HLA-DQA1*03:02-B1*03:03L HLA-DQA1*05:01-B1*03:01L HLA-DRB1*04:01L HLA-DRB1*04:03L HLA-DRB1*13:02L HLA-DRB1*13:03L HLA-DRB1*01:03L HLA-DRB1*04:05L HLA-DQA1*01:02-B1*06:02M HLA-DRB1*01:01L HLA-DRB4*03:01NL HLA-DRB1*08:77L
  REGION 1..10: note = CONT. FROM ABOVE: HLA-DPA1*01:03-B1*03:01L HLA-DPA1*03:01-B1*04: 02L HLA-DRB1*03:01L HLA-DRB1*14:01L HLA-DRB1*14:02M HLA-DRB1*11: 01L HLA-DQA1*01-B1*05L HLA-DQA1*05:05-B1*03:19L HLA-DQA1*05:01-B 1*02:01L HLA-DRB4*01:01L HLA-DPA1*01:03-B1*04:01L
  REGION 1..10: note = CONT. FROM ABOVE: HLA-DQA1*05:05-B1*03:116L HLA-DPA1*01:03-B1*04 :02L HLA-DRB1*12:01L HLA-DPA1*02:01-B1*13:01L HLA-DPA1*03:01-B1* 105:01L HLA-DQA1*03:01-B1*03:02L HLA-DPA1*01:02-B1*04:01L HLA-DR B1*10:01L HLA-DRB1*16:01L HLA-DQA1*01:03-B1*06:01L
  REGION 1..10: note = CONT. FROM ABOVE: HLA-DRB1*08:02L HLA-DQA1*02:01-B1*03:03M HLA-D RB1*15:03L
AQFAPSASAF

SEQ ID NO: 10507 - protein, 12 aa, Severe acute respiratory syndrome coronavirus 2
  REGION 1..12: note = Table B: HLA-DQA1*03:02-B1*03:03L HLA-DQA1*05:01-B1*03:01L HLA-DRB1*04:03L HLA-DRB1*01:03L HLA-DQA1*01:02-B1*06:02L HLA-DQA1*01:01-B1*05:01L HLA-DQA1*05:05-B1*03:19L HLA-DQA1*05:01-B1*02:01L HLA-DPA1*03:01-B1*105:01L
  REGION 1..12: note = CONT. FROM ABOVE: HLA-DRB1*16:01L
APSASAFFGMSR

SEQ ID NO: 10508 - protein, 11 aa, Severe acute respiratory syndrome coronavirus 2
  REGION 1..11: note = Table B: HLA-DQA1*03:02-B1*03:03L HLA-DRB1*13:03L HLA-DRB1*01:03L HLA-DRB1*04:02L HLA-DRB4*03:01NL HLA-DQA1*01-B1*05L HLA-DRB1*04:10L HLA-DRB1*12:01L HLA-DRB1*14:54L HLA-DRB1*16:01L HLA-DRB1*04:08L
  REGION 1..11: note = CONT. FROM ABOVE: HLA-DQA1*02:01-B1*03:03L
SRIGMEVTPSG

SEQ ID NO: 10509 - protein, 11 aa, Severe acute respiratory syndrome coronavirus 2
  REGION 1..11: note = Table B: HLA-DQA1*03:02-B1*03:03L HLA-DQA1*05:01-B1*03:01L HLA-DRB1*04:03L HLA-DRB1*13:03L HLA-DRB1*08:77L HLA-DPA1*01:03-B1*03:01L HLA-DPA1*03:01-B1*04:02L HLA-DRB1*14:02L HLA-DQA1*01-B1*05L HLA-DRB4*01:01L
  REGION 1..11: note = CONT. FROM ABOVE: HLA-DPA1*01:03-B1*04:01L HLA-DPA1*01:03-B1*04: 02L HLA-DRB1*12:01L HLA-DPA1*02:01-B1*13:01L HLA-DPA1*03:01-B1*1 05:01L HLA-DQA1*03:01-B1*03:02L HLA-DRB1*16:01L HLA-DQA1*01:03-B 1*06:01L HLA-DQA1*02:01-B1*03:03L HLA-DRB1*15:03L
IGMEVTPSGTW

SEQ ID NO: 10510 - protein, 10 aa, Severe acute respiratory syndrome coronavirus 2
  REGION 1..10: note = Table B: HLA-DQA1*03:02-B1*03:03M HLA-DQA1*05:01-B1*03:01L HLA-DRB1*13:03L HLA-DRB1*08:77L HLA-DPA1*03:01-B1*04:02L HLA-DRB1*11:02L HLA-DRB1*14:02L HLA-DQA1*05:05-B1*03:19M HLA-DQA1*05:01-B1*02:01L HLA-DRB4*01:01L
  REGION 1..10: note = CONT. FROM ABOVE: HLA-DPA1*01:03-B1*04:01L HLA-DQA1*05:05-B1*03: 116L HLA-DRB1*09:01L HLA-DPA1*01:03-B1*04:02L HLA-DQA1*03:01-B1* 03:02M HLA-DPA1*01:03-B1*104:01L HLA-DPA1*01:02-B1*04:01L HLA-DR B1*10:01L HLA-DQA1*02:01-B1*03:03L HLA-DRB1*15:03L
MEVTPSGTWL

SEQ ID NO: 10511 - protein, 11 aa, Severe acute respiratory syndrome coronavirus 2
  REGION 1..11: note = Table B: HLA-DQA1*03:02-B1*03:03L HLA-DQA1*05:01-B1*03:01L HLA-DRB1*04:03L HLA-DRB1*04:02L HLA-DRB1*01:02L HLA-DQA1*01-B1*05L HLA-DQA1*03:01-B1*03:02L HLA-DRB1*14:17L HLA-DRB1*16:01L HLA-DQA1*01:03-B1*06:01L
  REGION 1..11: note = CONT. FROM ABOVE: HLA-DQA1*02:01-B1*03:03L
GTWLTYTGAIK

SEQ ID NO: 10512 - protein, 10 aa, Severe acute respiratory syndrome coronavirus 2
  REGION 1..10: note = Table B: HLA-DQA1*03:02-B1*03:03L HLA-DRB1*08:77L HLA-DRB3*02:01L HLA-DPA1*03:01-B1*04:02L HLA-DRB1*12:01L HLA-DPA1*01:02-B1*04:01L HLA-DRB1*07:01L HLA-DRB1*16:01L HLA-DQA1*02:01-B1*03:03L HLA-DRB1*15:03L
WLTYTGAIKL

SEQ ID NO: 10513 - protein, 12 aa, Severe acute respiratory syndrome coronavirus 2
  REGION 1..12: note = Table B: HLA-DQA1*03:02-B1*03:03L HLA-DRB1*04:03L HLA-DRB1*13:02L HLA-DRB1*01:01L HLA-DRB4*03:01NL HLA-DRB1*08:77L HLA-DRB3*02:01L HLA-DPA1*01:03-B1*03:01L HLA-DPA1*03:01-B1*04:02L HLA-DRB1*14:01L HLA-DRB1*11:03L
  REGION 1..12: note = CONT. FROM ABOVE: HLA-DRB1*11:04L HLA-DRB1*14:02L HLA-DQA1*01:01 -B1*05:01L HLA-DRB1*11:01L HLA-DQA1*01-B1*05L HLA-DQA1*05:05-B1* 03:19L HLA-DPA1*01:03-B1*04:01L HLA-DRB1*04:10L HLA-DRB1*09:01L HLA-DPA1*01:03-B1*04:02L HLA-DRB1*12:02L HLA-DRB3*01:01L
  REGION 1..12: note = CONT. FROM ABOVE: HLA-DPA1*02:01-B1*13:01L HLA-DRB1*14:54L HLA-D PA1*01:03-B1*02:01L HLA-DQA1*05:05-B1*03:01L HLA-DRB1*14:17L HLA -DRB1*07:01L HLA-DRB1*10:01L HLA-DRB1*08:02L
LTYTGAIKLDDK

SEQ ID NO: 10514 - protein, 11 aa, Severe acute respiratory syndrome coronavirus 2
  REGION 1..11: note = Table B: HLA-DQA1*03:02-B1*03:03L HLA-DRB1*13:02L HLA-DRB1*01:02L HLA-DRB1*08:04L HLA-DRB1*08:77L HLA-DRB1*14:01L HLA-DRB1*11:04L HLA-DRB1*08:01L HLA-DQA1*05:01-B1*02:01L HLA-DRB1*04:10L HLA-DRB1*12:01L HLA-DRB1*12:02L
  REGION 1..11: note = CONT. FROM ABOVE: HLA-DPA1*01:02-B1*04:01L HLA-DRB1*04:08L HLA-D RB1*08:03L HLA-DRB1*15:03L
GAIKLDDKDPN

SEQ ID NO: 10515 - protein, 10 aa, Severe acute respiratory syndrome coronavirus 2
  REGION 1..10: note = Table B: HLA-DQA1*03:02-B1*03:03L HLA-DQA1*05:01-B1*03:01L HLA-DRB1*13:03L HLA-DQA1*01-B1*05L HLA-DQA1*05:01-B1*02:01L HLA-DQA1*03:01-B1*03:02L HLA-DPA1*01:02-B1*04:01L
DPNFKDQVIL

SEQ ID NO: 10516 - protein, 11 aa, Severe acute respiratory syndrome coronavirus 2
  REGION 1..11: note = Table B: HLA-DQA1*03:02-B1*03:03L HLA-DQA1*05:01-B1*03:01L HLA-DRB1*04:03L HLA-DRB1*13:03L HLA-DRB1*01:03L HLA-DRB1*04:02L HLA-DRB1*04:05L HLA-DQA1*01:02-B1*06:02L HLA-DRB1*01:02L HLA-DRB4*03:01NL HLA-DRB1*08:04L HLA-DPA1*03:01-B1*04:02L
  REGION 1..11: note = CONT. FROM ABOVE: HLA-DRB1*14:01L HLA-DRB1*11:04L HLA-DRB1*08:01 L HLA-DRB1*12:01L HLA-DPA1*03:01-B1*105:01L HLA-DRB1*14:54L HLA- DRB1*14:17L HLA-DPA1*01:02-B1*04:01L HLA-DRB1*16:01L HLA-DQA1*01 :03-B1*06:01L HLA-DRB1*04:08L HLA-DRB1*08:03L
  REGION 1..11: note = CONT. FROM ABOVE: HLA-DQA1*02:01-B1*03:03L HLA-DRB1*15:03L
DQVILLNKHID

SEQ ID NO: 10517 - protein, 12 aa, Severe acute respiratory syndrome coronavirus 2
  REGION 1..12: note = Table B: HLA-DQA1*03:02-B1*03:03L HLA-DQA1*01:02-B1*06:02L HLA-DQA1*05:01-B1*02:01L HLA-DPA1*03:01-B1*105:01L HLA-DRB1*16:01L HLA-DQA1*01:03-B1*06:01L HLA-DQA1*02:01-B1*03:03L HLA-DRB1*15:03L
IDAYKTFPPTEP

SEQ ID NO: 10518 - protein, 12 aa, Severe acute respiratory syndrome coronavirus 2
  REGION 1..12: note = Table B: HLA-DQA1*03:02-B1*03:03L HLA-DQA1*01:02-B1*06:02L HLA-DRB1*01:02L HLA-DQA1*01:01-B1*05:01L HLA-DQA1*05:01-B1*02:01L HLA-DRB1*12:02L HLA-DPA1*02:01-B1*13:01L HLA-DRB1*10:01L HLA-DRB1*08:03L
  REGION 1..12: note = CONT. FROM ABOVE: HLA-DRB1*15:03L
DAYKTFPPTEPK

SEQ ID NO: 10519 - protein, 10 aa, Severe acute respiratory syndrome coronavirus 2
  REGION 1..10: note = Table B: HLA-DQA1*03:02-B1*03:03L HLA-DQA1*05:01-B1*03:01L HLA-DQA1*05:01-B1*02:01L HLA-DQA1*03:01-B1*03:02L HLA-DQA1*01:03-B1*06:01L HLA-DQA1*02:01-B1*03:03L
DETQALPQRQ

SEQ ID NO: 10520 - protein, 10 aa, Severe acute respiratory syndrome coronavirus 2
  REGION 1..10: note = Table B: HLA-DQA1*03:02-B1*03:03L HLA-DQA1*05:01-B1*03:01L HLA-DRB1*04:01L HLA-DRB1*13:02M HLA-DRB1*13:03M HLA-DRB1*01:03L HLA-DRB1*04:02L HLA-DRB1*04:04L HLA-DQA1*01:02-B1*06:02L HLA-DRB1*01:01L HLA-DRB4*03:01NM HLA-DRB3*02:01L HLA-DRB1*14:01L
  REGION 1..10: note = CONT. FROM ABOVE: HLA-DRB1*11:04M HLA-DRB1*14:02L HLA-DRB1*08:01 M HLA-DRB1*11:01L HLA-DRB5*01:01M HLA-DPA1*01:03-B1*04:01L HLA-D PA1*01:03-B1*04:02L HLA-DRB1*12:01M HLA-DRB1*12:02L HLA-DPA1*03: 01-B1*105:01L HLA-DQA1*03:01-B1*03:02M HLA-DRB1*14:54L
  REGION 1..10: note = CONT. FROM ABOVE: HLA-DQA1*05:05-B1*03:01M HLA-DRB1*14:17L HLA-D RB1*16:01L HLA-DQA1*01:03-B1*06:01L HLA-DRB1*08:02L HLA-DRB1*08: 03L HLA-DQA1*02:01-B1*03:03L HLA-DRB1*15:01L
ETQALPQRQK

SEQ ID NO: 10521 - protein, 10 aa, Severe acute respiratory syndrome coronavirus 2
  REGION 1..10: note = Table B: HLA-DQA1*03:02-B1*03:03L HLA-DQA1*05:01-B1*03:01L HLA-DRB1*13:02L HLA-DRB1*13:03L HLA-DRB1*01:03L HLA-DRB1*04:02L HLA-DQA1*01:02-B1*06:02L HLA-DPA1*01:03-B1*03:01L HLA-DPA1*03:01-B1*04:02L HLA-DRB1*14:01L
  REGION 1..10: note = CONT. FROM ABOVE: HLA-DQA1*01:01-B1*05:01L HLA-DRB1*08:01M HLA-D RB1*11:01L HLA-DRB5*01:01L HLA-DQA1*01-B1*05L HLA-DQA1*05:01-B1* 02:01L HLA-DRB1*13:01L HLA-DPA1*01:03-B1*04:01L HLA-DQA1*05:05-B 1*03:116L HLA-DPA1*01:03-B1*04:02L HLA-DRB3*01:01L
  REGION 1..10: note = CONT. FROM ABOVE: HLA-DQA1*03:01-B1*03:02L HLA-DPA1*01:02-B1*04: 01L HLA-DRB1*16:01L HLA-DQA1*01:03-B1*06:01L HLA-DQA1*02:01-B1*0 3:03L
RQKKQQTVTL

SEQ ID NO: 10522 - protein, 12 aa, Severe acute respiratory syndrome coronavirus 2
  REGION 1..12: note = Table B: HLA-DQA1*03:02-B1*03:03L HLA-DRB1*04:03L HLA-DQA1*05:01-B1*02:01L
KQQTVTLLPAAD

SEQ ID NO: 10523 - protein, 13 aa, Severe acute respiratory syndrome coronavirus 2
  REGION 1..13: note = Table B: HLA-DQA1*03:02-B1*03:03L HLA-DRB1*01:02L HLA-DRB1*14:17L HLA-DRB1*16:01L HLA-DRB1*15:03L
QQTVTLLPAADLD

SEQ ID NO: 10524 - protein, 11 aa, Severe acute respiratory syndrome coronavirus 2
  REGION 1..11: note = Table B: HLA-DQA1*03:02-B1*03:03L HLA-DRB1*04:03L HLA-DRB1*04:02L HLA-DRB1*04:05L HLA-DRB4*03:01NL HLA-DQA1*01-B1*05L HLA-DQA1*05:01-B1*02:01L HLA-DRB1*04:10L HLA-DRB1*12:01L HLA-DRB1*14:54L HLA-DRB1*14:17L HLA-DRB1*16:01L
  REGION 1..11: note = CONT. FROM ABOVE: HLA-DQA1*01:03-B1*06:01L HLA-DQA1*02:01-B1*03: 03L HLA-DRB1*15:03L
VTLLPAADLDD

SEQ ID NO: 10525 - protein, 12 aa, Severe acute respiratory syndrome coronavirus 2
  REGION 1..12: note = Table B: HLA-DQA1*03:02-B1*03:03L HLA-DRB1*04:02L HLA-DRB1*04:05L HLA-DRB1*04:10L HLA-DRB1*12:01L HLA-DPA1*03:01-B1*105:01L HLA-DRB1*14:17L HLA-DRB1*16:01L
TLLPAADLDDFS

SEQ ID NO: 10526 - protein, 12 aa, Severe acute respiratory syndrome coronavirus 2
  REGION 1..12: note = Table B: HLA-DQA1*03:02-B1*03:03L HLA-DRB1*04:02L HLA-DRB1*04:05L HLA-DRB1*04:10L HLA-DRB1*14:17L HLA-DRB1*16:01L HLA-DRB1*04:08L
LLPAADLDDFSK

SEQ ID NO: 10527 - protein, 12 aa, Severe acute respiratory syndrome coronavirus 2
  REGION 1..12: note = Table B: HLA-DQA1*03:02-B1*03:03L HLA-DRB1*01:03L HLA-DRB1*04:02L HLA-DRB1*04:05L HLA-DQA1*01:01-B1*05:01L HLA-DRB1*12:01L HLA-DPA1*03:01-B1*105:01L HLA-DRB1*14:17L HLA-DRB1*16:01L HLA-DQA1*01:03-B1*06:01L
LPAADLDDFSKQ

SEQ ID NO: 10528 - protein, 10 aa, Severe acute respiratory syndrome coronavirus 2
  REGION 1..10: note = Table B: HLA-DQA1*03:02-B1*03:03M HLA-DQA1*01-B1*05L HLA-DQA1*05:05-B1*03:19L HLA-DQA1*05:01-B1*02:01L HLA-DRB1*09:01L HLA-DQA1*03:01-B1*03:02L HLA-DPA1*01:03-B1*104:01L
ADLDDFSKQL

SEQ ID NO: 10529 - protein, 10 aa, Severe acute respiratory syndrome coronavirus 2
  REGION 1..10: note = Table B: HLA-DQA1*03:02-B1*03:03L HLA-DQA1*01-B1*05L HLA-DQA1*03:01-B1*03:02L
DDFSKQLQQS

SEQ ID NO: 10530 - protein, 10 aa, Severe acute respiratory syndrome coronavirus 2
  REGION 1..10: note = Table B: HLA-DQA1*03:02-B1*03:03L HLA-DQA1*03:01-B1*03:02L
DFSKQLQQSM

SEQ ID NO: 10531 - protein, 14 aa, Severe acute respiratory syndrome coronavirus 2
  REGION 1..14: note = Table B: HLA-DQA1*03:02-B1*03:03L HLA-DQA1*05:01-B1*03:01L HLA-DRB1*04:01L HLA-DRB1*13:02L HLA-DRB1*13:03L HLA-DRB1*01:03L HLA-DQA1*01:02-B1*06:02L HLA-DRB1*01:02L HLA-DRB1*08:04L HLA-DPA1*01:03-B1*03:01L HLA-DRB1*14:01L HLA-DRB1*11:04L
  REGION 1..14: note = CONT. FROM ABOVE: HLA-DQA1*01:01-B1*05:01L HLA-DQA1*05:05-B1*03: 19L HLA-DQA1*05:01-B1*02:01L HLA-DRB1*12:01L HLA-DPA1*02:01-B1*1 3:01L HLA-DPA1*03:01-B1*105:01L HLA-DQA1*05:05-B1*03:01L HLA-DRB 1*10:01L HLA-DQA1*01:03-B1*06:01L HLA-DRB1*08:03L
  REGION 1..14: note = CONT. FROM ABOVE: HLA-DRB1*15:03L
SKQLQQSMSSADST

SEQ ID NO: 10532 - protein, 14 aa, Severe acute respiratory syndrome coronavirus 2
  REGION 1..14: note = Table B: HLA-DQA1*03:02-B1*03:03L HLA-DQA1*01:02-B1*06:02L HLA-DQA1*01-B1*05L HLA-DQA1*05:01-B1*02:01L HLA-DQA1*02:01-B1*03:03L
KQLQQSMSSADSTQ

SEQ ID NO: 10533 - protein, 13 aa, Severe acute respiratory syndrome coronavirus 2
  REGION 1..13: note = Table B: HLA-DQA1*03:02-B1*03:03L HLA-DRB1*04:03L HLA-DQA1*01-B1*05L HLA-DQA1*05:01-B1*02:01L HLA-DRB1*14:17L HLA-DQA1*02:01-B1*03:03L
LQQSMSSADSTQA

SEQ ID NO: 10534 - protein, 10 aa, Severe acute respiratory syndrome coronavirus 2
  REGION 1..10: note = Table B: HLA-DQA1*03:02-B1*03:03L HLA-DRB1*04:03L HLA-DRB1*01:03L HLA-DRB1*04:05L HLA-DQA1*01:02-B1*06:02L HLA-DRB1*01:01L HLA-DRB1*01:02L HLA-DPA1*03:01-B1*04:02L HLA-DQA1*05:05-B1*03:19L HLA-DQA1*05:01-B1*02:01L
  REGION 1..10: note = CONT. FROM ABOVE: HLA-DPA1*01:03-B1*04:01L HLA-DRB1*12:01L HLA-D PA1*02:01-B1*13:01M HLA-DPA1*03:01-B1*105:01L HLA-DRB1*16:01L HL A-DQA1*01:03-B1*06:01M HLA-DQA1*02:01-B1*03:03L HLA-DRB1*15:03L
GYINVFAFPF

SEQ ID NO: 10535 - protein, 10 aa, Severe acute respiratory syndrome coronavirus 2
  REGION 1..10: note = Table B: HLA-DQA1*03:02-B1*03:03L HLA-DQA1*05:01-B1*03:01L HLA-DRB1*13:02L HLA-DRB1*13:03L HLA-DRB1*01:03L HLA-DRB1*04:05L HLA-DQA1*01:02-B1*06:02M HLA-DRB1*01:01L HLA-DRB4*03:01NL HLA-DRB1*08:77L HLA-DPA1*01:03-B1*03:01L
  REGION 1..10: note = CONT. FROM ABOVE: HLA-DPA1*03:01-B1*04:02L HLA-DRB1*03:01L HLA-D RB1*14:01L HLA-DRB1*11:02L HLA-DRB1*14:02L HLA-DQA1*01-B1*05L HL A-DQA1*05:05-B1*03:19L HLA-DQA1*05:01-B1*02:01L HLA-DRB4*01:01L HLA-DPA1*01:03-B1*04:01M HLA-DQA1*05:05-B1*03:116L
  REGION 1..10: note = CONT. FROM ABOVE: HLA-DRB1*09:01L HLA-DPA1*01:03-B1*04:02L HLA-D RB1*12:01L HLA-DPA1*02:01-B1*13:01L HLA-DPA1*03:01-B1*105:01M HL A-DPA1*01:03-B1*104:01L HLA-DQA1*05:05-B1*03:01L HLA-DPA1*01:02- B1*04:01L HLA-DRB1*10:01L HLA-DRB1*16:01L
  REGION 1..10: note = CONT. FROM ABOVE: HLA-DQA1*01:03-B1*06:01L HLA-DRB1*08:02L HLA-D QA1*02:01-B1*03:03L HLA-DRB1*15:03L
NVFAFPFTIY

SEQ ID NO: 10536 - protein, 10 aa, Severe acute respiratory syndrome coronavirus 2
  REGION 1..10: note = Table B: HLA-DQA1*03:02-B1*03:03M HLA-DQA1*05:01-B1*03:01L HLA-DRB1*01:03L HLA-DRB1*04:05L HLA-DQA1*01:02-B1*06:02L HLA-DRB1*01:02L HLA-DPA1*03:01-B1*04:02L HLA-DRB1*14:01L HLA-DRB1*11:02L HLA-DRB1*14:02L HLA-DRB1*08:01L
  REGION 1..10: note = CONT. FROM ABOVE: HLA-DQA1*05:05-B1*03:19L HLA-DQA1*05:01-B1*02: 01L HLA-DRB4*01:01L HLA-DPA1*01:03-B1*04:01L HLA-DQA1*05:05-B1*0 3:116L HLA-DRB1*09:01L HLA-DPA1*01:03-B1*04:02L HLA-DPA1*02:01-B 1*13:01L HLA-DPA1*03:01-B1*105:01L HLA-DQA1*03:01-B1*03:02L
  REGION 1..10: note = CONT. FROM ABOVE: HLA-DPA1*01:03-B1*104:01L HLA-DPA1*01:02-B1*04 :01L HLA-DRB1*10:01L HLA-DRB1*16:01L HLA-DQA1*01:03-B1*06:01L HL A-DRB1*08:03L HLA-DQA1*02:01-B1*03:03L HLA-DRB1*15:03M
FAFPFTIYSL

SEQ ID NO: 10537 - protein, 10 aa, Severe acute respiratory syndrome coronavirus 2
  REGION 1..10: note = Table B: HLA-DQA1*03:02-B1*03:03L HLA-DQA1*05:01-B1*03:01L HLA-DRB1*04:03L HLA-DRB1*04:05L HLA-DQA1*01:02-B1*06:02L HLA-DQA1*01-B1*05L HLA-DQA1*05:01-B1*02:01L HLA-DQA1*03:01-B1*03:02L HLA-DQA1*01:03-B1*06:01L
  REGION 1..10: note = CONT. FROM ABOVE: HLA-DQA1*02:01-B1*03:03L
NYIAQVDVVN

SEQ ID NO: 10538 - protein, 10 aa, Severe acute respiratory syndrome coronavirus 2
  REGION 1..10: note = Table B: HLA-DQA1*03:02-B1*03:03L HLA-DQA1*05:01-B1*03:01L HLA-DRB1*04:03L HLA-DRB1*13:03L HLA-DRB1*01:03L HLA-DRB1*04:05L HLA-DQA1*01:02-B1*06:02M HLA-DRB1*01:01L HLA-DRB1*01:02L HLA-DRB4*03:01NL HLA-DRB1*08:77L HLA-DPA1*01:03-B1*03:01L
  REGION 1..10: note = CONT. FROM ABOVE: HLA-DPA1*03:01-B1*04:02L HLA-DRB1*03:01L HLA-D RB1*14:01L HLA-DRB1*11:03L HLA-DRB1*14:02L HLA-DQA1*01:01-B1*05: 01L HLA-DRB1*11:01L HLA-DQA1*01-B1*05L HLA-DQA1*05:05-B1*03:19L HLA-DQA1*05:01-B1*02:01L HLA-DRB4*01:01L
  REGION 1..10: note = CONT. FROM ABOVE: HLA-DPA1*01:03-B1*04:01L HLA-DQA1*05:05-B1*03: 116L HLA-DRB1*09:01L HLA-DPA1*01:03-B1*04:02L HLA-DRB1*12:01L HL A-DPA1*02:01-B1*13:01M HLA-DPA1*03:01-B1*105:01L HLA-DQA1*03:01- B1*03:02L HLA-DQA1*05:05-B1*03:01L HLA-DPA1*01:02-B1*04:01L
  REGION 1..10: note = CONT. FROM ABOVE: HLA-DRB1*10:01L HLA-DRB1*16:01L HLA-DQA1*01:03 -B1*06:01M HLA-DRB1*08:03L HLA-DQA1*02:01-B1*03:03L HLA-DRB1*15: 03L
YIAQVDVVNF

SEQ ID NO: 10539 - protein, 10 aa, Severe acute respiratory syndrome coronavirus 2
  REGION 1..10: note = Table B: HLA-DQA1*03:02-B1*03:03L HLA-DQA1*05:01-B1*03:01L HLA-DRB1*04:03L HLA-DRB1*13:02L HLA-DRB1*13:03L HLA-DRB1*04:02L HLA-DRB1*04:05L HLA-DQA1*01:02-B1*06:02L HLA-DRB1*01:02L HLA-DRB4*03:01NL HLA-DRB3*02:01L HLA-DPA1*01:03-B1*03:01L
  REGION 1..10: note = CONT. FROM ABOVE: HLA-DPA1*03:01-B1*04:02L HLA-DRB1*14:01L HLA-D QA1*01-B1*05L HLA-DQA1*05:05-B1*03:19L HLA-DQA1*05:01-B1*02:01L HLA-DRB1*04:10L HLA-DRB1*12:01L HLA-DRB1*12:02L HLA-DPA1*03:01-B 1*105:01L HLA-DQA1*03:01-B1*03:02L HLA-DRB1*14:54L
  REGION 1..10: note = CONT. FROM ABOVE: HLA-DQA1*05:05-B1*03:01L HLA-DRB1*14:17L HLA-D PA1*01:02-B1*04:01L HLA-DRB1*16:01L HLA-DQA1*01:03-B1*06:01L HLA -DQA1*02:01-B1*03:03L HLA-DRB1*15:03L
IAQVDVVNFN

SEQ ID NO: 10540 - protein, 10 aa, Severe acute respiratory syndrome coronavirus 2
  REGION 1..10: note = Table B: HLA-DQA1*03:02-B1*03:03M HLA-DQA1*05:01-B1*03:01L HLA-DRB1*13:03L HLA-DRB1*01:03L HLA-DQA1*01:02-B1*06:02L HLA-DRB1*01:02L HLA-DPA1*03:01-B1*04:02L HLA-DRB1*14:01L HLA-DRB1*11:02L HLA-DRB1*14:02L HLA-DRB1*08:01L
  REGION 1..10: note = CONT. FROM ABOVE: HLA-DQA1*05:05-B1*03:19M HLA-DQA1*05:01-B1*02: 01L HLA-DRB4*01:01L HLA-DPA1*01:03-B1*04:01L HLA-DQA1*05:05-B1*0 3:116M HLA-DRB1*09:01L HLA-DPA1*01:03-B1*04:02L HLA-DPA1*02:01-B 1*13:01L HLA-DPA1*03:01-B1*105:01L HLA-DQA1*03:01-B1*03:02M
  REGION 1..10: note = CONT. FROM ABOVE: HLA-DPA1*01:03-B1*104:01L HLA-DPA1*01:02-B1*04 :01L HLA-DRB1*10:01L HLA-DRB1*16:01L HLA-DQA1*01:03-B1*06:01L HL A-DRB1*08:03L HLA-DQA1*02:01-B1*03:03M HLA-DRB1*15:03M
AQVDVVNFNL

SEQ ID NO: 10541 - protein, 14 aa, Severe acute respiratory syndrome coronavirus 2
  REGION 1..14: note = Table B: HLA-DQA1*05:01-B1*03:01L HLA-DRB1*04:05L HLA-DPA1*01:03-B1*03:01L HLA-DQA1*05:01-B1*02:01L HLA-DPA1*02:01-B1*13:01L HLA-DPA1*03:01-B1*105:01L HLA-DQA1*05:05-B1*03:01L
NEKTHVQLSLPVLQ

SEQ ID NO: 10542 - protein, 15 aa, Severe acute respiratory syndrome coronavirus 2
  REGION 1..15: note = Table B: HLA-DQA1*05:01-B1*03:01L HLA-DPA1*02:01-B1*13:01L
THVQLSLPVLQVRDV

SEQ ID NO: 10543 - protein, 10 aa, Severe acute respiratory syndrome coronavirus 2
  REGION 1..10: note = Table B: HLA-DQA1*05:01-B1*03:01L HLA-DRB1*13:02L HLA-DRB1*13:03L HLA-DRB1*01:03L HLA-DQA1*01:02-B1*06:02M HLA-DPA1*01:03-B1*03:01L HLA-DRB1*03:01L HLA-DRB1*14:01L HLA-DRB1*14:02L HLA-DRB1*11:01L HLA-DQA1*05:01-B1*02:01L
  REGION 1..10: note = CONT. FROM ABOVE: HLA-DPA1*01:03-B1*04:01L HLA-DPA1*01:03-B1*04: 02L HLA-DPA1*02:01-B1*13:01L HLA-DPA1*03:01-B1*105:01L HLA-DQA1* 01:03-B1*06:01L HLA-DRB1*08:02L HLA-DQA1*02:01-B1*03:03M HLA-DRB 1*15:03L
QVRDVLVRGF

SEQ ID NO: 10544 - protein, 11 aa, Severe acute respiratory syndrome coronavirus 2
  REGION 1..11: note = Table B: HLA-DQA1*05:01-B1*03:01L HLA-DRB1*13:02L HLA-DRB1*13:03L HLA-DRB1*01:03L HLA-DRB4*03:01NL HLA-DRB1*14:01L HLA-DQA1*05:01-B1*02:01L HLA-DRB1*12:01L HLA-DRB1*14:54L HLA-DRB1*16:01L
LVEVEKGVLPQ

SEQ ID NO: 10545 - protein, 10 aa, Severe acute respiratory syndrome coronavirus 2
  REGION 1..10: note = Table B: HLA-DQA1*05:01-B1*03:01L HLA-DRB1*13:03L HLA-DQA1*01:02-B1*06:02M HLA-DPA1*03:01-B1*04:02L HLA-DRB1*14:01L HLA-DQA1*05:05-B1*03:116L HLA-DPA1*02:01-B1*13:01L HLA-DPA1*03:01-B1*105:01M
  REGION 1..10: note = CONT. FROM ABOVE: HLA-DPA1*01:02-B1*04:01L HLA-DQA1*01:03-B1*06: 01L HLA-DQA1*02:01-B1*03:03L HLA-DRB1*15:03L
LPQLEQPYVF

SEQ ID NO: 10546 - protein, 13 aa, Severe acute respiratory syndrome coronavirus 2
  REGION 1..13: note = Table B: HLA-DQA1*05:01-B1*03:01L HLA-DRB1*13:03L HLA-DRB1*04:02L HLA-DRB1*04:04L HLA-DRB1*14:01L HLA-DRB1*11:04L HLA-DRB1*11:01L HLA-DRB3*01:01L HLA-DRB1*14:17L
VFIKRSDARTAPH

SEQ ID NO: 10547 - protein, 12 aa, Severe acute respiratory syndrome coronavirus 2
  REGION 1..12: note = Table B: HLA-DQA1*05:01-B1*03:01L HLA-DRB1*04:05L HLA-DQA1*01:02-B1*06:02L HLA-DRB1*01:02L HLA-DRB1*08:01L HLA-DRB1*12:01L HLA-DQA1*01:03-B1*06:01L HLA-DRB1*04:08L
IKRSDARTAPHG

SEQ ID NO: 10548 - protein, 10 aa, Severe acute respiratory syndrome coronavirus 2
  REGION 1..10: note = Table B: HLA-DQA1*05:01-B1*03:01L HLA-DRB1*01:03L HLA-DRB1*08:01L HLA-DQA1*03:01-B1*03:02L HLA-DRB1*16:01L HLA-DQA1*02:01-B1*03:03L
ARTAPHGHVM

SEQ ID NO: 10549 - protein, 10 aa, Severe acute respiratory syndrome coronavirus 2
  REGION 1..10: note = Table B: HLA-DQA1*05:01-B1*03:01M HLA-DRB1*13:03L HLA-DRB1*04:02L HLA-DRB1*04:05L HLA-DQA1*01:02-B1*06:02L HLA-DPA1*01:03-B1*03:01L HLA-DPA1*03:01-B1*04:02L HLA-DRB1*14:01L HLA-DRB1*08:01L HLA-DRB5*01:01L
  REGION 1..10: note = CONT. FROM ABOVE: HLA-DQA1*01-B1*05L HLA-DQA1*05:01-B1*02:01L HL A-DRB1*13:01L HLA-DPA1*01:03-B1*04:01L HLA-DRB3*01:01L HLA-DPA1* 03:01-B1*105:01L HLA-DQA1*03:01-B1*03:02L HLA-DPA1*01:02-B1*04:0 1L HLA-DRB1*10:01L HLA-DRB1*16:01L HLA-DRB1*15:01L
APHGHVMVEL

SEQ ID NO: 10550 - protein, 10 aa, Severe acute respiratory syndrome coronavirus 2
  REGION 1..10: note = Table B: HLA-DQA1*05:01-B1*03:01L HLA-DRB1*13:03M HLA-DRB1*01:03L HLA-DQA1*01:02-B1*06:02M HLA-DRB4*03:01NL HLA-DRB1*08:77L HLA-DPA1*01:03-B1*03:01L HLA-DPA1*03:01-B1*04:02L HLA-DRB1*03:01L HLA-DRB1*14:01L
  REGION 1..10: note = CONT. FROM ABOVE: HLA-DRB1*11:02L HLA-DRB1*14:02L HLA-DQA1*01-B1 *05L HLA-DQA1*05:05-B1*03:19M HLA-DQA1*05:01-B1*02:01M HLA-DRB4* 01:01L HLA-DPA1*01:03-B1*04:01L HLA-DQA1*05:05-B1*03:116L HLA-DP A1*01:03-B1*04:02L HLA-DRB1*12:01L HLA-DPA1*02:01-B1*13:01L
  REGION 1..10: note = CONT. FROM ABOVE: HLA-DPA1*03:01-B1*105:01L HLA-DPA1*01:03-B1*10 4:01L HLA-DRB1*10:01L HLA-DRB1*16:01L HLA-DRB1*08:02L HLA-DQA1*0 2:01-B1*03:03L HLA-DRB1*15:03L
LVAELEGIQY

SEQ ID NO: 10551 - protein, 12 aa, Severe acute respiratory syndrome coronavirus 2
  REGION 1..12: note = Table B: HLA-DQA1*05:01-B1*03:01L HLA-DRB1*04:03L HLA-DRB1*01:02L HLA-DPA1*03:01-B1*04:02L HLA-DRB1*14:01L HLA-DQA1*05:01-B1*02:01L HLA-DPA1*03:01-B1*105:01L HLA-DRB1*14:54L HLA-DRB1*14:17L HLA-DPA1*01:02-B1*04:01L
  REGION 1..12: note = CONT. FROM ABOVE: HLA-DRB1*16:01L HLA-DQA1*02:01-B1*03:03L HLA-D RB1*15:03L
VAELEGIQYGRS

SEQ ID NO: 10552 - protein, 14 aa, Severe acute respiratory syndrome coronavirus 2
  REGION 1..14: note = Table B: HLA-DQA1*05:01-B1*03:01L HLA-DRB1*04:05L HLA-DRB1*01:02L HLA-DRB1*12:01L HLA-DPA1*02:01-B1*13:01L
YGRSGETLGVLVPH

SEQ ID NO: 10553 - protein, 10 aa, Severe acute respiratory syndrome coronavirus 2
  REGION 1..10: note = Table B: HLA-DQA1*05:01-B1*03:01L HLA-DRB1*13:03L HLA-DRB1*04:05L HLA-DQA1*01-B1*05L HLA-DQA1*03:01-B1*03:02L HLA-DRB1*16:01L
VPHVGEIPVA

SEQ ID NO: 10554 - protein, 10 aa, Severe acute respiratory syndrome coronavirus 2
  REGION 1..10: note = Table B: HLA-DQA1*05:01-B1*03:01L
IPVAYRKVLL

SEQ ID NO: 10555 - protein, 12 aa, Severe acute respiratory syndrome coronavirus 2
  REGION 1..12: note = Table B: HLA-DQA1*05:01-B1*03:01L HLA-DQA1*03:01-B1*03:02L
NGNKGAGGHSYG

SEQ ID NO: 10556 - protein, 13 aa, Severe acute respiratory syndrome coronavirus 2
  REGION 1..13: note = Table B: HLA-DQA1*05:01-B1*03:01L HLA-DQA1*03:01-B1*03:02L HLA-DQA1*05:05-B1*03:01L HLA-DQA1*01:03-B1*06:01L
GNKGAGGHSYGAD

SEQ ID NO: 10557 - protein, 11 aa, Severe acute respiratory syndrome coronavirus 2
  REGION 1..11: note = Table B: HLA-DQA1*05:01-B1*03:01L HLA-DQA1*01:03-B1*06:01L HLA-DQA1*02:01-B1*03:03L
AGGHSYGADLK

SEQ ID NO: 10558 - protein, 13 aa, Severe acute respiratory syndrome coronavirus 2
  REGION 1..13: note = Table B: HLA-DQA1*05:01-B1*03:01L HLA-DRB1*13:03L HLA-DRB1*01:03L HLA-DQA1*01:02-B1*06:02L HLA-DRB1*01:02L HLA-DPA1*01:03-B1*03:01L HLA-DRB1*08:01L HLA-DRB1*04:10L HLA-DRB1*12:01L HLA-DPA1*02:01-B1*13:01L
  REGION 1..13: note = CONT. FROM ABOVE: HLA-DPA1*03:01-B1*105:01L HLA-DQA1*05:05-B1*03 :01L HLA-DRB1*04:08L HLA-DRB1*15:03L
YGADLKSFDLGDE

SEQ ID NO: 10559 - protein, 12 aa, Severe acute respiratory syndrome coronavirus 2
  REGION 1..12: note = Table B: HLA-DQA1*05:01-B1*03:01L HLA-DPA1*01:03-B1*04:01L HLA-DPA1*01:03-B1*04:02L HLA-DRB1*12:01L HLA-DPA1*02:01-B1*13:01L HLA-DQA1*05:05-B1*03:01L HLA-DPA1*01:02-B1*04:01L HLA-DRB1*16:01L HLA-DRB1*04:08L
  REGION 1..12: note = CONT. FROM ABOVE: HLA-DRB1*15:03L
DELGTDPYEDFQ

SEQ ID NO: 10560 - protein, 10 aa, Severe acute respiratory syndrome coronavirus 2
  REGION 1..10: note = Table B: HLA-DQA1*05:01-B1*03:01L HLA-DRB1*13:03L HLA-DQA1*01:02-B1*06:02M HLA-DPA1*03:01-B1*04:02L HLA-DQA1*05:05-B1*03:116L HLA-DPA1*02:01-B1*13:01L HLA-DPA1*03:01-B1*105:01M HLA-DQA1*01:03-B1*06:01L
  REGION 1..10: note = CONT. FROM ABOVE: HLA-DRB1*15:03L
DPYEDFQENW

SEQ ID NO: 10561 - protein, 12 aa, Severe acute respiratory syndrome coronavirus 2
  REGION 1..12: note = Table B: HLA-DQA1*05:01-B1*03:01L HLA-DQA1*01:02-B1*06:02L HLA-DRB1*08:01L HLA-DQA1*02:01-B1*03:03L
ENWNTKHSSGVT

SEQ ID NO: 10562 - protein, 10 aa, Severe acute respiratory syndrome coronavirus 2
  REGION 1..10: note = Table B: HLA-DQA1*05:01-B1*03:01L HLA-DQA1*01:02-B1*06:02L HLA-DPA1*03:01-B1*105:01L HLA-DQA1*03:01-B1*03:02L HLA-DQA1*05:05-B1*03:01L HLA-DQA1*01:03-B1*06:01L HLA-DQA1*02:01-B1*03:03L
HSSGVTRELM

SEQ ID NO: 10563 - protein, 10 aa, Severe acute respiratory syndrome coronavirus 2
  REGION 1..10: note = Table B: HLA-DQA1*05:01-B1*03:01L HLA-DRB1*13:02L HLA-DRB1*13:03L HLA-DRB1*01:03L HLA-DQA1*01:02-B1*06:02L HLA-DRB1*08:77L HLA-DPA1*01:03-B1*03:01L HLA-DRB1*03:01L HLA-DRB1*14:01L HLA-DRB1*11:02L HLA-DRB1*14:02L HLA-DRB1*11:01L
  REGION 1..10: note = CONT. FROM ABOVE: HLA-DQA1*01-B1*05L HLA-DQA1*05:05-B1*03:19L HL A-DQA1*05:01-B1*02:01L HLA-DRB4*01:01L HLA-DPA1*01:03-B1*04:01L HLA-DQA1*05:05-B1*03:116L HLA-DPA1*01:03-B1*04:02L HLA-DRB1*12:0 1L HLA-DPA1*02:01-B1*13:01L HLA-DPA1*03:01-B1*105:01L
  REGION 1..10: note = CONT. FROM ABOVE: HLA-DPA1*01:03-B1*104:01L HLA-DRB1*10:01L HLA- DRB1*16:01L HLA-DQA1*01:03-B1*06:01L HLA-DRB1*08:02L HLA-DQA1*02 :01-B1*03:03L HLA-DRB1*15:03L
LMRELNGGAY

SEQ ID NO: 10564 - protein, 11 aa, Severe acute respiratory syndrome coronavirus 2
  REGION 1..11: note = Table B: HLA-DQA1*05:01-B1*03:01L HLA-DPA1*03:01-B1*105:01L HLA-DQA1*05:05-B1*03:01L
LNGGAYTRYVD

SEQ ID NO: 10565 - protein, 11 aa, Severe acute respiratory syndrome coronavirus 2
  REGION 1..11: note = Table B: HLA-DQA1*05:01-B1*03:01L HLA-DQA1*05:05-B1*03:19L HLA-DPA1*03:01-B1*105:01L HLA-DQA1*05:05-B1*03:01L
NGGAYTRYVDN

SEQ ID NO: 10566 - protein, 12 aa, Severe acute respiratory syndrome coronavirus 2
  REGION 1..12: note = Table B: HLA-DQA1*05:01-B1*03:01L HLA-DRB1*08:04L HLA-DRB3*02:01L HLA-DPA1*01:03-B1*03:01L HLA-DPA1*03:01-B1*04:02L HLA-DRB1*14:01L HLA-DRB1*08:01L HLA-DQA1*05:05-B1*03:19L HLA-DQA1*05:05-B1*03:01L
  REGION 1..12: note = CONT. FROM ABOVE: HLA-DRB1*14:17L HLA-DRB1*04:08L
GGAYTRYVDNNF

SEQ ID NO: 10567 - protein, 16 aa, Severe acute respiratory syndrome coronavirus 2
  REGION 1..16: note = Table B: HLA-DQA1*05:01-B1*03:01L HLA-DRB1*13:02L HLA-DPA1*03:01-B1*04:02L HLA-DRB1*14:02L HLA-DQA1*05:05-B1*03:19L HLA-DPA1*01:03-B1*04:02L HLA-DPA1*01:03-B1*104:01L HLA-DQA1*05:05-B1*03:01L
GAYTRYVDNNFCGPDG

SEQ ID NO: 10568 - protein, 16 aa, Severe acute respiratory syndrome coronavirus 2
  REGION 1..16: note = Table B: HLA-DQA1*05:01-B1*03:01L HLA-DRB1*04:01L HLA-DRB1*13:02L HLA-DRB1*13:03L HLA-DRB1*01:01L HLA-DRB1*08:04L HLA-DRB1*14:01L HLA-DQA1*01-B1*05L HLA-DPA1*01:03-B1*04:02L HLA-DRB3*01:01L HLA-DPA1*01:03-B1*02:01L
  REGION 1..16: note = CONT. FROM ABOVE: HLA-DPA1*01:03-B1*104:01L HLA-DPA1*01:02-B1*04 :01L HLA-DRB1*07:01L HLA-DRB1*10:01L HLA-DRB1*08:03L
GPDGYPLECIKDLLAR

SEQ ID NO: 10569 - protein, 12 aa, Severe acute respiratory syndrome coronavirus 2
  REGION 1..12: note = Table B: HLA-DQA1*05:01-B1*03:01L HLA-DQA1*01:02-B1*06:02L HLA-DRB1*01:02L HLA-DRB1*08:01L HLA-DQA1*05:05-B1*03:01L HLA-DRB1*16:01L HLA-DQA1*01:03-B1*06:01L HLA-DRB1*04:08L
IKDLLARAGKAS

SEQ ID NO: 10570 - protein, 15 aa, Severe acute respiratory syndrome coronavirus 2
  REGION 1..15: note = Table B: HLA-DQA1*05:01-B1*03:01L HLA-DRB1*13:02L HLA-DQA1*05:05-B1*03:19L HLA-DQA1*01:03-B1*06:01L HLA-DRB1*04:08L
DLLARAGKASCTLSE

SEQ ID NO: 10571 - protein, 14 aa, Severe acute respiratory syndrome coronavirus 2
  REGION 1..14: note = Table B: HLA-DQA1*05:01-B1*03:01L HLA-DRB1*04:05L HLA-DRB1*01:02L HLA-DPA1*01:03-B1*03:01L HLA-DQA1*05:05-B1*03:19L HLA-DRB1*12:01L HLA-DPA1*02:01-B1*13:01L HLA-DPA1*01:03-B1*104:01L
  REGION 1..14: note = CONT. FROM ABOVE: HLA-DQA1*05:05-B1*03:01L HLA-DQA1*01:03-B1*06: 01L HLA-DQA1*02:01-B1*03:03L
LARAGKASCTLSEQ

SEQ ID NO: 10572 - protein, 12 aa, Severe acute respiratory syndrome coronavirus 2
  REGION 1..12: note = Table B: HLA-DQA1*05:01-B1*03:01L HLA-DRB1*01:03L HLA-DRB1*04:04L HLA-DQA1*01:02-B1*06:02L HLA-DRB1*01:02L HLA-DRB1*14:01L HLA-DQA1*01:01-B1*05:01L HLA-DQA1*05:01-B1*02:01L HLA-DRB1*04:10L
  REGION 1..12: note = CONT. FROM ABOVE: HLA-DPA1*02:01-B1*13:01L HLA-DPA1*03:01-B1*105 :01L HLA-DRB1*14:54L HLA-DPA1*01:02-B1*04:01L HLA-DQA1*01:03-B1* 06:01L HLA-DRB1*04:08L HLA-DRB1*08:03L HLA-DRB1*15:03L
SEQLDFIDTKRG

SEQ ID NO: 10573 - protein, 16 aa, Severe acute respiratory syndrome coronavirus 2
  REGION 1..16: note = Table B: HLA-DQA1*05:01-B1*03:01L HLA-DRB1*13:03L HLA-DRB1*03:01L HLA-DRB1*14:01L HLA-DRB1*11:04L HLA-DQA1*01:01-B1*05:01L HLA-DRB3*01:01L HLA-DPA1*03:01-B1*105:01L HLA-DQA1*01:03-B1*06:01L
IDTKRGVYCCREHEHE

SEQ ID NO: 10574 - protein, 10 aa, Severe acute respiratory syndrome coronavirus 2
  REGION 1..10: note = Table B: HLA-DQA1*05:01-B1*03:01M HLA-DRB1*13:03L HLA-DRB1*01:03L HLA-DQA1*01:02-B1*06:02L HLA-DRB4*03:01NL HLA-DRB1*08:77L HLA-DPA1*01:03-B1*03:01L HLA-DPA1*03:01-B1*04:02L HLA-DRB1*03:01L HLA-DRB1*14:02L
  REGION 1..10: note = CONT. FROM ABOVE: HLA-DRB1*11:01L HLA-DQA1*01-B1*05L HLA-DQA1*05 :05-B1*03:19L HLA-DQA1*05:01-B1*02:01L HLA-DRB4*01:01L HLA-DPA1* 01:03-B1*04:01L HLA-DQA1*05:05-B1*03:116L HLA-DPA1*01:03-B1*04:0 2L HLA-DRB1*12:01L HLA-DPA1*01:03-B1*104:01L
  REGION 1..10: note = CONT. FROM ABOVE: HLA-DPA1*01:02-B1*04:01L HLA-DRB1*10:01L HLA-D RB1*16:01L HLA-DRB1*08:02L HLA-DQA1*02:01-B1*03:03L HLA-DRB1*15: 03L
REHEHEIAWY

SEQ ID NO: 10575 - protein, 15 aa, Severe acute respiratory syndrome coronavirus 2
  REGION 1..15: note = Table B: HLA-DQA1*05:01-B1*03:01L HLA-DQA1*01:01-B1*05:01L
EHEHEIAWYTERSEK

SEQ ID NO: 10576 - protein, 14 aa, Severe acute respiratory syndrome coronavirus 2
  REGION 1..14: note = Table B: HLA-DQA1*05:01-B1*03:01L HLA-DRB1*13:02L HLA-DRB1*08:04L HLA-DRB3*02:01L HLA-DRB1*11:04L HLA-DRB1*07:01L HLA-DRB1*08:03L
EHEIAWYTERSEKS

SEQ ID NO: 10577 - protein, 10 aa, Severe acute respiratory syndrome coronavirus 2
  REGION 1..10: note = Table B: HLA-DQA1*05:01-B1*03:01L HLA-DRB1*01:03L HLA-DRB1*04:05L HLA-DQA1*01:02-B1*06:02L HLA-DRB1*08:77L HLA-DPA1*01:03-B1*03:01L HLA-DPA1*03:01-B1*04:02L HLA-DRB1*03:01L HLA-DRB1*14:02L HLA-DQA1*01-B1*05L
  REGION 1..10: note = CONT. FROM ABOVE: HLA-DQA1*05:05-B1*03:19L HLA-DQA1*05:01-B1*02: 01L HLA-DRB4*01:01L HLA-DPA1*01:03-B1*04:01L HLA-DPA1*01:03-B1*0 4:02L HLA-DPA1*02:01-B1*13:01L HLA-DPA1*03:01-B1*105:01L HLA-DPA 1*01:03-B1*104:01L HLA-DRB1*10:01L HLA-DRB1*16:01L
  REGION 1..10: note = CONT. FROM ABOVE: HLA-DQA1*01:03-B1*06:01L HLA-DQA1*02:01-B1*03: 03L HLA-DRB1*15:03L
WYTERSEKSY

SEQ ID NO: 10578 - protein, 12 aa, Severe acute respiratory syndrome coronavirus 2
  REGION 1..12: note = Table B: HLA-DQA1*05:01-B1*03:01L HLA-DRB1*04:02L HLA-DRB1*04:05L HLA-DQA1*01:02-B1*06:02L HLA-DPA1*01:03-B1*03:01L HLA-DQA1*01:01-B1*05:01L HLA-DQA1*05:05-B1*03:19L HLA-DPA1*02:01-B1*13:01L
  REGION 1..12: note = CONT. FROM ABOVE: HLA-DPA1*03:01-B1*105:01L HLA-DQA1*05:05-B1*03 :01L HLA-DRB1*14:17L HLA-DRB1*16:01L HLA-DQA1*01:03-B1*06:01L
SEKSYELQTPFE

SEQ ID NO: 10579 - protein, 11 aa, Severe acute respiratory syndrome coronavirus 2
  REGION 1..11: note = Table B: HLA-DQA1*05:01-B1*03:01L HLA-DRB1*01:03L HLA-DQA1*01:02-B1*06:02L HLA-DPA1*03:01-B1*04:02L HLA-DRB1*14:01L HLA-DRB1*14:02L HLA-DQA1*05:01-B1*02:01L HLA-DPA1*01:03-B1*04:01L HLA-DRB1*12:01L
  REGION 1..11: note = CONT. FROM ABOVE: HLA-DPA1*03:01-B1*105:01L HLA-DPA1*01:02-B1*04 :01L HLA-DRB1*16:01L HLA-DRB1*15:03L
TPFEIKLAKKF

SEQ ID NO: 10580 - protein, 14 aa, Severe acute respiratory syndrome coronavirus 2
  REGION 1..14: note = Table B: HLA-DQA1*05:01-B1*03:01L HLA-DRB1*01:02L HLA-DQA1*05:05-B1*03:19L HLA-DRB1*12:01L HLA-DQA1*05:05-B1*03:01L HLA-DRB1*10:01L HLA-DQA1*01:03-B1*06:01L
DTFNGECPNFVFPL

SEQ ID NO: 10581 - protein, 13 aa, Severe acute respiratory syndrome coronavirus 2
  REGION 1..13: note = Table B: HLA-DQA1*05:01-B1*03:01L HLA-DQA1*05:05-B1*03:19L HLA-DPA1*03:01-B1*105:01L HLA-DQA1*05:05-B1*03:01L HLA-DQA1*02:01-B1*03:03L
FNGECPNFVFPLN

SEQ ID NO: 10582 - protein, 10 aa, Severe acute respiratory syndrome coronavirus 2
  REGION 1..10: note = Table B: HLA-DQA1*05:01-B1*03:01L HLA-DRB1*04:03L HLA-DRB1*13:02L HLA-DRB1*13:03L HLA-DRB1*04:02L HLA-DRB4*03:01NL HLA-DRB1*08:01L HLA-DRB1*12:01L HLA-DPA1*03:01-B1*105:01L HLA-DQA1*03:01-B1*03:02L HLA-DQA1*05:05-B1*03:01L
  REGION 1..10: note = CONT. FROM ABOVE: HLA-DRB1*14:17L HLA-DRB1*16:01L HLA-DQA1*01:03 -B1*06:01L HLA-DQA1*02:01-B1*03:03L
FVFPLNSIIK

SEQ ID NO: 10583 - protein, 10 aa, Severe acute respiratory syndrome coronavirus 2
  REGION 1..10: note = Table B: HLA-DQA1*05:01-B1*03:01L HLA-DRB1*01:03L HLA-DQA1*01:02-B1*06:02L HLA-DQA1*03:01-B1*03:02L HLA-DQA1*01:03-B1*06:01L HLA-DQA1*02:01-B1*03:03L
IKTIQPRVEK

SEQ ID NO: 10584 - protein, 12 aa, Severe acute respiratory syndrome coronavirus 2
  REGION 1..12: note = Table B: HLA-DQA1*05:01-B1*03:01L HLA-DQA1*01:02-B1*06:02L HLA-DQA1*05:05-B1*03:19L HLA-DQA1*05:05-B1*03:01L HLA-DQA1*01:03-B1*06:01L
YPVASPNECNQM

SEQ ID NO: 10585 - protein, 14 aa, Severe acute respiratory syndrome coronavirus 2
  REGION 1..14: note = Table B: HLA-DQA1*05:01-B1*03:01L HLA-DRB1*01:02L HLA-DPA1*01:03-B1*04:02L HLA-DPA1*03:01-B1*105:01L HLA-DQA1*05:05-B1*03:01L HLA-DRB1*04:08L HLA-DQA1*02:01-B1*03:03L HLA-DRB1*15:03L
GDFVKATCEFCGTE

SEQ ID NO: 10586 - protein, 14 aa, Severe acute respiratory syndrome coronavirus 2
  REGION 1..14: note = Table B: HLA-DQA1*05:01-B1*03:01L HLA-DRB1*01:02L HLA-DPA1*01:03-B1*03:01L HLA-DQA1*05:05-B1*03:19L HLA-DPA1*01:03-B1*04:02L HLA-DPA1*02:01-B1*13:01L HLA-DPA1*03:01-B1*105:01L HLA-DPA1*01:03-B1*104:01L
  REGION 1..14: note = CONT. FROM ABOVE: HLA-DQA1*05:05-B1*03:01L HLA-DQA1*02:01-B1*03: 03L HLA-DRB1*15:03L
DFVKATCEFCGTEN

SEQ ID NO: 10587 - protein, 12 aa, Severe acute respiratory syndrome coronavirus 2
  REGION 1..12: note = Table B: HLA-DQA1*05:01-B1*03:01L HLA-DRB1*01:03L HLA-DRB1*04:05L HLA-DQA1*01:02-B1*06:02L HLA-DRB1*14:01L HLA-DQA1*01:01-B1*05:01L HLA-DQA1*05:05-B1*03:19L HLA-DRB1*12:01L HLA-DPA1*03:01-B1*105:01L HLA-DRB1*14:54L
  REGION 1..12: note = CONT. FROM ABOVE: HLA-DQA1*05:05-B1*03:01L HLA-DQA1*01:03-B1*06: 01L
GTENLTKEGATT

SEQ ID NO: 10588 - protein, 15 aa, Severe acute respiratory syndrome coronavirus 2
  REGION 1..15: note = Table B: HLA-DQA1*05:01-B1*03:01L HLA-DRB1*01:02L HLA-DPA1*01:03-B1*03:01L HLA-DPA1*02:01-B1*13:01L HLA-DPA1*01:03-B1*104:01L
NLTKEGATTCGYLPQ

SEQ ID NO: 10589 - protein, 14 aa, Severe acute respiratory syndrome coronavirus 2
  REGION 1..14: note = Table B: HLA-DQA1*05:01-B1*03:01L HLA-DQA1*03:01-B1*03:02L
TKEGATTCGYLPQN

SEQ ID NO: 10590 - protein, 10 aa, Severe acute respiratory syndrome coronavirus 2
  REGION 1..10: note = Table B: HLA-DQA1*05:01-B1*03:01L HLA-DRB1*13:03M HLA-DRB1*01:03L HLA-DQA1*01:02-B1*06:02M HLA-DPA1*01:03-B1*03:01L HLA-DPA1*03:01-B1*04:02L HLA-DRB1*03:01L HLA-DRB1*14:01L HLA-DRB1*14:02L HLA-DRB5*01:01L
  REGION 1..10: note = CONT. FROM ABOVE: HLA-DQA1*01-B1*05L HLA-DQA1*05:05-B1*03:19L HL A-DQA1*05:01-B1*02:01L HLA-DPA1*01:03-B1*04:01L HLA-DPA1*02:01-B 1*13:01L HLA-DPA1*03:01-B1*105:01M HLA-DQA1*02:01-B1*03:03L HLA- DRB1*15:03L
LPQNAVVKIY

SEQ ID NO: 10591 - protein, 11 aa, Severe acute respiratory syndrome coronavirus 2
  REGION 1..11: note = Table B: HLA-DQA1*05:01-B1*03:01L HLA-DRB1*04:03L HLA-DRB1*13:02L HLA-DRB4*03:01NL HLA-DRB1*08:77L HLA-DPA1*03:01-B1*04:02L HLA-DRB1*03:01L HLA-DRB1*14:01L HLA-DRB1*11:02L HLA-DRB1*11:03L HLA-DRB1*14:02L HLA-DRB1*11:01L
  REGION 1..11: note = CONT. FROM ABOVE: HLA-DQA1*01-B1*05L HLA-DRB4*01:01L HLA-DPA1*01 :03-B1*04:01L HLA-DQA1*05:05-B1*03:116L HLA-DPA1*01:03-B1*04:02L HLA-DRB1*12:01L HLA-DPA1*02:01-B1*13:01L HLA-DPA1*01:03-B1*104:0 1L HLA-DRB1*10:01L HLA-DRB1*16:01L HLA-DQA1*01:03-B1*06:01L
  REGION 1..11: note = CONT. FROM ABOVE: HLA-DRB1*08:02L HLA-DRB1*15:03L
EVGPEHSLAEY

SEQ ID NO: 10592 - protein, 14 aa, Severe acute respiratory syndrome coronavirus 2
  REGION 1..14: note = Table B: HLA-DQA1*05:01-B1*03:01L HLA-DRB1*13:03L HLA-DRB1*01:03L HLA-DRB1*04:05L HLA-DQA1*01:02-B1*06:02L HLA-DRB1*01:02L HLA-DRB4*03:01NL HLA-DPA1*01:03-B1*03:01L HLA-DQA1*01:01-B1*05:01L HLA-DRB1*08:01L
  REGION 1..14: note = CONT. FROM ABOVE: HLA-DQA1*05:05-B1*03:19L HLA-DQA1*05:01-B1*02: 01L HLA-DRB1*04:10L HLA-DRB1*12:01L HLA-DPA1*02:01-B1*13:01L HLA -DPA1*03:01-B1*105:01L HLA-DQA1*05:05-B1*03:01L HLA-DRB1*14:17L HLA-DRB1*16:01L HLA-DQA1*01:03-B1*06:01L HLA-DRB1*04:08L
  REGION 1..14: note = CONT. FROM ABOVE: HLA-DRB1*15:03L
GPEHSLAEYHNESG

SEQ ID NO: 10593 - protein, 12 aa, Severe acute respiratory syndrome coronavirus 2
  REGION 1..12: note = Table B: HLA-DQA1*05:01-B1*03:01L HLA-DRB1*13:02L HLA-DRB1*04:04L HLA-DQA1*01:02-B1*06:02L HLA-DRB1*08:04L HLA-DRB1*08:77L HLA-DRB3*02:01L HLA-DPA1*01:03-B1*03:01L HLA-DPA1*03:01-B1*04:02L HLA-DRB1*14:01L HLA-DRB1*11:03L
  REGION 1..12: note = CONT. FROM ABOVE: HLA-DRB1*11:04L HLA-DRB1*08:01L HLA-DRB1*11:01 L HLA-DQA1*05:01-B1*02:01L HLA-DRB1*04:10L HLA-DRB1*09:01L HLA-D RB1*12:02L HLA-DRB3*01:01L HLA-DPA1*02:01-B1*13:01L HLA-DPA1*03: 01-B1*105:01L HLA-DRB1*14:54L HLA-DPA1*01:02-B1*04:01L
  REGION 1..12: note = CONT. FROM ABOVE: HLA-DRB1*07:01L HLA-DRB1*10:01L HLA-DRB1*08:03 L HLA-DRB1*15:03L
LAEYHNESGLKT

SEQ ID NO: 10594 - protein, 14 aa, Severe acute respiratory syndrome coronavirus 2
  REGION 1..14: note = Table B: HLA-DQA1*05:01-B1*03:01L HLA-DRB1*01:02L HLA-DPA1*01:03-B1*03:01L HLA-DRB1*04:08L HLA-DQA1*02:01-B1*03:03L
RTIAFGGCVFSYVG

SEQ ID NO: 10595 - protein, 12 aa, Severe acute respiratory syndrome coronavirus 2
  REGION 1..12: note = Table B: HLA-DQA1*05:01-B1*03:01L HLA-DRB1*04:05L HLA-DQA1*01:02-B1*06:02L HLA-DRB1*01:02L HLA-DPA1*01:03-B1*03:01L HLA-DRB1*12:01L HLA-DQA1*03:01-B1*03:02L HLA-DQA1*05:05-B1*03:01L
  REGION 1..12: note = CONT. FROM ABOVE: HLA-DQA1*01:03-B1*06:01L HLA-DQA1*02:01-B1*03: 03L
VPRASANIGCNH

SEQ ID NO: 10596 - protein, 12 aa, Severe acute respiratory syndrome coronavirus 2
  REGION 1..12: note = Table B: HLA-DQA1*05:01-B1*03:01L HLA-DRB1*04:03L HLA-DRB1*13:02L HLA-DRB1*04:02L HLA-DQA1*01:02-B1*06:02L HLA-DRB1*08:04L HLA-DRB1*12:01L HLA-DRB1*12:02L HLA-DRB1*14:54L HLA-DQA1*05:05-B1*03:01L HLA-DQA1*01:03-B1*06:01L
  REGION 1..12: note = CONT. FROM ABOVE: HLA-DQA1*02:01-B1*03:03L HLA-DRB1*15:03L
ANIGCNHTGVVG

SEQ ID NO: 10597 - protein, 12 aa, Severe acute respiratory syndrome coronavirus 2
  REGION 1..12: note = Table B: HLA-DQA1*05:01-B1*03:01L HLA-DRB1*13:02L HLA-DRB1*13:03L HLA-DRB1*01:03L HLA-DRB1*04:02L HLA-DRB1*04:05L HLA-DQA1*01:02-B1*06:02L HLA-DRB1*01:02L HLA-DRB1*08:04L HLA-DPA1*03:01-B1*04:02L HLA-DRB1*11:04L HLA-DRB1*08:01L
  REGION 1..12: note = CONT. FROM ABOVE: HLA-DRB1*11:01L HLA-DRB1*12:01L HLA-DRB3*01:01 L HLA-DRB1*14:54L HLA-DRB1*16:01L HLA-DRB1*04:08L HLA-DRB1*15:03 L
NLLEILQKEKVN

SEQ ID NO: 10598 - protein, 15 aa, Severe acute respiratory syndrome coronavirus 2
  REGION 1..15: note = Table B: HLA-DQA1*05:01-B1*03:01L HLA-DRB1*01:01L HLA-DQA1*05:05-B1*03:01L
LQKEKVNINIVGDFK

SEQ ID NO: 10599 - protein, 13 aa, Severe acute respiratory syndrome coronavirus 2
  REGION 1..13: note = Table B: HLA-DQA1*05:01-B1*03:01L HLA-DRB1*04:04L HLA-DRB1*04:05L HLA-DQA1*01:02-B1*06:02L HLA-DRB1*01:02L HLA-DRB4*03:01NL HLA-DPA1*01:03-B1*03:01L HLA-DRB1*14:01L HLA-DQA1*05:05-B1*03:19L HLA-DQA1*05:01-B1*02:01L
  REGION 1..13: note = CONT. FROM ABOVE: HLA-DRB1*04:10L HLA-DRB1*12:01L HLA-DPA1*03:01 -B1*105:01L HLA-DQA1*03:01-B1*03:02L HLA-DRB1*14:54L HLA-DQA1*05 :05-B1*03:01L HLA-DRB1*16:01L HLA-DRB1*04:08L HLA-DQA1*02:01-B1* 03:03L HLA-DRB1*15:03L
IAIILASFSASTS

SEQ ID NO: 10600 - protein, 13 aa, Severe acute respiratory syndrome coronavirus 2
  REGION 1..13: note = Table B: HLA-DQA1*05:01-B1*03:01L HLA-DQA1*01:02-B1*06:02L HLA-DRB1*01:02L HLA-DPA1*01:03-B1*03:01L HLA-DRB1*14:01L HLA-DRB1*11:04L HLA-DRB1*08:01L HLA-DRB1*11:01L HLA-DQA1*01-B1*05L HLA-DRB1*12:01L HLA-DPA1*02:01-B1*13:01L
  REGION 1..13: note = CONT. FROM ABOVE: HLA-DPA1*01:03-B1*02:01L HLA-DQA1*01:03-B1*06: 01L HLA-DQA1*02:01-B1*03:03L HLA-DRB1*15:03L
VKGLDYKAFKQIV

SEQ ID NO: 10601 - protein, 11 aa, Severe acute respiratory syndrome coronavirus 2
  REGION 1..11: note = Table B: HLA-DQA1*05:01-B1*03:01L HLA-DRB1*04:03L HLA-DRB1*13:03L HLA-DRB1*01:03L HLA-DRB1*04:02L HLA-DRB1*04:05L HLA-DQA1*01:02-B1*06:02L HLA-DRB1*01:02L HLA-DRB1*14:01L HLA-DRB1*11:04L HLA-DRB1*08:01L HLA-DRB1*11:01L
  REGION 1..11: note = CONT. FROM ABOVE: HLA-DQA1*01-B1*05L HLA-DPA1*01:03-B1*04:01L HL A-DPA1*01:03-B1*04:02L HLA-DRB1*12:01L HLA-DQA1*03:01-B1*03:02L HLA-DPA1*01:03-B1*02:01L HLA-DRB1*16:01L HLA-DQA1*01:03-B1*06:01 L HLA-DRB1*04:08L HLA-DQA1*02:01-B1*03:03L HLA-DRB1*15:03L
LDYKAFKQIVE

SEQ ID NO: 10602 - protein, 13 aa, Severe acute respiratory syndrome coronavirus 2
  REGION 1..13: note = Table B: HLA-DQA1*05:01-B1*03:01L HLA-DRB1*04:03L HLA-DRB1*01:03L HLA-DRB1*14:01L HLA-DRB1*12:01L HLA-DPA1*03:01-B1*105:01L HLA-DQA1*05:05-B1*03:01L HLA-DRB1*16:01L HLA-DRB1*04:08L HLA-DQA1*02:01-B1*03:03L
KQIVESCGNFKVT

SEQ ID NO: 10603 - protein, 11 aa, Severe acute respiratory syndrome coronavirus 2
  REGION 1..11: note = Table B: HLA-DQA1*05:01-B1*03:01L HLA-DRB1*04:03L HLA-DRB1*13:02L HLA-DRB1*13:03L HLA-DRB1*04:02L HLA-DRB1*04:04L HLA-DRB1*04:05L HLA-DQA1*01:02-B1*06:02L HLA-DRB1*01:01L HLA-DRB4*03:01NL HLA-DRB1*14:01L HLA-DRB1*11:04L HLA-DRB1*08:01L
  REGION 1..11: note = CONT. FROM ABOVE: HLA-DRB1*11:01L HLA-DRB1*12:01L HLA-DRB3*01:01 L HLA-DRB1*14:17L HLA-DPA1*01:02-B1*04:01L HLA-DRB1*07:01L HLA-D QA1*01:03-B1*06:01L HLA-DQA1*02:01-B1*03:03L HLA-DRB1*15:03L
GNFKVTKGKAK

SEQ ID NO: 10604 - protein, 12 aa, Severe acute respiratory syndrome coronavirus 2
  REGION 1..12: note = Table B: HLA-DQA1*05:01-B1*03:01L HLA-DRB1*13:02L HLA-DRB1*04:05L HLA-DQA1*01:02-B1*06:02L HLA-DRB1*01:01L HLA-DRB1*14:01L HLA-DRB1*08:01L HLA-DRB1*11:01L HLA-DRB3*01:01L HLA-DRB1*07:01L HLA-DQA1*01:03-B1*06:01L
NFKVTKGKAKKG

SEQ ID NO: 10605 - protein, 14 aa, Severe acute respiratory syndrome coronavirus 2
  REGION 1..14: note = Table B: HLA-DQA1*05:01-B1*03:01L HLA-DRB1*08:01L HLA-DQA1*05:05-B1*03:01L HLA-DQA1*01:03-B1*06:01L
FKVTKGKAKKGAWN

SEQ ID NO: 10606 - protein, 13 aa, Severe acute respiratory syndrome coronavirus 2
  REGION 1..13: note = Table B: HLA-DQA1*05:01-B1*03:01L HLA-DPA1*03:01-B1*105:01L HLA-DQA1*05:05-B1*03:01L HLA-DRB1*15:03L
AWNIGEQKSILSP

SEQ ID NO: 10607 - protein, 12 aa, Severe acute respiratory syndrome coronavirus 2
  REGION 1..12: note = Table B: HLA-DQA1*05:01-B1*03:01L
NIGEQKSILSPL

SEQ ID NO: 10608 - protein, 14 aa, Severe acute respiratory syndrome coronavirus 2
  REGION 1..14: note = Table B: HLA-DQA1*05:01-B1*03:01L HLA-DRB1*01:03L HLA-DPA1*01:03-B1*03:01L HLA-DRB1*14:01L HLA-DQA1*01-B1*05L HLA-DQA1*03:01-B1*03:02L HLA-DRB1*10:01L
KSILSPLYAFASEA

SEQ ID NO: 10609 - protein, 11 aa, Severe acute respiratory syndrome coronavirus 2
  REGION 1..11: note = Table B: HLA-DQA1*05:01-B1*03:01L HLA-DRB1*04:03L HLA-DRB1*04:02L HLA-DQA1*01-B1*05L HLA-DQA1*03:01-B1*03:02L HLA-DRB1*14:17L HLA-DRB1*16:01L HLA-DQA1*02:01-B1*03:03L
PLYAFASEAAR

SEQ ID NO: 10610 - protein, 10 aa, Severe acute respiratory syndrome coronavirus 2
  REGION 1..10: note = Table B: HLA-DQA1*05:01-B1*03:01L HLA-DQA1*01:02-B1*06:02L HLA-DPA1*03:01-B1*105:01L HLA-DQA1*01:03-B1*06:01L HLA-DQA1*02:01-B1*03:03L HLA-DRB1*15:03L
EAARVVRSIF

SEQ ID NO: 10611 - protein, 10 aa, Severe acute respiratory syndrome coronavirus 2
  REGION 1..10: note = Table B: HLA-DQA1*05:01-B1*03:01L HLA-DQA1*03:01-B1*03:02L HLA-DPA1*01:02-B1*04:01L HLA-DRB1*16:01L HLA-DQA1*01:03-B1*06:01L HLA-DQA1*02:01-B1*03:03L
VVRSIFSRTL

SEQ ID NO: 10612 - protein, 12 aa, Severe acute respiratory syndrome coronavirus 2
  REGION 1..12: note = Table B: HLA-DQA1*05:01-B1*03:01L HLA-DQA1*01:02-B1*06:02L HLA-DRB1*01:02L HLA-DRB1*08:04L HLA-DRB1*11:03L HLA-DRB1*11:04L HLA-DRB1*08:01L HLA-DRB1*11:01L HLA-DRB3*01:01L HLA-DPA1*02:01-B1*13:01L HLA-DRB1*14:54L HLA-DRB1*04:08L
  REGION 1..12: note = CONT. FROM ABOVE: HLA-DRB1*15:03L
NSVRVLQKAAIT

SEQ ID NO: 10613 - protein, 12 aa, Severe acute respiratory syndrome coronavirus 2
  REGION 1..12: note = Table B: HLA-DQA1*05:01-B1*03:01L HLA-DRB1*04:05L HLA-DRB1*01:02L HLA-DRB1*08:04L HLA-DPA1*01:03-B1*03:01L HLA-DPA1*03:01-B1*04:02L HLA-DRB1*08:01L HLA-DQA1*05:05-B1*03:19L HLA-DPA1*01:03-B1*04:01L
  REGION 1..12: note = CONT. FROM ABOVE: HLA-DPA1*01:03-B1*04:02L HLA-DRB1*12:01L HLA-D PA1*02:01-B1*13:01L HLA-DQA1*05:05-B1*03:01L HLA-DRB1*15:03L
ISQYSLRLIDAM

SEQ ID NO: 10614 - protein, 13 aa, Severe acute respiratory syndrome coronavirus 2
  REGION 1..13: note = Table B: HLA-DQA1*05:01-B1*03:01L HLA-DRB4*03:01NL HLA-DPA1*03:01-B1*04:02L HLA-DQA1*05:05-B1*03:19L HLA-DRB1*04:10L HLA-DRB1*12:01L HLA-DRB1*14:54L HLA-DRB1*04:08L HLA-DRB1*15:03L
DAMMFTSDLATNN

SEQ ID NO: 10615 - protein, 11 aa, Severe acute respiratory syndrome coronavirus 2
  REGION 1..11: note = Table B: HLA-DQA1*05:01-B1*03:01L HLA-DQA1*01:02-B1*06:02L HLA-DQA1*05:05-B1*03:19L HLA-DQA1*05:05-B1*03:01L HLA-DQA1*02:01-B1*03:03L
YITGGVVQLTS

SEQ ID NO: 10616 - protein, 12 aa, Severe acute respiratory syndrome coronavirus 2
  REGION 1..12: note = Table B: HLA-DQA1*05:01-B1*03:01L HLA-DQA1*05:01-B1*02:01L HLA-DQA1*05:05-B1*03:01L HLA-DRB1*15:03L
TGGVVQLTSQWL

SEQ ID NO: 10617 - protein, 11 aa, Severe acute respiratory syndrome coronavirus 2
  REGION 1..11: note = Table B: HLA-DQA1*05:01-B1*03:01L HLA-DRB1*04:03L HLA-DRB1*04:02L HLA-DRB1*01:02L HLA-DQA1*05:01-B1*02:01L HLA-DRB1*12:01L HLA-DPA1*03:01-B1*105:01L HLA-DQA1*05:05-B1*03:01L HLA-DRB1*14:17L HLA-DRB1*16:01L
  REGION 1..11: note = CONT. FROM ABOVE: HLA-DQA1*02:01-B1*03:03L HLA-DRB1*15:03L
VVQLTSQWLTN

SEQ ID NO: 10618 - protein, 12 aa, Severe acute respiratory syndrome coronavirus 2
  REGION 1..12: note = Table B: HLA-DQA1*05:01-B1*03:01L HLA-DRB1*14:01L HLA-DRB1*12:01L HLA-DQA1*05:05-B1*03:01L HLA-DPA1*01:02-B1*04:01L
SQWLTNIFGTVY

SEQ ID NO: 10619 - protein, 12 aa, Severe acute respiratory syndrome coronavirus 2
  REGION 1..12: note = Table B: HLA-DQA1*05:01-B1*03:01L HLA-DRB1*04:03L HLA-DRB1*13:02L HLA-DRB1*01:02L HLA-DRB1*08:04L HLA-DPA1*01:03-B1*03:01L HLA-DRB1*14:01L HLA-DRB1*11:04L HLA-DRB1*08:01L HLA-DRB1*11:01L HLA-DQA1*01-B1*05L
  REGION 1..12: note = CONT. FROM ABOVE: HLA-DQA1*05:01-B1*02:01L HLA-DRB3*01:01L HLA-D PA1*02:01-B1*13:01L HLA-DQA1*03:01-B1*03:02L HLA-DPA1*01:03-B1*0 2:01L HLA-DPA1*01:03-B1*104:01L HLA-DQA1*05:05-B1*03:01L HLA-DRB 1*15:03L
IFGTVYEKLKPV

SEQ ID NO: 10620 - protein, 10 aa, Severe acute respiratory syndrome coronavirus 2
  REGION 1..10: note = Table B: HLA-DQA1*05:01-B1*03:01L HLA-DQA1*01:02-B1*06:02L HLA-DRB1*08:77L HLA-DPA1*03:01-B1*04:02L HLA-DRB1*03:01L HLA-DQA1*01-B1*05L HLA-DQA1*05:05-B1*03:19L HLA-DQA1*05:01-B1*02:01L HLA-DRB4*01:01L
  REGION 1..10: note = CONT. FROM ABOVE: HLA-DPA1*01:03-B1*04:01L HLA-DPA1*01:03-B1*104 :01L HLA-DRB1*10:01L HLA-DRB1*16:01L HLA-DQA1*01:03-B1*06:01L HL A-DQA1*02:01-B1*03:03L HLA-DRB1*15:03L
YEKLKPVLDW

SEQ ID NO: 10621 - protein, 10 aa, Severe acute respiratory syndrome coronavirus 2
  REGION 1..10: note = Table B: HLA-DQA1*05:01-B1*03:01L HLA-DRB1*04:03L HLA-DRB1*13:02L HLA-DRB1*01:03L HLA-DQA1*01:02-B1*06:02L HLA-DRB1*01:02L HLA-DPA1*01:03-B1*03:01L HLA-DPA1*03:01-B1*04:02L HLA-DRB1*14:01L HLA-DRB1*11:04L
  REGION 1..10: note = CONT. FROM ABOVE: HLA-DRB1*08:01L HLA-DRB1*11:01L HLA-DQA1*01-B1 *05L HLA-DQA1*05:01-B1*02:01L HLA-DPA1*01:03-B1*04:01L HLA-DPA1* 01:03-B1*04:02L HLA-DRB1*12:01L HLA-DRB3*01:01L HLA-DPA1*03:01-B 1*105:01L HLA-DQA1*03:01-B1*03:02L HLA-DPA1*01:03-B1*02:01L
  REGION 1..10: note = CONT. FROM ABOVE: HLA-DPA1*01:02-B1*04:01M HLA-DRB1*16:01L HLA-D QA1*01:03-B1*06:01L HLA-DRB1*04:08L HLA-DQA1*02:01-B1*03:03L HLA -DRB1*15:03L
FLRDGWEIVK

SEQ ID NO: 10622 - protein, 14 aa, Severe acute respiratory syndrome coronavirus 2
  REGION 1..14: note = Table B: HLA-DQA1*05:01-B1*03:01L HLA-DRB1*13:02L HLA-DRB1*01:03L HLA-DRB1*04:05L HLA-DRB1*01:02L HLA-DPA1*01:03-B1*03:01L HLA-DQA1*05:05-B1*03:19L HLA-DPA1*01:03-B1*04:02L HLA-DRB1*12:01L
  REGION 1..14: note = CONT. FROM ABOVE: HLA-DPA1*02:01-B1*13:01L HLA-DPA1*01:03-B1*104 :01L HLA-DPA1*01:02-B1*04:01L HLA-DRB1*16:01L HLA-DRB1*04:08L HL A-DQA1*02:01-B1*03:03L HLA-DRB1*15:03L
IVKFISTCACEIVG

SEQ ID NO: 10623 - protein, 15 aa, Severe acute respiratory syndrome coronavirus 2
  REGION 1..15: note = Table B: HLA-DQA1*05:01-B1*03:01L HLA-DPA1*01:03-B1*03:01L HLA-DRB1*12:01L HLA-DPA1*01:03-B1*104:01L HLA-DQA1*02:01-B1*03:03L
VKFISTCACEIVGGQ

SEQ ID NO: 10624 - protein, 11 aa, Severe acute respiratory syndrome coronavirus 2
  REGION 1..11: note = Table B: HLA-DQA1*05:01-B1*03:01L HLA-DQA1*01:02-B1*06:02L HLA-DQA1*05:05-B1*03:19L HLA-DQA1*05:05-B1*03:01L HLA-DQA1*02:01-B1*03:03L
VGGQIVTCAKE

SEQ ID NO: 10625 - protein, 15 aa, Severe acute respiratory syndrome coronavirus 2
  REGION 1..15: note = Table B: HLA-DQA1*05:01-B1*03:01L HLA-DPA1*01:03-B1*03:01L HLA-DPA1*03:01-B1*04:02L HLA-DRB1*03:01L HLA-DRB1*11:02L HLA-DRB1*14:02L HLA-DQA1*05:05-B1*03:19L HLA-DQA1*05:01-B1*02:01L HLA-DRB1*13:01L
  REGION 1..15: note = CONT. FROM ABOVE: HLA-DPA1*01:03-B1*04:02L HLA-DPA1*02:01-B1*13: 01L HLA-DQA1*05:05-B1*03:01L HLA-DPA1*01:02-B1*04:01L HLA-DRB1*0 8:02L HLA-DRB1*08:03L HLA-DQA1*02:01-B1*03:03L
GQIVTCAKEIKESVQ

SEQ ID NO: 10626 - protein, 10 aa, Severe acute respiratory syndrome coronavirus 2
  REGION 1..10: note = Table B: HLA-DQA1*05:01-B1*03:01L HLA-DRB1*04:03L HLA-DRB1*01:03L HLA-DRB1*04:02L HLA-DRB1*01:02L HLA-DRB1*14:01L HLA-DRB1*12:01L HLA-DQA1*03:01-B1*03:02L HLA-DRB1*14:17L HLA-DPA1*01:02-B1*04:01L HLA-DRB1*16:01L
  REGION 1..10: note = CONT. FROM ABOVE: HLA-DQA1*02:01-B1*03:03L HLA-DRB1*15:03L
IIIGGAKLKA

SEQ ID NO: 10627 - protein, 10 aa, Severe acute respiratory syndrome coronavirus 2
  REGION 1..10: note = Table B: HLA-DQA1*05:01-B1*03:01L HLA-DQA1*01:02-B1*06:02L HLA-DPA1*03:01-B1*105:01L HLA-DQA1*05:05-B1*03:01L HLA-DQA1*01:03-B1*06:01L HLA-DQA1*02:01-B1*03:03L
IGGAKLKALN

SEQ ID NO: 10628 - protein, 13 aa, Severe acute respiratory syndrome coronavirus 2
  REGION 1..13: note = Table B: HLA-DQA1*05:01-B1*03:01L HLA-DRB1*04:03L HLA-DRB1*04:05L HLA-DRB1*01:02L HLA-DPA1*01:03-B1*03:01L HLA-DRB1*12:01L HLA-DQA1*05:05-B1*03:01L HLA-DRB1*14:17L
LKALNLGETFVTH

SEQ ID NO: 10629 - protein, 12 aa, Severe acute respiratory syndrome coronavirus 2
  REGION 1..12: note = Table B: HLA-DQA1*05:01-B1*03:01L HLA-DQA1*01:02-B1*06:02L HLA-DQA1*05:05-B1*03:01L HLA-DQA1*01:03-B1*06:01L HLA-DQA1*02:01-B1*03:03L
LNLGETFVTHSK

SEQ ID NO: 10630 - protein, 12 aa, Severe acute respiratory syndrome coronavirus 2
  REGION 1..12: note = Table B: HLA-DQA1*05:01-B1*03:01L HLA-DRB1*01:03L HLA-DRB1*04:02L HLA-DRB1*04:05L HLA-DQA1*01:02-B1*06:02L HLA-DQA1*01:01-B1*05:01L HLA-DRB1*08:01L HLA-DPA1*03:01-B1*105:01L HLA-DQA1*05:05-B1*03:01L
  REGION 1..12: note = CONT. FROM ABOVE: HLA-DRB1*14:17L HLA-DRB1*16:01L HLA-DRB1*04:08 L
NLGETFVTHSKG

SEQ ID NO: 10631 - protein, 10 aa, Severe acute respiratory syndrome coronavirus 2
  REGION 1..10: note = Table B: HLA-DQA1*05:01-B1*03:01L HLA-DRB1*13:03L HLA-DRB1*01:03L HLA-DQA1*01:02-B1*06:02L HLA-DRB1*08:77L HLA-DPA1*01:03-B1*03:01L HLA-DPA1*03:01-B1*04:02L HLA-DRB1*03:01L HLA-DRB1*14:02L HLA-DQA1*01-B1*05L
  REGION 1..10: note = CONT. FROM ABOVE: HLA-DQA1*05:05-B1*03:19L HLA-DQA1*05:01-B1*02: 01L HLA-DRB4*01:01L HLA-DPA1*01:03-B1*04:01L HLA-DQA1*05:05-B1*0 3:116L HLA-DPA1*01:03-B1*04:02L HLA-DPA1*02:01-B1*13:01L HLA-DPA 1*03:01-B1*105:01L HLA-DPA1*01:03-B1*104:01L
  REGION 1..10: note = CONT. FROM ABOVE: HLA-DPA1*01:02-B1*04:01L HLA-DRB1*16:01L HLA-D QA1*01:03-B1*06:01L HLA-DQA1*02:01-B1*03:03L HLA-DRB1*15:03L
TFVTHSKGLY

SEQ ID NO: 10632 - protein, 10 aa, Severe acute respiratory syndrome coronavirus 2
  REGION 1..10: note = Table B: HLA-DQA1*05:01-B1*03:01L HLA-DRB1*04:03L HLA-DRB1*13:02L HLA-DRB1*13:03L HLA-DRB1*01:03L HLA-DRB1*04:02L HLA-DRB1*04:04L HLA-DRB1*04:05L HLA-DQA1*01:02-B1*06:02L HLA-DRB1*01:01L HLA-DRB1*01:02L HLA-DRB4*03:01NL HLA-DRB1*03:01L
  REGION 1..10: note = CONT. FROM ABOVE: HLA-DRB1*14:01L HLA-DRB1*11:03L HLA-DRB1*11:04 L HLA-DRB1*08:01L HLA-DRB1*11:01L HLA-DRB1*13:01L HLA-DRB1*12:01 L HLA-DRB3*01:01L HLA-DQA1*03:01-B1*03:02L HLA-DRB1*14:54L HLA-D RB1*14:17L HLA-DPA1*01:02-B1*04:01L HLA-DRB1*16:01L
  REGION 1..10: note = CONT. FROM ABOVE: HLA-DQA1*01:03-B1*06:01L HLA-DRB1*04:08L HLA-D QA1*02:01-B1*03:03L HLA-DRB1*15:03L
FVTHSKGLYR

SEQ ID NO: 10633 - protein, 12 aa, Severe acute respiratory syndrome coronavirus 2
  REGION 1..12: note = Table B: HLA-DQA1*05:01-B1*03:01L HLA-DPA1*03:01-B1*105:01L HLA-DQA1*05:05-B1*03:01L
ETGLLMPLKAPK

SEQ ID NO: 10634 - protein, 11 aa, Severe acute respiratory syndrome coronavirus 2
  REGION 1..11: note = Table B: HLA-DQA1*05:01-B1*03:01L HLA-DRB1*13:03L HLA-DRB1*01:03L HLA-DRB1*04:04L HLA-DRB1*04:05L HLA-DQA1*01:02-B1*06:02L HLA-DRB1*01:02L HLA-DRB4*03:01NL HLA-DRB1*14:01L HLA-DRB1*08:01L HLA-DRB1*04:10L HLA-DRB1*12:01L
  REGION 1..11: note = CONT. FROM ABOVE: HLA-DRB1*14:54L HLA-DPA1*01:02-B1*04:01L HLA-D RB1*16:01L HLA-DQA1*01:03-B1*06:01L HLA-DRB1*04:08L HLA-DRB1*15: 03L
GLLMPLKAPKE

SEQ ID NO: 10635 - protein, 10 aa, Severe acute respiratory syndrome coronavirus 2
  REGION 1..10: note = Table B: HLA-DQA1*05:01-B1*03:01L HLA-DQA1*01:02-B1*06:02L HLA-DQA1*01-B1*05L HLA-DQA1*05:05-B1*03:116L HLA-DPA1*02:01-B1*13:01L
MPLKAPKEII

SEQ ID NO: 10636 - protein, 13 aa, Severe acute respiratory syndrome coronavirus 2
  REGION 1..13: note = Table B: HLA-DQA1*05:01-B1*03:01L HLA-DRB1*04:03L HLA-DRB1*13:02L HLA-DRB1*01:02L HLA-DRB4*03:01NL HLA-DRB1*08:77L HLA-DRB3*02:01L HLA-DPA1*03:01-B1*04:02L HLA-DRB1*14:01L HLA-DRB1*11:03L HLA-DQA1*05:01-B1*02:01L HLA-DRB1*09:01L
  REGION 1..13: note = CONT. FROM ABOVE: HLA-DRB1*12:01L HLA-DRB1*12:02L HLA-DRB1*14:54 L HLA-DPA1*01:02-B1*04:01L HLA-DRB1*07:01L HLA-DRB1*16:01L HLA-D QA1*02:01-B1*03:03L HLA-DRB1*15:03L
APKEIIFLEGETL

SEQ ID NO: 10637 - protein, 12 aa, Severe acute respiratory syndrome coronavirus 2
  REGION 1..12: note = Table B: HLA-DQA1*05:01-B1*03:01L HLA-DRB1*13:02L HLA-DRB1*01:03L HLA-DRB1*04:02L HLA-DRB1*01:01L HLA-DRB4*03:01NL HLA-DRB1*08:77L HLA-DRB1*11:03L HLA-DQA1*05:05-B1*03:19L HLA-DQA1*05:01-B1*02:01L HLA-DPA1*03:01-B1*105:01L
  REGION 1..12: note = CONT. FROM ABOVE: HLA-DQA1*05:05-B1*03:01L HLA-DRB1*07:01L HLA-D RB1*10:01L HLA-DRB1*04:08L HLA-DQA1*02:01-B1*03:03L
EIIFLEGETLPT

SEQ ID NO: 10638 - protein, 12 aa, Severe acute respiratory syndrome coronavirus 2
  REGION 1..12: note = Table B: HLA-DQA1*05:01-B1*03:01L HLA-DRB1*01:03L HLA-DQA1*01:02-B1*06:02L HLA-DRB1*01:01L HLA-DRB1*08:77L HLA-DQA1*05:05-B1*03:19L HLA-DQA1*05:01-B1*02:01L HLA-DPA1*03:01-B1*105:01L HLA-DQA1*03:01-B1*03:02L
  REGION 1..12: note = CONT. FROM ABOVE: HLA-DQA1*05:05-B1*03:01L HLA-DRB1*10:01L HLA-D QA1*01:03-B1*06:01L HLA-DRB1*04:08L HLA-DQA1*02:01-B1*03:03L
IIFLEGETLPTE

SEQ ID NO: 10639 - protein, 12 aa, Severe acute respiratory syndrome coronavirus 2
  REGION 1..12: note = Table B: HLA-DQA1*05:01-B1*03:01L HLA-DQA1*01:02-B1*06:02L HLA-DPA1*03:01-B1*105:01L HLA-DQA1*05:05-B1*03:01L HLA-DQA1*01:03-B1*06:01L HLA-DQA1*02:01-B1*03:03L
FLEGETLPTEVL

SEQ ID NO: 10640 - protein, 13 aa, Severe acute respiratory syndrome coronavirus 2
  REGION 1..13: note = Table B: HLA-DQA1*05:01-B1*03:01L HLA-DRB1*04:05L HLA-DRB1*01:02L HLA-DPA1*01:03-B1*03:01L HLA-DQA1*01:01-B1*05:01L HLA-DRB1*04:10L HLA-DPA1*02:01-B1*13:01L HLA-DRB1*14:54L HLA-DRB1*15:03L
LPTEVLTEEVVLK

SEQ ID NO: 10641 - protein, 12 aa, Severe acute respiratory syndrome coronavirus 2
  REGION 1..12: note = Table B: HLA-DQA1*05:01-B1*03:01L HLA-DRB1*01:02L HLA-DQA1*01-B1*05L HLA-DQA1*05:01-B1*02:01L HLA-DRB1*15:03L
EVLTEEVVLKTG

SEQ ID NO: 10642 - protein, 13 aa, Severe acute respiratory syndrome coronavirus 2
  REGION 1..13: note = Table B: HLA-DQA1*05:01-B1*03:01L HLA-DQA1*05:05-B1*03:01L
VLTEEVVLKTGDL

SEQ ID NO: 10643 - protein, 12 aa, Severe acute respiratory syndrome coronavirus 2
  REGION 1..12: note = Table B: HLA-DQA1*05:01-B1*03:01L HLA-DQA1*05:01-B1*02:01L
EVVLKTGDLQPL

SEQ ID NO: 10644 - protein, 12 aa, Severe acute respiratory syndrome coronavirus 2
  REGION 1..12: note = Table B: HLA-DQA1*05:01-B1*03:01L HLA-DQA1*05:05-B1*03:19L HLA-DQA1*03:01-B1*03:02L HLA-DQA1*05:05-B1*03:01L
LKTGDLQPLEQP

SEQ ID NO: 10645 - protein, 12 aa, Severe acute respiratory syndrome coronavirus 2
  REGION 1..12: note = Table B: HLA-DQA1*05:01-B1*03:01L HLA-DQA1*01:02-B1*06:02L HLA-DQA1*03:01-B1*03:02L HLA-DQA1*02:01-B1*03:03L
KTGDLQPLEQPT

SEQ ID NO: 10646 - protein, 13 aa, Severe acute respiratory syndrome coronavirus 2
  REGION 1..13: note = Table B: HLA-DQA1*05:01-B1*03:01L HLA-DRB1*13:02L HLA-DRB1*04:04L HLA-DQA1*01:02-B1*06:02L HLA-DRB1*01:02L HLA-DRB1*08:04L HLA-DRB1*08:77L HLA-DPA1*01:03-B1*03:01L HLA-DRB1*11:03L HLA-DRB1*11:04L HLA-DQA1*05:05-B1*03:19L
  REGION 1..13: note = CONT. FROM ABOVE: HLA-DPA1*03:01-B1*105:01L HLA-DRB1*08:03L HLA- DRB1*15:03L
TGDLQPLEQPTSE

SEQ ID NO: 10647 - protein, 13 aa, Severe acute respiratory syndrome coronavirus 2
  REGION 1..13: note = Table B: HLA-DQA1*05:01-B1*03:01L HLA-DRB1*04:04L HLA-DQA1*01:02-B1*06:02L HLA-DRB1*01:02L HLA-DPA1*01:03-B1*03:01L HLA-DRB1*14:01L HLA-DRB1*11:04L HLA-DQA1*05:05-B1*03:19L HLA-DPA1*03:01-B1*105:01L
  REGION 1..13: note = CONT. FROM ABOVE: HLA-DRB1*08:03L HLA-DRB1*15:03L
GDLQPLEQPTSEA

SEQ ID NO: 10648 - protein, 14 aa, Severe acute respiratory syndrome coronavirus 2
  REGION 1..14: note = Table B: HLA-DQA1*05:01-B1*03:01L HLA-DRB1*01:03L HLA-DQA1*01:02-B1*06:02L HLA-DRB1*01:02L HLA-DRB4*03:01NL HLA-DPA1*01:03-B1*03:01L HLA-DQA1*05:05-B1*03:19L HLA-DRB1*12:01L HLA-DPA1*02:01-B1*13:01L
  REGION 1..14: note = CONT. FROM ABOVE: HLA-DPA1*03:01-B1*105:01L HLA-DRB1*14:54L HLA- DQA1*05:05-B1*03:01L HLA-DRB1*04:08L
DLQPLEQPTSEAVE

SEQ ID NO: 10649 - protein, 15 aa, Severe acute respiratory syndrome coronavirus 2
  REGION 1..15: note = Table B: HLA-DQA1*05:01-B1*03:01L HLA-DRB1*04:03L HLA-DRB1*01:03L HLA-DRB1*04:02L HLA-DQA1*01:02-B1*06:02L HLA-DPA1*01:03-B1*03:01L HLA-DQA1*01:01-B1*05:01L HLA-DQA1*05:05-B1*03:19L HLA-DRB1*12:01L
  REGION 1..15: note = CONT. FROM ABOVE: HLA-DPA1*02:01-B1*13:01L HLA-DPA1*03:01-B1*105 :01L HLA-DQA1*05:05-B1*03:01L HLA-DRB1*16:01L
QPLEQPTSEAVEAPL

SEQ ID NO: 10650 - protein, 13 aa, Severe acute respiratory syndrome coronavirus 2
  REGION 1..13: note = Table B: HLA-DQA1*05:01-B1*03:01L HLA-DQA1*01:02-B1*06:02L HLA-DQA1*01:01-B1*05:01L HLA-DQA1*01-B1*05L HLA-DQA1*05:05-B1*03:19L HLA-DQA1*05:05-B1*03:01L HLA-DRB1*16:01L
QPTSEAVEAPLVG

SEQ ID NO: 10651 - protein, 13 aa, Severe acute respiratory syndrome coronavirus 2
  REGION 1..13: note = Table B: HLA-DQA1*05:01-B1*03:01L HLA-DQA1*01:02-B1*06:02L HLA-DPA1*03:01-B1*105:01L HLA-DQA1*01:03-B1*06:01L
VEAPLVGTPVCIN

SEQ ID NO: 10652 - protein, 12 aa, Severe acute respiratory syndrome coronavirus 2
  REGION 1..12: note = Table B: HLA-DQA1*05:01-B1*03:01L HLA-DQA1*05:05-B1*03:19L HLA-DPA1*01:03-B1*04:02L HLA-DQA1*03:01-B1*03:02L HLA-DQA1*05:05-B1*03:01L HLA-DQA1*02:01-B1*03:03L
INGLMLLEIKDT

SEQ ID NO: 10653 - protein, 13 aa, Severe acute respiratory syndrome coronavirus 2
  REGION 1..13: note = Table B: HLA-DQA1*05:01-B1*03:01L HLA-DRB1*01:03L HLA-DRB1*04:05L HLA-DQA1*01:02-B1*06:02L HLA-DRB1*01:02L HLA-DPA1*01:03-B1*03:01L HLA-DPA1*03:01-B1*04:02L HLA-DRB1*08:01L HLA-DPA1*01:03-B1*04:02L HLA-DRB1*12:01L
  REGION 1..13: note = CONT. FROM ABOVE: HLA-DPA1*02:01-B1*13:01L HLA-DQA1*03:01-B1*03: 02L HLA-DRB1*16:01L HLA-DRB1*04:08L HLA-DQA1*02:01-B1*03:03L
IKDTEKYCALAPN

SEQ ID NO: 10654 - protein, 11 aa, Severe acute respiratory syndrome coronavirus 2
  REGION 1..11: note = Table B: HLA-DQA1*05:01-B1*03:01L HLA-DRB1*13:03L HLA-DQA1*01:02-B1*06:02L HLA-DQA1*05:01-B1*02:01L HLA-DPA1*03:01-B1*105:01L HLA-DQA1*01:03-B1*06:01L HLA-DQA1*02:01-B1*03:03L HLA-DRB1*15:03L
APNMMVTNNTF

SEQ ID NO: 10655 - protein, 10 aa, Severe acute respiratory syndrome coronavirus 2
  REGION 1..10: note = Table B: HLA-DQA1*05:01-B1*03:01L HLA-DRB1*04:03L HLA-DRB1*13:02L HLA-DRB1*13:03L HLA-DRB1*01:03L HLA-DRB1*04:02L HLA-DRB1*01:01L HLA-DRB1*01:02L HLA-DRB4*03:01NL HLA-DRB1*11:04L HLA-DRB1*08:01L HLA-DRB1*12:01L HLA-DQA1*03:01-B1*03:02L
  REGION 1..10: note = CONT. FROM ABOVE: HLA-DQA1*05:05-B1*03:01L HLA-DRB1*14:17L HLA-D RB1*16:01L HLA-DQA1*02:01-B1*03:03L
FTLKGGAPTK

SEQ ID NO: 10656 - protein, 10 aa, Severe acute respiratory syndrome coronavirus 2
  REGION 1..10: note = Table B: HLA-DQA1*05:01-B1*03:01L HLA-DQA1*05:05-B1*03:01L HLA-DQA1*01:03-B1*06:01L
LKGGAPTKVT

SEQ ID NO: 10657 - protein, 12 aa, Severe acute respiratory syndrome coronavirus 2
  REGION 1..12: note = Table B: HLA-DQA1*05:01-B1*03:01L HLA-DRB4*01:01L HLA-DRB1*12:01L HLA-DPA1*03:01-B1*105:01L HLA-DRB1*15:03L
FGDDTVIEVQGY

SEQ ID NO: 10658 - protein, 10 aa, Severe acute respiratory syndrome coronavirus 2
  REGION 1..10: note = Table B: HLA-DQA1*05:01-B1*03:01L HLA-DRB1*13:03L HLA-DQA1*01:02-B1*06:02L HLA-DRB4*03:01NL HLA-DRB1*08:01L HLA-DRB5*01:01L HLA-DRB1*12:01L HLA-DQA1*03:01-B1*03:02L HLA-DQA1*05:05-B1*03:01L HLA-DRB1*14:17L
  REGION 1..10: note = CONT. FROM ABOVE: HLA-DQA1*01:03-B1*06:01L HLA-DQA1*02:01-B1*03: 03L
DTVIEVQGYK

SEQ ID NO: 10659 - protein, 11 aa, Severe acute respiratory syndrome coronavirus 2
  REGION 1..11: note = Table B: HLA-DQA1*05:01-B1*03:01L HLA-DRB1*13:03L HLA-DRB1*01:03L HLA-DRB1*04:02L HLA-DRB1*04:04L HLA-DRB1*04:05L HLA-DQA1*01:02-B1*06:02L HLA-DRB1*01:02L HLA-DRB4*03:01NL HLA-DPA1*01:03-B1*03:01L HLA-DPA1*03:01-B1*04:02L
  REGION 1..11: note = CONT. FROM ABOVE: HLA-DRB1*14:01L HLA-DQA1*05:05-B1*03:19L HLA-D QA1*05:01-B1*02:01L HLA-DRB1*04:10L HLA-DPA1*01:03-B1*04:02L HLA -DRB1*12:01L HLA-DPA1*03:01-B1*105:01L HLA-DRB1*14:54L HLA-DQA1* 05:05-B1*03:01L HLA-DRB1*14:17L HLA-DRB1*16:01L
  REGION 1..11: note = CONT. FROM ABOVE: HLA-DQA1*01:03-B1*06:01L HLA-DRB1*04:08L HLA-D RB1*15:03L
VIEVQGYKSVN

SEQ ID NO: 10660 - protein, 12 aa, Severe acute respiratory syndrome coronavirus 2
  REGION 1..12: note = Table B: HLA-DQA1*05:01-B1*03:01L HLA-DRB1*13:02L HLA-DRB1*13:03L HLA-DRB1*01:03L HLA-DRB1*04:04L HLA-DRB1*04:05L HLA-DRB3*02:01L HLA-DPA1*03:01-B1*04:02L HLA-DRB1*14:01L HLA-DRB1*08:01L HLA-DPA1*02:01-B1*13:01L
  REGION 1..12: note = CONT. FROM ABOVE: HLA-DQA1*05:05-B1*03:01L HLA-DRB1*04:08L HLA-D RB1*15:01L
IEVQGYKSVNIT

SEQ ID NO: 10661 - protein, 13 aa, Severe acute respiratory syndrome coronavirus 2
  REGION 1..13: note = Table B: HLA-DQA1*05:01-B1*03:01L HLA-DRB1*13:02L HLA-DRB1*01:03L HLA-DRB1*04:02L HLA-DRB1*04:05L HLA-DRB1*01:02L HLA-DRB3*02:01L HLA-DPA1*01:03-B1*03:01L HLA-DRB1*14:01L HLA-DPA1*01:03-B1*04:01L HLA-DRB1*04:10L
  REGION 1..13: note = CONT. FROM ABOVE: HLA-DPA1*01:03-B1*04:02L HLA-DQA1*05:05-B1*03: 01L HLA-DRB1*04:08L
SVNITFELDERID

SEQ ID NO: 10662 - protein, 16 aa, Severe acute respiratory syndrome coronavirus 2
  REGION 1..16: note = Table B: HLA-DQA1*05:01-B1*03:01L HLA-DRB1*14:02L HLA-DQA1*01-B1*05L HLA-DRB3*01:01L HLA-DRB1*07:01L
DERIDKVLNEKCSAYT

SEQ ID NO: 10663 - protein, 15 aa, Severe acute respiratory syndrome coronavirus 2
  REGION 1..15: note = Table B: HLA-DQA1*05:01-B1*03:01L HLA-DRB1*04:03L HLA-DRB1*13:02L HLA-DRB1*01:03L HLA-DRB1*04:05L HLA-DRB1*08:04L HLA-DRB1*08:01L HLA-DQA1*05:05-B1*03:01L HLA-DRB1*04:08L
IDKVLNEKCSAYTVE

SEQ ID NO: 10664 - protein, 13 aa, Severe acute respiratory syndrome coronavirus 2
  REGION 1..13: note = Table B: HLA-DQA1*05:01-B1*03:01L HLA-DRB1*14:01L HLA-DRB1*12:01L HLA-DPA1*03:01-B1*105:01L HLA-DQA1*05:05-B1*03:01L
VADAVIKTLQPVS

SEQ ID NO: 10665 - protein, 13 aa, Severe acute respiratory syndrome coronavirus 2
  REGION 1..13: note = Table B: HLA-DQA1*05:01-B1*03:01L HLA-DRB1*01:02L HLA-DPA1*01:03-B1*03:01L HLA-DPA1*03:01-B1*04:02L HLA-DRB1*14:01L HLA-DQA1*01:01-B1*05:01L HLA-DPA1*02:01-B1*13:01L HLA-DQA1*05:05-B1*03:01L
  REGION 1..13: note = CONT. FROM ABOVE: HLA-DPA1*01:02-B1*04:01L
TLQPVSELLTPLG

SEQ ID NO: 10666 - protein, 14 aa, Severe acute respiratory syndrome coronavirus 2
  REGION 1..14: note = Table B: HLA-DQA1*05:01-B1*03:01L HLA-DRB1*04:01L HLA-DRB1*01:03L HLA-DRB1*01:02L HLA-DRB1*08:04L HLA-DPA1*01:03-B1*03:01L HLA-DRB1*14:01L HLA-DRB1*11:04L HLA-DRB4*01:01L HLA-DQA1*05:05-B1*03:01L HLA-DRB1*10:01L
  REGION 1..14: note = CONT. FROM ABOVE: HLA-DRB1*04:08L HLA-DRB1*08:03L
LQPVSELLTPLGID

SEQ ID NO: 10667 - protein, 10 aa, Severe acute respiratory syndrome coronavirus 2
  REGION 1..10: note = Table B: HLA-DQA1*05:01-B1*03:01L HLA-DRB1*13:03L HLA-DQA1*01:02-B1*06:02M HLA-DQA1*05:01-B1*02:01L HLA-DPA1*02:01-B1*13:01L HLA-DPA1*03:01-B1*105:01M HLA-DRB1*15:03L
TPLGIDLDEW

SEQ ID NO: 10668 - protein, 19 aa, Severe acute respiratory syndrome coronavirus 2
  REGION 1..19: note = Table B: HLA-DQA1*05:01-B1*03:01L HLA-DRB1*04:05L HLA-DRB1*14:02L HLA-DPA1*02:01-B1*13:01L HLA-DRB1*04:08L
PPDEDEEEGDCEEEEFEPS

SEQ ID NO: 10669 - protein, 10 aa, Severe acute respiratory syndrome coronavirus 2
  REGION 1..10: note = Table B: HLA-DQA1*05:01-B1*03:01L HLA-DRB1*13:03L HLA-DRB1*01:03L HLA-DQA1*01:02-B1*06:02L HLA-DRB1*08:77L HLA-DPA1*01:03-B1*03:01L HLA-DPA1*03:01-B1*04:02L HLA-DRB1*03:01L HLA-DRB1*11:02L HLA-DRB1*14:02L
  REGION 1..10: note = CONT. FROM ABOVE: HLA-DQA1*01-B1*05L HLA-DQA1*05:05-B1*03:19M HL A-DQA1*05:01-B1*02:01M HLA-DRB4*01:01L HLA-DPA1*01:03-B1*04:01L HLA-DQA1*05:05-B1*03:116L HLA-DPA1*01:03-B1*04:02L HLA-DPA1*02:0 1-B1*13:01L HLA-DPA1*03:01-B1*105:01L HLA-DPA1*01:03-B1*104:01L
  REGION 1..10: note = CONT. FROM ABOVE: HLA-DRB1*10:01L HLA-DRB1*16:01L HLA-DQA1*02:01 -B1*03:03L HLA-DRB1*15:03L
EFEPSTQYEY

SEQ ID NO: 10670 - protein, 11 aa, Severe acute respiratory syndrome coronavirus 2
  REGION 1..11: note = Table B: HLA-DQA1*05:01-B1*03:01L HLA-DRB1*13:03L HLA-DRB1*01:03L HLA-DRB1*04:05L HLA-DRB4*03:01NL HLA-DRB1*04:10L HLA-DRB1*12:01L HLA-DPA1*03:01-B1*105:01L HLA-DRB1*14:54L HLA-DQA1*05:05-B1*03:01L HLA-DQA1*01:03-B1*06:01L
  REGION 1..11: note = CONT. FROM ABOVE: HLA-DRB1*04:08L
YGTEDDYQGKP

SEQ ID NO: 10671 - protein, 12 aa, Severe acute respiratory syndrome coronavirus 2
  REGION 1..12: note = Table B: HLA-DQA1*05:01-B1*03:01L HLA-DQA1*01:02-B1*06:02L HLA-DQA1*05:05-B1*03:19L HLA-DPA1*03:01-B1*105:01L HLA-DQA1*05:05-B1*03:01L
DYQGKPLEFGAT

SEQ ID NO: 10672 - protein, 13 aa, Severe acute respiratory syndrome coronavirus 2
  REGION 1..13: note = Table B: HLA-DQA1*05:01-B1*03:01L HLA-DRB1*04:03L HLA-DRB1*04:02L HLA-DQA1*01:02-B1*06:02L HLA-DQA1*05:05-B1*03:01L HLA-DRB1*14:17L HLA-DQA1*01:03-B1*06:01L HLA-DQA1*02:01-B1*03:03L
KPLEFGATSAALQ

SEQ ID NO: 10673 - protein, 14 aa, Severe acute respiratory syndrome coronavirus 2
  REGION 1..14: note = Table B: HLA-DQA1*05:01-B1*03:01L HLA-DQA1*01:02-B1*06:02L HLA-DQA1*01:03-B1*06:01L
PLEFGATSAALQPE

SEQ ID NO: 10674 - protein, 11 aa, Severe acute respiratory syndrome coronavirus 2
  REGION 1..11: note = Table B: HLA-DQA1*05:01-B1*03:01L HLA-DQA1*01:01-B1*05:01L HLA-DQA1*05:05-B1*03:19L HLA-DQA1*05:05-B1*03:01L
ATSAALQPEEE

SEQ ID NO: 10675 - protein, 11 aa, Severe acute respiratory syndrome coronavirus 2
  REGION 1..11: note = Table B: HLA-DQA1*05:01-B1*03:01L HLA-DQA1*01:01-B1*05:01L HLA-DQA1*05:05-B1*03:19L HLA-DQA1*05:05-B1*03:01L
TSAALQPEEEQ

SEQ ID NO: 10676 - protein, 12 aa, Severe acute respiratory syndrome coronavirus 2
  REGION 1..12: note = Table B: HLA-DQA1*05:01-B1*03:01L HLA-DRB1*13:03L HLA-DRB1*04:02L HLA-DRB1*04:05L HLA-DQA1*01:02-B1*06:02L HLA-DQA1*01:01-B1*05:01L HLA-DQA1*05:05-B1*03:19L HLA-DRB1*04:10L HLA-DRB1*12:01L HLA-DQA1*05:05-B1*03:01L
  REGION 1..12: note = CONT. FROM ABOVE: HLA-DRB1*16:01L
SAALQPEEEQEE

SEQ ID NO: 10677 - protein, 14 aa, Severe acute respiratory syndrome coronavirus 2
  REGION 1..14: note = Table B: HLA-DQA1*05:01-B1*03:01L HLA-DRB1*04:03L HLA-DQA1*01:02-B1*06:02L HLA-DQA1*01:01-B1*05:01L HLA-DQA1*05:05-B1*03:19L HLA-DQA1*05:05-B1*03:01L
DSQQTVGQQDGSED

SEQ ID NO: 10678 - protein, 12 aa, Severe acute respiratory syndrome coronavirus 2
  REGION 1..12: note = Table B: HLA-DQA1*05:01-B1*03:01L HLA-DRB1*13:02L HLA-DRB1*13:03L HLA-DRB1*01:03L HLA-DRB1*04:02L HLA-DRB1*04:04L HLA-DRB1*04:05L HLA-DRB1*01:02L HLA-DRB4*03:01NL HLA-DRB1*08:04L HLA-DRB3*02:01L HLA-DPA1*01:03-B1*03:01L
  REGION 1..12: note = CONT. FROM ABOVE: HLA-DPA1*03:01-B1*04:02L HLA-DRB1*14:01L HLA-D QA1*01:01-B1*05:01L HLA-DQA1*01-B1*05L HLA-DQA1*05:05-B1*03:19L HLA-DRB1*04:10L HLA-DRB1*12:01L HLA-DRB1*12:02L HLA-DPA1*02:01-B 1*13:01L HLA-DPA1*03:01-B1*105:01L HLA-DRB1*14:54L
  REGION 1..12: note = CONT. FROM ABOVE: HLA-DPA1*01:03-B1*104:01L HLA-DQA1*05:05-B1*03 :01L HLA-DRB1*10:01L HLA-DRB1*16:01L HLA-DRB1*04:08L HLA-DRB1*08 :03L HLA-DRB1*15:03L
IQTIVEVQPQLE

SEQ ID NO: 10679 - protein, 12 aa, Severe acute respiratory syndrome coronavirus 2
  REGION 1..12: note = Table B: HLA-DQA1*05:01-B1*03:01L HLA-DRB1*04:03L HLA-DRB1*04:02L HLA-DQA1*05:01-B1*02:01L HLA-DRB1*12:01L HLA-DQA1*03:01-B1*03:02L HLA-DQA1*05:05-B1*03:01L HLA-DRB1*14:17L
VVQTIEVNSFSG

SEQ ID NO: 10680 - protein, 10 aa, Severe acute respiratory syndrome coronavirus 2
  REGION 1..10: note = Table B: HLA-DQA1*05:01-B1*03:01L HLA-DRB1*04:03L HLA-DRB1*13:03L HLA-DRB1*01:03L HLA-DQA1*01:02-B1*06:02L HLA-DRB4*03:01NL HLA-DRB1*08:77M HLA-DPA1*01:03-B1*03:01M HLA-DPA1*03:01-B1*04:02L HLA-DRB1*03:01L HLA-DRB1*11:02L
  REGION 1..10: note = CONT. FROM ABOVE: HLA-DRB1*14:02L HLA-DQA1*01-B1*05L HLA-DQA1*05 :05-B1*03:19M HLA-DQA1*05:01-B1*02:01M HLA-DRB4*01:01L HLA-DPA1* 01:03-B1*04:01L HLA-DQA1*05:05-B1*03:116L HLA-DPA1*01:03-B1*04:0 2L HLA-DRB1*12:01L HLA-DPA1*03:01-B1*105:01L
  REGION 1..10: note = CONT. FROM ABOVE: HLA-DPA1*01:03-B1*104:01M HLA-DPA1*01:02-B1*04 :01L HLA-DRB1*10:01L HLA-DRB1*16:01M HLA-DQA1*02:01-B1*03:03L HL A-DRB1*15:03L
TIEVNSFSGY

SEQ ID NO: 10681 - protein, 11 aa, Severe acute respiratory syndrome coronavirus 2
  REGION 1..11: note = Table B: HLA-DQA1*05:01-B1*03:01L HLA-DRB1*04:03L HLA-DRB1*01:03L HLA-DRB1*04:02L HLA-DPA1*03:01-B1*04:02L HLA-DQA1*01-B1*05L HLA-DPA1*01:02-B1*04:01L HLA-DRB1*16:01L HLA-DRB1*15:03L
IEVNSFSGYLK

SEQ ID NO: 10682 - protein, 11 aa, Severe acute respiratory syndrome coronavirus 2
  REGION 1..11: note = Table B: HLA-DQA1*05:01-B1*03:01L HLA-DRB1*04:03L HLA-DRB1*13:02L HLA-DRB1*13:03L HLA-DRB1*01:03L HLA-DRB1*04:02L HLA-DRB1*04:05L HLA-DRB4*03:01NL HLA-DRB1*14:01L HLA-DQA1*05:01-B1*02:01L HLA-DPA1*03:01-B1*105:01L
  REGION 1..11: note = CONT. FROM ABOVE: HLA-DQA1*03:01-B1*03:02L HLA-DRB1*14:54L HLA-D RB1*14:17L HLA-DPA1*01:02-B1*04:01L HLA-DRB1*07:01L HLA-DRB1*04: 08L
YLKLTDNVYIK

SEQ ID NO: 10683 - protein, 12 aa, Severe acute respiratory syndrome coronavirus 2
  REGION 1..12: note = Table B: HLA-DQA1*05:01-B1*03:01L HLA-DRB1*13:02L HLA-DRB1*04:04L HLA-DQA1*01:02-B1*06:02L HLA-DRB1*08:04L HLA-DRB1*08:77L HLA-DRB3*02:01L HLA-DPA1*01:03-B1*03:01L HLA-DPA1*03:01-B1*04:02L HLA-DRB1*11:03L HLA-DRB1*11:04L
  REGION 1..12: note = CONT. FROM ABOVE: HLA-DRB1*14:02L HLA-DQA1*01:01-B1*05:01L HLA-D RB1*11:01L HLA-DRB5*01:01L HLA-DQA1*05:05-B1*03:19L HLA-DPA1*01: 03-B1*04:01L HLA-DRB1*09:01L HLA-DPA1*01:03-B1*04:02L HLA-DRB1*1 2:02M HLA-DRB3*01:01L HLA-DQA1*05:05-B1*03:01L HLA-DRB1*07:01L
  REGION 1..12: note = CONT. FROM ABOVE: HLA-DRB1*10:01L HLA-DRB1*08:03L
DNVYIKNADIVE

SEQ ID NO: 10684 - protein, 11 aa, Severe acute respiratory syndrome coronavirus 2
  REGION 1..11: note = Table B: HLA-DQA1*05:01-B1*03:01L HLA-DRB1*04:03L HLA-DRB1*13:03L HLA-DRB1*04:02L HLA-DRB1*04:05L HLA-DQA1*01:02-B1*06:02L HLA-DRB1*01:02L HLA-DRB4*03:01NL HLA-DRB1*14:01L HLA-DRB1*11:04L HLA-DRB1*08:01L HLA-DRB1*12:01L
  REGION 1..11: note = CONT. FROM ABOVE: HLA-DRB1*14:54L HLA-DRB1*14:17L HLA-DPA1*01:02 -B1*04:01L HLA-DRB1*04:08L HLA-DQA1*02:01-B1*03:03L
IVEEAKKVKPT

SEQ ID NO: 10685 - protein, 12 aa, Severe acute respiratory syndrome coronavirus 2
  REGION 1..12: note = Table B: HLA-DQA1*05:01-B1*03:01L HLA-DQA1*01:02-B1*06:02L HLA-DRB1*01:02L
VVNAANVYLKHG

SEQ ID NO: 10686 - protein, 12 aa, Severe acute respiratory syndrome coronavirus 2
  REGION 1..12: note = Table B: HLA-DQA1*05:01-B1*03:01L HLA-DQA1*05:05-B1*03:19L HLA-DQA1*05:05-B1*03:01L
YLKHGGGVAGAL

SEQ ID NO: 10687 - protein, 14 aa, Severe acute respiratory syndrome coronavirus 2
  REGION 1..14: note = Table B: HLA-DQA1*05:01-B1*03:01L HLA-DRB1*01:03L HLA-DRB1*04:05L HLA-DRB1*01:02L HLA-DPA1*01:03-B1*03:01L HLA-DQA1*05:05-B1*03:19L HLA-DRB1*12:01L HLA-DPA1*02:01-B1*13:01L HLA-DPA1*03:01-B1*105:01L
  REGION 1..14: note = CONT. FROM ABOVE: HLA-DQA1*03:01-B1*03:02L HLA-DPA1*01:03-B1*104 :01L HLA-DRB1*04:08L HLA-DQA1*02:01-B1*03:03L
GPLKVGGSCVLSGH

SEQ ID NO: 10688 - protein, 10 aa, Severe acute respiratory syndrome coronavirus 2
  REGION 1..10: note = Table B: HLA-DQA1*05:01-B1*03:01L HLA-DRB1*04:03L HLA-DRB1*13:03L HLA-DRB1*01:03L HLA-DRB1*04:02L HLA-DRB1*01:02L HLA-DRB1*12:01L HLA-DQA1*03:01-B1*03:02L HLA-DRB1*14:17L HLA-DRB1*16:01L HLA-DRB1*04:08L HLA-DQA1*02:01-B1*03:03L
VLSGHNLAKH

SEQ ID NO: 10689 - protein, 16 aa, Severe acute respiratory syndrome coronavirus 2
  REGION 1..16: note = Table B: HLA-DQA1*05:01-B1*03:01L HLA-DRB1*13:02L HLA-DRB1*04:04L HLA-DRB1*04:05L HLA-DPA1*01:03-B1*03:01L HLA-DRB1*14:01L HLA-DRB1*11:04L HLA-DRB1*11:01L HLA-DRB1*12:01L HLA-DRB3*01:01L HLA-DPA1*02:01-B1*13:01L
  REGION 1..16: note = CONT. FROM ABOVE: HLA-DPA1*03:01-B1*105:01L HLA-DQA1*03:01-B1*03 :02L HLA-DPA1*01:03-B1*104:01L HLA-DPA1*01:02-B1*04:01L HLA-DRB1 *07:01L HLA-DRB1*16:01L HLA-DRB1*15:03L
SGHNLAKHCLHVVGPN

SEQ ID NO: 10690 - protein, 10 aa, Severe acute respiratory syndrome coronavirus 2
  REGION 1..10: note = Table B: HLA-DQA1*05:01-B1*03:01M HLA-DRB1*13:03L HLA-DRB1*01:03L HLA-DQA1*01:02-B1*06:02L HLA-DRB4*03:01NL HLA-DRB1*08:77M HLA-DPA1*01:03-B1*03:01L HLA-DPA1*03:01-B1*04:02L HLA-DRB1*03:01L HLA-DRB1*11:02L
  REGION 1..10: note = CONT. FROM ABOVE: HLA-DRB1*14:02L HLA-DQA1*01-B1*05L HLA-DQA1*05 :05-B1*03:19M HLA-DQA1*05:01-B1*02:01L HLA-DRB4*01:01M HLA-DPA1* 01:03-B1*04:01M HLA-DQA1*05:05-B1*03:116L HLA-DPA1*01:03-B1*04:0 2L HLA-DRB1*12:01L HLA-DPA1*01:03-B1*104:01L
  REGION 1..10: note = CONT. FROM ABOVE: HLA-DPA1*01:02-B1*04:01L HLA-DRB1*10:01L HLA-D RB1*16:01L HLA-DQA1*02:01-B1*03:03L HLA-DRB1*15:03L
EDIQLLKSAY

SEQ ID NO: 10691 - protein, 13 aa, Severe acute respiratory syndrome coronavirus 2
  REGION 1..13: note = Table B: HLA-DQA1*05:01-B1*03:01L HLA-DRB1*04:04L HLA-DRB1*04:05L HLA-DRB1*01:02L HLA-DRB1*04:10L HLA-DRB1*12:01L HLA-DPA1*03:01-B1*105:01L HLA-DQA1*03:01-B1*03:02L HLA-DQA1*05:05-B1*03:01L HLA-DQA1*01:03-B1*06:01L
  REGION 1..13: note = CONT. FROM ABOVE: HLA-DQA1*02:01-B1*03:03L HLA-DRB1*15:03L
QHEVLLAPLLSAG

SEQ ID NO: 10692 - protein, 12 aa, Severe acute respiratory syndrome coronavirus 2
  REGION 1..12: note = Table B: HLA-DQA1*05:01-B1*03:01L HLA-DQA1*01:02-B1*06:02L HLA-DQA1*05:05-B1*03:19L HLA-DPA1*03:01-B1*105:01L HLA-DQA1*05:05-B1*03:01L
LSAGIFGADPIH

SEQ ID NO: 10693 - protein, 10 aa, Severe acute respiratory syndrome coronavirus 2
  REGION 1..10: note = Table B: HLA-DQA1*05:01-B1*03:01L HLA-DRB1*04:03L HLA-DRB1*13:02L HLA-DRB1*13:03L HLA-DRB1*01:03L HLA-DRB1*04:02L HLA-DQA1*01:02-B1*06:02L HLA-DRB1*01:01L HLA-DRB1*01:02L HLA-DRB4*03:01NL HLA-DRB3*02:01L HLA-DRB1*14:01L HLA-DRB1*11:04L
  REGION 1..10: note = CONT. FROM ABOVE: HLA-DRB1*14:02L HLA-DRB1*08:01L HLA-DRB5*01:01 L HLA-DQA1*05:05-B1*03:19L HLA-DQA1*05:01-B1*02:01L HLA-DRB1*13: 01L HLA-DPA1*01:03-B1*04:02L HLA-DRB1*12:01L HLA-DRB1*12:02L HLA -DRB3*01:01L HLA-DPA1*03:01-B1*105:01L HLA-DQA1*03:01-B1*03:02M
  REGION 1..10: note = CONT. FROM ABOVE: HLA-DQA1*05:05-B1*03:01L HLA-DRB1*14:17L HLA-D PA1*01:02-B1*04:01L HLA-DRB1*16:01L HLA-DQA1*01:03-B1*06:01L HLA -DRB1*04:08L HLA-DQA1*02:01-B1*03:03L HLA-DRB1*15:03L
FGADPIHSLR

SEQ ID NO: 10694 - protein, 14 aa, Severe acute respiratory syndrome coronavirus 2
  REGION 1..14: note = Table B: HLA-DQA1*05:01-B1*03:01L HLA-DRB1*13:02L HLA-DRB1*04:05L HLA-DPA1*01:03-B1*03:01L HLA-DRB1*14:01L HLA-DRB1*08:01L HLA-DPA1*01:03-B1*04:02L HLA-DPA1*02:01-B1*13:01L HLA-DPA1*01:03-B1*02:01L
DTVRTNVYLAVFDK

SEQ ID NO: 10695 - protein, 13 aa, Severe acute respiratory syndrome coronavirus 2
  REGION 1..13: note = Table B: HLA-DQA1*05:01-B1*03:01L HLA-DRB1*04:05L HLA-DRB1*01:02L HLA-DPA1*01:03-B1*03:01L HLA-DPA1*03:01-B1*04:02L HLA-DRB1*12:01L HLA-DPA1*02:01-B1*13:01L HLA-DQA1*05:05-B1*03:01L
  REGION 1..13: note = CONT. FROM ABOVE: HLA-DRB1*16:01L HLA-DRB1*04:08L HLA-DRB1*15:03 L
VRTNVYLAVFDKN

SEQ ID NO: 10696 - protein, 12 aa, Severe acute respiratory syndrome coronavirus 2
  REGION 1..12: note = Table B: HLA-DQA1*05:01-B1*03:01L HLA-DRB1*13:02L HLA-DRB1*13:03L HLA-DRB1*01:03L HLA-DRB4*03:01NL HLA-DRB1*08:04L HLA-DRB1*08:77L HLA-DRB3*02:01L HLA-DPA1*01:03-B1*03:01L HLA-DRB1*14:01L HLA-DRB1*08:01L HLA-DQA1*05:05-B1*03:19L
  REGION 1..12: note = CONT. FROM ABOVE: HLA-DRB1*09:01L HLA-DPA1*01:03-B1*04:02L HLA-D QA1*05:05-B1*03:01L HLA-DRB1*14:17L HLA-DRB1*07:01L HLA-DRB1*04: 08L
TNVYLAVFDKNL

SEQ ID NO: 10697 - protein, 10 aa, Severe acute respiratory syndrome coronavirus 2
  REGION 1..10: note = Table B: HLA-DQA1*05:01-B1*03:01L HLA-DRB1*04:05L HLA-DQA1*01:02-B1*06:02L HLA-DRB1*08:77L HLA-DPA1*01:03-B1*03:01L HLA-DPA1*03:01-B1*04:02L HLA-DRB1*03:01L HLA-DRB1*11:02L HLA-DRB1*14:02L
  REGION 1..10: note = CONT. FROM ABOVE: HLA-DQA1*01-B1*05L HLA-DQA1*05:05-B1*03:19L HL A-DQA1*05:01-B1*02:01L HLA-DRB4*01:01L HLA-DPA1*01:03-B1*04:01L HLA-DQA1*05:05-B1*03:116L HLA-DPA1*01:03-B1*04:02L HLA-DPA1*02:0 1-B1*13:01L HLA-DPA1*03:01-B1*105:01L HLA-DPA1*01:03-B1*104:01L
  REGION 1..10: note = CONT. FROM ABOVE: HLA-DRB1*10:01L HLA-DRB1*16:01L HLA-DQA1*01:03 -B1*06:01L HLA-DQA1*02:01-B1*03:03L HLA-DRB1*15:03L
YLAVFDKNLY

SEQ ID NO: 10698 - protein, 10 aa, Severe acute respiratory syndrome coronavirus 2
  REGION 1..10: note = Table B: HLA-DQA1*05:01-B1*03:01L HLA-DRB1*04:01L HLA-DRB1*04:03L HLA-DRB1*13:02L HLA-DRB1*13:03M HLA-DRB1*01:03L HLA-DRB1*04:02L HLA-DRB1*04:04L HLA-DQA1*01:02-B1*06:02L HLA-DRB1*01:01L HLA-DRB1*01:02L HLA-DRB4*03:01NL HLA-DRB3*02:01L
  REGION 1..10: note = CONT. FROM ABOVE: HLA-DRB1*14:01L HLA-DRB1*11:04L HLA-DRB1*14:02 L HLA-DRB1*08:01L HLA-DRB1*11:01L HLA-DRB5*01:01L HLA-DPA1*01:03 -B1*04:02L HLA-DRB1*12:01L HLA-DRB1*12:02L HLA-DRB3*01:01L HLA-D PA1*03:01-B1*105:01L HLA-DQA1*03:01-B1*03:02M
  REGION 1..10: note = CONT. FROM ABOVE: HLA-DQA1*05:05-B1*03:01L HLA-DRB1*14:17L HLA-D PA1*01:02-B1*04:01L HLA-DRB1*16:01L HLA-DQA1*01:03-B1*06:01L HLA -DRB1*08:02L HLA-DRB1*08:03L HLA-DQA1*02:01-B1*03:03L HLA-DRB1*1 5:01L
AVFDKNLYDK

SEQ ID NO: 10699 - protein, 13 aa, Severe acute respiratory syndrome coronavirus 2
  REGION 1..13: note = Table B: HLA-DQA1*05:01-B1*03:01L HLA-DRB1*08:01L HLA-DQA1*05:05-B1*03:01L
LYDKLVSSFLEMK

SEQ ID NO: 10700 - protein, 12 aa, Severe acute respiratory syndrome coronavirus 2
  REGION 1..12: note = Table B: HLA-DQA1*05:01-B1*03:01L HLA-DRB1*01:01L HLA-DRB1*11:03L HLA-DRB1*14:02L HLA-DRB1*11:01L HLA-DRB3*01:01L HLA-DQA1*05:05-B1*03:01L HLA-DRB1*08:03L
SFLEMKSEKQVE

SEQ ID NO: 10701 - protein, 12 aa, Severe acute respiratory syndrome coronavirus 2
  REGION 1..12: note = Table B: HLA-DQA1*05:01-B1*03:01L HLA-DRB1*04:05L HLA-DQA1*01:02-B1*06:02L HLA-DRB1*01:02L HLA-DRB1*16:01L HLA-DQA1*01:03-B1*06:01L HLA-DRB1*04:08L
LEMKSEKQVEQK

SEQ ID NO: 10702 - protein, 12 aa, Severe acute respiratory syndrome coronavirus 2
  REGION 1..12: note = Table B: HLA-DQA1*05:01-B1*03:01L HLA-DRB1*13:02L HLA-DRB1*13:03L HLA-DRB1*01:03L HLA-DRB1*04:02L HLA-DRB1*04:05L HLA-DQA1*01:02-B1*06:02L HLA-DRB1*01:02L HLA-DRB1*08:04L HLA-DRB1*14:01L HLA-DRB1*11:04L HLA-DRB1*08:01L
  REGION 1..12: note = CONT. FROM ABOVE: HLA-DQA1*05:01-B1*02:01L HLA-DRB1*12:01L HLA-D RB1*14:54L HLA-DRB1*14:17L HLA-DRB1*16:01L HLA-DRB1*04:08L HLA-D RB1*08:03L HLA-DRB1*15:03L
KPFITESKPSVE

SEQ ID NO: 10703 - protein, 14 aa, Severe acute respiratory syndrome coronavirus 2
  REGION 1..14: note = Table B: HLA-DQA1*05:01-B1*03:01L HLA-DRB1*13:02L HLA-DRB1*01:03L HLA-DPA1*01:03-B1*03:01L HLA-DRB1*14:01L HLA-DRB1*08:01L HLA-DPA1*03:01-B1*105:01L HLA-DPA1*01:03-B1*104:01L HLA-DQA1*05:05-B1*03:01L
  REGION 1..14: note = CONT. FROM ABOVE: HLA-DRB1*04:08L
DDKKIKACVEEVTT

SEQ ID NO: 10704 - protein, 14 aa, Severe acute respiratory syndrome coronavirus 2
  REGION 1..14: note = Table B: HLA-DQA1*05:01-B1*03:01L HLA-DRB1*01:03L HLA-DPA1*02:01-B1*13:01L HLA-DPA1*03:01-B1*105:01L HLA-DQA1*03:01-B1*03:02L HLA-DQA1*05:05-B1*03:01L HLA-DRB1*04:08L
DKKIKACVEEVTTT

SEQ ID NO: 10705 - protein, 12 aa, Severe acute respiratory syndrome coronavirus 2
  REGION 1..12: note = Table B: HLA-DQA1*05:01-B1*03:01L HLA-DQA1*01:02-B1*06:02L HLA-DPA1*01:03-B1*03:01L
TTTLEETKFLTE

SEQ ID NO: 10706 - protein, 11 aa, Severe acute respiratory syndrome coronavirus 2
  REGION 1..11: note = Table B: HLA-DQA1*05:01-B1*03:01L HLA-DRB1*13:02L HLA-DRB1*04:04L HLA-DRB1*01:02L HLA-DRB1*08:77L HLA-DRB1*14:01L HLA-DRB1*11:04L HLA-DRB1*04:10L HLA-DPA1*03:01-B1*105:01L HLA-DQA1*05:05-B1*03:01L HLA-DRB1*10:01L HLA-DRB1*04:08L
  REGION 1..11: note = CONT. FROM ABOVE: HLA-DRB1*15:03L
YIDINGNLHPD

SEQ ID NO: 10707 - protein, 11 aa, Severe acute respiratory syndrome coronavirus 2
  REGION 1..11: note = Table B: HLA-DQA1*05:01-B1*03:01L HLA-DRB1*13:02L HLA-DQA1*01:02-B1*06:02L HLA-DRB1*14:01L HLA-DQA1*01:01-B1*05:01L HLA-DQA1*05:05-B1*03:19L HLA-DRB1*04:10L HLA-DPA1*03:01-B1*105:01L
  REGION 1..11: note = CONT. FROM ABOVE: HLA-DQA1*05:05-B1*03:01L HLA-DQA1*01:03-B1*06: 01L HLA-DRB1*04:08L
IDINGNLHPDS

SEQ ID NO: 10708 - protein, 10 aa, Severe acute respiratory syndrome coronavirus 2
  REGION 1..10: note = Table B: HLA-DQA1*05:01-B1*03:01L HLA-DRB1*01:03L HLA-DQA1*01:02-B1*06:02L HLA-DRB1*14:01L HLA-DQA1*05:05-B1*03:19L HLA-DQA1*05:01-B1*02:01L HLA-DQA1*03:01-B1*03:02L HLA-DPA1*01:02-B1*04:01L
  REGION 1..10: note = CONT. FROM ABOVE: HLA-DRB1*16:01L HLA-DQA1*01:03-B1*06:01L HLA-D QA1*02:01-B1*03:03L
ITFLKKDAPY

SEQ ID NO: 10709 - protein, 13 aa, Severe acute respiratory syndrome coronavirus 2
  REGION 1..13: note = Table B: HLA-DQA1*05:01-B1*03:01L HLA-DQA1*01:02-B1*06:02L HLA-DRB1*01:02L HLA-DRB1*08:04L HLA-DPA1*01:03-B1*03:01L HLA-DRB1*14:01L HLA-DRB1*11:03L HLA-DRB1*14:02L HLA-DQA1*01:01-B1*05:01L HLA-DRB1*08:01L HLA-DRB5*01:01L
  REGION 1..13: note = CONT. FROM ABOVE: HLA-DQA1*05:05-B1*03:19L HLA-DRB1*09:01L HLA-D RB3*01:01L HLA-DPA1*02:01-B1*13:01L HLA-DQA1*05:05-B1*03:01L HLA -DQA1*01:03-B1*06:01L HLA-DRB1*08:03L HLA-DRB1*15:03L
DAPYIVGDVVQEG

SEQ ID NO: 10710 - protein, 11 aa, Severe acute respiratory syndrome coronavirus 2
  REGION 1..11: note = Table B: HLA-DQA1*05:01-B1*03:01L HLA-DRB1*04:03L HLA-DRB1*04:02L HLA-DRB1*04:05L HLA-DQA1*01:02-B1*06:02L HLA-DRB4*03:01NL HLA-DQA1*01-B1*05L HLA-DQA1*05:05-B1*03:19L HLA-DQA1*05:01-B1*02:01L HLA-DRB1*12:01L
  REGION 1..11: note = CONT. FROM ABOVE: HLA-DPA1*03:01-B1*105:01L HLA-DQA1*03:01-B1*03 :02L HLA-DRB1*14:54L HLA-DQA1*05:05-B1*03:01L HLA-DRB1*14:17L HL A-DRB1*16:01L HLA-DQA1*01:03-B1*06:01L HLA-DQA1*02:01-B1*03:03L HLA-DRB1*15:03L
IVGDVVQEGVL

SEQ ID NO: 10711 - protein, 10 aa, Severe acute respiratory syndrome coronavirus 2
  REGION 1..10: note = Table B: HLA-DQA1*05:01-B1*03:01L HLA-DQA1*01:02-B1*06:02L HLA-DQA1*05:05-B1*03:19L HLA-DPA1*03:01-B1*105:01L HLA-DQA1*03:01-B1*03:02L HLA-DQA1*05:05-B1*03:01L HLA-DQA1*01:03-B1*06:01M HLA-DQA1*02:01-B1*03:03L
LTAVVIPTKK

SEQ ID NO: 10712 - protein, 15 aa, Severe acute respiratory syndrome coronavirus 2
  REGION 1..15: note = Table B: HLA-DQA1*05:01-B1*03:01L HLA-DRB1*13:02L HLA-DRB1*04:05L HLA-DQA1*01:02-B1*06:02L HLA-DRB1*01:02L HLA-DPA1*01:03-B1*03:01L HLA-DRB1*12:01L HLA-DPA1*02:01-B1*13:01L HLA-DQA1*05:05-B1*03:01L
IPTKKAGGTTEMLAK

SEQ ID NO: 10713 - protein, 16 aa, Severe acute respiratory syndrome coronavirus 2
  REGION 1..16: note = Table B: HLA-DQA1*05:01-B1*03:01L HLA-DRB1*04:05L HLA-DPA1*03:01-B1*04:02L HLA-DRB1*11:02L HLA-DRB1*11:03L HLA-DRB1*11:04L HLA-DRB1*14:02L HLA-DQA1*05:05-B1*03:19L HLA-DPA1*01:03-B1*04:02L HLA-DRB3*01:01L
  REGION 1..16: note = CONT. FROM ABOVE: HLA-DPA1*02:01-B1*13:01L HLA-DPA1*01:03-B1*02: 01L HLA-DQA1*05:05-B1*03:01L HLA-DPA1*01:02-B1*04:01L HLA-DRB1*0 8:02L HLA-DRB1*08:03L
TTEMLAKALRKVPTDN

SEQ ID NO: 10714 - protein, 10 aa, Severe acute respiratory syndrome coronavirus 2
  REGION 1..10: note = Table B: HLA-DQA1*05:01-B1*03:01L HLA-DRB1*04:01L HLA-DRB1*04:03L HLA-DRB1*13:02L HLA-DRB1*13:03L HLA-DRB1*01:03M HLA-DQA1*01:02-B1*06:02L HLA-DRB1*08:77L HLA-DPA1*01:03-B1*03:01L HLA-DRB1*03:01L HLA-DRB1*14:01L
  REGION 1..10: note = CONT. FROM ABOVE: HLA-DRB1*14:02L HLA-DRB1*11:01L HLA-DQA1*01-B1 *05L HLA-DQA1*05:05-B1*03:19L HLA-DQA1*05:01-B1*02:01L HLA-DPA1* 01:03-B1*04:01L HLA-DQA1*05:05-B1*03:116L HLA-DPA1*01:03-B1*04:0 2L HLA-DRB1*12:01L HLA-DPA1*02:01-B1*13:01L
  REGION 1..10: note = CONT. FROM ABOVE: HLA-DPA1*03:01-B1*105:01L HLA-DPA1*01:03-B1*10 4:01L HLA-DPA1*01:02-B1*04:01L HLA-DRB1*10:01L HLA-DRB1*16:01L H LA-DQA1*01:03-B1*06:01L HLA-DRB1*08:02L HLA-DQA1*02:01-B1*03:03M HLA-DRB1*15:03L
ALRKVPTDNY

SEQ ID NO: 10715 - protein, 11 aa, Severe acute respiratory syndrome coronavirus 2
  REGION 1..11: note = Table B: HLA-DQA1*05:01-B1*03:01L HLA-DRB1*13:03L HLA-DQA1*01:02-B1*06:02L HLA-DQA1*05:05-B1*03:19L HLA-DRB1*12:01L HLA-DQA1*05:05-B1*03:01L HLA-DQA1*01:03-B1*06:01L
DNYITTYPGQG

SEQ ID NO: 10716 - protein, 12 aa, Severe acute respiratory syndrome coronavirus 2
  REGION 1..12: note = Table B: HLA-DQA1*05:01-B1*03:01L HLA-DQA1*01:01-B1*05:01L HLA-DQA1*05:05-B1*03:19L HLA-DRB1*04:10L HLA-DPA1*03:01-B1*105:01L HLA-DQA1*05:05-B1*03:01L
GLNGYTVEEAKT

SEQ ID NO: 10717 - protein, 11 aa, Severe acute respiratory syndrome coronavirus 2
  REGION 1..11: note = Table B: HLA-DQA1*05:01-B1*03:01L HLA-DRB1*12:01L HLA-DPA1*03:01-B1*105:01L
NGYTVEEAKTV

SEQ ID NO: 10718 - protein, 11 aa, Severe acute respiratory syndrome coronavirus 2
  REGION 1..11: note = Table B: HLA-DQA1*05:01-B1*03:01L HLA-DRB1*04:03L HLA-DRB1*01:02L HLA-DPA1*01:02-B1*04:01L
TVEEAKTVLKK

SEQ ID NO: 10719 - protein, 12 aa, Severe acute respiratory syndrome coronavirus 2
  REGION 1..12: note = Table B: HLA-DQA1*05:01-B1*03:01L HLA-DRB1*04:01L HLA-DRB1*13:02L HLA-DRB1*04:04L HLA-DQA1*01:02-B1*06:02L HLA-DRB1*01:01L HLA-DRB1*08:04L HLA-DRB1*08:77L HLA-DPA1*01:03-B1*03:01L HLA-DRB1*14:01L HLA-DRB1*11:03L
  REGION 1..12: note = CONT. FROM ABOVE: HLA-DRB1*11:04L HLA-DRB1*14:02L HLA-DRB1*08:01 L HLA-DQA1*05:05-B1*03:19L HLA-DRB1*09:01L HLA-DRB1*12:02L HLA-D PA1*02:01-B1*13:01L HLA-DRB1*08:03L
SAFYILPSIISN

SEQ ID NO: 10720 - protein, 12 aa, Severe acute respiratory syndrome coronavirus 2
  REGION 1..12: note = Table B: HLA-DQA1*05:01-B1*03:01L HLA-DRB1*01:03L HLA-DRB1*04:05L HLA-DRB4*03:01NL HLA-DQA1*01:01-B1*05:01L HLA-DQA1*01-B1*05L HLA-DQA1*05:05-B1*03:19L HLA-DRB1*04:10L HLA-DRB1*12:01L HLA-DPA1*03:01-B1*105:01L HLA-DRB1*14:54L
  REGION 1..12: note = CONT. FROM ABOVE: HLA-DRB1*16:01L
ILPSIISNEKQE

SEQ ID NO: 10721 - protein, 10 aa, Severe acute respiratory syndrome coronavirus 2
  REGION 1..10: note = Table B: HLA-DQA1*05:01-B1*03:01L HLA-DQA1*01:02-B1*06:02L HLA-DRB1*08:77L HLA-DQA1*05:05-B1*03:19L HLA-DQA1*05:01-B1*02:01L HLA-DRB4*01:01L HLA-DPA1*01:03-B1*04:01L HLA-DQA1*02:01-B1*03:03L
KQEILGTVSW

SEQ ID NO: 10722 - protein, 10 aa, Severe acute respiratory syndrome coronavirus 2
  REGION 1..10: note = Table B: HLA-DQA1*05:01-B1*03:01L HLA-DRB1*04:03L HLA-DQA1*01:02-B1*06:02L HLA-DRB1*01:02L HLA-DQA1*05:01-B1*02:01L HLA-DRB1*12:01L HLA-DPA1*03:01-B1*105:01L HLA-DQA1*03:01-B1*03:02L
  REGION 1..10: note = CONT. FROM ABOVE: HLA-DQA1*05:05-B1*03:01L HLA-DPA1*01:02-B1*04: 01L HLA-DRB1*16:01L HLA-DQA1*01:03-B1*06:01L HLA-DQA1*02:01-B1*0 3:03L HLA-DRB1*15:03L
ILGTVSWNLR

SEQ ID NO: 10723 - protein, 13 aa, Severe acute respiratory syndrome coronavirus 2
  REGION 1..13: note = Table B: HLA-DQA1*05:01-B1*03:01L HLA-DRB1*01:03L HLA-DQA1*01:01-B1*05:01L HLA-DPA1*02:01-B1*13:01L HLA-DRB1*04:08L
NLREMLAHAEETR

SEQ ID NO: 10724 - protein, 11 aa, Severe acute respiratory syndrome coronavirus 2
  REGION 1..11: note = Table B: HLA-DQA1*05:01-B1*03:01L HLA-DRB1*16:01L
EMLAHAEETRK

SEQ ID NO: 10725 - protein, 10 aa, Severe acute respiratory syndrome coronavirus 2
  REGION 1..10: note = Table B: HLA-DQA1*05:01-B1*03:01L HLA-DRB1*01:03L HLA-DRB1*01:02L HLA-DRB1*12:01L HLA-DQA1*03:01-B1*03:02L HLA-DPA1*01:02-B1*04:01L HLA-DRB1*16:01L HLA-DQA1*01:03-B1*06:01L HLA-DQA1*02:01-B1*03:03L
IVSTIQRKYK

SEQ ID NO: 10726 - protein, 15 aa, Severe acute respiratory syndrome coronavirus 2
  REGION 1..15: note = Table B: HLA-DQA1*05:01-B1*03:01L HLA-DRB1*04:01L HLA-DRB1*04:03L HLA-DRB1*04:02L HLA-DRB1*01:01L HLA-DRB1*08:04L HLA-DPA1*01:03-B1*03:01L HLA-DQA1*05:05-B1*03:19L HLA-DPA1*01:03-B1*04:02L HLA-DRB3*01:01L
  REGION 1..15: note = CONT. FROM ABOVE: HLA-DQA1*05:05-B1*03:01L HLA-DRB1*10:01L
IQRKYKGIKIQEGVV

SEQ ID NO: 10727 - protein, 11 aa, Severe acute respiratory syndrome coronavirus 2
  REGION 1..11: note = Table B: HLA-DQA1*05:01-B1*03:01L HLA-DRB1*04:03L HLA-DRB1*13:02L HLA-DRB1*13:03L HLA-DRB1*01:03L HLA-DRB1*04:02L HLA-DRB1*04:05L HLA-DQA1*01:02-B1*06:02L HLA-DRB1*01:02L HLA-DRB4*03:01NL HLA-DPA1*01:03-B1*03:01L
  REGION 1..11: note = CONT. FROM ABOVE: HLA-DQA1*01:01-B1*05:01L HLA-DRB1*08:01L HLA-D RB5*01:01L HLA-DQA1*01-B1*05L HLA-DQA1*05:05-B1*03:19L HLA-DQA1* 05:01-B1*02:01L HLA-DRB1*04:10L HLA-DPA1*01:03-B1*04:02L HLA-DRB 1*12:01L HLA-DPA1*03:01-B1*105:01L HLA-DRB1*14:54L
  REGION 1..11: note = CONT. FROM ABOVE: HLA-DQA1*05:05-B1*03:01L HLA-DRB1*14:17L HLA-D PA1*01:02-B1*04:01L HLA-DRB1*16:01L HLA-DRB1*04:08L HLA-DRB1*15: 03L
IQEGVVDYGAR

SEQ ID NO: 10728 - protein, 10 aa, Severe acute respiratory syndrome coronavirus 2
  REGION 1..10: note = Table B: HLA-DQA1*05:01-B1*03:01L HLA-DQA1*01:02-B1*06:02L HLA-DPA1*01:03-B1*03:01L HLA-DRB1*03:01L HLA-DRB1*11:02L HLA-DRB1*14:02L HLA-DQA1*01-B1*05L HLA-DQA1*05:05-B1*03:19L HLA-DQA1*05:01-B1*02:01L HLA-DPA1*01:03-B1*04:01L
  REGION 1..10: note = CONT. FROM ABOVE: HLA-DPA1*02:01-B1*13:01L HLA-DPA1*03:01-B1*105 :01L HLA-DPA1*01:03-B1*104:01L HLA-DRB1*16:01L HLA-DQA1*01:03-B1 *06:01L HLA-DQA1*02:01-B1*03:03L HLA-DRB1*15:03L
VVDYGARFYF

SEQ ID NO: 10729 - protein, 11 aa, Severe acute respiratory syndrome coronavirus 2
  REGION 1..11: note = Table B: HLA-DQA1*05:01-B1*03:01L HLA-DRB1*13:03L HLA-DRB1*01:03L HLA-DRB1*04:02L HLA-DRB3*02:01L HLA-DPA1*03:01-B1*04:02L HLA-DRB1*14:01L HLA-DQA1*05:01-B1*02:01L HLA-DRB1*12:01L
  REGION 1..11: note = CONT. FROM ABOVE: HLA-DQA1*03:01-B1*03:02L HLA-DQA1*05:05-B1*03: 01L HLA-DRB1*14:17L HLA-DRB1*04:08L
FYFYTSKTTVA

SEQ ID NO: 10730 - protein, 12 aa, Severe acute respiratory syndrome coronavirus 2
  REGION 1..12: note = Table B: HLA-DQA1*05:01-B1*03:01L HLA-DRB1*01:02L HLA-DPA1*03:01-B1*105:01L HLA-DPA1*01:02-B1*04:01L HLA-DQA1*01:03-B1*06:01L HLA-DRB1*15:03L
LVTMPLGYVTHG

SEQ ID NO: 10731 - protein, 12 aa, Severe acute respiratory syndrome coronavirus 2
  REGION 1..12: note = Table B: HLA-DQA1*05:01-B1*03:01L HLA-DRB1*01:03L HLA-DRB1*04:05L HLA-DQA1*01:02-B1*06:02L HLA-DQA1*01:01-B1*05:01L HLA-DQA1*05:05-B1*03:19L HLA-DRB1*12:01L HLA-DQA1*05:05-B1*03:01L
YVTHGLNLEEAA

SEQ ID NO: 10732 - protein, 12 aa, Severe acute respiratory syndrome coronavirus 2
  REGION 1..12: note = Table B: HLA-DQA1*05:01-B1*03:01L HLA-DRB1*04:03L HLA-DQA1*01:02-B1*06:02L HLA-DQA1*01:01-B1*05:01L HLA-DPA1*03:01-B1*105:01L HLA-DQA1*05:05-B1*03:01L
VTHGLNLEEAAR

SEQ ID NO: 10733 - protein, 10 aa, Severe acute respiratory syndrome coronavirus 2
  REGION 1..10: note = Table B: HLA-DQA1*05:01-B1*03:01L HLA-DRB1*04:03L HLA-DRB1*13:02L HLA-DRB1*13:03L HLA-DRB1*01:03L HLA-DQA1*01:02-B1*06:02L HLA-DRB4*03:01NL HLA-DRB1*08:77L HLA-DPA1*01:03-B1*03:01L HLA-DPA1*03:01-B1*04:02L
  REGION 1..10: note = CONT. FROM ABOVE: HLA-DRB1*03:01L HLA-DRB1*14:01L HLA-DRB1*11:02 L HLA-DRB1*14:02L HLA-DRB1*11:01L HLA-DQA1*01-B1*05L HLA-DQA1*05 :05-B1*03:19M HLA-DQA1*05:01-B1*02:01M HLA-DRB4*01:01L HLA-DPA1* 01:03-B1*04:01L HLA-DQA1*05:05-B1*03:116L
  REGION 1..10: note = CONT. FROM ABOVE: HLA-DPA1*01:03-B1*04:02L HLA-DRB1*12:01L HLA-D PA1*02:01-B1*13:01L HLA-DPA1*03:01-B1*105:01L HLA-DPA1*01:03-B1* 104:01L HLA-DPA1*01:02-B1*04:01L HLA-DRB1*10:01L HLA-DRB1*16:01L HLA-DQA1*01:03-B1*06:01L HLA-DRB1*08:02L
  REGION 1..10: note = CONT. FROM ABOVE: HLA-DQA1*02:01-B1*03:03L HLA-DRB1*15:03L
GLNLEEAARY

SEQ ID NO: 10734 - protein, 10 aa, Severe acute respiratory syndrome coronavirus 2
  REGION 1..10: note = Table B: HLA-DQA1*05:01-B1*03:01L HLA-DRB1*04:03L HLA-DRB1*13:03L HLA-DRB1*01:03L HLA-DRB1*04:02L HLA-DRB1*01:02L HLA-DRB4*03:01NL HLA-DRB1*08:04L HLA-DRB1*14:01L HLA-DRB1*08:01L HLA-DRB1*12:01L HLA-DQA1*03:01-B1*03:02L HLA-DRB1*14:54L
  REGION 1..10: note = CONT. FROM ABOVE: HLA-DRB1*14:17L HLA-DPA1*01:02-B1*04:01L HLA-D RB1*16:01L HLA-DRB1*04:08L HLA-DQA1*02:01-B1*03:03L
YMRSLKVPAT

SEQ ID NO: 10735 - protein, 13 aa, Severe acute respiratory syndrome coronavirus 2
  REGION 1..13: note = Table B: HLA-DQA1*05:01-B1*03:01L HLA-DRB1*04:02L HLA-DQA1*01:02-B1*06:02L HLA-DQA1*05:05-B1*03:01L HLA-DQA1*01:03-B1*06:01L
LKVPATVSVSSPD

SEQ ID NO: 10736 - protein, 10 aa, Severe acute respiratory syndrome coronavirus 2
  REGION 1..10: note = Table B: HLA-DQA1*05:01-B1*03:01L HLA-DRB1*13:03M HLA-DRB1*01:03L HLA-DQA1*01:02-B1*06:02M HLA-DRB4*03:01NL HLA-DRB1*08:77L HLA-DPA1*01:03-B1*03:01L HLA-DRB1*03:01L HLA-DRB1*14:01L HLA-DRB1*11:02L HLA-DRB1*14:02L
  REGION 1..10: note = CONT. FROM ABOVE: HLA-DQA1*01-B1*05L HLA-DQA1*05:05-B1*03:19L HL A-DQA1*05:01-B1*02:01L HLA-DRB4*01:01L HLA-DPA1*01:03-B1*04:01L HLA-DQA1*05:05-B1*03:116L HLA-DPA1*01:03-B1*04:02L HLA-DRB1*12:0 1L HLA-DPA1*02:01-B1*13:01L HLA-DPA1*03:01-B1*105:01L
  REGION 1..10: note = CONT. FROM ABOVE: HLA-DPA1*01:03-B1*104:01L HLA-DRB1*10:01L HLA- DRB1*16:01L HLA-DRB1*08:02L HLA-DQA1*02:01-B1*03:03L HLA-DRB1*15 :03L
VSSPDAVTAY

SEQ ID NO: 10737 - protein, 11 aa, Severe acute respiratory syndrome coronavirus 2
  REGION 1..11: note = Table B: HLA-DQA1*05:01-B1*03:01L HLA-DRB1*04:03L HLA-DRB1*13:03M HLA-DRB1*01:03L HLA-DRB4*03:01NL HLA-DRB1*08:77L HLA-DRB1*03:01L HLA-DRB1*14:01L HLA-DRB1*14:02L HLA-DQA1*01-B1*05L HLA-DPA1*01:03-B1*04:01L
  REGION 1..11: note = CONT. FROM ABOVE: HLA-DQA1*05:05-B1*03:116L HLA-DRB1*12:01L HLA- DPA1*02:01-B1*13:01L HLA-DPA1*03:01-B1*105:01L HLA-DPA1*01:02-B1 *04:01L HLA-DRB1*10:01L HLA-DQA1*02:01-B1*03:03L HLA-DRB1*15:03L
SPDAVTAYNGY

SEQ ID NO: 10738 - protein, 14 aa, Severe acute respiratory syndrome coronavirus 2
  REGION 1..14: note = Table B: HLA-DQA1*05:01-B1*03:01L HLA-DRB1*13:02L HLA-DRB1*13:03L HLA-DRB1*01:03L HLA-DRB1*04:02L HLA-DRB1*04:04L HLA-DRB1*04:05L HLA-DQA1*01:02-B1*06:02L HLA-DRB1*01:02L HLA-DRB4*03:01NL HLA-DRB1*08:04L HLA-DRB1*08:77L HLA-DRB3*02:01L
  REGION 1..14: note = CONT. FROM ABOVE: HLA-DPA1*01:03-B1*03:01L HLA-DPA1*03:01-B1*04: 02L HLA-DRB1*14:01L HLA-DRB1*11:03L HLA-DQA1*01:01-B1*05:01L HLA -DRB1*08:01L HLA-DRB1*04:10L HLA-DRB1*12:01L HLA-DRB1*12:02L HLA -DRB3*01:01L HLA-DPA1*03:01-B1*105:01L HLA-DRB1*14:54L
  REGION 1..14: note = CONT. FROM ABOVE: HLA-DQA1*05:05-B1*03:01L HLA-DPA1*01:02-B1*04: 01L HLA-DRB1*07:01L HLA-DRB1*10:01L HLA-DQA1*01:03-B1*06:01L HLA -DRB1*04:08L HLA-DRB1*08:03L HLA-DQA1*02:01-B1*03:03L HLA-DRB1*1 5:03L
TPEEHFIETISLAG

SEQ ID NO: 10739 - protein, 10 aa, Severe acute respiratory syndrome coronavirus 2
  REGION 1..10: note = Table B: HLA-DQA1*05:01-B1*03:01L HLA-DRB1*08:77L HLA-DQA1*05:05-B1*03:19L HLA-DRB4*01:01L HLA-DPA1*01:03-B1*04:01L
IETISLAGSY

SEQ ID NO: 10740 - protein, 12 aa, Severe acute respiratory syndrome coronavirus 2
  REGION 1..12: note = Table B: HLA-DQA1*05:01-B1*03:01L HLA-DRB1*04:05L HLA-DRB1*01:02L HLA-DRB1*12:01L HLA-DQA1*05:05-B1*03:01L
TISLAGSYKDWS

SEQ ID NO: 10741 - protein, 12 aa, Severe acute respiratory syndrome coronavirus 2
  REGION 1..12: note = Table B: HLA-DQA1*05:01-B1*03:01L HLA-DRB1*01:02L HLA-DPA1*01:03-B1*03:01L HLA-DRB1*14:01L HLA-DRB1*12:01L HLA-DQA1*01:03-B1*06:01L
YSGQSTQLGIEF

SEQ ID NO: 10742 - protein, 13 aa, Severe acute respiratory syndrome coronavirus 2
  REGION 1..13: note = Table B: HLA-DQA1*05:01-B1*03:01L HLA-DRB1*04:03L HLA-DRB1*12:01L
SGQSTQLGIEFLK

SEQ ID NO: 10743 - protein, 14 aa, Severe acute respiratory syndrome coronavirus 2
  REGION 1..14: note = Table B: HLA-DQA1*05:01-B1*03:01L HLA-DRB1*04:05L HLA-DRB1*14:01L HLA-DRB1*12:01L HLA-DRB3*01:01L HLA-DPA1*03:01-B1*105:01L HLA-DPA1*01:02-B1*04:01L HLA-DRB1*15:03L
STQLGIEFLKRGDK

SEQ ID NO: 10744 - protein, 18 aa, Severe acute respiratory syndrome coronavirus 2
  REGION 1..18: note = Table B: HLA-DQA1*05:01-B1*03:01L HLA-DRB1*04:03L HLA-DPA1*01:03-B1*03:01L HLA-DRB1*08:01L HLA-DQA1*05:01-B1*02:01L HLA-DRB3*01:01L HLA-DPA1*03:01-B1*105:01L HLA-DPA1*01:03-B1*104:01L
  REGION 1..18: note = CONT. FROM ABOVE: HLA-DRB1*07:01L HLA-DQA1*01:03-B1*06:01L HLA-D RB1*04:08L
IEFLKRGDKSVYYTSNPT

SEQ ID NO: 10745 - protein, 13 aa, Severe acute respiratory syndrome coronavirus 2
  REGION 1..13: note = Table B: HLA-DQA1*05:01-B1*03:01L HLA-DRB1*13:02L HLA-DRB1*04:04L HLA-DRB1*01:02L HLA-DRB1*14:01L HLA-DRB1*11:04L HLA-DRB1*12:02L HLA-DRB1*04:08L HLA-DRB1*15:03L
GDKSVYYTSNPTT

SEQ ID NO: 10746 - protein, 13 aa, Severe acute respiratory syndrome coronavirus 2
  REGION 1..13: note = Table B: HLA-DQA1*05:01-B1*03:01L HLA-DRB1*13:02L HLA-DRB1*13:03L HLA-DRB1*01:03L HLA-DRB1*04:02L HLA-DRB1*04:04L HLA-DRB1*04:05L HLA-DQA1*01:02-B1*06:02L HLA-DRB1*01:02L HLA-DRB4*03:01NL HLA-DRB1*08:04L HLA-DRB1*08:77L HLA-DRB3*02:01L
  REGION 1..13: note = CONT. FROM ABOVE: HLA-DPA1*01:03-B1*03:01L HLA-DPA1*03:01-B1*04: 02L HLA-DRB1*03:01L HLA-DRB1*14:01L HLA-DRB1*11:03L HLA-DRB1*11: 04L HLA-DRB1*14:02L HLA-DQA1*01:01-B1*05:01L HLA-DRB1*08:01L HLA -DRB1*11:01L HLA-DRB5*01:01L HLA-DQA1*05:05-B1*03:19L
  REGION 1..13: note = CONT. FROM ABOVE: HLA-DRB1*13:01L HLA-DRB4*01:01L HLA-DPA1*01:03 -B1*04:01L HLA-DRB1*04:10L HLA-DRB1*09:01L HLA-DPA1*01:03-B1*04: 02L HLA-DRB1*12:01L HLA-DRB1*12:02L HLA-DRB3*01:01L HLA-DPA1*02: 01-B1*13:01L HLA-DPA1*03:01-B1*105:01L HLA-DRB1*14:54M
  REGION 1..13: note = CONT. FROM ABOVE: HLA-DQA1*05:05-B1*03:01L HLA-DRB1*14:17L HLA-D PA1*01:02-B1*04:01L HLA-DRB1*07:01L HLA-DRB1*10:01L HLA-DRB1*16: 01M HLA-DQA1*01:03-B1*06:01L HLA-DRB1*04:08L HLA-DRB1*08:03L HLA -DQA1*02:01-B1*03:03L HLA-DRB1*15:03L
NPTTFHLDGEVIT

SEQ ID NO: 10747 - protein, 12 aa, Severe acute respiratory syndrome coronavirus 2
  REGION 1..12: note = Table B: HLA-DQA1*05:01-B1*03:01L HLA-DRB1*13:02L HLA-DRB3*02:01L HLA-DPA1*03:01-B1*04:02L HLA-DRB1*11:03L HLA-DRB1*11:04L HLA-DRB1*12:02L HLA-DPA1*02:01-B1*13:01L HLA-DRB1*10:01L HLA-DRB1*08:03L
DGEVITFDNLKT

SEQ ID NO: 10748 - protein, 14 aa, Severe acute respiratory syndrome coronavirus 2
  REGION 1..14: note = Table B: HLA-DQA1*05:01-B1*03:01L HLA-DRB1*13:02L HLA-DRB1*04:04L HLA-DRB1*01:01L HLA-DRB1*14:01L HLA-DRB1*11:04L HLA-DRB1*08:01L HLA-DRB1*11:01L HLA-DRB3*01:01L HLA-DPA1*03:01-B1*105:01L HLA-DRB1*07:01L
  REGION 1..14: note = CONT. FROM ABOVE: HLA-DQA1*02:01-B1*03:03L
LKTLLSLREVRTIK

SEQ ID NO: 10749 - protein, 12 aa, Severe acute respiratory syndrome coronavirus 2
  REGION 1..12: note = Table B: HLA-DQA1*05:01-B1*03:01L HLA-DRB1*04:03L HLA-DQA1*05:05-B1*03:19L HLA-DPA1*03:01-B1*105:01L HLA-DQA1*05:05-B1*03:01L HLA-DQA1*02:01-B1*03:03L
EVRTIKVFTTVD

SEQ ID NO: 10750 - protein, 12 aa, Severe acute respiratory syndrome coronavirus 2
  REGION 1..12: note = Table B: HLA-DQA1*05:01-B1*03:01L HLA-DRB1*13:03L HLA-DRB1*01:03L HLA-DRB1*04:05L HLA-DQA1*01:02-B1*06:02L HLA-DRB1*01:02L HLA-DRB3*02:01L HLA-DPA1*01:03-B1*03:01L HLA-DPA1*03:01-B1*04:02L HLA-DRB1*14:01L
  REGION 1..12: note = CONT. FROM ABOVE: HLA-DQA1*01:01-B1*05:01L HLA-DQA1*05:05-B1*03: 19L HLA-DPA1*01:03-B1*04:01L HLA-DRB1*04:10L HLA-DPA1*01:03-B1*0 4:02L HLA-DRB1*12:01L HLA-DPA1*02:01-B1*13:01L HLA-DPA1*03:01-B1 *105:01L HLA-DPA1*01:03-B1*104:01L HLA-DQA1*05:05-B1*03:01L
  REGION 1..12: note = CONT. FROM ABOVE: HLA-DPA1*01:02-B1*04:01L HLA-DRB1*16:01L HLA-D RB1*04:08L HLA-DRB1*15:03L
TIKVFTTVDNIN

SEQ ID NO: 10751 - protein, 11 aa, Severe acute respiratory syndrome coronavirus 2
  REGION 1..11: note = Table B: HLA-DQA1*05:01-B1*03:01L HLA-DRB1*08:77L HLA-DRB3*02:01L HLA-DPA1*03:01-B1*04:02L HLA-DRB1*14:02L HLA-DRB1*09:01L HLA-DRB1*12:01L
KVFTTVDNINL

SEQ ID NO: 10752 - protein, 11 aa, Severe acute respiratory syndrome coronavirus 2
  REGION 1..11: note = Table B: HLA-DQA1*05:01-B1*03:01L HLA-DRB1*13:02L HLA-DRB1*04:05L HLA-DQA1*01:02-B1*06:02L HLA-DRB1*01:02L HLA-DPA1*01:03-B1*03:01L HLA-DRB1*14:01L HLA-DRB1*14:02L HLA-DQA1*01:01-B1*05:01L HLA-DQA1*05:05-B1*03:19L
  REGION 1..11: note = CONT. FROM ABOVE: HLA-DPA1*01:03-B1*04:02L HLA-DRB1*12:01L HLA-D PA1*03:01-B1*105:01L HLA-DQA1*05:05-B1*03:01L HLA-DPA1*01:02-B1* 04:01L HLA-DRB1*15:03L
TTVDNINLHTQ

SEQ ID NO: 10753 - protein, 11 aa, Severe acute respiratory syndrome coronavirus 2
  REGION 1..11: note = Table B: HLA-DQA1*05:01-B1*03:01L HLA-DRB1*13:02L HLA-DRB1*13:03L HLA-DRB1*01:03L HLA-DRB1*04:04L HLA-DRB1*04:05L HLA-DQA1*01:02-B1*06:02L HLA-DRB1*01:02L HLA-DRB4*03:01NL HLA-DPA1*01:03-B1*03:01L HLA-DPA1*03:01-B1*04:02L
  REGION 1..11: note = CONT. FROM ABOVE: HLA-DRB1*14:01L HLA-DQA1*01:01-B1*05:01L HLA-D RB1*04:10L HLA-DRB1*12:01L HLA-DPA1*02:01-B1*13:01L HLA-DPA1*03: 01-B1*105:01L HLA-DRB1*14:54L HLA-DQA1*05:05-B1*03:01L HLA-DPA1* 01:02-B1*04:01L HLA-DRB1*16:01L HLA-DQA1*01:03-B1*06:01L
  REGION 1..11: note = CONT. FROM ABOVE: HLA-DRB1*04:08L HLA-DRB1*15:03L
INLHTQVVDMS

SEQ ID NO: 10754 - protein, 11 aa, Severe acute respiratory syndrome coronavirus 2
  REGION 1..11: note = Table B: HLA-DQA1*05:01-B1*03:01L HLA-DRB1*04:01L HLA-DRB1*13:02L HLA-DRB1*13:03L HLA-DRB1*04:02L HLA-DRB1*04:04L HLA-DRB1*04:05L HLA-DQA1*01:02-B1*06:02L HLA-DRB1*01:02L HLA-DRB4*03:01NL HLA-DRB1*08:04L HLA-DRB1*08:77L HLA-DRB3*02:01L
  REGION 1..11: note = CONT. FROM ABOVE: HLA-DPA1*01:03-B1*03:01L HLA-DPA1*03:01-B1*04: 02L HLA-DRB1*14:01L HLA-DRB1*11:03L HLA-DRB1*11:04L HLA-DRB1*14: 02L HLA-DQA1*01:01-B1*05:01L HLA-DQA1*05:05-B1*03:19L HLA-DPA1*0 1:03-B1*04:01L HLA-DRB1*04:10L HLA-DPA1*01:03-B1*04:02L
  REGION 1..11: note = CONT. FROM ABOVE: HLA-DRB1*12:01L HLA-DPA1*02:01-B1*13:01L HLA-D RB1*14:54L HLA-DPA1*01:03-B1*104:01L HLA-DQA1*05:05-B1*03:01L HL A-DRB1*14:17L HLA-DRB1*10:01L HLA-DRB1*04:08L
LHTQVVDMSMT

SEQ ID NO: 10755 - protein, 11 aa, Severe acute respiratory syndrome coronavirus 2
  REGION 1..11: note = Table B: HLA-DQA1*05:01-B1*03:01L HLA-DRB1*13:02L HLA-DRB1*01:03L HLA-DRB4*03:01NL HLA-DPA1*03:01-B1*04:02L HLA-DRB1*14:01L HLA-DRB1*14:02L HLA-DQA1*05:05-B1*03:116L HLA-DPA1*01:03-B1*04:02L HLA-DRB1*12:01L
  REGION 1..11: note = CONT. FROM ABOVE: HLA-DPA1*02:01-B1*13:01L HLA-DPA1*03:01-B1*105 :01L HLA-DRB1*08:02L HLA-DRB1*15:03L
HTQVVDMSMTY

SEQ ID NO: 10756 - protein, 14 aa, Severe acute respiratory syndrome coronavirus 2
  REGION 1..14: note = Table B: HLA-DQA1*05:01-B1*03:01L HLA-DRB1*04:03L HLA-DQA1*01:02-B1*06:02L HLA-DRB1*01:02L HLA-DRB1*14:01L HLA-DPA1*03:01-B1*105:01L HLA-DQA1*05:05-B1*03:01L HLA-DRB1*07:01L HLA-DQA1*01:03-B1*06:01L
VVDMSMTYGQQFGP

SEQ ID NO: 10757 - protein, 12 aa, Severe acute respiratory syndrome coronavirus 2
  REGION 1..12: note = Table B: HLA-DQA1*05:01-B1*03:01L HLA-DRB1*04:03L HLA-DQA1*05:05-B1*03:19L HLA-DRB1*12:01L HLA-DQA1*03:01-B1*03:02L HLA-DQA1*05:05-B1*03:01L HLA-DQA1*01:03-B1*06:01L HLA-DQA1*02:01-B1*03:03L
MSMTYGQQFGPT

SEQ ID NO: 10758 - protein, 15 aa, Severe acute respiratory syndrome coronavirus 2
  REGION 1..15: note = Table B: HLA-DQA1*05:01-B1*03:01L HLA-DRB1*04:03L HLA-DRB1*04:05L HLA-DQA1*01:02-B1*06:02L HLA-DQA1*05:05-B1*03:19L HLA-DPA1*02:01-B1*13:01L HLA-DPA1*03:01-B1*105:01L HLA-DQA1*05:05-B1*03:01L
  REGION 1..15: note = CONT. FROM ABOVE: HLA-DRB1*16:01L HLA-DQA1*01:03-B1*06:01L
GQQFGPTYLDGADVT

SEQ ID NO: 10759 - protein, 11 aa, Severe acute respiratory syndrome coronavirus 2
  REGION 1..11: note = Table B: HLA-DQA1*05:01-B1*03:01L HLA-DQA1*01:02-B1*06:02L HLA-DQA1*05:05-B1*03:19L HLA-DQA1*05:05-B1*03:01L
LDGADVTKIKP

SEQ ID NO: 10760 - protein, 11 aa, Severe acute respiratory syndrome coronavirus 2
  REGION 1..11: note = Table B: HLA-DQA1*05:01-B1*03:01L
DGADVTKIKPH

SEQ ID NO: 10761 - protein, 12 aa, Severe acute respiratory syndrome coronavirus 2
  REGION 1..12: note = Table B: HLA-DQA1*05:01-B1*03:01L HLA-DRB1*04:03L HLA-DRB1*01:03L HLA-DQA1*01:02-B1*06:02L HLA-DRB1*01:02L HLA-DRB1*14:17L HLA-DRB1*04:08L
ADVTKIKPHNSH

SEQ ID NO: 10762 - protein, 12 aa, Severe acute respiratory syndrome coronavirus 2
  REGION 1..12: note = Table B: HLA-DQA1*05:01-B1*03:01L HLA-DRB1*04:03L HLA-DRB1*01:03L HLA-DRB1*04:02L HLA-DRB1*04:04L HLA-DRB1*04:05L HLA-DQA1*01:02-B1*06:02L HLA-DRB1*01:02L HLA-DRB1*14:01L HLA-DRB1*08:01L HLA-DRB1*04:10L HLA-DRB1*12:01L
  REGION 1..12: note = CONT. FROM ABOVE: HLA-DQA1*03:01-B1*03:02L HLA-DRB1*14:17L HLA-D RB1*16:01L HLA-DRB1*04:08L HLA-DQA1*02:01-B1*03:03L
VTKIKPHNSHEG

SEQ ID NO: 10763 - protein, 11 aa, Severe acute respiratory syndrome coronavirus 2
  REGION 1..11: note = Table B: HLA-DQA1*05:01-B1*03:01L HLA-DRB1*13:03L HLA-DRB1*01:03L HLA-DQA1*01:02-B1*06:02L HLA-DRB1*14:01L HLA-DPA1*03:01-B1*105:01L
KPHNSHEGKTF

SEQ ID NO: 10764 - protein, 14 aa, Severe acute respiratory syndrome coronavirus 2
  REGION 1..14: note = Table B: HLA-DQA1*05:01-B1*03:01L HLA-DRB1*04:05L HLA-DRB1*01:02L HLA-DPA1*01:03-B1*03:01L HLA-DQA1*01:01-B1*05:01L HLA-DRB1*08:01L HLA-DPA1*02:01-B1*13:01L HLA-DPA1*03:01-B1*105:01L
  REGION 1..14: note = CONT. FROM ABOVE: HLA-DQA1*05:05-B1*03:01L HLA-DRB1*16:01L HLA-D RB1*04:08L
SHEGKTFYVLPNDD

SEQ ID NO: 10765 - protein, 12 aa, Severe acute respiratory syndrome coronavirus 2
  REGION 1..12: note = Table B: HLA-DQA1*05:01-B1*03:01L HLA-DRB1*13:03L HLA-DRB1*01:03L HLA-DRB1*04:04L HLA-DQA1*01:02-B1*06:02L HLA-DRB1*01:02L HLA-DRB4*03:01NL HLA-DPA1*01:03-B1*03:01L HLA-DQA1*01:01-B1*05:01L HLA-DRB1*08:01L HLA-DRB1*12:01L
  REGION 1..12: note = CONT. FROM ABOVE: HLA-DRB1*12:02L HLA-DPA1*02:01-B1*13:01L HLA-D PA1*03:01-B1*105:01L HLA-DRB1*14:54L HLA-DQA1*05:05-B1*03:01L HL A-DRB1*10:01L HLA-DQA1*01:03-B1*06:01L HLA-DRB1*04:08L HLA-DRB1* 08:03L HLA-DRB1*15:03L
GKTFYVLPNDDT

SEQ ID NO: 10766 - protein, 10 aa, Severe acute respiratory syndrome coronavirus 2
  REGION 1..10: note = Table B: HLA-DQA1*05:01-B1*03:01L HLA-DRB1*13:03L HLA-DRB1*01:03L HLA-DQA1*01:02-B1*06:02M HLA-DRB1*08:77L HLA-DPA1*01:03-B1*03:01L HLA-DRB1*03:01L HLA-DRB1*14:02L HLA-DQA1*01-B1*05L HLA-DQA1*05:05-B1*03:19L
  REGION 1..10: note = CONT. FROM ABOVE: HLA-DQA1*05:01-B1*02:01L HLA-DRB4*01:01L HLA-D PA1*01:03-B1*04:01L HLA-DQA1*05:05-B1*03:116L HLA-DPA1*01:03-B1* 04:02L HLA-DPA1*02:01-B1*13:01L HLA-DPA1*03:01-B1*105:01L HLA-DP A1*01:03-B1*104:01L HLA-DRB1*10:01L HLA-DRB1*16:01L
  REGION 1..10: note = CONT. FROM ABOVE: HLA-DQA1*01:03-B1*06:01L HLA-DQA1*02:01-B1*03: 03L HLA-DRB1*15:03L
DTLRVEAFEY

SEQ ID NO: 10767 - protein, 13 aa, Severe acute respiratory syndrome coronavirus 2
  REGION 1..13: note = Table B: HLA-DQA1*05:01-B1*03:01L HLA-DRB1*13:03L HLA-DRB1*01:03L HLA-DRB1*04:02L HLA-DRB1*04:05L HLA-DQA1*01:02-B1*06:02L HLA-DRB1*01:02L HLA-DRB4*03:01NL HLA-DRB1*08:04L HLA-DPA1*01:03-B1*03:01L
  REGION 1..13: note = CONT. FROM ABOVE: HLA-DPA1*03:01-B1*04:02L HLA-DRB1*14:01L HLA-D QA1*01:01-B1*05:01L HLA-DRB1*08:01L HLA-DQA1*05:05-B1*03:19L HLA -DQA1*05:01-B1*02:01L HLA-DPA1*01:03-B1*04:01L HLA-DRB1*04:10L H LA-DPA1*01:03-B1*04:02L HLA-DRB1*12:01L HLA-DPA1*02:01-B1*13:01L
  REGION 1..13: note = CONT. FROM ABOVE: HLA-DRB1*14:54L HLA-DQA1*05:05-B1*03:01L HLA-D RB1*14:17L HLA-DRB1*16:01L HLA-DQA1*01:03-B1*06:01L HLA-DRB1*04: 08L HLA-DRB1*08:03L HLA-DRB1*15:03L
VEAFEYYHTTDPS

SEQ ID NO: 10768 - protein, 10 aa, Severe acute respiratory syndrome coronavirus 2
  REGION 1..10: note = Table B: HLA-DQA1*05:01-B1*03:01L HLA-DRB1*04:01L HLA-DRB1*13:02H HLA-DRB1*13:03H HLA-DRB1*01:03L HLA-DRB1*04:02L HLA-DRB1*04:04L HLA-DQA1*01:02-B1*06:02L HLA-DRB1*01:01M HLA-DRB4*03:01NM HLA-DRB3*02:01M HLA-DRB1*03:01L HLA-DRB1*14:01M
  REGION 1..10: note = CONT. FROM ABOVE: HLA-DRB1*11:04M HLA-DRB1*14:02L HLA-DRB1*08:01 H HLA-DRB1*11:01L HLA-DRB5*01:01M HLA-DRB4*02:01NL HLA-DRB1*13:0 1L HLA-DPA1*01:03-B1*04:01L HLA-DPA1*01:03-B1*04:02M HLA-DRB1*12 :01H HLA-DRB1*12:02M HLA-DRB3*01:01L HLA-DPA1*03:01-B1*105:01L
  REGION 1..10: note = CONT. FROM ABOVE: HLA-DQA1*03:01-B1*03:02M HLA-DRB1*14:54L HLA-D QA1*05:05-B1*03:01H HLA-DRB1*14:17L HLA-DRB1*16:01L HLA-DQA1*01: 03-B1*06:01L HLA-DRB1*08:02L HLA-DRB1*08:03L HLA-DQA1*02:01-B1*0 3:03L HLA-DRB1*15:01M
HTTDPSFLGR

SEQ ID NO: 10769 - protein, 14 aa, Severe acute respiratory syndrome coronavirus 2
  REGION 1..14: note = Table B: HLA-DQA1*05:01-B1*03:01L HLA-DQA1*05:05-B1*03:01L HLA-DQA1*02:01-B1*03:03L
TDPSFLGRYMSALN

SEQ ID NO: 10770 - protein, 15 aa, Severe acute respiratory syndrome coronavirus 2
  REGION 1..15: note = Table B: HLA-DQA1*05:01-B1*03:01L HLA-DRB1*04:03L HLA-DRB1*13:02L HLA-DRB1*04:02L HLA-DRB1*04:04L HLA-DRB1*04:05L HLA-DRB1*08:04L HLA-DPA1*01:03-B1*03:01L HLA-DRB1*14:01L HLA-DRB1*11:04L HLA-DRB1*11:01L HLA-DQA1*01-B1*05L
  REGION 1..15: note = CONT. FROM ABOVE: HLA-DRB3*01:01L HLA-DPA1*02:01-B1*13:01L HLA-D QA1*03:01-B1*03:02L HLA-DPA1*01:03-B1*02:01L
DPSFLGRYMSALNHT

SEQ ID NO: 10771 - protein, 12 aa, Severe acute respiratory syndrome coronavirus 2
  REGION 1..12: note = Table B: HLA-DQA1*05:01-B1*03:01L HLA-DRB1*04:03L HLA-DRB1*04:02L HLA-DRB1*04:04L HLA-DRB1*04:05L HLA-DQA1*01:02-B1*06:02L HLA-DRB1*01:01L HLA-DRB1*14:01L HLA-DRB1*11:04L HLA-DRB1*11:01L HLA-DRB3*01:01L
  REGION 1..12: note = CONT. FROM ABOVE: HLA-DPA1*01:02-B1*04:01L HLA-DRB1*07:01L HLA-D RB1*15:03L
GRYMSALNHTKK

SEQ ID NO: 10772 - protein, 10 aa, Severe acute respiratory syndrome coronavirus 2
  REGION 1..10: note = Table B: HLA-DQA1*05:01-B1*03:01L HLA-DRB1*13:03L HLA-DRB1*01:03L HLA-DQA1*01:02-B1*06:02L HLA-DRB1*08:77L HLA-DRB1*14:02L HLA-DQA1*05:05-B1*03:19L HLA-DQA1*05:01-B1*02:01L HLA-DRB4*01:01L
  REGION 1..10: note = CONT. FROM ABOVE: HLA-DPA1*01:03-B1*04:01L HLA-DPA1*01:03-B1*04: 02L HLA-DPA1*02:01-B1*13:01L HLA-DPA1*03:01-B1*105:01L HLA-DQA1* 01:03-B1*06:01L HLA-DQA1*02:01-B1*03:03L HLA-DRB1*15:03L
QVNGLTSIKW

SEQ ID NO: 10773 - protein, 11 aa, Severe acute respiratory syndrome coronavirus 2
  REGION 1..11: note = Table B: HLA-DQA1*05:01-B1*03:01L HLA-DRB1*04:02L HLA-DPA1*03:01-B1*04:02L HLA-DQA1*05:01-B1*02:01L HLA-DPA1*01:03-B1*04:02L HLA-DQA1*05:05-B1*03:01L HLA-DRB1*14:17L HLA-DRB1*16:01L
GLTSIKWADNN

SEQ ID NO: 10774 - protein, 12 aa, Severe acute respiratory syndrome coronavirus 2
  REGION 1..12: note = Table B: HLA-DQA1*05:01-B1*03:01L HLA-DQA1*05:05-B1*03:01L HLA-DQA1*02:01-B1*03:03L
LATALLTLQQIE

SEQ ID NO: 10775 - protein, 10 aa, Severe acute respiratory syndrome coronavirus 2
  REGION 1..10: note = Table B: HLA-DQA1*05:01-B1*03:01L HLA-DRB1*13:03L HLA-DRB1*01:03L HLA-DQA1*01:02-B1*06:02L HLA-DRB1*08:77L HLA-DPA1*01:03-B1*03:01L HLA-DRB1*03:01L HLA-DRB1*11:02L HLA-DRB1*14:02L HLA-DQA1*01-B1*05L HLA-DQA1*05:05-B1*03:19M
  REGION 1..10: note = CONT. FROM ABOVE: HLA-DQA1*05:01-B1*02:01L HLA-DRB4*01:01L HLA-D PA1*01:03-B1*04:01L HLA-DQA1*05:05-B1*03:116L HLA-DPA1*01:03-B1* 04:02L HLA-DRB1*12:01L HLA-DPA1*03:01-B1*105:01L HLA-DPA1*01:03- B1*104:01L HLA-DRB1*10:01L HLA-DRB1*16:01L
  REGION 1..10: note = CONT. FROM ABOVE: HLA-DQA1*02:01-B1*03:03L HLA-DRB1*15:03L
FNPPALQDAY

SEQ ID NO: 10776 - protein, 11 aa, Severe acute respiratory syndrome coronavirus 2
  REGION 1..11: note = Table B: HLA-DQA1*05:01-B1*03:01L HLA-DRB1*13:03L HLA-DRB1*04:02L HLA-DRB1*04:05L HLA-DQA1*01:02-B1*06:02L HLA-DRB1*01:02L HLA-DRB4*03:01NL HLA-DRB1*08:01L HLA-DQA1*05:05-B1*03:19L HLA-DRB1*12:01L
  REGION 1..11: note = CONT. FROM ABOVE: HLA-DQA1*05:05-B1*03:01L HLA-DRB1*14:17L HLA-D QA1*01:03-B1*06:01L HLA-DRB1*04:08L HLA-DRB1*15:03L
YYRARAGEAAN

SEQ ID NO: 10777 - protein, 10 aa, Severe acute respiratory syndrome coronavirus 2
  REGION 1..10: note = Table B: HLA-DQA1*05:01-B1*03:01L HLA-DRB1*13:02L HLA-DRB1*13:03L HLA-DRB1*01:03M HLA-DQA1*01:02-B1*06:02L HLA-DRB1*08:77L HLA-DRB1*03:01L HLA-DRB1*14:01L HLA-DRB1*14:02L HLA-DRB1*11:01L HLA-DQA1*05:01-B1*02:01L
  REGION 1..10: note = CONT. FROM ABOVE: HLA-DPA1*01:03-B1*04:01L HLA-DPA1*01:03-B1*04: 02L HLA-DRB1*12:01L HLA-DPA1*02:01-B1*13:01L HLA-DPA1*03:01-B1*1 05:01L HLA-DQA1*03:01-B1*03:02L HLA-DRB1*16:01L HLA-DQA1*01:03-B 1*06:01L HLA-DRB1*08:02L HLA-DQA1*02:01-B1*03:03M
  REGION 1..10: note = CONT. FROM ABOVE: HLA-DRB1*15:03L
RARAGEAANF

SEQ ID NO: 10778 - protein, 12 aa, Severe acute respiratory syndrome coronavirus 2
  REGION 1..12: note = Table B: HLA-DQA1*05:01-B1*03:01L HLA-DRB1*04:03L HLA-DRB1*04:02L HLA-DRB1*01:02L HLA-DRB1*14:01L HLA-DQA1*01-B1*05L HLA-DRB1*12:01L HLA-DPA1*03:01-B1*105:01L HLA-DQA1*05:05-B1*03:01L HLA-DRB1*14:17L HLA-DRB1*16:01L
  REGION 1..12: note = CONT. FROM ABOVE: HLA-DQA1*02:01-B1*03:03L
ALILAYCNKTVG

SEQ ID NO: 10779 - protein, 14 aa, Severe acute respiratory syndrome coronavirus 2
  REGION 1..14: note = Table B: HLA-DQA1*05:01-B1*03:01L HLA-DRB1*13:02L HLA-DRB1*01:03L HLA-DQA1*05:05-B1*03:19L HLA-DPA1*01:03-B1*04:02L HLA-DRB1*12:01L HLA-DPA1*02:01-B1*13:01L HLA-DQA1*05:05-B1*03:01L
  REGION 1..14: note = CONT. FROM ABOVE: HLA-DRB1*16:01L HLA-DRB1*04:08L HLA-DQA1*02:01 -B1*03:03L
LILAYCNKTVGELG

SEQ ID NO: 10780 - protein, 11 aa, Severe acute respiratory syndrome coronavirus 2
  REGION 1..11: note = Table B: HLA-DQA1*05:01-B1*03:01L HLA-DRB1*04:03L HLA-DRB1*13:02L HLA-DRB1*01:03L HLA-DRB4*03:01NL HLA-DPA1*03:01-B1*04:02L HLA-DRB1*14:02L HLA-DQA1*05:05-B1*03:116L HLA-DPA1*01:03-B1*04:02L
  REGION 1..11: note = CONT. FROM ABOVE: HLA-DPA1*02:01-B1*13:01L HLA-DPA1*03:01-B1*105 :01L HLA-DPA1*01:02-B1*04:01L HLA-DRB1*08:02L HLA-DQA1*02:01-B1* 03:03L HLA-DRB1*15:03L
ELGDVRETMSY

SEQ ID NO: 10781 - protein, 13 aa, Severe acute respiratory syndrome coronavirus 2
  REGION 1..13: note = Table B: HLA-DQA1*05:01-B1*03:01L HLA-DRB1*04:03L HLA-DRB1*13:02L HLA-DRB3*02:01L HLA-DPA1*03:01-B1*04:02L HLA-DQA1*02:01-B1*03:03L
LGDVRETMSYLFQ

SEQ ID NO: 10782 - protein, 14 aa, Severe acute respiratory syndrome coronavirus 2
  REGION 1..14: note = Table B: HLA-DQA1*05:01-B1*03:01L HLA-DRB1*04:03L HLA-DRB1*13:02L HLA-DRB1*01:03L HLA-DRB1*04:05L HLA-DRB3*02:01L HLA-DPA1*01:03-B1*03:01L HLA-DRB1*14:01L HLA-DQA1*01-B1*05L HLA-DQA1*05:05-B1*03:19L HLA-DQA1*05:01-B1*02:01L
  REGION 1..14: note = CONT. FROM ABOVE: HLA-DPA1*01:03-B1*104:01L HLA-DQA1*05:05-B1*03 :01L HLA-DRB1*04:08L
DVRETMSYLFQHAN

SEQ ID NO: 10783 - protein, 13 aa, Severe acute respiratory syndrome coronavirus 2
  REGION 1..13: note = Table B: HLA-DQA1*05:01-B1*03:01L HLA-DRB1*01:02L HLA-DRB1*08:04L HLA-DPA1*01:03-B1*03:01L HLA-DQA1*05:01-B1*02:01L HLA-DPA1*01:03-B1*04:02L HLA-DRB1*12:01L HLA-DPA1*02:01-B1*13:01L
  REGION 1..13: note = CONT. FROM ABOVE: HLA-DQA1*05:05-B1*03:01L HLA-DRB1*16:01L HLA-D RB1*04:08L
ETMSYLFQHANLD

SEQ ID NO: 10784 - protein, 12 aa, Severe acute respiratory syndrome coronavirus 2
  REGION 1..12: note = Table B: HLA-DQA1*05:01-B1*03:01L HLA-DRB1*04:04L HLA-DQA1*01:02-B1*06:02L HLA-DRB1*01:02L HLA-DRB1*08:04L HLA-DRB1*08:01L HLA-DQA1*05:01-B1*02:01L HLA-DRB1*12:01L HLA-DPA1*02:01-B1*13:01L HLA-DPA1*03:01-B1*105:01L
  REGION 1..12: note = CONT. FROM ABOVE: HLA-DQA1*05:05-B1*03:01L HLA-DPA1*01:02-B1*04: 01L HLA-DRB1*10:01L HLA-DRB1*08:03L HLA-DRB1*15:03L
MSYLFQHANLDS

SEQ ID NO: 10785 - protein, 14 aa, Severe acute respiratory syndrome coronavirus 2
  REGION 1..14: note = Table B: HLA-DQA1*05:01-B1*03:01L HLA-DRB1*04:01L HLA-DRB1*13:02L HLA-DRB1*04:04L HLA-DRB1*01:01L HLA-DRB1*14:01L HLA-DRB1*11:04L HLA-DPA1*02:01-B1*13:01L
SYLFQHANLDSCKR

SEQ ID NO: 10786 - protein, 12 aa, Severe acute respiratory syndrome coronavirus 2
  REGION 1..12: note = Table B: HLA-DQA1*05:01-B1*03:01L HLA-DRB1*04:02L HLA-DQA1*01:02-B1*06:02L HLA-DRB4*03:01NL HLA-DQA1*05:01-B1*02:01L HLA-DRB1*14:54L HLA-DQA1*05:05-B1*03:01L HLA-DRB1*14:17L
  REGION 1..12: note = CONT. FROM ABOVE: HLA-DQA1*01:03-B1*06:01L HLA-DQA1*02:01-B1*03: 03L
GQQQTTLKGVEA

SEQ ID NO: 10787 - protein, 13 aa, Severe acute respiratory syndrome coronavirus 2
  REGION 1..13: note = Table B: HLA-DQA1*05:01-B1*03:01L HLA-DPA1*01:03-B1*03:01L HLA-DPA1*03:01-B1*04:02L HLA-DPA1*01:03-B1*04:02L HLA-DRB1*12:01L HLA-DQA1*05:05-B1*03:01L HLA-DQA1*02:01-B1*03:03L HLA-DRB1*15:03L
LKGVEAVMYMGTL

SEQ ID NO: 10788 - protein, 10 aa, Severe acute respiratory syndrome coronavirus 2
  REGION 1..10: note = Table B: HLA-DQA1*05:01-B1*03:01L HLA-DRB1*13:03L HLA-DQA1*01:02-B1*06:02L HLA-DRB1*08:77L HLA-DPA1*01:03-B1*03:01L HLA-DRB1*03:01L HLA-DRB1*11:02L HLA-DRB1*14:02L HLA-DQA1*01-B1*05L HLA-DQA1*05:05-B1*03:19M
  REGION 1..10: note = CONT. FROM ABOVE: HLA-DQA1*05:01-B1*02:01L HLA-DRB4*01:01L HLA-D PA1*01:03-B1*04:01L HLA-DQA1*05:05-B1*03:116L HLA-DRB1*12:01L HL A-DPA1*03:01-B1*105:01L HLA-DPA1*01:03-B1*104:01L HLA-DRB1*10:01 L HLA-DRB1*16:01L HLA-DQA1*02:01-B1*03:03L HLA-DRB1*15:03L
AVMYMGTLSY

SEQ ID NO: 10789 - protein, 11 aa, Severe acute respiratory syndrome coronavirus 2
  REGION 1..11: note = Table B: HLA-DQA1*05:01-B1*03:01L HLA-DRB1*04:03L HLA-DPA1*03:01-B1*04:02L HLA-DPA1*01:03-B1*04:02L HLA-DRB1*12:01L HLA-DQA1*03:01-B1*03:02L HLA-DQA1*05:05-B1*03:01L
YMGTLSYEQFK

SEQ ID NO: 10790 - protein, 11 aa, Severe acute respiratory syndrome coronavirus 2
  REGION 1..11: note = Table B: HLA-DQA1*05:01-B1*03:01L HLA-DRB1*04:03L HLA-DRB1*13:02L HLA-DRB1*13:03L HLA-DRB1*04:02L HLA-DRB1*04:05L HLA-DQA1*01:02-B1*06:02L HLA-DRB1*01:02L HLA-DPA1*01:03-B1*03:01L HLA-DRB1*14:01L HLA-DRB1*11:04L
  REGION 1..11: note = CONT. FROM ABOVE: HLA-DRB1*08:01L HLA-DRB1*11:01L HLA-DQA1*01-B1 *05L HLA-DPA1*01:03-B1*04:02L HLA-DRB1*12:01L HLA-DRB3*01:01L HL A-DPA1*02:01-B1*13:01L HLA-DPA1*01:03-B1*02:01L HLA-DRB1*14:17L HLA-DRB1*15:03L
GTLSYEQFKKG

SEQ ID NO: 10791 - protein, 12 aa, Severe acute respiratory syndrome coronavirus 2
  REGION 1..12: note = Table B: HLA-DQA1*05:01-B1*03:01L HLA-DRB1*04:03L HLA-DRB1*13:02L HLA-DRB1*04:02L HLA-DRB1*04:04L HLA-DRB1*04:05L HLA-DPA1*01:03-B1*03:01L HLA-DRB3*01:01L HLA-DPA1*02:01-B1*13:01L HLA-DRB1*08:03L HLA-DRB1*15:03L
TLSYEQFKKGVQ

SEQ ID NO: 10792 - protein, 13 aa, Severe acute respiratory syndrome coronavirus 2
  REGION 1..13: note = Table B: HLA-DQA1*05:01-B1*03:01L HLA-DRB1*01:02L HLA-DPA1*03:01-B1*105:01L HLA-DQA1*05:05-B1*03:01L HLA-DRB1*16:01L HLA-DQA1*02:01-B1*03:03L
YEQFKKGVQIPCT

SEQ ID NO: 10793 - protein, 14 aa, Severe acute respiratory syndrome coronavirus 2
  REGION 1..14: note = Table B: HLA-DQA1*05:01-B1*03:01L HLA-DQA1*05:05-B1*03:19L HLA-DQA1*02:01-B1*03:03L
GTFTCASEYTGNYQ

SEQ ID NO: 10794 - protein, 13 aa, Severe acute respiratory syndrome coronavirus 2
  REGION 1..13: note = Table B: HLA-DQA1*05:01-B1*03:01L HLA-DRB1*13:02L HLA-DRB1*04:04L HLA-DRB1*04:05L HLA-DPA1*01:03-B1*03:01L HLA-DRB1*14:01L HLA-DRB1*11:04L HLA-DRB3*01:01L HLA-DPA1*02:01-B1*13:01L HLA-DQA1*02:01-B1*03:03L
TGNYQCGHYKHIT

SEQ ID NO: 10795 - protein, 11 aa, Severe acute respiratory syndrome coronavirus 2
  REGION 1..11: note = Table B: HLA-DQA1*05:01-B1*03:01L HLA-DRB1*04:03L HLA-DRB1*13:02L HLA-DRB1*13:03L HLA-DRB1*04:02L HLA-DRB4*03:01NL HLA-DRB1*14:01L HLA-DRB1*12:01L HLA-DRB1*14:17L HLA-DRB1*15:03L
GHYKHITSKET

SEQ ID NO: 10796 - protein, 10 aa, Severe acute respiratory syndrome coronavirus 2
  REGION 1..10: note = Table B: HLA-DQA1*05:01-B1*03:01L HLA-DRB1*08:01L HLA-DQA1*01-B1*05L HLA-DQA1*03:01-B1*03:02L HLA-DPA1*01:02-B1*04:01L HLA-DRB1*16:01L HLA-DQA1*02:01-B1*03:03L
YKHITSKETL

SEQ ID NO: 10797 - protein, 10 aa, Severe acute respiratory syndrome coronavirus 2
  REGION 1..10: note = Table B: HLA-DQA1*05:01-B1*03:01L HLA-DRB1*13:02L HLA-DRB1*13:03L HLA-DRB1*01:03M HLA-DQA1*01:02-B1*06:02L HLA-DRB1*08:77L HLA-DPA1*01:03-B1*03:01L HLA-DRB1*03:01L HLA-DRB1*14:01L HLA-DRB1*14:02L HLA-DRB1*11:01L
  REGION 1..10: note = CONT. FROM ABOVE: HLA-DQA1*05:05-B1*03:19L HLA-DQA1*05:01-B1*02: 01L HLA-DPA1*01:03-B1*04:01L HLA-DPA1*01:03-B1*04:02L HLA-DRB1*1 2:01L HLA-DPA1*03:01-B1*105:01L HLA-DRB1*16:01L HLA-DQA1*01:03-B 1*06:01L HLA-DRB1*08:02L HLA-DQA1*02:01-B1*03:03M
  REGION 1..10: note = CONT. FROM ABOVE: HLA-DRB1*15:03L
KHITSKETLY

SEQ ID NO: 10798 - protein, 13 aa, Severe acute respiratory syndrome coronavirus 2
  REGION 1..13: note = Table B: HLA-DQA1*05:01-B1*03:01L HLA-DRB1*04:03L HLA-DRB1*04:02L HLA-DRB1*04:05L HLA-DQA1*01:02-B1*06:02L HLA-DRB1*01:01L HLA-DRB1*08:04L HLA-DRB1*14:02L HLA-DQA1*05:01-B1*02:01L HLA-DRB3*01:01L HLA-DRB1*14:17L
  REGION 1..13: note = CONT. FROM ABOVE: HLA-DPA1*01:02-B1*04:01L HLA-DRB1*10:01L HLA-D RB1*04:08L
ETLYCIDGALLTK

SEQ ID NO: 10799 - protein, 10 aa, Severe acute respiratory syndrome coronavirus 2
  REGION 1..10: note = Table B: HLA-DQA1*05:01-B1*03:01L HLA-DQA1*03:01-B1*03:02L HLA-DQA1*01:03-B1*06:01L HLA-DQA1*02:01-B1*03:03L
DGALLTKSSE

SEQ ID NO: 10800 - protein, 10 aa, Severe acute respiratory syndrome coronavirus 2
  REGION 1..10: note = Table B: HLA-DQA1*05:01-B1*03:01L HLA-DQA1*01:02-B1*06:02L HLA-DRB1*14:02L HLA-DQA1*05:05-B1*03:19L HLA-DQA1*05:01-B1*02:01L HLA-DPA1*03:01-B1*105:01L HLA-DQA1*01:03-B1*06:01L HLA-DQA1*02:01-B1*03:03L
GALLTKSSEY

SEQ ID NO: 10801 - protein, 10 aa, Severe acute respiratory syndrome coronavirus 2
  REGION 1..10: note = Table B: HLA-DQA1*05:01-B1*03:01L HLA-DRB1*01:03L HLA-DQA1*01:02-B1*06:02L HLA-DRB1*08:77L HLA-DPA1*01:03-B1*03:01L HLA-DRB1*03:01L HLA-DRB1*14:02L HLA-DQA1*01-B1*05L HLA-DQA1*05:05-B1*03:19L
  REGION 1..10: note = CONT. FROM ABOVE: HLA-DQA1*05:01-B1*02:01L HLA-DPA1*01:03-B1*04: 01L HLA-DPA1*01:03-B1*04:02L HLA-DPA1*02:01-B1*13:01L HLA-DPA1*0 3:01-B1*105:01L HLA-DPA1*01:03-B1*104:01L HLA-DRB1*16:01L HLA-DQ A1*01:03-B1*06:01L HLA-DQA1*02:01-B1*03:03L
YKGPITDVFY

SEQ ID NO: 10802 - protein, 14 aa, Severe acute respiratory syndrome coronavirus 2
  REGION 1..14: note = Table B: HLA-DQA1*05:01-B1*03:01L HLA-DRB1*01:03L HLA-DRB1*04:02L HLA-DRB1*04:05L HLA-DRB1*01:02L HLA-DRB1*08:04L HLA-DQA1*01:01-B1*05:01L HLA-DRB1*08:01L HLA-DPA1*01:03-B1*04:01L HLA-DPA1*01:03-B1*04:02L
  REGION 1..14: note = CONT. FROM ABOVE: HLA-DRB1*12:01L HLA-DPA1*02:01-B1*13:01L HLA-D QA1*05:05-B1*03:01L HLA-DRB1*04:08L
GPITDVFYKENSYT

SEQ ID NO: 10803 - protein, 14 aa, Severe acute respiratory syndrome coronavirus 2
  REGION 1..14: note = Table B: HLA-DQA1*05:01-B1*03:01L HLA-DRB1*13:02L HLA-DRB1*01:03L HLA-DRB1*04:05L HLA-DQA1*01:02-B1*06:02L HLA-DRB1*01:02L HLA-DPA1*01:03-B1*03:01L HLA-DRB1*08:01L HLA-DRB1*12:01L HLA-DPA1*03:01-B1*105:01L
  REGION 1..14: note = CONT. FROM ABOVE: HLA-DQA1*05:05-B1*03:01L HLA-DPA1*01:02-B1*04: 01L HLA-DRB1*16:01L HLA-DRB1*04:08L HLA-DRB1*15:03L
VFYKENSYTTTIKP

SEQ ID NO: 10804 - protein, 10 aa, Severe acute respiratory syndrome coronavirus 2
  REGION 1..10: note = Table B: HLA-DQA1*05:01-B1*03:01L HLA-DRB1*04:03L HLA-DRB1*13:02L HLA-DRB1*13:03L HLA-DRB1*01:03L HLA-DRB1*04:02L HLA-DQA1*01:02-B1*06:02L HLA-DRB1*01:01L HLA-DRB4*03:01NL HLA-DRB3*02:01L HLA-DRB1*14:01L HLA-DRB1*11:04L HLA-DRB1*08:01L
  REGION 1..10: note = CONT. FROM ABOVE: HLA-DRB5*01:01L HLA-DPA1*01:03-B1*04:02L HLA-D RB1*12:01L HLA-DRB1*12:02L HLA-DPA1*03:01-B1*105:01L HLA-DQA1*03 :01-B1*03:02M HLA-DRB1*14:54L HLA-DQA1*05:05-B1*03:01L HLA-DRB1* 14:17L HLA-DPA1*01:02-B1*04:01L HLA-DRB1*16:01L
  REGION 1..10: note = CONT. FROM ABOVE: HLA-DQA1*01:03-B1*06:01L HLA-DQA1*02:01-B1*03: 03L
TTTIKPVTYK

SEQ ID NO: 10805 - protein, 14 aa, Severe acute respiratory syndrome coronavirus 2
  REGION 1..14: note = Table B: HLA-DQA1*05:01-B1*03:01L HLA-DRB1*13:02L HLA-DRB1*01:03L HLA-DRB1*04:04L HLA-DPA1*01:03-B1*03:01L HLA-DRB1*14:01L HLA-DRB1*14:02L HLA-DQA1*01:01-B1*05:01L HLA-DRB1*08:01L HLA-DQA1*05:05-B1*03:19L HLA-DRB1*04:10L
  REGION 1..14: note = CONT. FROM ABOVE: HLA-DRB1*12:01L HLA-DRB1*14:17L HLA-DRB1*04:08 L
DGVVCTEIDPKLDN

SEQ ID NO: 10806 - protein, 16 aa, Severe acute respiratory syndrome coronavirus 2
  REGION 1..16: note = Table B: HLA-DQA1*05:01-B1*03:01L HLA-DRB1*04:01L HLA-DRB1*04:04L HLA-DRB1*11:02L HLA-DRB1*11:03L HLA-DPA1*01:03-B1*104:01L HLA-DRB1*10:01L HLA-DRB1*08:02L
LDNYYKKDNSYFTEQP

SEQ ID NO: 10807 - protein, 13 aa, Severe acute respiratory syndrome coronavirus 2
  REGION 1..13: note = Table B: HLA-DQA1*05:01-B1*03:01L HLA-DRB1*13:02L HLA-DRB1*01:03L HLA-DRB1*01:02L HLA-DRB1*08:77L HLA-DPA1*01:03-B1*03:01L HLA-DRB1*14:01L HLA-DQA1*01:01-B1*05:01L HLA-DRB1*08:01L HLA-DRB1*04:10L
  REGION 1..13: note = CONT. FROM ABOVE: HLA-DPA1*01:03-B1*04:02L HLA-DRB1*07:01L HLA-D RB1*04:08L
KDNSYFTEQPIDL

SEQ ID NO: 10808 - protein, 12 aa, Severe acute respiratory syndrome coronavirus 2
  REGION 1..12: note = Table B: HLA-DQA1*05:01-B1*03:01L HLA-DRB1*13:02L HLA-DRB1*04:04L HLA-DQA1*01:02-B1*06:02L HLA-DRB1*01:02L HLA-DRB1*08:04L HLA-DPA1*01:03-B1*03:01L HLA-DPA1*03:01-B1*04:02L HLA-DQA1*05:05-B1*03:19L
  REGION 1..12: note = CONT. FROM ABOVE: HLA-DPA1*01:03-B1*04:02L HLA-DPA1*03:01-B1*105 :01L HLA-DQA1*05:05-B1*03:01L HLA-DPA1*01:02-B1*04:01L HLA-DRB1* 10:01L HLA-DQA1*01:03-B1*06:01L HLA-DRB1*15:03L
YFTEQPIDLVPN

SEQ ID NO: 10809 - protein, 13 aa, Severe acute respiratory syndrome coronavirus 2
  REGION 1..13: note = Table B: HLA-DQA1*05:01-B1*03:01L HLA-DQA1*01:02-B1*06:02L HLA-DPA1*01:03-B1*03:01L HLA-DQA1*05:05-B1*03:19L HLA-DPA1*03:01-B1*105:01L HLA-DQA1*05:05-B1*03:01L HLA-DQA1*01:03-B1*06:01L
FTEQPIDLVPNQP

SEQ ID NO: 10810 - protein, 11 aa, Severe acute respiratory syndrome coronavirus 2
  REGION 1..11: note = Table B: HLA-DQA1*05:01-B1*03:01L HLA-DRB1*13:03L HLA-DRB1*08:77L HLA-DPA1*03:01-B1*04:02L HLA-DRB1*14:01L HLA-DRB1*14:02L HLA-DPA1*01:03-B1*04:01L HLA-DQA1*05:05-B1*03:116L HLA-DPA1*01:02-B1*04:01L
  REGION 1..11: note = CONT. FROM ABOVE: HLA-DRB1*08:03L
QPYPNASFDNF

SEQ ID NO: 10811 - protein, 11 aa, Severe acute respiratory syndrome coronavirus 2
  REGION 1..11: note = Table B: HLA-DQA1*05:01-B1*03:01L HLA-DPA1*03:01-B1*105:01L
NIKFADDLNQL

SEQ ID NO: 10812 - protein, 11 aa, Severe acute respiratory syndrome coronavirus 2
  REGION 1..11: note = Table B: HLA-DQA1*05:01-B1*03:01L HLA-DRB1*13:03L HLA-DRB1*01:03L HLA-DRB1*04:05L HLA-DQA1*01:02-B1*06:02L HLA-DPA1*03:01-B1*04:02L HLA-DRB1*11:03L HLA-DQA1*05:05-B1*03:116L HLA-DPA1*01:03-B1*04:02L
  REGION 1..11: note = CONT. FROM ABOVE: HLA-DRB1*12:01L HLA-DRB1*15:03L
FADDLNQLTGY

SEQ ID NO: 10813 - protein, 12 aa, Severe acute respiratory syndrome coronavirus 2
  REGION 1..12: note = Table B: HLA-DQA1*05:01-B1*03:01L HLA-DRB1*04:03L HLA-DRB1*01:03L HLA-DRB1*04:02L HLA-DRB1*01:02L HLA-DRB1*14:01L HLA-DRB1*12:01L HLA-DRB1*14:17L HLA-DPA1*01:02-B1*04:01L HLA-DRB1*16:01L HLA-DRB1*04:08L HLA-DQA1*02:01-B1*03:03L
  REGION 1..12: note = CONT. FROM ABOVE: HLA-DRB1*15:03L
DDLNQLTGYKKP

SEQ ID NO: 10814 - protein, 12 aa, Severe acute respiratory syndrome coronavirus 2
  REGION 1..12: note = Table B: HLA-DQA1*05:01-B1*03:01L HLA-DRB1*01:03L HLA-DRB1*04:05L HLA-DQA1*01:02-B1*06:02L HLA-DRB1*01:02L HLA-DRB4*03:01NL HLA-DRB1*08:01L HLA-DRB1*12:01L HLA-DRB1*14:54L HLA-DPA1*01:02-B1*04:01L HLA-DRB1*04:08L HLA-DRB1*15:03L
LNQLTGYKKPAS

SEQ ID NO: 10815 - protein, 13 aa, Severe acute respiratory syndrome coronavirus 2
  REGION 1..13: note = Table B: HLA-DQA1*05:01-B1*03:01L HLA-DRB1*11:02L
NQLTGYKKPASRE

SEQ ID NO: 10816 - protein, 10 aa, Severe acute respiratory syndrome coronavirus 2
  REGION 1..10: note = Table B: HLA-DQA1*05:01-B1*03:01L HLA-DRB1*01:03L HLA-DRB1*08:01L HLA-DQA1*03:01-B1*03:02L HLA-DPA1*01:02-B1*04:01L HLA-DRB1*16:01L HLA-DQA1*02:01-B1*03:03L
GYKKPASREL

SEQ ID NO: 10817 - protein, 13 aa, Severe acute respiratory syndrome coronavirus 2
  REGION 1..13: note = Table B: HLA-DQA1*05:01-B1*03:01L HLA-DRB1*13:02L HLA-DRB1*08:04L HLA-DRB1*14:01L HLA-DRB1*11:01L HLA-DQA1*03:01-B1*03:02L HLA-DPA1*01:03-B1*02:01L HLA-DPA1*01:03-B1*104:01L
SRELKVTFFPDLN

SEQ ID NO: 10818 - protein, 12 aa, Severe acute respiratory syndrome coronavirus 2
  REGION 1..12: note = Table B: HLA-DQA1*05:01-B1*03:01L HLA-DRB1*04:01L HLA-DRB1*13:02L HLA-DRB1*13:03L HLA-DRB1*01:03L HLA-DRB1*04:04L HLA-DQA1*01:02-B1*06:02L HLA-DRB1*01:02L HLA-DRB4*03:01NL HLA-DRB1*08:04L HLA-DRB1*08:77L HLA-DRB3*02:01L
  REGION 1..12: note = CONT. FROM ABOVE: HLA-DPA1*01:03-B1*03:01L HLA-DPA1*03:01-B1*04: 02L HLA-DRB1*14:01L HLA-DRB1*11:03L HLA-DRB1*11:04L HLA-DRB1*14: 02L HLA-DRB4*01:01L HLA-DPA1*01:03-B1*04:01L HLA-DRB1*09:01L HLA -DPA1*01:03-B1*04:02L HLA-DRB1*12:01L HLA-DRB3*01:01L
  REGION 1..12: note = CONT. FROM ABOVE: HLA-DPA1*03:01-B1*105:01L HLA-DRB1*14:54L HLA- DPA1*01:03-B1*104:01L HLA-DQA1*05:05-B1*03:01L HLA-DPA1*01:02-B1 *04:01L HLA-DRB1*10:01L HLA-DQA1*01:03-B1*06:01L HLA-DRB1*04:08L HLA-DRB1*08:03L
VTFFPDLNGDVV

SEQ ID NO: 10819 - protein, 11 aa, Severe acute respiratory syndrome coronavirus 2
  REGION 1..11: note = Table B: HLA-DQA1*05:01-B1*03:01L HLA-DRB1*04:03L HLA-DQA1*01:01-B1*05:01L HLA-DQA1*01-B1*05L HLA-DPA1*03:01-B1*105:01L HLA-DQA1*05:05-B1*03:01L
LNGDVVAIDYK

SEQ ID NO: 10820 - protein, 13 aa, Severe acute respiratory syndrome coronavirus 2
  REGION 1..13: note = Table B: HLA-DQA1*05:01-B1*03:01L HLA-DRB1*13:02L HLA-DQA1*01:02-B1*06:02L HLA-DRB1*01:01L HLA-DRB1*14:01L HLA-DRB3*01:01L HLA-DPA1*03:01-B1*105:01L HLA-DRB1*07:01L HLA-DRB1*15:01L
IDYKHYTPSFKKG

SEQ ID NO: 10821 - protein, 14 aa, Severe acute respiratory syndrome coronavirus 2
  REGION 1..14: note = Table B: HLA-DQA1*05:01-B1*03:01L HLA-DRB1*01:01L HLA-DPA1*02:01-B1*13:01L HLA-DRB1*07:01L
DYKHYTPSFKKGAK

SEQ ID NO: 10822 - protein, 10 aa, Severe acute respiratory syndrome coronavirus 2
  REGION 1..10: note = Table B: HLA-DQA1*05:01-B1*03:01L HLA-DQA1*01-B1*05L HLA-DPA1*01:02-B1*04:01L
TPSFKKGAKL

SEQ ID NO: 10823 - protein, 13 aa, Severe acute respiratory syndrome coronavirus 2
  REGION 1..13: note = Table B: HLA-DQA1*05:01-B1*03:01L HLA-DRB1*04:01L HLA-DRB1*13:02L HLA-DRB1*11:04L HLA-DRB1*08:01L HLA-DRB1*11:01L HLA-DRB3*01:01L HLA-DPA1*02:01-B1*13:01L HLA-DPA1*01:02-B1*04:01L HLA-DRB1*07:01L HLA-DRB1*10:01L
  REGION 1..13: note = CONT. FROM ABOVE: HLA-DRB1*08:03L
KPIVWHVNNATNK

SEQ ID NO: 10824 - protein, 13 aa, Severe acute respiratory syndrome coronavirus 2
  REGION 1..13: note = Table B: HLA-DQA1*05:01-B1*03:01L HLA-DRB1*13:02L HLA-DRB1*14:01L
PIVWHVNNATNKA

SEQ ID NO: 10825 - protein, 12 aa, Severe acute respiratory syndrome coronavirus 2
  REGION 1..12: note = Table B: HLA-DQA1*05:01-B1*03:01L HLA-DRB1*04:03L HLA-DRB1*13:02L HLA-DRB1*01:03L HLA-DRB1*04:02L HLA-DRB1*01:02L HLA-DRB1*08:04L HLA-DRB1*14:01L HLA-DRB1*12:01L HLA-DRB1*12:02L HLA-DRB1*14:54L HLA-DRB1*14:17L HLA-DRB1*16:01L HLA-DRB1*15:03L
VWHVNNATNKAT

SEQ ID NO: 10826 - protein, 10 aa, Severe acute respiratory syndrome coronavirus 2
  REGION 1..10: note = Table B: HLA-DQA1*05:01-B1*03:01L HLA-DRB1*04:03L HLA-DRB1*13:03L HLA-DRB1*01:03L HLA-DQA1*01:02-B1*06:02L HLA-DRB1*08:77L HLA-DPA1*01:03-B1*03:01L HLA-DRB1*03:01L HLA-DRB1*14:02L HLA-DQA1*01-B1*05L HLA-DQA1*05:05-B1*03:19L
  REGION 1..10: note = CONT. FROM ABOVE: HLA-DQA1*05:01-B1*02:01L HLA-DPA1*01:03-B1*04: 01L HLA-DPA1*01:03-B1*04:02L HLA-DRB1*12:01L HLA-DPA1*03:01-B1*1 05:01L HLA-DRB1*10:01L HLA-DRB1*16:01L HLA-DRB1*08:02L HLA-DQA1* 02:01-B1*03:03L HLA-DRB1*15:03L
VNNATNKATY

SEQ ID NO: 10827 - protein, 12 aa, Severe acute respiratory syndrome coronavirus 2
  REGION 1..12: note = Table B: HLA-DQA1*05:01-B1*03:01L HLA-DQA1*01:02-B1*06:02L HLA-DQA1*01-B1*05L HLA-DQA1*05:01-B1*02:01L HLA-DRB1*12:01L HLA-DPA1*03:01-B1*105:01L HLA-DQA1*05:05-B1*03:01L HLA-DRB1*16:01L HLA-DQA1*01:03-B1*06:01L
  REGION 1..12: note = CONT. FROM ABOVE: HLA-DQA1*02:01-B1*03:03L
KPVETSNSFDVL

SEQ ID NO: 10828 - protein, 12 aa, Severe acute respiratory syndrome coronavirus 2
  REGION 1..12: note = Table B: HLA-DQA1*05:01-B1*03:01L HLA-DRB1*04:03L HLA-DQA1*05:01-B1*02:01L HLA-DRB1*16:01L
PVETSNSFDVLK

SEQ ID NO: 10829 - protein, 12 aa, Severe acute respiratory syndrome coronavirus 2
  REGION 1..12: note = Table B: HLA-DQA1*05:01-B1*03:01L HLA-DRB1*13:02L HLA-DRB1*01:03L HLA-DRB1*04:04L HLA-DQA1*01:02-B1*06:02L HLA-DRB1*01:02L HLA-DRB1*08:77L HLA-DRB3*02:01L HLA-DPA1*01:03-B1*03:01L HLA-DPA1*03:01-B1*04:02L
  REGION 1..12: note = CONT. FROM ABOVE: HLA-DRB1*14:01L HLA-DRB1*11:03L HLA-DRB1*11:04 L HLA-DRB1*14:02L HLA-DQA1*01:01-B1*05:01L HLA-DQA1*05:05-B1*03: 19L HLA-DRB4*01:01L HLA-DRB1*04:10L HLA-DRB1*09:01L HLA-DRB1*12: 02L HLA-DPA1*02:01-B1*13:01L HLA-DPA1*03:01-B1*105:01L
  REGION 1..12: note = CONT. FROM ABOVE: HLA-DRB1*14:54L HLA-DQA1*05:05-B1*03:01L HLA-D PA1*01:02-B1*04:01L HLA-DRB1*07:01L HLA-DRB1*10:01L HLA-DRB1*04: 08L
DVLKSEDAQGMD

SEQ ID NO: 10830 - protein, 12 aa, Severe acute respiratory syndrome coronavirus 2
  REGION 1..12: note = Table B: HLA-DQA1*05:01-B1*03:01L HLA-DRB1*04:01L HLA-DRB1*13:02L HLA-DRB1*13:03L HLA-DRB1*01:03L HLA-DRB1*04:04L HLA-DQA1*01:02-B1*06:02L HLA-DRB1*01:01L HLA-DRB1*01:02M HLA-DRB1*08:04L HLA-DRB1*08:77L HLA-DRB3*02:01L
  REGION 1..12: note = CONT. FROM ABOVE: HLA-DPA1*01:03-B1*03:01L HLA-DRB1*14:01L HLA-D RB1*11:03L HLA-DRB1*11:04L HLA-DRB1*14:02L HLA-DQA1*01:01-B1*05: 01L HLA-DRB1*08:01L HLA-DRB1*11:01L HLA-DRB5*01:01L HLA-DQA1*05: 05-B1*03:19L HLA-DRB4*01:01L HLA-DRB1*04:10L HLA-DRB1*09:01L
  REGION 1..12: note = CONT. FROM ABOVE: HLA-DRB1*12:01L HLA-DRB1*12:02L HLA-DRB3*01:01 L HLA-DPA1*02:01-B1*13:01L HLA-DPA1*03:01-B1*105:01L HLA-DRB1*14 :54L HLA-DPA1*01:03-B1*104:01L HLA-DQA1*05:05-B1*03:01L HLA-DRB1 *07:01L HLA-DRB1*10:01L HLA-DRB1*04:08L HLA-DRB1*08:03L
  REGION 1..12: note = CONT. FROM ABOVE: HLA-DRB1*15:03L
VLKSEDAQGMDN

SEQ ID NO: 10831 - protein, 13 aa, Severe acute respiratory syndrome coronavirus 2
  REGION 1..13: note = Table B: HLA-DQA1*05:01-B1*03:01L HLA-DRB1*04:03L HLA-DRB1*01:02L HLA-DPA1*01:03-B1*03:01L HLA-DRB1*14:01L HLA-DRB1*08:01L HLA-DQA1*01-B1*05L HLA-DRB1*12:01L HLA-DPA1*02:01-B1*13:01L HLA-DPA1*01:03-B1*02:01L
  REGION 1..13: note = CONT. FROM ABOVE: HLA-DRB1*15:03L
MDNLACEDLKPVS

SEQ ID NO: 10832 - protein, 13 aa, Severe acute respiratory syndrome coronavirus 2
  REGION 1..13: note = Table B: HLA-DQA1*05:01-B1*03:01L
DNLACEDLKPVSE

SEQ ID NO: 10833 - protein, 14 aa, Severe acute respiratory syndrome coronavirus 2
  REGION 1..14: note = Table B: HLA-DQA1*05:01-B1*03:01L HLA-DQA1*01:02-B1*06:02L HLA-DQA1*05:05-B1*03:01L
KPVSEEVVENPTIQ

SEQ ID NO: 10834 - protein, 10 aa, Severe acute respiratory syndrome coronavirus 2
  REGION 1..10: note = Table B: HLA-DQA1*05:01-B1*03:01L HLA-DRB1*04:01L HLA-DRB1*13:02H HLA-DRB1*13:03H HLA-DRB1*01:03L HLA-DRB1*04:02L HLA-DRB1*04:04L HLA-DQA1*01:02-B1*06:02L HLA-DRB1*01:01M HLA-DRB4*03:01NM HLA-DRB3*02:01M HLA-DPA1*03:01-B1*04:02L
  REGION 1..10: note = CONT. FROM ABOVE: HLA-DRB1*03:01L HLA-DRB1*14:01M HLA-DRB1*11:04 M HLA-DRB1*14:02M HLA-DRB1*08:01H HLA-DRB1*11:01L HLA-DRB5*01:01 M HLA-DRB4*02:01NL HLA-DQA1*05:01-B1*02:01L HLA-DRB1*13:01L HLA- DRB4*01:01L HLA-DPA1*01:03-B1*04:01L HLA-DPA1*01:03-B1*04:02M
  REGION 1..10: note = CONT. FROM ABOVE: HLA-DRB1*12:01H HLA-DRB1*12:02M HLA-DRB3*01:01 L HLA-DPA1*03:01-B1*105:01M HLA-DQA1*03:01-B1*03:02M HLA-DRB1*14 :54L HLA-DQA1*05:05-B1*03:01H HLA-DRB1*14:17L HLA-DRB1*16:01L HL A-DQA1*01:03-B1*06:01L HLA-DRB1*08:02M HLA-DRB1*08:03M
  REGION 1..10: note = CONT. FROM ABOVE: HLA-DQA1*02:01-B1*03:03L HLA-DRB1*15:01M HLA-D RB1*15:03L
EVVENPTIQK

SEQ ID NO: 10835 - protein, 14 aa, Severe acute respiratory syndrome coronavirus 2
  REGION 1..14: note = Table B: HLA-DQA1*05:01-B1*03:01L HLA-DRB1*04:03L HLA-DRB1*13:02L HLA-DRB1*01:02L HLA-DRB1*08:04L HLA-DRB1*14:02L HLA-DRB1*08:01L HLA-DQA1*05:05-B1*03:19L HLA-DQA1*05:01-B1*02:01L HLA-DRB1*12:01L
  REGION 1..14: note = CONT. FROM ABOVE: HLA-DPA1*03:01-B1*105:01L HLA-DQA1*05:05-B1*03 :01L HLA-DRB1*16:01L HLA-DQA1*02:01-B1*03:03L HLA-DRB1*15:03L
DVLECNVKTTEVVG

SEQ ID NO: 10836 - protein, 12 aa, Severe acute respiratory syndrome coronavirus 2
  REGION 1..12: note = Table B: HLA-DQA1*05:01-B1*03:01L HLA-DRB1*04:03L HLA-DRB1*04:05L HLA-DQA1*01:02-B1*06:02L HLA-DRB1*01:02L HLA-DPA1*01:03-B1*03:01L HLA-DQA1*01:01-B1*05:01L HLA-DQA1*05:05-B1*03:19L HLA-DRB1*12:01L
  REGION 1..12: note = CONT. FROM ABOVE: HLA-DPA1*02:01-B1*13:01L HLA-DQA1*05:05-B1*03: 01L HLA-DRB1*16:01L HLA-DRB1*15:03L
NVKTTEVVGDII

SEQ ID NO: 10837 - protein, 14 aa, Severe acute respiratory syndrome coronavirus 2
  REGION 1..14: note = Table B: HLA-DQA1*05:01-B1*03:01L HLA-DQA1*05:05-B1*03:19L
KPANNSLKITEEVG

SEQ ID NO: 10838 - protein, 11 aa, Severe acute respiratory syndrome coronavirus 2
  REGION 1..11: note = Table B: HLA-DQA1*05:01-B1*03:01L HLA-DRB1*08:77L HLA-DPA1*01:03-B1*03:01L HLA-DPA1*03:01-B1*04:02L HLA-DRB1*14:01L HLA-DRB1*14:02L HLA-DQA1*01-B1*05L HLA-DRB4*01:01L HLA-DPA1*01:03-B1*04:01L
  REGION 1..11: note = CONT. FROM ABOVE: HLA-DQA1*05:05-B1*03:116L HLA-DPA1*01:03-B1*04 :02L HLA-DRB1*12:01L HLA-DPA1*02:01-B1*13:01L HLA-DPA1*01:03-B1* 104:01L HLA-DPA1*01:02-B1*04:01L HLA-DRB1*10:01L HLA-DQA1*01:03- B1*06:01L HLA-DRB1*08:02L HLA-DRB1*15:03L
EVGHTDLMAAY

SEQ ID NO: 10839 - protein, 13 aa, Severe acute respiratory syndrome coronavirus 2
  REGION 1..13: note = Table B: HLA-DQA1*05:01-B1*03:01L HLA-DRB1*13:03L HLA-DRB1*01:03L HLA-DRB1*04:04L HLA-DRB1*01:02L HLA-DRB4*03:01NL HLA-DRB3*02:01L HLA-DPA1*01:03-B1*03:01L HLA-DRB1*14:01L HLA-DQA1*05:05-B1*03:19L HLA-DRB1*14:54L
  REGION 1..13: note = CONT. FROM ABOVE: HLA-DQA1*05:05-B1*03:01L HLA-DRB1*04:08L HLA-D RB1*08:03L
TDLMAAYVDNSSL

SEQ ID NO: 10840 - protein, 13 aa, Severe acute respiratory syndrome coronavirus 2
  REGION 1..13: note = Table B: HLA-DQA1*05:01-B1*03:01L HLA-DRB1*13:02L HLA-DRB1*13:03L HLA-DRB1*01:03L HLA-DRB1*08:04L HLA-DRB3*02:01L HLA-DPA1*01:03-B1*03:01L HLA-DRB1*14:01L HLA-DRB1*11:03L HLA-DRB1*11:04L HLA-DRB1*08:01L HLA-DQA1*05:05-B1*03:19L
  REGION 1..13: note = CONT. FROM ABOVE: HLA-DRB1*09:01L HLA-DQA1*05:05-B1*03:01L HLA-D RB1*10:01L HLA-DRB1*08:03L HLA-DRB1*15:01L
DLMAAYVDNSSLT

SEQ ID NO: 10841 - protein, 11 aa, Severe acute respiratory syndrome coronavirus 2
  REGION 1..11: note = Table B: HLA-DQA1*05:01-B1*03:01L HLA-DQA1*01:02-B1*06:02L HLA-DRB1*14:01L HLA-DQA1*05:01-B1*02:01L HLA-DQA1*03:01-B1*03:02L HLA-DRB1*16:01L HLA-DQA1*02:01-B1*03:03L
KPNELSRVLGL

SEQ ID NO: 10842 - protein, 11 aa, Severe acute respiratory syndrome coronavirus 2
  REGION 1..11: note = Table B: HLA-DQA1*05:01-B1*03:01L HLA-DRB1*01:03L HLA-DRB1*04:04L HLA-DRB1*04:05L HLA-DQA1*01:02-B1*06:02L HLA-DRB1*01:02L HLA-DRB4*03:01NL HLA-DRB1*14:01L HLA-DRB1*04:10L HLA-DRB1*12:01L HLA-DQA1*03:01-B1*03:02L HLA-DRB1*14:54L
  REGION 1..11: note = CONT. FROM ABOVE: HLA-DRB1*16:01L HLA-DRB1*04:08L HLA-DQA1*02:01 -B1*03:03L
VLGLKTLATHG

SEQ ID NO: 10843 - protein, 12 aa, Severe acute respiratory syndrome coronavirus 2
  REGION 1..12: note = Table B: HLA-DQA1*05:01-B1*03:01L HLA-DQA1*01:02-B1*06:02L HLA-DQA1*05:05-B1*03:19L HLA-DQA1*03:01-B1*03:02L HLA-DQA1*05:05-B1*03:01L HLA-DQA1*01:03-B1*06:01L HLA-DQA1*02:01-B1*03:03L
ATHGLAAVNSVP

SEQ ID NO: 10844 - protein, 13 aa, Severe acute respiratory syndrome coronavirus 2
  REGION 1..13: note = Table B: HLA-DQA1*05:01-B1*03:01L HLA-DRB1*01:03L HLA-DRB1*01:02L HLA-DRB3*02:01L HLA-DPA1*01:03-B1*03:01L HLA-DRB1*14:01L HLA-DRB1*12:01L HLA-DQA1*05:05-B1*03:01L HLA-DRB1*04:08L
LAAVNSVPWDTIA

SEQ ID NO: 10845 - protein, 12 aa, Severe acute respiratory syndrome coronavirus 2
  REGION 1..12: note = Table B: HLA-DQA1*05:01-B1*03:01L HLA-DRB1*01:03L HLA-DRB1*04:05L HLA-DRB1*01:02L HLA-DPA1*01:03-B1*03:01L HLA-DPA1*03:01-B1*04:02L HLA-DQA1*01:01-B1*05:01L HLA-DPA1*01:03-B1*04:01L HLA-DRB1*04:10L
  REGION 1..12: note = CONT. FROM ABOVE: HLA-DPA1*01:03-B1*04:02L HLA-DRB1*12:01L HLA-D QA1*05:05-B1*03:01L HLA-DRB1*04:08L
AVNSVPWDTIAN

SEQ ID NO: 10846 - protein, 10 aa, Severe acute respiratory syndrome coronavirus 2
  REGION 1..10: note = Table B: HLA-DQA1*05:01-B1*03:01L HLA-DRB1*13:02L HLA-DRB1*13:03L HLA-DRB1*01:03L HLA-DRB1*04:02L HLA-DQA1*01:02-B1*06:02L HLA-DRB1*01:01L HLA-DRB4*03:01NL HLA-DRB1*08:01L HLA-DRB1*12:01L HLA-DQA1*03:01-B1*03:02L
  REGION 1..10: note = CONT. FROM ABOVE: HLA-DQA1*05:05-B1*03:01L HLA-DRB1*14:17L HLA-D RB1*16:01L HLA-DQA1*01:03-B1*06:01L HLA-DQA1*02:01-B1*03:03L
ANYAKPFLNK

SEQ ID NO: 10847 - protein, 11 aa, Severe acute respiratory syndrome coronavirus 2
  REGION 1..11: note = Table B: HLA-DQA1*05:01-B1*03:01L HLA-DRB1*04:04L HLA-DRB1*01:02L HLA-DRB1*08:04L HLA-DPA1*01:03-B1*03:01L HLA-DPA1*03:01-B1*04:02L HLA-DRB1*14:02L HLA-DRB5*01:01L HLA-DQA1*05:05-B1*03:19L HLA-DRB1*09:01L
  REGION 1..11: note = CONT. FROM ABOVE: HLA-DPA1*03:01-B1*105:01L HLA-DQA1*05:05-B1*03 :01L HLA-DRB1*10:01L HLA-DQA1*01:03-B1*06:01L HLA-DRB1*04:08L HL A-DRB1*08:03L HLA-DRB1*15:03L
KVVSTTTNIVT

SEQ ID NO: 10848 - protein, 11 aa, Severe acute respiratory syndrome coronavirus 2
  REGION 1..11: note = Table B: HLA-DQA1*05:01-B1*03:01L HLA-DRB1*14:04L HLA-DQA1*01:02-B1*06:02L HLA-DRB1*01:02L HLA-DRB1*08:04L HLA-DPA1*01:03-B1*03:01L HLA-DRB1*03:01L HLA-DQA1*01:01-B1*05:01L HLA-DQA1*01-B1*05L
  REGION 1..11: note = CONT. FROM ABOVE: HLA-DQA1*05:05-B1*03:19L HLA-DRB5*02:02L HLA-D RB4*01:01L HLA-DPA1*01:03-B1*04:01L HLA-DRB1*09:01L HLA-DPA1*01: 02-B1*04:01L HLA-DRB1*10:01L HLA-DRB1*04:08L HLA-DRB1*15:03L
VVSTTTNIVTR

SEQ ID NO: 10849 - protein, 12 aa, Severe acute respiratory syndrome coronavirus 2
  REGION 1..12: note = Table B: HLA-DQA1*05:01-B1*03:01L HLA-DQA1*01:02-B1*06:02L HLA-DQA1*03:01-B1*03:02L HLA-DQA1*01:03-B1*06:01L HLA-DQA1*02:01-B1*03:03L
STNSRIKASMPT

SEQ ID NO: 10850 - protein, 12 aa, Severe acute respiratory syndrome coronavirus 2
  REGION 1..12: note = Table B: HLA-DQA1*05:01-B1*03:01L HLA-DRB1*13:02L HLA-DRB1*01:02L HLA-DRB3*02:01L HLA-DRB1*14:01L HLA-DQA1*05:01-B1*02:01L HLA-DRB1*12:01L HLA-DQA1*05:05-B1*03:01L HLA-DRB1*07:01L HLA-DRB1*15:03L
SRIKASMPTTIA

SEQ ID NO: 10851 - protein, 11 aa, Severe acute respiratory syndrome coronavirus 2
  REGION 1..11: note = Table B: HLA-DQA1*05:01-B1*03:01L HLA-DRB1*04:03L HLA-DRB1*01:03L HLA-DRB1*04:02L HLA-DQA1*01:02-B1*06:02L HLA-DRB1*01:02L HLA-DQA1*05:05-B1*03:19L HLA-DRB1*14:17L HLA-DQA1*01:03-B1*06:01L HLA-DQA1*02:01-B1*03:03L
IKASMPTTIAK

SEQ ID NO: 10852 - protein, 10 aa, Severe acute respiratory syndrome coronavirus 2
  REGION 1..10: note = Table B: HLA-DQA1*05:01-B1*03:01L HLA-DRB1*04:03L HLA-DRB1*13:03L HLA-DRB1*01:03L HLA-DRB1*04:02L HLA-DRB1*04:05L HLA-DRB1*01:02L HLA-DRB4*03:01NL HLA-DQA1*05:01-B1*02:01L HLA-DRB1*12:01L HLA-DQA1*03:01-B1*03:02L HLA-DRB1*14:54L
  REGION 1..10: note = CONT. FROM ABOVE: HLA-DQA1*05:05-B1*03:01L HLA-DRB1*14:17L HLA-D RB1*16:01L HLA-DQA1*01:03-B1*06:01L HLA-DQA1*02:01-B1*03:03L
ASMPTTIAKN

SEQ ID NO: 10853 - protein, 10 aa, Severe acute respiratory syndrome coronavirus 2
  REGION 1..10: note = Table B: HLA-DQA1*05:01-B1*03:01L HLA-DRB1*04:03L HLA-DRB1*13:03L HLA-DRB1*01:03L HLA-DRB1*04:02L HLA-DRB4*03:01NL HLA-DQA1*03:01-B1*03:02L HLA-DQA1*05:05-B1*03:01L HLA-DRB1*14:17L HLA-DRB1*16:01L HLA-DQA1*01:03-B1*06:01L
  REGION 1..10: note = CONT. FROM ABOVE: HLA-DQA1*02:01-B1*03:03L
PTTIAKNTVK

SEQ ID NO: 10854 - protein, 12 aa, Severe acute respiratory syndrome coronavirus 2
  REGION 1..12: note = Table B: HLA-DQA1*05:01-B1*03:01L HLA-DRB1*04:03L HLA-DRB1*13:02L HLA-DRB1*04:05L HLA-DRB1*01:02L HLA-DRB1*14:01L HLA-DRB1*04:08L HLA-DRB1*15:03L
TIAKNTVKSVGK

SEQ ID NO: 10855 - protein, 12 aa, Severe acute respiratory syndrome coronavirus 2
  REGION 1..12: note = Table B: HLA-DQA1*05:01-B1*03:01L HLA-DQA1*01:02-B1*06:02L HLA-DRB1*01:02L HLA-DRB1*14:01L HLA-DQA1*01:03-B1*06:01L HLA-DRB1*15:03L
IAKNTVKSVGKF

SEQ ID NO: 10856 - protein, 18 aa, Severe acute respiratory syndrome coronavirus 2
  REGION 1..18: note = Table B: HLA-DQA1*05:01-B1*03:01L HLA-DRB1*08:04L HLA-DRB1*11:02L HLA-DRB1*14:02L HLA-DQA1*05:01-B1*02:01L HLA-DPA1*01:03-B1*04:01L HLA-DRB3*01:01L HLA-DQA1*05:05-B1*03:01L
SVGKFCLEASFNYLKSPN

SEQ ID NO: 10857 - protein, 10 aa, Severe acute respiratory syndrome coronavirus 2
  REGION 1..10: note = Table B: HLA-DQA1*05:01-B1*03:01L HLA-DRB1*04:03L HLA-DRB1*04:02L HLA-DRB1*01:02L HLA-DRB3*02:01L HLA-DPA1*03:01-B1*04:02L HLA-DRB1*14:01L HLA-DQA1*01-B1*05L HLA-DQA1*05:01-B1*02:01L HLA-DRB1*12:01L
  REGION 1..10: note = CONT. FROM ABOVE: HLA-DPA1*03:01-B1*105:01L HLA-DQA1*03:01-B1*03 :02L HLA-DRB1*14:17L HLA-DPA1*01:02-B1*04:01L HLA-DRB1*16:01L HL A-DQA1*02:01-B1*03:03L HLA-DRB1*15:03L
FNYLKSPNFS

SEQ ID NO: 10858 - protein, 12 aa, Severe acute respiratory syndrome coronavirus 2
  REGION 1..12: note = Table B: HLA-DQA1*05:01-B1*03:01L HLA-DQA1*01:02-B1*06:02L HLA-DQA1*05:05-B1*03:19L HLA-DPA1*03:01-B1*105:01L HLA-DQA1*05:05-B1*03:01L HLA-DQA1*02:01-B1*03:03L
YSTAALGVLMSN

SEQ ID NO: 10859 - protein, 12 aa, Severe acute respiratory syndrome coronavirus 2
  REGION 1..12: note = Table B: HLA-DQA1*05:01-B1*03:01L HLA-DRB1*04:02L HLA-DQA1*05:05-B1*03:19L HLA-DQA1*05:01-B1*02:01L HLA-DRB1*04:10L HLA-DRB1*12:01L HLA-DPA1*03:01-B1*105:01L
TAALGVLMSNLG

SEQ ID NO: 10860 - protein, 11 aa, Severe acute respiratory syndrome coronavirus 2
  REGION 1..11: note = Table B: HLA-DQA1*05:01-B1*03:01L HLA-DRB1*13:02L HLA-DRB1*13:03L HLA-DRB1*01:03L HLA-DPA1*03:01-B1*04:02L HLA-DRB1*03:01L HLA-DRB1*14:01L HLA-DRB1*11:02L HLA-DRB1*14:02L HLA-DQA1*01-B1*05L HLA-DQA1*05:05-B1*03:116L
  REGION 1..11: note = CONT. FROM ABOVE: HLA-DPA1*01:03-B1*04:02L HLA-DRB1*12:01L HLA-D PA1*02:01-B1*13:01L HLA-DPA1*03:01-B1*105:01L HLA-DQA1*05:05-B1* 03:01L HLA-DRB1*10:01L HLA-DQA1*01:03-B1*06:01L HLA-DRB1*08:02L
VLMSNLGMPSY

SEQ ID NO: 10861 - protein, 14 aa, Severe acute respiratory syndrome coronavirus 2
  REGION 1..14: note = Table B: HLA-DQA1*05:01-B1*03:01L HLA-DQA1*02:01-B1*03:03L
MSNLGMPSYCTGYR

SEQ ID NO: 10862 - protein, 12 aa, Severe acute respiratory syndrome coronavirus 2
  REGION 1..12: note = Table B: HLA-DQA1*05:01-B1*03:01L HLA-DRB1*04:03L HLA-DQA1*01:02-B1*06:02L HLA-DQA1*05:01-B1*02:01L HLA-DPA1*03:01-B1*105:01L HLA-DQA1*05:05-B1*03:01L HLA-DPA1*01:02-B1*04:01L HLA-DQA1*01:03-B1*06:01L
  REGION 1..12: note = CONT. FROM ABOVE: HLA-DQA1*02:01-B1*03:03L
YREGYLNSTNVT

SEQ ID NO: 10863 - protein, 14 aa, Severe acute respiratory syndrome coronavirus 2
  REGION 1..14: note = Table B: HLA-DQA1*05:01-B1*03:01L HLA-DPA1*01:03-B1*03:01L
TNVTIATYCTGSIP

SEQ ID NO: 10864 - protein, 13 aa, Severe acute respiratory syndrome coronavirus 2
  REGION 1..13: note = Table B: HLA-DQA1*05:01-B1*03:01L HLA-DRB1*04:04L HLA-DRB1*01:02L HLA-DRB4*03:01NL HLA-DRB1*08:04L HLA-DQA1*05:05-B1*03:19L HLA-DRB1*12:01L HLA-DRB1*14:54L HLA-DRB1*10:01L HLA-DRB1*04:08L HLA-DRB1*15:03L
SGLDSLDTYPSLE

SEQ ID NO: 10865 - protein, 13 aa, Severe acute respiratory syndrome coronavirus 2
  REGION 1..13: note = Table B: HLA-DQA1*05:01-B1*03:01L HLA-DRB1*01:03L HLA-DRB1*04:04L HLA-DRB1*04:05L HLA-DRB3*02:01L HLA-DPA1*03:01-B1*04:02L HLA-DRB1*14:01L HLA-DRB1*04:10L HLA-DQA1*05:05-B1*03:01L HLA-DRB1*04:08L HLA-DRB1*15:01L
DSLDTYPSLETIQ

SEQ ID NO: 10866 - protein, 11 aa, Severe acute respiratory syndrome coronavirus 2
  REGION 1..11: note = Table B: HLA-DQA1*05:01-B1*03:01L HLA-DRB1*04:03L HLA-DRB1*01:02L HLA-DPA1*03:01-B1*04:02L HLA-DRB1*14:01L HLA-DQA1*05:01-B1*02:01L HLA-DRB1*12:01L HLA-DQA1*03:01-B1*03:02L HLA-DRB1*14:17L
  REGION 1..11: note = CONT. FROM ABOVE: HLA-DPA1*01:02-B1*04:01L HLA-DRB1*16:01L
IQITISSFKWD

SEQ ID NO: 10867 - protein, 11 aa, Severe acute respiratory syndrome coronavirus 2
  REGION 1..11: note = Table B: HLA-DQA1*05:01-B1*03:01L HLA-DRB1*04:03L HLA-DRB1*01:02L HLA-DQA1*05:01-B1*02:01L HLA-DPA1*01:03-B1*04:01L HLA-DRB1*12:01L HLA-DQA1*05:05-B1*03:01L HLA-DRB1*04:08L HLA-DRB1*15:03L
FSYFAVHFISN

SEQ ID NO: 10868 - protein, 11 aa, Severe acute respiratory syndrome coronavirus 2
  REGION 1..11: note = Table B: HLA-DQA1*05:01-B1*03:01L HLA-DRB1*04:03L HLA-DRB1*04:02L HLA-DQA1*01:02-B1*06:02L HLA-DRB1*01:02L HLA-DRB1*14:01L HLA-DQA1*05:01-B1*02:01L HLA-DRB1*12:01L HLA-DPA1*03:01-B1*105:01L HLA-DQA1*03:01-B1*03:02L
  REGION 1..11: note = CONT. FROM ABOVE: HLA-DQA1*05:05-B1*03:01L HLA-DRB1*14:17L HLA-D RB1*16:01L HLA-DQA1*01:03-B1*06:01L HLA-DQA1*02:01-B1*03:03L HLA -DRB1*15:03L
IINLVQMAPIS

SEQ ID NO: 10869 - protein, 11 aa, Severe acute respiratory syndrome coronavirus 2
  REGION 1..11: note = Table B: HLA-DQA1*05:01-B1*03:01L HLA-DRB1*04:03L HLA-DRB1*01:03L HLA-DRB1*04:02L HLA-DQA1*01:02-B1*06:02L HLA-DPA1*03:01-B1*105:01L HLA-DRB1*14:17L HLA-DPA1*01:02-B1*04:01L HLA-DRB1*16:01L
VQMAPISAMVR

SEQ ID NO: 10870 - protein, 10 aa, Severe acute respiratory syndrome coronavirus 2
  REGION 1..10: note = Table B: HLA-DQA1*05:01-B1*03:01L HLA-DRB1*13:03M HLA-DRB1*01:03L HLA-DQA1*01:02-B1*06:02M HLA-DRB1*08:77L HLA-DPA1*01:03-B1*03:01L HLA-DPA1*03:01-B1*04:02L HLA-DRB1*03:01L HLA-DRB1*14:01L HLA-DRB1*14:02L
  REGION 1..10: note = CONT. FROM ABOVE: HLA-DQA1*01-B1*05L HLA-DQA1*05:05-B1*03:19L HL A-DQA1*05:01-B1*02:01L HLA-DPA1*01:03-B1*04:01L HLA-DQA1*05:05-B 1*03:116L HLA-DPA1*01:03-B1*04:02L HLA-DPA1*02:01-B1*13:01L HLA- DPA1*03:01-B1*105:01M HLA-DPA1*01:02-B1*04:01L HLA-DRB1*16:01L
  REGION 1..10: note = CONT. FROM ABOVE: HLA-DQA1*01:03-B1*06:01L HLA-DQA1*02:01-B1*03: 03L HLA-DRB1*15:03L
APISAMVRMY

SEQ ID NO: 10871 - protein, 12 aa, Severe acute respiratory syndrome coronavirus 2
  REGION 1..12: note = Table B: HLA-DQA1*05:01-B1*03:01L HLA-DRB1*04:03L HLA-DRB1*13:02L HLA-DRB1*13:03L HLA-DRB1*04:02L HLA-DRB1*04:05L HLA-DRB1*01:02L HLA-DRB1*08:04L HLA-DPA1*03:01-B1*04:02L HLA-DRB1*14:01L HLA-DRB1*11:04L HLA-DRB1*11:01L
  REGION 1..12: note = CONT. FROM ABOVE: HLA-DPA1*01:03-B1*04:02L HLA-DRB1*12:01L HLA-D RB3*01:01L HLA-DPA1*02:01-B1*13:01L HLA-DPA1*03:01-B1*105:01L HL A-DQA1*03:01-B1*03:02L HLA-DRB1*14:54L HLA-DPA1*01:03-B1*02:01L HLA-DRB1*08:03L HLA-DRB1*15:03L
ASFYYVWKSYVH

SEQ ID NO: 10872 - protein, 12 aa, Severe acute respiratory syndrome coronavirus 2
  REGION 1..12: note = Table B: HLA-DQA1*05:01-B1*03:01L HLA-DRB1*13:02L HLA-DRB1*04:05L HLA-DRB1*08:04L HLA-DRB1*14:01L HLA-DRB1*11:04L HLA-DRB1*11:01L HLA-DQA1*01-B1*05L HLA-DRB3*01:01L HLA-DQA1*03:01-B1*03:02L
YYVWKSYVHVVD

SEQ ID NO: 10873 - protein, 11 aa, Severe acute respiratory syndrome coronavirus 2
  REGION 1..11: note = Table B: HLA-DQA1*05:01-B1*03:01L HLA-DRB1*04:03L HLA-DPA1*03:01-B1*105:01L HLA-DQA1*03:01-B1*03:02L HLA-DQA1*05:05-B1*03:01L
VECTTIVNGVR

SEQ ID NO: 10874 - protein, 10 aa, Severe acute respiratory syndrome coronavirus 2
  REGION 1..10: note = Table B: HLA-DQA1*05:01-B1*03:01L HLA-DRB1*01:03L HLA-DQA1*01:02-B1*06:02L HLA-DPA1*01:03-B1*03:01L HLA-DRB1*03:01L HLA-DRB1*14:02L HLA-DQA1*05:05-B1*03:19L HLA-DQA1*05:01-B1*02:01L HLA-DPA1*01:03-B1*04:01L
  REGION 1..10: note = CONT. FROM ABOVE: HLA-DPA1*01:03-B1*04:02L HLA-DRB1*16:01L HLA-D QA1*01:03-B1*06:01L HLA-DRB1*08:02L HLA-DQA1*02:01-B1*03:03L
IVNGVRRSFY

SEQ ID NO: 10875 - protein, 11 aa, Severe acute respiratory syndrome coronavirus 2
  REGION 1..11: note = Table B: HLA-DQA1*05:01-B1*03:01L HLA-DRB1*04:01L HLA-DRB1*04:04L HLA-DQA1*01:02-B1*06:02L HLA-DRB1*08:04L HLA-DRB1*08:77L HLA-DPA1*01:03-B1*03:01L HLA-DPA1*03:01-B1*04:02L HLA-DRB1*11:03L HLA-DRB1*14:02L
  REGION 1..11: note = CONT. FROM ABOVE: HLA-DRB1*11:01L HLA-DQA1*05:05-B1*03:19L HLA-D RB4*01:01L HLA-DRB1*09:01L HLA-DRB3*01:01L HLA-DPA1*02:01-B1*13: 01L HLA-DRB1*07:01L HLA-DRB1*08:03L
STFISDEVARD

SEQ ID NO: 10876 - protein, 11 aa, Severe acute respiratory syndrome coronavirus 2
  REGION 1..11: note = Table B: HLA-DQA1*05:01-B1*03:01L HLA-DQA1*05:05-B1*03:116L
ISDEVARDLSL

SEQ ID NO: 10877 - protein, 10 aa, Severe acute respiratory syndrome coronavirus 2
  REGION 1..10: note = Table B: HLA-DQA1*05:01-B1*03:01L HLA-DRB1*04:03L HLA-DRB1*13:03L HLA-DRB1*01:03L HLA-DQA1*01:02-B1*06:02L HLA-DRB4*03:01NL HLA-DRB1*08:77L HLA-DPA1*01:03-B1*03:01L HLA-DRB1*03:01L HLA-DRB1*11:02L HLA-DRB1*14:02L
  REGION 1..10: note = CONT. FROM ABOVE: HLA-DQA1*01-B1*05L HLA-DQA1*05:05-B1*03:19L HL A-DQA1*05:01-B1*02:01L HLA-DRB4*01:01L HLA-DPA1*01:03-B1*04:01L HLA-DPA1*01:03-B1*04:02L HLA-DRB1*12:01L HLA-DPA1*03:01-B1*105:0 1L HLA-DPA1*01:03-B1*104:01L HLA-DRB1*10:01L HLA-DRB1*16:01L
  REGION 1..10: note = CONT. FROM ABOVE: HLA-DRB1*08:02L HLA-DQA1*02:01-B1*03:03L HLA-D RB1*15:03L
PINPTDQSSY

SEQ ID NO: 10878 - protein, 14 aa, Severe acute respiratory syndrome coronavirus 2
  REGION 1..14: note = Table B: HLA-DQA1*05:01-B1*03:01L HLA-DRB1*01:03L HLA-DRB1*04:05L HLA-DPA1*01:03-B1*03:01L HLA-DQA1*01:01-B1*05:01L HLA-DQA1*05:05-B1*03:19L HLA-DPA1*01:03-B1*04:02L HLA-DRB1*12:01L
  REGION 1..14: note = CONT. FROM ABOVE: HLA-DPA1*02:01-B1*13:01L HLA-DPA1*03:01-B1*105 :01L HLA-DQA1*05:05-B1*03:01L HLA-DRB1*16:01L HLA-DRB1*04:08L
NPTDQSSYIVDSVT

SEQ ID NO: 10879 - protein, 13 aa, Severe acute respiratory syndrome coronavirus 2
  REGION 1..13: note = Table B: HLA-DQA1*05:01-B1*03:01L HLA-DRB1*04:05L HLA-DQA1*01:02-B1*06:02L HLA-DRB1*01:02L HLA-DRB1*08:04L HLA-DRB1*08:77L HLA-DRB3*02:01L HLA-DPA1*01:03-B1*03:01L HLA-DPA1*03:01-B1*04:02L HLA-DRB1*11:03L HLA-DRB1*11:04L
  REGION 1..13: note = CONT. FROM ABOVE: HLA-DQA1*01:01-B1*05:01L HLA-DRB5*01:01L HLA-D RB1*04:10L HLA-DRB1*12:02L HLA-DPA1*02:01-B1*13:01L HLA-DPA1*03: 01-B1*105:01L HLA-DRB1*10:01L HLA-DRB1*04:08L HLA-DRB1*08:03L HL A-DRB1*15:03L
DQSSYIVDSVTVK

SEQ ID NO: 10880 - protein, 10 aa, Severe acute respiratory syndrome coronavirus 2
  REGION 1..10: note = Table B: HLA-DQA1*05:01-B1*03:01L HLA-DRB1*04:01L HLA-DRB1*13:02L HLA-DRB1*13:03L HLA-DRB1*01:03M HLA-DQA1*01:02-B1*06:02M HLA-DRB4*03:01NL HLA-DRB1*08:77L HLA-DPA1*01:03-B1*03:01L HLA-DPA1*03:01-B1*04:02L
  REGION 1..10: note = CONT. FROM ABOVE: HLA-DRB1*03:01M HLA-DRB1*14:01L HLA-DRB1*11:02 L HLA-DRB1*14:02M HLA-DRB1*11:01L HLA-DRB5*01:01L HLA-DQA1*01-B1 *05L HLA-DQA1*05:05-B1*03:19M HLA-DQA1*05:01-B1*02:01M HLA-DRB4* 01:01L HLA-DPA1*01:03-B1*04:01M HLA-DQA1*05:05-B1*03:116L
  REGION 1..10: note = CONT. FROM ABOVE: HLA-DPA1*01:03-B1*04:02M HLA-DRB1*12:01L HLA-D PA1*02:01-B1*13:01L HLA-DPA1*03:01-B1*105:01L HLA-DPA1*01:03-B1* 104:01L HLA-DPA1*01:02-B1*04:01L HLA-DRB1*10:01L HLA-DRB1*16:01L HLA-DQA1*01:03-B1*06:01L HLA-DRB1*08:02L
  REGION 1..10: note = CONT. FROM ABOVE: HLA-DQA1*02:01-B1*03:03M HLA-DRB1*15:03L
TVKNGSIHLY

SEQ ID NO: 10881 - protein, 12 aa, Severe acute respiratory syndrome coronavirus 2
  REGION 1..12: note = Table B: HLA-DQA1*05:01-B1*03:01L HLA-DPA1*03:01-B1*105:01L HLA-DQA1*03:01-B1*03:02L
VKNGSIHLYFDK

SEQ ID NO: 10882 - protein, 13 aa, Severe acute respiratory syndrome coronavirus 2
  REGION 1..13: note = Table B: HLA-DQA1*05:01-B1*03:01L HLA-DRB1*08:04L HLA-DRB3*02:01L HLA-DRB1*03:01L HLA-DRB1*11:04L HLA-DQA1*05:01-B1*02:01L HLA-DPA1*03:01-B1*105:01L HLA-DQA1*01:03-B1*06:01L
SIHLYFDKAGQKT

SEQ ID NO: 10883 - protein, 11 aa, Severe acute respiratory syndrome coronavirus 2
  REGION 1..11: note = Table B: HLA-DQA1*05:01-B1*03:01L HLA-DRB1*03:01L HLA-DRB1*11:01L HLA-DPA1*01:02-B1*04:01L HLA-DRB1*15:03L
KTYERHSLSHF

SEQ ID NO: 10884 - protein, 13 aa, Severe acute respiratory syndrome coronavirus 2
  REGION 1..13: note = Table B: HLA-DQA1*05:01-B1*03:01L HLA-DRB1*01:03L HLA-DQA1*01:01-B1*05:01L HLA-DRB1*12:01L HLA-DRB1*15:03L
ERHSLSHFVNLDN

SEQ ID NO: 10885 - protein, 12 aa, Severe acute respiratory syndrome coronavirus 2
  REGION 1..12: note = Table B: HLA-DQA1*05:01-B1*03:01L HLA-DRB1*01:01L HLA-DRB1*08:77L HLA-DPA1*01:03-B1*03:01L HLA-DRB1*14:02L HLA-DQA1*05:05-B1*03:19L HLA-DRB4*01:01L HLA-DRB1*09:01L
FVNLDNLRANNT

SEQ ID NO: 10886 - protein, 12 aa, Severe acute respiratory syndrome coronavirus 2
  REGION 1..12: note = Table B: HLA-DQA1*05:01-B1*03:01L HLA-DRB1*01:03L HLA-DRB1*04:05L HLA-DQA1*01:02-B1*06:02L HLA-DRB1*01:02L HLA-DRB1*16:01L HLA-DQA1*01:03-B1*06:01L HLA-DRB1*04:08L HLA-DQA1*02:01-B1*03:03L
VNLDNLRANNTK

SEQ ID NO: 10887 - protein, 14 aa, Severe acute respiratory syndrome coronavirus 2
  REGION 1..14: note = Table B: HLA-DQA1*05:01-B1*03:01L HLA-DRB1*13:02L HLA-DRB1*13:03L HLA-DRB1*01:03L HLA-DRB1*04:02L HLA-DRB1*04:04L HLA-DRB1*04:05L HLA-DQA1*01:02-B1*06:02L HLA-DRB1*01:02L HLA-DRB1*08:04L HLA-DRB1*11:04L HLA-DRB1*12:01L
  REGION 1..14: note = CONT. FROM ABOVE: HLA-DQA1*03:01-B1*03:02L HLA-DRB1*14:54L HLA-D QA1*05:05-B1*03:01L HLA-DRB1*16:01L HLA-DQA1*01:03-B1*06:01L HLA -DRB1*04:08L HLA-DQA1*02:01-B1*03:03L HLA-DRB1*15:03L
LDNLRANNTKGSLP

SEQ ID NO: 10888 - protein, 14 aa, Severe acute respiratory syndrome coronavirus 2
  REGION 1..14: note = Table B: HLA-DQA1*05:01-B1*03:01L HLA-DRB1*08:01L HLA-DQA1*03:01-B1*03:02L HLA-DRB1*04:08L
VFDGKSKCEESSAK

SEQ ID NO: 10889 - protein, 11 aa, Severe acute respiratory syndrome coronavirus 2
  REGION 1..11: note = Table B: HLA-DQA1*05:01-B1*03:01L HLA-DQA1*01:02-B1*06:02L HLA-DQA1*05:05-B1*03:19L HLA-DQA1*03:01-B1*03:02L HLA-DQA1*05:05-B1*03:01L
SAKSASVYYSQ

SEQ ID NO: 10890 - protein, 13 aa, Severe acute respiratory syndrome coronavirus 2
  REGION 1..13: note = Table B: HLA-DQA1*05:01-B1*03:01L HLA-DRB1*13:03L HLA-DRB1*01:03L HLA-DRB1*04:04L HLA-DRB1*04:05L HLA-DRB1*01:02L HLA-DRB4*03:01NL HLA-DRB1*08:04L HLA-DRB1*08:77L HLA-DRB3*02:01L HLA-DPA1*01:03-B1*03:01L HLA-DPA1*03:01-B1*04:02L
  REGION 1..13: note = CONT. FROM ABOVE: HLA-DRB1*11:03L HLA-DRB1*11:04L HLA-DRB1*14:02 L HLA-DQA1*01-B1*05L HLA-DRB1*04:10L HLA-DRB3*01:01L HLA-DPA1*03 :01-B1*105:01L HLA-DQA1*03:01-B1*03:02L HLA-DRB1*10:01L HLA-DRB1 *04:08L HLA-DQA1*02:01-B1*03:03L
QPILLLDQALVSD

SEQ ID NO: 10891 - protein, 15 aa, Severe acute respiratory syndrome coronavirus 2
  REGION 1..15: note = Table B: HLA-DQA1*05:01-B1*03:01L HLA-DQA1*01:02-B1*06:02L HLA-DRB1*01:01L HLA-DRB3*02:01L HLA-DPA1*03:01-B1*04:02L HLA-DRB1*03:01L HLA-DQA1*01:01-B1*05:01L HLA-DRB1*08:01L HLA-DRB1*11:01L HLA-DQA1*05:05-B1*03:19L HLA-DRB1*13:01L
  REGION 1..15: note = CONT. FROM ABOVE: HLA-DRB1*09:01L HLA-DPA1*01:03-B1*04:02L HLA-D PA1*01:03-B1*104:01L HLA-DQA1*05:05-B1*03:01L HLA-DRB1*07:01L HL A-DQA1*01:03-B1*06:01L HLA-DRB1*15:01L
DQALVSDVGDSAEVA

SEQ ID NO: 10892 - protein, 12 aa, Severe acute respiratory syndrome coronavirus 2
  REGION 1..12: note = Table B: HLA-DQA1*05:01-B1*03:01L HLA-DRB1*13:02L HLA-DRB1*04:02L HLA-DRB4*03:01NL HLA-DRB3*02:01L HLA-DPA1*01:03-B1*03:01L HLA-DRB1*14:01L HLA-DRB1*04:10L HLA-DRB1*09:01L HLA-DRB1*12:02L HLA-DQA1*03:01-B1*03:02L
  REGION 1..12: note = CONT. FROM ABOVE: HLA-DRB1*14:54L HLA-DQA1*05:05-B1*03:01L HLA-D RB1*14:17L HLA-DRB1*07:01L HLA-DRB1*04:08L
DAYVNTFSSTFN

SEQ ID NO: 10893 - protein, 12 aa, Severe acute respiratory syndrome coronavirus 2
  REGION 1..12: note = Table B: HLA-DQA1*05:01-B1*03:01L HLA-DRB1*13:03L HLA-DRB1*01:03L HLA-DRB1*04:02L HLA-DRB1*04:05L HLA-DQA1*01:02-B1*06:02L HLA-DRB1*01:02L HLA-DRB1*08:04L HLA-DPA1*01:03-B1*03:01L HLA-DRB1*14:01L HLA-DRB1*11:03L
  REGION 1..12: note = CONT. FROM ABOVE: HLA-DRB1*11:04L HLA-DRB1*14:02L HLA-DRB1*08:01 L HLA-DRB5*01:01L HLA-DQA1*01-B1*05L HLA-DQA1*05:05-B1*03:19L HL A-DRB4*01:01L HLA-DPA1*01:03-B1*04:01L HLA-DRB1*04:10L HLA-DRB1* 09:01L HLA-DRB1*12:02L HLA-DRB3*01:01L HLA-DPA1*02:01-B1*13:01L
  REGION 1..12: note = CONT. FROM ABOVE: HLA-DPA1*03:01-B1*105:01L HLA-DQA1*03:01-B1*03 :02L HLA-DRB1*14:54L HLA-DPA1*01:03-B1*104:01L HLA-DQA1*05:05-B1 *03:01L HLA-DRB1*14:17L HLA-DPA1*01:02-B1*04:01L HLA-DRB1*10:01L HLA-DQA1*01:03-B1*06:01L HLA-DRB1*04:08L HLA-DRB1*08:03L
VNTFSSTFNVPM

SEQ ID NO: 10894 - protein, 11 aa, Severe acute respiratory syndrome coronavirus 2
  REGION 1..11: note = Table B: HLA-DQA1*05:01-B1*03:01L HLA-DRB1*13:02L HLA-DRB1*13:03L HLA-DRB1*04:02L HLA-DRB1*01:02L HLA-DRB4*03:01NL HLA-DRB1*08:77L HLA-DRB3*02:01L HLA-DPA1*03:01-B1*04:02L HLA-DPA1*03:01-B1*105:01L HLA-DRB1*14:17L HLA-DRB1*07:01L
  REGION 1..11: note = CONT. FROM ABOVE: HLA-DRB1*15:03L
TFSSTFNVPME

SEQ ID NO: 10895 - protein, 10 aa, Severe acute respiratory syndrome coronavirus 2
  REGION 1..10: note = Table B: HLA-DQA1*05:01-B1*03:01L HLA-DQA1*03:01-B1*03:02L HLA-DPA1*01:02-B1*04:01L HLA-DQA1*02:01-B1*03:03L
NVPMEKLKTL

SEQ ID NO: 10896 - protein, 14 aa, Severe acute respiratory syndrome coronavirus 2
  REGION 1..14: note = Table B: HLA-DQA1*05:01-B1*03:01L HLA-DRB1*13:02L HLA-DRB1*01:03L HLA-DRB1*04:02L HLA-DRB1*04:04L HLA-DRB1*04:05L HLA-DQA1*01:02-B1*06:02L HLA-DRB1*01:02L HLA-DRB1*08:04L HLA-DPA1*01:03-B1*03:01L HLA-DRB1*14:01L HLA-DRB1*11:04L
  REGION 1..14: note = CONT. FROM ABOVE: HLA-DRB1*08:01L HLA-DRB1*04:10L HLA-DRB1*12:01 L HLA-DPA1*02:01-B1*13:01L HLA-DPA1*03:01-B1*105:01L HLA-DQA1*03 :01-B1*03:02L HLA-DPA1*01:03-B1*104:01L HLA-DQA1*05:05-B1*03:01L HLA-DRB1*10:01L HLA-DRB1*16:01L HLA-DRB1*04:08L
  REGION 1..14: note = CONT. FROM ABOVE: HLA-DQA1*02:01-B1*03:03L HLA-DRB1*15:03L
VPMEKLKTLVATAE

SEQ ID NO: 10897 - protein, 12 aa, Severe acute respiratory syndrome coronavirus 2
  REGION 1..12: note = Table B: HLA-DQA1*05:01-B1*03:01L HLA-DRB1*13:02L HLA-DRB1*04:02L HLA-DRB1*04:05L HLA-DRB4*03:01NL HLA-DRB1*08:77L HLA-DRB3*02:01L HLA-DPA1*01:03-B1*03:01L HLA-DPA1*03:01-B1*04:02L HLA-DRB1*14:01L HLA-DRB1*04:10L
  REGION 1..12: note = CONT. FROM ABOVE: HLA-DRB1*12:02L HLA-DPA1*02:01-B1*13:01L HLA-D PA1*03:01-B1*105:01L HLA-DRB1*14:54L HLA-DRB1*14:17L HLA-DRB1*07 :01L HLA-DRB1*16:01L HLA-DQA1*01:03-B1*06:01L HLA-DRB1*15:03L
LKTLVATAEAEL

SEQ ID NO: 10898 - protein, 11 aa, Severe acute respiratory syndrome coronavirus 2
  REGION 1..11: note = Table B: HLA-DQA1*05:01-B1*03:01L HLA-DRB1*04:03L HLA-DQA1*01:02-B1*06:02L HLA-DQA1*05:01-B1*02:01L HLA-DPA1*03:01-B1*105:01L HLA-DQA1*05:05-B1*03:01L HLA-DRB1*14:17L HLA-DQA1*02:01-B1*03:03L
TAEAELAKNVS

SEQ ID NO: 10899 - protein, 11 aa, Severe acute respiratory syndrome coronavirus 2
  REGION 1..11: note = Table B: HLA-DQA1*05:01-B1*03:01L HLA-DPA1*03:01-B1*04:02L HLA-DPA1*01:02-B1*04:01L
TFISAARQGFV

SEQ ID NO: 10900 - protein, 12 aa, Severe acute respiratory syndrome coronavirus 2
  REGION 1..12: note = Table B: HLA-DQA1*05:01-B1*03:01L HLA-DRB1*13:02L HLA-DRB1*01:03L HLA-DRB1*04:02L HLA-DRB1*04:05L HLA-DQA1*01:02-B1*06:02L HLA-DRB1*01:02L HLA-DRB4*03:01NL HLA-DRB1*08:77L HLA-DPA1*01:03-B1*03:01L HLA-DRB1*11:04L
  REGION 1..12: note = CONT. FROM ABOVE: HLA-DRB1*14:02L HLA-DRB5*01:01L HLA-DQA1*05:05 -B1*03:19L HLA-DRB4*01:01L HLA-DRB1*04:10L HLA-DPA1*01:03-B1*04: 02L HLA-DRB1*12:01L HLA-DRB3*01:01L HLA-DPA1*02:01-B1*13:01L HLA -DPA1*03:01-B1*105:01L HLA-DRB1*14:54L HLA-DQA1*05:05-B1*03:01L
  REGION 1..12: note = CONT. FROM ABOVE: HLA-DRB1*14:17L HLA-DPA1*01:02-B1*04:01L HLA-D RB1*07:01L HLA-DRB1*04:08L HLA-DRB1*15:03L
VDSDVETKDVVE

SEQ ID NO: 10901 - protein, 13 aa, Severe acute respiratory syndrome coronavirus 2
  REGION 1..13: note = Table B: HLA-DQA1*05:01-B1*03:01L HLA-DRB1*01:03L HLA-DRB1*01:02L HLA-DPA1*03:01-B1*105:01L HLA-DRB1*04:08L
SDVETKDVVECLK

SEQ ID NO: 10902 - protein, 18 aa, Severe acute respiratory syndrome coronavirus 2
  REGION 1..18: note = Table B: HLA-DQA1*05:01-B1*03:01L HLA-DRB1*04:03L HLA-DPA1*03:01-B1*04:02L HLA-DRB1*14:02L HLA-DQA1*05:05-B1*03:116L HLA-DPA1*01:03-B1*04:02L HLA-DQA1*05:05-B1*03:01L HLA-DRB1*07:01L HLA-DRB1*08:03L
DVETKDVVECLKLSHQSD

SEQ ID NO: 10903 - protein, 15 aa, Severe acute respiratory syndrome coronavirus 2
  REGION 1..15: note = Table B: HLA-DQA1*05:01-B1*03:01L HLA-DPA1*02:01-B1*13:01L HLA-DQA1*05:05-B1*03:01L
DVVECLKLSHQSDIE

SEQ ID NO: 10904 - protein, 11 aa, Severe acute respiratory syndrome coronavirus 2
  REGION 1..11: note = Table B: HLA-DQA1*05:01-B1*03:01L HLA-DRB1*08:77L HLA-DPA1*03:01-B1*04:02L HLA-DQA1*01-B1*05L HLA-DRB4*01:01L HLA-DPA1*01:03-B1*104:01L HLA-DRB1*10:01L HLA-DRB1*16:01L
IEVTGDSCNNY

SEQ ID NO: 10905 - protein, 12 aa, Severe acute respiratory syndrome coronavirus 2
  REGION 1..12: note = Table B: HLA-DQA1*05:01-B1*03:01L HLA-DRB1*13:03L HLA-DRB1*01:03L HLA-DRB1*04:05L HLA-DRB1*01:02L HLA-DRB4*03:01NL HLA-DRB1*08:04L HLA-DRB1*14:01L HLA-DRB1*08:01L HLA-DQA1*05:01-B1*02:01L HLA-DRB1*04:10L HLA-DRB1*12:01L
  REGION 1..12: note = CONT. FROM ABOVE: HLA-DPA1*02:01-B1*13:01L HLA-DRB1*14:54L HLA-D QA1*05:05-B1*03:01L HLA-DRB1*04:08L HLA-DRB1*08:03L HLA-DRB1*15: 03L
NNYMLTYNKVEN

SEQ ID NO: 10906 - protein, 12 aa, Severe acute respiratory syndrome coronavirus 2
  REGION 1..12: note = Table B: HLA-DQA1*05:01-B1*03:01L HLA-DRB1*01:03L HLA-DRB1*01:02L HLA-DRB1*08:04L HLA-DRB3*02:01L HLA-DPA1*01:03-B1*03:01L HLA-DPA1*03:01-B1*04:02L HLA-DRB1*14:01L HLA-DQA1*05:01-B1*02:01L
  REGION 1..12: note = CONT. FROM ABOVE: HLA-DPA1*01:03-B1*04:01L HLA-DPA1*01:03-B1*04: 02L HLA-DRB1*12:01L HLA-DPA1*02:01-B1*13:01L HLA-DRB1*04:08L HLA -DRB1*15:03L
NYMLTYNKVENM

SEQ ID NO: 10907 - protein, 11 aa, Severe acute respiratory syndrome coronavirus 2
  REGION 1..11: note = Table B: HLA-DQA1*05:01-B1*03:01L HLA-DRB1*04:05L HLA-DRB4*03:01NL HLA-DRB1*16:01L HLA-DQA1*01:03-B1*06:01L
YNKVENMTPRD

SEQ ID NO: 10908 - protein, 14 aa, Severe acute respiratory syndrome coronavirus 2
  REGION 1..14: note = Table B: HLA-DQA1*05:01-B1*03:01L HLA-DRB1*01:03L HLA-DRB1*04:05L HLA-DRB1*01:02L HLA-DRB1*08:01L HLA-DRB1*12:01L HLA-DPA1*02:01-B1*13:01L HLA-DPA1*03:01-B1*105:01L HLA-DQA1*03:01-B1*03:02L HLA-DQA1*05:05-B1*03:01L
  REGION 1..14: note = CONT. FROM ABOVE: HLA-DRB1*16:01L HLA-DRB1*04:08L HLA-DQA1*02:01 -B1*03:03L
TPRDLGACIDCSAR

SEQ ID NO: 10909 - protein, 13 aa, Severe acute respiratory syndrome coronavirus 2
  REGION 1..13: note = Table B: HLA-DQA1*05:01-B1*03:01L HLA-DRB1*04:03L HLA-DRB1*01:03L HLA-DRB1*04:04L HLA-DRB1*04:05L HLA-DQA1*01:02-B1*06:02L HLA-DRB1*08:01L HLA-DRB1*12:01L HLA-DPA1*02:01-B1*13:01L HLA-DRB1*16:01L
  REGION 1..13: note = CONT. FROM ABOVE: HLA-DQA1*01:03-B1*06:01L HLA-DRB1*04:08L
SARHINAQVAKSH

SEQ ID NO: 10910 - protein, 13 aa, Severe acute respiratory syndrome coronavirus 2
  REGION 1..13: note = Table B: HLA-DQA1*05:01-B1*03:01L HLA-DRB1*04:03L HLA-DRB1*13:02L HLA-DRB1*04:02L HLA-DRB1*04:04L HLA-DRB1*04:05L HLA-DRB1*08:04L HLA-DRB1*14:01L HLA-DRB1*11:04L HLA-DRB1*14:02L HLA-DRB1*11:01L HLA-DQA1*05:05-B1*03:19L HLA-DRB3*01:01L
  REGION 1..13: note = CONT. FROM ABOVE: HLA-DQA1*03:01-B1*03:02L HLA-DPA1*01:03-B1*104 :01L HLA-DQA1*05:05-B1*03:01L
IWNVKDFMSLSEQ

SEQ ID NO: 10911 - protein, 13 aa, Severe acute respiratory syndrome coronavirus 2
  REGION 1..13: note = Table B: HLA-DQA1*05:01-B1*03:01L HLA-DRB1*01:03L HLA-DQA1*01:01-B1*05:01L HLA-DRB1*08:01L HLA-DRB1*04:10L HLA-DPA1*02:01-B1*13:01L HLA-DPA1*03:01-B1*105:01L
NVKDFMSLSEQLR

SEQ ID NO: 10912 - protein, 11 aa, Severe acute respiratory syndrome coronavirus 2
  REGION 1..11: note = Table B: HLA-DQA1*05:01-B1*03:01L HLA-DRB1*04:03L HLA-DRB1*01:03L HLA-DRB1*01:02L HLA-DRB1*12:01L HLA-DRB1*14:17L HLA-DRB1*16:01L HLA-DRB1*15:03L
DFMSLSEQLRK

SEQ ID NO: 10913 - protein, 16 aa, Severe acute respiratory syndrome coronavirus 2
  REGION 1..16: note = Table B: HLA-DQA1*05:01-B1*03:01L HLA-DRB1*08:04L
SEQLRKQIRSAAKKNN

SEQ ID NO: 10914 - protein, 11 aa, Severe acute respiratory syndrome coronavirus 2
  REGION 1..11: note = Table B: HLA-DQA1*05:01-B1*03:01L HLA-DRB1*04:03L HLA-DRB1*13:03L HLA-DRB1*04:02L HLA-DRB1*01:02L HLA-DRB1*08:01L HLA-DRB1*14:17L HLA-DPA1*01:02-B1*04:01L HLA-DRB1*16:01L
SAAKKNNLPFK

SEQ ID NO: 10915 - protein, 11 aa, Severe acute respiratory syndrome coronavirus 2
  REGION 1..11: note = Table B: HLA-DQA1*05:01-B1*03:01L HLA-DRB1*04:03L HLA-DQA1*05:05-B1*03:19L HLA-DPA1*03:01-B1*105:01L HLA-DQA1*03:01-B1*03:02L HLA-DQA1*05:05-B1*03:01L HLA-DQA1*02:01-B1*03:03L
LTCATTRQVVN

SEQ ID NO: 10916 - protein, 12 aa, Severe acute respiratory syndrome coronavirus 2
  REGION 1..12: note = Table B: HLA-DQA1*05:01-B1*03:01L HLA-DRB1*01:03L HLA-DRB1*04:05L HLA-DQA1*01:02-B1*06:02L HLA-DRB1*01:02L HLA-DRB1*14:01L HLA-DRB1*08:01L HLA-DRB1*12:01L HLA-DPA1*03:01-B1*105:01L HLA-DPA1*01:02-B1*04:01L
  REGION 1..12: note = CONT. FROM ABOVE: HLA-DRB1*16:01L HLA-DRB1*04:08L HLA-DRB1*15:03 L
VVTTKIALKGGK

SEQ ID NO: 10917 - protein, 10 aa, Severe acute respiratory syndrome coronavirus 2
  REGION 1..10: note = Table B: HLA-DQA1*05:01-B1*03:01L HLA-DRB1*04:03L HLA-DRB1*13:02L HLA-DRB1*13:03L HLA-DRB1*01:03L HLA-DRB1*04:02L HLA-DRB1*01:01L HLA-DRB1*01:02L HLA-DRB4*03:01NL HLA-DRB1*08:77L HLA-DRB1*14:01L HLA-DRB1*11:03L HLA-DRB1*14:02L HLA-DRB1*12:01L
  REGION 1..10: note = CONT. FROM ABOVE: HLA-DRB1*12:02L HLA-DQA1*03:01-B1*03:02L HLA-D RB1*14:54L HLA-DQA1*05:05-B1*03:01L HLA-DRB1*14:17L HLA-DRB1*07: 01L HLA-DRB1*16:01L HLA-DRB1*04:08L HLA-DQA1*02:01-B1*03:03L HLA -DRB1*15:03L
IALKGGKIVN

SEQ ID NO: 10918 - protein, 11 aa, Severe acute respiratory syndrome coronavirus 2
  REGION 1..11: note = Table B: HLA-DQA1*05:01-B1*03:01L HLA-DRB1*01:03L HLA-DRB1*14:02L HLA-DQA1*05:05-B1*03:19L HLA-DPA1*03:01-B1*105:01L
ALKGGKIVNNW

SEQ ID NO: 10919 - protein, 12 aa, Severe acute respiratory syndrome coronavirus 2
  REGION 1..12: note = Table B: HLA-DQA1*05:01-B1*03:01L HLA-DQA1*03:01-B1*03:02L HLA-DQA1*05:05-B1*03:01L
LKGGKIVNNWLK

SEQ ID NO: 10920 - protein, 13 aa, Severe acute respiratory syndrome coronavirus 2
  REGION 1..13: note = Table B: HLA-DQA1*05:01-B1*03:01L HLA-DRB1*04:03L HLA-DRB1*13:03L HLA-DRB1*04:02L HLA-DRB1*08:04L HLA-DPA1*03:01-B1*04:02L HLA-DRB1*11:03L HLA-DRB1*11:04L HLA-DRB1*11:01L HLA-DRB1*13:01L HLA-DPA1*02:01-B1*13:01L
  REGION 1..13: note = CONT. FROM ABOVE: HLA-DPA1*03:01-B1*105:01L HLA-DRB1*14:54L HLA- DPA1*01:03-B1*02:01L
GKIVNNWLKQLIK

SEQ ID NO: 10921 - protein, 10 aa, Severe acute respiratory syndrome coronavirus 2
  REGION 1..10: note = Table B: HLA-DQA1*05:01-B1*03:01L HLA-DRB1*04:03L HLA-DRB1*13:02L HLA-DRB1*01:03L HLA-DRB1*04:02L HLA-DRB1*01:02L HLA-DRB4*03:01NL HLA-DRB3*02:01L HLA-DPA1*03:01-B1*04:02L HLA-DRB1*14:01L HLA-DQA1*05:01-B1*02:01L HLA-DRB1*12:01L
  REGION 1..10: note = CONT. FROM ABOVE: HLA-DPA1*03:01-B1*105:01L HLA-DQA1*03:01-B1*03 :02L HLA-DRB1*14:17L HLA-DPA1*01:02-B1*04:01L HLA-DRB1*16:01L HL A-DQA1*02:01-B1*03:03L HLA-DRB1*15:03L
YLITPVHVMS

SEQ ID NO: 10922 - protein, 12 aa, Severe acute respiratory syndrome coronavirus 2
  REGION 1..12: note = Table B: HLA-DQA1*05:01-B1*03:01L HLA-DRB1*04:03L HLA-DRB1*13:02L HLA-DRB1*04:05L HLA-DQA1*01:02-B1*06:02L HLA-DRB1*01:02L HLA-DRB1*08:04L HLA-DRB1*11:04L HLA-DRB1*11:01L HLA-DRB1*12:01L HLA-DRB3*01:01L HLA-DRB1*14:54L
  REGION 1..12: note = CONT. FROM ABOVE: HLA-DPA1*01:02-B1*04:01L HLA-DQA1*01:03-B1*06: 01L HLA-DRB1*04:08L HLA-DQA1*02:01-B1*03:03L HLA-DRB1*15:03L
ITPVHVMSKHTD

SEQ ID NO: 10923 - protein, 15 aa, Severe acute respiratory syndrome coronavirus 2
  REGION 1..15: note = Table B: HLA-DQA1*05:01-B1*03:01L HLA-DPA1*03:01-B1*04:02L HLA-DRB1*14:02L HLA-DQA1*01-B1*05L HLA-DQA1*05:05-B1*03:19L HLA-DQA1*05:01-B1*02:01L HLA-DPA1*01:03-B1*04:02L HLA-DPA1*02:01-B1*13:01L HLA-DPA1*03:01-B1*105:01L
  REGION 1..15: note = CONT. FROM ABOVE: HLA-DPA1*01:03-B1*02:01L HLA-DPA1*01:02-B1*04: 01L HLA-DQA1*02:01-B1*03:03L
TPVHVMSKHTDFSSE

SEQ ID NO: 10924 - protein, 14 aa, Severe acute respiratory syndrome coronavirus 2
  REGION 1..14: note = Table B: HLA-DQA1*05:01-B1*03:01L HLA-DRB1*13:02L HLA-DRB1*13:03L HLA-DRB1*01:03L HLA-DRB1*01:02L HLA-DPA1*01:03-B1*03:01L HLA-DRB1*08:01L HLA-DQA1*05:05-B1*03:19L HLA-DRB1*04:10L
  REGION 1..14: note = CONT. FROM ABOVE: HLA-DPA1*03:01-B1*105:01L HLA-DQA1*05:05-B1*03 :01L HLA-DRB1*04:08L
VMSKHTDFSSEIIG

SEQ ID NO: 10925 - protein, 10 aa, Severe acute respiratory syndrome coronavirus 2
  REGION 1..10: note = Table B: HLA-DQA1*05:01-B1*03:01L HLA-DRB1*13:03L HLA-DQA1*01:02-B1*06:02L HLA-DRB4*03:01NL HLA-DRB1*08:77L HLA-DPA1*01:03-B1*03:01L HLA-DPA1*03:01-B1*04:02L HLA-DRB1*03:01L HLA-DRB1*11:02L HLA-DQA1*01-B1*05L
  REGION 1..10: note = CONT. FROM ABOVE: HLA-DQA1*05:05-B1*03:19M HLA-DQA1*05:01-B1*02: 01M HLA-DRB4*01:01L HLA-DPA1*01:03-B1*04:01L HLA-DQA1*05:05-B1*0 3:116L HLA-DRB1*12:01L HLA-DPA1*01:03-B1*104:01L HLA-DRB1*10:01L HLA-DRB1*16:01L HLA-DRB1*15:03L
TDFSSEIIGY

SEQ ID NO: 10926 - protein, 12 aa, Severe acute respiratory syndrome coronavirus 2
  REGION 1..12: note = Table B: HLA-DQA1*05:01-B1*03:01L HLA-DQA1*01:02-B1*06:02L HLA-DQA1*01:01-B1*05:01L HLA-DQA1*05:05-B1*03:19L HLA-DQA1*05:01-B1*02:01L HLA-DQA1*05:05-B1*03:01L HLA-DRB1*16:01L HLA-DQA1*01:03-B1*06:01L
DGGVTRDIASTD

SEQ ID NO: 10927 - protein, 12 aa, Severe acute respiratory syndrome coronavirus 2
  REGION 1..12: note = Table B: HLA-DQA1*05:01-B1*03:01L HLA-DRB1*01:03L HLA-DQA1*01:01-B1*05:01L HLA-DQA1*05:05-B1*03:19L HLA-DRB1*04:10L HLA-DRB1*14:54L HLA-DQA1*05:05-B1*03:01L
GGVTRDIASTDT

SEQ ID NO: 10928 - protein, 14 aa, Severe acute respiratory syndrome coronavirus 2
  REGION 1..14: note = Table B: HLA-DQA1*05:01-B1*03:01L HLA-DRB1*04:05L HLA-DRB1*01:02L HLA-DPA1*01:03-B1*03:01L HLA-DRB1*14:01L HLA-DQA1*05:05-B1*03:19L HLA-DQA1*05:01-B1*02:01L HLA-DRB1*12:01L HLA-DPA1*02:01-B1*13:01L
  REGION 1..14: note = CONT. FROM ABOVE: HLA-DPA1*03:01-B1*105:01L HLA-DQA1*05:05-B1*03 :01L HLA-DRB1*16:01L HLA-DRB1*15:03L
VTRDIASTDTCFAN

SEQ ID NO: 10929 - protein, 12 aa, Severe acute respiratory syndrome coronavirus 2
  REGION 1..12: note = Table B: HLA-DQA1*05:01-B1*03:01L HLA-DRB1*04:03L HLA-DRB1*04:02L HLA-DQA1*01:02-B1*06:02L HLA-DPA1*03:01-B1*105:01L HLA-DQA1*03:01-B1*03:02L HLA-DQA1*05:05-B1*03:01L HLA-DRB1*14:17L
DIASTDTCFANK

SEQ ID NO: 10930 - protein, 12 aa, Severe acute respiratory syndrome coronavirus 2
  REGION 1..12: note = Table B: HLA-DQA1*05:01-B1*03:01L HLA-DRB1*04:03L HLA-DQA1*01:02-B1*06:02L HLA-DPA1*03:01-B1*105:01L HLA-DQA1*03:01-B1*03:02L
IASTDTCFANKH

SEQ ID NO: 10931 - protein, 14 aa, Severe acute respiratory syndrome coronavirus 2
  REGION 1..14: note = Table B: HLA-DQA1*05:01-B1*03:01L HLA-DQA1*05:05-B1*03:01L
STDTCFANKHADFD

SEQ ID NO: 10932 - protein, 12 aa, Severe acute respiratory syndrome coronavirus 2
  REGION 1..12: note = Table B: HLA-DQA1*05:01-B1*03:01L HLA-DQA1*02:01-B1*03:03L
FSQRGGSYTNDK

SEQ ID NO: 10933 - protein, 12 aa, Severe acute respiratory syndrome coronavirus 2
  REGION 1..12: note = Table B: HLA-DQA1*05:01-B1*03:01L HLA-DQA1*01:02-B1*06:02L HLA-DQA1*05:05-B1*03:19L HLA-DPA1*03:01-B1*105:01L HLA-DQA1*05:05-B1*03:01L HLA-DQA1*01:03-B1*06:01L HLA-DQA1*02:01-B1*03:03L
DKACPLIAAVIT

SEQ ID NO: 10934 - protein, 12 aa, Severe acute respiratory syndrome coronavirus 2
  REGION 1..12: note = Table B: HLA-DQA1*05:01-B1*03:01L HLA-DRB1*13:02L HLA-DRB1*01:03L HLA-DRB1*04:02L HLA-DRB1*04:05L HLA-DQA1*01:02-B1*06:02L HLA-DRB1*01:01L HLA-DRB1*01:02M HLA-DRB4*03:01NL HLA-DRB3*02:01L HLA-DPA1*01:03-B1*03:01L
  REGION 1..12: note = CONT. FROM ABOVE: HLA-DRB1*14:01L HLA-DRB1*11:03L HLA-DQA1*01-B1 *05L HLA-DQA1*05:05-B1*03:19L HLA-DQA1*05:01-B1*02:01L HLA-DRB1* 12:01L HLA-DPA1*02:01-B1*13:01L HLA-DPA1*03:01-B1*105:01L HLA-DQ A1*03:01-B1*03:02L HLA-DQA1*05:05-B1*03:01L HLA-DRB1*14:17L
  REGION 1..12: note = CONT. FROM ABOVE: HLA-DRB1*07:01L HLA-DRB1*16:01L HLA-DQA1*01:03 -B1*06:01L HLA-DRB1*04:08L HLA-DQA1*02:01-B1*03:03L HLA-DRB1*15: 03L
VITREVGFVVPG

SEQ ID NO: 10935 - protein, 14 aa, Severe acute respiratory syndrome coronavirus 2
  REGION 1..14: note = Table B: HLA-DQA1*05:01-B1*03:01L HLA-DRB1*13:02L HLA-DRB1*01:03L HLA-DRB1*04:02L HLA-DRB1*04:05L HLA-DRB1*01:02L HLA-DPA1*01:03-B1*03:01L HLA-DQA1*01:01-B1*05:01L HLA-DQA1*05:01-B1*02:01L HLA-DRB1*04:10L HLA-DRB1*12:01L
  REGION 1..14: note = CONT. FROM ABOVE: HLA-DPA1*02:01-B1*13:01L HLA-DPA1*03:01-B1*105 :01L HLA-DQA1*05:05-B1*03:01L HLA-DRB1*16:01L HLA-DQA1*01:03-B1* 06:01L HLA-DRB1*04:08L HLA-DRB1*15:03L
ITREVGFVVPGLPG

SEQ ID NO: 10936 - protein, 13 aa, Severe acute respiratory syndrome coronavirus 2
  REGION 1..13: note = Table B: HLA-DQA1*05:01-B1*03:01L HLA-DRB1*13:02L HLA-DRB1*04:02L HLA-DQA1*01-B1*05L HLA-DQA1*03:01-B1*03:02L
NGDFLHFLPRVFS

SEQ ID NO: 10937 - protein, 14 aa, Severe acute respiratory syndrome coronavirus 2
  REGION 1..14: note = Table B: HLA-DQA1*05:01-B1*03:01L HLA-DRB1*13:02L HLA-DRB1*13:03L HLA-DRB1*04:02L HLA-DRB1*11:02L HLA-DRB1*11:03L HLA-DRB1*14:02L HLA-DQA1*05:05-B1*03:19L HLA-DQA1*05:05-B1*03:116L HLA-DRB3*01:01L
  REGION 1..14: note = CONT. FROM ABOVE: HLA-DQA1*05:05-B1*03:01L HLA-DRB1*08:02L HLA-D RB1*08:03L
DFLHFLPRVFSAVG

SEQ ID NO: 10938 - protein, 13 aa, Severe acute respiratory syndrome coronavirus 2
  REGION 1..13: note = Table B: HLA-DQA1*05:01-B1*03:01L HLA-DRB1*04:03L HLA-DRB1*13:02L HLA-DRB1*01:03L HLA-DRB1*01:02L HLA-DPA1*01:03-B1*03:01L HLA-DPA1*03:01-B1*04:02L HLA-DRB1*14:01L HLA-DRB1*12:01L HLA-DPA1*03:01-B1*105:01L
  REGION 1..13: note = CONT. FROM ABOVE: HLA-DPA1*01:03-B1*104:01L HLA-DQA1*05:05-B1*03 :01L HLA-DRB1*16:01L HLA-DRB1*15:03L
LPRVFSAVGNICY

SEQ ID NO: 10939 - protein, 14 aa, Severe acute respiratory syndrome coronavirus 2
  REGION 1..14: note = Table B: HLA-DQA1*05:01-B1*03:01L HLA-DRB1*01:02L HLA-DPA1*03:01-B1*105:01L
VFSAVGNICYTPSK

SEQ ID NO: 10940 - protein, 14 aa, Severe acute respiratory syndrome coronavirus 2
  REGION 1..14: note = Table B: HLA-DQA1*05:01-B1*03:01L HLA-DRB1*13:02L HLA-DRB1*01:03L HLA-DRB1*04:08L
NICYTPSKLIEYTD

SEQ ID NO: 10941 - protein, 14 aa, Severe acute respiratory syndrome coronavirus 2
  REGION 1..14: note = Table B: HLA-DQA1*05:01-B1*03:01L HLA-DRB1*13:02L HLA-DRB1*13:03L HLA-DRB4*03:01NL HLA-DRB1*08:04L HLA-DRB1*08:77L HLA-DRB1*11:02L HLA-DRB1*11:03L HLA-DRB1*11:04L HLA-DRB1*14:02L HLA-DQA1*01:01-B1*05:01L HLA-DRB1*11:01L
  REGION 1..14: note = CONT. FROM ABOVE: HLA-DQA1*05:05-B1*03:19L HLA-DRB1*09:01L HLA-D RB1*12:02L HLA-DRB3*01:01L HLA-DPA1*01:03-B1*02:01L HLA-DPA1*01: 03-B1*104:01L HLA-DQA1*05:05-B1*03:01L HLA-DRB1*07:01L HLA-DRB1* 10:01L HLA-DRB1*08:03L
TPSKLIEYTDFATS

SEQ ID NO: 10942 - protein, 12 aa, Severe acute respiratory syndrome coronavirus 2
  REGION 1..12: note = Table B: HLA-DQA1*05:01-B1*03:01L HLA-DRB1*13:02L HLA-DRB1*04:04L HLA-DRB1*04:05L HLA-DQA1*01:02-B1*06:02L HLA-DRB4*03:01NL HLA-DRB1*08:04L HLA-DRB3*02:01L HLA-DRB1*14:01L HLA-DRB1*11:03L HLA-DRB1*11:04L HLA-DRB1*14:02L HLA-DRB1*08:01L
  REGION 1..12: note = CONT. FROM ABOVE: HLA-DRB1*04:10L HLA-DRB3*01:01L HLA-DPA1*02:01 -B1*13:01L HLA-DRB1*14:54L HLA-DPA1*01:03-B1*02:01L HLA-DQA1*05: 05-B1*03:01L HLA-DRB1*07:01L HLA-DRB1*10:01L HLA-DRB1*08:03L HLA -DRB1*15:01L
KLIEYTDFATSA

SEQ ID NO: 10943 - protein, 12 aa, Severe acute respiratory syndrome coronavirus 2
  REGION 1..12: note = Table B: HLA-DQA1*05:01-B1*03:01L HLA-DQA1*05:05-B1*03:19L HLA-DPA1*03:01-B1*105:01L HLA-DQA1*05:05-B1*03:01L HLA-DQA1*02:01-B1*03:03L
DFATSACVLAAE

SEQ ID NO: 10944 - protein, 14 aa, Severe acute respiratory syndrome coronavirus 2
  REGION 1..14: note = Table B: HLA-DQA1*05:01-B1*03:01L HLA-DRB1*01:02L HLA-DQA1*05:05-B1*03:19L
VLAAECTIFKDASG

SEQ ID NO: 10945 - protein, 12 aa, Severe acute respiratory syndrome coronavirus 2
  REGION 1..12: note = Table B: HLA-DQA1*05:01-B1*03:01L
YDTNVLEGSVAY

SEQ ID NO: 10946 - protein, 11 aa, Severe acute respiratory syndrome coronavirus 2
  REGION 1..11: note = Table B: HLA-DQA1*05:01-B1*03:01L HLA-DQA1*01:02-B1*06:02L HLA-DQA1*05:05-B1*03:19L HLA-DQA1*05:01-B1*02:01L HLA-DQA1*05:05-B1*03:01L HLA-DQA1*01:03-B1*06:01L HLA-DQA1*02:01-B1*03:03L
VLEGSVAYESL

SEQ ID NO: 10947 - protein, 11 aa, Severe acute respiratory syndrome coronavirus 2
  REGION 1..11: note = Table B: HLA-DQA1*05:01-B1*03:01L HLA-DQA1*01:02-B1*06:02L HLA-DQA1*05:05-B1*03:19L
LEGSVAYESLR

SEQ ID NO: 10948 - protein, 11 aa, Severe acute respiratory syndrome coronavirus 2
  REGION 1..11: note = Table B: HLA-DQA1*05:01-B1*03:01L HLA-DRB1*04:02L HLA-DQA1*01:02-B1*06:02L
GSVAYESLRPD

SEQ ID NO: 10949 - protein, 11 aa, Severe acute respiratory syndrome coronavirus 2
  REGION 1..11: note = Table B: HLA-DQA1*05:01-B1*03:01L HLA-DRB1*13:03L HLA-DRB1*01:03L HLA-DRB1*04:05L HLA-DRB1*01:01L HLA-DRB3*02:01L HLA-DRB1*11:03L HLA-DQA1*05:05-B1*03:19L HLA-DRB1*12:02L HLA-DPA1*03:01-B1*105:01L HLA-DQA1*03:01-B1*03:02L
  REGION 1..11: note = CONT. FROM ABOVE: HLA-DRB1*14:54L HLA-DQA1*05:05-B1*03:01L HLA-D PA1*01:02-B1*04:01L HLA-DRB1*07:01L HLA-DRB1*10:01L HLA-DRB1*04: 08L
RYVLMDGSIIQ

SEQ ID NO: 10950 - protein, 11 aa, Severe acute respiratory syndrome coronavirus 2
  REGION 1..11: note = Table B: HLA-DQA1*05:01-B1*03:01L HLA-DRB1*13:02L HLA-DRB1*13:03L HLA-DRB1*01:03L HLA-DRB1*04:05L HLA-DRB4*03:01NL HLA-DRB3*02:01L HLA-DRB1*14:01L HLA-DRB1*11:03L HLA-DQA1*05:01-B1*02:01L HLA-DRB1*04:10L
  REGION 1..11: note = CONT. FROM ABOVE: HLA-DPA1*03:01-B1*105:01L HLA-DQA1*03:01-B1*03 :02L HLA-DRB1*14:54L HLA-DQA1*01:03-B1*06:01L
IIQFPNTYLEG

SEQ ID NO: 10951 - protein, 11 aa, Severe acute respiratory syndrome coronavirus 2
  REGION 1..11: note = Table B: HLA-DQA1*05:01-B1*03:01L HLA-DRB1*01:03L HLA-DRB1*04:02L HLA-DQA1*01:02-B1*06:02L HLA-DRB1*14:01L HLA-DQA1*02:01-B1*03:03L
YLEGSVRVVTT

SEQ ID NO: 10952 - protein, 12 aa, Severe acute respiratory syndrome coronavirus 2
  REGION 1..12: note = Table B: HLA-DQA1*05:01-B1*03:01L HLA-DQA1*05:05-B1*03:19L HLA-DPA1*03:01-B1*105:01L HLA-DQA1*05:05-B1*03:01L
LEGSVRVVTTFD

SEQ ID NO: 10953 - protein, 13 aa, Severe acute respiratory syndrome coronavirus 2
  REGION 1..13: note = Table B: HLA-DQA1*05:01-B1*03:01L HLA-DRB1*13:02L HLA-DRB1*04:02L HLA-DRB1*04:04L HLA-DPA1*03:01-B1*04:02L HLA-DRB1*14:01L HLA-DRB1*08:01L HLA-DQA1*05:05-B1*03:01L HLA-DPA1*01:02-B1*04:01L
VVTTFDSEYCRHG

SEQ ID NO: 10954 - protein, 16 aa, Severe acute respiratory syndrome coronavirus 2
  REGION 1..16: note = Table B: HLA-DQA1*05:01-B1*03:01L HLA-DRB1*13:02L HLA-DRB1*01:03L HLA-DRB1*14:01L HLA-DRB1*08:01L HLA-DRB1*12:01L HLA-DRB3*01:01L HLA-DPA1*03:01-B1*105:01L HLA-DQA1*05:05-B1*03:01L HLA-DRB1*16:01L HLA-DRB1*15:03L
DSEYCRHGTCERSEAG

SEQ ID NO: 10955 - protein, 12 aa, Severe acute respiratory syndrome coronavirus 2
  REGION 1..12: note = Table B: HLA-DQA1*05:01-B1*03:01L HLA-DQA1*01:02-B1*06:02L HLA-DQA1*05:05-B1*03:19L HLA-DQA1*05:05-B1*03:01L HLA-DQA1*01:03-B1*06:01L
RSEAGVCVSTSG

SEQ ID NO: 10956 - protein, 15 aa, Severe acute respiratory syndrome coronavirus 2
  REGION 1..15: note = Table B: HLA-DQA1*05:01-B1*03:01L HLA-DRB1*03:01L HLA-DRB1*11:01L
SGRWVLNNDYYRSLP

SEQ ID NO: 10957 - protein, 12 aa, Severe acute respiratory syndrome coronavirus 2
  REGION 1..12: note = Table B: HLA-DQA1*05:01-B1*03:01L HLA-DRB1*04:03L HLA-DRB1*01:03L HLA-DRB1*04:02L HLA-DRB1*04:05L HLA-DQA1*01:02-B1*06:02L HLA-DRB1*01:02L HLA-DPA1*01:03-B1*03:01L HLA-DPA1*03:01-B1*04:02L
  REGION 1..12: note = CONT. FROM ABOVE: HLA-DRB1*14:01L HLA-DRB1*08:01L HLA-DQA1*05:01 -B1*02:01L HLA-DPA1*01:03-B1*04:01L HLA-DPA1*01:03-B1*04:02L HLA -DRB1*12:01L HLA-DPA1*03:01-B1*105:01L HLA-DQA1*03:01-B1*03:02L HLA-DPA1*01:03-B1*02:01L HLA-DRB1*16:01L
  REGION 1..12: note = CONT. FROM ABOVE: HLA-DQA1*01:03-B1*06:01L HLA-DRB1*04:08L HLA-D QA1*02:01-B1*03:03L HLA-DRB1*15:03L
VLNNDYYRSLPG

SEQ ID NO: 10958 - protein, 11 aa, Severe acute respiratory syndrome coronavirus 2
  REGION 1..11: note = Table B: HLA-DQA1*05:01-B1*03:01L HLA-DQA1*05:01-B1*02:01L HLA-DPA1*03:01-B1*105:01L HLA-DQA1*02:01-B1*03:03L HLA-DRB1*15:03L
GVDAVNLLTNM

SEQ ID NO: 10959 - protein, 12 aa, Severe acute respiratory syndrome coronavirus 2
  REGION 1..12: note = Table B: HLA-DQA1*05:01-B1*03:01L HLA-DRB1*13:02L HLA-DQA1*01:02-B1*06:02L HLA-DRB1*01:02L HLA-DRB3*02:01L HLA-DPA1*01:03-B1*03:01L HLA-DRB1*14:01L HLA-DQA1*05:01-B1*02:01L HLA-DPA1*01:03-B1*04:01L
  REGION 1..12: note = CONT. FROM ABOVE: HLA-DPA1*03:01-B1*105:01L HLA-DRB1*14:17L HLA- DRB1*16:01L HLA-DQA1*02:01-B1*03:03L HLA-DRB1*15:03L
AVNLLTNMFTPL

SEQ ID NO: 10960 - protein, 15 aa, Severe acute respiratory syndrome coronavirus 2
  REGION 1..15: note = Table B: HLA-DQA1*05:01-B1*03:01L HLA-DRB1*13:02L HLA-DRB1*01:03L HLA-DRB1*08:04L HLA-DPA1*01:03-B1*03:01L HLA-DQA1*05:05-B1*03:19L HLA-DPA1*02:01-B1*13:01L HLA-DQA1*03:01-B1*03:02L HLA-DPA1*01:03-B1*02:01L
  REGION 1..15: note = CONT. FROM ABOVE: HLA-DQA1*05:05-B1*03:01L HLA-DRB1*10:01L HLA-D QA1*02:01-B1*03:03L
VNLLTNMFTPLIQPI

SEQ ID NO: 10961 - protein, 12 aa, Severe acute respiratory syndrome coronavirus 2
  REGION 1..12: note = Table B: HLA-DQA1*05:01-B1*03:01L HLA-DRB1*04:05L HLA-DQA1*01:02-B1*06:02L HLA-DRB1*01:02L HLA-DQA1*05:05-B1*03:19L HLA-DRB1*04:10L HLA-DRB1*12:01L HLA-DPA1*03:01-B1*105:01L HLA-DQA1*05:05-B1*03:01L
  REGION 1..12: note = CONT. FROM ABOVE: HLA-DRB1*10:01L HLA-DRB1*16:01L HLA-DQA1*01:03 -B1*06:01L HLA-DRB1*04:08L
FTPLIQPIGALD

SEQ ID NO: 10962 - protein, 12 aa, Severe acute respiratory syndrome coronavirus 2
  REGION 1..12: note = Table B: HLA-DQA1*05:01-B1*03:01L HLA-DRB1*01:02L HLA-DQA1*05:01-B1*02:01L HLA-DRB1*12:01L HLA-DPA1*03:01-B1*105:01L HLA-DRB1*16:01L HLA-DQA1*02:01-B1*03:03L HLA-DRB1*15:03L
PLIQPIGALDIS

SEQ ID NO: 10963 - protein, 11 aa, Severe acute respiratory syndrome coronavirus 2
  REGION 1..11: note = Table B: HLA-DQA1*05:01-B1*03:01L HLA-DQA1*01:02-B1*06:02L HLA-DQA1*05:05-B1*03:19L HLA-DQA1*05:05-B1*03:01L HLA-DQA1*01:03-B1*06:01L HLA-DQA1*02:01-B1*03:03L
ISASIVAGGIV

SEQ ID NO: 10964 - protein, 12 aa, Severe acute respiratory syndrome coronavirus 2
  REGION 1..12: note = Table B: HLA-DQA1*05:01-B1*03:01L HLA-DRB1*13:02L HLA-DRB1*01:03L HLA-DRB1*04:02L HLA-DRB1*04:04L HLA-DRB1*04:05L HLA-DRB1*01:02L HLA-DRB4*03:01NL HLA-DRB1*08:04L HLA-DRB1*08:77L HLA-DRB3*02:01L HLA-DPA1*03:01-B1*04:02L HLA-DRB1*14:01L
  REGION 1..12: note = CONT. FROM ABOVE: HLA-DRB1*11:03L HLA-DRB1*11:04L HLA-DQA1*01:01 -B1*05:01L HLA-DRB1*08:01L HLA-DRB5*01:01L HLA-DRB4*01:01L HLA-D RB1*04:10L HLA-DRB1*09:01L HLA-DPA1*01:03-B1*04:02L HLA-DRB1*12: 01L HLA-DRB1*12:02L HLA-DRB1*14:54L HLA-DPA1*01:03-B1*104:01L
  REGION 1..12: note = CONT. FROM ABOVE: HLA-DQA1*05:05-B1*03:01L HLA-DRB1*14:17L HLA-D PA1*01:02-B1*04:01L HLA-DRB1*07:01L HLA-DRB1*10:01L HLA-DRB1*04: 08L HLA-DRB1*08:03L
TPVYSFLPGVYS

SEQ ID NO: 10965 - protein, 11 aa, Severe acute respiratory syndrome coronavirus 2
  REGION 1..11: note = Table B: HLA-DQA1*05:01-B1*03:01L HLA-DRB1*04:05L HLA-DQA1*01:02-B1*06:02L HLA-DRB1*01:02L HLA-DRB1*08:04L HLA-DRB3*02:01L HLA-DPA1*01:03-B1*03:01L HLA-DPA1*03:01-B1*04:02L HLA-DRB1*14:02L
  REGION 1..11: note = CONT. FROM ABOVE: HLA-DPA1*01:02-B1*04:01L HLA-DRB1*04:08L HLA-D RB1*15:03L
YLTNDVSFLAH

SEQ ID NO: 10966 - protein, 11 aa, Severe acute respiratory syndrome coronavirus 2
  REGION 1..11: note = Table B: HLA-DQA1*05:01-B1*03:01L HLA-DRB1*04:02L HLA-DQA1*01:02-B1*06:02L HLA-DQA1*05:05-B1*03:01L HLA-DRB1*14:17L HLA-DRB1*16:01L
TNDVSFLAHIQ

SEQ ID NO: 10967 - protein, 11 aa, Severe acute respiratory syndrome coronavirus 2
  REGION 1..11: note = Table B: HLA-DQA1*05:01-B1*03:01L HLA-DRB1*04:03L HLA-DQA1*01:02-B1*06:02L HLA-DPA1*03:01-B1*105:01L HLA-DQA1*03:01-B1*03:02L HLA-DQA1*01:03-B1*06:01L HLA-DQA1*02:01-B1*03:03L
IAYIICISTKH

SEQ ID NO: 10968 - protein, 14 aa, Severe acute respiratory syndrome coronavirus 2
  REGION 1..14: note = Table B: HLA-DQA1*05:01-B1*03:01L HLA-DRB1*13:03L HLA-DRB1*11:04L HLA-DRB1*11:01L
TKHFYWFFSNYLKR

SEQ ID NO: 10969 - protein, 14 aa, Severe acute respiratory syndrome coronavirus 2
  REGION 1..14: note = Table B: HLA-DQA1*05:01-B1*03:01L HLA-DRB1*04:01L HLA-DRB1*11:04L HLA-DRB1*11:01L
KHFYWFFSNYLKRR

SEQ ID NO: 10970 - protein, 12 aa, Severe acute respiratory syndrome coronavirus 2
  REGION 1..12: note = Table B: HLA-DQA1*05:01-B1*03:01L HLA-DQA1*05:05-B1*03:19L HLA-DPA1*01:03-B1*04:01L HLA-DPA1*01:03-B1*04:02L HLA-DQA1*05:05-B1*03:01L
VFNGVSFSTFEE

SEQ ID NO: 10971 - protein, 11 aa, Severe acute respiratory syndrome coronavirus 2
  REGION 1..11: note = Table B: HLA-DQA1*05:01-B1*03:01L HLA-DRB1*04:03L HLA-DQA1*01:02-B1*06:02L HLA-DPA1*03:01-B1*04:02L HLA-DQA1*05:05-B1*03:19L HLA-DPA1*01:03-B1*04:01L HLA-DPA1*01:03-B1*04:02L HLA-DRB1*12:01L
  REGION 1..11: note = CONT. FROM ABOVE: HLA-DPA1*02:01-B1*13:01L HLA-DPA1*03:01-B1*105 :01L HLA-DQA1*03:01-B1*03:02L HLA-DPA1*01:02-B1*04:01L HLA-DRB1* 16:01L HLA-DQA1*02:01-B1*03:03L HLA-DRB1*15:03L
VSFSTFEEAAL

SEQ ID NO: 10972 - protein, 13 aa, Severe acute respiratory syndrome coronavirus 2
  REGION 1..13: note = Table B: HLA-DQA1*05:01-B1*03:01L HLA-DQA1*05:05-B1*03:19L HLA-DQA1*05:05-B1*03:01L
EEAALCTFLLNKE

SEQ ID NO: 10973 - protein, 10 aa, Severe acute respiratory syndrome coronavirus 2
  REGION 1..10: note = Table B: HLA-DQA1*05:01-B1*03:01L HLA-DRB1*13:02L HLA-DRB1*01:03L HLA-DRB1*01:02L HLA-DRB1*14:01L HLA-DRB1*12:01L HLA-DQA1*03:01-B1*03:02L HLA-DPA1*01:02-B1*04:01L HLA-DRB1*16:01L HLA-DQA1*02:01-B1*03:03L HLA-DRB1*15:03L
FLLNKEMYLK

SEQ ID NO: 10974 - protein, 14 aa, Severe acute respiratory syndrome coronavirus 2
  REGION 1..14: note = Table B: HLA-DQA1*05:01-B1*03:01L HLA-DRB1*04:03L HLA-DRB1*08:04L
YLKLRSDVLLPLTQ

SEQ ID NO: 10975 - protein, 10 aa, Severe acute respiratory syndrome coronavirus 2
  REGION 1..10: note = Table B: HLA-DQA1*05:01-B1*03:01L HLA-DRB1*13:03L HLA-DQA1*01:02-B1*06:02L HLA-DRB4*03:01NL HLA-DRB1*08:77M HLA-DPA1*01:03-B1*03:01M HLA-DPA1*03:01-B1*04:02L HLA-DRB1*03:01L HLA-DRB1*11:02L HLA-DQA1*01-B1*05L
  REGION 1..10: note = CONT. FROM ABOVE: HLA-DQA1*05:05-B1*03:19M HLA-DQA1*05:01-B1*02: 01M HLA-DRB4*01:01L HLA-DPA1*01:03-B1*04:01L HLA-DQA1*05:05-B1*0 3:116L HLA-DPA1*01:03-B1*04:02L HLA-DRB1*12:01L HLA-DPA1*01:03-B 1*104:01M HLA-DRB1*10:01L HLA-DRB1*16:01M HLA-DRB1*15:03L
SDVLLPLTQY

SEQ ID NO: 10976 - protein, 10 aa, Severe acute respiratory syndrome coronavirus 2
  REGION 1..10: note = Table B: HLA-DQA1*05:01-B1*03:01L HLA-DRB1*04:03L HLA-DRB1*13:03L HLA-DRB1*01:03L HLA-DQA1*01:02-B1*06:02L HLA-DRB1*08:77L HLA-DPA1*01:03-B1*03:01L HLA-DPA1*03:01-B1*04:02L HLA-DRB1*03:01L HLA-DRB1*14:01L
  REGION 1..10: note = CONT. FROM ABOVE: HLA-DRB1*11:02L HLA-DRB1*14:02L HLA-DQA1*01-B1 *05L HLA-DQA1*05:05-B1*03:19M HLA-DQA1*05:01-B1*02:01L HLA-DRB4* 01:01L HLA-DPA1*01:03-B1*04:01L HLA-DQA1*05:05-B1*03:116L HLA-DP A1*01:03-B1*04:02L HLA-DRB1*12:01L HLA-DPA1*02:01-B1*13:01L
  REGION 1..10: note = CONT. FROM ABOVE: HLA-DPA1*03:01-B1*105:01L HLA-DPA1*01:03-B1*10 4:01L HLA-DQA1*05:05-B1*03:01L HLA-DPA1*01:02-B1*04:01L HLA-DRB1 *10:01L HLA-DRB1*16:01L HLA-DQA1*01:03-B1*06:01L HLA-DRB1*08:02L HLA-DQA1*02:01-B1*03:03L HLA-DRB1*15:03L
LLPLTQYNRY

SEQ ID NO: 10977 - protein, 10 aa, Severe acute respiratory syndrome coronavirus 2
  REGION 1..10: note = Table B: HLA-DQA1*05:01-B1*03:01L HLA-DRB1*01:03L HLA-DQA1*01:02-B1*06:02L HLA-DRB1*03:01L HLA-DQA1*05:05-B1*03:19L HLA-DQA1*05:01-B1*02:01L HLA-DRB1*16:01L HLA-DQA1*01:03-B1*06:01L
  REGION 1..10: note = CONT. FROM ABOVE: HLA-DQA1*02:01-B1*03:03L
NRYLALYNKY

SEQ ID NO: 10978 - protein, 10 aa, Severe acute respiratory syndrome coronavirus 2
  REGION 1..10: note = Table B: HLA-DQA1*05:01-B1*03:01L HLA-DRB1*01:03L HLA-DQA1*01:02-B1*06:02L HLA-DRB1*08:77L HLA-DPA1*01:03-B1*03:01L HLA-DPA1*03:01-B1*04:02L HLA-DRB1*03:01L HLA-DRB1*14:01L HLA-DRB1*11:02L HLA-DRB1*14:02L
  REGION 1..10: note = CONT. FROM ABOVE: HLA-DQA1*01-B1*05L HLA-DQA1*05:05-B1*03:19M HL A-DQA1*05:01-B1*02:01L HLA-DRB4*01:01L HLA-DPA1*01:03-B1*04:01L HLA-DQA1*05:05-B1*03:116L HLA-DPA1*01:03-B1*04:02L HLA-DRB1*12:0 1L HLA-DPA1*02:01-B1*13:01L HLA-DPA1*03:01-B1*105:01L
  REGION 1..10: note = CONT. FROM ABOVE: HLA-DPA1*01:03-B1*104:01L HLA-DRB1*10:01L HLA- DRB1*16:01L HLA-DQA1*01:03-B1*06:01L HLA-DQA1*02:01-B1*03:03L HL A-DRB1*15:03L
YLALYNKYKY

SEQ ID NO: 10979 - protein, 11 aa, Severe acute respiratory syndrome coronavirus 2
  REGION 1..11: note = Table B: HLA-DQA1*05:01-B1*03:01L HLA-DRB1*01:03L HLA-DPA1*03:01-B1*04:02L HLA-DRB1*03:01L HLA-DRB1*11:02L HLA-DRB1*14:02L HLA-DRB4*01:01L HLA-DPA1*01:03-B1*04:02L HLA-DPA1*02:01-B1*13:01L HLA-DPA1*03:01-B1*105:01L
  REGION 1..11: note = CONT. FROM ABOVE: HLA-DRB1*10:01L HLA-DQA1*01:03-B1*06:01L HLA-D RB1*15:03L
YFSGAMDTTSY

SEQ ID NO: 10980 - protein, 10 aa, Severe acute respiratory syndrome coronavirus 2
  REGION 1..10: note = Table B: HLA-DQA1*05:01-B1*03:01L HLA-DRB1*04:03L HLA-DRB1*13:03L HLA-DRB1*04:02L HLA-DRB4*03:01NL HLA-DRB1*12:01L HLA-DQA1*03:01-B1*03:02L HLA-DQA1*05:05-B1*03:01L HLA-DRB1*14:17L HLA-DQA1*01:03-B1*06:01L
  REGION 1..10: note = CONT. FROM ABOVE: HLA-DQA1*02:01-B1*03:03L
SGAMDTTSYR

SEQ ID NO: 10981 - protein, 11 aa, Severe acute respiratory syndrome coronavirus 2
  REGION 1..11: note = Table B: HLA-DQA1*05:01-B1*03:01L HLA-DRB1*13:02L HLA-DRB1*04:05L HLA-DQA1*01:02-B1*06:02L HLA-DRB1*01:02L HLA-DRB1*08:77L HLA-DPA1*01:03-B1*03:01L HLA-DPA1*03:01-B1*04:02L HLA-DQA1*05:05-B1*03:19L
  REGION 1..11: note = CONT. FROM ABOVE: HLA-DPA1*01:03-B1*04:01L HLA-DRB1*04:10L HLA-D PA1*01:03-B1*04:02L HLA-DQA1*05:05-B1*03:01L HLA-DQA1*01:03-B1*0 6:01L HLA-DRB1*04:08L HLA-DRB1*15:03L
GAMDTTSYREA

SEQ ID NO: 10982 - protein, 11 aa, Severe acute respiratory syndrome coronavirus 2
  REGION 1..11: note = Table B: HLA-DQA1*05:01-B1*03:01L HLA-DQA1*01:02-B1*06:02L HLA-DQA1*05:05-B1*03:19L HLA-DPA1*01:03-B1*04:02L HLA-DQA1*05:05-B1*03:01L
AMDTTSYREAA

SEQ ID NO: 10983 - protein, 13 aa, Severe acute respiratory syndrome coronavirus 2
  REGION 1..13: note = Table B: HLA-DQA1*05:01-B1*03:01L HLA-DRB1*13:02L HLA-DRB1*04:04L HLA-DQA1*01:02-B1*06:02L HLA-DRB1*01:01L HLA-DPA1*01:03-B1*03:01L HLA-DRB1*11:04L HLA-DRB1*08:01L HLA-DRB1*11:01L HLA-DRB3*01:01L HLA-DPA1*02:01-B1*13:01L
  REGION 1..13: note = CONT. FROM ABOVE: HLA-DPA1*03:01-B1*105:01L HLA-DQA1*03:01-B1*03 :02L HLA-DPA1*01:02-B1*04:01L HLA-DRB1*07:01L HLA-DQA1*02:01-B1* 03:03L
TSYREAACCHLAK

SEQ ID NO: 10984 - protein, 13 aa, Severe acute respiratory syndrome coronavirus 2
  REGION 1..13: note = Table B: HLA-DQA1*05:01-B1*03:01L HLA-DPA1*03:01-B1*04:02L HLA-DPA1*02:01-B1*13:01L HLA-DPA1*03:01-B1*105:01L HLA-DQA1*05:05-B1*03:01L HLA-DQA1*01:03-B1*06:01L
ALNDFSNSGSDVL

SEQ ID NO: 10985 - protein, 14 aa, Severe acute respiratory syndrome coronavirus 2
  REGION 1..14: note = Table B: HLA-DQA1*05:01-B1*03:01L HLA-DPA1*03:01-B1*105:01L
DFSNSGSDVLYQPP

SEQ ID NO: 10986 - protein, 14 aa, Severe acute respiratory syndrome coronavirus 2
  REGION 1..14: note = Table B: HLA-DQA1*05:01-B1*03:01L HLA-DPA1*03:01-B1*105:01L
FSNSGSDVLYQPPQ

SEQ ID NO: 10987 - protein, 10 aa, Severe acute respiratory syndrome coronavirus 2
  REGION 1..10: note = Table B: HLA-DQA1*05:01-B1*03:01L HLA-DPA1*03:01-B1*04:02L HLA-DQA1*03:01-B1*03:02L HLA-DPA1*01:02-B1*04:01L HLA-DRB1*16:01L HLA-DQA1*01:03-B1*06:01L HLA-DQA1*02:01-B1*03:03L
AVLQSGFRKM

SEQ ID NO: 10988 - protein, 12 aa, Severe acute respiratory syndrome coronavirus 2
  REGION 1..12: note = Table B: HLA-DQA1*05:01-B1*03:01L HLA-DRB1*04:03L HLA-DRB1*01:03L HLA-DRB1*04:02L HLA-DRB1*04:04L HLA-DRB1*04:05L HLA-DQA1*01:02-B1*06:02L HLA-DRB1*01:02L HLA-DRB1*14:01L HLA-DRB1*08:01L HLA-DRB1*12:01L HLA-DRB1*14:17L HLA-DRB1*16:01L
  REGION 1..12: note = CONT. FROM ABOVE: HLA-DRB1*04:08L HLA-DQA1*02:01-B1*03:03L HLA-D RB1*15:03L
FRKMAFPSGKVE

SEQ ID NO: 10989 - protein, 14 aa, Severe acute respiratory syndrome coronavirus 2
  REGION 1..14: note = Table B: HLA-DQA1*05:01-B1*03:01L
TSEDMLNPNYEDLL

SEQ ID NO: 10990 - protein, 12 aa, Severe acute respiratory syndrome coronavirus 2
  REGION 1..12: note = Table B: HLA-DQA1*05:01-B1*03:01L HLA-DRB1*01:03L HLA-DRB1*04:05L HLA-DQA1*01:02-B1*06:02L HLA-DRB1*01:02L HLA-DRB1*08:01L HLA-DPA1*03:01-B1*105:01L HLA-DQA1*05:05-B1*03:01L HLA-DPA1*01:02-B1*04:01L
  REGION 1..12: note = CONT. FROM ABOVE: HLA-DRB1*16:01L HLA-DRB1*04:08L
YEDLLIRKSNHN

SEQ ID NO: 10991 - protein, 13 aa, Severe acute respiratory syndrome coronavirus 2
  REGION 1..13: note = Table B: HLA-DQA1*05:01-B1*03:01L HLA-DRB1*04:03L HLA-DRB1*13:03L HLA-DRB3*02:01L HLA-DRB1*11:04L HLA-DQA1*05:01-B1*02:01L HLA-DRB1*12:02L HLA-DRB3*01:01L HLA-DPA1*02:01-B1*13:01L HLA-DPA1*03:01-B1*105:01L
  REGION 1..13: note = CONT. FROM ABOVE: HLA-DRB1*14:17L HLA-DPA1*01:02-B1*04:01L
EDLLIRKSNHNFL

SEQ ID NO: 10992 - protein, 14 aa, Severe acute respiratory syndrome coronavirus 2
  REGION 1..14: note = Table B: HLA-DQA1*05:01-B1*03:01L HLA-DRB1*13:02L HLA-DRB1*04:05L HLA-DRB1*01:02L HLA-DPA1*01:03-B1*03:01L HLA-DRB1*08:01L HLA-DRB1*12:01L HLA-DPA1*02:01-B1*13:01L HLA-DPA1*03:01-B1*105:01L HLA-DPA1*01:02-B1*04:01L
  REGION 1..14: note = CONT. FROM ABOVE: HLA-DRB1*16:01L HLA-DRB1*04:08L HLA-DRB1*15:03 L
IRKSNHNFLVQAGN

SEQ ID NO: 10993 - protein, 11 aa, Severe acute respiratory syndrome coronavirus 2
  REGION 1..11: note = Table B: HLA-DQA1*05:01-B1*03:01L HLA-DRB1*13:03L HLA-DRB1*01:03L HLA-DRB1*04:02L HLA-DRB1*04:05L HLA-DQA1*01:02-B1*06:02L HLA-DRB4*03:01NL HLA-DPA1*01:03-B1*03:01L HLA-DQA1*01:01-B1*05:01L
  REGION 1..11: note = CONT. FROM ABOVE: HLA-DRB1*08:01L HLA-DQA1*05:05-B1*03:19L HLA-D RB1*04:10L HLA-DRB1*12:01L HLA-DPA1*03:01-B1*105:01L HLA-DRB1*14 :54L HLA-DQA1*05:05-B1*03:01L HLA-DRB1*14:17L HLA-DRB1*16:01L HL A-DQA1*01:03-B1*06:01L HLA-DRB1*04:08L
HNFLVQAGNVQ

SEQ ID NO: 10994 - protein, 10 aa, Severe acute respiratory syndrome coronavirus 2
  REGION 1..10: note = Table B: HLA-DQA1*05:01-B1*03:01L HLA-DRB1*04:03L HLA-DRB1*13:02L HLA-DRB1*13:03L HLA-DRB1*01:03L HLA-DRB1*04:02L HLA-DRB1*04:04L HLA-DQA1*01:02-B1*06:02L HLA-DRB1*01:01L HLA-DRB1*01:02L HLA-DRB4*03:01NL HLA-DRB1*08:77L HLA-DRB3*02:01L
  REGION 1..10: note = CONT. FROM ABOVE: HLA-DRB1*14:01L HLA-DRB1*11:04L HLA-DRB1*14:02 L HLA-DRB1*08:01L HLA-DRB5*01:01L HLA-DQA1*05:05-B1*03:19L HLA-D PA1*01:03-B1*04:02L HLA-DRB1*12:01L HLA-DRB1*12:02L HLA-DPA1*03: 01-B1*105:01L HLA-DQA1*03:01-B1*03:02M HLA-DRB1*14:54L
  REGION 1..10: note = CONT. FROM ABOVE: HLA-DQA1*05:05-B1*03:01L HLA-DRB1*14:17L HLA-D PA1*01:02-B1*04:01L HLA-DRB1*16:01L HLA-DQA1*01:03-B1*06:01L HLA -DQA1*02:01-B1*03:03L HLA-DRB1*15:01L HLA-DRB1*15:03L
LVQAGNVQLR

SEQ ID NO: 10995 - protein, 10 aa, Severe acute respiratory syndrome coronavirus 2
  REGION 1..10: note = Table B: HLA-DQA1*05:01-B1*03:01L HLA-DQA1*01:02-B1*06:02L HLA-DQA1*03:01-B1*03:02L HLA-DQA1*01:03-B1*06:01L HLA-DQA1*02:01-B1*03:03L
AGNVQLRVIG

SEQ ID NO: 10996 - protein, 12 aa, Severe acute respiratory syndrome coronavirus 2
  REGION 1..12: note = Table B: HLA-DQA1*05:01-B1*03:01L HLA-DRB1*13:02L HLA-DRB1*04:04L HLA-DRB1*04:05L HLA-DQA1*01:02-B1*06:02L HLA-DRB1*01:02L HLA-DRB4*03:01NL HLA-DRB1*08:04L HLA-DPA1*01:03-B1*03:01L HLA-DRB1*11:03L HLA-DRB1*11:04L
  REGION 1..12: note = CONT. FROM ABOVE: HLA-DRB1*11:01L HLA-DRB1*04:10L HLA-DRB1*12:01 L HLA-DRB3*01:01L HLA-DPA1*02:01-B1*13:01L HLA-DPA1*03:01-B1*105 :01L HLA-DRB1*14:54L HLA-DPA1*01:03-B1*104:01L HLA-DQA1*05:05-B1 *03:01L HLA-DPA1*01:02-B1*04:01L HLA-DQA1*01:03-B1*06:01L
  REGION 1..12: note = CONT. FROM ABOVE: HLA-DRB1*04:08L HLA-DRB1*08:03L HLA-DRB1*15:03 L
VQLRVIGHSMQN

SEQ ID NO: 10997 - protein, 15 aa, Severe acute respiratory syndrome coronavirus 2
  REGION 1..15: note = Table B: HLA-DQA1*05:01-B1*03:01L HLA-DRB1*13:02L HLA-DRB1*04:04L HLA-DRB1*08:04L HLA-DPA1*02:01-B1*13:01L HLA-DRB1*08:03L
NPKTPKYKFVRIQPG

SEQ ID NO: 10998 - protein, 13 aa, Severe acute respiratory syndrome coronavirus 2
  REGION 1..13: note = Table B: HLA-DQA1*05:01-B1*03:01L HLA-DRB1*04:03L HLA-DRB1*08:04L HLA-DPA1*03:01-B1*105:01L
TPKYKFVRIQPGQ

SEQ ID NO: 10999 - protein, 10 aa, Severe acute respiratory syndrome coronavirus 2
  REGION 1..10: note = Table B: HLA-DQA1*05:01-B1*03:01L HLA-DRB1*04:03L HLA-DQA1*01:02-B1*06:02L HLA-DQA1*03:01-B1*03:02L HLA-DRB1*14:17L HLA-DQA1*01:03-B1*06:01L HLA-DQA1*02:01-B1*03:03L
KFVRIQPGQT

SEQ ID NO: 11000 - protein, 10 aa, Severe acute respiratory syndrome coronavirus 2
  REGION 1..10: note = Table B: HLA-DQA1*05:01-B1*03:01L HLA-DRB1*04:03L HLA-DRB1*04:02L HLA-DRB1*01:02L HLA-DRB4*03:01NL HLA-DRB1*14:01L HLA-DRB1*12:01L HLA-DQA1*03:01-B1*03:02L HLA-DRB1*14:54L HLA-DRB1*14:17L HLA-DRB1*16:01L HLA-DQA1*02:01-B1*03:03L
  REGION 1..10: note = CONT. FROM ABOVE: HLA-DRB1*15:03L
VRIQPGQTFS

SEQ ID NO: 11001 - protein, 11 aa, Severe acute respiratory syndrome coronavirus 2
  REGION 1..11: note = Table B: HLA-DQA1*05:01-B1*03:01L HLA-DPA1*03:01-B1*105:01L HLA-DQA1*05:05-B1*03:01L HLA-DQA1*02:01-B1*03:03L
VYQCAMRPNFT

SEQ ID NO: 11002 - protein, 10 aa, Severe acute respiratory syndrome coronavirus 2
  REGION 1..10: note = Table B: HLA-DQA1*05:01-B1*03:01L HLA-DRB1*13:03L HLA-DRB1*01:03L HLA-DQA1*01:02-B1*06:02L HLA-DPA1*01:03-B1*03:01L HLA-DRB1*14:01L HLA-DPA1*03:01-B1*105:01L HLA-DQA1*02:01-B1*03:03L
RPNFTIKGSF

SEQ ID NO: 11003 - protein, 12 aa, Severe acute respiratory syndrome coronavirus 2
  REGION 1..12: note = Table B: HLA-DQA1*05:01-B1*03:01L HLA-DQA1*05:05-B1*03:19L HLA-DPA1*03:01-B1*105:01L HLA-DQA1*05:05-B1*03:01L HLA-DQA1*02:01-B1*03:03L
TIKGSFLNGSCG

SEQ ID NO: 11004 - protein, 13 aa, Severe acute respiratory syndrome coronavirus 2
  REGION 1..13: note = Table B: HLA-DQA1*05:01-B1*03:01L HLA-DQA1*01:02-B1*06:02L
KGSFLNGSCGSVG

SEQ ID NO: 11005 - protein, 14 aa, Severe acute respiratory syndrome coronavirus 2
  REGION 1..14: note = Table B: HLA-DQA1*05:01-B1*03:01L HLA-DPA1*03:01-B1*105:01L
GSFLNGSCGSVGFN

SEQ ID NO: 11006 - protein, 14 aa, Severe acute respiratory syndrome coronavirus 2
  REGION 1..14: note = Table B: HLA-DQA1*05:01-B1*03:01L HLA-DRB1*13:02L HLA-DRB1*04:05L HLA-DRB1*08:04L HLA-DRB1*11:04L HLA-DRB3*01:01L HLA-DPA1*02:01-B1*13:01L HLA-DPA1*01:03-B1*104:01L
NIDYDCVSFCYMHH

SEQ ID NO: 11007 - protein, 12 aa, Severe acute respiratory syndrome coronavirus 2
  REGION 1..12: note = Table B: HLA-DQA1*05:01-B1*03:01L HLA-DQA1*01:02-B1*06:02L HLA-DRB1*01:02L HLA-DPA1*03:01-B1*105:01L HLA-DQA1*01:03-B1*06:01L HLA-DQA1*02:01-B1*03:03L
YMHHMELPTGVH

SEQ ID NO: 11008 - protein, 11 aa, Severe acute respiratory syndrome coronavirus 2
  REGION 1..11: note = Table B: HLA-DQA1*05:01-B1*03:01L HLA-DQA1*05:01-B1*02:01L HLA-DQA1*05:05-B1*03:01L HLA-DQA1*01:03-B1*06:01L
ELPTGVHAGTD

SEQ ID NO: 11009 - protein, 11 aa, Severe acute respiratory syndrome coronavirus 2
  REGION 1..11: note = Table B: HLA-DQA1*05:01-B1*03:01L HLA-DRB1*01:03L HLA-DRB1*04:02L HLA-DQA1*01:02-B1*06:02L HLA-DRB4*03:01NL HLA-DRB1*14:01L HLA-DQA1*01:01-B1*05:01L HLA-DRB5*01:01L HLA-DQA1*05:05-B1*03:19L HLA-DQA1*05:01-B1*02:01L
  REGION 1..11: note = CONT. FROM ABOVE: HLA-DQA1*05:05-B1*03:01L HLA-DPA1*01:02-B1*04: 01L HLA-DRB1*16:01L
LPTGVHAGTDL

SEQ ID NO: 11010 - protein, 11 aa, Severe acute respiratory syndrome coronavirus 2
  REGION 1..11: note = Table B: HLA-DQA1*05:01-B1*03:01L HLA-DRB1*04:02L HLA-DQA1*01:02-B1*06:02L HLA-DQA1*01-B1*05L HLA-DQA1*05:05-B1*03:01L HLA-DRB1*16:01L
GVHAGTDLEGN

SEQ ID NO: 11011 - protein, 11 aa, Severe acute respiratory syndrome coronavirus 2
  REGION 1..11: note = Table B: HLA-DQA1*05:01-B1*03:01L HLA-DQA1*05:05-B1*03:19L HLA-DRB1*15:03L
VHAGTDLEGNF

SEQ ID NO: 11012 - protein, 11 aa, Severe acute respiratory syndrome coronavirus 2
  REGION 1..11: note = Table B: HLA-DQA1*05:01-B1*03:01L HLA-DRB1*01:03L HLA-DRB1*11:02L HLA-DRB1*14:02L HLA-DPA1*01:03-B1*04:01L HLA-DPA1*01:03-B1*04:02L HLA-DRB1*12:01L HLA-DRB1*10:01L HLA-DRB1*15:03L
HAGTDLEGNFY

SEQ ID NO: 11013 - protein, 13 aa, Severe acute respiratory syndrome coronavirus 2
  REGION 1..13: note = Table B: HLA-DQA1*05:01-B1*03:01L HLA-DRB1*04:03L HLA-DRB1*04:02L HLA-DQA1*01:01-B1*05:01L HLA-DPA1*03:01-B1*105:01L HLA-DPA1*01:02-B1*04:01L HLA-DRB1*16:01L
DLEGNFYGPFVDR

SEQ ID NO: 11014 - protein, 14 aa, Severe acute respiratory syndrome coronavirus 2
  REGION 1..14: note = Table B: HLA-DQA1*05:01-B1*03:01L HLA-DPA1*01:03-B1*03:01L HLA-DPA1*01:03-B1*04:02L
EGNFYGPFVDRQTA

SEQ ID NO: 11015 - protein, 12 aa, Severe acute respiratory syndrome coronavirus 2
  REGION 1..12: note = Table B: HLA-DQA1*05:01-B1*03:01L HLA-DQA1*01:02-B1*06:02L HLA-DRB1*01:02L HLA-DPA1*03:01-B1*105:01L HLA-DQA1*01:03-B1*06:01L HLA-DRB1*15:03L
FYGPFVDRQTAQ

SEQ ID NO: 11016 - protein, 12 aa, Severe acute respiratory syndrome coronavirus 2
  REGION 1..12: note = Table B: HLA-DQA1*05:01-B1*03:01L HLA-DQA1*05:01-B1*02:01L HLA-DQA1*03:01-B1*03:02L HLA-DQA1*05:05-B1*03:01L HLA-DQA1*02:01-B1*03:03L
TAQAAGTDTTIT

SEQ ID NO: 11017 - protein, 13 aa, Severe acute respiratory syndrome coronavirus 2
  REGION 1..13: note = Table B: HLA-DQA1*05:01-B1*03:01L HLA-DRB1*04:03L HLA-DQA1*01:02-B1*06:02L HLA-DQA1*01:01-B1*05:01L HLA-DQA1*01-B1*05L HLA-DQA1*05:01-B1*02:01L HLA-DQA1*05:05-B1*03:01L HLA-DRB1*16:01L
  REGION 1..13: note = CONT. FROM ABOVE: HLA-DQA1*01:03-B1*06:01L HLA-DQA1*02:01-B1*03: 03L
AQAAGTDTTITVN

SEQ ID NO: 11018 - protein, 11 aa, Severe acute respiratory syndrome coronavirus 2
  REGION 1..11: note = Table B: HLA-DQA1*05:01-B1*03:01L HLA-DRB1*13:03L HLA-DQA1*01-B1*05L HLA-DPA1*01:02-B1*04:01L
GTDTTITVNVL

SEQ ID NO: 11019 - protein, 10 aa, Severe acute respiratory syndrome coronavirus 2
  REGION 1..10: note = Table B: HLA-DQA1*05:01-B1*03:01L HLA-DQA1*01:02-B1*06:02L HLA-DQA1*05:05-B1*03:19L HLA-DQA1*05:01-B1*02:01L HLA-DPA1*03:01-B1*105:01L HLA-DQA1*01:03-B1*06:01L HLA-DQA1*02:01-B1*03:03L
AAVINGDRWF

SEQ ID NO: 11020 - protein, 12 aa, Severe acute respiratory syndrome coronavirus 2
  REGION 1..12: note = Table B: HLA-DQA1*05:01-B1*03:01L HLA-DRB1*04:05L HLA-DQA1*01:02-B1*06:02L HLA-DRB1*01:02L HLA-DRB1*14:01L HLA-DRB1*08:01L HLA-DRB1*11:01L HLA-DPA1*01:03-B1*04:02L HLA-DRB1*12:01L HLA-DPA1*02:01-B1*13:01L
  REGION 1..12: note = CONT. FROM ABOVE: HLA-DQA1*03:01-B1*03:02L HLA-DQA1*01:03-B1*06: 01L HLA-DQA1*02:01-B1*03:03L HLA-DRB1*15:03L
GDRWFLNRFTTT

SEQ ID NO: 11021 - protein, 12 aa, Severe acute respiratory syndrome coronavirus 2
  REGION 1..12: note = Table B: HLA-DQA1*05:01-B1*03:01L HLA-DRB1*13:02L HLA-DRB1*01:03L HLA-DRB1*04:02L HLA-DRB1*04:05L HLA-DRB1*01:02L HLA-DPA1*01:03-B1*03:01L HLA-DPA1*03:01-B1*04:02L HLA-DQA1*01:01-B1*05:01L HLA-DQA1*05:05-B1*03:19L
  REGION 1..12: note = CONT. FROM ABOVE: HLA-DRB1*04:10L HLA-DRB1*12:01L HLA-DPA1*01:03 -B1*104:01L HLA-DQA1*05:05-B1*03:01L HLA-DPA1*01:02-B1*04:01L HL A-DRB1*04:08L HLA-DRB1*15:03L
LNRFTTTLNDFN

SEQ ID NO: 11022 - protein, 14 aa, Severe acute respiratory syndrome coronavirus 2
  REGION 1..14: note = Table B: HLA-DQA1*05:01-B1*03:01L HLA-DRB1*13:02L HLA-DRB1*01:03L HLA-DRB1*04:02L HLA-DRB1*04:04L HLA-DPA1*01:03-B1*03:01L HLA-DRB1*08:01L HLA-DRB1*04:10L HLA-DPA1*01:03-B1*04:02L HLA-DPA1*01:03-B1*104:01L
  REGION 1..14: note = CONT. FROM ABOVE: HLA-DQA1*05:05-B1*03:01L HLA-DRB1*04:08L
NRFTTTLNDFNLVA

SEQ ID NO: 11023 - protein, 10 aa, Severe acute respiratory syndrome coronavirus 2
  REGION 1..10: note = Table B: HLA-DQA1*05:01-B1*03:01M HLA-DRB1*13:03L HLA-DQA1*01:02-B1*06:02L HLA-DRB4*03:01NL HLA-DRB1*08:77M HLA-DPA1*01:03-B1*03:01M HLA-DPA1*03:01-B1*04:02L HLA-DRB1*03:01L HLA-DRB1*11:02L HLA-DQA1*01-B1*05L
  REGION 1..10: note = CONT. FROM ABOVE: HLA-DQA1*05:05-B1*03:19M HLA-DQA1*05:01-B1*02: 01M HLA-DRB4*01:01M HLA-DPA1*01:03-B1*04:01M HLA-DQA1*05:05-B1*0 3:116L HLA-DPA1*01:03-B1*04:02L HLA-DRB1*12:01L HLA-DPA1*01:03-B 1*104:01M HLA-DPA1*01:02-B1*04:01L HLA-DRB1*10:01L
  REGION 1..10: note = CONT. FROM ABOVE: HLA-DRB1*16:01M HLA-DRB1*15:03L
NDFNLVAMKY

SEQ ID NO: 11024 - protein, 13 aa, Severe acute respiratory syndrome coronavirus 2
  REGION 1..13: note = Table B: HLA-DQA1*05:01-B1*03:01L HLA-DRB1*13:02L HLA-DRB1*04:04L HLA-DPA1*01:03-B1*03:01L HLA-DRB1*14:01L HLA-DRB1*11:04L HLA-DRB1*11:01L HLA-DPA1*01:03-B1*04:01L HLA-DPA1*01:03-B1*04:02L HLA-DRB3*01:01L HLA-DRB1*14:54L
  REGION 1..13: note = CONT. FROM ABOVE: HLA-DPA1*01:03-B1*02:01L
AMKYNYEPLTQDH

SEQ ID NO: 11025 - protein, 11 aa, Severe acute respiratory syndrome coronavirus 2
  REGION 1..11: note = Table B: HLA-DQA1*05:01-B1*03:01L HLA-DRB1*04:05L HLA-DQA1*01:02-B1*06:02L HLA-DRB1*12:01L HLA-DPA1*03:01-B1*105:01L HLA-DPA1*01:02-B1*04:01L HLA-DRB1*15:03L
NYEPLTQDHVD

SEQ ID NO: 11026 - protein, 12 aa, Severe acute respiratory syndrome coronavirus 2
  REGION 1..12: note = Table B: HLA-DQA1*05:01-B1*03:01L HLA-DRB1*13:02L HLA-DRB1*13:03L HLA-DRB1*04:02L HLA-DRB1*04:05L HLA-DQA1*01:02-B1*06:02L HLA-DRB1*01:02L HLA-DRB1*08:04L HLA-DRB3*02:01L HLA-DPA1*01:03-B1*03:01L
  REGION 1..12: note = CONT. FROM ABOVE: HLA-DPA1*03:01-B1*04:02L HLA-DRB1*14:01L HLA-D RB1*14:02L HLA-DRB1*12:01L HLA-DPA1*02:01-B1*13:01L HLA-DPA1*03: 01-B1*105:01L HLA-DRB1*15:03L
YEPLTQDHVDIL

SEQ ID NO: 11027 - protein, 14 aa, Severe acute respiratory syndrome coronavirus 2
  REGION 1..14: note = Table B: HLA-DQA1*05:01-B1*03:01L HLA-DRB1*04:01L HLA-DRB1*13:02L HLA-DRB1*13:03L HLA-DRB1*01:03L HLA-DRB1*04:04L HLA-DQA1*01:02-B1*06:02L HLA-DRB1*01:02L HLA-DRB4*03:01NL HLA-DRB1*08:04L HLA-DRB1*08:77L HLA-DRB3*02:01L
  REGION 1..14: note = CONT. FROM ABOVE: HLA-DPA1*01:03-B1*03:01L HLA-DPA1*03:01-B1*04: 02L HLA-DRB1*03:01L HLA-DRB1*14:01L HLA-DRB1*11:03L HLA-DRB1*11: 04L HLA-DRB1*14:02L HLA-DQA1*01:01-B1*05:01L HLA-DRB1*08:01L HLA -DRB5*01:01L HLA-DQA1*05:05-B1*03:19L HLA-DRB1*13:01L
  REGION 1..14: note = CONT. FROM ABOVE: HLA-DRB4*01:01L HLA-DRB1*04:10L HLA-DRB1*09:01 L HLA-DPA1*01:03-B1*04:02L HLA-DRB1*12:01L HLA-DRB1*12:02L HLA-D RB3*01:01L HLA-DPA1*02:01-B1*13:01L HLA-DRB1*14:54L HLA-DQA1*05: 05-B1*03:01L HLA-DRB1*14:17L HLA-DPA1*01:02-B1*04:01L
  REGION 1..14: note = CONT. FROM ABOVE: HLA-DRB1*10:01L HLA-DQA1*01:03-B1*06:01L HLA-D RB1*04:08L HLA-DRB1*08:03L HLA-DRB1*15:03L
EPLTQDHVDILGPL

SEQ ID NO: 11028 - protein, 14 aa, Severe acute respiratory syndrome coronavirus 2
  REGION 1..14: note = Table B: HLA-DQA1*05:01-B1*03:01L HLA-DRB1*01:03L HLA-DPA1*01:03-B1*03:01L HLA-DRB1*14:01L HLA-DQA1*05:01-B1*02:01L HLA-DPA1*02:01-B1*13:01L HLA-DPA1*03:01-B1*105:01L HLA-DQA1*05:05-B1*03:01L
  REGION 1..14: note = CONT. FROM ABOVE: HLA-DRB1*04:08L
TQDHVDILGPLSAQ

SEQ ID NO: 11029 - protein, 14 aa, Severe acute respiratory syndrome coronavirus 2
  REGION 1..14: note = Table B: HLA-DQA1*05:01-B1*03:01L HLA-DPA1*03:01-B1*105:01L
ELLQNGMNGRTILG

SEQ ID NO: 11030 - protein, 12 aa, Severe acute respiratory syndrome coronavirus 2
  REGION 1..12: note = Table B: HLA-DQA1*05:01-B1*03:01L HLA-DRB1*13:02L HLA-DRB1*13:03L HLA-DRB1*01:03L HLA-DRB1*04:02L HLA-DRB1*04:05L HLA-DRB1*01:02L HLA-DRB4*03:01NL HLA-DRB1*08:04L HLA-DRB3*02:01L HLA-DPA1*01:03-B1*03:01L HLA-DRB1*14:01L
  REGION 1..12: note = CONT. FROM ABOVE: HLA-DPA1*01:03-B1*04:01L HLA-DPA1*01:03-B1*04: 02L HLA-DRB1*12:01L HLA-DPA1*02:01-B1*13:01L HLA-DRB1*14:54L HLA -DRB1*14:17L HLA-DRB1*16:01L HLA-DRB1*04:08L
SALLEDEFTPFD

SEQ ID NO: 11031 - protein, 14 aa, Severe acute respiratory syndrome coronavirus 2
  REGION 1..14: note = Table B: HLA-DQA1*05:01-B1*03:01L HLA-DRB1*01:03L HLA-DRB1*01:02L HLA-DRB1*08:04L HLA-DRB1*08:01L HLA-DQA1*05:05-B1*03:19L HLA-DPA1*01:03-B1*04:02L HLA-DRB1*16:01L HLA-DRB1*15:03L
FTPFDVVRQCSGVT

SEQ ID NO: 11032 - protein, 15 aa, Severe acute respiratory syndrome coronavirus 2
  REGION 1..15: note = Table B: HLA-DQA1*05:01-B1*03:01L HLA-DRB1*13:02L HLA-DRB1*01:03L HLA-DRB1*04:05L HLA-DRB3*02:01L HLA-DPA1*01:03-B1*03:01L HLA-DPA1*03:01-B1*04:02L HLA-DRB1*14:01L HLA-DQA1*05:05-B1*03:19L
  REGION 1..15: note = CONT. FROM ABOVE: HLA-DQA1*05:01-B1*02:01L HLA-DPA1*02:01-B1*13: 01L HLA-DPA1*01:03-B1*104:01L HLA-DRB1*07:01L
TPFDVVRQCSGVTFQ

SEQ ID NO: 11033 - protein, 14 aa, Severe acute respiratory syndrome coronavirus 2
  REGION 1..14: note = Table B: HLA-DQA1*05:01-B1*03:01L HLA-DPA1*03:01-B1*105:01L HLA-DQA1*05:05-B1*03:01L HLA-DQA1*02:01-B1*03:03L
DVVRQCSGVTFQSA

SEQ ID NO: 11034 - protein, 12 aa, Severe acute respiratory syndrome coronavirus 2
  REGION 1..12: note = Table B: HLA-DQA1*05:01-B1*03:01L HLA-DRB1*13:03L HLA-DRB1*01:03L HLA-DRB1*04:05L HLA-DQA1*01:02-B1*06:02L HLA-DRB1*01:02L HLA-DRB1*14:01L HLA-DRB1*11:04L HLA-DRB1*11:01L HLA-DRB1*12:01L HLA-DPA1*01:02-B1*04:01L HLA-DRB1*04:08L
  REGION 1..12: note = CONT. FROM ABOVE: HLA-DRB1*15:03L
VTFQSAVKRTIK

SEQ ID NO: 11035 - protein, 11 aa, Severe acute respiratory syndrome coronavirus 2
  REGION 1..11: note = Table B: HLA-DQA1*05:01-B1*03:01L HLA-DPA1*01:03-B1*04:02L HLA-DRB1*12:01L HLA-DQA1*03:01-B1*03:02L
FLYENAFLPFA

SEQ ID NO: 11036 - protein, 11 aa, Severe acute respiratory syndrome coronavirus 2
  REGION 1..11: note = Table B: HLA-DQA1*05:01-B1*03:01L HLA-DRB1*13:02L HLA-DRB3*02:01L HLA-DPA1*01:03-B1*03:01L HLA-DQA1*01-B1*05L HLA-DQA1*05:05-B1*03:19L HLA-DPA1*01:03-B1*04:01L HLA-DPA1*01:03-B1*04:02L HLA-DQA1*05:05-B1*03:01L
  REGION 1..11: note = CONT. FROM ABOVE: HLA-DRB1*16:01L HLA-DQA1*02:01-B1*03:03L
GIIAMSAFAMM

SEQ ID NO: 11037 - protein, 12 aa, Severe acute respiratory syndrome coronavirus 2
  REGION 1..12: note = Table B: HLA-DQA1*05:01-B1*03:01L HLA-DRB1*13:02L HLA-DRB1*04:02L HLA-DRB1*04:05L HLA-DQA1*01:02-B1*06:02L HLA-DRB1*01:02L HLA-DRB1*14:01L HLA-DRB1*08:01L HLA-DRB1*11:01L HLA-DRB1*12:01L HLA-DRB3*01:01L HLA-DPA1*03:01-B1*105:01L
  REGION 1..12: note = CONT. FROM ABOVE: HLA-DRB1*14:17L HLA-DRB1*04:08L HLA-DRB1*15:03 L
SAFAMMFVKHKH

SEQ ID NO: 11038 - protein, 12 aa, Severe acute respiratory syndrome coronavirus 2
  REGION 1..12: note = Table B: HLA-DQA1*05:01-B1*03:01L HLA-DRB1*13:02L HLA-DRB1*04:05L HLA-DQA1*01:02-B1*06:02L HLA-DRB1*14:01L HLA-DRB1*11:01L HLA-DRB1*12:01L HLA-DRB3*01:01L HLA-DPA1*03:01-B1*105:01L HLA-DQA1*02:01-B1*03:03L
  REGION 1..12: note = CONT. FROM ABOVE: HLA-DRB1*15:03L
AFAMMFVKHKHA

SEQ ID NO: 11039 - protein, 12 aa, Severe acute respiratory syndrome coronavirus 2
  REGION 1..12: note = Table B: HLA-DQA1*05:01-B1*03:01L HLA-DRB1*04:03L HLA-DPA1*03:01-B1*04:02L HLA-DRB1*14:01L HLA-DQA1*05:01-B1*02:01L HLA-DPA1*01:03-B1*04:01L HLA-DRB1*12:01L HLA-DPA1*01:02-B1*04:01L HLA-DRB1*16:01L
  REGION 1..12: note = CONT. FROM ABOVE: HLA-DQA1*01:03-B1*06:01L HLA-DQA1*02:01-B1*03: 03L HLA-DRB1*15:03L
LPSLATVAYFNM

SEQ ID NO: 11040 - protein, 10 aa, Severe acute respiratory syndrome coronavirus 2
  REGION 1..10: note = Table B: HLA-DQA1*05:01-B1*03:01L HLA-DRB1*13:03L HLA-DQA1*01:02-B1*06:02L HLA-DRB1*08:77L HLA-DPA1*01:03-B1*03:01L HLA-DRB1*03:01L HLA-DRB1*11:02L HLA-DRB1*14:02L HLA-DQA1*01-B1*05L HLA-DQA1*05:05-B1*03:19M
  REGION 1..10: note = CONT. FROM ABOVE: HLA-DQA1*05:01-B1*02:01L HLA-DRB4*01:01L HLA-D PA1*01:03-B1*04:01L HLA-DQA1*05:05-B1*03:116L HLA-DPA1*01:03-B1* 04:02L HLA-DPA1*03:01-B1*105:01L HLA-DPA1*01:03-B1*104:01L HLA-D RB1*10:01L HLA-DRB1*16:01L HLA-DQA1*02:01-B1*03:03L
  REGION 1..10: note = CONT. FROM ABOVE: HLA-DRB1*15:03L
ATVAYFNMVY

SEQ ID NO: 11041 - protein, 11 aa, Severe acute respiratory syndrome coronavirus 2
  REGION 1..11: note = Table B: HLA-DQA1*05:01-B1*03:01L HLA-DRB1*04:03L HLA-DRB1*01:03L HLA-DRB1*01:02L HLA-DPA1*01:02-B1*04:01L
MVYMPASWVMR

SEQ ID NO: 11042 - protein, 11 aa, Severe acute respiratory syndrome coronavirus 2
  REGION 1..11: note = Table B: HLA-DQA1*05:01-B1*03:01L HLA-DRB1*04:03L HLA-DRB1*04:05L HLA-DRB1*08:77L HLA-DPA1*03:01-B1*04:02L HLA-DRB1*11:02L HLA-DRB1*14:02L HLA-DQA1*05:01-B1*02:01L HLA-DRB4*01:01L HLA-DRB1*09:01L HLA-DPA1*01:02-B1*04:01L
VYMPASWVMRI

SEQ ID NO: 11043 - protein, 10 aa, Severe acute respiratory syndrome coronavirus 2
  REGION 1..10: note = Table B: HLA-DQA1*05:01-B1*03:01L HLA-DRB1*13:03L HLA-DQA1*01:02-B1*06:02L HLA-DQA1*01-B1*05L HLA-DPA1*03:01-B1*105:01L HLA-DQA1*03:01-B1*03:02L HLA-DPA1*01:02-B1*04:01L HLA-DQA1*01:03-B1*06:01L
  REGION 1..10: note = CONT. FROM ABOVE: HLA-DRB1*15:03L
MPASWVMRIM

SEQ ID NO: 11044 - protein, 10 aa, Severe acute respiratory syndrome coronavirus 2
  REGION 1..10: note = Table B: HLA-DQA1*05:01-B1*03:01L HLA-DRB1*04:03L HLA-DRB1*01:03L HLA-DRB1*01:02L HLA-DRB1*12:01L HLA-DQA1*03:01-B1*03:02L HLA-DRB1*14:17L HLA-DRB1*16:01L HLA-DQA1*01:03-B1*06:01L HLA-DRB1*04:08L
  REGION 1..10: note = CONT. FROM ABOVE: HLA-DQA1*02:01-B1*03:03L HLA-DRB1*15:03L
TSLSGFKLKD

SEQ ID NO: 11045 - protein, 15 aa, Severe acute respiratory syndrome coronavirus 2
  REGION 1..15: note = Table B: HLA-DQA1*05:01-B1*03:01L
GFKLKDCVMYASAVV

SEQ ID NO: 11046 - protein, 10 aa, Severe acute respiratory syndrome coronavirus 2
  REGION 1..10: note = Table B: HLA-DQA1*05:01-B1*03:01L HLA-DRB1*04:03L HLA-DRB1*13:02L HLA-DRB1*13:03L HLA-DRB1*01:03L HLA-DRB1*04:02L HLA-DQA1*01:02-B1*06:02L HLA-DRB1*01:02L HLA-DRB4*03:01NL HLA-DRB1*14:01L HLA-DQA1*05:01-B1*02:01L HLA-DRB1*12:01L
  REGION 1..10: note = CONT. FROM ABOVE: HLA-DRB1*12:02L HLA-DPA1*03:01-B1*105:01L HLA- DQA1*03:01-B1*03:02L HLA-DRB1*14:54L HLA-DRB1*14:17L HLA-DPA1*01 :02-B1*04:01L HLA-DRB1*16:01L HLA-DQA1*02:01-B1*03:03L HLA-DRB1* 15:03L
ILMTARTVYD

SEQ ID NO: 11047 - protein, 10 aa, Severe acute respiratory syndrome coronavirus 2
  REGION 1..10: note = Table B: HLA-DQA1*05:01-B1*03:01L HLA-DRB1*13:03L HLA-DQA1*01:02-B1*06:02L HLA-DRB1*08:77L HLA-DPA1*01:03-B1*03:01L HLA-DPA1*03:01-B1*04:02L HLA-DRB1*03:01L HLA-DRB1*11:02L HLA-DRB1*14:02L
  REGION 1..10: note = CONT. FROM ABOVE: HLA-DQA1*01-B1*05L HLA-DQA1*05:05-B1*03:19M HL A-DQA1*05:01-B1*02:01L HLA-DRB4*01:01L HLA-DPA1*01:03-B1*04:01L HLA-DQA1*05:05-B1*03:116L HLA-DPA1*01:03-B1*04:02L HLA-DRB1*12:0 1L HLA-DPA1*02:01-B1*13:01L HLA-DPA1*03:01-B1*105:01L
  REGION 1..10: note = CONT. FROM ABOVE: HLA-DPA1*01:03-B1*104:01L HLA-DRB1*10:01L HLA- DRB1*16:01L HLA-DQA1*02:01-B1*03:03L HLA-DRB1*15:03L
TLMNVLTLVY

SEQ ID NO: 11048 - protein, 11 aa, Severe acute respiratory syndrome coronavirus 2
  REGION 1..11: note = Table B: HLA-DQA1*05:01-B1*03:01L HLA-DRB1*13:03L HLA-DRB1*01:03L HLA-DRB1*04:05L HLA-DRB4*03:01NL HLA-DRB1*12:01L HLA-DPA1*03:01-B1*105:01L HLA-DPA1*01:02-B1*04:01L HLA-DQA1*01:03-B1*06:01L
KVYYGNALDQA

SEQ ID NO: 11049 - protein, 12 aa, Severe acute respiratory syndrome coronavirus 2
  REGION 1..12: note = Table B: HLA-DQA1*05:01-B1*03:01L HLA-DRB1*13:02L HLA-DRB1*13:03L HLA-DRB1*01:03L HLA-DRB1*04:02L HLA-DRB1*04:04L HLA-DRB1*04:05L HLA-DQA1*01:02-B1*06:02L HLA-DRB1*01:02L HLA-DRB4*03:01NL HLA-DRB1*08:77L HLA-DRB3*02:01L
  REGION 1..12: note = CONT. FROM ABOVE: HLA-DPA1*01:03-B1*03:01L HLA-DPA1*03:01-B1*04: 02L HLA-DRB1*14:01L HLA-DRB1*11:03L HLA-DRB1*14:02L HLA-DQA1*01: 01-B1*05:01L HLA-DRB1*04:10L HLA-DRB1*09:01L HLA-DPA1*01:03-B1*0 4:02L HLA-DRB1*12:01L HLA-DPA1*03:01-B1*105:01L HLA-DRB1*14:54L
  REGION 1..12: note = CONT. FROM ABOVE: HLA-DQA1*05:05-B1*03:01L HLA-DPA1*01:02-B1*04: 01L HLA-DRB1*10:01L HLA-DRB1*16:01L HLA-DRB1*04:08L HLA-DRB1*15: 03L
VYYGNALDQAIS

SEQ ID NO: 11050 - protein, 10 aa, Severe acute respiratory syndrome coronavirus 2
  REGION 1..10: note = Table B: HLA-DQA1*05:01-B1*03:01L HLA-DRB1*13:03L HLA-DRB1*01:03L HLA-DQA1*01:02-B1*06:02L HLA-DRB1*08:77L HLA-DPA1*01:03-B1*03:01L HLA-DRB1*03:01L HLA-DRB1*14:02L HLA-DQA1*05:05-B1*03:19L HLA-DQA1*05:01-B1*02:01L
  REGION 1..10: note = CONT. FROM ABOVE: HLA-DRB4*01:01L HLA-DPA1*01:03-B1*04:01L HLA-D PA1*01:03-B1*04:02L HLA-DPA1*02:01-B1*13:01L HLA-DPA1*03:01-B1*1 05:01L HLA-DPA1*01:03-B1*104:01L HLA-DRB1*10:01L HLA-DQA1*01:03- B1*06:01L HLA-DQA1*02:01-B1*03:03L HLA-DRB1*15:03L
ALIISVTSNY

SEQ ID NO: 11051 - protein, 12 aa, Severe acute respiratory syndrome coronavirus 2
  REGION 1..12: note = Table B: HLA-DQA1*05:01-B1*03:01L HLA-DQA1*01:02-B1*06:02L HLA-DRB1*01:02L HLA-DRB1*08:04L HLA-DPA1*01:03-B1*03:01L HLA-DRB1*14:01L HLA-DQA1*01-B1*05L HLA-DQA1*05:05-B1*03:19L HLA-DRB4*01:01L HLA-DPA1*03:01-B1*105:01L
  REGION 1..12: note = CONT. FROM ABOVE: HLA-DQA1*05:05-B1*03:01L HLA-DQA1*01:03-B1*06: 01L HLA-DRB1*15:03L
IISVTSNYSGVV

SEQ ID NO: 11052 - protein, 10 aa, Severe acute respiratory syndrome coronavirus 2
  REGION 1..10: note = Table B: HLA-DQA1*05:01-B1*03:01L HLA-DQA1*01:02-B1*06:02L HLA-DRB1*12:01L HLA-DPA1*03:01-B1*105:01L HLA-DQA1*03:01-B1*03:02L HLA-DQA1*05:05-B1*03:01L HLA-DQA1*01:03-B1*06:01L HLA-DQA1*02:01-B1*03:03L
VVTTVMFLAR

SEQ ID NO: 11053 - protein, 12 aa, Severe acute respiratory syndrome coronavirus 2
  REGION 1..12: note = Table B: HLA-DQA1*05:01-B1*03:01L HLA-DPA1*03:01-B1*04:02L HLA-DRB1*14:01L HLA-DRB1*12:01L HLA-DQA1*05:05-B1*03:01L HLA-DPA1*01:02-B1*04:01L HLA-DRB1*15:03L
VTTVMFLARGIV

SEQ ID NO: 11054 - protein, 11 aa, Severe acute respiratory syndrome coronavirus 2
  REGION 1..11: note = Table B: HLA-DQA1*05:01-B1*03:01L HLA-DRB1*04:03L HLA-DRB1*13:02L HLA-DRB1*13:03L HLA-DRB1*01:03L HLA-DRB1*04:02L HLA-DRB1*04:04L HLA-DRB1*04:05L HLA-DQA1*01:02-B1*06:02L HLA-DRB4*03:01NL HLA-DRB1*08:77L HLA-DRB3*02:01L
  REGION 1..11: note = CONT. FROM ABOVE: HLA-DPA1*01:03-B1*03:01L HLA-DPA1*03:01-B1*04: 02L HLA-DRB1*14:01L HLA-DRB1*11:03L HLA-DQA1*01-B1*05L HLA-DQA1* 05:05-B1*03:19L HLA-DQA1*05:01-B1*02:01L HLA-DRB1*04:10L HLA-DRB 1*09:01L HLA-DRB1*12:02L HLA-DPA1*03:01-B1*105:01L
  REGION 1..11: note = CONT. FROM ABOVE: HLA-DQA1*03:01-B1*03:02L HLA-DRB1*14:54L HLA-D QA1*05:05-B1*03:01L HLA-DRB1*14:17L HLA-DPA1*01:02-B1*04:01L HLA -DRB1*07:01L HLA-DRB1*10:01L HLA-DRB1*16:01L HLA-DQA1*01:03-B1*0 6:01L HLA-DRB1*04:08L HLA-DQA1*02:01-B1*03:03L
PIFFITGNTLQ

SEQ ID NO: 11055 - protein, 12 aa, Severe acute respiratory syndrome coronavirus 2
  REGION 1..12: note = Table B: HLA-DQA1*05:01-B1*03:01L HLA-DPA1*01:03-B1*03:01L HLA-DPA1*03:01-B1*04:02L HLA-DQA1*05:05-B1*03:116L HLA-DPA1*01:03-B1*04:02L HLA-DRB1*12:01L HLA-DPA1*01:03-B1*104:01L HLA-DQA1*05:05-B1*03:01L
  REGION 1..12: note = CONT. FROM ABOVE: HLA-DPA1*01:02-B1*04:01L HLA-DRB1*10:01L HLA-D RB1*04:08L
GVYDYLVSTQEF

SEQ ID NO: 11056 - protein, 10 aa, Severe acute respiratory syndrome coronavirus 2
  REGION 1..10: note = Table B: HLA-DQA1*05:01-B1*03:01L HLA-DQA1*01:02-B1*06:02L HLA-DPA1*03:01-B1*04:02L HLA-DQA1*05:01-B1*02:01L HLA-DRB1*12:01L HLA-DPA1*03:01-B1*105:01L HLA-DPA1*01:02-B1*04:01L HLA-DQA1*01:03-B1*06:01L
  REGION 1..10: note = CONT. FROM ABOVE: HLA-DQA1*02:01-B1*03:03L HLA-DRB1*15:03L
LVSTQEFRYM

SEQ ID NO: 11057 - protein, 12 aa, Severe acute respiratory syndrome coronavirus 2
  REGION 1..12: note = Table B: HLA-DQA1*05:01-B1*03:01L HLA-DRB1*04:03L HLA-DRB1*01:03L HLA-DRB1*04:02L HLA-DRB1*04:05L HLA-DQA1*01:02-B1*06:02L HLA-DRB1*01:01L HLA-DRB1*01:02M HLA-DRB1*11:03L HLA-DRB1*14:02L HLA-DQA1*01-B1*05L
  REGION 1..12: note = CONT. FROM ABOVE: HLA-DQA1*05:05-B1*03:19L HLA-DRB1*12:01L HLA-D PA1*03:01-B1*105:01L HLA-DQA1*03:01-B1*03:02L HLA-DQA1*05:05-B1* 03:01L HLA-DRB1*07:01L HLA-DRB1*10:01L HLA-DRB1*16:01L HLA-DRB1* 04:08L HLA-DQA1*02:01-B1*03:03L HLA-DRB1*15:03L
FRYMNSQGLLPP

SEQ ID NO: 11058 - protein, 11 aa, Severe acute respiratory syndrome coronavirus 2
  REGION 1..11: note = Table B: HLA-DQA1*05:01-B1*03:01L HLA-DRB1*13:02L HLA-DRB1*01:03L HLA-DRB1*14:01L HLA-DRB1*12:01L HLA-DPA1*03:01-B1*105:01L HLA-DQA1*05:05-B1*03:01L HLA-DPA1*01:02-B1*04:01L HLA-DRB1*16:01L
YMNSQGLLPPK

SEQ ID NO: 11059 - protein, 10 aa, Severe acute respiratory syndrome coronavirus 2
  REGION 1..10: note = Table B: HLA-DQA1*05:01-B1*03:01L HLA-DQA1*03:01-B1*03:02L HLA-DQA1*05:05-B1*03:01L HLA-DQA1*01:03-B1*06:01L HLA-DQA1*02:01-B1*03:03L
NSQGLLPPKN

SEQ ID NO: 11060 - protein, 10 aa, Severe acute respiratory syndrome coronavirus 2
  REGION 1..10: note = Table B: HLA-DQA1*05:01-B1*03:01L HLA-DRB1*13:03L HLA-DQA1*01:02-B1*06:02M HLA-DRB1*14:01L HLA-DPA1*02:01-B1*13:01L HLA-DPA1*03:01-B1*105:01L HLA-DRB1*15:03L
LPPKNSIDAF

SEQ ID NO: 11061 - protein, 16 aa, Severe acute respiratory syndrome coronavirus 2
  REGION 1..16: note = Table B: HLA-DQA1*05:01-B1*03:01L HLA-DRB1*01:01L HLA-DRB3*02:01L HLA-DRB1*03:01L HLA-DRB1*14:54L HLA-DPA1*01:03-B1*104:01L HLA-DQA1*05:05-B1*03:01L HLA-DQA1*01:03-B1*06:01L HLA-DRB1*08:03L
DAFKLNIKLLGVGGKP

SEQ ID NO: 11062 - protein, 14 aa, Severe acute respiratory syndrome coronavirus 2
  REGION 1..14: note = Table B: HLA-DQA1*05:01-B1*03:01L HLA-DRB1*07:01L HLA-DQA1*01:03-B1*06:01L
NIKLLGVGGKPCIK

SEQ ID NO: 11063 - protein, 10 aa, Severe acute respiratory syndrome coronavirus 2
  REGION 1..10: note = Table B: HLA-DQA1*05:01-B1*03:01L HLA-DRB1*04:03L HLA-DRB1*13:02L HLA-DRB1*13:03L HLA-DRB1*01:03L HLA-DRB1*04:02L HLA-DQA1*01:02-B1*06:02L HLA-DRB4*03:01NL HLA-DRB1*14:01L HLA-DQA1*01:01-B1*05:01L HLA-DRB1*08:01L HLA-DRB1*12:01L
  REGION 1..10: note = CONT. FROM ABOVE: HLA-DPA1*03:01-B1*105:01L HLA-DQA1*03:01-B1*03 :02L HLA-DQA1*05:05-B1*03:01L HLA-DRB1*14:17L HLA-DPA1*01:02-B1* 04:01L HLA-DRB1*16:01L HLA-DQA1*01:03-B1*06:01L HLA-DQA1*02:01-B 1*03:03L
TVQSKMSDVK

SEQ ID NO: 11064 - protein, 11 aa, Severe acute respiratory syndrome coronavirus 2
  REGION 1..11: note = Table B: HLA-DQA1*05:01-B1*03:01L HLA-DQA1*01:02-B1*06:02L HLA-DQA1*03:01-B1*03:02L
SVVLLSVLQQL

SEQ ID NO: 11065 - protein, 13 aa, Severe acute respiratory syndrome coronavirus 2
  REGION 1..13: note = Table B: HLA-DQA1*05:01-B1*03:01L HLA-DRB1*13:02L HLA-DRB3*02:01L HLA-DPA1*01:03-B1*03:01L HLA-DQA1*05:01-B1*02:01L HLA-DQA1*05:05-B1*03:01L HLA-DRB1*16:01L
VVLLSVLQQLRVE

SEQ ID NO: 11066 - protein, 12 aa, Severe acute respiratory syndrome coronavirus 2
  REGION 1..12: note = Table B: HLA-DQA1*05:01-B1*03:01L HLA-DRB1*04:05L HLA-DQA1*01:02-B1*06:02L HLA-DRB1*01:02L HLA-DPA1*03:01-B1*105:01L HLA-DRB1*14:54L
LSVLQQLRVESS

SEQ ID NO: 11067 - protein, 12 aa, Severe acute respiratory syndrome coronavirus 2
  REGION 1..12: note = Table B: HLA-DQA1*05:01-B1*03:01L HLA-DRB1*01:03L HLA-DRB1*04:05L HLA-DQA1*01:02-B1*06:02L HLA-DRB1*01:02L HLA-DPA1*03:01-B1*105:01L HLA-DQA1*01:03-B1*06:01L HLA-DRB1*04:08L HLA-DQA1*02:01-B1*03:03L
VLQQLRVESSSK

SEQ ID NO: 11068 - protein, 11 aa, Severe acute respiratory syndrome coronavirus 2
  REGION 1..11: note = Table B: HLA-DQA1*05:01-B1*03:01L HLA-DRB1*04:03L HLA-DRB1*01:02L HLA-DRB1*14:01L HLA-DRB1*12:01L HLA-DRB1*16:01L HLA-DQA1*02:01-B1*03:03L HLA-DRB1*15:03L
QQLRVESSSKL

SEQ ID NO: 11069 - protein, 15 aa, Severe acute respiratory syndrome coronavirus 2
  REGION 1..15: note = Table B: HLA-DQA1*05:01-B1*03:01L HLA-DQA1*05:05-B1*03:19L
SSSKLWAQCVQLHND

SEQ ID NO: 11070 - protein, 13 aa, Severe acute respiratory syndrome coronavirus 2
  REGION 1..13: note = Table B: HLA-DQA1*05:01-B1*03:01L HLA-DQA1*01:01-B1*05:01L HLA-DPA1*03:01-B1*105:01L HLA-DQA1*05:05-B1*03:01L HLA-DRB1*15:03L
LHNDILLAKDTTE

SEQ ID NO: 11071 - protein, 12 aa, Severe acute respiratory syndrome coronavirus 2
  REGION 1..12: note = Table B: HLA-DQA1*05:01-B1*03:01L HLA-DRB1*04:04L HLA-DQA1*01:02-B1*06:02L HLA-DRB1*01:02L HLA-DRB1*08:04L HLA-DRB1*14:01L HLA-DRB1*11:04L HLA-DQA1*01:01-B1*05:01L HLA-DRB1*08:01L HLA-DRB1*12:02L HLA-DPA1*02:01-B1*13:01L
  REGION 1..12: note = CONT. FROM ABOVE: HLA-DPA1*03:01-B1*105:01L HLA-DQA1*05:05-B1*03 :01L HLA-DRB1*08:03L HLA-DRB1*15:03L
NDILLAKDTTEA

SEQ ID NO: 11072 - protein, 11 aa, Severe acute respiratory syndrome coronavirus 2
  REGION 1..11: note = Table B: HLA-DQA1*05:01-B1*03:01L HLA-DRB1*08:77L HLA-DPA1*03:01-B1*04:02L HLA-DRB1*14:01L HLA-DQA1*05:05-B1*03:19L HLA-DQA1*05:01-B1*02:01L HLA-DRB1*12:01L
ILLAKDTTEAF

SEQ ID NO: 11073 - protein, 14 aa, Severe acute respiratory syndrome coronavirus 2
  REGION 1..14: note = Table B: HLA-DQA1*05:01-B1*03:01L HLA-DPA1*01:03-B1*04:02L HLA-DQA1*05:05-B1*03:01L
LAKDTTEAFEKMVS

SEQ ID NO: 11074 - protein, 11 aa, Severe acute respiratory syndrome coronavirus 2
  REGION 1..11: note = Table B: HLA-DQA1*05:01-B1*03:01L HLA-DRB1*01:02L
LSMQGAVDINK

SEQ ID NO: 11075 - protein, 13 aa, Severe acute respiratory syndrome coronavirus 2
  REGION 1..13: note = Table B: HLA-DQA1*05:01-B1*03:01L HLA-DRB1*01:02L HLA-DQA1*05:01-B1*02:01L HLA-DPA1*03:01-B1*105:01L HLA-DQA1*03:01-B1*03:02L HLA-DQA1*05:05-B1*03:01L HLA-DRB1*16:01L HLA-DQA1*02:01-B1*03:03L
VDINKLCEEMLDN

SEQ ID NO: 11076 - protein, 13 aa, Severe acute respiratory syndrome coronavirus 2
  REGION 1..13: note = Table B: HLA-DQA1*05:01-B1*03:01L
EMLDNRATLQAIA

SEQ ID NO: 11077 - protein, 11 aa, Severe acute respiratory syndrome coronavirus 2
  REGION 1..11: note = Table B: HLA-DQA1*05:01-B1*03:01L HLA-DRB1*04:03L HLA-DRB1*13:03L HLA-DRB1*04:02L HLA-DRB1*04:05L HLA-DRB4*03:01NL HLA-DRB1*14:01L HLA-DQA1*01-B1*05L HLA-DQA1*05:01-B1*02:01L HLA-DRB1*12:01L HLA-DPA1*03:01-B1*105:01L
  REGION 1..11: note = CONT. FROM ABOVE: HLA-DPA1*01:03-B1*104:01L HLA-DRB1*14:17L HLA- DRB1*10:01L HLA-DRB1*16:01L HLA-DQA1*02:01-B1*03:03L HLA-DRB1*15 :03L
SEFSSLPSYAA

SEQ ID NO: 11078 - protein, 14 aa, Severe acute respiratory syndrome coronavirus 2
  REGION 1..14: note = Table B: HLA-DQA1*05:01-B1*03:01L HLA-DQA1*01:02-B1*06:02L HLA-DQA1*05:05-B1*03:19L HLA-DRB1*12:01L HLA-DPA1*03:01-B1*105:01L HLA-DQA1*05:05-B1*03:01L
ATAQEAYEQAVANG

SEQ ID NO: 11079 - protein, 14 aa, Severe acute respiratory syndrome coronavirus 2
  REGION 1..14: note = Table B: HLA-DQA1*05:01-B1*03:01L HLA-DRB1*13:03L HLA-DQA1*01:02-B1*06:02L HLA-DRB1*01:02L HLA-DPA1*01:03-B1*03:01L HLA-DQA1*01:01-B1*05:01L HLA-DQA1*05:05-B1*03:19L HLA-DRB1*12:01L
  REGION 1..14: note = CONT. FROM ABOVE: HLA-DPA1*02:01-B1*13:01L HLA-DPA1*03:01-B1*105 :01L HLA-DQA1*05:05-B1*03:01L HLA-DQA1*01:03-B1*06:01L HLA-DRB1* 15:03L
TAQEAYEQAVANGD

SEQ ID NO: 11080 - protein, 12 aa, Severe acute respiratory syndrome coronavirus 2
  REGION 1..12: note = Table B: HLA-DQA1*05:01-B1*03:01L HLA-DRB1*13:02L HLA-DRB1*04:04L HLA-DQA1*01:02-B1*06:02L HLA-DRB1*08:04L HLA-DRB1*08:77L HLA-DRB1*14:01L HLA-DRB1*11:03L HLA-DRB1*11:04L HLA-DRB1*14:02L HLA-DQA1*01:01-B1*05:01L HLA-DRB1*08:01L
  REGION 1..12: note = CONT. FROM ABOVE: HLA-DRB5*01:01L HLA-DQA1*05:05-B1*03:19L HLA-D RB1*09:01L HLA-DRB1*12:02L HLA-DPA1*02:01-B1*13:01L HLA-DPA1*03: 01-B1*105:01L HLA-DQA1*05:05-B1*03:01L HLA-DQA1*01:03-B1*06:01L HLA-DRB1*08:03L
EAYEQAVANGDS

SEQ ID NO: 11081 - protein, 11 aa, Severe acute respiratory syndrome coronavirus 2
  REGION 1..11: note = Table B: HLA-DQA1*05:01-B1*03:01L HLA-DRB1*13:03L HLA-DQA1*05:05-B1*03:19L HLA-DQA1*05:01-B1*02:01L HLA-DPA1*01:02-B1*04:01L HLA-DQA1*01:03-B1*06:01L HLA-DQA1*02:01-B1*03:03L HLA-DRB1*15:03L
AVANGDSEVVL

SEQ ID NO: 11082 - protein, 11 aa, Severe acute respiratory syndrome coronavirus 2
  REGION 1..11: note = Table B: HLA-DQA1*05:01-B1*03:01L HLA-DRB1*04:01L HLA-DRB1*04:03L HLA-DRB1*13:02L HLA-DRB1*01:03L HLA-DRB1*04:02L HLA-DRB1*04:05L HLA-DQA1*01:02-B1*06:02L HLA-DRB1*01:01L HLA-DRB1*08:77L HLA-DRB3*02:01L HLA-DPA1*01:03-B1*03:01L
  REGION 1..11: note = CONT. FROM ABOVE: HLA-DRB1*14:01L HLA-DRB1*11:04L HLA-DRB1*14:02 L HLA-DQA1*01:01-B1*05:01L HLA-DRB1*08:01L HLA-DRB5*01:01L HLA-D QA1*01-B1*05L HLA-DQA1*05:05-B1*03:19L HLA-DQA1*05:01-B1*02:01L HLA-DPA1*01:03-B1*04:02L HLA-DRB1*12:02L
  REGION 1..11: note = CONT. FROM ABOVE: HLA-DPA1*03:01-B1*105:01L HLA-DRB1*14:54L HLA- DRB1*14:17L HLA-DPA1*01:02-B1*04:01L HLA-DRB1*16:01L
VANGDSEVVLK

SEQ ID NO: 11083 - protein, 14 aa, Severe acute respiratory syndrome coronavirus 2
  REGION 1..14: note = Table B: HLA-DQA1*05:01-B1*03:01L HLA-DRB1*13:02L HLA-DRB1*13:03L HLA-DRB1*04:02L HLA-DRB1*04:05L HLA-DRB1*11:03L HLA-DRB1*11:04L HLA-DRB1*11:01L HLA-DPA1*02:01-B1*13:01L HLA-DPA1*03:01-B1*105:01L HLA-DPA1*01:02-B1*04:01L
  REGION 1..14: note = CONT. FROM ABOVE: HLA-DQA1*01:03-B1*06:01L HLA-DRB1*08:03L HLA-D QA1*02:01-B1*03:03L
DSEVVLKKLKKSLN

SEQ ID NO: 11084 - protein, 10 aa, Severe acute respiratory syndrome coronavirus 2
  REGION 1..10: note = Table B: HLA-DQA1*05:01-B1*03:01L HLA-DRB1*01:03L HLA-DQA1*01:02-B1*06:02L HLA-DRB1*14:02L HLA-DQA1*05:01-B1*02:01L HLA-DPA1*01:03-B1*04:01L HLA-DPA1*02:01-B1*13:01L HLA-DQA1*01:03-B1*06:01L
  REGION 1..10: note = CONT. FROM ABOVE: HLA-DQA1*02:01-B1*03:03L
KSLNVAKSEF

SEQ ID NO: 11085 - protein, 12 aa, Severe acute respiratory syndrome coronavirus 2
  REGION 1..12: note = Table B: HLA-DQA1*05:01-B1*03:01L HLA-DRB1*04:01L HLA-DRB1*04:04L HLA-DQA1*01:02-B1*06:02L HLA-DRB1*08:04L HLA-DRB1*08:77L HLA-DPA1*03:01-B1*04:02L HLA-DRB1*11:03L HLA-DRB1*14:02L HLA-DRB1*11:01L HLA-DRB1*13:01L
  REGION 1..12: note = CONT. FROM ABOVE: HLA-DPA1*02:01-B1*13:01L HLA-DPA1*03:01-B1*105 :01L HLA-DRB1*14:54L HLA-DRB1*07:01L HLA-DRB1*10:01L HLA-DQA1*01 :03-B1*06:01L HLA-DRB1*08:03L
SEFDRDAAMQRK

SEQ ID NO: 11086 - protein, 13 aa, Severe acute respiratory syndrome coronavirus 2
  REGION 1..13: note = Table B: HLA-DQA1*05:01-B1*03:01L HLA-DRB1*04:05L
FDRDAAMQRKLEK

SEQ ID NO: 11087 - protein, 13 aa, Severe acute respiratory syndrome coronavirus 2
  REGION 1..13: note = Table B: HLA-DQA1*05:01-B1*03:01L HLA-DRB1*04:01L HLA-DRB1*01:01L HLA-DRB1*11:04L HLA-DRB1*08:01L HLA-DRB1*11:01L HLA-DRB3*01:01L HLA-DPA1*03:01-B1*105:01L HLA-DPA1*01:02-B1*04:01L HLA-DRB1*10:01L
  REGION 1..13: note = CONT. FROM ABOVE: HLA-DQA1*01:03-B1*06:01L
RKLEKMADQAMTQ

SEQ ID NO: 11088 - protein, 10 aa, Severe acute respiratory syndrome coronavirus 2
  REGION 1..10: note = Table B: HLA-DQA1*05:01-B1*03:01L HLA-DRB1*04:03L HLA-DRB1*13:02L HLA-DRB1*13:03M HLA-DRB1*01:03M HLA-DRB1*04:02L HLA-DRB1*04:05L HLA-DQA1*01:02-B1*06:02M HLA-DRB4*03:01NL HLA-DRB1*08:77H HLA-DPA1*01:03-B1*03:01H
  REGION 1..10: note = CONT. FROM ABOVE: HLA-DPA1*03:01-B1*04:02L HLA-DRB1*03:01M HLA-D RB1*14:01L HLA-DRB1*11:02H HLA-DRB1*11:03M HLA-DRB1*11:04L HLA-D RB1*14:02L HLA-DRB1*11:01L HLA-DRB5*01:01L HLA-DQA1*01-B1*05H HL A-DQA1*05:05-B1*03:19H HLA-DQA1*05:01-B1*02:01H HLA-DRB4*01:01M
  REGION 1..10: note = CONT. FROM ABOVE: HLA-DPA1*01:03-B1*04:01M HLA-DQA1*05:05-B1*03: 116M HLA-DPA1*01:03-B1*04:02M HLA-DRB1*12:01M HLA-DPA1*03:01-B1* 105:01L HLA-DRB1*14:54L HLA-DPA1*01:03-B1*104:01H HLA-DPA1*01:02 -B1*04:01L HLA-DRB1*10:01M HLA-DRB1*16:01H HLA-DRB1*08:02L
  REGION 1..10: note = CONT. FROM ABOVE: HLA-DQA1*02:01-B1*03:03L HLA-DRB1*15:01L HLA-D RB1*15:03L
MADQAMTQMY

SEQ ID NO: 11089 - protein, 12 aa, Severe acute respiratory syndrome coronavirus 2
  REGION 1..12: note = Table B: HLA-DQA1*05:01-B1*03:01L HLA-DRB1*04:02L HLA-DQA1*01:02-B1*06:02L HLA-DRB1*08:01L HLA-DQA1*02:01-B1*03:03L
DQAMTQMYKQAR

SEQ ID NO: 11090 - protein, 12 aa, Severe acute respiratory syndrome coronavirus 2
  REGION 1..12: note = Table B: HLA-DQA1*05:01-B1*03:01L HLA-DRB1*04:03L HLA-DRB1*13:02L HLA-DRB1*13:03L HLA-DRB1*01:03L HLA-DRB1*04:02L HLA-DRB1*04:04L HLA-DRB1*04:05L HLA-DQA1*01:02-B1*06:02L HLA-DRB1*01:02L HLA-DRB4*03:01NL HLA-DRB1*08:04L HLA-DRB1*14:01L
  REGION 1..12: note = CONT. FROM ABOVE: HLA-DRB1*11:04L HLA-DQA1*01:01-B1*05:01L HLA-D RB1*08:01M HLA-DRB1*11:01L HLA-DRB1*04:10L HLA-DRB1*12:01L HLA-D RB3*01:01L HLA-DPA1*02:01-B1*13:01L HLA-DQA1*03:01-B1*03:02L HLA -DRB1*14:17L HLA-DPA1*01:02-B1*04:01L HLA-DRB1*16:01L
  REGION 1..12: note = CONT. FROM ABOVE: HLA-DRB1*04:08L HLA-DRB1*08:03L HLA-DQA1*02:01 -B1*03:03L HLA-DRB1*15:03L
TQMYKQARSEDK

SEQ ID NO: 11091 - protein, 12 aa, Severe acute respiratory syndrome coronavirus 2
  REGION 1..12: note = Table B: HLA-DQA1*05:01-B1*03:01L HLA-DQA1*01:02-B1*06:02L HLA-DQA1*05:05-B1*03:01L HLA-DQA1*01:03-B1*06:01L
EDKRAKVTSAMQ

SEQ ID NO: 11092 - protein, 12 aa, Severe acute respiratory syndrome coronavirus 2
  REGION 1..12: note = Table B: HLA-DQA1*05:01-B1*03:01L HLA-DRB1*04:03L HLA-DRB1*04:02L HLA-DQA1*01:02-B1*06:02L HLA-DQA1*01:01-B1*05:01L HLA-DQA1*05:05-B1*03:01L HLA-DRB1*16:01L HLA-DQA1*01:03-B1*06:01L
LDNDALNNIINN

SEQ ID NO: 11093 - protein, 13 aa, Severe acute respiratory syndrome coronavirus 2
  REGION 1..13: note = Table B: HLA-DQA1*05:01-B1*03:01L HLA-DRB1*14:04L HLA-DRB1*01:03L HLA-DRB1*04:04L HLA-DRB1*04:05L HLA-DRB1*01:02L HLA-DRB1*08:04L HLA-DRB1*08:77L HLA-DPA1*01:03-B1*03:01L HLA-DPA1*03:01-B1*04:02L HLA-DRB1*11:03L
  REGION 1..13: note = CONT. FROM ABOVE: HLA-DQA1*01:01-B1*05:01L HLA-DRB5*01:01L HLA-D QA1*05:05-B1*03:19L HLA-DQA1*05:01-B1*02:01L HLA-DRB1*04:10M HLA -DRB1*09:01L HLA-DRB1*12:02L HLA-DPA1*02:01-B1*13:01L HLA-DRB1*1 4:54L HLA-DPA1*01:03-B1*104:01L HLA-DRB1*10:01L
  REGION 1..13: note = CONT. FROM ABOVE: HLA-DQA1*01:03-B1*06:01L HLA-DRB1*04:08L HLA-D RB1*08:03L HLA-DRB1*15:03L
VPLNIIPLTTAAK

SEQ ID NO: 11094 - protein, 11 aa, Severe acute respiratory syndrome coronavirus 2
  REGION 1..11: note = Table B: HLA-DQA1*05:01-B1*03:01L HLA-DRB1*13:02L HLA-DQA1*01:02-B1*06:02L HLA-DRB1*01:02L HLA-DRB1*08:04L HLA-DRB1*14:01L HLA-DRB1*11:03L HLA-DQA1*01:01-B1*05:01L HLA-DRB5*01:01L HLA-DRB1*12:02L HLA-DPA1*03:01-B1*105:01L
  REGION 1..11: note = CONT. FROM ABOVE: HLA-DQA1*05:05-B1*03:01L HLA-DQA1*01:03-B1*06: 01L HLA-DRB1*15:03L
EIQQVVDADSK

SEQ ID NO: 11095 - protein, 13 aa, Severe acute respiratory syndrome coronavirus 2
  REGION 1..13: note = Table B: HLA-DQA1*05:01-B1*03:01L HLA-DQA1*05:05-B1*03:01L
DADSKIVQLSEIS

SEQ ID NO: 11096 - protein, 13 aa, Severe acute respiratory syndrome coronavirus 2
  REGION 1..13: note = Table B: HLA-DQA1*05:01-B1*03:01L HLA-DRB1*13:02L HLA-DRB1*13:03L HLA-DRB1*01:03L HLA-DRB1*04:02L HLA-DRB1*04:04L HLA-DRB1*04:05L HLA-DQA1*01:02-B1*06:02L HLA-DRB4*03:01NL HLA-DQA1*01:01-B1*05:01L HLA-DQA1*05:05-B1*03:19L
  REGION 1..13: note = CONT. FROM ABOVE: HLA-DRB1*04:10L HLA-DRB1*12:01L HLA-DRB1*12:02 L HLA-DRB1*14:54L HLA-DQA1*05:05-B1*03:01L HLA-DRB1*16:01L HLA-D QA1*01:03-B1*06:01L HLA-DRB1*04:08L
VQLSEISMDNSPN

SEQ ID NO: 11097 - protein, 11 aa, Severe acute respiratory syndrome coronavirus 2
  REGION 1..11: note = Table B: HLA-DQA1*05:01-B1*03:01L HLA-DRB1*04:01L HLA-DRB1*04:03L HLA-DRB1*13:02L HLA-DRB1*13:03L HLA-DRB1*01:03L HLA-DRB1*04:02L HLA-DRB4*03:01NL HLA-DRB1*08:77L HLA-DRB3*02:01L HLA-DPA1*03:01-B1*04:02L HLA-DRB1*14:01L HLA-DRB1*11:02L
  REGION 1..11: note = CONT. FROM ABOVE: HLA-DRB1*11:03L HLA-DRB1*11:04L HLA-DRB1*14:02 L HLA-DRB1*11:01L HLA-DRB5*01:01L HLA-DQA1*01-B1*05L HLA-DQA1*05 :05-B1*03:19L HLA-DQA1*05:01-B1*02:01L HLA-DRB4*01:01L HLA-DPA1* 01:03-B1*04:01L HLA-DQA1*05:05-B1*03:116L HLA-DRB1*09:01L
  REGION 1..11: note = CONT. FROM ABOVE: HLA-DPA1*01:03-B1*04:02L HLA-DRB1*12:01L HLA-D PA1*03:01-B1*105:01L HLA-DRB1*14:54L HLA-DPA1*01:03-B1*104:01L H LA-DRB1*14:17L HLA-DPA1*01:02-B1*04:01L HLA-DRB1*07:01L HLA-DRB1 *10:01L HLA-DRB1*16:01L HLA-DRB1*08:03L HLA-DQA1*02:01-B1*03:03L
  REGION 1..11: note = CONT. FROM ABOVE: HLA-DRB1*15:03L
SEISMDNSPNL

SEQ ID NO: 11098 - protein, 14 aa, Severe acute respiratory syndrome coronavirus 2
  REGION 1..14: note = Table B: HLA-DQA1*05:01-B1*03:01L HLA-DRB1*13:02L HLA-DQA1*01:02-B1*06:02L HLA-DRB1*01:02L HLA-DPA1*01:03-B1*03:01L HLA-DRB1*03:01L HLA-DRB1*14:02L HLA-DRB1*12:01L HLA-DQA1*05:05-B1*03:01L
  REGION 1..14: note = CONT. FROM ABOVE: HLA-DQA1*01:03-B1*06:01L HLA-DQA1*02:01-B1*03: 03L
EISMDNSPNLAWPL

SEQ ID NO: 11099 - protein, 12 aa, Severe acute respiratory syndrome coronavirus 2
  REGION 1..12: note = Table B: HLA-DQA1*05:01-B1*03:01L HLA-DQA1*01:02-B1*06:02L HLA-DQA1*01:03-B1*06:01L
NSPNLAWPLIVT

SEQ ID NO: 11100 - protein, 14 aa, Severe acute respiratory syndrome coronavirus 2
  REGION 1..14: note = Table B: HLA-DQA1*05:01-B1*03:01L HLA-DRB1*04:03L HLA-DRB1*01:03L HLA-DRB1*04:05L HLA-DRB1*01:02L HLA-DPA1*01:03-B1*03:01L HLA-DRB1*08:01L HLA-DPA1*01:03-B1*04:02L HLA-DRB1*12:01L
  REGION 1..14: note = CONT. FROM ABOVE: HLA-DPA1*02:01-B1*13:01L HLA-DPA1*01:03-B1*104 :01L HLA-DRB1*16:01L HLA-DQA1*01:03-B1*06:01L HLA-DRB1*04:08L
SPNLAWPLIVTALR

SEQ ID NO: 11101 - protein, 13 aa, Severe acute respiratory syndrome coronavirus 2
  REGION 1..13: note = Table B: HLA-DQA1*05:01-B1*03:01L HLA-DRB1*01:03L HLA-DRB1*04:04L HLA-DRB1*01:02L HLA-DPA1*03:01-B1*04:02L HLA-DRB1*11:04L HLA-DRB1*08:01L HLA-DRB1*04:10L HLA-DPA1*03:01-B1*105:01L HLA-DQA1*05:05-B1*03:01L
  REGION 1..13: note = CONT. FROM ABOVE: HLA-DPA1*01:02-B1*04:01L HLA-DQA1*01:03-B1*06: 01L HLA-DRB1*04:08L HLA-DRB1*15:03L
WPLIVTALRANSA

SEQ ID NO: 11102 - protein, 11 aa, Severe acute respiratory syndrome coronavirus 2
  REGION 1..11: note = Table B: HLA-DQA1*05:01-B1*03:01L HLA-DRB1*13:03L HLA-DRB1*04:04L HLA-DRB1*04:05L HLA-DQA1*01:02-B1*06:02L HLA-DRB1*01:01L HLA-DRB4*03:01NL HLA-DRB1*12:01L HLA-DRB1*14:54L HLA-DQA1*05:05-B1*03:01L HLA-DRB1*10:01L HLA-DRB1*16:01L
  REGION 1..11: note = CONT. FROM ABOVE: HLA-DQA1*01:03-B1*06:01L HLA-DRB1*04:08L HLA-D RB1*15:03L
VTALRANSAVK

SEQ ID NO: 11103 - protein, 12 aa, Severe acute respiratory syndrome coronavirus 2
  REGION 1..12: note = Table B: HLA-DQA1*05:01-B1*03:01L HLA-DRB4*03:01NL HLA-DRB1*11:03L HLA-DRB1*14:02L
TALRANSAVKLQ

SEQ ID NO: 11104 - protein, 11 aa, Severe acute respiratory syndrome coronavirus 2
  REGION 1..11: note = Table B: HLA-DQA1*05:01-B1*03:01L HLA-DRB1*04:03L HLA-DRB1*13:03L HLA-DRB1*01:03L HLA-DRB1*04:02L HLA-DRB1*01:02L HLA-DRB4*03:01NL HLA-DRB1*08:04L HLA-DRB1*08:77L HLA-DRB1*11:03L HLA-DRB1*11:04L HLA-DRB1*14:02L HLA-DRB1*12:02L HLA-DRB1*14:54L
  REGION 1..11: note = CONT. FROM ABOVE: HLA-DRB1*14:17L HLA-DRB1*04:08L HLA-DQA1*02:01 -B1*03:03L
LRANSAVKLQN

SEQ ID NO: 11105 - protein, 12 aa, Severe acute respiratory syndrome coronavirus 2
  REGION 1..12: note = Table B: HLA-DQA1*05:01-B1*03:01L HLA-DQA1*01:02-B1*06:02L HLA-DPA1*03:01-B1*105:01L HLA-DQA1*01:03-B1*06:01L
LQNNELSPVALR

SEQ ID NO: 11106 - protein, 14 aa, Severe acute respiratory syndrome coronavirus 2
  REGION 1..14: note = Table B: HLA-DQA1*05:01-B1*03:01L HLA-DRB1*01:02L HLA-DQA1*05:05-B1*03:19L HLA-DPA1*03:01-B1*105:01L HLA-DRB1*04:08L
LRQMSCAAGTTQTA

SEQ ID NO: 11107 - protein, 13 aa, Severe acute respiratory syndrome coronavirus 2
  REGION 1..13: note = Table B: HLA-DQA1*05:01-B1*03:01L HLA-DQA1*01:02-B1*06:02L HLA-DQA1*01:01-B1*05:01L HLA-DQA1*05:01-B1*02:01L
AAGTTQTACTDDN

SEQ ID NO: 11108 - protein, 13 aa, Severe acute respiratory syndrome coronavirus 2
  REGION 1..13: note = Table B: HLA-DQA1*05:01-B1*03:01L HLA-DQA1*05:05-B1*03:01L
TDDNALAYYNTTK

SEQ ID NO: 11109 - protein, 10 aa, Severe acute respiratory syndrome coronavirus 2
  REGION 1..10: note = Table B: HLA-DQA1*05:01-B1*03:01L HLA-DQA1*03:01-B1*03:02L HLA-DRB1*16:01L HLA-DQA1*02:01-B1*03:03L
NTTKGGRFVL

SEQ ID NO: 11110 - protein, 13 aa, Severe acute respiratory syndrome coronavirus 2
  REGION 1..13: note = Table B: HLA-DQA1*05:01-B1*03:01L HLA-DRB1*13:02L HLA-DRB1*04:05L HLA-DRB1*14:01L HLA-DRB1*11:04L HLA-DRB1*08:01L HLA-DRB1*11:01L HLA-DPA1*01:03-B1*04:01L HLA-DPA1*01:03-B1*04:02L HLA-DPA1*02:01-B1*13:01L
  REGION 1..13: note = CONT. FROM ABOVE: HLA-DQA1*03:01-B1*03:02L HLA-DPA1*01:03-B1*02: 01L HLA-DQA1*02:01-B1*03:03L HLA-DRB1*15:03L
LQDLKWARFPKSD

SEQ ID NO: 11111 - protein, 12 aa, Severe acute respiratory syndrome coronavirus 2
  REGION 1..12: note = Table B: HLA-DQA1*05:01-B1*03:01L HLA-DRB1*04:05L HLA-DRB1*01:02L HLA-DPA1*03:01-B1*04:02L HLA-DPA1*01:03-B1*04:02L HLA-DRB1*12:01L HLA-DPA1*03:01-B1*105:01L HLA-DQA1*03:01-B1*03:02L
  REGION 1..12: note = CONT. FROM ABOVE: HLA-DRB1*16:01L HLA-DQA1*02:01-B1*03:03L
DLKWARFPKSDG

SEQ ID NO: 11112 - protein, 10 aa, Severe acute respiratory syndrome coronavirus 2
  REGION 1..10: note = Table B: HLA-DQA1*05:01-B1*03:01L HLA-DRB1*13:03L HLA-DRB1*04:05L HLA-DRB4*03:01NL HLA-DRB1*14:01L HLA-DQA1*01-B1*05L
FPKSDGTGTI

SEQ ID NO: 11113 - protein, 13 aa, Severe acute respiratory syndrome coronavirus 2
  REGION 1..13: note = Table B: HLA-DQA1*05:01-B1*03:01L HLA-DQA1*01:01-B1*05:01L HLA-DQA1*01-B1*05L HLA-DQA1*05:05-B1*03:19L HLA-DPA1*03:01-B1*105:01L HLA-DQA1*05:05-B1*03:01L
DGTGTIYTELEPP

SEQ ID NO: 11114 - protein, 10 aa, Severe acute respiratory syndrome coronavirus 2
  REGION 1..10: note = Table B: HLA-DQA1*05:01-B1*03:01L HLA-DQA1*01:02-B1*06:02L HLA-DRB1*01:02L HLA-DQA1*01-B1*05L HLA-DQA1*05:01-B1*02:01L HLA-DPA1*03:01-B1*105:01L HLA-DQA1*03:01-B1*03:02L HLA-DQA1*05:05-B1*03:01L HLA-DPA1*01:02-B1*04:01L
  REGION 1..10: note = CONT. FROM ABOVE: HLA-DRB1*16:01L HLA-DQA1*01:03-B1*06:01L HLA-D QA1*02:01-B1*03:03L HLA-DRB1*15:03L
IYTELEPPCR

SEQ ID NO: 11115 - protein, 10 aa, Severe acute respiratory syndrome coronavirus 2
  REGION 1..10: note = Table B: HLA-DQA1*05:01-B1*03:01L HLA-DRB1*13:03M HLA-DRB1*01:03L HLA-DQA1*01:02-B1*06:02M HLA-DRB4*03:01NL HLA-DRB1*08:77L HLA-DPA1*01:03-B1*03:01L HLA-DPA1*03:01-B1*04:02L HLA-DRB1*03:01L HLA-DRB1*14:01L
  REGION 1..10: note = CONT. FROM ABOVE: HLA-DRB1*14:02L HLA-DRB1*11:01L HLA-DRB5*01:01 L HLA-DQA1*01-B1*05L HLA-DQA1*05:05-B1*03:19L HLA-DQA1*05:01-B1* 02:01M HLA-DPA1*01:03-B1*04:01L HLA-DPA1*01:03-B1*04:02L HLA-DPA 1*02:01-B1*13:01L HLA-DPA1*03:01-B1*105:01M
  REGION 1..10: note = CONT. FROM ABOVE: HLA-DPA1*01:02-B1*04:01L HLA-DRB1*10:01L HLA-D RB1*16:01L HLA-DQA1*01:03-B1*06:01L HLA-DRB1*08:02L HLA-DQA1*02: 01-B1*03:03L HLA-DRB1*15:03L
DTPKGPKVKY

SEQ ID NO: 11116 - protein, 10 aa, Severe acute respiratory syndrome coronavirus 2
  REGION 1..10: note = Table B: HLA-DQA1*05:01-B1*03:01L HLA-DQA1*05:01-B1*02:01L
TPKGPKVKYL

SEQ ID NO: 11117 - protein, 15 aa, Severe acute respiratory syndrome coronavirus 2
  REGION 1..15: note = Table B: HLA-DQA1*05:01-B1*03:01L HLA-DRB1*04:03L HLA-DRB1*13:02L HLA-DRB1*04:02L HLA-DRB1*04:04L HLA-DPA1*01:03-B1*03:01L HLA-DRB1*11:02L HLA-DRB1*11:03L HLA-DRB1*14:02L HLA-DQA1*05:05-B1*03:19L
  REGION 1..15: note = CONT. FROM ABOVE: HLA-DPA1*01:03-B1*04:01L HLA-DQA1*05:05-B1*03: 116L HLA-DRB3*01:01L HLA-DQA1*03:01-B1*03:02L HLA-DPA1*01:03-B1* 104:01L HLA-DQA1*05:05-B1*03:01L HLA-DRB1*07:01L HLA-DQA1*01:03- B1*06:01L HLA-DRB1*08:02L
GPKVKYLYFIKGLNN

SEQ ID NO: 11118 - protein, 12 aa, Severe acute respiratory syndrome coronavirus 2
  REGION 1..12: note = Table B: HLA-DQA1*05:01-B1*03:01L HLA-DRB1*01:03L HLA-DRB1*04:05L HLA-DRB1*01:02L HLA-DRB1*08:04L HLA-DPA1*01:03-B1*03:01L HLA-DQA1*05:05-B1*03:19L HLA-DPA1*01:03-B1*04:02L HLA-DRB1*12:01L
  REGION 1..12: note = CONT. FROM ABOVE: HLA-DQA1*05:05-B1*03:01L HLA-DRB1*04:08L
YLYFIKGLNNLN

SEQ ID NO: 11119 - protein, 11 aa, Severe acute respiratory syndrome coronavirus 2
  REGION 1..11: note = Table B: HLA-DQA1*05:01-B1*03:01L HLA-DRB1*13:02L HLA-DRB1*04:04L HLA-DRB1*04:05L HLA-DQA1*01:02-B1*06:02L HLA-DRB1*01:02L HLA-DRB1*14:01L HLA-DRB1*11:04L HLA-DQA1*01-B1*05L HLA-DRB1*04:10L HLA-DPA1*03:01-B1*105:01L
  REGION 1..11: note = CONT. FROM ABOVE: HLA-DRB1*14:54L HLA-DPA1*01:02-B1*04:01L HLA-D RB1*10:01L HLA-DRB1*16:01L HLA-DQA1*01:03-B1*06:01L HLA-DRB1*04: 08L HLA-DRB1*15:03L
FIKGLNNLNRG

SEQ ID NO: 11120 - protein, 11 aa, Severe acute respiratory syndrome coronavirus 2
  REGION 1..11: note = Table B: HLA-DQA1*05:01-B1*03:01L HLA-DQA1*05:05-B1*03:01L
LNRGMVLGSLA

SEQ ID NO: 11121 - protein, 11 aa, Severe acute respiratory syndrome coronavirus 2
  REGION 1..11: note = Table B: HLA-DQA1*05:01-B1*03:01L HLA-DRB1*13:03L HLA-DRB1*08:04L HLA-DRB1*11:04L HLA-DQA1*05:05-B1*03:19L HLA-DRB1*14:54L HLA-DQA1*05:05-B1*03:01L
SLAATVRLQAG

SEQ ID NO: 11122 - protein, 10 aa, Severe acute respiratory syndrome coronavirus 2
  REGION 1..10: note = Table B: HLA-DQA1*05:01-B1*03:01L HLA-DRB1*04:03L HLA-DQA1*01:02-B1*06:02L HLA-DQA1*03:01-B1*03:02L HLA-DQA1*05:05-B1*03:01L HLA-DQA1*01:03-B1*06:01L HLA-DQA1*02:01-B1*03:03L
AATVRLQAGN

SEQ ID NO: 11123 - protein, 12 aa, Severe acute respiratory syndrome coronavirus 2
  REGION 1..12: note = Table B: HLA-DQA1*05:01-B1*03:01L HLA-DQA1*01:02-B1*06:02L HLA-DRB1*01:02L HLA-DRB4*03:01NL HLA-DRB1*12:01L HLA-DQA1*03:01-B1*03:02L HLA-DQA1*05:05-B1*03:01L HLA-DQA1*01:03-B1*06:01L
ATVRLQAGNATE

SEQ ID NO: 11124 - protein, 13 aa, Severe acute respiratory syndrome coronavirus 2
  REGION 1..13: note = Table B: HLA-DQA1*05:01-B1*03:01L HLA-DRB1*01:02L HLA-DQA1*05:05-B1*03:19L HLA-DQA1*03:01-B1*03:02L HLA-DQA1*05:05-B1*03:01L HLA-DQA1*01:03-B1*06:01L HLA-DRB1*15:03L
TVRLQAGNATEVP

SEQ ID NO: 11125 - protein, 13 aa, Severe acute respiratory syndrome coronavirus 2
  REGION 1..13: note = Table B: HLA-DQA1*05:01-B1*03:01L HLA-DRB1*04:03L HLA-DRB1*04:02L HLA-DQA1*05:05-B1*03:19L HLA-DQA1*03:01-B1*03:02L HLA-DQA1*05:05-B1*03:01L HLA-DRB1*14:17L
VRLQAGNATEVPA

SEQ ID NO: 11126 - protein, 10 aa, Severe acute respiratory syndrome coronavirus 2
  REGION 1..10: note = Table B: HLA-DQA1*05:01-B1*03:01L HLA-DRB1*13:03M HLA-DQA1*01:02-B1*06:02M HLA-DPA1*03:01-B1*04:02L HLA-DRB1*14:01L HLA-DRB1*14:02L HLA-DQA1*01-B1*05L HLA-DQA1*05:01-B1*02:01L HLA-DQA1*05:05-B1*03:116L
  REGION 1..10: note = CONT. FROM ABOVE: HLA-DPA1*02:01-B1*13:01L HLA-DPA1*03:01-B1*105 :01M HLA-DPA1*01:02-B1*04:01L HLA-DQA1*01:03-B1*06:01L HLA-DRB1* 15:03L
VPANSTVLSF

SEQ ID NO: 11127 - protein, 13 aa, Severe acute respiratory syndrome coronavirus 2
  REGION 1..13: note = Table B: HLA-DQA1*05:01-B1*03:01L HLA-DRB1*04:03L HLA-DRB1*01:03L HLA-DRB1*04:05L HLA-DRB1*01:02L HLA-DRB1*08:01L HLA-DQA1*01-B1*05L HLA-DPA1*01:03-B1*04:01L HLA-DPA1*02:01-B1*13:01L HLA-DQA1*03:01-B1*03:02L
  REGION 1..13: note = CONT. FROM ABOVE: HLA-DPA1*01:03-B1*02:01L HLA-DQA1*05:05-B1*03: 01L HLA-DRB1*16:01L HLA-DRB1*15:03L
VLSFCAFAVDAAK

SEQ ID NO: 11128 - protein, 10 aa, Severe acute respiratory syndrome coronavirus 2
  REGION 1..10: note = Table B: HLA-DQA1*05:01-B1*03:01L HLA-DRB1*04:01L HLA-DRB1*04:03L HLA-DRB1*13:02L HLA-DRB1*13:03L HLA-DRB1*01:03L HLA-DRB1*04:02L HLA-DRB1*04:04L HLA-DRB1*04:05L HLA-DRB1*01:01L HLA-DRB1*01:02L HLA-DRB4*03:01NL HLA-DRB1*08:04L HLA-DRB1*08:77L
  REGION 1..10: note = CONT. FROM ABOVE: HLA-DRB3*02:01L HLA-DPA1*01:03-B1*03:01L HLA-D RB1*03:01L HLA-DRB1*14:01L HLA-DRB1*11:03L HLA-DRB1*11:04L HLA-D RB1*14:02L HLA-DRB1*08:01L HLA-DRB1*11:01L HLA-DRB5*01:01L HLA-D QA1*01-B1*05L HLA-DQA1*05:01-B1*02:01L HLA-DRB1*13:01L
  REGION 1..10: note = CONT. FROM ABOVE: HLA-DRB1*12:01L HLA-DRB1*12:02L HLA-DRB3*01:01 L HLA-DPA1*03:01-B1*105:01L HLA-DQA1*03:01-B1*03:02L HLA-DRB1*14 :54L HLA-DQA1*05:05-B1*03:01L HLA-DRB1*14:17L HLA-DPA1*01:02-B1* 04:01L HLA-DRB1*10:01L HLA-DRB1*16:01L HLA-DRB1*04:08L
  REGION 1..10: note = CONT. FROM ABOVE: HLA-DRB1*08:03L HLA-DQA1*02:01-B1*03:03L HLA-D RB1*15:03L
FAVDAAKAYK

SEQ ID NO: 11129 - protein, 12 aa, Severe acute respiratory syndrome coronavirus 2
  REGION 1..12: note = Table B: HLA-DQA1*05:01-B1*03:01L HLA-DRB1*01:03L HLA-DRB1*04:05L HLA-DRB1*01:02L HLA-DRB1*08:04L HLA-DPA1*01:03-B1*03:01L HLA-DPA1*03:01-B1*04:02L HLA-DRB1*14:01L HLA-DRB1*11:04L HLA-DRB1*14:02L HLA-DRB5*01:01L
  REGION 1..12: note = CONT. FROM ABOVE: HLA-DQA1*01-B1*05L HLA-DQA1*05:05-B1*03:19L HL A-DPA1*01:03-B1*04:01L HLA-DRB1*04:10L HLA-DRB3*01:01L HLA-DPA1* 03:01-B1*105:01L HLA-DRB1*14:54L HLA-DQA1*05:05-B1*03:01L HLA-DR B1*14:17L HLA-DPA1*01:02-B1*04:01L HLA-DRB1*10:01L
  REGION 1..12: note = CONT. FROM ABOVE: HLA-DRB1*04:08L HLA-DRB1*08:03L
YKDYLASGGQPI

SEQ ID NO: 11130 - protein, 11 aa, Severe acute respiratory syndrome coronavirus 2
  REGION 1..11: note = Table B: HLA-DQA1*05:01-B1*03:01L HLA-DQA1*05:05-B1*03:19L HLA-DQA1*05:05-B1*03:01L HLA-DQA1*01:03-B1*06:01L HLA-DQA1*02:01-B1*03:03L
SGGQPITNCVK

SEQ ID NO: 11131 - protein, 12 aa, Severe acute respiratory syndrome coronavirus 2
  REGION 1..12: note = Table B: HLA-DQA1*05:01-B1*03:01L HLA-DQA1*01:02-B1*06:02L HLA-DQA1*05:05-B1*03:19L HLA-DQA1*05:05-B1*03:01L
TGTGQAITVTPE

SEQ ID NO: 11132 - protein, 12 aa, Severe acute respiratory syndrome coronavirus 2
  REGION 1..12: note = Table B: HLA-DQA1*05:01-B1*03:01L HLA-DQA1*01:02-B1*06:02L HLA-DQA1*01:01-B1*05:01L HLA-DQA1*01-B1*05L HLA-DQA1*05:05-B1*03:19L HLA-DQA1*05:05-B1*03:01L HLA-DRB1*16:01L
TGQAITVTPEAN

SEQ ID NO: 11133 - protein, 13 aa, Severe acute respiratory syndrome coronavirus 2
  REGION 1..13: note = Table B: HLA-DQA1*05:01-B1*03:01L HLA-DRB1*13:03L HLA-DRB1*01:03L HLA-DRB1*04:05L HLA-DQA1*01:02-B1*06:02L HLA-DRB1*01:02L HLA-DRB1*08:04L HLA-DPA1*01:03-B1*03:01L HLA-DPA1*03:01-B1*04:02L HLA-DRB1*11:03L
  REGION 1..13: note = CONT. FROM ABOVE: HLA-DQA1*01:01-B1*05:01L HLA-DQA1*05:05-B1*03: 19L HLA-DRB1*09:01L HLA-DPA1*03:01-B1*105:01L HLA-DQA1*05:05-B1* 03:01L HLA-DRB1*04:08L HLA-DRB1*08:03L
GQAITVTPEANMD

SEQ ID NO: 11134 - protein, 12 aa, Severe acute respiratory syndrome coronavirus 2
  REGION 1..12: note = Table B: HLA-DQA1*05:01-B1*03:01L HLA-DQA1*01:02-B1*06:02L HLA-DQA1*01:01-B1*05:01L HLA-DQA1*05:05-B1*03:19L HLA-DRB1*12:02L HLA-DPA1*03:01-B1*105:01L HLA-DQA1*05:05-B1*03:01L
AITVTPEANMDQ

SEQ ID NO: 11135 - protein, 13 aa, Severe acute respiratory syndrome coronavirus 2
  REGION 1..13: note = Table B: HLA-DQA1*05:01-B1*03:01L HLA-DRB1*13:02L HLA-DRB1*01:03L HLA-DRB1*04:02L HLA-DRB1*04:05L HLA-DRB4*03:01NL HLA-DRB1*14:02L HLA-DRB1*04:10L HLA-DPA1*02:01-B1*13:01L HLA-DQA1*05:05-B1*03:01L HLA-DRB1*04:08L HLA-DRB1*15:03L
VTPEANMDQESFG

SEQ ID NO: 11136 - protein, 15 aa, Severe acute respiratory syndrome coronavirus 2
  REGION 1..15: note = Table B: HLA-DQA1*05:01-B1*03:01L HLA-DRB1*13:02L HLA-DRB1*01:03L HLA-DRB1*04:04L HLA-DRB1*01:02L HLA-DRB4*03:01NL HLA-DPA1*01:03-B1*03:01L HLA-DRB1*14:02L HLA-DRB1*04:10L HLA-DPA1*01:03-B1*04:02L HLA-DRB3*01:01L
  REGION 1..15: note = CONT. FROM ABOVE: HLA-DPA1*02:01-B1*13:01L HLA-DRB1*14:54L HLA-D RB1*04:08L HLA-DRB1*15:03L
TPEANMDQESFGGAS

SEQ ID NO: 11137 - protein, 15 aa, Severe acute respiratory syndrome coronavirus 2
  REGION 1..15: note = Table B: HLA-DQA1*05:01-B1*03:01L HLA-DPA1*03:01-B1*105:01L
DQESFGGASCCLYCR

SEQ ID NO: 11138 - protein, 17 aa, Severe acute respiratory syndrome coronavirus 2
  REGION 1..17: note = Table B: HLA-DQA1*05:01-B1*03:01L HLA-DPA1*03:01-B1*105:01L
DHPNPKGFCDLKGKYVQ

SEQ ID NO: 11139 - protein, 15 aa, Severe acute respiratory syndrome coronavirus 2
  REGION 1..15: note = Table B: HLA-DQA1*05:01-B1*03:01L HLA-DPA1*03:01-B1*04:02L HLA-DQA1*05:05-B1*03:01L
DLKGKYVQIPTTCAN

SEQ ID NO: 11140 - protein, 14 aa, Severe acute respiratory syndrome coronavirus 2
  REGION 1..14: note = Table B: HLA-DQA1*05:01-B1*03:01L HLA-DRB1*13:02L HLA-DRB1*01:01L HLA-DPA1*01:03-B1*03:01L HLA-DRB1*14:01L HLA-DQA1*01-B1*05L HLA-DQA1*05:05-B1*03:19L HLA-DQA1*05:01-B1*02:01L HLA-DRB4*01:01L
  REGION 1..14: note = CONT. FROM ABOVE: HLA-DPA1*01:03-B1*04:02L HLA-DRB3*01:01L HLA-D PA1*02:01-B1*13:01L HLA-DPA1*03:01-B1*105:01L HLA-DQA1*05:05-B1* 03:01L
GKYVQIPTTCANDP

SEQ ID NO: 11141 - protein, 13 aa, Severe acute respiratory syndrome coronavirus 2
  REGION 1..13: note = Table B: HLA-DQA1*05:01-B1*03:01L HLA-DRB1*04:03L HLA-DRB1*01:03L HLA-DRB1*04:02L HLA-DRB1*04:05L HLA-DQA1*01:02-B1*06:02L HLA-DRB4*03:01NL HLA-DPA1*01:03-B1*03:01L HLA-DQA1*01:01-B1*05:01L
  REGION 1..13: note = CONT. FROM ABOVE: HLA-DQA1*05:05-B1*03:19L HLA-DRB1*04:10L HLA-D RB1*12:01L HLA-DPA1*02:01-B1*13:01L HLA-DPA1*03:01-B1*105:01L HL A-DQA1*05:05-B1*03:01L HLA-DRB1*14:17L HLA-DRB1*16:01L HLA-DQA1* 01:03-B1*06:01L HLA-DRB1*04:08L
VQIPTTCANDPVG

SEQ ID NO: 11142 - protein, 14 aa, Severe acute respiratory syndrome coronavirus 2
  REGION 1..14: note = Table B: HLA-DQA1*05:01-B1*03:01L HLA-DRB1*13:02L HLA-DRB1*01:03L HLA-DRB1*04:05L HLA-DRB1*01:02L HLA-DPA1*01:03-B1*03:01L HLA-DQA1*01:01-B1*05:01L HLA-DQA1*05:05-B1*03:19L HLA-DQA1*05:01-B1*02:01L
  REGION 1..14: note = CONT. FROM ABOVE: HLA-DRB1*12:01L HLA-DPA1*02:01-B1*13:01L HLA-D PA1*03:01-B1*105:01L HLA-DQA1*05:05-B1*03:01L HLA-DRB1*16:01L HL A-DRB1*15:03L
DQLREPMLQSADAQ

SEQ ID NO: 11143 - protein, 12 aa, Severe acute respiratory syndrome coronavirus 2
  REGION 1..12: note = Table B: HLA-DQA1*05:01-B1*03:01L HLA-DRB1*04:03L HLA-DQA1*05:05-B1*03:19L HLA-DQA1*05:01-B1*02:01L HLA-DQA1*05:05-B1*03:01L
PMLQSADAQSFL

SEQ ID NO: 11144 - protein, 11 aa, Severe acute respiratory syndrome coronavirus 2
  REGION 1..11: note = Table B: HLA-DQA1*05:01-B1*03:01L HLA-DQA1*01:02-B1*06:02L HLA-DQA1*05:05-B1*03:19L HLA-DPA1*03:01-B1*105:01L HLA-DQA1*03:01-B1*03:02L HLA-DQA1*05:05-B1*03:01L HLA-DQA1*02:01-B1*03:03L
LQSADAQSFLN

SEQ ID NO: 11145 - protein, 15 aa, Severe acute respiratory syndrome coronavirus 2
  REGION 1..15: note = Table B: HLA-DQA1*05:01-B1*03:01L HLA-DRB1*12:01L HLA-DPA1*03:01-B1*105:01L HLA-DQA1*05:05-B1*03:01L HLA-DRB1*16:01L HLA-DRB1*15:03L
AQSFLNRVCGVSAAR

SEQ ID NO: 11146 - protein, 14 aa, Severe acute respiratory syndrome coronavirus 2
  REGION 1..14: note = Table B: HLA-DQA1*05:01-B1*03:01L HLA-DRB1*01:02L HLA-DRB1*12:01L HLA-DPA1*03:01-B1*105:01L HLA-DQA1*05:05-B1*03:01L HLA-DQA1*02:01-B1*03:03L HLA-DRB1*15:03L
LNRVCGVSAARLTP

SEQ ID NO: 11147 - protein, 10 aa, Severe acute respiratory syndrome coronavirus 2
  REGION 1..10: note = Table B: HLA-DQA1*05:01-B1*03:01L HLA-DQA1*01:02-B1*06:02L HLA-DQA1*05:05-B1*03:19L HLA-DQA1*05:05-B1*03:01L HLA-DQA1*01:03-B1*06:01L HLA-DQA1*02:01-B1*03:03L
VSAARLTPCG

SEQ ID NO: 11148 - protein, 14 aa, Severe acute respiratory syndrome coronavirus 2
  REGION 1..14: note = Table B: HLA-DQA1*05:01-B1*03:01L HLA-DRB1*04:01L HLA-DRB1*01:03L HLA-DRB1*04:04L HLA-DRB1*01:02L HLA-DRB4*03:01NL HLA-DRB1*08:04L HLA-DPA1*01:03-B1*03:01L HLA-DRB1*11:04L HLA-DQA1*05:05-B1*03:19L HLA-DRB1*12:01L
  REGION 1..14: note = CONT. FROM ABOVE: HLA-DPA1*03:01-B1*105:01L HLA-DQA1*03:01-B1*03 :02L HLA-DRB1*10:01L HLA-DRB1*16:01L HLA-DRB1*04:08L HLA-DQA1*02 :01-B1*03:03L HLA-DRB1*15:03L
AARLTPCGTGTSTD

SEQ ID NO: 11149 - protein, 11 aa, Severe acute respiratory syndrome coronavirus 2
  REGION 1..11: note = Table B: HLA-DQA1*05:01-B1*03:01L HLA-DRB1*04:01L HLA-DRB1*13:02L HLA-DRB1*13:03L HLA-DRB1*01:03L HLA-DRB1*04:02L HLA-DRB1*04:05L HLA-DRB1*01:02L HLA-DRB4*03:01NL HLA-DRB1*08:04L HLA-DPA1*01:03-B1*03:01L HLA-DRB1*03:01L HLA-DRB1*11:04L
  REGION 1..11: note = CONT. FROM ABOVE: HLA-DRB1*14:02L HLA-DRB1*08:01L HLA-DRB1*11:01 L HLA-DRB1*12:01L HLA-DRB3*01:01L HLA-DRB1*14:54L HLA-DRB1*14:17 L HLA-DRB1*04:08L HLA-DQA1*02:01-B1*03:03L
IYNDKVAGFAK

SEQ ID NO: 11150 - protein, 11 aa, Severe acute respiratory syndrome coronavirus 2
  REGION 1..11: note = Table B: HLA-DQA1*05:01-B1*03:01L HLA-DRB1*01:03L HLA-DQA1*01:02-B1*06:02L HLA-DPA1*03:01-B1*04:02L HLA-DPA1*01:03-B1*04:01L HLA-DPA1*01:03-B1*04:02L HLA-DQA1*03:01-B1*03:02L HLA-DRB1*16:01L HLA-DRB1*04:08L
VAGFAKFLKTN

SEQ ID NO: 11151 - protein, 10 aa, Severe acute respiratory syndrome coronavirus 2
  REGION 1..10: note = Table B: HLA-DQA1*05:01-B1*03:01L HLA-DRB1*13:03L HLA-DRB1*01:03L HLA-DQA1*01:02-B1*06:02L HLA-DRB4*03:01NL HLA-DRB1*08:77M HLA-DPA1*01:03-B1*03:01M HLA-DPA1*03:01-B1*04:02L HLA-DRB1*03:01L HLA-DRB1*11:02L
  REGION 1..10: note = CONT. FROM ABOVE: HLA-DQA1*01-B1*05L HLA-DQA1*05:05-B1*03:19M HL A-DQA1*05:01-B1*02:01M HLA-DRB4*01:01L HLA-DPA1*01:03-B1*04:01L HLA-DRB1*12:01L HLA-DPA1*01:03-B1*104:01M HLA-DPA1*01:02-B1*04:0 1L HLA-DRB1*10:01L HLA-DRB1*16:01M HLA-DRB1*15:03L
DEDDNLIDSY

SEQ ID NO: 11152 - protein, 13 aa, Severe acute respiratory syndrome coronavirus 2
  REGION 1..13: note = Table B: HLA-DQA1*05:01-B1*03:01L HLA-DRB1*04:03L HLA-DRB1*04:05L HLA-DRB1*01:02L HLA-DPA1*03:01-B1*04:02L HLA-DPA1*01:03-B1*04:02L HLA-DRB1*14:17L HLA-DRB1*15:03L
DDNLIDSYFVVKR

SEQ ID NO: 11153 - protein, 14 aa, Severe acute respiratory syndrome coronavirus 2
  REGION 1..14: note = Table B: HLA-DQA1*05:01-B1*03:01L HLA-DRB1*04:03L HLA-DRB1*04:04L HLA-DRB1*08:04L HLA-DPA1*03:01-B1*04:02L HLA-DRB1*11:04L HLA-DRB1*11:01L HLA-DPA1*01:03-B1*04:01L HLA-DPA1*01:03-B1*04:02L HLA-DPA1*02:01-B1*13:01L
  REGION 1..14: note = CONT. FROM ABOVE: HLA-DPA1*01:03-B1*02:01L
DNLIDSYFVVKRHT

SEQ ID NO: 11154 - protein, 11 aa, Severe acute respiratory syndrome coronavirus 2
  REGION 1..11: note = Table B: HLA-DQA1*05:01-B1*03:01L HLA-DPA1*03:01-B1*04:02L HLA-DRB1*14:01L HLA-DRB1*08:01L HLA-DRB1*04:08L
DSYFVVKRHTF

SEQ ID NO: 11155 - protein, 15 aa, Severe acute respiratory syndrome coronavirus 2
  REGION 1..15: note = Table B: HLA-DQA1*05:01-B1*03:01L HLA-DRB1*04:04L HLA-DQA1*01-B1*05L HLA-DPA1*03:01-B1*105:01L
FVVKRHTFSNYQHEE

SEQ ID NO: 11156 - protein, 12 aa, Severe acute respiratory syndrome coronavirus 2
  REGION 1..12: note = Table B: HLA-DQA1*05:01-B1*03:01L HLA-DRB1*01:03L HLA-DRB1*04:05L HLA-DRB1*01:02L HLA-DRB1*14:01L HLA-DQA1*01:01-B1*05:01L HLA-DRB1*08:01L HLA-DRB1*04:10L HLA-DRB1*12:01L HLA-DPA1*02:01-B1*13:01L
  REGION 1..12: note = CONT. FROM ABOVE: HLA-DPA1*01:02-B1*04:01L HLA-DRB1*04:08L HLA-D RB1*08:03L HLA-DRB1*15:03L
RHTFSNYQHEET

SEQ ID NO: 11157 - protein, 13 aa, Severe acute respiratory syndrome coronavirus 2
  REGION 1..13: note = Table B: HLA-DQA1*05:01-B1*03:01L HLA-DRB1*13:02L HLA-DRB1*13:03L HLA-DRB4*03:01NL HLA-DPA1*01:03-B1*03:01L HLA-DPA1*03:01-B1*04:02L HLA-DRB1*11:03L HLA-DRB1*14:02L HLA-DRB4*01:01L HLA-DRB3*01:01L HLA-DPA1*02:01-B1*13:01L
  REGION 1..13: note = CONT. FROM ABOVE: HLA-DRB1*14:54L HLA-DRB1*08:02L HLA-DRB1*08:03 L
TIYNLLKDCPAVA

SEQ ID NO: 11158 - protein, 14 aa, Severe acute respiratory syndrome coronavirus 2
  REGION 1..14: note = Table B: HLA-DQA1*05:01-B1*03:01L HLA-DRB1*13:02L HLA-DRB3*01:01L HLA-DPA1*02:01-B1*13:01L
IYNLLKDCPAVAKH

SEQ ID NO: 11159 - protein, 13 aa, Severe acute respiratory syndrome coronavirus 2
  REGION 1..13: note = Table B: HLA-DQA1*05:01-B1*03:01L HLA-DRB1*04:03L HLA-DRB1*13:02L HLA-DPA1*02:01-B1*13:01L HLA-DQA1*01:03-B1*06:01L
NLLKDCPAVAKHD

SEQ ID NO: 11160 - protein, 13 aa, Severe acute respiratory syndrome coronavirus 2
  REGION 1..13: note = Table B: HLA-DQA1*05:01-B1*03:01L HLA-DRB1*14:01L HLA-DPA1*02:01-B1*13:01L HLA-DPA1*03:01-B1*105:01L
LLKDCPAVAKHDF

SEQ ID NO: 11161 - protein, 11 aa, Severe acute respiratory syndrome coronavirus 2
  REGION 1..11: note = Table B: HLA-DQA1*05:01-B1*03:01L HLA-DRB1*13:03L HLA-DRB1*01:03L HLA-DRB1*04:02L HLA-DQA1*01:02-B1*06:02L HLA-DQA1*01:01-B1*05:01L HLA-DRB1*08:01L HLA-DQA1*05:05-B1*03:19L HLA-DRB1*12:01L
  REGION 1..11: note = CONT. FROM ABOVE: HLA-DQA1*05:05-B1*03:01L HLA-DQA1*01:03-B1*06: 01L
IDGDMVPHISR

SEQ ID NO: 11162 - protein, 12 aa, Severe acute respiratory syndrome coronavirus 2
  REGION 1..12: note = Table B: HLA-DQA1*05:01-B1*03:01L HLA-DQA1*01:02-B1*06:02L HLA-DRB1*01:02L HLA-DRB1*04:08L
DGDMVPHISRQR

SEQ ID NO: 11163 - protein, 17 aa, Severe acute respiratory syndrome coronavirus 2
  REGION 1..17: note = Table B: HLA-DQA1*05:01-B1*03:01L HLA-DRB3*02:01L HLA-DRB1*14:01L HLA-DRB3*01:01L HLA-DQA1*05:05-B1*03:01L
DDYFNKKDWYDFVENPD

SEQ ID NO: 11164 - protein, 13 aa, Severe acute respiratory syndrome coronavirus 2
  REGION 1..13: note = Table B: HLA-DQA1*05:01-B1*03:01L HLA-DRB1*13:02L HLA-DRB1*01:03L HLA-DRB1*04:02L HLA-DRB1*01:02L HLA-DRB1*08:04L HLA-DRB3*02:01L HLA-DPA1*01:03-B1*03:01L HLA-DRB1*14:02L HLA-DQA1*01:01-B1*05:01L HLA-DRB1*08:01L
  REGION 1..13: note = CONT. FROM ABOVE: HLA-DQA1*05:05-B1*03:19L HLA-DPA1*01:03-B1*04: 01L HLA-DRB1*09:01L HLA-DPA1*01:03-B1*04:02L HLA-DPA1*01:03-B1*1 04:01L HLA-DQA1*05:05-B1*03:01L HLA-DPA1*01:02-B1*04:01L HLA-DRB 1*08:03L HLA-DQA1*02:01-B1*03:03L
KDWYDFVENPDIL

SEQ ID NO: 11165 - protein, 10 aa, Severe acute respiratory syndrome coronavirus 2
  REGION 1..10: note = Table B: HLA-DQA1*05:01-B1*03:01L HLA-DRB1*13:02L HLA-DRB1*13:03L HLA-DRB1*01:03L HLA-DRB1*01:02L HLA-DRB1*14:01L HLA-DRB1*08:01L HLA-DRB1*12:01L HLA-DRB1*12:02L HLA-DQA1*03:01-B1*03:02L HLA-DPA1*01:02-B1*04:01L
  REGION 1..10: note = CONT. FROM ABOVE: HLA-DRB1*16:01L HLA-DQA1*01:03-B1*06:01L HLA-D RB1*04:08L HLA-DQA1*02:01-B1*03:03L HLA-DRB1*15:03L
VYANLGERVR

SEQ ID NO: 11166 - protein, 10 aa, Severe acute respiratory syndrome coronavirus 2
  REGION 1..10: note = Table B: HLA-DQA1*05:01-B1*03:01L HLA-DRB1*13:02L HLA-DRB1*01:03L HLA-DRB1*08:01L HLA-DQA1*03:01-B1*03:02L HLA-DRB1*16:01L HLA-DQA1*01:03-B1*06:01L HLA-DQA1*02:01-B1*03:03L
RVRQALLKTV

SEQ ID NO: 11167 - protein, 10 aa, Severe acute respiratory syndrome coronavirus 2
  REGION 1..10: note = Table B: HLA-DQA1*05:01-B1*03:01L HLA-DRB1*13:02L HLA-DRB1*13:03L HLA-DRB1*01:03M HLA-DRB1*04:05L HLA-DQA1*01:02-B1*06:02L HLA-DRB1*08:77L HLA-DPA1*01:03-B1*03:01L HLA-DRB1*03:01L HLA-DRB1*14:01L
  REGION 1..10: note = CONT. FROM ABOVE: HLA-DRB1*14:02L HLA-DQA1*01:01-B1*05:01L HLA-D RB1*11:01L HLA-DQA1*05:05-B1*03:19L HLA-DQA1*05:01-B1*02:01L HLA -DPA1*01:03-B1*04:01L HLA-DQA1*05:05-B1*03:116L HLA-DPA1*01:03-B 1*04:02L HLA-DPA1*02:01-B1*13:01L HLA-DPA1*03:01-B1*105:01L
  REGION 1..10: note = CONT. FROM ABOVE: HLA-DQA1*03:01-B1*03:02L HLA-DRB1*16:01L HLA-D QA1*01:03-B1*06:01L HLA-DRB1*08:02L HLA-DQA1*02:01-B1*03:03M HLA -DRB1*15:03L
RQALLKTVQF

SEQ ID NO: 11168 - protein, 12 aa, Severe acute respiratory syndrome coronavirus 2
  REGION 1..12: note = Table B: HLA-DQA1*05:01-B1*03:01L HLA-DRB1*01:02L HLA-DQA1*05:05-B1*03:19L HLA-DPA1*03:01-B1*105:01L HLA-DRB1*04:08L HLA-DRB1*15:03L
TVQFCDAMRNAG

SEQ ID NO: 11169 - protein, 13 aa, Severe acute respiratory syndrome coronavirus 2
  REGION 1..13: note = Table B: HLA-DQA1*05:01-B1*03:01L HLA-DRB1*01:03L HLA-DRB1*04:04L HLA-DRB1*01:02L HLA-DPA1*01:03-B1*03:01L HLA-DQA1*05:05-B1*03:19L HLA-DRB1*12:01L HLA-DRB1*14:54L HLA-DRB1*10:01L HLA-DRB1*04:08L HLA-DRB1*15:03L
AGIVGVLTLDNQD

SEQ ID NO: 11170 - protein, 13 aa, Severe acute respiratory syndrome coronavirus 2
  REGION 1..13: note = Table B: HLA-DQA1*05:01-B1*03:01L HLA-DRB1*15:03L
GIVGVLTLDNQDL

SEQ ID NO: 11171 - protein, 13 aa, Severe acute respiratory syndrome coronavirus 2
  REGION 1..13: note = Table B: HLA-DQA1*05:01-B1*03:01L HLA-DRB1*13:02L HLA-DRB1*13:03L HLA-DRB1*01:03L HLA-DRB1*04:04L HLA-DRB1*01:02L HLA-DRB1*08:04L HLA-DRB1*08:77L HLA-DRB3*02:01L HLA-DPA1*01:03-B1*03:01L HLA-DPA1*03:01-B1*04:02L
  REGION 1..13: note = CONT. FROM ABOVE: HLA-DRB1*14:01L HLA-DRB1*14:02L HLA-DQA1*01:01 -B1*05:01L HLA-DQA1*05:05-B1*03:19L HLA-DRB4*01:01L HLA-DRB1*09: 01L HLA-DRB1*12:02L HLA-DPA1*02:01-B1*13:01L HLA-DPA1*01:03-B1*1 04:01L HLA-DRB1*07:01L HLA-DRB1*10:01L HLA-DRB1*04:08L
  REGION 1..13: note = CONT. FROM ABOVE: HLA-DRB1*08:03L HLA-DRB1*15:03L
IVGVLTLDNQDLN

SEQ ID NO: 11172 - protein, 14 aa, Severe acute respiratory syndrome coronavirus 2
  REGION 1..14: note = Table B: HLA-DQA1*05:01-B1*03:01L HLA-DRB1*01:01L HLA-DPA1*03:01-B1*04:02L HLA-DRB1*03:01L HLA-DRB1*08:01L HLA-DRB1*11:01L HLA-DQA1*05:05-B1*03:19L HLA-DRB4*01:01L HLA-DRB1*09:01L HLA-DPA1*02:01-B1*13:01L
  REGION 1..14: note = CONT. FROM ABOVE: HLA-DQA1*05:05-B1*03:01L HLA-DRB1*07:01L
VGVLTLDNQDLNGN

SEQ ID NO: 11173 - protein, 11 aa, Severe acute respiratory syndrome coronavirus 2
  REGION 1..11: note = Table B: HLA-DQA1*05:01-B1*03:01L HLA-DQA1*01:02-B1*06:02L HLA-DRB1*08:77L HLA-DPA1*01:03-B1*03:01L HLA-DPA1*03:01-B1*04:02L HLA-DRB1*03:01L HLA-DQA1*01-B1*05L HLA-DRB4*01:01L HLA-DPA1*01:03-B1*04:01L
  REGION 1..11: note = CONT. FROM ABOVE: HLA-DPA1*03:01-B1*105:01L HLA-DPA1*01:03-B1*10 4:01L HLA-DRB1*10:01L HLA-DRB1*16:01L HLA-DRB1*15:03L
TLDNQDLNGNW

SEQ ID NO: 11174 - protein, 12 aa, Severe acute respiratory syndrome coronavirus 2
  REGION 1..12: note = Table B: HLA-DQA1*05:01-B1*03:01L HLA-DQA1*01:02-B1*06:02L HLA-DRB1*08:77L HLA-DRB3*02:01L HLA-DPA1*01:03-B1*03:01L HLA-DRB1*11:03L HLA-DRB1*11:04L HLA-DQA1*01:01-B1*05:01L HLA-DRB5*01:01L HLA-DQA1*05:05-B1*03:19L HLA-DRB1*09:01L
  REGION 1..12: note = CONT. FROM ABOVE: HLA-DRB1*12:02L HLA-DPA1*03:01-B1*105:01L HLA- DQA1*05:05-B1*03:01L HLA-DRB1*10:01L HLA-DRB1*04:08L
FGDFIQTTPGSG

SEQ ID NO: 11175 - protein, 10 aa, Severe acute respiratory syndrome coronavirus 2
  REGION 1..10: note = Table B: HLA-DQA1*05:01-B1*03:01L
MPILTLTRAL

SEQ ID NO: 11176 - protein, 12 aa, Severe acute respiratory syndrome coronavirus 2
  REGION 1..12: note = Table B: HLA-DQA1*05:01-B1*03:01L HLA-DRB1*01:03L HLA-DRB1*04:04L HLA-DRB1*04:05L HLA-DQA1*01:02-B1*06:02L HLA-DRB1*01:02L HLA-DRB1*04:10L HLA-DRB1*12:01L HLA-DRB1*16:01L HLA-DQA1*01:03-B1*06:01L HLA-DRB1*04:08L
LTLTRALTAESH

SEQ ID NO: 11177 - protein, 12 aa, Severe acute respiratory syndrome coronavirus 2
  REGION 1..12: note = Table B: HLA-DQA1*05:01-B1*03:01L HLA-DRB1*04:05L HLA-DQA1*01:02-B1*06:02L HLA-DRB1*04:10L HLA-DRB1*16:01L
TRALTAESHVDT

SEQ ID NO: 11178 - protein, 11 aa, Severe acute respiratory syndrome coronavirus 2
  REGION 1..11: note = Table B: HLA-DQA1*05:01-B1*03:01L HLA-DQA1*01:02-B1*06:02L HLA-DQA1*01-B1*05L HLA-DQA1*05:05-B1*03:19L HLA-DPA1*03:01-B1*105:01L HLA-DQA1*05:05-B1*03:01L HLA-DRB1*16:01L
ALTAESHVDTD

SEQ ID NO: 11179 - protein, 10 aa, Severe acute respiratory syndrome coronavirus 2
  REGION 1..10: note = Table B: HLA-DQA1*05:01-B1*03:01L HLA-DPA1*01:03-B1*03:01L HLA-DQA1*01-B1*05L HLA-DQA1*05:05-B1*03:19L HLA-DQA1*05:01-B1*02:01L HLA-DPA1*01:03-B1*04:01L HLA-DPA1*01:03-B1*104:01L HLA-DRB1*16:01L
TDLTKPYIKW

SEQ ID NO: 11180 - protein, 10 aa, Severe acute respiratory syndrome coronavirus 2
  REGION 1..10: note = Table B: HLA-DQA1*05:01-B1*03:01L HLA-DRB1*03:01L HLA-DQA1*05:05-B1*03:19L HLA-DQA1*05:01-B1*02:01L HLA-DRB1*16:01L HLA-DQA1*02:01-B1*03:03L
EERLKLFDRY

SEQ ID NO: 11181 - protein, 15 aa, Severe acute respiratory syndrome coronavirus 2
  REGION 1..15: note = Table B: HLA-DQA1*05:01-B1*03:01L HLA-DRB1*04:03L HLA-DRB1*13:02L HLA-DRB1*01:03L HLA-DRB1*04:05L HLA-DRB1*08:04L HLA-DPA1*01:03-B1*03:01L HLA-DPA1*03:01-B1*04:02L HLA-DRB1*03:01L HLA-DRB1*11:04L HLA-DRB1*08:01L HLA-DRB1*11:01L
  REGION 1..15: note = CONT. FROM ABOVE: HLA-DQA1*05:05-B1*03:19L HLA-DQA1*05:01-B1*02: 01L HLA-DRB1*12:01L HLA-DRB3*01:01L HLA-DPA1*02:01-B1*13:01L HLA -DPA1*03:01-B1*105:01L HLA-DQA1*03:01-B1*03:02L HLA-DQA1*05:05-B 1*03:01L HLA-DPA1*01:02-B1*04:01L HLA-DRB1*07:01L
  REGION 1..15: note = CONT. FROM ABOVE: HLA-DRB1*16:01L HLA-DQA1*01:03-B1*06:01L HLA-D RB1*04:08L HLA-DQA1*02:01-B1*03:03L
DQTYHPNCVNCLDDR

SEQ ID NO: 11182 - protein, 15 aa, Severe acute respiratory syndrome coronavirus 2
  REGION 1..15: note = Table B: HLA-DQA1*05:01-B1*03:01L HLA-DRB1*04:03L HLA-DPA1*01:03-B1*03:01L HLA-DQA1*05:01-B1*02:01L HLA-DRB1*12:01L HLA-DRB1*16:01L HLA-DRB1*04:08L
NVLFSTVFPPTSFGP

SEQ ID NO: 11183 - protein, 11 aa, Severe acute respiratory syndrome coronavirus 2
  REGION 1..11: note = Table B: HLA-DQA1*05:01-B1*03:01L HLA-DRB1*13:03L HLA-DRB1*04:02L HLA-DQA1*01:02-B1*06:02L HLA-DRB4*03:01NL HLA-DPA1*03:01-B1*04:02L HLA-DRB1*14:01L HLA-DQA1*05:05-B1*03:19L HLA-DQA1*05:01-B1*02:01L
  REGION 1..11: note = CONT. FROM ABOVE: HLA-DRB1*12:01L HLA-DPA1*02:01-B1*13:01L HLA-D PA1*03:01-B1*105:01L HLA-DRB1*14:17L HLA-DPA1*01:02-B1*04:01L HL A-DRB1*16:01L HLA-DQA1*01:03-B1*06:01L HLA-DRB1*15:03L
TVFPPTSFGPL

SEQ ID NO: 11184 - protein, 17 aa, Severe acute respiratory syndrome coronavirus 2
  REGION 1..17: note = Table B: HLA-DQA1*05:01-B1*03:01L HLA-DRB1*13:02L HLA-DRB1*13:03L HLA-DRB1*04:02L HLA-DRB1*04:05L HLA-DPA1*03:01-B1*04:02L HLA-DRB1*11:02L HLA-DRB1*11:03L HLA-DRB1*14:02L HLA-DQA1*05:05-B1*03:116L
  REGION 1..17: note = CONT. FROM ABOVE: HLA-DPA1*01:03-B1*04:02L HLA-DRB1*12:01L HLA-D RB3*01:01L HLA-DPA1*02:01-B1*13:01L HLA-DPA1*03:01-B1*105:01L HL A-DQA1*05:05-B1*03:01L HLA-DPA1*01:02-B1*04:01L HLA-DRB1*04:08L HLA-DRB1*08:02L HLA-DRB1*08:03L
FPPTSFGPLVRKIFVDG

SEQ ID NO: 11185 - protein, 12 aa, Severe acute respiratory syndrome coronavirus 2
  REGION 1..12: note = Table B: HLA-DQA1*05:01-B1*03:01L HLA-DQA1*01:02-B1*06:02L HLA-DRB1*01:02L HLA-DPA1*03:01-B1*105:01L HLA-DQA1*03:01-B1*03:02L HLA-DPA1*01:02-B1*04:01L HLA-DRB1*16:01L HLA-DQA1*02:01-B1*03:03L
VVSTGYHFRELG

SEQ ID NO: 11186 - protein, 13 aa, Severe acute respiratory syndrome coronavirus 2
  REGION 1..13: note = Table B: HLA-DQA1*05:01-B1*03:01L HLA-DRB1*04:01L HLA-DRB1*04:04L HLA-DRB1*08:04L HLA-DRB1*11:04L HLA-DPA1*02:01-B1*13:01L HLA-DRB1*15:03L
YHFRELGVVHNQD

SEQ ID NO: 11187 - protein, 10 aa, Severe acute respiratory syndrome coronavirus 2
  REGION 1..10: note = Table B: HLA-DQA1*05:01-B1*03:01L HLA-DRB1*04:03L HLA-DRB1*13:03L HLA-DRB1*01:03L HLA-DRB1*04:02L HLA-DRB1*04:05L HLA-DRB1*01:02L HLA-DRB4*03:01NL HLA-DRB1*14:01L HLA-DQA1*01-B1*05L HLA-DRB1*12:01L HLA-DQA1*03:01-B1*03:02L
  REGION 1..10: note = CONT. FROM ABOVE: HLA-DRB1*14:54L HLA-DRB1*14:17L HLA-DPA1*01:02 -B1*04:01L HLA-DRB1*16:01L HLA-DQA1*01:03-B1*06:01L HLA-DQA1*02: 01-B1*03:03L HLA-DRB1*15:03L
VVHNQDVNLH

SEQ ID NO: 11188 - protein, 12 aa, Severe acute respiratory syndrome coronavirus 2
  REGION 1..12: note = Table B: HLA-DQA1*05:01-B1*03:01L HLA-DRB1*04:03L HLA-DQA1*01:02-B1*06:02L HLA-DRB1*14:01L HLA-DPA1*03:01-B1*105:01L HLA-DRB1*15:03L
NQDVNLHSSRLS

SEQ ID NO: 11189 - protein, 12 aa, Severe acute respiratory syndrome coronavirus 2
  REGION 1..12: note = Table B: HLA-DQA1*05:01-B1*03:01L HLA-DRB1*01:03L HLA-DQA1*01:02-B1*06:02L HLA-DRB1*01:02L HLA-DRB1*12:01L HLA-DQA1*03:01-B1*03:02L HLA-DRB1*16:01L HLA-DQA1*01:03-B1*06:01L HLA-DRB1*04:08L
VNLHSSRLSFKE

SEQ ID NO: 11190 - protein, 14 aa, Severe acute respiratory syndrome coronavirus 2
  REGION 1..14: note = Table B: HLA-DQA1*05:01-B1*03:01L HLA-DRB1*13:02L HLA-DRB1*01:03L HLA-DRB1*04:04L HLA-DRB1*08:04L HLA-DPA1*01:03-B1*03:01L HLA-DPA1*03:01-B1*04:02L HLA-DRB1*08:01L HLA-DRB1*11:01L HLA-DQA1*05:05-B1*03:19L
  REGION 1..14: note = CONT. FROM ABOVE: HLA-DQA1*05:01-B1*02:01L HLA-DPA1*01:03-B1*04: 01L HLA-DPA1*01:03-B1*04:02L HLA-DPA1*02:01-B1*13:01L HLA-DPA1*0 1:03-B1*02:01L HLA-DPA1*01:03-B1*104:01L HLA-DQA1*05:05-B1*03:01 L HLA-DPA1*01:02-B1*04:01L HLA-DRB1*10:01L
  REGION 1..14: note = CONT. FROM ABOVE: HLA-DQA1*01:03-B1*06:01L
LSFKELLVYAADPA

SEQ ID NO: 11191 - protein, 10 aa, Severe acute respiratory syndrome coronavirus 2
  REGION 1..10: note = Table B: HLA-DQA1*05:01-B1*03:01L HLA-DQA1*01:02-B1*06:02L HLA-DRB4*03:01NL HLA-DRB1*12:01L HLA-DQA1*03:01-B1*03:02L HLA-DQA1*05:05-B1*03:01L HLA-DQA1*01:03-B1*06:01L HLA-DQA1*02:01-B1*03:03L
AASGNLLLDK

SEQ ID NO: 11192 - protein, 12 aa, Severe acute respiratory syndrome coronavirus 2
  REGION 1..12: note = Table B: HLA-DQA1*05:01-B1*03:01L HLA-DQA1*01:02-B1*06:02L
ASGNLLLDKRTT

SEQ ID NO: 11193 - protein, 14 aa, Severe acute respiratory syndrome coronavirus 2
  REGION 1..14: note = Table B: HLA-DQA1*05:01-B1*03:01L HLA-DRB1*04:01L HLA-DRB1*04:05L HLA-DRB1*01:01L HLA-DRB4*03:01NL HLA-DPA1*03:01-B1*04:02L HLA-DRB1*11:02L HLA-DQA1*05:05-B1*03:19L HLA-DRB1*13:01L
  REGION 1..14: note = CONT. FROM ABOVE: HLA-DPA1*01:03-B1*04:02L HLA-DPA1*03:01-B1*105 :01L HLA-DRB1*14:17L HLA-DPA1*01:02-B1*04:01L HLA-DRB1*10:01L HL A-DRB1*08:03L
SGNLLLDKRTTCFS

SEQ ID NO: 11194 - protein, 11 aa, Severe acute respiratory syndrome coronavirus 2
  REGION 1..11: note = Table B: HLA-DQA1*05:01-B1*03:01L HLA-DRB1*04:02L HLA-DRB1*04:05L HLA-DQA1*01:02-B1*06:02L HLA-DRB4*03:01NL HLA-DQA1*05:01-B1*02:01L HLA-DRB1*04:10L HLA-DRB1*12:01L HLA-DRB1*14:54L HLA-DQA1*05:05-B1*03:01L HLA-DRB1*16:01L
  REGION 1..11: note = CONT. FROM ABOVE: HLA-DQA1*01:03-B1*06:01L
FSVAALTNNVA

SEQ ID NO: 11195 - protein, 14 aa, Severe acute respiratory syndrome coronavirus 2
  REGION 1..14: note = Table B: HLA-DQA1*05:01-B1*03:01L HLA-DRB1*13:02L HLA-DRB1*01:02L HLA-DRB1*14:01L HLA-DRB1*12:01L HLA-DRB1*15:03L
AALTNNVAFQTVKP

SEQ ID NO: 11196 - protein, 11 aa, Severe acute respiratory syndrome coronavirus 2
  REGION 1..11: note = Table B: HLA-DQA1*05:01-B1*03:01L HLA-DQA1*01:02-B1*06:02L HLA-DPA1*03:01-B1*105:01L HLA-DQA1*01:03-B1*06:01L
TVKPGNFNKDF

SEQ ID NO: 11197 - protein, 17 aa, Severe acute respiratory syndrome coronavirus 2
  REGION 1..17: note = Table B: HLA-DQA1*05:01-B1*03:01L HLA-DRB1*04:01L HLA-DRB3*02:01L HLA-DRB1*03:01L HLA-DRB1*11:02L HLA-DQA1*05:05-B1*03:19L HLA-DQA1*05:05-B1*03:01L HLA-DRB1*07:01L HLA-DRB1*10:01L HLA-DRB1*08:02L
KPGNFNKDFYDFAVSKG

SEQ ID NO: 11198 - protein, 12 aa, Severe acute respiratory syndrome coronavirus 2
  REGION 1..12: note = Table B: HLA-DQA1*05:01-B1*03:01L HLA-DRB1*13:02L HLA-DRB1*01:03L HLA-DRB1*04:05L HLA-DQA1*01:02-B1*06:02L HLA-DRB1*14:01L HLA-DRB1*08:01L HLA-DQA1*01-B1*05L HLA-DRB1*12:01L HLA-DPA1*03:01-B1*105:01L
  REGION 1..12: note = CONT. FROM ABOVE: HLA-DQA1*05:05-B1*03:01L HLA-DRB1*07:01L HLA-D RB1*04:08L HLA-DRB1*15:03L
DFAVSKGFFKEG

SEQ ID NO: 11199 - protein, 14 aa, Severe acute respiratory syndrome coronavirus 2
  REGION 1..14: note = Table B: HLA-DQA1*05:01-B1*03:01L HLA-DPA1*03:01-B1*105:01L HLA-DRB1*15:03L
AVSKGFFKEGSSVE

SEQ ID NO: 11200 - protein, 13 aa, Severe acute respiratory syndrome coronavirus 2
  REGION 1..13: note = Table B: HLA-DQA1*05:01-B1*03:01L HLA-DRB1*04:04L HLA-DQA1*01:02-B1*06:02L HLA-DRB1*01:01L HLA-DRB3*02:01L HLA-DPA1*01:03-B1*03:01L HLA-DPA1*03:01-B1*04:02L HLA-DRB1*03:01L HLA-DRB1*11:04L HLA-DRB1*11:01L HLA-DRB5*01:01L
  REGION 1..13: note = CONT. FROM ABOVE: HLA-DRB4*01:01L HLA-DRB1*04:10L HLA-DRB1*09:01 L HLA-DRB1*12:02L HLA-DRB3*01:01L HLA-DPA1*03:01-B1*105:01L HLA- DQA1*05:05-B1*03:01L HLA-DRB1*08:03L HLA-DQA1*02:01-B1*03:03L
HFFFAQDGNAAIS

SEQ ID NO: 11201 - protein, 12 aa, Severe acute respiratory syndrome coronavirus 2
  REGION 1..12: note = Table B: HLA-DQA1*05:01-B1*03:01L HLA-DRB1*04:01L HLA-DRB1*04:04L HLA-DRB1*04:05L HLA-DRB1*01:01L HLA-DRB1*01:02L HLA-DRB1*08:04L HLA-DRB3*02:01L HLA-DPA1*01:03-B1*03:01L HLA-DRB1*11:04L HLA-DRB1*11:01L HLA-DRB4*01:01L HLA-DRB1*04:10L
  REGION 1..12: note = CONT. FROM ABOVE: HLA-DRB1*12:02L HLA-DRB3*01:01L HLA-DPA1*03:01 -B1*105:01L HLA-DQA1*03:01-B1*03:02L HLA-DQA1*05:05-B1*03:01L HL A-DQA1*02:01-B1*03:03L HLA-DRB1*15:03L
FFAQDGNAAISD

SEQ ID NO: 11202 - protein, 11 aa, Severe acute respiratory syndrome coronavirus 2
  REGION 1..11: note = Table B: HLA-DQA1*05:01-B1*03:01L HLA-DRB1*13:03L HLA-DRB1*01:03L HLA-DQA1*01:02-B1*06:02L HLA-DRB1*08:77L HLA-DPA1*01:03-B1*03:01L HLA-DPA1*03:01-B1*04:02L HLA-DRB1*03:01L HLA-DRB1*11:02L HLA-DRB1*14:02L
  REGION 1..11: note = CONT. FROM ABOVE: HLA-DQA1*01-B1*05L HLA-DQA1*05:01-B1*02:01L HL A-DRB4*01:01L HLA-DPA1*01:03-B1*04:01L HLA-DPA1*01:03-B1*04:02L HLA-DRB1*12:01L HLA-DPA1*01:03-B1*104:01L HLA-DRB1*10:01L HLA-DR B1*16:01L HLA-DRB1*08:02L HLA-DQA1*02:01-B1*03:03L
  REGION 1..11: note = CONT. FROM ABOVE: HLA-DRB1*15:03L
AQDGNAAISDY

SEQ ID NO: 11203 - protein, 13 aa, Severe acute respiratory syndrome coronavirus 2
  REGION 1..13: note = Table B: HLA-DQA1*05:01-B1*03:01L HLA-DRB1*01:03L HLA-DRB1*04:05L HLA-DQA1*01:01-B1*05:01L HLA-DPA1*02:01-B1*13:01L HLA-DRB1*04:08L HLA-DRB1*15:03L
DGNAAISDYDYYR

SEQ ID NO: 11204 - protein, 10 aa, Severe acute respiratory syndrome coronavirus 2
  REGION 1..10: note = Table B: HLA-DQA1*05:01-B1*03:01L HLA-DRB1*13:03L HLA-DRB1*01:03L HLA-DQA1*01:02-B1*06:02M HLA-DRB4*03:01NL HLA-DRB1*08:77M HLA-DPA1*01:03-B1*03:01M HLA-DPA1*03:01-B1*04:02L HLA-DRB1*03:01L HLA-DRB1*11:02M
  REGION 1..10: note = CONT. FROM ABOVE: HLA-DRB1*14:02L HLA-DQA1*01-B1*05M HLA-DQA1*05 :05-B1*03:19H HLA-DQA1*05:01-B1*02:01M HLA-DRB4*01:01L HLA-DPA1* 01:03-B1*04:01L HLA-DQA1*05:05-B1*03:116L HLA-DPA1*01:03-B1*04:0 2L HLA-DRB1*12:01L HLA-DPA1*02:01-B1*13:01L
  REGION 1..10: note = CONT. FROM ABOVE: HLA-DPA1*03:01-B1*105:01L HLA-DPA1*01:03-B1*10 4:01M HLA-DRB1*10:01L HLA-DRB1*16:01M HLA-DRB1*08:02L HLA-DQA1*0 2:01-B1*03:03L HLA-DRB1*15:03L
AISDYDYYRY

SEQ ID NO: 11205 - protein, 12 aa, Severe acute respiratory syndrome coronavirus 2
  REGION 1..12: note = Table B: HLA-DQA1*05:01-B1*03:01L HLA-DRB1*13:02L HLA-DRB1*01:03L HLA-DQA1*01:02-B1*06:02L HLA-DRB1*01:02L HLA-DPA1*01:03-B1*03:01L HLA-DPA1*03:01-B1*04:02L HLA-DRB1*14:01L HLA-DRB1*14:02L HLA-DQA1*05:05-B1*03:19L
  REGION 1..12: note = CONT. FROM ABOVE: HLA-DQA1*05:01-B1*02:01L HLA-DRB1*12:01L HLA-D PA1*02:01-B1*13:01L HLA-DPA1*03:01-B1*105:01L HLA-DQA1*05:05-B1* 03:01L HLA-DRB1*15:03L
DYYRYNLPTMCD

SEQ ID NO: 11206 - protein, 12 aa, Severe acute respiratory syndrome coronavirus 2
  REGION 1..12: note = Table B: HLA-DQA1*05:01-B1*03:01L HLA-DRB1*13:02L HLA-DRB1*01:03L HLA-DRB1*04:05L HLA-DQA1*01:02-B1*06:02L HLA-DRB1*01:02L HLA-DPA1*01:03-B1*03:01L HLA-DPA1*03:01-B1*04:02L HLA-DRB1*14:01L HLA-DRB1*11:04L
  REGION 1..12: note = CONT. FROM ABOVE: HLA-DRB1*08:01L HLA-DRB1*11:01L HLA-DPA1*01:03 -B1*04:02L HLA-DRB1*12:01L HLA-DRB3*01:01L HLA-DPA1*02:01-B1*13: 01L HLA-DPA1*03:01-B1*105:01L HLA-DQA1*03:01-B1*03:02L HLA-DQA1* 05:05-B1*03:01L HLA-DPA1*01:02-B1*04:01L HLA-DRB1*16:01L
  REGION 1..12: note = CONT. FROM ABOVE: HLA-DQA1*01:03-B1*06:01L HLA-DRB1*04:08L HLA-D QA1*02:01-B1*03:03L HLA-DRB1*15:03L
YRYNLPTMCDIR

SEQ ID NO: 11207 - protein, 10 aa, Severe acute respiratory syndrome coronavirus 2
  REGION 1..10: note = Table B: HLA-DQA1*05:01-B1*03:01L HLA-DRB1*13:03L HLA-DQA1*01:02-B1*06:02M HLA-DRB1*08:77L HLA-DPA1*01:03-B1*03:01L HLA-DRB1*03:01L HLA-DRB1*14:02L HLA-DQA1*01-B1*05L HLA-DQA1*05:05-B1*03:19L
  REGION 1..10: note = CONT. FROM ABOVE: HLA-DQA1*05:01-B1*02:01L HLA-DRB4*01:01L HLA-D PA1*01:03-B1*04:01M HLA-DPA1*02:01-B1*13:01L HLA-DPA1*03:01-B1*1 05:01M HLA-DQA1*02:01-B1*03:03L HLA-DRB1*15:03L
EVVDKYFDCY

SEQ ID NO: 11208 - protein, 10 aa, Severe acute respiratory syndrome coronavirus 2
  REGION 1..10: note = Table B: HLA-DQA1*05:01-B1*03:01L HLA-DRB1*01:03L HLA-DQA1*01:02-B1*06:02L HLA-DPA1*01:03-B1*03:01L HLA-DRB1*03:01L HLA-DRB1*14:02L HLA-DQA1*05:05-B1*03:19L HLA-DQA1*05:01-B1*02:01L HLA-DPA1*01:03-B1*04:01L
  REGION 1..10: note = CONT. FROM ABOVE: HLA-DPA1*01:03-B1*04:02L HLA-DPA1*02:01-B1*13: 01L HLA-DPA1*03:01-B1*105:01L HLA-DQA1*01:03-B1*06:01L HLA-DQA1* 02:01-B1*03:03L HLA-DRB1*15:03L
KSAGFPFNKW

SEQ ID NO: 11209 - protein, 14 aa, Severe acute respiratory syndrome coronavirus 2
  REGION 1..14: note = Table B: HLA-DQA1*05:01-B1*03:01L HLA-DRB1*04:05L HLA-DRB1*08:04L HLA-DRB1*11:04L HLA-DRB1*11:01L HLA-DQA1*05:05-B1*03:19L HLA-DRB3*01:01L HLA-DQA1*05:05-B1*03:01L
FPFNKWGKARLYYD

SEQ ID NO: 11210 - protein, 15 aa, Severe acute respiratory syndrome coronavirus 2
  REGION 1..15: note = Table B: HLA-DQA1*05:01-B1*03:01L HLA-DRB3*02:01L HLA-DRB1*14:01L HLA-DRB1*14:02L HLA-DQA1*01:01-B1*05:01L HLA-DPA1*01:03-B1*04:01L HLA-DPA1*01:03-B1*04:02L HLA-DRB3*01:01L HLA-DPA1*01:03-B1*104:01L
  REGION 1..15: note = CONT. FROM ABOVE: HLA-DQA1*05:05-B1*03:01L HLA-DRB1*10:01L
GKARLYYDSMSYEDQ

SEQ ID NO: 11211 - protein, 13 aa, Severe acute respiratory syndrome coronavirus 2
  REGION 1..13: note = Table B: HLA-DQA1*05:01-B1*03:01L
EDQDALFAYTKRN

SEQ ID NO: 11212 - protein, 13 aa, Severe acute respiratory syndrome coronavirus 2
  REGION 1..13: note = Table B: HLA-DQA1*05:01-B1*03:01L HLA-DRB1*13:02L HLA-DRB1*13:03L HLA-DRB1*04:02L HLA-DRB1*04:05L HLA-DQA1*01:02-B1*06:02L HLA-DRB3*02:01L HLA-DRB1*11:03L HLA-DRB1*11:04L HLA-DRB1*14:02L HLA-DPA1*01:03-B1*04:01L
  REGION 1..13: note = CONT. FROM ABOVE: HLA-DPA1*01:03-B1*04:02L HLA-DRB3*01:01L HLA-D PA1*02:01-B1*13:01L HLA-DPA1*03:01-B1*105:01L HLA-DRB1*08:03L HL A-DQA1*02:01-B1*03:03L
DALFAYTKRNVIP

SEQ ID NO: 11213 - protein, 12 aa, Severe acute respiratory syndrome coronavirus 2
  REGION 1..12: note = Table B: HLA-DQA1*05:01-B1*03:01L HLA-DRB1*04:03L HLA-DRB1*01:03L HLA-DRB1*04:05L HLA-DQA1*01:02-B1*06:02L HLA-DRB1*01:02L HLA-DRB1*14:01L HLA-DRB1*08:01L HLA-DRB1*12:01L HLA-DPA1*02:01-B1*13:01L HLA-DRB1*16:01L
YTKRNVIPTITQ

SEQ ID NO: 11214 - protein, 10 aa, Severe acute respiratory syndrome coronavirus 2
  REGION 1..10: note = Table B: HLA-DQA1*05:01-B1*03:01L HLA-DQA1*01:02-B1*06:02L HLA-DRB1*08:77L HLA-DPA1*01:03-B1*03:01L HLA-DRB1*03:01L HLA-DRB1*11:02L HLA-DQA1*01-B1*05L HLA-DQA1*05:05-B1*03:19M HLA-DQA1*05:01-B1*02:01L HLA-DPA1*01:03-B1*04:01L
  REGION 1..10: note = CONT. FROM ABOVE: HLA-DRB1*12:01L HLA-DPA1*01:03-B1*104:01L HLA- DRB1*16:01L HLA-DQA1*02:01-B1*03:03L
PTITQMNLKY

SEQ ID NO: 11215 - protein, 14 aa, Severe acute respiratory syndrome coronavirus 2
  REGION 1..14: note = Table B: HLA-DQA1*05:01-B1*03:01L HLA-DRB1*13:02L HLA-DRB1*01:03L HLA-DRB1*04:02L HLA-DRB1*08:04L HLA-DRB1*14:01L HLA-DPA1*03:01-B1*105:01L HLA-DQA1*03:01-B1*03:02L HLA-DQA1*05:05-B1*03:01L HLA-DRB1*16:01L HLA-DRB1*04:08L
  REGION 1..14: note = CONT. FROM ABOVE: HLA-DRB1*15:03L
ITQMNLKYAISAKN

SEQ ID NO: 11216 - protein, 12 aa, Severe acute respiratory syndrome coronavirus 2
  REGION 1..12: note = Table B: HLA-DQA1*05:01-B1*03:01L HLA-DRB1*13:02L HLA-DRB1*04:02L HLA-DRB1*04:04L HLA-DRB1*04:05M HLA-DQA1*01:02-B1*06:02L HLA-DRB1*01:01L HLA-DPA1*01:03-B1*03:01L HLA-DRB1*11:01L HLA-DRB1*04:10L
  REGION 1..12: note = CONT. FROM ABOVE: HLA-DPA1*02:01-B1*13:01L HLA-DPA1*01:03-B1*104 :01L HLA-DPA1*01:02-B1*04:01L HLA-DRB1*07:01L HLA-DQA1*01:03-B1* 06:01L HLA-DRB1*15:03L
MNLKYAISAKNR

SEQ ID NO: 11217 - protein, 12 aa, Severe acute respiratory syndrome coronavirus 2
  REGION 1..12: note = Table B: HLA-DQA1*05:01-B1*03:01L HLA-DRB1*13:02L HLA-DRB1*04:04L HLA-DQA1*01:02-B1*06:02L HLA-DRB4*03:01NL HLA-DRB1*08:04L HLA-DRB1*11:04L HLA-DRB1*11:01L HLA-DRB1*04:10L HLA-DRB3*01:01L HLA-DPA1*02:01-B1*13:01L HLA-DRB1*14:54L
  REGION 1..12: note = CONT. FROM ABOVE: HLA-DPA1*01:02-B1*04:01L HLA-DRB1*15:03L
NLKYAISAKNRA

SEQ ID NO: 11218 - protein, 10 aa, Severe acute respiratory syndrome coronavirus 2
  REGION 1..10: note = Table B: HLA-DQA1*05:01-B1*03:01L HLA-DRB1*04:03L HLA-DRB1*13:02L HLA-DRB1*13:03L HLA-DRB1*01:03L HLA-DRB1*04:02L HLA-DRB1*04:05L HLA-DQA1*01:02-B1*06:02L HLA-DRB1*01:01L HLA-DRB1*01:02L HLA-DRB4*03:01NL HLA-DRB1*14:01L HLA-DRB1*11:04L
  REGION 1..10: note = CONT. FROM ABOVE: HLA-DRB1*08:01L HLA-DRB1*11:01L HLA-DRB1*12:01 L HLA-DRB3*01:01L HLA-DQA1*03:01-B1*03:02L HLA-DRB1*14:54L HLA-D RB1*14:17L HLA-DRB1*16:01L HLA-DRB1*04:08L HLA-DQA1*02:01-B1*03: 03L
YAISAKNRAR

SEQ ID NO: 11219 - protein, 14 aa, Severe acute respiratory syndrome coronavirus 2
  REGION 1..14: note = Table B: HLA-DQA1*05:01-B1*03:01L HLA-DQA1*02:01-B1*03:03L
ARTVAGVSICSTMT

SEQ ID NO: 11220 - protein, 12 aa, Severe acute respiratory syndrome coronavirus 2
  REGION 1..12: note = Table B: HLA-DQA1*05:01-B1*03:01L HLA-DRB1*04:05L HLA-DQA1*05:05-B1*03:19L HLA-DRB1*04:10L HLA-DPA1*03:01-B1*105:01L
GVSICSTMTNRQ

SEQ ID NO: 11221 - protein, 16 aa, Severe acute respiratory syndrome coronavirus 2
  REGION 1..16: note = Table B: HLA-DQA1*05:01-B1*03:01L HLA-DRB1*01:01L HLA-DPA1*01:03-B1*03:01L HLA-DQA1*03:01-B1*03:02L HLA-DPA1*01:03-B1*104:01L HLA-DRB1*07:01L
TNRQFHQKLLKSIAAT

SEQ ID NO: 11222 - protein, 13 aa, Severe acute respiratory syndrome coronavirus 2
  REGION 1..13: note = Table B: HLA-DQA1*05:01-B1*03:01L HLA-DPA1*02:01-B1*13:01L
HQKLLKSIAATRG

SEQ ID NO: 11223 - protein, 12 aa, Severe acute respiratory syndrome coronavirus 2
  REGION 1..12: note = Table B: HLA-DQA1*05:01-B1*03:01L HLA-DRB1*01:03L HLA-DQA1*01:02-B1*06:02L HLA-DRB1*01:02L HLA-DPA1*03:01-B1*105:01L HLA-DQA1*05:05-B1*03:01L HLA-DRB1*16:01L HLA-DQA1*01:03-B1*06:01L HLA-DRB1*04:08L
  REGION 1..12: note = CONT. FROM ABOVE: HLA-DQA1*02:01-B1*03:03L HLA-DRB1*15:03L
LLKSIAATRGAT

SEQ ID NO: 11224 - protein, 11 aa, Severe acute respiratory syndrome coronavirus 2
  REGION 1..11: note = Table B: HLA-DQA1*05:01-B1*03:01L HLA-DQA1*03:01-B1*03:02L HLA-DQA1*02:01-B1*03:03L
AATRGATVVIG

SEQ ID NO: 11225 - protein, 12 aa, Severe acute respiratory syndrome coronavirus 2
  REGION 1..12: note = Table B: HLA-DQA1*05:01-B1*03:01L HLA-DQA1*01:02-B1*06:02L HLA-DPA1*01:03-B1*03:01L HLA-DPA1*03:01-B1*04:02L HLA-DQA1*05:05-B1*03:19L HLA-DQA1*05:01-B1*02:01L HLA-DRB1*12:01L HLA-DPA1*03:01-B1*105:01L
  REGION 1..12: note = CONT. FROM ABOVE: HLA-DQA1*05:05-B1*03:01L HLA-DPA1*01:02-B1*04: 01L HLA-DQA1*01:03-B1*06:01L HLA-DRB1*15:03L
VVIGTSKFYGGW

SEQ ID NO: 11226 - protein, 11 aa, Severe acute respiratory syndrome coronavirus 2
  REGION 1..11: note = Table B: HLA-DQA1*05:01-B1*03:01L HLA-DQA1*01:02-B1*06:02L HLA-DPA1*03:01-B1*105:01L HLA-DQA1*05:05-B1*03:01L HLA-DQA1*01:03-B1*06:01L HLA-DQA1*02:01-B1*03:03L
IGTSKFYGGWH

SEQ ID NO: 11227 - protein, 10 aa, Severe acute respiratory syndrome coronavirus 2
  REGION 1..10: note = Table B: HLA-DQA1*05:01-B1*03:01L HLA-DRB1*13:03L HLA-DQA1*01:02-B1*06:02M HLA-DRB1*08:77L HLA-DPA1*01:03-B1*03:01L HLA-DPA1*03:01-B1*04:02L HLA-DRB1*03:01L HLA-DRB1*14:02L HLA-DQA1*01-B1*05L
  REGION 1..10: note = CONT. FROM ABOVE: HLA-DQA1*05:05-B1*03:19M HLA-DQA1*05:01-B1*02: 01L HLA-DRB4*01:01L HLA-DPA1*01:03-B1*04:01L HLA-DQA1*05:05-B1*0 3:116L HLA-DPA1*02:01-B1*13:01L HLA-DPA1*03:01-B1*105:01L HLA-DP A1*01:03-B1*104:01L HLA-DRB1*10:01L HLA-DRB1*16:01L
  REGION 1..10: note = CONT. FROM ABOVE: HLA-DQA1*01:03-B1*06:01L HLA-DQA1*02:01-B1*03: 03L HLA-DRB1*15:03L
DVENPHLMGW

SEQ ID NO: 11228 - protein, 11 aa, Severe acute respiratory syndrome coronavirus 2
  REGION 1..11: note = Table B: HLA-DQA1*05:01-B1*03:01L HLA-DQA1*01:02-B1*06:02L HLA-DRB1*08:77L HLA-DPA1*01:03-B1*03:01L HLA-DRB1*03:01L HLA-DQA1*05:01-B1*02:01L HLA-DRB4*01:01L HLA-DPA1*01:03-B1*04:01L HLA-DPA1*01:03-B1*104:01L
  REGION 1..11: note = CONT. FROM ABOVE: HLA-DRB1*16:01L
VENPHLMGWDY

SEQ ID NO: 11229 - protein, 16 aa, Severe acute respiratory syndrome coronavirus 2
  REGION 1..16: note = Table B: HLA-DQA1*05:01-B1*03:01L HLA-DRB1*04:01L HLA-DRB1*14:02L HLA-DRB1*08:01L HLA-DRB1*11:01L HLA-DQA1*01-B1*05L HLA-DPA1*02:01-B1*13:01L HLA-DQA1*05:05-B1*03:01L HLA-DRB1*10:01L
MPNMLRIMASLVLARK

SEQ ID NO: 11230 - protein, 12 aa, Severe acute respiratory syndrome coronavirus 2
  REGION 1..12: note = Table B: HLA-DQA1*05:01-B1*03:01L HLA-DRB1*01:02L
IMASLVLARKHT

SEQ ID NO: 11231 - protein, 13 aa, Severe acute respiratory syndrome coronavirus 2
  REGION 1..13: note = Table B: HLA-DQA1*05:01-B1*03:01L HLA-DPA1*01:03-B1*03:01L HLA-DQA1*05:05-B1*03:19L
RLANECAQVLSEM

SEQ ID NO: 11232 - protein, 14 aa, Severe acute respiratory syndrome coronavirus 2
  REGION 1..14: note = Table B: HLA-DQA1*05:01-B1*03:01L HLA-DRB1*01:02L HLA-DPA1*03:01-B1*105:01L HLA-DQA1*05:05-B1*03:01L HLA-DQA1*02:01-B1*03:03L HLA-DRB1*15:03L
EMVMCGGSLYVKPG

SEQ ID NO: 11233 - protein, 12 aa, Severe acute respiratory syndrome coronavirus 2
  REGION 1..12: note = Table B: HLA-DQA1*05:01-B1*03:01L HLA-DQA1*05:05-B1*03:19L HLA-DQA1*05:05-B1*03:01L
SLYVKPGGTSSG

SEQ ID NO: 11234 - protein, 10 aa, Severe acute respiratory syndrome coronavirus 2
  REGION 1..10: note = Table B: HLA-DQA1*05:01-B1*03:01L HLA-DRB1*13:03L HLA-DRB1*01:03L HLA-DQA1*01:02-B1*06:02L HLA-DRB1*08:77L HLA-DPA1*01:03-B1*03:01L HLA-DRB1*03:01L HLA-DRB1*14:02L HLA-DQA1*01-B1*05L HLA-DQA1*05:05-B1*03:19L
  REGION 1..10: note = CONT. FROM ABOVE: HLA-DQA1*05:01-B1*02:01L HLA-DPA1*01:03-B1*04: 01L HLA-DPA1*01:03-B1*04:02L HLA-DPA1*03:01-B1*105:01L HLA-DRB1* 10:01L HLA-DRB1*16:01L HLA-DQA1*02:01-B1*03:03L HLA-DRB1*15:03L
TSSGDATTAY

SEQ ID NO: 11235 - protein, 12 aa, Severe acute respiratory syndrome coronavirus 2
  REGION 1..12: note = Table B: HLA-DQA1*05:01-B1*03:01L HLA-DRB1*04:03L HLA-DQA1*01:02-B1*06:02L HLA-DRB1*01:02L HLA-DQA1*05:05-B1*03:19L HLA-DRB1*12:01L HLA-DPA1*03:01-B1*105:01L HLA-DQA1*05:05-B1*03:01L
  REGION 1..12: note = CONT. FROM ABOVE: HLA-DRB1*14:17L HLA-DRB1*16:01L HLA-DQA1*01:03 -B1*06:01L HLA-DRB1*04:08L HLA-DQA1*02:01-B1*03:03L HLA-DRB1*15: 03L
SVFNICQAVTAN

SEQ ID NO: 11236 - protein, 11 aa, Severe acute respiratory syndrome coronavirus 2
  REGION 1..11: note = Table B: HLA-DQA1*05:01-B1*03:01L HLA-DRB1*04:03L HLA-DQA1*01:02-B1*06:02L HLA-DQA1*03:01-B1*03:02L HLA-DQA1*05:05-B1*03:01L HLA-DRB1*14:17L HLA-DQA1*01:03-B1*06:01L HLA-DQA1*02:01-B1*03:03L
NICQAVTANVN

SEQ ID NO: 11237 - protein, 14 aa, Severe acute respiratory syndrome coronavirus 2
  REGION 1..14: note = Table B: HLA-DQA1*05:01-B1*03:01L HLA-DRB1*04:02L HLA-DRB1*01:02L HLA-DQA1*05:05-B1*03:19L HLA-DPA1*03:01-B1*105:01L HLA-DRB1*14:54L
AVTANVNALLSTDG

SEQ ID NO: 11238 - protein, 14 aa, Severe acute respiratory syndrome coronavirus 2
  REGION 1..14: note = Table B: HLA-DQA1*05:01-B1*03:01L HLA-DQA1*05:05-B1*03:19L HLA-DPA1*03:01-B1*105:01L
VTANVNALLSTDGN

SEQ ID NO: 11239 - protein, 14 aa, Severe acute respiratory syndrome coronavirus 2
  REGION 1..14: note = Table B: HLA-DQA1*05:01-B1*03:01L HLA-DRB1*01:03L HLA-DRB1*04:04L HLA-DRB1*01:02L HLA-DRB1*12:01L HLA-DPA1*03:01-B1*105:01L HLA-DQA1*05:05-B1*03:01L HLA-DRB1*16:01L HLA-DRB1*04:08L
TANVNALLSTDGNK

SEQ ID NO: 11240 - protein, 11 aa, Severe acute respiratory syndrome coronavirus 2
  REGION 1..11: note = Table B: HLA-DQA1*05:01-B1*03:01L HLA-DRB1*01:03L HLA-DRB1*04:05L HLA-DRB1*14:01L HLA-DRB1*14:54L HLA-DPA1*01:02-B1*04:01L HLA-DQA1*01:03-B1*06:01L
LSTDGNKIADK

SEQ ID NO: 11241 - protein, 10 aa, Severe acute respiratory syndrome coronavirus 2
  REGION 1..10: note = Table B: HLA-DQA1*05:01-B1*03:01L HLA-DRB1*13:03L HLA-DRB1*01:03L HLA-DQA1*01:02-B1*06:02L HLA-DRB1*08:77L HLA-DPA1*01:03-B1*03:01L HLA-DPA1*03:01-B1*04:02L HLA-DRB1*03:01L HLA-DRB1*11:02L HLA-DQA1*01-B1*05L
  REGION 1..10: note = CONT. FROM ABOVE: HLA-DQA1*05:05-B1*03:19M HLA-DQA1*05:01-B1*02: 01M HLA-DRB4*01:01L HLA-DPA1*01:03-B1*04:01L HLA-DPA1*01:03-B1*0 4:02L HLA-DRB1*12:01L HLA-DPA1*01:03-B1*104:01L HLA-DRB1*10:01L HLA-DRB1*16:01M HLA-DRB1*15:03L
TDGNKIADKY

SEQ ID NO: 11242 - protein, 16 aa, Severe acute respiratory syndrome coronavirus 2
  REGION 1..16: note = Table B: HLA-DQA1*05:01-B1*03:01L HLA-DRB1*01:01L HLA-DRB1*03:01L HLA-DPA1*03:01-B1*105:01L
DGNKIADKYVRNLQHR

SEQ ID NO: 11243 - protein, 11 aa, Severe acute respiratory syndrome coronavirus 2
  REGION 1..11: note = Table B: HLA-DQA1*05:01-B1*03:01L HLA-DRB1*13:02L HLA-DRB1*13:03L HLA-DRB1*04:05L HLA-DRB1*14:01L HLA-DRB3*01:01L HLA-DRB1*07:01L HLA-DRB1*04:08L HLA-DRB1*15:03L
DKYVRNLQHRL

SEQ ID NO: 11244 - protein, 10 aa, Severe acute respiratory syndrome coronavirus 2
  REGION 1..10: note = Table B: HLA-DQA1*05:01-B1*03:01L HLA-DRB1*13:02L HLA-DRB1*01:03L HLA-DQA1*01:02-B1*06:02L HLA-DRB1*01:02L HLA-DPA1*01:03-B1*03:01L HLA-DPA1*03:01-B1*04:02L HLA-DRB1*03:01L HLA-DRB1*14:01L HLA-DRB1*14:02L HLA-DRB1*11:01L
  REGION 1..10: note = CONT. FROM ABOVE: HLA-DQA1*05:05-B1*03:19L HLA-DQA1*05:01-B1*02: 01L HLA-DPA1*01:03-B1*04:01L HLA-DPA1*01:03-B1*04:02L HLA-DRB1*1 2:01L HLA-DPA1*02:01-B1*13:01L HLA-DPA1*03:01-B1*105:01L HLA-DPA 1*01:02-B1*04:01L HLA-DRB1*16:01L HLA-DQA1*01:03-B1*06:01L
  REGION 1..10: note = CONT. FROM ABOVE: HLA-DQA1*02:01-B1*03:03L HLA-DRB1*15:03L
YVRNLQHRLY

SEQ ID NO: 11245 - protein, 16 aa, Severe acute respiratory syndrome coronavirus 2
  REGION 1..16: note = Table B: HLA-DQA1*05:01-B1*03:01L HLA-DRB1*01:01L HLA-DPA1*03:01-B1*04:02L HLA-DRB1*14:02L HLA-DPA1*01:03-B1*04:01L HLA-DPA1*03:01-B1*105:01L HLA-DQA1*03:01-B1*03:02L HLA-DPA1*01:03-B1*02:01L
  REGION 1..16: note = CONT. FROM ABOVE: HLA-DPA1*01:03-B1*104:01L HLA-DQA1*01:03-B1*06 :01L
LQHRLYECLYRNRDVD

SEQ ID NO: 11246 - protein, 10 aa, Severe acute respiratory syndrome coronavirus 2
  REGION 1..10: note = Table B: HLA-DQA1*05:01-B1*03:01L HLA-DRB1*13:03L HLA-DQA1*01:02-B1*06:02L HLA-DRB1*08:77L HLA-DPA1*01:03-B1*03:01M HLA-DRB1*03:01L HLA-DRB1*11:02L HLA-DQA1*01-B1*05L HLA-DQA1*05:05-B1*03:19M
  REGION 1..10: note = CONT. FROM ABOVE: HLA-DQA1*05:01-B1*02:01M HLA-DRB4*01:01L HLA-D PA1*01:03-B1*04:01L HLA-DQA1*05:05-B1*03:116L HLA-DRB1*12:01L HL A-DPA1*01:03-B1*104:01M HLA-DRB1*10:01L HLA-DRB1*16:01M HLA-DRB1 *15:03L
VDTDFVNEFY

SEQ ID NO: 11247 - protein, 13 aa, Severe acute respiratory syndrome coronavirus 2
  REGION 1..13: note = Table B: HLA-DQA1*05:01-B1*03:01L HLA-DRB1*13:02L HLA-DRB1*08:04L HLA-DRB1*14:01L HLA-DRB1*11:04L HLA-DRB1*11:01L HLA-DRB3*01:01L HLA-DPA1*02:01-B1*13:01L HLA-DQA1*02:01-B1*03:03L
DTDFVNEFYAYLR

SEQ ID NO: 11248 - protein, 12 aa, Severe acute respiratory syndrome coronavirus 2
  REGION 1..12: note = Table B: HLA-DQA1*05:01-B1*03:01L HLA-DRB1*13:02L HLA-DRB1*04:04L HLA-DRB1*04:05L HLA-DQA1*01:02-B1*06:02L HLA-DRB1*14:01L HLA-DRB1*11:04L HLA-DRB1*11:01L HLA-DQA1*01-B1*05L HLA-DRB1*12:01L HLA-DRB3*01:01L
  REGION 1..12: note = CONT. FROM ABOVE: HLA-DRB1*15:03L
FVNEFYAYLRKH

SEQ ID NO: 11249 - protein, 12 aa, Severe acute respiratory syndrome coronavirus 2
  REGION 1..12: note = Table B: HLA-DQA1*05:01-B1*03:01L HLA-DRB1*13:02L HLA-DRB1*08:04L HLA-DPA1*03:01-B1*04:02L HLA-DRB1*14:01L HLA-DRB1*11:04L HLA-DRB1*11:01L HLA-DRB1*12:01L HLA-DRB3*01:01L
VNEFYAYLRKHF

SEQ ID NO: 11250 - protein, 12 aa, Severe acute respiratory syndrome coronavirus 2
  REGION 1..12: note = Table B: HLA-DQA1*05:01-B1*03:01L HLA-DRB1*13:02L HLA-DRB1*13:03L HLA-DRB1*04:02L HLA-DRB1*01:02L HLA-DRB1*08:04L HLA-DPA1*03:01-B1*04:02L HLA-DRB1*11:04L HLA-DRB1*12:01L HLA-DRB3*01:01L HLA-DRB1*08:03L
NEFYAYLRKHFS

SEQ ID NO: 11251 - protein, 15 aa, Severe acute respiratory syndrome coronavirus 2
  REGION 1..15: note = Table B: HLA-DQA1*05:01-B1*03:01L HLA-DRB1*13:03L HLA-DRB1*01:01L HLA-DRB4*03:01NL HLA-DRB1*08:04L HLA-DRB3*02:01L HLA-DPA1*03:01-B1*04:02L HLA-DRB1*11:02L HLA-DRB1*11:03L HLA-DRB1*11:04L HLA-DRB1*08:01L HLA-DQA1*05:01-B1*02:01L
  REGION 1..15: note = CONT. FROM ABOVE: HLA-DRB1*09:01L HLA-DRB1*14:54L HLA-DRB1*10:01 L HLA-DRB1*08:03L
DDAVVCFNSTYASQG

SEQ ID NO: 11252 - protein, 12 aa, Severe acute respiratory syndrome coronavirus 2
  REGION 1..12: note = Table B: HLA-DQA1*05:01-B1*03:01L HLA-DRB1*04:03L HLA-DQA1*01:02-B1*06:02L HLA-DQA1*05:05-B1*03:19L HLA-DQA1*03:01-B1*03:02L HLA-DQA1*05:05-B1*03:01L HLA-DQA1*01:03-B1*06:01L HLA-DQA1*02:01-B1*03:03L
FNSTYASQGLVA

SEQ ID NO: 11253 - protein, 10 aa, Severe acute respiratory syndrome coronavirus 2
  REGION 1..10: note = Table B: HLA-DQA1*05:01-B1*03:01L HLA-DQA1*01:02-B1*06:02L HLA-DQA1*05:05-B1*03:19L HLA-DQA1*03:01-B1*03:02L HLA-DQA1*05:05-B1*03:01L HLA-DQA1*01:03-B1*06:01L HLA-DQA1*02:01-B1*03:03L
ASQGLVASIK

SEQ ID NO: 11254 - protein, 10 aa, Severe acute respiratory syndrome coronavirus 2
  REGION 1..10: note = Table B: HLA-DQA1*05:01-B1*03:01L HLA-DQA1*03:01-B1*03:02L HLA-DQA1*05:05-B1*03:01L HLA-DQA1*01:03-B1*06:01L HLA-DQA1*02:01-B1*03:03L
SQGLVASIKN

SEQ ID NO: 11255 - protein, 14 aa, Severe acute respiratory syndrome coronavirus 2
  REGION 1..14: note = Table B: HLA-DQA1*05:01-B1*03:01L HLA-DRB1*04:01L HLA-DRB1*13:02L HLA-DPA1*01:03-B1*03:01L HLA-DRB1*11:02L HLA-DRB1*08:01L HLA-DRB1*11:01L HLA-DQA1*05:05-B1*03:19L HLA-DRB4*01:01L HLA-DRB1*09:01L HLA-DRB3*01:01L
  REGION 1..14: note = CONT. FROM ABOVE: HLA-DQA1*05:05-B1*03:01L HLA-DRB1*10:01L HLA-D QA1*01:03-B1*06:01L HLA-DRB1*08:03L HLA-DRB1*15:01L
QGLVASIKNFKSVL

SEQ ID NO: 11256 - protein, 10 aa, Severe acute respiratory syndrome coronavirus 2
  REGION 1..10: note = Table B: HLA-DQA1*05:01-B1*03:01L HLA-DRB1*13:02L HLA-DRB1*13:03L HLA-DRB1*01:03L HLA-DQA1*01:02-B1*06:02L HLA-DRB1*08:77L HLA-DPA1*01:03-B1*03:01L HLA-DPA1*03:01-B1*04:02L HLA-DRB1*03:01L HLA-DRB1*14:01L
  REGION 1..10: note = CONT. FROM ABOVE: HLA-DRB1*14:02L HLA-DQA1*01-B1*05L HLA-DQA1*05 :05-B1*03:19L HLA-DQA1*05:01-B1*02:01L HLA-DRB4*01:01L HLA-DPA1* 01:03-B1*04:01L HLA-DPA1*01:03-B1*04:02L HLA-DRB1*12:01L HLA-DPA 1*02:01-B1*13:01L HLA-DPA1*03:01-B1*105:01L
  REGION 1..10: note = CONT. FROM ABOVE: HLA-DPA1*01:03-B1*104:01L HLA-DQA1*05:05-B1*03 :01L HLA-DPA1*01:02-B1*04:01L HLA-DRB1*16:01L HLA-DQA1*01:03-B1* 06:01L HLA-DRB1*08:02L HLA-DQA1*02:01-B1*03:03L HLA-DRB1*15:03L
SIKNFKSVLY

SEQ ID NO: 11257 - protein, 12 aa, Severe acute respiratory syndrome coronavirus 2
  REGION 1..12: note = Table B: HLA-DQA1*05:01-B1*03:01L HLA-DRB1*13:02L HLA-DRB1*01:03L HLA-DRB1*04:02L HLA-DRB1*04:04L HLA-DRB1*04:05L HLA-DQA1*01:02-B1*06:02L HLA-DRB3*02:01L HLA-DPA1*03:01-B1*04:02L HLA-DRB1*14:01L HLA-DRB1*08:01L
  REGION 1..12: note = CONT. FROM ABOVE: HLA-DQA1*01-B1*05L HLA-DQA1*05:01-B1*02:01L HL A-DRB3*01:01L HLA-DPA1*02:01-B1*13:01L HLA-DPA1*03:01-B1*105:01L HLA-DQA1*03:01-B1*03:02L HLA-DPA1*01:02-B1*04:01L HLA-DQA1*01:03 -B1*06:01L HLA-DRB1*04:08L HLA-DQA1*02:01-B1*03:03L
IKNFKSVLYYQN

SEQ ID NO: 11258 - protein, 12 aa, Severe acute respiratory syndrome coronavirus 2
  REGION 1..12: note = Table B: HLA-DQA1*05:01-B1*03:01L HLA-DRB1*04:02L HLA-DRB1*01:02L HLA-DPA1*01:03-B1*03:01L HLA-DPA1*03:01-B1*04:02L
FKSVLYYQNNVF

SEQ ID NO: 11259 - protein, 12 aa, Severe acute respiratory syndrome coronavirus 2
  REGION 1..12: note = Table B: HLA-DQA1*05:01-B1*03:01L HLA-DRB1*13:02L HLA-DRB1*01:03L HLA-DRB1*04:02L HLA-DRB1*04:04L HLA-DRB1*04:05L HLA-DRB1*01:02L HLA-DRB3*02:01L HLA-DPA1*03:01-B1*04:02L HLA-DRB1*08:01L HLA-DRB1*04:10L HLA-DRB1*14:54L HLA-DRB1*14:17L
  REGION 1..12: note = CONT. FROM ABOVE: HLA-DRB1*04:08L HLA-DRB1*15:01L
KSVLYYQNNVFM

SEQ ID NO: 11260 - protein, 13 aa, Severe acute respiratory syndrome coronavirus 2
  REGION 1..13: note = Table B: HLA-DQA1*05:01-B1*03:01L HLA-DRB1*13:02L HLA-DRB1*01:03L HLA-DRB1*04:04L HLA-DRB1*04:05L HLA-DRB1*08:04L HLA-DRB3*02:01L HLA-DPA1*01:03-B1*03:01L HLA-DQA1*03:01-B1*03:02L HLA-DQA1*05:05-B1*03:01L
  REGION 1..13: note = CONT. FROM ABOVE: HLA-DPA1*01:02-B1*04:01L HLA-DRB1*04:08L HLA-D RB1*15:01L
SVLYYQNNVFMSE

SEQ ID NO: 11261 - protein, 12 aa, Severe acute respiratory syndrome coronavirus 2
  REGION 1..12: note = Table B: HLA-DQA1*05:01-B1*03:01L HLA-DQA1*01:02-B1*06:02L HLA-DQA1*05:01-B1*02:01L HLA-DPA1*03:01-B1*105:01L HLA-DQA1*05:05-B1*03:01L
WTETDLTKGPHE

SEQ ID NO: 11262 - protein, 14 aa, Severe acute respiratory syndrome coronavirus 2
  REGION 1..14: note = Table B: HLA-DQA1*05:01-B1*03:01L HLA-DRB1*04:03L HLA-DRB1*13:02L HLA-DRB1*13:03L HLA-DRB1*01:03L HLA-DRB1*04:02L HLA-DRB1*04:04L HLA-DRB1*04:05L HLA-DRB1*01:01L HLA-DRB1*01:02L HLA-DRB1*08:04L HLA-DPA1*01:03-B1*03:01L
  REGION 1..14: note = CONT. FROM ABOVE: HLA-DPA1*03:01-B1*04:02L HLA-DRB1*14:01L HLA-D RB1*11:03L HLA-DRB1*11:04L HLA-DRB1*08:01L HLA-DRB1*11:01L HLA-D RB1*12:01L HLA-DRB3*01:01L HLA-DPA1*02:01-B1*13:01L HLA-DPA1*03: 01-B1*105:01L HLA-DPA1*01:03-B1*02:01L HLA-DQA1*05:05-B1*03:01L
  REGION 1..14: note = CONT. FROM ABOVE: HLA-DPA1*01:02-B1*04:01L HLA-DRB1*07:01L HLA-D RB1*16:01L HLA-DQA1*01:03-B1*06:01L HLA-DRB1*04:08M HLA-DRB1*08: 03L HLA-DQA1*02:01-B1*03:03L HLA-DRB1*15:03L
GPHEFCSQHTMLVK

SEQ ID NO: 11263 - protein, 10 aa, Severe acute respiratory syndrome coronavirus 2
  REGION 1..10: note = Table B: HLA-DQA1*05:01-B1*03:01L HLA-DRB1*13:03L HLA-DRB1*01:03L HLA-DQA1*01:02-B1*06:02L HLA-DRB1*08:77L HLA-DPA1*01:03-B1*03:01L HLA-DRB1*03:01L HLA-DRB1*11:02L HLA-DRB1*14:02L HLA-DQA1*01-B1*05L HLA-DQA1*05:05-B1*03:19L
  REGION 1..10: note = CONT. FROM ABOVE: HLA-DQA1*05:01-B1*02:01L HLA-DRB4*01:01L HLA-D PA1*01:03-B1*04:01L HLA-DPA1*01:03-B1*04:02L HLA-DRB1*12:01L HLA -DPA1*03:01-B1*105:01L HLA-DPA1*01:03-B1*104:01L HLA-DRB1*10:01L HLA-DRB1*16:01L HLA-DQA1*01:03-B1*06:01L HLA-DRB1*08:02L
  REGION 1..10: note = CONT. FROM ABOVE: HLA-DQA1*02:01-B1*03:03L HLA-DRB1*15:03L
LVKQGDDYVY

SEQ ID NO: 11264 - protein, 12 aa, Severe acute respiratory syndrome coronavirus 2
  REGION 1..12: note = Table B: HLA-DQA1*05:01-B1*03:01L HLA-DRB1*13:03L HLA-DRB1*01:03L HLA-DRB1*04:05L HLA-DQA1*01:02-B1*06:02L HLA-DPA1*01:03-B1*03:01L HLA-DPA1*03:01-B1*04:02L HLA-DQA1*01:01-B1*05:01L HLA-DRB1*08:01L
  REGION 1..12: note = CONT. FROM ABOVE: HLA-DQA1*05:05-B1*03:19L HLA-DPA1*01:03-B1*04: 01L HLA-DRB1*04:10L HLA-DPA1*01:03-B1*04:02L HLA-DRB1*12:01L HLA -DPA1*02:01-B1*13:01L HLA-DQA1*05:05-B1*03:01L HLA-DPA1*01:02-B1 *04:01L HLA-DRB1*16:01L HLA-DRB1*04:08L HLA-DRB1*15:03L
DDYVYLPYPDPS

SEQ ID NO: 11265 - protein, 16 aa, Severe acute respiratory syndrome coronavirus 2
  REGION 1..16: note = Table B: HLA-DQA1*05:01-B1*03:01L
YPDPSRILGAGCFVDD

SEQ ID NO: 11266 - protein, 17 aa, Severe acute respiratory syndrome coronavirus 2
  REGION 1..17: note = Table B: HLA-DQA1*05:01-B1*03:01L HLA-DPA1*01:03-B1*03:01L HLA-DPA1*01:03-B1*04:02L HLA-DPA1*02:01-B1*13:01L HLA-DRB1*15:03L
DPSRILGAGCFVDDIVK

SEQ ID NO: 11267 - protein, 12 aa, Severe acute respiratory syndrome coronavirus 2
  REGION 1..12: note = Table B: HLA-DQA1*05:01-B1*03:01L HLA-DRB1*04:04L HLA-DRB1*04:05L HLA-DQA1*01:02-B1*06:02L HLA-DRB1*08:04L HLA-DRB1*03:01L HLA-DRB1*11:03L HLA-DRB1*11:01L HLA-DRB1*13:01L HLA-DRB1*04:10L HLA-DRB3*01:01L HLA-DPA1*03:01-B1*105:01L
  REGION 1..12: note = CONT. FROM ABOVE: HLA-DPA1*01:02-B1*04:01L HLA-DRB1*10:01L HLA-D QA1*01:03-B1*06:01L HLA-DRB1*04:08L HLA-DRB1*08:03L
IVKTDGTLMIER

SEQ ID NO: 11268 - protein, 14 aa, Severe acute respiratory syndrome coronavirus 2
  REGION 1..14: note = Table B: HLA-DQA1*05:01-B1*03:01L HLA-DRB1*13:03L HLA-DRB1*01:03L HLA-DRB1*04:04L HLA-DRB1*08:04L HLA-DRB3*02:01L HLA-DRB1*14:01L HLA-DRB1*11:03L HLA-DRB1*14:02L HLA-DRB1*08:01L HLA-DRB1*11:01L HLA-DRB1*04:10L HLA-DRB1*09:01L HLA-DRB3*01:01L
  REGION 1..14: note = CONT. FROM ABOVE: HLA-DQA1*03:01-B1*03:02L HLA-DPA1*01:03-B1*02: 01L HLA-DRB1*07:01L HLA-DRB1*10:01L HLA-DRB1*08:03L HLA-DQA1*02: 01-B1*03:03L
IERFVSLAIDAYPL

SEQ ID NO: 11269 - protein, 10 aa, Severe acute respiratory syndrome coronavirus 2
  REGION 1..10: note = Table B: HLA-DQA1*05:01-B1*03:01L HLA-DRB1*04:03L HLA-DRB1*13:02L HLA-DRB1*13:03L HLA-DRB1*01:03L HLA-DRB1*04:02L HLA-DRB1*01:01L HLA-DRB1*01:02L HLA-DRB4*03:01NL HLA-DRB1*14:01L HLA-DRB1*12:01L HLA-DRB1*12:02L HLA-DPA1*03:01-B1*105:01L
  REGION 1..10: note = CONT. FROM ABOVE: HLA-DQA1*03:01-B1*03:02L HLA-DQA1*05:05-B1*03: 01L HLA-DRB1*14:17L HLA-DRB1*16:01L HLA-DQA1*01:03-B1*06:01L HLA -DQA1*02:01-B1*03:03L HLA-DRB1*15:03L
LAIDAYPLTK

SEQ ID NO: 11270 - protein, 10 aa, Severe acute respiratory syndrome coronavirus 2
  REGION 1..10: note = Table B: HLA-DQA1*05:01-B1*03:01L HLA-DRB1*13:03L HLA-DQA1*03:01-B1*03:02L HLA-DQA1*01:03-B1*06:01L HLA-DQA1*02:01-B1*03:03L
DAYPLTKHPN

SEQ ID NO: 11271 - protein, 10 aa, Severe acute respiratory syndrome coronavirus 2
  REGION 1..10: note = Table B: HLA-DQA1*05:01-B1*03:01L HLA-DRB1*01:03L HLA-DQA1*01:02-B1*06:02L HLA-DPA1*01:03-B1*03:01L HLA-DRB1*03:01L HLA-DRB1*14:02L HLA-DQA1*05:05-B1*03:19L HLA-DQA1*05:01-B1*02:01L HLA-DPA1*01:03-B1*04:02L
  REGION 1..10: note = CONT. FROM ABOVE: HLA-DPA1*03:01-B1*105:01L HLA-DRB1*16:01L HLA- DQA1*01:03-B1*06:01L HLA-DQA1*02:01-B1*03:03L HLA-DRB1*15:03L
PLTKHPNQEY

SEQ ID NO: 11272 - protein, 10 aa, Severe acute respiratory syndrome coronavirus 2
  REGION 1..10: note = Table B: HLA-DQA1*05:01-B1*03:01L HLA-DRB1*13:03L HLA-DQA1*01:02-B1*06:02L HLA-DRB1*14:01L HLA-DPA1*03:01-B1*105:01L HLA-DRB1*15:03L
HPNQEYADVF

SEQ ID NO: 11273 - protein, 10 aa, Severe acute respiratory syndrome coronavirus 2
  REGION 1..10: note = Table B: HLA-DQA1*05:01-B1*03:01L HLA-DQA1*01:02-B1*06:02L HLA-DRB1*08:77L HLA-DPA1*01:03-B1*03:01M HLA-DPA1*03:01-B1*04:02L HLA-DRB1*03:01L HLA-DRB1*11:02L HLA-DQA1*01-B1*05L HLA-DQA1*05:05-B1*03:19H
  REGION 1..10: note = CONT. FROM ABOVE: HLA-DQA1*05:01-B1*02:01M HLA-DRB4*01:01L HLA-D PA1*01:03-B1*04:01L HLA-DQA1*05:05-B1*03:116L HLA-DRB1*12:01L HL A-DPA1*01:03-B1*104:01M HLA-DPA1*01:02-B1*04:01L HLA-DRB1*10:01L HLA-DRB1*16:01M HLA-DRB1*15:03L
ADVFHLYLQY

SEQ ID NO: 11274 - protein, 12 aa, Severe acute respiratory syndrome coronavirus 2
  REGION 1..12: note = Table B: HLA-DQA1*05:01-B1*03:01L HLA-DRB1*13:02L HLA-DRB1*04:05L HLA-DRB1*14:01L HLA-DRB1*08:01L HLA-DQA1*01-B1*05L HLA-DRB1*12:01L HLA-DRB3*01:01L HLA-DQA1*03:01-B1*03:02L HLA-DQA1*02:01-B1*03:03L
  REGION 1..12: note = CONT. FROM ABOVE: HLA-DRB1*15:01L
DVFHLYLQYIRK

SEQ ID NO: 11275 - protein, 15 aa, Severe acute respiratory syndrome coronavirus 2
  REGION 1..15: note = Table B: HLA-DQA1*05:01-B1*03:01L HLA-DPA1*03:01-B1*04:02L HLA-DRB1*11:02L HLA-DPA1*01:03-B1*04:02L HLA-DPA1*03:01-B1*105:01L HLA-DQA1*02:01-B1*03:03L
VFHLYLQYIRKLHDE

SEQ ID NO: 11276 - protein, 12 aa, Severe acute respiratory syndrome coronavirus 2
  REGION 1..12: note = Table B: HLA-DQA1*05:01-B1*03:01L HLA-DQA1*05:05-B1*03:01L
LTGHMLDMYSVM

SEQ ID NO: 11277 - protein, 12 aa, Severe acute respiratory syndrome coronavirus 2
  REGION 1..12: note = Table B: HLA-DQA1*05:01-B1*03:01L HLA-DRB1*04:02L HLA-DRB1*04:04L HLA-DRB1*04:05L HLA-DRB4*03:01NL HLA-DPA1*01:03-B1*03:01L HLA-DQA1*01-B1*05L HLA-DQA1*05:05-B1*03:19L HLA-DQA1*05:01-B1*02:01L
  REGION 1..12: note = CONT. FROM ABOVE: HLA-DRB1*04:10L HLA-DRB1*12:01L HLA-DPA1*03:01 -B1*105:01L HLA-DRB1*14:54L HLA-DQA1*05:05-B1*03:01L HLA-DRB1*16 :01L HLA-DRB1*04:08L
LDMYSVMLTNDN

SEQ ID NO: 11278 - protein, 14 aa, Severe acute respiratory syndrome coronavirus 2
  REGION 1..14: note = Table B: HLA-DQA1*05:01-B1*03:01L HLA-DRB1*01:01L HLA-DRB1*08:04L HLA-DPA1*01:03-B1*03:01L HLA-DRB1*11:01L HLA-DQA1*05:05-B1*03:19L HLA-DRB1*09:01L HLA-DRB3*01:01L HLA-DPA1*02:01-B1*13:01L HLA-DPA1*03:01-B1*105:01L
  REGION 1..14: note = CONT. FROM ABOVE: HLA-DRB1*15:03L
DMYSVMLTNDNTSR

SEQ ID NO: 11279 - protein, 10 aa, Severe acute respiratory syndrome coronavirus 2
  REGION 1..10: note = Table B: HLA-DQA1*05:01-B1*03:01L HLA-DRB1*13:03L HLA-DRB1*01:03L HLA-DQA1*01:02-B1*06:02L HLA-DRB1*08:77L HLA-DPA1*01:03-B1*03:01L HLA-DPA1*03:01-B1*04:02L HLA-DRB1*03:01L HLA-DRB1*14:01L HLA-DRB1*11:02L HLA-DRB1*14:02L
  REGION 1..10: note = CONT. FROM ABOVE: HLA-DQA1*01-B1*05L HLA-DQA1*05:05-B1*03:19L HL A-DQA1*05:01-B1*02:01L HLA-DRB4*01:01L HLA-DPA1*01:03-B1*04:01L HLA-DQA1*05:05-B1*03:116L HLA-DPA1*01:03-B1*04:02L HLA-DRB1*12:0 1L HLA-DPA1*02:01-B1*13:01L HLA-DPA1*03:01-B1*105:01L
  REGION 1..10: note = CONT. FROM ABOVE: HLA-DPA1*01:03-B1*104:01L HLA-DPA1*01:02-B1*04 :01L HLA-DRB1*10:01L HLA-DRB1*16:01L HLA-DQA1*01:03-B1*06:01L HL A-DRB1*08:02L HLA-DQA1*02:01-B1*03:03L HLA-DRB1*15:03L
LTNDNTSRYW

SEQ ID NO: 11280 - protein, 11 aa, Severe acute respiratory syndrome coronavirus 2
  REGION 1..11: note = Table B: HLA-DQA1*05:01-B1*03:01L HLA-DRB1*01:03L HLA-DRB1*01:02L HLA-DPA1*01:03-B1*03:01L HLA-DRB1*14:01L HLA-DRB1*14:02L HLA-DRB1*08:01L HLA-DRB1*11:01L HLA-DRB1*12:01L HLA-DPA1*01:03-B1*104:01L HLA-DQA1*05:05-B1*03:01L
  REGION 1..11: note = CONT. FROM ABOVE: HLA-DRB1*04:08L
RYWEPEFYEAM

SEQ ID NO: 11281 - protein, 10 aa, Severe acute respiratory syndrome coronavirus 2
  REGION 1..10: note = Table B: HLA-DQA1*05:01-B1*03:01L HLA-DPA1*01:03-B1*03:01L HLA-DPA1*03:01-B1*04:02L HLA-DRB1*11:02L HLA-DQA1*01-B1*05L HLA-DQA1*05:05-B1*03:19M HLA-DQA1*05:01-B1*02:01L HLA-DRB4*01:01L HLA-DPA1*01:03-B1*04:01L
  REGION 1..10: note = CONT. FROM ABOVE: HLA-DPA1*01:03-B1*104:01L HLA-DRB1*16:01L
WEPEFYEAMY

SEQ ID NO: 11282 - protein, 14 aa, Severe acute respiratory syndrome coronavirus 2
  REGION 1..14: note = Table B: HLA-DQA1*05:01-B1*03:01L HLA-DRB1*01:02L HLA-DPA1*03:01-B1*105:01L HLA-DQA1*05:05-B1*03:01L
VGACVLCNSQTSLR

SEQ ID NO: 11283 - protein, 14 aa, Severe acute respiratory syndrome coronavirus 2
  REGION 1..14: note = Table B: HLA-DQA1*05:01-B1*03:01L HLA-DRB1*13:02L HLA-DRB1*01:03L HLA-DRB1*04:02L HLA-DRB1*04:04L HLA-DRB1*04:05L HLA-DRB1*01:02L HLA-DPA1*01:03-B1*03:01L HLA-DRB1*14:01L HLA-DQA1*05:05-B1*03:19L HLA-DRB1*12:01L
  REGION 1..14: note = CONT. FROM ABOVE: HLA-DQA1*03:01-B1*03:02L HLA-DPA1*01:03-B1*02: 01L HLA-DPA1*01:03-B1*104:01L HLA-DQA1*05:05-B1*03:01L HLA-DRB1* 16:01L HLA-DRB1*04:08L HLA-DRB1*15:03L
LVLSVNPYVCNAPG

SEQ ID NO: 11284 - protein, 12 aa, Severe acute respiratory syndrome coronavirus 2
  REGION 1..12: note = Table B: HLA-DQA1*05:01-B1*03:01L HLA-DRB1*04:03L HLA-DPA1*03:01-B1*04:02L HLA-DRB1*12:01L
DVTQLYLGGMSY

SEQ ID NO: 11285 - protein, 10 aa, Severe acute respiratory syndrome coronavirus 2
  REGION 1..10: note = Table B: HLA-DQA1*05:01-B1*03:01L HLA-DRB1*13:03L HLA-DRB1*01:03L HLA-DQA1*01:02-B1*06:02M HLA-DRB1*08:77L HLA-DPA1*01:03-B1*03:01L HLA-DPA1*03:01-B1*04:02L HLA-DRB1*03:01L HLA-DRB1*14:01L HLA-DRB1*11:02L HLA-DRB1*14:02L
  REGION 1..10: note = CONT. FROM ABOVE: HLA-DQA1*01-B1*05L HLA-DQA1*05:05-B1*03:19M HL A-DQA1*05:01-B1*02:01L HLA-DRB4*01:01L HLA-DPA1*01:03-B1*04:01L HLA-DQA1*05:05-B1*03:116L HLA-DPA1*01:03-B1*04:02L HLA-DRB1*12:0 1L HLA-DPA1*02:01-B1*13:01L HLA-DPA1*03:01-B1*105:01L
  REGION 1..10: note = CONT. FROM ABOVE: HLA-DPA1*01:03-B1*104:01L HLA-DQA1*05:05-B1*03 :01L HLA-DRB1*10:01L HLA-DRB1*16:01L HLA-DQA1*01:03-B1*06:01L HL A-DRB1*08:02L HLA-DQA1*02:01-B1*03:03L HLA-DRB1*15:03L
QLYLGGMSYY

SEQ ID NO: 11286 - protein, 13 aa, Severe acute respiratory syndrome coronavirus 2
  REGION 1..13: note = Table B: HLA-DQA1*05:01-B1*03:01L HLA-DRB1*13:02L HLA-DRB1*13:03L HLA-DRB1*04:02L HLA-DRB1*08:04L HLA-DRB1*12:01L HLA-DRB3*01:01L HLA-DPA1*02:01-B1*13:01L HLA-DQA1*01:03-B1*06:01L HLA-DRB1*08:03L HLA-DRB1*15:03L
GGMSYYCKSHKPP

SEQ ID NO: 11287 - protein, 14 aa, Severe acute respiratory syndrome coronavirus 2
  REGION 1..14: note = Table B: HLA-DQA1*05:01-B1*03:01L HLA-DRB1*04:02L HLA-DRB1*11:03L HLA-DPA1*03:01-B1*105:01L HLA-DRB1*08:02L
GMSYYCKSHKPPIS

SEQ ID NO: 11288 - protein, 13 aa, Severe acute respiratory syndrome coronavirus 2
  REGION 1..13: note = Table B: HLA-DQA1*05:01-B1*03:01L HLA-DRB1*04:03L HLA-DRB1*13:02L HLA-DRB1*13:03L HLA-DRB1*01:03L HLA-DRB1*04:02L HLA-DRB1*04:04L HLA-DRB1*04:05L HLA-DQA1*01:02-B1*06:02L HLA-DRB1*08:04L HLA-DRB3*02:01L HLA-DPA1*03:01-B1*04:02L
  REGION 1..13: note = CONT. FROM ABOVE: HLA-DRB1*14:01L HLA-DRB1*11:03L HLA-DRB1*11:04 L HLA-DRB1*08:01L HLA-DRB1*11:01L HLA-DQA1*01-B1*05L HLA-DPA1*01 :03-B1*04:02L HLA-DRB1*12:01L HLA-DRB3*01:01L HLA-DPA1*03:01-B1* 105:01L HLA-DQA1*03:01-B1*03:02L HLA-DQA1*05:05-B1*03:01L
  REGION 1..13: note = CONT. FROM ABOVE: HLA-DRB1*14:17L HLA-DPA1*01:02-B1*04:01L HLA-D QA1*01:03-B1*06:01L HLA-DRB1*04:08L HLA-DRB1*08:03L HLA-DQA1*02: 01-B1*03:03L HLA-DRB1*15:01L
GQVFGLYKNTCVG

SEQ ID NO: 11289 - protein, 14 aa, Severe acute respiratory syndrome coronavirus 2
  REGION 1..14: note = Table B: HLA-DQA1*05:01-B1*03:01L HLA-DRB1*13:03L HLA-DRB1*01:03L HLA-DQA1*01:02-B1*06:02L HLA-DQA1*01:01-B1*05:01L HLA-DRB1*12:01L HLA-DPA1*02:01-B1*13:01L HLA-DPA1*03:01-B1*105:01L
  REGION 1..14: note = CONT. FROM ABOVE: HLA-DQA1*05:05-B1*03:01L
VGSDNVTDFNAIAT

SEQ ID NO: 11290 - protein, 14 aa, Severe acute respiratory syndrome coronavirus 2
  REGION 1..14: note = Table B: HLA-DQA1*05:01-B1*03:01L HLA-DPA1*03:01-B1*04:02L HLA-DQA1*05:05-B1*03:19L HLA-DPA1*01:03-B1*04:02L HLA-DQA1*05:05-B1*03:01L HLA-DQA1*02:01-B1*03:03L
DFNAIATCDWTNAG

SEQ ID NO: 11291 - protein, 12 aa, Severe acute respiratory syndrome coronavirus 2
  REGION 1..12: note = Table B: HLA-DQA1*05:01-B1*03:01L HLA-DRB1*13:02L HLA-DRB1*01:03L HLA-DRB1*04:05L HLA-DRB1*14:01L HLA-DRB1*12:01L HLA-DPA1*03:01-B1*105:01L HLA-DRB1*16:01L HLA-DRB1*04:08L
YILANTCTERLK

SEQ ID NO: 11292 - protein, 13 aa, Severe acute respiratory syndrome coronavirus 2
  REGION 1..13: note = Table B: HLA-DQA1*05:01-B1*03:01L HLA-DRB1*13:02L HLA-DRB1*04:02L HLA-DRB1*04:04L HLA-DRB3*02:01L HLA-DRB1*14:01L HLA-DRB3*01:01L HLA-DPA1*02:01-B1*13:01L HLA-DPA1*03:01-B1*105:01L
TERLKLFAAETLK

SEQ ID NO: 11293 - protein, 14 aa, Severe acute respiratory syndrome coronavirus 2
  REGION 1..14: note = Table B: HLA-DQA1*05:01-B1*03:01L HLA-DRB1*13:02L HLA-DRB1*01:01L
ERLKLFAAETLKAT

SEQ ID NO: 11294 - protein, 10 aa, Severe acute respiratory syndrome coronavirus 2
  REGION 1..10: note = Table B: HLA-DQA1*05:01-B1*03:01L HLA-DRB1*04:03L HLA-DRB1*13:02L HLA-DRB1*13:03L HLA-DRB1*01:03M HLA-DRB1*04:02L HLA-DRB1*04:05L HLA-DQA1*01:02-B1*06:02M HLA-DRB4*03:01NL HLA-DRB1*08:77H HLA-DPA1*01:03-B1*03:01H
  REGION 1..10: note = CONT. FROM ABOVE: HLA-DPA1*03:01-B1*04:02L HLA-DRB1*03:01M HLA-D RB1*11:02H HLA-DRB1*11:03M HLA-DRB1*11:04L HLA-DRB1*14:02L HLA-D RB1*11:01L HLA-DRB5*01:01L HLA-DQA1*01-B1*05H HLA-DQA1*05:05-B1* 03:19H HLA-DQA1*05:01-B1*02:01H HLA-DRB4*01:01M
  REGION 1..10: note = CONT. FROM ABOVE: HLA-DPA1*01:03-B1*04:01M HLA-DQA1*05:05-B1*03: 116M HLA-DPA1*01:03-B1*04:02L HLA-DRB1*12:01M HLA-DPA1*03:01-B1* 105:01L HLA-DRB1*14:54L HLA-DPA1*01:03-B1*104:01H HLA-DPA1*01:02 -B1*04:01L HLA-DRB1*10:01M HLA-DRB1*16:01H HLA-DRB1*08:02L
  REGION 1..10: note = CONT. FROM ABOVE: HLA-DQA1*02:01-B1*03:03L HLA-DRB1*15:03L
ATEETFKLSY

SEQ ID NO: 11295 - protein, 12 aa, Severe acute respiratory syndrome coronavirus 2
  REGION 1..12: note = Table B: HLA-DQA1*05:01-B1*03:01L HLA-DRB1*01:03L HLA-DRB1*01:01L HLA-DRB1*01:02L HLA-DPA1*03:01-B1*105:01L HLA-DRB1*16:01L HLA-DRB1*04:08L HLA-DRB1*15:03L
TFKLSYGIATVR

SEQ ID NO: 11296 - protein, 10 aa, Severe acute respiratory syndrome coronavirus 2
  REGION 1..10: note = Table B: HLA-DQA1*05:01-B1*03:01L HLA-DQA1*03:01-B1*03:02L HLA-DQA1*02:01-B1*03:03L
SWEVGKPRPP

SEQ ID NO: 11297 - protein, 10 aa, Severe acute respiratory syndrome coronavirus 2
  REGION 1..10: note = Table B: HLA-DQA1*05:01-B1*03:01L HLA-DQA1*03:01-B1*03:02L HLA-DQA1*01:03-B1*06:01L HLA-DQA1*02:01-B1*03:03L
EVGKPRPPLN

SEQ ID NO: 11298 - protein, 10 aa, Severe acute respiratory syndrome coronavirus 2
  REGION 1..10: note = Table B: HLA-DQA1*05:01-B1*03:01L HLA-DRB1*13:02L HLA-DRB1*13:03L HLA-DRB1*01:03L HLA-DQA1*01:02-B1*06:02M HLA-DPA1*01:03-B1*03:01L HLA-DRB1*03:01L HLA-DRB1*14:01L HLA-DRB1*14:02L HLA-DRB1*08:01L HLA-DRB1*11:01L HLA-DRB5*01:01L
  REGION 1..10: note = CONT. FROM ABOVE: HLA-DQA1*01-B1*05L HLA-DQA1*05:01-B1*02:01L HL A-DPA1*01:03-B1*04:01L HLA-DRB3*01:01L HLA-DPA1*03:01-B1*105:01L HLA-DRB1*16:01L HLA-DQA1*02:01-B1*03:03L HLA-DRB1*15:03L
KPRPPLNRNY

SEQ ID NO: 11299 - protein, 10 aa, Severe acute respiratory syndrome coronavirus 2
  REGION 1..10: note = Table B: HLA-DQA1*05:01-B1*03:01L HLA-DRB1*13:02L HLA-DRB1*13:03L HLA-DRB1*01:03L HLA-DRB1*04:02L HLA-DQA1*01:02-B1*06:02L HLA-DRB1*01:01L HLA-DRB1*01:02L HLA-DRB4*03:01NL HLA-DRB3*02:01L HLA-DPA1*03:01-B1*04:02L
  REGION 1..10: note = CONT. FROM ABOVE: HLA-DRB1*14:01L HLA-DRB1*11:04L HLA-DRB1*08:01 L HLA-DRB1*11:01L HLA-DPA1*01:03-B1*04:01L HLA-DPA1*01:03-B1*04: 02L HLA-DRB1*12:01L HLA-DRB3*01:01L HLA-DPA1*03:01-B1*105:01L HL A-DQA1*03:01-B1*03:02L HLA-DQA1*05:05-B1*03:01L HLA-DRB1*14:17L
  REGION 1..10: note = CONT. FROM ABOVE: HLA-DPA1*01:02-B1*04:01L HLA-DRB1*16:01L HLA-D QA1*01:03-B1*06:01L HLA-DRB1*04:08L HLA-DQA1*02:01-B1*03:03L HLA -DRB1*15:03L
YVFTGYRVTK

SEQ ID NO: 11300 - protein, 10 aa, Severe acute respiratory syndrome coronavirus 2
  REGION 1..10: note = Table B: HLA-DQA1*05:01-B1*03:01L HLA-DRB1*04:03L HLA-DRB1*13:02L HLA-DRB1*13:03L HLA-DRB1*01:03L HLA-DRB1*04:02L HLA-DRB1*04:05L HLA-DRB1*01:02L HLA-DRB4*03:01NL HLA-DRB1*08:77L HLA-DRB1*14:01L HLA-DRB1*11:03L HLA-DRB1*11:04L HLA-DRB1*08:01L
  REGION 1..10: note = CONT. FROM ABOVE: HLA-DRB1*12:01L HLA-DRB3*01:01L HLA-DQA1*03:01 -B1*03:02L HLA-DRB1*14:17L HLA-DPA1*01:02-B1*04:01L HLA-DRB1*07: 01L HLA-DRB1*16:01L HLA-DRB1*04:08L HLA-DQA1*02:01-B1*03:03L HLA -DRB1*15:03L
YRVTKNSKVQ

SEQ ID NO: 11301 - protein, 12 aa, Severe acute respiratory syndrome coronavirus 2
  REGION 1..12: note = Table B: HLA-DQA1*05:01-B1*03:01L HLA-DRB1*13:02L HLA-DRB1*01:02L HLA-DPA1*01:03-B1*03:01L HLA-DPA1*03:01-B1*04:02L HLA-DRB1*12:01L HLA-DPA1*02:01-B1*13:01L HLA-DPA1*03:01-B1*105:01L
  REGION 1..12: note = CONT. FROM ABOVE: HLA-DQA1*03:01-B1*03:02L HLA-DPA1*01:03-B1*104 :01L HLA-DQA1*05:05-B1*03:01L HLA-DPA1*01:02-B1*04:01L HLA-DRB1* 16:01L HLA-DQA1*01:03-B1*06:01L HLA-DRB1*15:03L
VTKNSKVQIGEY

SEQ ID NO: 11302 - protein, 14 aa, Severe acute respiratory syndrome coronavirus 2
  REGION 1..14: note = Table B: HLA-DQA1*05:01-B1*03:01L HLA-DRB1*01:02L HLA-DPA1*03:01-B1*105:01L HLA-DRB1*15:03L
NSKVQIGEYTFEKG

SEQ ID NO: 11303 - protein, 12 aa, Severe acute respiratory syndrome coronavirus 2
  REGION 1..12: note = Table B: HLA-DQA1*05:01-B1*03:01L HLA-DQA1*01:02-B1*06:02L HLA-DRB1*01:02L HLA-DRB1*08:01L HLA-DQA1*05:05-B1*03:19L HLA-DRB1*04:10L HLA-DRB1*12:01L HLA-DQA1*05:05-B1*03:01L HLA-DRB1*10:01L HLA-DQA1*01:03-B1*06:01L HLA-DRB1*04:08L
  REGION 1..12: note = CONT. FROM ABOVE: HLA-DRB1*15:03L
EYTFEKGDYGDA

SEQ ID NO: 11304 - protein, 12 aa, Severe acute respiratory syndrome coronavirus 2
  REGION 1..12: note = Table B: HLA-DQA1*05:01-B1*03:01L HLA-DQA1*01:02-B1*06:02L HLA-DRB1*08:77L HLA-DPA1*03:01-B1*04:02L HLA-DRB1*14:02L HLA-DPA1*01:03-B1*04:01L HLA-DPA1*01:03-B1*04:02L HLA-DRB1*12:01L HLA-DPA1*02:01-B1*13:01L
  REGION 1..12: note = CONT. FROM ABOVE: HLA-DPA1*03:01-B1*105:01L HLA-DPA1*01:02-B1*04 :01L HLA-DQA1*01:03-B1*06:01L HLA-DQA1*02:01-B1*03:03L HLA-DRB1* 15:03L
FEKGDYGDAVVY

SEQ ID NO: 11305 - protein, 12 aa, Severe acute respiratory syndrome coronavirus 2
  REGION 1..12: note = Table B: HLA-DQA1*05:01-B1*03:01L HLA-DRB1*01:03L HLA-DRB1*01:02L HLA-DQA1*05:05-B1*03:19L HLA-DQA1*05:01-B1*02:01L HLA-DPA1*01:03-B1*04:02L HLA-DPA1*03:01-B1*105:01L HLA-DQA1*05:05-B1*03:01L
  REGION 1..12: note = CONT. FROM ABOVE: HLA-DRB1*04:08L
DYGDAVVYRGTT

SEQ ID NO: 11306 - protein, 11 aa, Severe acute respiratory syndrome coronavirus 2
  REGION 1..11: note = Table B: HLA-DQA1*05:01-B1*03:01L HLA-DRB1*13:03L HLA-DRB1*01:03L HLA-DQA1*01:02-B1*06:02L HLA-DRB4*03:01NL HLA-DQA1*01:01-B1*05:01L HLA-DQA1*01-B1*05L HLA-DQA1*05:05-B1*03:19L HLA-DQA1*05:01-B1*02:01L
  REGION 1..11: note = CONT. FROM ABOVE: HLA-DQA1*05:05-B1*03:01L HLA-DRB1*14:17L HLA-D RB1*16:01L HLA-DQA1*01:03-B1*06:01L
GDAVVYRGTTT

SEQ ID NO: 11307 - protein, 10 aa, Severe acute respiratory syndrome coronavirus 2
  REGION 1..10: note = Table B: HLA-DQA1*05:01-B1*03:01L HLA-DRB1*04:01L HLA-DRB1*04:03L HLA-DRB1*13:02L HLA-DRB1*13:03L HLA-DRB1*01:03L HLA-DRB1*04:02L HLA-DRB1*04:04L HLA-DRB1*01:01L HLA-DRB1*01:02L HLA-DRB4*03:01NL HLA-DRB3*02:01L HLA-DRB1*14:01L HLA-DRB1*11:04L
  REGION 1..10: note = CONT. FROM ABOVE: HLA-DRB1*08:01L HLA-DRB1*11:01L HLA-DRB5*01:01 L HLA-DRB1*13:01L HLA-DRB1*12:01L HLA-DRB1*12:02L HLA-DRB3*01:01 L HLA-DQA1*03:01-B1*03:02M HLA-DQA1*05:05-B1*03:01L HLA-DRB1*14: 17L HLA-DRB1*16:01L HLA-DQA1*02:01-B1*03:03L HLA-DRB1*15:01L
  REGION 1..10: note = CONT. FROM ABOVE: HLA-DRB1*15:03L
VVYRGTTTYK

SEQ ID NO: 11308 - protein, 11 aa, Severe acute respiratory syndrome coronavirus 2
  REGION 1..11: note = Table B: HLA-DQA1*05:01-B1*03:01L HLA-DRB1*13:02L HLA-DRB1*01:03L HLA-DRB3*02:01L HLA-DPA1*03:01-B1*105:01L HLA-DPA1*01:02-B1*04:01L HLA-DRB1*07:01L HLA-DRB1*04:08L
VYRGTTTYKLN

SEQ ID NO: 11309 - protein, 12 aa, Severe acute respiratory syndrome coronavirus 2
  REGION 1..12: note = Table B: HLA-DQA1*05:01-B1*03:01L HLA-DRB1*04:03L HLA-DRB1*13:02L HLA-DRB1*01:03L HLA-DRB1*04:02L HLA-DRB1*04:05L HLA-DQA1*01:02-B1*06:02L HLA-DRB3*02:01L HLA-DRB1*14:01L HLA-DRB1*12:01L HLA-DPA1*03:01-B1*105:01L
  REGION 1..12: note = CONT. FROM ABOVE: HLA-DQA1*05:05-B1*03:01L HLA-DPA1*01:02-B1*04: 01L HLA-DRB1*07:01L HLA-DQA1*01:03-B1*06:01L HLA-DRB1*04:08L
YRGTTTYKLNVG

SEQ ID NO: 11310 - protein, 12 aa, Severe acute respiratory syndrome coronavirus 2
  REGION 1..12: note = Table B: HLA-DQA1*05:01-B1*03:01L HLA-DRB1*13:02L HLA-DRB1*01:03L HLA-DQA1*01:02-B1*06:02L HLA-DRB1*01:01L HLA-DRB3*02:01L HLA-DPA1*03:01-B1*04:02L HLA-DRB1*14:02L HLA-DQA1*05:05-B1*03:19L HLA-DQA1*05:01-B1*02:01L
  REGION 1..12: note = CONT. FROM ABOVE: HLA-DPA1*03:01-B1*105:01L HLA-DQA1*05:05-B1*03 :01L HLA-DPA1*01:02-B1*04:01L HLA-DRB1*07:01L HLA-DQA1*01:03-B1* 06:01L HLA-DRB1*04:08L
YFVLTSHTVMPL

SEQ ID NO: 11311 - protein, 12 aa, Severe acute respiratory syndrome coronavirus 2
  REGION 1..12: note = Table B: HLA-DQA1*05:01-B1*03:01L HLA-DRB1*13:02L HLA-DQA1*01:02-B1*06:02L HLA-DRB1*01:02L HLA-DPA1*03:01-B1*04:02L HLA-DQA1*05:01-B1*02:01L HLA-DPA1*03:01-B1*105:01L HLA-DRB1*14:54L
  REGION 1..12: note = CONT. FROM ABOVE: HLA-DPA1*01:02-B1*04:01L
FVLTSHTVMPLS

SEQ ID NO: 11312 - protein, 13 aa, Severe acute respiratory syndrome coronavirus 2
  REGION 1..13: note = Table B: HLA-DQA1*05:01-B1*03:01L HLA-DQA1*05:01-B1*02:01L HLA-DPA1*03:01-B1*105:01L HLA-DQA1*05:05-B1*03:01L
VLTSHTVMPLSAP

SEQ ID NO: 11313 - protein, 12 aa, Severe acute respiratory syndrome coronavirus 2
  REGION 1..12: note = Table B: HLA-DQA1*05:01-B1*03:01L HLA-DRB1*04:03L HLA-DRB1*01:03L HLA-DRB1*04:02L HLA-DRB1*01:01L HLA-DRB1*01:02L HLA-DRB4*03:01NL HLA-DRB1*08:77L HLA-DRB1*11:03L HLA-DQA1*05:05-B1*03:19L HLA-DRB1*12:01L HLA-DRB1*14:54L
  REGION 1..12: note = CONT. FROM ABOVE: HLA-DQA1*05:05-B1*03:01L HLA-DRB1*14:17L HLA-D RB1*10:01L HLA-DRB1*16:01L HLA-DQA1*02:01-B1*03:03L HLA-DRB1*15: 03L
VMPLSAPTLVPQ

SEQ ID NO: 11314 - protein, 13 aa, Severe acute respiratory syndrome coronavirus 2
  REGION 1..13: note = Table B: HLA-DQA1*05:01-B1*03:01L HLA-DRB1*01:03L HLA-DRB1*04:02L HLA-DRB1*04:05L HLA-DQA1*01:01-B1*05:01L HLA-DQA1*05:05-B1*03:19L HLA-DQA1*05:01-B1*02:01L HLA-DPA1*03:01-B1*105:01L HLA-DRB1*14:17L HLA-DRB1*16:01L
MPLSAPTLVPQEH

SEQ ID NO: 11315 - protein, 10 aa, Severe acute respiratory syndrome coronavirus 2
  REGION 1..10: note = Table B: HLA-DQA1*05:01-B1*03:01L HLA-DRB1*04:03L HLA-DRB1*13:03M HLA-DRB1*01:03L HLA-DRB1*04:02L HLA-DQA1*01:02-B1*06:02M HLA-DRB4*03:01NL HLA-DRB1*08:77L HLA-DPA1*01:03-B1*03:01L HLA-DPA1*03:01-B1*04:02L
  REGION 1..10: note = CONT. FROM ABOVE: HLA-DRB1*03:01L HLA-DRB1*14:01L HLA-DRB1*11:03 L HLA-DRB1*14:02L HLA-DQA1*01-B1*05L HLA-DQA1*05:05-B1*03:19L HL A-DQA1*05:01-B1*02:01L HLA-DPA1*01:03-B1*04:01L HLA-DPA1*01:03-B 1*04:02L HLA-DRB1*12:01L HLA-DPA1*02:01-B1*13:01L
  REGION 1..10: note = CONT. FROM ABOVE: HLA-DPA1*03:01-B1*105:01M HLA-DPA1*01:03-B1*10 4:01L HLA-DPA1*01:02-B1*04:01L HLA-DRB1*10:01L HLA-DRB1*16:01L H LA-DQA1*01:03-B1*06:01L HLA-DRB1*08:02L HLA-DQA1*02:01-B1*03:03L HLA-DRB1*15:03L
APTLVPQEHY

SEQ ID NO: 11316 - protein, 12 aa, Severe acute respiratory syndrome coronavirus 2
  REGION 1..12: note = Table B: HLA-DQA1*05:01-B1*03:01L HLA-DRB1*13:03L HLA-DRB1*01:03L HLA-DRB1*04:05L HLA-DRB1*01:02L HLA-DRB1*14:01L HLA-DRB1*08:01L HLA-DQA1*01-B1*05L HLA-DRB1*12:01L HLA-DPA1*03:01-B1*105:01L HLA-DPA1*01:02-B1*04:01L
  REGION 1..12: note = CONT. FROM ABOVE: HLA-DRB1*16:01L HLA-DRB1*04:08L HLA-DRB1*15:03 L
EHYVRITGLYPT

SEQ ID NO: 11317 - protein, 11 aa, Severe acute respiratory syndrome coronavirus 2
  REGION 1..11: note = Table B: HLA-DQA1*05:01-B1*03:01L HLA-DQA1*01:02-B1*06:02L HLA-DPA1*03:01-B1*105:01L HLA-DQA1*05:05-B1*03:01L HLA-DQA1*01:03-B1*06:01L HLA-DQA1*02:01-B1*03:03L
VRITGLYPTLN

SEQ ID NO: 11318 - protein, 16 aa, Severe acute respiratory syndrome coronavirus 2
  REGION 1..16: note = Table B: HLA-DQA1*05:01-B1*03:01L HLA-DRB1*01:03L HLA-DRB1*08:04L HLA-DPA1*01:03-B1*03:01L HLA-DQA1*05:05-B1*03:19L HLA-DPA1*01:03-B1*04:02L HLA-DRB1*04:08L
YPTLNISDEFSSNVAN

SEQ ID NO: 11319 - protein, 11 aa, Severe acute respiratory syndrome coronavirus 2
  REGION 1..11: note = Table B: HLA-DQA1*05:01-B1*03:01L HLA-DRB1*01:03L HLA-DRB1*04:05L HLA-DRB1*01:02L HLA-DPA1*01:02-B1*04:01L HLA-DQA1*01:03-B1*06:01L HLA-DRB1*04:08L
VANYQKVGMQK

SEQ ID NO: 11320 - protein, 12 aa, Severe acute respiratory syndrome coronavirus 2
  REGION 1..12: note = Table B: HLA-DQA1*05:01-B1*03:01L HLA-DRB1*08:77L HLA-DRB1*11:03L HLA-DQA1*05:05-B1*03:19L HLA-DRB1*10:01L HLA-DRB1*15:03L
YSTLQGPPGTGK

SEQ ID NO: 11321 - protein, 12 aa, Severe acute respiratory syndrome coronavirus 2
  REGION 1..12: note = Table B: HLA-DQA1*05:01-B1*03:01L HLA-DRB1*01:02L HLA-DRB1*04:08L
TLQGPPGTGKSH

SEQ ID NO: 11322 - protein, 10 aa, Severe acute respiratory syndrome coronavirus 2
  REGION 1..10: note = Table B: HLA-DQA1*05:01-B1*03:01L HLA-DRB1*13:03L HLA-DQA1*01:02-B1*06:02L HLA-DRB1*14:01L HLA-DRB5*01:01L HLA-DQA1*01-B1*05L HLA-DPA1*03:01-B1*105:01L
GPPGTGKSHF

SEQ ID NO: 11323 - protein, 12 aa, Severe acute respiratory syndrome coronavirus 2
  REGION 1..12: note = Table B: HLA-DQA1*05:01-B1*03:01L HLA-DQA1*01:02-B1*06:02L HLA-DQA1*05:05-B1*03:19L HLA-DQA1*05:05-B1*03:01L HLA-DQA1*02:01-B1*03:03L
PPGTGKSHFAIG

SEQ ID NO: 11324 - protein, 10 aa, Severe acute respiratory syndrome coronavirus 2
  REGION 1..10: note = Table B: HLA-DQA1*05:01-B1*03:01L HLA-DRB1*04:03L HLA-DRB1*14:01L HLA-DRB1*12:01L HLA-DPA1*03:01-B1*105:01L HLA-DQA1*03:01-B1*03:02L HLA-DPA1*01:02-B1*04:01L HLA-DRB1*16:01L HLA-DQA1*02:01-B1*03:03L HLA-DRB1*15:03L
YYPSARIVYT

SEQ ID NO: 11325 - protein, 10 aa, Severe acute respiratory syndrome coronavirus 2
  REGION 1..10: note = Table B: HLA-DQA1*05:01-B1*03:01L HLA-DRB1*13:03L HLA-DRB1*04:05L HLA-DQA1*01-B1*05L HLA-DPA1*01:02-B1*04:01L HLA-DRB1*16:01L
YPSARIVYTA

SEQ ID NO: 11326 - protein, 11 aa, Severe acute respiratory syndrome coronavirus 2
  REGION 1..11: note = Table B: HLA-DQA1*05:01-B1*03:01L HLA-DQA1*05:05-B1*03:19L HLA-DPA1*03:01-B1*105:01L HLA-DQA1*05:05-B1*03:01L HLA-DQA1*02:01-B1*03:03L
VYTACSHAAVD

SEQ ID NO: 11327 - protein, 14 aa, Severe acute respiratory syndrome coronavirus 2
  REGION 1..14: note = Table B: HLA-DQA1*05:01-B1*03:01L HLA-DRB1*04:05L HLA-DRB1*12:01L HLA-DRB1*16:01L HLA-DRB1*04:08L HLA-DRB1*15:03L
SHAAVDALCEKALK

SEQ ID NO: 11328 - protein, 14 aa, Severe acute respiratory syndrome coronavirus 2
  REGION 1..14: note = Table B: HLA-DQA1*05:01-B1*03:01L HLA-DRB1*13:03L HLA-DRB1*03:01L HLA-DRB1*11:03L HLA-DRB1*07:01L HLA-DRB1*10:01L HLA-DQA1*01:03-B1*06:01L
EKALKYLPIDKCSR

SEQ ID NO: 11329 - protein, 13 aa, Severe acute respiratory syndrome coronavirus 2
  REGION 1..13: note = Table B: HLA-DQA1*05:01-B1*03:01L HLA-DRB1*01:03L HLA-DRB1*01:02L HLA-DRB1*11:04L HLA-DRB1*08:01L HLA-DRB1*11:01L HLA-DQA1*03:01-B1*03:02L HLA-DQA1*05:05-B1*03:01L HLA-DRB1*16:01L HLA-DRB1*04:08L
LPIDKCSRIIPAR

SEQ ID NO: 11330 - protein, 10 aa, Severe acute respiratory syndrome coronavirus 2
  REGION 1..10: note = Table B: HLA-DQA1*05:01-B1*03:01L HLA-DRB1*01:03L HLA-DRB1*01:02L HLA-DRB1*12:01L HLA-DQA1*03:01-B1*03:02L HLA-DRB1*16:01L HLA-DRB1*04:08L HLA-DQA1*02:01-B1*03:03L HLA-DRB1*15:03L
RIIPARARVE

SEQ ID NO: 11331 - protein, 12 aa, Severe acute respiratory syndrome coronavirus 2
  REGION 1..12: note = Table B: HLA-DQA1*05:01-B1*03:01L HLA-DRB1*04:04L HLA-DQA1*01:02-B1*06:02L HLA-DRB1*08:77L HLA-DRB3*02:01L HLA-DPA1*01:03-B1*03:01L HLA-DPA1*03:01-B1*04:02L HLA-DRB1*11:03L HLA-DRB1*14:02L HLA-DQA1*01:01-B1*05:01L
  REGION 1..12: note = CONT. FROM ABOVE: HLA-DRB1*11:01L HLA-DQA1*05:01-B1*02:01L HLA-D RB1*09:01L HLA-DRB1*12:02L HLA-DRB3*01:01L HLA-DPA1*02:01-B1*13: 01L HLA-DPA1*03:01-B1*105:01L HLA-DQA1*05:05-B1*03:01L HLA-DRB1* 10:01L HLA-DRB1*15:03L
FDKFKVNSTLEQ

SEQ ID NO: 11332 - protein, 13 aa, Severe acute respiratory syndrome coronavirus 2
  REGION 1..13: note = Table B: HLA-DQA1*05:01-B1*03:01L HLA-DQA1*01-B1*05L HLA-DQA1*05:05-B1*03:01L
ALPETTADIVVFD

SEQ ID NO: 11333 - protein, 13 aa, Severe acute respiratory syndrome coronavirus 2
  REGION 1..13: note = Table B: HLA-DQA1*05:01-B1*03:01L HLA-DRB1*04:03L HLA-DRB1*01:03L HLA-DRB1*04:05L HLA-DQA1*01:01-B1*05:01L HLA-DQA1*01-B1*05L HLA-DRB1*12:01L HLA-DQA1*05:05-B1*03:01L HLA-DRB1*16:01L HLA-DRB1*04:08L
LPETTADIVVFDE

SEQ ID NO: 11334 - protein, 13 aa, Severe acute respiratory syndrome coronavirus 2
  REGION 1..13: note = Table B: HLA-DQA1*05:01-B1*03:01L HLA-DRB1*04:04L HLA-DRB3*02:01L HLA-DRB1*12:02L HLA-DPA1*03:01-B1*105:01L HLA-DRB1*04:08L
FDEISMATNYDLS

SEQ ID NO: 11335 - protein, 14 aa, Severe acute respiratory syndrome coronavirus 2
  REGION 1..14: note = Table B: HLA-DQA1*05:01-B1*03:01L HLA-DRB1*13:02L HLA-DRB3*02:01L HLA-DPA1*03:01-B1*04:02L
EISMATNYDLSVVN

SEQ ID NO: 11336 - protein, 10 aa, Severe acute respiratory syndrome coronavirus 2
  REGION 1..10: note = Table B: HLA-DQA1*05:01-B1*03:01L HLA-DQA1*03:01-B1*03:02L HLA-DQA1*01:03-B1*06:01L HLA-DQA1*02:01-B1*03:03L
DLSVVNARLR

SEQ ID NO: 11337 - protein, 12 aa, Severe acute respiratory syndrome coronavirus 2
  REGION 1..12: note = Table B: HLA-DQA1*05:01-B1*03:01L HLA-DRB1*13:02L HLA-DQA1*01:02-B1*06:02L HLA-DRB1*01:01L HLA-DRB1*08:77L HLA-DPA1*01:03-B1*03:01L HLA-DPA1*03:01-B1*04:02L HLA-DRB1*14:01L HLA-DRB1*11:03L HLA-DRB1*14:02L
  REGION 1..12: note = CONT. FROM ABOVE: HLA-DQA1*01:01-B1*05:01L HLA-DRB1*11:01L HLA-D RB5*01:01L HLA-DRB1*09:01L HLA-DRB3*01:01L HLA-DPA1*03:01-B1*105 :01L HLA-DQA1*05:05-B1*03:01L HLA-DPA1*01:02-B1*04:01L HLA-DRB1* 07:01L HLA-DRB1*15:03L
AKHYVYIGDPAQ

SEQ ID NO: 11338 - protein, 11 aa, Severe acute respiratory syndrome coronavirus 2
  REGION 1..11: note = Table B: HLA-DQA1*05:01-B1*03:01L HLA-DRB1*04:03L HLA-DRB1*13:02L HLA-DRB1*01:03L HLA-DRB1*04:05L HLA-DQA1*01:02-B1*06:02L HLA-DRB4*03:01NL HLA-DRB1*08:77L HLA-DRB1*11:04L HLA-DRB1*14:02L HLA-DQA1*01:01-B1*05:01L
  REGION 1..11: note = CONT. FROM ABOVE: HLA-DRB1*08:01L HLA-DRB5*01:01L HLA-DQA1*05:05 -B1*03:19L HLA-DQA1*05:01-B1*02:01L HLA-DRB1*04:10L HLA-DRB1*12: 01L HLA-DRB1*12:02L HLA-DRB1*14:54L HLA-DQA1*05:05-B1*03:01L HLA -DRB1*16:01L HLA-DQA1*01:03-B1*06:01L HLA-DRB1*04:08L
IGDPAQLPAPR

SEQ ID NO: 11339 - protein, 11 aa, Severe acute respiratory syndrome coronavirus 2
  REGION 1..11: note = Table B: HLA-DQA1*05:01-B1*03:01L HLA-DRB1*04:03L HLA-DRB1*01:03L HLA-DPA1*01:03-B1*03:01L HLA-DRB1*14:01L HLA-DRB1*14:02L HLA-DRB1*08:01L HLA-DRB1*11:01L HLA-DQA1*01-B1*05L HLA-DQA1*05:05-B1*03:116L HLA-DRB1*09:01L
  REGION 1..11: note = CONT. FROM ABOVE: HLA-DRB1*12:01L HLA-DQA1*05:05-B1*03:01L HLA-D RB1*04:08L HLA-DRB1*08:03L
GTLEPEYFNSV

SEQ ID NO: 11340 - protein, 13 aa, Severe acute respiratory syndrome coronavirus 2
  REGION 1..13: note = Table B: HLA-DQA1*05:01-B1*03:01L HLA-DRB1*13:02L HLA-DRB1*13:03L HLA-DRB1*01:03L HLA-DRB1*04:05L HLA-DQA1*01:02-B1*06:02L HLA-DRB1*01:02L HLA-DRB1*08:04L HLA-DRB1*14:01L HLA-DRB1*08:01L HLA-DRB1*11:01L
  REGION 1..13: note = CONT. FROM ABOVE: HLA-DPA1*02:01-B1*13:01L HLA-DQA1*01:03-B1*06: 01L HLA-DRB1*04:08L HLA-DQA1*02:01-B1*03:03L
EPEYFNSVCRLMK

SEQ ID NO: 11341 - protein, 14 aa, Severe acute respiratory syndrome coronavirus 2
  REGION 1..14: note = Table B: HLA-DQA1*05:01-B1*03:01L HLA-DRB1*01:03L HLA-DRB1*01:02L HLA-DRB1*08:01L HLA-DPA1*03:01-B1*105:01L HLA-DQA1*05:05-B1*03:01L HLA-DRB1*04:08L
FNSVCRLMKTIGPD

SEQ ID NO: 11342 - protein, 15 aa, Severe acute respiratory syndrome coronavirus 2
  REGION 1..15: note = Table B: HLA-DQA1*05:01-B1*03:01L HLA-DRB1*01:03L HLA-DRB1*08:04L HLA-DRB1*08:01L HLA-DRB1*11:01L HLA-DQA1*05:05-B1*03:19L HLA-DPA1*03:01-B1*105:01L HLA-DQA1*05:05-B1*03:01L HLA-DRB1*04:08L
  REGION 1..15: note = CONT. FROM ABOVE: HLA-DQA1*02:01-B1*03:03L
GPDMFLGTCRRCPAE

SEQ ID NO: 11343 - protein, 10 aa, Severe acute respiratory syndrome coronavirus 2
  REGION 1..10: note = Table B: HLA-DQA1*05:01-B1*03:01L HLA-DRB1*04:03L HLA-DRB1*13:03L HLA-DRB1*01:03L HLA-DQA1*01:02-B1*06:02L HLA-DRB4*03:01NL HLA-DRB1*08:77L HLA-DPA1*01:03-B1*03:01M HLA-DRB1*03:01L HLA-DRB1*11:02L HLA-DRB1*14:02L
  REGION 1..10: note = CONT. FROM ABOVE: HLA-DQA1*01-B1*05L HLA-DQA1*05:05-B1*03:19M HL A-DQA1*05:01-B1*02:01M HLA-DRB4*01:01L HLA-DPA1*01:03-B1*04:01L HLA-DQA1*05:05-B1*03:116L HLA-DPA1*01:03-B1*04:02L HLA-DRB1*12:0 1L HLA-DPA1*01:03-B1*104:01L HLA-DRB1*10:01L HLA-DRB1*16:01M
  REGION 1..10: note = CONT. FROM ABOVE: HLA-DRB1*15:03L
IVDTVSALVY

SEQ ID NO: 11344 - protein, 10 aa, Severe acute respiratory syndrome coronavirus 2
  REGION 1..10: note = Table B: HLA-DQA1*05:01-B1*03:01L HLA-DRB1*13:02L HLA-DRB1*13:03L HLA-DRB1*04:02L HLA-DQA1*01:02-B1*06:02L HLA-DRB4*03:01NL HLA-DRB1*08:01L HLA-DRB5*01:01L HLA-DRB1*12:01L HLA-DPA1*03:01-B1*105:01L HLA-DQA1*03:01-B1*03:02L
  REGION 1..10: note = CONT. FROM ABOVE: HLA-DQA1*05:05-B1*03:01L HLA-DRB1*14:17L HLA-D QA1*01:03-B1*06:01L HLA-DQA1*02:01-B1*03:03L
TVSALVYDNK

SEQ ID NO: 11345 - protein, 13 aa, Severe acute respiratory syndrome coronavirus 2
  REGION 1..13: note = Table B: HLA-DQA1*05:01-B1*03:01L HLA-DRB1*04:01L HLA-DRB1*04:04L HLA-DQA1*01:02-B1*06:02L HLA-DRB1*01:01L HLA-DRB3*02:01L HLA-DPA1*01:03-B1*03:01L HLA-DPA1*03:01-B1*04:02L HLA-DPA1*03:01-B1*105:01L
  REGION 1..13: note = CONT. FROM ABOVE: HLA-DRB1*10:01L
VSALVYDNKLKAH

SEQ ID NO: 11346 - protein, 12 aa, Severe acute respiratory syndrome coronavirus 2
  REGION 1..12: note = Table B: HLA-DQA1*05:01-B1*03:01L HLA-DRB1*04:01L HLA-DRB1*04:04L HLA-DQA1*01:02-B1*06:02L HLA-DRB1*01:01L HLA-DRB1*08:04L HLA-DRB1*08:77L HLA-DPA1*01:03-B1*03:01L HLA-DRB1*14:02L HLA-DQA1*05:01-B1*02:01L HLA-DRB1*13:01L
  REGION 1..12: note = CONT. FROM ABOVE: HLA-DPA1*03:01-B1*105:01L HLA-DPA1*01:02-B1*04 :01L HLA-DRB1*10:01L HLA-DQA1*01:03-B1*06:01L HLA-DRB1*08:03L HL A-DQA1*02:01-B1*03:03L
LVYDNKLKAHKD

SEQ ID NO: 11347 - protein, 16 aa, Severe acute respiratory syndrome coronavirus 2
  REGION 1..16: note = Table B: HLA-DQA1*05:01-B1*03:01L HLA-DRB1*12:01L HLA-DPA1*02:01-B1*13:01L HLA-DPA1*03:01-B1*105:01L
AHKDKSAQCFKMFYKG

SEQ ID NO: 11348 - protein, 12 aa, Severe acute respiratory syndrome coronavirus 2
  REGION 1..12: note = Table B: HLA-DQA1*05:01-B1*03:01L HLA-DRB1*04:03L HLA-DRB1*04:02L HLA-DRB1*14:17L HLA-DRB1*16:01L HLA-DQA1*02:01-B1*03:03L
ITHDVSSAINRP

SEQ ID NO: 11349 - protein, 10 aa, Severe acute respiratory syndrome coronavirus 2
  REGION 1..10: note = Table B: HLA-DQA1*05:01-B1*03:01L HLA-DRB1*13:03L HLA-DRB1*01:03L HLA-DQA1*01:02-B1*06:02M HLA-DPA1*01:03-B1*03:01L HLA-DPA1*03:01-B1*04:02L HLA-DRB1*14:01L HLA-DRB1*14:02L HLA-DRB1*08:01L HLA-DRB5*01:01L
  REGION 1..10: note = CONT. FROM ABOVE: HLA-DQA1*01-B1*05L HLA-DQA1*05:01-B1*02:01L HL A-DPA1*01:03-B1*04:01L HLA-DRB3*01:01L HLA-DPA1*02:01-B1*13:01L HLA-DPA1*03:01-B1*105:01M HLA-DPA1*01:02-B1*04:01L HLA-DQA1*01:0 3-B1*06:01L HLA-DQA1*02:01-B1*03:03L HLA-DRB1*15:03L
RPQIGVVREF

SEQ ID NO: 11350 - protein, 13 aa, Severe acute respiratory syndrome coronavirus 2
  REGION 1..13: note = Table B: HLA-DQA1*05:01-B1*03:01L HLA-DRB1*01:03L HLA-DQA1*01:02-B1*06:02L HLA-DRB1*01:02L HLA-DRB1*08:01L HLA-DQA1*05:05-B1*03:19L HLA-DQA1*05:01-B1*02:01L HLA-DRB1*12:01L HLA-DPA1*02:01-B1*13:01L
  REGION 1..13: note = CONT. FROM ABOVE: HLA-DPA1*03:01-B1*105:01L HLA-DQA1*03:01-B1*03 :02L HLA-DPA1*01:02-B1*04:01L HLA-DRB1*16:01L HLA-DQA1*01:03-B1* 06:01L HLA-DRB1*04:08L HLA-DQA1*02:01-B1*03:03L HLA-DRB1*15:03L
NPAWRKAVFISPY

SEQ ID NO: 11351 - protein, 11 aa, Severe acute respiratory syndrome coronavirus 2
  REGION 1..11: note = Table B: HLA-DQA1*05:01-B1*03:01L HLA-DRB1*13:02L HLA-DRB1*01:03L HLA-DRB1*04:05L HLA-DRB1*01:01L HLA-DRB1*01:02L HLA-DRB1*14:54L HLA-DQA1*05:05-B1*03:01L HLA-DRB1*10:01L HLA-DRB1*04:08L HLA-DQA1*02:01-B1*03:03L
PYNSQNAVASK

SEQ ID NO: 11352 - protein, 11 aa, Severe acute respiratory syndrome coronavirus 2
  REGION 1..11: note = Table B: HLA-DQA1*05:01-B1*03:01L
NSQNAVASKIL

SEQ ID NO: 11353 - protein, 11 aa, Severe acute respiratory syndrome coronavirus 2
  REGION 1..11: note = Table B: HLA-DQA1*05:01-B1*03:01L HLA-DRB1*04:03L HLA-DRB1*04:02L HLA-DQA1*01:02-B1*06:02L HLA-DQA1*05:05-B1*03:19L HLA-DQA1*05:05-B1*03:01L
SQNAVASKILG

SEQ ID NO: 11354 - protein, 11 aa, Severe acute respiratory syndrome coronavirus 2
  REGION 1..11: note = Table B: HLA-DQA1*05:01-B1*03:01L HLA-DRB1*04:03L HLA-DQA1*01:02-B1*06:02L HLA-DPA1*03:01-B1*105:01L HLA-DQA1*03:01-B1*03:02L HLA-DRB1*14:17L HLA-DPA1*01:02-B1*04:01L HLA-DQA1*02:01-B1*03:03L
AVASKILGLPT

SEQ ID NO: 11355 - protein, 10 aa, Severe acute respiratory syndrome coronavirus 2
  REGION 1..10: note = Table B: HLA-DQA1*05:01-B1*03:01L HLA-DRB1*13:03L HLA-DRB1*01:03L HLA-DQA1*01:02-B1*06:02L HLA-DRB4*03:01NL HLA-DRB1*08:77M HLA-DPA1*01:03-B1*03:01M HLA-DPA1*03:01-B1*04:02L HLA-DRB1*03:01M HLA-DRB1*11:02M
  REGION 1..10: note = CONT. FROM ABOVE: HLA-DRB1*11:03L HLA-DRB1*11:04L HLA-DRB1*14:02 L HLA-DRB5*01:01L HLA-DQA1*01-B1*05M HLA-DQA1*05:05-B1*03:19M HL A-DQA1*05:01-B1*02:01M HLA-DRB4*01:01L HLA-DPA1*01:03-B1*04:01L HLA-DQA1*05:05-B1*03:116L HLA-DPA1*01:03-B1*04:02L
  REGION 1..10: note = CONT. FROM ABOVE: HLA-DRB1*12:01L HLA-DPA1*01:03-B1*104:01M HLA- DRB1*10:01M HLA-DRB1*16:01M HLA-DRB1*08:02L HLA-DRB1*15:03L
TVDSSQGSEY

SEQ ID NO: 11356 - protein, 13 aa, Severe acute respiratory syndrome coronavirus 2
  REGION 1..13: note = Table B: HLA-DQA1*05:01-B1*03:01L HLA-DRB1*04:03L HLA-DQA1*01:02-B1*06:02L HLA-DRB1*01:02L HLA-DRB1*08:04L HLA-DRB1*08:01L HLA-DQA1*03:01-B1*03:02L HLA-DPA1*01:03-B1*02:01L HLA-DPA1*01:03-B1*104:01L
  REGION 1..13: note = CONT. FROM ABOVE: HLA-DQA1*05:05-B1*03:01L HLA-DQA1*02:01-B1*03: 03L
GSEYDYVIFTQTT

SEQ ID NO: 11357 - protein, 14 aa, Severe acute respiratory syndrome coronavirus 2
  REGION 1..14: note = Table B: HLA-DQA1*05:01-B1*03:01L HLA-DRB1*13:02L HLA-DRB1*01:02L HLA-DRB1*08:04L HLA-DRB1*11:01L HLA-DQA1*05:05-B1*03:19L HLA-DPA1*01:03-B1*104:01L HLA-DQA1*05:05-B1*03:01L
SEYDYVIFTQTTET

SEQ ID NO: 11358 - protein, 11 aa, Severe acute respiratory syndrome coronavirus 2
  REGION 1..11: note = Table B: HLA-DQA1*05:01-B1*03:01L HLA-DRB1*04:01L HLA-DRB1*13:02L HLA-DRB1*04:04L HLA-DQA1*01:02-B1*06:02L HLA-DRB1*01:01L HLA-DRB1*01:02L HLA-DRB1*08:04L HLA-DRB1*08:77L HLA-DRB3*02:01L HLA-DPA1*01:03-B1*03:01L HLA-DRB1*14:01L
  REGION 1..11: note = CONT. FROM ABOVE: HLA-DRB1*11:03L HLA-DRB1*11:04L HLA-DRB1*14:02 L HLA-DRB1*11:01L HLA-DRB5*01:01L HLA-DQA1*05:05-B1*03:19L HLA-D RB4*01:01L HLA-DRB1*09:01L HLA-DRB1*12:02L HLA-DPA1*03:01-B1*105 :01L HLA-DQA1*05:05-B1*03:01L HLA-DRB1*07:01L HLA-DRB1*10:01L
  REGION 1..11: note = CONT. FROM ABOVE: HLA-DQA1*01:03-B1*06:01L HLA-DRB1*08:03L HLA-D RB1*15:03L
IFTQTTETAHS

SEQ ID NO: 11359 - protein, 12 aa, Severe acute respiratory syndrome coronavirus 2
  REGION 1..12: note = Table B: HLA-DQA1*05:01-B1*03:01L HLA-DQA1*05:05-B1*03:19L HLA-DPA1*03:01-B1*105:01L
ETAHSCNVNRFN

SEQ ID NO: 11360 - protein, 12 aa, Severe acute respiratory syndrome coronavirus 2
  REGION 1..12: note = Table B: HLA-DQA1*05:01-B1*03:01L HLA-DRB1*04:03L HLA-DRB1*04:05L HLA-DQA1*01:02-B1*06:02L HLA-DRB1*08:01L HLA-DRB1*12:01L HLA-DRB1*14:17L HLA-DRB1*04:08L HLA-DRB1*15:03L
VNRFNVAITRAK

SEQ ID NO: 11361 - protein, 13 aa, Severe acute respiratory syndrome coronavirus 2
  REGION 1..13: note = Table B: HLA-DQA1*05:01-B1*03:01L HLA-DRB1*13:03L HLA-DRB1*04:04L HLA-DRB1*04:10L HLA-DRB3*01:01L HLA-DPA1*02:01-B1*13:01L
DKLQFTSLEIPRR

SEQ ID NO: 11362 - protein, 10 aa, Severe acute respiratory syndrome coronavirus 2
  REGION 1..10: note = Table B: HLA-DQA1*05:01-B1*03:01L HLA-DQA1*03:01-B1*03:02L HLA-DQA1*01:03-B1*06:01L HLA-DQA1*02:01-B1*03:03L
FTSLEIPRRN

SEQ ID NO: 11363 - protein, 14 aa, Severe acute respiratory syndrome coronavirus 2
  REGION 1..14: note = Table B: HLA-DQA1*05:01-B1*03:01L HLA-DPA1*02:01-B1*13:01L HLA-DPA1*03:01-B1*105:01L HLA-DQA1*02:01-B1*03:03L
VTGLFKDCSKVITG

SEQ ID NO: 11364 - protein, 12 aa, Severe acute respiratory syndrome coronavirus 2
  REGION 1..12: note = Table B: HLA-DQA1*05:01-B1*03:01L HLA-DRB1*04:03L HLA-DRB1*01:02L HLA-DRB1*12:01L HLA-DRB1*14:17L HLA-DRB1*16:01L HLA-DRB1*15:03L
KVITGLHPTQAP

SEQ ID NO: 11365 - protein, 11 aa, Severe acute respiratory syndrome coronavirus 2
  REGION 1..11: note = Table B: HLA-DQA1*05:01-B1*03:01L HLA-DRB1*04:03L HLA-DRB1*04:02L HLA-DRB1*01:02L HLA-DRB4*03:01NL HLA-DQA1*03:01-B1*03:02L HLA-DQA1*05:05-B1*03:01L HLA-DRB1*14:17L HLA-DQA1*02:01-B1*03:03L
ITGLHPTQAPT

SEQ ID NO: 11366 - protein, 10 aa, Severe acute respiratory syndrome coronavirus 2
  REGION 1..10: note = Table B: HLA-DQA1*05:01-B1*03:01L HLA-DRB1*04:03L HLA-DRB1*13:03L HLA-DRB1*01:03L HLA-DRB1*04:02L HLA-DRB4*03:01NL HLA-DQA1*03:01-B1*03:02L HLA-DRB1*14:17L HLA-DRB1*16:01L HLA-DQA1*02:01-B1*03:03L
GLHPTQAPTH

SEQ ID NO: 11367 - protein, 14 aa, Severe acute respiratory syndrome coronavirus 2
  REGION 1..14: note = Table B: HLA-DQA1*05:01-B1*03:01L HLA-DRB1*01:02L HLA-DRB1*08:01L
HPTQAPTHLSVDTK

SEQ ID NO: 11368 - protein, 14 aa, Severe acute respiratory syndrome coronavirus 2
  REGION 1..14: note = Table B: HLA-DQA1*05:01-B1*03:01L HLA-DRB1*04:04L HLA-DRB4*03:01NL HLA-DRB1*08:04L HLA-DRB1*08:77L HLA-DRB3*02:01L HLA-DPA1*01:03-B1*03:01L HLA-DPA1*03:01-B1*04:02L HLA-DRB1*03:01L HLA-DRB1*11:03L HLA-DRB1*11:04L HLA-DRB1*14:02L
  REGION 1..14: note = CONT. FROM ABOVE: HLA-DRB1*11:01L HLA-DQA1*05:01-B1*02:01L HLA-D RB1*04:10L HLA-DRB1*12:02L HLA-DPA1*02:01-B1*13:01L HLA-DPA1*03: 01-B1*105:01L HLA-DPA1*01:02-B1*04:01L HLA-DRB1*10:01L HLA-DRB1* 08:03L HLA-DRB1*15:03L
APTHLSVDTKFKTE

SEQ ID NO: 11369 - protein, 11 aa, Severe acute respiratory syndrome coronavirus 2
  REGION 1..11: note = Table B: HLA-DQA1*05:01-B1*03:01L HLA-DRB1*14:01L
SVDTKFKTEGL

SEQ ID NO: 11370 - protein, 10 aa, Severe acute respiratory syndrome coronavirus 2
  REGION 1..10: note = Table B: HLA-DQA1*05:01-B1*03:01L HLA-DRB1*13:03L HLA-DQA1*01:02-B1*06:02M HLA-DPA1*01:03-B1*03:01L HLA-DQA1*05:05-B1*03:19L HLA-DQA1*05:01-B1*02:01L HLA-DPA1*03:01-B1*105:01L HLA-DRB1*15:03L
IPGIPKDMTY

SEQ ID NO: 11371 - protein, 10 aa, Severe acute respiratory syndrome coronavirus 2
  REGION 1..10: note = Table B: HLA-DQA1*05:01-B1*03:01L HLA-DRB1*14:01L HLA-DRB1*08:01L HLA-DRB3*01:01L HLA-DQA1*03:01-B1*03:02L
IPKDMTYRRL

SEQ ID NO: 11372 - protein, 14 aa, Severe acute respiratory syndrome coronavirus 2
  REGION 1..14: note = Table B: HLA-DQA1*05:01-B1*03:01L HLA-DRB1*13:02L HLA-DRB1*04:02L HLA-DRB1*08:04L HLA-DRB1*14:01L HLA-DRB3*01:01L HLA-DPA1*02:01-B1*13:01L HLA-DPA1*03:01-B1*105:01L HLA-DQA1*03:01-B1*03:02L HLA-DPA1*01:02-B1*04:01L
  REGION 1..14: note = CONT. FROM ABOVE: HLA-DRB1*07:01L HLA-DRB1*10:01L HLA-DQA1*02:01 -B1*03:03L
DMTYRRLISMMGFK

SEQ ID NO: 11373 - protein, 14 aa, Severe acute respiratory syndrome coronavirus 2
  REGION 1..14: note = Table B: HLA-DQA1*05:01-B1*03:01L HLA-DRB1*13:02L HLA-DRB1*04:04L HLA-DRB1*04:05L HLA-DRB1*01:01L HLA-DRB1*14:01L HLA-DRB1*08:01L HLA-DRB3*01:01L HLA-DRB1*07:01L HLA-DQA1*01:03-B1*06:01L HLA-DRB1*15:01L
RRLISMMGFKMNYQ

SEQ ID NO: 11374 - protein, 12 aa, Severe acute respiratory syndrome coronavirus 2
  REGION 1..12: note = Table B: HLA-DQA1*05:01-B1*03:01L HLA-DRB1*14:04L HLA-DRB1*04:01L HLA-DRB1*13:02L HLA-DRB1*13:03L HLA-DRB1*01:03L HLA-DRB1*04:04L HLA-DRB1*04:05L HLA-DQA1*01:02-B1*06:02L HLA-DRB1*01:01L HLA-DRB1*01:02L HLA-DRB4*03:01NL HLA-DRB1*08:04L
  REGION 1..12: note = CONT. FROM ABOVE: HLA-DRB1*08:77L HLA-DRB3*02:01L HLA-DPA1*01:03 -B1*03:01L HLA-DPA1*03:01-B1*04:02L HLA-DRB1*03:01L HLA-DRB1*14: 01M HLA-DRB1*11:02L HLA-DRB1*11:03L HLA-DRB1*11:04L HLA-DRB1*14: 02L HLA-DRB1*08:01L HLA-DRB1*11:01L HLA-DQA1*05:05-B1*03:19L
  REGION 1..12: note = CONT. FROM ABOVE: HLA-DRB1*04:10L HLA-DRB1*09:01L HLA-DPA1*01:03 -B1*04:02L HLA-DRB1*12:01M HLA-DRB1*12:02L HLA-DRB3*01:01L HLA-D PA1*02:01-B1*13:01L HLA-DPA1*03:01-B1*105:01L HLA-DRB1*14:54L HL A-DPA1*01:03-B1*02:01L HLA-DPA1*01:03-B1*104:01L
  REGION 1..12: note = CONT. FROM ABOVE: HLA-DQA1*05:05-B1*03:01L HLA-DPA1*01:02-B1*04: 01L HLA-DRB1*07:01L HLA-DRB1*10:01L HLA-DRB1*16:01L HLA-DQA1*01: 03-B1*06:01L HLA-DRB1*04:08L HLA-DRB1*08:03L HLA-DRB1*15:03L
FKMNYQVNGYPN

SEQ ID NO: 11375 - protein, 12 aa, Severe acute respiratory syndrome coronavirus 2
  REGION 1..12: note = Table B: HLA-DQA1*05:01-B1*03:01L HLA-DRB1*04:03L HLA-DRB1*04:02L HLA-DQA1*01:02-B1*06:02L HLA-DQA1*05:01-B1*02:01L HLA-DPA1*03:01-B1*105:01L HLA-DQA1*01:03-B1*06:01L
GYPNMFITREEA

SEQ ID NO: 11376 - protein, 12 aa, Severe acute respiratory syndrome coronavirus 2
  REGION 1..12: note = Table B: HLA-DQA1*05:01-B1*03:01L HLA-DRB1*13:02L HLA-DRB1*01:03L HLA-DQA1*01:02-B1*06:02L HLA-DRB1*01:02L HLA-DRB1*14:01L HLA-DRB1*08:01L HLA-DQA1*05:01-B1*02:01L HLA-DRB1*12:01L HLA-DPA1*03:01-B1*105:01L HLA-DRB1*07:01L
  REGION 1..12: note = CONT. FROM ABOVE: HLA-DQA1*01:03-B1*06:01L HLA-DRB1*04:08L HLA-D RB1*15:03L
PNMFITREEAIR

SEQ ID NO: 11377 - protein, 10 aa, Severe acute respiratory syndrome coronavirus 2
  REGION 1..10: note = Table B: HLA-DQA1*05:01-B1*03:01L HLA-DRB1*01:03L HLA-DRB1*01:02L HLA-DRB1*08:01L HLA-DRB1*12:01L HLA-DQA1*03:01-B1*03:02L HLA-DRB1*14:17L HLA-DPA1*01:02-B1*04:01L HLA-DRB1*16:01L HLA-DRB1*04:08L
  REGION 1..10: note = CONT. FROM ABOVE: HLA-DQA1*02:01-B1*03:03L
FITREEAIRH

SEQ ID NO: 11378 - protein, 13 aa, Severe acute respiratory syndrome coronavirus 2
  REGION 1..13: note = Table B: HLA-DQA1*05:01-B1*03:01L HLA-DRB1*04:03L HLA-DRB1*01:03L HLA-DRB1*04:02L HLA-DRB1*04:04L HLA-DPA1*03:01-B1*105:01L HLA-DQA1*05:05-B1*03:01L HLA-DRB1*04:08L
EAIRHVRAWIGFD

SEQ ID NO: 11379 - protein, 14 aa, Severe acute respiratory syndrome coronavirus 2
  REGION 1..14: note = Table B: HLA-DQA1*05:01-B1*03:01L HLA-DRB1*13:02L HLA-DRB3*02:01L HLA-DRB1*14:02L HLA-DQA1*05:05-B1*03:19L HLA-DQA1*05:01-B1*02:01L HLA-DQA1*05:05-B1*03:01L
AIRHVRAWIGFDVE

SEQ ID NO: 11380 - protein, 16 aa, Severe acute respiratory syndrome coronavirus 2
  REGION 1..16: note = Table B: HLA-DQA1*05:01-B1*03:01L HLA-DRB1*04:01L HLA-DRB1*13:02L HLA-DRB1*04:04L HLA-DRB1*04:05L HLA-DRB1*14:02L HLA-DRB1*08:01L HLA-DRB1*11:01L HLA-DRB3*01:01L HLA-DPA1*02:01-B1*13:01L HLA-DQA1*03:01-B1*03:02L
  REGION 1..16: note = CONT. FROM ABOVE: HLA-DRB1*10:01L HLA-DQA1*01:03-B1*06:01L HLA-D QA1*02:01-B1*03:03L
VRAWIGFDVEGCHATR

SEQ ID NO: 11381 - protein, 13 aa, Severe acute respiratory syndrome coronavirus 2
  REGION 1..13: note = Table B: HLA-DQA1*05:01-B1*03:01L HLA-DRB1*01:02L HLA-DPA1*03:01-B1*105:01L HLA-DQA1*03:01-B1*03:02L HLA-DQA1*05:05-B1*03:01L HLA-DQA1*01:03-B1*06:01L HLA-DRB1*04:08L HLA-DQA1*02:01-B1*03:03L
IGFDVEGCHATRE

SEQ ID NO: 11382 - protein, 12 aa, Severe acute respiratory syndrome coronavirus 2
  REGION 1..12: note = Table B: HLA-DQA1*05:01-B1*03:01L HLA-DQA1*01:02-B1*06:02M HLA-DQA1*03:01-B1*03:02L HLA-DQA1*05:05-B1*03:01L HLA-DQA1*02:01-B1*03:03L
VEGCHATREAVG

SEQ ID NO: 11383 - protein, 11 aa, Severe acute respiratory syndrome coronavirus 2
  REGION 1..11: note = Table B: HLA-DQA1*05:01-B1*03:01L HLA-DRB1*04:03L HLA-DRB1*04:02L HLA-DRB1*14:17L
REAVGTNLPLQ

SEQ ID NO: 11384 - protein, 11 aa, Severe acute respiratory syndrome coronavirus 2
  REGION 1..11: note = Table B: HLA-DQA1*05:01-B1*03:01L HLA-DQA1*01:02-B1*06:02L HLA-DPA1*03:01-B1*105:01L
EAVGTNLPLQL

SEQ ID NO: 11385 - protein, 11 aa, Severe acute respiratory syndrome coronavirus 2
  REGION 1..11: note = Table B: HLA-DQA1*05:01-B1*03:01L HLA-DRB1*04:03L HLA-DQA1*01:02-B1*06:02L HLA-DQA1*05:01-B1*02:01L HLA-DPA1*03:01-B1*105:01L
AVGTNLPLQLG

SEQ ID NO: 11386 - protein, 13 aa, Severe acute respiratory syndrome coronavirus 2
  REGION 1..13: note = Table B: HLA-DQA1*05:01-B1*03:01L HLA-DRB1*13:02L HLA-DRB1*13:03L HLA-DRB1*01:03L HLA-DQA1*01:02-B1*06:02L HLA-DRB1*01:02L HLA-DRB4*03:01NL HLA-DQA1*05:05-B1*03:19L HLA-DRB1*12:01L HLA-DPA1*02:01-B1*13:01L
  REGION 1..13: note = CONT. FROM ABOVE: HLA-DPA1*03:01-B1*105:01L HLA-DRB1*14:54L HLA- DQA1*05:05-B1*03:01L HLA-DRB1*04:08L HLA-DRB1*15:03L
LVAVPTGYVDTPN

SEQ ID NO: 11387 - protein, 13 aa, Severe acute respiratory syndrome coronavirus 2
  REGION 1..13: note = Table B: HLA-DQA1*05:01-B1*03:01L HLA-DRB1*13:03L HLA-DRB1*01:03L HLA-DQA1*01:02-B1*06:02L HLA-DRB4*03:01NL HLA-DQA1*05:05-B1*03:19L HLA-DRB1*12:01L HLA-DPA1*02:01-B1*13:01L HLA-DPA1*03:01-B1*105:01L
  REGION 1..13: note = CONT. FROM ABOVE: HLA-DQA1*05:05-B1*03:01L HLA-DRB1*04:08L HLA-D RB1*15:03L
VAVPTGYVDTPNN

SEQ ID NO: 11388 - protein, 13 aa, Severe acute respiratory syndrome coronavirus 2
  REGION 1..13: note = Table B: HLA-DQA1*05:01-B1*03:01L HLA-DRB1*04:01L HLA-DRB1*13:02L HLA-DRB1*13:03L HLA-DRB1*01:03L HLA-DRB1*04:04L HLA-DRB1*04:05M HLA-DQA1*01:02-B1*06:02L HLA-DRB1*01:02L HLA-DRB4*03:01NL HLA-DRB1*08:04L HLA-DRB1*08:77L HLA-DRB3*02:01L
  REGION 1..13: note = CONT. FROM ABOVE: HLA-DPA1*01:03-B1*03:01L HLA-DPA1*03:01-B1*04: 02L HLA-DRB1*14:01L HLA-DRB1*11:03L HLA-DRB1*11:04L HLA-DRB1*14: 02L HLA-DQA1*01:01-B1*05:01L HLA-DRB1*08:01L HLA-DRB5*01:01L HLA -DQA1*05:05-B1*03:19L HLA-DRB1*13:01L HLA-DRB4*01:01L
  REGION 1..13: note = CONT. FROM ABOVE: HLA-DRB1*04:10M HLA-DRB1*09:01L HLA-DPA1*01:03 -B1*04:02L HLA-DRB1*12:01L HLA-DRB1*12:02L HLA-DRB3*01:01L HLA-D PA1*02:01-B1*13:01L HLA-DPA1*03:01-B1*105:01L HLA-DRB1*14:54L HL A-DPA1*01:03-B1*104:01L HLA-DQA1*05:05-B1*03:01L HLA-DRB1*14:17L
  REGION 1..13: note = CONT. FROM ABOVE: HLA-DPA1*01:02-B1*04:01L HLA-DRB1*07:01L HLA-D RB1*10:01L HLA-DQA1*01:03-B1*06:01L HLA-DRB1*04:08L HLA-DRB1*08: 03L HLA-DRB1*15:03L
VPTGYVDTPNNTD

SEQ ID NO: 11389 - protein, 10 aa, Severe acute respiratory syndrome coronavirus 2
  REGION 1..10: note = Table B: HLA-DQA1*05:01-B1*03:01L HLA-DRB1*13:03L HLA-DQA1*01-B1*05L HLA-DPA1*03:01-B1*105:01L HLA-DPA1*01:02-B1*04:01L
TPNNTDFSRV

SEQ ID NO: 11390 - protein, 12 aa, Severe acute respiratory syndrome coronavirus 2
  REGION 1..12: note = Table B: HLA-DQA1*05:01-B1*03:01L HLA-DRB1*13:03L HLA-DRB1*04:05L HLA-DRB1*01:02L HLA-DRB1*08:01L HLA-DRB1*12:01L HLA-DRB1*16:01L HLA-DRB1*04:08L HLA-DQA1*02:01-B1*03:03L
DFSRVSAKPPPG

SEQ ID NO: 11391 - protein, 11 aa, Severe acute respiratory syndrome coronavirus 2
  REGION 1..11: note = Table B: HLA-DQA1*05:01-B1*03:01L HLA-DPA1*03:01-B1*04:02L HLA-DRB1*12:01L
DQFKHLIPLMY

SEQ ID NO: 11392 - protein, 10 aa, Severe acute respiratory syndrome coronavirus 2
  REGION 1..10: note = Table B: HLA-DQA1*05:01-B1*03:01L HLA-DRB1*04:03L HLA-DRB1*13:02L HLA-DRB1*13:03L HLA-DRB1*01:03M HLA-DQA1*01:02-B1*06:02L HLA-DRB1*01:02L HLA-DPA1*01:03-B1*03:01L HLA-DPA1*03:01-B1*04:02L
  REGION 1..10: note = CONT. FROM ABOVE: HLA-DRB1*14:01L HLA-DRB1*11:04L HLA-DRB1*08:01 L HLA-DRB1*11:01L HLA-DPA1*01:03-B1*04:01L HLA-DPA1*01:03-B1*04: 02L HLA-DRB1*12:01L HLA-DRB3*01:01L HLA-DPA1*03:01-B1*105:01L HL A-DQA1*03:01-B1*03:02L HLA-DPA1*01:03-B1*02:01L
  REGION 1..10: note = CONT. FROM ABOVE: HLA-DQA1*05:05-B1*03:01L HLA-DPA1*01:02-B1*04: 01M HLA-DRB1*16:01L HLA-DQA1*01:03-B1*06:01L HLA-DRB1*04:08M HLA -DQA1*02:01-B1*03:03L HLA-DRB1*15:03L
YKGLPWNVVR

SEQ ID NO: 11393 - protein, 12 aa, Severe acute respiratory syndrome coronavirus 2
  REGION 1..12: note = Table B: HLA-DQA1*05:01-B1*03:01L HLA-DRB1*01:03L HLA-DRB1*01:02L HLA-DPA1*03:01-B1*04:02L HLA-DRB1*14:01L HLA-DRB1*08:01L HLA-DRB1*12:01L HLA-DQA1*03:01-B1*03:02L HLA-DPA1*01:02-B1*04:01L HLA-DRB1*16:01L HLA-DRB1*04:08L
  REGION 1..12: note = CONT. FROM ABOVE: HLA-DQA1*02:01-B1*03:03L
LPWNVVRIKIVQ

SEQ ID NO: 11394 - protein, 12 aa, Severe acute respiratory syndrome coronavirus 2
  REGION 1..12: note = Table B: HLA-DQA1*05:01-B1*03:01L HLA-DRB1*01:03L HLA-DRB1*04:04L HLA-DRB1*04:05L HLA-DQA1*01:02-B1*06:02L HLA-DPA1*03:01-B1*04:02L HLA-DRB1*14:01L HLA-DRB1*04:10L HLA-DPA1*02:01-B1*13:01L HLA-DRB1*04:08L
IKIVQMLSDTLK

SEQ ID NO: 11395 - protein, 11 aa, Severe acute respiratory syndrome coronavirus 2
  REGION 1..11: note = Table B: HLA-DQA1*05:01-B1*03:01L HLA-DRB1*01:03L HLA-DRB1*04:04L HLA-DRB1*04:05L HLA-DQA1*01:02-B1*06:02L HLA-DRB4*03:01NL HLA-DRB1*14:01L HLA-DRB1*04:10L HLA-DRB1*14:54L HLA-DRB1*10:01L HLA-DRB1*04:08L
IVQMLSDTLKN

SEQ ID NO: 11396 - protein, 13 aa, Severe acute respiratory syndrome coronavirus 2
  REGION 1..13: note = Table B: HLA-DQA1*05:01-B1*03:01L HLA-DRB1*01:03L HLA-DRB1*04:04L HLA-DRB1*04:05L HLA-DRB1*08:04L HLA-DRB1*04:10L HLA-DRB1*14:54L HLA-DPA1*01:02-B1*04:01L HLA-DRB1*04:08L
SDTLKNLSDRVVF

SEQ ID NO: 11397 - protein, 11 aa, Severe acute respiratory syndrome coronavirus 2
  REGION 1..11: note = Table B: HLA-DQA1*05:01-B1*03:01L HLA-DRB1*04:03L HLA-DRB1*01:02L HLA-DRB1*14:01L HLA-DQA1*01-B1*05L HLA-DQA1*05:01-B1*02:01L HLA-DPA1*01:03-B1*04:01L HLA-DPA1*01:03-B1*04:02L HLA-DRB1*12:01L
  REGION 1..11: note = CONT. FROM ABOVE: HLA-DPA1*03:01-B1*105:01L HLA-DPA1*01:02-B1*04 :01L HLA-DRB1*16:01L HLA-DQA1*02:01-B1*03:03L
VVFVLWAHGFE

SEQ ID NO: 11398 - protein, 10 aa, Severe acute respiratory syndrome coronavirus 2
  REGION 1..10: note = Table B: HLA-DQA1*05:01-B1*03:01L HLA-DRB1*04:03L HLA-DRB1*13:02L HLA-DRB1*13:03L HLA-DRB1*01:03L HLA-DQA1*01:02-B1*06:02M HLA-DRB4*03:01NL HLA-DRB1*08:77L HLA-DPA1*01:03-B1*03:01L HLA-DPA1*03:01-B1*04:02L
  REGION 1..10: note = CONT. FROM ABOVE: HLA-DRB1*03:01L HLA-DRB1*14:01L HLA-DRB1*11:02 L HLA-DRB1*14:02L HLA-DRB1*11:01L HLA-DQA1*01-B1*05L HLA-DQA1*05 :05-B1*03:19M HLA-DQA1*05:01-B1*02:01M HLA-DRB4*01:01L HLA-DPA1* 01:03-B1*04:01L HLA-DQA1*05:05-B1*03:116L
  REGION 1..10: note = CONT. FROM ABOVE: HLA-DPA1*01:03-B1*04:02L HLA-DRB1*12:01L HLA-D PA1*02:01-B1*13:01L HLA-DPA1*03:01-B1*105:01L HLA-DPA1*01:03-B1* 104:01L HLA-DPA1*01:02-B1*04:01L HLA-DRB1*10:01L HLA-DRB1*16:01L HLA-DQA1*01:03-B1*06:01L HLA-DRB1*08:02L
  REGION 1..10: note = CONT. FROM ABOVE: HLA-DQA1*02:01-B1*03:03M HLA-DRB1*15:03L
HGFELTSMKY

SEQ ID NO: 11399 - protein, 10 aa, Severe acute respiratory syndrome coronavirus 2
  REGION 1..10: note = Table B: HLA-DQA1*05:01-B1*03:01L HLA-DQA1*01:02-B1*06:02L HLA-DPA1*03:01-B1*04:02L HLA-DQA1*05:05-B1*03:19L HLA-DQA1*05:01-B1*02:01L HLA-DPA1*02:01-B1*13:01L HLA-DPA1*03:01-B1*105:01L HLA-DPA1*01:02-B1*04:01L
  REGION 1..10: note = CONT. FROM ABOVE: HLA-DQA1*01:03-B1*06:01L HLA-DQA1*02:01-B1*03: 03L HLA-DRB1*15:03L
GFELTSMKYF

SEQ ID NO: 11400 - protein, 14 aa, Severe acute respiratory syndrome coronavirus 2
  REGION 1..14: note = Table B: HLA-DQA1*05:01-B1*03:01L HLA-DPA1*03:01-B1*105:01L
FSTASDTYACWHHS

SEQ ID NO: 11401 - protein, 12 aa, Severe acute respiratory syndrome coronavirus 2
  REGION 1..12: note = Table B: HLA-DQA1*05:01-B1*03:01L HLA-DRB1*13:03L HLA-DRB1*01:03L HLA-DRB1*04:05L HLA-DRB1*01:02L HLA-DRB1*08:04L HLA-DRB1*14:01L HLA-DPA1*02:01-B1*13:01L HLA-DPA1*03:01-B1*105:01L HLA-DQA1*03:01-B1*03:02L
  REGION 1..12: note = CONT. FROM ABOVE: HLA-DQA1*05:05-B1*03:01L HLA-DPA1*01:02-B1*04: 01L HLA-DRB1*16:01L HLA-DRB1*04:08L HLA-DRB1*08:03L HLA-DQA1*02: 01-B1*03:03L
SDTYACWHHSIG

SEQ ID NO: 11402 - protein, 11 aa, Severe acute respiratory syndrome coronavirus 2
  REGION 1..11: note = Table B: HLA-DQA1*05:01-B1*03:01L HLA-DRB1*04:03L HLA-DQA1*01:02-B1*06:02L HLA-DPA1*03:01-B1*04:02L HLA-DQA1*05:05-B1*03:19L HLA-DPA1*01:03-B1*04:01L HLA-DRB1*12:01L HLA-DPA1*02:01-B1*13:01L
  REGION 1..11: note = CONT. FROM ABOVE: HLA-DPA1*03:01-B1*105:01L HLA-DQA1*03:01-B1*03 :02L HLA-DPA1*01:02-B1*04:01L HLA-DRB1*16:01L HLA-DQA1*01:03-B1* 06:01L HLA-DQA1*02:01-B1*03:03L HLA-DRB1*15:03L
IGFDYVYNPFM

SEQ ID NO: 11403 - protein, 11 aa, Severe acute respiratory syndrome coronavirus 2
  REGION 1..11: note = Table B: HLA-DQA1*05:01-B1*03:01L HLA-DRB1*04:03L HLA-DRB1*13:02L HLA-DRB1*13:03L HLA-DRB1*01:03L HLA-DRB1*04:02L HLA-DRB1*04:05L HLA-DRB1*08:04L HLA-DPA1*01:03-B1*03:01L HLA-DRB1*14:01L HLA-DRB1*08:01L HLA-DQA1*05:01-B1*02:01L
  REGION 1..11: note = CONT. FROM ABOVE: HLA-DPA1*01:03-B1*04:01L HLA-DPA1*01:03-B1*04: 02L HLA-DRB1*12:01L HLA-DQA1*03:01-B1*03:02L HLA-DPA1*01:03-B1*0 2:01L HLA-DQA1*05:05-B1*03:01L HLA-DRB1*14:17L HLA-DRB1*16:01L H LA-DRB1*04:08L
YVYNPFMIDVQ

SEQ ID NO: 11404 - protein, 10 aa, Severe acute respiratory syndrome coronavirus 2
  REGION 1..10: note = Table B: HLA-DQA1*05:01-B1*03:01L HLA-DRB1*13:03L HLA-DRB1*01:03L HLA-DRB1*04:05L HLA-DQA1*01:02-B1*06:02M HLA-DRB1*01:01L HLA-DRB1*08:77L HLA-DPA1*03:01-B1*04:02L HLA-DRB1*14:01L HLA-DRB1*14:02L HLA-DQA1*05:01-B1*02:01L
  REGION 1..10: note = CONT. FROM ABOVE: HLA-DPA1*01:03-B1*04:01L HLA-DQA1*05:05-B1*03: 116L HLA-DPA1*02:01-B1*13:01M HLA-DPA1*03:01-B1*105:01M HLA-DPA1 *01:02-B1*04:01L HLA-DQA1*01:03-B1*06:01L HLA-DQA1*02:01-B1*03:0 3L HLA-DRB1*15:03M
NPFMIDVQQW

SEQ ID NO: 11405 - protein, 13 aa, Severe acute respiratory syndrome coronavirus 2
  REGION 1..13: note = Table B: HLA-DQA1*05:01-B1*03:01L HLA-DRB1*04:03L HLA-DQA1*01:02-B1*06:02L HLA-DQA1*01:01-B1*05:01L HLA-DQA1*05:05-B1*03:19L HLA-DPA1*03:01-B1*105:01L HLA-DQA1*05:05-B1*03:01L HLA-DRB1*16:01L
IDVQQWGFTGNLQ

SEQ ID NO: 11406 - protein, 11 aa, Severe acute respiratory syndrome coronavirus 2
  REGION 1..11: note = Table B: HLA-DQA1*05:01-B1*03:01L HLA-DRB1*04:03L HLA-DQA1*01:02-B1*06:02L HLA-DPA1*03:01-B1*105:01L HLA-DQA1*05:05-B1*03:01L
WGFTGNLQSNH

SEQ ID NO: 11407 - protein, 10 aa, Severe acute respiratory syndrome coronavirus 2
  REGION 1..10: note = Table B: HLA-DQA1*05:01-B1*03:01L HLA-DRB1*04:03L HLA-DRB1*13:03L HLA-DRB1*01:03L HLA-DQA1*01:02-B1*06:02L HLA-DRB1*08:77L HLA-DPA1*01:03-B1*03:01L HLA-DRB1*03:01L HLA-DRB1*11:02L HLA-DRB1*14:02L HLA-DQA1*01-B1*05L
  REGION 1..10: note = CONT. FROM ABOVE: HLA-DQA1*05:05-B1*03:19M HLA-DQA1*05:01-B1*02: 01L HLA-DRB4*01:01L HLA-DPA1*01:03-B1*04:01L HLA-DQA1*05:05-B1*0 3:116L HLA-DPA1*01:03-B1*04:02L HLA-DRB1*12:01L HLA-DPA1*03:01-B 1*105:01L HLA-DPA1*01:03-B1*104:01L HLA-DRB1*10:01L
  REGION 1..10: note = CONT. FROM ABOVE: HLA-DRB1*16:01L HLA-DRB1*08:02L HLA-DQA1*02:01 -B1*03:03L HLA-DRB1*15:03L
GNLQSNHDLY

SEQ ID NO: 11408 - protein, 12 aa, Severe acute respiratory syndrome coronavirus 2
  REGION 1..12: note = Table B: HLA-DQA1*05:01-B1*03:01L HLA-DRB1*01:03L HLA-DRB1*08:01L HLA-DQA1*03:01-B1*03:02L HLA-DRB1*04:08L
HDLYCQVHGNAH

SEQ ID NO: 11409 - protein, 14 aa, Severe acute respiratory syndrome coronavirus 2
  REGION 1..14: note = Table B: HLA-DQA1*05:01-B1*03:01L HLA-DQA1*05:05-B1*03:19L HLA-DQA1*03:01-B1*03:02L HLA-DQA1*05:05-B1*03:01L HLA-DQA1*02:01-B1*03:03L
VHGNAHVASCDAIM

SEQ ID NO: 11410 - protein, 12 aa, Severe acute respiratory syndrome coronavirus 2
  REGION 1..12: note = Table B: HLA-DQA1*05:01-B1*03:01L HLA-DRB1*04:03L HLA-DRB1*01:03L HLA-DRB1*04:05L HLA-DRB1*01:02L HLA-DRB1*14:01L HLA-DRB1*08:01L HLA-DRB1*12:01L HLA-DPA1*03:01-B1*105:01L HLA-DQA1*03:01-B1*03:02L HLA-DRB1*16:01L HLA-DRB1*04:08L
  REGION 1..12: note = CONT. FROM ABOVE: HLA-DRB1*15:03L
DAIMTRCLAVHE

SEQ ID NO: 11411 - protein, 13 aa, Severe acute respiratory syndrome coronavirus 2
  REGION 1..13: note = Table B: HLA-DQA1*05:01-B1*03:01L HLA-DRB1*04:03L HLA-DRB1*13:02L HLA-DRB1*01:03L HLA-DRB1*04:02L HLA-DRB1*04:05L HLA-DQA1*01:02-B1*06:02L HLA-DRB1*08:04L HLA-DRB1*03:01L HLA-DRB1*11:03L HLA-DRB1*11:04L HLA-DRB1*08:01L HLA-DRB1*11:01L
  REGION 1..13: note = CONT. FROM ABOVE: HLA-DRB3*01:01L HLA-DRB1*14:54L HLA-DPA1*01:02 -B1*04:01L HLA-DQA1*01:03-B1*06:01L HLA-DRB1*04:08L HLA-DQA1*02: 01-B1*03:03L
DELKINAACRKVQ

SEQ ID NO: 11412 - protein, 10 aa, Severe acute respiratory syndrome coronavirus 2
  REGION 1..10: note = Table B: HLA-DQA1*05:01-B1*03:01L HLA-DRB1*04:03L HLA-DRB1*13:03L HLA-DRB1*01:03L HLA-DRB1*04:02L HLA-DQA1*03:01-B1*03:02L HLA-DRB1*14:17L HLA-DRB1*16:01L HLA-DQA1*01:03-B1*06:01L HLA-DQA1*02:01-B1*03:03L
VVKAALLADK

SEQ ID NO: 11413 - protein, 15 aa, Severe acute respiratory syndrome coronavirus 2
  REGION 1..15: note = Table B: HLA-DQA1*05:01-B1*03:01L HLA-DQA1*05:05-B1*03:01L HLA-DRB1*15:03L
LHDIGNPKAIKCVPQ

SEQ ID NO: 11414 - protein, 10 aa, Severe acute respiratory syndrome coronavirus 2
  REGION 1..10: note = Table B: HLA-DQA1*05:01-B1*03:01L HLA-DRB1*13:03L HLA-DQA1*01:02-B1*06:02M HLA-DQA1*05:05-B1*03:116L HLA-DPA1*02:01-B1*13:01L HLA-DPA1*03:01-B1*105:01M HLA-DPA1*01:02-B1*04:01L HLA-DQA1*01:03-B1*06:01L
  REGION 1..10: note = CONT. FROM ABOVE: HLA-DRB1*15:03L
VPQADVEWKF

SEQ ID NO: 11415 - protein, 10 aa, Severe acute respiratory syndrome coronavirus 2
  REGION 1..10: note = Table B: HLA-DQA1*05:01-B1*03:01L HLA-DRB1*01:03L HLA-DQA1*01:02-B1*06:02L HLA-DRB1*08:77L HLA-DPA1*01:03-B1*03:01L HLA-DRB1*03:01L HLA-DRB1*14:02L HLA-DQA1*01-B1*05L HLA-DQA1*05:05-B1*03:19L
  REGION 1..10: note = CONT. FROM ABOVE: HLA-DQA1*05:01-B1*02:01L HLA-DRB4*01:01L HLA-D PA1*01:03-B1*04:01L HLA-DQA1*05:05-B1*03:116L HLA-DPA1*01:03-B1* 04:02L HLA-DPA1*02:01-B1*13:01L HLA-DPA1*03:01-B1*105:01L HLA-DP A1*01:03-B1*104:01L HLA-DRB1*16:01L HLA-DQA1*01:03-B1*06:01L
  REGION 1..10: note = CONT. FROM ABOVE: HLA-DRB1*08:02L HLA-DQA1*02:01-B1*03:03L HLA-D RB1*15:03L
KAYKIEELFY

SEQ ID NO: 11416 - protein, 10 aa, Severe acute respiratory syndrome coronavirus 2
  REGION 1..10: note = Table B: HLA-DQA1*05:01-B1*03:01L HLA-DRB1*01:03L HLA-DQA1*01:02-B1*06:02L HLA-DRB1*08:77L HLA-DPA1*01:03-B1*03:01L HLA-DPA1*03:01-B1*04:02L HLA-DRB1*03:01L HLA-DRB1*11:02L HLA-DRB1*14:02L
  REGION 1..10: note = CONT. FROM ABOVE: HLA-DQA1*01-B1*05L HLA-DQA1*05:05-B1*03:19M HL A-DQA1*05:01-B1*02:01L HLA-DRB4*01:01L HLA-DPA1*01:03-B1*04:01L HLA-DQA1*05:05-B1*03:116L HLA-DPA1*01:03-B1*04:02L HLA-DPA1*02:0 1-B1*13:01L HLA-DPA1*03:01-B1*105:01L HLA-DPA1*01:03-B1*104:01L
  REGION 1..10: note = CONT. FROM ABOVE: HLA-DRB1*10:01L HLA-DRB1*16:01L HLA-DQA1*01:03 -B1*06:01L HLA-DQA1*02:01-B1*03:03L HLA-DRB1*15:03L
YKIEELFYSY

SEQ ID NO: 11417 - protein, 13 aa, Severe acute respiratory syndrome coronavirus 2
  REGION 1..13: note = Table B: HLA-DQA1*05:01-B1*03:01L HLA-DRB1*13:02L HLA-DRB1*13:03L HLA-DRB1*01:03L HLA-DRB1*04:05L HLA-DQA1*01:02-B1*06:02L HLA-DRB1*01:02L HLA-DRB4*03:01NL HLA-DRB1*08:04L HLA-DRB1*08:77L HLA-DRB3*02:01L
  REGION 1..13: note = CONT. FROM ABOVE: HLA-DPA1*01:03-B1*03:01L HLA-DPA1*03:01-B1*04: 02L HLA-DRB1*14:01L HLA-DRB1*11:03L HLA-DRB1*14:02L HLA-DQA1*01: 01-B1*05:01L HLA-DRB1*08:01L HLA-DQA1*05:05-B1*03:19L HLA-DPA1*0 1:03-B1*04:01L HLA-DRB1*04:10L HLA-DRB1*09:01L
  REGION 1..13: note = CONT. FROM ABOVE: HLA-DPA1*01:03-B1*04:02L HLA-DRB1*12:01L HLA-D RB1*12:02L HLA-DPA1*02:01-B1*13:01L HLA-DPA1*03:01-B1*105:01L HL A-DRB1*14:54L HLA-DPA1*01:03-B1*104:01L HLA-DQA1*05:05-B1*03:01L HLA-DRB1*14:17L HLA-DPA1*01:02-B1*04:01L HLA-DRB1*07:01L
  REGION 1..13: note = CONT. FROM ABOVE: HLA-DRB1*10:01L HLA-DQA1*01:03-B1*06:01L HLA-D RB1*04:08L HLA-DRB1*08:03L
IEELFYSYATHSD

SEQ ID NO: 11418 - protein, 12 aa, Severe acute respiratory syndrome coronavirus 2
  REGION 1..12: note = Table B: HLA-DQA1*05:01-B1*03:01L HLA-DRB1*01:03L HLA-DPA1*03:01-B1*04:02L HLA-DRB1*08:01L HLA-DQA1*05:05-B1*03:19L HLA-DPA1*01:03-B1*04:02L HLA-DQA1*05:05-B1*03:01L HLA-DRB1*16:01L
  REGION 1..12: note = CONT. FROM ABOVE: HLA-DQA1*01:03-B1*06:01L HLA-DRB1*04:08L HLA-D QA1*02:01-B1*03:03L HLA-DRB1*15:03L
FWNCNVDRYPAN

SEQ ID NO: 11419 - protein, 13 aa, Severe acute respiratory syndrome coronavirus 2
  REGION 1..13: note = Table B: HLA-DQA1*05:01-B1*03:01L HLA-DRB1*13:02L HLA-DRB1*04:04L HLA-DQA1*01:02-B1*06:02L HLA-DRB1*01:02L HLA-DPA1*01:03-B1*03:01L HLA-DRB1*14:01L HLA-DQA1*01:01-B1*05:01L HLA-DPA1*02:01-B1*13:01L
  REGION 1..13: note = CONT. FROM ABOVE: HLA-DPA1*03:01-B1*105:01L HLA-DQA1*05:05-B1*03 :01L HLA-DRB1*04:08L HLA-DRB1*15:03L
FDTRVLSNLNLPG

SEQ ID NO: 11420 - protein, 12 aa, Severe acute respiratory syndrome coronavirus 2
  REGION 1..12: note = Table B: HLA-DQA1*05:01-B1*03:01L HLA-DRB1*04:03L HLA-DRB1*04:02L HLA-DQA1*01:02-B1*06:02L HLA-DRB1*01:02L HLA-DRB1*14:01L HLA-DQA1*05:05-B1*03:19L HLA-DRB1*12:01L HLA-DPA1*03:01-B1*105:01L HLA-DQA1*03:01-B1*03:02L
  REGION 1..12: note = CONT. FROM ABOVE: HLA-DQA1*05:05-B1*03:01L HLA-DRB1*14:17L HLA-D QA1*01:03-B1*06:01L HLA-DQA1*02:01-B1*03:03L HLA-DRB1*15:03L
VLSNLNLPGCDG

SEQ ID NO: 11421 - protein, 13 aa, Severe acute respiratory syndrome coronavirus 2
  REGION 1..13: note = Table B: HLA-DQA1*05:01-B1*03:01L HLA-DQA1*01:02-B1*06:02L HLA-DQA1*05:05-B1*03:01L HLA-DQA1*01:03-B1*06:01L HLA-DQA1*02:01-B1*03:03L
LPGCDGGSLYVNK

SEQ ID NO: 11422 - protein, 13 aa, Severe acute respiratory syndrome coronavirus 2
  REGION 1..13: note = Table B: HLA-DQA1*05:01-B1*03:01L HLA-DRB1*08:04L HLA-DRB1*11:04L HLA-DPA1*01:02-B1*04:01L
DGGSLYVNKHAFH

SEQ ID NO: 11423 - protein, 14 aa, Severe acute respiratory syndrome coronavirus 2
  REGION 1..14: note = Table B: HLA-DQA1*05:01-B1*03:01L HLA-DRB3*01:01L HLA-DPA1*02:01-B1*13:01L HLA-DPA1*01:02-B1*04:01L HLA-DRB1*08:03L
GGSLYVNKHAFHTP

SEQ ID NO: 11424 - protein, 14 aa, Severe acute respiratory syndrome coronavirus 2
  REGION 1..14: note = Table B: HLA-DQA1*05:01-B1*03:01L HLA-DRB1*04:04L HLA-DRB1*01:01L HLA-DRB4*03:01NL HLA-DPA1*03:01-B1*04:02L HLA-DRB1*03:01L HLA-DRB1*11:02L HLA-DRB1*14:02L HLA-DQA1*05:05-B1*03:19L HLA-DQA1*05:05-B1*03:116L
  REGION 1..14: note = CONT. FROM ABOVE: HLA-DPA1*01:03-B1*04:02L HLA-DPA1*02:01-B1*13: 01L HLA-DPA1*03:01-B1*105:01L HLA-DRB1*14:54L HLA-DPA1*01:03-B1* 02:01L HLA-DQA1*05:05-B1*03:01L HLA-DRB1*07:01L HLA-DRB1*08:02L
GSLYVNKHAFHTPA

SEQ ID NO: 11425 - protein, 14 aa, Severe acute respiratory syndrome coronavirus 2
  REGION 1..14: note = Table B: HLA-DQA1*05:01-B1*03:01L HLA-DRB1*03:01L HLA-DRB1*14:01L HLA-DPA1*03:01-B1*105:01L HLA-DQA1*01:03-B1*06:01L
VNKHAFHTPAFDKS

SEQ ID NO: 11426 - protein, 10 aa, Severe acute respiratory syndrome coronavirus 2
  REGION 1..10: note = Table B: HLA-DQA1*05:01-B1*03:01L HLA-DRB1*13:03L HLA-DRB1*01:03L HLA-DQA1*01:02-B1*06:02M HLA-DPA1*01:03-B1*03:01L HLA-DPA1*03:01-B1*04:02L HLA-DRB1*14:01L HLA-DRB1*14:02L HLA-DQA1*05:05-B1*03:19L
  REGION 1..10: note = CONT. FROM ABOVE: HLA-DQA1*05:01-B1*02:01L HLA-DPA1*01:03-B1*04: 01L HLA-DPA1*02:01-B1*13:01L HLA-DPA1*03:01-B1*105:01L HLA-DPA1* 01:02-B1*04:01L HLA-DQA1*01:03-B1*06:01L HLA-DQA1*02:01-B1*03:03 L HLA-DRB1*15:03L
HTPAFDKSAF

SEQ ID NO: 11427 - protein, 10 aa, Severe acute respiratory syndrome coronavirus 2
  REGION 1..10: note = Table B: HLA-DQA1*05:01-B1*03:01L HLA-DRB1*04:03L HLA-DQA1*01:02-B1*06:02L HLA-DRB1*01:02L HLA-DRB3*02:01L HLA-DPA1*03:01-B1*04:02L HLA-DRB1*14:01L HLA-DRB1*14:02L HLA-DQA1*05:05-B1*03:19L HLA-DQA1*05:01-B1*02:01L
  REGION 1..10: note = CONT. FROM ABOVE: HLA-DRB1*12:01L HLA-DPA1*02:01-B1*13:01L HLA-D PA1*03:01-B1*105:01L HLA-DQA1*05:05-B1*03:01L HLA-DPA1*01:02-B1* 04:01L HLA-DRB1*16:01L HLA-DQA1*01:03-B1*06:01L HLA-DQA1*02:01-B 1*03:03L HLA-DRB1*15:03L
FVNLKQLPFF

SEQ ID NO: 11428 - protein, 10 aa, Severe acute respiratory syndrome coronavirus 2
  REGION 1..10: note = Table B: HLA-DQA1*05:01-B1*03:01L HLA-DQA1*01:02-B1*06:02L HLA-DPA1*01:03-B1*03:01L HLA-DRB1*03:01L HLA-DRB1*14:02L HLA-DQA1*05:05-B1*03:19L HLA-DQA1*05:01-B1*02:01L HLA-DRB4*01:01L HLA-DPA1*01:03-B1*04:01L HLA-DRB1*12:01L
  REGION 1..10: note = CONT. FROM ABOVE: HLA-DPA1*03:01-B1*105:01L HLA-DPA1*01:03-B1*10 4:01L HLA-DRB1*16:01L HLA-DQA1*02:01-B1*03:03L HLA-DRB1*15:03L
NLKQLPFFYY

SEQ ID NO: 11429 - protein, 13 aa, Severe acute respiratory syndrome coronavirus 2
  REGION 1..13: note = Table B: HLA-DQA1*05:01-B1*03:01L HLA-DQA1*01:02-B1*06:02L HLA-DPA1*03:01-B1*105:01L HLA-DQA1*01:03-B1*06:01L HLA-DQA1*02:01-B1*03:03L
YYSDSPCESHGKQ

SEQ ID NO: 11430 - protein, 11 aa, Severe acute respiratory syndrome coronavirus 2
  REGION 1..11: note = Table B: HLA-DQA1*05:01-B1*03:01L HLA-DRB1*13:02L HLA-DRB1*13:03L HLA-DRB1*01:03L HLA-DRB1*04:02L HLA-DRB1*04:05L HLA-DQA1*01:02-B1*06:02L HLA-DRB1*01:02L HLA-DRB4*03:01NL HLA-DPA1*01:03-B1*03:01L HLA-DPA1*03:01-B1*04:02L
  REGION 1..11: note = CONT. FROM ABOVE: HLA-DRB1*14:01L HLA-DQA1*01:01-B1*05:01L HLA-D QA1*05:05-B1*03:19L HLA-DRB1*04:10L HLA-DPA1*01:03-B1*04:02L HLA -DRB1*12:01L HLA-DPA1*03:01-B1*105:01L HLA-DRB1*14:54L HLA-DQA1* 05:05-B1*03:01L HLA-DRB1*14:17L HLA-DPA1*01:02-B1*04:01L
  REGION 1..11: note = CONT. FROM ABOVE: HLA-DRB1*16:01L HLA-DRB1*04:08L HLA-DRB1*15:03 L
VVSDIDYVPLK

SEQ ID NO: 11431 - protein, 13 aa, Severe acute respiratory syndrome coronavirus 2
  REGION 1..13: note = Table B: HLA-DQA1*05:01-B1*03:01L HLA-DRB1*01:03L HLA-DRB1*04:05L HLA-DRB1*01:02L HLA-DPA1*01:03-B1*03:01L HLA-DQA1*05:05-B1*03:19L HLA-DPA1*01:03-B1*04:01L HLA-DRB1*12:01L HLA-DQA1*05:05-B1*03:01L HLA-DRB1*04:08L
  REGION 1..13: note = CONT. FROM ABOVE: HLA-DRB1*15:03L
VSDIDYVPLKSAT

SEQ ID NO: 11432 - protein, 13 aa, Severe acute respiratory syndrome coronavirus 2
  REGION 1..13: note = Table B: HLA-DQA1*05:01-B1*03:01L HLA-DRB1*04:01L HLA-DRB1*13:02L HLA-DRB1*04:04L HLA-DRB1*04:05L HLA-DPA1*01:03-B1*03:01L HLA-DRB1*14:01L HLA-DRB1*11:03L HLA-DRB1*11:01L HLA-DQA1*05:05-B1*03:19L
  REGION 1..13: note = CONT. FROM ABOVE: HLA-DPA1*01:03-B1*04:02L HLA-DRB3*01:01L HLA-D RB1*07:01L HLA-DQA1*01:03-B1*06:01L HLA-DRB1*08:02L
IDYVPLKSATCIT

SEQ ID NO: 11433 - protein, 12 aa, Severe acute respiratory syndrome coronavirus 2
  REGION 1..12: note = Table B: HLA-DQA1*05:01-B1*03:01L HLA-DRB1*04:01L HLA-DRB1*04:04L HLA-DRB1*04:05L HLA-DQA1*01:02-B1*06:02L HLA-DRB1*11:04L HLA-DRB1*08:01L HLA-DRB1*11:01L HLA-DRB1*12:01L HLA-DRB3*01:01L HLA-DPA1*03:01-B1*105:01L HLA-DRB1*07:01L
  REGION 1..12: note = CONT. FROM ABOVE: HLA-DRB1*10:01L HLA-DQA1*01:03-B1*06:01L
YVPLKSATCITR

SEQ ID NO: 11434 - protein, 10 aa, Severe acute respiratory syndrome coronavirus 2
  REGION 1..10: note = Table B: HLA-DQA1*05:01-B1*03:01L HLA-DRB1*01:03L HLA-DQA1*01:02-B1*06:02L HLA-DRB1*03:01L HLA-DRB1*11:01L HLA-DRB1*16:01L HLA-DQA1*02:01-B1*03:03L
RHHANEYRLY

SEQ ID NO: 11435 - protein, 12 aa, Severe acute respiratory syndrome coronavirus 2
  REGION 1..12: note = Table B: HLA-DQA1*05:01-B1*03:01L HLA-DRB1*01:03L HLA-DRB1*01:02L HLA-DRB1*12:01L HLA-DPA1*01:03-B1*104:01L HLA-DRB1*04:08L
FSLWVYKQFDTY

SEQ ID NO: 11436 - protein, 13 aa, Severe acute respiratory syndrome coronavirus 2
  REGION 1..13: note = Table B: HLA-DQA1*05:01-B1*03:01L HLA-DRB1*13:02L HLA-DPA1*01:03-B1*04:02L HLA-DQA1*03:01-B1*03:02L HLA-DQA1*05:05-B1*03:01L
VYKQFDTYNLWNT

SEQ ID NO: 11437 - protein, 12 aa, Severe acute respiratory syndrome coronavirus 2
  REGION 1..12: note = Table B: HLA-DQA1*05:01-B1*03:01L HLA-DRB1*01:03L HLA-DRB1*01:02L HLA-DRB1*14:01L HLA-DPA1*01:03-B1*04:02L HLA-DRB1*04:08L
DTYNLWNTFTRL

SEQ ID NO: 11438 - protein, 11 aa, Severe acute respiratory syndrome coronavirus 2
  REGION 1..11: note = Table B: HLA-DQA1*05:01-B1*03:01L HLA-DRB1*04:03L HLA-DRB1*01:03L HLA-DQA1*01:02-B1*06:02L HLA-DRB1*01:02L HLA-DPA1*01:03-B1*03:01L HLA-DRB1*12:01L HLA-DPA1*02:01-B1*13:01L HLA-DQA1*03:01-B1*03:02L
  REGION 1..11: note = CONT. FROM ABOVE: HLA-DPA1*01:03-B1*02:01L HLA-DRB1*04:08L HLA-D QA1*02:01-B1*03:03L HLA-DRB1*15:03L
SLENVAFNVVN

SEQ ID NO: 11439 - protein, 10 aa, Severe acute respiratory syndrome coronavirus 2
  REGION 1..10: note = Table B: HLA-DQA1*05:01-B1*03:01L HLA-DRB1*04:03L HLA-DRB1*04:02L HLA-DQA1*03:01-B1*03:02L HLA-DPA1*01:02-B1*04:01L HLA-DQA1*01:03-B1*06:01L HLA-DQA1*02:01-B1*03:03L
VAFNVVNKGH

SEQ ID NO: 11440 - protein, 11 aa, Severe acute respiratory syndrome coronavirus 2
  REGION 1..11: note = Table B: HLA-DQA1*05:01-B1*03:01L HLA-DQA1*05:05-B1*03:116L
SIINNTVYTKV

SEQ ID NO: 11441 - protein, 11 aa, Severe acute respiratory syndrome coronavirus 2
  REGION 1..11: note = Table B: HLA-DQA1*05:01-B1*03:01L HLA-DRB1*04:03L HLA-DRB1*04:02L HLA-DQA1*01:02-B1*06:02L HLA-DRB1*01:02L HLA-DPA1*03:01-B1*04:02L HLA-DRB1*14:01L HLA-DQA1*05:01-B1*02:01L HLA-DRB1*12:01L
  REGION 1..11: note = CONT. FROM ABOVE: HLA-DPA1*03:01-B1*105:01L HLA-DRB1*14:17L HLA- DPA1*01:02-B1*04:01L HLA-DRB1*16:01L
IINNTVYTKVD

SEQ ID NO: 11442 - protein, 14 aa, Severe acute respiratory syndrome coronavirus 2
  REGION 1..14: note = Table B: HLA-DQA1*05:01-B1*03:01L HLA-DRB1*01:03L HLA-DRB3*02:01L HLA-DRB1*08:01L HLA-DRB1*15:01L
VDVELFENKTTLPV

SEQ ID NO: 11443 - protein, 14 aa, Severe acute respiratory syndrome coronavirus 2
  REGION 1..14: note = Table B: HLA-DQA1*05:01-B1*03:01L HLA-DRB1*04:03L HLA-DRB1*01:03L HLA-DRB1*04:05L HLA-DPA1*01:03-B1*03:01L HLA-DPA1*03:01-B1*04:02L HLA-DRB1*08:01L HLA-DQA1*01-B1*05L HLA-DPA1*01:03-B1*04:01L HLA-DPA1*01:03-B1*04:02L
  REGION 1..14: note = CONT. FROM ABOVE: HLA-DRB1*12:01L HLA-DQA1*05:05-B1*03:01L HLA-D RB1*16:01L
LPVNVAFELWAKRN

SEQ ID NO: 11444 - protein, 14 aa, Severe acute respiratory syndrome coronavirus 2
  REGION 1..14: note = Table B: HLA-DQA1*05:01-B1*03:01L HLA-DRB1*08:04L HLA-DRB1*11:02L HLA-DRB1*11:03L HLA-DPA1*03:01-B1*105:01L HLA-DPA1*01:03-B1*02:01L HLA-DQA1*01:03-B1*06:01L HLA-DRB1*08:02L HLA-DRB1*08:03L
FELWAKRNIKPVPE

SEQ ID NO: 11445 - protein, 14 aa, Severe acute respiratory syndrome coronavirus 2
  REGION 1..14: note = Table B: HLA-DQA1*05:01-B1*03:01L HLA-DRB1*03:01L HLA-DQA1*01:01-B1*05:01L HLA-DRB1*04:10L HLA-DQA1*01:03-B1*06:01L
LWAKRNIKPVPEVK

SEQ ID NO: 11446 - protein, 12 aa, Severe acute respiratory syndrome coronavirus 2
  REGION 1..12: note = Table B: HLA-DQA1*05:01-B1*03:01L HLA-DRB1*13:02L HLA-DRB1*01:03L HLA-DRB1*04:02L HLA-DRB1*04:05L HLA-DQA1*01:02-B1*06:02L HLA-DRB1*01:02L HLA-DRB1*14:01L HLA-DQA1*01-B1*05L HLA-DQA1*05:01-B1*02:01L HLA-DRB1*12:01L
  REGION 1..12: note = CONT. FROM ABOVE: HLA-DPA1*03:01-B1*105:01L HLA-DRB1*14:17L HLA- DPA1*01:02-B1*04:01L HLA-DRB1*16:01L HLA-DQA1*01:03-B1*06:01L HL A-DRB1*04:08L
IKPVPEVKILNN

SEQ ID NO: 11447 - protein, 13 aa, Severe acute respiratory syndrome coronavirus 2
  REGION 1..13: note = Table B: HLA-DQA1*05:01-B1*03:01L HLA-DRB1*13:02L HLA-DRB1*13:03L HLA-DRB1*01:03L HLA-DQA1*01:02-B1*06:02L HLA-DRB1*08:04L HLA-DRB1*08:77L HLA-DRB3*02:01L HLA-DPA1*01:03-B1*03:01L HLA-DPA1*03:01-B1*04:02L
  REGION 1..13: note = CONT. FROM ABOVE: HLA-DRB1*11:03L HLA-DRB1*11:04L HLA-DRB1*08:01 L HLA-DQA1*05:01-B1*02:01L HLA-DRB1*09:01L HLA-DRB1*12:02L HLA-D PA1*03:01-B1*105:01L HLA-DQA1*05:05-B1*03:01L HLA-DRB1*10:01L HL A-DRB1*04:08L HLA-DRB1*08:03L
VPEVKILNNLGVD

SEQ ID NO: 11448 - protein, 12 aa, Severe acute respiratory syndrome coronavirus 2
  REGION 1..12: note = Table B: HLA-DQA1*05:01-B1*03:01L HLA-DRB1*13:02L HLA-DRB1*01:03L HLA-DQA1*01:02-B1*06:02L HLA-DRB1*08:04L HLA-DRB1*08:77L HLA-DRB3*02:01L HLA-DPA1*01:03-B1*03:01L HLA-DPA1*03:01-B1*04:02L HLA-DRB1*11:03L HLA-DRB1*14:02L
  REGION 1..12: note = CONT. FROM ABOVE: HLA-DQA1*05:05-B1*03:19L HLA-DQA1*05:01-B1*02: 01L HLA-DRB1*12:02L HLA-DPA1*03:01-B1*105:01L HLA-DQA1*05:05-B1* 03:01L HLA-DPA1*01:02-B1*04:01L HLA-DRB1*07:01L
VKILNNLGVDIA

SEQ ID NO: 11449 - protein, 12 aa, Severe acute respiratory syndrome coronavirus 2
  REGION 1..12: note = Table B: HLA-DQA1*05:01-B1*03:01L HLA-DPA1*03:01-B1*04:02L HLA-DRB1*14:01L HLA-DRB1*12:01L HLA-DQA1*05:05-B1*03:01L HLA-DQA1*01:03-B1*06:01L
VDIAANTVIWDY

SEQ ID NO: 11450 - protein, 14 aa, Severe acute respiratory syndrome coronavirus 2
  REGION 1..14: note = Table B: HLA-DQA1*05:01-B1*03:01L HLA-DRB1*14:04L HLA-DRB1*04:01L HLA-DPA1*01:03-B1*03:01L HLA-DPA1*03:01-B1*04:02L HLA-DRB1*03:01L HLA-DRB1*11:02L HLA-DQA1*05:05-B1*03:19L HLA-DRB1*13:01L
  REGION 1..14: note = CONT. FROM ABOVE: HLA-DPA1*01:03-B1*04:02L HLA-DRB1*12:02L HLA-D PA1*03:01-B1*105:01L HLA-DPA1*01:03-B1*02:01L HLA-DRB1*10:01L HL A-DQA1*01:03-B1*06:01L HLA-DRB1*08:02L
ANTVIWDYKRDAPA

SEQ ID NO: 11451 - protein, 13 aa, Severe acute respiratory syndrome coronavirus 2
  REGION 1..13: note = Table B: HLA-DQA1*05:01-B1*03:01L HLA-DRB1*04:04L HLA-DRB1*11:03L HLA-DRB1*14:02L HLA-DQA1*01:01-B1*05:01L HLA-DPA1*02:01-B1*13:01L HLA-DPA1*03:01-B1*105:01L HLA-DRB1*10:01L HLA-DRB1*08:02L
TVIWDYKRDAPAH

SEQ ID NO: 11452 - protein, 11 aa, Severe acute respiratory syndrome coronavirus 2
  REGION 1..11: note = Table B: HLA-DQA1*05:01-B1*03:01L HLA-DRB1*04:03L HLA-DRB1*13:03L HLA-DRB1*01:03L HLA-DRB1*04:02L HLA-DRB1*04:05L HLA-DRB1*01:02L HLA-DRB4*03:01NL HLA-DRB1*08:04L HLA-DRB1*08:77L HLA-DRB1*11:04L HLA-DRB1*12:01L HLA-DRB3*01:01L
  REGION 1..11: note = CONT. FROM ABOVE: HLA-DQA1*03:01-B1*03:02L HLA-DRB1*14:54L HLA-D RB1*14:17L HLA-DRB1*04:08L HLA-DQA1*02:01-B1*03:03L HLA-DRB1*15: 03L
YKRDAPAHIST

SEQ ID NO: 11453 - protein, 11 aa, Severe acute respiratory syndrome coronavirus 2
  REGION 1..11: note = Table B: HLA-DQA1*05:01-B1*03:01L HLA-DRB1*04:03L HLA-DRB1*04:02L HLA-DQA1*01:02-B1*06:02L HLA-DQA1*05:05-B1*03:19L HLA-DPA1*03:01-B1*105:01L HLA-DQA1*05:05-B1*03:01L HLA-DQA1*01:03-B1*06:01L
FFDGRVDGQVD

SEQ ID NO: 11454 - protein, 10 aa, Severe acute respiratory syndrome coronavirus 2
  REGION 1..10: note = Table B: HLA-DQA1*05:01-B1*03:01L HLA-DRB1*01:03L HLA-DQA1*01:02-B1*06:02L HLA-DRB1*14:02L HLA-DQA1*05:05-B1*03:19L HLA-DQA1*05:01-B1*02:01L HLA-DPA1*03:01-B1*105:01L HLA-DQA1*01:03-B1*06:01L
  REGION 1..10: note = CONT. FROM ABOVE: HLA-DQA1*02:01-B1*03:03L HLA-DRB1*15:03L
GRVDGQVDLF

SEQ ID NO: 11455 - protein, 14 aa, Severe acute respiratory syndrome coronavirus 2
  REGION 1..14: note = Table B: HLA-DQA1*05:01-B1*03:01L HLA-DRB1*01:03L HLA-DRB1*04:05L HLA-DRB1*01:02L HLA-DRB1*12:01L HLA-DPA1*02:01-B1*13:01L HLA-DPA1*03:01-B1*105:01L HLA-DQA1*05:05-B1*03:01L HLA-DRB1*04:08L
NARNGVLITEGSVK

SEQ ID NO: 11456 - protein, 12 aa, Severe acute respiratory syndrome coronavirus 2
  REGION 1..12: note = Table B: HLA-DQA1*05:01-B1*03:01L HLA-DRB1*04:01L HLA-DQA1*01:02-B1*06:02L HLA-DRB1*08:04L HLA-DRB1*08:77L HLA-DRB3*02:01L HLA-DPA1*01:03-B1*03:01L HLA-DRB1*14:02L HLA-DQA1*01:01-B1*05:01L HLA-DRB1*08:01L HLA-DRB5*01:01L
  REGION 1..12: note = CONT. FROM ABOVE: HLA-DQA1*05:05-B1*03:19L HLA-DRB1*09:01L HLA-D PA1*03:01-B1*105:01L HLA-DQA1*05:05-B1*03:01L HLA-DRB1*07:01L HL A-DRB1*15:03L
NGVLITEGSVKG

SEQ ID NO: 11457 - protein, 12 aa, Severe acute respiratory syndrome coronavirus 2
  REGION 1..12: note = Table B: HLA-DQA1*05:01-B1*03:01L HLA-DRB1*04:03L HLA-DRB1*13:02L HLA-DRB1*13:03L HLA-DRB1*01:03L HLA-DRB1*04:02L HLA-DRB1*04:05L HLA-DQA1*01:02-B1*06:02L HLA-DRB1*01:02L HLA-DRB4*03:01NL HLA-DRB1*08:04L HLA-DRB1*08:77L
  REGION 1..12: note = CONT. FROM ABOVE: HLA-DPA1*01:03-B1*03:01L HLA-DRB1*14:01L HLA-D RB1*11:03L HLA-DRB1*11:04L HLA-DRB1*14:02L HLA-DQA1*01:01-B1*05: 01L HLA-DQA1*05:05-B1*03:19L HLA-DQA1*05:01-B1*02:01L HLA-DRB1*0 4:10L HLA-DRB1*12:01L HLA-DRB1*12:02L HLA-DPA1*03:01-B1*105:01L
  REGION 1..12: note = CONT. FROM ABOVE: HLA-DRB1*14:54L HLA-DQA1*05:05-B1*03:01L HLA-D RB1*14:17L HLA-DRB1*10:01L HLA-DRB1*16:01L HLA-DRB1*04:08L
ITEGSVKGLQPS

SEQ ID NO: 11458 - protein, 12 aa, Severe acute respiratory syndrome coronavirus 2
  REGION 1..12: note = Table B: HLA-DQA1*05:01-B1*03:01L HLA-DRB1*04:03L HLA-DRB1*04:02L HLA-DRB1*04:05L HLA-DQA1*01:02-B1*06:02L HLA-DRB1*01:02L HLA-DQA1*05:05-B1*03:19L HLA-DRB1*04:10L HLA-DRB1*12:01L HLA-DQA1*03:01-B1*03:02L
  REGION 1..12: note = CONT. FROM ABOVE: HLA-DQA1*05:05-B1*03:01L HLA-DRB1*14:17L HLA-D QA1*02:01-B1*03:03L
GSVKGLQPSVGP

SEQ ID NO: 11459 - protein, 12 aa, Severe acute respiratory syndrome coronavirus 2
  REGION 1..12: note = Table B: HLA-DQA1*05:01-B1*03:01L HLA-DRB1*04:02L HLA-DQA1*01:02-B1*06:02L HLA-DQA1*05:05-B1*03:01L
SVKGLQPSVGPK

SEQ ID NO: 11460 - protein, 10 aa, Severe acute respiratory syndrome coronavirus 2
  REGION 1..10: note = Table B: HLA-DQA1*05:01-B1*03:01L HLA-DRB1*13:03M HLA-DRB1*01:03L HLA-DQA1*01:02-B1*06:02M HLA-DRB4*03:01NL HLA-DRB1*08:77L HLA-DPA1*01:03-B1*03:01L HLA-DPA1*03:01-B1*04:02L HLA-DRB1*03:01L HLA-DRB1*14:01L
  REGION 1..10: note = CONT. FROM ABOVE: HLA-DRB1*11:02L HLA-DRB1*14:02L HLA-DRB5*01:01 L HLA-DQA1*01-B1*05L HLA-DQA1*05:05-B1*03:19M HLA-DQA1*05:01-B1* 02:01L HLA-DRB4*01:01L HLA-DPA1*01:03-B1*04:01M HLA-DQA1*05:05-B 1*03:116L HLA-DPA1*01:03-B1*04:02L HLA-DRB1*12:01L
  REGION 1..10: note = CONT. FROM ABOVE: HLA-DPA1*02:01-B1*13:01L HLA-DPA1*03:01-B1*105 :01L HLA-DPA1*01:03-B1*104:01L HLA-DQA1*05:05-B1*03:01L HLA-DPA1 *01:02-B1*04:01L HLA-DRB1*10:01L HLA-DRB1*16:01L HLA-DQA1*01:03- B1*06:01L HLA-DRB1*08:02L HLA-DQA1*02:01-B1*03:03L
  REGION 1..10: note = CONT. FROM ABOVE: HLA-DRB1*15:03L
EAVKTQFNYY

SEQ ID NO: 11461 - protein, 12 aa, Severe acute respiratory syndrome coronavirus 2
  REGION 1..12: note = Table B: HLA-DQA1*05:01-B1*03:01L HLA-DRB1*04:03L HLA-DRB1*13:02L HLA-DRB1*04:04L HLA-DQA1*01:02-B1*06:02L HLA-DRB1*01:02L HLA-DRB4*03:01NL HLA-DRB1*08:04L HLA-DRB1*14:01L HLA-DRB1*11:04L HLA-DRB1*11:01L HLA-DRB1*04:10L HLA-DRB1*12:01L
  REGION 1..12: note = CONT. FROM ABOVE: HLA-DRB3*01:01L HLA-DPA1*02:01-B1*13:01L HLA-D PA1*03:01-B1*105:01L HLA-DRB1*14:54L HLA-DRB1*14:17L HLA-DPA1*01 :02-B1*04:01L HLA-DRB1*08:03L HLA-DRB1*15:03L
FNYYKKVDGVVQ

SEQ ID NO: 11462 - protein, 14 aa, Severe acute respiratory syndrome coronavirus 2
  REGION 1..14: note = Table B: HLA-DQA1*05:01-B1*03:01L HLA-DRB1*01:02L HLA-DPA1*01:03-B1*03:01L HLA-DQA1*05:05-B1*03:19L HLA-DPA1*02:01-B1*13:01L HLA-DPA1*03:01-B1*105:01L HLA-DQA1*05:05-B1*03:01L
YKKVDGVVQQLPET

SEQ ID NO: 11463 - protein, 12 aa, Severe acute respiratory syndrome coronavirus 2
  REGION 1..12: note = Table B: HLA-DQA1*05:01-B1*03:01L HLA-DRB1*04:03L HLA-DRB1*13:02L HLA-DRB1*13:03L HLA-DRB1*01:03L HLA-DRB1*04:02L HLA-DRB1*04:05L HLA-DRB1*01:02L HLA-DRB4*03:01NL HLA-DRB1*08:77L HLA-DRB3*02:01L HLA-DPA1*01:03-B1*03:01L
  REGION 1..12: note = CONT. FROM ABOVE: HLA-DPA1*03:01-B1*04:02L HLA-DRB1*14:01L HLA-D RB1*11:03L HLA-DRB1*08:01L HLA-DQA1*05:05-B1*03:19L HLA-DQA1*05: 01-B1*02:01L HLA-DPA1*01:03-B1*04:01L HLA-DRB1*09:01L HLA-DPA1*0 1:03-B1*04:02L HLA-DRB1*12:01L HLA-DRB1*12:02L
  REGION 1..12: note = CONT. FROM ABOVE: HLA-DPA1*02:01-B1*13:01L HLA-DRB1*14:54L HLA-D QA1*05:05-B1*03:01L HLA-DRB1*14:17L HLA-DPA1*01:02-B1*04:01L HLA -DRB1*07:01L HLA-DRB1*16:01L HLA-DQA1*01:03-B1*06:01L HLA-DRB1*0 4:08L HLA-DRB1*15:03L
LPETYFTQSRNL

SEQ ID NO: 11464 - protein, 12 aa, Severe acute respiratory syndrome coronavirus 2
  REGION 1..12: note = Table B: HLA-DQA1*05:01-B1*03:01L HLA-DRB1*04:03L HLA-DRB1*13:03L HLA-DRB1*01:03L HLA-DRB1*04:02L HLA-DRB1*04:05L HLA-DRB1*01:02L HLA-DRB1*08:04L HLA-DPA1*03:01-B1*04:02L HLA-DRB1*14:01L HLA-DRB1*08:01L HLA-DQA1*01-B1*05L
  REGION 1..12: note = CONT. FROM ABOVE: HLA-DRB1*12:01L HLA-DPA1*02:01-B1*13:01L HLA-D QA1*05:05-B1*03:01L HLA-DRB1*16:01L HLA-DQA1*01:03-B1*06:01L HLA -DRB1*04:08L HLA-DRB1*15:03L
PETYFTQSRNLQ

SEQ ID NO: 11465 - protein, 13 aa, Severe acute respiratory syndrome coronavirus 2
  REGION 1..13: note = Table B: HLA-DQA1*05:01-B1*03:01L HLA-DRB1*13:03L HLA-DRB1*01:03L HLA-DRB1*04:02L HLA-DRB1*04:05L HLA-DQA1*01:02-B1*06:02L HLA-DRB1*01:02L HLA-DRB1*08:04L HLA-DRB1*14:01L HLA-DPA1*02:01-B1*13:01L HLA-DRB1*16:01L
  REGION 1..13: note = CONT. FROM ABOVE: HLA-DRB1*04:08L HLA-DRB1*08:03L HLA-DQA1*02:01 -B1*03:03L HLA-DRB1*15:03L
LQEFKPRSQMEID

SEQ ID NO: 11466 - protein, 13 aa, Severe acute respiratory syndrome coronavirus 2
  REGION 1..13: note = Table B: HLA-DQA1*05:01-B1*03:01L HLA-DRB1*01:03L HLA-DRB1*04:02L HLA-DRB1*04:05L HLA-DRB1*11:03L HLA-DRB1*14:02L HLA-DQA1*05:05-B1*03:116L HLA-DPA1*01:03-B1*04:02L HLA-DRB3*01:01L HLA-DPA1*02:01-B1*13:01L
  REGION 1..13: note = CONT. FROM ABOVE: HLA-DPA1*03:01-B1*105:01L HLA-DRB1*08:02L
DEFIERYKLEGYA

SEQ ID NO: 11467 - protein, 13 aa, Severe acute respiratory syndrome coronavirus 2
  REGION 1..13: note = Table B: HLA-DQA1*05:01-B1*03:01L HLA-DRB1*04:03L HLA-DRB1*13:02L HLA-DRB1*13:03L HLA-DRB1*04:02L HLA-DRB1*04:04L HLA-DRB1*08:04L HLA-DRB1*11:04L HLA-DRB1*11:01L HLA-DPA1*01:03-B1*04:01L HLA-DPA1*01:03-B1*04:02L
  REGION 1..13: note = CONT. FROM ABOVE: HLA-DRB3*01:01L HLA-DPA1*01:03-B1*02:01L HLA-D RB1*08:03L
IERYKLEGYAFEH

SEQ ID NO: 11468 - protein, 10 aa, Severe acute respiratory syndrome coronavirus 2
  REGION 1..10: note = Table B: HLA-DQA1*05:01-B1*03:01L HLA-DRB1*04:05L HLA-DQA1*01:02-B1*06:02L HLA-DPA1*03:01-B1*04:02L HLA-DQA1*01-B1*05L HLA-DQA1*05:05-B1*03:19L HLA-DQA1*05:01-B1*02:01L HLA-DPA1*01:03-B1*04:01L
  REGION 1..10: note = CONT. FROM ABOVE: HLA-DPA1*02:01-B1*13:01L HLA-DPA1*03:01-B1*105 :01L HLA-DPA1*01:02-B1*04:01L HLA-DRB1*16:01L HLA-DQA1*01:03-B1* 06:01L HLA-DQA1*02:01-B1*03:03L HLA-DRB1*15:03L
AFEHIVYGDF

SEQ ID NO: 11469 - protein, 10 aa, Severe acute respiratory syndrome coronavirus 2
  REGION 1..10: note = Table B: HLA-DQA1*05:01-B1*03:01L HLA-DRB1*01:03L HLA-DQA1*01:02-B1*06:02L HLA-DPA1*03:01-B1*105:01L HLA-DQA1*03:01-B1*03:02L HLA-DPA1*01:02-B1*04:01L HLA-DRB1*16:01L HLA-DQA1*01:03-B1*06:01L
  REGION 1..10: note = CONT. FROM ABOVE: HLA-DQA1*02:01-B1*03:03L
FSHSQLGGLH

SEQ ID NO: 11470 - protein, 12 aa, Severe acute respiratory syndrome coronavirus 2
  REGION 1..12: note = Table B: HLA-DQA1*05:01-B1*03:01L HLA-DRB1*01:03L HLA-DQA1*01:02-B1*06:02L HLA-DRB1*01:02L HLA-DQA1*01:01-B1*05:01L HLA-DRB1*04:10L HLA-DRB1*12:01L HLA-DPA1*02:01-B1*13:01L HLA-DPA1*03:01-B1*105:01L
  REGION 1..12: note = CONT. FROM ABOVE: HLA-DRB1*14:54L HLA-DRB1*04:08L HLA-DRB1*15:03 L
LEDFIPMDSTVK

SEQ ID NO: 11471 - protein, 10 aa, Severe acute respiratory syndrome coronavirus 2
  REGION 1..10: note = Table B: HLA-DQA1*05:01-B1*03:01L HLA-DRB1*04:03L HLA-DRB1*13:03L HLA-DRB1*01:03L HLA-DRB1*04:02L HLA-DRB1*04:05L HLA-DRB1*01:02L HLA-DRB4*03:01NL HLA-DQA1*01-B1*05L HLA-DQA1*05:01-B1*02:01L HLA-DRB1*12:01L
  REGION 1..10: note = CONT. FROM ABOVE: HLA-DQA1*03:01-B1*03:02L HLA-DRB1*14:17L HLA-D RB1*16:01L HLA-DQA1*02:01-B1*03:03L HLA-DRB1*15:03L
FIPMDSTVKN

SEQ ID NO: 11472 - protein, 15 aa, Severe acute respiratory syndrome coronavirus 2
  REGION 1..15: note = Table B: HLA-DQA1*05:01-B1*03:01L HLA-DQA1*05:05-B1*03:19L HLA-DQA1*05:05-B1*03:01L
DSTVKNYFITDAQTG

SEQ ID NO: 11473 - protein, 14 aa, Severe acute respiratory syndrome coronavirus 2
  REGION 1..14: note = Table B: HLA-DQA1*05:01-B1*03:01L HLA-DQA1*05:05-B1*03:19L HLA-DPA1*03:01-B1*105:01L HLA-DQA1*05:05-B1*03:01L HLA-DQA1*01:03-B1*06:01L HLA-DQA1*02:01-B1*03:03L
AQTGSSKCVCSVID

SEQ ID NO: 11474 - protein, 13 aa, Severe acute respiratory syndrome coronavirus 2
  REGION 1..13: note = Table B: HLA-DQA1*05:01-B1*03:01L HLA-DRB1*08:01L HLA-DRB3*01:01L HLA-DPA1*01:03-B1*104:01L HLA-DQA1*05:05-B1*03:01L
IDLLLDDFVEIIK

SEQ ID NO: 11475 - protein, 12 aa, Severe acute respiratory syndrome coronavirus 2
  REGION 1..12: note = Table B: HLA-DQA1*05:01-B1*03:01L HLA-DRB1*01:03L HLA-DRB1*04:05L HLA-DQA1*01:02-B1*06:02L HLA-DRB1*08:04L HLA-DPA1*03:01-B1*04:02L HLA-DRB1*08:01L HLA-DQA1*01-B1*05L HLA-DPA1*03:01-B1*105:01L HLA-DRB1*16:01L
  REGION 1..12: note = CONT. FROM ABOVE: HLA-DQA1*01:03-B1*06:01L HLA-DRB1*04:08L
VETFYPKLQSSQ

SEQ ID NO: 11476 - protein, 10 aa, Severe acute respiratory syndrome coronavirus 2
  REGION 1..10: note = Table B: HLA-DQA1*05:01-B1*03:01L HLA-DRB1*13:03L HLA-DQA1*01:02-B1*06:02M HLA-DPA1*03:01-B1*04:02L HLA-DRB1*14:01L HLA-DRB1*14:02L HLA-DQA1*05:01-B1*02:01L HLA-DPA1*02:01-B1*13:01L HLA-DPA1*03:01-B1*105:01M
  REGION 1..10: note = CONT. FROM ABOVE: HLA-DQA1*02:01-B1*03:03L HLA-DRB1*15:03L
YPKLQSSQAW

SEQ ID NO: 11477 - protein, 10 aa, Severe acute respiratory syndrome coronavirus 2
  REGION 1..10: note = Table B: HLA-DQA1*05:01-B1*03:01L HLA-DQA1*01:02-B1*06:02L HLA-DQA1*05:05-B1*03:19L HLA-DQA1*03:01-B1*03:02L HLA-DQA1*05:05-B1*03:01L HLA-DQA1*01:03-B1*06:01L HLA-DQA1*02:01-B1*03:03L
PGVAMPNLYK

SEQ ID NO: 11478 - protein, 14 aa, Severe acute respiratory syndrome coronavirus 2
  REGION 1..14: note = Table B: HLA-DQA1*05:01-B1*03:01L HLA-DRB1*04:03L HLA-DRB1*04:04L HLA-DRB1*01:01L HLA-DRB1*11:02L HLA-DRB1*11:03L HLA-DRB1*14:02L HLA-DQA1*05:05-B1*03:116L HLA-DPA1*01:03-B1*04:02L HLA-DPA1*02:01-B1*13:01L
  REGION 1..14: note = CONT. FROM ABOVE: HLA-DPA1*03:01-B1*105:01L HLA-DQA1*03:01-B1*03 :02L HLA-DPA1*01:03-B1*02:01L HLA-DRB1*07:01L HLA-DRB1*08:02L HL A-DRB1*08:03L HLA-DQA1*02:01-B1*03:03L
MPNLYKMQRMLLEK

SEQ ID NO: 11479 - protein, 15 aa, Severe acute respiratory syndrome coronavirus 2
  REGION 1..15: note = Table B: HLA-DQA1*05:01-B1*03:01L HLA-DRB1*01:02L HLA-DRB1*04:08L HLA-DRB1*15:03L
RMLLEKCDLQNYGDS

SEQ ID NO: 11480 - protein, 12 aa, Severe acute respiratory syndrome coronavirus 2
  REGION 1..12: note = Table B: HLA-DQA1*05:01-B1*03:01L HLA-DQA1*05:05-B1*03:19L HLA-DPA1*03:01-B1*105:01L HLA-DQA1*05:05-B1*03:01L
LPKGIMMNVAKY

SEQ ID NO: 11481 - protein, 14 aa, Severe acute respiratory syndrome coronavirus 2
  REGION 1..14: note = Table B: HLA-DQA1*05:01-B1*03:01L HLA-DRB1*13:02L HLA-DRB1*04:04L HLA-DRB1*14:01L HLA-DRB1*11:01L HLA-DPA1*01:03-B1*02:01L
NVAKYTQLCQYLNT

SEQ ID NO: 11482 - protein, 15 aa, Severe acute respiratory syndrome coronavirus 2
  REGION 1..15: note = Table B: HLA-DQA1*05:01-B1*03:01L HLA-DRB1*13:02L HLA-DRB1*01:01L HLA-DRB1*11:01L HLA-DQA1*01-B1*05L HLA-DPA1*01:03-B1*02:01L HLA-DRB1*08:02L HLA-DRB1*08:03L
VAKYTQLCQYLNTLT

SEQ ID NO: 11483 - protein, 10 aa, Severe acute respiratory syndrome coronavirus 2
  REGION 1..10: note = Table B: HLA-DQA1*05:01-B1*03:01L HLA-DRB1*04:03L HLA-DQA1*01:02-B1*06:02L HLA-DPA1*03:01-B1*105:01L HLA-DQA1*03:01-B1*03:02L HLA-DQA1*05:05-B1*03:01L HLA-DRB1*14:17L HLA-DQA1*01:03-B1*06:01L
  REGION 1..10: note = CONT. FROM ABOVE: HLA-DQA1*02:01-B1*03:03L
LTLAVPYNMR

SEQ ID NO: 11484 - protein, 10 aa, Severe acute respiratory syndrome coronavirus 2
  REGION 1..10: note = Table B: HLA-DQA1*05:01-B1*03:01L HLA-DRB1*13:03L HLA-DRB1*01:03L HLA-DRB1*04:05L HLA-DQA1*01:02-B1*06:02M HLA-DRB1*01:01L HLA-DRB1*01:02L HLA-DPA1*03:01-B1*04:02L HLA-DRB1*14:01L HLA-DRB1*08:01L HLA-DQA1*05:01-B1*02:01L
  REGION 1..10: note = CONT. FROM ABOVE: HLA-DQA1*05:05-B1*03:116L HLA-DPA1*02:01-B1*13 :01M HLA-DPA1*03:01-B1*105:01M HLA-DPA1*01:02-B1*04:01L HLA-DRB1 *16:01L HLA-DQA1*01:03-B1*06:01L HLA-DQA1*02:01-B1*03:03L HLA-DR B1*15:03M
VPYNMRVIHF

SEQ ID NO: 11485 - protein, 12 aa, Severe acute respiratory syndrome coronavirus 2
  REGION 1..12: note = Table B: HLA-DQA1*05:01-B1*03:01L HLA-DRB1*01:03L HLA-DRB4*03:01NL HLA-DQA1*01:01-B1*05:01L HLA-DQA1*05:05-B1*03:19L HLA-DQA1*05:05-B1*03:01L
AGSDKGVAPGTA

SEQ ID NO: 11486 - protein, 11 aa, Severe acute respiratory syndrome coronavirus 2
  REGION 1..11: note = Table B: HLA-DQA1*05:01-B1*03:01L
SDKGVAPGTAV

SEQ ID NO: 11487 - protein, 12 aa, Severe acute respiratory syndrome coronavirus 2
  REGION 1..12: note = Table B: HLA-DQA1*05:01-B1*03:01L HLA-DQA1*05:05-B1*03:19L
DKGVAPGTAVLR

SEQ ID NO: 11488 - protein, 10 aa, Severe acute respiratory syndrome coronavirus 2
  REGION 1..10: note = Table B: HLA-DQA1*05:01-B1*03:01L HLA-DRB1*13:03L HLA-DRB1*01:03L HLA-DQA1*01:02-B1*06:02M HLA-DPA1*01:03-B1*03:01L HLA-DPA1*03:01-B1*04:02L HLA-DRB1*14:01L HLA-DRB1*14:02L HLA-DQA1*05:01-B1*02:01L
  REGION 1..10: note = CONT. FROM ABOVE: HLA-DPA1*01:03-B1*04:01L HLA-DPA1*02:01-B1*13: 01L HLA-DPA1*03:01-B1*105:01M HLA-DQA1*02:01-B1*03:03L HLA-DRB1* 15:03L
APGTAVLRQW

SEQ ID NO: 11489 - protein, 13 aa, Severe acute respiratory syndrome coronavirus 2
  REGION 1..13: note = Table B: HLA-DQA1*05:01-B1*03:01L HLA-DRB1*13:02L HLA-DRB1*01:03L HLA-DRB1*04:04L HLA-DRB1*04:05L HLA-DRB3*02:01L HLA-DPA1*01:03-B1*03:01L HLA-DQA1*05:05-B1*03:19L HLA-DQA1*05:05-B1*03:01L HLA-DRB1*14:17L
  REGION 1..13: note = CONT. FROM ABOVE: HLA-DQA1*01:03-B1*06:01L HLA-DRB1*04:08L
TAVLRQWLPTGTL

SEQ ID NO: 11490 - protein, 12 aa, Severe acute respiratory syndrome coronavirus 2
  REGION 1..12: note = Table B: HLA-DQA1*05:01-B1*03:01L HLA-DRB1*04:03L HLA-DRB1*13:02L HLA-DRB1*01:03L HLA-DRB1*04:02L HLA-DRB1*04:05L HLA-DQA1*01:02-B1*06:02L HLA-DRB1*01:02L HLA-DRB4*03:01NL HLA-DRB1*08:77L HLA-DRB3*02:01L HLA-DPA1*01:03-B1*03:01L
  REGION 1..12: note = CONT. FROM ABOVE: HLA-DPA1*03:01-B1*04:02L HLA-DRB1*14:01L HLA-D RB1*11:03L HLA-DQA1*01-B1*05L HLA-DQA1*05:05-B1*03:19L HLA-DPA1* 01:03-B1*04:01L HLA-DPA1*01:03-B1*04:02L HLA-DRB1*12:01L HLA-DPA 1*03:01-B1*105:01L HLA-DQA1*05:05-B1*03:01L HLA-DRB1*14:17L
  REGION 1..12: note = CONT. FROM ABOVE: HLA-DPA1*01:02-B1*04:01L HLA-DRB1*07:01L HLA-D RB1*16:01L HLA-DRB1*04:08L HLA-DRB1*15:03L
WLPTGTLLVDSD

SEQ ID NO: 11491 - protein, 13 aa, Severe acute respiratory syndrome coronavirus 2
  REGION 1..13: note = Table B: HLA-DQA1*05:01-B1*03:01L HLA-DQA1*01:01-B1*05:01L HLA-DQA1*01-B1*05L HLA-DQA1*05:05-B1*03:19L HLA-DPA1*03:01-B1*105:01L HLA-DQA1*05:05-B1*03:01L HLA-DRB1*16:01L
LPTGTLLVDSDLN

SEQ ID NO: 11492 - protein, 14 aa, Severe acute respiratory syndrome coronavirus 2
  REGION 1..14: note = Table B: HLA-DQA1*05:01-B1*03:01L HLA-DRB1*14:04L HLA-DQA1*01:02-B1*06:02L HLA-DRB1*11:02L HLA-DQA1*01:01-B1*05:01L HLA-DRB1*08:01L HLA-DRB4*02:01NL HLA-DPA1*01:03-B1*104:01L HLA-DPA1*01:02-B1*04:01L
  REGION 1..14: note = CONT. FROM ABOVE: HLA-DQA1*01:03-B1*06:01L HLA-DRB1*08:02L HLA-D RB1*15:01L
LNDFVSDADSTLIG

SEQ ID NO: 11493 - protein, 12 aa, Severe acute respiratory syndrome coronavirus 2
  REGION 1..12: note = Table B: HLA-DQA1*05:01-B1*03:01L HLA-DRB1*04:03L HLA-DPA1*03:01-B1*105:01L HLA-DQA1*03:01-B1*03:02L
IGDCATVHTANK

SEQ ID NO: 11494 - protein, 15 aa, Severe acute respiratory syndrome coronavirus 2
  REGION 1..15: note = Table B: HLA-DQA1*05:01-B1*03:01L HLA-DRB1*13:02L HLA-DRB1*01:03L HLA-DRB1*04:04L HLA-DPA1*03:01-B1*04:02L HLA-DRB1*14:01L HLA-DRB1*08:01L HLA-DQA1*05:05-B1*03:01L HLA-DPA1*01:02-B1*04:01L HLA-DRB1*07:01L
  REGION 1..15: note = CONT. FROM ABOVE: HLA-DQA1*01:03-B1*06:01L
ANKWDLIISDMYDPK

SEQ ID NO: 11495 - protein, 14 aa, Severe acute respiratory syndrome coronavirus 2
  REGION 1..14: note = Table B: HLA-DQA1*05:01-B1*03:01L HLA-DRB1*13:02L HLA-DRB1*01:01L HLA-DPA1*01:03-B1*03:01L HLA-DRB1*03:01L HLA-DRB1*11:03L HLA-DRB1*14:02L HLA-DQA1*01:01-B1*05:01L HLA-DRB1*11:01L HLA-DRB4*01:01L HLA-DPA1*01:03-B1*04:02L
  REGION 1..14: note = CONT. FROM ABOVE: HLA-DRB3*01:01L HLA-DQA1*05:05-B1*03:01L
DLIISDMYDPKTKN

SEQ ID NO: 11496 - protein, 11 aa, Severe acute respiratory syndrome coronavirus 2
  REGION 1..11: note = Table B: HLA-DQA1*05:01-B1*03:01L HLA-DRB1*01:03L HLA-DQA1*01:02-B1*06:02L HLA-DRB1*03:01L HLA-DQA1*05:01-B1*02:01L HLA-DPA1*01:03-B1*04:01L HLA-DRB1*16:01L
VTKENDSKEGF

SEQ ID NO: 11497 - protein, 14 aa, Severe acute respiratory syndrome coronavirus 2
  REGION 1..14: note = Table B: HLA-DQA1*05:01-B1*03:01L HLA-DRB1*04:03L HLA-DRB1*13:02L HLA-DRB1*04:04L HLA-DRB1*04:05L HLA-DRB1*01:01L HLA-DPA1*01:03-B1*03:01L HLA-DPA1*03:01-B1*04:02L HLA-DRB1*14:01L HLA-DRB1*14:02L HLA-DRB1*08:01L HLA-DRB1*11:01L
  REGION 1..14: note = CONT. FROM ABOVE: HLA-DQA1*01-B1*05L HLA-DQA1*05:05-B1*03:19L HL A-DPA1*02:01-B1*13:01L HLA-DQA1*05:05-B1*03:01L HLA-DRB1*10:01L
EGFFTYICGFIQQK

SEQ ID NO: 11498 - protein, 10 aa, Severe acute respiratory syndrome coronavirus 2
  REGION 1..10: note = Table B: HLA-DQA1*05:01-B1*03:01L HLA-DRB1*04:03L HLA-DRB1*04:02L HLA-DRB1*01:02L HLA-DRB4*03:01NL HLA-DRB1*12:01L HLA-DQA1*03:01-B1*03:02L HLA-DQA1*05:05-B1*03:01L HLA-DRB1*14:17L HLA-DQA1*02:01-B1*03:03L
LALGGSVAIK

SEQ ID NO: 11499 - protein, 10 aa, Severe acute respiratory syndrome coronavirus 2
  REGION 1..10: note = Table B: HLA-DQA1*05:01-B1*03:01L HLA-DRB1*08:77L HLA-DPA1*01:03-B1*03:01L HLA-DPA1*03:01-B1*04:02L HLA-DQA1*01-B1*05L HLA-DQA1*05:05-B1*03:19L HLA-DQA1*05:01-B1*02:01L HLA-DRB4*01:01L
  REGION 1..10: note = CONT. FROM ABOVE: HLA-DPA1*01:03-B1*04:01L HLA-DPA1*01:03-B1*104 :01L HLA-DPA1*01:02-B1*04:01L HLA-DRB1*10:01L HLA-DRB1*16:01L
ADLYKLMGHF

SEQ ID NO: 11500 - protein, 11 aa, Severe acute respiratory syndrome coronavirus 2
  REGION 1..11: note = Table B: HLA-DQA1*05:01-B1*03:01L HLA-DQA1*05:05-B1*03:19L HLA-DQA1*05:01-B1*02:01L HLA-DQA1*05:05-B1*03:01L HLA-DRB1*16:01L HLA-DQA1*02:01-B1*03:03L
AWWTAFVTNVN

SEQ ID NO: 11501 - protein, 13 aa, Severe acute respiratory syndrome coronavirus 2
  REGION 1..13: note = Table B: HLA-DQA1*05:01-B1*03:01L HLA-DRB1*01:02L HLA-DRB3*02:01L HLA-DPA1*01:03-B1*03:01L HLA-DRB1*14:02L HLA-DQA1*05:05-B1*03:19L
WTAFVTNVNASSS

SEQ ID NO: 11502 - protein, 11 aa, Severe acute respiratory syndrome coronavirus 2
  REGION 1..11: note = Table B: HLA-DQA1*05:01-B1*03:01L HLA-DRB1*04:01L HLA-DRB1*13:02L HLA-DRB1*13:03L HLA-DRB1*01:03L HLA-DRB1*04:02L HLA-DRB1*04:04L HLA-DRB1*04:05L HLA-DQA1*01:02-B1*06:02L HLA-DRB1*01:01L HLA-DRB1*01:02L HLA-DRB4*03:01NL HLA-DRB1*08:04L
  REGION 1..11: note = CONT. FROM ABOVE: HLA-DRB1*08:77L HLA-DRB3*02:01L HLA-DPA1*01:03 -B1*03:01L HLA-DRB1*14:01L HLA-DRB1*11:03L HLA-DRB1*11:04L HLA-D RB1*14:02L HLA-DRB1*11:01L HLA-DQA1*01-B1*05L HLA-DQA1*05:05-B1* 03:19L HLA-DQA1*05:01-B1*02:01L HLA-DRB1*04:10L HLA-DRB1*12:01L
  REGION 1..11: note = CONT. FROM ABOVE: HLA-DRB1*12:02L HLA-DPA1*03:01-B1*105:01L HLA- DQA1*03:01-B1*03:02L HLA-DQA1*05:05-B1*03:01L HLA-DRB1*10:01L HL A-DRB1*16:01L HLA-DRB1*04:08L HLA-DRB1*08:03L HLA-DQA1*02:01-B1* 03:03L HLA-DRB1*15:03L
FVTNVNASSSE

SEQ ID NO: 11503 - protein, 12 aa, Severe acute respiratory syndrome coronavirus 2
  REGION 1..12: note = Table B: HLA-DQA1*05:01-B1*03:01L HLA-DRB1*04:03L HLA-DQA1*01:02-B1*06:02L HLA-DQA1*01:01-B1*05:01L HLA-DQA1*01-B1*05L HLA-DQA1*05:05-B1*03:19L HLA-DRB1*12:01L HLA-DPA1*03:01-B1*105:01L HLA-DQA1*05:05-B1*03:01L
  REGION 1..12: note = CONT. FROM ABOVE: HLA-DRB1*16:01L
VNASSSEAFLIG

SEQ ID NO: 11504 - protein, 14 aa, Severe acute respiratory syndrome coronavirus 2
  REGION 1..14: note = Table B: HLA-DQA1*05:01-B1*03:01L HLA-DRB1*04:01L HLA-DRB1*13:02L HLA-DRB1*04:02L HLA-DRB1*04:04L HLA-DRB1*04:05L HLA-DRB1*01:01L HLA-DRB1*08:04L HLA-DRB1*14:01L HLA-DRB1*11:04L HLA-DRB1*11:01L HLA-DRB1*12:01L HLA-DRB3*01:01L
  REGION 1..14: note = CONT. FROM ABOVE: HLA-DQA1*03:01-B1*03:02L HLA-DPA1*01:03-B1*02: 01L HLA-DQA1*05:05-B1*03:01L HLA-DRB1*14:17L HLA-DRB1*10:01L HLA -DQA1*01:03-B1*06:01L HLA-DQA1*02:01-B1*03:03L
EAFLIGCNYLGKPR

SEQ ID NO: 11505 - protein, 11 aa, Severe acute respiratory syndrome coronavirus 2
  REGION 1..11: note = Table B: HLA-DQA1*05:01-B1*03:01L HLA-DRB1*04:03L HLA-DRB1*13:03L HLA-DRB1*01:03L HLA-DRB1*04:02L HLA-DRB1*01:02L HLA-DRB1*14:01L HLA-DRB1*08:01L HLA-DQA1*05:05-B1*03:01L HLA-DRB1*14:17L HLA-DRB1*16:01L HLA-DRB1*04:08L
YLGKPREQIDG

SEQ ID NO: 11506 - protein, 15 aa, Severe acute respiratory syndrome coronavirus 2
  REGION 1..15: note = Table B: HLA-DQA1*05:01-B1*03:01L HLA-DRB1*13:02L HLA-DPA1*01:03-B1*03:01L HLA-DRB1*04:08L
GKPREQIDGYVMHAN

SEQ ID NO: 11507 - protein, 10 aa, Severe acute respiratory syndrome coronavirus 2
  REGION 1..10: note = Table B: HLA-DQA1*05:01-B1*03:01L HLA-DPA1*01:03-B1*03:01L HLA-DRB1*03:01L HLA-DQA1*01-B1*05L HLA-DQA1*05:05-B1*03:19L HLA-DQA1*05:01-B1*02:01L HLA-DPA1*01:03-B1*104:01L HLA-DRB1*16:01L HLA-DQA1*02:01-B1*03:03L
IDGYVMHANY

SEQ ID NO: 11508 - protein, 11 aa, Severe acute respiratory syndrome coronavirus 2
  REGION 1..11: note = Table B: HLA-DQA1*05:01-B1*03:01L HLA-DPA1*03:01-B1*04:02L HLA-DRB1*14:01L HLA-DQA1*05:01-B1*02:01L HLA-DRB1*12:01L HLA-DPA1*03:01-B1*105:01L HLA-DPA1*01:02-B1*04:01L
DGYVMHANYIF

SEQ ID NO: 11509 - protein, 10 aa, Severe acute respiratory syndrome coronavirus 2
  REGION 1..10: note = Table B: HLA-DQA1*05:01-B1*03:01L HLA-DRB1*13:03L HLA-DRB1*04:05L HLA-DQA1*01:02-B1*06:02L HLA-DRB1*01:02L HLA-DPA1*01:03-B1*03:01L HLA-DPA1*03:01-B1*04:02L HLA-DRB1*14:01L HLA-DRB1*08:01L HLA-DRB5*01:01L
  REGION 1..10: note = CONT. FROM ABOVE: HLA-DQA1*01-B1*05L HLA-DQA1*05:01-B1*02:01L HL A-DQA1*05:05-B1*03:116L HLA-DPA1*02:01-B1*13:01L HLA-DPA1*03:01- B1*105:01L HLA-DQA1*03:01-B1*03:02L HLA-DPA1*01:02-B1*04:01L HLA -DRB1*16:01L HLA-DQA1*02:01-B1*03:03L HLA-DRB1*15:03L
FPLKLRGTAV

SEQ ID NO: 11510 - protein, 10 aa, Severe acute respiratory syndrome coronavirus 2
  REGION 1..10: note = Table B: HLA-DQA1*05:01-B1*03:01L HLA-DQA1*01:02-B1*06:02L HLA-DPA1*03:01-B1*105:01L HLA-DPA1*01:02-B1*04:01L HLA-DQA1*01:03-B1*06:01L HLA-DQA1*02:01-B1*03:03L
LRGTAVMSLK

SEQ ID NO: 11511 - protein, 13 aa, Severe acute respiratory syndrome coronavirus 2
  REGION 1..13: note = Table B: HLA-DQA1*05:01-B1*03:01L HLA-DRB1*01:03L HLA-DRB1*04:02L HLA-DRB1*04:05L HLA-DRB1*01:02L HLA-DRB1*12:01L HLA-DPA1*01:02-B1*04:01L HLA-DRB1*16:01L HLA-DRB1*04:08L
INDMILSLLSKGR

SEQ ID NO: 11512 - protein, 12 aa, Severe acute respiratory syndrome coronavirus 2
  REGION 1..12: note = Table B: HLA-DQA1*05:01-B1*03:01L HLA-DRB1*13:02L HLA-DRB1*01:03L HLA-DRB1*04:02L HLA-DRB1*04:05L HLA-DRB1*01:02L HLA-DRB3*02:01L HLA-DPA1*03:01-B1*04:02L HLA-DQA1*05:01-B1*02:01L HLA-DRB1*12:01L
  REGION 1..12: note = CONT. FROM ABOVE: HLA-DPA1*03:01-B1*105:01L HLA-DRB1*14:54L HLA- DQA1*05:05-B1*03:01L HLA-DPA1*01:02-B1*04:01L HLA-DRB1*16:01L HL A-DRB1*04:08L
DMILSLLSKGRL

SEQ ID NO: 11513 - protein, 12 aa, Severe acute respiratory syndrome coronavirus 2
  REGION 1..12: note = Table B: HLA-DQA1*05:01-B1*03:01L HLA-DRB1*04:05L HLA-DQA1*01:02-B1*06:02L HLA-DRB4*03:01NL HLA-DRB3*02:01L HLA-DPA1*01:03-B1*03:01L HLA-DPA1*03:01-B1*04:02L HLA-DRB1*03:01L HLA-DRB1*11:03L HLA-DRB1*14:02L HLA-DRB1*08:01L
  REGION 1..12: note = CONT. FROM ABOVE: HLA-DRB1*11:01L HLA-DQA1*05:01-B1*02:01L HLA-D PA1*03:01-B1*105:01L HLA-DQA1*02:01-B1*03:03L
LIIRENNRVVIS

SEQ ID NO: 11514 - protein, 13 aa, Severe acute respiratory syndrome coronavirus 2
  REGION 1..13: note = Table B: HLA-DQA1*05:01-B1*03:01L HLA-DRB1*04:05L HLA-DQA1*01:02-B1*06:02L HLA-DRB1*08:77L HLA-DRB3*02:01L HLA-DPA1*01:03-B1*03:01L HLA-DRB1*03:01L HLA-DRB1*11:03L HLA-DRB1*14:02L HLA-DRB1*11:01L HLA-DQA1*05:05-B1*03:19L
  REGION 1..13: note = CONT. FROM ABOVE: HLA-DQA1*05:01-B1*02:01L HLA-DQA1*03:01-B1*03: 02L HLA-DQA1*02:01-B1*03:03L
IIRENNRVVISSD

SEQ ID NO: 11515 - protein, 12 aa, Severe acute respiratory syndrome coronavirus 2
  REGION 1..12: note = Table B: HLA-DQA1*05:01-B1*03:01L HLA-DRB1*13:02L HLA-DRB1*04:04L HLA-DRB1*04:05L HLA-DRB1*01:02L HLA-DRB4*03:01NL HLA-DQA1*01-B1*05L HLA-DRB1*04:10L HLA-DRB1*12:02L HLA-DQA1*02:01-B1*03:03L HLA-DRB1*15:03L
NRVVISSDVLVN

SEQ ID NO: 11516 - protein, 13 aa, Severe acute respiratory syndrome coronavirus 2
  REGION 1..13: note = Table B: HLA-DQA1*05:01-B1*03:01L HLA-DRB1*04:02L HLA-DRB1*04:04L HLA-DPA1*01:03-B1*03:01L HLA-DQA1*02:01-B1*03:03L
LVLLPLVSSQCVN

SEQ ID NO: 11517 - protein, 12 aa, Severe acute respiratory syndrome coronavirus 2
  REGION 1..12: note = Table B: HLA-DQA1*05:01-B1*03:01L HLA-DRB1*13:02L HLA-DRB1*13:03L HLA-DRB1*01:03L HLA-DRB4*03:01NL HLA-DRB1*08:04L HLA-DRB1*08:01L HLA-DRB1*12:01L HLA-DQA1*03:01-B1*03:02L HLA-DRB1*16:01L HLA-DQA1*02:01-B1*03:03L
VNLTTRTQLPPA

SEQ ID NO: 11518 - protein, 12 aa, Severe acute respiratory syndrome coronavirus 2
  REGION 1..12: note = Table B: HLA-DQA1*05:01-B1*03:01L HLA-DQA1*01:02-B1*06:02L HLA-DRB1*14:01L HLA-DQA1*01:03-B1*06:01L
TNSFTRGVYYPD

SEQ ID NO: 11519 - protein, 10 aa, Severe acute respiratory syndrome coronavirus 2
  REGION 1..10: note = Table B: HLA-DQA1*05:01-B1*03:01L HLA-DRB1*01:03L HLA-DRB1*04:02L HLA-DQA1*01:02-B1*06:02L HLA-DQA1*03:01-B1*03:02L HLA-DPA1*01:02-B1*04:01L HLA-DRB1*16:01L HLA-DQA1*01:03-B1*06:01L
  REGION 1..10: note = CONT. FROM ABOVE: HLA-DQA1*02:01-B1*03:03L
FTRGVYYPDK

SEQ ID NO: 11520 - protein, 10 aa, Severe acute respiratory syndrome coronavirus 2
  REGION 1..10: note = Table B: HLA-DQA1*05:01-B1*03:01L HLA-DRB1*13:03L HLA-DQA1*01:02-B1*06:02L HLA-DQA1*01-B1*05L HLA-DQA1*05:05-B1*03:116L HLA-DPA1*02:01-B1*13:01L HLA-DPA1*03:01-B1*105:01L HLA-DPA1*01:02-B1*04:01L
  REGION 1..10: note = CONT. FROM ABOVE: HLA-DRB1*16:01L
YPDKVFRSSV

SEQ ID NO: 11521 - protein, 11 aa, Severe acute respiratory syndrome coronavirus 2
  REGION 1..11: note = Table B: HLA-DQA1*05:01-B1*03:01L HLA-DRB1*01:03L HLA-DQA1*05:05-B1*03:01L HLA-DPA1*01:02-B1*04:01L HLA-DRB1*04:08L
VFRSSVLHSTQ

SEQ ID NO: 11522 - protein, 11 aa, Severe acute respiratory syndrome coronavirus 2
  REGION 1..11: note = Table B: HLA-DQA1*05:01-B1*03:01L HLA-DQA1*05:05-B1*03:19L HLA-DQA1*05:05-B1*03:01L HLA-DPA1*01:02-B1*04:01L
FRSSVLHSTQD

SEQ ID NO: 11523 - protein, 13 aa, Severe acute respiratory syndrome coronavirus 2
  REGION 1..13: note = Table B: HLA-DQA1*05:01-B1*03:01L HLA-DRB1*04:03L HLA-DRB1*13:02L HLA-DRB1*01:03L HLA-DRB1*04:02L HLA-DRB1*04:05L HLA-DRB3*02:01L HLA-DRB1*14:01L HLA-DQA1*05:01-B1*02:01L HLA-DPA1*02:01-B1*13:01L HLA-DRB1*04:08L HLA-DRB1*15:01L
FSNVTWFHAIHVS

SEQ ID NO: 11524 - protein, 12 aa, Severe acute respiratory syndrome coronavirus 2
  REGION 1..12: note = Table B: HLA-DQA1*05:01-B1*03:01L HLA-DRB1*13:02L HLA-DQA1*01:02-B1*06:02L HLA-DRB1*08:01L HLA-DRB1*15:01L
NVTWFHAIHVSG

SEQ ID NO: 11525 - protein, 11 aa, Severe acute respiratory syndrome coronavirus 2
  REGION 1..11: note = Table B: HLA-DQA1*05:01-B1*03:01L HLA-DQA1*05:05-B1*03:19L HLA-DQA1*03:01-B1*03:02L HLA-DQA1*05:05-B1*03:01L HLA-DQA1*01:03-B1*06:01L
WFHAIHVSGTN

SEQ ID NO: 11526 - protein, 12 aa, Severe acute respiratory syndrome coronavirus 2
  REGION 1..12: note = Table B: HLA-DQA1*05:01-B1*03:01L HLA-DRB1*04:04L HLA-DQA1*01:02-B1*06:02L HLA-DRB1*01:02L HLA-DRB1*14:01L HLA-DRB1*11:04L HLA-DRB1*08:01L HLA-DRB1*04:10L HLA-DRB1*14:54L HLA-DRB1*10:01L HLA-DRB1*04:08L HLA-DRB1*08:03L HLA-DRB1*15:03L
HAIHVSGTNGTK

SEQ ID NO: 11527 - protein, 12 aa, Severe acute respiratory syndrome coronavirus 2
  REGION 1..12: note = Table B: HLA-DQA1*05:01-B1*03:01L HLA-DRB1*04:04L HLA-DQA1*01:02-B1*06:02L HLA-DRB1*01:02L HLA-DRB1*04:08L
AIHVSGTNGTKR

SEQ ID NO: 11528 - protein, 10 aa, Severe acute respiratory syndrome coronavirus 2
  REGION 1..10: note = Table B: HLA-DQA1*05:01-B1*03:01L HLA-DRB1*04:01L HLA-DRB1*13:02L HLA-DRB1*13:03L HLA-DRB1*01:03L HLA-DRB1*04:02L HLA-DRB1*01:01L HLA-DRB4*03:01NL HLA-DRB3*02:01L HLA-DRB1*14:01L HLA-DRB1*11:04L HLA-DRB1*14:02L HLA-DRB1*08:01L HLA-DRB5*01:01L
  REGION 1..10: note = CONT. FROM ABOVE: HLA-DPA1*01:03-B1*04:02L HLA-DRB1*12:01L HLA-D RB1*12:02L HLA-DQA1*03:01-B1*03:02M HLA-DQA1*05:05-B1*03:01L HLA -DRB1*14:17L HLA-DRB1*16:01L HLA-DQA1*01:03-B1*06:01L HLA-DQA1*0 2:01-B1*03:03L HLA-DRB1*15:01L
ASTEKSNIIR

SEQ ID NO: 11529 - protein, 14 aa, Severe acute respiratory syndrome coronavirus 2
  REGION 1..14: note = Table B: HLA-DQA1*05:01-B1*03:01L HLA-DRB1*01:03L HLA-DRB1*01:02L HLA-DPA1*01:03-B1*03:01L HLA-DQA1*05:05-B1*03:19L HLA-DPA1*01:03-B1*04:01L HLA-DPA1*02:01-B1*13:01L HLA-DRB1*16:01L HLA-DRB1*04:08L
NIIRGWIFGTTLDS

SEQ ID NO: 11530 - protein, 10 aa, Severe acute respiratory syndrome coronavirus 2
  REGION 1..10: note = Table B: HLA-DQA1*05:01-B1*03:01L HLA-DRB1*04:03L HLA-DRB1*13:02L HLA-DRB1*13:03L HLA-DRB1*04:02L HLA-DQA1*01:02-B1*06:02L HLA-DRB4*03:01NL HLA-DRB1*12:01L HLA-DPA1*03:01-B1*105:01L HLA-DQA1*03:01-B1*03:02L
  REGION 1..10: note = CONT. FROM ABOVE: HLA-DQA1*05:05-B1*03:01L HLA-DRB1*14:17L HLA-D RB1*16:01L HLA-DQA1*01:03-B1*06:01L HLA-DQA1*02:01-B1*03:03L
WIFGTTLDSK

SEQ ID NO: 11531 - protein, 13 aa, Severe acute respiratory syndrome coronavirus 2
  REGION 1..13: note = Table B: HLA-DQA1*05:01-B1*03:01L
NATNVVIKVCEFQ

SEQ ID NO: 11532 - protein, 15 aa, Severe acute respiratory syndrome coronavirus 2
  REGION 1..15: note = Table B: HLA-DQA1*05:01-B1*03:01L HLA-DRB1*04:03L HLA-DRB1*13:02L HLA-DPA1*01:03-B1*03:01L HLA-DRB1*08:01L HLA-DQA1*01-B1*05L HLA-DQA1*05:05-B1*03:19L HLA-DQA1*05:01-B1*02:01L HLA-DPA1*02:01-B1*13:01L
  REGION 1..15: note = CONT. FROM ABOVE: HLA-DPA1*01:03-B1*104:01L HLA-DQA1*05:05-B1*03 :01L HLA-DQA1*02:01-B1*03:03L
VVIKVCEFQFCNDPF

SEQ ID NO: 11533 - protein, 12 aa, Severe acute respiratory syndrome coronavirus 2
  REGION 1..12: note = Table B: HLA-DQA1*05:01-B1*03:01L HLA-DRB1*04:05L HLA-DQA1*01:02-B1*06:02L HLA-DRB1*01:02L HLA-DPA1*01:03-B1*03:01L HLA-DRB1*12:01L HLA-DPA1*01:03-B1*02:01L HLA-DQA1*02:01-B1*03:03L
  REGION 1..12: note = CONT. FROM ABOVE: HLA-DRB1*15:03L
NDPFLGVYYHKN

SEQ ID NO: 11534 - protein, 12 aa, Severe acute respiratory syndrome coronavirus 2
  REGION 1..12: note = Table B: HLA-DQA1*05:01-B1*03:01L HLA-DRB1*04:03L HLA-DRB1*13:02L HLA-DRB1*13:03L HLA-DRB1*04:04L HLA-DRB1*04:05L HLA-DQA1*01:02-B1*06:02L HLA-DRB1*01:02L HLA-DRB1*08:04L HLA-DPA1*01:03-B1*03:01L HLA-DRB1*14:01L HLA-DRB1*11:04L
  REGION 1..12: note = CONT. FROM ABOVE: HLA-DRB1*11:01L HLA-DQA1*01-B1*05L HLA-DRB1*12 :01L HLA-DRB3*01:01L HLA-DPA1*02:01-B1*13:01L HLA-DPA1*01:03-B1* 02:01L HLA-DQA1*02:01-B1*03:03L HLA-DRB1*15:03L
DPFLGVYYHKNN

SEQ ID NO: 11535 - protein, 10 aa, Severe acute respiratory syndrome coronavirus 2
  REGION 1..10: note = Table B: HLA-DQA1*05:01-B1*03:01L HLA-DRB1*04:03L HLA-DRB1*01:03M HLA-DRB1*04:05M HLA-DQA1*01:02-B1*06:02L HLA-DRB1*01:01L HLA-DRB1*01:02L HLA-DRB1*08:77L HLA-DPA1*03:01-B1*04:02L HLA-DRB1*11:03L HLA-DRB1*14:02L
  REGION 1..10: note = CONT. FROM ABOVE: HLA-DQA1*01:01-B1*05:01L HLA-DRB1*11:01L HLA-D QA1*05:05-B1*03:19L HLA-DQA1*05:01-B1*02:01L HLA-DRB4*01:01L HLA -DPA1*01:03-B1*04:01L HLA-DQA1*05:05-B1*03:116L HLA-DPA1*01:03-B 1*04:02L HLA-DRB1*12:01L HLA-DPA1*02:01-B1*13:01M
  REGION 1..10: note = CONT. FROM ABOVE: HLA-DPA1*03:01-B1*105:01L HLA-DPA1*01:02-B1*04 :01L HLA-DRB1*16:01L HLA-DQA1*01:03-B1*06:01M HLA-DQA1*02:01-B1* 03:03L HLA-DRB1*15:03L
VYYHKNNKSW

SEQ ID NO: 11536 - protein, 13 aa, Severe acute respiratory syndrome coronavirus 2
  REGION 1..13: note = Table B: HLA-DQA1*05:01-B1*03:01L HLA-DRB1*04:03L HLA-DRB1*04:05L HLA-DRB1*11:01L HLA-DQA1*05:05-B1*03:01L
FEYVSQPFLMDLE

SEQ ID NO: 11537 - protein, 12 aa, Severe acute respiratory syndrome coronavirus 2
  REGION 1..12: note = Table B: HLA-DQA1*05:01-B1*03:01L HLA-DRB1*04:03L HLA-DRB1*13:02L HLA-DRB1*13:03L HLA-DRB1*04:02L HLA-DRB1*04:04L HLA-DRB1*04:05L HLA-DRB1*08:04L HLA-DRB1*14:01L HLA-DRB1*11:04L HLA-DRB1*08:01L HLA-DRB1*11:01L HLA-DRB3*01:01L
  REGION 1..12: note = CONT. FROM ABOVE: HLA-DPA1*01:03-B1*02:01L HLA-DQA1*05:05-B1*03: 01L HLA-DRB1*14:17L HLA-DRB1*10:01L HLA-DRB1*08:03L
YVSQPFLMDLEG

SEQ ID NO: 11538 - protein, 14 aa, Severe acute respiratory syndrome coronavirus 2
  REGION 1..14: note = Table B: HLA-DQA1*05:01-B1*03:01L HLA-DRB1*01:01L HLA-DQA1*05:05-B1*03:19L HLA-DRB1*13:01L HLA-DPA1*01:03-B1*04:01L HLA-DPA1*01:03-B1*04:02L HLA-DQA1*05:05-B1*03:01L HLA-DRB1*07:01L
VSQPFLMDLEGKQG

SEQ ID NO: 11539 - protein, 10 aa, Severe acute respiratory syndrome coronavirus 2
  REGION 1..10: note = Table B: HLA-DQA1*05:01-B1*03:01L HLA-DRB1*08:77L HLA-DPA1*03:01-B1*04:02L HLA-DQA1*01-B1*05L HLA-DQA1*05:05-B1*03:19L HLA-DQA1*05:01-B1*02:01L HLA-DRB4*01:01L HLA-DPA1*01:03-B1*04:01L
  REGION 1..10: note = CONT. FROM ABOVE: HLA-DPA1*01:02-B1*04:01L HLA-DRB1*10:01L HLA-D RB1*16:01L HLA-DRB1*15:03L
MDLEGKQGNF

SEQ ID NO: 11540 - protein, 12 aa, Severe acute respiratory syndrome coronavirus 2
  REGION 1..12: note = Table B: HLA-DQA1*05:01-B1*03:01L HLA-DRB1*13:02L HLA-DRB1*01:03L HLA-DQA1*01:02-B1*06:02L HLA-DRB1*14:01L HLA-DRB1*08:01L HLA-DRB3*01:01L HLA-DPA1*01:02-B1*04:01L HLA-DRB1*07:01L HLA-DRB1*16:01L HLA-DRB1*04:08L
  REGION 1..12: note = CONT. FROM ABOVE: HLA-DQA1*02:01-B1*03:03L
GNFKNLREFVFK

SEQ ID NO: 11541 - protein, 13 aa, Severe acute respiratory syndrome coronavirus 2
  REGION 1..13: note = Table B: HLA-DQA1*05:01-B1*03:01L HLA-DRB1*04:03L HLA-DRB1*13:02L HLA-DRB1*04:02L HLA-DPA1*03:01-B1*04:02L HLA-DRB1*11:04L HLA-DRB3*01:01L HLA-DPA1*02:01-B1*13:01L HLA-DPA1*03:01-B1*105:01L HLA-DQA1*01:03-B1*06:01L
  REGION 1..13: note = CONT. FROM ABOVE: HLA-DRB1*08:03L
IDGYFKIYSKHTP

SEQ ID NO: 11542 - protein, 11 aa, Severe acute respiratory syndrome coronavirus 2
  REGION 1..11: note = Table B: HLA-DQA1*05:01-B1*03:01L HLA-DRB1*04:03L HLA-DRB1*13:03L HLA-DRB1*04:02L HLA-DRB1*04:05L HLA-DQA1*01:02-B1*06:02L HLA-DRB1*01:02L HLA-DRB1*08:04L HLA-DRB1*11:04L HLA-DRB1*11:01L HLA-DRB1*12:01L HLA-DRB1*14:54L
  REGION 1..11: note = CONT. FROM ABOVE: HLA-DRB1*14:17L HLA-DPA1*01:02-B1*04:01L HLA-D RB1*04:08L HLA-DRB1*08:03L
FKIYSKHTPIN

SEQ ID NO: 11543 - protein, 12 aa, Severe acute respiratory syndrome coronavirus 2
  REGION 1..12: note = Table B: HLA-DQA1*05:01-B1*03:01L HLA-DRB1*14:04L HLA-DRB1*13:02L HLA-DRB1*01:01L HLA-DRB1*08:77L HLA-DRB3*02:01L HLA-DPA1*01:03-B1*03:01L HLA-DPA1*03:01-B1*04:02L HLA-DRB1*11:03L HLA-DRB1*14:02L HLA-DQA1*01:01-B1*05:01L
  REGION 1..12: note = CONT. FROM ABOVE: HLA-DRB1*11:01L HLA-DRB5*01:01L HLA-DQA1*05:05 -B1*03:19L HLA-DRB4*01:01L HLA-DRB1*09:01L HLA-DRB3*01:01L HLA-D PA1*02:01-B1*13:01L HLA-DPA1*03:01-B1*105:01L HLA-DPA1*01:03-B1* 104:01L HLA-DQA1*05:05-B1*03:01L HLA-DRB1*07:01L
  REGION 1..12: note = CONT. FROM ABOVE: HLA-DQA1*01:03-B1*06:01L HLA-DRB1*08:02L HLA-D RB1*15:01L
TPINLVRDLPQG

SEQ ID NO: 11544 - protein, 13 aa, Severe acute respiratory syndrome coronavirus 2
  REGION 1..13: note = Table B: HLA-DQA1*05:01-B1*03:01L HLA-DRB1*04:03L HLA-DRB1*13:02L HLA-DRB1*13:03L HLA-DRB1*01:03L HLA-DRB1*04:02L HLA-DRB1*04:05L HLA-DRB1*01:02L HLA-DRB4*03:01NL HLA-DRB1*08:04L HLA-DRB3*02:01L HLA-DPA1*01:03-B1*03:01L
  REGION 1..13: note = CONT. FROM ABOVE: HLA-DPA1*03:01-B1*04:02L HLA-DRB1*14:01L HLA-D RB1*14:02L HLA-DQA1*01:01-B1*05:01L HLA-DRB1*08:01L HLA-DQA1*01- B1*05L HLA-DQA1*05:01-B1*02:01L HLA-DPA1*01:03-B1*04:01L HLA-DRB 1*04:10L HLA-DRB1*09:01L HLA-DPA1*01:03-B1*04:02L
  REGION 1..13: note = CONT. FROM ABOVE: HLA-DRB1*12:01L HLA-DRB1*12:02L HLA-DPA1*02:01 -B1*13:01L HLA-DPA1*03:01-B1*105:01L HLA-DRB1*14:54L HLA-DPA1*01 :03-B1*104:01L HLA-DRB1*14:17L HLA-DPA1*01:02-B1*04:01L HLA-DRB1 *10:01L HLA-DRB1*16:01L HLA-DRB1*04:08L HLA-DRB1*08:03L
  REGION 1..13: note = CONT. FROM ABOVE: HLA-DRB1*15:03L
LPQGFSALEPLVD

SEQ ID NO: 11545 - protein, 11 aa, Severe acute respiratory syndrome coronavirus 2
  REGION 1..11: note = Table B: HLA-DQA1*05:01-B1*03:01L HLA-DRB1*13:02L HLA-DRB1*01:03L HLA-DRB1*04:04L HLA-DQA1*01:02-B1*06:02L HLA-DRB1*01:02L HLA-DRB1*08:77L HLA-DRB3*02:01L HLA-DPA1*03:01-B1*04:02L HLA-DRB1*14:01L HLA-DRB1*11:03L
  REGION 1..11: note = CONT. FROM ABOVE: HLA-DRB1*12:02L HLA-DPA1*02:01-B1*13:01L HLA-D RB1*10:01L HLA-DQA1*01:03-B1*06:01L HLA-DRB1*04:08L
ALEPLVDLPIG

SEQ ID NO: 11546 - protein, 14 aa, Severe acute respiratory syndrome coronavirus 2
  REGION 1..14: note = Table B: HLA-DQA1*05:01-B1*03:01L HLA-DRB1*01:03L HLA-DRB1*04:05L HLA-DRB1*01:02L HLA-DPA1*01:03-B1*03:01L HLA-DRB1*14:01L HLA-DQA1*01:01-B1*05:01L HLA-DPA1*02:01-B1*13:01L HLA-DPA1*01:02-B1*04:01L
  REGION 1..14: note = CONT. FROM ABOVE: HLA-DRB1*16:01L HLA-DRB1*04:08L
EPLVDLPIGINITR

SEQ ID NO: 11547 - protein, 13 aa, Severe acute respiratory syndrome coronavirus 2
  REGION 1..13: note = Table B: HLA-DQA1*05:01-B1*03:01L HLA-DRB1*13:02L HLA-DRB1*08:04L HLA-DRB1*14:01L HLA-DRB1*11:04L HLA-DRB1*08:01L HLA-DRB1*11:01L HLA-DRB3*01:01L HLA-DPA1*01:03-B1*02:01L HLA-DPA1*01:03-B1*104:01L
INITRFQTLLALH

SEQ ID NO: 11548 - protein, 12 aa, Severe acute respiratory syndrome coronavirus 2
  REGION 1..12: note = Table B: HLA-DQA1*05:01-B1*03:01L HLA-DRB1*04:01L HLA-DRB1*13:02L HLA-DRB1*13:03L HLA-DRB1*01:01L HLA-DRB1*14:01L HLA-DRB1*11:04L HLA-DRB1*11:01L HLA-DRB3*01:01L HLA-DPA1*02:01-B1*13:01L HLA-DPA1*01:03-B1*104:01L
  REGION 1..12: note = CONT. FROM ABOVE: HLA-DRB1*07:01L HLA-DQA1*01:03-B1*06:01L
ITRFQTLLALHR

SEQ ID NO: 11549 - protein, 10 aa, Severe acute respiratory syndrome coronavirus 2
  REGION 1..10: note = Table B: HLA-DQA1*05:01-B1*03:01L HLA-DQA1*01:02-B1*06:02L HLA-DQA1*05:05-B1*03:19L HLA-DQA1*05:01-B1*02:01L HLA-DQA1*02:01-B1*03:03L
QTLLALHRSY

SEQ ID NO: 11550 - protein, 14 aa, Severe acute respiratory syndrome coronavirus 2
  REGION 1..14: note = Table B: HLA-DQA1*05:01-B1*03:01L HLA-DRB1*13:02L HLA-DRB1*01:03L HLA-DRB1*04:04L HLA-DQA1*01:02-B1*06:02L HLA-DRB1*01:02L HLA-DPA1*01:03-B1*03:01L HLA-DQA1*01:01-B1*05:01L HLA-DRB1*08:01L
  REGION 1..14: note = CONT. FROM ABOVE: HLA-DQA1*05:05-B1*03:19L HLA-DRB3*01:01L HLA-D PA1*03:01-B1*105:01L HLA-DPA1*01:03-B1*104:01L HLA-DQA1*05:05-B1 *03:01L HLA-DRB1*07:01L HLA-DQA1*01:03-B1*06:01L HLA-DRB1*15:03L
LHRSYLTPGDSSSG

SEQ ID NO: 11551 - protein, 11 aa, Severe acute respiratory syndrome coronavirus 2
  REGION 1..11: note = Table B: HLA-DQA1*05:01-B1*03:01L HLA-DRB1*08:77L HLA-DRB1*14:02L HLA-DQA1*05:05-B1*03:19L HLA-DQA1*05:01-B1*02:01L HLA-DRB4*01:01L HLA-DPA1*01:03-B1*04:01L HLA-DPA1*02:01-B1*13:01L
  REGION 1..11: note = CONT. FROM ABOVE: HLA-DQA1*02:01-B1*03:03L HLA-DRB1*15:03L
YLTPGDSSSGW

SEQ ID NO: 11552 - protein, 14 aa, Severe acute respiratory syndrome coronavirus 2
  REGION 1..14: note = Table B: HLA-DQA1*05:01-B1*03:01L HLA-DRB1*01:02L HLA-DRB1*08:01L HLA-DPA1*03:01-B1*105:01L HLA-DRB1*04:08L HLA-DRB1*15:01L
AGAAAYYVGYLQPR

SEQ ID NO: 11553 - protein, 12 aa, Severe acute respiratory syndrome coronavirus 2
  REGION 1..12: note = Table B: HLA-DQA1*05:01-B1*03:01L HLA-DRB1*04:03L HLA-DRB1*13:02L HLA-DRB1*13:03L HLA-DRB1*01:03L HLA-DRB1*04:02L HLA-DRB1*04:04L HLA-DRB1*04:05L HLA-DRB1*01:02L HLA-DRB4*03:01NL HLA-DRB1*08:04L HLA-DRB1*08:77L HLA-DRB3*02:01L
  REGION 1..12: note = CONT. FROM ABOVE: HLA-DPA1*01:03-B1*03:01L HLA-DPA1*03:01-B1*04: 02L HLA-DRB1*14:01L HLA-DRB1*11:04L HLA-DRB1*14:02L HLA-DQA1*01: 01-B1*05:01L HLA-DRB1*08:01L HLA-DQA1*01-B1*05L HLA-DRB4*01:01L HLA-DPA1*01:03-B1*04:01L HLA-DQA1*05:05-B1*03:116L
  REGION 1..12: note = CONT. FROM ABOVE: HLA-DRB1*04:10L HLA-DRB1*09:01L HLA-DPA1*01:03 -B1*04:02L HLA-DRB1*12:01L HLA-DPA1*02:01-B1*13:01L HLA-DPA1*03: 01-B1*105:01L HLA-DRB1*14:54L HLA-DQA1*05:05-B1*03:01M HLA-DRB1* 14:17L HLA-DPA1*01:02-B1*04:01L HLA-DRB1*07:01L HLA-DRB1*10:01L
  REGION 1..12: note = CONT. FROM ABOVE: HLA-DRB1*16:01L HLA-DRB1*04:08L HLA-DRB1*15:03 L
YNENGTITDAVD

SEQ ID NO: 11554 - protein, 15 aa, Severe acute respiratory syndrome coronavirus 2
  REGION 1..15: note = Table B: HLA-DQA1*05:01-B1*03:01L HLA-DRB1*01:03L HLA-DRB1*01:02L HLA-DRB4*03:01NL HLA-DQA1*05:05-B1*03:19L HLA-DRB1*12:01L HLA-DRB1*15:03L
ITDAVDCALDPLSET

SEQ ID NO: 11555 - protein, 10 aa, Severe acute respiratory syndrome coronavirus 2
  REGION 1..10: note = Table B: HLA-DQA1*05:01-B1*03:01L HLA-DRB1*04:03L HLA-DRB1*04:02L HLA-DQA1*03:01-B1*03:02L HLA-DRB1*14:17L HLA-DRB1*16:01L HLA-DQA1*02:01-B1*03:03L
SFTVEKGIYQ

SEQ ID NO: 11556 - protein, 11 aa, Severe acute respiratory syndrome coronavirus 2
  REGION 1..11: note = Table B: HLA-DQA1*05:01-B1*03:01L HLA-DRB1*04:03L HLA-DRB1*01:03L HLA-DRB1*04:02L HLA-DRB1*01:02L HLA-DRB1*08:77L HLA-DRB3*02:01L HLA-DPA1*03:01-B1*04:02L HLA-DQA1*05:01-B1*02:01L HLA-DRB1*12:01L
  REGION 1..11: note = CONT. FROM ABOVE: HLA-DPA1*03:01-B1*105:01L HLA-DPA1*01:02-B1*04 :01L HLA-DRB1*07:01L HLA-DRB1*04:08L HLA-DQA1*02:01-B1*03:03L
GIYQTSNFRVQ

SEQ ID NO: 11557 - protein, 11 aa, Severe acute respiratory syndrome coronavirus 2
  REGION 1..11: note = Table B: HLA-DQA1*05:01-B1*03:01L HLA-DRB1*04:03L HLA-DRB1*01:03L HLA-DRB1*01:02L HLA-DPA1*03:01-B1*04:02L HLA-DRB1*14:01L HLA-DQA1*01-B1*05L HLA-DPA1*01:03-B1*04:01L HLA-DRB1*12:01L HLA-DPA1*03:01-B1*105:01L
  REGION 1..11: note = CONT. FROM ABOVE: HLA-DQA1*01:03-B1*06:01L HLA-DRB1*04:08L HLA-D QA1*02:01-B1*03:03L
IYQTSNFRVQP

SEQ ID NO: 11558 - protein, 10 aa, Severe acute respiratory syndrome coronavirus 2
  REGION 1..10: note = Table B: HLA-DQA1*05:01-B1*03:01L HLA-DRB1*04:01L HLA-DRB1*04:03L HLA-DRB1*13:02M HLA-DRB1*13:03M HLA-DRB1*01:03L HLA-DRB1*04:02L HLA-DRB1*04:04L HLA-DRB1*01:01L HLA-DRB4*03:01NL HLA-DRB3*02:01L HLA-DRB1*14:01L HLA-DRB1*11:04L HLA-DRB1*14:02L
  REGION 1..10: note = CONT. FROM ABOVE: HLA-DRB1*08:01M HLA-DRB1*11:01L HLA-DRB5*01:01 L HLA-DRB1*13:01L HLA-DPA1*01:03-B1*04:02L HLA-DRB1*12:01M HLA-D RB1*12:02L HLA-DRB3*01:01L HLA-DQA1*03:01-B1*03:02M HLA-DQA1*05: 05-B1*03:01L HLA-DRB1*14:17L HLA-DRB1*16:01L
  REGION 1..10: note = CONT. FROM ABOVE: HLA-DQA1*01:03-B1*06:01L HLA-DRB1*08:02L HLA-D RB1*08:03L HLA-DQA1*02:01-B1*03:03L HLA-DRB1*15:01L
RVQPTESIVR

SEQ ID NO: 11559 - protein, 13 aa, Severe acute respiratory syndrome coronavirus 2
  REGION 1..13: note = Table B: HLA-DQA1*05:01-B1*03:01L
QPTESIVRFPNIT

SEQ ID NO: 11560 - protein, 11 aa, Severe acute respiratory syndrome coronavirus 2
  REGION 1..11: note = Table B: HLA-DQA1*05:01-B1*03:01L HLA-DRB1*01:03L HLA-DRB1*01:02L HLA-DPA1*01:03-B1*03:01L HLA-DRB1*14:01L HLA-DRB1*14:02L HLA-DQA1*01-B1*05L HLA-DPA1*01:03-B1*04:02L HLA-DRB1*12:01L HLA-DQA1*03:01-B1*03:02L
EVFNATRFASV

SEQ ID NO: 11561 - protein, 12 aa, Severe acute respiratory syndrome coronavirus 2
  REGION 1..12: note = Table B: HLA-DQA1*05:01-B1*03:01L HLA-DRB1*13:02L HLA-DRB1*04:04L HLA-DRB1*04:05L HLA-DQA1*01:02-B1*06:02L HLA-DRB1*08:01L HLA-DPA1*02:01-B1*13:01L HLA-DPA1*01:02-B1*04:01L HLA-DRB1*07:01L
  REGION 1..12: note = CONT. FROM ABOVE: HLA-DQA1*01:03-B1*06:01L
TRFASVYAWNRK

SEQ ID NO: 11562 - protein, 12 aa, Severe acute respiratory syndrome coronavirus 2
  REGION 1..12: note = Table B: HLA-DQA1*05:01-B1*03:01L HLA-DRB1*13:02L HLA-DRB1*04:05L HLA-DQA1*01:02-B1*06:02L HLA-DRB1*01:01L HLA-DRB3*01:01L HLA-DRB1*07:01L HLA-DQA1*01:03-B1*06:01L
RFASVYAWNRKR

SEQ ID NO: 11563 - protein, 13 aa, Severe acute respiratory syndrome coronavirus 2
  REGION 1..13: note = Table B: HLA-DQA1*05:01-B1*03:01L HLA-DPA1*03:01-B1*04:02L HLA-DRB1*03:01L HLA-DRB1*14:02L HLA-DQA1*05:05-B1*03:19L HLA-DQA1*05:05-B1*03:116L HLA-DPA1*01:03-B1*04:02L HLA-DPA1*02:01-B1*13:01L HLA-DPA1*01:03-B1*02:01L
  REGION 1..13: note = CONT. FROM ABOVE: HLA-DRB1*07:01L HLA-DRB1*08:02L
ASVYAWNRKRISN

SEQ ID NO: 11564 - protein, 14 aa, Severe acute respiratory syndrome coronavirus 2
  REGION 1..14: note = Table B: HLA-DQA1*05:01-B1*03:01L HLA-DRB1*01:03L HLA-DRB1*04:04L HLA-DRB1*04:05L HLA-DPA1*01:03-B1*03:01L HLA-DRB1*08:01L HLA-DRB1*12:01L HLA-DQA1*03:01-B1*03:02L HLA-DPA1*01:03-B1*104:01L HLA-DPA1*01:02-B1*04:01L
  REGION 1..14: note = CONT. FROM ABOVE: HLA-DRB1*16:01L HLA-DRB1*04:08L
RKRISNCVADYSVL

SEQ ID NO: 11565 - protein, 14 aa, Severe acute respiratory syndrome coronavirus 2
  REGION 1..14: note = Table B: HLA-DQA1*05:01-B1*03:01L HLA-DQA1*01-B1*05L HLA-DQA1*01:03-B1*06:01L
ASFSTFKCYGVSPT

SEQ ID NO: 11566 - protein, 12 aa, Severe acute respiratory syndrome coronavirus 2
  REGION 1..12: note = Table B: HLA-DQA1*05:01-B1*03:01L HLA-DRB1*04:03L HLA-DRB1*13:02L HLA-DRB1*13:03L HLA-DRB1*04:02L HLA-DRB1*04:04L HLA-DRB1*04:05L HLA-DQA1*01:02-B1*06:02L HLA-DRB1*01:01L HLA-DRB1*01:02L HLA-DRB1*08:04L HLA-DRB1*14:01L HLA-DRB1*11:04L
  REGION 1..12: note = CONT. FROM ABOVE: HLA-DRB1*08:01L HLA-DRB1*11:01L HLA-DQA1*01-B1 *05L HLA-DRB1*04:10L HLA-DRB1*12:01L HLA-DRB3*01:01L HLA-DPA1*02 :01-B1*13:01L HLA-DPA1*03:01-B1*105:01L HLA-DPA1*01:03-B1*02:01L HLA-DRB1*14:17L HLA-DPA1*01:02-B1*04:01L HLA-DRB1*10:01L
  REGION 1..12: note = CONT. FROM ABOVE: HLA-DRB1*16:01L HLA-DQA1*01:03-B1*06:01L HLA-D RB1*08:03L HLA-DQA1*02:01-B1*03:03L HLA-DRB1*15:03L
STFKCYGVSPTK

SEQ ID NO: 11567 - protein, 17 aa, Severe acute respiratory syndrome coronavirus 2
  REGION 1..17: note = Table B: HLA-DQA1*05:01-B1*03:01L HLA-DRB1*08:04L HLA-DRB1*14:01L HLA-DRB1*14:02L HLA-DRB1*08:01L HLA-DQA1*01-B1*05L HLA-DQA1*05:01-B1*02:01L HLA-DPA1*01:03-B1*04:01L HLA-DPA1*01:03-B1*02:01L
SPTKLNDLCFTNVYADS

SEQ ID NO: 11568 - protein, 12 aa, Severe acute respiratory syndrome coronavirus 2
  REGION 1..12: note = Table B: HLA-DQA1*05:01-B1*03:01L HLA-DRB1*04:03L HLA-DRB1*13:03L HLA-DRB1*01:03L HLA-DRB1*04:02L HLA-DRB1*04:05L HLA-DQA1*01:02-B1*06:02L HLA-DRB1*01:02L HLA-DPA1*01:03-B1*03:01L HLA-DPA1*03:01-B1*04:02L
  REGION 1..12: note = CONT. FROM ABOVE: HLA-DQA1*01:01-B1*05:01L HLA-DRB1*08:01L HLA-D QA1*05:05-B1*03:19L HLA-DPA1*01:03-B1*04:02L HLA-DRB1*12:01L HLA -DPA1*02:01-B1*13:01L HLA-DPA1*03:01-B1*105:01L HLA-DQA1*05:05-B 1*03:01L HLA-DRB1*14:17L HLA-DPA1*01:02-B1*04:01L
  REGION 1..12: note = CONT. FROM ABOVE: HLA-DRB1*16:01L HLA-DRB1*04:08L HLA-DRB1*15:03 L
VYADSFVIRGDE

SEQ ID NO: 11569 - protein, 12 aa, Severe acute respiratory syndrome coronavirus 2
  REGION 1..12: note = Table B: HLA-DQA1*05:01-B1*03:01L HLA-DRB1*01:03L HLA-DRB1*04:02L HLA-DRB1*04:05L HLA-DQA1*01:02-B1*06:02L HLA-DQA1*01:01-B1*05:01L HLA-DRB1*16:01L HLA-DRB1*04:08L
ADSFVIRGDEVR

SEQ ID NO: 11570 - protein, 12 aa, Severe acute respiratory syndrome coronavirus 2
  REGION 1..12: note = Table B: HLA-DQA1*05:01-B1*03:01L HLA-DRB1*04:05L HLA-DQA1*01:02-B1*06:02L HLA-DRB4*03:01NL HLA-DRB1*14:01L HLA-DRB1*12:01L HLA-DRB1*14:54L HLA-DRB1*15:03L
DSFVIRGDEVRQ

SEQ ID NO: 11571 - protein, 12 aa, Severe acute respiratory syndrome coronavirus 2
  REGION 1..12: note = Table B: HLA-DQA1*05:01-B1*03:01L HLA-DRB1*04:03L HLA-DRB1*01:03L HLA-DRB1*04:02L HLA-DQA1*01:02-B1*06:02L HLA-DRB1*01:02L HLA-DRB1*14:01L HLA-DPA1*03:01-B1*105:01L HLA-DQA1*03:01-B1*03:02L HLA-DQA1*05:05-B1*03:01L
  REGION 1..12: note = CONT. FROM ABOVE: HLA-DRB1*16:01L HLA-DQA1*01:03-B1*06:01L HLA-D QA1*02:01-B1*03:03L
IRGDEVRQIAPG

SEQ ID NO: 11572 - protein, 12 aa, Severe acute respiratory syndrome coronavirus 2
  REGION 1..12: note = Table B: HLA-DQA1*05:01-B1*03:01L HLA-DRB1*13:03L HLA-DRB1*01:03L HLA-DRB1*04:05L HLA-DQA1*01:02-B1*06:02L HLA-DRB4*03:01NL HLA-DQA1*01-B1*05L HLA-DRB1*04:10L HLA-DRB1*12:01L HLA-DRB1*14:54L HLA-DQA1*05:05-B1*03:01L
  REGION 1..12: note = CONT. FROM ABOVE: HLA-DRB1*16:01L HLA-DQA1*01:03-B1*06:01L
GDEVRQIAPGQT

SEQ ID NO: 11573 - protein, 12 aa, Severe acute respiratory syndrome coronavirus 2
  REGION 1..12: note = Table B: HLA-DQA1*05:01-B1*03:01L HLA-DRB1*13:02L HLA-DRB1*13:03L HLA-DRB1*01:03L HLA-DRB1*04:04L HLA-DRB1*04:05L HLA-DQA1*01:02-B1*06:02L HLA-DRB1*01:02L HLA-DRB4*03:01NL HLA-DRB1*08:04L HLA-DRB1*08:77L HLA-DPA1*01:03-B1*03:01L
  REGION 1..12: note = CONT. FROM ABOVE: HLA-DRB1*14:01L HLA-DQA1*01:01-B1*05:01L HLA-D RB1*08:01L HLA-DQA1*01-B1*05L HLA-DQA1*05:05-B1*03:19L HLA-DRB1* 04:10L HLA-DRB1*12:01L HLA-DRB1*12:02L HLA-DPA1*02:01-B1*13:01L HLA-DPA1*03:01-B1*105:01L HLA-DRB1*14:54L
  REGION 1..12: note = CONT. FROM ABOVE: HLA-DQA1*05:05-B1*03:01L HLA-DRB1*10:01L HLA-D RB1*16:01L HLA-DQA1*01:03-B1*06:01L HLA-DRB1*04:08L HLA-DRB1*08: 03L HLA-DRB1*15:03L
DEVRQIAPGQTG

SEQ ID NO: 11574 - protein, 11 aa, Severe acute respiratory syndrome coronavirus 2
  REGION 1..11: note = Table B: HLA-DQA1*05:01-B1*03:01L HLA-DRB1*01:03L HLA-DRB1*08:77L HLA-DRB1*14:02L HLA-DPA1*01:03-B1*04:02L HLA-DPA1*03:01-B1*105:01L HLA-DRB1*15:03L
APGQTGKIADY

SEQ ID NO: 11575 - protein, 11 aa, Severe acute respiratory syndrome coronavirus 2
  REGION 1..11: note = Table B: HLA-DQA1*05:01-B1*03:01L HLA-DQA1*03:01-B1*03:02L HLA-DQA1*05:05-B1*03:01L
PGQTGKIADYN

SEQ ID NO: 11576 - protein, 10 aa, Severe acute respiratory syndrome coronavirus 2
  REGION 1..10: note = Table B: HLA-DQA1*05:01-B1*03:01L HLA-DRB1*13:03L HLA-DRB1*01:03L HLA-DQA1*01:02-B1*06:02L HLA-DRB1*08:77L HLA-DPA1*01:03-B1*03:01L HLA-DRB1*03:01L HLA-DRB1*11:02L HLA-DRB1*14:02L HLA-DQA1*01-B1*05L HLA-DQA1*05:05-B1*03:19M
  REGION 1..10: note = CONT. FROM ABOVE: HLA-DQA1*05:01-B1*02:01L HLA-DRB4*01:01L HLA-D PA1*01:03-B1*04:01L HLA-DQA1*05:05-B1*03:116L HLA-DPA1*01:03-B1* 04:02L HLA-DPA1*03:01-B1*105:01L HLA-DPA1*01:03-B1*104:01L HLA-D RB1*10:01L HLA-DRB1*16:01L HLA-DQA1*01:03-B1*06:01L
  REGION 1..10: note = CONT. FROM ABOVE: HLA-DQA1*02:01-B1*03:03L
QTGKIADYNY

SEQ ID NO: 11577 - protein, 11 aa, Severe acute respiratory syndrome coronavirus 2
  REGION 1..11: note = Table B: HLA-DQA1*05:01-B1*03:01L HLA-DRB1*13:02L HLA-DRB1*13:03L HLA-DRB1*01:03L HLA-DRB1*04:05L HLA-DQA1*01:02-B1*06:02L HLA-DRB1*01:02L HLA-DRB4*03:01NL HLA-DRB1*08:04L HLA-DRB1*08:77L HLA-DRB3*02:01L
  REGION 1..11: note = CONT. FROM ABOVE: HLA-DPA1*01:03-B1*03:01L HLA-DPA1*03:01-B1*04: 02L HLA-DRB1*14:01L HLA-DRB1*14:02L HLA-DQA1*01:01-B1*05:01L HLA -DRB1*08:01L HLA-DQA1*05:05-B1*03:19L HLA-DRB1*04:10L HLA-DPA1*0 1:03-B1*04:02L HLA-DRB1*12:01L HLA-DPA1*02:01-B1*13:01L
  REGION 1..11: note = CONT. FROM ABOVE: HLA-DPA1*03:01-B1*105:01L HLA-DRB1*14:54L HLA- DQA1*05:05-B1*03:01L HLA-DRB1*14:17L HLA-DQA1*01:03-B1*06:01L HL A-DRB1*04:08L HLA-DRB1*15:03L
IADYNYKLPDD

SEQ ID NO: 11578 - protein, 12 aa, Severe acute respiratory syndrome coronavirus 2
  REGION 1..12: note = Table B: HLA-DQA1*05:01-B1*03:01L HLA-DQA1*05:05-B1*03:19L HLA-DPA1*03:01-B1*105:01L HLA-DQA1*02:01-B1*03:03L
DFTGCVIAWNSN

SEQ ID NO: 11579 - protein, 12 aa, Severe acute respiratory syndrome coronavirus 2
  REGION 1..12: note = Table B: HLA-DQA1*05:01-B1*03:01L HLA-DQA1*05:05-B1*03:19L HLA-DPA1*03:01-B1*105:01L HLA-DQA1*02:01-B1*03:03L
FTGCVIAWNSNN

SEQ ID NO: 11580 - protein, 16 aa, Severe acute respiratory syndrome coronavirus 2
  REGION 1..16: note = Table B: HLA-DQA1*05:01-B1*03:01L HLA-DRB1*04:04L HLA-DRB1*01:01L HLA-DPA1*01:03-B1*03:01L HLA-DRB1*03:01L HLA-DQA1*05:05-B1*03:19L HLA-DQA1*05:05-B1*03:116L HLA-DPA1*02:01-B1*13:01L HLA-DPA1*01:03-B1*104:01L
  REGION 1..16: note = CONT. FROM ABOVE: HLA-DRB1*07:01L HLA-DRB1*08:03L HLA-DQA1*02:01 -B1*03:03L
VGGNYNYLYRLFRKSN

SEQ ID NO: 11581 - protein, 16 aa, Severe acute respiratory syndrome coronavirus 2
  REGION 1..16: note = Table B: HLA-DQA1*05:01-B1*03:01L HLA-DPA1*01:03-B1*03:01L HLA-DPA1*03:01-B1*04:02L HLA-DRB1*03:01L HLA-DRB1*14:02L HLA-DQA1*05:05-B1*03:19L HLA-DRB1*13:01L HLA-DPA1*01:03-B1*04:02L HLA-DPA1*01:03-B1*02:01L
  REGION 1..16: note = CONT. FROM ABOVE: HLA-DPA1*01:03-B1*104:01L HLA-DRB1*07:01L HLA- DRB1*08:02L
NYLYRLFRKSNLKPFE

SEQ ID NO: 11582 - protein, 10 aa, Severe acute respiratory syndrome coronavirus 2
  REGION 1..10: note = Table B: HLA-DQA1*05:01-B1*03:01L HLA-DRB1*08:77L HLA-DPA1*01:03-B1*03:01L HLA-DPA1*03:01-B1*04:02L HLA-DRB1*03:01L HLA-DQA1*01-B1*05L HLA-DQA1*05:05-B1*03:19L HLA-DQA1*05:01-B1*02:01L HLA-DRB4*01:01L
  REGION 1..10: note = CONT. FROM ABOVE: HLA-DPA1*01:03-B1*04:01L HLA-DPA1*01:03-B1*104 :01L HLA-DRB1*10:01L HLA-DRB1*16:01L HLA-DRB1*15:03L
FERDISTEIY

SEQ ID NO: 11583 - protein, 14 aa, Severe acute respiratory syndrome coronavirus 2
  REGION 1..14: note = Table B: HLA-DQA1*05:01-B1*03:01L HLA-DRB1*04:02L HLA-DRB1*01:02L HLA-DQA1*05:05-B1*03:19L HLA-DPA1*01:03-B1*04:02L HLA-DQA1*05:05-B1*03:01L HLA-DRB1*04:08L
ERDISTEIYQAGST

SEQ ID NO: 11584 - protein, 12 aa, Severe acute respiratory syndrome coronavirus 2
  REGION 1..12: note = Table B: HLA-DQA1*05:01-B1*03:01L HLA-DQA1*01:02-B1*06:02L HLA-DQA1*05:05-B1*03:19L HLA-DQA1*05:05-B1*03:01L HLA-DQA1*01:03-B1*06:01L
QAGSTPCNGVEG

SEQ ID NO: 11585 - protein, 14 aa, Severe acute respiratory syndrome coronavirus 2
  REGION 1..14: note = Table B: HLA-DQA1*05:01-B1*03:01L HLA-DRB1*04:03L HLA-DRB1*01:03L HLA-DRB1*04:05L HLA-DRB1*01:02L HLA-DRB1*08:04L HLA-DPA1*01:03-B1*03:01L HLA-DPA1*03:01-B1*04:02L HLA-DQA1*01-B1*05L HLA-DQA1*05:01-B1*02:01L
  REGION 1..14: note = CONT. FROM ABOVE: HLA-DPA1*01:03-B1*04:02L HLA-DRB1*12:01L HLA-D PA1*02:01-B1*13:01L HLA-DQA1*05:05-B1*03:01L HLA-DPA1*01:02-B1*0 4:01L HLA-DRB1*16:01L HLA-DQA1*01:03-B1*06:01L HLA-DRB1*04:08L H LA-DQA1*02:01-B1*03:03L HLA-DRB1*15:03L
VEGFNCYFPLQSYG

SEQ ID NO: 11586 - protein, 12 aa, Severe acute respiratory syndrome coronavirus 2
  REGION 1..12: note = Table B: HLA-DQA1*05:01-B1*03:01L HLA-DRB1*04:03L HLA-DRB1*13:02L HLA-DRB1*01:03L HLA-DRB1*04:02L HLA-DRB1*04:05L HLA-DQA1*01:02-B1*06:02L HLA-DRB1*01:01L HLA-DRB1*01:02L HLA-DRB3*02:01L HLA-DPA1*03:01-B1*04:02L HLA-DRB1*14:01L
  REGION 1..12: note = CONT. FROM ABOVE: HLA-DRB1*11:03L HLA-DQA1*01-B1*05L HLA-DQA1*05 :01-B1*02:01L HLA-DRB1*12:01L HLA-DPA1*03:01-B1*105:01L HLA-DQA1 *03:01-B1*03:02L HLA-DQA1*05:05-B1*03:01L HLA-DRB1*14:17L HLA-DP A1*01:02-B1*04:01L HLA-DRB1*07:01L HLA-DRB1*16:01L
  REGION 1..12: note = CONT. FROM ABOVE: HLA-DRB1*04:08L HLA-DQA1*02:01-B1*03:03L HLA-D RB1*15:03L
YFPLQSYGFQPT

SEQ ID NO: 11587 - protein, 12 aa, Severe acute respiratory syndrome coronavirus 2
  REGION 1..12: note = Table B: HLA-DQA1*05:01-B1*03:01L HLA-DRB1*04:05L HLA-DQA1*05:01-B1*02:01L HLA-DRB1*14:54L HLA-DQA1*05:05-B1*03:01L HLA-DRB1*16:01L
QSYGFQPTNGVG

SEQ ID NO: 11588 - protein, 10 aa, Severe acute respiratory syndrome coronavirus 2
  REGION 1..10: note = Table B: HLA-DQA1*05:01-B1*03:01L HLA-DRB1*13:03L HLA-DRB1*01:03L HLA-DRB1*04:05L HLA-DQA1*01:02-B1*06:02M HLA-DRB1*01:01L HLA-DRB1*01:02L HLA-DRB1*14:02L HLA-DQA1*05:01-B1*02:01L HLA-DQA1*05:05-B1*03:116L
  REGION 1..10: note = CONT. FROM ABOVE: HLA-DPA1*02:01-B1*13:01L HLA-DPA1*03:01-B1*105 :01L HLA-DQA1*01:03-B1*06:01L HLA-DQA1*02:01-B1*03:03L HLA-DRB1* 15:03L
QPYRVVVLSF

SEQ ID NO: 11589 - protein, 13 aa, Severe acute respiratory syndrome coronavirus 2
  REGION 1..13: note = Table B: HLA-DQA1*05:01-B1*03:01L HLA-DRB1*04:03L HLA-DRB1*04:02L HLA-DRB1*12:01L HLA-DQA1*03:01-B1*03:02L HLA-DQA1*05:05-B1*03:01L HLA-DRB1*16:01L HLA-DQA1*01:03-B1*06:01L HLA-DRB1*15:03L
ELLHAPATVCGPK

SEQ ID NO: 11590 - protein, 13 aa, Severe acute respiratory syndrome coronavirus 2
  REGION 1..13: note = Table B: HLA-DQA1*05:01-B1*03:01L HLA-DQA1*05:05-B1*03:01L HLA-DQA1*01:03-B1*06:01L HLA-DQA1*02:01-B1*03:03L
APATVCGPKKSTN

SEQ ID NO: 11591 - protein, 13 aa, Severe acute respiratory syndrome coronavirus 2
  REGION 1..13: note = Table B: HLA-DQA1*05:01-B1*03:01L HLA-DQA1*01:02-B1*06:02L HLA-DRB1*08:04L HLA-DRB3*02:01L HLA-DRB1*14:54L HLA-DPA1*01:02-B1*04:01L HLA-DRB1*16:01L HLA-DQA1*02:01-B1*03:03L
STNLVKNKCVNFN

SEQ ID NO: 11592 - protein, 12 aa, Severe acute respiratory syndrome coronavirus 2
  REGION 1..12: note = Table B: HLA-DQA1*05:01-B1*03:01L HLA-DQA1*01:02-B1*06:02L HLA-DRB1*01:01L HLA-DQA1*05:01-B1*02:01L HLA-DRB1*12:01L HLA-DPA1*03:01-B1*105:01L HLA-DQA1*05:05-B1*03:01L HLA-DRB1*10:01L HLA-DRB1*16:01L HLA-DQA1*01:03-B1*06:01L
  REGION 1..12: note = CONT. FROM ABOVE: HLA-DQA1*02:01-B1*03:03L HLA-DRB1*15:03L
FNFNGLTGTGVL

SEQ ID NO: 11593 - protein, 10 aa, Severe acute respiratory syndrome coronavirus 2
  REGION 1..10: note = Table B: HLA-DQA1*05:01-B1*03:01L HLA-DQA1*01:02-B1*06:02L HLA-DQA1*03:01-B1*03:02L HLA-DQA1*05:05-B1*03:01L HLA-DQA1*01:03-B1*06:01L HLA-DQA1*02:01-B1*03:03L
GTGVLTESNK

SEQ ID NO: 11594 - protein, 13 aa, Severe acute respiratory syndrome coronavirus 2
  REGION 1..13: note = Table B: HLA-DQA1*05:01-B1*03:01L HLA-DRB1*13:02L HLA-DRB1*01:03L HLA-DRB1*04:05L HLA-DRB1*01:02L HLA-DPA1*01:03-B1*03:01L HLA-DRB1*08:01L HLA-DQA1*01-B1*05L HLA-DPA1*01:03-B1*04:01L HLA-DPA1*01:03-B1*04:02L
  REGION 1..13: note = CONT. FROM ABOVE: HLA-DRB1*12:01L HLA-DPA1*01:03-B1*104:01L HLA- DRB1*04:08L HLA-DRB1*15:03L
ESNKKFLPFQQFG

SEQ ID NO: 11595 - protein, 13 aa, Severe acute respiratory syndrome coronavirus 2
  REGION 1..13: note = Table B: HLA-DQA1*05:01-B1*03:01L
NKKFLPFQQFGRD

SEQ ID NO: 11596 - protein, 12 aa, Severe acute respiratory syndrome coronavirus 2
  REGION 1..12: note = Table B: HLA-DQA1*05:01-B1*03:01L HLA-DRB1*01:03L HLA-DRB1*04:05L HLA-DQA1*01:02-B1*06:02L HLA-DQA1*01:01-B1*05:01L HLA-DQA1*05:05-B1*03:19L HLA-DRB1*04:10L HLA-DRB1*04:08L
DIADTTDAVRDP

SEQ ID NO: 11597 - protein, 14 aa, Severe acute respiratory syndrome coronavirus 2
  REGION 1..14: note = Table B: HLA-DQA1*05:01-B1*03:01L HLA-DRB1*13:02L HLA-DRB1*13:03L HLA-DRB1*01:03L HLA-DRB1*04:02L HLA-DRB1*04:04L HLA-DRB1*04:05L HLA-DQA1*01:02-B1*06:02L HLA-DRB1*01:02L HLA-DRB4*03:01NL HLA-DRB1*08:04L HLA-DRB1*08:77L HLA-DRB3*02:01L
  REGION 1..14: note = CONT. FROM ABOVE: HLA-DPA1*01:03-B1*03:01L HLA-DRB1*14:01L HLA-D RB1*11:03L HLA-DRB1*11:04L HLA-DRB1*14:02L HLA-DQA1*01:01-B1*05: 01L HLA-DRB1*08:01L HLA-DQA1*05:05-B1*03:19L HLA-DRB4*01:01L HLA -DPA1*01:03-B1*04:01L HLA-DRB1*04:10L HLA-DRB1*09:01L
  REGION 1..14: note = CONT. FROM ABOVE: HLA-DPA1*01:03-B1*04:02L HLA-DRB1*12:02L HLA-D PA1*02:01-B1*13:01L HLA-DRB1*14:54L HLA-DPA1*01:03-B1*02:01L HLA -DPA1*01:03-B1*104:01L HLA-DQA1*05:05-B1*03:01L HLA-DRB1*14:17L HLA-DPA1*01:02-B1*04:01L HLA-DRB1*07:01L HLA-DRB1*10:01L
  REGION 1..14: note = CONT. FROM ABOVE: HLA-DRB1*04:08L HLA-DRB1*08:03L HLA-DQA1*02:01 -B1*03:03L
DPQTLEILDITPCS

SEQ ID NO: 11598 - protein, 13 aa, Severe acute respiratory syndrome coronavirus 2
  REGION 1..13: note = Table B: HLA-DQA1*05:01-B1*03:01L HLA-DRB1*04:03L HLA-DPA1*01:03-B1*03:01L HLA-DPA1*03:01-B1*04:02L HLA-DQA1*05:05-B1*03:19L HLA-DQA1*05:01-B1*02:01L HLA-DPA1*01:03-B1*04:01L HLA-DPA1*01:03-B1*04:02L
  REGION 1..13: note = CONT. FROM ABOVE: HLA-DRB1*12:01L HLA-DQA1*05:05-B1*03:01L HLA-D PA1*01:02-B1*04:01L HLA-DQA1*02:01-B1*03:03L HLA-DRB1*15:03L
ILDITPCSFGGVS

SEQ ID NO: 11599 - protein, 11 aa, Severe acute respiratory syndrome coronavirus 2
  REGION 1..11: note = Table B: HLA-DQA1*05:01-B1*03:01L HLA-DQA1*01:02-B1*06:02L HLA-DQA1*05:05-B1*03:19L HLA-DQA1*05:01-B1*02:01L HLA-DQA1*05:05-B1*03:01L
GGVSVITPGTN

SEQ ID NO: 11600 - protein, 13 aa, Severe acute respiratory syndrome coronavirus 2
  REGION 1..13: note = Table B: HLA-DQA1*05:01-B1*03:01L HLA-DRB1*04:02L HLA-DQA1*05:05-B1*03:19L HLA-DQA1*05:05-B1*03:01L
GVSVITPGTNTSN

SEQ ID NO: 11601 - protein, 14 aa, Severe acute respiratory syndrome coronavirus 2
  REGION 1..14: note = Table B: HLA-DQA1*05:01-B1*03:01L HLA-DQA1*01:02-B1*06:02L HLA-DRB1*01:02L HLA-DQA1*05:05-B1*03:19L HLA-DQA1*05:01-B1*02:01L HLA-DRB1*16:01L HLA-DRB1*04:08L
VSVITPGTNTSNQV

SEQ ID NO: 11602 - protein, 13 aa, Severe acute respiratory syndrome coronavirus 2
  REGION 1..13: note = Table B: HLA-DQA1*05:01-B1*03:01L HLA-DRB1*13:02L HLA-DRB1*01:03L HLA-DRB1*04:05L HLA-DQA1*01:02-B1*06:02L HLA-DRB1*01:02L HLA-DRB1*08:77L HLA-DPA1*01:03-B1*03:01L HLA-DQA1*05:05-B1*03:19L HLA-DRB1*04:10L HLA-DRB1*12:01L
  REGION 1..13: note = CONT. FROM ABOVE: HLA-DRB1*14:54L HLA-DQA1*05:05-B1*03:01L HLA-D RB1*16:01L HLA-DQA1*01:03-B1*06:01L
VITPGTNTSNQVA

SEQ ID NO: 11603 - protein, 10 aa, Severe acute respiratory syndrome coronavirus 2
  REGION 1..10: note = Table B: HLA-DQA1*05:01-B1*03:01L HLA-DRB1*13:03M HLA-DRB1*01:03L HLA-DQA1*01:02-B1*06:02M HLA-DRB4*03:01NL HLA-DRB1*08:77L HLA-DPA1*01:03-B1*03:01L HLA-DPA1*03:01-B1*04:02L HLA-DRB1*03:01L HLA-DRB1*14:01L
  REGION 1..10: note = CONT. FROM ABOVE: HLA-DRB1*11:02L HLA-DRB1*14:02L HLA-DQA1*01-B1 *05L HLA-DQA1*05:05-B1*03:19M HLA-DQA1*05:01-B1*02:01L HLA-DRB4* 01:01L HLA-DPA1*01:03-B1*04:01L HLA-DQA1*05:05-B1*03:116L HLA-DP A1*01:03-B1*04:02L HLA-DRB1*12:01L HLA-DPA1*02:01-B1*13:01L
  REGION 1..10: note = CONT. FROM ABOVE: HLA-DPA1*03:01-B1*105:01L HLA-DPA1*01:03-B1*10 4:01L HLA-DRB1*10:01L HLA-DRB1*16:01L HLA-DRB1*08:02L HLA-DQA1*0 2:01-B1*03:03L HLA-DRB1*15:03L
NTSNQVAVLY

SEQ ID NO: 11604 - protein, 11 aa, Severe acute respiratory syndrome coronavirus 2
  REGION 1..11: note = Table B: HLA-DQA1*05:01-B1*03:01L HLA-DRB1*04:03L HLA-DPA1*01:03-B1*03:01L HLA-DPA1*03:01-B1*04:02L HLA-DQA1*01:01-B1*05:01L HLA-DQA1*05:05-B1*03:19L HLA-DPA1*01:03-B1*04:01L HLA-DPA1*01:03-B1*04:02L
  REGION 1..11: note = CONT. FROM ABOVE: HLA-DRB1*12:01L HLA-DQA1*05:05-B1*03:01L HLA-D RB1*14:17L HLA-DRB1*16:01L HLA-DRB1*15:03L
NQVAVLYQDVN

SEQ ID NO: 11605 - protein, 11 aa, Severe acute respiratory syndrome coronavirus 2
  REGION 1..11: note = Table B: HLA-DQA1*05:01-B1*03:01L HLA-DQA1*01:02-B1*06:02L HLA-DPA1*03:01-B1*105:01L HLA-DQA1*03:01-B1*03:02L HLA-DQA1*05:05-B1*03:01L HLA-DQA1*02:01-B1*03:03L
VNCTEVPVAIH

SEQ ID NO: 11606 - protein, 10 aa, Severe acute respiratory syndrome coronavirus 2
  REGION 1..10: note = Table B: HLA-DQA1*05:01-B1*03:01L HLA-DRB1*13:03L HLA-DRB1*01:03L HLA-DQA1*01:02-B1*06:02M HLA-DRB1*08:77L HLA-DPA1*01:03-B1*03:01L HLA-DRB1*03:01L HLA-DRB1*14:02L HLA-DQA1*05:05-B1*03:19L HLA-DQA1*05:01-B1*02:01L
  REGION 1..10: note = CONT. FROM ABOVE: HLA-DPA1*01:03-B1*04:01L HLA-DPA1*01:03-B1*04: 02L HLA-DPA1*02:01-B1*13:01L HLA-DPA1*03:01-B1*105:01L HLA-DRB1* 16:01L HLA-DQA1*01:03-B1*06:01L HLA-DQA1*02:01-B1*03:03L HLA-DRB 1*15:03L
DQLTPTWRVY

SEQ ID NO: 11607 - protein, 10 aa, Severe acute respiratory syndrome coronavirus 2
  REGION 1..10: note = Table B: HLA-DQA1*05:01-B1*03:01L HLA-DRB1*04:01L HLA-DRB1*13:02M HLA-DRB1*13:03M HLA-DRB1*01:03L HLA-DRB1*04:02L HLA-DRB1*04:04L HLA-DQA1*01:02-B1*06:02L HLA-DRB1*01:01M HLA-DRB4*03:01NM HLA-DRB3*02:01L HLA-DRB1*14:01L HLA-DRB1*11:04M
  REGION 1..10: note = CONT. FROM ABOVE: HLA-DRB1*14:02L HLA-DRB1*08:01M HLA-DRB1*11:01 L HLA-DRB5*01:01M HLA-DQA1*05:05-B1*03:19L HLA-DRB4*02:01NL HLA- DRB5*02:02L HLA-DPA1*01:03-B1*04:01L HLA-DPA1*01:03-B1*04:02M HL A-DRB1*12:01H HLA-DRB1*12:02M HLA-DRB3*01:01L
  REGION 1..10: note = CONT. FROM ABOVE: HLA-DPA1*03:01-B1*105:01L HLA-DQA1*03:01-B1*03 :02M HLA-DRB1*14:54L HLA-DQA1*05:05-B1*03:01H HLA-DRB1*14:17L HL A-DRB1*16:01L HLA-DQA1*01:03-B1*06:01M HLA-DRB1*08:02L HLA-DRB1* 08:03L HLA-DQA1*02:01-B1*03:03L HLA-DRB1*15:01L
STGSNVFQTR

SEQ ID NO: 11608 - protein, 13 aa, Severe acute respiratory syndrome coronavirus 2
  REGION 1..13: note = Table B: HLA-DQA1*05:01-B1*03:01L HLA-DQA1*05:05-B1*03:19L HLA-DPA1*03:01-B1*105:01L HLA-DQA1*05:05-B1*03:01L HLA-DQA1*02:01-B1*03:03L
VFQTRAGCLIGAE

SEQ ID NO: 11609 - protein, 12 aa, Severe acute respiratory syndrome coronavirus 2
  REGION 1..12: note = Table B: HLA-DQA1*05:01-B1*03:01L HLA-DPA1*03:01-B1*105:01L HLA-DQA1*03:01-B1*03:02L HLA-DQA1*05:05-B1*03:01L
QTRAGCLIGAEH

SEQ ID NO: 11610 - protein, 13 aa, Severe acute respiratory syndrome coronavirus 2
  REGION 1..13: note = Table B: HLA-DQA1*05:01-B1*03:01L HLA-DQA1*03:01-B1*03:02L HLA-DQA1*05:05-B1*03:01L
TRAGCLIGAEHVN

SEQ ID NO: 11611 - protein, 10 aa, Severe acute respiratory syndrome coronavirus 2
  REGION 1..10: note = Table B: HLA-DQA1*05:01-B1*03:01L HLA-DRB1*04:03L HLA-DRB1*13:03L HLA-DRB1*01:03L HLA-DQA1*01:02-B1*06:02L HLA-DRB4*03:01NL HLA-DRB1*08:77L HLA-DPA1*01:03-B1*03:01L HLA-DPA1*03:01-B1*04:02L HLA-DRB1*03:01L HLA-DRB1*14:01L
  REGION 1..10: note = CONT. FROM ABOVE: HLA-DRB1*14:02L HLA-DQA1*01-B1*05L HLA-DQA1*05 :05-B1*03:19L HLA-DQA1*05:01-B1*02:01L HLA-DRB4*01:01L HLA-DPA1* 01:03-B1*04:01L HLA-DQA1*05:05-B1*03:116L HLA-DPA1*01:03-B1*04:0 2L HLA-DRB1*12:01L HLA-DPA1*02:01-B1*13:01L
  REGION 1..10: note = CONT. FROM ABOVE: HLA-DPA1*03:01-B1*105:01L HLA-DPA1*01:03-B1*10 4:01L HLA-DRB1*10:01L HLA-DRB1*16:01L HLA-DQA1*01:03-B1*06:01L H LA-DRB1*08:02L HLA-DQA1*02:01-B1*03:03L HLA-DRB1*15:03L
IGAEHVNNSY

SEQ ID NO: 11612 - protein, 11 aa, Severe acute respiratory syndrome coronavirus 2
  REGION 1..11: note = Table B: HLA-DQA1*05:01-B1*03:01L HLA-DRB1*13:03L HLA-DQA1*01:02-B1*06:02L HLA-DRB1*08:77L HLA-DPA1*01:03-B1*03:01L HLA-DRB1*03:01L HLA-DRB1*14:02L HLA-DQA1*05:05-B1*03:19L HLA-DQA1*05:01-B1*02:01L
  REGION 1..11: note = CONT. FROM ABOVE: HLA-DPA1*01:03-B1*04:01L HLA-DPA1*03:01-B1*105 :01L HLA-DRB1*16:01L HLA-DQA1*02:01-B1*03:03L HLA-DRB1*15:03L
IPIGAGICASY

SEQ ID NO: 11613 - protein, 10 aa, Severe acute respiratory syndrome coronavirus 2
  REGION 1..10: note = Table B: HLA-DQA1*05:01-B1*03:01L HLA-DRB1*04:01L HLA-DRB1*04:03L HLA-DRB1*13:02L HLA-DRB1*13:03L HLA-DRB1*01:03L HLA-DRB1*04:02L HLA-DRB1*04:05L HLA-DRB1*01:01L HLA-DRB4*03:01NL HLA-DRB1*11:03L HLA-DRB1*11:04L HLA-DRB1*08:01L HLA-DRB5*01:01L
  REGION 1..10: note = CONT. FROM ABOVE: HLA-DQA1*01-B1*05L HLA-DRB1*04:10L HLA-DRB1*12 :01L HLA-DRB1*12:02L HLA-DQA1*03:01-B1*03:02L HLA-DRB1*14:54L HL A-DQA1*05:05-B1*03:01L HLA-DRB1*14:17L HLA-DRB1*10:01L HLA-DRB1* 16:01L HLA-DRB1*04:08L HLA-DRB1*08:03L HLA-DQA1*02:01-B1*03:03L
SYQTQTNSPR

SEQ ID NO: 11614 - protein, 12 aa, Severe acute respiratory syndrome coronavirus 2
  REGION 1..12: note = Table B: HLA-DQA1*05:01-B1*03:01L HLA-DQA1*01:02-B1*06:02L HLA-DQA1*01:03-B1*06:01L
YQTQTNSPRRAR

SEQ ID NO: 11615 - protein, 14 aa, Severe acute respiratory syndrome coronavirus 2
  REGION 1..14: note = Table B: HLA-DQA1*05:01-B1*03:01L HLA-DRB1*13:02L HLA-DRB1*04:04L HLA-DQA1*01:02-B1*06:02L HLA-DPA1*01:03-B1*03:01L HLA-DRB1*08:01L HLA-DQA1*03:01-B1*03:02L HLA-DPA1*01:03-B1*104:01L
  REGION 1..14: note = CONT. FROM ABOVE: HLA-DPA1*01:02-B1*04:01L HLA-DRB1*07:01L HLA-D QA1*01:03-B1*06:01L HLA-DRB1*04:08L HLA-DQA1*02:01-B1*03:03L HLA -DRB1*15:03L
SPRRARSVASQSII

SEQ ID NO: 11616 - protein, 12 aa, Severe acute respiratory syndrome coronavirus 2
  REGION 1..12: note = Table B: HLA-DQA1*05:01-B1*03:01L HLA-DQA1*01:02-B1*06:02L HLA-DQA1*03:01-B1*03:02L HLA-DQA1*01:03-B1*06:01L HLA-DQA1*02:01-B1*03:03L
RARSVASQSIIA

SEQ ID NO: 11617 - protein, 14 aa, Severe acute respiratory syndrome coronavirus 2
  REGION 1..14: note = Table B: HLA-DQA1*05:01-B1*03:01L HLA-DRB1*01:03L HLA-DRB3*02:01L HLA-DPA1*01:03-B1*03:01L HLA-DRB1*11:03L HLA-DRB1*11:04L HLA-DQA1*05:05-B1*03:19L HLA-DQA1*03:01-B1*03:02L HLA-DQA1*05:05-B1*03:01L
  REGION 1..14: note = CONT. FROM ABOVE: HLA-DQA1*01:03-B1*06:01L HLA-DRB1*08:03L HLA-D QA1*02:01-B1*03:03L HLA-DRB1*15:01L
SQSIIAYTMSLGAE

SEQ ID NO: 11618 - protein, 12 aa, Severe acute respiratory syndrome coronavirus 2
  REGION 1..12: note = Table B: HLA-DQA1*05:01-B1*03:01L HLA-DRB1*04:03L HLA-DRB1*01:02L HLA-DQA1*03:01-B1*03:02L HLA-DQA1*05:05-B1*03:01L HLA-DRB1*14:17L HLA-DQA1*02:01-B1*03:03L
YTMSLGAENSVA

SEQ ID NO: 11619 - protein, 11 aa, Severe acute respiratory syndrome coronavirus 2
  REGION 1..11: note = Table B: HLA-DQA1*05:01-B1*03:01L HLA-DPA1*01:03-B1*03:01L HLA-DRB1*03:01L HLA-DRB4*01:01L HLA-DPA1*01:03-B1*04:01L HLA-DRB1*16:01L HLA-DRB1*08:02L HLA-DRB1*15:03L
MSLGAENSVAY

SEQ ID NO: 11620 - protein, 13 aa, Severe acute respiratory syndrome coronavirus 2
  REGION 1..13: note = Table B: HLA-DQA1*05:01-B1*03:01L HLA-DRB1*13:02L HLA-DRB1*13:03L HLA-DRB1*01:03L HLA-DRB1*04:04L HLA-DQA1*01:02-B1*06:02L HLA-DRB1*01:02L HLA-DRB1*08:77L HLA-DRB3*02:01L HLA-DPA1*01:03-B1*03:01L HLA-DRB1*11:04L
  REGION 1..13: note = CONT. FROM ABOVE: HLA-DQA1*05:05-B1*03:19L HLA-DPA1*03:01-B1*105 :01L HLA-DQA1*05:05-B1*03:01L HLA-DQA1*01:03-B1*06:01L HLA-DRB1* 04:08L HLA-DRB1*08:03L HLA-DRB1*15:03L
AENSVAYSNNSIA

SEQ ID NO: 11621 - protein, 11 aa, Severe acute respiratory syndrome coronavirus 2
  REGION 1..11: note = Table B: HLA-DQA1*05:01-B1*03:01L HLA-DRB1*04:03L HLA-DRB1*13:03L HLA-DRB1*01:03L HLA-DRB1*04:02L HLA-DQA1*01:02-B1*06:02L HLA-DRB4*03:01NL HLA-DQA1*05:05-B1*03:19L HLA-DRB1*12:01L
  REGION 1..11: note = CONT. FROM ABOVE: HLA-DPA1*03:01-B1*105:01L HLA-DRB1*14:54L HLA- DQA1*05:05-B1*03:01L HLA-DRB1*14:17L HLA-DRB1*16:01L
YSNNSIAIPTN

SEQ ID NO: 11622 - protein, 12 aa, Severe acute respiratory syndrome coronavirus 2
  REGION 1..12: note = Table B: HLA-DQA1*05:01-B1*03:01L HLA-DQA1*01:01-B1*05:01L HLA-DQA1*05:05-B1*03:19L HLA-DPA1*03:01-B1*105:01L HLA-DQA1*05:05-B1*03:01L
SNNSIAIPTNFT

SEQ ID NO: 11623 - protein, 10 aa, Severe acute respiratory syndrome coronavirus 2
  REGION 1..10: note = Table B: HLA-DQA1*05:01-B1*03:01L HLA-DRB1*13:03L HLA-DPA1*03:01-B1*04:02L HLA-DQA1*01-B1*05L HLA-DQA1*05:05-B1*03:116L HLA-DPA1*02:01-B1*13:01L HLA-DPA1*03:01-B1*105:01L
LPVSMTKTSV

SEQ ID NO: 11624 - protein, 10 aa, Severe acute respiratory syndrome coronavirus 2
  REGION 1..10: note = Table B: HLA-DQA1*05:01-B1*03:01L HLA-DQA1*01:02-B1*06:02L HLA-DRB1*08:77L HLA-DPA1*01:03-B1*03:01L HLA-DPA1*03:01-B1*04:02L HLA-DRB1*03:01L HLA-DRB1*11:02L HLA-DQA1*01-B1*05L HLA-DQA1*05:05-B1*03:19M
  REGION 1..10: note = CONT. FROM ABOVE: HLA-DQA1*05:01-B1*02:01L HLA-DRB4*01:01L HLA-D PA1*01:03-B1*04:01L HLA-DQA1*05:05-B1*03:116L HLA-DPA1*01:03-B1* 104:01L HLA-DRB1*10:01L HLA-DRB1*16:01L HLA-DRB1*15:03L
TECSNLLLQY

SEQ ID NO: 11625 - protein, 12 aa, Severe acute respiratory syndrome coronavirus 2
  REGION 1..12: note = Table B: HLA-DQA1*05:01-B1*03:01L HLA-DRB1*01:03L HLA-DQA1*01:02-B1*06:02L HLA-DRB1*01:02L HLA-DPA1*03:01-B1*04:02L HLA-DRB1*08:01L HLA-DPA1*01:03-B1*04:01L HLA-DPA1*01:03-B1*04:02L
  REGION 1..12: note = CONT. FROM ABOVE: HLA-DQA1*03:01-B1*03:02L HLA-DPA1*01:03-B1*02: 01L HLA-DQA1*05:05-B1*03:01L HLA-DPA1*01:02-B1*04:01L HLA-DRB1*1 6:01L HLA-DRB1*04:08L HLA-DQA1*02:01-B1*03:03L
LQYGSFCTQLNR

SEQ ID NO: 11626 - protein, 12 aa, Severe acute respiratory syndrome coronavirus 2
  REGION 1..12: note = Table B: HLA-DQA1*05:01-B1*03:01L HLA-DPA1*03:01-B1*105:01L HLA-DQA1*05:05-B1*03:01L HLA-DQA1*02:01-B1*03:03L
SFCTQLNRALTG

SEQ ID NO: 11627 - protein, 13 aa, Severe acute respiratory syndrome coronavirus 2
  REGION 1..13: note = Table B: HLA-DQA1*05:01-B1*03:01L HLA-DRB1*04:03L HLA-DRB1*04:02L HLA-DRB1*04:05L HLA-DQA1*01:02-B1*06:02L HLA-DRB1*01:02L HLA-DPA1*01:03-B1*03:01L HLA-DRB1*12:01L HLA-DPA1*03:01-B1*105:01L HLA-DQA1*05:05-B1*03:01L
  REGION 1..13: note = CONT. FROM ABOVE: HLA-DRB1*14:17L HLA-DRB1*15:03L
TQLNRALTGIAVE

SEQ ID NO: 11628 - protein, 11 aa, Severe acute respiratory syndrome coronavirus 2
  REGION 1..11: note = Table B: HLA-DQA1*05:01-B1*03:01L HLA-DRB1*04:02L HLA-DRB1*14:17L HLA-DRB1*16:01L
NTQEVFAQVKQ

SEQ ID NO: 11629 - protein, 10 aa, Severe acute respiratory syndrome coronavirus 2
  REGION 1..10: note = Table B: HLA-DQA1*05:01-B1*03:01L HLA-DRB1*04:03L HLA-DRB1*13:02L HLA-DRB1*13:03L HLA-DRB1*01:03L HLA-DRB1*04:02L HLA-DRB1*04:05L HLA-DQA1*01:02-B1*06:02L HLA-DRB1*01:02L HLA-DRB4*03:01NL HLA-DRB1*14:01L HLA-DQA1*01-B1*05L
  REGION 1..10: note = CONT. FROM ABOVE: HLA-DRB1*12:01L HLA-DPA1*03:01-B1*105:01L HLA- DQA1*03:01-B1*03:02L HLA-DQA1*05:05-B1*03:01L HLA-DRB1*14:17L HL A-DPA1*01:02-B1*04:01L HLA-DRB1*16:01L HLA-DQA1*01:03-B1*06:01L HLA-DRB1*04:08L HLA-DQA1*02:01-B1*03:03L HLA-DRB1*15:03L
QIYKTPPIKD

SEQ ID NO: 11630 - protein, 14 aa, Severe acute respiratory syndrome coronavirus 2
  REGION 1..14: note = Table B: HLA-DQA1*05:01-B1*03:01L HLA-DRB1*13:02L HLA-DRB1*04:04L HLA-DPA1*01:03-B1*03:01L HLA-DRB1*08:01L HLA-DQA1*05:05-B1*03:19L HLA-DRB1*04:10L HLA-DRB3*01:01L HLA-DRB1*14:54L HLA-DQA1*05:05-B1*03:01L
  REGION 1..14: note = CONT. FROM ABOVE: HLA-DPA1*01:02-B1*04:01L HLA-DRB1*07:01L
TPPIKDFGGFNFSQ

SEQ ID NO: 11631 - protein, 14 aa, Severe acute respiratory syndrome coronavirus 2
  REGION 1..14: note = Table B: HLA-DQA1*05:01-B1*03:01L
DFGGFNFSQILPDP

SEQ ID NO: 11632 - protein, 12 aa, Severe acute respiratory syndrome coronavirus 2
  REGION 1..12: note = Table B: HLA-DQA1*05:01-B1*03:01L HLA-DRB1*01:03L HLA-DRB1*04:05L HLA-DQA1*01:02-B1*06:02L HLA-DRB1*01:02L HLA-DRB4*03:01NL HLA-DQA1*05:05-B1*03:19L HLA-DRB1*12:01L HLA-DPA1*03:01-B1*105:01L HLA-DQA1*05:05-B1*03:01L
  REGION 1..12: note = CONT. FROM ABOVE: HLA-DRB1*10:01L HLA-DRB1*16:01L HLA-DQA1*01:03 -B1*06:01L HLA-DRB1*04:08L
NFSQILPDPSKP

SEQ ID NO: 11633 - protein, 11 aa, Severe acute respiratory syndrome coronavirus 2
  REGION 1..11: note = Table B: HLA-DQA1*05:01-B1*03:01L HLA-DQA1*01:02-B1*06:02L HLA-DRB1*11:02L HLA-DRB1*09:01L HLA-DPA1*02:01-B1*13:01L
IEDLLFNKVTL

SEQ ID NO: 11634 - protein, 10 aa, Severe acute respiratory syndrome coronavirus 2
  REGION 1..10: note = Table B: HLA-DQA1*05:01-B1*03:01L HLA-DRB1*04:03L HLA-DRB1*13:02L HLA-DRB1*13:03L HLA-DRB1*01:03L HLA-DRB1*04:02L HLA-DRB1*04:05L HLA-DQA1*01:02-B1*06:02M HLA-DRB4*03:01NL HLA-DRB1*08:77M HLA-DPA1*01:03-B1*03:01H
  REGION 1..10: note = CONT. FROM ABOVE: HLA-DPA1*03:01-B1*04:02L HLA-DRB1*03:01M HLA-D RB1*14:01L HLA-DRB1*11:02M HLA-DRB1*11:03L HLA-DRB1*11:04L HLA-D RB1*14:02L HLA-DRB1*11:01L HLA-DRB5*01:01L HLA-DQA1*01-B1*05H HL A-DQA1*05:05-B1*03:19H HLA-DQA1*05:01-B1*02:01H HLA-DRB4*01:01M
  REGION 1..10: note = CONT. FROM ABOVE: HLA-DPA1*01:03-B1*04:01M HLA-DQA1*05:05-B1*03: 116M HLA-DPA1*01:03-B1*04:02M HLA-DRB1*12:01M HLA-DPA1*02:01-B1* 13:01L HLA-DPA1*03:01-B1*105:01L HLA-DRB1*14:54L HLA-DPA1*01:03- B1*104:01H HLA-DQA1*05:05-B1*03:01L HLA-DPA1*01:02-B1*04:01L
  REGION 1..10: note = CONT. FROM ABOVE: HLA-DRB1*10:01M HLA-DRB1*16:01H HLA-DRB1*08:02 L HLA-DQA1*02:01-B1*03:03L HLA-DRB1*15:03L
LADAGFIKQY

SEQ ID NO: 11635 - protein, 14 aa, Severe acute respiratory syndrome coronavirus 2
  REGION 1..14: note = Table B: HLA-DQA1*05:01-B1*03:01L HLA-DRB1*04:01L HLA-DRB1*13:03L HLA-DRB1*04:02L HLA-DRB1*04:04L HLA-DRB1*01:01L HLA-DRB1*08:04L HLA-DRB3*02:01L HLA-DRB1*14:01L HLA-DRB1*11:02L HLA-DRB1*11:03L HLA-DRB1*11:04L HLA-DRB1*14:02L HLA-DRB1*08:01L
  REGION 1..14: note = CONT. FROM ABOVE: HLA-DRB1*11:01L HLA-DRB4*01:01L HLA-DPA1*01:03 -B1*04:01L HLA-DRB1*04:10L HLA-DRB1*09:01L HLA-DPA1*01:03-B1*04: 02L HLA-DRB3*01:01L HLA-DPA1*01:02-B1*04:01L HLA-DRB1*07:01L HLA -DRB1*10:01L HLA-DRB1*08:03L HLA-DRB1*15:01L
GFIKQYGDCLGDIA

SEQ ID NO: 11636 - protein, 15 aa, Severe acute respiratory syndrome coronavirus 2
  REGION 1..15: note = Table B: HLA-DQA1*05:01-B1*03:01L HLA-DQA1*05:05-B1*03:01L
IKQYGDCLGDIAARD

SEQ ID NO: 11637 - protein, 14 aa, Severe acute respiratory syndrome coronavirus 2
  REGION 1..14: note = Table B: HLA-DQA1*05:01-B1*03:01L HLA-DRB1*01:03L HLA-DRB1*01:02L HLA-DRB1*04:08L
LGDIAARDLICAQK

SEQ ID NO: 11638 - protein, 14 aa, Severe acute respiratory syndrome coronavirus 2
  REGION 1..14: note = Table B: HLA-DQA1*05:01-B1*03:01L HLA-DRB1*13:03L HLA-DRB1*04:02L HLA-DRB1*04:05L HLA-DRB1*11:02L HLA-DRB1*11:03L HLA-DRB1*14:02L HLA-DQA1*05:05-B1*03:19L HLA-DQA1*05:05-B1*03:116L HLA-DPA1*02:01-B1*13:01L
  REGION 1..14: note = CONT. FROM ABOVE: HLA-DPA1*01:03-B1*104:01L HLA-DQA1*05:05-B1*03 :01L HLA-DRB1*08:02L HLA-DRB1*08:03L HLA-DQA1*02:01-B1*03:03L
ARDLICAQKFNGLT

SEQ ID NO: 11639 - protein, 11 aa, Severe acute respiratory syndrome coronavirus 2
  REGION 1..11: note = Table B: HLA-DQA1*05:01-B1*03:01L HLA-DQA1*01:02-B1*06:02L HLA-DQA1*01-B1*05L HLA-DQA1*05:01-B1*02:01L HLA-DPA1*03:01-B1*105:01L HLA-DQA1*01:03-B1*06:01L
TVLPPLLTDEM

SEQ ID NO: 11640 - protein, 16 aa, Severe acute respiratory syndrome coronavirus 2
  REGION 1..16: note = Table B: HLA-DQA1*05:01-B1*03:01L HLA-DRB1*04:01L HLA-DRB3*02:01L HLA-DPA1*02:01-B1*13:01L HLA-DPA1*01:03-B1*02:01L
LPPLLTDEMIAQYTSA

SEQ ID NO: 11641 - protein, 14 aa, Severe acute respiratory syndrome coronavirus 2
  REGION 1..14: note = Table B: HLA-DQA1*05:01-B1*03:01L HLA-DRB1*13:02L HLA-DRB1*13:03L HLA-DRB1*04:05L HLA-DRB1*01:01L HLA-DPA1*03:01-B1*04:02L HLA-DRB1*14:01L HLA-DRB1*11:03L HLA-DRB1*11:04L HLA-DRB1*14:02L HLA-DRB1*08:01L
  REGION 1..14: note = CONT. FROM ABOVE: HLA-DQA1*05:05-B1*03:19L HLA-DRB1*04:10L HLA-D PA1*03:01-B1*105:01L HLA-DRB1*14:54L HLA-DRB1*08:03L
DEMIAQYTSALLAG

SEQ ID NO: 11642 - protein, 12 aa, Severe acute respiratory syndrome coronavirus 2
  REGION 1..12: note = Table B: HLA-DQA1*05:01-B1*03:01L HLA-DQA1*05:05-B1*03:19L HLA-DQA1*03:01-B1*03:02L HLA-DQA1*05:05-B1*03:01L HLA-DQA1*02:01-B1*03:03L
TSALLAGTITSG

SEQ ID NO: 11643 - protein, 10 aa, Severe acute respiratory syndrome coronavirus 2
  REGION 1..10: note = Table B: HLA-DQA1*05:01-B1*03:01L HLA-DRB1*13:03L HLA-DQA1*01:02-B1*06:02L HLA-DPA1*03:01-B1*04:02L HLA-DRB1*14:02L HLA-DQA1*05:05-B1*03:19L HLA-DQA1*05:01-B1*02:01L HLA-DRB4*01:01L
  REGION 1..10: note = CONT. FROM ABOVE: HLA-DPA1*01:03-B1*04:01L HLA-DPA1*02:01-B1*13: 01L HLA-DPA1*03:01-B1*105:01L HLA-DQA1*01:03-B1*06:01L HLA-DQA1* 02:01-B1*03:03L HLA-DRB1*15:03L
LLAGTITSGW

SEQ ID NO: 11644 - protein, 12 aa, Severe acute respiratory syndrome coronavirus 2
  REGION 1..12: note = Table B: HLA-DQA1*05:01-B1*03:01L HLA-DRB1*13:02L HLA-DRB3*02:01L HLA-DPA1*03:01-B1*04:02L HLA-DRB1*14:01L HLA-DQA1*05:01-B1*02:01L HLA-DPA1*01:02-B1*04:01L
IPFAMQMAYRFN

SEQ ID NO: 11645 - protein, 12 aa, Severe acute respiratory syndrome coronavirus 2
  REGION 1..12: note = Table B: HLA-DQA1*05:01-B1*03:01L HLA-DRB1*04:03L HLA-DRB1*01:03L HLA-DRB1*04:02L HLA-DQA1*01:02-B1*06:02L HLA-DRB1*01:02L HLA-DPA1*03:01-B1*04:02L HLA-DRB1*14:01L HLA-DRB1*08:01L HLA-DQA1*01-B1*05L HLA-DRB1*12:01L
  REGION 1..12: note = CONT. FROM ABOVE: HLA-DPA1*03:01-B1*105:01L HLA-DQA1*03:01-B1*03 :02L HLA-DPA1*01:02-B1*04:01L HLA-DRB1*16:01L HLA-DRB1*04:08L HL A-DQA1*02:01-B1*03:03L HLA-DRB1*15:03L
MAYRFNGIGVTQ

SEQ ID NO: 11646 - protein, 11 aa, Severe acute respiratory syndrome coronavirus 2
  REGION 1..11: note = Table B: HLA-DQA1*05:01-B1*03:01L HLA-DRB1*01:03L HLA-DRB1*04:02L HLA-DRB1*04:05L HLA-DPA1*03:01-B1*105:01L HLA-DPA1*01:02-B1*04:01L HLA-DRB1*16:01L HLA-DRB1*04:08L
YRFNGIGVTQN

SEQ ID NO: 11647 - protein, 10 aa, Severe acute respiratory syndrome coronavirus 2
  REGION 1..10: note = Table B: HLA-DQA1*05:01-B1*03:01L HLA-DRB1*13:03L HLA-DRB1*01:03L HLA-DQA1*01:02-B1*06:02L HLA-DRB1*08:77L HLA-DPA1*01:03-B1*03:01L HLA-DRB1*03:01L HLA-DRB1*14:02L HLA-DQA1*05:05-B1*03:19L HLA-DQA1*05:01-B1*02:01L
  REGION 1..10: note = CONT. FROM ABOVE: HLA-DPA1*01:03-B1*04:01L HLA-DRB1*12:01L HLA-D PA1*03:01-B1*105:01L HLA-DPA1*01:03-B1*104:01L HLA-DRB1*16:01L H LA-DQA1*02:01-B1*03:03L HLA-DRB1*15:03L
GIGVTQNVLY

SEQ ID NO: 11648 - protein, 10 aa, Severe acute respiratory syndrome coronavirus 2
  REGION 1..10: note = Table B: HLA-DQA1*05:01-B1*03:01L HLA-DRB1*04:03L HLA-DPA1*03:01-B1*105:01L HLA-DQA1*03:01-B1*03:02L HLA-DPA1*01:02-B1*04:01L HLA-DQA1*01:03-B1*06:01L HLA-DQA1*02:01-B1*03:03L
QFNSAIGKIQ

SEQ ID NO: 11649 - protein, 14 aa, Severe acute respiratory syndrome coronavirus 2
  REGION 1..14: note = Table B: HLA-DQA1*05:01-B1*03:01L HLA-DRB1*14:04L HLA-DRB1*04:01L HLA-DRB1*13:02L HLA-DQA1*01:02-B1*06:02L HLA-DRB1*01:01L HLA-DRB1*08:04L HLA-DRB1*08:77L HLA-DPA1*01:03-B1*03:01L HLA-DRB1*11:03L HLA-DRB1*14:02L
  REGION 1..14: note = CONT. FROM ABOVE: HLA-DRB1*11:01L HLA-DRB5*01:01L HLA-DQA1*05:05 -B1*03:19L HLA-DRB4*01:01L HLA-DRB1*09:01L HLA-DRB1*12:02L HLA-D PA1*02:01-B1*13:01L HLA-DPA1*03:01-B1*105:01L HLA-DPA1*01:03-B1* 104:01L HLA-DQA1*05:05-B1*03:01L HLA-DRB1*07:01L HLA-DRB1*10:01L
  REGION 1..14: note = CONT. FROM ABOVE: HLA-DQA1*01:03-B1*06:01L HLA-DRB1*08:03L HLA-D RB1*15:03L
IGKIQDSLSSTASA

SEQ ID NO: 11650 - protein, 13 aa, Severe acute respiratory syndrome coronavirus 2
  REGION 1..13: note = Table B: HLA-DQA1*05:01-B1*03:01L HLA-DRB1*04:03L HLA-DRB1*04:02L HLA-DRB1*04:05L HLA-DQA1*01:02-B1*06:02L HLA-DRB4*03:01NL HLA-DQA1*01:01-B1*05:01L HLA-DQA1*05:05-B1*03:19L HLA-DQA1*05:01-B1*02:01L
  REGION 1..13: note = CONT. FROM ABOVE: HLA-DQA1*05:05-B1*03:01L HLA-DRB1*14:17L HLA-D RB1*16:01L HLA-DQA1*01:03-B1*06:01L HLA-DQA1*02:01-B1*03:03L
IQDSLSSTASALG

SEQ ID NO: 11651 - protein, 11 aa, Severe acute respiratory syndrome coronavirus 2
  REGION 1..11: note = Table B: HLA-DQA1*05:01-B1*03:01L HLA-DRB1*13:02L HLA-DRB1*04:05L HLA-DQA1*05:05-B1*03:19L HLA-DRB1*12:02L HLA-DPA1*03:01-B1*105:01L
SLSSTASALGK

SEQ ID NO: 11652 - protein, 13 aa, Severe acute respiratory syndrome coronavirus 2
  REGION 1..13: note = Table B: HLA-DQA1*05:01-B1*03:01L HLA-DRB1*04:01L HLA-DRB1*13:02L HLA-DRB1*08:04L HLA-DRB1*08:77L HLA-DPA1*01:03-B1*03:01L HLA-DRB1*14:01L HLA-DRB1*11:03L HLA-DRB1*11:04L HLA-DRB1*09:01L HLA-DRB1*12:02L
  REGION 1..13: note = CONT. FROM ABOVE: HLA-DPA1*03:01-B1*105:01L HLA-DPA1*01:03-B1*10 4:01L HLA-DQA1*05:05-B1*03:01L HLA-DRB1*07:01L HLA-DRB1*10:01L H LA-DRB1*08:03L HLA-DRB1*15:03L
LGKLQDVVNQNAQ

SEQ ID NO: 11653 - protein, 13 aa, Severe acute respiratory syndrome coronavirus 2
  REGION 1..13: note = Table B: HLA-DQA1*05:01-B1*03:01L HLA-DRB1*04:01L HLA-DRB1*13:02L HLA-DRB1*08:04L HLA-DPA1*01:03-B1*03:01L HLA-DRB1*14:01L HLA-DRB1*11:03L HLA-DRB1*11:04L HLA-DPA1*03:01-B1*105:01L HLA-DQA1*05:05-B1*03:01L
  REGION 1..13: note = CONT. FROM ABOVE: HLA-DRB1*10:01L HLA-DRB1*08:03L HLA-DRB1*15:03 L
GKLQDVVNQNAQA

SEQ ID NO: 11654 - protein, 10 aa, Severe acute respiratory syndrome coronavirus 2
  REGION 1..10: note = Table B: HLA-DQA1*05:01-B1*03:01L HLA-DRB4*03:01NL HLA-DQA1*03:01-B1*03:02L HLA-DQA1*05:05-B1*03:01L HLA-DQA1*01:03-B1*06:01L HLA-DQA1*02:01-B1*03:03L
NAQALNTLVK

SEQ ID NO: 11655 - protein, 11 aa, Severe acute respiratory syndrome coronavirus 2
  REGION 1..11: note = Table B: HLA-DQA1*05:01-B1*03:01L HLA-DRB1*04:05L HLA-DRB1*01:02L HLA-DRB4*03:01NL HLA-DRB1*14:01L HLA-DQA1*05:01-B1*02:01L HLA-DRB1*04:10L HLA-DRB1*14:54L HLA-DRB1*16:01L HLA-DRB1*15:03L
TLVKQLSSNFG

SEQ ID NO: 11656 - protein, 11 aa, Severe acute respiratory syndrome coronavirus 2
  REGION 1..11: note = Table B: HLA-DQA1*05:01-B1*03:01L HLA-DRB1*04:03L HLA-DQA1*01:02-B1*06:02L HLA-DQA1*05:05-B1*03:19L HLA-DQA1*05:01-B1*02:01L HLA-DQA1*03:01-B1*03:02L HLA-DQA1*05:05-B1*03:01L HLA-DRB1*14:17L
  REGION 1..11: note = CONT. FROM ABOVE: HLA-DQA1*01:03-B1*06:01L HLA-DQA1*02:01-B1*03: 03L
SNFGAISSVLN

SEQ ID NO: 11657 - protein, 11 aa, Severe acute respiratory syndrome coronavirus 2
  REGION 1..11: note = Table B: HLA-DQA1*05:01-B1*03:01L HLA-DRB1*04:03L HLA-DRB1*12:01L HLA-DRB1*16:01L HLA-DRB1*15:03L
GAISSVLNDIL

SEQ ID NO: 11658 - protein, 11 aa, Severe acute respiratory syndrome coronavirus 2
  REGION 1..11: note = Table B: HLA-DQA1*05:01-B1*03:01L HLA-DRB1*04:03L HLA-DQA1*01:02-B1*06:02L HLA-DPA1*03:01-B1*105:01L HLA-DRB1*16:01L
ISSVLNDILSR

SEQ ID NO: 11659 - protein, 10 aa, Severe acute respiratory syndrome coronavirus 2
  REGION 1..10: note = Table B: HLA-DQA1*05:01-B1*03:01L HLA-DQA1*01:02-B1*06:02L HLA-DPA1*03:01-B1*105:01L HLA-DQA1*01:03-B1*06:01L HLA-DQA1*02:01-B1*03:03L
ITGRLQSLQT

SEQ ID NO: 11660 - protein, 13 aa, Severe acute respiratory syndrome coronavirus 2
  REGION 1..13: note = Table B: HLA-DQA1*05:01-B1*03:01L HLA-DRB1*13:02L HLA-DRB1*13:03L HLA-DRB1*08:04L HLA-DPA1*01:03-B1*03:01L HLA-DRB1*11:03L HLA-DRB1*11:04L HLA-DQA1*01-B1*05L HLA-DQA1*05:01-B1*02:01L HLA-DRB1*12:02L
  REGION 1..13: note = CONT. FROM ABOVE: HLA-DPA1*03:01-B1*105:01L HLA-DQA1*05:05-B1*03 :01L HLA-DRB1*10:01L HLA-DRB1*08:03L
TGRLQSLQTYVTQ

SEQ ID NO: 11661 - protein, 13 aa, Severe acute respiratory syndrome coronavirus 2
  REGION 1..13: note = Table B: HLA-DQA1*05:01-B1*03:01L HLA-DRB1*04:01L HLA-DRB1*01:01L HLA-DRB1*08:04L HLA-DRB1*11:04L HLA-DQA1*01-B1*05L HLA-DPA1*03:01-B1*105:01L HLA-DQA1*05:05-B1*03:01L HLA-DRB1*10:01L
GRLQSLQTYVTQQ

SEQ ID NO: 11662 - protein, 10 aa, Severe acute respiratory syndrome coronavirus 2
  REGION 1..10: note = Table B: HLA-DQA1*05:01-B1*03:01L HLA-DRB1*04:03L HLA-DQA1*01:02-B1*06:02L HLA-DPA1*03:01-B1*105:01L HLA-DQA1*03:01-B1*03:02L HLA-DQA1*01:03-B1*06:01L HLA-DQA1*02:01-B1*03:03L
VTQQLIRAAE

SEQ ID NO: 11663 - protein, 12 aa, Severe acute respiratory syndrome coronavirus 2
  REGION 1..12: note = Table B: HLA-DQA1*05:01-B1*03:01L
QQLIRAAEIRAS

SEQ ID NO: 11664 - protein, 10 aa, Severe acute respiratory syndrome coronavirus 2
  REGION 1..10: note = Table B: HLA-DQA1*05:01-B1*03:01L HLA-DQA1*01:02-B1*06:02L HLA-DQA1*05:05-B1*03:19L HLA-DPA1*03:01-B1*105:01L HLA-DQA1*03:01-B1*03:02L HLA-DQA1*05:05-B1*03:01L HLA-DQA1*01:03-B1*06:01L HLA-DQA1*02:01-B1*03:03L
IRAAEIRASA

SEQ ID NO: 11665 - protein, 11 aa, Severe acute respiratory syndrome coronavirus 2
  REGION 1..11: note = Table B: HLA-DQA1*05:01-B1*03:01L HLA-DRB1*04:01L HLA-DRB1*04:04L HLA-DRB1*04:05L HLA-DQA1*01:02-B1*06:02L HLA-DRB1*01:02L HLA-DRB1*08:04L HLA-DRB1*14:01L HLA-DRB1*11:03L HLA-DRB1*11:04L HLA-DRB1*11:01L HLA-DQA1*05:05-B1*03:19L
  REGION 1..11: note = CONT. FROM ABOVE: HLA-DRB1*04:10L HLA-DRB1*12:02L HLA-DPA1*03:01 -B1*105:01L HLA-DRB1*14:54L HLA-DRB1*10:01L HLA-DQA1*01:03-B1*06 :01L HLA-DRB1*04:08L HLA-DRB1*08:03L HLA-DRB1*15:03L
IRASANLAATK

SEQ ID NO: 11666 - protein, 14 aa, Severe acute respiratory syndrome coronavirus 2
  REGION 1..14: note = Table B: HLA-DQA1*05:01-B1*03:01L HLA-DRB1*01:02L
LAATKMSECVLGQS

SEQ ID NO: 11667 - protein, 13 aa, Severe acute respiratory syndrome coronavirus 2
  REGION 1..13: note = Table B: HLA-DQA1*05:01-B1*03:01L
ATKMSECVLGQSK

SEQ ID NO: 11668 - protein, 13 aa, Severe acute respiratory syndrome coronavirus 2
  REGION 1..13: note = Table B: HLA-DQA1*05:01-B1*03:01L HLA-DRB1*01:02L HLA-DRB1*04:08L
TKMSECVLGQSKR

SEQ ID NO: 11669 - protein, 10 aa, Severe acute respiratory syndrome coronavirus 2
  REGION 1..10: note = Table B: HLA-DQA1*05:01-B1*03:01L HLA-DRB1*01:03L HLA-DQA1*01:02-B1*06:02L HLA-DRB1*14:01L HLA-DQA1*03:01-B1*03:02L HLA-DRB1*16:01L HLA-DQA1*01:03-B1*06:01L HLA-DQA1*02:01-B1*03:03L
  REGION 1..10: note = CONT. FROM ABOVE: HLA-DRB1*15:03L
VLGQSKRVDF

SEQ ID NO: 11670 - protein, 12 aa, Severe acute respiratory syndrome coronavirus 2
  REGION 1..12: note = Table B: HLA-DQA1*05:01-B1*03:01L HLA-DRB1*04:01L HLA-DRB1*13:03L HLA-DRB1*01:03L HLA-DRB1*04:04L HLA-DRB1*04:05L HLA-DQA1*01:02-B1*06:02L HLA-DRB1*01:02L HLA-DRB4*03:01NL HLA-DRB1*08:04L HLA-DRB1*14:01L HLA-DRB1*11:04L HLA-DRB1*08:01L
  REGION 1..12: note = CONT. FROM ABOVE: HLA-DRB1*04:10L HLA-DRB1*12:01L HLA-DPA1*03:01 -B1*105:01L HLA-DRB1*14:54L HLA-DQA1*05:05-B1*03:01L HLA-DRB1*10 :01L HLA-DRB1*16:01L HLA-DRB1*04:08L HLA-DRB1*15:03L
YHLMSFPQSAPH

SEQ ID NO: 11671 - protein, 10 aa, Severe acute respiratory syndrome coronavirus 2
  REGION 1..10: note = Table B: HLA-DQA1*05:01-B1*03:01L HLA-DRB1*13:03L HLA-DQA1*01:02-B1*06:02L HLA-DPA1*03:01-B1*04:02L HLA-DQA1*01-B1*05L HLA-DQA1*05:05-B1*03:116L HLA-DPA1*03:01-B1*105:01L HLA-DPA1*01:02-B1*04:01L
APHGVVFLHV

SEQ ID NO: 11672 - protein, 12 aa, Severe acute respiratory syndrome coronavirus 2
  REGION 1..12: note = Table B: HLA-DQA1*05:01-B1*03:01L HLA-DRB1*04:03L HLA-DQA1*01:02-B1*06:02L HLA-DRB1*01:02L HLA-DPA1*01:03-B1*03:01L HLA-DRB1*14:01L HLA-DQA1*05:01-B1*02:01L HLA-DPA1*01:03-B1*04:01L
  REGION 1..12: note = CONT. FROM ABOVE: HLA-DPA1*01:03-B1*04:02L HLA-DRB1*12:01L HLA-D RB1*16:01L HLA-DRB1*04:08L HLA-DQA1*02:01-B1*03:03L HLA-DRB1*15: 03L
VVFLHVTYVPAQ

SEQ ID NO: 11673 - protein, 11 aa, Severe acute respiratory syndrome coronavirus 2
  REGION 1..11: note = Table B: HLA-DQA1*05:01-B1*03:01L
TYVPAQEKNFT

SEQ ID NO: 11674 - protein, 14 aa, Severe acute respiratory syndrome coronavirus 2
  REGION 1..14: note = Table B: HLA-DQA1*05:01-B1*03:01L HLA-DQA1*01:02-B1*06:02L HLA-DQA1*05:05-B1*03:01L HLA-DQA1*01:03-B1*06:01L
YVPAQEKNFTTAPA

SEQ ID NO: 11675 - protein, 16 aa, Severe acute respiratory syndrome coronavirus 2
  REGION 1..16: note = Table B: HLA-DQA1*05:01-B1*03:01L HLA-DRB1*13:02L HLA-DRB1*01:03L HLA-DRB1*04:04L HLA-DRB1*01:02L HLA-DPA1*03:01-B1*105:01L HLA-DQA1*05:05-B1*03:01L HLA-DRB1*07:01L HLA-DRB1*04:08L HLA-DRB1*15:03L
VPAQEKNFTTAPAICH

SEQ ID NO: 11676 - protein, 10 aa, Severe acute respiratory syndrome coronavirus 2
  REGION 1..10: note = Table B: HLA-DQA1*05:01-B1*03:01L HLA-DQA1*01:02-B1*06:02L HLA-DQA1*05:05-B1*03:19L HLA-DQA1*03:01-B1*03:02L HLA-DQA1*05:05-B1*03:01L HLA-DQA1*01:03-B1*06:01L HLA-DQA1*02:01-B1*03:03L
TTAPAICHDG

SEQ ID NO: 11677 - protein, 14 aa, Severe acute respiratory syndrome coronavirus 2
  REGION 1..14: note = Table B: HLA-DQA1*05:01-B1*03:01L HLA-DRB1*04:01L HLA-DRB1*04:02L HLA-DRB1*04:05L HLA-DQA1*01:02-B1*06:02L HLA-DRB1*01:01L HLA-DRB4*03:01NL HLA-DRB1*08:77L HLA-DPA1*01:03-B1*03:01L HLA-DRB1*11:03L HLA-DRB1*14:02L
  REGION 1..14: note = CONT. FROM ABOVE: HLA-DRB1*11:01L HLA-DRB5*01:01L HLA-DQA1*05:01 -B1*02:01L HLA-DPA1*03:01-B1*105:01L HLA-DQA1*03:01-B1*03:02L HL A-DRB1*14:54L HLA-DPA1*01:02-B1*04:01L HLA-DRB1*10:01L HLA-DRB1* 08:03L HLA-DQA1*02:01-B1*03:03L
APAICHDGKAHFPR

SEQ ID NO: 11678 - protein, 13 aa, Severe acute respiratory syndrome coronavirus 2
  REGION 1..13: note = Table B: HLA-DQA1*05:01-B1*03:01L HLA-DRB1*13:02L HLA-DQA1*05:05-B1*03:01L HLA-DPA1*01:02-B1*04:01L
VFVSNGTHWFVTQ

SEQ ID NO: 11679 - protein, 13 aa, Severe acute respiratory syndrome coronavirus 2
  REGION 1..13: note = Table B: HLA-DQA1*05:01-B1*03:01L
VSNGTHWFVTQRN

SEQ ID NO: 11680 - protein, 12 aa, Severe acute respiratory syndrome coronavirus 2
  REGION 1..12: note = Table B: HLA-DQA1*05:01-B1*03:01L HLA-DPA1*01:03-B1*03:01L HLA-DPA1*03:01-B1*04:02L HLA-DRB1*14:01L HLA-DRB1*12:01L HLA-DPA1*03:01-B1*105:01L HLA-DRB1*15:03L
GTHWFVTQRNFY

SEQ ID NO: 11681 - protein, 15 aa, Severe acute respiratory syndrome coronavirus 2
  REGION 1..15: note = Table B: HLA-DQA1*05:01-B1*03:01L HLA-DRB3*02:01L HLA-DRB1*08:01L HLA-DQA1*05:05-B1*03:19L HLA-DPA1*01:03-B1*04:01L HLA-DPA1*01:03-B1*04:02L HLA-DQA1*05:05-B1*03:01L
VTQRNFYEPQIITTD

SEQ ID NO: 11682 - protein, 12 aa, Severe acute respiratory syndrome coronavirus 2
  REGION 1..12: note = Table B: HLA-DQA1*05:01-B1*03:01L HLA-DRB1*13:03L HLA-DRB1*04:02L HLA-DRB1*04:05L HLA-DQA1*01:02-B1*06:02L HLA-DRB4*03:01NL HLA-DQA1*05:05-B1*03:19L HLA-DRB1*04:10L HLA-DPA1*03:01-B1*105:01L HLA-DQA1*05:05-B1*03:01L
  REGION 1..12: note = CONT. FROM ABOVE: HLA-DRB1*16:01L HLA-DRB1*04:08L
NFYEPQIITTDN

SEQ ID NO: 11683 - protein, 13 aa, Severe acute respiratory syndrome coronavirus 2
  REGION 1..13: note = Table B: HLA-DQA1*05:01-B1*03:01L HLA-DRB3*02:01L HLA-DPA1*03:01-B1*04:02L HLA-DPA1*03:01-B1*105:01L
YEPQIITTDNTFV

SEQ ID NO: 11684 - protein, 13 aa, Severe acute respiratory syndrome coronavirus 2
  REGION 1..13: note = Table B: HLA-DQA1*05:01-B1*03:01L HLA-DRB1*14:04L HLA-DRB1*04:01L HLA-DRB1*01:03L HLA-DRB1*04:04L HLA-DRB1*01:01L HLA-DRB1*01:02L HLA-DRB1*08:04L HLA-DPA1*01:03-B1*03:01L HLA-DPA1*03:01-B1*04:02L HLA-DRB1*14:02L HLA-DRB1*08:01L
  REGION 1..13: note = CONT. FROM ABOVE: HLA-DRB1*11:01L HLA-DRB5*01:01L HLA-DQA1*05:05 -B1*03:19L HLA-DRB4*01:01L HLA-DRB1*09:01L HLA-DRB3*01:01L HLA-D PA1*03:01-B1*105:01L HLA-DQA1*05:05-B1*03:01L HLA-DRB1*07:01L HL A-DRB1*10:01L HLA-DRB1*04:08L HLA-DRB1*08:03L
EPQIITTDNTFVS

SEQ ID NO: 11685 - protein, 13 aa, Severe acute respiratory syndrome coronavirus 2
  REGION 1..13: note = Table B: HLA-DQA1*05:01-B1*03:01L HLA-DRB1*04:01L HLA-DRB1*01:03L HLA-DRB1*04:04L HLA-DRB1*01:02L HLA-DRB1*08:04L HLA-DPA1*01:03-B1*03:01L HLA-DRB1*03:01L HLA-DRB1*14:02L HLA-DRB5*01:01L HLA-DRB4*01:01L HLA-DRB1*09:01L HLA-DRB3*01:01L
  REGION 1..13: note = CONT. FROM ABOVE: HLA-DQA1*05:05-B1*03:01L HLA-DRB1*07:01L HLA-D RB1*10:01L HLA-DRB1*04:08L HLA-DRB1*08:03L
PQIITTDNTFVSG

SEQ ID NO: 11686 - protein, 12 aa, Severe acute respiratory syndrome coronavirus 2
  REGION 1..12: note = Table B: HLA-DQA1*05:01-B1*03:01L HLA-DQA1*05:05-B1*03:19L HLA-DPA1*03:01-B1*105:01L HLA-DQA1*05:05-B1*03:01L HLA-DQA1*02:01-B1*03:03L
TFVSGNCDVVIG

SEQ ID NO: 11687 - protein, 10 aa, Severe acute respiratory syndrome coronavirus 2
  REGION 1..10: note = Table B: HLA-DQA1*05:01-B1*03:01L HLA-DRB1*04:03L HLA-DRB1*13:03L HLA-DRB1*01:03L HLA-DQA1*01:02-B1*06:02L HLA-DRB1*08:77L HLA-DPA1*01:03-B1*03:01L HLA-DPA1*03:01-B1*04:02L HLA-DRB1*03:01L HLA-DRB1*14:01L
  REGION 1..10: note = CONT. FROM ABOVE: HLA-DRB1*14:02L HLA-DQA1*01-B1*05L HLA-DQA1*05 :05-B1*03:19L HLA-DQA1*05:01-B1*02:01L HLA-DRB4*01:01L HLA-DPA1* 01:03-B1*04:01L HLA-DPA1*01:03-B1*04:02L HLA-DRB1*12:01L HLA-DPA 1*03:01-B1*105:01L HLA-DPA1*01:03-B1*104:01L HLA-DRB1*16:01L
  REGION 1..10: note = CONT. FROM ABOVE: HLA-DQA1*01:03-B1*06:01L HLA-DQA1*02:01-B1*03: 03L HLA-DRB1*15:03L
VIGIVNNTVY

SEQ ID NO: 11688 - protein, 13 aa, Severe acute respiratory syndrome coronavirus 2
  REGION 1..13: note = Table B: HLA-DQA1*05:01-B1*03:01L HLA-DRB1*13:02L HLA-DRB1*13:03L HLA-DRB1*01:03L HLA-DRB1*04:02L HLA-DQA1*01:02-B1*06:02L HLA-DRB1*01:02L HLA-DRB4*03:01NL HLA-DPA1*01:03-B1*03:01L HLA-DPA1*03:01-B1*04:02L
  REGION 1..13: note = CONT. FROM ABOVE: HLA-DQA1*01:01-B1*05:01L HLA-DQA1*05:05-B1*03: 19L HLA-DRB1*04:10L HLA-DRB1*12:01L HLA-DRB1*14:54L HLA-DQA1*05: 05-B1*03:01L HLA-DRB1*14:17L HLA-DPA1*01:02-B1*04:01L HLA-DRB1*0 4:08L HLA-DRB1*15:03L
IVNNTVYDPLQPE

SEQ ID NO: 11689 - protein, 10 aa, Severe acute respiratory syndrome coronavirus 2
  REGION 1..10: note = Table B: HLA-DQA1*05:01-B1*03:01L HLA-DRB1*13:03L HLA-DQA1*01:02-B1*06:02M HLA-DPA1*03:01-B1*04:02L HLA-DQA1*05:01-B1*02:01L HLA-DQA1*05:05-B1*03:116L HLA-DPA1*02:01-B1*13:01L HLA-DPA1*03:01-B1*105:01M
  REGION 1..10: note = CONT. FROM ABOVE: HLA-DPA1*01:02-B1*04:01L HLA-DQA1*01:03-B1*06: 01L HLA-DRB1*15:03L
DPLQPELDSF

SEQ ID NO: 11690 - protein, 13 aa, Severe acute respiratory syndrome coronavirus 2
  REGION 1..13: note = Table B: HLA-DQA1*05:01-B1*03:01L HLA-DRB1*13:02L HLA-DRB1*13:03L HLA-DRB1*01:03L HLA-DRB1*04:04L HLA-DRB1*01:02L HLA-DRB4*03:01NL HLA-DRB1*08:04L HLA-DPA1*03:01-B1*04:02L HLA-DRB1*14:01L HLA-DQA1*01:01-B1*05:01L HLA-DRB1*12:01L
  REGION 1..13: note = CONT. FROM ABOVE: HLA-DPA1*03:01-B1*105:01L HLA-DRB1*14:54L HLA- DRB1*14:17L HLA-DPA1*01:02-B1*04:01L HLA-DRB1*08:03L
QPELDSFKEELDK

SEQ ID NO: 11691 - protein, 13 aa, Severe acute respiratory syndrome coronavirus 2
  REGION 1..13: note = Table B: HLA-DQA1*05:01-B1*03:01L HLA-DRB1*04:03L HLA-DRB1*01:03L HLA-DRB1*04:05L HLA-DQA1*01:02-B1*06:02L HLA-DQA1*01:01-B1*05:01L HLA-DQA1*01-B1*05L HLA-DQA1*05:05-B1*03:19L HLA-DQA1*05:01-B1*02:01L
  REGION 1..13: note = CONT. FROM ABOVE: HLA-DRB1*12:01L HLA-DPA1*03:01-B1*105:01L HLA- DQA1*05:05-B1*03:01L HLA-DRB1*16:01L HLA-DRB1*04:08L HLA-DQA1*02 :01-B1*03:03L
SPDVDLGDISGIN

SEQ ID NO: 11692 - protein, 14 aa, Severe acute respiratory syndrome coronavirus 2
  REGION 1..14: note = Table B: HLA-DQA1*05:01-B1*03:01L HLA-DQA1*01:02-B1*06:02L HLA-DPA1*03:01-B1*105:01L HLA-DQA1*05:05-B1*03:01L HLA-DQA1*01:03-B1*06:01L
VDLGDISGINASVV

SEQ ID NO: 11693 - protein, 14 aa, Severe acute respiratory syndrome coronavirus 2
  REGION 1..14: note = Table B: HLA-DQA1*05:01-B1*03:01L HLA-DRB1*13:02L HLA-DRB1*04:04L HLA-DQA1*01:02-B1*06:02L HLA-DPA1*01:03-B1*03:01L HLA-DRB1*14:01L HLA-DQA1*01:01-B1*05:01L HLA-DRB3*01:01L
  REGION 1..14: note = CONT. FROM ABOVE: HLA-DPA1*02:01-B1*13:01L HLA-DPA1*03:01-B1*105 :01L HLA-DPA1*01:02-B1*04:01L HLA-DRB1*07:01L HLA-DQA1*01:03-B1* 06:01L
IQKEIDRLNEVAKN

SEQ ID NO: 11694 - protein, 14 aa, Severe acute respiratory syndrome coronavirus 2
  REGION 1..14: note = Table B: HLA-DQA1*05:01-B1*03:01L HLA-DRB1*13:03L HLA-DRB1*14:01L HLA-DQA1*01:01-B1*05:01L HLA-DQA1*05:05-B1*03:19L HLA-DRB1*07:01L
VAKNLNESLIDLQE

SEQ ID NO: 11695 - protein, 10 aa, Severe acute respiratory syndrome coronavirus 2
  REGION 1..10: note = Table B: HLA-DQA1*05:01-B1*03:01L HLA-DRB1*04:03L HLA-DRB1*13:02L HLA-DRB1*13:03L HLA-DRB1*01:03L HLA-DRB1*04:02L HLA-DRB1*04:05L HLA-DQA1*01:02-B1*06:02L HLA-DRB4*03:01NL HLA-DRB1*08:77M HLA-DPA1*01:03-B1*03:01H
  REGION 1..10: note = CONT. FROM ABOVE: HLA-DPA1*03:01-B1*04:02L HLA-DRB1*03:01M HLA-D RB1*11:02M HLA-DRB1*11:03L HLA-DRB1*11:04L HLA-DRB1*14:02L HLA-D RB5*01:01L HLA-DQA1*01-B1*05M HLA-DQA1*05:05-B1*03:19H HLA-DQA1* 05:01-B1*02:01H HLA-DRB4*01:01L HLA-DPA1*01:03-B1*04:01M
  REGION 1..10: note = CONT. FROM ABOVE: HLA-DQA1*05:05-B1*03:116L HLA-DPA1*01:03-B1*04 :02L HLA-DRB1*12:01L HLA-DRB1*14:54L HLA-DPA1*01:03-B1*104:01M H LA-DPA1*01:02-B1*04:01L HLA-DRB1*10:01M HLA-DRB1*16:01M HLA-DRB1 *08:02L HLA-DQA1*02:01-B1*03:03L HLA-DRB1*15:03L
LIDLQELGKY

SEQ ID NO: 11696 - protein, 10 aa, Severe acute respiratory syndrome coronavirus 2
  REGION 1..10: note = Table B: HLA-DQA1*05:01-B1*03:01L HLA-DRB1*01:03L HLA-DQA1*01:02-B1*06:02L HLA-DRB1*08:77L HLA-DPA1*01:03-B1*03:01M HLA-DPA1*03:01-B1*04:02L HLA-DRB1*03:01L HLA-DRB1*11:02L HLA-DRB1*14:02L
  REGION 1..10: note = CONT. FROM ABOVE: HLA-DQA1*01-B1*05L HLA-DQA1*05:05-B1*03:19M HL A-DQA1*05:01-B1*02:01M HLA-DRB4*01:01L HLA-DPA1*01:03-B1*04:01L HLA-DQA1*05:05-B1*03:116L HLA-DPA1*01:03-B1*04:02L HLA-DRB1*12:0 1L HLA-DPA1*01:03-B1*104:01M HLA-DRB1*10:01L HLA-DRB1*16:01L
  REGION 1..10: note = CONT. FROM ABOVE: HLA-DRB1*08:02L HLA-DQA1*02:01-B1*03:03L HLA-D RB1*15:03L
LQELGKYEQY

SEQ ID NO: 11697 - protein, 12 aa, Severe acute respiratory syndrome coronavirus 2
  REGION 1..12: note = Table B: HLA-DQA1*05:01-B1*03:01L HLA-DRB1*13:02L HLA-DRB1*01:02L HLA-DRB1*08:04L HLA-DRB1*08:77L HLA-DPA1*01:03-B1*03:01L HLA-DRB1*14:01L HLA-DQA1*05:05-B1*03:19L HLA-DPA1*03:01-B1*105:01L
  REGION 1..12: note = CONT. FROM ABOVE: HLA-DQA1*05:05-B1*03:01L
FDEDDSEPVLKG

SEQ ID NO: 11698 - protein, 13 aa, Severe acute respiratory syndrome coronavirus 2
  REGION 1..13: note = Table B: HLA-DQA1*05:01-B1*03:01L HLA-DQA1*01:02-B1*06:02L HLA-DQA1*01:01-B1*05:01L HLA-DQA1*05:05-B1*03:01L
DEDDSEPVLKGVK

SEQ ID NO: 11699 - protein, 12 aa, Severe acute respiratory syndrome coronavirus 2
  REGION 1..12: note = Table B: HLA-DQA1*05:01-B1*03:01L HLA-DRB1*01:03L HLA-DRB1*04:05L HLA-DRB1*01:02L HLA-DRB1*14:01L HLA-DRB1*04:08L HLA-DRB1*15:03L
IFTIGTVTLKQG

SEQ ID NO: 11700 - protein, 12 aa, Severe acute respiratory syndrome coronavirus 2
  REGION 1..12: note = Table B: HLA-DQA1*05:01-B1*03:01L HLA-DPA1*03:01-B1*105:01L HLA-DQA1*05:05-B1*03:01L
FTIGTVTLKQGE

SEQ ID NO: 11701 - protein, 10 aa, Severe acute respiratory syndrome coronavirus 2
  REGION 1..10: note = Table B: HLA-DQA1*05:01-B1*03:01L HLA-DQA1*03:01-B1*03:02L HLA-DQA1*01:03-B1*06:01L HLA-DQA1*02:01-B1*03:03L
TVTLKQGEIK

SEQ ID NO: 11702 - protein, 12 aa, Severe acute respiratory syndrome coronavirus 2
  REGION 1..12: note = Table B: HLA-DQA1*05:01-B1*03:01L HLA-DQA1*01:02-B1*06:02L HLA-DQA1*03:01-B1*03:02L HLA-DQA1*05:05-B1*03:01L HLA-DQA1*02:01-B1*03:03L
LKQGEIKDATPS

SEQ ID NO: 11703 - protein, 14 aa, Severe acute respiratory syndrome coronavirus 2
  REGION 1..14: note = Table B: HLA-DQA1*05:01-B1*03:01L HLA-DRB1*13:02L HLA-DRB1*01:03L HLA-DRB1*04:05L HLA-DQA1*01:02-B1*06:02L HLA-DRB1*01:02L HLA-DRB4*03:01NL HLA-DRB1*08:04L HLA-DRB1*08:77L HLA-DRB3*02:01L HLA-DPA1*01:03-B1*03:01L
  REGION 1..14: note = CONT. FROM ABOVE: HLA-DPA1*03:01-B1*04:02L HLA-DRB1*14:01L HLA-D RB1*11:03L HLA-DQA1*05:01-B1*02:01L HLA-DRB1*04:10L HLA-DRB1*09: 01L HLA-DRB1*12:01L HLA-DRB1*12:02L HLA-DPA1*02:01-B1*13:01L HLA -DPA1*03:01-B1*105:01L HLA-DRB1*14:54L HLA-DQA1*05:05-B1*03:01L
  REGION 1..14: note = CONT. FROM ABOVE: HLA-DPA1*01:02-B1*04:01L HLA-DRB1*07:01L HLA-D RB1*16:01L HLA-DQA1*01:03-B1*06:01L HLA-DRB1*04:08L HLA-DRB1*15: 03L
TPSDFVRATATIPI

SEQ ID NO: 11704 - protein, 12 aa, Severe acute respiratory syndrome coronavirus 2
  REGION 1..12: note = Table B: HLA-DQA1*05:01-B1*03:01L HLA-DRB1*01:02L
QSASKIITLKKR

SEQ ID NO: 11705 - protein, 13 aa, Severe acute respiratory syndrome coronavirus 2
  REGION 1..13: note = Table B: HLA-DQA1*05:01-B1*03:01L HLA-DRB1*13:02L HLA-DRB1*08:04L HLA-DRB1*14:01L HLA-DRB1*08:01L HLA-DQA1*01-B1*05L HLA-DQA1*05:01-B1*02:01L HLA-DPA1*01:03-B1*104:01L HLA-DQA1*05:05-B1*03:01L
VTVYSHLLLVAAG

SEQ ID NO: 11706 - protein, 14 aa, Severe acute respiratory syndrome coronavirus 2
  REGION 1..14: note = Table B: HLA-DQA1*05:01-B1*03:01L HLA-DRB1*04:02L HLA-DRB1*04:04L HLA-DRB1*04:05L HLA-DRB1*01:02L HLA-DPA1*01:03-B1*03:01L HLA-DRB1*14:01L HLA-DQA1*05:05-B1*03:19L HLA-DQA1*05:01-B1*02:01L
  REGION 1..14: note = CONT. FROM ABOVE: HLA-DRB1*04:10L HLA-DRB1*12:01L HLA-DPA1*02:01 -B1*13:01L HLA-DQA1*03:01-B1*03:02L HLA-DPA1*01:03-B1*104:01L HL A-DQA1*05:05-B1*03:01L HLA-DRB1*14:17L HLA-DRB1*16:01L HLA-DQA1* 01:03-B1*06:01L HLA-DRB1*04:08L HLA-DQA1*02:01-B1*03:03L
SHLLLVAAGLEAPF

SEQ ID NO: 11707 - protein, 10 aa, Severe acute respiratory syndrome coronavirus 2
  REGION 1..10: note = Table B: HLA-DQA1*05:01-B1*03:01L HLA-DQA1*01:02-B1*06:02L HLA-DRB1*08:77L HLA-DPA1*01:03-B1*03:01M HLA-DRB1*03:01L HLA-DRB1*11:02L HLA-DQA1*01-B1*05L HLA-DQA1*05:05-B1*03:19M HLA-DQA1*05:01-B1*02:01M HLA-DRB4*01:01L
  REGION 1..10: note = CONT. FROM ABOVE: HLA-DPA1*01:03-B1*04:01L HLA-DQA1*05:05-B1*03: 116L HLA-DPA1*01:03-B1*104:01M HLA-DRB1*10:01L HLA-DRB1*16:01L H LA-DRB1*15:03L
GLEAPFLYLY

SEQ ID NO: 11708 - protein, 11 aa, Severe acute respiratory syndrome coronavirus 2
  REGION 1..11: note = Table B: HLA-DQA1*05:01-B1*03:01L HLA-DRB1*04:03L HLA-DRB1*13:02L HLA-DRB1*13:03L HLA-DRB1*01:03L HLA-DRB1*04:02L HLA-DQA1*01:02-B1*06:02L HLA-DRB1*01:02L HLA-DRB4*03:01NL HLA-DPA1*03:01-B1*04:02L HLA-DRB1*14:01L
  REGION 1..11: note = CONT. FROM ABOVE: HLA-DPA1*03:01-B1*105:01L HLA-DQA1*05:05-B1*03 :01L HLA-DRB1*14:17L HLA-DRB1*16:01L HLA-DRB1*04:08L
VYFLQSINFVR

SEQ ID NO: 11709 - protein, 12 aa, Severe acute respiratory syndrome coronavirus 2
  REGION 1..12: note = Table B: HLA-DQA1*05:01-B1*03:01L HLA-DRB1*01:03L HLA-DRB1*04:05L HLA-DRB1*01:02L HLA-DRB1*14:01L HLA-DPA1*01:03-B1*04:02L HLA-DPA1*01:03-B1*02:01L HLA-DRB1*04:08L
LQSINFVRIIMR

SEQ ID NO: 11710 - protein, 13 aa, Severe acute respiratory syndrome coronavirus 2
  REGION 1..13: note = Table B: HLA-DQA1*05:01-B1*03:01L HLA-DRB1*13:03L HLA-DRB1*01:03L HLA-DRB4*03:01NL HLA-DRB1*08:77L HLA-DRB3*02:01L HLA-DPA1*01:03-B1*04:01L HLA-DRB1*09:01L HLA-DRB3*01:01L HLA-DRB1*14:17L HLA-DRB1*07:01L HLA-DRB1*04:08L
  REGION 1..13: note = CONT. FROM ABOVE: HLA-DQA1*02:01-B1*03:03L
SKNPLLYDANYFL

SEQ ID NO: 11711 - protein, 16 aa, Severe acute respiratory syndrome coronavirus 2
  REGION 1..16: note = Table B: HLA-DQA1*05:01-B1*03:01L HLA-DRB1*13:02L HLA-DRB1*03:01L HLA-DRB1*11:02L HLA-DRB1*11:04L HLA-DRB1*14:02M HLA-DRB1*08:01L HLA-DRB1*11:01L HLA-DQA1*05:05-B1*03:19L HLA-DRB4*01:01L HLA-DQA1*05:05-B1*03:116L HLA-DRB1*09:01L
  REGION 1..16: note = CONT. FROM ABOVE: HLA-DRB3*01:01L HLA-DPA1*01:03-B1*104:01L HLA- DQA1*05:05-B1*03:01L HLA-DRB1*10:01L HLA-DRB1*08:02L HLA-DRB1*08 :03L HLA-DQA1*02:01-B1*03:03L
NPLLYDANYFLCWHTN

SEQ ID NO: 11712 - protein, 14 aa, Severe acute respiratory syndrome coronavirus 2
  REGION 1..14: note = Table B: HLA-DQA1*05:01-B1*03:01L HLA-DRB1*01:02L HLA-DPA1*01:03-B1*04:02L HLA-DQA1*02:01-B1*03:03L HLA-DRB1*15:03L
TNCYDYCIPYNSVT

SEQ ID NO: 11713 - protein, 10 aa, Severe acute respiratory syndrome coronavirus 2
  REGION 1..10: note = Table B: HLA-DQA1*05:01-B1*03:01L HLA-DRB1*13:03L HLA-DRB1*04:05L HLA-DQA1*01:02-B1*06:02L HLA-DRB1*01:01L HLA-DPA1*03:01-B1*04:02L HLA-DRB1*14:01L HLA-DQA1*01-B1*05L HLA-DQA1*05:05-B1*03:116M HLA-DPA1*02:01-B1*13:01M
  REGION 1..10: note = CONT. FROM ABOVE: HLA-DPA1*03:01-B1*105:01L HLA-DPA1*01:02-B1*04 :01L HLA-DRB1*16:01L HLA-DRB1*08:03L HLA-DRB1*15:03L
IPYNSVTSSI

SEQ ID NO: 11714 - protein, 14 aa, Severe acute respiratory syndrome coronavirus 2
  REGION 1..14: note = Table B: HLA-DQA1*05:01-B1*03:01L HLA-DRB1*13:02L HLA-DQA1*01:02-B1*06:02L HLA-DRB1*01:02L HLA-DRB4*03:01NL HLA-DRB1*14:01L HLA-DRB1*12:01L HLA-DRB1*14:54L HLA-DRB1*16:01L HLA-DQA1*01:03-B1*06:01L HLA-DRB1*15:03L
SSIVITSGDGTTSP

SEQ ID NO: 11715 - protein, 13 aa, Severe acute respiratory syndrome coronavirus 2
  REGION 1..13: note = Table B: HLA-DQA1*05:01-B1*03:01L HLA-DRB1*04:02L HLA-DRB4*03:01NL HLA-DQA1*05:05-B1*03:19L HLA-DQA1*05:05-B1*03:01L
IVITSGDGTTSPI

SEQ ID NO: 11716 - protein, 13 aa, Severe acute respiratory syndrome coronavirus 2
  REGION 1..13: note = Table B: HLA-DQA1*05:01-B1*03:01L HLA-DRB1*13:03L HLA-DRB1*01:03L HLA-DRB1*04:05L HLA-DRB1*01:02L HLA-DRB1*08:04L HLA-DQA1*01:01-B1*05:01L HLA-DRB1*12:01L HLA-DPA1*02:01-B1*13:01L HLA-DPA1*03:01-B1*105:01L
  REGION 1..13: note = CONT. FROM ABOVE: HLA-DRB1*16:01L HLA-DRB1*04:08L HLA-DRB1*08:03 L HLA-DRB1*15:03L
IGGYTEKWESGVK

SEQ ID NO: 11717 - protein, 15 aa, Severe acute respiratory syndrome coronavirus 2
  REGION 1..15: note = Table B: HLA-DQA1*05:01-B1*03:01L HLA-DRB1*01:03L HLA-DRB1*01:02L HLA-DRB1*08:01L HLA-DPA1*03:01-B1*105:01L HLA-DRB1*04:08L
TEKWESGVKDCVVLH

SEQ ID NO: 11718 - protein, 13 aa, Severe acute respiratory syndrome coronavirus 2
  REGION 1..13: note = Table B: HLA-DQA1*05:01-B1*03:01L HLA-DPA1*01:03-B1*03:01L HLA-DQA1*05:05-B1*03:01L HLA-DRB1*15:03L
ESGVKDCVVLHSY

SEQ ID NO: 11719 - protein, 14 aa, Severe acute respiratory syndrome coronavirus 2
  REGION 1..14: note = Table B: HLA-DQA1*05:01-B1*03:01L HLA-DRB1*04:03L HLA-DRB1*01:02L HLA-DQA1*05:05-B1*03:01L
SGVKDCVVLHSYFT

SEQ ID NO: 11720 - protein, 11 aa, Severe acute respiratory syndrome coronavirus 2
  REGION 1..11: note = Table B: HLA-DQA1*05:01-B1*03:01L HLA-DRB1*01:03L HLA-DRB1*12:01L HLA-DQA1*05:05-B1*03:01L
SYFTSDYYQLY

SEQ ID NO: 11721 - protein, 13 aa, Severe acute respiratory syndrome coronavirus 2
  REGION 1..13: note = Table B: HLA-DQA1*05:01-B1*03:01L HLA-DRB1*04:01L HLA-DRB1*13:02L HLA-DRB1*13:03L HLA-DRB1*01:01L HLA-DRB1*08:04L HLA-DRB1*08:77L HLA-DRB3*02:01L HLA-DPA1*01:03-B1*03:01L HLA-DPA1*03:01-B1*04:02L HLA-DRB1*11:04L HLA-DRB1*14:02L
  REGION 1..13: note = CONT. FROM ABOVE: HLA-DQA1*01:01-B1*05:01L HLA-DRB1*08:01L HLA-D RB5*01:01L HLA-DQA1*05:05-B1*03:19L HLA-DRB4*01:01L HLA-DPA1*01: 03-B1*04:01L HLA-DRB1*09:01L HLA-DPA1*01:03-B1*04:02L HLA-DRB1*1 2:02L HLA-DPA1*02:01-B1*13:01L HLA-DPA1*01:03-B1*104:01L
  REGION 1..13: note = CONT. FROM ABOVE: HLA-DPA1*01:02-B1*04:01L HLA-DRB1*07:01L HLA-D RB1*08:03L
YQLYSTQLSTDTG

SEQ ID NO: 11722 - protein, 14 aa, Severe acute respiratory syndrome coronavirus 2
  REGION 1..14: note = Table B: HLA-DQA1*05:01-B1*03:01L HLA-DQA1*05:05-B1*03:19L
QLYSTQLSTDTGVE

SEQ ID NO: 11723 - protein, 11 aa, Severe acute respiratory syndrome coronavirus 2
  REGION 1..11: note = Table B: HLA-DQA1*05:01-B1*03:01L HLA-DRB1*13:02L HLA-DRB1*01:03L HLA-DRB1*04:04L HLA-DQA1*01:02-B1*06:02L HLA-DRB1*01:02L HLA-DRB1*08:04L HLA-DPA1*01:03-B1*03:01L HLA-DRB1*14:01L HLA-DRB1*11:04L HLA-DQA1*01:01-B1*05:01L
  REGION 1..11: note = CONT. FROM ABOVE: HLA-DRB1*08:01L HLA-DPA1*01:03-B1*04:02L HLA-D RB1*12:01L HLA-DRB1*12:02L HLA-DPA1*02:01-B1*13:01L HLA-DRB1*14: 54L HLA-DQA1*05:05-B1*03:01L HLA-DRB1*10:01L HLA-DRB1*08:03L HLA -DRB1*15:03L
FIYNKIVDEPE

SEQ ID NO: 11724 - protein, 12 aa, Severe acute respiratory syndrome coronavirus 2
  REGION 1..12: note = Table B: HLA-DQA1*05:01-B1*03:01L HLA-DRB1*04:01L HLA-DRB1*13:02L HLA-DRB1*04:04L HLA-DRB1*01:02L HLA-DRB1*08:04L HLA-DPA1*01:03-B1*03:01L HLA-DRB1*14:01L HLA-DRB1*11:04L HLA-DRB1*12:02L HLA-DRB3*01:01L HLA-DPA1*03:01-B1*105:01L
  REGION 1..12: note = CONT. FROM ABOVE: HLA-DQA1*05:05-B1*03:01L HLA-DRB1*07:01L HLA-D RB1*10:01L HLA-DQA1*01:03-B1*06:01L HLA-DRB1*08:03L HLA-DRB1*15: 03L
IYNKIVDEPEEH

SEQ ID NO: 11725 - protein, 13 aa, Severe acute respiratory syndrome coronavirus 2
  REGION 1..13: note = Table B: HLA-DQA1*05:01-B1*03:01L HLA-DRB1*04:03L HLA-DRB1*13:03L HLA-DRB1*01:03L HLA-DRB1*04:02L HLA-DRB1*04:05L HLA-DQA1*01:01-B1*05:01L HLA-DRB1*08:01L HLA-DQA1*01-B1*05L HLA-DQA1*05:01-B1*02:01L HLA-DPA1*02:01-B1*13:01L
  REGION 1..13: note = CONT. FROM ABOVE: HLA-DPA1*03:01-B1*105:01L HLA-DQA1*05:05-B1*03 :01L HLA-DRB1*16:01L HLA-DRB1*04:08L
EPEEHVQIHTIDG

SEQ ID NO: 11726 - protein, 12 aa, Severe acute respiratory syndrome coronavirus 2
  REGION 1..12: note = Table B: HLA-DQA1*05:01-B1*03:01L HLA-DRB1*08:04L HLA-DQA1*01:01-B1*05:01L HLA-DRB1*08:01L HLA-DPA1*02:01-B1*13:01L HLA-DQA1*01:03-B1*06:01L
HVQIHTIDGSSG

SEQ ID NO: 11727 - protein, 10 aa, Severe acute respiratory syndrome coronavirus 2
  REGION 1..10: note = Table B: HLA-DQA1*05:01-B1*03:01L HLA-DQA1*01:02-B1*06:02L HLA-DQA1*05:05-B1*03:19L HLA-DQA1*05:05-B1*03:01L HLA-DQA1*01:03-B1*06:01L HLA-DQA1*02:01-B1*03:03L
SSGVVNPVME

SEQ ID NO: 11728 - protein, 10 aa, Severe acute respiratory syndrome coronavirus 2
  REGION 1..10: note = Table B: HLA-DQA1*05:01-B1*03:01L HLA-DRB1*13:03L HLA-DRB1*01:03L HLA-DQA1*01:02-B1*06:02L HLA-DRB1*08:77L HLA-DPA1*01:03-B1*03:01L HLA-DRB1*03:01L HLA-DRB1*14:02L HLA-DQA1*01-B1*05L HLA-DQA1*05:05-B1*03:19L
  REGION 1..10: note = CONT. FROM ABOVE: HLA-DQA1*05:01-B1*02:01L HLA-DRB4*01:01L HLA-D PA1*01:03-B1*04:01L HLA-DQA1*05:05-B1*03:116L HLA-DPA1*01:03-B1* 04:02L HLA-DRB1*12:01L HLA-DPA1*03:01-B1*105:01L HLA-DPA1*01:03- B1*104:01L HLA-DRB1*10:01L HLA-DRB1*16:01L
  REGION 1..10: note = CONT. FROM ABOVE: HLA-DQA1*01:03-B1*06:01L HLA-DQA1*02:01-B1*03: 03L HLA-DRB1*15:03L
VVNPVMEPIY

SEQ ID NO: 11729 - protein, 15 aa, Severe acute respiratory syndrome coronavirus 2
  REGION 1..15: note = Table B: HLA-DQA1*05:01-B1*03:01L HLA-DRB3*02:01L HLA-DPA1*01:03-B1*03:01L HLA-DQA1*05:05-B1*03:19L HLA-DQA1*01:03-B1*06:01L
NPVMEPIYDEPTTTT

SEQ ID NO: 11730 - protein, 14 aa, Severe acute respiratory syndrome coronavirus 2
  REGION 1..14: note = Table B: HLA-DQA1*05:01-B1*03:01L HLA-DRB1*13:02L HLA-DRB1*13:03L HLA-DRB1*01:03L HLA-DRB1*04:02L HLA-DRB1*04:04L HLA-DRB1*04:05L HLA-DQA1*01:02-B1*06:02L HLA-DRB1*01:02L HLA-DRB4*03:01NL HLA-DPA1*01:03-B1*03:01L
  REGION 1..14: note = CONT. FROM ABOVE: HLA-DQA1*01:01-B1*05:01L HLA-DQA1*05:05-B1*03: 19L HLA-DRB1*04:10L HLA-DRB1*12:01L HLA-DPA1*02:01-B1*13:01L HLA -DPA1*03:01-B1*105:01L HLA-DRB1*14:54L HLA-DQA1*05:05-B1*03:01L HLA-DRB1*14:17L HLA-DRB1*10:01L HLA-DRB1*16:01L
  REGION 1..14: note = CONT. FROM ABOVE: HLA-DQA1*01:03-B1*06:01L HLA-DRB1*04:08L HLA-D QA1*02:01-B1*03:03L HLA-DRB1*15:03L
EPIYDEPTTTTSVP

SEQ ID NO: 11731 - protein, 14 aa, Severe acute respiratory syndrome coronavirus 2
  REGION 1..14: note = Table B: HLA-DQA1*05:01-B1*03:01L HLA-DRB1*13:02L HLA-DRB1*13:03L HLA-DRB1*01:03L HLA-DRB1*04:02L HLA-DRB1*04:05L HLA-DQA1*01:02-B1*06:02L HLA-DRB1*01:02L HLA-DRB4*03:01NL HLA-DRB1*08:77L HLA-DPA1*01:03-B1*03:01L
  REGION 1..14: note = CONT. FROM ABOVE: HLA-DQA1*05:05-B1*03:19L HLA-DRB1*04:10L HLA-D RB1*12:01L HLA-DPA1*03:01-B1*105:01L HLA-DQA1*05:05-B1*03:01L HL A-DRB1*14:17L HLA-DRB1*16:01L HLA-DQA1*01:03-B1*06:01L HLA-DQA1* 02:01-B1*03:03L
PIYDEPTTTTSVPL

SEQ ID NO: 11732 - protein, 11 aa, Severe acute respiratory syndrome coronavirus 2
  REGION 1..11: note = Table B: HLA-DQA1*05:01-B1*03:01L HLA-DRB1*04:03L HLA-DRB1*13:02L HLA-DRB1*13:03L HLA-DRB1*01:03L HLA-DRB1*04:02L HLA-DRB1*04:05L HLA-DQA1*01:02-B1*06:02L HLA-DRB4*03:01NL HLA-DRB1*08:77L HLA-DRB3*02:01L HLA-DPA1*01:03-B1*03:01L
  REGION 1..11: note = CONT. FROM ABOVE: HLA-DPA1*03:01-B1*04:02L HLA-DRB1*14:01L HLA-D RB1*14:02L HLA-DQA1*05:05-B1*03:19L HLA-DPA1*01:03-B1*04:01L HLA -DRB1*09:01L HLA-DPA1*01:03-B1*04:02L HLA-DRB1*12:01L HLA-DPA1*0 2:01-B1*13:01L HLA-DPA1*03:01-B1*105:01L
  REGION 1..11: note = CONT. FROM ABOVE: HLA-DQA1*05:05-B1*03:01L HLA-DRB1*14:17L HLA-D PA1*01:02-B1*04:01L HLA-DRB1*07:01L HLA-DRB1*16:01L HLA-DQA1*01: 03-B1*06:01L HLA-DQA1*02:01-B1*03:03L HLA-DRB1*15:03L
YSFVSEETGTL

SEQ ID NO: 11733 - protein, 12 aa, Severe acute respiratory syndrome coronavirus 2
  REGION 1..12: note = Table B: HLA-DQA1*05:01-B1*03:01L HLA-DRB1*13:02L HLA-DRB1*01:03L HLA-DRB1*04:02L HLA-DRB1*04:05L HLA-DQA1*01:02-B1*06:02L HLA-DRB1*01:01L HLA-DRB1*01:02L HLA-DRB4*03:01NL HLA-DRB1*08:77L HLA-DRB1*14:02L
  REGION 1..12: note = CONT. FROM ABOVE: HLA-DQA1*01-B1*05L HLA-DRB1*12:01L HLA-DPA1*03 :01-B1*105:01L HLA-DRB1*14:54L HLA-DQA1*05:05-B1*03:01L HLA-DRB1 *14:17L HLA-DRB1*10:01L HLA-DRB1*04:08L
FVSEETGTLIVN

SEQ ID NO: 11734 - protein, 10 aa, Severe acute respiratory syndrome coronavirus 2
  REGION 1..10: note = Table B: HLA-DQA1*05:01-B1*03:01L HLA-DQA1*01:02-B1*06:02L HLA-DQA1*05:05-B1*03:19L HLA-DQA1*05:01-B1*02:01L HLA-DPA1*03:01-B1*105:01L HLA-DQA1*01:03-B1*06:01L HLA-DQA1*02:01-B1*03:03L HLA-DRB1*15:03L
VNVSLVKPSF

SEQ ID NO: 11735 - protein, 10 aa, Severe acute respiratory syndrome coronavirus 2
  REGION 1..10: note = Table B: HLA-DQA1*05:01-B1*03:01L HLA-DRB1*13:03L HLA-DRB1*01:03L HLA-DQA1*01:02-B1*06:02L HLA-DRB1*08:77L HLA-DPA1*01:03-B1*03:01L HLA-DPA1*03:01-B1*04:02L HLA-DRB1*03:01L HLA-DRB1*14:01L HLA-DRB1*14:02L
  REGION 1..10: note = CONT. FROM ABOVE: HLA-DQA1*01-B1*05L HLA-DQA1*05:05-B1*03:19L HL A-DQA1*05:01-B1*02:01L HLA-DRB4*01:01L HLA-DPA1*01:03-B1*04:01L HLA-DPA1*01:03-B1*04:02L HLA-DRB1*12:01L HLA-DPA1*02:01-B1*13:01 L HLA-DPA1*03:01-B1*105:01L HLA-DPA1*01:03-B1*104:01L
  REGION 1..10: note = CONT. FROM ABOVE: HLA-DQA1*05:05-B1*03:01L HLA-DPA1*01:02-B1*04: 01L HLA-DRB1*10:01L HLA-DRB1*16:01L HLA-DQA1*01:03-B1*06:01L HLA -DQA1*02:01-B1*03:03L HLA-DRB1*15:03L
NVSLVKPSFY

SEQ ID NO: 11736 - protein, 12 aa, Severe acute respiratory syndrome coronavirus 2
  REGION 1..12: note = Table B: HLA-DQA1*05:01-B1*03:01L HLA-DRB1*13:02L HLA-DRB1*04:02L HLA-DRB1*04:05L HLA-DRB1*01:02L HLA-DRB1*08:04L HLA-DRB1*14:01L HLA-DRB1*11:04L HLA-DRB1*11:01L HLA-DRB1*12:01L HLA-DRB3*01:01L HLA-DPA1*02:01-B1*13:01L HLA-DRB1*14:54L
  REGION 1..12: note = CONT. FROM ABOVE: HLA-DRB1*14:17L HLA-DRB1*08:03L HLA-DRB1*15:03 L
KPSFYVYSRVKN

SEQ ID NO: 11737 - protein, 10 aa, Severe acute respiratory syndrome coronavirus 2
  REGION 1..10: note = Table B: HLA-DQA1*05:01-B1*03:01L HLA-DRB1*04:03L HLA-DRB1*01:03L HLA-DQA1*01:02-B1*06:02L HLA-DRB1*01:02L HLA-DPA1*03:01-B1*04:02L HLA-DPA1*01:03-B1*04:01L HLA-DPA1*01:03-B1*04:02L HLA-DRB1*12:01L
  REGION 1..10: note = CONT. FROM ABOVE: HLA-DPA1*03:01-B1*105:01L HLA-DQA1*03:01-B1*03 :02L HLA-DPA1*01:02-B1*04:01L HLA-DRB1*16:01L HLA-DQA1*01:03-B1* 06:01L HLA-DRB1*04:08L HLA-DQA1*02:01-B1*03:03L HLA-DRB1*15:03L
YVYSRVKNLN

SEQ ID NO: 11738 - protein, 11 aa, Severe acute respiratory syndrome coronavirus 2
  REGION 1..11: note = Table B: HLA-DQA1*05:01-B1*03:01L HLA-DRB1*04:03L HLA-DRB1*13:03L HLA-DRB1*01:03L HLA-DRB1*04:02L HLA-DRB1*04:04L HLA-DRB1*04:05L HLA-DRB1*01:02L HLA-DRB4*03:01NL HLA-DRB1*14:01L HLA-DRB1*04:10L HLA-DRB1*12:01L HLA-DQA1*03:01-B1*03:02L
  REGION 1..11: note = CONT. FROM ABOVE: HLA-DRB1*14:54L HLA-DRB1*14:17L HLA-DRB1*16:01 L HLA-DRB1*04:08L HLA-DQA1*02:01-B1*03:03L HLA-DRB1*15:03L
VKNLNSSRVPD

SEQ ID NO: 11739 - protein, 10 aa, Severe acute respiratory syndrome coronavirus 2
  REGION 1..10: note = Table B: HLA-DQA1*05:01-B1*03:01L HLA-DRB1*04:03L HLA-DRB1*13:02L HLA-DRB1*13:03L HLA-DRB1*01:03L HLA-DRB1*04:02L HLA-DQA1*01:02-B1*06:02L HLA-DRB1*01:01L HLA-DRB4*03:01NL HLA-DRB1*11:04L HLA-DQA1*01:01-B1*05:01L HLA-DRB1*08:01L
  REGION 1..10: note = CONT. FROM ABOVE: HLA-DRB5*01:01L HLA-DRB1*12:01L HLA-DPA1*03:01 -B1*105:01L HLA-DQA1*03:01-B1*03:02M HLA-DQA1*05:05-B1*03:01L HL A-DRB1*14:17L HLA-DPA1*01:02-B1*04:01L HLA-DRB1*16:01L HLA-DQA1* 01:03-B1*06:01L HLA-DQA1*02:01-B1*03:03L
GTITVEELKK

SEQ ID NO: 11740 - protein, 10 aa, Severe acute respiratory syndrome coronavirus 2
  REGION 1..10: note = Table B: HLA-DQA1*05:01-B1*03:01L HLA-DRB1*08:77L HLA-DPA1*03:01-B1*04:02L HLA-DQA1*05:05-B1*03:19L HLA-DQA1*05:01-B1*02:01L HLA-DRB4*01:01L HLA-DPA1*01:03-B1*04:01L HLA-DPA1*01:03-B1*104:01L
  REGION 1..10: note = CONT. FROM ABOVE: HLA-DRB1*15:03L
LEQWNLVIGF

SEQ ID NO: 11741 - protein, 10 aa, Severe acute respiratory syndrome coronavirus 2
  REGION 1..10: note = Table B: HLA-DQA1*05:01-B1*03:01L HLA-DRB1*04:03L HLA-DRB1*13:03L HLA-DRB1*01:03L HLA-DQA1*01:02-B1*06:02L HLA-DRB1*08:01L HLA-DRB1*12:01L HLA-DQA1*03:01-B1*03:02L HLA-DRB1*14:17L HLA-DPA1*01:02-B1*04:01L HLA-DRB1*16:01L
  REGION 1..10: note = CONT. FROM ABOVE: HLA-DQA1*01:03-B1*06:01L HLA-DRB1*04:08L HLA-D QA1*02:01-B1*03:03L
LQFAYANRNR

SEQ ID NO: 11742 - protein, 10 aa, Severe acute respiratory syndrome coronavirus 2
  REGION 1..10: note = Table B: HLA-DQA1*05:01-B1*03:01L HLA-DQA1*01:02-B1*06:02L HLA-DPA1*03:01-B1*04:02L HLA-DRB1*14:01L HLA-DRB1*14:02L HLA-DQA1*05:05-B1*03:19L HLA-DQA1*05:01-B1*02:01L HLA-DPA1*01:03-B1*04:01L HLA-DPA1*02:01-B1*13:01L
  REGION 1..10: note = CONT. FROM ABOVE: HLA-DPA1*03:01-B1*105:01L HLA-DQA1*01:03-B1*06 :01L HLA-DQA1*02:01-B1*03:03L HLA-DRB1*15:03L
VLAAVYRINW

SEQ ID NO: 11743 - protein, 15 aa, Severe acute respiratory syndrome coronavirus 2
  REGION 1..15: note = Table B: HLA-DQA1*05:01-B1*03:01L HLA-DRB1*07:01L
LSYFIASFRLFARTR

SEQ ID NO: 11744 - protein, 16 aa, Severe acute respiratory syndrome coronavirus 2
  REGION 1..16: note = Table B: HLA-DQA1*05:01-B1*03:01L HLA-DRB1*04:01L HLA-DRB1*04:03L HLA-DRB1*13:02L HLA-DRB1*04:04L HLA-DRB1*01:01L HLA-DRB1*11:04L HLA-DRB1*08:01L HLA-DRB1*11:01L HLA-DRB3*01:01L HLA-DQA1*05:05-B1*03:01L HLA-DRB1*10:01L
FRLFARTRSMWSFNPE

SEQ ID NO: 11745 - protein, 12 aa, Severe acute respiratory syndrome coronavirus 2
  REGION 1..12: note = Table B: HLA-DQA1*05:01-B1*03:01L HLA-DRB1*04:03L HLA-DRB1*01:03L HLA-DQA1*01:02-B1*06:02L HLA-DRB1*01:02L HLA-DPA1*03:01-B1*105:01L HLA-DRB1*16:01L HLA-DQA1*01:03-B1*06:01L
VPLHGTILTRPL

SEQ ID NO: 11746 - protein, 13 aa, Severe acute respiratory syndrome coronavirus 2
  REGION 1..13: note = Table B: HLA-DQA1*05:01-B1*03:01L HLA-DRB1*04:02L HLA-DRB1*14:01L HLA-DPA1*03:01-B1*105:01L HLA-DQA1*01:03-B1*06:01L
ESELVIGAVILRG

SEQ ID NO: 11747 - protein, 10 aa, Severe acute respiratory syndrome coronavirus 2
  REGION 1..10: note = Table B: HLA-DQA1*05:01-B1*03:01L HLA-DQA1*01:02-B1*06:02L HLA-DQA1*05:05-B1*03:19L HLA-DPA1*03:01-B1*105:01L HLA-DQA1*03:01-B1*03:02L HLA-DQA1*05:05-B1*03:01L HLA-DQA1*01:03-B1*06:01L HLA-DQA1*02:01-B1*03:03L
VIGAVILRGH

SEQ ID NO: 11748 - protein, 11 aa, Severe acute respiratory syndrome coronavirus 2
  REGION 1..11: note = Table B: HLA-DQA1*05:01-B1*03:01L
IGAVILRGHLR

SEQ ID NO: 11749 - protein, 13 aa, Severe acute respiratory syndrome coronavirus 2
  REGION 1..13: note = Table B: HLA-DQA1*05:01-B1*03:01L HLA-DRB1*01:03L HLA-DRB4*03:01NL HLA-DPA1*01:03-B1*03:01L HLA-DQA1*01-B1*05L HLA-DQA1*05:01-B1*02:01L HLA-DRB1*12:01L HLA-DQA1*05:05-B1*03:01L
DLPKEITVATSRT

SEQ ID NO: 11750 - protein, 10 aa, Severe acute respiratory syndrome coronavirus 2
  REGION 1..10: note = Table B: HLA-DQA1*05:01-B1*03:01L HLA-DRB1*04:03L HLA-DRB1*13:02L HLA-DRB1*13:03L HLA-DRB1*01:03L HLA-DQA1*01:02-B1*06:02L HLA-DRB4*03:01NL HLA-DRB1*08:77L HLA-DPA1*01:03-B1*03:01L HLA-DPA1*03:01-B1*04:02L
  REGION 1..10: note = CONT. FROM ABOVE: HLA-DRB1*03:01L HLA-DRB1*14:01L HLA-DRB1*11:02 L HLA-DRB1*14:02L HLA-DRB1*11:01L HLA-DQA1*01-B1*05L HLA-DQA1*05 :05-B1*03:19M HLA-DQA1*05:01-B1*02:01L HLA-DRB4*01:01L HLA-DPA1* 01:03-B1*04:01L HLA-DQA1*05:05-B1*03:116L
  REGION 1..10: note = CONT. FROM ABOVE: HLA-DPA1*01:03-B1*04:02L HLA-DRB1*12:01L HLA-D PA1*02:01-B1*13:01L HLA-DPA1*03:01-B1*105:01L HLA-DPA1*01:03-B1* 104:01L HLA-DQA1*05:05-B1*03:01L HLA-DPA1*01:02-B1*04:01L HLA-DR B1*10:01L HLA-DRB1*16:01L HLA-DQA1*01:03-B1*06:01L
  REGION 1..10: note = CONT. FROM ABOVE: HLA-DRB1*08:02L HLA-DQA1*02:01-B1*03:03L HLA-D RB1*15:03L
VATSRTLSYY

SEQ ID NO: 11751 - protein, 11 aa, Severe acute respiratory syndrome coronavirus 2
  REGION 1..11: note = Table B: HLA-DQA1*05:01-B1*03:01L HLA-DRB1*12:01L HLA-DRB1*04:08L HLA-DRB1*15:03L
YYKLGASQRVA

SEQ ID NO: 11752 - protein, 12 aa, Severe acute respiratory syndrome coronavirus 2
  REGION 1..12: note = Table B: HLA-DQA1*05:01-B1*03:01L HLA-DRB1*04:05L HLA-DQA1*01:02-B1*06:02L HLA-DRB1*14:01L HLA-DQA1*01:01-B1*05:01L HLA-DRB1*08:01L HLA-DQA1*05:05-B1*03:19L HLA-DQA1*05:01-B1*02:01L
  REGION 1..12: note = CONT. FROM ABOVE: HLA-DRB1*04:10L HLA-DPA1*03:01-B1*105:01L HLA- DRB1*14:54L HLA-DQA1*05:05-B1*03:01L
LGASQRVAGDSG

SEQ ID NO: 11753 - protein, 13 aa, Severe acute respiratory syndrome coronavirus 2
  REGION 1..13: note = Table B: HLA-DQA1*05:01-B1*03:01L
GASQRVAGDSGFA

SEQ ID NO: 11754 - protein, 11 aa, Severe acute respiratory syndrome coronavirus 2
  REGION 1..11: note = Table B: HLA-DQA1*05:01-B1*03:01L HLA-DRB1*04:01L HLA-DRB1*04:03L HLA-DRB1*13:02L HLA-DRB1*01:03M HLA-DRB4*03:01NL HLA-DRB1*08:77M HLA-DPA1*01:03-B1*03:01L HLA-DPA1*03:01-B1*04:02L HLA-DRB1*03:01M HLA-DRB1*14:01L
  REGION 1..11: note = CONT. FROM ABOVE: HLA-DRB1*11:02L HLA-DRB1*11:03L HLA-DRB1*14:02 M HLA-DRB1*11:01L HLA-DQA1*01-B1*05L HLA-DRB4*01:01L HLA-DPA1*01 :03-B1*04:01L HLA-DQA1*05:05-B1*03:116L HLA-DPA1*01:03-B1*04:02M HLA-DRB1*12:01L HLA-DPA1*02:01-B1*13:01L
  REGION 1..11: note = CONT. FROM ABOVE: HLA-DPA1*01:03-B1*104:01L HLA-DQA1*05:05-B1*03 :01L HLA-DPA1*01:02-B1*04:01L HLA-DRB1*10:01L HLA-DQA1*01:03-B1* 06:01L HLA-DRB1*08:02L
RVAGDSGFAAY

SEQ ID NO: 11755 - protein, 10 aa, Severe acute respiratory syndrome coronavirus 2
  REGION 1..10: note = Table B: HLA-DQA1*05:01-B1*03:01L HLA-DRB1*13:03L HLA-DQA1*01:02-B1*06:02L HLA-DPA1*01:03-B1*03:01L HLA-DRB1*03:01L HLA-DQA1*05:05-B1*03:19L HLA-DQA1*05:01-B1*02:01L HLA-DPA1*03:01-B1*105:01L
  REGION 1..10: note = CONT. FROM ABOVE: HLA-DRB1*16:01L HLA-DQA1*01:03-B1*06:01L HLA-D QA1*02:01-B1*03:03L
DSGFAAYSRY

SEQ ID NO: 11756 - protein, 10 aa, Severe acute respiratory syndrome coronavirus 2
  REGION 1..10: note = Table B: HLA-DQA1*05:01-B1*03:01L HLA-DRB1*01:03L HLA-DQA1*01:02-B1*06:02L HLA-DQA1*03:01-B1*03:02L HLA-DPA1*01:02-B1*04:01L HLA-DQA1*01:03-B1*06:01L HLA-DQA1*02:01-B1*03:03L
SGFAAYSRYR

SEQ ID NO: 11757 - protein, 13 aa, Severe acute respiratory syndrome coronavirus 2
  REGION 1..13: note = Table B: HLA-DQA1*05:01-B1*03:01L HLA-DRB1*13:02L HLA-DRB1*11:01L HLA-DRB3*01:01L HLA-DPA1*02:01-B1*13:01L HLA-DPA1*03:01-B1*105:01L
FAAYSRYRIGNYK

SEQ ID NO: 11758 - protein, 13 aa, Severe acute respiratory syndrome coronavirus 2
  REGION 1..13: note = Table B: HLA-DQA1*05:01-B1*03:01L HLA-DQA1*01:02-B1*06:02L HLA-DRB1*08:77L HLA-DRB3*02:01L HLA-DPA1*01:03-B1*03:01L HLA-DRB1*03:01L HLA-DRB1*11:03L HLA-DRB1*14:02L HLA-DQA1*01:01-B1*05:01L HLA-DRB1*08:01L HLA-DRB1*11:01L
  REGION 1..13: note = CONT. FROM ABOVE: HLA-DRB5*01:01L HLA-DQA1*05:05-B1*03:19L HLA-D RB4*01:01L HLA-DRB1*12:02L HLA-DRB3*01:01L HLA-DPA1*02:01-B1*13: 01L HLA-DPA1*03:01-B1*105:01L HLA-DQA1*05:05-B1*03:01L HLA-DRB1* 07:01L HLA-DRB1*10:01L HLA-DQA1*01:03-B1*06:01L HLA-DRB1*08:03L
YKLNTDHSSSSDN

SEQ ID NO: 11759 - protein, 12 aa, Severe acute respiratory syndrome coronavirus 2
  REGION 1..12: note = Table B: HLA-DQA1*05:01-B1*03:01L HLA-DRB1*13:03L HLA-DRB1*01:03L HLA-DRB1*04:05L HLA-DRB1*14:02L HLA-DRB1*12:01L HLA-DQA1*05:05-B1*03:01L HLA-DQA1*01:03-B1*06:01L
NTDHSSSSDNIA

SEQ ID NO: 11760 - protein, 12 aa, Severe acute respiratory syndrome coronavirus 2
  REGION 1..12: note = Table B: HLA-DQA1*05:01-B1*03:01L HLA-DRB1*04:03L HLA-DRB1*13:02L HLA-DRB1*01:03L HLA-DRB1*04:05L HLA-DRB1*01:02L HLA-DRB1*08:04L HLA-DPA1*01:03-B1*03:01L HLA-DRB1*14:01L HLA-DRB1*08:01L HLA-DQA1*01-B1*05L HLA-DQA1*05:01-B1*02:01L
  REGION 1..12: note = CONT. FROM ABOVE: HLA-DRB1*12:01L HLA-DPA1*01:03-B1*02:01L HLA-D QA1*05:05-B1*03:01L HLA-DRB1*04:08L
FHLVDFQVTIAE

SEQ ID NO: 11761 - protein, 11 aa, Severe acute respiratory syndrome coronavirus 2
  REGION 1..11: note = Table B: HLA-DQA1*05:01-B1*03:01L HLA-DRB1*13:02L HLA-DPA1*03:01-B1*04:02L HLA-DPA1*01:03-B1*04:01L HLA-DPA1*03:01-B1*105:01L HLA-DQA1*03:01-B1*03:02L HLA-DPA1*01:02-B1*04:01L HLA-DQA1*01:03-B1*06:01L
VDFQVTIAEIL

SEQ ID NO: 11762 - protein, 11 aa, Severe acute respiratory syndrome coronavirus 2
  REGION 1..11: note = Table B: HLA-DQA1*05:01-B1*03:01L HLA-DPA1*03:01-B1*04:02L HLA-DQA1*05:05-B1*03:19L HLA-DRB4*01:01L HLA-DRB1*12:01L
AEILLIIMRTF

SEQ ID NO: 11763 - protein, 12 aa, Severe acute respiratory syndrome coronavirus 2
  REGION 1..12: note = Table B: HLA-DQA1*05:01-B1*03:01L HLA-DRB1*04:03L HLA-DRB1*13:02L HLA-DRB1*04:05L HLA-DRB1*01:02L HLA-DRB1*08:04L HLA-DRB1*14:01L HLA-DRB1*14:02L HLA-DRB1*08:01L HLA-DRB1*11:01L HLA-DRB1*12:01L HLA-DPA1*01:03-B1*02:01L
  REGION 1..12: note = CONT. FROM ABOVE: HLA-DQA1*05:05-B1*03:01L
RTFKVSIWNLDY

SEQ ID NO: 11764 - protein, 12 aa, Severe acute respiratory syndrome coronavirus 2
  REGION 1..12: note = Table B: HLA-DQA1*05:01-B1*03:01L HLA-DRB1*13:02L HLA-DRB1*01:03L HLA-DRB1*04:05L HLA-DRB1*01:02L HLA-DRB1*08:04L HLA-DRB3*02:01L HLA-DPA1*01:03-B1*03:01L HLA-DRB1*14:01L HLA-DQA1*05:05-B1*03:19L HLA-DPA1*01:03-B1*04:01L
  REGION 1..12: note = CONT. FROM ABOVE: HLA-DPA1*01:03-B1*04:02L HLA-DPA1*02:01-B1*13: 01L HLA-DQA1*05:05-B1*03:01L HLA-DRB1*14:17L HLA-DRB1*04:08L
NLDYIINLIIKN

SEQ ID NO: 11765 - protein, 13 aa, Severe acute respiratory syndrome coronavirus 2
  REGION 1..13: note = Table B: HLA-DQA1*05:01-B1*03:01L HLA-DRB3*02:01L HLA-DPA1*01:03-B1*03:01L HLA-DRB1*11:03L HLA-DQA1*05:01-B1*02:01L HLA-DRB1*12:02L HLA-DPA1*03:01-B1*105:01L
INLIIKNLSKSLT

SEQ ID NO: 11766 - protein, 12 aa, Severe acute respiratory syndrome coronavirus 2
  REGION 1..12: note = Table B: HLA-DQA1*05:01-B1*03:01L HLA-DRB1*04:05L HLA-DQA1*01:02-B1*06:02L HLA-DRB3*02:01L HLA-DPA1*03:01-B1*04:02L HLA-DRB1*11:03L HLA-DRB1*11:04L HLA-DRB1*14:02L HLA-DRB1*08:01L HLA-DRB1*11:01L HLA-DRB1*12:02L
  REGION 1..12: note = CONT. FROM ABOVE: HLA-DRB3*01:01L HLA-DPA1*03:01-B1*105:01L HLA- DQA1*03:01-B1*03:02L HLA-DRB1*08:03L
LIIKNLSKSLTE

SEQ ID NO: 11767 - protein, 12 aa, Severe acute respiratory syndrome coronavirus 2
  REGION 1..12: note = Table B: HLA-DQA1*05:01-B1*03:01L HLA-DRB1*04:05L HLA-DQA1*01:02-B1*06:02L HLA-DRB3*02:01L HLA-DPA1*01:03-B1*03:01L HLA-DPA1*03:01-B1*04:02L HLA-DRB1*11:03L HLA-DRB1*11:04L HLA-DRB1*14:02L HLA-DRB1*08:01L
  REGION 1..12: note = CONT. FROM ABOVE: HLA-DRB1*11:01L HLA-DQA1*05:05-B1*03:19L HLA-D RB1*12:02L HLA-DRB3*01:01L HLA-DPA1*02:01-B1*13:01L HLA-DPA1*03: 01-B1*105:01L HLA-DQA1*03:01-B1*03:02L HLA-DQA1*05:05-B1*03:01L HLA-DPA1*01:02-B1*04:01L HLA-DRB1*08:03L
  REGION 1..12: note = CONT. FROM ABOVE: HLA-DQA1*02:01-B1*03:03L
IIKNLSKSLTEN

SEQ ID NO: 11768 - protein, 10 aa, Severe acute respiratory syndrome coronavirus 2
  REGION 1..10: note = Table B: HLA-DQA1*05:01-B1*03:01L HLA-DRB1*13:03L HLA-DRB1*01:03L HLA-DQA1*01:02-B1*06:02L HLA-DRB1*08:77L HLA-DPA1*01:03-B1*03:01L HLA-DRB1*03:01L HLA-DRB1*14:02L HLA-DQA1*01-B1*05L HLA-DQA1*05:05-B1*03:19L
  REGION 1..10: note = CONT. FROM ABOVE: HLA-DQA1*05:01-B1*02:01L HLA-DPA1*01:03-B1*04: 01L HLA-DPA1*01:03-B1*04:02L HLA-DRB1*12:01L HLA-DPA1*03:01-B1*1 05:01L HLA-DPA1*01:03-B1*104:01L HLA-DPA1*01:02-B1*04:01L HLA-DR B1*16:01L HLA-DQA1*01:03-B1*06:01L HLA-DRB1*08:02L
  REGION 1..10: note = CONT. FROM ABOVE: HLA-DQA1*02:01-B1*03:03L HLA-DRB1*15:03L
LSKSLTENKY

SEQ ID NO: 11769 - protein, 14 aa, Severe acute respiratory syndrome coronavirus 2
  REGION 1..14: note = Table B: HLA-DQA1*05:01-B1*03:01L HLA-DRB1*13:02L HLA-DRB1*01:02L HLA-DPA1*01:03-B1*03:01L HLA-DPA1*03:01-B1*04:02L HLA-DQA1*05:05-B1*03:19L HLA-DQA1*05:05-B1*03:01L
LTENKYSQLDEEQP

SEQ ID NO: 11770 - protein, 14 aa, Severe acute respiratory syndrome coronavirus 2
  REGION 1..14: note = Table B: HLA-DQA1*05:01-B1*03:01L HLA-DRB1*13:02L HLA-DPA1*01:03-B1*03:01L HLA-DRB1*14:02L HLA-DQA1*05:05-B1*03:01L HLA-DRB1*08:03L
TENKYSQLDEEQPM

SEQ ID NO: 11771 - protein, 14 aa, Severe acute respiratory syndrome coronavirus 2
  REGION 1..14: note = Table B: HLA-DQA1*05:01-B1*03:01L HLA-DRB1*04:01L HLA-DRB1*13:02L HLA-DRB1*04:04L HLA-DRB3*02:01L HLA-DPA1*01:03-B1*03:01L HLA-DPA1*03:01-B1*04:02L HLA-DRB1*14:01L HLA-DRB1*14:02L HLA-DQA1*05:05-B1*03:19L
  REGION 1..14: note = CONT. FROM ABOVE: HLA-DRB1*09:01L HLA-DPA1*01:03-B1*04:02L HLA-D RB1*12:02L HLA-DRB3*01:01L HLA-DPA1*01:03-B1*104:01L HLA-DRB1*07 :01L HLA-DRB1*10:01L HLA-DRB1*08:03L
ENKYSQLDEEQPME

SEQ ID NO: 11772 - protein, 12 aa, Severe acute respiratory syndrome coronavirus 2
  REGION 1..12: note = Table B: HLA-DQA1*05:01-B1*03:01L HLA-DPA1*03:01-B1*04:02L HLA-DQA1*05:05-B1*03:01L HLA-DQA1*02:01-B1*03:03L
ITLATCELYHYQ

SEQ ID NO: 11773 - protein, 12 aa, Severe acute respiratory syndrome coronavirus 2
  REGION 1..12: note = Table B: HLA-DQA1*05:01-B1*03:01L HLA-DQA1*01:02-B1*06:02L HLA-DQA1*01-B1*05L HLA-DQA1*05:05-B1*03:19L HLA-DQA1*05:01-B1*02:01L HLA-DQA1*05:05-B1*03:01L
EGNSPFHPLADN

SEQ ID NO: 11774 - protein, 10 aa, Severe acute respiratory syndrome coronavirus 2
  REGION 1..10: note = Table B: HLA-DQA1*05:01-B1*03:01L HLA-DRB1*04:03L HLA-DRB1*01:03L HLA-DRB1*04:05L HLA-DQA1*01:02-B1*06:02L HLA-DRB1*01:01L HLA-DRB1*01:02L HLA-DQA1*01:01-B1*05:01L HLA-DQA1*01-B1*05L HLA-DQA1*05:01-B1*02:01L HLA-DRB1*12:01L
  REGION 1..10: note = CONT. FROM ABOVE: HLA-DPA1*02:01-B1*13:01L HLA-DPA1*03:01-B1*105 :01L HLA-DPA1*01:02-B1*04:01L HLA-DRB1*16:01L HLA-DQA1*01:03-B1* 06:01L HLA-DQA1*02:01-B1*03:03L HLA-DRB1*15:03L
PFHPLADNKF

SEQ ID NO: 11775 - protein, 10 aa, Severe acute respiratory syndrome coronavirus 2
  REGION 1..10: note = Table B: HLA-DQA1*05:01-B1*03:01L HLA-DRB1*13:03L HLA-DRB1*04:02L HLA-DQA1*01:02-B1*06:02L HLA-DPA1*03:01-B1*04:02L HLA-DRB1*14:01L HLA-DRB1*08:01L HLA-DRB5*01:01L HLA-DQA1*01-B1*05L HLA-DQA1*05:01-B1*02:01L
  REGION 1..10: note = CONT. FROM ABOVE: HLA-DQA1*05:05-B1*03:116L HLA-DPA1*03:01-B1*10 5:01L HLA-DQA1*03:01-B1*03:02L HLA-DPA1*01:02-B1*04:01L HLA-DRB1 *16:01L HLA-DQA1*02:01-B1*03:03L HLA-DRB1*15:03L
HPLADNKFAL

SEQ ID NO: 11776 - protein, 12 aa, Severe acute respiratory syndrome coronavirus 2
  REGION 1..12: note = Table B: HLA-DQA1*05:01-B1*03:01L HLA-DRB1*01:03L HLA-DQA1*01:02-B1*06:02L HLA-DRB1*01:02L HLA-DQA1*03:01-B1*03:02L HLA-DRB1*04:08L HLA-DQA1*02:01-B1*03:03L HLA-DRB1*15:03L
QFAFACPDGVKH

SEQ ID NO: 11777 - protein, 10 aa, Severe acute respiratory syndrome coronavirus 2
  REGION 1..10: note = Table B: HLA-DQA1*05:01-B1*03:01L HLA-DRB1*13:03L HLA-DRB1*01:03L HLA-DQA1*01:02-B1*06:02L HLA-DRB1*08:77L HLA-DPA1*01:03-B1*03:01L HLA-DRB1*03:01L HLA-DRB1*14:02L HLA-DQA1*01-B1*05L HLA-DQA1*05:05-B1*03:19L
  REGION 1..10: note = CONT. FROM ABOVE: HLA-DQA1*05:01-B1*02:01L HLA-DRB4*01:01L HLA-D PA1*01:03-B1*04:01L HLA-DPA1*01:03-B1*04:02L HLA-DPA1*03:01-B1*1 05:01L HLA-DPA1*01:03-B1*104:01L HLA-DRB1*10:01L HLA-DRB1*16:01L HLA-DQA1*01:03-B1*06:01L HLA-DRB1*08:02L
  REGION 1..10: note = CONT. FROM ABOVE: HLA-DQA1*02:01-B1*03:03L HLA-DRB1*15:03L
ACPDGVKHVY

SEQ ID NO: 11778 - protein, 12 aa, Severe acute respiratory syndrome coronavirus 2
  REGION 1..12: note = Table B: HLA-DQA1*05:01-B1*03:01L HLA-DRB1*13:02L HLA-DQA1*01:02-B1*06:02L HLA-DRB1*01:01L HLA-DRB1*08:04L HLA-DRB1*11:03L HLA-DRB3*01:01L HLA-DRB1*08:03L HLA-DRB1*15:03L
VYQLRARSVSPK

SEQ ID NO: 11779 - protein, 13 aa, Severe acute respiratory syndrome coronavirus 2
  REGION 1..13: note = Table B: HLA-DQA1*05:01-B1*03:01L HLA-DRB1*13:03L HLA-DRB1*01:02L HLA-DRB4*03:01NL HLA-DRB1*08:04L HLA-DRB1*14:01L HLA-DQA1*01:01-B1*05:01L HLA-DRB1*04:10L HLA-DRB1*12:01L HLA-DRB1*14:54L HLA-DRB1*14:17L HLA-DRB1*08:03L HLA-DRB1*15:03L
SPKLFIRQEEVQE

SEQ ID NO: 11780 - protein, 10 aa, Severe acute respiratory syndrome coronavirus 2
  REGION 1..10: note = Table B: HLA-DQA1*05:01-B1*03:01L HLA-DRB1*13:03L HLA-DRB1*01:03L HLA-DQA1*01:02-B1*06:02L HLA-DRB1*08:77L HLA-DPA1*01:03-B1*03:01L HLA-DRB1*03:01L HLA-DRB1*14:02L HLA-DQA1*01-B1*05L HLA-DQA1*05:05-B1*03:19L
  REGION 1..10: note = CONT. FROM ABOVE: HLA-DQA1*05:01-B1*02:01L HLA-DPA1*01:03-B1*04: 01L HLA-DPA1*01:03-B1*04:02L HLA-DRB1*12:01L HLA-DPA1*03:01-B1*1 05:01L HLA-DPA1*01:03-B1*104:01L HLA-DRB1*16:01L HLA-DQA1*01:03- B1*06:01L HLA-DRB1*08:02L HLA-DQA1*02:01-B1*03:03L
  REGION 1..10: note = CONT. FROM ABOVE: HLA-DRB1*15:03L
IRQEEVQELY

SEQ ID NO: 11781 - protein, 15 aa, Severe acute respiratory syndrome coronavirus 2
  REGION 1..15: note = Table B: HLA-DQA1*05:01-B1*03:01L HLA-DRB1*04:04L HLA-DRB1*08:04L HLA-DPA1*01:03-B1*03:01L HLA-DPA1*03:01-B1*04:02L HLA-DRB1*03:01L HLA-DRB1*11:02L HLA-DRB1*14:02L HLA-DRB1*13:01L HLA-DPA1*01:03-B1*04:02L
  REGION 1..15: note = CONT. FROM ABOVE: HLA-DQA1*05:05-B1*03:01L
IVFITLCFTLKRKTE

SEQ ID NO: 11782 - protein, 16 aa, Severe acute respiratory syndrome coronavirus 2
  REGION 1..16: note = Table B: HLA-DQA1*05:01-B1*03:01L HLA-DRB1*04:03L HLA-DRB1*13:03L HLA-DRB3*02:01L HLA-DPA1*01:03-B1*03:01L HLA-DRB1*03:01L HLA-DRB1*11:02L HLA-DRB1*14:02L HLA-DQA1*01-B1*05L HLA-DQA1*05:05-B1*03:19L
  REGION 1..16: note = CONT. FROM ABOVE: HLA-DQA1*05:01-B1*02:01L HLA-DRB1*13:01L HLA-D PA1*01:03-B1*02:01L HLA-DPA1*01:03-B1*104:01L HLA-DQA1*05:05-B1* 03:01L HLA-DRB1*07:01L HLA-DQA1*01:03-B1*06:01L HLA-DRB1*08:02L HLA-DRB1*08:03L HLA-DRB1*15:01L
DPCPIHFYSKWYIRVG

SEQ ID NO: 11783 - protein, 12 aa, Severe acute respiratory syndrome coronavirus 2
  REGION 1..12: note = Table B: HLA-DQA1*05:01-B1*03:01L HLA-DRB1*04:03L HLA-DRB1*13:02L HLA-DRB1*13:03L HLA-DRB1*01:03L HLA-DRB1*04:02L HLA-DRB1*04:05L HLA-DQA1*01:02-B1*06:02L HLA-DRB1*01:02L HLA-DRB1*14:01L HLA-DRB1*11:04L HLA-DRB1*08:01L HLA-DRB1*11:01L
  REGION 1..12: note = CONT. FROM ABOVE: HLA-DRB1*12:01L HLA-DRB3*01:01L HLA-DQA1*03:01 -B1*03:02L HLA-DPA1*01:02-B1*04:01L HLA-DRB1*16:01L HLA-DRB1*04: 08L HLA-DQA1*02:01-B1*03:03L HLA-DRB1*15:03L
YIRVGARKSAPL

SEQ ID NO: 11784 - protein, 14 aa, Severe acute respiratory syndrome coronavirus 2
  REGION 1..14: note = Table B: HLA-DQA1*05:01-B1*03:01L HLA-DRB1*04:01L HLA-DRB1*13:03L HLA-DRB1*01:03L HLA-DRB1*01:01L HLA-DRB4*03:01NL HLA-DRB1*08:04L HLA-DPA1*01:03-B1*03:01L HLA-DRB1*14:01L HLA-DRB1*11:03L HLA-DRB1*11:04L HLA-DRB1*08:01L HLA-DRB1*11:01L
  REGION 1..14: note = CONT. FROM ABOVE: HLA-DQA1*01-B1*05L HLA-DQA1*05:05-B1*03:19L HL A-DRB4*01:01L HLA-DRB1*09:01L HLA-DRB1*12:01L HLA-DPA1*03:01-B1* 105:01L HLA-DQA1*03:01-B1*03:02L HLA-DRB1*14:54L HLA-DQA1*05:05- B1*03:01L HLA-DRB1*10:01L HLA-DRB1*16:01M
  REGION 1..14: note = CONT. FROM ABOVE: HLA-DQA1*01:03-B1*06:01L HLA-DRB1*08:03L HLA-D QA1*02:01-B1*03:03L HLA-DRB1*15:03L
APLIELCVDEAGSK

SEQ ID NO: 11785 - protein, 10 aa, Severe acute respiratory syndrome coronavirus 2
  REGION 1..10: note = Table B: HLA-DQA1*05:01-B1*03:01L HLA-DRB1*13:02L HLA-DRB1*13:03M HLA-DRB1*01:03L HLA-DQA1*01:02-B1*06:02M HLA-DRB4*03:01NL HLA-DRB1*08:77L HLA-DPA1*01:03-B1*03:01L HLA-DPA1*03:01-B1*04:02L HLA-DRB1*03:01L HLA-DRB1*14:01L
  REGION 1..10: note = CONT. FROM ABOVE: HLA-DRB1*14:02L HLA-DRB5*01:01L HLA-DQA1*01-B1 *05L HLA-DQA1*05:05-B1*03:19L HLA-DQA1*05:01-B1*02:01L HLA-DRB4* 01:01L HLA-DPA1*01:03-B1*04:01L HLA-DQA1*05:05-B1*03:116L HLA-DP A1*01:03-B1*04:02L HLA-DRB1*12:01L HLA-DPA1*02:01-B1*13:01L
  REGION 1..10: note = CONT. FROM ABOVE: HLA-DPA1*03:01-B1*105:01L HLA-DPA1*01:03-B1*10 4:01L HLA-DQA1*05:05-B1*03:01L HLA-DPA1*01:02-B1*04:01L HLA-DRB1 *10:01L HLA-DRB1*16:01L HLA-DQA1*01:03-B1*06:01L HLA-DRB1*08:02L HLA-DQA1*02:01-B1*03:03L HLA-DRB1*15:03L
EAGSKSPIQY

SEQ ID NO: 11786 - protein, 12 aa, Severe acute respiratory syndrome coronavirus 2
  REGION 1..12: note = Table B: HLA-DQA1*05:01-B1*03:01L HLA-DPA1*03:01-B1*04:02L HLA-DQA1*05:05-B1*03:19L HLA-DQA1*05:05-B1*03:01L HLA-DQA1*02:01-B1*03:03L
NYTVSCLPFTIN

SEQ ID NO: 11787 - protein, 10 aa, Severe acute respiratory syndrome coronavirus 2
  REGION 1..10: note = Table B: HLA-DQA1*05:01-B1*03:01L HLA-DRB1*13:02L HLA-DRB1*13:03L HLA-DRB1*01:03L HLA-DRB1*04:02L HLA-DQA1*01:02-B1*06:02L HLA-DRB1*01:01L HLA-DRB4*03:01NL HLA-DRB1*11:04L HLA-DRB1*08:01L HLA-DRB5*01:01L HLA-DRB1*12:01L
  REGION 1..10: note = CONT. FROM ABOVE: HLA-DQA1*03:01-B1*03:02M HLA-DQA1*05:05-B1*03: 01L HLA-DRB1*14:17L HLA-DPA1*01:02-B1*04:01L HLA-DRB1*16:01L HLA -DQA1*01:03-B1*06:01L HLA-DQA1*02:01-B1*03:03L
EPKLGSLVVR

SEQ ID NO: 11788 - protein, 12 aa, Severe acute respiratory syndrome coronavirus 2
  REGION 1..12: note = Table B: HLA-DQA1*05:01-B1*03:01L HLA-DRB1*13:02L HLA-DRB1*04:05L HLA-DRB1*01:02L HLA-DRB1*08:04L HLA-DRB1*14:01L HLA-DRB1*14:02L HLA-DRB1*08:01L HLA-DRB1*11:01L HLA-DRB1*12:01L HLA-DRB3*01:01L HLA-DPA1*02:01-B1*13:01L
  REGION 1..12: note = CONT. FROM ABOVE: HLA-DPA1*01:03-B1*02:01L
FYEDFLEYHDVR

SEQ ID NO: 11789 - protein, 12 aa, Severe acute respiratory syndrome coronavirus 2
  REGION 1..12: note = Table B: HLA-DQA1*05:01-B1*03:01L HLA-DRB1*13:02L HLA-DRB1*13:03L HLA-DRB1*01:03L HLA-DRB1*04:04L HLA-DRB1*04:05L HLA-DRB3*02:01L HLA-DPA1*01:03-B1*03:01L HLA-DRB1*14:01L HLA-DRB1*08:01L HLA-DPA1*01:03-B1*04:01L HLA-DRB1*14:17L
  REGION 1..12: note = CONT. FROM ABOVE: HLA-DRB1*04:08L HLA-DRB1*15:01L
EDFLEYHDVRVV

SEQ ID NO: 11790 - protein, 13 aa, Severe acute respiratory syndrome coronavirus 2
  REGION 1..13: note = Table B: HLA-DQA1*05:01-B1*03:01L HLA-DRB1*04:03L HLA-DQA1*01:02-B1*06:02L
SDNGPQNQRNAPR

SEQ ID NO: 11791 - protein, 13 aa, Severe acute respiratory syndrome coronavirus 2
  REGION 1..13: note = Table B: HLA-DQA1*05:01-B1*03:01L HLA-DQA1*01:02-B1*06:02L HLA-DQA1*05:05-B1*03:19L HLA-DQA1*05:01-B1*02:01L HLA-DQA1*05:05-B1*03:01L HLA-DQA1*01:03-B1*06:01L
APRITFGGPSDST

SEQ ID NO: 11792 - protein, 10 aa, Severe acute respiratory syndrome coronavirus 2
  REGION 1..10: note = Table B: HLA-DQA1*05:01-B1*03:01L HLA-DRB1*04:03L HLA-DRB1*01:03L HLA-DRB1*04:02L HLA-DQA1*01:02-B1*06:02L HLA-DPA1*03:01-B1*105:01L HLA-DQA1*03:01-B1*03:02L HLA-DQA1*05:05-B1*03:01L HLA-DRB1*14:17L
  REGION 1..10: note = CONT. FROM ABOVE: HLA-DPA1*01:02-B1*04:01L HLA-DRB1*16:01L HLA-D QA1*01:03-B1*06:01L HLA-DQA1*02:01-B1*03:03L
WFTALTQHGK

SEQ ID NO: 11793 - protein, 10 aa, Severe acute respiratory syndrome coronavirus 2
  REGION 1..10: note = Table B: HLA-DQA1*05:01-B1*03:01L HLA-DRB1*13:03L HLA-DRB1*01:03L HLA-DQA1*03:01-B1*03:02L
FPRGQGVPIN

SEQ ID NO: 11794 - protein, 10 aa, Severe acute respiratory syndrome coronavirus 2
  REGION 1..10: note = Table B: HLA-DQA1*05:01-B1*03:01L HLA-DRB1*04:03L HLA-DRB1*13:03L HLA-DRB1*01:03L HLA-DQA1*01:02-B1*06:02L HLA-DRB4*03:01NL HLA-DRB1*08:77L HLA-DPA1*01:03-B1*03:01L HLA-DPA1*03:01-B1*04:02L HLA-DRB1*03:01L HLA-DRB1*11:02L
  REGION 1..10: note = CONT. FROM ABOVE: HLA-DRB1*14:02L HLA-DQA1*01-B1*05L HLA-DQA1*05 :05-B1*03:19M HLA-DQA1*05:01-B1*02:01M HLA-DRB4*01:01L HLA-DPA1* 01:03-B1*04:01L HLA-DQA1*05:05-B1*03:116L HLA-DPA1*01:03-B1*04:0 2L HLA-DRB1*12:01L HLA-DPA1*02:01-B1*13:01L
  REGION 1..10: note = CONT. FROM ABOVE: HLA-DPA1*03:01-B1*105:01L HLA-DPA1*01:03-B1*10 4:01L HLA-DRB1*10:01L HLA-DRB1*16:01L HLA-DRB1*08:02L HLA-DQA1*0 2:01-B1*03:03L HLA-DRB1*15:03L
NSSPDDQIGY

SEQ ID NO: 11795 - protein, 10 aa, Severe acute respiratory syndrome coronavirus 2
  REGION 1..10: note = Table B: HLA-DQA1*05:01-B1*03:01L HLA-DRB1*13:03L HLA-DRB1*01:03L HLA-DQA1*01:02-B1*06:02M HLA-DRB1*08:77L HLA-DPA1*01:03-B1*03:01L HLA-DRB1*03:01L HLA-DRB1*14:02L HLA-DQA1*01-B1*05L HLA-DQA1*05:05-B1*03:19L
  REGION 1..10: note = CONT. FROM ABOVE: HLA-DQA1*05:01-B1*02:01L HLA-DPA1*01:03-B1*04: 01L HLA-DPA1*03:01-B1*105:01L HLA-DPA1*01:03-B1*104:01L HLA-DRB1 *10:01L HLA-DRB1*16:01L HLA-DRB1*15:03L
SSPDDQIGYY

SEQ ID NO: 11796 - protein, 15 aa, Severe acute respiratory syndrome coronavirus 2
  REGION 1..15: note = Table B: HLA-DQA1*05:01-B1*03:01L HLA-DRB1*04:02L HLA-DRB1*04:04L HLA-DRB1*01:01L HLA-DRB1*03:01L HLA-DRB1*11:03L HLA-DRB1*13:01L HLA-DPA1*02:01-B1*13:01L HLA-DRB1*14:54L HLA-DPA1*01:02-B1*04:01L HLA-DRB1*07:01L
SPDDQIGYYRRATRR

SEQ ID NO: 11797 - protein, 10 aa, Severe acute respiratory syndrome coronavirus 2
  REGION 1..10: note = Table B: HLA-DQA1*05:01-B1*03:01L HLA-DRB1*13:02L HLA-DRB1*01:03L HLA-DQA1*01:02-B1*06:02L HLA-DPA1*01:03-B1*03:01L HLA-DRB1*03:01L HLA-DRB1*14:01L HLA-DRB1*14:02L HLA-DRB1*11:01L HLA-DQA1*05:05-B1*03:19L
  REGION 1..10: note = CONT. FROM ABOVE: HLA-DQA1*05:01-B1*02:01L HLA-DPA1*01:03-B1*04: 01L HLA-DPA1*01:03-B1*04:02L HLA-DRB1*12:01L HLA-DRB1*16:01L HLA -DQA1*01:03-B1*06:01L HLA-DRB1*08:02L HLA-DQA1*02:01-B1*03:03M H LA-DRB1*15:03L
KMKDLSPRWY

SEQ ID NO: 11798 - protein, 12 aa, Severe acute respiratory syndrome coronavirus 2
  REGION 1..12: note = Table B: HLA-DQA1*05:01-B1*03:01L HLA-DQA1*05:05-B1*03:19L HLA-DQA1*01:03-B1*06:01L
EAGLPYGANKDG

SEQ ID NO: 11799 - protein, 12 aa, Severe acute respiratory syndrome coronavirus 2
  REGION 1..12: note = Table B: HLA-DQA1*05:01-B1*03:01L HLA-DRB1*13:02L HLA-DRB1*04:04L HLA-DRB1*04:05L HLA-DQA1*01:02-B1*06:02L HLA-DRB1*01:02L HLA-DRB1*08:77L HLA-DPA1*01:03-B1*03:01L HLA-DRB1*11:03L HLA-DRB1*11:04L HLA-DRB1*14:02L
  REGION 1..12: note = CONT. FROM ABOVE: HLA-DQA1*01:01-B1*05:01L HLA-DQA1*01-B1*05L HL A-DQA1*05:05-B1*03:19L HLA-DRB1*04:10L HLA-DPA1*01:03-B1*04:02L HLA-DRB1*12:02L HLA-DPA1*03:01-B1*105:01L HLA-DRB1*10:01L HLA-DR B1*04:08L HLA-DRB1*15:03L
VATEGALNTPKD

SEQ ID NO: 11800 - protein, 11 aa, Severe acute respiratory syndrome coronavirus 2
  REGION 1..11: note = Table B: HLA-DQA1*05:01-B1*03:01L HLA-DRB1*13:03L HLA-DRB1*01:03L HLA-DRB1*04:02L HLA-DQA1*01:02-B1*06:02L HLA-DRB4*03:01NL HLA-DQA1*01:01-B1*05:01L HLA-DQA1*01-B1*05L HLA-DQA1*05:01-B1*02:01L HLA-DRB1*14:17L HLA-DRB1*16:01L
TEGALNTPKDH

SEQ ID NO: 11801 - protein, 13 aa, Severe acute respiratory syndrome coronavirus 2
  REGION 1..13: note = Table B: HLA-DQA1*05:01-B1*03:01L HLA-DQA1*01:02-B1*06:02L HLA-DRB1*08:01L HLA-DQA1*01:03-B1*06:01L HLA-DQA1*02:01-B1*03:03L
TPKDHIGTRNPAN

SEQ ID NO: 11802 - protein, 11 aa, Severe acute respiratory syndrome coronavirus 2
  REGION 1..11: note = Table B: HLA-DQA1*05:01-B1*03:01L HLA-DRB1*04:03L HLA-DQA1*02:01-B1*03:03L
DHIGTRNPANN

SEQ ID NO: 11803 - protein, 13 aa, Severe acute respiratory syndrome coronavirus 2
  REGION 1..13: note = Table B: HLA-DQA1*05:01-B1*03:01L HLA-DRB1*13:02L HLA-DQA1*01:02-B1*06:02L HLA-DRB1*01:02L HLA-DPA1*01:03-B1*03:01L HLA-DQA1*05:01-B1*02:01L HLA-DRB1*04:10L HLA-DRB1*12:01L HLA-DPA1*02:01-B1*13:01L
  REGION 1..13: note = CONT. FROM ABOVE: HLA-DPA1*01:03-B1*104:01L HLA-DQA1*05:05-B1*03 :01L HLA-DQA1*01:03-B1*06:01L
IGTRNPANNAAIV

SEQ ID NO: 11804 - protein, 11 aa, Severe acute respiratory syndrome coronavirus 2
  REGION 1..11: note = Table B: HLA-DQA1*05:01-B1*03:01L HLA-DRB1*01:03L HLA-DRB1*08:77L HLA-DPA1*01:03-B1*03:01L HLA-DPA1*03:01-B1*04:02L HLA-DRB1*14:01L HLA-DRB1*14:02L HLA-DQA1*05:05-B1*03:19L HLA-DQA1*05:01-B1*02:01L
  REGION 1..11: note = CONT. FROM ABOVE: HLA-DPA1*01:03-B1*04:01L HLA-DPA1*03:01-B1*105 :01L HLA-DPA1*01:02-B1*04:01L HLA-DRB1*16:01L HLA-DRB1*15:03L
LPQGTTLPKGF

SEQ ID NO: 11805 - protein, 14 aa, Severe acute respiratory syndrome coronavirus 2
  REGION 1..14: note = Table B: HLA-DQA1*05:01-B1*03:01L HLA-DQA1*01:02-B1*06:02L HLA-DRB1*01:02L HLA-DRB1*08:01L HLA-DQA1*01:03-B1*06:01L HLA-DRB1*04:08L
GTTLPKGFYAEGSR

SEQ ID NO: 11806 - protein, 13 aa, Severe acute respiratory syndrome coronavirus 2
  REGION 1..13: note = Table B: HLA-DQA1*05:01-B1*03:01L HLA-DQA1*01:02-B1*06:02L HLA-DQA1*01:03-B1*06:01L
TLPKGFYAEGSRG

SEQ ID NO: 11807 - protein, 13 aa, Severe acute respiratory syndrome coronavirus 2
  REGION 1..13: note = Table B: HLA-DQA1*05:01-B1*03:01L HLA-DRB1*04:03L HLA-DRB1*13:03L HLA-DRB1*01:03L HLA-DRB1*04:02L HLA-DRB1*04:05L HLA-DQA1*01:02-B1*06:02L HLA-DRB1*01:02L HLA-DRB4*03:01NL HLA-DRB1*08:01L HLA-DRB1*04:10L HLA-DRB1*12:01L HLA-DRB1*14:17L
  REGION 1..13: note = CONT. FROM ABOVE: HLA-DRB1*16:01L HLA-DRB1*04:08L
LPKGFYAEGSRGG

SEQ ID NO: 11808 - protein, 11 aa, Severe acute respiratory syndrome coronavirus 2
  REGION 1..11: note = Table B: HLA-DQA1*05:01-B1*03:01L HLA-DRB1*04:01L HLA-DRB1*04:04L HLA-DRB1*04:05L HLA-DQA1*01:02-B1*06:02L HLA-DRB1*01:01L HLA-DRB1*01:02L HLA-DRB4*03:01NL HLA-DRB1*14:01L HLA-DRB1*11:03L HLA-DRB1*11:04L HLA-DRB1*14:02L HLA-DRB1*11:01L
  REGION 1..11: note = CONT. FROM ABOVE: HLA-DQA1*05:05-B1*03:19L HLA-DRB1*04:10L HLA-D RB1*12:01L HLA-DRB1*14:54L HLA-DQA1*05:05-B1*03:01L HLA-DRB1*10: 01L HLA-DRB1*16:01L HLA-DRB1*04:08L HLA-DQA1*02:01-B1*03:03L HLA -DRB1*15:03L
FYAEGSRGGSQ

SEQ ID NO: 11809 - protein, 13 aa, Severe acute respiratory syndrome coronavirus 2
  REGION 1..13: note = Table B: HLA-DQA1*05:01-B1*03:01L HLA-DQA1*05:05-B1*03:01L
YAEGSRGGSQASS

SEQ ID NO: 11810 - protein, 12 aa, Severe acute respiratory syndrome coronavirus 2
  REGION 1..12: note = Table B: HLA-DQA1*05:01-B1*03:01L HLA-DQA1*01:02-B1*06:02L HLA-DQA1*01:03-B1*06:01L HLA-DRB1*04:08L HLA-DQA1*02:01-B1*03:03L
EGSRGGSQASSR

SEQ ID NO: 11811 - protein, 12 aa, Severe acute respiratory syndrome coronavirus 2
  REGION 1..12: note = Table B: HLA-DQA1*05:01-B1*03:01L HLA-DQA1*01:02-B1*06:02L HLA-DRB1*01:02L HLA-DQA1*05:05-B1*03:19L HLA-DQA1*01:03-B1*06:01L HLA-DRB1*04:08L HLA-DQA1*02:01-B1*03:03L
GSRGGSQASSRS

SEQ ID NO: 11812 - protein, 12 aa, Severe acute respiratory syndrome coronavirus 2
  REGION 1..12: note = Table B: HLA-DQA1*05:01-B1*03:01L HLA-DRB1*01:03L HLA-DQA1*02:01-B1*03:03L
GGSQASSRSSSR

SEQ ID NO: 11813 - protein, 12 aa, Severe acute respiratory syndrome coronavirus 2
  REGION 1..12: note = Table B: HLA-DQA1*05:01-B1*03:01L HLA-DQA1*02:01-B1*03:03L
NSSRNSTPGSSR

SEQ ID NO: 11814 - protein, 12 aa, Severe acute respiratory syndrome coronavirus 2
  REGION 1..12: note = Table B: HLA-DQA1*05:01-B1*03:01L HLA-DQA1*03:01-B1*03:02L HLA-DQA1*02:01-B1*03:03L
NSTPGSSRGTSP

SEQ ID NO: 11815 - protein, 12 aa, Severe acute respiratory syndrome coronavirus 2
  REGION 1..12: note = Table B: HLA-DQA1*05:01-B1*03:01L HLA-DQA1*05:05-B1*03:01L HLA-DQA1*02:01-B1*03:03L
TPGSSRGTSPAR

SEQ ID NO: 11816 - protein, 13 aa, Severe acute respiratory syndrome coronavirus 2
  REGION 1..13: note = Table B: HLA-DQA1*05:01-B1*03:01L HLA-DQA1*01:02-B1*06:02L HLA-DQA1*03:01-B1*03:02L HLA-DQA1*05:05-B1*03:01L HLA-DQA1*01:03-B1*06:01L HLA-DQA1*02:01-B1*03:03L
SSRGTSPARMAGN

SEQ ID NO: 11817 - protein, 11 aa, Severe acute respiratory syndrome coronavirus 2
  REGION 1..11: note = Table B: HLA-DQA1*05:01-B1*03:01L HLA-DRB1*04:03L HLA-DQA1*01:02-B1*06:02L HLA-DQA1*03:01-B1*03:02L HLA-DQA1*05:05-B1*03:01L HLA-DQA1*01:03-B1*06:01L HLA-DQA1*02:01-B1*03:03L
DAALALLLLDR

SEQ ID NO: 11818 - protein, 15 aa, Severe acute respiratory syndrome coronavirus 2
  REGION 1..15: note = Table B: HLA-DQA1*05:01-B1*03:01L HLA-DRB1*01:01L HLA-DRB1*11:04L HLA-DRB3*01:01L HLA-DRB1*10:01L
LDRLNQLESKMSGKG

SEQ ID NO: 11819 - protein, 14 aa, Severe acute respiratory syndrome coronavirus 2
  REGION 1..14: note = Table B: HLA-DQA1*05:01-B1*03:01L HLA-DQA1*01:02-B1*06:02L HLA-DRB1*08:01L HLA-DQA1*03:01-B1*03:02L HLA-DQA1*02:01-B1*03:03L
LESKMSGKGQQQQG

SEQ ID NO: 11820 - protein, 13 aa, Severe acute respiratory syndrome coronavirus 2
  REGION 1..13: note = Table B: HLA-DQA1*05:01-B1*03:01L HLA-DRB1*01:02L
GKGQQQQGQTVTK

SEQ ID NO: 11821 - protein, 12 aa, Severe acute respiratory syndrome coronavirus 2
  REGION 1..12: note = Table B: HLA-DQA1*05:01-B1*03:01L HLA-DRB1*04:03L HLA-DRB1*01:02L
GQQQQGQTVTKK

SEQ ID NO: 11822 - protein, 14 aa, Severe acute respiratory syndrome coronavirus 2
  REGION 1..14: note = Table B: HLA-DQA1*05:01-B1*03:01L HLA-DRB1*04:04L HLA-DQA1*01:02-B1*06:02L HLA-DRB1*01:02L HLA-DRB1*08:04L HLA-DRB1*14:01L HLA-DRB1*11:04L HLA-DQA1*01:01-B1*05:01L HLA-DRB1*11:01L HLA-DRB1*04:10L HLA-DRB1*12:01L HLA-DRB3*01:01L
  REGION 1..14: note = CONT. FROM ABOVE: HLA-DPA1*02:01-B1*13:01L HLA-DRB1*16:01L HLA-D QA1*01:03-B1*06:01L HLA-DRB1*08:03L HLA-DRB1*15:03L
GQTVTKKSAAEASK

SEQ ID NO: 11823 - protein, 13 aa, Severe acute respiratory syndrome coronavirus 2
  REGION 1..13: note = Table B: HLA-DQA1*05:01-B1*03:01L HLA-DRB1*01:03L HLA-DRB1*04:05L HLA-DQA1*01:02-B1*06:02L HLA-DRB1*01:02L HLA-DRB1*08:01L HLA-DRB1*12:01L HLA-DRB1*16:01L HLA-DQA1*01:03-B1*06:01L HLA-DQA1*02:01-B1*03:03L
VTKKSAAEASKKP

SEQ ID NO: 11824 - protein, 15 aa, Severe acute respiratory syndrome coronavirus 2
  REGION 1..15: note = Table B: HLA-DQA1*05:01-B1*03:01L HLA-DRB1*13:02L HLA-DQA1*01:02-B1*06:02L HLA-DPA1*01:03-B1*03:01L HLA-DRB1*08:01L HLA-DRB1*11:01L HLA-DQA1*03:01-B1*03:02L HLA-DPA1*01:03-B1*104:01L HLA-DPA1*01:02-B1*04:01L
  REGION 1..15: note = CONT. FROM ABOVE: HLA-DRB1*16:01L HLA-DQA1*01:03-B1*06:01L HLA-D RB1*04:08L HLA-DRB1*15:03L
KPRQKRTATKAYNVT

SEQ ID NO: 11825 - protein, 12 aa, Severe acute respiratory syndrome coronavirus 2
  REGION 1..12: note = Table B: HLA-DQA1*05:01-B1*03:01L HLA-DRB1*04:05L HLA-DRB1*07:01L HLA-DRB1*04:08L
KAYNVTQAFGRR

SEQ ID NO: 11826 - protein, 13 aa, Severe acute respiratory syndrome coronavirus 2
  REGION 1..13: note = Table B: HLA-DQA1*05:01-B1*03:01L
AYNVTQAFGRRGP

SEQ ID NO: 11827 - protein, 12 aa, Severe acute respiratory syndrome coronavirus 2
  REGION 1..12: note = Table B: HLA-DQA1*05:01-B1*03:01L HLA-DRB1*01:03L HLA-DRB1*04:02L HLA-DQA1*01:02-B1*06:02L HLA-DRB1*01:02L HLA-DRB1*08:01L HLA-DQA1*03:01-B1*03:02L HLA-DRB1*14:17L HLA-DRB1*16:01L HLA-DQA1*01:03-B1*06:01L
  REGION 1..12: note = CONT. FROM ABOVE: HLA-DQA1*02:01-B1*03:03L
NVTQAFGRRGPE

SEQ ID NO: 11828 - protein, 12 aa, Severe acute respiratory syndrome coronavirus 2
  REGION 1..12: note = Table B: HLA-DQA1*05:01-B1*03:01L HLA-DQA1*01:02-B1*06:02L HLA-DQA1*03:01-B1*03:02L HLA-DQA1*01:03-B1*06:01L HLA-DQA1*02:01-B1*03:03L
VTQAFGRRGPEQ

SEQ ID NO: 11829 - protein, 14 aa, Severe acute respiratory syndrome coronavirus 2
  REGION 1..14: note = Table B: HLA-DQA1*05:01-B1*03:01L
RGPEQTQGNFGDQE

SEQ ID NO: 11830 - protein, 14 aa, Severe acute respiratory syndrome coronavirus 2
  REGION 1..14: note = Table B: HLA-DQA1*05:01-B1*03:01L HLA-DRB1*01:03L HLA-DRB1*04:02L HLA-DRB1*04:05L HLA-DQA1*01:02-B1*06:02L HLA-DRB1*01:02L HLA-DPA1*01:03-B1*03:01L HLA-DPA1*03:01-B1*04:02L HLA-DQA1*05:05-B1*03:19L
  REGION 1..14: note = CONT. FROM ABOVE: HLA-DRB1*12:01L HLA-DPA1*02:01-B1*13:01L HLA-D PA1*03:01-B1*105:01L HLA-DRB1*04:08L HLA-DRB1*15:03L
GPEQTQGNFGDQEL

SEQ ID NO: 11831 - protein, 12 aa, Severe acute respiratory syndrome coronavirus 2
  REGION 1..12: note = Table B: HLA-DQA1*05:01-B1*03:01L HLA-DRB1*13:03L HLA-DRB1*01:03L HLA-DRB1*04:02L HLA-DQA1*01:02-B1*06:02L HLA-DPA1*01:03-B1*03:01L HLA-DRB1*14:01L HLA-DQA1*01:01-B1*05:01L HLA-DQA1*05:05-B1*03:19L
  REGION 1..12: note = CONT. FROM ABOVE: HLA-DPA1*01:03-B1*04:02L HLA-DRB1*12:01L HLA-D PA1*03:01-B1*105:01L HLA-DQA1*05:05-B1*03:01L HLA-DPA1*01:02-B1* 04:01L
FGDQELIRQGTD

SEQ ID NO: 11832 - protein, 14 aa, Severe acute respiratory syndrome coronavirus 2
  REGION 1..14: note = Table B: HLA-DQA1*05:01-B1*03:01L HLA-DRB1*04:02L HLA-DPA1*01:03-B1*03:01L HLA-DRB3*01:01L HLA-DPA1*03:01-B1*105:01L HLA-DQA1*01:03-B1*06:01L
ELIRQGTDYKHWPQ

SEQ ID NO: 11833 - protein, 13 aa, Severe acute respiratory syndrome coronavirus 2
  REGION 1..13: note = Table B: HLA-DQA1*05:01-B1*03:01L HLA-DRB1*04:02L HLA-DRB1*04:05L HLA-DQA1*01:02-B1*06:02L HLA-DRB1*01:02L HLA-DRB4*03:01NL HLA-DQA1*01-B1*05L HLA-DQA1*05:01-B1*02:01L HLA-DRB1*04:10L HLA-DRB1*12:01L HLA-DRB1*14:54L
  REGION 1..13: note = CONT. FROM ABOVE: HLA-DQA1*05:05-B1*03:01L HLA-DRB1*16:01L HLA-D RB1*15:03L
WPQIAQFAPSASA

SEQ ID NO: 11834 - protein, 12 aa, Severe acute respiratory syndrome coronavirus 2
  REGION 1..12: note = Table B: HLA-DQA1*05:01-B1*03:01L HLA-DRB1*13:03L HLA-DPA1*03:01-B1*04:02L HLA-DRB1*11:04L HLA-DRB1*11:01L HLA-DQA1*05:05-B1*03:19L HLA-DPA1*01:03-B1*04:02L HLA-DQA1*05:05-B1*03:01L HLA-DPA1*01:02-B1*04:01L
  REGION 1..12: note = CONT. FROM ABOVE: HLA-DRB1*16:01L HLA-DRB1*04:08L HLA-DRB1*08:03 L HLA-DRB1*15:03L
SAFFGMSRIGME

SEQ ID NO: 11835 - protein, 13 aa, Severe acute respiratory syndrome coronavirus 2
  REGION 1..13: note = Table B: HLA-DQA1*05:01-B1*03:01L HLA-DRB1*13:02L HLA-DRB1*11:03L HLA-DRB1*11:04L HLA-DQA1*01:01-B1*05:01L HLA-DRB1*08:01L HLA-DRB1*12:02L HLA-DPA1*03:01-B1*105:01L HLA-DPA1*01:03-B1*104:01L HLA-DQA1*05:05-B1*03:01L
  REGION 1..13: note = CONT. FROM ABOVE: HLA-DRB1*07:01L HLA-DRB1*10:01L HLA-DQA1*01:03 -B1*06:01L HLA-DRB1*15:03L
GMSRIGMEVTPSG

SEQ ID NO: 11836 - protein, 10 aa, Severe acute respiratory syndrome coronavirus 2
  REGION 1..10: note = Table B: HLA-DQA1*05:01-B1*03:01L HLA-DRB1*13:03L HLA-DQA1*01:02-B1*06:02L HLA-DRB1*08:77L HLA-DPA1*01:03-B1*03:01L HLA-DRB1*03:01L HLA-DRB1*11:02L HLA-DRB1*14:02L HLA-DQA1*01-B1*05L HLA-DQA1*05:05-B1*03:19L
  REGION 1..10: note = CONT. FROM ABOVE: HLA-DQA1*05:01-B1*02:01L HLA-DRB4*01:01L HLA-D PA1*01:03-B1*04:01L HLA-DPA1*03:01-B1*105:01L HLA-DPA1*01:03-B1* 104:01L HLA-DRB1*10:01L HLA-DRB1*16:01L HLA-DQA1*02:01-B1*03:03L HLA-DRB1*15:03L
VTPSGTWLTY

SEQ ID NO: 11837 - protein, 10 aa, Severe acute respiratory syndrome coronavirus 2
  REGION 1..10: note = Table B: HLA-DQA1*05:01-B1*03:01L HLA-DRB1*01:02L HLA-DQA1*05:01-B1*02:01L HLA-DRB1*12:01L HLA-DPA1*03:01-B1*105:01L HLA-DRB1*16:01L HLA-DQA1*01:03-B1*06:01L HLA-DQA1*02:01-B1*03:03L
  REGION 1..10: note = CONT. FROM ABOVE: HLA-DRB1*15:03L
LTYTGAIKLD

SEQ ID NO: 11838 - protein, 11 aa, Severe acute respiratory syndrome coronavirus 2
  REGION 1..11: note = Table B: HLA-DQA1*05:01-B1*03:01L HLA-DRB1*04:05L HLA-DQA1*01:02-B1*06:02L HLA-DRB1*08:04L HLA-DPA1*01:02-B1*04:01L HLA-DRB1*16:01L HLA-DRB1*04:08L HLA-DRB1*08:03L
TYTGAIKLDDK

SEQ ID NO: 11839 - protein, 12 aa, Severe acute respiratory syndrome coronavirus 2
  REGION 1..12: note = Table B: HLA-DQA1*05:01-B1*03:01L HLA-DRB1*04:04L HLA-DQA1*01:02-B1*06:02L HLA-DRB3*02:01L HLA-DPA1*01:03-B1*03:01L HLA-DPA1*03:01-B1*04:02L HLA-DRB1*11:03L HLA-DRB1*14:02L HLA-DQA1*01:01-B1*05:01L
  REGION 1..12: note = CONT. FROM ABOVE: HLA-DRB5*01:01L HLA-DQA1*05:05-B1*03:19L HLA-D RB3*01:01L HLA-DPA1*02:01-B1*13:01L HLA-DPA1*03:01-B1*105:01L HL A-DQA1*05:05-B1*03:01L HLA-DRB1*10:01L HLA-DQA1*01:03-B1*06:01L
TGAIKLDDKDPN

SEQ ID NO: 11840 - protein, 13 aa, Severe acute respiratory syndrome coronavirus 2
  REGION 1..13: note = Table B: HLA-DQA1*05:01-B1*03:01L HLA-DRB3*02:01L HLA-DPA1*03:01-B1*04:02L HLA-DRB1*11:02L HLA-DQA1*05:05-B1*03:19L HLA-DRB4*02:01NL HLA-DRB1*09:01L HLA-DPA1*01:03-B1*04:02L HLA-DRB1*08:02L HLA-DRB1*15:01L
GAIKLDDKDPNFK

SEQ ID NO: 11841 - protein, 14 aa, Severe acute respiratory syndrome coronavirus 2
  REGION 1..14: note = Table B: HLA-DQA1*05:01-B1*03:01L HLA-DRB3*02:01L HLA-DPA1*03:01-B1*04:02L HLA-DRB1*11:02L HLA-DQA1*05:05-B1*03:19L HLA-DRB1*04:10L HLA-DPA1*01:03-B1*04:02L HLA-DQA1*01:03-B1*06:01L
AIKLDDKDPNFKDQ

SEQ ID NO: 11842 - protein, 10 aa, Severe acute respiratory syndrome coronavirus 2
  REGION 1..10: note = Table B: HLA-DQA1*05:01-B1*03:01L HLA-DRB1*01:03L HLA-DQA1*01:02-B1*06:02L HLA-DRB1*08:77L HLA-DPA1*01:03-B1*03:01L HLA-DRB1*03:01L HLA-DRB1*14:02L HLA-DQA1*01-B1*05L HLA-DQA1*05:05-B1*03:19L
  REGION 1..10: note = CONT. FROM ABOVE: HLA-DQA1*05:01-B1*02:01L HLA-DRB4*01:01L HLA-D PA1*01:03-B1*04:01L HLA-DQA1*05:05-B1*03:116L HLA-DPA1*01:03-B1* 04:02L HLA-DPA1*02:01-B1*13:01L HLA-DPA1*03:01-B1*105:01L HLA-DP A1*01:03-B1*104:01L HLA-DRB1*16:01L HLA-DQA1*01:03-B1*06:01L
  REGION 1..10: note = CONT. FROM ABOVE: HLA-DRB1*08:02L HLA-DQA1*02:01-B1*03:03L HLA-D RB1*15:03L
ILLNKHIDAY

SEQ ID NO: 11843 - protein, 10 aa, Severe acute respiratory syndrome coronavirus 2
  REGION 1..10: note = Table B: HLA-DQA1*05:01-B1*03:01L HLA-DRB1*04:03L HLA-DRB1*13:02L HLA-DRB1*13:03L HLA-DRB1*01:03L HLA-DRB1*04:02L HLA-DRB1*04:05L HLA-DRB4*03:01NL HLA-DRB1*08:01L HLA-DQA1*01-B1*05L HLA-DRB1*12:01L HLA-DQA1*03:01-B1*03:02L
  REGION 1..10: note = CONT. FROM ABOVE: HLA-DRB1*14:54L HLA-DRB1*14:17L HLA-DRB1*16:01 L HLA-DRB1*04:08L HLA-DQA1*02:01-B1*03:03L
YKTFPPTEPK

SEQ ID NO: 11844 - protein, 11 aa, Severe acute respiratory syndrome coronavirus 2
  REGION 1..11: note = Table B: HLA-DQA1*05:01-B1*03:01L HLA-DQA1*05:05-B1*03:19L HLA-DPA1*03:01-B1*105:01L HLA-DQA1*05:05-B1*03:01L
QQTVTLLPAAD

SEQ ID NO: 11845 - protein, 12 aa, Severe acute respiratory syndrome coronavirus 2
  REGION 1..12: note = Table B: HLA-DQA1*05:01-B1*03:01L HLA-DQA1*01:02-B1*06:02L HLA-DRB1*01:02L HLA-DQA1*05:05-B1*03:19L HLA-DPA1*03:01-B1*105:01L HLA-DQA1*05:05-B1*03:01L
TVTLLPAADLDD

SEQ ID NO: 11846 - protein, 13 aa, Severe acute respiratory syndrome coronavirus 2
  REGION 1..13: note = Table B: HLA-DQA1*05:01-B1*03:01L HLA-DRB1*13:03L HLA-DRB1*01:03L HLA-DRB1*04:04L HLA-DPA1*01:03-B1*03:01L HLA-DPA1*03:01-B1*04:02L HLA-DQA1*01:01-B1*05:01L HLA-DRB4*01:01L HLA-DRB1*04:08L HLA-DRB1*08:03L
VTLLPAADLDDFS

SEQ ID NO: 11847 - protein, 15 aa, Severe acute respiratory syndrome coronavirus 2
  REGION 1..15: note = Table B: HLA-DQA1*05:01-B1*03:01L HLA-DRB1*13:02L HLA-DRB1*13:03L HLA-DRB1*08:04L HLA-DPA1*01:03-B1*03:01L HLA-DPA1*03:01-B1*04:02L HLA-DRB1*14:01L HLA-DRB1*08:01L HLA-DRB3*01:01L HLA-DRB1*14:54L HLA-DPA1*01:02-B1*04:01L
  REGION 1..15: note = CONT. FROM ABOVE: HLA-DRB1*04:08L
LPAADLDDFSKQLQQ

SEQ ID NO: 11848 - protein, 13 aa, Severe acute respiratory syndrome coronavirus 2
  REGION 1..13: note = Table B: HLA-DQA1*05:01-B1*03:01L HLA-DRB1*13:03L HLA-DRB1*01:03L HLA-DQA1*01:02-B1*06:02L HLA-DRB1*08:04L HLA-DRB1*14:01L HLA-DRB1*08:01L HLA-DPA1*03:01-B1*105:01L HLA-DRB1*14:54L HLA-DRB1*16:01L HLA-DQA1*01:03-B1*06:01L
  REGION 1..13: note = CONT. FROM ABOVE: HLA-DRB1*04:08L HLA-DQA1*02:01-B1*03:03L
ADLDDFSKQLQQS

SEQ ID NO: 11849 - protein, 11 aa, Severe acute respiratory syndrome coronavirus 2
  REGION 1..11: note = Table B: HLA-DQA1*05:01-B1*03:01L HLA-DQA1*05:01-B1*02:01L HLA-DPA1*01:02-B1*04:01L HLA-DQA1*01:03-B1*06:01L HLA-DQA1*02:01-B1*03:03L
DDFSKQLQQSM

SEQ ID NO: 11850 - protein, 11 aa, Severe acute respiratory syndrome coronavirus 2
  REGION 1..11: note = Table B: HLA-DQA1*05:01-B1*03:01L HLA-DRB1*13:02L HLA-DRB1*04:02L HLA-DRB3*02:01L HLA-DPA1*01:03-B1*03:01L HLA-DRB1*14:01L HLA-DQA1*01-B1*05L HLA-DQA1*03:01-B1*03:02L HLA-DQA1*05:05-B1*03:01L HLA-DRB1*14:17L
  REGION 1..11: note = CONT. FROM ABOVE: HLA-DPA1*01:02-B1*04:01L HLA-DRB1*07:01L
GYINVFAFPFT

SEQ ID NO: 11851 - protein, 15 aa, Severe acute respiratory syndrome coronavirus 2
  REGION 1..15: note = Table B: HLA-DRB1*14:04L HLA-DRB3*02:01L HLA-DPA1*01:03-B1*04:02L HLA-DPA1*01:03-B1*02:01L HLA-DRB1*07:01L
VEEVLSEARQHLKDG

SEQ ID NO: 11852 - protein, 12 aa, Severe acute respiratory syndrome coronavirus 2
  REGION 1..12: note = Table B: HLA-DRB1*14:04L HLA-DRB1*04:05L HLA-DQA1*01:02-B1*06:02L HLA-DRB1*01:02L HLA-DRB1*08:04L HLA-DRB1*11:03L HLA-DRB1*11:04L HLA-DRB1*08:01L HLA-DRB1*11:01L HLA-DQA1*05:05-B1*03:19L HLA-DRB1*12:02L
  REGION 1..12: note = CONT. FROM ABOVE: HLA-DQA1*05:05-B1*03:01L HLA-DRB1*08:03L HLA-D RB1*15:03L
GLVEVEKGVLPQ

SEQ ID NO: 11853 - protein, 12 aa, Severe acute respiratory syndrome coronavirus 2
  REGION 1..12: note = Table B: HLA-DRB1*14:04L HLA-DRB1*04:04L HLA-DQA1*01:01-B1*05:01L HLA-DRB1*11:01L HLA-DRB5*01:01L HLA-DRB4*01:01L HLA-DPA1*01:03-B1*04:02L HLA-DRB3*01:01L HLA-DPA1*01:03-B1*104:01L HLA-DRB1*10:01L HLA-DRB1*08:03L
NSIIKTIQPRVE

SEQ ID NO: 11854 - protein, 12 aa, Severe acute respiratory syndrome coronavirus 2
  REGION 1..12: note = Table B: HLA-DRB1*14:04L HLA-DRB1*04:01L HLA-DRB1*04:04L HLA-DQA1*01:02-B1*06:02L HLA-DRB1*01:01L HLA-DRB3*02:01L HLA-DRB1*03:01L HLA-DRB1*11:02L HLA-DRB1*11:03L HLA-DQA1*01:01-B1*05:01L HLA-DRB1*08:01L HLA-DRB1*11:01L
  REGION 1..12: note = CONT. FROM ABOVE: HLA-DRB5*01:01L HLA-DQA1*05:05-B1*03:19L HLA-D RB1*13:01L HLA-DRB4*01:01L HLA-DPA1*01:03-B1*04:01L HLA-DRB1*04: 10L HLA-DRB1*09:01L HLA-DPA1*01:03-B1*04:02L HLA-DRB1*12:02L HLA -DPA1*02:01-B1*13:01L HLA-DPA1*01:03-B1*02:01L
  REGION 1..12: note = CONT. FROM ABOVE: HLA-DPA1*01:03-B1*104:01L HLA-DQA1*05:05-B1*03 :01L HLA-DRB1*07:01L HLA-DRB1*10:01L HLA-DRB1*08:03L HLA-DRB1*15 :01L
INIVGDFKLNEE

SEQ ID NO: 11855 - protein, 14 aa, Severe acute respiratory syndrome coronavirus 2
  REGION 1..14: note = Table B: HLA-DRB1*14:04L HLA-DRB1*08:03L
AQNSVRVLQKAAIT

SEQ ID NO: 11856 - protein, 14 aa, Severe acute respiratory syndrome coronavirus 2
  REGION 1..14: note = Table B: HLA-DRB1*14:04L HLA-DPA1*01:03-B1*03:01L HLA-DPA1*02:01-B1*13:01L
VGGQIVTCAKEIKE

SEQ ID NO: 11857 - protein, 14 aa, Severe acute respiratory syndrome coronavirus 2
  REGION 1..14: note = Table B: HLA-DRB1*14:04L HLA-DRB1*04:01L HLA-DRB1*01:01L HLA-DRB1*08:77L HLA-DRB3*02:01L HLA-DRB1*03:01L HLA-DRB1*11:02L HLA-DQA1*01:01-B1*05:01L HLA-DQA1*05:05-B1*03:116L HLA-DRB1*12:02L HLA-DRB3*01:01L HLA-DPA1*02:01-B1*13:01L
  REGION 1..14: note = CONT. FROM ABOVE: HLA-DPA1*01:03-B1*104:01L HLA-DRB1*07:01L HLA- DRB1*10:01L HLA-DRB1*08:02L HLA-DRB1*08:03L
DSIIIGGAKLKALN

SEQ ID NO: 11858 - protein, 13 aa, Severe acute respiratory syndrome coronavirus 2
  REGION 1..13: note = Table B: HLA-DRB1*14:04L HLA-DPA1*01:03-B1*02:01L
GETFVTHSKGLYR

SEQ ID NO: 11859 - protein, 14 aa, Severe acute respiratory syndrome coronavirus 2
  REGION 1..14: note = Table B: HLA-DRB1*14:04L HLA-DRB1*04:01L HLA-DRB1*01:01L HLA-DRB3*02:01L HLA-DRB1*14:02L HLA-DQA1*01:01-B1*05:01L HLA-DRB1*08:01L HLA-DRB1*11:01L HLA-DRB5*01:01L HLA-DRB4*01:01L HLA-DRB1*09:01L HLA-DRB3*01:01L HLA-DPA1*02:01-B1*13:01L
  REGION 1..14: note = CONT. FROM ABOVE: HLA-DPA1*01:03-B1*104:01L HLA-DRB1*07:01L HLA- DQA1*01:03-B1*06:01L HLA-DRB1*08:02L
TGDLQPLEQPTSEA

SEQ ID NO: 11860 - protein, 14 aa, Severe acute respiratory syndrome coronavirus 2
  REGION 1..14: note = Table B: HLA-DRB1*14:04L HLA-DRB1*04:04L HLA-DRB1*08:01L HLA-DRB1*11:01L HLA-DRB3*01:01L HLA-DPA1*02:01-B1*13:01L HLA-DPA1*01:03-B1*104:01L HLA-DPA1*01:02-B1*04:01L HLA-DRB1*10:01L HLA-DRB1*08:03L
APNMMVTNNTFTLK

SEQ ID NO: 11861 - protein, 14 aa, Severe acute respiratory syndrome coronavirus 2
  REGION 1..14: note = Table B: HLA-DRB1*14:04L HLA-DRB1*13:01L HLA-DQA1*05:05-B1*03:116L HLA-DRB1*08:02L
DDTVIEVQGYKSVN

SEQ ID NO: 11862 - protein, 11 aa, Severe acute respiratory syndrome coronavirus 2
  REGION 1..11: note = Table B: HLA-DRB1*14:04L HLA-DRB1*04:01L HLA-DRB1*08:04L HLA-DRB1*08:77L HLA-DRB3*02:01L HLA-DPA1*01:03-B1*03:01L HLA-DPA1*03:01-B1*04:02L HLA-DRB1*11:03L HLA-DRB1*11:04L HLA-DRB1*14:02L HLA-DQA1*01:01-B1*05:01L HLA-DRB1*08:01L
  REGION 1..11: note = CONT. FROM ABOVE: HLA-DRB5*01:01L HLA-DQA1*05:05-B1*03:19L HLA-D RB1*09:01L HLA-DRB3*01:01L HLA-DPA1*02:01-B1*13:01L HLA-DRB1*07: 01L HLA-DRB1*10:01L HLA-DRB1*08:03L
AVIKTLQPVSE

SEQ ID NO: 11863 - protein, 13 aa, Severe acute respiratory syndrome coronavirus 2
  REGION 1..13: note = Table B: HLA-DRB1*14:04L HLA-DRB1*11:02L HLA-DRB4*02:01NL HLA-DPA1*01:03-B1*02:01L HLA-DRB1*15:01L
ATYYLFDESGEFK

SEQ ID NO: 11864 - protein, 14 aa, Severe acute respiratory syndrome coronavirus 2
  REGION 1..14: note = Table B: HLA-DRB1*14:04L HLA-DRB1*04:01L HLA-DRB1*11:03L HLA-DRB1*14:02L HLA-DRB1*08:01L HLA-DRB4*01:01L HLA-DRB1*09:01L HLA-DPA1*01:03-B1*04:02L HLA-DPA1*01:02-B1*04:01L HLA-DRB1*07:01L
IQTIVEVQPQLEME

SEQ ID NO: 11865 - protein, 14 aa, Severe acute respiratory syndrome coronavirus 2
  REGION 1..14: note = Table B: HLA-DRB1*14:04L HLA-DPA1*01:03-B1*03:01L HLA-DPA1*03:01-B1*04:02L HLA-DRB1*08:01L HLA-DRB5*01:01L HLA-DQA1*05:05-B1*03:19L HLA-DRB4*01:01L HLA-DRB1*09:01L HLA-DRB3*01:01L HLA-DPA1*02:01-B1*13:01L
  REGION 1..14: note = CONT. FROM ABOVE: HLA-DPA1*01:03-B1*104:01L HLA-DRB1*07:01L HLA- DQA1*01:03-B1*06:01L
VQPQLEMELTPVVQ

SEQ ID NO: 11866 - protein, 13 aa, Severe acute respiratory syndrome coronavirus 2
  REGION 1..13: note = Table B: HLA-DRB1*14:04L HLA-DRB1*04:04L HLA-DRB1*08:04L HLA-DRB1*11:04L HLA-DQA1*01:01-B1*05:01L HLA-DPA1*01:03-B1*104:01L HLA-DRB1*10:01L HLA-DRB1*08:03L
TPVVQTIEVNSFS

SEQ ID NO: 11867 - protein, 13 aa, Severe acute respiratory syndrome coronavirus 2
  REGION 1..13: note = Table B: HLA-DRB1*14:04L HLA-DRB1*04:01L HLA-DRB1*01:01L HLA-DRB4*01:01L HLA-DPA1*01:03-B1*02:01L HLA-DPA1*01:03-B1*104:01L HLA-DRB1*08:02L
DNVYIKNADIVEE

SEQ ID NO: 11868 - protein, 13 aa, Severe acute respiratory syndrome coronavirus 2
  REGION 1..13: note = Table B: HLA-DRB1*14:04L HLA-DRB1*04:04L HLA-DRB1*11:03L HLA-DRB1*08:03L
ADIVEEAKKVKPT

SEQ ID NO: 11869 - protein, 13 aa, Severe acute respiratory syndrome coronavirus 2
  REGION 1..13: note = Table B: HLA-DRB1*14:04L HLA-DRB1*11:04L HLA-DRB1*08:01L HLA-DRB1*04:10L HLA-DRB1*09:01L HLA-DRB3*01:01L HLA-DRB1*04:08L HLA-DRB1*08:03L
VKPTVVVNAANVY

SEQ ID NO: 11870 - protein, 14 aa, Severe acute respiratory syndrome coronavirus 2
  REGION 1..14: note = Table B: HLA-DRB1*14:04L HLA-DRB1*04:01L HLA-DRB1*01:01L HLA-DRB1*08:01L HLA-DRB1*11:01L HLA-DRB5*01:01L HLA-DRB1*13:01L HLA-DRB1*08:03L
KPTVVVNAANVYLK

SEQ ID NO: 11871 - protein, 12 aa, Severe acute respiratory syndrome coronavirus 2
  REGION 1..12: note = Table B: HLA-DRB1*14:04L HLA-DRB1*01:01L
GALNKATNNAMQ

SEQ ID NO: 11872 - protein, 12 aa, Severe acute respiratory syndrome coronavirus 2
  REGION 1..12: note = Table B: HLA-DRB1*14:04L HLA-DRB1*04:01L HLA-DRB1*11:02L HLA-DRB4*02:01NL HLA-DRB1*13:01L HLA-DRB4*01:01L HLA-DPA1*01:03-B1*04:01L HLA-DRB1*08:02L HLA-DRB1*15:01L
DYIATNGPLKVG

SEQ ID NO: 11873 - protein, 12 aa, Severe acute respiratory syndrome coronavirus 2
  REGION 1..12: note = Table B: HLA-DRB1*14:04L HLA-DRB1*04:01L HLA-DRB1*04:04L HLA-DRB1*01:01L HLA-DRB1*03:01L HLA-DRB1*11:02L HLA-DQA1*01:01-B1*05:01L HLA-DRB1*08:01L HLA-DRB1*11:01L HLA-DRB5*01:01L HLA-DQA1*01-B1*05L HLA-DRB4*02:01NL
  REGION 1..12: note = CONT. FROM ABOVE: HLA-DRB5*02:02L HLA-DRB1*13:01L HLA-DRB4*01:01 L HLA-DPA1*01:03-B1*04:01L HLA-DQA1*05:05-B1*03:116L HLA-DRB1*04 :10L HLA-DRB1*09:01L HLA-DPA1*01:03-B1*04:02L HLA-DRB3*01:01L HL A-DPA1*02:01-B1*13:01L HLA-DPA1*01:03-B1*02:01L
  REGION 1..12: note = CONT. FROM ABOVE: HLA-DPA1*01:03-B1*104:01L HLA-DRB1*10:01L HLA- DRB1*08:02L HLA-DRB1*08:03L HLA-DRB1*15:01L
IATNGPLKVGGS

SEQ ID NO: 11874 - protein, 13 aa, Severe acute respiratory syndrome coronavirus 2
  REGION 1..13: note = Table B: HLA-DRB1*14:04L HLA-DRB1*04:01L HLA-DRB1*01:01L HLA-DRB1*11:01L HLA-DRB5*01:01L HLA-DRB1*09:01L HLA-DRB1*07:01L
GEDIQLLKSAYEN

SEQ ID NO: 11875 - protein, 13 aa, Severe acute respiratory syndrome coronavirus 2
  REGION 1..13: note = Table B: HLA-DRB1*14:04L
SAGIFGADPIHSL

SEQ ID NO: 11876 - protein, 12 aa, Severe acute respiratory syndrome coronavirus 2
  REGION 1..12: note = Table B: HLA-DRB1*14:04L HLA-DRB4*02:01NL
GIFGADPIHSLR

SEQ ID NO: 11877 - protein, 16 aa, Severe acute respiratory syndrome coronavirus 2
  REGION 1..16: note = Table B: HLA-DRB1*14:04L
VEQKIAEIPKEEVKPF

SEQ ID NO: 11878 - protein, 14 aa, Severe acute respiratory syndrome coronavirus 2
  REGION 1..14: note = Table B: HLA-DRB1*14:04L HLA-DRB1*01:01L HLA-DRB1*03:01L HLA-DRB1*11:02L HLA-DRB5*01:01L HLA-DRB1*13:01L HLA-DPA1*01:03-B1*02:01L HLA-DPA1*01:03-B1*104:01L
VKPFITESKPSVEQ

SEQ ID NO: 11879 - protein, 14 aa, Severe acute respiratory syndrome coronavirus 2
  REGION 1..14: note = Table B: HLA-DRB1*14:04L HLA-DRB1*11:02L HLA-DRB4*02:01NL HLA-DPA1*01:03-B1*04:01L HLA-DPA1*01:03-B1*02:01L
NGNLHPDSATLVSD

SEQ ID NO: 11880 - protein, 15 aa, Severe acute respiratory syndrome coronavirus 2
  REGION 1..15: note = Table B: HLA-DRB1*14:04L HLA-DRB4*02:01NL HLA-DRB5*02:02L HLA-DRB1*15:01L
GNLHPDSATLVSDID

SEQ ID NO: 11881 - protein, 15 aa, Severe acute respiratory syndrome coronavirus 2
  REGION 1..15: note = Table B: HLA-DRB1*14:04L HLA-DRB4*02:01NL
DAPYIVGDVVQEGVL

SEQ ID NO: 11882 - protein, 13 aa, Severe acute respiratory syndrome coronavirus 2
  REGION 1..13: note = Table B: HLA-DRB1*14:04L HLA-DRB1*08:77L HLA-DPA1*03:01-B1*04:02L HLA-DRB1*11:02L HLA-DQA1*05:05-B1*03:116L HLA-DPA1*01:03-B1*04:02L HLA-DRB1*12:02L HLA-DPA1*03:01-B1*105:01L
  REGION 1..13: note = CONT. FROM ABOVE: HLA-DPA1*01:03-B1*02:01L HLA-DRB1*10:01L
AVVIPTKKAGGTT

SEQ ID NO: 11883 - protein, 14 aa, Severe acute respiratory syndrome coronavirus 2
  REGION 1..14: note = Table B: HLA-DRB1*14:04L HLA-DRB1*04:01L HLA-DRB1*03:01L HLA-DRB4*02:01NL HLA-DRB1*13:01L HLA-DQA1*05:05-B1*03:116L HLA-DPA1*01:03-B1*02:01L HLA-DRB1*08:02L
DNYITTYPGQGLNG

SEQ ID NO: 11884 - protein, 13 aa, Severe acute respiratory syndrome coronavirus 2
  REGION 1..13: note = Table B: HLA-DRB1*14:04L HLA-DRB1*01:03L HLA-DRB1*04:05L HLA-DRB1*01:02L HLA-DRB4*03:01NL HLA-DPA1*01:03-B1*03:01L HLA-DRB1*03:01L HLA-DRB1*11:03L HLA-DRB1*11:04L HLA-DRB1*08:01L HLA-DRB1*11:01L HLA-DRB5*01:01L HLA-DRB1*09:01L HLA-DRB3*01:01L
  REGION 1..13: note = CONT. FROM ABOVE: HLA-DPA1*03:01-B1*105:01L HLA-DQA1*05:05-B1*03 :01L HLA-DRB1*10:01L HLA-DRB1*04:08L HLA-DRB1*08:03L
LPSIISNEKQEIL

SEQ ID NO: 11885 - protein, 13 aa, Severe acute respiratory syndrome coronavirus 2
  REGION 1..13: note = Table B: HLA-DRB1*14:04L HLA-DRB1*11:02L HLA-DRB1*08:01L HLA-DRB5*01:01L HLA-DRB1*13:01L HLA-DRB4*01:01L HLA-DRB1*09:01L HLA-DPA1*01:03-B1*04:02L HLA-DRB1*08:02L
PSIISNEKQEILG

SEQ ID NO: 11886 - protein, 14 aa, Severe acute respiratory syndrome coronavirus 2
  REGION 1..14: note = Table B: HLA-DRB1*14:04L HLA-DRB1*08:77L HLA-DRB1*11:02L HLA-DRB1*14:02L HLA-DRB1*11:01L HLA-DRB4*01:01L HLA-DPA1*01:03-B1*02:01L HLA-DRB1*08:02L
YKGIKIQEGVVDYG

SEQ ID NO: 11887 - protein, 14 aa, Severe acute respiratory syndrome coronavirus 2
  REGION 1..14: note = Table B: HLA-DRB1*14:04L HLA-DRB1*01:01L HLA-DRB1*08:77L HLA-DRB1*03:01L HLA-DRB1*14:02L HLA-DRB4*01:01L HLA-DRB1*09:01L HLA-DPA1*01:03-B1*02:01L
GIKIQEGVVDYGAR

SEQ ID NO: 11888 - protein, 14 aa, Severe acute respiratory syndrome coronavirus 2
  REGION 1..14: note = Table B: HLA-DRB1*14:04L HLA-DRB1*08:77L HLA-DRB3*02:01L HLA-DPA1*01:03-B1*03:01L HLA-DPA1*03:01-B1*04:02L HLA-DRB1*14:02L HLA-DQA1*01:01-B1*05:01L HLA-DRB1*08:01L HLA-DRB5*01:01L HLA-DRB4*01:01L HLA-DRB1*09:01L HLA-DRB3*01:01L
  REGION 1..14: note = CONT. FROM ABOVE: HLA-DPA1*02:01-B1*13:01L HLA-DPA1*01:03-B1*104 :01L HLA-DRB1*07:01L
VASLINTLNDLNET

SEQ ID NO: 11889 - protein, 13 aa, Severe acute respiratory syndrome coronavirus 2
  REGION 1..13: note = Table B: HLA-DRB1*14:04L HLA-DRB1*01:01L HLA-DQA1*05:05-B1*03:116L HLA-DRB3*01:01L HLA-DPA1*01:03-B1*02:01L HLA-DPA1*01:03-B1*104:01L
NGYLTSSSKTPEE

SEQ ID NO: 11890 - protein, 14 aa, Severe acute respiratory syndrome coronavirus 2
  REGION 1..14: note = Table B: HLA-DRB1*14:04L HLA-DRB1*11:02L HLA-DRB4*02:01NL HLA-DRB1*13:01L HLA-DPA1*01:03-B1*02:01L HLA-DRB1*08:02L
DKSVYYTSNPTTFH

SEQ ID NO: 11891 - protein, 16 aa, Severe acute respiratory syndrome coronavirus 2
  REGION 1..16: note = Table B: HLA-DRB1*14:04L HLA-DRB4*02:01NL HLA-DPA1*01:03-B1*02:01L HLA-DRB1*15:01L
NPTTFHLDGEVITFDN

SEQ ID NO: 11892 - protein, 13 aa, Severe acute respiratory syndrome coronavirus 2
  REGION 1..13: note = Table B: HLA-DRB1*14:04L HLA-DRB1*04:01L HLA-DRB1*01:01L HLA-DRB1*11:02L HLA-DRB1*11:01L HLA-DPA1*01:03-B1*02:01L
DGEVITFDNLKTL

SEQ ID NO: 11893 - protein, 13 aa, Severe acute respiratory syndrome coronavirus 2
  REGION 1..13: note = Table B: HLA-DRB1*14:04L HLA-DRB1*01:01L HLA-DRB1*03:01L HLA-DRB1*11:02L HLA-DRB1*11:01L HLA-DRB5*01:01L HLA-DRB1*13:01L HLA-DPA1*01:03-B1*02:01L HLA-DRB1*08:02L HLA-DRB1*15:01L
INLHTQVVDMSMT

SEQ ID NO: 11894 - protein, 15 aa, Severe acute respiratory syndrome coronavirus 2
  REGION 1..15: note = Table B: HLA-DRB1*14:04L HLA-DRB1*04:01L HLA-DRB1*01:01L HLA-DRB1*03:01L HLA-DRB1*11:02L HLA-DRB1*11:04L HLA-DRB1*08:01L HLA-DRB1*11:01L HLA-DRB3*01:01L HLA-DPA1*01:03-B1*104:01L HLA-DRB1*10:01L HLA-DRB1*15:01L
YPQVNGLTSIKWADN

SEQ ID NO: 11895 - protein, 14 aa, Severe acute respiratory syndrome coronavirus 2
  REGION 1..14: note = Table B: HLA-DRB1*14:04L HLA-DRB1*13:02L HLA-DRB1*01:03L HLA-DRB1*04:04L HLA-DRB4*03:01NL HLA-DRB1*08:04L HLA-DRB1*11:03L HLA-DRB1*11:04L HLA-DRB1*09:01L HLA-DQA1*01:03-B1*06:01L HLA-DRB1*04:08L HLA-DRB1*08:03L
VEAVMYMGTLSYEQ

SEQ ID NO: 11896 - protein, 14 aa, Severe acute respiratory syndrome coronavirus 2
  REGION 1..14: note = Table B: HLA-DRB1*14:04L HLA-DRB1*04:03L HLA-DRB1*13:02L HLA-DRB1*13:03M HLA-DRB1*04:02L HLA-DRB1*04:04L HLA-DRB1*01:02L HLA-DRB4*03:01NL HLA-DRB1*08:04L HLA-DRB3*02:01L HLA-DRB1*11:03L HLA-DRB1*11:04L HLA-DQA1*01:01-B1*05:01L HLA-DRB1*11:01L
  REGION 1..14: note = CONT. FROM ABOVE: HLA-DQA1*01-B1*05L HLA-DRB1*04:10L HLA-DRB1*09 :01L HLA-DRB1*12:02L HLA-DRB3*01:01L HLA-DRB1*14:54L HLA-DPA1*01 :03-B1*02:01L HLA-DPA1*01:03-B1*104:01L HLA-DQA1*05:05-B1*03:01L HLA-DRB1*14:17L HLA-DRB1*07:01L HLA-DRB1*10:01L HLA-DRB1*04:08M
  REGION 1..14: note = CONT. FROM ABOVE: HLA-DRB1*08:03L
APPAQYELKHGTFT

SEQ ID NO: 11897 - protein, 12 aa, Severe acute respiratory syndrome coronavirus 2
  REGION 1..12: note = Table B: HLA-DRB1*14:04L HLA-DRB1*04:04L HLA-DRB5*01:01L HLA-DRB1*09:01L HLA-DRB3*01:01L HLA-DPA1*01:03-B1*104:01L HLA-DRB1*07:01L HLA-DRB1*08:02L
ENSYTTTIKPVT

SEQ ID NO: 11898 - protein, 13 aa, Severe acute respiratory syndrome coronavirus 2
  REGION 1..13: note = Table B: HLA-DRB1*14:04L HLA-DRB1*04:04L HLA-DQA1*01:02-B1*06:02L HLA-DRB1*08:04L HLA-DRB1*11:03L HLA-DRB1*11:04L HLA-DRB1*14:02L HLA-DRB1*08:01L HLA-DRB1*09:01L HLA-DPA1*02:01-B1*13:01L HLA-DPA1*03:01-B1*105:01L
  REGION 1..13: note = CONT. FROM ABOVE: HLA-DQA1*05:05-B1*03:01L HLA-DPA1*01:02-B1*04: 01L HLA-DRB1*07:01L HLA-DRB1*10:01L HLA-DQA1*01:03-B1*06:01L HLA -DRB1*08:03L
EQPIDLVPNQPYP

SEQ ID NO: 11899 - protein, 12 aa, Severe acute respiratory syndrome coronavirus 2
  REGION 1..12: note = Table B: HLA-DRB1*14:04L HLA-DRB1*04:01L HLA-DQA1*01:02-B1*06:02L HLA-DRB1*01:01L HLA-DPA1*03:01-B1*04:02L HLA-DRB1*03:01L HLA-DQA1*01:01-B1*05:01L HLA-DRB1*08:01L HLA-DRB1*11:01L
  REGION 1..12: note = CONT. FROM ABOVE: HLA-DRB5*01:01L HLA-DRB1*13:01L HLA-DRB4*01:01 L HLA-DRB1*09:01L HLA-DPA1*01:03-B1*04:02L HLA-DRB3*01:01L HLA-D PA1*02:01-B1*13:01L HLA-DPA1*03:01-B1*105:01L HLA-DQA1*05:05-B1* 03:01L HLA-DPA1*01:02-B1*04:01L HLA-DRB1*07:01L
  REGION 1..12: note = CONT. FROM ABOVE: HLA-DQA1*01:03-B1*06:01L HLA-DRB1*15:01L
PIDLVPNQPYPN

SEQ ID NO: 11900 - protein, 14 aa, Severe acute respiratory syndrome coronavirus 2
  REGION 1..14: note = Table B: HLA-DRB1*14:04L HLA-DRB1*01:01L HLA-DRB3*02:01L HLA-DRB1*11:02L HLA-DQA1*01:01-B1*05:01L HLA-DRB1*11:01L HLA-DRB5*01:01L HLA-DQA1*05:05-B1*03:19L HLA-DRB1*13:01L HLA-DPA1*01:03-B1*04:01L HLA-DPA1*01:03-B1*04:02L
  REGION 1..14: note = CONT. FROM ABOVE: HLA-DPA1*01:03-B1*02:01L HLA-DPA1*01:03-B1*104 :01L HLA-DRB1*07:01L HLA-DRB1*08:02L HLA-DRB1*15:01L
DNIKFADDLNQLTG

SEQ ID NO: 11901 - protein, 13 aa, Severe acute respiratory syndrome coronavirus 2
  REGION 1..13: note = Table B: HLA-DRB1*14:04L HLA-DRB1*03:01L HLA-DRB1*11:02L HLA-DRB4*02:01NL HLA-DRB1*13:01L HLA-DPA1*01:03-B1*04:01L HLA-DPA1*01:03-B1*04:02L HLA-DPA1*01:03-B1*02:01L HLA-DRB1*08:02L HLA-DRB1*15:01L
DVLKSEDAQGMDN

SEQ ID NO: 11902 - protein, 13 aa, Severe acute respiratory syndrome coronavirus 2
  REGION 1..13: note = Table B: HLA-DRB1*14:04L HLA-DRB1*04:04L HLA-DRB1*11:01L HLA-DPA1*02:01-B1*13:01L HLA-DRB1*07:01L
VGDIILKPANNSL

SEQ ID NO: 11903 - protein, 13 aa, Severe acute respiratory syndrome coronavirus 2
  REGION 1..13: note = Table B: HLA-DRB1*14:04L HLA-DRB1*01:01L HLA-DRB1*03:01L HLA-DRB1*11:02L HLA-DRB5*01:01L HLA-DPA1*01:03-B1*104:01L HLA-DRB1*07:01L HLA-DRB1*08:02L HLA-DRB1*15:01L
GDIILKPANNSLK

SEQ ID NO: 11904 - protein, 14 aa, Severe acute respiratory syndrome coronavirus 2
  REGION 1..14: note = Table B: HLA-DRB1*14:04L HLA-DRB1*13:01L HLA-DRB1*08:02L
AAYVDNSSLTIKKP

SEQ ID NO: 11905 - protein, 13 aa, Severe acute respiratory syndrome coronavirus 2
  REGION 1..13: note = Table B: HLA-DRB1*14:04L HLA-DRB1*11:02L HLA-DPA1*01:03-B1*04:01L HLA-DRB1*09:01L HLA-DPA1*01:03-B1*02:01L HLA-DPA1*01:03-B1*104:01L HLA-DRB1*08:02L
YVDNSSLTIKKPN

SEQ ID NO: 11906 - protein, 13 aa, Severe acute respiratory syndrome coronavirus 2
  REGION 1..13: note = Table B: HLA-DRB1*14:04L HLA-DRB1*13:03L HLA-DRB1*01:03L HLA-DRB1*04:04L HLA-DRB1*04:05L HLA-DRB4*03:01NL HLA-DRB1*08:04L HLA-DRB1*11:03L HLA-DRB1*14:02L HLA-DQA1*01-B1*05L HLA-DRB1*04:10L HLA-DRB1*09:01L HLA-DPA1*02:01-B1*13:01L
  REGION 1..13: note = CONT. FROM ABOVE: HLA-DPA1*01:03-B1*104:01L HLA-DPA1*01:02-B1*04 :01L HLA-DRB1*07:01L HLA-DRB1*10:01L HLA-DRB1*04:08L
THGLAAVNSVPWD

SEQ ID NO: 11907 - protein, 12 aa, Severe acute respiratory syndrome coronavirus 2
  REGION 1..12: note = Table B: HLA-DRB1*14:04L HLA-DRB1*04:01L HLA-DQA1*01:02-B1*06:02L HLA-DRB1*01:01L HLA-DRB1*03:01L HLA-DRB1*08:01L HLA-DRB1*11:01L HLA-DQA1*01-B1*05L HLA-DRB4*02:01NL HLA-DRB1*13:01L HLA-DRB4*01:01L
  REGION 1..12: note = CONT. FROM ABOVE: HLA-DPA1*01:03-B1*04:01L HLA-DPA1*01:03-B1*04: 02L HLA-DRB3*01:01L HLA-DPA1*02:01-B1*13:01L HLA-DPA1*01:03-B1*1 04:01L HLA-DPA1*01:02-B1*04:01L HLA-DRB1*15:01L
NKVVSTTTNIVT

SEQ ID NO: 11908 - protein, 13 aa, Severe acute respiratory syndrome coronavirus 2
  REGION 1..13: note = Table B: HLA-DRB1*14:04L HLA-DRB1*11:02L HLA-DQA1*01:01-B1*05:01L HLA-DRB1*11:01L HLA-DRB1*08:02L HLA-DRB1*15:01L
EASFNYLKSPNFS

SEQ ID NO: 11909 - protein, 14 aa, Severe acute respiratory syndrome coronavirus 2
  REGION 1..14: note = Table B: HLA-DRB1*14:04L HLA-DRB1*03:01L HLA-DQA1*01:01-B1*05:01L HLA-DRB4*02:01NL HLA-DRB1*13:01L HLA-DPA1*01:03-B1*02:01L HLA-DRB1*08:02L HLA-DRB1*15:01L
REGYLNSTNVTIAT

SEQ ID NO: 11910 - protein, 14 aa, Severe acute respiratory syndrome coronavirus 2
  REGION 1..14: note = Table B: HLA-DRB1*14:04L HLA-DRB1*15:01L
AGSTFISDEVARDL

SEQ ID NO: 11911 - protein, 13 aa, Severe acute respiratory syndrome coronavirus 2
  REGION 1..13: note = Table B: HLA-DRB1*14:04L HLA-DRB1*11:02L HLA-DRB4*02:01NL HLA-DRB1*15:01L
STFISDEVARDLS

SEQ ID NO: 11912 - protein, 15 aa, Severe acute respiratory syndrome coronavirus 2
  REGION 1..15: note = Table B: HLA-DRB1*14:04L HLA-DRB1*11:02L HLA-DRB1*08:02L
DQSSYIVDSVTVKNG

SEQ ID NO: 11913 - protein, 13 aa, Severe acute respiratory syndrome coronavirus 2
  REGION 1..13: note = Table B: HLA-DRB1*14:04L HLA-DRB1*04:04L HLA-DRB1*08:04L HLA-DRB1*08:77L HLA-DRB3*02:01L HLA-DPA1*01:03-B1*03:01L HLA-DRB1*11:04L HLA-DRB1*14:02L HLA-DRB1*11:01L HLA-DPA1*01:03-B1*04:02L HLA-DRB1*12:02L HLA-DRB3*01:01L
  REGION 1..13: note = CONT. FROM ABOVE: HLA-DPA1*02:01-B1*13:01L HLA-DPA1*01:03-B1*104 :01L HLA-DRB1*07:01L HLA-DRB1*08:03L HLA-DRB1*15:03L
IVDSVTVKNGSIH

SEQ ID NO: 11914 - protein, 16 aa, Severe acute respiratory syndrome coronavirus 2
  REGION 1..16: note = Table B: HLA-DRB1*14:04L HLA-DRB1*08:02L
LDQALVSDVGDSAEVA

SEQ ID NO: 11915 - protein, 13 aa, Severe acute respiratory syndrome coronavirus 2
  REGION 1..13: note = Table B: HLA-DRB1*14:04L HLA-DRB1*04:01L HLA-DRB1*04:04L HLA-DRB1*01:01L HLA-DRB1*03:01L HLA-DRB1*11:02L HLA-DQA1*01:01-B1*05:01L HLA-DRB1*11:01L HLA-DRB4*02:01NL HLA-DRB1*13:01L HLA-DPA1*01:03-B1*04:02L
  REGION 1..13: note = CONT. FROM ABOVE: HLA-DPA1*01:03-B1*02:01L HLA-DRB1*08:02L HLA-D RB1*15:01L
VNTFSSTFNVPME

SEQ ID NO: 11916 - protein, 15 aa, Severe acute respiratory syndrome coronavirus 2
  REGION 1..15: note = Table B: HLA-DRB1*14:04L
LKTLVATAEAELAKN

SEQ ID NO: 11917 - protein, 14 aa, Severe acute respiratory syndrome coronavirus 2
  REGION 1..14: note = Table B: HLA-DRB1*14:04L HLA-DRB1*04:01L HLA-DRB1*01:01L HLA-DRB1*08:77L HLA-DRB1*11:02L HLA-DRB1*11:03L HLA-DRB1*11:04L HLA-DRB1*14:02L HLA-DRB1*11:01L HLA-DRB4*02:01NL HLA-DRB4*01:01L HLA-DPA1*01:03-B1*04:01L HLA-DQA1*05:05-B1*03:116L
  REGION 1..14: note = CONT. FROM ABOVE: HLA-DRB1*09:01L HLA-DRB1*12:02L HLA-DRB3*01:01 L HLA-DPA1*01:03-B1*02:01L HLA-DPA1*01:03-B1*104:01L HLA-DRB1*07 :01L HLA-DRB1*10:01L HLA-DRB1*08:02L
DNVLSTFISAARQG

SEQ ID NO: 11918 - protein, 13 aa, Severe acute respiratory syndrome coronavirus 2
  REGION 1..13: note = Table B: HLA-DRB1*14:04L HLA-DRB1*04:04L HLA-DRB1*03:01L HLA-DRB5*01:01L HLA-DRB1*13:01L HLA-DRB1*04:10L HLA-DRB1*07:01L HLA-DRB1*10:01L
STFISAARQGFVD

SEQ ID NO: 11919 - protein, 13 aa, Severe acute respiratory syndrome coronavirus 2
  REGION 1..13: note = Table B: HLA-DRB1*14:04L HLA-DRB1*04:04L HLA-DRB1*08:04L HLA-DRB1*11:03L HLA-DRB1*11:04L HLA-DQA1*01-B1*05L HLA-DRB3*01:01L HLA-DRB1*07:01L
TRQVVNVVTTKIA

SEQ ID NO: 11920 - protein, 15 aa, Severe acute respiratory syndrome coronavirus 2
  REGION 1..15: note = Table B: HLA-DRB1*14:04L HLA-DRB1*13:01L HLA-DQA1*05:05-B1*03:116L
SSEIIGYKAIDGGVT

SEQ ID NO: 11921 - protein, 14 aa, Severe acute respiratory syndrome coronavirus 2
  REGION 1..14: note = Table B: HLA-DRB1*14:04L HLA-DQA1*01:01-B1*05:01L HLA-DRB4*02:01NL HLA-DRB5*02:02L HLA-DRB1*13:01L HLA-DQA1*05:05-B1*03:116L HLA-DRB1*08:02L HLA-DRB1*15:01L
GGSYTNDKACPLIA

SEQ ID NO: 11922 - protein, 16 aa, Severe acute respiratory syndrome coronavirus 2
  REGION 1..16: note = Table B: HLA-DRB1*14:04L HLA-DRB1*03:01L HLA-DRB1*11:02L HLA-DRB4*01:01L HLA-DRB1*09:01L HLA-DRB1*08:02L
TNVLEGSVAYESLRPD

SEQ ID NO: 11923 - protein, 15 aa, Severe acute respiratory syndrome coronavirus 2
  REGION 1..15: note = Table B: HLA-DRB1*14:04L HLA-DRB1*11:02L HLA-DQA1*01:01-B1*05:01L HLA-DPA1*01:03-B1*04:02L HLA-DPA1*01:03-B1*02:01L HLA-DRB1*08:02L
RPDTRYVLMDGSIIQ

SEQ ID NO: 11924 - protein, 14 aa, Severe acute respiratory syndrome coronavirus 2
  REGION 1..14: note = Table B: HLA-DRB1*14:04L HLA-DRB1*13:01L HLA-DPA1*01:03-B1*02:01L HLA-DRB1*08:02L
DGSIIQFPNTYLEG

SEQ ID NO: 11925 - protein, 13 aa, Severe acute respiratory syndrome coronavirus 2
  REGION 1..13: note = Table B: HLA-DRB1*14:04L HLA-DRB1*13:02L HLA-DRB1*01:03L HLA-DRB1*04:04L HLA-DRB1*04:05L HLA-DQA1*01:02-B1*06:02L HLA-DRB1*08:04L HLA-DRB1*08:77L HLA-DRB3*02:01L HLA-DPA1*01:03-B1*03:01L HLA-DPA1*03:01-B1*04:02L
  REGION 1..13: note = CONT. FROM ABOVE: HLA-DRB1*11:03L HLA-DRB1*11:04L HLA-DRB1*14:02 L HLA-DQA1*01:01-B1*05:01L HLA-DRB1*08:01L HLA-DQA1*05:05-B1*03: 19L HLA-DRB4*01:01L HLA-DPA1*01:03-B1*04:01L HLA-DRB1*04:10L HLA -DRB1*09:01L HLA-DRB1*12:02M HLA-DRB3*01:01L
  REGION 1..13: note = CONT. FROM ABOVE: HLA-DPA1*02:01-B1*13:01L HLA-DRB1*14:54L HLA-D PA1*01:03-B1*104:01L HLA-DQA1*05:05-B1*03:01L HLA-DPA1*01:02-B1* 04:01L HLA-DRB1*07:01L HLA-DRB1*10:01L HLA-DQA1*01:03-B1*06:01L HLA-DRB1*04:08L HLA-DRB1*08:03L
TPLIQPIGALDIS

SEQ ID NO: 11926 - protein, 15 aa, Severe acute respiratory syndrome coronavirus 2
  REGION 1..15: note = Table B: HLA-DRB1*14:04L HLA-DRB3*02:01L HLA-DPA1*03:01-B1*04:02L HLA-DRB1*03:01L HLA-DRB1*11:02L HLA-DRB4*01:01L HLA-DPA1*01:03-B1*04:01L HLA-DQA1*05:05-B1*03:116L HLA-DPA1*01:03-B1*02:01L
  REGION 1..15: note = CONT. FROM ABOVE: HLA-DRB1*07:01L
GPFVDRQTAQAAGTD

SEQ ID NO: 11927 - protein, 12 aa, Severe acute respiratory syndrome coronavirus 2
  REGION 1..12: note = Table B: HLA-DRB1*14:04L HLA-DRB1*04:04L HLA-DRB1*04:05L HLA-DRB1*08:04L HLA-DRB1*08:77L HLA-DRB3*02:01L HLA-DPA1*01:03-B1*03:01L HLA-DPA1*03:01-B1*04:02L HLA-DRB1*03:01L HLA-DRB1*11:03L HLA-DRB1*11:04L HLA-DRB1*14:02L
  REGION 1..12: note = CONT. FROM ABOVE: HLA-DQA1*01:01-B1*05:01L HLA-DRB1*08:01L HLA-D RB1*11:01L HLA-DRB5*01:01L HLA-DQA1*01-B1*05L HLA-DQA1*05:05-B1* 03:19L HLA-DRB4*01:01L HLA-DRB1*04:10L HLA-DRB1*09:01L HLA-DPA1* 01:03-B1*04:02L HLA-DRB3*01:01L HLA-DPA1*02:01-B1*13:01L
  REGION 1..12: note = CONT. FROM ABOVE: HLA-DPA1*01:03-B1*02:01L HLA-DPA1*01:03-B1*104 :01L HLA-DRB1*07:01L HLA-DRB1*10:01L HLA-DRB1*04:08L HLA-DRB1*08 :03L
ILMTARTVYDDG

SEQ ID NO: 11928 - protein, 14 aa, Severe acute respiratory syndrome coronavirus 2
  REGION 1..14: note = Table B: HLA-DRB1*14:04L HLA-DRB1*01:01L HLA-DRB1*11:02L
NDILLAKDTTEAFE

SEQ ID NO: 11929 - protein, 14 aa, Severe acute respiratory syndrome coronavirus 2
  REGION 1..14: note = Table B: HLA-DRB1*14:04L HLA-DRB1*01:01L HLA-DRB1*11:02L HLA-DRB4*02:01NL HLA-DPA1*01:03-B1*02:01L
DILLAKDTTEAFEK

SEQ ID NO: 11930 - protein, 14 aa, Severe acute respiratory syndrome coronavirus 2
  REGION 1..14: note = Table B: HLA-DRB1*14:04L HLA-DRB1*13:02L HLA-DRB1*04:04L HLA-DRB1*03:01L HLA-DRB1*11:02L HLA-DRB1*11:03L HLA-DRB1*14:02L HLA-DRB1*11:01L HLA-DQA1*05:05-B1*03:19L HLA-DRB3*01:01L HLA-DPA1*03:01-B1*105:01L HLA-DPA1*01:02-B1*04:01L
  REGION 1..14: note = CONT. FROM ABOVE: HLA-DRB1*08:02L HLA-DRB1*08:03L
DQAMTQMYKQARSE

SEQ ID NO: 11931 - protein, 14 aa, Severe acute respiratory syndrome coronavirus 2
  REGION 1..14: note = Table B: HLA-DRB1*14:04L HLA-DRB1*04:01L HLA-DRB1*09:01L HLA-DRB3*01:01L HLA-DPA1*01:03-B1*104:01L HLA-DRB1*15:01L
NDALNNIINNARDG

SEQ ID NO: 11932 - protein, 13 aa, Severe acute respiratory syndrome coronavirus 2
  REGION 1..13: note = Table B: HLA-DRB1*14:04L HLA-DQA1*01:02-B1*06:02L HLA-DRB1*01:01L HLA-DPA1*03:01-B1*04:02L HLA-DRB1*03:01L HLA-DRB1*08:01L HLA-DRB1*11:01L HLA-DRB4*02:01NL HLA-DRB1*13:01L HLA-DRB4*01:01L HLA-DPA1*01:03-B1*04:01L HLA-DRB1*09:01L
  REGION 1..13: note = CONT. FROM ABOVE: HLA-DPA1*01:03-B1*04:02L HLA-DPA1*02:01-B1*13: 01L HLA-DPA1*01:03-B1*104:01L
IQQVVDADSKIVQ

SEQ ID NO: 11933 - protein, 12 aa, Severe acute respiratory syndrome coronavirus 2
  REGION 1..12: note = Table B: HLA-DRB1*14:04L HLA-DRB1*13:03L HLA-DRB1*04:05L HLA-DQA1*01:02-B1*06:02L HLA-DRB4*03:01NL HLA-DRB1*11:03L HLA-DPA1*01:03-B1*04:01L HLA-DRB1*04:10L HLA-DRB1*09:01L HLA-DPA1*03:01-B1*105:01L HLA-DQA1*05:05-B1*03:01L
DSKIVQLSEISM

SEQ ID NO: 11934 - protein, 13 aa, Severe acute respiratory syndrome coronavirus 2
  REGION 1..13: note = Table B: HLA-DRB1*14:04L HLA-DRB1*01:01L HLA-DRB1*08:04L HLA-DRB1*11:04L HLA-DRB1*14:02L HLA-DRB1*08:01L HLA-DRB4*01:01L HLA-DRB3*01:01L HLA-DPA1*02:01-B1*13:01L HLA-DRB1*08:03L HLA-DRB1*15:01L
SKIVQLSEISMDN

SEQ ID NO: 11935 - protein, 14 aa, Severe acute respiratory syndrome coronavirus 2
  REGION 1..14: note = Table B: HLA-DRB1*14:04L HLA-DRB1*04:01L HLA-DRB1*01:01L HLA-DRB1*08:04L HLA-DPA1*01:03-B1*03:01L HLA-DPA1*03:01-B1*04:02L HLA-DRB1*03:01L HLA-DRB1*11:04L HLA-DRB1*14:02L HLA-DRB1*08:01L HLA-DRB1*11:01L HLA-DRB5*01:01L
  REGION 1..14: note = CONT. FROM ABOVE: HLA-DRB4*01:01L HLA-DPA1*01:03-B1*04:01L HLA-D RB1*09:01L HLA-DPA1*01:03-B1*04:02L HLA-DRB3*01:01L HLA-DPA1*02: 01-B1*13:01L HLA-DPA1*01:03-B1*104:01L HLA-DPA1*01:02-B1*04:01L HLA-DRB1*07:01L HLA-DRB1*08:03L
IVQLSEISMDNSPN

SEQ ID NO: 11936 - protein, 13 aa, Severe acute respiratory syndrome coronavirus 2
  REGION 1..13: note = Table B: HLA-DRB1*14:04L HLA-DRB1*04:01L HLA-DRB1*04:04L HLA-DRB1*08:01L HLA-DRB5*01:01L HLA-DRB4*02:01NL HLA-DRB1*13:01L HLA-DRB4*01:01L HLA-DPA1*01:03-B1*04:01L HLA-DRB1*09:01L HLA-DPA1*02:01-B1*13:01L HLA-DPA1*01:03-B1*02:01L
  REGION 1..13: note = CONT. FROM ABOVE: HLA-DPA1*01:03-B1*104:01L HLA-DRB1*10:01L HLA- DRB1*08:02L HLA-DRB1*08:03L HLA-DRB1*15:01L
ALRANSAVKLQNN

SEQ ID NO: 11937 - protein, 13 aa, Severe acute respiratory syndrome coronavirus 2
  REGION 1..13: note = Table B: HLA-DRB1*14:04L HLA-DRB1*01:01L HLA-DRB3*02:01L HLA-DPA1*03:01-B1*04:02L HLA-DQA1*01:01-B1*05:01L HLA-DRB1*08:01L HLA-DRB1*11:01L HLA-DRB5*01:01L HLA-DRB3*01:01L HLA-DPA1*02:01-B1*13:01L HLA-DPA1*01:03-B1*104:01L
  REGION 1..13: note = CONT. FROM ABOVE: HLA-DRB1*07:01L HLA-DRB1*08:02L HLA-DRB1*15:01 L
SAVKLQNNELSPV

SEQ ID NO: 11938 - protein, 13 aa, Severe acute respiratory syndrome coronavirus 2
  REGION 1..13: note = Table B: HLA-DRB1*14:04L HLA-DRB5*01:01L
AVKLQNNELSPVA

SEQ ID NO: 11939 - protein, 15 aa, Severe acute respiratory syndrome coronavirus 2
  REGION 1..15: note = Table B: HLA-DRB1*14:04L HLA-DRB1*14:02L HLA-DPA1*01:03-B1*04:01L HLA-DPA1*01:03-B1*04:02L HLA-DPA1*01:03-B1*02:01L HLA-DPA1*01:03-B1*104:01L
DDNALAYYNTTKGGR

SEQ ID NO: 11940 - protein, 12 aa, Severe acute respiratory syndrome coronavirus 2
  REGION 1..12: note = Table B: HLA-DRB1*14:04L HLA-DRB1*13:02L HLA-DRB1*01:03L HLA-DRB1*04:05L HLA-DRB1*11:03L HLA-DRB1*14:02L HLA-DRB1*08:01L HLA-DRB1*11:01L HLA-DRB1*12:01L HLA-DRB1*16:01L HLA-DRB1*04:08L HLA-DRB1*08:03L
GSLAATVRLQAG

SEQ ID NO: 11941 - protein, 14 aa, Severe acute respiratory syndrome coronavirus 2
  REGION 1..14: note = Table B: HLA-DRB1*14:04L HLA-DQA1*01:01-B1*05:01L HLA-DQA1*05:05-B1*03:116L
AYKDYLASGGQPIT

SEQ ID NO: 11942 - protein, 13 aa, Severe acute respiratory syndrome coronavirus 2
  REGION 1..13: note = Table B: HLA-DRB1*14:04L HLA-DRB1*11:02L HLA-DQA1*01:01-B1*05:01L
KDYLASGGQPITN

SEQ ID NO: 11943 - protein, 14 aa, Severe acute respiratory syndrome coronavirus 2
  REGION 1..14: note = Table B: HLA-DRB1*14:04L HLA-DRB1*04:01L HLA-DRB1*04:04L HLA-DRB1*01:01L HLA-DRB1*11:04L HLA-DRB1*14:02L HLA-DRB1*08:01L HLA-DRB1*11:01L HLA-DRB5*01:01L HLA-DRB4*01:01L HLA-DPA1*01:03-B1*04:02L HLA-DRB3*01:01L
  REGION 1..14: note = CONT. FROM ABOVE: HLA-DPA1*02:01-B1*13:01L HLA-DPA1*01:03-B1*104 :01L HLA-DRB1*10:01L
GQAITVTPEANMDQ

SEQ ID NO: 11944 - protein, 14 aa, Severe acute respiratory syndrome coronavirus 2
  REGION 1..14: note = Table B: HLA-DRB1*14:04L HLA-DRB1*04:01L HLA-DRB1*01:01L HLA-DRB1*11:04L HLA-DQA1*01:01-B1*05:01L HLA-DRB1*08:01L HLA-DRB1*11:01L HLA-DRB5*01:01L HLA-DRB4*02:01NL HLA-DQA1*05:05-B1*03:116L HLA-DRB3*01:01L
  REGION 1..14: note = CONT. FROM ABOVE: HLA-DPA1*01:03-B1*02:01L HLA-DRB1*08:02L
EPMLQSADAQSFLN

SEQ ID NO: 11945 - protein, 14 aa, Severe acute respiratory syndrome coronavirus 2
  REGION 1..14: note = Table B: HLA-DRB1*14:04L
AFDIYNDKVAGFAK

SEQ ID NO: 11946 - protein, 14 aa, Severe acute respiratory syndrome coronavirus 2
  REGION 1..14: note = Table B: HLA-DRB1*14:04L HLA-DRB1*04:01L HLA-DRB1*13:02L HLA-DRB1*13:03L HLA-DRB1*01:01L HLA-DRB1*08:77L HLA-DRB3*02:01L HLA-DPA1*01:03-B1*03:01L HLA-DRB1*03:01L HLA-DRB1*11:02L HLA-DRB1*11:03L HLA-DRB1*14:02L HLA-DQA1*01:01-B1*05:01L
  REGION 1..14: note = CONT. FROM ABOVE: HLA-DRB1*11:01L HLA-DQA1*05:05-B1*03:19L HLA-D RB1*09:01L HLA-DPA1*01:03-B1*04:02L HLA-DRB1*12:02L HLA-DRB3*01: 01L HLA-DPA1*02:01-B1*13:01L HLA-DPA1*01:03-B1*02:01L HLA-DPA1*0 1:03-B1*104:01L HLA-DQA1*05:05-B1*03:01L
  REGION 1..14: note = CONT. FROM ABOVE: HLA-DPA1*01:02-B1*04:01L HLA-DRB1*07:01L HLA-D RB1*10:01L HLA-DRB1*08:02L HLA-DRB1*08:03L
NPDILRVYANLGER

SEQ ID NO: 11947 - protein, 12 aa, Severe acute respiratory syndrome coronavirus 2
  REGION 1..12: note = Table B: HLA-DRB1*14:04L HLA-DRB1*04:10L
GVPFVVSTGYHF

SEQ ID NO: 11948 - protein, 13 aa, Severe acute respiratory syndrome coronavirus 2
  REGION 1..13: note = Table B: HLA-DRB1*14:04L HLA-DRB1*04:01L HLA-DRB3*01:01L
LGVVHNQDVNLHS

SEQ ID NO: 11949 - protein, 14 aa, Severe acute respiratory syndrome coronavirus 2
  REGION 1..14: note = Table B: HLA-DRB1*14:04L HLA-DPA1*01:03-B1*02:01L
LLVYAADPAMHAAS

SEQ ID NO: 11950 - protein, 14 aa, Severe acute respiratory syndrome coronavirus 2
  REGION 1..14: note = Table B: HLA-DRB1*14:04L HLA-DQA1*01:01-B1*05:01L HLA-DPA1*01:03-B1*04:01L HLA-DPA1*01:03-B1*02:01L
LVYAADPAMHAASG

SEQ ID NO: 11951 - protein, 16 aa, Severe acute respiratory syndrome coronavirus 2
  REGION 1..16: note = Table B: HLA-DRB1*14:04L HLA-DRB1*03:01L HLA-DRB1*11:02L HLA-DRB1*11:01L HLA-DRB5*01:01L HLA-DRB4*02:01NL HLA-DRB1*13:01L HLA-DPA1*01:03-B1*04:01L HLA-DQA1*05:05-B1*03:116L HLA-DRB1*09:01L HLA-DPA1*01:03-B1*04:02L HLA-DRB3*01:01L
  REGION 1..16: note = CONT. FROM ABOVE: HLA-DPA1*01:03-B1*02:01L HLA-DPA1*01:03-B1*104 :01L HLA-DRB1*07:01L HLA-DRB1*08:02L HLA-DRB1*15:01L
VAALTNNVAFQTVKPG

SEQ ID NO: 11952 - protein, 13 aa, Severe acute respiratory syndrome coronavirus 2
  REGION 1..13: note = Table B: HLA-DRB1*14:04L HLA-DRB1*04:01L HLA-DRB1*04:04L HLA-DRB1*03:01L HLA-DRB1*11:02L HLA-DRB4*02:01NL HLA-DPA1*01:03-B1*02:01L HLA-DRB1*08:02L
NVAFQTVKPGNFN

SEQ ID NO: 11953 - protein, 12 aa, Severe acute respiratory syndrome coronavirus 2
  REGION 1..12: note = Table B: HLA-DRB1*14:04L HLA-DRB4*02:01NL HLA-DRB1*13:01L HLA-DRB1*08:02L
QVIVNNLDKSAG

SEQ ID NO: 11954 - protein, 14 aa, Severe acute respiratory syndrome coronavirus 2
  REGION 1..14: note = Table B: HLA-DRB1*14:04L HLA-DRB1*11:02L HLA-DQA1*05:05-B1*03:116L HLA-DRB1*08:02L
VIVNNLDKSAGFPF

SEQ ID NO: 11955 - protein, 14 aa, Severe acute respiratory syndrome coronavirus 2
  REGION 1..14: note = Table B: HLA-DRB1*14:04L HLA-DRB1*04:01L HLA-DPA1*01:03-B1*02:01L
IVNNLDKSAGFPFN

SEQ ID NO: 11956 - protein, 13 aa, Severe acute respiratory syndrome coronavirus 2
  REGION 1..13: note = Table B: HLA-DRB1*14:04L HLA-DPA1*01:03-B1*104:01L
ALFAYTKRNVIPT

SEQ ID NO: 11957 - protein, 13 aa, Severe acute respiratory syndrome coronavirus 2
  REGION 1..13: note = Table B: HLA-DRB1*14:04L HLA-DRB1*04:01L HLA-DRB1*04:04L HLA-DRB1*01:01L HLA-DRB1*03:01L HLA-DQA1*01:01-B1*05:01L HLA-DRB1*08:01L HLA-DRB4*01:01L HLA-DPA1*01:03-B1*04:02L HLA-DPA1*01:03-B1*02:01L HLA-DRB1*08:02L HLA-DRB1*15:01L
VNALLSTDGNKIA

SEQ ID NO: 11958 - protein, 15 aa, Severe acute respiratory syndrome coronavirus 2
  REGION 1..15: note = Table B: HLA-DRB1*14:04L HLA-DQA1*01:01-B1*05:01L HLA-DQA1*01-B1*05L
IADKYVRNLQHRLYE

SEQ ID NO: 11959 - protein, 14 aa, Severe acute respiratory syndrome coronavirus 2
  REGION 1..14: note = Table B: HLA-DRB1*14:04L HLA-DQA1*01:01-B1*05:01L HLA-DQA1*05:05-B1*03:116L HLA-DPA1*01:03-B1*02:01L HLA-DPA1*01:03-B1*104:01L HLA-DRB1*08:02L HLA-DRB1*15:01L
VDDIVKTDGTLMIE

SEQ ID NO: 11960 - protein, 13 aa, Severe acute respiratory syndrome coronavirus 2
  REGION 1..13: note = Table B: HLA-DRB1*14:04L HLA-DRB1*11:02L HLA-DRB4*02:01NL HLA-DPA1*01:03-B1*02:01L HLA-DPA1*01:03-B1*104:01L HLA-DRB1*15:01L
DIVKTDGTLMIER

SEQ ID NO: 11961 - protein, 12 aa, Severe acute respiratory syndrome coronavirus 2
  REGION 1..12: note = Table B: HLA-DRB1*14:04L HLA-DRB1*01:01L HLA-DRB1*01:02L HLA-DRB1*08:04L HLA-DRB3*02:01L HLA-DRB1*09:01L HLA-DRB3*01:01L HLA-DRB1*07:01L
SVMLTNDNTSRY

SEQ ID NO: 11962 - protein, 14 aa, Severe acute respiratory syndrome coronavirus 2
  REGION 1..14: note = Table B: HLA-DRB1*14:04L HLA-DRB1*01:01L HLA-DRB1*08:77L HLA-DRB3*02:01L HLA-DRB1*03:01L HLA-DRB1*11:02L HLA-DRB1*11:03L HLA-DQA1*01:01-B1*05:01L HLA-DRB5*01:01L HLA-DRB4*01:01L HLA-DRB1*09:01L HLA-DRB1*12:02L HLA-DPA1*01:03-B1*104:01L
  REGION 1..14: note = CONT. FROM ABOVE: HLA-DRB1*07:01L HLA-DRB1*08:02L
EAMYTPHTVLQAVG

SEQ ID NO: 11963 - protein, 13 aa, Severe acute respiratory syndrome coronavirus 2
  REGION 1..13: note = Table B: HLA-DRB1*14:04L HLA-DRB1*01:03L HLA-DRB1*04:05L HLA-DRB3*02:01L HLA-DPA1*03:01-B1*04:02L HLA-DRB1*11:03L
YDHVISTSHKLVL

SEQ ID NO: 11964 - protein, 16 aa, Severe acute respiratory syndrome coronavirus 2
  REGION 1..16: note = Table B: HLA-DRB1*14:04L
DAVVYRGTTTYKLNVG

SEQ ID NO: 11965 - protein, 12 aa, Severe acute respiratory syndrome coronavirus 2
  REGION 1..12: note = Table B: HLA-DRB1*14:04L HLA-DRB4*02:01NL HLA-DRB1*09:01L HLA-DPA1*02:01-B1*13:01L HLA-DPA1*01:03-B1*02:01L
DEFSSNVANYQK

SEQ ID NO: 11966 - protein, 12 aa, Severe acute respiratory syndrome coronavirus 2
  REGION 1..12: note = Table B: HLA-DRB1*14:04L HLA-DPA1*01:03-B1*03:01L HLA-DRB1*03:01L HLA-DRB1*11:02L HLA-DRB4*01:01L HLA-DPA1*01:03-B1*04:01L HLA-DQA1*05:05-B1*03:116L HLA-DRB1*04:10L HLA-DRB1*09:01L HLA-DPA1*02:01-B1*13:01L
  REGION 1..12: note = CONT. FROM ABOVE: HLA-DPA1*01:03-B1*02:01L HLA-DPA1*01:03-B1*104 :01L HLA-DRB1*07:01L
FSSNVANYQKVG

SEQ ID NO: 11967 - protein, 14 aa, Severe acute respiratory syndrome coronavirus 2
  REGION 1..14: note = Table B: HLA-DRB1*14:04L HLA-DRB1*03:01L HLA-DRB1*11:01L HLA-DRB1*08:03L
SSNVANYQKVGMQK

SEQ ID NO: 11968 - protein, 13 aa, Severe acute respiratory syndrome coronavirus 2
  REGION 1..13: note = Table B: HLA-DRB1*14:04L HLA-DRB3*02:01L HLA-DPA1*03:01-B1*04:02L HLA-DRB1*03:01L HLA-DRB4*02:01NL HLA-DRB1*13:01L HLA-DRB1*09:01L HLA-DRB3*01:01L HLA-DPA1*02:01-B1*13:01L HLA-DPA1*01:03-B1*02:01L
  REGION 1..13: note = CONT. FROM ABOVE: HLA-DPA1*01:03-B1*104:01L HLA-DPA1*01:02-B1*04 :01L HLA-DRB1*08:02L
VYIGDPAQLPAPR

SEQ ID NO: 11969 - protein, 15 aa, Severe acute respiratory syndrome coronavirus 2
  REGION 1..15: note = Table B: HLA-DRB1*14:04L HLA-DQA1*01-B1*05L HLA-DRB4*02:01NL HLA-DRB4*01:01L HLA-DQA1*05:05-B1*03:116L HLA-DRB1*04:10L HLA-DRB1*09:01L HLA-DPA1*02:01-B1*13:01L HLA-DPA1*01:03-B1*02:01L HLA-DPA1*01:03-B1*104:01L
  REGION 1..15: note = CONT. FROM ABOVE: HLA-DQA1*05:05-B1*03:01L
VSALVYDNKLKAHKD

SEQ ID NO: 11970 - protein, 12 aa, Severe acute respiratory syndrome coronavirus 2
  REGION 1..12: note = Table B: HLA-DRB1*14:04L HLA-DRB1*04:01L HLA-DRB1*04:04L HLA-DQA1*01:02-B1*06:02L HLA-DRB1*01:01L HLA-DRB1*03:01L HLA-DRB1*08:01L HLA-DRB1*11:01L HLA-DRB5*01:01L HLA-DQA1*05:05-B1*03:19L HLA-DRB4*02:01NL HLA-DRB1*13:01L
  REGION 1..12: note = CONT. FROM ABOVE: HLA-DRB4*01:01L HLA-DPA1*01:03-B1*04:01L HLA-D RB1*09:01L HLA-DPA1*01:03-B1*04:02L HLA-DPA1*02:01-B1*13:01L HLA -DRB1*07:01L HLA-DRB1*10:01L HLA-DRB1*08:03L
GVITHDVSSAIN

SEQ ID NO: 11971 - protein, 14 aa, Severe acute respiratory syndrome coronavirus 2
  REGION 1..14: note = Table B: HLA-DRB1*14:04L HLA-DRB1*04:01L HLA-DRB1*11:02L HLA-DRB4*02:01NL HLA-DRB1*13:01L HLA-DRB4*01:01L HLA-DPA1*01:03-B1*04:01L HLA-DRB1*09:01L HLA-DPA1*01:03-B1*104:01L HLA-DRB1*07:01L HLA-DRB1*08:02L
VITHDVSSAINRPQ

SEQ ID NO: 11972 - protein, 14 aa, Severe acute respiratory syndrome coronavirus 2
  REGION 1..14: note = Table B: HLA-DRB1*14:04L HLA-DRB1*04:01L
THDVSSAINRPQIG

SEQ ID NO: 11973 - protein, 13 aa, Severe acute respiratory syndrome coronavirus 2
  REGION 1..13: note = Table B: HLA-DRB1*14:04L HLA-DRB1*08:01L
ASKILGLPTQTVD

SEQ ID NO: 11974 - protein, 13 aa, Severe acute respiratory syndrome coronavirus 2
  REGION 1..13: note = Table B: HLA-DRB1*14:04L HLA-DRB1*04:01L HLA-DRB1*08:01L HLA-DRB1*11:01L HLA-DRB4*01:01L HLA-DRB3*01:01L HLA-DRB1*15:01L
SKILGLPTQTVDS

SEQ ID NO: 11975 - protein, 12 aa, Severe acute respiratory syndrome coronavirus 2
  REGION 1..12: note = Table B: HLA-DRB1*14:04L HLA-DPA1*03:01-B1*04:02L HLA-DRB1*03:01L HLA-DRB1*08:01L HLA-DRB1*13:01L HLA-DPA1*01:03-B1*04:02L HLA-DRB3*01:01L HLA-DPA1*02:01-B1*13:01L HLA-DPA1*01:03-B1*104:01L
  REGION 1..12: note = CONT. FROM ABOVE: HLA-DRB1*08:02L
VIFTQTTETAHS

SEQ ID NO: 11976 - protein, 14 aa, Severe acute respiratory syndrome coronavirus 2
  REGION 1..14: note = Table B: HLA-DRB1*14:04L HLA-DRB1*04:01L HLA-DRB1*01:01L HLA-DRB1*08:04L HLA-DRB1*08:77L HLA-DRB3*02:01L HLA-DPA1*03:01-B1*04:02L HLA-DRB1*03:01L HLA-DRB1*11:02L HLA-DRB1*11:03L HLA-DRB1*14:02L HLA-DQA1*01-B1*05L
  REGION 1..14: note = CONT. FROM ABOVE: HLA-DRB1*13:01L HLA-DPA1*01:03-B1*04:01L HLA-D RB1*04:10L HLA-DRB1*09:01L HLA-DPA1*01:03-B1*04:02L HLA-DRB1*12: 02L HLA-DPA1*01:03-B1*02:01L HLA-DPA1*01:03-B1*104:01L HLA-DRB1* 10:01L HLA-DRB1*08:02L HLA-DRB1*08:03L HLA-DRB1*15:01L
VNRFNVAITRAKVG

SEQ ID NO: 11977 - protein, 14 aa, Severe acute respiratory syndrome coronavirus 2
  REGION 1..14: note = Table B: HLA-DRB1*14:04L HLA-DRB3*02:01L HLA-DPA1*03:01-B1*04:02L HLA-DRB1*03:01L HLA-DQA1*01:01-B1*05:01L HLA-DRB1*08:01L HLA-DRB4*02:01NL HLA-DRB4*01:01L HLA-DRB1*09:01L HLA-DPA1*01:03-B1*04:02L
  REGION 1..14: note = CONT. FROM ABOVE: HLA-DRB3*01:01L HLA-DPA1*02:01-B1*13:01L HLA-D PA1*01:03-B1*104:01L HLA-DRB1*07:01L HLA-DRB1*08:02L HLA-DRB1*15 :01L
SKVITGLHPTQAPT

SEQ ID NO: 11978 - protein, 16 aa, Severe acute respiratory syndrome coronavirus 2
  REGION 1..16: note = Table B: HLA-DRB1*14:04L HLA-DRB1*04:01L HLA-DRB1*01:01L HLA-DRB1*03:01L HLA-DRB1*11:02L HLA-DRB1*11:01L HLA-DRB4*01:01L HLA-DPA1*01:03-B1*04:01L HLA-DPA1*01:03-B1*04:02L HLA-DRB3*01:01L HLA-DPA1*01:03-B1*02:01L
  REGION 1..16: note = CONT. FROM ABOVE: HLA-DPA1*01:02-B1*04:01L HLA-DRB1*07:01L HLA-D RB1*08:02L HLA-DRB1*15:01L
GVNLVAVPTGYVDTPN

SEQ ID NO: 11979 - protein, 14 aa, Severe acute respiratory syndrome coronavirus 2
  REGION 1..14: note = Table B: HLA-DRB1*14:04L HLA-DRB1*03:01L HLA-DRB1*11:02L HLA-DRB1*11:03L HLA-DQA1*01:01-B1*05:01L HLA-DRB5*01:01L HLA-DRB1*13:01L HLA-DRB1*09:01L HLA-DRB1*12:02L HLA-DPA1*01:03-B1*104:01L HLA-DRB1*07:01L
  REGION 1..14: note = CONT. FROM ABOVE: HLA-DQA1*01:03-B1*06:01L HLA-DRB1*08:02L HLA-D RB1*15:01L
FPVLHDIGNPKAIK

SEQ ID NO: 11980 - protein, 14 aa, Severe acute respiratory syndrome coronavirus 2
  REGION 1..14: note = Table B: HLA-DRB1*14:04L HLA-DRB1*03:01L HLA-DRB1*11:02L HLA-DRB5*01:01L HLA-DRB1*13:01L HLA-DRB4*01:01L HLA-DQA1*05:05-B1*03:116L HLA-DPA1*01:03-B1*02:01L HLA-DRB1*15:01L
IEELFYSYATHSDK

SEQ ID NO: 11981 - protein, 11 aa, Severe acute respiratory syndrome coronavirus 2
  REGION 1..11: note = Table B: HLA-DRB1*14:04L HLA-DRB1*04:04L HLA-DRB1*03:01L HLA-DRB1*11:04L HLA-DRB5*02:02L HLA-DRB1*04:10L HLA-DRB3*01:01L HLA-DRB1*14:17L
SAFVNLKQLPF

SEQ ID NO: 11982 - protein, 14 aa, Severe acute respiratory syndrome coronavirus 2
  REGION 1..14: note = Table B: HLA-DRB1*14:04L HLA-DRB1*04:01L HLA-DRB1*04:04L HLA-DRB1*03:01L HLA-DQA1*01:01-B1*05:01L HLA-DRB1*13:01L HLA-DPA1*01:03-B1*04:01L HLA-DRB1*04:10L HLA-DRB1*09:01L HLA-DPA1*01:03-B1*104:01L HLA-DRB1*07:01L HLA-DRB1*10:01L
ENVAFNVVNKGHFD

SEQ ID NO: 11983 - protein, 13 aa, Severe acute respiratory syndrome coronavirus 2
  REGION 1..13: note = Table B: HLA-DRB1*14:04L HLA-DRB1*15:01L
EVPVSIINNTVYT

SEQ ID NO: 11984 - protein, 13 aa, Severe acute respiratory syndrome coronavirus 2
  REGION 1..13: note = Table B: HLA-DRB1*14:04L
VPVSIINNTVYTK

SEQ ID NO: 11985 - protein, 13 aa, Severe acute respiratory syndrome coronavirus 2
  REGION 1..13: note = Table B: HLA-DRB1*14:04L HLA-DRB1*04:01L HLA-DRB1*01:01L HLA-DRB1*03:01L HLA-DRB1*11:02L HLA-DRB5*01:01L HLA-DRB4*02:01NL HLA-DRB1*13:01L HLA-DRB4*01:01L HLA-DRB1*07:01L HLA-DRB1*15:01L
VELFENKTTLPVN

SEQ ID NO: 11986 - protein, 14 aa, Severe acute respiratory syndrome coronavirus 2
  REGION 1..14: note = Table B: HLA-DRB1*14:04L HLA-DRB1*11:02L HLA-DQA1*01:01-B1*05:01L HLA-DRB1*08:01L HLA-DRB1*13:01L HLA-DPA1*01:03-B1*04:01L HLA-DRB3*01:01L HLA-DPA1*02:01-B1*13:01L HLA-DPA1*01:03-B1*02:01L
  REGION 1..14: note = CONT. FROM ABOVE: HLA-DRB1*08:02L HLA-DRB1*15:01L
VKILNNLGVDIAAN

SEQ ID NO: 11987 - protein, 14 aa, Severe acute respiratory syndrome coronavirus 2
  REGION 1..14: note = Table B: HLA-DRB1*14:04L HLA-DRB1*04:01L HLA-DRB1*01:01L HLA-DRB5*01:01L HLA-DRB1*13:01L HLA-DRB3*01:01L HLA-DRB1*08:02L
GVDIAANTVIWDYK

SEQ ID NO: 11988 - protein, 14 aa, Severe acute respiratory syndrome coronavirus 2
  REGION 1..14: note = Table B: HLA-DRB1*14:04L HLA-DRB1*01:01L HLA-DRB3*02:01L HLA-DRB1*03:01L HLA-DRB1*11:02L HLA-DRB1*08:01L HLA-DRB1*11:01L HLA-DRB5*01:01L HLA-DQA1*01-B1*05L HLA-DRB4*01:01L HLA-DRB1*09:01L HLA-DPA1*01:03-B1*04:02L
  REGION 1..14: note = CONT. FROM ABOVE: HLA-DPA1*01:03-B1*104:01L HLA-DRB1*07:01L HLA- DRB1*08:02L
VLITEGSVKGLQPS

SEQ ID NO: 11989 - protein, 14 aa, Severe acute respiratory syndrome coronavirus 2
  REGION 1..14: note = Table B: HLA-DRB1*14:04L HLA-DRB1*08:04L HLA-DRB1*04:08L
VDGVVQQLPETYFT

SEQ ID NO: 11990 - protein, 14 aa, Severe acute respiratory syndrome coronavirus 2
  REGION 1..14: note = Table B: HLA-DRB1*14:04L HLA-DRB1*04:01L HLA-DRB1*01:01L HLA-DRB1*03:01L HLA-DRB1*11:02L HLA-DRB5*01:01L
LPETYFTQSRNLQE

SEQ ID NO: 11991 - protein, 14 aa, Severe acute respiratory syndrome coronavirus 2
  REGION 1..14: note = Table B: HLA-DRB1*14:04L HLA-DRB1*11:02L HLA-DRB4*02:01NL HLA-DPA1*01:03-B1*04:01L HLA-DQA1*05:05-B1*03:116L HLA-DPA1*01:03-B1*04:02L HLA-DPA1*01:03-B1*02:01L HLA-DPA1*01:03-B1*104:01L HLA-DQA1*01:03-B1*06:01L
  REGION 1..14: note = CONT. FROM ABOVE: HLA-DRB1*08:02L HLA-DRB1*15:01L
VKNYFITDAQTGSS

SEQ ID NO: 11992 - protein, 11 aa, Severe acute respiratory syndrome coronavirus 2
  REGION 1..11: note = Table B: HLA-DRB1*14:04L HLA-DPA1*03:01-B1*04:02L HLA-DRB1*03:01L HLA-DRB4*02:01NL HLA-DRB5*02:02L HLA-DPA1*01:03-B1*04:01L HLA-DRB1*09:01L HLA-DPA1*02:01-B1*13:01L HLA-DPA1*01:03-B1*02:01L
  REGION 1..11: note = CONT. FROM ABOVE: HLA-DPA1*01:03-B1*104:01L HLA-DRB1*07:01L HLA- DRB1*15:03L
FITDAQTGSSK

SEQ ID NO: 11993 - protein, 12 aa, Severe acute respiratory syndrome coronavirus 2
  REGION 1..12: note = Table B: HLA-DRB1*14:04L HLA-DRB1*01:01L HLA-DRB1*08:01L HLA-DRB1*11:01L HLA-DRB5*01:01L HLA-DRB4*01:01L
EIIKSQDLSVVS

SEQ ID NO: 11994 - protein, 12 aa, Severe acute respiratory syndrome coronavirus 2
  REGION 1..12: note = Table B: HLA-DRB1*14:04L HLA-DQA1*01:01-B1*05:01L HLA-DRB1*11:01L HLA-DPA1*01:03-B1*04:02L HLA-DPA1*02:01-B1*13:01L
IIKSQDLSVVSK

SEQ ID NO: 11995 - protein, 14 aa, Severe acute respiratory syndrome coronavirus 2
  REGION 1..14: note = Table B: HLA-DRB1*14:04L HLA-DRB1*13:03L HLA-DRB1*01:03L HLA-DRB1*04:04L HLA-DRB4*03:01NL HLA-DRB1*08:04L HLA-DRB3*02:01L HLA-DPA1*03:01-B1*04:02L HLA-DRB1*11:03L HLA-DRB1*11:04L HLA-DRB1*14:02L HLA-DQA1*01:01-B1*05:01L HLA-DRB1*08:01L
  REGION 1..14: note = CONT. FROM ABOVE: HLA-DRB1*11:01L HLA-DPA1*01:03-B1*04:01L HLA-D RB1*04:10L HLA-DRB1*09:01L HLA-DPA1*01:03-B1*04:02L HLA-DRB1*12: 02L HLA-DRB3*01:01L HLA-DPA1*02:01-B1*13:01L HLA-DPA1*01:03-B1*0 2:01L HLA-DPA1*01:03-B1*104:01L HLA-DPA1*01:02-B1*04:01L
  REGION 1..14: note = CONT. FROM ABOVE: HLA-DRB1*07:01L HLA-DRB1*04:08L HLA-DRB1*08:03 L
LPKGIMMNVAKYTQ

SEQ ID NO: 11996 - protein, 13 aa, Severe acute respiratory syndrome coronavirus 2
  REGION 1..13: note = Table B: HLA-DRB1*14:04L HLA-DRB1*13:02L HLA-DRB1*04:04L HLA-DRB4*03:01NL HLA-DRB3*02:01L HLA-DPA1*01:03-B1*03:01L HLA-DPA1*03:01-B1*04:02L HLA-DRB1*11:02L HLA-DRB1*11:03L HLA-DRB1*11:04L HLA-DRB1*11:01L HLA-DQA1*01-B1*05L
  REGION 1..13: note = CONT. FROM ABOVE: HLA-DPA1*01:03-B1*04:02L HLA-DRB1*12:02L HLA-D RB3*01:01L HLA-DPA1*01:03-B1*02:01L HLA-DPA1*01:02-B1*04:01L HLA -DRB1*10:01L HLA-DRB1*08:02L HLA-DRB1*08:03L
GSVAIKITEHSWN

SEQ ID NO: 11997 - protein, 13 aa, Severe acute respiratory syndrome coronavirus 2
  REGION 1..13: note = Table B: HLA-DRB1*14:04L HLA-DQA1*01:01-B1*05:01L HLA-DRB1*08:01L HLA-DRB4*02:01NL HLA-DRB1*13:01L HLA-DQA1*05:05-B1*03:116L HLA-DPA1*02:01-B1*13:01L HLA-DPA1*01:03-B1*02:01L HLA-DPA1*01:03-B1*104:01L
  REGION 1..13: note = CONT. FROM ABOVE: HLA-DPA1*01:02-B1*04:01L HLA-DRB1*08:02L HLA-D RB1*15:01L
TAFVTNVNASSSE

SEQ ID NO: 11998 - protein, 13 aa, Severe acute respiratory syndrome coronavirus 2
  REGION 1..13: note = Table B: HLA-DRB1*14:04L HLA-DRB1*04:01L HLA-DRB1*01:01L HLA-DRB1*11:02L HLA-DRB5*01:01L HLA-DRB4*01:01L HLA-DQA1*05:05-B1*03:116L HLA-DRB1*15:01L
ANYIFWRNTNPIQ

SEQ ID NO: 11999 - protein, 13 aa, Severe acute respiratory syndrome coronavirus 2
  REGION 1..13: note = Table B: HLA-DRB1*14:04L HLA-DRB1*04:04L HLA-DRB1*11:04L HLA-DQA1*01:01-B1*05:01L HLA-DRB1*08:01L HLA-DRB4*01:01L HLA-DPA1*01:03-B1*04:01L HLA-DRB1*10:01L HLA-DRB1*04:08L HLA-DRB1*08:03L
GTAVMSLKEGQIN

SEQ ID NO: 12000 - protein, 13 aa, Severe acute respiratory syndrome coronavirus 2
  REGION 1..13: note = Table B: HLA-DRB1*14:04L HLA-DRB1*13:03L HLA-DRB1*01:03L HLA-DQA1*01:02-B1*06:02L HLA-DRB1*08:04L HLA-DRB1*08:77L HLA-DRB3*02:01L HLA-DPA1*01:03-B1*03:01L HLA-DPA1*03:01-B1*04:02L HLA-DRB1*11:03L HLA-DRB1*11:04L
  REGION 1..13: note = CONT. FROM ABOVE: HLA-DRB1*09:01L HLA-DPA1*02:01-B1*13:01L HLA-D PA1*03:01-B1*105:01L HLA-DQA1*05:05-B1*03:01L HLA-DRB1*07:01L HL A-DRB1*10:01L HLA-DQA1*01:03-B1*06:01L HLA-DRB1*04:08L HLA-DRB1* 08:03L
NNRVVISSDVLVN

SEQ ID NO: 12001 - protein, 16 aa, Severe acute respiratory syndrome coronavirus 2
  REGION 1..16: note = Table B: HLA-DRB1*14:04L HLA-DRB1*11:02L HLA-DRB4*02:01NL HLA-DRB1*13:01L HLA-DRB4*01:01L HLA-DRB1*12:02L HLA-DRB1*15:01L
YPDKVFRSSVLHSTQD

SEQ ID NO: 12002 - protein, 13 aa, Severe acute respiratory syndrome coronavirus 2
  REGION 1..13: note = Table B: HLA-DRB1*14:04L HLA-DRB1*04:04L HLA-DRB4*01:01L HLA-DRB1*09:01L HLA-DRB1*07:01L HLA-DRB1*08:03L
QSLLIVNNATNVV

SEQ ID NO: 12003 - protein, 11 aa, Severe acute respiratory syndrome coronavirus 2
  REGION 1..11: note = Table B: HLA-DRB1*14:04L HLA-DPA1*01:03-B1*03:01L HLA-DRB1*03:01L HLA-DRB1*11:02L HLA-DQA1*01:01-B1*05:01L HLA-DRB1*11:01L HLA-DQA1*01-B1*05L HLA-DRB4*02:01NL HLA-DRB1*13:01L HLA-DRB4*01:01L HLA-DPA1*01:03-B1*04:01L
  REGION 1..11: note = CONT. FROM ABOVE: HLA-DRB1*09:01L HLA-DPA1*01:03-B1*04:02L HLA-D RB3*01:01L HLA-DPA1*01:03-B1*02:01L HLA-DPA1*01:03-B1*104:01L HL A-DRB1*08:02L HLA-DRB1*15:01L
IVNNATNVVIK

SEQ ID NO: 12004 - protein, 12 aa, Severe acute respiratory syndrome coronavirus 2
  REGION 1..12: note = Table B: HLA-DRB1*14:04L HLA-DRB1*08:04L HLA-DPA1*01:03-B1*03:01L HLA-DRB1*11:04L HLA-DRB1*14:02L HLA-DQA1*01:01-B1*05:01L HLA-DRB1*08:01L HLA-DQA1*05:05-B1*03:19L HLA-DRB4*01:01L HLA-DRB1*09:01L
  REGION 1..12: note = CONT. FROM ABOVE: HLA-DRB3*01:01L HLA-DQA1*05:05-B1*03:01L HLA-D RB1*07:01L HLA-DRB1*08:03L HLA-DRB1*15:01L
SALEPLVDLPIG

SEQ ID NO: 12005 - protein, 15 aa, Severe acute respiratory syndrome coronavirus 2
  REGION 1..15: note = Table B: HLA-DRB1*14:04L HLA-DRB5*01:01L HLA-DRB4*02:01NL HLA-DRB1*13:01L
LLKYNENGTITDAVD

SEQ ID NO: 12006 - protein, 16 aa, Severe acute respiratory syndrome coronavirus 2
  REGION 1..16: note = Table B: HLA-DRB1*14:04L HLA-DRB4*01:01L
VEKGIYQTSNFRVQPT

SEQ ID NO: 12007 - protein, 13 aa, Severe acute respiratory syndrome coronavirus 2
  REGION 1..13: note = Table B: HLA-DRB1*14:04L HLA-DRB1*11:02L HLA-DRB4*02:01NL HLA-DPA1*01:03-B1*04:01L HLA-DPA1*01:03-B1*02:01L HLA-DPA1*01:03-B1*104:01L
SNFRVQPTESIVR

SEQ ID NO: 12008 - protein, 14 aa, Severe acute respiratory syndrome coronavirus 2
  REGION 1..14: note = Table B: HLA-DRB1*14:04L HLA-DRB1*01:01L HLA-DRB1*11:02L HLA-DRB5*01:01L HLA-DQA1*01-B1*05L HLA-DRB1*13:01L HLA-DRB4*01:01L HLA-DRB1*09:01L HLA-DPA1*01:03-B1*04:02L HLA-DRB1*12:02L HLA-DPA1*01:03-B1*02:01L
  REGION 1..14: note = CONT. FROM ABOVE: HLA-DPA1*01:03-B1*104:01L HLA-DRB1*07:01L HLA- DRB1*08:02L
FVIRGDEVRQIAPG

SEQ ID NO: 12009 - protein, 13 aa, Severe acute respiratory syndrome coronavirus 2
  REGION 1..13: note = Table B: HLA-DRB1*14:04L HLA-DRB1*04:01L HLA-DRB3*02:01L HLA-DRB1*11:03L HLA-DRB1*11:04L HLA-DRB1*14:02L HLA-DRB1*09:01L HLA-DPA1*01:03-B1*104:01L HLA-DRB1*07:01L
GDEVRQIAPGQTG

SEQ ID NO: 12010 - protein, 13 aa, Severe acute respiratory syndrome coronavirus 2
  REGION 1..13: note = Table B: HLA-DRB1*14:04L HLA-DRB1*04:01L HLA-DRB1*13:02L HLA-DRB1*01:03L HLA-DRB1*04:04L HLA-DRB1*04:05L HLA-DQA1*01:02-B1*06:02L HLA-DRB1*01:02L HLA-DRB1*08:04L HLA-DRB1*08:77L HLA-DRB3*02:01L HLA-DPA1*01:03-B1*03:01L
  REGION 1..13: note = CONT. FROM ABOVE: HLA-DRB1*11:03L HLA-DRB1*11:04L HLA-DRB1*14:02 L HLA-DQA1*01:01-B1*05:01L HLA-DRB1*08:01L HLA-DRB1*11:01L HLA-D RB5*01:01L HLA-DQA1*05:05-B1*03:19L HLA-DRB4*01:01L HLA-DPA1*01: 03-B1*04:01L HLA-DRB1*04:10M HLA-DRB1*09:01L
  REGION 1..13: note = CONT. FROM ABOVE: HLA-DPA1*01:03-B1*04:02L HLA-DRB1*12:01L HLA-D RB1*12:02L HLA-DRB3*01:01L HLA-DPA1*02:01-B1*13:01L HLA-DPA1*03: 01-B1*105:01L HLA-DPA1*01:03-B1*104:01L HLA-DQA1*05:05-B1*03:01L HLA-DRB1*07:01L HLA-DRB1*10:01L HLA-DQA1*01:03-B1*06:01L
  REGION 1..13: note = CONT. FROM ABOVE: HLA-DRB1*04:08L HLA-DRB1*08:03L HLA-DRB1*15:03 L
VPVAIHADQLTPT

SEQ ID NO: 12011 - protein, 14 aa, Severe acute respiratory syndrome coronavirus 2
  REGION 1..14: note = Table B: HLA-DRB1*14:04L HLA-DRB1*01:01L HLA-DRB1*08:77L HLA-DRB3*02:01L HLA-DRB1*15:01L
QSIIAYTMSLGAEN

SEQ ID NO: 12012 - protein, 12 aa, Severe acute respiratory syndrome coronavirus 2
  REGION 1..12: note = Table B: HLA-DRB1*14:04L HLA-DQA1*01:02-B1*06:02L HLA-DQA1*01:01-B1*05:01L HLA-DPA1*01:03-B1*04:01L HLA-DPA1*01:03-B1*04:02L HLA-DPA1*02:01-B1*13:01L HLA-DPA1*01:03-B1*104:01L HLA-DQA1*01:03-B1*06:01L
FSQILPDPSKPS

SEQ ID NO: 12013 - protein, 12 aa, Severe acute respiratory syndrome coronavirus 2
  REGION 1..12: note = Table B: HLA-DRB1*14:04L HLA-DRB1*11:02L HLA-DQA1*01:01-B1*05:01L HLA-DRB4*02:01NL HLA-DPA1*01:03-B1*04:01L HLA-DPA1*01:03-B1*02:01L HLA-DPA1*01:03-B1*104:01L HLA-DQA1*01:03-B1*06:01L
  REGION 1..12: note = CONT. FROM ABOVE: HLA-DRB1*08:02L
SQILPDPSKPSK

SEQ ID NO: 12014 - protein, 14 aa, Severe acute respiratory syndrome coronavirus 2
  REGION 1..14: note = Table B: HLA-DRB1*14:04L HLA-DRB1*04:01L HLA-DRB1*01:01L HLA-DRB1*03:01L HLA-DRB1*11:02L HLA-DRB5*01:01L HLA-DRB1*13:01L HLA-DRB4*01:01L HLA-DPA1*01:03-B1*04:01L HLA-DRB1*09:01L HLA-DPA1*01:03-B1*02:01L HLA-DRB1*07:01L
EDLLFNKVTLADAG

SEQ ID NO: 12015 - protein, 14 aa, Severe acute respiratory syndrome coronavirus 2
  REGION 1..14: note = Table B: HLA-DRB1*14:04L HLA-DRB1*01:01L HLA-DRB1*08:77L HLA-DRB1*03:01L HLA-DRB1*13:01L HLA-DRB1*07:01L
QNVLYENQKLIANQ

SEQ ID NO: 12016 - protein, 14 aa, Severe acute respiratory syndrome coronavirus 2
  REGION 1..14: note = Table B: HLA-DRB1*14:04L HLA-DRB1*01:01L HLA-DRB1*03:01L HLA-DRB1*11:02L HLA-DQA1*01:01-B1*05:01L HLA-DRB1*13:01L HLA-DRB4*01:01L HLA-DRB1*09:01L HLA-DRB1*07:01L HLA-DRB1*08:02L HLA-DRB1*15:01L
NQKLIANQFNSAIG

SEQ ID NO: 12017 - protein, 14 aa, Severe acute respiratory syndrome coronavirus 2
  REGION 1..14: note = Table B: HLA-DRB1*14:04L HLA-DRB1*13:02L HLA-DRB1*01:01L HLA-DRB1*11:01L HLA-DRB5*01:01L HLA-DRB1*08:02L
NSAIGKIQDSLSST

SEQ ID NO: 12018 - protein, 16 aa, Severe acute respiratory syndrome coronavirus 2
  REGION 1..16: note = Table B: HLA-DRB1*14:04L HLA-DRB1*03:01L HLA-DRB1*11:02L HLA-DRB1*13:01L HLA-DPA1*01:03-B1*04:01L HLA-DRB3*01:01L
IQDSLSSTASALGKLQ

SEQ ID NO: 12019 - protein, 14 aa, Severe acute respiratory syndrome coronavirus 2
  REGION 1..14: note = Table B: HLA-DRB1*14:04L HLA-DRB1*01:01L HLA-DRB3*02:01L HLA-DPA1*03:01-B1*04:02L HLA-DRB1*03:01L HLA-DRB1*14:02L HLA-DRB1*08:01L HLA-DRB1*11:01L HLA-DRB5*01:01L HLA-DRB4*01:01L HLA-DRB3*01:01L HLA-DQA1*01:03-B1*06:01L HLA-DRB1*15:01L
LGKLQDVVNQNAQA

SEQ ID NO: 12020 - protein, 14 aa, Severe acute respiratory syndrome coronavirus 2
  REGION 1..14: note = Table B: HLA-DRB1*14:04L HLA-DRB1*13:02L HLA-DRB1*04:04L HLA-DRB1*11:02L HLA-DRB1*14:02L HLA-DPA1*01:03-B1*04:02L HLA-DRB1*12:01L HLA-DRB3*01:01L HLA-DPA1*02:01-B1*13:01L HLA-DPA1*01:03-B1*02:01L HLA-DPA1*01:03-B1*104:01L
  REGION 1..14: note = CONT. FROM ABOVE: HLA-DRB1*16:01L HLA-DRB1*08:02L HLA-DRB1*08:03 L
AQALNTLVKQLSSN

SEQ ID NO: 12021 - protein, 14 aa, Severe acute respiratory syndrome coronavirus 2
  REGION 1..14: note = Table B: HLA-DRB1*14:04L HLA-DRB4*01:01L HLA-DRB1*09:01L HLA-DPA1*01:03-B1*104:01L HLA-DRB1*08:03L
AEVQIDRLITGRLQ

SEQ ID NO: 12022 - protein, 14 aa, Severe acute respiratory syndrome coronavirus 2
  REGION 1..14: note = Table B: HLA-DRB1*14:04L HLA-DRB1*01:01L HLA-DPA1*03:01-B1*04:02L HLA-DRB1*14:01L HLA-DRB1*11:03L HLA-DRB1*14:54L HLA-DRB1*07:01L HLA-DRB1*10:01L
QQLIRAAEIRASAN

SEQ ID NO: 12023 - protein, 14 aa, Severe acute respiratory syndrome coronavirus 2
  REGION 1..14: note = Table B: HLA-DRB1*14:04L HLA-DRB1*01:01L HLA-DPA1*03:01-B1*04:02L HLA-DRB1*11:02L HLA-DRB1*11:01L HLA-DRB1*13:01L HLA-DPA1*01:03-B1*04:02L HLA-DPA1*02:01-B1*13:01L HLA-DPA1*01:03-B1*104:01L
  REGION 1..14: note = CONT. FROM ABOVE: HLA-DPA1*01:02-B1*04:01L
PQIITTDNTFVSGN

SEQ ID NO: 12024 - protein, 11 aa, Severe acute respiratory syndrome coronavirus 2
  REGION 1..11: note = Table B: HLA-DRB1*14:04L HLA-DRB1*04:01L HLA-DRB1*13:02L HLA-DRB1*04:02L HLA-DRB1*04:05L HLA-DRB1*01:01L HLA-DRB4*03:01NL HLA-DRB3*02:01L HLA-DRB1*11:02L HLA-DRB1*11:03L HLA-DRB1*11:01L HLA-DRB5*01:01L HLA-DRB1*12:02L HLA-DRB1*14:54L
  REGION 1..11: note = CONT. FROM ABOVE: HLA-DQA1*05:05-B1*03:01L HLA-DRB1*14:17L HLA-D RB1*08:02L
VVIGIVNNTVY

SEQ ID NO: 12025 - protein, 14 aa, Severe acute respiratory syndrome coronavirus 2
  REGION 1..14: note = Table B: HLA-DRB1*14:04L HLA-DRB1*13:01L HLA-DRB1*15:01L
LDKYFKNHTSPDVD

SEQ ID NO: 12026 - protein, 13 aa, Severe acute respiratory syndrome coronavirus 2
  REGION 1..13: note = Table B: HLA-DRB1*14:04L HLA-DRB1*04:01L HLA-DRB1*03:01L HLA-DRB1*11:01L HLA-DPA1*01:03-B1*04:01L HLA-DRB3*01:01L HLA-DPA1*01:03-B1*02:01L HLA-DPA1*01:02-B1*04:01L HLA-DRB1*08:02L HLA-DRB1*15:01L
LGDISGINASVVN

SEQ ID NO: 12027 - protein, 13 aa, Severe acute respiratory syndrome coronavirus 2
  REGION 1..13: note = Table B: HLA-DRB1*14:04L HLA-DRB1*01:01L HLA-DRB3*02:01L HLA-DPA1*03:01-B1*04:02L HLA-DQA1*01-B1*05L HLA-DRB4*01:01L HLA-DRB1*09:01L HLA-DPA1*02:01-B1*13:01L HLA-DPA1*01:03-B1*02:01L HLA-DPA1*01:03-B1*104:01L
  REGION 1..13: note = CONT. FROM ABOVE: HLA-DPA1*01:02-B1*04:01L HLA-DRB1*07:01L HLA-D RB1*08:02L
ISGINASVVNIQK

SEQ ID NO: 12028 - protein, 13 aa, Severe acute respiratory syndrome coronavirus 2
  REGION 1..13: note = Table B: HLA-DRB1*14:04L HLA-DRB3*02:01L HLA-DPA1*03:01-B1*04:02L HLA-DPA1*02:01-B1*13:01L HLA-DPA1*01:03-B1*104:01L
INASVVNIQKEID

SEQ ID NO: 12029 - protein, 12 aa, Severe acute respiratory syndrome coronavirus 2
  REGION 1..12: note = Table B: HLA-DRB1*14:04L HLA-DRB1*14:02L HLA-DQA1*05:05-B1*03:116L HLA-DRB1*09:01L HLA-DPA1*01:03-B1*02:01L HLA-DRB1*07:01L
ASVVNIQKEIDR

SEQ ID NO: 12030 - protein, 14 aa, Severe acute respiratory syndrome coronavirus 2
  REGION 1..14: note = Table B: HLA-DRB1*14:04L HLA-DRB1*04:01L HLA-DRB1*04:04L HLA-DRB1*11:02L HLA-DRB1*13:01L HLA-DPA1*01:03-B1*02:01L HLA-DRB1*04:08L HLA-DRB1*08:02L
LNEVAKNLNESLID

SEQ ID NO: 12031 - protein, 12 aa, Severe acute respiratory syndrome coronavirus 2
  REGION 1..12: note = Table B: HLA-DRB1*14:04L HLA-DRB1*04:01L HLA-DRB1*03:01L HLA-DRB1*11:02L HLA-DQA1*01:01-B1*05:01L HLA-DRB4*02:01NL HLA-DRB4*01:01L HLA-DQA1*05:05-B1*03:116L HLA-DRB3*01:01L HLA-DPA1*01:03-B1*02:01L HLA-DRB1*08:02L HLA-DRB1*15:01L
DFVRATATIPIQ

SEQ ID NO: 12032 - protein, 12 aa, Severe acute respiratory syndrome coronavirus 2
  REGION 1..12: note = Table B: HLA-DRB1*14:04L HLA-DQA1*01:01-B1*05:01L HLA-DQA1*01-B1*05L HLA-DRB4*01:01L HLA-DPA1*01:03-B1*04:02L HLA-DRB3*01:01L HLA-DRB1*10:01L
LAVFQSASKIIT

SEQ ID NO: 12033 - protein, 13 aa, Severe acute respiratory syndrome coronavirus 2
  REGION 1..13: note = Table B: HLA-DRB1*14:04L HLA-DPA1*01:03-B1*03:01L HLA-DRB1*14:02L HLA-DRB1*09:01L HLA-DRB3*01:01L HLA-DPA1*03:01-B1*105:01L HLA-DQA1*05:05-B1*03:01L HLA-DRB1*07:01L
EHVQIHTIDGSSG

SEQ ID NO: 12034 - protein, 12 aa, Severe acute respiratory syndrome coronavirus 2
  REGION 1..12: note = Table B: HLA-DRB1*14:04L HLA-DRB1*13:02L HLA-DRB1*01:02L HLA-DRB1*11:02L HLA-DRB1*12:02L
IVNVSLVKPSFY

SEQ ID NO: 12035 - protein, 14 aa, Severe acute respiratory syndrome coronavirus 2
  REGION 1..14: note = Table B: HLA-DRB1*14:04L HLA-DRB1*01:01L HLA-DQA1*01:01-B1*05:01L HLA-DRB5*01:01L HLA-DRB4*02:01NL HLA-DRB1*13:01L HLA-DQA1*05:05-B1*03:116L HLA-DRB1*07:01L HLA-DRB1*15:01L
AAVYRINWITGGIA

SEQ ID NO: 12036 - protein, 13 aa, Severe acute respiratory syndrome coronavirus 2
  REGION 1..13: note = Table B: HLA-DRB1*14:04L HLA-DRB1*04:04L HLA-DRB1*01:01L HLA-DRB1*08:04L HLA-DRB1*03:01L HLA-DRB1*08:01L HLA-DRB1*11:01L HLA-DRB4*02:01NL HLA-DRB4*01:01L HLA-DRB3*01:01L HLA-DPA1*01:03-B1*104:01L HLA-DRB1*10:01L HLA-DRB1*04:08L
  REGION 1..13: note = CONT. FROM ABOVE: HLA-DRB1*08:03L HLA-DRB1*15:01L
LPKEITVATSRTL

SEQ ID NO: 12037 - protein, 13 aa, Severe acute respiratory syndrome coronavirus 2
  REGION 1..13: note = Table B: HLA-DRB1*14:04L HLA-DRB1*01:01L HLA-DRB1*03:01L HLA-DRB1*11:02L HLA-DQA1*05:05-B1*03:19L HLA-DRB4*02:01NL HLA-DRB1*13:01L HLA-DRB4*01:01L HLA-DPA1*01:03-B1*04:02L HLA-DPA1*01:03-B1*02:01L HLA-DPA1*01:03-B1*104:01L
  REGION 1..13: note = CONT. FROM ABOVE: HLA-DRB1*08:02L
IGNYKLNTDHSSS

SEQ ID NO: 12038 - protein, 14 aa, Severe acute respiratory syndrome coronavirus 2
  REGION 1..14: note = Table B: HLA-DRB1*14:04L HLA-DRB1*04:04L HLA-DRB1*08:77L HLA-DRB1*03:01L HLA-DRB1*11:02L HLA-DQA1*05:05-B1*03:19L HLA-DPA1*01:03-B1*04:02L HLA-DPA1*02:01-B1*13:01L HLA-DQA1*05:05-B1*03:01L HLA-DRB1*07:01L
  REGION 1..14: note = CONT. FROM ABOVE: HLA-DQA1*01:03-B1*06:01L HLA-DRB1*08:02L
INLIIKNLSKSLTE

SEQ ID NO: 12039 - protein, 12 aa, Severe acute respiratory syndrome coronavirus 2
  REGION 1..12: note = Table B: HLA-DRB1*14:04L HLA-DRB1*04:01L HLA-DRB1*08:04L HLA-DRB5*01:01L HLA-DPA1*01:03-B1*02:01L HLA-DRB1*15:01L
SPFHPLADNKFA

SEQ ID NO: 12040 - protein, 12 aa, Severe acute respiratory syndrome coronavirus 2
  REGION 1..12: note = Table B: HLA-DRB1*14:04L HLA-DRB1*04:01L HLA-DRB1*01:01L HLA-DRB4*01:01L HLA-DRB3*01:01L
GIITTVAAFHQE

SEQ ID NO: 12041 - protein, 12 aa, Severe acute respiratory syndrome coronavirus 2
  REGION 1..12: note = Table B: HLA-DRB1*14:04L HLA-DRB1*11:02L HLA-DRB4*02:01NL HLA-DRB1*08:02L HLA-DRB1*15:01L
QPYVVDDPCPIH

SEQ ID NO: 12042 - protein, 13 aa, Severe acute respiratory syndrome coronavirus 2
  REGION 1..13: note = Table B: HLA-DRB1*14:04L HLA-DRB1*11:01L HLA-DPA1*01:03-B1*02:01L HLA-DRB1*15:01L
KSPIQYIDIGNYT

SEQ ID NO: 12043 - protein, 14 aa, Severe acute respiratory syndrome coronavirus 2
  REGION 1..14: note = Table B: HLA-DRB1*14:04L HLA-DRB1*04:01L HLA-DPA1*01:03-B1*02:01L HLA-DRB1*15:01L
SPIQYIDIGNYTVS

SEQ ID NO: 12044 - protein, 14 aa, Severe acute respiratory syndrome coronavirus 2
  REGION 1..14: note = Table B: HLA-DRB1*14:04L HLA-DRB1*03:01L HLA-DRB5*01:01L HLA-DRB4*02:01NL HLA-DRB1*13:01L HLA-DRB1*15:01L
ASWFTALTQHGKED

SEQ ID NO: 12045 - protein, 14 aa, Severe acute respiratory syndrome coronavirus 2
  REGION 1..14: note = Table B: HLA-DRB1*14:04L HLA-DRB1*01:01L HLA-DRB1*11:02L HLA-DQA1*01:01-B1*05:01L HLA-DRB1*08:01L HLA-DRB1*11:01L HLA-DRB5*01:01L HLA-DPA1*01:03-B1*04:02L HLA-DRB1*07:01L HLA-DRB1*08:02L
KDGIIWVATEGALN

SEQ ID NO: 12046 - protein, 14 aa, Severe acute respiratory syndrome coronavirus 2
  REGION 1..14: note = Table B: HLA-DRB1*14:04L HLA-DPA1*01:03-B1*02:01L HLA-DPA1*01:03-B1*104:01L HLA-DRB1*07:01L
TGAIKLDDKDPNFK

SEQ ID NO: 12047 - protein, 12 aa, Severe acute respiratory syndrome coronavirus 2
  REGION 1..12: note = Table B: HLA-DRB1*14:04L HLA-DRB1*13:02L HLA-DRB1*04:04L HLA-DRB3*02:01L HLA-DRB1*11:03L HLA-DRB1*14:02L HLA-DRB1*11:01L HLA-DQA1*05:05-B1*03:19L HLA-DQA1*05:05-B1*03:116L HLA-DPA1*01:03-B1*04:02L HLA-DRB1*12:02L HLA-DRB3*01:01L
  REGION 1..12: note = CONT. FROM ABOVE: HLA-DPA1*02:01-B1*13:01L HLA-DPA1*01:03-B1*02: 01L HLA-DQA1*05:05-B1*03:01L HLA-DRB1*10:01L HLA-DRB1*08:02L
DQVILLNKHIDA

SEQ ID NO: 12048 - protein, 11 aa, Severe acute respiratory syndrome coronavirus 2
  REGION 1..11: note = Table B: HLA-DRB1*14:04L HLA-DRB1*04:01L HLA-DRB1*04:04L HLA-DRB1*08:04L HLA-DRB1*11:02L HLA-DRB1*11:04L HLA-DRB1*08:01L HLA-DRB5*01:01L HLA-DRB5*02:02L HLA-DRB1*13:01L HLA-DRB3*01:01L HLA-DPA1*01:03-B1*02:01L HLA-DPA1*01:03-B1*104:01L
  REGION 1..11: note = CONT. FROM ABOVE: HLA-DRB1*07:01L HLA-DRB1*04:08M HLA-DRB1*08:02 L HLA-DRB1*15:01L
YIAQVDVVNFN

SEQ ID NO: 12049 - protein, 14 aa, Severe acute respiratory syndrome coronavirus 2
  REGION 1..14: note = Table B: HLA-DRB3*02:02L
DYIATNGPLKVGGS

SEQ ID NO: 12050 - protein, 18 aa, Severe acute respiratory syndrome coronavirus 2
  REGION 1..18: note = Table B: HLA-DRB3*02:02L
QPIDLVPNQPYPNASFDN

SEQ ID NO: 12051 - protein, 16 aa, Severe acute respiratory syndrome coronavirus 2
  REGION 1..16: note = Table B: HLA-DRB3*02:02L
ISDEFSSNVANYQKVG

SEQ ID NO: 12052 - protein, 14 aa, Severe acute respiratory syndrome coronavirus 2
  REGION 1..14: note = Table B: HLA-DRB1*04:01L HLA-DRB1*04:04L HLA-DRB1*01:01L HLA-DRB1*11:02L HLA-DRB1*13:01L HLA-DRB1*08:02L
VEEVLSEARQHLKD

SEQ ID NO: 12053 - protein, 14 aa, Severe acute respiratory syndrome coronavirus 2
  REGION 1..14: note = Table B: HLA-DRB1*04:01L HLA-DRB1*04:04L HLA-DRB1*01:01L HLA-DRB1*08:04L HLA-DRB1*08:77L HLA-DRB1*11:02L HLA-DRB1*13:01L HLA-DRB1*10:01L HLA-DRB1*08:02L HLA-DRB1*08:03L
EEVLSEARQHLKDG

SEQ ID NO: 12054 - protein, 15 aa, Severe acute respiratory syndrome coronavirus 2
  REGION 1..15: note = Table B: HLA-DRB1*04:01L HLA-DRB1*13:02L HLA-DRB1*01:01L
PYVFIKRSDARTAPH

SEQ ID NO: 12055 - protein, 18 aa, Severe acute respiratory syndrome coronavirus 2
  REGION 1..18: note = Table B: HLA-DRB1*04:01L
YRKVLLRKNGNKGAGGHS

SEQ ID NO: 12056 - protein, 14 aa, Severe acute respiratory syndrome coronavirus 2
  REGION 1..14: note = Table B: HLA-DRB1*04:01L HLA-DRB1*04:04L HLA-DRB4*03:01NL HLA-DRB3*02:01L HLA-DRB1*11:02L HLA-DRB1*11:03L HLA-DQA1*01:01-B1*05:01L HLA-DRB1*04:10L HLA-DRB1*12:02L HLA-DRB3*01:01L HLA-DPA1*01:03-B1*02:01L HLA-DRB1*14:17L
GHSYGADLKSFDLG

SEQ ID NO: 12057 - protein, 17 aa, Severe acute respiratory syndrome coronavirus 2
  REGION 1..17: note = Table B: HLA-DRB1*04:01L HLA-DRB1*04:04L HLA-DRB3*02:01L HLA-DRB1*03:01L HLA-DRB1*11:02L HLA-DRB1*11:03L HLA-DRB1*14:02L HLA-DRB1*11:01L HLA-DQA1*05:05-B1*03:19L HLA-DPA1*01:03-B1*04:02L HLA-DPA1*01:03-B1*02:01L
  REGION 1..17: note = CONT. FROM ABOVE: HLA-DPA1*01:03-B1*104:01L HLA-DRB1*10:01L HLA- DRB1*08:02L
DPYEDFQENWNTKHSSG

SEQ ID NO: 12058 - protein, 13 aa, Severe acute respiratory syndrome coronavirus 2
  REGION 1..13: note = Table B: HLA-DRB1*04:01L HLA-DRB1*08:04L HLA-DRB1*11:04L
RELMRELNGGAYT

SEQ ID NO: 12059 - protein, 10 aa, Severe acute respiratory syndrome coronavirus 2
  REGION 1..10: note = Table B: HLA-DRB1*04:01L HLA-DRB1*13:02L HLA-DRB1*13:03L HLA-DRB1*01:03L HLA-DRB1*04:02L HLA-DRB1*01:01L HLA-DRB4*03:01NL HLA-DRB3*02:01L HLA-DRB1*14:01L HLA-DRB1*11:04L HLA-DRB1*08:01L HLA-DRB1*11:01L HLA-DRB5*01:01L HLA-DPA1*01:03-B1*04:02L
  REGION 1..10: note = CONT. FROM ABOVE: HLA-DRB1*12:01L HLA-DRB3*01:01L HLA-DQA1*03:01 -B1*03:02M HLA-DQA1*05:05-B1*03:01L HLA-DRB1*14:17L HLA-DRB1*16: 01L HLA-DRB1*08:02L HLA-DQA1*02:01-B1*03:03L HLA-DRB1*15:01L
RELNGGAYTR

SEQ ID NO: 12060 - protein, 14 aa, Severe acute respiratory syndrome coronavirus 2
  REGION 1..14: note = Table B: HLA-DRB1*04:01L HLA-DRB1*08:04L HLA-DRB1*14:01L HLA-DRB1*11:04L HLA-DRB1*11:01L HLA-DRB1*12:01L HLA-DRB3*01:01L HLA-DPA1*03:01-B1*105:01L HLA-DQA1*03:01-B1*03:02L HLA-DQA1*02:01-B1*03:03L HLA-DRB1*15:03L
YPLECIKDLLARAG

SEQ ID NO: 12061 - protein, 14 aa, Severe acute respiratory syndrome coronavirus 2
  REGION 1..14: note = Table B: HLA-DRB1*04:01L
SEQLDFIDTKRGVY

SEQ ID NO: 12062 - protein, 11 aa, Severe acute respiratory syndrome coronavirus 2
  REGION 1..11: note = Table B: HLA-DRB1*04:01L HLA-DRB1*13:02L HLA-DRB1*04:04L HLA-DRB1*01:01L HLA-DRB1*01:02L HLA-DRB4*03:01NL HLA-DRB1*08:04L HLA-DRB1*14:01L HLA-DRB1*11:04L HLA-DRB1*08:01L HLA-DRB1*11:01L HLA-DRB1*04:10L HLA-DRB1*12:01L HLA-DRB1*14:54L
  REGION 1..11: note = CONT. FROM ABOVE: HLA-DQA1*05:05-B1*03:01L HLA-DRB1*04:08L
WYTERSEKSYE

SEQ ID NO: 12063 - protein, 13 aa, Severe acute respiratory syndrome coronavirus 2
  REGION 1..13: note = Table B: HLA-DRB1*04:01L HLA-DRB1*08:04L HLA-DRB1*03:01L HLA-DQA1*01:01-B1*05:01L HLA-DRB4*02:01NL HLA-DRB1*04:10L HLA-DPA1*01:03-B1*04:02L HLA-DRB1*14:54L HLA-DRB1*08:03L
EKSYELQTPFEIK

SEQ ID NO: 12064 - protein, 13 aa, Severe acute respiratory syndrome coronavirus 2
  REGION 1..13: note = Table B: HLA-DRB1*04:01L HLA-DRB1*01:01L HLA-DRB1*03:01L
NSIIKTIQPRVEK

SEQ ID NO: 12065 - protein, 13 aa, Severe acute respiratory syndrome coronavirus 2
  REGION 1..13: note = Table B: HLA-DRB1*04:01L HLA-DRB1*13:02L HLA-DRB1*13:03L HLA-DRB1*01:01L HLA-DRB1*08:04L HLA-DRB1*08:77L HLA-DPA1*01:03-B1*03:01L HLA-DRB1*11:03L HLA-DRB1*11:04L HLA-DRB1*14:02L HLA-DQA1*01:01-B1*05:01L HLA-DRB1*08:01L
  REGION 1..13: note = CONT. FROM ABOVE: HLA-DRB1*11:01L HLA-DQA1*01-B1*05L HLA-DQA1*05 :05-B1*03:19L HLA-DQA1*05:01-B1*02:01L HLA-DRB1*12:02L HLA-DRB3* 01:01L HLA-DPA1*02:01-B1*13:01L HLA-DPA1*03:01-B1*105:01L HLA-DR B1*14:54L HLA-DPA1*01:03-B1*104:01L HLA-DPA1*01:02-B1*04:01L
  REGION 1..13: note = CONT. FROM ABOVE: HLA-DRB1*07:01L HLA-DRB1*10:01L HLA-DRB1*08:03 L
GRIRSVYPVASPN

SEQ ID NO: 12066 - protein, 16 aa, Severe acute respiratory syndrome coronavirus 2
  REGION 1..16: note = Table B: HLA-DRB1*04:01L HLA-DRB1*01:01L HLA-DRB1*08:04L HLA-DRB3*02:01L HLA-DRB1*11:02L HLA-DRB1*11:01L HLA-DQA1*05:01-B1*02:01L HLA-DRB4*01:01L HLA-DQA1*03:01-B1*03:02L HLA-DRB1*10:01L HLA-DRB1*08:02L
TGDFVKATCEFCGTEN

SEQ ID NO: 12067 - protein, 12 aa, Severe acute respiratory syndrome coronavirus 2
  REGION 1..12: note = Table B: HLA-DRB1*04:01L HLA-DRB1*11:03L HLA-DQA1*01:01-B1*05:01L HLA-DRB1*07:01L
GYLPQNAVVKIY

SEQ ID NO: 12068 - protein, 16 aa, Severe acute respiratory syndrome coronavirus 2
  REGION 1..16: note = Table B: HLA-DRB1*04:01L HLA-DRB1*13:02L HLA-DRB1*01:01L HLA-DRB1*08:04L HLA-DRB3*02:01L HLA-DPA1*03:01-B1*04:02L HLA-DRB1*14:01L HLA-DRB1*11:02L HLA-DRB1*11:03L HLA-DRB1*11:04L HLA-DRB1*14:02L HLA-DRB1*11:01L HLA-DRB3*01:01L
  REGION 1..16: note = CONT. FROM ABOVE: HLA-DPA1*01:02-B1*04:01L HLA-DRB1*07:01L HLA-D RB1*10:01L HLA-DRB1*08:03L
GPEHSLAEYHNESGLK

SEQ ID NO: 12069 - protein, 14 aa, Severe acute respiratory syndrome coronavirus 2
  REGION 1..14: note = Table B: HLA-DRB1*04:01L
LAEYHNESGLKTIL

SEQ ID NO: 12070 - protein, 14 aa, Severe acute respiratory syndrome coronavirus 2
  REGION 1..14: note = Table B: HLA-DRB1*04:01L HLA-DRB1*11:01L HLA-DRB3*01:01L
AEYHNESGLKTILR

SEQ ID NO: 12071 - protein, 15 aa, Severe acute respiratory syndrome coronavirus 2
  REGION 1..15: note = Table B: HLA-DRB1*04:01L HLA-DRB1*04:04L HLA-DRB1*08:04L HLA-DRB1*14:01L HLA-DRB1*08:01L HLA-DRB1*11:01L HLA-DRB4*01:01L HLA-DRB3*01:01L HLA-DPA1*01:02-B1*04:01L HLA-DRB1*08:03L
HTGVVGEGSEGLNDN

SEQ ID NO: 12072 - protein, 15 aa, Severe acute respiratory syndrome coronavirus 2
  REGION 1..15: note = Table B: HLA-DRB1*04:01L HLA-DRB3*02:01L HLA-DPA1*03:01-B1*04:02L HLA-DRB1*11:02L HLA-DQA1*01-B1*05L HLA-DRB4*01:01L HLA-DPA1*01:03-B1*04:02L HLA-DPA1*01:03-B1*104:01L HLA-DRB1*14:17L HLA-DRB1*10:01L
  REGION 1..15: note = CONT. FROM ABOVE: HLA-DRB1*08:02L HLA-DRB1*08:03L
LEILQKEKVNINIVG

SEQ ID NO: 12073 - protein, 14 aa, Severe acute respiratory syndrome coronavirus 2
  REGION 1..14: note = Table B: HLA-DRB1*04:01L HLA-DRB1*04:04L HLA-DRB1*03:01L HLA-DRB1*11:02L HLA-DRB1*08:01L HLA-DRB1*11:01L HLA-DRB4*02:01NL HLA-DRB4*01:01L HLA-DPA1*01:03-B1*04:02L HLA-DRB3*01:01L HLA-DPA1*01:03-B1*104:01L HLA-DRB1*08:02L HLA-DRB1*15:01L
LASFSASTSAFVET

SEQ ID NO: 12074 - protein, 14 aa, Severe acute respiratory syndrome coronavirus 2
  REGION 1..14: note = Table B: HLA-DRB1*04:01L HLA-DRB1*01:01L HLA-DRB1*03:01L HLA-DRB1*11:03L HLA-DRB1*13:01L HLA-DRB1*14:54L HLA-DPA1*01:03-B1*104:01L HLA-DQA1*05:05-B1*03:01L HLA-DRB1*07:01L HLA-DRB1*10:01L
VKGLDYKAFKQIVE

SEQ ID NO: 12075 - protein, 13 aa, Severe acute respiratory syndrome coronavirus 2
  REGION 1..13: note = Table B: HLA-DRB1*04:01L HLA-DRB1*11:03L HLA-DPA1*03:01-B1*105:01L HLA-DRB1*15:01L
GNFKVTKGKAKKG

SEQ ID NO: 12076 - protein, 11 aa, Severe acute respiratory syndrome coronavirus 2
  REGION 1..11: note = Table B: HLA-DRB1*04:01L HLA-DRB3*02:01L HLA-DPA1*01:03-B1*03:01L HLA-DRB1*11:01L HLA-DRB1*12:02L HLA-DRB3*01:01L HLA-DRB1*07:01L HLA-DRB1*04:08L
RTLETAQNSVR

SEQ ID NO: 12077 - protein, 13 aa, Severe acute respiratory syndrome coronavirus 2
  REGION 1..13: note = Table B: HLA-DRB1*04:01L HLA-DRB1*01:01L HLA-DRB1*08:04L HLA-DRB1*11:03L HLA-DRB1*11:04L HLA-DRB1*11:01L HLA-DRB1*09:01L HLA-DRB1*12:02L HLA-DRB3*01:01L HLA-DRB1*08:03L
AAITILDGISQYS

SEQ ID NO: 12078 - protein, 15 aa, Severe acute respiratory syndrome coronavirus 2
  REGION 1..15: note = Table B: HLA-DRB1*04:01L HLA-DRB1*01:01L HLA-DRB3*02:01L HLA-DRB1*11:03L HLA-DRB1*13:01L HLA-DRB1*09:01L HLA-DRB1*07:01L HLA-DRB1*08:02L HLA-DRB1*08:03L
TSQWLTNIFGTVYEK

SEQ ID NO: 12079 - protein, 14 aa, Severe acute respiratory syndrome coronavirus 2
  REGION 1..14: note = Table B: HLA-DRB1*04:01L HLA-DRB1*01:01L HLA-DRB1*03:01L HLA-DQA1*01:01-B1*05:01L HLA-DRB1*13:01L HLA-DRB1*14:54L HLA-DRB1*10:01L
TNIFGTVYEKLKPV

SEQ ID NO: 12080 - protein, 14 aa, Severe acute respiratory syndrome coronavirus 2
  REGION 1..14: note = Table B: HLA-DRB1*04:01L HLA-DRB1*04:04L HLA-DRB1*01:01L HLA-DRB1*08:02L
GTVYEKLKPVLDWL

SEQ ID NO: 12081 - protein, 14 aa, Severe acute respiratory syndrome coronavirus 2
  REGION 1..14: note = Table B: HLA-DRB1*04:01L HLA-DRB1*04:04L HLA-DRB1*01:01L HLA-DRB1*11:01L
TVYEKLKPVLDWLE

SEQ ID NO: 12082 - protein, 13 aa, Severe acute respiratory syndrome coronavirus 2
  REGION 1..13: note = Table B: HLA-DRB1*04:01L HLA-DRB1*01:01L HLA-DRB4*03:01NL HLA-DRB1*08:77L HLA-DRB1*03:01L HLA-DQA1*01:01-B1*05:01L HLA-DRB1*14:54L HLA-DRB1*14:17L HLA-DRB1*10:01L
GVEFLRDGWEIVK

SEQ ID NO: 12083 - protein, 15 aa, Severe acute respiratory syndrome coronavirus 2
  REGION 1..15: note = Table B: HLA-DRB1*04:01L HLA-DRB1*11:02L HLA-DRB1*14:02L HLA-DRB4*01:01L HLA-DPA1*01:03-B1*04:02L HLA-DRB3*01:01L
TGLLMPLKAPKEIIF

SEQ ID NO: 12084 - protein, 15 aa, Severe acute respiratory syndrome coronavirus 2
  REGION 1..15: note = Table B: HLA-DRB1*04:01L HLA-DRB1*03:01L HLA-DRB1*11:02L HLA-DRB1*11:04M HLA-DQA1*01:01-B1*05:01L HLA-DRB1*08:01L HLA-DRB1*11:01L HLA-DRB5*01:01L HLA-DRB4*02:01NL HLA-DRB1*13:01L HLA-DRB4*01:01L HLA-DRB1*04:10L HLA-DPA1*01:03-B1*04:02L
  REGION 1..15: note = CONT. FROM ABOVE: HLA-DRB3*01:01L HLA-DPA1*01:03-B1*02:01L HLA-D RB1*08:02L HLA-DRB1*08:03L HLA-DRB1*15:01L
APKEIIFLEGETLPT

SEQ ID NO: 12085 - protein, 17 aa, Severe acute respiratory syndrome coronavirus 2
  REGION 1..17: note = Table B: HLA-DRB1*04:01L HLA-DRB1*11:02L HLA-DRB1*11:01L HLA-DPA1*01:03-B1*02:01L HLA-DRB1*08:02L HLA-DRB1*08:03L
LPTEVLTEEVVLKTGDL

SEQ ID NO: 12086 - protein, 16 aa, Severe acute respiratory syndrome coronavirus 2
  REGION 1..16: note = Table B: HLA-DRB1*04:01L HLA-DRB1*04:04L HLA-DRB1*08:77L HLA-DRB1*11:01L HLA-DQA1*05:05-B1*03:116L HLA-DRB3*01:01L HLA-DPA1*01:03-B1*02:01L HLA-DRB1*07:01L HLA-DRB1*08:03L
EVVLKTGDLQPLEQPT

SEQ ID NO: 12087 - protein, 16 aa, Severe acute respiratory syndrome coronavirus 2
  REGION 1..16: note = Table B: HLA-DRB1*04:01L HLA-DRB1*04:04L HLA-DRB1*11:01L
DTEKYCALAPNMMVTN

SEQ ID NO: 12088 - protein, 15 aa, Severe acute respiratory syndrome coronavirus 2
  REGION 1..15: note = Table B: HLA-DRB1*04:01L HLA-DRB1*01:01L HLA-DRB1*03:01L HLA-DRB1*11:02L HLA-DRB5*01:01L HLA-DRB1*13:01L HLA-DPA1*01:03-B1*04:02L HLA-DRB1*08:02L HLA-DRB1*15:01L
APNMMVTNNTFTLKG

SEQ ID NO: 12089 - protein, 13 aa, Severe acute respiratory syndrome coronavirus 2
  REGION 1..13: note = Table B: HLA-DRB1*04:01L HLA-DRB1*04:04L HLA-DPA1*01:03-B1*03:01L HLA-DQA1*01-B1*05L HLA-DPA1*01:03-B1*04:02L HLA-DRB3*01:01L HLA-DPA1*02:01-B1*13:01L HLA-DPA1*01:03-B1*02:01L
  REGION 1..13: note = CONT. FROM ABOVE: HLA-DPA1*01:02-B1*04:01L HLA-DRB1*07:01L HLA-D RB1*08:02L
NNTFTLKGGAPTK

SEQ ID NO: 12090 - protein, 14 aa, Severe acute respiratory syndrome coronavirus 2
  REGION 1..14: note = Table B: HLA-DRB1*04:01L HLA-DRB1*13:02L HLA-DRB1*01:03L HLA-DRB1*04:02L HLA-DRB1*04:04L HLA-DQA1*01:02-B1*06:02L HLA-DRB1*01:02L HLA-DRB4*03:01NL HLA-DRB1*08:04L HLA-DRB1*08:77L HLA-DPA1*03:01-B1*04:02L HLA-DRB1*03:01L HLA-DRB1*14:01L
  REGION 1..14: note = CONT. FROM ABOVE: HLA-DRB1*11:03L HLA-DRB1*11:04L HLA-DQA1*05:05 -B1*03:19L HLA-DRB1*13:01L HLA-DRB4*01:01L HLA-DRB1*04:10L HLA-D RB1*12:01L HLA-DRB3*01:01L HLA-DPA1*02:01-B1*13:01L HLA-DRB1*14: 54L HLA-DQA1*05:05-B1*03:01L HLA-DRB1*14:17L HLA-DRB1*10:01L
  REGION 1..14: note = CONT. FROM ABOVE: HLA-DQA1*01:03-B1*06:01L HLA-DRB1*04:08L HLA-D RB1*15:03L
KVTFGDDTVIEVQG

SEQ ID NO: 12091 - protein, 13 aa, Severe acute respiratory syndrome coronavirus 2
  REGION 1..13: note = Table B: HLA-DRB1*04:01L HLA-DRB1*01:01L HLA-DRB1*08:77L HLA-DRB1*11:02L HLA-DRB1*11:03L HLA-DRB1*11:04L HLA-DRB1*14:02L HLA-DQA1*01:01-B1*05:01L HLA-DRB1*11:01L HLA-DRB4*01:01L HLA-DRB1*09:01L HLA-DRB1*12:02L HLA-DRB3*01:01L
  REGION 1..13: note = CONT. FROM ABOVE: HLA-DPA1*01:03-B1*02:01L HLA-DRB1*07:01L HLA-D RB1*08:03L HLA-DRB1*15:01L
DTVIEVQGYKSVN

SEQ ID NO: 12092 - protein, 14 aa, Severe acute respiratory syndrome coronavirus 2
  REGION 1..14: note = Table B: HLA-DRB1*04:01L HLA-DRB1*13:02L HLA-DRB1*13:03L HLA-DRB1*01:01L HLA-DRB4*03:01NL HLA-DRB1*08:04L HLA-DRB1*08:77L HLA-DRB3*02:01L HLA-DRB1*03:01L HLA-DRB1*14:01L HLA-DRB1*11:02L HLA-DRB1*11:03L HLA-DRB1*11:04L HLA-DRB1*14:02M
  REGION 1..14: note = CONT. FROM ABOVE: HLA-DQA1*01:01-B1*05:01L HLA-DRB1*08:01L HLA-D RB1*11:01L HLA-DQA1*01-B1*05L HLA-DRB4*01:01L HLA-DPA1*01:03-B1* 04:01L HLA-DRB1*04:10L HLA-DRB1*09:01L HLA-DRB1*12:02L HLA-DRB3* 01:01L HLA-DRB1*14:54L HLA-DPA1*01:03-B1*02:01L
  REGION 1..14: note = CONT. FROM ABOVE: HLA-DPA1*01:03-B1*104:01L HLA-DRB1*07:01L HLA- DRB1*08:02L HLA-DRB1*08:03L
VNEFACVVADAVIK

SEQ ID NO: 12093 - protein, 12 aa, Severe acute respiratory syndrome coronavirus 2
  REGION 1..12: note = Table B: HLA-DRB1*04:01L HLA-DRB1*04:04L HLA-DQA1*01:02-B1*06:02L HLA-DRB1*01:02L HLA-DRB1*08:04L HLA-DPA1*01:03-B1*03:01L HLA-DRB1*11:04L HLA-DQA1*01:01-B1*05:01L HLA-DQA1*05:05-B1*03:19L
  REGION 1..12: note = CONT. FROM ABOVE: HLA-DRB1*10:01L HLA-DRB1*15:03L
EYGTEDDYQGKP

SEQ ID NO: 12094 - protein, 15 aa, Severe acute respiratory syndrome coronavirus 2
  REGION 1..15: note = Table B: HLA-DRB1*04:01L HLA-DRB1*01:01L HLA-DRB3*02:01L HLA-DPA1*03:01-B1*04:02L HLA-DRB1*14:01L HLA-DRB1*11:03L HLA-DRB1*11:04L HLA-DRB1*14:02L HLA-DQA1*01:01-B1*05:01L HLA-DRB1*08:01L HLA-DRB1*11:01L HLA-DRB5*01:01L HLA-DRB4*01:01L
  REGION 1..15: note = CONT. FROM ABOVE: HLA-DPA1*01:03-B1*04:02L HLA-DRB3*01:01L HLA-D PA1*01:03-B1*02:01L HLA-DPA1*01:02-B1*04:01L HLA-DRB1*07:01L HLA -DRB1*08:02L HLA-DRB1*08:03L
KPLEFGATSAALQPE

SEQ ID NO: 12095 - protein, 14 aa, Severe acute respiratory syndrome coronavirus 2
  REGION 1..14: note = Table B: HLA-DRB1*04:01L HLA-DRB1*04:05L HLA-DPA1*01:03-B1*03:01L HLA-DRB1*03:01L HLA-DRB1*11:03L HLA-DRB1*11:04L HLA-DRB5*01:01L HLA-DRB4*01:01L HLA-DRB1*12:01L HLA-DPA1*03:01-B1*105:01L HLA-DRB1*04:08L
EEDWLDDDSQQTVG

SEQ ID NO: 12096 - protein, 14 aa, Severe acute respiratory syndrome coronavirus 2
  REGION 1..14: note = Table B: HLA-DRB1*04:01L HLA-DRB1*01:01L HLA-DPA1*01:03-B1*03:01L HLA-DQA1*05:05-B1*03:19L HLA-DRB4*01:01L
QPQLEMELTPVVQT

SEQ ID NO: 12097 - protein, 14 aa, Severe acute respiratory syndrome coronavirus 2
  REGION 1..14: note = Table B: HLA-DRB1*04:01L HLA-DRB1*01:01L HLA-DRB1*03:01L HLA-DRB1*11:02L HLA-DRB1*08:01L HLA-DRB1*11:01L HLA-DRB5*01:01L HLA-DRB4*02:01NL HLA-DRB1*13:01L HLA-DPA1*01:03-B1*04:02L HLA-DRB3*01:01L HLA-DPA1*01:03-B1*02:01L HLA-DRB1*08:02L
TPVVQTIEVNSFSG

SEQ ID NO: 12098 - protein, 13 aa, Severe acute respiratory syndrome coronavirus 2
  REGION 1..13: note = Table B: HLA-DRB1*04:01L HLA-DRB1*08:04L HLA-DRB5*01:01L HLA-DRB4*02:01NL HLA-DRB1*04:10L HLA-DRB1*08:03L HLA-DRB1*15:01L
SGYLKLTDNVYIK

SEQ ID NO: 12099 - protein, 14 aa, Severe acute respiratory syndrome coronavirus 2
  REGION 1..14: note = Table B: HLA-DRB1*04:01L HLA-DRB1*01:01L HLA-DRB4*01:01L HLA-DRB1*09:01L HLA-DPA1*01:03-B1*02:01L HLA-DRB1*08:02L
NVYIKNADIVEEAK

SEQ ID NO: 12100 - protein, 14 aa, Severe acute respiratory syndrome coronavirus 2
  REGION 1..14: note = Table B: HLA-DRB1*04:01L HLA-DRB1*13:02L HLA-DRB1*01:01L HLA-DRB1*08:04L HLA-DPA1*01:03-B1*03:01L HLA-DRB1*14:01L HLA-DRB1*11:03L HLA-DRB1*11:04L HLA-DQA1*01:01-B1*05:01L HLA-DRB1*08:01L HLA-DRB1*11:01L HLA-DRB1*04:10L HLA-DRB3*01:01L
  REGION 1..14: note = CONT. FROM ABOVE: HLA-DPA1*02:01-B1*13:01L HLA-DRB1*14:54L HLA-D PA1*01:03-B1*104:01L HLA-DRB1*07:01L HLA-DRB1*10:01L HLA-DRB1*08 :03L HLA-DRB1*15:03L
AKKVKPTVVVNAAN

SEQ ID NO: 12101 - protein, 16 aa, Severe acute respiratory syndrome coronavirus 2
  REGION 1..16: note = Table B: HLA-DRB1*04:01L HLA-DRB1*11:02L
ANVYLKHGGGVAGALN

SEQ ID NO: 12102 - protein, 11 aa, Severe acute respiratory syndrome coronavirus 2
  REGION 1..11: note = Table B: HLA-DRB1*04:01L HLA-DRB1*04:04L HLA-DPA1*03:01-B1*04:02L HLA-DRB1*11:01L HLA-DPA1*01:03-B1*04:01L HLA-DRB1*09:01L HLA-DRB3*01:01L HLA-DPA1*02:01-B1*13:01L
DDYIATNGPLK

SEQ ID NO: 12103 - protein, 16 aa, Severe acute respiratory syndrome coronavirus 2
  REGION 1..16: note = Table B: HLA-DRB1*04:01L HLA-DRB1*01:01L HLA-DRB1*03:01L HLA-DRB1*11:02L HLA-DRB1*14:02L HLA-DRB4*01:01L HLA-DRB1*09:01L HLA-DRB1*10:01L HLA-DRB1*08:02L
VDTVRTNVYLAVFDKN

SEQ ID NO: 12104 - protein, 14 aa, Severe acute respiratory syndrome coronavirus 2
  REGION 1..14: note = Table B: HLA-DRB1*04:01L HLA-DRB1*11:04L HLA-DRB1*11:01L HLA-DRB1*04:10L HLA-DRB1*12:02L HLA-DPA1*01:03-B1*02:01L HLA-DRB1*08:03L HLA-DRB1*15:01L
TNVYLAVFDKNLYD

SEQ ID NO: 12105 - protein, 11 aa, Severe acute respiratory syndrome coronavirus 2
  REGION 1..11: note = Table B: HLA-DRB1*04:01L HLA-DRB1*04:03L HLA-DRB1*13:03L HLA-DRB1*01:03L HLA-DRB1*04:02L HLA-DRB1*04:04L HLA-DRB1*04:05L HLA-DQA1*01:02-B1*06:02L HLA-DRB1*01:02L HLA-DRB4*03:01NL HLA-DRB1*08:04L HLA-DRB1*14:01L HLA-DRB1*11:04L HLA-DRB1*12:01L
  REGION 1..11: note = CONT. FROM ABOVE: HLA-DPA1*03:01-B1*105:01L HLA-DQA1*03:01-B1*03 :02L HLA-DRB1*14:54L HLA-DRB1*14:17L HLA-DRB1*10:01L HLA-DRB1*16 :01L HLA-DRB1*04:08L HLA-DQA1*02:01-B1*03:03L HLA-DRB1*15:03L
FLEMKSEKQVE

SEQ ID NO: 12106 - protein, 15 aa, Severe acute respiratory syndrome coronavirus 2
  REGION 1..15: note = Table B: HLA-DRB1*04:01L HLA-DRB3*02:01L HLA-DRB1*11:02L HLA-DPA1*01:03-B1*04:02L HLA-DPA1*01:03-B1*02:01L HLA-DRB1*10:01L
VEQKIAEIPKEEVKP

SEQ ID NO: 12107 - protein, 16 aa, Severe acute respiratory syndrome coronavirus 2
  REGION 1..16: note = Table B: HLA-DRB1*04:01L HLA-DRB1*01:01L HLA-DRB1*08:04L HLA-DRB3*02:01L HLA-DPA1*01:03-B1*03:01L HLA-DPA1*03:01-B1*04:02L HLA-DRB1*03:01L HLA-DRB1*11:03L HLA-DRB1*11:04L HLA-DRB1*11:01L HLA-DRB3*01:01L
  REGION 1..16: note = CONT. FROM ABOVE: HLA-DPA1*01:03-B1*104:01L HLA-DRB1*07:01L HLA- DRB1*10:01L HLA-DRB1*08:03L HLA-DRB1*15:01L
IPKEEVKPFITESKPS

SEQ ID NO: 12108 - protein, 13 aa, Severe acute respiratory syndrome coronavirus 2
  REGION 1..13: note = Table B: HLA-DRB1*04:01L HLA-DRB1*04:04L HLA-DRB1*11:03L HLA-DRB1*11:01L HLA-DRB1*04:10L HLA-DPA1*01:03-B1*04:02L HLA-DRB1*12:02L HLA-DRB3*01:01L HLA-DPA1*02:01-B1*13:01L HLA-DRB1*10:01L HLA-DRB1*08:02L
KPFITESKPSVEQ

SEQ ID NO: 12109 - protein, 13 aa, Severe acute respiratory syndrome coronavirus 2
  REGION 1..13: note = Table B: HLA-DRB1*04:01L HLA-DRB1*01:01L HLA-DRB1*09:01L
TTTLEETKFLTEN

SEQ ID NO: 12110 - protein, 15 aa, Severe acute respiratory syndrome coronavirus 2
  REGION 1..15: note = Table B: HLA-DRB1*04:01L HLA-DPA1*02:01-B1*13:01L HLA-DPA1*01:03-B1*02:01L HLA-DPA1*01:03-B1*104:01L
NLLLYIDINGNLHPD

SEQ ID NO: 12111 - protein, 13 aa, Severe acute respiratory syndrome coronavirus 2
  REGION 1..13: note = Table B: HLA-DRB1*04:01L HLA-DRB1*04:04L HLA-DQA1*01:02-B1*06:02L HLA-DRB1*01:01L HLA-DQA1*05:05-B1*03:19L HLA-DRB4*01:01L HLA-DPA1*01:03-B1*04:02L HLA-DQA1*05:05-B1*03:01L
GNLHPDSATLVSD

SEQ ID NO: 12112 - protein, 14 aa, Severe acute respiratory syndrome coronavirus 2
  REGION 1..14: note = Table B: HLA-DRB1*04:01L HLA-DRB1*04:04L HLA-DRB1*01:01L HLA-DRB1*11:02L HLA-DRB1*11:01L HLA-DRB5*01:01L HLA-DRB1*13:01L HLA-DPA1*01:03-B1*04:01L HLA-DRB1*04:10L HLA-DRB1*09:01L HLA-DPA1*01:03-B1*02:01L HLA-DRB1*07:01L HLA-DRB1*10:01L
  REGION 1..14: note = CONT. FROM ABOVE: HLA-DRB1*08:02L HLA-DRB1*08:03L
NLHPDSATLVSDID

SEQ ID NO: 12113 - protein, 14 aa, Severe acute respiratory syndrome coronavirus 2
  REGION 1..14: note = Table B: HLA-DRB1*04:01L HLA-DRB1*13:02L HLA-DRB1*13:03L HLA-DRB1*01:03L HLA-DRB1*04:02L HLA-DRB1*04:05L HLA-DRB1*01:02L HLA-DRB4*03:01NL HLA-DRB1*08:04L HLA-DRB1*08:77L HLA-DPA1*01:03-B1*03:01L HLA-DRB1*14:01L HLA-DRB1*11:03L
  REGION 1..14: note = CONT. FROM ABOVE: HLA-DRB1*11:04L HLA-DPA1*01:03-B1*04:02L HLA-D RB1*12:01L HLA-DRB3*01:01L HLA-DRB1*14:54L HLA-DRB1*14:17L HLA-D RB1*10:01L HLA-DRB1*16:01L HLA-DRB1*04:08L
SATLVSDIDITFLK

SEQ ID NO: 12114 - protein, 14 aa, Severe acute respiratory syndrome coronavirus 2
  REGION 1..14: note = Table B: HLA-DRB1*04:01L HLA-DQA1*05:05-B1*03:116L HLA-DPA1*01:03-B1*02:01L HLA-DPA1*01:03-B1*104:01L HLA-DRB1*08:02L
DITFLKKDAPYIVG

SEQ ID NO: 12115 - protein, 13 aa, Severe acute respiratory syndrome coronavirus 2
  REGION 1..13: note = Table B: HLA-DRB1*04:01L HLA-DRB1*13:02L HLA-DRB1*13:03L HLA-DRB1*01:03L HLA-DRB1*04:04L HLA-DRB1*01:02L HLA-DRB1*08:04L HLA-DRB1*08:77L HLA-DPA1*01:03-B1*03:01L HLA-DPA1*03:01-B1*04:02L HLA-DRB1*03:01L HLA-DRB1*14:01L
  REGION 1..13: note = CONT. FROM ABOVE: HLA-DRB1*14:02L HLA-DRB4*01:01L HLA-DPA1*01:03 -B1*04:01L HLA-DRB1*04:10L HLA-DPA1*01:03-B1*04:02L HLA-DPA1*02: 01-B1*13:01L HLA-DPA1*01:03-B1*104:01L HLA-DPA1*01:02-B1*04:01L HLA-DRB1*10:01L
PYIVGDVVQEGVL

SEQ ID NO: 12116 - protein, 14 aa, Severe acute respiratory syndrome coronavirus 2
  REGION 1..14: note = Table B: HLA-DRB1*04:01L HLA-DRB1*01:03L HLA-DRB1*04:04L HLA-DRB1*04:05L HLA-DRB4*03:01NL HLA-DRB1*08:04L HLA-DPA1*01:03-B1*03:01L HLA-DRB1*11:04L HLA-DRB1*04:10L HLA-DRB1*12:01L HLA-DRB1*14:54L HLA-DRB1*04:08L
VGDVVQEGVLTAVV

SEQ ID NO: 12117 - protein, 14 aa, Severe acute respiratory syndrome coronavirus 2
  REGION 1..14: note = Table B: HLA-DRB1*04:01L HLA-DRB1*01:01L HLA-DRB3*02:01L HLA-DPA1*01:03-B1*03:01L HLA-DRB1*03:01L HLA-DQA1*05:01-B1*02:01L HLA-DRB1*13:01L HLA-DPA1*02:01-B1*13:01L HLA-DPA1*01:03-B1*104:01L
  REGION 1..14: note = CONT. FROM ABOVE: HLA-DPA1*01:02-B1*04:01L HLA-DRB1*07:01L
TAVVIPTKKAGGTT

SEQ ID NO: 12118 - protein, 14 aa, Severe acute respiratory syndrome coronavirus 2
  REGION 1..14: note = Table B: HLA-DRB1*04:01L HLA-DRB1*01:01L HLA-DPA1*01:03-B1*03:01L HLA-DRB1*03:01L HLA-DRB1*13:01L HLA-DPA1*02:01-B1*13:01L HLA-DPA1*01:03-B1*104:01L HLA-DPA1*01:02-B1*04:01L HLA-DRB1*07:01L
AVVIPTKKAGGTTE

SEQ ID NO: 12119 - protein, 16 aa, Severe acute respiratory syndrome coronavirus 2
  REGION 1..16: note = Table B: HLA-DRB1*04:01L HLA-DRB1*03:01L HLA-DRB4*01:01L HLA-DRB3*01:01L HLA-DPA1*01:03-B1*02:01L HLA-DRB1*08:02L
VPTDNYITTYPGQGLN

SEQ ID NO: 12120 - protein, 12 aa, Severe acute respiratory syndrome coronavirus 2
  REGION 1..12: note = Table B: HLA-DRB1*04:01L HLA-DRB1*13:02L HLA-DRB1*01:01L HLA-DRB1*08:04L HLA-DRB1*08:77L HLA-DRB3*02:01L HLA-DPA1*01:03-B1*03:01L HLA-DPA1*03:01-B1*04:02L HLA-DRB1*14:01L HLA-DRB1*11:03L HLA-DRB1*11:04L HLA-DRB1*14:02L
  REGION 1..12: note = CONT. FROM ABOVE: HLA-DQA1*01:01-B1*05:01L HLA-DRB1*08:01L HLA-D RB1*11:01L HLA-DQA1*05:05-B1*03:19L HLA-DRB4*01:01L HLA-DRB1*09: 01L HLA-DPA1*01:03-B1*04:02L HLA-DRB3*01:01L HLA-DPA1*02:01-B1*1 3:01L HLA-DPA1*01:03-B1*02:01L HLA-DPA1*01:03-B1*104:01L
  REGION 1..12: note = CONT. FROM ABOVE: HLA-DRB1*07:01L HLA-DRB1*08:02L HLA-DRB1*08:03 L
FYILPSIISNEK

SEQ ID NO: 12121 - protein, 14 aa, Severe acute respiratory syndrome coronavirus 2
  REGION 1..14: note = Table B: HLA-DRB1*04:01L HLA-DRB1*04:04L HLA-DRB1*01:01L HLA-DQA1*01-B1*05L HLA-DRB4*02:01NL HLA-DPA1*01:03-B1*04:01L HLA-DQA1*05:05-B1*03:116L HLA-DPA1*02:01-B1*13:01L HLA-DPA1*01:03-B1*02:01L HLA-DRB1*07:01L HLA-DRB1*15:01L
LPSIISNEKQEILG

SEQ ID NO: 12122 - protein, 14 aa, Severe acute respiratory syndrome coronavirus 2
  REGION 1..14: note = Table B: HLA-DRB1*04:01L HLA-DRB1*11:01L
KQEILGTVSWNLRE

SEQ ID NO: 12123 - protein, 14 aa, Severe acute respiratory syndrome coronavirus 2
  REGION 1..14: note = Table B: HLA-DRB1*04:01L HLA-DRB1*01:01L HLA-DRB1*11:01L HLA-DRB3*01:01L HLA-DPA1*01:03-B1*02:01L HLA-DRB1*07:01L
RKYKGIKIQEGVVD

SEQ ID NO: 12124 - protein, 13 aa, Severe acute respiratory syndrome coronavirus 2
  REGION 1..13: note = Table B: HLA-DRB1*04:01L HLA-DRB1*13:03L HLA-DRB1*01:01L HLA-DRB1*08:04L HLA-DRB1*11:03L HLA-DRB1*11:04L HLA-DRB1*08:01L HLA-DRB1*09:01L HLA-DRB1*12:02L HLA-DRB3*01:01L HLA-DPA1*01:03-B1*104:01L HLA-DPA1*01:02-B1*04:01L
  REGION 1..13: note = CONT. FROM ABOVE: HLA-DRB1*07:01L HLA-DRB1*08:03L
KGIKIQEGVVDYG

SEQ ID NO: 12125 - protein, 13 aa, Severe acute respiratory syndrome coronavirus 2
  REGION 1..13: note = Table B: HLA-DRB1*04:01L HLA-DRB1*08:04L HLA-DRB3*02:01L HLA-DPA1*03:01-B1*04:02L HLA-DRB1*11:03L HLA-DRB1*11:04L HLA-DRB1*11:01L HLA-DRB1*12:02L HLA-DRB3*01:01L HLA-DPA1*02:01-B1*13:01L HLA-DPA1*01:03-B1*104:01L
  REGION 1..13: note = CONT. FROM ABOVE: HLA-DRB1*07:01L HLA-DRB1*10:01L HLA-DRB1*08:03 L
IKIQEGVVDYGAR

SEQ ID NO: 12126 - protein, 14 aa, Severe acute respiratory syndrome coronavirus 2
  REGION 1..14: note = Table B: HLA-DRB1*04:01L HLA-DPA1*01:03-B1*03:01L HLA-DPA1*01:03-B1*04:01L HLA-DRB1*09:01L HLA-DPA1*01:03-B1*04:02L HLA-DRB1*10:01L HLA-DRB1*08:03L
GARFYFYTSKTTVA

SEQ ID NO: 12127 - protein, 14 aa, Severe acute respiratory syndrome coronavirus 2
  REGION 1..14: note = Table B: HLA-DRB1*04:01L HLA-DRB1*03:01L HLA-DRB1*13:01L HLA-DPA1*01:03-B1*02:01L HLA-DRB1*08:02L
ARFYFYTSKTTVAS

SEQ ID NO: 12128 - protein, 15 aa, Severe acute respiratory syndrome coronavirus 2
  REGION 1..15: note = Table B: HLA-DRB1*04:01L HLA-DRB4*01:01L
FYFYTSKTTVASLIN

SEQ ID NO: 12129 - protein, 13 aa, Severe acute respiratory syndrome coronavirus 2
  REGION 1..13: note = Table B: HLA-DRB1*04:01L HLA-DRB1*13:02L HLA-DRB1*08:04L HLA-DRB1*11:03L HLA-DRB1*12:02L
ASLINTLNDLNET

SEQ ID NO: 12130 - protein, 13 aa, Severe acute respiratory syndrome coronavirus 2
  REGION 1..13: note = Table B: HLA-DRB1*04:01L HLA-DRB1*01:01L HLA-DRB3*01:01L HLA-DRB1*07:01L
RYMRSLKVPATVS

SEQ ID NO: 12131 - protein, 15 aa, Severe acute respiratory syndrome coronavirus 2
  REGION 1..15: note = Table B: HLA-DRB1*04:01L HLA-DRB1*04:04L HLA-DRB1*14:01L HLA-DRB1*11:03L HLA-DRB1*11:04L HLA-DRB1*14:02L HLA-DRB5*01:01L HLA-DPA1*01:03-B1*104:01L HLA-DRB1*10:01L HLA-DRB1*08:03L
VPATVSVSSPDAVTA

SEQ ID NO: 12132 - protein, 15 aa, Severe acute respiratory syndrome coronavirus 2
  REGION 1..15: note = Table B: HLA-DRB1*04:01L
TAYNGYLTSSSKTPE

SEQ ID NO: 12133 - protein, 13 aa, Severe acute respiratory syndrome coronavirus 2
  REGION 1..13: note = Table B: HLA-DRB1*04:01L HLA-DRB3*01:01L HLA-DPA1*01:03-B1*02:01L
GYLTSSSKTPEEH

SEQ ID NO: 12134 - protein, 16 aa, Severe acute respiratory syndrome coronavirus 2
  REGION 1..16: note = Table B: HLA-DRB1*04:01L HLA-DRB1*01:01L HLA-DRB1*11:02L HLA-DRB1*11:04L HLA-DRB1*11:01L HLA-DPA1*01:03-B1*02:01L HLA-DRB1*08:02L
TPEEHFIETISLAGSY

SEQ ID NO: 12135 - protein, 14 aa, Severe acute respiratory syndrome coronavirus 2
  REGION 1..14: note = Table B: HLA-DRB1*04:01L HLA-DRB1*11:01L HLA-DPA1*02:01-B1*13:01L HLA-DPA1*01:03-B1*02:01L HLA-DRB1*08:02L HLA-DRB1*08:03L
EHFIETISLAGSYK

SEQ ID NO: 12136 - protein, 14 aa, Severe acute respiratory syndrome coronavirus 2
  REGION 1..14: note = Table B: HLA-DRB1*04:01L HLA-DRB1*11:02L HLA-DRB1*11:03L HLA-DRB1*14:02L HLA-DRB1*09:01L HLA-DPA1*01:03-B1*104:01L HLA-DPA1*01:02-B1*04:01L HLA-DRB1*07:01L HLA-DRB1*08:02L
IETISLAGSYKDWS

SEQ ID NO: 12137 - protein, 14 aa, Severe acute respiratory syndrome coronavirus 2
  REGION 1..14: note = Table B: HLA-DRB1*04:01L HLA-DRB1*13:02L HLA-DRB1*13:03L HLA-DRB1*01:01L HLA-DRB1*08:04L HLA-DRB1*08:77L HLA-DRB3*02:01L HLA-DPA1*03:01-B1*04:02L HLA-DRB1*14:01L HLA-DRB1*11:03L HLA-DRB1*11:04L HLA-DRB1*14:02L HLA-DQA1*01:01-B1*05:01L
  REGION 1..14: note = CONT. FROM ABOVE: HLA-DRB1*08:01L HLA-DRB1*11:01L HLA-DQA1*01-B1 *05L HLA-DRB4*01:01L HLA-DRB1*09:01L HLA-DPA1*01:03-B1*04:02L HL A-DPA1*01:03-B1*104:01L HLA-DRB1*07:01L HLA-DRB1*08:02L HLA-DRB1 *08:03L
DWSYSGQSTQLGIE

SEQ ID NO: 12138 - protein, 12 aa, Severe acute respiratory syndrome coronavirus 2
  REGION 1..12: note = Table B: HLA-DRB1*04:01L HLA-DRB1*03:01L HLA-DRB5*01:01L HLA-DRB1*09:01L HLA-DRB3*01:01L HLA-DPA1*01:03-B1*104:01L HLA-DRB1*15:01L
SVYYTSNPTTFH

SEQ ID NO: 12139 - protein, 15 aa, Severe acute respiratory syndrome coronavirus 2
  REGION 1..15: note = Table B: HLA-DRB1*04:01L HLA-DRB1*11:02L
NPTTFHLDGEVITFD

SEQ ID NO: 12140 - protein, 15 aa, Severe acute respiratory syndrome coronavirus 2
  REGION 1..15: note = Table B: HLA-DRB1*04:01L
PTTFHLDGEVITFDN

SEQ ID NO: 12141 - protein, 14 aa, Severe acute respiratory syndrome coronavirus 2
  REGION 1..14: note = Table B: HLA-DRB1*04:01L HLA-DRB1*03:01L HLA-DRB1*11:02L HLA-DRB1*11:01L HLA-DPA1*01:03-B1*02:01L
GEVITFDNLKTLLS

SEQ ID NO: 12142 - protein, 14 aa, Severe acute respiratory syndrome coronavirus 2
  REGION 1..14: note = Table B: HLA-DRB1*04:01L HLA-DRB1*13:03L HLA-DRB1*01:01L HLA-DRB1*03:01L HLA-DRB1*11:02L HLA-DRB1*11:03L HLA-DRB3*01:01L HLA-DPA1*01:03-B1*02:01L HLA-DQA1*05:05-B1*03:01L HLA-DRB1*10:01L HLA-DRB1*08:02L HLA-DRB1*08:03L
VITFDNLKTLLSLR

SEQ ID NO: 12143 - protein, 14 aa, Severe acute respiratory syndrome coronavirus 2
  REGION 1..14: note = Table B: HLA-DRB1*04:01L
ITFDNLKTLLSLRE

SEQ ID NO: 12144 - protein, 14 aa, Severe acute respiratory syndrome coronavirus 2
  REGION 1..14: note = Table B: HLA-DRB1*04:01L HLA-DRB1*01:01L HLA-DRB1*11:03L HLA-DRB1*11:04L HLA-DRB1*11:01L HLA-DRB3*01:01L HLA-DPA1*01:03-B1*02:01L HLA-DRB1*07:01L
REVRTIKVFTTVDN

SEQ ID NO: 12145 - protein, 14 aa, Severe acute respiratory syndrome coronavirus 2
  REGION 1..14: note = Table B: HLA-DRB1*04:01L HLA-DRB1*01:01L HLA-DRB1*08:77L HLA-DRB1*11:02L HLA-DRB1*11:03L HLA-DRB1*11:04L HLA-DRB1*14:02L HLA-DRB1*11:01L HLA-DRB4*01:01L HLA-DRB1*09:01L HLA-DRB1*12:02L HLA-DRB3*01:01L HLA-DPA1*01:03-B1*02:01L HLA-DRB1*07:01L
  REGION 1..14: note = CONT. FROM ABOVE: HLA-DRB1*08:02L HLA-DRB1*15:01L
VRTIKVFTTVDNIN

SEQ ID NO: 12146 - protein, 11 aa, Severe acute respiratory syndrome coronavirus 2
  REGION 1..11: note = Table B: HLA-DRB1*04:01L HLA-DRB1*04:04L HLA-DRB1*01:01L HLA-DRB1*08:04L HLA-DPA1*01:03-B1*03:01L HLA-DPA1*03:01-B1*04:02L HLA-DRB1*11:04L HLA-DQA1*01:01-B1*05:01L HLA-DRB1*08:01L HLA-DRB5*01:01L
  REGION 1..11: note = CONT. FROM ABOVE: HLA-DPA1*01:03-B1*04:01L HLA-DRB1*09:01L HLA-D PA1*01:03-B1*04:02L HLA-DPA1*02:01-B1*13:01L HLA-DRB1*07:01L HLA -DRB1*08:03L
VFTTVDNINLH

SEQ ID NO: 12147 - protein, 16 aa, Severe acute respiratory syndrome coronavirus 2
  REGION 1..16: note = Table B: HLA-DRB1*04:01L HLA-DRB1*04:04L HLA-DRB1*01:01L HLA-DRB1*08:04L HLA-DRB1*03:01L HLA-DRB3*01:01L HLA-DPA1*01:03-B1*02:01L
GPTYLDGADVTKIKPH

SEQ ID NO: 12148 - protein, 15 aa, Severe acute respiratory syndrome coronavirus 2
  REGION 1..15: note = Table B: HLA-DRB1*04:01L HLA-DRB1*13:02L HLA-DRB1*01:01L HLA-DRB1*08:04L HLA-DRB1*11:01L HLA-DQA1*05:05-B1*03:19L HLA-DRB3*01:01L HLA-DPA1*02:01-B1*13:01L HLA-DRB1*07:01L HLA-DRB1*10:01L
GADVTKIKPHNSHEG

SEQ ID NO: 12149 - protein, 14 aa, Severe acute respiratory syndrome coronavirus 2
  REGION 1..14: note = Table B: HLA-DRB1*04:01L HLA-DRB1*13:02L HLA-DRB1*01:01L HLA-DRB1*08:04L HLA-DRB1*03:01L HLA-DRB1*11:03L HLA-DRB1*11:01L HLA-DQA1*01-B1*05L HLA-DPA1*02:01-B1*13:01L HLA-DPA1*03:01-B1*105:01L HLA-DRB1*07:01L HLA-DRB1*10:01L
  REGION 1..14: note = CONT. FROM ABOVE: HLA-DQA1*01:03-B1*06:01L HLA-DRB1*08:03L HLA-D RB1*15:01L
VTKIKPHNSHEGKT

SEQ ID NO: 12150 - protein, 11 aa, Severe acute respiratory syndrome coronavirus 2
  REGION 1..11: note = Table B: HLA-DRB1*04:01L HLA-DRB1*04:04L HLA-DRB1*01:02L HLA-DRB1*04:10L HLA-DRB1*10:01L HLA-DRB1*04:08L
FYVLPNDDTLR

SEQ ID NO: 12151 - protein, 20 aa, Severe acute respiratory syndrome coronavirus 2
  REGION 1..20: note = Table B: HLA-DRB1*04:01L HLA-DRB1*09:01L HLA-DRB1*07:01L HLA-DRB1*08:02L
LPNDDTLRVEAFEYYHTTDP

SEQ ID NO: 12152 - protein, 18 aa, Severe acute respiratory syndrome coronavirus 2
  REGION 1..18: note = Table B: HLA-DRB1*04:01L HLA-DRB1*13:01L HLA-DRB1*09:01L HLA-DRB1*07:01L HLA-DRB1*08:02L
DDTLRVEAFEYYHTTDPS

SEQ ID NO: 12153 - protein, 13 aa, Severe acute respiratory syndrome coronavirus 2
  REGION 1..13: note = Table B: HLA-DRB1*04:01L HLA-DRB4*03:01NL HLA-DRB1*11:03L HLA-DPA1*02:01-B1*13:01L HLA-DPA1*03:01-B1*105:01L HLA-DRB1*10:01L HLA-DQA1*01:03-B1*06:01L HLA-DRB1*08:03L HLA-DRB1*15:01L
LGRYMSALNHTKK

SEQ ID NO: 12154 - protein, 14 aa, Severe acute respiratory syndrome coronavirus 2
  REGION 1..14: note = Table B: HLA-DRB1*04:01L HLA-DRB1*13:02L HLA-DPA1*01:03-B1*03:01L HLA-DRB1*11:03L HLA-DRB1*14:02L HLA-DRB3*01:01L HLA-DPA1*02:01-B1*13:01L HLA-DPA1*03:01-B1*105:01L HLA-DQA1*05:05-B1*03:01L
  REGION 1..14: note = CONT. FROM ABOVE: HLA-DRB1*10:01L HLA-DQA1*01:03-B1*06:01L HLA-D RB1*08:02L HLA-DRB1*08:03L
LQQIELKFNPPALQ

SEQ ID NO: 12155 - protein, 13 aa, Severe acute respiratory syndrome coronavirus 2
  REGION 1..13: note = Table B: HLA-DRB1*04:01L HLA-DRB1*04:04L HLA-DRB3*02:01L HLA-DPA1*01:03-B1*03:01L HLA-DPA1*03:01-B1*04:02L HLA-DRB1*03:01L HLA-DRB1*11:02L HLA-DRB4*01:01L HLA-DPA1*01:03-B1*04:01L HLA-DQA1*05:05-B1*03:116L
  REGION 1..13: note = CONT. FROM ABOVE: HLA-DPA1*01:03-B1*04:02L HLA-DRB3*01:01L HLA-D PA1*01:03-B1*02:01L HLA-DPA1*01:03-B1*104:01L HLA-DRB1*08:02L HL A-DRB1*15:01L
DAYYRARAGEAAN

SEQ ID NO: 12156 - protein, 14 aa, Severe acute respiratory syndrome coronavirus 2
  REGION 1..14: note = Table B: HLA-DRB1*04:01L HLA-DRB1*14:02L HLA-DQA1*05:05-B1*03:19L HLA-DRB1*09:01L HLA-DPA1*01:03-B1*02:01L HLA-DPA1*01:03-B1*104:01L HLA-DRB1*07:01L
ETMSYLFQHANLDS

SEQ ID NO: 12157 - protein, 16 aa, Severe acute respiratory syndrome coronavirus 2
  REGION 1..16: note = Table B: HLA-DRB1*04:01L HLA-DRB1*01:01L
AVMYMGTLSYEQFKKG

SEQ ID NO: 12158 - protein, 14 aa, Severe acute respiratory syndrome coronavirus 2
  REGION 1..14: note = Table B: HLA-DRB1*04:01L HLA-DRB3*02:01L HLA-DRB1*03:01L HLA-DRB1*11:02L HLA-DRB1*13:01L HLA-DQA1*05:05-B1*03:116L HLA-DRB1*09:01L HLA-DRB1*08:02L HLA-DRB1*15:01L
MGTLSYEQFKKGVQ

SEQ ID NO: 12159 - protein, 14 aa, Severe acute respiratory syndrome coronavirus 2
  REGION 1..14: note = Table B: HLA-DRB1*04:01L HLA-DRB1*03:01L HLA-DRB1*11:02L HLA-DRB1*11:01L HLA-DPA1*01:03-B1*02:01L HLA-DRB1*08:02L
ATKYLVQQESPFVM

SEQ ID NO: 12160 - protein, 15 aa, Severe acute respiratory syndrome coronavirus 2
  REGION 1..15: note = Table B: HLA-DRB1*04:01L HLA-DRB1*01:01L HLA-DPA1*03:01-B1*04:02L HLA-DRB1*11:02L HLA-DRB1*11:03L HLA-DRB1*13:01L HLA-DPA1*02:01-B1*13:01L HLA-DPA1*01:03-B1*02:01L HLA-DQA1*05:05-B1*03:01L
  REGION 1..15: note = CONT. FROM ABOVE: HLA-DRB1*07:01L HLA-DRB1*10:01L HLA-DRB1*08:03 L
YKHITSKETLYCIDG

SEQ ID NO: 12161 - protein, 14 aa, Severe acute respiratory syndrome coronavirus 2
  REGION 1..14: note = Table B: HLA-DRB1*04:01L HLA-DRB1*04:04L HLA-DRB1*11:04L HLA-DRB1*08:01L HLA-DRB1*07:01L
KETLYCIDGALLTK

SEQ ID NO: 12162 - protein, 18 aa, Severe acute respiratory syndrome coronavirus 2
  REGION 1..18: note = Table B: HLA-DRB1*04:01L HLA-DRB1*11:01L
GPITDVFYKENSYTTTIK

SEQ ID NO: 12163 - protein, 16 aa, Severe acute respiratory syndrome coronavirus 2
  REGION 1..16: note = Table B: HLA-DRB1*04:01L HLA-DRB1*04:04L HLA-DRB1*08:04L HLA-DPA1*03:01-B1*04:02L HLA-DRB1*14:01L HLA-DRB1*14:02L HLA-DRB1*11:01L HLA-DRB3*01:01L HLA-DRB1*07:01L
TDVFYKENSYTTTIKP

SEQ ID NO: 12164 - protein, 18 aa, Severe acute respiratory syndrome coronavirus 2
  REGION 1..18: note = Table B: HLA-DRB1*04:01L HLA-DRB1*04:03L HLA-DRB1*04:04L HLA-DRB1*01:01L HLA-DRB1*08:04L HLA-DRB3*02:01L HLA-DPA1*03:01-B1*04:02L HLA-DRB1*03:01L HLA-DRB1*14:01L HLA-DRB1*11:02L HLA-DRB1*11:03L HLA-DRB1*11:04L HLA-DRB1*14:02L
  REGION 1..18: note = CONT. FROM ABOVE: HLA-DRB1*08:01L HLA-DRB1*11:01L HLA-DQA1*05:01 -B1*02:01L HLA-DRB3*01:01L HLA-DPA1*01:03-B1*104:01L HLA-DPA1*01 :02-B1*04:01L HLA-DRB1*07:01L HLA-DRB1*10:01L HLA-DRB1*08:02L
KPVTYKLDGVVCTEIDPK

SEQ ID NO: 12165 - protein, 13 aa, Severe acute respiratory syndrome coronavirus 2
  REGION 1..13: note = Table B: HLA-DRB1*04:01L HLA-DRB1*01:01L HLA-DRB3*02:01L HLA-DRB1*11:03L HLA-DRB1*11:04L HLA-DRB1*08:01L HLA-DRB1*11:01L HLA-DPA1*01:03-B1*04:01L HLA-DRB1*09:01L HLA-DRB1*12:02L HLA-DRB3*01:01L HLA-DPA1*01:03-B1*02:01L
  REGION 1..13: note = CONT. FROM ABOVE: HLA-DPA1*01:03-B1*104:01L HLA-DRB1*07:01L HLA- DRB1*08:03L
SYFTEQPIDLVPN

SEQ ID NO: 12166 - protein, 12 aa, Severe acute respiratory syndrome coronavirus 2
  REGION 1..12: note = Table B: HLA-DRB1*04:01L HLA-DRB1*04:04L HLA-DRB1*01:01L HLA-DRB3*02:01L HLA-DPA1*01:03-B1*03:01L HLA-DPA1*03:01-B1*04:02L HLA-DRB1*03:01L HLA-DRB1*11:01L HLA-DRB5*01:01L HLA-DRB1*09:01L HLA-DPA1*03:01-B1*105:01L
  REGION 1..12: note = CONT. FROM ABOVE: HLA-DPA1*01:02-B1*04:01L HLA-DRB1*07:01L HLA-D RB1*10:01L HLA-DQA1*01:03-B1*06:01L HLA-DRB1*08:03L
DLVPNQPYPNAS

SEQ ID NO: 12167 - protein, 13 aa, Severe acute respiratory syndrome coronavirus 2
  REGION 1..13: note = Table B: HLA-DRB1*04:01L HLA-DRB1*11:03L HLA-DRB1*14:02L HLA-DRB4*01:01L HLA-DRB1*09:01L
DNIKFADDLNQLT

SEQ ID NO: 12168 - protein, 12 aa, Severe acute respiratory syndrome coronavirus 2
  REGION 1..12: note = Table B: HLA-DRB1*04:01L HLA-DRB1*13:02L HLA-DRB1*13:03L HLA-DRB1*01:03L HLA-DRB1*04:04L HLA-DQA1*01:02-B1*06:02L HLA-DRB1*01:02L HLA-DRB4*03:01NL HLA-DRB1*08:04L HLA-DRB1*11:04L HLA-DRB1*04:10L HLA-DRB1*12:01L HLA-DRB3*01:01L
  REGION 1..12: note = CONT. FROM ABOVE: HLA-DPA1*03:01-B1*105:01L HLA-DRB1*14:54L HLA- DRB1*10:01L HLA-DRB1*04:08L HLA-DRB1*08:03L
IKFADDLNQLTG

SEQ ID NO: 12169 - protein, 16 aa, Severe acute respiratory syndrome coronavirus 2
  REGION 1..16: note = Table B: HLA-DRB1*04:01L HLA-DPA1*01:03-B1*03:01L HLA-DPA1*03:01-B1*04:02L HLA-DPA1*01:03-B1*104:01L
DDLNQLTGYKKPASRE

SEQ ID NO: 12170 - protein, 16 aa, Severe acute respiratory syndrome coronavirus 2
  REGION 1..16: note = Table B: HLA-DRB1*04:01L HLA-DPA1*01:03-B1*03:01L HLA-DPA1*01:03-B1*104:01L HLA-DRB1*10:01L
LNQLTGYKKPASRELK

SEQ ID NO: 12171 - protein, 14 aa, Severe acute respiratory syndrome coronavirus 2
  REGION 1..14: note = Table B: HLA-DRB1*04:01L HLA-DRB1*13:02L HLA-DRB1*13:03L HLA-DRB1*04:04L HLA-DRB1*01:02L HLA-DRB4*03:01NL HLA-DRB1*08:04L HLA-DRB1*08:77L HLA-DRB3*02:01L HLA-DPA1*03:01-B1*04:02L HLA-DRB1*03:01L HLA-DRB1*14:01L HLA-DRB1*11:03L HLA-DRB1*11:04L
  REGION 1..14: note = CONT. FROM ABOVE: HLA-DRB1*14:02L HLA-DRB1*08:01L HLA-DRB1*11:01 L HLA-DRB4*01:01L HLA-DPA1*01:03-B1*04:01L HLA-DRB1*04:10L HLA-D RB1*09:01L HLA-DPA1*01:03-B1*04:02L HLA-DRB1*12:01L HLA-DRB1*12: 02L HLA-DRB3*01:01L HLA-DPA1*02:01-B1*13:01L HLA-DRB1*14:54L
  REGION 1..14: note = CONT. FROM ABOVE: HLA-DPA1*01:03-B1*104:01L HLA-DRB1*14:17L HLA- DPA1*01:02-B1*04:01L HLA-DRB1*07:01L HLA-DRB1*10:01L HLA-DRB1*08 :02L HLA-DRB1*08:03L HLA-DRB1*15:03L
FPDLNGDVVAIDYK

SEQ ID NO: 12172 - protein, 13 aa, Severe acute respiratory syndrome coronavirus 2
  REGION 1..13: note = Table B: HLA-DRB1*04:01L HLA-DRB1*01:01L HLA-DPA1*03:01-B1*04:02L HLA-DRB1*11:01L HLA-DRB5*01:01L HLA-DRB4*01:01L HLA-DRB1*09:01L HLA-DPA1*01:03-B1*04:02L HLA-DRB3*01:01L HLA-DPA1*01:03-B1*104:01L HLA-DRB1*07:01L
SNSFDVLKSEDAQ

SEQ ID NO: 12173 - protein, 11 aa, Severe acute respiratory syndrome coronavirus 2
  REGION 1..11: note = Table B: HLA-DRB1*04:01L HLA-DRB1*13:03L HLA-DRB1*01:03L HLA-DRB1*04:04L HLA-DRB1*04:05L HLA-DRB1*01:02L HLA-DRB4*03:01NL HLA-DRB1*11:04L HLA-DQA1*05:01-B1*02:01L HLA-DRB1*04:10L HLA-DRB1*12:01L HLA-DRB1*14:54L HLA-DRB1*10:01L HLA-DRB1*16:01L
  REGION 1..11: note = CONT. FROM ABOVE: HLA-DRB1*04:08L
FDVLKSEDAQG

SEQ ID NO: 12174 - protein, 12 aa, Severe acute respiratory syndrome coronavirus 2
  REGION 1..12: note = Table B: HLA-DRB1*04:01L HLA-DRB1*08:04L HLA-DRB1*11:03L HLA-DQA1*01:01-B1*05:01L HLA-DRB1*11:01L HLA-DRB1*12:02L HLA-DRB3*01:01L HLA-DPA1*02:01-B1*13:01L HLA-DQA1*05:05-B1*03:01L HLA-DRB1*08:03L
DIILKPANNSLK

SEQ ID NO: 12175 - protein, 14 aa, Severe acute respiratory syndrome coronavirus 2
  REGION 1..14: note = Table B: HLA-DRB1*04:01L HLA-DRB1*01:01L HLA-DRB1*08:77L HLA-DRB1*11:02L HLA-DRB1*14:02L HLA-DQA1*01:01-B1*05:01L HLA-DRB1*11:01L HLA-DRB4*01:01L HLA-DPA1*01:03-B1*04:01L HLA-DPA1*01:03-B1*04:02L HLA-DRB1*12:02L HLA-DRB3*01:01L
  REGION 1..14: note = CONT. FROM ABOVE: HLA-DPA1*01:03-B1*02:01L HLA-DPA1*01:03-B1*104 :01L HLA-DRB1*07:01L
TDLMAAYVDNSSLT

SEQ ID NO: 12176 - protein, 13 aa, Severe acute respiratory syndrome coronavirus 2
  REGION 1..13: note = Table B: HLA-DRB1*04:01L HLA-DRB1*08:04L HLA-DRB1*11:04L HLA-DRB1*11:01L HLA-DRB3*01:01L
SRVLGLKTLATHG

SEQ ID NO: 12177 - protein, 14 aa, Severe acute respiratory syndrome coronavirus 2
  REGION 1..14: note = Table B: HLA-DRB1*04:01L HLA-DRB1*11:03L HLA-DRB1*11:04L HLA-DRB1*08:01L HLA-DRB1*11:01L HLA-DRB3*01:01L HLA-DRB1*10:01L HLA-DRB1*15:01L
VLGLKTLATHGLAA

SEQ ID NO: 12178 - protein, 14 aa, Severe acute respiratory syndrome coronavirus 2
  REGION 1..14: note = Table B: HLA-DRB1*04:01L HLA-DRB1*01:01L HLA-DRB1*08:77L HLA-DRB1*03:01L HLA-DRB1*11:02L HLA-DRB1*11:03L HLA-DRB1*11:04L HLA-DRB1*14:02L HLA-DRB1*11:01L HLA-DRB4*01:01L HLA-DRB1*09:01L HLA-DRB1*12:02L HLA-DRB3*01:01L HLA-DRB1*07:01L HLA-DRB1*10:01L
  REGION 1..14: note = CONT. FROM ABOVE: HLA-DRB1*08:02L HLA-DRB1*08:03L
LAAVNSVPWDTIAN

SEQ ID NO: 12179 - protein, 10 aa, Severe acute respiratory syndrome coronavirus 2
  REGION 1..10: note = Table B: HLA-DRB1*04:01L HLA-DRB1*13:02M HLA-DRB1*13:03M HLA-DRB1*01:03L HLA-DRB1*04:02L HLA-DRB1*04:04L HLA-DRB1*01:01L HLA-DRB4*03:01NM HLA-DRB3*02:01L HLA-DRB1*14:01L HLA-DRB1*11:04M HLA-DRB1*14:02L HLA-DRB1*08:01M HLA-DRB1*11:01L HLA-DRB5*01:01M
  REGION 1..10: note = CONT. FROM ABOVE: HLA-DRB4*02:01NL HLA-DRB1*13:01L HLA-DPA1*01:0 3-B1*04:02L HLA-DRB1*12:01M HLA-DRB1*12:02M HLA-DRB3*01:01L HLA- DPA1*03:01-B1*105:01L HLA-DQA1*03:01-B1*03:02M HLA-DRB1*14:54L H LA-DQA1*05:05-B1*03:01M HLA-DRB1*14:17L HLA-DRB1*16:01L
  REGION 1..10: note = CONT. FROM ABOVE: HLA-DQA1*01:03-B1*06:01L HLA-DRB1*08:02L HLA-D RB1*08:03L HLA-DQA1*02:01-B1*03:03L HLA-DRB1*15:01L
VSTTTNIVTR

SEQ ID NO: 12180 - protein, 14 aa, Severe acute respiratory syndrome coronavirus 2
  REGION 1..14: note = Table B: HLA-DRB1*04:01L HLA-DRB1*03:01L HLA-DRB1*14:02L HLA-DRB1*11:01L HLA-DRB1*04:10L HLA-DPA1*02:01-B1*13:01L HLA-DPA1*01:02-B1*04:01L
NSRIKASMPTTIAK

SEQ ID NO: 12181 - protein, 13 aa, Severe acute respiratory syndrome coronavirus 2
  REGION 1..13: note = Table B: HLA-DRB1*04:01L HLA-DRB1*15:01L
ASFNYLKSPNFSK

SEQ ID NO: 12182 - protein, 14 aa, Severe acute respiratory syndrome coronavirus 2
  REGION 1..14: note = Table B: HLA-DRB1*04:01L HLA-DRB1*08:01L HLA-DPA1*01:03-B1*02:01L HLA-DRB1*08:02L
LGSLIYSTAALGVL

SEQ ID NO: 12183 - protein, 15 aa, Severe acute respiratory syndrome coronavirus 2
  REGION 1..15: note = Table B: HLA-DRB1*04:01L HLA-DRB1*01:01L HLA-DRB1*08:04L HLA-DRB1*14:01L HLA-DRB1*11:03L HLA-DQA1*01-B1*05L HLA-DRB1*09:01L HLA-DRB1*08:03L
TAALGVLMSNLGMPS

SEQ ID NO: 12184 - protein, 13 aa, Severe acute respiratory syndrome coronavirus 2
  REGION 1..13: note = Table B: HLA-DRB1*04:01L HLA-DRB1*04:04L HLA-DRB1*08:04L HLA-DRB1*11:01L HLA-DRB4*01:01L HLA-DRB3*01:01L
EGYLNSTNVTIAT

SEQ ID NO: 12185 - protein, 14 aa, Severe acute respiratory syndrome coronavirus 2
  REGION 1..14: note = Table B: HLA-DRB1*04:01L HLA-DRB1*13:02L HLA-DRB1*13:03L HLA-DRB1*01:03L HLA-DRB1*01:01L HLA-DRB1*08:77L HLA-DRB3*02:01L HLA-DPA1*01:03-B1*03:01L HLA-DPA1*03:01-B1*04:02L HLA-DRB1*14:01L HLA-DRB1*11:03L HLA-DRB1*11:04L HLA-DRB1*14:02L
  REGION 1..14: note = CONT. FROM ABOVE: HLA-DRB1*11:01L HLA-DRB4*01:01L HLA-DRB1*09:01 L HLA-DRB1*12:02L HLA-DPA1*01:03-B1*104:01L HLA-DRB1*08:02L HLA- DRB1*08:03L
LSGLDSLDTYPSLE

SEQ ID NO: 12186 - protein, 14 aa, Severe acute respiratory syndrome coronavirus 2
  REGION 1..14: note = Table B: HLA-DRB1*04:01L HLA-DPA1*01:03-B1*03:01L HLA-DRB1*08:03L
SGLDSLDTYPSLET

SEQ ID NO: 12187 - protein, 14 aa, Severe acute respiratory syndrome coronavirus 2
  REGION 1..14: note = Table B: HLA-DRB1*04:01L HLA-DRB1*03:01L HLA-DRB1*11:02L HLA-DRB1*11:04L HLA-DRB1*11:01L HLA-DQA1*05:05-B1*03:19L HLA-DRB4*01:01L HLA-DPA1*01:03-B1*02:01L HLA-DRB1*08:02L
ISSFKWDLTAFGLV

SEQ ID NO: 12188 - protein, 14 aa, Severe acute respiratory syndrome coronavirus 2
  REGION 1..14: note = Table B: HLA-DRB1*04:01L HLA-DRB1*01:01L HLA-DRB1*08:04L HLA-DRB1*11:03L HLA-DRB1*11:04L HLA-DRB1*14:02L HLA-DRB1*11:01L HLA-DQA1*01-B1*05L HLA-DRB1*09:01L HLA-DPA1*01:03-B1*04:02L HLA-DRB3*01:01L HLA-DPA1*02:01-B1*13:01L
  REGION 1..14: note = CONT. FROM ABOVE: HLA-DPA1*01:03-B1*104:01L HLA-DRB1*07:01L HLA- DRB1*08:03L
INLVQMAPISAMVR

SEQ ID NO: 12189 - protein, 15 aa, Severe acute respiratory syndrome coronavirus 2
  REGION 1..15: note = Table B: HLA-DRB1*04:01L HLA-DRB1*09:01L
SFYYVWKSYVHVVDG

SEQ ID NO: 12190 - protein, 12 aa, Severe acute respiratory syndrome coronavirus 2
  REGION 1..12: note = Table B: HLA-DRB1*04:01L HLA-DRB1*13:02L HLA-DRB1*04:04L HLA-DRB1*01:01L HLA-DRB1*08:04L HLA-DRB3*02:01L HLA-DPA1*01:03-B1*03:01L HLA-DPA1*03:01-B1*04:02L HLA-DRB1*14:01L HLA-DRB1*11:03L HLA-DRB1*11:04L
  REGION 1..12: note = CONT. FROM ABOVE: HLA-DQA1*01:01-B1*05:01L HLA-DRB1*11:01L HLA-D RB1*09:01L HLA-DRB1*12:02L HLA-DRB3*01:01L HLA-DPA1*02:01-B1*13: 01L HLA-DPA1*01:02-B1*04:01L HLA-DRB1*07:01L HLA-DRB1*10:01L HLA -DRB1*08:03L HLA-DRB1*15:01L
RSFYVYANGGKG

SEQ ID NO: 12191 - protein, 14 aa, Severe acute respiratory syndrome coronavirus 2
  REGION 1..14: note = Table B: HLA-DRB1*04:01L HLA-DRB1*04:10L HLA-DRB1*07:01L
ISDEVARDLSLQFK

SEQ ID NO: 12192 - protein, 15 aa, Severe acute respiratory syndrome coronavirus 2
  REGION 1..15: note = Table B: HLA-DRB1*04:01L
SDEVARDLSLQFKRP

SEQ ID NO: 12193 - protein, 12 aa, Severe acute respiratory syndrome coronavirus 2
  REGION 1..12: note = Table B: HLA-DRB1*04:01L HLA-DRB1*08:04L HLA-DRB3*02:01L HLA-DPA1*01:03-B1*03:01L HLA-DPA1*03:01-B1*04:02L HLA-DRB1*03:01L HLA-DRB1*11:03L HLA-DRB1*11:04L HLA-DRB1*11:01L HLA-DRB5*01:01L HLA-DRB4*02:01NL HLA-DRB1*13:01L HLA-DRB1*04:10L
  REGION 1..12: note = CONT. FROM ABOVE: HLA-DRB1*09:01L HLA-DRB1*12:02L HLA-DRB3*01:01 L HLA-DPA1*03:01-B1*105:01L HLA-DPA1*01:02-B1*04:01L HLA-DRB1*10 :01L HLA-DRB1*08:03L HLA-DRB1*15:03L
SSYIVDSVTVKN

SEQ ID NO: 12194 - protein, 11 aa, Severe acute respiratory syndrome coronavirus 2
  REGION 1..11: note = Table B: HLA-DRB1*04:01L HLA-DRB1*04:04L HLA-DRB1*08:04L HLA-DRB3*02:01L HLA-DPA1*01:03-B1*03:01L HLA-DRB1*11:03L HLA-DRB1*11:04L HLA-DRB1*12:02L HLA-DPA1*03:01-B1*105:01L HLA-DQA1*05:05-B1*03:01L HLA-DPA1*01:02-B1*04:01L
  REGION 1..11: note = CONT. FROM ABOVE: HLA-DRB1*15:03L
YIVDSVTVKNG

SEQ ID NO: 12195 - protein, 14 aa, Severe acute respiratory syndrome coronavirus 2
  REGION 1..14: note = Table B: HLA-DRB1*04:01L HLA-DRB1*01:01L HLA-DPA1*03:01-B1*04:02L HLA-DRB1*11:03L HLA-DRB1*07:01L HLA-DRB1*08:03L
GSIHLYFDKAGQKT

SEQ ID NO: 12196 - protein, 11 aa, Severe acute respiratory syndrome coronavirus 2
  REGION 1..11: note = Table B: HLA-DRB1*04:01L HLA-DRB1*01:01L HLA-DQA1*05:05-B1*03:01L
LYFDKAGQKTY

SEQ ID NO: 12197 - protein, 10 aa, Severe acute respiratory syndrome coronavirus 2
  REGION 1..10: note = Table B: HLA-DRB1*04:01L HLA-DRB1*04:03M HLA-DRB1*13:02L HLA-DRB1*13:03L HLA-DRB1*01:03L HLA-DRB1*04:02M HLA-DRB1*04:04L HLA-DRB1*04:05L HLA-DQA1*01:02-B1*06:02L HLA-DRB1*01:02L HLA-DRB4*03:01NL HLA-DRB1*08:04L HLA-DRB1*14:01L HLA-DRB1*11:03L
  REGION 1..10: note = CONT. FROM ABOVE: HLA-DRB1*11:04L HLA-DRB1*11:01L HLA-DQA1*01-B1 *05L HLA-DQA1*05:01-B1*02:01L HLA-DRB1*04:10M HLA-DRB1*12:01L HL A-DRB1*12:02L HLA-DPA1*03:01-B1*105:01L HLA-DQA1*03:01-B1*03:02L HLA-DRB1*14:54L HLA-DQA1*05:05-B1*03:01L HLA-DRB1*14:17M
  REGION 1..10: note = CONT. FROM ABOVE: HLA-DRB1*10:01L HLA-DRB1*16:01L HLA-DRB1*04:08 M HLA-DRB1*08:03L HLA-DQA1*02:01-B1*03:03L HLA-DRB1*15:03L
FVNLDNLRAN

SEQ ID NO: 12198 - protein, 16 aa, Severe acute respiratory syndrome coronavirus 2
  REGION 1..16: note = Table B: HLA-DRB1*04:01L HLA-DRB1*01:01L HLA-DPA1*03:01-B1*04:02L HLA-DRB1*11:02L HLA-DRB1*13:01L HLA-DRB4*01:01L HLA-DQA1*05:05-B1*03:116L HLA-DRB1*04:10L HLA-DRB1*09:01L HLA-DPA1*01:03-B1*04:02L
  REGION 1..16: note = CONT. FROM ABOVE: HLA-DPA1*01:03-B1*02:01L HLA-DPA1*01:03-B1*104 :01L HLA-DPA1*01:02-B1*04:01L HLA-DRB1*07:01L HLA-DRB1*10:01L HL A-DRB1*08:02L HLA-DRB1*08:03L
LDNLRANNTKGSLPIN

SEQ ID NO: 12199 - protein, 14 aa, Severe acute respiratory syndrome coronavirus 2
  REGION 1..14: note = Table B: HLA-DRB1*04:01L HLA-DRB1*01:01L HLA-DRB1*11:02L HLA-DRB5*01:01L HLA-DRB1*08:03L
INVIVFDGKSKCEE

SEQ ID NO: 12200 - protein, 14 aa, Severe acute respiratory syndrome coronavirus 2
  REGION 1..14: note = Table B: HLA-DRB1*04:01L HLA-DRB1*11:02L HLA-DRB5*01:01L HLA-DRB1*13:01L HLA-DRB1*08:03L
NVIVFDGKSKCEES

SEQ ID NO: 12201 - protein, 11 aa, Severe acute respiratory syndrome coronavirus 2
  REGION 1..11: note = Table B: HLA-DRB1*04:01L HLA-DRB1*04:03L HLA-DRB1*04:02L HLA-DRB1*04:05L HLA-DRB1*11:03L HLA-DRB1*14:54L HLA-DRB1*04:08L
EESSAKSASVY

SEQ ID NO: 12202 - protein, 14 aa, Severe acute respiratory syndrome coronavirus 2
  REGION 1..14: note = Table B: HLA-DRB1*04:01L HLA-DRB1*04:04L HLA-DRB1*01:02L HLA-DRB1*08:04L HLA-DRB1*08:77L HLA-DPA1*01:03-B1*03:01L HLA-DRB1*14:01L HLA-DRB1*11:03L HLA-DRB1*11:04L HLA-DRB1*14:02L HLA-DRB5*01:01L HLA-DRB4*01:01L HLA-DRB1*12:02L HLA-DRB3*01:01L
  REGION 1..14: note = CONT. FROM ABOVE: HLA-DPA1*02:01-B1*13:01L HLA-DPA1*03:01-B1*105 :01L HLA-DRB1*10:01L HLA-DRB1*04:08L HLA-DRB1*08:03L HLA-DRB1*15 :03L
DQALVSDVGDSAEV

SEQ ID NO: 12203 - protein, 14 aa, Severe acute respiratory syndrome coronavirus 2
  REGION 1..14: note = Table B: HLA-DRB1*04:01L HLA-DRB1*13:03L HLA-DRB1*01:03L HLA-DRB1*04:04L HLA-DRB1*01:02L HLA-DRB1*11:04L HLA-DRB1*12:01L HLA-DRB1*14:54L HLA-DRB1*10:01L HLA-DRB1*04:08L
QALVSDVGDSAEVA

SEQ ID NO: 12204 - protein, 11 aa, Severe acute respiratory syndrome coronavirus 2
  REGION 1..11: note = Table B: HLA-DRB1*04:01L HLA-DRB1*04:04L HLA-DQA1*01:02-B1*06:02L HLA-DRB1*01:01L HLA-DRB1*01:02L HLA-DRB1*08:04L HLA-DRB1*08:77L HLA-DRB3*02:01L HLA-DPA1*01:03-B1*03:01L HLA-DPA1*03:01-B1*04:02L
  REGION 1..11: note = CONT. FROM ABOVE: HLA-DRB1*14:01L HLA-DRB1*11:03L HLA-DRB1*11:04 L HLA-DRB1*08:01L HLA-DRB1*11:01L HLA-DRB4*02:01NL HLA-DRB1*13:0 1L HLA-DRB4*01:01L HLA-DPA1*01:03-B1*04:01L HLA-DQA1*05:05-B1*03 :116L HLA-DRB1*04:10L HLA-DRB1*09:01L HLA-DRB1*12:02L
  REGION 1..11: note = CONT. FROM ABOVE: HLA-DRB3*01:01L HLA-DPA1*02:01-B1*13:01L HLA-D PA1*01:03-B1*104:01L HLA-DPA1*01:02-B1*04:01L HLA-DRB1*07:01L HL A-DRB1*10:01L HLA-DRB1*04:08L HLA-DRB1*08:02L HLA-DRB1*08:03L HL A-DRB1*15:03L
DVGDSAEVAVK

SEQ ID NO: 12205 - protein, 13 aa, Severe acute respiratory syndrome coronavirus 2
  REGION 1..13: note = Table B: HLA-DRB1*04:01L HLA-DRB1*08:04L HLA-DRB1*11:01L HLA-DRB3*01:01L HLA-DPA1*01:03-B1*104:01L HLA-DRB1*08:03L HLA-DRB1*15:01L
NTFSSTFNVPMEK

SEQ ID NO: 12206 - protein, 15 aa, Severe acute respiratory syndrome coronavirus 2
  REGION 1..15: note = Table B: HLA-DRB1*04:01L HLA-DRB1*11:01L HLA-DRB3*01:01L
NVPMEKLKTLVATAE

SEQ ID NO: 12207 - protein, 12 aa, Severe acute respiratory syndrome coronavirus 2
  REGION 1..12: note = Table B: HLA-DRB1*04:01L HLA-DRB1*01:01L HLA-DRB1*08:04L HLA-DRB1*11:03L HLA-DRB1*09:01L HLA-DRB3*01:01L HLA-DRB1*10:01L
LVATAEAELAKN

SEQ ID NO: 12208 - protein, 14 aa, Severe acute respiratory syndrome coronavirus 2
  REGION 1..14: note = Table B: HLA-DRB1*04:01L HLA-DRB1*04:04L HLA-DRB1*08:77L HLA-DRB1*03:01L HLA-DRB1*11:02L HLA-DRB1*11:03L HLA-DRB1*11:04L HLA-DRB1*14:02L HLA-DRB1*11:01L HLA-DRB4*01:01L HLA-DQA1*05:05-B1*03:116L HLA-DRB1*09:01L
  REGION 1..14: note = CONT. FROM ABOVE: HLA-DPA1*01:03-B1*04:02L HLA-DRB3*01:01L HLA-D PA1*01:03-B1*02:01L HLA-DPA1*01:03-B1*104:01L HLA-DRB1*07:01L HL A-DRB1*10:01L HLA-DRB1*08:02L HLA-DRB1*08:03L
EAELAKNVSLDNVL

SEQ ID NO: 12209 - protein, 14 aa, Severe acute respiratory syndrome coronavirus 2
  REGION 1..14: note = Table B: HLA-DRB1*04:01L HLA-DRB1*04:04L HLA-DRB1*08:04L HLA-DPA1*03:01-B1*04:02L HLA-DRB1*11:03L HLA-DRB1*13:01L HLA-DRB1*09:01L HLA-DRB1*12:02L HLA-DRB1*10:01L
GFVDSDVETKDVVE

SEQ ID NO: 12210 - protein, 15 aa, Severe acute respiratory syndrome coronavirus 2
  REGION 1..15: note = Table B: HLA-DRB1*04:01L HLA-DRB1*01:01L HLA-DRB1*08:77L HLA-DRB1*11:02L HLA-DQA1*01:01-B1*05:01L HLA-DRB1*13:01L HLA-DRB1*09:01L HLA-DPA1*01:03-B1*104:01L HLA-DRB1*08:02L HLA-DRB1*15:01L
NYMLTYNKVENMTPR

SEQ ID NO: 12211 - protein, 15 aa, Severe acute respiratory syndrome coronavirus 2
  REGION 1..15: note = Table B: HLA-DRB1*04:01L HLA-DRB1*04:03L HLA-DRB1*04:02L HLA-DRB1*04:04L HLA-DRB1*11:04L HLA-DRB1*11:01L HLA-DQA1*05:05-B1*03:19L HLA-DRB1*15:03L
TPRDLGACIDCSARH

SEQ ID NO: 12212 - protein, 16 aa, Severe acute respiratory syndrome coronavirus 2
  REGION 1..16: note = Table B: HLA-DRB1*04:01L HLA-DRB3*02:01L HLA-DRB1*10:01L
SARHINAQVAKSHNIA

SEQ ID NO: 12213 - protein, 14 aa, Severe acute respiratory syndrome coronavirus 2
  REGION 1..14: note = Table B: HLA-DRB1*04:01L HLA-DRB1*14:02L HLA-DRB1*08:02L
SHNIALIWNVKDFM

SEQ ID NO: 12214 - protein, 16 aa, Severe acute respiratory syndrome coronavirus 2
  REGION 1..16: note = Table B: HLA-DRB1*04:01L HLA-DRB3*02:01L HLA-DRB4*01:01L
IALIWNVKDFMSLSEQ

SEQ ID NO: 12215 - protein, 14 aa, Severe acute respiratory syndrome coronavirus 2
  REGION 1..14: note = Table B: HLA-DRB1*04:01L HLA-DRB3*02:01L HLA-DRB1*03:01L HLA-DRB1*11:03L HLA-DRB1*11:04L HLA-DRB1*14:02L HLA-DRB1*11:01L HLA-DPA1*02:01-B1*13:01L HLA-DRB1*10:01L HLA-DRB1*15:01L
VKDFMSLSEQLRKQ

SEQ ID NO: 12216 - protein, 14 aa, Severe acute respiratory syndrome coronavirus 2
  REGION 1..14: note = Table B: HLA-DRB1*04:01L HLA-DRB1*13:02L HLA-DRB1*01:01L HLA-DRB1*03:01L HLA-DRB1*11:03L HLA-DQA1*03:01-B1*03:02L HLA-DRB1*14:17L HLA-DRB1*07:01L
SEQLRKQIRSAAKK

SEQ ID NO: 12217 - protein, 15 aa, Severe acute respiratory syndrome coronavirus 2
  REGION 1..15: note = Table B: HLA-DRB1*04:01L HLA-DRB1*01:01L HLA-DRB1*11:01L
TRQVVNVVTTKIALK

SEQ ID NO: 12218 - protein, 13 aa, Severe acute respiratory syndrome coronavirus 2
  REGION 1..13: note = Table B: HLA-DRB1*04:01L HLA-DRB1*04:04L HLA-DRB1*11:02L HLA-DRB1*11:04L HLA-DRB1*11:01L HLA-DRB3*01:01L HLA-DRB1*08:02L
AAIFYLITPVHVM

SEQ ID NO: 12219 - protein, 13 aa, Severe acute respiratory syndrome coronavirus 2
  REGION 1..13: note = Table B: HLA-DRB1*04:01L HLA-DRB1*04:04L HLA-DRB1*11:04L HLA-DRB1*11:01L HLA-DRB3*01:01L
AIFYLITPVHVMS

SEQ ID NO: 12220 - protein, 13 aa, Severe acute respiratory syndrome coronavirus 2
  REGION 1..13: note = Table B: HLA-DRB1*04:01L HLA-DRB1*11:02L HLA-DRB4*01:01L HLA-DPA1*01:03-B1*02:01L HLA-DRB1*08:02L
EIIGYKAIDGGVT

SEQ ID NO: 12221 - protein, 13 aa, Severe acute respiratory syndrome coronavirus 2
  REGION 1..13: note = Table B: HLA-DRB1*04:01L
IIGYKAIDGGVTR

SEQ ID NO: 12222 - protein, 15 aa, Severe acute respiratory syndrome coronavirus 2
  REGION 1..15: note = Table B: HLA-DRB1*04:01L HLA-DRB1*13:02L HLA-DRB4*03:01NL HLA-DRB1*08:04L HLA-DRB1*11:04L HLA-DRB1*08:01L HLA-DRB1*11:01L HLA-DRB1*04:10L HLA-DRB3*01:01L
VTRDIASTDTCFANK

SEQ ID NO: 12223 - protein, 15 aa, Severe acute respiratory syndrome coronavirus 2
  REGION 1..15: note = Table B: HLA-DRB1*04:01L HLA-DRB1*01:01L
TRDIASTDTCFANKH

SEQ ID NO: 12224 - protein, 13 aa, Severe acute respiratory syndrome coronavirus 2
  REGION 1..13: note = Table B: HLA-DRB1*04:01L HLA-DRB1*04:04L HLA-DRB1*01:01L HLA-DRB1*11:02L HLA-DRB1*11:03L HLA-DRB1*11:04L HLA-DRB1*08:01L HLA-DRB1*11:01L HLA-DRB4*01:01L HLA-DRB1*09:01L HLA-DPA1*01:03-B1*02:01L HLA-DPA1*01:03-B1*104:01L
  REGION 1..13: note = CONT. FROM ABOVE: HLA-DQA1*05:05-B1*03:01L HLA-DRB1*10:01L HLA-D QA1*01:03-B1*06:01L HLA-DRB1*08:03L
GSYTNDKACPLIA

SEQ ID NO: 12225 - protein, 15 aa, Severe acute respiratory syndrome coronavirus 2
  REGION 1..15: note = Table B: HLA-DRB1*04:01L HLA-DRB1*08:04L
IAAVITREVGFVVPG

SEQ ID NO: 12226 - protein, 15 aa, Severe acute respiratory syndrome coronavirus 2
  REGION 1..15: note = Table B: HLA-DRB1*04:01L HLA-DRB1*01:01L HLA-DRB1*03:01L HLA-DRB1*11:01L
LPGTILRTTNGDFLH

SEQ ID NO: 12227 - protein, 15 aa, Severe acute respiratory syndrome coronavirus 2
  REGION 1..15: note = Table B: HLA-DRB1*04:01L HLA-DRB1*01:01L HLA-DRB1*03:01L HLA-DRB1*13:01L HLA-DRB4*01:01L HLA-DQA1*05:05-B1*03:116L HLA-DRB1*08:02L
TPSKLIEYTDFATSA

SEQ ID NO: 12228 - protein, 12 aa, Severe acute respiratory syndrome coronavirus 2
  REGION 1..12: note = Table B: HLA-DRB1*04:01L HLA-DRB1*04:04L HLA-DRB1*01:01L HLA-DRB1*08:04L HLA-DRB1*11:02L HLA-DRB1*11:03L HLA-DRB1*11:04L HLA-DQA1*01:01-B1*05:01L HLA-DRB1*08:01L HLA-DRB1*11:01L HLA-DQA1*05:05-B1*03:116L HLA-DRB1*04:10L HLA-DRB1*09:01L
  REGION 1..12: note = CONT. FROM ABOVE: HLA-DRB1*12:02L HLA-DRB3*01:01L HLA-DRB1*08:02 L HLA-DRB1*08:03L
IFKDASGKPVPY

SEQ ID NO: 12229 - protein, 15 aa, Severe acute respiratory syndrome coronavirus 2
  REGION 1..15: note = Table B: HLA-DRB1*04:01L HLA-DRB1*13:02L HLA-DRB1*13:03L HLA-DRB4*03:01NL HLA-DRB1*08:04L HLA-DRB3*02:01L HLA-DRB1*14:01L HLA-DRB1*11:04L HLA-DRB1*11:01L HLA-DQA1*01-B1*05L HLA-DPA1*01:03-B1*02:01L HLA-DPA1*01:02-B1*04:01L
  REGION 1..15: note = CONT. FROM ABOVE: HLA-DRB1*10:01L
TNVLEGSVAYESLRP

SEQ ID NO: 12230 - protein, 15 aa, Severe acute respiratory syndrome coronavirus 2
  REGION 1..15: note = Table B: HLA-DRB1*04:01L HLA-DRB1*01:01L HLA-DRB1*08:04L HLA-DRB1*08:77L HLA-DRB1*14:01L HLA-DRB1*11:03L HLA-DRB1*11:04L HLA-DRB1*12:02L HLA-DRB3*01:01L HLA-DPA1*01:03-B1*02:01L HLA-DRB1*10:01L
NVLEGSVAYESLRPD

SEQ ID NO: 12231 - protein, 14 aa, Severe acute respiratory syndrome coronavirus 2
  REGION 1..14: note = Table B: HLA-DRB1*04:01L HLA-DRB1*01:01L HLA-DRB1*11:04L HLA-DRB1*11:01L HLA-DRB3*01:01L HLA-DRB1*07:01L
SVAYESLRPDTRYV

SEQ ID NO: 12232 - protein, 15 aa, Severe acute respiratory syndrome coronavirus 2
  REGION 1..15: note = Table B: HLA-DRB1*04:01L HLA-DRB3*02:01L HLA-DRB1*08:03L HLA-DRB1*15:01L
YESLRPDTRYVLMDG

SEQ ID NO: 12233 - protein, 12 aa, Severe acute respiratory syndrome coronavirus 2
  REGION 1..12: note = Table B: HLA-DRB1*04:01L HLA-DRB1*04:03L HLA-DRB1*13:02L HLA-DRB1*04:02L HLA-DRB1*04:04L HLA-DRB1*04:05L HLA-DRB1*01:02L HLA-DRB4*03:01NL HLA-DRB1*08:04L HLA-DRB3*02:01L HLA-DPA1*01:03-B1*03:01L HLA-DRB1*03:01L HLA-DRB1*11:03L
  REGION 1..12: note = CONT. FROM ABOVE: HLA-DRB1*11:04L HLA-DQA1*01-B1*05L HLA-DRB1*04 :10L HLA-DRB1*12:01L HLA-DRB1*14:54L HLA-DQA1*05:05-B1*03:01L HL A-DRB1*14:17L HLA-DRB1*04:08L
VLMDGSIIQFPN

SEQ ID NO: 12234 - protein, 13 aa, Severe acute respiratory syndrome coronavirus 2
  REGION 1..13: note = Table B: HLA-DRB1*04:01L HLA-DRB1*01:01L HLA-DRB1*08:04L HLA-DRB1*11:02L HLA-DRB1*11:01L HLA-DRB3*01:01L HLA-DRB1*10:01L
GSIIQFPNTYLEG

SEQ ID NO: 12235 - protein, 15 aa, Severe acute respiratory syndrome coronavirus 2
  REGION 1..15: note = Table B: HLA-DRB1*04:01L HLA-DRB1*01:01L HLA-DRB3*02:01L HLA-DRB1*11:02L HLA-DRB1*13:01L HLA-DRB1*07:01L HLA-DRB1*10:01L HLA-DRB1*08:02L HLA-DRB1*08:03L
GRWVLNNDYYRSLPG

SEQ ID NO: 12236 - protein, 15 aa, Severe acute respiratory syndrome coronavirus 2
  REGION 1..15: note = Table B: HLA-DRB1*04:01L HLA-DRB3*01:01L HLA-DRB1*15:01L
NDYYRSLPGVFCGVD

SEQ ID NO: 12237 - protein, 16 aa, Severe acute respiratory syndrome coronavirus 2
  REGION 1..16: note = Table B: HLA-DRB1*04:01L HLA-DRB1*11:02L HLA-DRB4*01:01L HLA-DRB1*08:02L
VNLLTNMFTPLIQPIG

SEQ ID NO: 12238 - protein, 14 aa, Severe acute respiratory syndrome coronavirus 2
  REGION 1..14: note = Table B: HLA-DRB1*04:01L HLA-DRB1*01:01L HLA-DRB1*08:02L
TNMFTPLIQPIGAL

SEQ ID NO: 12239 - protein, 14 aa, Severe acute respiratory syndrome coronavirus 2
  REGION 1..14: note = Table B: HLA-DRB1*04:01L HLA-DRB1*04:04L HLA-DRB1*01:01L HLA-DPA1*01:03-B1*03:01L
NMFTPLIQPIGALD

SEQ ID NO: 12240 - protein, 14 aa, Severe acute respiratory syndrome coronavirus 2
  REGION 1..14: note = Table B: HLA-DRB1*04:01L HLA-DRB1*01:01L HLA-DRB1*11:01L HLA-DRB1*15:01L
TPLIQPIGALDISA

SEQ ID NO: 12241 - protein, 14 aa, Severe acute respiratory syndrome coronavirus 2
  REGION 1..14: note = Table B: HLA-DRB1*04:01L HLA-DRB1*11:01L HLA-DRB3*01:01L HLA-DRB1*08:02L
TPVYSFLPGVYSVI

SEQ ID NO: 12242 - protein, 12 aa, Severe acute respiratory syndrome coronavirus 2
  REGION 1..12: note = Table B: HLA-DRB1*04:01L HLA-DRB1*04:04L HLA-DRB1*04:05L HLA-DRB1*01:02L HLA-DRB1*08:04L HLA-DRB3*02:01L HLA-DPA1*01:03-B1*03:01L HLA-DPA1*03:01-B1*04:02L HLA-DRB1*14:02L HLA-DQA1*01:01-B1*05:01L HLA-DRB4*01:01L
  REGION 1..12: note = CONT. FROM ABOVE: HLA-DRB1*04:10L HLA-DPA1*01:03-B1*04:02L HLA-D PA1*02:01-B1*13:01L HLA-DRB1*10:01L HLA-DRB1*04:08L
LTNDVSFLAHIQ

SEQ ID NO: 12243 - protein, 15 aa, Severe acute respiratory syndrome coronavirus 2
  REGION 1..15: note = Table B: HLA-DRB1*04:01L
RRVVFNGVSFSTFEE

SEQ ID NO: 12244 - protein, 17 aa, Severe acute respiratory syndrome coronavirus 2
  REGION 1..17: note = Table B: HLA-DRB1*04:01L HLA-DRB3*02:01L HLA-DRB1*09:01L HLA-DRB1*15:01L
LPLTQYNRYLALYNKYK

SEQ ID NO: 12245 - protein, 14 aa, Severe acute respiratory syndrome coronavirus 2
  REGION 1..14: note = Table B: HLA-DRB1*04:01L HLA-DRB1*01:01L HLA-DRB3*02:01L HLA-DRB1*11:02L HLA-DRB1*11:03L HLA-DRB1*14:02L HLA-DQA1*01:01-B1*05:01L HLA-DPA1*01:03-B1*02:01L HLA-DRB1*08:02L HLA-DRB1*15:01L
YNKYKYFSGAMDTT

SEQ ID NO: 12246 - protein, 14 aa, Severe acute respiratory syndrome coronavirus 2
  REGION 1..14: note = Table B: HLA-DRB1*04:01L HLA-DRB1*04:03L HLA-DRB1*14:01L HLA-DQA1*01:03-B1*06:01L
TTSYREAACCHLAK

SEQ ID NO: 12247 - protein, 17 aa, Severe acute respiratory syndrome coronavirus 2
  REGION 1..17: note = Table B: HLA-DRB1*04:01L HLA-DRB1*01:01L HLA-DRB1*08:04L HLA-DRB1*08:77L HLA-DRB1*11:04L HLA-DPA1*01:03-B1*04:01L HLA-DRB3*01:01L HLA-DRB1*07:01L HLA-DRB1*08:03L
QPPQTSITSAVLQSGFR

SEQ ID NO: 12248 - protein, 14 aa, Severe acute respiratory syndrome coronavirus 2
  REGION 1..14: note = Table B: HLA-DRB1*04:01L HLA-DRB1*13:02L HLA-DRB1*13:03L HLA-DRB1*01:01L HLA-DRB1*08:04L HLA-DRB1*11:04L HLA-DRB1*11:01L HLA-DPA1*01:03-B1*04:02L HLA-DRB3*01:01L HLA-DPA1*03:01-B1*105:01L HLA-DQA1*05:05-B1*03:01L
  REGION 1..14: note = CONT. FROM ABOVE: HLA-DRB1*10:01L
SGFRKMAFPSGKVE

SEQ ID NO: 12249 - protein, 15 aa, Severe acute respiratory syndrome coronavirus 2
  REGION 1..15: note = Table B: HLA-DRB1*04:01L HLA-DRB1*13:02L HLA-DRB1*04:04L HLA-DRB1*01:01L HLA-DRB3*01:01L HLA-DPA1*01:03-B1*02:01L HLA-DRB1*07:01L HLA-DRB1*10:01L HLA-DRB1*08:03L
NPNYEDLLIRKSNHN

SEQ ID NO: 12250 - protein, 14 aa, Severe acute respiratory syndrome coronavirus 2
  REGION 1..14: note = Table B: HLA-DRB1*04:01L HLA-DQA1*01:02-B1*06:02L HLA-DRB1*08:04L HLA-DRB1*08:77L HLA-DRB3*02:01L HLA-DRB1*11:03L HLA-DRB1*11:04L HLA-DRB1*11:01L HLA-DQA1*01-B1*05L HLA-DPA1*02:01-B1*13:01L HLA-DPA1*03:01-B1*105:01L
  REGION 1..14: note = CONT. FROM ABOVE: HLA-DPA1*01:02-B1*04:01L HLA-DRB1*10:01L
VLKLKVDTANPKTP

SEQ ID NO: 12251 - protein, 14 aa, Severe acute respiratory syndrome coronavirus 2
  REGION 1..14: note = Table B: HLA-DRB1*04:01L HLA-DRB1*13:02L HLA-DRB1*01:01L HLA-DRB3*02:01L HLA-DPA1*01:03-B1*03:01L HLA-DPA1*03:01-B1*04:02L HLA-DRB1*03:01L HLA-DRB1*11:02L HLA-DRB1*11:03L HLA-DRB1*14:02L HLA-DQA1*01:01-B1*05:01L
  REGION 1..14: note = CONT. FROM ABOVE: HLA-DQA1*01-B1*05L HLA-DPA1*01:03-B1*04:01L HL A-DQA1*05:05-B1*03:116L HLA-DRB1*09:01L HLA-DPA1*01:03-B1*104:01 L HLA-DRB1*07:01L HLA-DRB1*08:02L HLA-DRB1*08:03L
TPKYKFVRIQPGQT

SEQ ID NO: 12252 - protein, 13 aa, Severe acute respiratory syndrome coronavirus 2
  REGION 1..13: note = Table B: HLA-DRB1*04:01L HLA-DRB3*01:01L
YKFVRIQPGQTFS

SEQ ID NO: 12253 - protein, 16 aa, Severe acute respiratory syndrome coronavirus 2
  REGION 1..16: note = Table B: HLA-DRB1*04:01L HLA-DRB1*08:04L HLA-DRB1*11:03L HLA-DRB1*11:04L HLA-DRB1*11:01L HLA-DRB4*02:01NL HLA-DRB1*09:01L HLA-DRB1*08:02L HLA-DRB1*08:03L
LPTGVHAGTDLEGNFY

SEQ ID NO: 12254 - protein, 13 aa, Severe acute respiratory syndrome coronavirus 2
  REGION 1..13: note = Table B: HLA-DRB1*04:01L HLA-DRB1*13:02L HLA-DRB1*04:04L HLA-DQA1*01:02-B1*06:02L HLA-DRB1*01:01L HLA-DRB1*01:02L HLA-DRB1*08:04L HLA-DRB1*08:77L HLA-DPA1*01:03-B1*03:01L HLA-DRB1*11:03L HLA-DRB1*11:04L HLA-DRB1*14:02L HLA-DRB1*11:01L
  REGION 1..13: note = CONT. FROM ABOVE: HLA-DRB5*01:01L HLA-DQA1*05:05-B1*03:19L HLA-D RB1*09:01L HLA-DPA1*01:03-B1*04:02L HLA-DRB1*12:02L HLA-DRB3*01: 01L HLA-DPA1*03:01-B1*105:01L HLA-DQA1*05:05-B1*03:01L HLA-DRB1* 10:01L HLA-DRB1*08:02L HLA-DRB1*08:03L HLA-DRB1*15:03L
GPFVDRQTAQAAG

SEQ ID NO: 12255 - protein, 14 aa, Severe acute respiratory syndrome coronavirus 2
  REGION 1..14: note = Table B: HLA-DRB1*04:01L HLA-DRB1*04:04L HLA-DRB1*08:04L HLA-DRB1*11:01L HLA-DRB1*10:01L HLA-DRB1*15:03L
PFVDRQTAQAAGTD

SEQ ID NO: 12256 - protein, 16 aa, Severe acute respiratory syndrome coronavirus 2
  REGION 1..16: note = Table B: HLA-DRB1*04:01L HLA-DRB1*01:01L HLA-DRB3*02:01L HLA-DRB1*14:01L HLA-DRB1*11:02L HLA-DRB1*11:03L HLA-DRB1*11:01L HLA-DPA1*01:03-B1*04:01L HLA-DRB1*09:01L HLA-DRB1*07:01L
VNVLAWLYAAVINGDR

SEQ ID NO: 12257 - protein, 17 aa, Severe acute respiratory syndrome coronavirus 2
  REGION 1..17: note = Table B: HLA-DRB1*04:01L
GDRWFLNRFTTTLNDFN

SEQ ID NO: 12258 - protein, 15 aa, Severe acute respiratory syndrome coronavirus 2
  REGION 1..15: note = Table B: HLA-DRB1*04:01L HLA-DRB3*02:01L HLA-DRB1*14:01L HLA-DRB1*14:02L HLA-DRB4*01:01L HLA-DRB1*09:01L HLA-DRB3*01:01L HLA-DPA1*01:03-B1*02:01L HLA-DRB1*07:01L HLA-DRB1*08:03L
LNRFTTTLNDFNLVA

SEQ ID NO: 12259 - protein, 15 aa, Severe acute respiratory syndrome coronavirus 2
  REGION 1..15: note = Table B: HLA-DRB1*04:01L HLA-DRB1*01:01L HLA-DRB1*07:01L HLA-DRB1*08:02L
AMKYNYEPLTQDHVD

SEQ ID NO: 12260 - protein, 15 aa, Severe acute respiratory syndrome coronavirus 2
  REGION 1..15: note = Table B: HLA-DRB1*04:01L HLA-DRB1*01:01L
TQDHVDILGPLSAQT

SEQ ID NO: 12261 - protein, 14 aa, Severe acute respiratory syndrome coronavirus 2
  REGION 1..14: note = Table B: HLA-DRB1*04:01L HLA-DRB1*13:02L HLA-DRB1*13:03L HLA-DRB1*01:01L HLA-DRB1*08:04L HLA-DRB1*08:77L HLA-DRB1*14:01L HLA-DRB1*11:03L HLA-DRB1*11:04L HLA-DRB1*14:02L HLA-DRB1*11:01L HLA-DQA1*01-B1*05L HLA-DRB4*01:01L HLA-DRB1*12:02L
  REGION 1..14: note = CONT. FROM ABOVE: HLA-DPA1*01:03-B1*104:01L HLA-DRB1*07:01L HLA- DQA1*01:03-B1*06:01L HLA-DRB1*08:03L HLA-DRB1*15:03L
DHVDILGPLSAQTG

SEQ ID NO: 12262 - protein, 14 aa, Severe acute respiratory syndrome coronavirus 2
  REGION 1..14: note = Table B: HLA-DRB1*04:01L HLA-DRB1*11:04L HLA-DRB1*04:10L HLA-DRB1*08:03L
LGPLSAQTGIAVLD

SEQ ID NO: 12263 - protein, 16 aa, Severe acute respiratory syndrome coronavirus 2
  REGION 1..16: note = Table B: HLA-DRB1*04:01L HLA-DRB1*04:04L HLA-DRB1*03:01L HLA-DRB1*10:01L
GSALLEDEFTPFDVVR

SEQ ID NO: 12264 - protein, 11 aa, Severe acute respiratory syndrome coronavirus 2
  REGION 1..11: note = Table B: HLA-DRB1*04:01L HLA-DRB1*01:01L HLA-DRB1*08:77L HLA-DRB1*11:03L HLA-DRB1*11:04L HLA-DRB1*14:02L HLA-DRB1*11:01L HLA-DRB4*01:01L HLA-DRB1*09:01L HLA-DRB1*12:02L HLA-DRB3*01:01L HLA-DPA1*01:03-B1*104:01L HLA-DRB1*07:01L HLA-DRB1*08:03L
DEFTPFDVVRQ

SEQ ID NO: 12265 - protein, 11 aa, Severe acute respiratory syndrome coronavirus 2
  REGION 1..11: note = Table B: HLA-DRB1*04:01L HLA-DRB1*13:02L HLA-DRB1*04:05L HLA-DRB1*01:01L HLA-DRB1*11:03L HLA-DRB1*11:01L HLA-DRB5*01:01L HLA-DQA1*03:01-B1*03:02L
FLLPSLATVAY

SEQ ID NO: 12266 - protein, 13 aa, Severe acute respiratory syndrome coronavirus 2
  REGION 1..13: note = Table B: HLA-DRB1*04:01L HLA-DRB1*11:02L HLA-DRB4*02:01NL HLA-DRB1*13:01L HLA-DPA1*01:03-B1*04:01L HLA-DQA1*05:05-B1*03:116L HLA-DRB1*08:02L
LILMTARTVYDDG

SEQ ID NO: 12267 - protein, 15 aa, Severe acute respiratory syndrome coronavirus 2
  REGION 1..15: note = Table B: HLA-DRB1*04:01L HLA-DRB1*04:05L HLA-DRB1*14:01L HLA-DRB1*08:01L HLA-DRB1*11:01L HLA-DRB1*07:01L
RRVWTLMNVLTLVYK

SEQ ID NO: 12268 - protein, 13 aa, Severe acute respiratory syndrome coronavirus 2
  REGION 1..13: note = Table B: HLA-DRB1*04:01L HLA-DRB1*11:02L HLA-DRB1*11:01L HLA-DRB1*04:10L HLA-DPA1*01:03-B1*04:02L HLA-DRB1*12:02L HLA-DRB1*14:54L HLA-DPA1*01:03-B1*104:01L
LVYKVYYGNALDQ

SEQ ID NO: 12269 - protein, 13 aa, Severe acute respiratory syndrome coronavirus 2
  REGION 1..13: note = Table B: HLA-DRB1*04:01L HLA-DRB1*01:01L HLA-DRB1*08:04L HLA-DRB1*03:01L HLA-DRB1*11:02L HLA-DRB1*11:04L HLA-DRB1*08:01L HLA-DRB1*11:01L HLA-DRB5*01:01L HLA-DRB4*01:01L HLA-DPA1*01:03-B1*04:01L HLA-DQA1*05:05-B1*03:116L
  REGION 1..13: note = CONT. FROM ABOVE: HLA-DRB1*12:02L HLA-DRB3*01:01L HLA-DPA1*01:03 -B1*02:01L HLA-DRB1*07:01L HLA-DRB1*08:02L HLA-DRB1*08:03L
KVYYGNALDQAIS

SEQ ID NO: 12270 - protein, 13 aa, Severe acute respiratory syndrome coronavirus 2
  REGION 1..13: note = Table B: HLA-DRB1*04:01L HLA-DRB1*13:02L HLA-DRB1*04:04L HLA-DRB1*08:04L HLA-DRB1*14:01L HLA-DRB1*11:03L HLA-DRB1*11:04L HLA-DQA1*01:01-B1*05:01L HLA-DRB1*11:01L HLA-DRB1*09:01L HLA-DRB1*12:02L HLA-DRB3*01:01L HLA-DRB1*07:01L HLA-DRB1*08:02L
  REGION 1..13: note = CONT. FROM ABOVE: HLA-DRB1*08:03L
GVYDYLVSTQEFR

SEQ ID NO: 12271 - protein, 13 aa, Severe acute respiratory syndrome coronavirus 2
  REGION 1..13: note = Table B: HLA-DRB1*04:01L HLA-DRB1*13:02L HLA-DRB1*13:03L HLA-DRB1*04:04L HLA-DRB1*11:01L HLA-DRB3*01:01L HLA-DRB1*14:17L HLA-DQA1*01:03-B1*06:01L
EFRYMNSQGLLPP

SEQ ID NO: 12272 - protein, 13 aa, Severe acute respiratory syndrome coronavirus 2
  REGION 1..13: note = Table B: HLA-DRB1*04:01L HLA-DRB1*01:01L HLA-DRB1*11:04L HLA-DRB1*08:01L HLA-DRB1*11:01L HLA-DQA1*05:05-B1*03:01L HLA-DRB1*10:01L
SVLQQLRVESSSK

SEQ ID NO: 12273 - protein, 14 aa, Severe acute respiratory syndrome coronavirus 2
  REGION 1..14: note = Table B: HLA-DRB1*04:01L HLA-DRB1*04:04L HLA-DRB1*11:04L HLA-DRB1*11:01L HLA-DRB3*01:01L HLA-DRB1*10:01L
LQQLRVESSSKLWA

SEQ ID NO: 12274 - protein, 14 aa, Severe acute respiratory syndrome coronavirus 2
  REGION 1..14: note = Table B: HLA-DRB1*04:01L HLA-DRB1*13:02L HLA-DRB1*11:03L HLA-DRB1*11:04L HLA-DRB1*14:02L HLA-DRB1*08:01L HLA-DRB1*11:01L HLA-DQA1*01-B1*05L HLA-DRB3*01:01L HLA-DRB1*07:01L HLA-DRB1*10:01L HLA-DRB1*15:01L
QQLRVESSSKLWAQ

SEQ ID NO: 12275 - protein, 13 aa, Severe acute respiratory syndrome coronavirus 2
  REGION 1..13: note = Table B: HLA-DRB1*04:01L HLA-DRB1*13:02L HLA-DRB1*08:77L HLA-DPA1*01:03-B1*03:01L HLA-DRB1*11:03L HLA-DRB5*01:01L HLA-DRB4*01:01L HLA-DRB1*09:01L HLA-DRB3*01:01L HLA-DRB1*07:01L
HNDILLAKDTTEA

SEQ ID NO: 12276 - protein, 13 aa, Severe acute respiratory syndrome coronavirus 2
  REGION 1..13: note = Table B: HLA-DRB1*04:01L HLA-DRB1*11:03L HLA-DRB1*11:04L HLA-DQA1*01:01-B1*05:01L HLA-DRB1*08:01L HLA-DRB1*11:01L HLA-DRB5*01:01L HLA-DRB1*13:01L HLA-DPA1*01:03-B1*04:01L HLA-DRB1*09:01L HLA-DPA1*01:03-B1*04:02L
  REGION 1..13: note = CONT. FROM ABOVE: HLA-DPA1*01:03-B1*104:01L HLA-DQA1*05:05-B1*03 :01L HLA-DPA1*01:02-B1*04:01L HLA-DRB1*07:01L HLA-DRB1*08:02L HL A-DRB1*08:03L
DILLAKDTTEAFE

SEQ ID NO: 12277 - protein, 12 aa, Severe acute respiratory syndrome coronavirus 2
  REGION 1..12: note = Table B: HLA-DRB1*04:01L HLA-DRB1*08:04L HLA-DRB1*08:77L HLA-DPA1*01:03-B1*03:01L HLA-DRB1*03:01L HLA-DRB1*11:04L HLA-DRB1*08:01L
LLAKDTTEAFEK

SEQ ID NO: 12278 - protein, 13 aa, Severe acute respiratory syndrome coronavirus 2
  REGION 1..13: note = Table B: HLA-DRB1*04:01L HLA-DRB1*04:04L HLA-DRB1*01:01L HLA-DRB1*08:04L HLA-DQA1*01-B1*05L HLA-DRB4*01:01L
EAFEKMVSLLSVL

SEQ ID NO: 12279 - protein, 10 aa, Severe acute respiratory syndrome coronavirus 2
  REGION 1..10: note = Table B: HLA-DRB1*04:01L HLA-DRB1*04:03L HLA-DRB1*13:02L HLA-DRB1*13:03L HLA-DRB1*01:03L HLA-DRB1*04:02L HLA-DRB1*01:01L HLA-DRB4*03:01NL HLA-DRB3*02:01L HLA-DRB1*14:01L HLA-DRB1*11:04L HLA-DRB1*14:02L HLA-DRB1*08:01L HLA-DRB5*01:01L
  REGION 1..10: note = CONT. FROM ABOVE: HLA-DPA1*01:03-B1*04:02L HLA-DRB1*12:01L HLA-D RB1*12:02L HLA-DPA1*03:01-B1*105:01L HLA-DQA1*03:01-B1*03:02M HL A-DQA1*05:05-B1*03:01L HLA-DRB1*14:17L HLA-DRB1*16:01L HLA-DQA1* 01:03-B1*06:01L HLA-DRB1*08:02L HLA-DQA1*02:01-B1*03:03L
SMQGAVDINK

SEQ ID NO: 12280 - protein, 14 aa, Severe acute respiratory syndrome coronavirus 2
  REGION 1..14: note = Table B: HLA-DRB1*04:01L HLA-DRB1*01:03L HLA-DRB1*04:04L HLA-DRB1*04:05L HLA-DRB1*01:02L HLA-DRB1*08:04L HLA-DRB3*02:01L HLA-DPA1*01:03-B1*03:01L HLA-DRB1*03:01L HLA-DRB1*11:03L HLA-DRB1*11:04L HLA-DRB1*14:02L HLA-DRB1*08:01L HLA-DRB1*11:01L
  REGION 1..14: note = CONT. FROM ABOVE: HLA-DRB1*04:08L
EEMLDNRATLQAIA

SEQ ID NO: 12281 - protein, 16 aa, Severe acute respiratory syndrome coronavirus 2
  REGION 1..16: note = Table B: HLA-DRB1*04:01L HLA-DRB1*13:02L HLA-DRB1*01:01L HLA-DRB1*08:04L HLA-DRB3*02:01L HLA-DRB1*11:02L HLA-DRB1*11:03L HLA-DRB1*11:01L HLA-DRB1*09:01L HLA-DRB3*01:01L HLA-DRB1*07:01L HLA-DRB1*08:02L HLA-DRB1*15:01L
RATLQAIASEFSSLPS

SEQ ID NO: 12282 - protein, 12 aa, Severe acute respiratory syndrome coronavirus 2
  REGION 1..12: note = Table B: HLA-DRB1*04:01L HLA-DRB1*11:03L
EFSSLPSYAAFA

SEQ ID NO: 12283 - protein, 12 aa, Severe acute respiratory syndrome coronavirus 2
  REGION 1..12: note = Table B: HLA-DRB1*04:01L HLA-DRB1*04:05L HLA-DRB1*01:01L HLA-DRB1*11:03L
FSSLPSYAAFAT

SEQ ID NO: 12284 - protein, 14 aa, Severe acute respiratory syndrome coronavirus 2
  REGION 1..14: note = Table B: HLA-DRB1*04:01L HLA-DRB1*01:01L HLA-DRB1*11:04L HLA-DRB1*11:01L HLA-DRB1*09:01L HLA-DRB1*07:01L
PSYAAFATAQEAYE

SEQ ID NO: 12285 - protein, 14 aa, Severe acute respiratory syndrome coronavirus 2
  REGION 1..14: note = Table B: HLA-DRB1*04:01L HLA-DRB1*11:03L HLA-DRB1*11:04L HLA-DRB1*11:01L HLA-DRB1*09:01L HLA-DRB1*07:01L
YAAFATAQEAYEQA

SEQ ID NO: 12286 - protein, 13 aa, Severe acute respiratory syndrome coronavirus 2
  REGION 1..13: note = Table B: HLA-DRB1*04:01L HLA-DRB1*01:02L HLA-DPA1*01:03-B1*03:01L HLA-DRB1*11:01L HLA-DRB4*01:01L HLA-DRB1*07:01L
QEAYEQAVANGDS

SEQ ID NO: 12287 - protein, 13 aa, Severe acute respiratory syndrome coronavirus 2
  REGION 1..13: note = Table B: HLA-DRB1*04:01L HLA-DRB1*01:01L HLA-DRB3*02:01L HLA-DRB1*11:01L HLA-DRB4*01:01L HLA-DRB1*07:01L HLA-DRB1*15:03L
EAYEQAVANGDSE

SEQ ID NO: 12288 - protein, 14 aa, Severe acute respiratory syndrome coronavirus 2
  REGION 1..14: note = Table B: HLA-DRB1*04:01L HLA-DRB1*08:04L HLA-DRB1*14:01L HLA-DRB1*11:04L HLA-DRB3*01:01L HLA-DRB1*07:01L HLA-DRB1*10:01L HLA-DRB1*15:03L
KKSLNVAKSEFDRD

SEQ ID NO: 12289 - protein, 11 aa, Severe acute respiratory syndrome coronavirus 2
  REGION 1..11: note = Table B: HLA-DRB1*04:01L HLA-DQA1*05:05-B1*03:01L
KMADQAMTQMY

SEQ ID NO: 12290 - protein, 16 aa, Severe acute respiratory syndrome coronavirus 2
  REGION 1..16: note = Table B: HLA-DRB1*04:01L HLA-DPA1*01:03-B1*04:01L HLA-DQA1*05:05-B1*03:116L HLA-DRB1*12:02L HLA-DPA1*01:03-B1*104:01L
ADQAMTQMYKQARSED

SEQ ID NO: 12291 - protein, 16 aa, Severe acute respiratory syndrome coronavirus 2
  REGION 1..16: note = Table B: HLA-DRB1*04:01L HLA-DQA1*05:05-B1*03:116L HLA-DPA1*01:03-B1*104:01L
DQAMTQMYKQARSEDK

SEQ ID NO: 12292 - protein, 14 aa, Severe acute respiratory syndrome coronavirus 2
  REGION 1..14: note = Table B: HLA-DRB1*04:01L
TQMYKQARSEDKRA

SEQ ID NO: 12293 - protein, 13 aa, Severe acute respiratory syndrome coronavirus 2
  REGION 1..13: note = Table B: HLA-DRB1*04:01L HLA-DRB1*13:02L HLA-DRB1*13:03L HLA-DQA1*01:02-B1*06:02L HLA-DRB4*03:01NL HLA-DPA1*01:03-B1*03:01L HLA-DRB1*14:01L HLA-DRB1*11:04L HLA-DRB1*08:01L HLA-DRB3*01:01L HLA-DPA1*03:01-B1*105:01L
  REGION 1..13: note = CONT. FROM ABOVE: HLA-DRB1*14:54L HLA-DPA1*01:03-B1*104:01L HLA- DRB1*07:01L HLA-DRB1*10:01L
TMLRKLDNDALNN

SEQ ID NO: 12294 - protein, 15 aa, Severe acute respiratory syndrome coronavirus 2
  REGION 1..15: note = Table B: HLA-DRB1*04:01L HLA-DRB1*01:01L HLA-DPA1*01:03-B1*02:01L
MLRKLDNDALNNIIN

SEQ ID NO: 12295 - protein, 15 aa, Severe acute respiratory syndrome coronavirus 2
  REGION 1..15: note = Table B: HLA-DRB1*04:01L HLA-DPA1*01:03-B1*02:01L
LRKLDNDALNNIINN

SEQ ID NO: 12296 - protein, 14 aa, Severe acute respiratory syndrome coronavirus 2
  REGION 1..14: note = Table B: HLA-DRB1*04:01L HLA-DRB1*11:01L HLA-DRB4*01:01L HLA-DRB3*01:01L HLA-DPA1*01:03-B1*02:01L
VPLNIIPLTTAAKL

SEQ ID NO: 12297 - protein, 14 aa, Severe acute respiratory syndrome coronavirus 2
  REGION 1..14: note = Table B: HLA-DRB1*04:01L HLA-DRB1*01:01L HLA-DRB1*11:03L HLA-DRB1*11:04L HLA-DRB1*08:01L HLA-DRB1*11:01L HLA-DRB1*09:01L HLA-DRB3*01:01L HLA-DRB1*07:01L HLA-DRB1*08:03L HLA-DRB1*15:01L
AKLMVVIPDYNTYK

SEQ ID NO: 12298 - protein, 14 aa, Severe acute respiratory syndrome coronavirus 2
  REGION 1..14: note = Table B: HLA-DRB1*04:01L HLA-DRB1*08:01L HLA-DPA1*01:03-B1*02:01L
LMVVIPDYNTYKNT

SEQ ID NO: 12299 - protein, 14 aa, Severe acute respiratory syndrome coronavirus 2
  REGION 1..14: note = Table B: HLA-DRB1*04:01L HLA-DRB1*01:03L HLA-DRB1*04:04L HLA-DRB1*01:02L HLA-DRB1*08:01L HLA-DQA1*05:05-B1*03:19L HLA-DRB1*12:01L HLA-DPA1*03:01-B1*105:01L HLA-DQA1*05:05-B1*03:01L HLA-DQA1*02:01-B1*03:03L
YNTYKNTCDGTTFT

SEQ ID NO: 12300 - protein, 15 aa, Severe acute respiratory syndrome coronavirus 2
  REGION 1..15: note = Table B: HLA-DRB1*04:01L HLA-DRB1*04:04L HLA-DRB1*14:01L HLA-DRB1*07:01L HLA-DRB1*08:02L
DGTTFTYASALWEIQ

SEQ ID NO: 12301 - protein, 14 aa, Severe acute respiratory syndrome coronavirus 2
  REGION 1..14: note = Table B: HLA-DRB1*04:01L HLA-DRB1*03:01L HLA-DRB1*11:02L HLA-DQA1*01:01-B1*05:01L HLA-DRB1*11:01L HLA-DRB5*01:01L HLA-DRB4*02:01NL HLA-DRB1*13:01L HLA-DPA1*01:03-B1*04:02L HLA-DPA1*01:03-B1*02:01L HLA-DPA1*01:03-B1*104:01L
  REGION 1..14: note = CONT. FROM ABOVE: HLA-DRB1*08:02L
DSKIVQLSEISMDN

SEQ ID NO: 12302 - protein, 12 aa, Severe acute respiratory syndrome coronavirus 2
  REGION 1..12: note = Table B: HLA-DRB1*04:01L HLA-DRB1*13:02L HLA-DRB1*08:04L HLA-DPA1*01:03-B1*03:01L HLA-DRB1*11:03L HLA-DRB1*11:04L HLA-DRB1*08:01L HLA-DRB1*11:01L HLA-DQA1*01-B1*05L HLA-DQA1*05:05-B1*03:19L HLA-DRB1*04:10L
  REGION 1..12: note = CONT. FROM ABOVE: HLA-DPA1*03:01-B1*105:01L
IVTALRANSAVK

SEQ ID NO: 12303 - protein, 14 aa, Severe acute respiratory syndrome coronavirus 2
  REGION 1..14: note = Table B: HLA-DRB1*04:01L HLA-DRB3*02:01L HLA-DRB1*11:02L HLA-DRB1*11:01L HLA-DQA1*05:05-B1*03:19L HLA-DRB1*09:01L HLA-DRB3*01:01L HLA-DPA1*02:01-B1*13:01L HLA-DRB1*07:01L
DNALAYYNTTKGGR

SEQ ID NO: 12304 - protein, 14 aa, Severe acute respiratory syndrome coronavirus 2
  REGION 1..14: note = Table B: HLA-DRB1*04:01L HLA-DRB1*11:04L HLA-DRB1*08:01L HLA-DPA1*01:03-B1*04:02L HLA-DRB1*10:01L HLA-DRB1*08:03L
RFVLALLSDLQDLK

SEQ ID NO: 12305 - protein, 15 aa, Severe acute respiratory syndrome coronavirus 2
  REGION 1..15: note = Table B: HLA-DRB1*04:01L HLA-DRB1*01:01L HLA-DRB1*11:03L HLA-DRB1*14:02L HLA-DRB1*10:01L
DLQDLKWARFPKSDG

SEQ ID NO: 12306 - protein, 16 aa, Severe acute respiratory syndrome coronavirus 2
  REGION 1..16: note = Table B: HLA-DRB1*04:01L HLA-DRB1*01:01L HLA-DRB3*02:01L HLA-DRB1*11:02L HLA-DQA1*05:01-B1*02:01L
LQDLKWARFPKSDGTG

SEQ ID NO: 12307 - protein, 13 aa, Severe acute respiratory syndrome coronavirus 2
  REGION 1..13: note = Table B: HLA-DRB1*04:01L HLA-DRB1*01:01L HLA-DRB1*08:04L HLA-DRB1*08:77L HLA-DRB3*02:01L HLA-DRB1*11:03L HLA-DRB1*11:04L HLA-DRB1*14:02L HLA-DQA1*01:01-B1*05:01L HLA-DRB1*11:01L HLA-DRB1*09:01L HLA-DRB1*12:02L HLA-DRB3*01:01L
  REGION 1..13: note = CONT. FROM ABOVE: HLA-DPA1*01:03-B1*02:01L HLA-DPA1*01:03-B1*104 :01L HLA-DRB1*07:01L HLA-DRB1*08:03L
TGTIYTELEPPCR

SEQ ID NO: 12308 - protein, 14 aa, Severe acute respiratory syndrome coronavirus 2
  REGION 1..14: note = Table B: HLA-DRB1*04:01L HLA-DRB1*13:02L HLA-DRB1*04:02L HLA-DRB1*04:04L HLA-DRB1*01:01L HLA-DRB3*02:01L HLA-DRB1*11:02L HLA-DRB1*11:03L HLA-DRB1*14:02L HLA-DQA1*01-B1*05L HLA-DQA1*05:01-B1*02:01L HLA-DPA1*01:03-B1*04:01L
  REGION 1..14: note = CONT. FROM ABOVE: HLA-DQA1*05:05-B1*03:116L HLA-DRB1*09:01L HLA- DRB3*01:01L HLA-DPA1*01:03-B1*02:01L HLA-DPA1*01:03-B1*104:01L H LA-DRB1*07:01L HLA-DRB1*10:01L HLA-DRB1*08:02L
VKYLYFIKGLNNLN

SEQ ID NO: 12309 - protein, 13 aa, Severe acute respiratory syndrome coronavirus 2
  REGION 1..13: note = Table B: HLA-DRB1*04:01L HLA-DRB1*01:01L HLA-DPA1*01:03-B1*03:01L HLA-DRB1*11:03L HLA-DRB1*14:02L HLA-DRB1*11:01L HLA-DQA1*05:05-B1*03:19L HLA-DQA1*05:01-B1*02:01L HLA-DPA1*01:03-B1*04:02L
  REGION 1..13: note = CONT. FROM ABOVE: HLA-DPA1*01:03-B1*02:01L HLA-DRB1*07:01L HLA-D RB1*08:03L
LYFIKGLNNLNRG

SEQ ID NO: 12310 - protein, 16 aa, Severe acute respiratory syndrome coronavirus 2
  REGION 1..16: note = Table B: HLA-DRB1*04:01L HLA-DRB1*01:01L HLA-DRB1*08:77L HLA-DRB1*11:03L HLA-DRB1*11:04L HLA-DRB1*14:02L HLA-DQA1*01-B1*05L
AATVRLQAGNATEVPA

SEQ ID NO: 12311 - protein, 15 aa, Severe acute respiratory syndrome coronavirus 2
  REGION 1..15: note = Table B: HLA-DRB1*04:01L HLA-DRB1*04:04L HLA-DRB1*01:01L HLA-DRB3*02:01L HLA-DRB1*14:01L HLA-DRB1*11:03L HLA-DRB1*11:04L HLA-DQA1*01-B1*05L HLA-DQA1*05:05-B1*03:116L HLA-DRB1*04:10L HLA-DRB1*09:01L HLA-DRB1*14:54L HLA-DRB1*10:01L HLA-DRB1*08:03L
TVRLQAGNATEVPAN

SEQ ID NO: 12312 - protein, 11 aa, Severe acute respiratory syndrome coronavirus 2
  REGION 1..11: note = Table B: HLA-DRB1*04:01L HLA-DRB3*02:01L HLA-DRB1*11:03L HLA-DRB1*11:01L HLA-DRB5*01:01L HLA-DRB1*12:02L HLA-DRB1*08:02L
AVDAAKAYKDY

SEQ ID NO: 12313 - protein, 15 aa, Severe acute respiratory syndrome coronavirus 2
  REGION 1..15: note = Table B: HLA-DRB1*04:01L
AKAYKDYLASGGQPI

SEQ ID NO: 12314 - protein, 12 aa, Severe acute respiratory syndrome coronavirus 2
  REGION 1..12: note = Table B: HLA-DRB1*04:01L HLA-DRB1*04:04L HLA-DQA1*01:02-B1*06:02L HLA-DRB1*03:01L HLA-DRB1*08:01L HLA-DRB1*11:01L HLA-DQA1*01-B1*05L HLA-DRB4*02:01NL HLA-DRB4*01:01L HLA-DPA1*01:03-B1*04:02L HLA-DRB3*01:01L
  REGION 1..12: note = CONT. FROM ABOVE: HLA-DPA1*02:01-B1*13:01L HLA-DPA1*01:03-B1*02: 01L HLA-DPA1*01:03-B1*104:01L HLA-DPA1*01:02-B1*04:01L HLA-DRB1* 10:01L HLA-DRB1*08:02L HLA-DRB1*08:03L HLA-DRB1*15:01L
KDYLASGGQPIT

SEQ ID NO: 12315 - protein, 12 aa, Severe acute respiratory syndrome coronavirus 2
  REGION 1..12: note = Table B: HLA-DRB1*04:01L HLA-DRB1*04:04L HLA-DRB1*03:01L HLA-DRB1*08:01L HLA-DRB1*11:01L HLA-DQA1*01-B1*05L HLA-DRB4*02:01NL HLA-DRB5*02:02L HLA-DRB4*01:01L HLA-DQA1*05:05-B1*03:116L HLA-DPA1*01:03-B1*04:02L
  REGION 1..12: note = CONT. FROM ABOVE: HLA-DRB3*01:01L HLA-DPA1*02:01-B1*13:01L HLA-D PA1*01:03-B1*02:01L HLA-DPA1*01:03-B1*104:01L HLA-DRB1*08:02L HL A-DRB1*08:03L HLA-DRB1*15:01L
DYLASGGQPITN

SEQ ID NO: 12316 - protein, 14 aa, Severe acute respiratory syndrome coronavirus 2
  REGION 1..14: note = Table B: HLA-DRB1*04:01L HLA-DRB1*13:02L HLA-DRB1*08:04L HLA-DRB1*14:01L HLA-DRB1*11:04L HLA-DRB4*01:01L HLA-DRB1*10:01L HLA-DRB1*08:03L
AITVTPEANMDQES

SEQ ID NO: 12317 - protein, 12 aa, Severe acute respiratory syndrome coronavirus 2
  REGION 1..12: note = Table B: HLA-DRB1*04:01L HLA-DRB1*13:03L HLA-DRB1*01:03L HLA-DRB1*04:02L HLA-DRB1*04:04L HLA-DRB1*04:05L HLA-DQA1*01:02-B1*06:02L HLA-DRB1*01:02L HLA-DRB4*03:01NL HLA-DRB1*08:04L HLA-DRB1*11:04L HLA-DRB1*08:01L HLA-DRB1*11:01L
  REGION 1..12: note = CONT. FROM ABOVE: HLA-DRB1*04:10L HLA-DRB1*12:01L HLA-DQA1*03:01 -B1*03:02L HLA-DRB1*14:54L HLA-DRB1*10:01L HLA-DRB1*16:01L HLA-D RB1*08:03L HLA-DQA1*02:01-B1*03:03L HLA-DRB1*15:03L
GKYVQIPTTCAN

SEQ ID NO: 12318 - protein, 14 aa, Severe acute respiratory syndrome coronavirus 2
  REGION 1..14: note = Table B: HLA-DRB1*04:01L HLA-DRB1*01:01L HLA-DRB1*11:01L HLA-DRB3*01:01L
REPMLQSADAQSFL

SEQ ID NO: 12319 - protein, 10 aa, Severe acute respiratory syndrome coronavirus 2
  REGION 1..10: note = Table B: HLA-DRB1*04:01L HLA-DRB1*13:02M HLA-DRB1*13:03M HLA-DRB1*04:02L HLA-DRB1*01:01L HLA-DRB4*03:01NL HLA-DRB3*02:01L HLA-DRB1*14:01L HLA-DRB1*11:04L HLA-DRB1*14:02L HLA-DRB1*08:01M HLA-DRB5*01:01L HLA-DPA1*01:03-B1*04:02L HLA-DRB1*12:01M
  REGION 1..10: note = CONT. FROM ABOVE: HLA-DRB1*12:02L HLA-DQA1*03:01-B1*03:02M HLA-D QA1*05:05-B1*03:01M HLA-DRB1*14:17L HLA-DRB1*16:01L HLA-DQA1*01: 03-B1*06:01L HLA-DRB1*08:02L HLA-DQA1*02:01-B1*03:03L HLA-DRB1*1 5:01L
SADAQSFLNR

SEQ ID NO: 12320 - protein, 13 aa, Severe acute respiratory syndrome coronavirus 2
  REGION 1..13: note = Table B: HLA-DRB1*04:01L HLA-DRB4*03:01NL HLA-DRB3*02:01L HLA-DRB1*11:03L HLA-DRB1*14:02L HLA-DRB1*12:02L HLA-DRB1*14:54L HLA-DPA1*01:03-B1*02:01L HLA-DPA1*01:03-B1*104:01L HLA-DQA1*05:05-B1*03:01L HLA-DRB1*07:01L HLA-DRB1*08:02L
DVVYRAFDIYNDK

SEQ ID NO: 12321 - protein, 12 aa, Severe acute respiratory syndrome coronavirus 2
  REGION 1..12: note = Table B: HLA-DRB1*04:01L HLA-DRB1*01:03L HLA-DRB1*04:04L HLA-DRB1*04:05L HLA-DQA1*01:02-B1*06:02L HLA-DRB1*01:01L HLA-DRB1*08:04L HLA-DRB1*14:01L HLA-DRB1*11:04L HLA-DRB1*08:01L HLA-DRB1*11:01L HLA-DQA1*01-B1*05L HLA-DQA1*05:05-B1*03:19L
  REGION 1..12: note = CONT. FROM ABOVE: HLA-DRB1*04:10L HLA-DPA1*01:03-B1*04:02L HLA-D RB1*12:01L HLA-DPA1*03:01-B1*105:01L HLA-DQA1*03:01-B1*03:02L HL A-DQA1*05:05-B1*03:01L HLA-DRB1*10:01L HLA-DQA1*02:01-B1*03:03L HLA-DRB1*15:03L
IYNLLKDCPAVA

SEQ ID NO: 12322 - protein, 10 aa, Severe acute respiratory syndrome coronavirus 2
  REGION 1..10: note = Table B: HLA-DRB1*04:01L HLA-DRB1*04:03L HLA-DRB1*13:02L HLA-DRB1*13:03L HLA-DRB1*01:03L HLA-DRB1*04:02L HLA-DRB1*04:04L HLA-DRB1*04:05L HLA-DRB1*01:02L HLA-DRB4*03:01NL HLA-DRB1*14:01L HLA-DRB1*11:04L HLA-DRB1*08:01L HLA-DQA1*01-B1*05L
  REGION 1..10: note = CONT. FROM ABOVE: HLA-DRB1*04:10L HLA-DRB1*12:01L HLA-DRB3*01:01 L HLA-DQA1*03:01-B1*03:02L HLA-DRB1*14:54L HLA-DRB1*14:17L HLA-D RB1*10:01L HLA-DRB1*16:01L HLA-DRB1*04:08L HLA-DQA1*02:01-B1*03: 03L
FRIDGDMVPH

SEQ ID NO: 12323 - protein, 15 aa, Severe acute respiratory syndrome coronavirus 2
  REGION 1..15: note = Table B: HLA-DRB1*04:01L HLA-DRB1*08:04L HLA-DRB1*08:77L HLA-DRB3*02:01L HLA-DPA1*01:03-B1*03:01L HLA-DPA1*03:01-B1*04:02L HLA-DRB1*11:02L HLA-DRB1*14:02L HLA-DRB1*14:54L HLA-DRB1*10:01L HLA-DRB1*08:03L
IDGDMVPHISRQRLT

SEQ ID NO: 12324 - protein, 14 aa, Severe acute respiratory syndrome coronavirus 2
  REGION 1..14: note = Table B: HLA-DRB1*04:01L HLA-DRB1*04:02L HLA-DRB1*04:04L HLA-DRB1*01:01L HLA-DRB1*08:04L HLA-DPA1*01:03-B1*03:01L HLA-DRB1*14:01L HLA-DRB1*11:04L HLA-DRB1*11:01L HLA-DPA1*01:03-B1*04:01L HLA-DRB3*01:01L
  REGION 1..14: note = CONT. FROM ABOVE: HLA-DPA1*01:03-B1*02:01L HLA-DPA1*01:03-B1*104 :01L HLA-DRB1*07:01L HLA-DRB1*10:01L HLA-DRB1*08:03L
LTKYTMADLVYALR

SEQ ID NO: 12325 - protein, 14 aa, Severe acute respiratory syndrome coronavirus 2
  REGION 1..14: note = Table B: HLA-DRB1*04:01L HLA-DRB1*11:01L HLA-DRB1*15:01L
KDWYDFVENPDILR

SEQ ID NO: 12326 - protein, 14 aa, Severe acute respiratory syndrome coronavirus 2
  REGION 1..14: note = Table B: HLA-DRB1*04:01L HLA-DRB1*08:04L HLA-DRB1*11:02L HLA-DRB1*10:01L HLA-DRB1*15:01L
ILRVYANLGERVRQ

SEQ ID NO: 12327 - protein, 16 aa, Severe acute respiratory syndrome coronavirus 2
  REGION 1..16: note = Table B: HLA-DRB1*04:01L HLA-DPA1*01:03-B1*04:02L
NAGIVGVLTLDNQDLN

SEQ ID NO: 12328 - protein, 13 aa, Severe acute respiratory syndrome coronavirus 2
  REGION 1..13: note = Table B: HLA-DRB1*04:01L HLA-DRB1*13:02L HLA-DRB1*13:03L HLA-DRB1*01:03L HLA-DRB1*04:04L HLA-DRB1*01:02L HLA-DRB1*08:04L HLA-DRB1*08:77L HLA-DRB3*02:01L HLA-DPA1*01:03-B1*03:01L HLA-DRB1*14:01L HLA-DRB1*11:03L HLA-DRB1*11:04L HLA-DRB1*14:02L
  REGION 1..13: note = CONT. FROM ABOVE: HLA-DRB5*01:01L HLA-DRB1*12:02L HLA-DRB3*01:01 L HLA-DPA1*03:01-B1*105:01L HLA-DRB1*10:01L HLA-DRB1*04:08L HLA- DRB1*08:03L HLA-DRB1*15:03L
VGVLTLDNQDLNG

SEQ ID NO: 12329 - protein, 16 aa, Severe acute respiratory syndrome coronavirus 2
  REGION 1..16: note = Table B: HLA-DRB1*04:01L HLA-DRB4*01:01L
NGNWYDFGDFIQTTPG

SEQ ID NO: 12330 - protein, 14 aa, Severe acute respiratory syndrome coronavirus 2
  REGION 1..14: note = Table B: HLA-DRB1*04:01L HLA-DRB1*01:01L HLA-DRB1*08:04L HLA-DRB1*03:01L HLA-DRB1*08:01L HLA-DRB1*11:01L HLA-DRB5*01:01L HLA-DRB4*02:01NL HLA-DRB4*01:01L HLA-DRB3*01:01L HLA-DPA1*02:01-B1*13:01L HLA-DPA1*01:03-B1*104:01L
  REGION 1..14: note = CONT. FROM ABOVE: HLA-DRB1*08:02L HLA-DRB1*08:03L HLA-DRB1*15:01 L
GDFIQTTPGSGVPV

SEQ ID NO: 12331 - protein, 15 aa, Severe acute respiratory syndrome coronavirus 2
  REGION 1..15: note = Table B: HLA-DRB1*04:01L HLA-DQA1*05:01-B1*02:01L
MPILTLTRALTAESH

SEQ ID NO: 12332 - protein, 14 aa, Severe acute respiratory syndrome coronavirus 2
  REGION 1..14: note = Table B: HLA-DRB1*04:01L HLA-DRB1*08:04L HLA-DPA1*01:03-B1*03:01L HLA-DRB1*11:04L HLA-DRB1*08:01L HLA-DPA1*02:01-B1*13:01L HLA-DRB1*10:01L
LTLTRALTAESHVD

SEQ ID NO: 12333 - protein, 13 aa, Severe acute respiratory syndrome coronavirus 2
  REGION 1..13: note = Table B: HLA-DRB1*04:01L HLA-DRB1*04:02L HLA-DRB1*04:04L HLA-DRB1*08:77L HLA-DRB3*02:01L HLA-DRB1*11:03L HLA-DRB1*11:04L HLA-DRB1*11:01L HLA-DQA1*05:05-B1*03:19L HLA-DRB1*13:01L HLA-DRB4*01:01L HLA-DPA1*01:03-B1*04:01L
  REGION 1..13: note = CONT. FROM ABOVE: HLA-DPA1*01:03-B1*04:02L HLA-DPA1*01:03-B1*02: 01L HLA-DRB1*14:17L HLA-DRB1*10:01L HLA-DQA1*01:03-B1*06:01L HLA -DRB1*08:03L HLA-DQA1*02:01-B1*03:03L
DLLKYDFTEERLK

SEQ ID NO: 12334 - protein, 12 aa, Severe acute respiratory syndrome coronavirus 2
  REGION 1..12: note = Table B: HLA-DRB1*04:01L HLA-DRB4*03:01NL HLA-DRB1*08:04L HLA-DRB1*08:77L HLA-DRB3*02:01L HLA-DRB1*03:01L HLA-DRB1*11:02L HLA-DRB1*11:03L HLA-DRB1*11:04L HLA-DRB1*11:01L HLA-DQA1*01-B1*05L HLA-DRB4*01:01L HLA-DPA1*01:03-B1*04:01L
  REGION 1..12: note = CONT. FROM ABOVE: HLA-DRB1*12:02L HLA-DRB3*01:01L HLA-DRB1*14:54 L HLA-DQA1*05:05-B1*03:01L HLA-DRB1*04:08L
KIFVDGVPFVVS

SEQ ID NO: 12335 - protein, 14 aa, Severe acute respiratory syndrome coronavirus 2
  REGION 1..14: note = Table B: HLA-DRB1*04:01L HLA-DRB1*11:02L
GVPFVVSTGYHFRE

SEQ ID NO: 12336 - protein, 14 aa, Severe acute respiratory syndrome coronavirus 2
  REGION 1..14: note = Table B: HLA-DRB1*04:01L HLA-DRB3*01:01L HLA-DRB1*08:02L
HFRELGVVHNQDVN

SEQ ID NO: 12337 - protein, 13 aa, Severe acute respiratory syndrome coronavirus 2
  REGION 1..13: note = Table B: HLA-DRB1*04:01L HLA-DPA1*01:03-B1*03:01L HLA-DRB3*01:01L HLA-DQA1*05:05-B1*03:01L
GVVHNQDVNLHSS

SEQ ID NO: 12338 - protein, 15 aa, Severe acute respiratory syndrome coronavirus 2
  REGION 1..15: note = Table B: HLA-DRB1*04:01L HLA-DRB1*01:01L HLA-DRB1*14:01L HLA-DRB1*11:04L HLA-DRB3*01:01L
RLSFKELLVYAADPA

SEQ ID NO: 12339 - protein, 13 aa, Severe acute respiratory syndrome coronavirus 2
  REGION 1..13: note = Table B: HLA-DRB1*04:01L HLA-DRB1*13:02L HLA-DRB1*01:01L HLA-DRB1*08:04L HLA-DRB1*08:77L HLA-DRB3*02:01L HLA-DPA1*01:03-B1*03:01L HLA-DRB1*11:03L HLA-DRB1*11:04L HLA-DRB1*14:02L HLA-DQA1*01:01-B1*05:01L HLA-DRB1*08:01L
  REGION 1..13: note = CONT. FROM ABOVE: HLA-DPA1*01:03-B1*04:01L HLA-DRB1*09:01L HLA-D PA1*01:03-B1*04:02L HLA-DRB1*12:02L HLA-DRB3*01:01L HLA-DPA1*01: 03-B1*104:01L HLA-DRB1*07:01L HLA-DRB1*10:01L HLA-DRB1*08:03L HL A-DRB1*15:01L
KELLVYAADPAMH

SEQ ID NO: 12340 - protein, 13 aa, Severe acute respiratory syndrome coronavirus 2
  REGION 1..13: note = Table B: HLA-DRB1*04:01L HLA-DRB1*03:01L HLA-DRB1*08:01L HLA-DRB1*11:01L HLA-DRB1*13:01L HLA-DRB4*01:01L HLA-DPA1*01:03-B1*04:01L HLA-DPA1*01:03-B1*04:02L HLA-DPA1*01:03-B1*104:01L HLA-DRB1*07:01L
ELLVYAADPAMHA

SEQ ID NO: 12341 - protein, 15 aa, Severe acute respiratory syndrome coronavirus 2
  REGION 1..15: note = Table B: HLA-DRB1*04:01L HLA-DRB1*03:01L HLA-DRB1*11:02L HLA-DPA1*01:03-B1*02:01L HLA-DRB1*08:02L
DPAMHAASGNLLLDK

SEQ ID NO: 12342 - protein, 11 aa, Severe acute respiratory syndrome coronavirus 2
  REGION 1..11: note = Table B: HLA-DRB1*04:01L HLA-DRB1*04:04L HLA-DRB1*01:01L HLA-DRB1*01:02L HLA-DRB4*03:01NL HLA-DRB1*08:04L HLA-DRB1*11:03L HLA-DRB1*11:04L HLA-DQA1*01-B1*05L HLA-DRB4*01:01L HLA-DRB1*04:10L HLA-DRB1*12:02L HLA-DRB1*14:54L
  REGION 1..11: note = CONT. FROM ABOVE: HLA-DQA1*05:05-B1*03:01L HLA-DRB1*10:01L HLA-D RB1*04:08L HLA-DRB1*08:03L
VAALTNNVAFQ

SEQ ID NO: 12343 - protein, 14 aa, Severe acute respiratory syndrome coronavirus 2
  REGION 1..14: note = Table B: HLA-DRB1*04:01L HLA-DRB1*04:02L HLA-DRB1*04:04L HLA-DRB1*11:04L HLA-DRB3*01:01L
KDFYDFAVSKGFFK

SEQ ID NO: 12344 - protein, 13 aa, Severe acute respiratory syndrome coronavirus 2
  REGION 1..13: note = Table B: HLA-DRB1*04:01L HLA-DRB1*04:04L HLA-DRB1*01:01L HLA-DRB1*11:01L HLA-DRB3*01:01L HLA-DRB1*07:01L
KGFFKEGSSVELK

SEQ ID NO: 12345 - protein, 13 aa, Severe acute respiratory syndrome coronavirus 2
  REGION 1..13: note = Table B: HLA-DRB1*04:01L HLA-DRB1*13:02L HLA-DRB1*04:04L HLA-DRB1*01:01L HLA-DRB1*11:04L HLA-DRB1*11:01L HLA-DRB3*01:01L HLA-DRB1*07:01L
GFFKEGSSVELKH

SEQ ID NO: 12346 - protein, 12 aa, Severe acute respiratory syndrome coronavirus 2
  REGION 1..12: note = Table B: HLA-DRB1*04:01L HLA-DRB1*04:05L HLA-DRB1*01:02L HLA-DRB1*08:04L HLA-DRB1*15:03L
FFFAQDGNAAIS

SEQ ID NO: 12347 - protein, 14 aa, Severe acute respiratory syndrome coronavirus 2
  REGION 1..14: note = Table B: HLA-DRB1*04:01L HLA-DRB1*04:03L HLA-DRB1*13:03L HLA-DRB1*04:02L HLA-DRB1*04:04L HLA-DRB1*01:01L HLA-DRB1*08:04L HLA-DRB1*08:77L HLA-DRB3*02:01L HLA-DRB1*03:01L HLA-DRB1*11:02L HLA-DRB1*11:03L HLA-DRB1*13:01L HLA-DQA1*05:05-B1*03:116L
  REGION 1..14: note = CONT. FROM ABOVE: HLA-DRB1*09:01L HLA-DRB1*10:01L HLA-DRB1*08:02 L HLA-DRB1*08:03L
DYYRYNLPTMCDIR

SEQ ID NO: 12348 - protein, 11 aa, Severe acute respiratory syndrome coronavirus 2
  REGION 1..11: note = Table B: HLA-DRB1*04:01L HLA-DQA1*01:02-B1*06:02L HLA-DRB1*01:01L HLA-DRB3*02:01L HLA-DPA1*01:03-B1*03:01L HLA-DPA1*03:01-B1*04:02L HLA-DRB1*03:01L HLA-DQA1*01:01-B1*05:01L HLA-DRB1*08:01L HLA-DRB1*11:01L
  REGION 1..11: note = CONT. FROM ABOVE: HLA-DRB5*01:01L HLA-DQA1*05:05-B1*03:19L HLA-D RB4*01:01L HLA-DRB1*09:01L HLA-DPA1*01:03-B1*04:02L HLA-DRB3*01: 01L HLA-DPA1*02:01-B1*13:01L HLA-DPA1*03:01-B1*105:01L HLA-DPA1* 01:03-B1*02:01L HLA-DPA1*01:03-B1*104:01L
  REGION 1..11: note = CONT. FROM ABOVE: HLA-DQA1*05:05-B1*03:01L HLA-DPA1*01:02-B1*04: 01L HLA-DRB1*07:01L HLA-DQA1*01:03-B1*06:01L
VIVNNLDKSAG

SEQ ID NO: 12349 - protein, 14 aa, Severe acute respiratory syndrome coronavirus 2
  REGION 1..14: note = Table B: HLA-DRB1*04:01L HLA-DRB1*04:04L HLA-DRB1*01:01L
MSYEDQDALFAYTK

SEQ ID NO: 12350 - protein, 14 aa, Severe acute respiratory syndrome coronavirus 2
  REGION 1..14: note = Table B: HLA-DRB1*04:01L HLA-DRB1*13:02L HLA-DRB1*13:03L HLA-DRB1*01:01L HLA-DRB1*08:04L HLA-DRB1*08:01L HLA-DRB1*11:01L HLA-DRB3*01:01L HLA-DPA1*01:03-B1*104:01L HLA-DRB1*07:01L
KRNVIPTITQMNLK

SEQ ID NO: 12351 - protein, 14 aa, Severe acute respiratory syndrome coronavirus 2
  REGION 1..14: note = Table B: HLA-DRB1*04:01L
QMNLKYAISAKNRA

SEQ ID NO: 12352 - protein, 14 aa, Severe acute respiratory syndrome coronavirus 2
  REGION 1..14: note = Table B: HLA-DRB1*04:01L HLA-DRB1*03:01L HLA-DQA1*01:01-B1*05:01L HLA-DQA1*05:05-B1*03:19L
MNLKYAISAKNRAR

SEQ ID NO: 12353 - protein, 14 aa, Severe acute respiratory syndrome coronavirus 2
  REGION 1..14: note = Table B: HLA-DRB1*04:01L HLA-DRB1*03:01L HLA-DPA1*03:01-B1*105:01L HLA-DRB1*10:01L HLA-DQA1*01:03-B1*06:01L
NLKYAISAKNRART

SEQ ID NO: 12354 - protein, 15 aa, Severe acute respiratory syndrome coronavirus 2
  REGION 1..15: note = Table B: HLA-DRB1*04:01L HLA-DRB1*14:01L
GVSICSTMTNRQFHQ

SEQ ID NO: 12355 - protein, 13 aa, Severe acute respiratory syndrome coronavirus 2
  REGION 1..13: note = Table B: HLA-DRB1*04:01L HLA-DRB1*04:04L HLA-DRB1*04:05L HLA-DRB1*01:01L HLA-DRB1*14:01L HLA-DRB1*11:04L HLA-DRB1*12:01L HLA-DRB1*10:01L
KLLKSIAATRGAT

SEQ ID NO: 12356 - protein, 14 aa, Severe acute respiratory syndrome coronavirus 2
  REGION 1..14: note = Table B: HLA-DRB1*04:01L HLA-DRB1*04:04L HLA-DRB1*08:01L HLA-DRB1*11:01L HLA-DRB4*02:01NL HLA-DRB3*01:01L HLA-DRB1*15:01L
KSIAATRGATVVIG

SEQ ID NO: 12357 - protein, 15 aa, Severe acute respiratory syndrome coronavirus 2
  REGION 1..15: note = Table B: HLA-DRB1*04:01L HLA-DRB1*08:04L HLA-DPA1*01:03-B1*04:01L HLA-DPA1*01:03-B1*104:01L HLA-DRB1*07:01L
HNMLKTVYSDVENPH

SEQ ID NO: 12358 - protein, 14 aa, Severe acute respiratory syndrome coronavirus 2
  REGION 1..14: note = Table B: HLA-DRB1*04:01L
SHRFYRLANECAQV

SEQ ID NO: 12359 - protein, 16 aa, Severe acute respiratory syndrome coronavirus 2
  REGION 1..16: note = Table B: HLA-DRB1*04:01L HLA-DRB1*04:04L HLA-DRB1*01:01L HLA-DPA1*01:03-B1*04:02L HLA-DPA1*02:01-B1*13:01L HLA-DPA1*01:03-B1*104:01L HLA-DRB1*07:01L HLA-DRB1*10:01L HLA-DRB1*08:02L
GGSLYVKPGGTSSGDA

SEQ ID NO: 12360 - protein, 14 aa, Severe acute respiratory syndrome coronavirus 2
  REGION 1..14: note = Table B: HLA-DRB1*04:01L HLA-DRB1*13:02L HLA-DRB1*08:04L HLA-DPA1*03:01-B1*04:02L HLA-DRB1*11:02L HLA-DRB1*11:03L HLA-DRB1*11:04L HLA-DQA1*01:01-B1*05:01L HLA-DRB1*08:01L HLA-DRB1*11:01L HLA-DQA1*01-B1*05L HLA-DRB4*01:01L
  REGION 1..14: note = CONT. FROM ABOVE: HLA-DRB1*09:01L HLA-DRB3*01:01L HLA-DPA1*02:01 -B1*13:01L HLA-DPA1*01:02-B1*04:01L HLA-DRB1*07:01L HLA-DRB1*08: 02L HLA-DRB1*08:03L
SVFNICQAVTANVN

SEQ ID NO: 12361 - protein, 13 aa, Severe acute respiratory syndrome coronavirus 2
  REGION 1..13: note = Table B: HLA-DRB1*04:01L HLA-DRB1*03:01L HLA-DPA1*01:03-B1*02:01L
ALLSTDGNKIADK

SEQ ID NO: 12362 - protein, 13 aa, Severe acute respiratory syndrome coronavirus 2
  REGION 1..13: note = Table B: HLA-DRB1*04:01L HLA-DRB1*04:04L HLA-DRB1*01:01L HLA-DRB1*08:77L HLA-DRB1*11:02L HLA-DRB1*09:01L HLA-DRB1*12:02L HLA-DRB1*14:54L HLA-DPA1*01:03-B1*02:01L HLA-DQA1*05:05-B1*03:01L HLA-DRB1*14:17L HLA-DRB1*10:01L
  REGION 1..13: note = CONT. FROM ABOVE: HLA-DRB1*08:02L HLA-DRB1*08:03L
DKYVRNLQHRLYE

SEQ ID NO: 12363 - protein, 15 aa, Severe acute respiratory syndrome coronavirus 2
  REGION 1..15: note = Table B: HLA-DRB1*04:01L HLA-DRB1*11:03L HLA-DRB1*07:01L
VDTDFVNEFYAYLRK

SEQ ID NO: 12364 - protein, 14 aa, Severe acute respiratory syndrome coronavirus 2
  REGION 1..14: note = Table B: HLA-DRB1*04:01L HLA-DRB1*13:03L HLA-DRB1*04:02L HLA-DRB1*01:01L HLA-DRB1*08:04L HLA-DRB1*11:03L HLA-DRB1*14:02L HLA-DRB1*13:01L HLA-DQA1*05:05-B1*03:01L HLA-DRB1*07:01L HLA-DRB1*08:03L HLA-DRB1*15:01L
TDFVNEFYAYLRKH

SEQ ID NO: 12365 - protein, 16 aa, Severe acute respiratory syndrome coronavirus 2
  REGION 1..16: note = Table B: HLA-DRB1*04:01L HLA-DRB1*08:77L HLA-DRB1*11:03L HLA-DRB1*11:01L HLA-DPA1*01:03-B1*104:01L HLA-DPA1*01:02-B1*04:01L HLA-DRB1*10:01L HLA-DRB1*08:02L
SMMILSDDAVVCFNST

SEQ ID NO: 12366 - protein, 13 aa, Severe acute respiratory syndrome coronavirus 2
  REGION 1..13: note = Table B: HLA-DRB1*04:01L HLA-DRB1*13:02L HLA-DRB1*13:03L HLA-DRB1*04:04L HLA-DRB1*04:05L HLA-DRB1*08:04L HLA-DRB1*08:77L HLA-DRB3*02:01L HLA-DPA1*01:03-B1*03:01L HLA-DPA1*03:01-B1*04:02L HLA-DRB1*11:04L HLA-DRB1*14:02L
  REGION 1..13: note = CONT. FROM ABOVE: HLA-DQA1*01:01-B1*05:01L HLA-DRB1*08:01L HLA-D RB1*11:01L HLA-DQA1*05:01-B1*02:01L HLA-DPA1*01:03-B1*04:01L HLA -DRB1*04:10L HLA-DRB1*12:01L HLA-DPA1*01:03-B1*02:01L HLA-DPA1*0 1:02-B1*04:01L HLA-DRB1*10:01L HLA-DRB1*16:01L HLA-DRB1*15:03L
STYASQGLVASIK

SEQ ID NO: 12367 - protein, 14 aa, Severe acute respiratory syndrome coronavirus 2
  REGION 1..14: note = Table B: HLA-DRB1*04:01L HLA-DRB1*11:02L HLA-DRB1*04:10L HLA-DRB1*09:01L HLA-DRB1*14:17L
SIKNFKSVLYYQNN

SEQ ID NO: 12368 - protein, 14 aa, Severe acute respiratory syndrome coronavirus 2
  REGION 1..14: note = Table B: HLA-DRB1*04:01L HLA-DRB1*01:01L HLA-DRB1*08:77L HLA-DRB3*02:01L HLA-DRB1*03:01L HLA-DRB1*11:02L HLA-DRB1*11:03L HLA-DRB1*14:02M HLA-DQA1*01:01-B1*05:01L HLA-DRB4*01:01L HLA-DQA1*05:05-B1*03:116L HLA-DRB1*04:10L HLA-DRB1*09:01L
  REGION 1..14: note = CONT. FROM ABOVE: HLA-DRB1*12:02L HLA-DRB3*01:01L HLA-DPA1*02:01 -B1*13:01L HLA-DPA1*01:03-B1*104:01L HLA-DRB1*07:01L HLA-DRB1*10 :01L HLA-DRB1*08:02L HLA-DRB1*08:03L
VLYYQNNVFMSEAK

SEQ ID NO: 12369 - protein, 15 aa, Severe acute respiratory syndrome coronavirus 2
  REGION 1..15: note = Table B: HLA-DRB1*04:01L HLA-DRB1*14:17L HLA-DRB1*10:01L
GPHEFCSQHTMLVKQ

SEQ ID NO: 12370 - protein, 13 aa, Severe acute respiratory syndrome coronavirus 2
  REGION 1..13: note = Table B: HLA-DRB1*04:01L HLA-DRB1*04:04L HLA-DRB1*11:02L HLA-DRB1*08:01L HLA-DPA1*01:03-B1*04:02L
DDIVKTDGTLMIE

SEQ ID NO: 12371 - protein, 10 aa, Severe acute respiratory syndrome coronavirus 2
  REGION 1..10: note = Table B: HLA-DRB1*04:01L HLA-DRB1*13:02L HLA-DRB1*13:03L HLA-DRB1*04:02L HLA-DRB1*01:01L HLA-DRB4*03:01NL HLA-DRB3*02:01L HLA-DRB1*14:01L HLA-DRB1*11:04L HLA-DRB1*14:02L HLA-DRB1*08:01L HLA-DRB5*01:01L HLA-DPA1*01:03-B1*04:02L HLA-DRB1*12:01L
  REGION 1..10: note = CONT. FROM ABOVE: HLA-DRB1*12:02L HLA-DQA1*03:01-B1*03:02M HLA-D QA1*05:05-B1*03:01L HLA-DRB1*14:17L HLA-DRB1*16:01L HLA-DRB1*08: 02L HLA-DQA1*02:01-B1*03:03L
KTDGTLMIER

SEQ ID NO: 12372 - protein, 14 aa, Severe acute respiratory syndrome coronavirus 2
  REGION 1..14: note = Table B: HLA-DRB1*04:01L HLA-DRB1*01:01L
TDGTLMIERFVSLA

SEQ ID NO: 12373 - protein, 16 aa, Severe acute respiratory syndrome coronavirus 2
  REGION 1..16: note = Table B: HLA-DRB1*04:01L HLA-DRB1*13:03L HLA-DRB1*11:02L HLA-DRB1*11:03L HLA-DRB1*11:04L HLA-DRB4*01:01L HLA-DRB3*01:01L HLA-DPA1*01:02-B1*04:01L HLA-DRB1*07:01L
TGHMLDMYSVMLTNDN

SEQ ID NO: 12374 - protein, 14 aa, Severe acute respiratory syndrome coronavirus 2
  REGION 1..14: note = Table B: HLA-DRB1*04:01L HLA-DRB1*13:03L HLA-DRB1*01:02L HLA-DRB1*11:03L HLA-DRB1*11:04L HLA-DRB1*08:03L HLA-DRB1*15:03L
LDMYSVMLTNDNTS

SEQ ID NO: 12375 - protein, 11 aa, Severe acute respiratory syndrome coronavirus 2
  REGION 1..11: note = Table B: HLA-DRB1*04:01L HLA-DRB1*13:02L HLA-DRB1*08:01L HLA-DRB5*01:01L HLA-DQA1*01-B1*05L HLA-DRB1*12:02L HLA-DQA1*05:05-B1*03:01L HLA-DRB1*08:03L
SVMLTNDNTSR

SEQ ID NO: 12376 - protein, 16 aa, Severe acute respiratory syndrome coronavirus 2
  REGION 1..16: note = Table B: HLA-DRB1*04:01L HLA-DRB1*01:01L HLA-DRB1*11:03L HLA-DRB1*13:01L HLA-DRB1*14:54L HLA-DRB1*07:01L HLA-DRB1*10:01L
SRYWEPEFYEAMYTPH

SEQ ID NO: 12377 - protein, 13 aa, Severe acute respiratory syndrome coronavirus 2
  REGION 1..13: note = Table B: HLA-DRB1*04:01L HLA-DRB1*13:02L HLA-DRB1*04:04L HLA-DRB1*01:02L HLA-DRB1*08:04L HLA-DRB1*08:77L HLA-DRB3*02:01L HLA-DPA1*01:03-B1*03:01L HLA-DRB1*14:01L HLA-DRB1*11:03L HLA-DRB1*11:04L HLA-DRB1*14:02L HLA-DQA1*01:01-B1*05:01L
  REGION 1..13: note = CONT. FROM ABOVE: HLA-DRB1*11:01L HLA-DRB5*01:01L HLA-DQA1*05:05 -B1*03:19L HLA-DRB4*01:01L HLA-DPA1*01:03-B1*04:01L HLA-DRB1*09: 01L HLA-DRB1*12:02L HLA-DRB3*01:01L HLA-DPA1*02:01-B1*13:01L HLA -DRB1*14:54L HLA-DPA1*01:03-B1*02:01L HLA-DPA1*01:03-B1*104:01L
  REGION 1..13: note = CONT. FROM ABOVE: HLA-DQA1*05:05-B1*03:01L HLA-DRB1*07:01L HLA-D RB1*10:01L HLA-DRB1*08:02L HLA-DRB1*08:03L
EPEFYEAMYTPHT

SEQ ID NO: 12378 - protein, 11 aa, Severe acute respiratory syndrome coronavirus 2
  REGION 1..11: note = Table B: HLA-DRB1*04:01L HLA-DRB1*04:03L HLA-DRB1*01:03L HLA-DRB1*04:02L HLA-DRB1*04:04L HLA-DRB1*04:05L HLA-DRB4*03:01NL HLA-DRB1*14:17L HLA-DRB1*04:08L
YEAMYTPHTVL

SEQ ID NO: 12379 - protein, 13 aa, Severe acute respiratory syndrome coronavirus 2
  REGION 1..13: note = Table B: HLA-DRB1*04:01L HLA-DRB1*13:02L HLA-DRB1*11:04L HLA-DRB1*14:02L HLA-DRB1*11:01L HLA-DRB3*01:01L HLA-DPA1*01:03-B1*02:01L HLA-DRB1*10:01L HLA-DRB1*08:03L
AMYTPHTVLQAVG

SEQ ID NO: 12380 - protein, 20 aa, Severe acute respiratory syndrome coronavirus 2
  REGION 1..20: note = Table B: HLA-DRB1*04:01L HLA-DRB1*01:01L HLA-DPA1*01:03-B1*02:01L HLA-DRB1*07:01L
DVTQLYLGGMSYYCKSHKPP

SEQ ID NO: 12381 - protein, 14 aa, Severe acute respiratory syndrome coronavirus 2
  REGION 1..14: note = Table B: HLA-DRB1*04:01L HLA-DRB1*01:01L HLA-DPA1*01:03-B1*03:01L HLA-DRB1*11:02L HLA-DRB1*14:02L HLA-DQA1*05:05-B1*03:19L HLA-DPA1*02:01-B1*13:01L HLA-DPA1*01:03-B1*02:01L HLA-DPA1*01:03-B1*104:01L
  REGION 1..14: note = CONT. FROM ABOVE: HLA-DRB1*10:01L HLA-DRB1*08:02L
NGQVFGLYKNTCVG

SEQ ID NO: 12382 - protein, 14 aa, Severe acute respiratory syndrome coronavirus 2
  REGION 1..14: note = Table B: HLA-DRB1*04:01L HLA-DRB1*01:01L HLA-DRB3*02:01L HLA-DPA1*03:01-B1*04:02L HLA-DRB1*11:02L HLA-DRB1*11:03L HLA-DRB1*14:02L HLA-DPA1*01:03-B1*04:02L HLA-DRB3*01:01L HLA-DPA1*01:03-B1*104:01L HLA-DPA1*01:02-B1*04:01L
  REGION 1..14: note = CONT. FROM ABOVE: HLA-DRB1*07:01L HLA-DQA1*01:03-B1*06:01L
VFGLYKNTCVGSDN

SEQ ID NO: 12383 - protein, 12 aa, Severe acute respiratory syndrome coronavirus 2
  REGION 1..12: note = Table B: HLA-DRB1*04:01L HLA-DRB1*13:02L HLA-DRB1*04:04L HLA-DRB1*01:02L HLA-DRB1*08:04L HLA-DPA1*01:03-B1*03:01L HLA-DRB1*14:01L HLA-DRB1*11:04L HLA-DQA1*01:01-B1*05:01L HLA-DRB1*11:01L HLA-DQA1*05:05-B1*03:19L
  REGION 1..12: note = CONT. FROM ABOVE: HLA-DQA1*05:01-B1*02:01L HLA-DRB1*12:01L HLA-D RB1*12:02L HLA-DPA1*02:01-B1*13:01L HLA-DRB1*14:54L HLA-DRB1*10: 01L HLA-DRB1*08:03L HLA-DRB1*15:03L
GDYILANTCTER

SEQ ID NO: 12384 - protein, 14 aa, Severe acute respiratory syndrome coronavirus 2
  REGION 1..14: note = Table B: HLA-DRB1*04:01L HLA-DRB1*01:01L HLA-DRB3*02:01L HLA-DRB1*14:02L HLA-DRB3*01:01L HLA-DRB1*07:01L HLA-DRB1*15:01L
RLKLFAAETLKATE

SEQ ID NO: 12385 - protein, 12 aa, Severe acute respiratory syndrome coronavirus 2
  REGION 1..12: note = Table B: HLA-DRB1*04:01L HLA-DRB1*13:02L HLA-DRB1*13:03L HLA-DRB1*08:04L HLA-DPA1*01:03-B1*03:01L HLA-DRB1*14:01L HLA-DRB1*11:04L HLA-DRB1*14:02L HLA-DQA1*01:01-B1*05:01L HLA-DRB1*08:01L HLA-DRB1*11:01L HLA-DRB1*04:10L
  REGION 1..12: note = CONT. FROM ABOVE: HLA-DPA1*01:03-B1*02:01L HLA-DPA1*01:03-B1*104 :01L HLA-DRB1*10:01L
LFAAETLKATEE

SEQ ID NO: 12386 - protein, 14 aa, Severe acute respiratory syndrome coronavirus 2
  REGION 1..14: note = Table B: HLA-DRB1*04:01L HLA-DRB1*04:04L HLA-DRB1*08:77L HLA-DRB3*02:01L HLA-DPA1*01:03-B1*03:01L HLA-DRB1*03:01L HLA-DRB1*11:04L HLA-DRB1*14:02L HLA-DRB1*08:01L HLA-DRB1*11:01L HLA-DQA1*01-B1*05L HLA-DRB1*09:01L HLA-DRB3*01:01L
  REGION 1..14: note = CONT. FROM ABOVE: HLA-DPA1*02:01-B1*13:01L HLA-DPA1*01:02-B1*04: 01L HLA-DRB1*15:01L
EETFKLSYGIATVR

SEQ ID NO: 12387 - protein, 14 aa, Severe acute respiratory syndrome coronavirus 2
  REGION 1..14: note = Table B: HLA-DRB1*04:01L HLA-DRB1*01:01L HLA-DRB1*03:01L HLA-DRB1*11:04L HLA-DRB1*11:01L HLA-DRB3*01:01L HLA-DPA1*01:03-B1*104:01L HLA-DRB1*07:01L HLA-DRB1*10:01L
IATVREVLSDRELH

SEQ ID NO: 12388 - protein, 15 aa, Severe acute respiratory syndrome coronavirus 2
  REGION 1..15: note = Table B: HLA-DRB1*04:01L HLA-DRB1*11:02L HLA-DRB4*01:01L
VREVLSDRELHLSWE

SEQ ID NO: 12389 - protein, 12 aa, Severe acute respiratory syndrome coronavirus 2
  REGION 1..12: note = Table B: HLA-DRB1*04:01L HLA-DRB1*08:04L HLA-DPA1*01:03-B1*03:01L HLA-DRB1*03:01L HLA-DRB1*14:02L HLA-DQA1*01:01-B1*05:01L HLA-DRB5*01:01L HLA-DQA1*01-B1*05L HLA-DQA1*05:05-B1*03:19L HLA-DRB1*13:01L
  REGION 1..12: note = CONT. FROM ABOVE: HLA-DPA1*01:03-B1*04:01L HLA-DRB1*09:01L HLA-D PA1*01:03-B1*04:02L HLA-DPA1*01:03-B1*104:01L HLA-DQA1*05:05-B1* 03:01L HLA-DRB1*10:01L HLA-DRB1*08:03L HLA-DRB1*15:01L
TGYRVTKNSKVQ

SEQ ID NO: 12390 - protein, 12 aa, Severe acute respiratory syndrome coronavirus 2
  REGION 1..12: note = Table B: HLA-DRB1*04:01L HLA-DRB1*13:02L HLA-DRB1*04:04L HLA-DQA1*01:02-B1*06:02L HLA-DRB1*01:02L HLA-DRB1*08:04L HLA-DRB3*02:01L HLA-DRB1*14:01L HLA-DRB1*11:03L HLA-DRB1*11:04L HLA-DRB1*14:02L HLA-DQA1*01:01-B1*05:01L HLA-DRB1*08:01L
  REGION 1..12: note = CONT. FROM ABOVE: HLA-DRB1*11:01L HLA-DRB5*01:01L HLA-DRB1*09:01 L HLA-DRB1*12:02L HLA-DRB3*01:01L HLA-DPA1*02:01-B1*13:01L HLA-D PA1*03:01-B1*105:01L HLA-DQA1*05:05-B1*03:01L HLA-DRB1*07:01L HL A-DQA1*01:03-B1*06:01L HLA-DRB1*08:03L
IGEYTFEKGDYG

SEQ ID NO: 12391 - protein, 13 aa, Severe acute respiratory syndrome coronavirus 2
  REGION 1..13: note = Table B: HLA-DRB1*04:01L HLA-DRB1*13:02L HLA-DRB1*04:04L HLA-DRB1*01:01L HLA-DRB1*08:04L HLA-DRB1*14:01L HLA-DRB1*11:03L HLA-DRB1*11:04L HLA-DRB1*14:02L HLA-DPA1*02:01-B1*13:01L HLA-DRB1*08:03L
GEYTFEKGDYGDA

SEQ ID NO: 12392 - protein, 16 aa, Severe acute respiratory syndrome coronavirus 2
  REGION 1..16: note = Table B: HLA-DRB1*04:01L HLA-DRB1*01:01L HLA-DRB1*14:01L HLA-DRB1*11:04L HLA-DRB1*14:02L HLA-DRB3*01:01L
EKGDYGDAVVYRGTTT

SEQ ID NO: 12393 - protein, 14 aa, Severe acute respiratory syndrome coronavirus 2
  REGION 1..14: note = Table B: HLA-DRB1*04:01L HLA-DRB1*03:01L HLA-DRB1*11:02L HLA-DRB5*02:02L HLA-DPA1*01:03-B1*02:01L HLA-DRB1*08:02L HLA-DRB1*15:01L
VGDYFVLTSHTVMP

SEQ ID NO: 12394 - protein, 14 aa, Severe acute respiratory syndrome coronavirus 2
  REGION 1..14: note = Table B: HLA-DRB1*04:01L HLA-DRB1*11:02L HLA-DRB1*08:02L
GDYFVLTSHTVMPL

SEQ ID NO: 12395 - protein, 16 aa, Severe acute respiratory syndrome coronavirus 2
  REGION 1..16: note = Table B: HLA-DRB1*04:01L HLA-DRB1*13:03L HLA-DRB1*08:77L HLA-DRB1*03:01L HLA-DRB1*11:02L HLA-DRB1*11:03L HLA-DRB1*11:01L HLA-DQA1*01-B1*05L HLA-DPA1*01:03-B1*04:01L HLA-DRB1*12:02L HLA-DRB3*01:01L HLA-DRB1*10:01L HLA-DRB1*08:03L
YFVLTSHTVMPLSAPT

SEQ ID NO: 12396 - protein, 14 aa, Severe acute respiratory syndrome coronavirus 2
  REGION 1..14: note = Table B: HLA-DRB1*04:01L HLA-DRB1*04:04L HLA-DPA1*01:03-B1*03:01L HLA-DQA1*01-B1*05L
HTVMPLSAPTLVPQ

SEQ ID NO: 12397 - protein, 16 aa, Severe acute respiratory syndrome coronavirus 2
  REGION 1..16: note = Table B: HLA-DRB1*04:01L
SAPTLVPQEHYVRITG

SEQ ID NO: 12398 - protein, 17 aa, Severe acute respiratory syndrome coronavirus 2
  REGION 1..17: note = Table B: HLA-DRB1*04:01L HLA-DRB1*01:01L HLA-DPA1*01:03-B1*04:01L
VPQEHYVRITGLYPTLN

SEQ ID NO: 12399 - protein, 13 aa, Severe acute respiratory syndrome coronavirus 2
  REGION 1..13: note = Table B: HLA-DRB1*04:01L HLA-DRB1*04:02L HLA-DRB1*11:03L HLA-DRB1*14:02L HLA-DQA1*01-B1*05L HLA-DQA1*05:05-B1*03:01L HLA-DQA1*02:01-B1*03:03L
QKYSTLQGPPGTG

SEQ ID NO: 12400 - protein, 10 aa, Severe acute respiratory syndrome coronavirus 2
  REGION 1..10: note = Table B: HLA-DRB1*04:01L HLA-DRB1*04:03L HLA-DRB1*13:02L HLA-DRB1*13:03L HLA-DRB1*01:03L HLA-DRB1*04:02L HLA-DRB1*04:04L HLA-DRB1*01:01L HLA-DRB4*03:01NL HLA-DRB3*02:01L HLA-DRB1*14:01L HLA-DRB1*11:04L HLA-DRB1*14:02L HLA-DRB1*08:01L HLA-DRB1*11:01L
  REGION 1..10: note = CONT. FROM ABOVE: HLA-DRB5*01:01L HLA-DPA1*01:03-B1*04:02L HLA-D RB1*12:01L HLA-DRB1*12:02L HLA-DRB3*01:01L HLA-DPA1*03:01-B1*105 :01L HLA-DQA1*03:01-B1*03:02L HLA-DRB1*14:54L HLA-DQA1*05:05-B1* 03:01L HLA-DRB1*14:17L HLA-DRB1*16:01L HLA-DRB1*08:02L
  REGION 1..10: note = CONT. FROM ABOVE: HLA-DRB1*08:03L HLA-DQA1*02:01-B1*03:03L HLA-D RB1*15:01L
TLQGPPGTGK

SEQ ID NO: 12401 - protein, 17 aa, Severe acute respiratory syndrome coronavirus 2
  REGION 1..17: note = Table B: HLA-DRB1*04:01L HLA-DRB1*11:03L HLA-DRB1*08:03L
GKSHFAIGLALYYPSAR

SEQ ID NO: 12402 - protein, 14 aa, Severe acute respiratory syndrome coronavirus 2
  REGION 1..14: note = Table B: HLA-DRB1*04:01L HLA-DRB1*01:01L HLA-DRB4*03:01NL HLA-DRB1*11:02L HLA-DRB1*11:03L HLA-DQA1*01:01-B1*05:01L HLA-DRB1*04:10L HLA-DRB3*01:01L HLA-DRB1*14:54L HLA-DRB1*07:01L HLA-DRB1*08:02L
ARIVYTACSHAAVD

SEQ ID NO: 12403 - protein, 13 aa, Severe acute respiratory syndrome coronavirus 2
  REGION 1..13: note = Table B: HLA-DRB1*04:01L HLA-DRB1*13:02L HLA-DRB1*04:04L HLA-DQA1*01:02-B1*06:02L HLA-DRB1*01:01L HLA-DRB1*14:01L HLA-DRB1*11:04L HLA-DRB1*11:01L HLA-DPA1*01:03-B1*04:02L HLA-DRB3*01:01L HLA-DPA1*01:03-B1*02:01L
KALKYLPIDKCSR

SEQ ID NO: 12404 - protein, 13 aa, Severe acute respiratory syndrome coronavirus 2
  REGION 1..13: note = Table B: HLA-DRB1*04:01L
FDKFKVNSTLEQY

SEQ ID NO: 12405 - protein, 14 aa, Severe acute respiratory syndrome coronavirus 2
  REGION 1..14: note = Table B: HLA-DRB1*04:01L HLA-DRB1*01:01L
DKFKVNSTLEQYVF

SEQ ID NO: 12406 - protein, 14 aa, Severe acute respiratory syndrome coronavirus 2
  REGION 1..14: note = Table B: HLA-DRB1*04:01L HLA-DRB1*01:01L HLA-DRB3*02:01L HLA-DPA1*01:03-B1*03:01L HLA-DRB1*11:03L HLA-DRB1*11:04L HLA-DRB1*14:02L HLA-DRB1*08:01L HLA-DRB1*11:01L HLA-DRB4*01:01L HLA-DPA1*01:03-B1*04:01L HLA-DRB1*09:01L
  REGION 1..14: note = CONT. FROM ABOVE: HLA-DPA1*02:01-B1*13:01L HLA-DPA1*01:03-B1*02: 01L HLA-DPA1*01:03-B1*104:01L HLA-DRB1*07:01L HLA-DRB1*08:03L
LEQYVFCTVNALPE

SEQ ID NO: 12407 - protein, 14 aa, Severe acute respiratory syndrome coronavirus 2
  REGION 1..14: note = Table B: HLA-DRB1*04:01L HLA-DRB1*01:01L
ADIVVFDEISMATN

SEQ ID NO: 12408 - protein, 14 aa, Severe acute respiratory syndrome coronavirus 2
  REGION 1..14: note = Table B: HLA-DRB1*04:01L HLA-DRB1*01:01L HLA-DQA1*01:01-B1*05:01L HLA-DRB1*08:01L HLA-DPA1*01:03-B1*02:01L HLA-DRB1*08:02L
IVVFDEISMATNYD

SEQ ID NO: 12409 - protein, 11 aa, Severe acute respiratory syndrome coronavirus 2
  REGION 1..11: note = Table B: HLA-DRB1*04:01L HLA-DRB1*04:04L HLA-DRB1*01:02L HLA-DRB1*08:04L HLA-DRB1*11:04L HLA-DRB1*08:01L HLA-DRB1*12:02L HLA-DPA1*02:01-B1*13:01L HLA-DRB1*10:01L HLA-DRB1*08:03L
KHYVYIGDPAQ

SEQ ID NO: 12410 - protein, 12 aa, Severe acute respiratory syndrome coronavirus 2
  REGION 1..12: note = Table B: HLA-DRB1*04:01L HLA-DRB1*13:03L HLA-DRB1*01:03L HLA-DRB1*04:04L HLA-DRB1*04:05L HLA-DRB4*03:01NL HLA-DRB1*08:77L HLA-DRB1*11:03L HLA-DRB1*11:04L HLA-DRB1*04:10L HLA-DRB1*12:01L HLA-DRB1*14:54L HLA-DRB1*10:01L HLA-DRB1*04:08L HLA-DRB1*08:03L
YVYIGDPAQLPA

SEQ ID NO: 12411 - protein, 12 aa, Severe acute respiratory syndrome coronavirus 2
  REGION 1..12: note = Table B: HLA-DRB1*04:01L HLA-DRB1*04:04L HLA-DRB1*01:01L HLA-DRB1*01:02L HLA-DRB1*08:04L HLA-DPA1*01:03-B1*03:01L HLA-DRB1*14:01L HLA-DRB1*11:03L HLA-DRB1*11:01L HLA-DPA1*01:03-B1*04:02L HLA-DPA1*03:01-B1*105:01L
  REGION 1..12: note = CONT. FROM ABOVE: HLA-DRB1*07:01L HLA-DRB1*10:01L HLA-DRB1*08:03 L HLA-DRB1*15:03L
YIGDPAQLPAPR

SEQ ID NO: 12412 - protein, 12 aa, Severe acute respiratory syndrome coronavirus 2
  REGION 1..12: note = Table B: HLA-DRB1*04:01L HLA-DRB1*13:02L HLA-DRB1*13:03L HLA-DRB1*04:02L HLA-DRB1*04:04L HLA-DRB1*04:05L HLA-DRB4*03:01NL HLA-DRB1*08:04L HLA-DRB1*08:77L HLA-DRB3*02:01L HLA-DRB1*11:03L HLA-DRB1*11:04L HLA-DRB5*02:02L HLA-DRB3*01:01L HLA-DRB1*14:54L
  REGION 1..12: note = CONT. FROM ABOVE: HLA-DPA1*01:03-B1*02:01L HLA-DRB1*14:17L HLA-D RB1*07:01L HLA-DRB1*10:01L
KGTLEPEYFNSV

SEQ ID NO: 12413 - protein, 12 aa, Severe acute respiratory syndrome coronavirus 2
  REGION 1..12: note = Table B: HLA-DRB1*04:01L HLA-DRB1*13:02L HLA-DRB1*04:04L HLA-DRB1*04:05L HLA-DRB1*01:01L HLA-DRB1*01:02L HLA-DRB1*08:04L HLA-DRB3*02:01L HLA-DPA1*03:01-B1*04:02L HLA-DRB1*11:03L HLA-DRB1*11:04L HLA-DQA1*01:01-B1*05:01L HLA-DRB5*01:01L
  REGION 1..12: note = CONT. FROM ABOVE: HLA-DRB1*04:10L HLA-DRB1*09:01L HLA-DRB1*12:02 L HLA-DPA1*02:01-B1*13:01L HLA-DPA1*03:01-B1*105:01L HLA-DQA1*05 :05-B1*03:01L HLA-DPA1*01:02-B1*04:01L HLA-DRB1*07:01L HLA-DRB1* 04:08L HLA-DRB1*08:03L
IVDTVSALVYDN

SEQ ID NO: 12414 - protein, 12 aa, Severe acute respiratory syndrome coronavirus 2
  REGION 1..12: note = Table B: HLA-DRB1*04:01L HLA-DQA1*01:02-B1*06:02L HLA-DPA1*01:03-B1*03:01L HLA-DRB1*13:01L
ALVYDNKLKAHK

SEQ ID NO: 12415 - protein, 14 aa, Severe acute respiratory syndrome coronavirus 2
  REGION 1..14: note = Table B: HLA-DRB1*04:01L HLA-DRB1*08:77L HLA-DPA1*01:03-B1*03:01L HLA-DRB1*11:01L HLA-DRB4*01:01L HLA-DPA1*01:03-B1*04:01L HLA-DPA1*01:03-B1*04:02L HLA-DRB3*01:01L HLA-DPA1*01:03-B1*02:01L
  REGION 1..14: note = CONT. FROM ABOVE: HLA-DPA1*01:03-B1*104:01L HLA-DRB1*08:02L
AVFISPYNSQNAVA

SEQ ID NO: 12416 - protein, 14 aa, Severe acute respiratory syndrome coronavirus 2
  REGION 1..14: note = Table B: HLA-DRB1*04:01L HLA-DRB1*08:04L HLA-DRB3*02:01L HLA-DPA1*01:03-B1*03:01L HLA-DRB1*03:01L HLA-DRB1*14:02L HLA-DQA1*01:01-B1*05:01L HLA-DRB1*08:01L HLA-DRB5*01:01L HLA-DRB1*09:01L HLA-DRB3*01:01L HLA-DPA1*02:01-B1*13:01L
  REGION 1..14: note = CONT. FROM ABOVE: HLA-DPA1*01:03-B1*104:01L HLA-DRB1*07:01L
ILGLPTQTVDSSQG

SEQ ID NO: 12417 - protein, 15 aa, Severe acute respiratory syndrome coronavirus 2
  REGION 1..15: note = Table B: HLA-DRB1*04:01L HLA-DRB1*01:01L HLA-DRB1*08:77L HLA-DRB3*02:01L HLA-DRB1*11:02L HLA-DRB1*11:03L HLA-DRB4*01:01L HLA-DQA1*05:05-B1*03:116L HLA-DRB1*04:10L HLA-DRB1*09:01L HLA-DRB1*07:01L HLA-DRB1*08:02L
GSEYDYVIFTQTTET

SEQ ID NO: 12418 - protein, 14 aa, Severe acute respiratory syndrome coronavirus 2
  REGION 1..14: note = Table B: HLA-DRB1*04:01L HLA-DRB1*01:01L HLA-DRB1*08:04L HLA-DPA1*01:03-B1*03:01L HLA-DRB1*11:03L HLA-DRB1*11:04L HLA-DRB1*14:02L HLA-DQA1*01:01-B1*05:01L HLA-DRB1*11:01L HLA-DPA1*01:03-B1*04:01L HLA-DPA1*01:03-B1*02:01L
  REGION 1..14: note = CONT. FROM ABOVE: HLA-DPA1*01:03-B1*104:01L HLA-DRB1*07:01L HLA- DRB1*10:01L HLA-DRB1*08:03L
DKLQFTSLEIPRRN

SEQ ID NO: 12419 - protein, 13 aa, Severe acute respiratory syndrome coronavirus 2
  REGION 1..13: note = Table B: HLA-DRB1*04:01L HLA-DRB1*11:04L
RNVATLQAENVTG

SEQ ID NO: 12420 - protein, 14 aa, Severe acute respiratory syndrome coronavirus 2
  REGION 1..14: note = Table B: HLA-DRB1*04:01L HLA-DRB1*04:04L HLA-DRB1*08:04L HLA-DRB1*03:01L HLA-DRB1*11:03L HLA-DRB1*11:04L HLA-DRB1*08:01L HLA-DRB1*11:01L HLA-DRB3*01:01L
VATLQAENVTGLFK

SEQ ID NO: 12421 - protein, 16 aa, Severe acute respiratory syndrome coronavirus 2
  REGION 1..16: note = Table B: HLA-DRB1*04:01L HLA-DRB1*04:02L HLA-DRB1*01:01L HLA-DRB1*03:01L HLA-DRB1*11:02L HLA-DRB1*11:03L HLA-DQA1*01:01-B1*05:01L HLA-DRB1*04:10L HLA-DRB1*07:01L HLA-DRB1*08:02L
VDTKFKTEGLCVDIPG

SEQ ID NO: 12422 - protein, 13 aa, Severe acute respiratory syndrome coronavirus 2
  REGION 1..13: note = Table B: HLA-DRB1*04:01L HLA-DRB1*04:03L HLA-DRB1*04:04L HLA-DRB1*04:05L HLA-DRB1*11:04L
MTYRRLISMMGFK

SEQ ID NO: 12423 - protein, 14 aa, Severe acute respiratory syndrome coronavirus 2
  REGION 1..14: note = Table B: HLA-DRB1*04:01L HLA-DRB1*04:04L HLA-DRB1*01:01L HLA-DRB1*08:04L HLA-DRB1*03:01L HLA-DRB1*11:01L HLA-DRB1*10:01L HLA-DRB1*15:01L
YPNMFITREEAIRH

SEQ ID NO: 12424 - protein, 16 aa, Severe acute respiratory syndrome coronavirus 2
  REGION 1..16: note = Table B: HLA-DRB1*04:01L HLA-DRB1*11:02L HLA-DRB1*11:03L HLA-DRB1*09:01L HLA-DRB1*08:02L HLA-DRB1*08:03L
EEAIRHVRAWIGFDVE

SEQ ID NO: 12425 - protein, 11 aa, Severe acute respiratory syndrome coronavirus 2
  REGION 1..11: note = Table B: HLA-DRB1*04:01L HLA-DRB1*04:04L HLA-DRB1*11:04L HLA-DRB1*04:10L HLA-DRB1*14:54L HLA-DRB1*14:17L HLA-DRB1*04:08L
YVDTPNNTDFS

SEQ ID NO: 12426 - protein, 17 aa, Severe acute respiratory syndrome coronavirus 2
  REGION 1..17: note = Table B: HLA-DRB1*04:01L HLA-DRB1*13:03L HLA-DRB1*04:04L HLA-DRB1*11:03L HLA-DRB1*11:04L HLA-DQA1*03:01-B1*03:02L HLA-DQA1*05:05-B1*03:01L HLA-DRB1*10:01L
PPPGDQFKHLIPLMYKG

SEQ ID NO: 12427 - protein, 14 aa, Severe acute respiratory syndrome coronavirus 2
  REGION 1..14: note = Table B: HLA-DRB1*04:01L HLA-DRB1*04:04L HLA-DRB1*04:05L HLA-DRB1*01:01L HLA-DRB1*08:77L HLA-DRB3*02:01L HLA-DRB1*03:01L HLA-DRB1*11:02L HLA-DRB1*11:03L HLA-DRB1*14:02L HLA-DQA1*01:01-B1*05:01L HLA-DRB1*09:01L
  REGION 1..14: note = CONT. FROM ABOVE: HLA-DPA1*01:03-B1*104:01L HLA-DRB1*14:17L HLA- DRB1*07:01L HLA-DRB1*10:01L HLA-DRB1*08:03L
IPLMYKGLPWNVVR

SEQ ID NO: 12428 - protein, 14 aa, Severe acute respiratory syndrome coronavirus 2
  REGION 1..14: note = Table B: HLA-DRB1*04:01L HLA-DRB1*04:04L HLA-DRB1*01:01L HLA-DRB3*02:01L HLA-DRB1*11:02L HLA-DRB1*11:03L HLA-DRB1*09:01L HLA-DRB3*01:01L HLA-DRB1*07:01L HLA-DRB1*10:01L HLA-DRB1*08:02L
GFDYVYNPFMIDVQ

SEQ ID NO: 12429 - protein, 13 aa, Severe acute respiratory syndrome coronavirus 2
  REGION 1..13: note = Table B: HLA-DRB1*04:01L HLA-DRB1*01:01L HLA-DRB1*08:77L HLA-DRB1*11:02L HLA-DQA1*01:01-B1*05:01L HLA-DRB4*01:01L HLA-DQA1*05:05-B1*03:116L HLA-DRB1*04:10L HLA-DRB1*09:01L HLA-DRB1*08:02L
DYVYNPFMIDVQQ

SEQ ID NO: 12430 - protein, 14 aa, Severe acute respiratory syndrome coronavirus 2
  REGION 1..14: note = Table B: HLA-DRB1*04:01L HLA-DRB1*11:02L HLA-DRB1*11:03L HLA-DRB1*11:04L HLA-DRB1*08:01L HLA-DRB1*11:01L HLA-DRB1*12:02L HLA-DRB3*01:01L HLA-DRB1*14:54L HLA-DPA1*01:03-B1*02:01L HLA-DRB1*10:01L HLA-DRB1*08:02L
NPFMIDVQQWGFTG

SEQ ID NO: 12431 - protein, 14 aa, Severe acute respiratory syndrome coronavirus 2
  REGION 1..14: note = Table B: HLA-DRB1*04:01L HLA-DRB1*01:01L HLA-DRB1*14:01L HLA-DRB1*11:03L HLA-DRB1*14:02L HLA-DQA1*01:01-B1*05:01L HLA-DRB1*11:01L HLA-DPA1*01:03-B1*04:02L HLA-DRB3*01:01L HLA-DPA1*01:03-B1*104:01L HLA-DRB1*07:01L
VQQWGFTGNLQSNH

SEQ ID NO: 12432 - protein, 16 aa, Severe acute respiratory syndrome coronavirus 2
  REGION 1..16: note = Table B: HLA-DRB1*04:01L HLA-DRB3*02:01L HLA-DPA1*02:01-B1*13:01L HLA-DRB1*07:01L HLA-DRB1*08:03L
TGNLQSNHDLYCQVHG

SEQ ID NO: 12433 - protein, 14 aa, Severe acute respiratory syndrome coronavirus 2
  REGION 1..14: note = Table B: HLA-DRB1*04:01L HLA-DRB1*04:04L HLA-DRB1*01:01L HLA-DRB1*08:04L HLA-DRB1*11:03L HLA-DRB1*09:01L HLA-DPA1*01:03-B1*104:01L HLA-DRB1*07:01L HLA-DRB1*08:03L
RVDWTIEYPIIGDE

SEQ ID NO: 12434 - protein, 16 aa, Severe acute respiratory syndrome coronavirus 2
  REGION 1..16: note = Table B: HLA-DRB1*04:01L HLA-DRB1*01:01L
IGDELKINAACRKVQH

SEQ ID NO: 12435 - protein, 14 aa, Severe acute respiratory syndrome coronavirus 2
  REGION 1..14: note = Table B: HLA-DRB1*04:01L HLA-DRB1*03:01L HLA-DRB1*11:03L
KAALLADKFPVLHD

SEQ ID NO: 12436 - protein, 13 aa, Severe acute respiratory syndrome coronavirus 2
  REGION 1..13: note = Table B: HLA-DRB1*04:01L HLA-DQA1*01:02-B1*06:02L HLA-DRB3*02:01L HLA-DPA1*01:03-B1*03:01L HLA-DPA1*03:01-B1*04:02L HLA-DRB4*01:01L HLA-DPA1*01:03-B1*04:02L HLA-DPA1*03:01-B1*105:01L
  REGION 1..13: note = CONT. FROM ABOVE: HLA-DQA1*05:05-B1*03:01L HLA-DRB1*08:03L
FPVLHDIGNPKAI

SEQ ID NO: 12437 - protein, 13 aa, Severe acute respiratory syndrome coronavirus 2
  REGION 1..13: note = Table B: HLA-DRB1*04:01L HLA-DRB1*01:01L HLA-DRB1*08:04L HLA-DRB1*14:01L HLA-DRB1*11:04L HLA-DRB1*08:01L HLA-DRB1*11:01L HLA-DRB1*04:10L HLA-DRB1*12:01L HLA-DRB3*01:01L HLA-DPA1*03:01-B1*105:01L HLA-DRB1*14:54L
  REGION 1..13: note = CONT. FROM ABOVE: HLA-DQA1*05:05-B1*03:01L HLA-DRB1*10:01L
PVLHDIGNPKAIK

SEQ ID NO: 12438 - protein, 16 aa, Severe acute respiratory syndrome coronavirus 2
  REGION 1..16: note = Table B: HLA-DRB1*04:01L HLA-DRB1*01:01L HLA-DRB1*03:01L HLA-DRB1*11:02L
NPKAIKCVPQADVEWK

SEQ ID NO: 12439 - protein, 16 aa, Severe acute respiratory syndrome coronavirus 2
  REGION 1..16: note = Table B: HLA-DRB1*04:01L HLA-DRB1*01:01L
SDKAYKIEELFYSYAT

SEQ ID NO: 12440 - protein, 16 aa, Severe acute respiratory syndrome coronavirus 2
  REGION 1..16: note = Table B: HLA-DRB1*04:01L HLA-DRB1*01:01L HLA-DRB3*02:01L HLA-DRB1*11:03L HLA-DRB1*07:01L
DKAYKIEELFYSYATH

SEQ ID NO: 12441 - protein, 12 aa, Severe acute respiratory syndrome coronavirus 2
  REGION 1..12: note = Table B: HLA-DRB1*04:01L HLA-DRB1*13:02L HLA-DRB1*08:04L HLA-DPA1*01:03-B1*03:01L HLA-DPA1*03:01-B1*04:02L HLA-DRB1*14:01L HLA-DRB1*11:04L HLA-DRB1*14:02L HLA-DRB1*11:01L HLA-DQA1*05:05-B1*03:19L HLA-DRB1*09:01L
  REGION 1..12: note = CONT. FROM ABOVE: HLA-DPA1*01:03-B1*04:02L HLA-DRB1*12:02L HLA-D RB3*01:01L HLA-DPA1*02:01-B1*13:01L HLA-DQA1*05:05-B1*03:01L HLA -DRB1*07:01L
ELFYSYATHSDK

SEQ ID NO: 12442 - protein, 14 aa, Severe acute respiratory syndrome coronavirus 2
  REGION 1..14: note = Table B: HLA-DRB1*04:01L HLA-DRB1*13:02L HLA-DRB1*01:03L HLA-DRB1*04:04L HLA-DRB1*04:05L HLA-DRB1*01:01L HLA-DRB1*08:04L HLA-DPA1*01:03-B1*03:01L HLA-DRB1*11:04L HLA-DRB1*11:01L HLA-DRB1*10:01L HLA-DRB1*16:01L
TRVLSNLNLPGCDG

SEQ ID NO: 12443 - protein, 16 aa, Severe acute respiratory syndrome coronavirus 2
  REGION 1..16: note = Table B: HLA-DRB1*04:01L HLA-DRB1*13:02L HLA-DRB1*04:04L HLA-DRB1*08:04L HLA-DRB1*11:04L HLA-DRB1*11:01L HLA-DPA1*01:03-B1*04:02L HLA-DRB3*01:01L HLA-DPA1*01:03-B1*02:01L HLA-DPA1*01:03-B1*104:01L
  REGION 1..16: note = CONT. FROM ABOVE: HLA-DRB1*07:01L
KHAFHTPAFDKSAFVN

SEQ ID NO: 12444 - protein, 12 aa, Severe acute respiratory syndrome coronavirus 2
  REGION 1..12: note = Table B: HLA-DRB1*04:01L HLA-DRB1*04:02L HLA-DRB1*04:04L HLA-DRB4*03:01NL HLA-DRB1*08:04L HLA-DRB1*03:01L HLA-DRB1*11:03L HLA-DRB1*11:04L HLA-DRB1*14:02L HLA-DQA1*01:01-B1*05:01L HLA-DRB1*11:01L HLA-DRB5*01:01L HLA-DRB4*01:01L HLA-DRB1*04:10L
  REGION 1..12: note = CONT. FROM ABOVE: HLA-DRB1*09:01L HLA-DRB1*12:02L HLA-DRB3*01:01 L HLA-DRB1*14:54L HLA-DPA1*01:03-B1*02:01L HLA-DQA1*05:05-B1*03: 01L HLA-DRB1*14:17L HLA-DRB1*10:01L HLA-DRB1*08:03L
TPAFDKSAFVNL

SEQ ID NO: 12445 - protein, 12 aa, Severe acute respiratory syndrome coronavirus 2
  REGION 1..12: note = Table B: HLA-DRB1*04:01L HLA-DRB1*13:03L HLA-DRB1*01:03L HLA-DRB1*04:04L HLA-DRB1*04:05L HLA-DQA1*01:02-B1*06:02L HLA-DRB1*01:02L HLA-DRB1*08:04L HLA-DQA1*01-B1*05L HLA-DQA1*05:01-B1*02:01L HLA-DRB1*12:01L
  REGION 1..12: note = CONT. FROM ABOVE: HLA-DPA1*03:01-B1*105:01L HLA-DQA1*03:01-B1*03 :02L HLA-DRB1*14:54L HLA-DRB1*16:01L HLA-DQA1*02:01-B1*03:03L HL A-DRB1*15:03L
FYYSDSPCESHG

SEQ ID NO: 12446 - protein, 14 aa, Severe acute respiratory syndrome coronavirus 2
  REGION 1..14: note = Table B: HLA-DRB1*04:01L HLA-DRB1*01:01L HLA-DRB1*08:77L HLA-DRB3*02:01L HLA-DRB1*03:01L HLA-DRB1*11:03L HLA-DRB1*11:04L HLA-DRB1*14:02L HLA-DRB1*08:01L HLA-DRB1*11:01L HLA-DRB4*01:01L HLA-DPA1*01:03-B1*04:01L HLA-DRB1*09:01L HLA-DRB1*12:02L
  REGION 1..14: note = CONT. FROM ABOVE: HLA-DPA1*01:03-B1*02:01L HLA-DPA1*01:03-B1*104 :01L HLA-DRB1*07:01L HLA-DRB1*10:01L HLA-DRB1*08:03L
GKQVVSDIDYVPLK

SEQ ID NO: 12447 - protein, 14 aa, Severe acute respiratory syndrome coronavirus 2
  REGION 1..14: note = Table B: HLA-DRB1*04:01L HLA-DRB1*01:01L HLA-DRB1*11:01L HLA-DRB1*09:01L HLA-DRB3*01:01L
ANEYRLYLDAYNMM

SEQ ID NO: 12448 - protein, 11 aa, Severe acute respiratory syndrome coronavirus 2
  REGION 1..11: note = Table B: HLA-DRB1*04:01L HLA-DRB1*13:02L HLA-DRB1*13:03L HLA-DRB1*04:02L HLA-DRB1*04:04L HLA-DRB1*01:01L HLA-DRB4*03:01NL HLA-DRB1*08:04L HLA-DPA1*01:03-B1*03:01L HLA-DPA1*03:01-B1*04:02L HLA-DRB1*14:01L HLA-DRB1*11:03L
  REGION 1..11: note = CONT. FROM ABOVE: HLA-DRB1*11:04L HLA-DQA1*01:01-B1*05:01L HLA-D RB1*08:01L HLA-DRB1*11:01L HLA-DQA1*05:05-B1*03:19L HLA-DQA1*05: 01-B1*02:01L HLA-DRB1*04:10L HLA-DPA1*01:03-B1*04:02L HLA-DRB1*1 2:02L HLA-DPA1*02:01-B1*13:01L HLA-DRB1*14:54L
  REGION 1..11: note = CONT. FROM ABOVE: HLA-DQA1*05:05-B1*03:01L HLA-DRB1*10:01L HLA-D RB1*08:03L HLA-DRB1*15:03L
NTFTRLQSLEN

SEQ ID NO: 12449 - protein, 12 aa, Severe acute respiratory syndrome coronavirus 2
  REGION 1..12: note = Table B: HLA-DRB1*04:01L HLA-DRB1*01:01L HLA-DPA1*01:03-B1*03:01L HLA-DRB1*11:01L HLA-DQA1*05:05-B1*03:19L HLA-DQA1*05:01-B1*02:01L HLA-DPA1*01:03-B1*04:02L HLA-DPA1*02:01-B1*13:01L
  REGION 1..12: note = CONT. FROM ABOVE: HLA-DQA1*05:05-B1*03:01L
TFTRLQSLENVA

SEQ ID NO: 12450 - protein, 14 aa, Severe acute respiratory syndrome coronavirus 2
  REGION 1..14: note = Table B: HLA-DRB1*04:01L
LQSLENVAFNVVNK

SEQ ID NO: 12451 - protein, 14 aa, Severe acute respiratory syndrome coronavirus 2
  REGION 1..14: note = Table B: HLA-DRB1*04:01L HLA-DRB1*14:02L HLA-DRB1*10:01L HLA-DRB1*08:03L
QSLENVAFNVVNKG

SEQ ID NO: 12452 - protein, 10 aa, Severe acute respiratory syndrome coronavirus 2
  REGION 1..10: note = Table B: HLA-DRB1*04:01L HLA-DRB1*13:02L HLA-DRB1*13:03L HLA-DRB1*04:02L HLA-DRB1*01:01L HLA-DRB4*03:01NL HLA-DRB3*02:01L HLA-DRB1*14:01L HLA-DRB1*11:04L HLA-DRB1*08:01L HLA-DRB5*01:01L HLA-DPA1*01:03-B1*04:02L HLA-DRB1*12:01L HLA-DRB1*12:02L
  REGION 1..10: note = CONT. FROM ABOVE: HLA-DQA1*03:01-B1*03:02L HLA-DQA1*05:05-B1*03: 01L HLA-DRB1*14:17L HLA-DRB1*16:01L HLA-DQA1*02:01-B1*03:03L
SIINNTVYTK

SEQ ID NO: 12453 - protein, 12 aa, Severe acute respiratory syndrome coronavirus 2
  REGION 1..12: note = Table B: HLA-DRB1*04:01L HLA-DRB1*01:01L HLA-DRB1*11:01L HLA-DRB4*01:01L HLA-DPA1*01:03-B1*04:02L HLA-DRB3*01:01L HLA-DPA1*01:03-B1*104:01L HLA-DRB1*08:02L
TVYTKVDGVDVE

SEQ ID NO: 12454 - protein, 16 aa, Severe acute respiratory syndrome coronavirus 2
  REGION 1..16: note = Table B: HLA-DRB1*04:01L HLA-DRB1*13:03L HLA-DRB1*08:04L HLA-DRB1*08:77L HLA-DRB1*03:01L HLA-DRB1*11:02L HLA-DRB1*14:02L HLA-DRB1*13:01L HLA-DPA1*01:03-B1*04:01L HLA-DRB1*09:01L HLA-DPA1*01:03-B1*04:02L HLA-DRB1*14:54L HLA-DRB1*10:01L
  REGION 1..16: note = CONT. FROM ABOVE: HLA-DRB1*08:03L
AKRNIKPVPEVKILNN

SEQ ID NO: 12455 - protein, 17 aa, Severe acute respiratory syndrome coronavirus 2
  REGION 1..17: note = Table B: HLA-DRB1*04:01L HLA-DRB1*01:01L HLA-DRB1*11:02L HLA-DRB1*11:01L HLA-DRB4*01:01L HLA-DPA1*01:03-B1*04:02L HLA-DRB1*08:02L
KPVPEVKILNNLGVDIA

SEQ ID NO: 12456 - protein, 14 aa, Severe acute respiratory syndrome coronavirus 2
  REGION 1..14: note = Table B: HLA-DRB1*04:01L HLA-DPA1*01:03-B1*03:01L HLA-DPA1*03:01-B1*04:02L HLA-DRB1*03:01L HLA-DRB1*11:02L HLA-DRB1*13:01L HLA-DPA1*01:03-B1*04:02L HLA-DPA1*01:03-B1*02:01L HLA-DRB1*07:01L
  REGION 1..14: note = CONT. FROM ABOVE: HLA-DQA1*01:03-B1*06:01L
NTVIWDYKRDAPAH

SEQ ID NO: 12457 - protein, 16 aa, Severe acute respiratory syndrome coronavirus 2
  REGION 1..16: note = Table B: HLA-DRB1*04:01L HLA-DRB1*01:01L HLA-DRB1*08:77L HLA-DRB1*11:02L HLA-DRB1*11:03L HLA-DRB1*11:04L HLA-DRB1*11:01L HLA-DRB1*13:01L HLA-DPA1*01:03-B1*04:01L HLA-DQA1*05:05-B1*03:116L HLA-DRB1*09:01L
  REGION 1..16: note = CONT. FROM ABOVE: HLA-DPA1*01:03-B1*02:01L HLA-DPA1*01:03-B1*104 :01L HLA-DRB1*07:01L HLA-DRB1*10:01L HLA-DRB1*08:02L
APLTVFFDGRVDGQVD

SEQ ID NO: 12458 - protein, 16 aa, Severe acute respiratory syndrome coronavirus 2
  REGION 1..16: note = Table B: HLA-DRB1*04:01L HLA-DRB1*01:01L HLA-DRB1*11:02L HLA-DRB1*11:03L HLA-DRB1*11:01L HLA-DQA1*05:05-B1*03:19L HLA-DPA1*01:03-B1*04:01L HLA-DRB1*09:01L HLA-DPA1*01:03-B1*04:02L HLA-DPA1*01:03-B1*104:01L
  REGION 1..16: note = CONT. FROM ABOVE: HLA-DQA1*05:05-B1*03:01L
VDGQVDLFRNARNGVL

SEQ ID NO: 12459 - protein, 13 aa, Severe acute respiratory syndrome coronavirus 2
  REGION 1..13: note = Table B: HLA-DRB1*04:01L HLA-DRB1*01:01L HLA-DRB1*08:04L HLA-DRB1*08:77L HLA-DPA1*01:03-B1*03:01L HLA-DRB1*11:01L HLA-DRB1*09:01L HLA-DQA1*05:05-B1*03:01L
GVLITEGSVKGLQ

SEQ ID NO: 12460 - protein, 13 aa, Severe acute respiratory syndrome coronavirus 2
  REGION 1..13: note = Table B: HLA-DRB1*04:01L HLA-DRB1*04:04L HLA-DRB1*08:03L
LITEGSVKGLQPS

SEQ ID NO: 12461 - protein, 13 aa, Severe acute respiratory syndrome coronavirus 2
  REGION 1..13: note = Table B: HLA-DRB1*04:01L HLA-DRB1*13:03L HLA-DRB1*01:03L HLA-DRB1*04:04L HLA-DRB1*01:01L HLA-DRB4*03:01NL HLA-DRB1*11:04L HLA-DPA1*03:01-B1*105:01L HLA-DRB1*14:54L HLA-DRB1*10:01L HLA-DRB1*16:01L HLA-DQA1*01:03-B1*06:01L HLA-DRB1*04:08L
  REGION 1..13: note = CONT. FROM ABOVE: HLA-DRB1*08:03L HLA-DRB1*15:03L
GSVKGLQPSVGPK

SEQ ID NO: 12462 - protein, 14 aa, Severe acute respiratory syndrome coronavirus 2
  REGION 1..14: note = Table B: HLA-DRB1*04:01L HLA-DRB1*11:02L HLA-DRB1*11:03L HLA-DRB1*11:04L HLA-DRB1*11:01L HLA-DRB1*09:01L HLA-DRB1*12:02L HLA-DRB1*08:03L
GVTLIGEAVKTQFN

SEQ ID NO: 12463 - protein, 15 aa, Severe acute respiratory syndrome coronavirus 2
  REGION 1..15: note = Table B: HLA-DRB1*04:01L HLA-DQA1*05:05-B1*03:19L HLA-DPA1*01:03-B1*104:01L HLA-DRB1*07:01L
NYYKKVDGVVQQLPE

SEQ ID NO: 12464 - protein, 16 aa, Severe acute respiratory syndrome coronavirus 2
  REGION 1..16: note = Table B: HLA-DRB1*04:01L HLA-DRB1*01:01L HLA-DRB1*11:03L HLA-DRB1*07:01L
ETYFTQSRNLQEFKPR

SEQ ID NO: 12465 - protein, 14 aa, Severe acute respiratory syndrome coronavirus 2
  REGION 1..14: note = Table B: HLA-DRB1*04:01L HLA-DRB1*01:01L HLA-DRB1*03:01L HLA-DRB1*11:02L HLA-DRB1*11:03L HLA-DRB1*11:01L HLA-DRB4*01:01L HLA-DRB1*08:02L
EHIVYGDFSHSQLG

SEQ ID NO: 12466 - protein, 14 aa, Severe acute respiratory syndrome coronavirus 2
  REGION 1..14: note = Table B: HLA-DRB1*04:01L HLA-DRB1*04:04L HLA-DRB4*03:01NL HLA-DRB1*14:17L HLA-DRB1*10:01L
ESPFELEDFIPMDS

SEQ ID NO: 12467 - protein, 14 aa, Severe acute respiratory syndrome coronavirus 2
  REGION 1..14: note = Table B: HLA-DRB1*04:01L HLA-DRB1*13:02L HLA-DRB1*04:04L HLA-DRB1*01:01L HLA-DRB3*02:01L HLA-DRB1*11:03L HLA-DRB1*14:02L HLA-DQA1*05:05-B1*03:19L HLA-DRB1*10:01L HLA-DRB1*08:03L
SPFELEDFIPMDST

SEQ ID NO: 12468 - protein, 13 aa, Severe acute respiratory syndrome coronavirus 2
  REGION 1..13: note = Table B: HLA-DRB1*04:01L HLA-DRB1*01:01L HLA-DRB1*11:01L HLA-DRB5*01:01L HLA-DRB4*01:01L HLA-DRB3*01:01L HLA-DPA1*01:03-B1*104:01L HLA-DRB1*15:01L
LEDFIPMDSTVKN

SEQ ID NO: 12469 - protein, 13 aa, Severe acute respiratory syndrome coronavirus 2
  REGION 1..13: note = Table B: HLA-DRB1*04:01L HLA-DRB1*01:01L HLA-DRB1*08:77L HLA-DRB1*11:02L HLA-DRB5*01:01L HLA-DRB4*01:01L
DDFVEIIKSQDLS

SEQ ID NO: 12470 - protein, 14 aa, Severe acute respiratory syndrome coronavirus 2
  REGION 1..14: note = Table B: HLA-DRB1*04:01L HLA-DRB3*02:01L HLA-DRB1*11:04L HLA-DQA1*01:01-B1*05:01L HLA-DQA1*05:05-B1*03:19L HLA-DRB4*01:01L HLA-DRB1*09:01L HLA-DRB3*01:01L HLA-DPA1*01:03-B1*104:01L HLA-DRB1*10:01L HLA-DRB1*08:03L
SKVVKVTIDYTEIS

SEQ ID NO: 12471 - protein, 14 aa, Severe acute respiratory syndrome coronavirus 2
  REGION 1..14: note = Table B: HLA-DRB1*04:01L HLA-DRB1*11:02L HLA-DRB1*11:03L HLA-DRB1*11:04L HLA-DRB1*08:01L HLA-DRB1*11:01L HLA-DPA1*01:03-B1*02:01L HLA-DRB1*08:02L HLA-DRB1*08:03L
VVKVTIDYTEISFM

SEQ ID NO: 12472 - protein, 15 aa, Severe acute respiratory syndrome coronavirus 2
  REGION 1..15: note = Table B: HLA-DRB1*04:01L HLA-DRB1*13:02L HLA-DRB1*04:04L HLA-DRB1*08:04L HLA-DRB1*08:77L HLA-DRB3*02:01L HLA-DRB1*11:02L HLA-DRB1*11:03L HLA-DRB1*11:04L HLA-DQA1*01-B1*05L HLA-DRB1*09:01L HLA-DRB1*12:02L HLA-DRB3*01:01L HLA-DRB1*14:17L
  REGION 1..15: note = CONT. FROM ABOVE: HLA-DPA1*01:02-B1*04:01L HLA-DRB1*07:01L HLA-D RB1*08:02L HLA-DRB1*08:03L
SQAWQPGVAMPNLYK

SEQ ID NO: 12473 - protein, 13 aa, Severe acute respiratory syndrome coronavirus 2
  REGION 1..13: note = Table B: HLA-DRB1*04:01L HLA-DRB1*08:04L HLA-DRB1*08:77L HLA-DRB3*02:01L HLA-DPA1*01:03-B1*03:01L HLA-DPA1*03:01-B1*04:02L HLA-DRB1*14:02L HLA-DQA1*05:05-B1*03:19L HLA-DRB1*09:01L
  REGION 1..13: note = CONT. FROM ABOVE: HLA-DPA1*02:01-B1*13:01L HLA-DPA1*01:02-B1*04: 01L
DLQNYGDSATLPK

SEQ ID NO: 12474 - protein, 13 aa, Severe acute respiratory syndrome coronavirus 2
  REGION 1..13: note = Table B: HLA-DRB1*04:01L HLA-DRB1*08:04L HLA-DRB3*02:01L HLA-DPA1*03:01-B1*04:02L HLA-DRB1*11:01L HLA-DRB1*09:01L HLA-DRB3*01:01L HLA-DPA1*01:03-B1*104:01L
LQNYGDSATLPKG

SEQ ID NO: 12475 - protein, 15 aa, Severe acute respiratory syndrome coronavirus 2
  REGION 1..15: note = Table B: HLA-DRB1*04:01L HLA-DRB1*01:01L HLA-DRB1*08:77L HLA-DRB1*03:01L HLA-DRB1*11:02L HLA-DRB1*13:01L HLA-DRB4*01:01L HLA-DRB1*10:01L HLA-DRB1*08:02L HLA-DRB1*15:01L
LPKGIMMNVAKYTQL

SEQ ID NO: 12476 - protein, 15 aa, Severe acute respiratory syndrome coronavirus 2
  REGION 1..15: note = Table B: HLA-DRB1*04:01L HLA-DRB1*13:02L HLA-DRB1*04:04L HLA-DRB1*01:01L HLA-DRB1*08:04L HLA-DPA1*01:03-B1*03:01L HLA-DRB1*14:01L HLA-DRB1*11:03L HLA-DRB1*11:04L HLA-DRB1*11:01L HLA-DRB5*01:01L HLA-DQA1*01-B1*05L HLA-DRB1*04:10L
  REGION 1..15: note = CONT. FROM ABOVE: HLA-DPA1*01:03-B1*04:02L HLA-DRB1*12:02L HLA-D PA1*02:01-B1*13:01L HLA-DPA1*03:01-B1*105:01L HLA-DPA1*01:03-B1* 104:01L HLA-DRB1*07:01L HLA-DRB1*10:01L HLA-DRB1*08:03L HLA-DRB1 *15:03L
VIHFGAGSDKGVAPG

SEQ ID NO: 12477 - protein, 10 aa, Severe acute respiratory syndrome coronavirus 2
  REGION 1..10: note = Table B: HLA-DRB1*04:01L HLA-DRB1*13:02M HLA-DRB1*13:03M HLA-DRB1*01:03L HLA-DRB1*04:02L HLA-DRB1*04:04L HLA-DQA1*01:02-B1*06:02L HLA-DRB1*01:01M HLA-DRB4*03:01NM HLA-DRB3*02:01M HLA-DRB1*14:01L HLA-DRB1*11:04M HLA-DRB1*14:02L
  REGION 1..10: note = CONT. FROM ABOVE: HLA-DRB1*08:01M HLA-DRB1*11:01L HLA-DRB5*01:01 M HLA-DRB5*02:02L HLA-DRB1*13:01L HLA-DPA1*01:03-B1*04:01L HLA-D PA1*01:03-B1*04:02L HLA-DRB1*12:01M HLA-DRB1*12:02M HLA-DRB3*01: 01L HLA-DPA1*03:01-B1*105:01L HLA-DQA1*03:01-B1*03:02M
  REGION 1..10: note = CONT. FROM ABOVE: HLA-DRB1*14:54L HLA-DQA1*05:05-B1*03:01M HLA-D RB1*14:17L HLA-DRB1*16:01L HLA-DQA1*01:03-B1*06:01L HLA-DRB1*08: 02L HLA-DRB1*08:03L HLA-DQA1*02:01-B1*03:03L HLA-DRB1*15:01L
GVAPGTAVLR

SEQ ID NO: 12478 - protein, 14 aa, Severe acute respiratory syndrome coronavirus 2
  REGION 1..14: note = Table B: HLA-DRB1*04:01L HLA-DRB1*04:04L HLA-DRB1*01:01L HLA-DRB1*03:01L HLA-DRB1*11:02L HLA-DQA1*01:01-B1*05:01L HLA-DRB1*11:01L HLA-DRB4*01:01L HLA-DRB1*04:10L HLA-DRB3*01:01L HLA-DPA1*01:03-B1*02:01L HLA-DRB1*10:01L HLA-DRB1*08:03L
  REGION 1..14: note = CONT. FROM ABOVE: HLA-DRB1*15:01L
RQWLPTGTLLVDSD

SEQ ID NO: 12479 - protein, 15 aa, Severe acute respiratory syndrome coronavirus 2
  REGION 1..15: note = Table B: HLA-DRB1*04:01L HLA-DRB1*13:02L HLA-DRB1*04:04L HLA-DRB1*01:02L HLA-DRB1*08:04L HLA-DRB1*08:77L HLA-DRB3*02:01L HLA-DPA1*01:03-B1*03:01L HLA-DRB1*14:01L HLA-DRB1*11:03L HLA-DRB1*11:04L HLA-DRB1*08:01L HLA-DRB1*09:01L
  REGION 1..15: note = CONT. FROM ABOVE: HLA-DPA1*01:03-B1*04:02L HLA-DRB1*12:02L HLA-D RB3*01:01L HLA-DRB1*14:54L HLA-DPA1*01:03-B1*104:01L HLA-DPA1*01 :02-B1*04:01L HLA-DRB1*10:01L HLA-DRB1*08:03L
LPTGTLLVDSDLNDF

SEQ ID NO: 12480 - protein, 14 aa, Severe acute respiratory syndrome coronavirus 2
  REGION 1..14: note = Table B: HLA-DRB1*04:01L HLA-DRB1*01:03L HLA-DRB1*04:04L HLA-DRB1*01:02L HLA-DRB4*03:01NL HLA-DRB1*08:04L HLA-DRB1*08:03L
GTLLVDSDLNDFVS

SEQ ID NO: 12481 - protein, 12 aa, Severe acute respiratory syndrome coronavirus 2
  REGION 1..12: note = Table B: HLA-DRB1*04:01L HLA-DRB1*04:04L HLA-DRB1*01:02L HLA-DRB4*03:01NL HLA-DRB1*08:04L HLA-DRB3*02:01L HLA-DPA1*01:03-B1*03:01L HLA-DRB1*14:01L HLA-DRB1*11:03L HLA-DRB1*11:04L HLA-DRB1*14:02L HLA-DRB5*01:01L HLA-DRB4*01:01L
  REGION 1..12: note = CONT. FROM ABOVE: HLA-DPA1*01:03-B1*04:01L HLA-DRB1*04:10L HLA-D RB1*09:01L HLA-DRB1*12:02L HLA-DRB3*01:01L HLA-DPA1*02:01-B1*13: 01L HLA-DPA1*03:01-B1*105:01L HLA-DRB1*14:54L HLA-DRB1*07:01L HL A-DRB1*10:01L HLA-DRB1*04:08L HLA-DRB1*08:03L HLA-DRB1*15:03L
LNDFVSDADSTL

SEQ ID NO: 12482 - protein, 11 aa, Severe acute respiratory syndrome coronavirus 2
  REGION 1..11: note = Table B: HLA-DRB1*04:01L HLA-DRB1*04:03L HLA-DRB1*13:03L HLA-DRB1*01:03L HLA-DRB1*04:02L HLA-DRB1*04:04L HLA-DRB1*04:05L HLA-DRB4*03:01NL HLA-DRB1*08:77L HLA-DRB1*14:01L HLA-DRB1*11:03L HLA-DRB1*11:04L HLA-DRB1*14:02L HLA-DQA1*01-B1*05L
  REGION 1..11: note = CONT. FROM ABOVE: HLA-DQA1*05:01-B1*02:01L HLA-DRB1*04:10L HLA-D RB1*12:01L HLA-DQA1*03:01-B1*03:02L HLA-DRB1*14:54L HLA-DRB1*14: 17L HLA-DRB1*10:01L HLA-DRB1*16:01L HLA-DRB1*04:08L
FVSDADSTLIG

SEQ ID NO: 12483 - protein, 15 aa, Severe acute respiratory syndrome coronavirus 2
  REGION 1..15: note = Table B: HLA-DRB1*04:01L HLA-DRB1*13:02L HLA-DRB3*02:01L HLA-DRB1*11:04L HLA-DRB1*14:02L HLA-DRB1*08:01L HLA-DPA1*01:03-B1*04:02L HLA-DPA1*02:01-B1*13:01L HLA-DPA1*01:03-B1*104:01L HLA-DRB1*10:01L
DSTLIGDCATVHTAN

SEQ ID NO: 12484 - protein, 13 aa, Severe acute respiratory syndrome coronavirus 2
  REGION 1..13: note = Table B: HLA-DRB1*04:01L HLA-DRB1*08:04L HLA-DRB1*14:01L HLA-DRB1*11:04L HLA-DRB1*08:01L HLA-DRB1*10:01L HLA-DRB1*08:03L
DLIISDMYDPKTK

SEQ ID NO: 12485 - protein, 14 aa, Severe acute respiratory syndrome coronavirus 2
  REGION 1..14: note = Table B: HLA-DRB1*04:01L HLA-DRB1*01:01L HLA-DRB1*08:77L HLA-DRB1*03:01L HLA-DRB1*13:01L HLA-DRB4*01:01L HLA-DQA1*05:05-B1*03:116L HLA-DRB1*09:01L HLA-DPA1*01:03-B1*104:01L HLA-DRB1*07:01L
GGSVAIKITEHSWN

SEQ ID NO: 12486 - protein, 14 aa, Severe acute respiratory syndrome coronavirus 2
  REGION 1..14: note = Table B: HLA-DRB1*04:01L HLA-DRB1*04:02L HLA-DRB1*04:04L HLA-DRB1*01:01L HLA-DRB1*08:04L HLA-DRB1*11:02L HLA-DRB1*11:03L HLA-DRB1*11:04L HLA-DRB1*14:02L HLA-DRB1*11:01L HLA-DRB4*01:01L HLA-DQA1*05:05-B1*03:116L HLA-DRB3*01:01L
  REGION 1..14: note = CONT. FROM ABOVE: HLA-DPA1*01:03-B1*02:01L HLA-DRB1*10:01L HLA-D RB1*08:02L HLA-DRB1*08:03L
GHFAWWTAFVTNVN

SEQ ID NO: 12487 - protein, 14 aa, Severe acute respiratory syndrome coronavirus 2
  REGION 1..14: note = Table B: HLA-DRB1*04:01L HLA-DRB1*01:01L
NYIFWRNTNPIQLS

SEQ ID NO: 12488 - protein, 14 aa, Severe acute respiratory syndrome coronavirus 2
  REGION 1..14: note = Table B: HLA-DRB1*04:01L HLA-DPA1*01:03-B1*02:01L HLA-DRB1*08:02L
YIFWRNTNPIQLSS

SEQ ID NO: 12489 - protein, 14 aa, Severe acute respiratory syndrome coronavirus 2
  REGION 1..14: note = Table B: HLA-DRB1*04:01L HLA-DRB1*04:04L HLA-DRB1*01:01L HLA-DRB1*11:02L HLA-DRB1*13:01L HLA-DPA1*02:01-B1*13:01L HLA-DRB1*07:01L HLA-DRB1*10:01L HLA-DQA1*01:03-B1*06:01L HLA-DRB1*08:02L HLA-DRB1*08:03L HLA-DRB1*15:01L
GRLIIRENNRVVIS

SEQ ID NO: 12490 - protein, 17 aa, Severe acute respiratory syndrome coronavirus 2
  REGION 1..17: note = Table B: HLA-DRB1*04:01L HLA-DRB1*01:01L HLA-DRB1*13:01L HLA-DPA1*01:03-B1*02:01L HLA-DRB1*15:01L
LPPAYTNSFTRGVYYPD

SEQ ID NO: 12491 - protein, 14 aa, Severe acute respiratory syndrome coronavirus 2
  REGION 1..14: note = Table B: HLA-DRB1*04:01L HLA-DRB1*04:04L HLA-DRB1*01:01L HLA-DRB1*11:04L
VTWFHAIHVSGTNG

SEQ ID NO: 12492 - protein, 13 aa, Severe acute respiratory syndrome coronavirus 2
  REGION 1..13: note = Table B: HLA-DRB1*04:01L HLA-DRB1*13:02L HLA-DRB1*08:04L HLA-DRB1*11:03L HLA-DQA1*05:05-B1*03:19L HLA-DRB1*12:02L HLA-DPA1*03:01-B1*105:01L HLA-DQA1*05:05-B1*03:01L HLA-DQA1*01:03-B1*06:01L
FHAIHVSGTNGTK

SEQ ID NO: 12493 - protein, 13 aa, Severe acute respiratory syndrome coronavirus 2
  REGION 1..13: note = Table B: HLA-DRB1*04:01L HLA-DRB1*11:01L HLA-DRB3*01:01L
HAIHVSGTNGTKR

SEQ ID NO: 12494 - protein, 13 aa, Severe acute respiratory syndrome coronavirus 2
  REGION 1..13: note = Table B: HLA-DRB1*04:01L HLA-DRB1*11:01L HLA-DRB4*01:01L
NDGVYFASTEKSN

SEQ ID NO: 12495 - protein, 14 aa, Severe acute respiratory syndrome coronavirus 2
  REGION 1..14: note = Table B: HLA-DRB1*04:01L HLA-DRB1*11:02L HLA-DRB1*11:01L HLA-DRB4*01:01L HLA-DRB3*01:01L HLA-DPA1*01:03-B1*02:01L HLA-DRB1*08:02L
DGVYFASTEKSNII

SEQ ID NO: 12496 - protein, 14 aa, Severe acute respiratory syndrome coronavirus 2
  REGION 1..14: note = Table B: HLA-DRB1*04:01L HLA-DRB1*04:04L HLA-DRB1*08:04L HLA-DPA1*01:03-B1*03:01L HLA-DPA1*03:01-B1*04:02L HLA-DQA1*01:01-B1*05:01L HLA-DPA1*01:03-B1*04:02L HLA-DPA1*02:01-B1*13:01L HLA-DPA1*01:02-B1*04:01L
  REGION 1..14: note = CONT. FROM ABOVE: HLA-DRB1*10:01L HLA-DRB1*15:03L
IRGWIFGTTLDSKT

SEQ ID NO: 12497 - protein, 12 aa, Severe acute respiratory syndrome coronavirus 2
  REGION 1..12: note = Table B: HLA-DRB1*04:01L HLA-DRB1*08:04L HLA-DRB3*02:01L HLA-DRB1*08:01L HLA-DRB1*11:01L HLA-DRB4*01:01L HLA-DRB1*09:01L HLA-DPA1*01:03-B1*04:02L HLA-DRB3*01:01L HLA-DPA1*02:01-B1*13:01L HLA-DPA1*01:03-B1*104:01L
  REGION 1..12: note = CONT. FROM ABOVE: HLA-DRB1*07:01L HLA-DRB1*08:03L
WIFGTTLDSKTQ

SEQ ID NO: 12498 - protein, 14 aa, Severe acute respiratory syndrome coronavirus 2
  REGION 1..14: note = Table B: HLA-DRB1*04:01L HLA-DRB1*01:01L HLA-DRB1*03:01L HLA-DRB1*11:02L HLA-DQA1*01:01-B1*05:01L HLA-DRB1*08:01L HLA-DRB1*11:01L HLA-DRB5*01:01L HLA-DPA1*01:03-B1*04:02L HLA-DRB3*01:01L HLA-DPA1*02:01-B1*13:01L
  REGION 1..14: note = CONT. FROM ABOVE: HLA-DPA1*01:03-B1*02:01L HLA-DPA1*01:03-B1*104 :01L HLA-DRB1*08:02L HLA-DRB1*15:01L
TQSLLIVNNATNVV

SEQ ID NO: 12499 - protein, 14 aa, Severe acute respiratory syndrome coronavirus 2
  REGION 1..14: note = Table B: HLA-DRB1*04:01L
QSLLIVNNATNVVI

SEQ ID NO: 12500 - protein, 14 aa, Severe acute respiratory syndrome coronavirus 2
  REGION 1..14: note = Table B: HLA-DRB1*04:01L HLA-DRB1*11:03L HLA-DPA1*01:03-B1*104:01L HLA-DQA1*05:05-B1*03:01L HLA-DRB1*07:01L HLA-DRB1*10:01L HLA-DRB1*08:03L
DPFLGVYYHKNNKS

SEQ ID NO: 12501 - protein, 18 aa, Severe acute respiratory syndrome coronavirus 2
  REGION 1..18: note = Table B: HLA-DRB1*04:01L
NNKSWMESEFRVYSSANN

SEQ ID NO: 12502 - protein, 14 aa, Severe acute respiratory syndrome coronavirus 2
  REGION 1..14: note = Table B: HLA-DRB1*04:01L HLA-DRB1*11:02L HLA-DPA1*01:03-B1*02:01L
ESEFRVYSSANNCT

SEQ ID NO: 12503 - protein, 15 aa, Severe acute respiratory syndrome coronavirus 2
  REGION 1..15: note = Table B: HLA-DRB1*04:01L HLA-DRB1*01:01L HLA-DRB1*11:03L HLA-DRB4*01:01L HLA-DQA1*05:05-B1*03:116L HLA-DRB1*04:10L HLA-DRB1*07:01L HLA-DRB1*08:02L
TFEYVSQPFLMDLEG

SEQ ID NO: 12504 - protein, 13 aa, Severe acute respiratory syndrome coronavirus 2
  REGION 1..13: note = Table B: HLA-DRB1*04:01L HLA-DRB1*04:04L HLA-DQA1*01:02-B1*06:02L HLA-DRB3*02:01L HLA-DRB1*11:03L HLA-DRB1*11:01L HLA-DRB5*01:01L HLA-DRB4*01:01L HLA-DRB1*09:01L HLA-DPA1*02:01-B1*13:01L HLA-DRB1*15:03L
SQPFLMDLEGKQG

SEQ ID NO: 12505 - protein, 15 aa, Severe acute respiratory syndrome coronavirus 2
  REGION 1..15: note = Table B: HLA-DRB1*04:01L HLA-DRB1*01:01L HLA-DRB1*11:01L HLA-DQA1*05:05-B1*03:01L HLA-DQA1*01:03-B1*06:01L
QPFLMDLEGKQGNFK

SEQ ID NO: 12506 - protein, 14 aa, Severe acute respiratory syndrome coronavirus 2
  REGION 1..14: note = Table B: HLA-DRB1*04:01L HLA-DRB1*04:04L HLA-DRB1*01:01L HLA-DRB1*11:03L HLA-DRB1*13:01L HLA-DPA1*01:03-B1*02:01L HLA-DRB1*07:01L HLA-DRB1*08:03L
LREFVFKNIDGYFK

SEQ ID NO: 12507 - protein, 15 aa, Severe acute respiratory syndrome coronavirus 2
  REGION 1..15: note = Table B: HLA-DRB1*04:01L HLA-DRB1*03:01L HLA-DQA1*01:01-B1*05:01L HLA-DQA1*01-B1*05L HLA-DQA1*05:01-B1*02:01L HLA-DRB1*13:01L HLA-DPA1*01:03-B1*04:01L HLA-DRB1*04:10L HLA-DRB1*09:01L
IDGYFKIYSKHTPIN

SEQ ID NO: 12508 - protein, 16 aa, Severe acute respiratory syndrome coronavirus 2
  REGION 1..16: note = Table B: HLA-DRB1*04:01L HLA-DRB1*01:01L HLA-DRB1*11:01L HLA-DRB1*08:02L
LPQGFSALEPLVDLPI

SEQ ID NO: 12509 - protein, 13 aa, Severe acute respiratory syndrome coronavirus 2
  REGION 1..13: note = Table B: HLA-DRB1*04:01L HLA-DRB1*01:01L HLA-DRB1*03:01L HLA-DRB1*11:02L HLA-DRB1*11:01L HLA-DRB5*01:01L HLA-DPA1*01:03-B1*04:01L HLA-DPA1*01:03-B1*04:02L HLA-DPA1*01:03-B1*104:01L HLA-DPA1*01:02-B1*04:01L
FSALEPLVDLPIG

SEQ ID NO: 12510 - protein, 13 aa, Severe acute respiratory syndrome coronavirus 2
  REGION 1..13: note = Table B: HLA-DRB1*04:01L HLA-DRB1*13:02L HLA-DRB1*04:04L HLA-DRB1*08:04L HLA-DQA1*01:01-B1*05:01L HLA-DRB4*01:01L HLA-DRB1*09:01L HLA-DRB3*01:01L HLA-DRB1*14:54L HLA-DQA1*05:05-B1*03:01L HLA-DRB1*07:01L
LPIGINITRFQTL

SEQ ID NO: 12511 - protein, 14 aa, Severe acute respiratory syndrome coronavirus 2
  REGION 1..14: note = Table B: HLA-DRB1*04:01L HLA-DRB1*01:01L HLA-DRB1*03:01L HLA-DRB1*11:02L HLA-DRB1*11:01L HLA-DRB3*01:01L HLA-DPA1*01:03-B1*02:01L HLA-DRB1*08:02L HLA-DRB1*08:03L
LKYNENGTITDAVD

SEQ ID NO: 12512 - protein, 15 aa, Severe acute respiratory syndrome coronavirus 2
  REGION 1..15: note = Table B: HLA-DRB1*04:01L HLA-DRB1*10:01L
TDAVDCALDPLSETK

SEQ ID NO: 12513 - protein, 13 aa, Severe acute respiratory syndrome coronavirus 2
  REGION 1..13: note = Table B: HLA-DRB1*04:01L HLA-DRB1*01:01L HLA-DRB1*11:03L HLA-DRB1*11:01L HLA-DPA1*01:03-B1*04:02L HLA-DRB3*01:01L HLA-DRB1*07:01L
LKSFTVEKGIYQT

SEQ ID NO: 12514 - protein, 12 aa, Severe acute respiratory syndrome coronavirus 2
  REGION 1..12: note = Table B: HLA-DRB1*04:01L HLA-DRB1*13:02L HLA-DRB1*04:04L HLA-DRB1*04:05L HLA-DRB1*01:01L HLA-DRB1*08:04L HLA-DRB1*08:77L HLA-DRB3*02:01L HLA-DPA1*01:03-B1*03:01L HLA-DRB1*03:01L HLA-DRB1*11:03L HLA-DRB1*11:04L HLA-DRB1*08:01L HLA-DRB1*11:01L
  REGION 1..12: note = CONT. FROM ABOVE: HLA-DQA1*05:05-B1*03:19L HLA-DRB1*04:10L HLA-D RB1*09:01L HLA-DRB1*12:02L HLA-DRB3*01:01L HLA-DPA1*02:01-B1*13: 01L HLA-DRB1*14:54L HLA-DPA1*01:03-B1*02:01L HLA-DPA1*01:03-B1*1 04:01L HLA-DQA1*05:05-B1*03:01L HLA-DRB1*07:01L HLA-DRB1*10:01L
  REGION 1..12: note = CONT. FROM ABOVE: HLA-DRB1*08:03L HLA-DRB1*15:01L
IYQTSNFRVQPT

SEQ ID NO: 12515 - protein, 12 aa, Severe acute respiratory syndrome coronavirus 2
  REGION 1..12: note = Table B: HLA-DRB1*04:01L HLA-DRB1*04:03L HLA-DRB1*04:02L HLA-DRB1*04:04L HLA-DRB1*01:01L HLA-DRB1*11:03L HLA-DRB1*09:01L HLA-DRB3*01:01L HLA-DPA1*01:03-B1*02:01L HLA-DRB1*07:01L HLA-DRB1*08:02L HLA-DRB1*08:03L
EVFNATRFASVY

SEQ ID NO: 12516 - protein, 14 aa, Severe acute respiratory syndrome coronavirus 2
  REGION 1..14: note = Table B: HLA-DRB1*04:01L HLA-DRB1*11:03L HLA-DQA1*05:05-B1*03:01L HLA-DRB1*14:17L HLA-DRB1*10:01L HLA-DRB1*15:01L
ATRFASVYAWNRKR

SEQ ID NO: 12517 - protein, 12 aa, Severe acute respiratory syndrome coronavirus 2
  REGION 1..12: note = Table B: HLA-DRB1*04:01L HLA-DRB1*01:03L HLA-DRB1*01:02L HLA-DQA1*01-B1*05L HLA-DQA1*05:05-B1*03:19L HLA-DRB1*12:01L HLA-DPA1*03:01-B1*105:01L HLA-DQA1*03:01-B1*03:02L HLA-DRB1*14:54L HLA-DQA1*05:05-B1*03:01L HLA-DRB1*10:01L
  REGION 1..12: note = CONT. FROM ABOVE: HLA-DRB1*15:03L
DYSVLYNSASFS

SEQ ID NO: 12518 - protein, 12 aa, Severe acute respiratory syndrome coronavirus 2
  REGION 1..12: note = Table B: HLA-DRB1*04:01L HLA-DRB1*04:04L HLA-DRB1*08:04L HLA-DRB1*11:02L HLA-DRB1*11:04L HLA-DRB1*09:01L HLA-DRB1*12:02L HLA-DRB3*01:01L HLA-DRB1*14:54L HLA-DRB1*07:01L HLA-DRB1*08:03L
VLYNSASFSTFK

SEQ ID NO: 12519 - protein, 10 aa, Severe acute respiratory syndrome coronavirus 2
  REGION 1..10: note = Table B: HLA-DRB1*04:01L HLA-DRB1*13:02M HLA-DRB1*13:03M HLA-DRB1*04:02L HLA-DRB1*01:01L HLA-DRB4*03:01NL HLA-DRB3*02:01L HLA-DRB1*14:01L HLA-DRB1*11:04L HLA-DRB1*14:02L HLA-DRB1*08:01M HLA-DRB5*01:01L HLA-DPA1*01:03-B1*04:02L HLA-DRB1*12:01M
  REGION 1..10: note = CONT. FROM ABOVE: HLA-DRB1*12:02L HLA-DRB3*01:01L HLA-DPA1*03:01 -B1*105:01L HLA-DQA1*03:01-B1*03:02M HLA-DQA1*05:05-B1*03:01M HL A-DRB1*14:17L HLA-DRB1*16:01L HLA-DQA1*01:03-B1*06:01L HLA-DRB1* 08:02L HLA-DRB1*08:03L HLA-DQA1*02:01-B1*03:03L HLA-DRB1*15:01L
NVYADSFVIR

SEQ ID NO: 12520 - protein, 16 aa, Severe acute respiratory syndrome coronavirus 2
  REGION 1..16: note = Table B: HLA-DRB1*04:01L HLA-DRB1*03:01L HLA-DRB1*11:02L HLA-DRB4*01:01L HLA-DPA1*01:03-B1*02:01L HLA-DRB1*08:02L
VRQIAPGQTGKIADYN

SEQ ID NO: 12521 - protein, 13 aa, Severe acute respiratory syndrome coronavirus 2
  REGION 1..13: note = Table B: HLA-DRB1*04:01L HLA-DRB1*04:04L HLA-DRB1*01:01L HLA-DRB1*08:01L HLA-DRB1*11:01L HLA-DRB5*01:01L HLA-DRB1*13:01L HLA-DRB1*04:10L HLA-DRB1*09:01L HLA-DRB1*07:01L HLA-DRB1*08:03L
KPFERDISTEIYQ

SEQ ID NO: 12522 - protein, 13 aa, Severe acute respiratory syndrome coronavirus 2
  REGION 1..13: note = Table B: HLA-DRB1*04:01L HLA-DRB1*08:04L HLA-DRB1*11:04L HLA-DRB1*11:01L HLA-DQA1*01-B1*05L HLA-DRB1*04:10L HLA-DRB1*09:01L HLA-DRB1*07:01L HLA-DRB1*08:03L
TEIYQAGSTPCNG

SEQ ID NO: 12523 - protein, 15 aa, Severe acute respiratory syndrome coronavirus 2
  REGION 1..15: note = Table B: HLA-DRB1*04:01L HLA-DRB1*01:01L HLA-DRB1*03:01L HLA-DRB1*11:02L HLA-DQA1*01:01-B1*05:01L HLA-DRB1*11:01L HLA-DRB5*01:01L HLA-DRB4*01:01L HLA-DPA1*01:03-B1*04:01L HLA-DQA1*05:05-B1*03:116L HLA-DRB3*01:01L
  REGION 1..15: note = CONT. FROM ABOVE: HLA-DPA1*01:03-B1*104:01L HLA-DRB1*07:01L HLA- DRB1*08:02L
FPLQSYGFQPTNGVG

SEQ ID NO: 12524 - protein, 14 aa, Severe acute respiratory syndrome coronavirus 2
  REGION 1..14: note = Table B: HLA-DRB1*04:01L HLA-DRB1*04:04L HLA-DRB1*04:05L HLA-DRB1*01:01L HLA-DPA1*01:03-B1*03:01L HLA-DRB1*14:01L HLA-DRB1*11:04L HLA-DRB1*08:01L HLA-DRB3*01:01L
FELLHAPATVCGPK

SEQ ID NO: 12525 - protein, 15 aa, Severe acute respiratory syndrome coronavirus 2
  REGION 1..15: note = Table B: HLA-DRB1*04:01L HLA-DRB1*03:01L HLA-DRB4*01:01L HLA-DPA1*01:03-B1*104:01L HLA-DRB1*10:01L
GRDIADTTDAVRDPQ

SEQ ID NO: 12526 - protein, 16 aa, Severe acute respiratory syndrome coronavirus 2
  REGION 1..16: note = Table B: HLA-DRB1*04:01L HLA-DRB1*01:01L HLA-DRB1*11:02L HLA-DRB1*11:01L HLA-DRB1*08:02L
DPQTLEILDITPCSFG

SEQ ID NO: 12527 - protein, 14 aa, Severe acute respiratory syndrome coronavirus 2
  REGION 1..14: note = Table B: HLA-DRB1*04:01L HLA-DRB1*04:04L HLA-DRB1*08:77L HLA-DRB3*02:01L HLA-DRB1*03:01L HLA-DRB1*11:03L HLA-DQA1*01:01-B1*05:01L HLA-DRB1*08:01L HLA-DRB1*11:01L HLA-DRB4*01:01L HLA-DPA1*01:03-B1*04:01L HLA-DRB1*09:01L
  REGION 1..14: note = CONT. FROM ABOVE: HLA-DRB1*12:02L HLA-DPA1*01:03-B1*02:01L HLA-D PA1*01:03-B1*104:01L HLA-DPA1*01:02-B1*04:01L HLA-DRB1*08:03L
VNNSYECDIPIGAG

SEQ ID NO: 12528 - protein, 13 aa, Severe acute respiratory syndrome coronavirus 2
  REGION 1..13: note = Table B: HLA-DRB1*04:01L HLA-DRB1*13:02L HLA-DRB1*13:03L HLA-DRB1*08:04L HLA-DPA1*03:01-B1*04:02L HLA-DRB1*11:03L HLA-DRB1*11:04L HLA-DRB4*01:01L HLA-DRB1*09:01L HLA-DRB1*12:02L HLA-DPA1*01:03-B1*104:01L HLA-DRB1*08:03L
SIIAYTMSLGAEN

SEQ ID NO: 12529 - protein, 14 aa, Severe acute respiratory syndrome coronavirus 2
  REGION 1..14: note = Table B: HLA-DRB1*04:01L HLA-DRB1*13:02L HLA-DRB1*01:03L HLA-DRB1*04:04L HLA-DRB1*01:01L HLA-DRB1*08:77L HLA-DPA1*01:03-B1*03:01L HLA-DRB1*11:03L HLA-DRB1*14:02L HLA-DQA1*01-B1*05L HLA-DRB1*09:01L HLA-DPA1*01:03-B1*04:02L
  REGION 1..14: note = CONT. FROM ABOVE: HLA-DPA1*02:01-B1*13:01L HLA-DPA1*01:03-B1*104 :01L HLA-DRB1*07:01L HLA-DQA1*01:03-B1*06:01L HLA-DRB1*04:08L
IAYTMSLGAENSVA

SEQ ID NO: 12530 - protein, 14 aa, Severe acute respiratory syndrome coronavirus 2
  REGION 1..14: note = Table B: HLA-DRB1*04:01L HLA-DRB1*01:01L HLA-DPA1*03:01-B1*04:02L HLA-DRB1*03:01L HLA-DRB1*11:02L HLA-DRB4*01:01L HLA-DRB3*01:01L HLA-DPA1*01:02-B1*04:01L HLA-DRB1*08:03L
SVAYSNNSIAIPTN

SEQ ID NO: 12531 - protein, 13 aa, Severe acute respiratory syndrome coronavirus 2
  REGION 1..13: note = Table B: HLA-DRB1*04:01L HLA-DRB1*08:77L HLA-DRB1*14:01L HLA-DRB1*11:01L HLA-DRB3*01:01L HLA-DPA1*01:03-B1*104:01L
NRALTGIAVEQDK

SEQ ID NO: 12532 - protein, 13 aa, Severe acute respiratory syndrome coronavirus 2
  REGION 1..13: note = Table B: HLA-DRB1*04:01L
TGIAVEQDKNTQE

SEQ ID NO: 12533 - protein, 11 aa, Severe acute respiratory syndrome coronavirus 2
  REGION 1..11: note = Table B: HLA-DRB1*04:01L HLA-DRB1*04:03L HLA-DRB1*04:02L HLA-DRB1*04:05L HLA-DPA1*02:01-B1*13:01L HLA-DRB1*14:54L
VEQDKNTQEVF

SEQ ID NO: 12534 - protein, 16 aa, Severe acute respiratory syndrome coronavirus 2
  REGION 1..16: note = Table B: HLA-DRB1*04:01L HLA-DRB3*02:01L HLA-DRB1*13:01L HLA-DPA1*01:03-B1*02:01L
TQEVFAQVKQIYKTPP

SEQ ID NO: 12535 - protein, 14 aa, Severe acute respiratory syndrome coronavirus 2
  REGION 1..14: note = Table B: HLA-DRB1*04:01L HLA-DRB1*13:02L HLA-DRB1*04:04L HLA-DRB1*01:01L HLA-DRB1*08:77L HLA-DRB3*02:01L HLA-DRB1*14:01L HLA-DRB1*11:03L HLA-DRB1*11:04L HLA-DRB1*11:01L HLA-DRB1*09:01L HLA-DRB1*12:02L HLA-DRB3*01:01L HLA-DRB1*14:54L
  REGION 1..14: note = CONT. FROM ABOVE: HLA-DPA1*01:03-B1*104:01L HLA-DRB1*07:01L HLA- DRB1*08:02L
FGGFNFSQILPDPS

SEQ ID NO: 12536 - protein, 14 aa, Severe acute respiratory syndrome coronavirus 2
  REGION 1..14: note = Table B: HLA-DRB1*04:01L HLA-DRB1*01:01L HLA-DRB1*08:77L HLA-DRB3*02:01L HLA-DRB1*14:01L HLA-DRB1*11:03L HLA-DRB4*01:01L HLA-DQA1*05:05-B1*03:116L HLA-DRB1*09:01L HLA-DRB3*01:01L HLA-DRB1*14:54L HLA-DRB1*07:01L HLA-DRB1*08:02L HLA-DRB1*08:03L
GFNFSQILPDPSKP

SEQ ID NO: 12537 - protein, 11 aa, Severe acute respiratory syndrome coronavirus 2
  REGION 1..11: note = Table B: HLA-DRB1*04:01L HLA-DRB1*04:04L HLA-DRB1*01:01L HLA-DRB1*08:04L HLA-DRB3*02:01L HLA-DPA1*01:03-B1*03:01L HLA-DPA1*03:01-B1*04:02L HLA-DRB1*03:01L HLA-DRB1*14:02L HLA-DRB1*08:01L HLA-DRB1*11:01L HLA-DRB5*01:01L
  REGION 1..11: note = CONT. FROM ABOVE: HLA-DQA1*05:05-B1*03:19L HLA-DRB1*13:01L HLA-D RB4*01:01L HLA-DRB1*09:01L HLA-DRB3*01:01L HLA-DPA1*03:01-B1*105 :01L HLA-DQA1*05:05-B1*03:01L HLA-DPA1*01:02-B1*04:01L HLA-DRB1* 07:01L HLA-DRB1*08:03L
SQILPDPSKPS

SEQ ID NO: 12538 - protein, 13 aa, Severe acute respiratory syndrome coronavirus 2
  REGION 1..13: note = Table B: HLA-DRB1*04:01L HLA-DRB1*04:04L HLA-DRB3*02:01L HLA-DRB1*03:01L HLA-DRB1*11:03L
RSFIEDLLFNKVT

SEQ ID NO: 12539 - protein, 14 aa, Severe acute respiratory syndrome coronavirus 2
  REGION 1..14: note = Table B: HLA-DRB1*04:01L HLA-DRB1*11:01L
FNKVTLADAGFIKQ

SEQ ID NO: 12540 - protein, 14 aa, Severe acute respiratory syndrome coronavirus 2
  REGION 1..14: note = Table B: HLA-DRB1*04:01L HLA-DRB1*01:03L HLA-DRB1*04:04L HLA-DRB1*01:01L HLA-DRB1*08:01L HLA-DRB1*11:01L HLA-DRB1*10:01L
IKQYGDCLGDIAAR

SEQ ID NO: 12541 - protein, 14 aa, Severe acute respiratory syndrome coronavirus 2
  REGION 1..14: note = Table B: HLA-DRB1*04:01L HLA-DRB1*13:02L HLA-DRB1*13:03L HLA-DRB1*04:04L HLA-DRB1*04:05L HLA-DRB1*01:01L HLA-DRB1*08:04L HLA-DRB1*08:77L HLA-DRB1*14:01L HLA-DRB1*11:02L HLA-DRB1*11:03L HLA-DRB1*11:04L HLA-DQA1*01:01-B1*05:01L HLA-DRB1*08:01L
  REGION 1..14: note = CONT. FROM ABOVE: HLA-DRB1*11:01L HLA-DRB4*01:01L HLA-DQA1*05:05 -B1*03:116L HLA-DRB1*04:10L HLA-DRB1*09:01L HLA-DPA1*01:03-B1*02 :01L HLA-DRB1*07:01L HLA-DRB1*10:01L HLA-DRB1*08:02L HLA-DRB1*08 :03L
IAQYTSALLAGTIT

SEQ ID NO: 12542 - protein, 14 aa, Severe acute respiratory syndrome coronavirus 2
  REGION 1..14: note = Table B: HLA-DRB1*04:01L HLA-DRB1*13:02L HLA-DRB1*04:04L HLA-DRB1*01:01L HLA-DPA1*03:01-B1*04:02L HLA-DRB1*11:04L HLA-DRB1*14:02L HLA-DRB1*11:01L HLA-DPA1*01:03-B1*02:01L HLA-DRB1*08:02L HLA-DRB1*08:03L
AYRFNGIGVTQNVL

SEQ ID NO: 12543 - protein, 16 aa, Severe acute respiratory syndrome coronavirus 2
  REGION 1..16: note = Table B: HLA-DRB1*04:01L HLA-DPA1*01:03-B1*04:01L
VTQNVLYENQKLIANQ

SEQ ID NO: 12544 - protein, 15 aa, Severe acute respiratory syndrome coronavirus 2
  REGION 1..15: note = Table B: HLA-DRB1*04:01L HLA-DRB1*01:01L HLA-DRB1*09:01L
NVLYENQKLIANQFN

SEQ ID NO: 12545 - protein, 13 aa, Severe acute respiratory syndrome coronavirus 2
  REGION 1..13: note = Table B: HLA-DRB1*04:01L HLA-DRB4*03:01NL HLA-DRB3*02:01L HLA-DRB1*11:03L HLA-DRB3*01:01L HLA-DPA1*01:03-B1*104:01L HLA-DRB1*08:03L
QKLIANQFNSAIG

SEQ ID NO: 12546 - protein, 14 aa, Severe acute respiratory syndrome coronavirus 2
  REGION 1..14: note = Table B: HLA-DRB1*04:01L HLA-DRB5*01:01L HLA-DQA1*05:05-B1*03:116L HLA-DRB3*01:01L HLA-DPA1*01:03-B1*02:01L HLA-DRB1*08:02L
ANQFNSAIGKIQDS

SEQ ID NO: 12547 - protein, 13 aa, Severe acute respiratory syndrome coronavirus 2
  REGION 1..13: note = Table B: HLA-DRB1*04:01L HLA-DRB1*11:03L HLA-DRB4*01:01L
SAIGKIQDSLSST

SEQ ID NO: 12548 - protein, 14 aa, Severe acute respiratory syndrome coronavirus 2
  REGION 1..14: note = Table B: HLA-DRB1*04:01L HLA-DRB1*08:04L HLA-DRB1*11:03L HLA-DRB1*08:01L HLA-DPA1*01:03-B1*04:02L HLA-DPA1*02:01-B1*13:01L HLA-DPA1*01:03-B1*104:01L HLA-DRB1*07:01L HLA-DRB1*08:03L
IQDSLSSTASALGK

SEQ ID NO: 12549 - protein, 14 aa, Severe acute respiratory syndrome coronavirus 2
  REGION 1..14: note = Table B: HLA-DRB1*04:01L HLA-DRB1*01:01L HLA-DRB3*02:01L HLA-DPA1*03:01-B1*04:02L HLA-DRB1*11:03L HLA-DRB1*14:02L HLA-DRB1*08:01L HLA-DRB1*11:01L HLA-DRB4*02:01NL HLA-DRB4*01:01L HLA-DRB1*09:01L HLA-DPA1*02:01-B1*13:01L
  REGION 1..14: note = CONT. FROM ABOVE: HLA-DPA1*01:03-B1*02:01L HLA-DPA1*01:03-B1*104 :01L HLA-DPA1*01:02-B1*04:01L HLA-DRB1*07:01L HLA-DRB1*08:02L HL A-DRB1*08:03L
DSLSSTASALGKLQ

SEQ ID NO: 12550 - protein, 14 aa, Severe acute respiratory syndrome coronavirus 2
  REGION 1..14: note = Table B: HLA-DRB1*04:01L HLA-DRB1*08:04L HLA-DRB1*14:01L HLA-DRB1*11:04L HLA-DPA1*02:01-B1*13:01L HLA-DRB1*08:03L
ASALGKLQDVVNQN

SEQ ID NO: 12551 - protein, 14 aa, Severe acute respiratory syndrome coronavirus 2
  REGION 1..14: note = Table B: HLA-DRB1*04:01L HLA-DRB1*04:04L HLA-DRB1*01:01L HLA-DRB1*11:01L HLA-DRB4*01:01L HLA-DRB3*01:01L HLA-DRB1*08:03L
LQDVVNQNAQALNT

SEQ ID NO: 12552 - protein, 14 aa, Severe acute respiratory syndrome coronavirus 2
  REGION 1..14: note = Table B: HLA-DRB1*04:01L HLA-DRB1*01:01L HLA-DRB3*02:01L HLA-DRB1*11:03L HLA-DRB1*14:02L HLA-DRB1*11:01L HLA-DRB4*01:01L HLA-DRB1*09:01L HLA-DPA1*01:03-B1*04:02L HLA-DRB3*01:01L HLA-DPA1*01:03-B1*104:01L HLA-DRB1*07:01L HLA-DRB1*08:03L
TLVKQLSSNFGAIS

SEQ ID NO: 12553 - protein, 15 aa, Severe acute respiratory syndrome coronavirus 2
  REGION 1..15: note = Table B: HLA-DRB1*04:01L HLA-DRB4*01:01L HLA-DRB1*09:01L
SSNFGAISSVLNDIL

SEQ ID NO: 12554 - protein, 13 aa, Severe acute respiratory syndrome coronavirus 2
  REGION 1..13: note = Table B: HLA-DRB1*04:01L HLA-DRB1*04:04L HLA-DRB1*08:04L HLA-DRB1*08:77L HLA-DPA1*01:03-B1*03:01L HLA-DPA1*03:01-B1*04:02L HLA-DRB1*14:01L HLA-DRB1*11:04L HLA-DRB1*04:10L HLA-DRB1*12:02L HLA-DPA1*02:01-B1*13:01L
  REGION 1..13: note = CONT. FROM ABOVE: HLA-DRB1*14:54L HLA-DRB1*10:01L HLA-DRB1*08:03 L
GAISSVLNDILSR

SEQ ID NO: 12555 - protein, 15 aa, Severe acute respiratory syndrome coronavirus 2
  REGION 1..15: note = Table B: HLA-DRB1*04:01L HLA-DRB4*03:01NL HLA-DPA1*01:03-B1*03:01L HLA-DPA1*03:01-B1*04:02L HLA-DRB1*03:01L HLA-DRB1*13:01L HLA-DPA1*01:03-B1*02:01L HLA-DPA1*01:03-B1*104:01L HLA-DPA1*01:02-B1*04:01L
  REGION 1..15: note = CONT. FROM ABOVE: HLA-DRB1*07:01L HLA-DRB1*10:01L
NDILSRLDKVEAEVQ

SEQ ID NO: 12556 - protein, 15 aa, Severe acute respiratory syndrome coronavirus 2
  REGION 1..15: note = Table B: HLA-DRB1*04:01L
LSRLDKVEAEVQIDR

SEQ ID NO: 12557 - protein, 10 aa, Severe acute respiratory syndrome coronavirus 2
  REGION 1..10: note = Table B: HLA-DRB1*04:01L HLA-DRB1*13:02M HLA-DRB1*13:03M HLA-DRB1*01:03L HLA-DRB1*04:02L HLA-DRB1*04:04L HLA-DRB1*01:01L HLA-DRB4*03:01NL HLA-DRB3*02:01L HLA-DRB1*14:01L HLA-DRB1*11:04L HLA-DRB1*08:01L HLA-DRB1*11:01L HLA-DRB5*01:01L HLA-DRB1*13:01L
  REGION 1..10: note = CONT. FROM ABOVE: HLA-DPA1*01:03-B1*04:02L HLA-DRB1*12:01L HLA-D RB1*12:02L HLA-DRB3*01:01L HLA-DQA1*03:01-B1*03:02M HLA-DQA1*05: 05-B1*03:01L HLA-DRB1*14:17L HLA-DRB1*16:01L HLA-DRB1*08:02L HLA -DQA1*02:01-B1*03:03L HLA-DRB1*15:01L
VQIDRLITGR

SEQ ID NO: 12558 - protein, 12 aa, Severe acute respiratory syndrome coronavirus 2
  REGION 1..12: note = Table B: HLA-DRB1*04:01L HLA-DRB1*13:02L HLA-DRB1*08:04L HLA-DRB1*11:04L HLA-DRB1*08:01L HLA-DRB1*11:01L HLA-DPA1*01:03-B1*04:01L HLA-DRB1*04:10L HLA-DPA1*01:03-B1*02:01L HLA-DRB1*10:01L
TYVTQQLIRAAE

SEQ ID NO: 12559 - protein, 13 aa, Severe acute respiratory syndrome coronavirus 2
  REGION 1..13: note = Table B: HLA-DRB1*04:01L HLA-DRB1*13:03L HLA-DRB4*03:01NL HLA-DRB1*08:04L HLA-DRB1*11:04L HLA-DRB1*14:02L HLA-DRB1*04:10L HLA-DRB3*01:01L HLA-DPA1*02:01-B1*13:01L
QLIRAAEIRASAN

SEQ ID NO: 12560 - protein, 13 aa, Severe acute respiratory syndrome coronavirus 2
  REGION 1..13: note = Table B: HLA-DRB1*04:01L HLA-DRB1*13:02L HLA-DRB1*08:04L HLA-DRB1*08:77L HLA-DPA1*01:03-B1*03:01L HLA-DRB1*11:03L HLA-DRB1*08:01L HLA-DRB1*11:01L HLA-DQA1*01-B1*05L HLA-DQA1*05:01-B1*02:01L HLA-DRB1*09:01L
  REGION 1..13: note = CONT. FROM ABOVE: HLA-DPA1*03:01-B1*105:01L HLA-DRB1*15:03L
AAEIRASANLAAT

SEQ ID NO: 12561 - protein, 11 aa, Severe acute respiratory syndrome coronavirus 2
  REGION 1..11: note = Table B: HLA-DRB1*04:01L HLA-DRB1*13:02L HLA-DRB1*01:01L HLA-DRB1*01:02L HLA-DPA1*01:03-B1*03:01L HLA-DRB1*03:01L HLA-DRB1*11:03L HLA-DRB1*11:04L HLA-DQA1*01:01-B1*05:01L HLA-DRB1*08:01L HLA-DRB1*11:01L HLA-DRB5*01:01L HLA-DRB4*01:01L
  REGION 1..11: note = CONT. FROM ABOVE: HLA-DPA1*01:03-B1*04:01L HLA-DRB1*09:01L HLA-D PA1*01:03-B1*04:02L HLA-DRB1*12:01L HLA-DQA1*05:05-B1*03:01L HLA -DRB1*07:01L HLA-DRB1*10:01L HLA-DRB1*08:02L HLA-DRB1*08:03L
FPQSAPHGVVF

SEQ ID NO: 12562 - protein, 17 aa, Severe acute respiratory syndrome coronavirus 2
  REGION 1..17: note = Table B: HLA-DRB1*04:01L HLA-DRB4*01:01L
APHGVVFLHVTYVPAQE

SEQ ID NO: 12563 - protein, 16 aa, Severe acute respiratory syndrome coronavirus 2
  REGION 1..16: note = Table B: HLA-DRB1*04:01L HLA-DRB1*01:01L HLA-DRB1*11:02L HLA-DRB1*11:03L HLA-DRB4*01:01L HLA-DQA1*05:05-B1*03:116L HLA-DRB1*09:01L HLA-DRB1*07:01L HLA-DRB1*08:02L
GVVFLHVTYVPAQEKN

SEQ ID NO: 12564 - protein, 14 aa, Severe acute respiratory syndrome coronavirus 2
  REGION 1..14: note = Table B: HLA-DRB1*04:01L HLA-DRB1*13:02L HLA-DRB1*13:03L HLA-DRB1*04:04L HLA-DRB1*01:01L HLA-DRB1*08:04L HLA-DRB1*14:01L HLA-DRB1*14:02L HLA-DRB1*11:01L HLA-DPA1*01:03-B1*104:01L HLA-DRB1*14:17L HLA-DPA1*01:02-B1*04:01L HLA-DRB1*07:01L
  REGION 1..14: note = CONT. FROM ABOVE: HLA-DRB1*10:01L HLA-DRB1*08:03L
EKNFTTAPAICHDG

SEQ ID NO: 12565 - protein, 18 aa, Severe acute respiratory syndrome coronavirus 2
  REGION 1..18: note = Table B: HLA-DRB1*04:01L
FPREGVFVSNGTHWFVTQ

SEQ ID NO: 12566 - protein, 14 aa, Severe acute respiratory syndrome coronavirus 2
  REGION 1..14: note = Table B: HLA-DRB1*04:01L HLA-DRB1*01:01L HLA-DRB3*02:01L HLA-DPA1*01:03-B1*03:01L HLA-DRB1*11:02L HLA-DRB1*11:03L HLA-DQA1*05:05-B1*03:116L HLA-DRB1*09:01L HLA-DRB1*12:02L HLA-DPA1*01:03-B1*02:01L HLA-DPA1*01:03-B1*104:01L
  REGION 1..14: note = CONT. FROM ABOVE: HLA-DQA1*05:05-B1*03:01L HLA-DRB1*07:01L
THWFVTQRNFYEPQ

SEQ ID NO: 12567 - protein, 15 aa, Severe acute respiratory syndrome coronavirus 2
  REGION 1..15: note = Table B: HLA-DRB1*04:01L HLA-DRB1*01:01L HLA-DRB1*11:02L HLA-DRB4*01:01L
TDNTFVSGNCDVVIG

SEQ ID NO: 12568 - protein, 13 aa, Severe acute respiratory syndrome coronavirus 2
  REGION 1..13: note = Table B: HLA-DRB1*04:01L HLA-DRB1*01:01L HLA-DRB1*08:77L HLA-DRB3*02:01L HLA-DPA1*03:01-B1*04:02L HLA-DRB1*03:01L HLA-DRB1*11:02L HLA-DRB1*11:03L HLA-DRB5*01:01L HLA-DRB4*01:01L HLA-DPA1*01:03-B1*04:01L HLA-DQA1*05:05-B1*03:116L
  REGION 1..13: note = CONT. FROM ABOVE: HLA-DRB1*09:01L HLA-DPA1*01:03-B1*04:02L HLA-D PA1*01:03-B1*02:01L HLA-DPA1*01:03-B1*104:01L HLA-DRB1*07:01L HL A-DRB1*10:01L HLA-DRB1*08:02L
DKYFKNHTSPDVD

SEQ ID NO: 12569 - protein, 14 aa, Severe acute respiratory syndrome coronavirus 2
  REGION 1..14: note = Table B: HLA-DRB1*04:01L HLA-DRB1*07:01L HLA-DRB1*10:01L
KYFKNHTSPDVDLG

SEQ ID NO: 12570 - protein, 16 aa, Severe acute respiratory syndrome coronavirus 2
  REGION 1..16: note = Table B: HLA-DRB1*04:01L HLA-DRB1*03:01L HLA-DRB1*11:04L HLA-DRB1*14:02L HLA-DRB1*08:01L HLA-DRB4*01:01L HLA-DPA1*01:03-B1*04:01L HLA-DRB3*01:01L HLA-DRB1*10:01L HLA-DRB1*08:03L
VAKNLNESLIDLQELG

SEQ ID NO: 12571 - protein, 14 aa, Severe acute respiratory syndrome coronavirus 2
  REGION 1..14: note = Table B: HLA-DRB1*04:01L HLA-DRB1*08:04L HLA-DRB1*11:04L HLA-DRB1*12:02L HLA-DRB3*01:01L HLA-DRB1*07:01L HLA-DRB1*08:03L
QGEIKDATPSDFVR

SEQ ID NO: 12572 - protein, 13 aa, Severe acute respiratory syndrome coronavirus 2
  REGION 1..13: note = Table B: HLA-DRB1*04:01L HLA-DRB1*04:04L HLA-DRB3*02:01L HLA-DPA1*01:03-B1*03:01L HLA-DPA1*03:01-B1*04:02L HLA-DRB1*11:03L HLA-DQA1*01:01-B1*05:01L HLA-DPA1*01:03-B1*04:01L HLA-DRB1*09:01L HLA-DRB1*10:01L
KKRWQLALSKGVH

SEQ ID NO: 12573 - protein, 15 aa, Severe acute respiratory syndrome coronavirus 2
  REGION 1..15: note = Table B: HLA-DRB1*04:01L HLA-DRB1*04:04L HLA-DRB1*01:01L HLA-DRB1*11:03L HLA-DRB1*08:03L
HSYFTSDYYQLYSTQ

SEQ ID NO: 12574 - protein, 14 aa, Severe acute respiratory syndrome coronavirus 2
  REGION 1..14: note = Table B: HLA-DRB1*04:01L HLA-DRB1*13:02L HLA-DRB1*04:04L HLA-DRB1*11:04L HLA-DRB1*11:01L HLA-DRB1*12:02L HLA-DRB3*01:01L HLA-DRB1*15:01L
TSDYYQLYSTQLST

SEQ ID NO: 12575 - protein, 14 aa, Severe acute respiratory syndrome coronavirus 2
  REGION 1..14: note = Table B: HLA-DRB1*04:01L HLA-DRB1*13:02L HLA-DRB3*02:01L HLA-DPA1*01:03-B1*03:01L HLA-DRB1*14:01L HLA-DRB1*11:04L HLA-DRB1*08:01L HLA-DRB1*11:01L HLA-DRB1*09:01L HLA-DRB3*01:01L HLA-DPA1*01:03-B1*104:01L HLA-DRB1*07:01L HLA-DRB1*08:03L
SDYYQLYSTQLSTD

SEQ ID NO: 12576 - protein, 14 aa, Severe acute respiratory syndrome coronavirus 2
  REGION 1..14: note = Table B: HLA-DRB1*04:01L HLA-DRB1*13:02L HLA-DRB1*13:03L HLA-DRB1*08:77L HLA-DRB3*02:01L HLA-DPA1*01:03-B1*03:01L HLA-DRB1*11:04L HLA-DRB1*11:01L HLA-DRB1*09:01L HLA-DRB1*07:01L HLA-DRB1*08:03L
DYYQLYSTQLSTDT

SEQ ID NO: 12577 - protein, 14 aa, Severe acute respiratory syndrome coronavirus 2
  REGION 1..14: note = Table B: HLA-DRB1*04:01L HLA-DRB1*04:04L HLA-DRB1*01:01L HLA-DRB3*02:01L HLA-DPA1*03:01-B1*04:02L HLA-DRB1*08:01L HLA-DRB1*11:01L HLA-DRB4*02:01NL HLA-DRB1*13:01L HLA-DRB4*01:01L HLA-DPA1*01:03-B1*04:01L HLA-DRB1*09:01L
  REGION 1..14: note = CONT. FROM ABOVE: HLA-DPA1*01:03-B1*04:02L HLA-DPA1*02:01-B1*13: 01L HLA-DPA1*01:02-B1*04:01L HLA-DRB1*07:01L HLA-DRB1*08:03L
STQLSTDTGVEHVT

SEQ ID NO: 12578 - protein, 15 aa, Severe acute respiratory syndrome coronavirus 2
  REGION 1..15: note = Table B: HLA-DRB1*04:01L HLA-DRB1*01:01L HLA-DRB1*03:01L HLA-DRB4*01:01L
HVTFFIYNKIVDEPE

SEQ ID NO: 12579 - protein, 14 aa, Severe acute respiratory syndrome coronavirus 2
  REGION 1..14: note = Table B: HLA-DRB1*04:01L HLA-DRB1*01:01L HLA-DRB1*08:04L HLA-DRB1*11:03L HLA-DRB1*11:04L HLA-DRB1*08:01L HLA-DRB1*11:01L HLA-DRB5*01:01L HLA-DQA1*05:05-B1*03:116L HLA-DPA1*01:03-B1*04:02L HLA-DRB1*12:02L HLA-DRB1*07:01L
IHTIDGSSGVVNPV

SEQ ID NO: 12580 - protein, 14 aa, Severe acute respiratory syndrome coronavirus 2
  REGION 1..14: note = Table B: HLA-DRB1*04:01L HLA-DRB1*13:02L HLA-DQA1*01:02-B1*06:02L HLA-DRB1*08:04L HLA-DRB1*08:77L HLA-DPA1*03:01-B1*04:02L HLA-DRB1*14:01L HLA-DRB1*11:03L HLA-DRB1*14:02L HLA-DRB1*09:01L HLA-DPA1*02:01-B1*13:01L
  REGION 1..14: note = CONT. FROM ABOVE: HLA-DPA1*03:01-B1*105:01L HLA-DQA1*05:05-B1*03 :01L
NPVMEPIYDEPTTT

SEQ ID NO: 12581 - protein, 15 aa, Severe acute respiratory syndrome coronavirus 2
  REGION 1..15: note = Table B: HLA-DRB1*04:01L HLA-DRB1*01:01L HLA-DRB1*08:04L HLA-DRB3*02:01L HLA-DPA1*03:01-B1*04:02L HLA-DRB1*14:01L HLA-DRB1*11:03L HLA-DRB1*11:04L HLA-DRB1*14:02L HLA-DRB1*08:01L HLA-DRB1*11:01L HLA-DRB5*01:01L HLA-DRB4*01:01L
  REGION 1..15: note = CONT. FROM ABOVE: HLA-DPA1*01:03-B1*04:01L HLA-DQA1*05:05-B1*03: 116L HLA-DRB1*09:01L HLA-DPA1*01:03-B1*04:02L HLA-DRB1*12:02L HL A-DRB3*01:01L HLA-DPA1*01:03-B1*104:01L HLA-DRB1*07:01L HLA-DRB1 *08:03L
EPIYDEPTTTTSVPL

SEQ ID NO: 12582 - protein, 14 aa, Severe acute respiratory syndrome coronavirus 2
  REGION 1..14: note = Table B: HLA-DRB1*04:01L HLA-DRB1*04:04L HLA-DRB1*08:04L HLA-DRB1*11:04L HLA-DRB1*11:01L HLA-DRB4*01:01L HLA-DRB1*04:10L HLA-DRB1*12:02L HLA-DRB3*01:01L HLA-DPA1*01:03-B1*104:01L HLA-DRB1*08:03L
YSFVSEETGTLIVN

SEQ ID NO: 12583 - protein, 17 aa, Severe acute respiratory syndrome coronavirus 2
  REGION 1..17: note = Table B: HLA-DRB1*04:01L HLA-DQA1*05:01-B1*02:01L HLA-DRB1*09:01L
VKPSFYVYSRVKNLNSS

SEQ ID NO: 12584 - protein, 14 aa, Severe acute respiratory syndrome coronavirus 2
  REGION 1..14: note = Table B: HLA-DRB1*04:01L HLA-DRB1*01:01L HLA-DPA1*02:01-B1*13:01L
FYVYSRVKNLNSSR

SEQ ID NO: 12585 - protein, 13 aa, Severe acute respiratory syndrome coronavirus 2
  REGION 1..13: note = Table B: HLA-DRB1*04:01L HLA-DRB1*13:02L HLA-DQA1*01:02-B1*06:02L HLA-DRB1*01:01L HLA-DRB1*11:03L HLA-DRB1*11:04L HLA-DRB1*08:01L HLA-DRB1*11:01L HLA-DQA1*01-B1*05L HLA-DRB3*01:01L HLA-DPA1*02:01-B1*13:01L
  REGION 1..13: note = CONT. FROM ABOVE: HLA-DPA1*03:01-B1*105:01L HLA-DQA1*05:05-B1*03 :01L HLA-DPA1*01:02-B1*04:01L HLA-DRB1*07:01L HLA-DRB1*10:01L HL A-DQA1*01:03-B1*06:01L HLA-DRB1*08:03L HLA-DRB1*15:01L
SRVKNLNSSRVPD

SEQ ID NO: 12586 - protein, 13 aa, Severe acute respiratory syndrome coronavirus 2
  REGION 1..13: note = Table B: HLA-DRB1*04:01L HLA-DRB1*13:03L HLA-DRB1*04:04L HLA-DRB4*03:01NL HLA-DRB1*08:77L HLA-DRB3*02:01L HLA-DRB1*03:01L HLA-DRB1*11:02L HLA-DRB1*11:03L HLA-DRB1*11:04L HLA-DRB1*14:02L HLA-DRB1*11:01L HLA-DRB4*01:01L HLA-DPA1*01:03-B1*04:01L
  REGION 1..13: note = CONT. FROM ABOVE: HLA-DRB1*04:10L HLA-DRB1*09:01L HLA-DRB1*12:02 L HLA-DRB3*01:01L HLA-DRB1*14:54L HLA-DPA1*01:03-B1*02:01L HLA-D PA1*01:03-B1*104:01L HLA-DRB1*10:01L HLA-DRB1*08:02L HLA-DRB1*08 :03L
AVYRINWITGGIA

SEQ ID NO: 12587 - protein, 14 aa, Severe acute respiratory syndrome coronavirus 2
  REGION 1..14: note = Table B: HLA-DRB1*04:01L HLA-DRB1*04:04L HLA-DRB1*11:03L HLA-DRB1*14:02L HLA-DRB1*11:01L HLA-DRB4*01:01L HLA-DRB1*09:01L HLA-DPA1*01:03-B1*104:01L
VYRINWITGGIAIA

SEQ ID NO: 12588 - protein, 17 aa, Severe acute respiratory syndrome coronavirus 2
  REGION 1..17: note = Table B: HLA-DRB1*04:01L HLA-DQA1*05:05-B1*03:116L HLA-DRB1*08:02L HLA-DRB1*08:03L
NPETNILLNVPLHGTIL

SEQ ID NO: 12589 - protein, 12 aa, Severe acute respiratory syndrome coronavirus 2
  REGION 1..12: note = Table B: HLA-DRB1*04:01L HLA-DRB3*02:01L HLA-DPA1*01:03-B1*03:01L HLA-DQA1*01-B1*05L HLA-DQA1*05:01-B1*02:01L HLA-DRB1*09:01L HLA-DRB3*01:01L
YYKLGASQRVAG

SEQ ID NO: 12590 - protein, 12 aa, Severe acute respiratory syndrome coronavirus 2
  REGION 1..12: note = Table B: HLA-DRB1*04:01L HLA-DRB1*13:02L HLA-DRB1*04:04L HLA-DRB1*01:02L HLA-DRB1*08:04L HLA-DRB1*08:77L HLA-DRB1*14:01L HLA-DRB1*11:03L HLA-DRB1*11:04L HLA-DRB1*14:02L HLA-DRB1*08:01L HLA-DRB1*11:01L HLA-DRB1*04:10L HLA-DRB1*12:01L HLA-DRB1*12:02L
  REGION 1..12: note = CONT. FROM ABOVE: HLA-DRB3*01:01L HLA-DQA1*03:01-B1*03:02L HLA-D RB1*10:01L HLA-DRB1*04:08L HLA-DRB1*08:03L HLA-DQA1*02:01-B1*03: 03L HLA-DRB1*15:03L
GNYKLNTDHSSS

SEQ ID NO: 12591 - protein, 11 aa, Severe acute respiratory syndrome coronavirus 2
  REGION 1..11: note = Table B: HLA-DRB1*04:01L HLA-DRB1*13:03L HLA-DRB1*04:04L HLA-DRB1*04:05L HLA-DRB1*14:01L HLA-DRB1*11:04L HLA-DRB1*04:10L HLA-DRB1*12:01L HLA-DRB1*04:08L
YKLNTDHSSSS

SEQ ID NO: 12592 - protein, 13 aa, Severe acute respiratory syndrome coronavirus 2
  REGION 1..13: note = Table B: HLA-DRB1*04:01L HLA-DRB1*01:01L HLA-DRB1*03:01L HLA-DRB1*11:02L HLA-DRB1*04:10L HLA-DRB1*10:01L HLA-DRB1*08:02L
DYIINLIIKNLSK

SEQ ID NO: 12593 - protein, 16 aa, Severe acute respiratory syndrome coronavirus 2
  REGION 1..16: note = Table B: HLA-DRB1*04:01L
INLIIKNLSKSLTENK

SEQ ID NO: 12594 - protein, 14 aa, Severe acute respiratory syndrome coronavirus 2
  REGION 1..14: note = Table B: HLA-DRB1*04:01L HLA-DRB1*04:04L HLA-DRB1*11:03L HLA-DRB1*11:04L HLA-DRB1*14:02L HLA-DRB1*11:01L HLA-DRB3*01:01L HLA-DRB1*14:54L HLA-DRB1*08:03L
STQFAFACPDGVKH

SEQ ID NO: 12595 - protein, 14 aa, Severe acute respiratory syndrome coronavirus 2
  REGION 1..14: note = Table B: HLA-DRB1*04:01L HLA-DRB1*10:01L
KHVYQLRARSVSPK

SEQ ID NO: 12596 - protein, 17 aa, Severe acute respiratory syndrome coronavirus 2
  REGION 1..17: note = Table B: HLA-DRB1*04:01L HLA-DRB1*04:04L HLA-DRB1*01:01L HLA-DRB1*11:04L HLA-DRB1*11:01L HLA-DRB3*01:01L HLA-DRB1*07:01L
SPKLFIRQEEVQELYSP

SEQ ID NO: 12597 - protein, 15 aa, Severe acute respiratory syndrome coronavirus 2
  REGION 1..15: note = Table B: HLA-DRB1*04:01L HLA-DRB1*01:01L HLA-DRB3*01:01L HLA-DPA1*01:03-B1*02:01L
LFIRQEEVQELYSPI

SEQ ID NO: 12598 - protein, 14 aa, Severe acute respiratory syndrome coronavirus 2
  REGION 1..14: note = Table B: HLA-DRB1*04:01L HLA-DRB1*04:04L HLA-DRB1*11:03L HLA-DRB1*13:01L HLA-DRB1*07:01L HLA-DRB1*10:01L
KWYIRVGARKSAPL

SEQ ID NO: 12599 - protein, 14 aa, Severe acute respiratory syndrome coronavirus 2
  REGION 1..14: note = Table B: HLA-DRB1*04:01L
SKSPIQYIDIGNYT

SEQ ID NO: 12600 - protein, 16 aa, Severe acute respiratory syndrome coronavirus 2
  REGION 1..16: note = Table B: HLA-DRB1*04:01L HLA-DRB1*04:04L HLA-DRB1*11:04L HLA-DRB1*14:02L HLA-DQA1*05:05-B1*03:116L HLA-DRB1*10:01L
APRITFGGPSDSTGSN

SEQ ID NO: 12601 - protein, 14 aa, Severe acute respiratory syndrome coronavirus 2
  REGION 1..14: note = Table B: HLA-DRB1*04:01L HLA-DRB1*04:03L HLA-DRB1*01:03L HLA-DRB1*04:02L HLA-DRB1*04:05L HLA-DQA1*01:02-B1*06:02M HLA-DRB1*01:02L HLA-DRB1*08:04L HLA-DRB1*08:77L HLA-DPA1*01:03-B1*03:01L HLA-DRB1*11:04L HLA-DRB1*14:02L
  REGION 1..14: note = CONT. FROM ABOVE: HLA-DQA1*01:01-B1*05:01L HLA-DRB1*11:01L HLA-D QA1*01-B1*05L HLA-DQA1*05:05-B1*03:19M HLA-DQA1*05:01-B1*02:01L HLA-DQA1*05:05-B1*03:116L HLA-DRB1*04:10L HLA-DPA1*01:03-B1*04:0 2L HLA-DRB3*01:01L HLA-DPA1*02:01-B1*13:01L
  REGION 1..14: note = CONT. FROM ABOVE: HLA-DPA1*03:01-B1*105:01L HLA-DRB1*14:54L HLA- DRB1*07:01L HLA-DRB1*16:01L HLA-DRB1*04:08L HLA-DRB1*15:03L
GPSDSTGSNQNGER

SEQ ID NO: 12602 - protein, 12 aa, Severe acute respiratory syndrome coronavirus 2
  REGION 1..12: note = Table B: HLA-DRB1*04:01L HLA-DRB1*13:02L HLA-DRB1*04:04L HLA-DRB1*01:01L HLA-DRB1*08:04L HLA-DPA1*01:03-B1*03:01L HLA-DRB1*11:04L HLA-DRB1*14:02L HLA-DRB1*11:01L HLA-DRB1*04:10L HLA-DPA1*01:03-B1*04:02L HLA-DPA1*02:01-B1*13:01L
SWFTALTQHGKE

SEQ ID NO: 12603 - protein, 12 aa, Severe acute respiratory syndrome coronavirus 2
  REGION 1..12: note = Table B: HLA-DRB1*04:01L HLA-DRB4*01:01L HLA-DPA1*01:03-B1*04:01L HLA-DQA1*05:05-B1*03:116L HLA-DRB1*09:01L HLA-DRB3*01:01L HLA-DPA1*01:03-B1*02:01L HLA-DPA1*01:03-B1*104:01L HLA-DRB1*08:02L
WFTALTQHGKED

SEQ ID NO: 12604 - protein, 14 aa, Severe acute respiratory syndrome coronavirus 2
  REGION 1..14: note = Table B: HLA-DRB1*04:01L HLA-DRB1*01:02L HLA-DRB1*08:04L HLA-DRB3*02:01L HLA-DPA1*03:01-B1*04:02L HLA-DRB1*03:01L HLA-DRB1*14:01L HLA-DRB1*14:02L HLA-DRB1*08:01L HLA-DRB1*11:01L HLA-DRB1*13:01L HLA-DRB4*01:01L HLA-DPA1*01:03-B1*04:01L
  REGION 1..14: note = CONT. FROM ABOVE: HLA-DRB1*09:01L HLA-DPA1*01:03-B1*04:02L HLA-D RB3*01:01L HLA-DPA1*02:01-B1*13:01L HLA-DPA1*03:01-B1*105:01L HL A-DPA1*01:03-B1*104:01L HLA-DPA1*01:02-B1*04:01L HLA-DRB1*15:03L
VPINTNSSPDDQIG

SEQ ID NO: 12605 - protein, 16 aa, Severe acute respiratory syndrome coronavirus 2
  REGION 1..16: note = Table B: HLA-DRB1*04:01L HLA-DRB1*01:01L HLA-DRB3*02:01L HLA-DRB1*14:01L HLA-DRB1*11:02L HLA-DRB1*11:03L HLA-DRB1*11:04L HLA-DRB1*14:02L HLA-DQA1*01:01-B1*05:01L HLA-DRB1*11:01L HLA-DRB4*01:01L HLA-DQA1*05:05-B1*03:116L HLA-DRB1*09:01L
  REGION 1..16: note = CONT. FROM ABOVE: HLA-DRB3*01:01L HLA-DRB1*07:01L HLA-DRB1*08:02 L
SPRWYFYYLGTGPEAG

SEQ ID NO: 12606 - protein, 13 aa, Severe acute respiratory syndrome coronavirus 2
  REGION 1..13: note = Table B: HLA-DRB1*04:01L HLA-DRB1*13:02L HLA-DRB1*13:03L HLA-DRB1*08:04L HLA-DRB1*08:77L HLA-DRB3*02:01L HLA-DPA1*03:01-B1*04:02L HLA-DRB1*11:03L HLA-DRB1*11:04L HLA-DRB1*14:02L HLA-DRB4*01:01L HLA-DRB1*09:01L
  REGION 1..13: note = CONT. FROM ABOVE: HLA-DPA1*02:01-B1*13:01L HLA-DPA1*01:03-B1*104 :01L HLA-DRB1*08:03L
DGIIWVATEGALN

SEQ ID NO: 12607 - protein, 13 aa, Severe acute respiratory syndrome coronavirus 2
  REGION 1..13: note = Table B: HLA-DRB1*04:01L HLA-DRB1*08:04L HLA-DRB1*14:01L HLA-DRB1*11:01L HLA-DRB5*01:01L HLA-DRB1*09:01L HLA-DRB3*01:01L HLA-DPA1*02:01-B1*13:01L HLA-DPA1*01:03-B1*104:01L HLA-DRB1*07:01L HLA-DRB1*08:03L
VATEGALNTPKDH

SEQ ID NO: 12608 - protein, 16 aa, Severe acute respiratory syndrome coronavirus 2
  REGION 1..16: note = Table B: HLA-DRB1*04:01L HLA-DRB1*11:01L HLA-DQA1*01-B1*05L HLA-DRB3*01:01L HLA-DPA1*02:01-B1*13:01L HLA-DPA1*01:03-B1*104:01L
NAAIVLQLPQGTTLPK

SEQ ID NO: 12609 - protein, 10 aa, Severe acute respiratory syndrome coronavirus 2
  REGION 1..10: note = Table B: HLA-DRB1*04:01L HLA-DRB1*13:02M HLA-DRB1*13:03M HLA-DRB1*01:03L HLA-DRB1*04:02L HLA-DRB1*04:04L HLA-DRB1*01:01L HLA-DRB4*03:01NL HLA-DRB3*02:01L HLA-DRB1*14:01L HLA-DRB1*11:04L HLA-DRB1*14:02L HLA-DRB1*08:01L HLA-DRB5*01:01L
  REGION 1..10: note = CONT. FROM ABOVE: HLA-DPA1*01:03-B1*04:02L HLA-DRB1*12:01L HLA-D RB1*12:02L HLA-DRB3*01:01L HLA-DQA1*03:01-B1*03:02M HLA-DQA1*05: 05-B1*03:01L HLA-DRB1*14:17L HLA-DRB1*16:01L HLA-DRB1*08:02L HLA -DQA1*02:01-B1*03:03L HLA-DRB1*15:01L
QQQQGQTVTK

SEQ ID NO: 12610 - protein, 16 aa, Severe acute respiratory syndrome coronavirus 2
  REGION 1..16: note = Table B: HLA-DRB1*04:01L HLA-DRB1*13:02L HLA-DRB1*01:01L HLA-DPA1*03:01-B1*105:01L HLA-DQA1*05:05-B1*03:01L HLA-DRB1*07:01L
GQTVTKKSAAEASKKP

SEQ ID NO: 12611 - protein, 18 aa, Severe acute respiratory syndrome coronavirus 2
  REGION 1..18: note = Table B: HLA-DRB1*04:01L HLA-DRB1*08:77L HLA-DRB1*03:01L HLA-DRB1*11:03L HLA-DRB1*11:04L HLA-DRB4*01:01L HLA-DRB1*09:01L HLA-DRB1*10:01L
GPEQTQGNFGDQELIRQG

SEQ ID NO: 12612 - protein, 16 aa, Severe acute respiratory syndrome coronavirus 2
  REGION 1..16: note = Table B: HLA-DRB1*04:01L HLA-DRB1*01:01L HLA-DRB3*02:01L HLA-DRB1*11:03L HLA-DRB1*14:02L HLA-DQA1*01:01-B1*05:01L HLA-DRB1*11:01L HLA-DRB1*13:01L HLA-DRB1*09:01L HLA-DPA1*01:03-B1*02:01L HLA-DRB1*07:01L HLA-DRB1*08:03L
  REGION 1..16: note = CONT. FROM ABOVE: HLA-DRB1*15:01L
DQELIRQGTDYKHWPQ

SEQ ID NO: 12613 - protein, 15 aa, Severe acute respiratory syndrome coronavirus 2
  REGION 1..15: note = Table B: HLA-DRB1*04:01L HLA-DRB1*01:01L HLA-DRB3*02:01L HLA-DRB1*03:01L HLA-DRB1*11:02L HLA-DRB1*11:03L HLA-DQA1*01:01-B1*05:01L HLA-DRB4*01:01L HLA-DPA1*01:03-B1*04:01L HLA-DRB1*09:01L HLA-DRB3*01:01L
  REGION 1..15: note = CONT. FROM ABOVE: HLA-DRB1*14:54L HLA-DPA1*01:03-B1*02:01L HLA-D RB1*08:02L
TDYKHWPQIAQFAPS

SEQ ID NO: 12614 - protein, 14 aa, Severe acute respiratory syndrome coronavirus 2
  REGION 1..14: note = Table B: HLA-DRB1*04:01L HLA-DRB1*13:02L HLA-DRB1*08:04L HLA-DRB1*11:04L HLA-DRB1*08:01L HLA-DRB3*01:01L HLA-DRB1*10:01L HLA-DRB1*08:03L
MSRIGMEVTPSGTW

SEQ ID NO: 12615 - protein, 15 aa, Severe acute respiratory syndrome coronavirus 2
  REGION 1..15: note = Table B: HLA-DRB1*04:01L HLA-DRB1*03:01L HLA-DRB1*11:02L HLA-DRB4*02:01NL
GTWLTYTGAIKLDDK

SEQ ID NO: 12616 - protein, 16 aa, Severe acute respiratory syndrome coronavirus 2
  REGION 1..16: note = Table B: HLA-DRB1*04:01L HLA-DRB1*03:01L HLA-DRB1*11:02L HLA-DRB1*13:01L HLA-DRB4*01:01L
WLTYTGAIKLDDKDPN

SEQ ID NO: 12617 - protein, 12 aa, Severe acute respiratory syndrome coronavirus 2
  REGION 1..12: note = Table B: HLA-DRB1*04:01L HLA-DRB1*04:04L HLA-DQA1*01:02-B1*06:02L HLA-DRB1*01:01L HLA-DRB1*08:77L HLA-DPA1*01:03-B1*03:01L HLA-DRB1*11:03L HLA-DRB1*14:02L HLA-DRB1*11:01L HLA-DRB5*01:01L HLA-DQA1*05:01-B1*02:01L
  REGION 1..12: note = CONT. FROM ABOVE: HLA-DRB1*13:01L HLA-DRB4*01:01L HLA-DPA1*03:01 -B1*105:01L HLA-DPA1*01:02-B1*04:01L HLA-DRB1*10:01L HLA-DRB1*08 :03L
AIKLDDKDPNFK

SEQ ID NO: 12618 - protein, 14 aa, Severe acute respiratory syndrome coronavirus 2
  REGION 1..14: note = Table B: HLA-DRB1*04:01L HLA-DRB1*13:02L HLA-DRB1*01:01L HLA-DRB1*03:01L HLA-DRB1*14:01L HLA-DRB1*11:03L HLA-DRB1*11:04L HLA-DRB1*14:02L HLA-DQA1*01:01-B1*05:01L HLA-DQA1*05:05-B1*03:19L HLA-DPA1*01:03-B1*04:01L
  REGION 1..14: note = CONT. FROM ABOVE: HLA-DRB3*01:01L HLA-DPA1*01:03-B1*104:01L HLA- DQA1*05:05-B1*03:01L HLA-DRB1*07:01L HLA-DRB1*10:01L HLA-DRB1*08 :03L
DPNFKDQVILLNKH

SEQ ID NO: 12619 - protein, 13 aa, Severe acute respiratory syndrome coronavirus 2
  REGION 1..13: note = Table B: HLA-DRB1*04:01L HLA-DRB1*04:04L HLA-DRB1*01:01L HLA-DRB1*08:04L HLA-DRB1*08:77L HLA-DPA1*01:03-B1*03:01L HLA-DRB1*14:01L HLA-DRB1*11:03L HLA-DRB1*11:04L HLA-DRB1*14:02L HLA-DRB1*11:01L HLA-DRB5*01:01L HLA-DQA1*05:05-B1*03:19L
  REGION 1..13: note = CONT. FROM ABOVE: HLA-DRB1*09:01L HLA-DRB3*01:01L HLA-DQA1*05:05 -B1*03:01L HLA-DPA1*01:02-B1*04:01L HLA-DRB1*07:01L
IDAYKTFPPTEPK

SEQ ID NO: 12620 - protein, 10 aa, Severe acute respiratory syndrome coronavirus 2
  REGION 1..10: note = Table B: HLA-DRB1*04:01L HLA-DRB1*13:02L HLA-DRB1*13:03L HLA-DRB1*01:03L HLA-DRB1*04:02L HLA-DRB1*04:04L HLA-DQA1*01:02-B1*06:02L HLA-DRB1*01:01L HLA-DRB4*03:01NL HLA-DRB3*02:01L HLA-DRB1*14:01L HLA-DRB1*11:04L HLA-DRB1*14:02L
  REGION 1..10: note = CONT. FROM ABOVE: HLA-DRB1*08:01L HLA-DRB1*11:01L HLA-DRB5*01:01 L HLA-DPA1*01:03-B1*04:02L HLA-DRB1*12:01L HLA-DRB1*12:02L HLA-D RB3*01:01L HLA-DQA1*03:01-B1*03:02M HLA-DQA1*05:05-B1*03:01L HLA -DRB1*14:17L HLA-DRB1*16:01L HLA-DRB1*08:02L
  REGION 1..10: note = CONT. FROM ABOVE: HLA-DQA1*02:01-B1*03:03L HLA-DRB1*15:01L
KTFPPTEPKK

SEQ ID NO: 12621 - protein, 14 aa, Severe acute respiratory syndrome coronavirus 2
  REGION 1..14: note = Table B: HLA-DRB1*04:01L HLA-DRB1*13:02L HLA-DRB1*08:04L HLA-DRB3*02:01L HLA-DRB1*14:01L HLA-DRB1*11:04L HLA-DRB1*14:02L HLA-DRB1*08:01L HLA-DRB1*09:01L HLA-DRB1*12:02L HLA-DPA1*01:03-B1*104:01L HLA-DRB1*10:01L
TVTLLPAADLDDFS

SEQ ID NO: 12622 - protein, 10 aa, Severe acute respiratory syndrome coronavirus 2
  REGION 1..10: note = Table B: HLA-DRB1*04:03L HLA-DQA1*03:01-B1*03:02L HLA-DQA1*01:03-B1*06:01L HLA-DQA1*02:01-B1*03:03L
LVPGFNEKTH

SEQ ID NO: 12623 - protein, 10 aa, Severe acute respiratory syndrome coronavirus 2
  REGION 1..10: note = Table B: HLA-DRB1*04:03L
HVQLSLPVLQ

SEQ ID NO: 12624 - protein, 10 aa, Severe acute respiratory syndrome coronavirus 2
  REGION 1..10: note = Table B: HLA-DRB1*04:03L HLA-DQA1*03:01-B1*03:02L HLA-DRB1*14:17L HLA-DQA1*01:03-B1*06:01L HLA-DQA1*02:01-B1*03:03L
LSLPVLQVRD

SEQ ID NO: 12625 - protein, 12 aa, Severe acute respiratory syndrome coronavirus 2
  REGION 1..12: note = Table B: HLA-DRB1*04:03L HLA-DRB1*01:03L HLA-DRB1*04:02L HLA-DRB1*04:05L HLA-DRB1*01:02L HLA-DRB1*08:01L HLA-DRB1*12:01L HLA-DRB1*14:17L HLA-DRB1*16:01L HLA-DRB1*04:08L HLA-DRB1*15:03L
LPVLQVRDVLVR

SEQ ID NO: 12626 - protein, 12 aa, Severe acute respiratory syndrome coronavirus 2
  REGION 1..12: note = Table B: HLA-DRB1*04:03L HLA-DRB1*01:03L HLA-DRB1*04:05L HLA-DRB1*01:02L HLA-DRB1*14:01L HLA-DRB1*12:01L HLA-DRB1*16:01L HLA-DRB1*04:08L HLA-DQA1*02:01-B1*03:03L HLA-DRB1*15:03L
PVLQVRDVLVRG

SEQ ID NO: 12627 - protein, 11 aa, Severe acute respiratory syndrome coronavirus 2
  REGION 1..11: note = Table B: HLA-DRB1*04:03L HLA-DRB1*04:02L HLA-DQA1*05:01-B1*02:01L HLA-DQA1*03:01-B1*03:02L HLA-DRB1*16:01L HLA-DRB1*15:03L
VLVRGFGDSVE

SEQ ID NO: 12628 - protein, 10 aa, Severe acute respiratory syndrome coronavirus 2
  REGION 1..10: note = Table B: HLA-DRB1*04:03L HLA-DRB1*04:02L HLA-DRB1*04:05L HLA-DQA1*01-B1*05M HLA-DQA1*05:01-B1*02:01L HLA-DRB1*04:10L HLA-DQA1*03:01-B1*03:02L HLA-DRB1*16:01L
VRGFGDSVEE

SEQ ID NO: 12629 - protein, 11 aa, Severe acute respiratory syndrome coronavirus 2
  REGION 1..11: note = Table B: HLA-DRB1*04:03L HLA-DRB1*04:02L HLA-DRB1*14:17L HLA-DQA1*01:03-B1*06:01L HLA-DQA1*02:01-B1*03:03L
VEEVLSEARQH

SEQ ID NO: 12630 - protein, 12 aa, Severe acute respiratory syndrome coronavirus 2
  REGION 1..12: note = Table B: HLA-DRB1*04:03L HLA-DRB1*04:02L HLA-DRB1*11:04L HLA-DRB1*11:01L HLA-DRB3*01:01L HLA-DRB1*14:17L HLA-DRB1*04:08L
EVLSEARQHLKD

SEQ ID NO: 12631 - protein, 11 aa, Severe acute respiratory syndrome coronavirus 2
  REGION 1..11: note = Table B: HLA-DRB1*04:03L HLA-DRB1*04:05L HLA-DRB1*14:02L HLA-DRB1*12:01L
VLPQLEQPYVF

SEQ ID NO: 12632 - protein, 12 aa, Severe acute respiratory syndrome coronavirus 2
  REGION 1..12: note = Table B: HLA-DRB1*04:03L HLA-DRB1*04:05L HLA-DQA1*01:02-B1*06:02L HLA-DRB1*01:02L HLA-DRB1*08:01L HLA-DRB1*12:01L HLA-DRB1*04:08L HLA-DRB1*15:03L
FIKRSDARTAPH

SEQ ID NO: 12633 - protein, 13 aa, Severe acute respiratory syndrome coronavirus 2
  REGION 1..13: note = Table B: HLA-DRB1*04:03L HLA-DRB1*04:05L HLA-DQA1*01:02-B1*06:02L HLA-DRB1*04:10L HLA-DRB1*12:01L HLA-DPA1*03:01-B1*105:01L HLA-DRB1*14:17L HLA-DRB1*15:03L
GHVMVELVAELEG

SEQ ID NO: 12634 - protein, 11 aa, Severe acute respiratory syndrome coronavirus 2
  REGION 1..11: note = Table B: HLA-DRB1*04:03L HLA-DRB1*14:17L
LVAELEGIQYG

SEQ ID NO: 12635 - protein, 12 aa, Severe acute respiratory syndrome coronavirus 2
  REGION 1..12: note = Table B: HLA-DRB1*04:03L HLA-DQA1*01:02-B1*06:02L HLA-DPA1*03:01-B1*105:01L HLA-DPA1*01:02-B1*04:01L
AELEGIQYGRSG

SEQ ID NO: 12636 - protein, 12 aa, Severe acute respiratory syndrome coronavirus 2
  REGION 1..12: note = Table B: HLA-DRB1*04:03L HLA-DRB1*04:02L HLA-DRB1*04:05L HLA-DPA1*01:03-B1*03:01L HLA-DQA1*01:01-B1*05:01L HLA-DQA1*01-B1*05L HLA-DRB1*04:10L HLA-DRB1*16:01L HLA-DRB1*04:08L
GETLGVLVPHVG

SEQ ID NO: 12637 - protein, 13 aa, Severe acute respiratory syndrome coronavirus 2
  REGION 1..13: note = Table B: HLA-DRB1*04:03L
GAGGHSYGADLKS

SEQ ID NO: 12638 - protein, 10 aa, Severe acute respiratory syndrome coronavirus 2
  REGION 1..10: note = Table B: HLA-DRB1*04:03L HLA-DRB1*04:02L HLA-DQA1*01-B1*05L HLA-DQA1*03:01-B1*03:02L HLA-DRB1*14:17L
DLKSFDLGDE

SEQ ID NO: 12639 - protein, 13 aa, Severe acute respiratory syndrome coronavirus 2
  REGION 1..13: note = Table B: HLA-DRB1*04:03L HLA-DRB1*01:03L HLA-DRB1*04:05L HLA-DRB1*01:02L HLA-DRB1*08:04L HLA-DRB3*02:01L HLA-DPA1*01:03-B1*03:01L HLA-DRB1*14:02L HLA-DQA1*01:01-B1*05:01L HLA-DRB1*08:01L
GDELGTDPYEDFQ

SEQ ID NO: 12640 - protein, 12 aa, Severe acute respiratory syndrome coronavirus 2
  REGION 1..12: note = Table B: HLA-DRB1*04:03L HLA-DRB1*04:02L HLA-DQA1*01-B1*05L HLA-DRB1*14:17L HLA-DRB1*16:01L HLA-DQA1*02:01-B1*03:03L
EDFQENWNTKHS

SEQ ID NO: 12641 - protein, 12 aa, Severe acute respiratory syndrome coronavirus 2
  REGION 1..12: note = Table B: HLA-DRB1*04:03L HLA-DRB1*13:03L HLA-DRB1*01:03L HLA-DRB1*04:02L HLA-DQA1*01:02-B1*06:02L HLA-DRB1*08:01L HLA-DQA1*03:01-B1*03:02L HLA-DRB1*14:17L HLA-DQA1*02:01-B1*03:03L
FQENWNTKHSSG

SEQ ID NO: 12642 - protein, 12 aa, Severe acute respiratory syndrome coronavirus 2
  REGION 1..12: note = Table B: HLA-DRB1*04:03L HLA-DRB1*04:05L HLA-DRB1*01:02L
NTKHSSGVTREL

SEQ ID NO: 12643 - protein, 10 aa, Severe acute respiratory syndrome coronavirus 2
  REGION 1..10: note = Table B: HLA-DRB1*04:03L
MRELNGGAYT

SEQ ID NO: 12644 - protein, 10 aa, Severe acute respiratory syndrome coronavirus 2
  REGION 1..10: note = Table B: HLA-DRB1*04:03L HLA-DRB1*01:03L HLA-DRB1*04:05L HLA-DQA1*01:02-B1*06:02L HLA-DRB1*01:01L HLA-DRB1*01:02L HLA-DQA1*01:01-B1*05:01L HLA-DPA1*02:01-B1*13:01M HLA-DRB1*16:01L HLA-DQA1*01:03-B1*06:01M
  REGION 1..10: note = CONT. FROM ABOVE: HLA-DQA1*02:01-B1*03:03L HLA-DRB1*15:03L
AYTRYVDNNF

SEQ ID NO: 12645 - protein, 13 aa, Severe acute respiratory syndrome coronavirus 2
  REGION 1..13: note = Table B: HLA-DRB1*04:03L HLA-DRB1*04:05L HLA-DQA1*01:02-B1*06:02L HLA-DRB1*08:01L HLA-DQA1*03:01-B1*03:02L HLA-DRB1*04:08L HLA-DQA1*02:01-B1*03:03L
TRYVDNNFCGPDG

SEQ ID NO: 12646 - protein, 11 aa, Severe acute respiratory syndrome coronavirus 2
  REGION 1..11: note = Table B: HLA-DRB1*04:03L HLA-DRB1*04:08L
PLECIKDLLAR

SEQ ID NO: 12647 - protein, 12 aa, Severe acute respiratory syndrome coronavirus 2
  REGION 1..12: note = Table B: HLA-DRB1*04:03L HLA-DRB1*04:08L
LECIKDLLARAG

SEQ ID NO: 12648 - protein, 10 aa, Severe acute respiratory syndrome coronavirus 2
  REGION 1..10: note = Table B: HLA-DRB1*04:03L HLA-DRB1*01:03L HLA-DQA1*03:01-B1*03:02L HLA-DRB1*14:17L HLA-DQA1*02:01-B1*03:03L
DLLARAGKAS

SEQ ID NO: 12649 - protein, 12 aa, Severe acute respiratory syndrome coronavirus 2
  REGION 1..12: note = Table B: HLA-DRB1*04:03L HLA-DQA1*01:02-B1*06:02L HLA-DQA1*05:01-B1*02:01L HLA-DPA1*03:01-B1*105:01L HLA-DQA1*01:03-B1*06:01L HLA-DQA1*02:01-B1*03:03L
TLSEQLDFIDTK

SEQ ID NO: 12650 - protein, 10 aa, Severe acute respiratory syndrome coronavirus 2
  REGION 1..10: note = Table B: HLA-DRB1*04:03L HLA-DQA1*01-B1*05L HLA-DQA1*03:01-B1*03:02L HLA-DRB1*14:17L
QLDFIDTKRG

SEQ ID NO: 12651 - protein, 10 aa, Severe acute respiratory syndrome coronavirus 2
  REGION 1..10: note = Table B: HLA-DRB1*04:03L HLA-DRB1*04:02L HLA-DQA1*01-B1*05L HLA-DQA1*03:01-B1*03:02L HLA-DRB1*14:17L
IAWYTERSEK

SEQ ID NO: 12652 - protein, 10 aa, Severe acute respiratory syndrome coronavirus 2
  REGION 1..10: note = Table B: HLA-DRB1*04:03L HLA-DRB1*13:03L HLA-DRB1*01:03L HLA-DRB1*04:02L HLA-DQA1*01-B1*05L HLA-DQA1*05:01-B1*02:01L HLA-DQA1*03:01-B1*03:02L HLA-DRB1*14:17L HLA-DPA1*01:02-B1*04:01L HLA-DRB1*16:01L
  REGION 1..10: note = CONT. FROM ABOVE: HLA-DQA1*02:01-B1*03:03L
YTERSEKSYE

SEQ ID NO: 12653 - protein, 11 aa, Severe acute respiratory syndrome coronavirus 2
  REGION 1..11: note = Table B: HLA-DRB1*04:03L HLA-DQA1*05:01-B1*02:01L
EKSYELQTPFE

SEQ ID NO: 12654 - protein, 13 aa, Severe acute respiratory syndrome coronavirus 2
  REGION 1..13: note = Table B: HLA-DRB1*04:03L HLA-DRB1*04:02L HLA-DRB1*08:04L HLA-DRB1*11:03L HLA-DRB1*11:04L HLA-DRB1*11:01L HLA-DRB3*01:01L HLA-DRB1*14:54L HLA-DRB1*14:17L HLA-DRB1*08:03L
TPFEIKLAKKFDT

SEQ ID NO: 12655 - protein, 13 aa, Severe acute respiratory syndrome coronavirus 2
  REGION 1..13: note = Table B: HLA-DRB1*04:03L HLA-DRB1*04:05L HLA-DQA1*01-B1*05L HLA-DQA1*03:01-B1*03:02L HLA-DRB1*16:01L HLA-DQA1*02:01-B1*03:03L
AKKFDTFNGECPN

SEQ ID NO: 12656 - protein, 13 aa, Severe acute respiratory syndrome coronavirus 2
  REGION 1..13: note = Table B: HLA-DRB1*04:03L HLA-DRB1*01:03L HLA-DRB1*08:04L HLA-DRB1*11:04L HLA-DRB1*04:08L
FPLNSIIKTIQPR

SEQ ID NO: 12657 - protein, 12 aa, Severe acute respiratory syndrome coronavirus 2
  REGION 1..12: note = Table B: HLA-DRB1*04:03L HLA-DRB1*01:03L HLA-DRB1*04:02L HLA-DRB1*04:05L HLA-DQA1*01:02-B1*06:02L HLA-DRB1*01:02L HLA-DRB1*14:01L HLA-DRB1*12:01L HLA-DQA1*03:01-B1*03:02L HLA-DRB1*14:17L HLA-DRB1*16:01L HLA-DRB1*04:08L
  REGION 1..12: note = CONT. FROM ABOVE: HLA-DQA1*02:01-B1*03:03L HLA-DRB1*15:03L
GRIRSVYPVASP

SEQ ID NO: 12658 - protein, 15 aa, Severe acute respiratory syndrome coronavirus 2
  REGION 1..15: note = Table B: HLA-DRB1*04:03L HLA-DRB1*01:03L HLA-DPA1*01:03-B1*03:01L HLA-DPA1*03:01-B1*04:02L HLA-DRB1*14:01L HLA-DRB1*14:02L HLA-DRB1*12:01L HLA-DRB1*16:01L
TGDFVKATCEFCGTE

SEQ ID NO: 12659 - protein, 11 aa, Severe acute respiratory syndrome coronavirus 2
  REGION 1..11: note = Table B: HLA-DRB1*04:03L HLA-DRB1*13:03L HLA-DRB1*04:02L HLA-DRB4*03:01NL HLA-DQA1*01-B1*05L HLA-DQA1*05:01-B1*02:01L HLA-DQA1*03:01-B1*03:02L HLA-DRB1*14:17L HLA-DRB1*16:01L HLA-DQA1*02:01-B1*03:03L
TENLTKEGATT

SEQ ID NO: 12660 - protein, 11 aa, Severe acute respiratory syndrome coronavirus 2
  REGION 1..11: note = Table B: HLA-DRB1*04:03L HLA-DRB1*13:02L HLA-DRB4*03:01NL HLA-DRB1*11:02L HLA-DRB1*11:01L HLA-DRB4*01:01L HLA-DPA1*01:03-B1*04:02L HLA-DRB1*12:01L HLA-DQA1*05:05-B1*03:01L HLA-DRB1*08:02L
YLPQNAVVKIY

SEQ ID NO: 12661 - protein, 13 aa, Severe acute respiratory syndrome coronavirus 2
  REGION 1..13: note = Table B: HLA-DRB1*04:03L HLA-DRB1*01:03L HLA-DQA1*01:02-B1*06:02L HLA-DRB1*16:01L HLA-DRB1*04:08L
NAVVKIYCPACHN

SEQ ID NO: 12662 - protein, 11 aa, Severe acute respiratory syndrome coronavirus 2
  REGION 1..11: note = Table B: HLA-DRB1*04:03L
SEVGPEHSLAE

SEQ ID NO: 12663 - protein, 11 aa, Severe acute respiratory syndrome coronavirus 2
  REGION 1..11: note = Table B: HLA-DRB1*04:03L HLA-DRB1*04:02L HLA-DQA1*01-B1*05L
HSLAEYHNESG

SEQ ID NO: 12664 - protein, 11 aa, Severe acute respiratory syndrome coronavirus 2
  REGION 1..11: note = Table B: HLA-DRB1*04:03L HLA-DRB1*04:02L HLA-DRB1*14:17L
LAEYHNESGLK

SEQ ID NO: 12665 - protein, 12 aa, Severe acute respiratory syndrome coronavirus 2
  REGION 1..12: note = Table B: HLA-DRB1*04:03L HLA-DRB1*01:03L HLA-DRB1*04:02L HLA-DRB1*04:05L HLA-DRB1*01:02L HLA-DPA1*01:03-B1*03:01L HLA-DRB1*08:01L HLA-DRB1*11:01L HLA-DRB4*02:01NL HLA-DQA1*05:01-B1*02:01L HLA-DPA1*01:03-B1*04:02L
  REGION 1..12: note = CONT. FROM ABOVE: HLA-DRB1*12:01L HLA-DRB1*16:01L HLA-DRB1*04:08 L
NHTGVVGEGSEG

SEQ ID NO: 12666 - protein, 13 aa, Severe acute respiratory syndrome coronavirus 2
  REGION 1..13: note = Table B: HLA-DRB1*04:03L HLA-DRB1*13:02L HLA-DRB1*04:02L HLA-DRB1*01:02L HLA-DRB4*03:01NL HLA-DRB1*08:77L HLA-DRB3*02:01L HLA-DPA1*01:03-B1*03:01L HLA-DPA1*03:01-B1*04:02L HLA-DQA1*01-B1*05L HLA-DRB1*12:01L HLA-DRB1*14:17L
  REGION 1..13: note = CONT. FROM ABOVE: HLA-DRB1*07:01L HLA-DRB1*16:01L HLA-DRB1*15:03 L
HTGVVGEGSEGLN

SEQ ID NO: 12667 - protein, 11 aa, Severe acute respiratory syndrome coronavirus 2
  REGION 1..11: note = Table B: HLA-DRB1*04:03L HLA-DRB1*13:03L HLA-DRB1*04:02L HLA-DRB1*08:04L HLA-DRB1*08:01L HLA-DRB1*14:54L HLA-DRB1*16:01L
EILQKEKVNIN

SEQ ID NO: 12668 - protein, 10 aa, Severe acute respiratory syndrome coronavirus 2
  REGION 1..10: note = Table B: HLA-DRB1*04:03L HLA-DRB1*04:02L HLA-DRB1*01:02L HLA-DQA1*01-B1*05L HLA-DQA1*05:01-B1*02:01L HLA-DRB1*12:01L HLA-DRB1*14:17L HLA-DRB1*16:01L HLA-DRB1*15:03L
INIVGDFKLN

SEQ ID NO: 12669 - protein, 12 aa, Severe acute respiratory syndrome coronavirus 2
  REGION 1..12: note = Table B: HLA-DRB1*04:03L
NEEIAIILASFS

SEQ ID NO: 12670 - protein, 12 aa, Severe acute respiratory syndrome coronavirus 2
  REGION 1..12: note = Table B: HLA-DRB1*04:03L HLA-DRB1*14:17L
EEIAIILASFSA

SEQ ID NO: 12671 - protein, 12 aa, Severe acute respiratory syndrome coronavirus 2
  REGION 1..12: note = Table B: HLA-DRB1*04:03L
EIAIILASFSAS

SEQ ID NO: 12672 - protein, 12 aa, Severe acute respiratory syndrome coronavirus 2
  REGION 1..12: note = Table B: HLA-DRB1*04:03L HLA-DRB1*14:17L
IAIILASFSAST

SEQ ID NO: 12673 - protein, 11 aa, Severe acute respiratory syndrome coronavirus 2
  REGION 1..11: note = Table B: HLA-DRB1*04:03L HLA-DRB1*14:17L
IILASFSASTS

SEQ ID NO: 12674 - protein, 12 aa, Severe acute respiratory syndrome coronavirus 2
  REGION 1..12: note = Table B: HLA-DRB1*04:03L HLA-DRB1*13:02L HLA-DRB1*04:02L HLA-DRB1*04:05L HLA-DRB1*01:02L HLA-DRB4*03:01NL HLA-DRB3*02:01L HLA-DRB1*11:03L HLA-DRB1*09:01L HLA-DRB1*12:01L HLA-DRB1*12:02L HLA-DQA1*03:01-B1*03:02L HLA-DQA1*05:05-B1*03:01L
  REGION 1..12: note = CONT. FROM ABOVE: HLA-DRB1*14:17L HLA-DRB1*07:01L HLA-DRB1*16:01 L
ASFSASTSAFVE

SEQ ID NO: 12675 - protein, 11 aa, Severe acute respiratory syndrome coronavirus 2
  REGION 1..11: note = Table B: HLA-DRB1*04:03L
FSASTSAFVET

SEQ ID NO: 12676 - protein, 11 aa, Severe acute respiratory syndrome coronavirus 2
  REGION 1..11: note = Table B: HLA-DRB1*04:03L HLA-DRB1*04:02L HLA-DQA1*01:01-B1*05:01L
ASTSAFVETVK

SEQ ID NO: 12677 - protein, 12 aa, Severe acute respiratory syndrome coronavirus 2
  REGION 1..12: note = Table B: HLA-DRB1*04:03L HLA-DQA1*01:02-B1*06:02L
WNIGEQKSILSP

SEQ ID NO: 12678 - protein, 11 aa, Severe acute respiratory syndrome coronavirus 2
  REGION 1..11: note = Table B: HLA-DRB1*04:03L HLA-DRB1*04:02L HLA-DRB1*14:01L HLA-DQA1*01-B1*05L HLA-DQA1*05:01-B1*02:01L HLA-DRB1*14:17L HLA-DPA1*01:02-B1*04:01L HLA-DRB1*16:01L
IGEQKSILSPL

SEQ ID NO: 12679 - protein, 12 aa, Severe acute respiratory syndrome coronavirus 2
  REGION 1..12: note = Table B: HLA-DRB1*04:03L HLA-DRB1*04:05L HLA-DRB1*01:02L
GEQKSILSPLYA

SEQ ID NO: 12680 - protein, 12 aa, Severe acute respiratory syndrome coronavirus 2
  REGION 1..12: note = Table B: HLA-DRB1*04:03L HLA-DQA1*01:02-B1*06:02L HLA-DRB1*14:17L
SILSPLYAFASE

SEQ ID NO: 12681 - protein, 13 aa, Severe acute respiratory syndrome coronavirus 2
  REGION 1..13: note = Table B: HLA-DRB1*04:03L HLA-DRB1*14:17L
ILSPLYAFASEAA

SEQ ID NO: 12682 - protein, 13 aa, Severe acute respiratory syndrome coronavirus 2
  REGION 1..13: note = Table B: HLA-DRB1*04:03L HLA-DRB1*04:05L HLA-DRB1*08:01L
ARVVRSIFSRTLE

SEQ ID NO: 12683 - protein, 11 aa, Severe acute respiratory syndrome coronavirus 2
  REGION 1..11: note = Table B: HLA-DRB1*04:03L HLA-DRB1*04:02L HLA-DQA1*01:02-B1*06:02L HLA-DPA1*03:01-B1*105:01L HLA-DQA1*03:01-B1*03:02L HLA-DRB1*14:17L HLA-DPA1*01:02-B1*04:01L HLA-DQA1*01:03-B1*06:01L
  REGION 1..11: note = CONT. FROM ABOVE: HLA-DQA1*02:01-B1*03:03L
IFSRTLETAQN

SEQ ID NO: 12684 - protein, 12 aa, Severe acute respiratory syndrome coronavirus 2
  REGION 1..12: note = Table B: HLA-DRB1*04:03L HLA-DRB1*04:05L HLA-DPA1*01:03-B1*03:01L
FSRTLETAQNSV

SEQ ID NO: 12685 - protein, 10 aa, Severe acute respiratory syndrome coronavirus 2
  REGION 1..10: note = Table B: HLA-DRB1*04:03L HLA-DQA1*03:01-B1*03:02L HLA-DQA1*01:03-B1*06:01L HLA-DQA1*02:01-B1*03:03L
TAQNSVRVLQ

SEQ ID NO: 12686 - protein, 11 aa, Severe acute respiratory syndrome coronavirus 2
  REGION 1..11: note = Table B: HLA-DRB1*04:03L HLA-DRB1*13:02L HLA-DRB1*13:03L HLA-DRB1*01:03L HLA-DRB1*04:02L HLA-DRB1*04:05L HLA-DRB1*14:01L HLA-DRB1*12:01L HLA-DQA1*03:01-B1*03:02L HLA-DPA1*01:02-B1*04:01L HLA-DRB1*16:01L
  REGION 1..11: note = CONT. FROM ABOVE: HLA-DQA1*02:01-B1*03:03L
SVRVLQKAAIT

SEQ ID NO: 12687 - protein, 10 aa, Severe acute respiratory syndrome coronavirus 2
  REGION 1..10: note = Table B: HLA-DRB1*04:03L HLA-DRB1*14:17L
AITILDGISQ

SEQ ID NO: 12688 - protein, 11 aa, Severe acute respiratory syndrome coronavirus 2
  REGION 1..11: note = Table B: HLA-DRB1*04:03L HLA-DRB1*13:02L HLA-DRB1*01:03L HLA-DRB1*04:02L HLA-DRB1*01:02L HLA-DRB4*03:01NL HLA-DPA1*01:03-B1*03:01L HLA-DRB1*12:01L HLA-DQA1*05:05-B1*03:01L HLA-DRB1*14:17L HLA-DRB1*04:08L
ILDGISQYSLR

SEQ ID NO: 12689 - protein, 11 aa, Severe acute respiratory syndrome coronavirus 2
  REGION 1..11: note = Table B: HLA-DRB1*04:03L HLA-DRB1*13:03L HLA-DRB1*04:02L HLA-DQA1*01:02-B1*06:02L HLA-DRB1*14:01L HLA-DRB1*14:17L HLA-DPA1*01:02-B1*04:01L HLA-DRB1*16:01L HLA-DQA1*01:03-B1*06:01L
ISQYSLRLIDA

SEQ ID NO: 12690 - protein, 11 aa, Severe acute respiratory syndrome coronavirus 2
  REGION 1..11: note = Table B: HLA-DRB1*04:03L HLA-DRB1*14:17L
MMFTSDLATNN

SEQ ID NO: 12691 - protein, 11 aa, Severe acute respiratory syndrome coronavirus 2
  REGION 1..11: note = Table B: HLA-DRB1*04:03L HLA-DQA1*01-B1*05L HLA-DQA1*05:05-B1*03:19L HLA-DRB1*16:01L
SDLATNNLVVM

SEQ ID NO: 12692 - protein, 12 aa, Severe acute respiratory syndrome coronavirus 2
  REGION 1..12: note = Table B: HLA-DRB1*04:03L HLA-DQA1*01:02-B1*06:02L HLA-DRB1*14:17L HLA-DQA1*01:03-B1*06:01L
TNNLVVMAYITG

SEQ ID NO: 12693 - protein, 12 aa, Severe acute respiratory syndrome coronavirus 2
  REGION 1..12: note = Table B: HLA-DRB1*04:03L
LVVMAYITGGVV

SEQ ID NO: 12694 - protein, 12 aa, Severe acute respiratory syndrome coronavirus 2
  REGION 1..12: note = Table B: HLA-DRB1*04:03L HLA-DRB1*01:03L HLA-DRB1*04:02L HLA-DRB1*01:02L HLA-DRB1*08:01L HLA-DPA1*01:03-B1*04:02L
YITGGVVQLTSQ

SEQ ID NO: 12695 - protein, 13 aa, Severe acute respiratory syndrome coronavirus 2
  REGION 1..13: note = Table B: HLA-DRB1*04:03L HLA-DRB1*13:02L HLA-DRB1*01:02L HLA-DRB1*08:77L HLA-DRB3*02:01L HLA-DPA1*01:03-B1*03:01L HLA-DPA1*03:01-B1*04:02L HLA-DRB1*14:01L HLA-DRB1*12:02L HLA-DRB1*16:01L
ITGGVVQLTSQWL

SEQ ID NO: 12696 - protein, 12 aa, Severe acute respiratory syndrome coronavirus 2
  REGION 1..12: note = Table B: HLA-DRB1*04:03L HLA-DRB1*01:02L HLA-DRB1*15:03L
GGVVQLTSQWLT

SEQ ID NO: 12697 - protein, 13 aa, Severe acute respiratory syndrome coronavirus 2
  REGION 1..13: note = Table B: HLA-DRB1*04:03L HLA-DRB1*01:02L HLA-DPA1*01:03-B1*02:01L HLA-DRB1*04:08L
SQWLTNIFGTVYE

SEQ ID NO: 12698 - protein, 10 aa, Severe acute respiratory syndrome coronavirus 2
  REGION 1..10: note = Table B: HLA-DRB1*04:03L HLA-DRB1*13:03L HLA-DRB1*04:02L HLA-DRB4*03:01NL HLA-DRB1*12:01L HLA-DQA1*03:01-B1*03:02L HLA-DQA1*05:05-B1*03:01L HLA-DRB1*14:17L HLA-DQA1*02:01-B1*03:03L
TNIFGTVYEK

SEQ ID NO: 12699 - protein, 11 aa, Severe acute respiratory syndrome coronavirus 2
  REGION 1..11: note = Table B: HLA-DRB1*04:03L HLA-DRB1*04:05L HLA-DRB1*08:04L HLA-DRB1*04:10L HLA-DRB1*14:17L HLA-DRB1*04:08L
TVYEKLKPVLD

SEQ ID NO: 12700 - protein, 11 aa, Severe acute respiratory syndrome coronavirus 2
  REGION 1..11: note = Table B: HLA-DRB1*04:03L HLA-DRB1*01:03L HLA-DRB1*04:05L HLA-DRB1*12:01L HLA-DPA1*02:01-B1*13:01L
VYEKLKPVLDW

SEQ ID NO: 12701 - protein, 12 aa, Severe acute respiratory syndrome coronavirus 2
  REGION 1..12: note = Table B: HLA-DRB1*04:03L
YEKLKPVLDWLE

SEQ ID NO: 12702 - protein, 12 aa, Severe acute respiratory syndrome coronavirus 2
  REGION 1..12: note = Table B: HLA-DRB1*04:03L HLA-DRB1*04:05L HLA-DQA1*01-B1*05L
EKLKPVLDWLEE

SEQ ID NO: 12703 - protein, 14 aa, Severe acute respiratory syndrome coronavirus 2
  REGION 1..14: note = Table B: HLA-DRB1*04:03L HLA-DRB1*13:02L HLA-DRB1*01:03L HLA-DRB1*04:02L HLA-DRB1*04:04L HLA-DRB1*14:01L HLA-DRB1*08:01L HLA-DRB3*01:01L
KPVLDWLEEKFKEG

SEQ ID NO: 12704 - protein, 14 aa, Severe acute respiratory syndrome coronavirus 2
  REGION 1..14: note = Table B: HLA-DRB1*04:03L HLA-DRB1*13:03L HLA-DRB3*01:01L HLA-DPA1*03:01-B1*105:01L HLA-DQA1*01:03-B1*06:01L
EEKFKEGVEFLRDG

SEQ ID NO: 12705 - protein, 13 aa, Severe acute respiratory syndrome coronavirus 2
  REGION 1..13: note = Table B: HLA-DRB1*04:03L HLA-DRB1*04:05L HLA-DRB1*01:02L HLA-DRB1*08:04L HLA-DPA1*01:03-B1*03:01L HLA-DPA1*02:01-B1*13:01L HLA-DRB1*04:08L
EGVEFLRDGWEIV

SEQ ID NO: 12706 - protein, 13 aa, Severe acute respiratory syndrome coronavirus 2
  REGION 1..13: note = Table B: HLA-DRB1*04:03L HLA-DRB1*04:02L HLA-DQA1*05:01-B1*02:01L HLA-DPA1*01:02-B1*04:01L HLA-DRB1*16:01L
EIVGGQIVTCAKE

SEQ ID NO: 12707 - protein, 14 aa, Severe acute respiratory syndrome coronavirus 2
  REGION 1..14: note = Table B: HLA-DRB1*04:03L HLA-DRB1*13:02L HLA-DPA1*03:01-B1*04:02L HLA-DQA1*01:01-B1*05:01L HLA-DPA1*02:01-B1*13:01L
IVGGQIVTCAKEIK

SEQ ID NO: 12708 - protein, 12 aa, Severe acute respiratory syndrome coronavirus 2
  REGION 1..12: note = Table B: HLA-DRB1*04:03L HLA-DRB1*13:02L HLA-DRB1*13:03L HLA-DRB1*01:03L HLA-DRB1*04:02L HLA-DRB1*04:05L HLA-DQA1*01:02-B1*06:02L HLA-DRB1*01:02L HLA-DRB1*08:04L HLA-DRB1*11:03L HLA-DRB1*11:04L HLA-DRB1*11:01L HLA-DRB1*12:01L
  REGION 1..12: note = CONT. FROM ABOVE: HLA-DRB3*01:01L HLA-DRB1*14:54L HLA-DRB1*16:01 L HLA-DRB1*04:08L HLA-DRB1*15:03L
GQIVTCAKEIKE

SEQ ID NO: 12709 - protein, 13 aa, Severe acute respiratory syndrome coronavirus 2
  REGION 1..13: note = Table B: HLA-DRB1*04:03L HLA-DRB1*08:01L HLA-DRB3*01:01L HLA-DRB1*07:01L HLA-DRB1*04:08L
AKEIKESVQTFFK

SEQ ID NO: 12710 - protein, 14 aa, Severe acute respiratory syndrome coronavirus 2
  REGION 1..14: note = Table B: HLA-DRB1*04:03L HLA-DRB1*01:01L HLA-DRB1*11:02L HLA-DRB1*11:03L HLA-DRB3*01:01L HLA-DPA1*01:03-B1*02:01L HLA-DPA1*01:03-B1*104:01L HLA-DQA1*05:05-B1*03:01L HLA-DRB1*07:01L HLA-DRB1*10:01L HLA-DRB1*08:02L
VQTFFKLVNKFLAL

SEQ ID NO: 12711 - protein, 11 aa, Severe acute respiratory syndrome coronavirus 2
  REGION 1..11: note = Table B: HLA-DRB1*04:03L HLA-DRB1*13:02L HLA-DRB1*01:03L HLA-DRB1*04:02L HLA-DQA1*05:05-B1*03:01L HLA-DRB1*16:01L
DSIIIGGAKLK

SEQ ID NO: 12712 - protein, 11 aa, Severe acute respiratory syndrome coronavirus 2
  REGION 1..11: note = Table B: HLA-DRB1*04:03L HLA-DRB1*04:02L HLA-DQA1*03:01-B1*03:02L HLA-DRB1*14:17L HLA-DQA1*02:01-B1*03:03L
AKLKALNLGET

SEQ ID NO: 12713 - protein, 13 aa, Severe acute respiratory syndrome coronavirus 2
  REGION 1..13: note = Table B: HLA-DRB1*04:03L HLA-DRB1*01:02L HLA-DPA1*03:01-B1*105:01L
ALNLGETFVTHSK

SEQ ID NO: 12714 - protein, 11 aa, Severe acute respiratory syndrome coronavirus 2
  REGION 1..11: note = Table B: HLA-DRB1*04:03L HLA-DQA1*01:03-B1*06:01L
LGETFVTHSKG

SEQ ID NO: 12715 - protein, 11 aa, Severe acute respiratory syndrome coronavirus 2
  REGION 1..11: note = Table B: HLA-DRB1*04:03L HLA-DRB1*13:02L HLA-DRB4*03:01NL HLA-DRB1*11:01L HLA-DRB1*10:01L HLA-DRB1*08:02L
ETFVTHSKGLY

SEQ ID NO: 12716 - protein, 10 aa, Severe acute respiratory syndrome coronavirus 2
  REGION 1..10: note = Table B: HLA-DRB1*04:03L HLA-DRB1*04:02L HLA-DQA1*03:01-B1*03:02L HLA-DRB1*14:17L HLA-DQA1*02:01-B1*03:03L
LLMPLKAPKE

SEQ ID NO: 12717 - protein, 11 aa, Severe acute respiratory syndrome coronavirus 2
  REGION 1..11: note = Table B: HLA-DRB1*04:03L HLA-DRB1*01:02L HLA-DRB1*12:01L HLA-DRB1*14:17L HLA-DRB1*16:01L HLA-DRB1*15:03L
IIFLEGETLPT

SEQ ID NO: 12718 - protein, 13 aa, Severe acute respiratory syndrome coronavirus 2
  REGION 1..13: note = Table B: HLA-DRB1*04:03L HLA-DQA1*01-B1*05L HLA-DQA1*05:01-B1*02:01L HLA-DQA1*01:03-B1*06:01L HLA-DQA1*02:01-B1*03:03L
EGETLPTEVLTEE

SEQ ID NO: 12719 - protein, 14 aa, Severe acute respiratory syndrome coronavirus 2
  REGION 1..14: note = Table B: HLA-DRB1*04:03L HLA-DQA1*02:01-B1*03:03L
GETLPTEVLTEEVV

SEQ ID NO: 12720 - protein, 12 aa, Severe acute respiratory syndrome coronavirus 2
  REGION 1..12: note = Table B: HLA-DRB1*04:03L HLA-DQA1*01-B1*05L HLA-DQA1*05:01-B1*02:01L
PTEVLTEEVVLK

SEQ ID NO: 12721 - protein, 11 aa, Severe acute respiratory syndrome coronavirus 2
  REGION 1..11: note = Table B: HLA-DRB1*04:03L HLA-DPA1*03:01-B1*105:01L HLA-DPA1*01:02-B1*04:01L HLA-DQA1*01:03-B1*06:01L HLA-DQA1*02:01-B1*03:03L
VLTEEVVLKTG

SEQ ID NO: 12722 - protein, 12 aa, Severe acute respiratory syndrome coronavirus 2
  REGION 1..12: note = Table B: HLA-DRB1*04:03L HLA-DQA1*01-B1*05L HLA-DQA1*05:01-B1*02:01L HLA-DQA1*02:01-B1*03:03L
EEVVLKTGDLQP

SEQ ID NO: 12723 - protein, 12 aa, Severe acute respiratory syndrome coronavirus 2
  REGION 1..12: note = Table B: HLA-DRB1*04:03L HLA-DRB1*01:03L HLA-DRB1*04:02L HLA-DRB1*04:05L HLA-DRB1*01:02L HLA-DPA1*01:03-B1*03:01L HLA-DPA1*03:01-B1*04:02L HLA-DRB1*14:02L HLA-DQA1*01:01-B1*05:01L HLA-DQA1*01-B1*05L HLA-DRB4*02:01NL
  REGION 1..12: note = CONT. FROM ABOVE: HLA-DPA1*01:03-B1*04:02L HLA-DRB1*12:01L HLA-D RB1*14:17L HLA-DPA1*01:02-B1*04:01L HLA-DRB1*04:08L HLA-DRB1*15: 03L
VVLKTGDLQPLE

SEQ ID NO: 12724 - protein, 14 aa, Severe acute respiratory syndrome coronavirus 2
  REGION 1..14: note = Table B: HLA-DRB1*04:03L HLA-DRB1*01:03L HLA-DRB1*04:02L HLA-DRB1*01:02L HLA-DQA1*01:01-B1*05:01L HLA-DRB1*08:01L HLA-DRB4*02:01NL HLA-DPA1*01:03-B1*04:02L HLA-DRB1*12:01L HLA-DRB1*04:08L
VLKTGDLQPLEQPT

SEQ ID NO: 12725 - protein, 11 aa, Severe acute respiratory syndrome coronavirus 2
  REGION 1..11: note = Table B: HLA-DRB1*04:03L HLA-DRB1*04:02L HLA-DRB1*04:05L HLA-DRB4*03:01NL HLA-DQA1*01-B1*05L HLA-DQA1*05:01-B1*02:01L HLA-DRB1*04:10L HLA-DQA1*03:01-B1*03:02L HLA-DRB1*14:17L HLA-DRB1*16:01L
GDLQPLEQPTS

SEQ ID NO: 12726 - protein, 11 aa, Severe acute respiratory syndrome coronavirus 2
  REGION 1..11: note = Table B: HLA-DRB1*04:03L HLA-DQA1*03:01-B1*03:02L HLA-DRB1*14:17L
DLQPLEQPTSE

SEQ ID NO: 12727 - protein, 13 aa, Severe acute respiratory syndrome coronavirus 2
  REGION 1..13: note = Table B: HLA-DRB1*04:03L HLA-DRB1*04:02L HLA-DQA1*01:01-B1*05:01L HLA-DRB1*04:10L HLA-DRB1*14:17L HLA-DRB1*16:01L HLA-DQA1*01:03-B1*06:01L
LQPLEQPTSEAVE

SEQ ID NO: 12728 - protein, 14 aa, Severe acute respiratory syndrome coronavirus 2
  REGION 1..14: note = Table B: HLA-DRB1*04:03L HLA-DRB1*01:03L HLA-DRB1*04:02L HLA-DRB1*04:05L HLA-DRB1*12:01L HLA-DPA1*03:01-B1*105:01L HLA-DRB1*04:08L
EQPTSEAVEAPLVG

SEQ ID NO: 12729 - protein, 12 aa, Severe acute respiratory syndrome coronavirus 2
  REGION 1..12: note = Table B: HLA-DRB1*04:03L
EAVEAPLVGTPV

SEQ ID NO: 12730 - protein, 13 aa, Severe acute respiratory syndrome coronavirus 2
  REGION 1..13: note = Table B: HLA-DRB1*04:03L HLA-DRB1*13:02L HLA-DRB1*04:05L HLA-DRB3*02:01L HLA-DRB1*14:01L HLA-DRB1*14:02L HLA-DQA1*01-B1*05L HLA-DPA1*01:03-B1*04:01L HLA-DRB1*09:01L HLA-DRB1*07:01L HLA-DRB1*04:08L
DTEKYCALAPNMM

SEQ ID NO: 12731 - protein, 10 aa, Severe acute respiratory syndrome coronavirus 2
  REGION 1..10: note = Table B: HLA-DRB1*04:03L HLA-DRB1*04:02L HLA-DQA1*03:01-B1*03:02L HLA-DRB1*14:17L HLA-DQA1*02:01-B1*03:03L
ALAPNMMVTN

SEQ ID NO: 12732 - protein, 10 aa, Severe acute respiratory syndrome coronavirus 2
  REGION 1..10: note = Table B: HLA-DRB1*04:03L HLA-DRB1*13:02L HLA-DRB1*13:03L HLA-DRB1*04:02L HLA-DRB4*03:01NL HLA-DRB3*02:01L HLA-DRB1*14:01L HLA-DRB1*12:01L HLA-DRB1*12:02L HLA-DQA1*03:01-B1*03:02L HLA-DQA1*05:05-B1*03:01L HLA-DRB1*14:17L HLA-DRB1*16:01L
  REGION 1..10: note = CONT. FROM ABOVE: HLA-DQA1*01:03-B1*06:01L HLA-DQA1*02:01-B1*03: 03L
MVTNNTFTLK

SEQ ID NO: 12733 - protein, 11 aa, Severe acute respiratory syndrome coronavirus 2
  REGION 1..11: note = Table B: HLA-DRB1*04:03L HLA-DRB1*13:03L HLA-DRB1*01:03L HLA-DRB1*04:02L HLA-DRB1*04:05L HLA-DRB4*03:01NL HLA-DRB1*08:01L HLA-DQA1*03:01-B1*03:02L HLA-DRB1*14:54L HLA-DRB1*14:17L HLA-DRB1*16:01L HLA-DQA1*02:01-B1*03:03L
NTFTLKGGAPT

SEQ ID NO: 12734 - protein, 13 aa, Severe acute respiratory syndrome coronavirus 2
  REGION 1..13: note = Table B: HLA-DRB1*04:03L HLA-DRB1*13:03L HLA-DRB1*04:05L HLA-DPA1*01:03-B1*03:01L HLA-DRB1*14:02L HLA-DPA1*03:01-B1*105:01L HLA-DRB1*16:01L
KVTFGDDTVIEVQ

SEQ ID NO: 12735 - protein, 13 aa, Severe acute respiratory syndrome coronavirus 2
  REGION 1..13: note = Table B: HLA-DRB1*04:03L HLA-DRB1*04:05L HLA-DPA1*03:01-B1*105:01L HLA-DRB1*16:01L HLA-DQA1*02:01-B1*03:03L
VTFGDDTVIEVQG

SEQ ID NO: 12736 - protein, 10 aa, Severe acute respiratory syndrome coronavirus 2
  REGION 1..10: note = Table B: HLA-DRB1*04:03L HLA-DRB1*04:02L HLA-DRB4*03:01NL HLA-DQA1*03:01-B1*03:02L HLA-DRB1*14:17L HLA-DQA1*01:03-B1*06:01L HLA-DQA1*02:01-B1*03:03L
TVIEVQGYKS

SEQ ID NO: 12737 - protein, 10 aa, Severe acute respiratory syndrome coronavirus 2
  REGION 1..10: note = Table B: HLA-DRB1*04:03L HLA-DRB1*04:02L HLA-DQA1*01-B1*05L HLA-DQA1*03:01-B1*03:02L HLA-DRB1*16:01L HLA-DQA1*01:03-B1*06:01L HLA-DQA1*02:01-B1*03:03L HLA-DRB1*15:03L
VQGYKSVNIT

SEQ ID NO: 12738 - protein, 12 aa, Severe acute respiratory syndrome coronavirus 2
  REGION 1..12: note = Table B: HLA-DRB1*04:03L HLA-DRB1*01:03L HLA-DRB1*08:04L HLA-DPA1*01:03-B1*03:01L HLA-DQA1*01-B1*05L HLA-DRB1*12:01L HLA-DRB3*01:01L HLA-DRB1*04:08L
FELDERIDKVLN

SEQ ID NO: 12739 - protein, 13 aa, Severe acute respiratory syndrome coronavirus 2
  REGION 1..13: note = Table B: HLA-DRB1*04:03L HLA-DRB1*04:05L HLA-DRB1*01:02L HLA-DRB1*04:08L HLA-DRB1*15:03L
DERIDKVLNEKCS

SEQ ID NO: 12740 - protein, 11 aa, Severe acute respiratory syndrome coronavirus 2
  REGION 1..11: note = Table B: HLA-DRB1*04:03L HLA-DRB1*14:17L
YTVELGTEVNE

SEQ ID NO: 12741 - protein, 11 aa, Severe acute respiratory syndrome coronavirus 2
  REGION 1..11: note = Table B: HLA-DRB1*04:03L HLA-DPA1*03:01-B1*105:01L HLA-DQA1*01:03-B1*06:01L
VELGTEVNEFA

SEQ ID NO: 12742 - protein, 11 aa, Severe acute respiratory syndrome coronavirus 2
  REGION 1..11: note = Table B: HLA-DRB1*04:03L HLA-DQA1*01:02-B1*06:02L HLA-DQA1*01:03-B1*06:01L HLA-DQA1*02:01-B1*03:03L
FACVVADAVIK

SEQ ID NO: 12743 - protein, 10 aa, Severe acute respiratory syndrome coronavirus 2
  REGION 1..10: note = Table B: HLA-DRB1*04:03L HLA-DRB1*04:02L HLA-DQA1*03:01-B1*03:02L HLA-DRB1*14:17L HLA-DQA1*02:01-B1*03:03L
AVIKTLQPVS

SEQ ID NO: 12744 - protein, 13 aa, Severe acute respiratory syndrome coronavirus 2
  REGION 1..13: note = Table B: HLA-DRB1*04:03L HLA-DQA1*05:01-B1*02:01L HLA-DRB1*12:01L HLA-DRB1*16:01L HLA-DRB1*15:03L
IKTLQPVSELLTP

SEQ ID NO: 12745 - protein, 11 aa, Severe acute respiratory syndrome coronavirus 2
  REGION 1..11: note = Table B: HLA-DRB1*04:03L HLA-DQA1*01-B1*05L HLA-DQA1*05:01-B1*02:01L HLA-DQA1*03:01-B1*03:02L HLA-DQA1*01:03-B1*06:01L HLA-DQA1*02:01-B1*03:03L
QPVSELLTPLG

SEQ ID NO: 12746 - protein, 12 aa, Severe acute respiratory syndrome coronavirus 2
  REGION 1..12: note = Table B: HLA-DRB1*04:03L
PVSELLTPLGID

SEQ ID NO: 12747 - protein, 12 aa, Severe acute respiratory syndrome coronavirus 2
  REGION 1..12: note = Table B: HLA-DRB1*04:03L HLA-DRB1*04:05L HLA-DQA1*05:01-B1*02:01L HLA-DRB1*04:10L HLA-DQA1*03:01-B1*03:02L HLA-DRB1*14:17L
ELLTPLGIDLDE

SEQ ID NO: 12748 - protein, 12 aa, Severe acute respiratory syndrome coronavirus 2
  REGION 1..12: note = Table B: HLA-DRB1*04:03L HLA-DQA1*03:01-B1*03:02L
LTPLGIDLDEWS

SEQ ID NO: 12749 - protein, 13 aa, Severe acute respiratory syndrome coronavirus 2
  REGION 1..13: note = Table B: HLA-DRB1*04:03L
TPLGIDLDEWSMA

SEQ ID NO: 12750 - protein, 12 aa, Severe acute respiratory syndrome coronavirus 2
  REGION 1..12: note = Table B: HLA-DRB1*04:03L HLA-DQA1*05:05-B1*03:01L
ESGEFKLASHMY

SEQ ID NO: 12751 - protein, 12 aa, Severe acute respiratory syndrome coronavirus 2
  REGION 1..12: note = Table B: HLA-DRB1*04:03L HLA-DRB1*04:02L HLA-DRB1*04:05L HLA-DRB1*01:02L HLA-DRB3*02:01L HLA-DRB1*11:03L HLA-DRB1*09:01L HLA-DRB1*12:02L HLA-DRB1*14:54L HLA-DRB1*14:17L
EEFEPSTQYEYG

SEQ ID NO: 12752 - protein, 15 aa, Severe acute respiratory syndrome coronavirus 2
  REGION 1..15: note = Table B: HLA-DRB1*04:03L HLA-DRB1*04:05L HLA-DQA1*01:02-B1*06:02L HLA-DQA1*01:01-B1*05:01L HLA-DRB1*12:01L HLA-DPA1*02:01-B1*13:01L HLA-DPA1*03:01-B1*105:01L HLA-DRB1*04:08L HLA-DRB1*15:03L
EPSTQYEYGTEDDYQ

SEQ ID NO: 12753 - protein, 13 aa, Severe acute respiratory syndrome coronavirus 2
  REGION 1..13: note = Table B: HLA-DRB1*04:03L HLA-DRB1*04:05L HLA-DRB1*04:10L HLA-DQA1*03:01-B1*03:02L
TQYEYGTEDDYQG

SEQ ID NO: 12754 - protein, 12 aa, Severe acute respiratory syndrome coronavirus 2
  REGION 1..12: note = Table B: HLA-DRB1*04:03L HLA-DRB1*04:05L HLA-DRB1*04:10L
YEYGTEDDYQGK

SEQ ID NO: 12755 - protein, 13 aa, Severe acute respiratory syndrome coronavirus 2
  REGION 1..13: note = Table B: HLA-DRB1*04:03L HLA-DRB1*04:02L HLA-DRB1*08:04L HLA-DRB1*08:01L HLA-DPA1*01:03-B1*02:01L HLA-DRB1*04:08L
DDYQGKPLEFGAT

SEQ ID NO: 12756 - protein, 12 aa, Severe acute respiratory syndrome coronavirus 2
  REGION 1..12: note = Table B: HLA-DRB1*04:03L HLA-DQA1*01:02-B1*06:02L HLA-DPA1*03:01-B1*105:01L HLA-DPA1*01:02-B1*04:01L HLA-DQA1*02:01-B1*03:03L
YQGKPLEFGATS

SEQ ID NO: 12757 - protein, 13 aa, Severe acute respiratory syndrome coronavirus 2
  REGION 1..13: note = Table B: HLA-DRB1*04:03L
GKPLEFGATSAAL

SEQ ID NO: 12758 - protein, 13 aa, Severe acute respiratory syndrome coronavirus 2
  REGION 1..13: note = Table B: HLA-DRB1*04:03L HLA-DRB1*14:17L
LEFGATSAALQPE

SEQ ID NO: 12759 - protein, 13 aa, Severe acute respiratory syndrome coronavirus 2
  REGION 1..13: note = Table B: HLA-DRB1*04:03L HLA-DPA1*03:01-B1*105:01L HLA-DRB1*04:08L
EFGATSAALQPEE

SEQ ID NO: 12760 - protein, 12 aa, Severe acute respiratory syndrome coronavirus 2
  REGION 1..12: note = Table B: HLA-DRB1*04:03L HLA-DRB1*01:03L HLA-DPA1*03:01-B1*105:01L HLA-DRB1*16:01L HLA-DRB1*04:08L
GATSAALQPEEE

SEQ ID NO: 12761 - protein, 12 aa, Severe acute respiratory syndrome coronavirus 2
  REGION 1..12: note = Table B: HLA-DRB1*04:03L HLA-DRB1*01:03L HLA-DPA1*03:01-B1*105:01L HLA-DRB1*16:01L HLA-DRB1*04:08L
ATSAALQPEEEQ

SEQ ID NO: 12762 - protein, 11 aa, Severe acute respiratory syndrome coronavirus 2
  REGION 1..11: note = Table B: HLA-DRB1*04:03L HLA-DQA1*01-B1*05L HLA-DQA1*02:01-B1*03:03L
AALQPEEEQEE

SEQ ID NO: 12763 - protein, 11 aa, Severe acute respiratory syndrome coronavirus 2
  REGION 1..11: note = Table B: HLA-DRB1*04:03L HLA-DQA1*05:01-B1*02:01L
WLDDDSQQTVG

SEQ ID NO: 12764 - protein, 12 aa, Severe acute respiratory syndrome coronavirus 2
  REGION 1..12: note = Table B: HLA-DRB1*04:03L HLA-DRB1*01:03L HLA-DRB1*04:02L HLA-DRB1*04:05L HLA-DRB1*01:02L HLA-DQA1*01:01-B1*05:01L HLA-DRB1*08:01L HLA-DRB4*02:01NL HLA-DPA1*01:03-B1*04:02L HLA-DRB1*12:01L HLA-DRB1*14:17L HLA-DRB1*16:01L HLA-DRB1*04:08L
DNQTTTIQTIVE

SEQ ID NO: 12765 - protein, 11 aa, Severe acute respiratory syndrome coronavirus 2
  REGION 1..11: note = Table B: HLA-DRB1*04:03L HLA-DRB1*14:17L HLA-DQA1*02:01-B1*03:03L
TIQTIVEVQPQ

SEQ ID NO: 12766 - protein, 13 aa, Severe acute respiratory syndrome coronavirus 2
  REGION 1..13: note = Table B: HLA-DRB1*04:03L HLA-DRB1*14:17L
VQPQLEMELTPVV

SEQ ID NO: 12767 - protein, 12 aa, Severe acute respiratory syndrome coronavirus 2
  REGION 1..12: note = Table B: HLA-DRB1*04:03L HLA-DQA1*05:01-B1*02:01L HLA-DQA1*03:01-B1*03:02L HLA-DRB1*14:17L
PQLEMELTPVVQ

SEQ ID NO: 12768 - protein, 11 aa, Severe acute respiratory syndrome coronavirus 2
  REGION 1..11: note = Table B: HLA-DRB1*04:03L HLA-DRB1*14:17L
LEMELTPVVQT

SEQ ID NO: 12769 - protein, 11 aa, Severe acute respiratory syndrome coronavirus 2
  REGION 1..11: note = Table B: HLA-DRB1*04:03L HLA-DRB1*14:17L
MELTPVVQTIE

SEQ ID NO: 12770 - protein, 12 aa, Severe acute respiratory syndrome coronavirus 2
  REGION 1..12: note = Table B: HLA-DRB1*04:03L
LTPVVQTIEVNS

SEQ ID NO: 12771 - protein, 12 aa, Severe acute respiratory syndrome coronavirus 2
  REGION 1..12: note = Table B: HLA-DRB1*04:03L HLA-DRB1*13:02L HLA-DRB1*13:03L HLA-DRB1*04:02L HLA-DRB1*04:05L HLA-DRB1*01:02L HLA-DRB1*14:01L HLA-DRB1*11:01L HLA-DQA1*01-B1*05L HLA-DRB1*12:01L HLA-DPA1*02:01-B1*13:01L HLA-DPA1*01:03-B1*02:01L
  REGION 1..12: note = CONT. FROM ABOVE: HLA-DRB1*08:03L HLA-DRB1*15:03L
NSFSGYLKLTDN

SEQ ID NO: 12772 - protein, 11 aa, Severe acute respiratory syndrome coronavirus 2
  REGION 1..11: note = Table B: HLA-DRB1*04:03L HLA-DRB1*14:17L
LKLTDNVYIKN

SEQ ID NO: 12773 - protein, 11 aa, Severe acute respiratory syndrome coronavirus 2
  REGION 1..11: note = Table B: HLA-DRB1*04:03L HLA-DQA1*03:01-B1*03:02L HLA-DQA1*02:01-B1*03:03L
LTDNVYIKNAD

SEQ ID NO: 12774 - protein, 10 aa, Severe acute respiratory syndrome coronavirus 2
  REGION 1..10: note = Table B: HLA-DRB1*04:03L HLA-DRB1*01:03L HLA-DRB1*04:02L HLA-DRB1*04:05L HLA-DRB1*01:02L HLA-DQA1*01-B1*05L HLA-DQA1*05:01-B1*02:01L HLA-DRB1*12:01L HLA-DPA1*02:01-B1*13:01L HLA-DPA1*03:01-B1*105:01L
  REGION 1..10: note = CONT. FROM ABOVE: HLA-DQA1*03:01-B1*03:02L HLA-DRB1*14:17L HLA-D PA1*01:02-B1*04:01L HLA-DRB1*16:01L HLA-DQA1*01:03-B1*06:01L HLA -DQA1*02:01-B1*03:03L HLA-DRB1*15:03L
VYIKNADIVE

SEQ ID NO: 12775 - protein, 10 aa, Severe acute respiratory syndrome coronavirus 2
  REGION 1..10: note = Table B: HLA-DRB1*04:03L HLA-DRB1*04:02L HLA-DRB1*14:17L
YIKNADIVEE

SEQ ID NO: 12776 - protein, 13 aa, Severe acute respiratory syndrome coronavirus 2
  REGION 1..13: note = Table B: HLA-DRB1*04:03L
AKKVKPTVVVNAA

SEQ ID NO: 12777 - protein, 10 aa, Severe acute respiratory syndrome coronavirus 2
  REGION 1..10: note = Table B: HLA-DRB1*04:03L HLA-DRB1*13:02L HLA-DRB1*13:03L HLA-DRB1*04:02L HLA-DRB4*03:01NL HLA-DRB1*12:01L HLA-DQA1*03:01-B1*03:02L HLA-DQA1*05:05-B1*03:01L HLA-DRB1*14:17L HLA-DQA1*02:01-B1*03:03L
VVNAANVYLK

SEQ ID NO: 12778 - protein, 12 aa, Severe acute respiratory syndrome coronavirus 2
  REGION 1..12: note = Table B: HLA-DRB1*04:03L HLA-DQA1*01:02-B1*06:02L
AANVYLKHGGGV

SEQ ID NO: 12779 - protein, 11 aa, Severe acute respiratory syndrome coronavirus 2
  REGION 1..11: note = Table B: HLA-DRB1*04:03L HLA-DRB1*04:02L HLA-DRB4*03:01NL HLA-DRB1*14:17L HLA-DRB1*16:01L
NVYLKHGGGVA

SEQ ID NO: 12780 - protein, 12 aa, Severe acute respiratory syndrome coronavirus 2
  REGION 1..12: note = Table B: HLA-DRB1*04:03L HLA-DRB1*04:02L HLA-DRB1*01:02L HLA-DPA1*01:03-B1*03:01L HLA-DQA1*01:01-B1*05:01L HLA-DRB1*08:01L HLA-DRB1*11:01L HLA-DQA1*05:05-B1*03:116L HLA-DPA1*01:03-B1*04:02L HLA-DPA1*03:01-B1*105:01L
  REGION 1..12: note = CONT. FROM ABOVE: HLA-DRB1*04:08L
LKHGGGVAGALN

SEQ ID NO: 12781 - protein, 11 aa, Severe acute respiratory syndrome coronavirus 2
  REGION 1..11: note = Table B: HLA-DRB1*04:03L HLA-DRB1*04:02L HLA-DQA1*01:01-B1*05:01L HLA-DRB1*08:01L HLA-DRB1*12:01L HLA-DRB1*04:08L
HGGGVAGALNK

SEQ ID NO: 12782 - protein, 10 aa, Severe acute respiratory syndrome coronavirus 2
  REGION 1..10: note = Table B: HLA-DRB1*04:03L HLA-DRB1*14:17L
LNKATNNAMQ

SEQ ID NO: 12783 - protein, 13 aa, Severe acute respiratory syndrome coronavirus 2
  REGION 1..13: note = Table B: HLA-DRB1*04:03L HLA-DRB1*04:02L HLA-DRB1*04:05L HLA-DRB1*04:10L HLA-DRB1*12:01L HLA-DRB1*14:17L
NNAMQVESDDYIA

SEQ ID NO: 12784 - protein, 12 aa, Severe acute respiratory syndrome coronavirus 2
  REGION 1..12: note = Table B: HLA-DRB1*04:03L HLA-DQA1*05:01-B1*02:01L
AMQVESDDYIAT

SEQ ID NO: 12785 - protein, 10 aa, Severe acute respiratory syndrome coronavirus 2
  REGION 1..10: note = Table B: HLA-DRB1*04:03L HLA-DRB1*04:02L HLA-DQA1*03:01-B1*03:02L HLA-DRB1*14:17L HLA-DQA1*02:01-B1*03:03L
ATNGPLKVGG

SEQ ID NO: 12786 - protein, 15 aa, Severe acute respiratory syndrome coronavirus 2
  REGION 1..15: note = Table B: HLA-DRB1*04:03L HLA-DRB1*13:02L HLA-DRB1*04:02L HLA-DRB1*04:04L HLA-DPA1*03:01-B1*04:02L HLA-DQA1*01:01-B1*05:01L HLA-DRB1*08:01L HLA-DRB1*11:01L HLA-DQA1*05:01-B1*02:01L HLA-DPA1*01:03-B1*04:02L
  REGION 1..15: note = CONT. FROM ABOVE: HLA-DPA1*01:02-B1*04:01L HLA-DRB1*07:01L HLA-D RB1*16:01L HLA-DRB1*15:03L
GPLKVGGSCVLSGHN

SEQ ID NO: 12787 - protein, 11 aa, Severe acute respiratory syndrome coronavirus 2
  REGION 1..11: note = Table B: HLA-DRB1*04:03L
LHVVGPNVNKG

SEQ ID NO: 12788 - protein, 10 aa, Severe acute respiratory syndrome coronavirus 2
  REGION 1..10: note = Table B: HLA-DRB1*04:03L HLA-DRB1*14:17L
DIQLLKSAYE

SEQ ID NO: 12789 - protein, 10 aa, Severe acute respiratory syndrome coronavirus 2
  REGION 1..10: note = Table B: HLA-DRB1*04:03L HLA-DRB1*04:02L HLA-DRB1*04:05L HLA-DRB4*03:01NL HLA-DQA1*01-B1*05L HLA-DRB1*04:10L HLA-DQA1*03:01-B1*03:02L HLA-DRB1*14:17L HLA-DQA1*02:01-B1*03:03L
IQLLKSAYEN

SEQ ID NO: 12790 - protein, 11 aa, Severe acute respiratory syndrome coronavirus 2
  REGION 1..11: note = Table B: HLA-DRB1*04:03L HLA-DQA1*01-B1*05L
FNQHEVLLAPL

SEQ ID NO: 12791 - protein, 10 aa, Severe acute respiratory syndrome coronavirus 2
  REGION 1..10: note = Table B: HLA-DRB1*04:03L HLA-DRB1*04:02L HLA-DRB1*14:17L
VLLAPLLSAG

SEQ ID NO: 12792 - protein, 14 aa, Severe acute respiratory syndrome coronavirus 2
  REGION 1..14: note = Table B: HLA-DRB1*04:03L HLA-DRB1*01:02L HLA-DPA1*01:03-B1*03:01L HLA-DPA1*01:03-B1*04:02L HLA-DRB1*15:03L
LAPLLSAGIFGADP

SEQ ID NO: 12793 - protein, 14 aa, Severe acute respiratory syndrome coronavirus 2
  REGION 1..14: note = Table B: HLA-DRB1*04:03L HLA-DPA1*01:03-B1*04:02L
APLLSAGIFGADPI

SEQ ID NO: 12794 - protein, 13 aa, Severe acute respiratory syndrome coronavirus 2
  REGION 1..13: note = Table B: HLA-DRB1*04:03L HLA-DRB1*04:05L HLA-DRB1*04:08L
ADPIHSLRVCVDT

SEQ ID NO: 12795 - protein, 16 aa, Severe acute respiratory syndrome coronavirus 2
  REGION 1..16: note = Table B: HLA-DRB1*04:03L HLA-DRB1*13:02L HLA-DRB1*04:04L HLA-DRB1*08:04L HLA-DPA1*01:03-B1*03:01L HLA-DRB1*14:01L HLA-DRB3*01:01L HLA-DPA1*03:01-B1*105:01L HLA-DPA1*01:03-B1*104:01L HLA-DQA1*01:03-B1*06:01L
DPIHSLRVCVDTVRTN

SEQ ID NO: 12796 - protein, 15 aa, Severe acute respiratory syndrome coronavirus 2
  REGION 1..15: note = Table B: HLA-DRB1*04:03L HLA-DRB1*13:03L HLA-DRB1*04:02L HLA-DRB1*04:04L HLA-DRB1*08:04L HLA-DRB1*11:03L HLA-DRB1*11:04L HLA-DRB1*11:01L HLA-DPA1*01:03-B1*04:01L HLA-DRB3*01:01L HLA-DRB1*07:01L HLA-DRB1*08:03L
VDTVRTNVYLAVFDK

SEQ ID NO: 12797 - protein, 11 aa, Severe acute respiratory syndrome coronavirus 2
  REGION 1..11: note = Table B: HLA-DRB1*04:03L HLA-DRB1*04:02L HLA-DQA1*01:02-B1*06:02L HLA-DQA1*05:01-B1*02:01L HLA-DPA1*01:02-B1*04:01L
TNVYLAVFDKN

SEQ ID NO: 12798 - protein, 10 aa, Severe acute respiratory syndrome coronavirus 2
  REGION 1..10: note = Table B: HLA-DRB1*04:03L HLA-DRB1*14:01L HLA-DQA1*01-B1*05L
LAVFDKNLYD

SEQ ID NO: 12799 - protein, 10 aa, Severe acute respiratory syndrome coronavirus 2
  REGION 1..10: note = Table B: HLA-DRB1*04:03L HLA-DRB1*13:03L HLA-DRB1*01:03L HLA-DRB1*04:02L HLA-DRB1*04:05L HLA-DRB4*03:01NL HLA-DRB1*08:01L HLA-DQA1*01-B1*05L HLA-DRB1*04:10L HLA-DQA1*03:01-B1*03:02L HLA-DRB1*14:54L HLA-DRB1*14:17L HLA-DRB1*16:01L HLA-DRB1*04:08L
  REGION 1..10: note = CONT. FROM ABOVE: HLA-DQA1*02:01-B1*03:03L
SFLEMKSEKQ

SEQ ID NO: 12800 - protein, 11 aa, Severe acute respiratory syndrome coronavirus 2
  REGION 1..11: note = Table B: HLA-DRB1*04:03L HLA-DRB1*04:02L HLA-DQA1*03:01-B1*03:02L HLA-DRB1*14:17L
LEMKSEKQVEQ

SEQ ID NO: 12801 - protein, 11 aa, Severe acute respiratory syndrome coronavirus 2
  REGION 1..11: note = Table B: HLA-DRB1*04:03L HLA-DQA1*02:01-B1*03:03L
VEQKIAEIPKE

SEQ ID NO: 12802 - protein, 11 aa, Severe acute respiratory syndrome coronavirus 2
  REGION 1..11: note = Table B: HLA-DRB1*04:03L HLA-DRB1*13:03L HLA-DRB1*01:03L HLA-DRB1*04:02L HLA-DRB4*03:01NL HLA-DRB1*14:01L HLA-DQA1*03:01-B1*03:02L HLA-DRB1*14:54L HLA-DRB1*14:17L HLA-DPA1*01:02-B1*04:01L HLA-DRB1*16:01L
  REGION 1..11: note = CONT. FROM ABOVE: HLA-DQA1*02:01-B1*03:03L
IAEIPKEEVKP

SEQ ID NO: 12803 - protein, 11 aa, Severe acute respiratory syndrome coronavirus 2
  REGION 1..11: note = Table B: HLA-DRB1*04:03L HLA-DRB1*13:03L HLA-DRB1*04:02L HLA-DQA1*01-B1*05L HLA-DQA1*03:01-B1*03:02L HLA-DRB1*14:17L HLA-DRB1*16:01L HLA-DQA1*02:01-B1*03:03L
VKPFITESKPS

SEQ ID NO: 12804 - protein, 11 aa, Severe acute respiratory syndrome coronavirus 2
  REGION 1..11: note = Table B: HLA-DRB1*04:03L HLA-DQA1*03:01-B1*03:02L HLA-DQA1*02:01-B1*03:03L
PFITESKPSVE

SEQ ID NO: 12805 - protein, 13 aa, Severe acute respiratory syndrome coronavirus 2
  REGION 1..13: note = Table B: HLA-DRB1*04:03L HLA-DRB1*04:05L HLA-DRB1*01:02L HLA-DRB1*12:01L HLA-DRB1*16:01L HLA-DQA1*01:03-B1*06:01L HLA-DQA1*02:01-B1*03:03L HLA-DRB1*15:03L
DKKIKACVEEVTT

SEQ ID NO: 12806 - protein, 14 aa, Severe acute respiratory syndrome coronavirus 2
  REGION 1..14: note = Table B: HLA-DRB1*04:03L
IKACVEEVTTTLEE

SEQ ID NO: 12807 - protein, 14 aa, Severe acute respiratory syndrome coronavirus 2
  REGION 1..14: note = Table B: HLA-DRB1*04:03L
KACVEEVTTTLEET

SEQ ID NO: 12808 - protein, 12 aa, Severe acute respiratory syndrome coronavirus 2
  REGION 1..12: note = Table B: HLA-DRB1*04:03L HLA-DRB1*04:04L HLA-DRB1*04:05L HLA-DRB1*01:02L HLA-DRB1*08:77L HLA-DPA1*01:03-B1*03:01L HLA-DQA1*01-B1*05L HLA-DQA1*05:05-B1*03:19L HLA-DRB1*04:10L HLA-DPA1*02:01-B1*13:01L HLA-DRB1*14:54L HLA-DRB1*07:01L
  REGION 1..12: note = CONT. FROM ABOVE: HLA-DRB1*04:08L HLA-DRB1*15:03L
VEEVTTTLEETK

SEQ ID NO: 12809 - protein, 11 aa, Severe acute respiratory syndrome coronavirus 2
  REGION 1..11: note = Table B: HLA-DRB1*04:03L HLA-DRB1*01:03L HLA-DRB1*01:02L HLA-DRB1*14:01L HLA-DRB1*08:01L HLA-DQA1*01-B1*05L HLA-DQA1*05:01-B1*02:01L HLA-DPA1*01:03-B1*04:02L HLA-DRB1*12:01L HLA-DPA1*01:03-B1*02:01L HLA-DRB1*16:01L
  REGION 1..11: note = CONT. FROM ABOVE: HLA-DQA1*01:03-B1*06:01L HLA-DRB1*04:08L HLA-D QA1*02:01-B1*03:03L HLA-DRB1*15:03L
TTLEETKFLTE

SEQ ID NO: 12810 - protein, 13 aa, Severe acute respiratory syndrome coronavirus 2
  REGION 1..13: note = Table B: HLA-DRB1*04:03L
TENLLLYIDINGN

SEQ ID NO: 12811 - protein, 14 aa, Severe acute respiratory syndrome coronavirus 2
  REGION 1..14: note = Table B: HLA-DRB1*04:03L HLA-DRB1*16:01L
ENLLLYIDINGNLH

SEQ ID NO: 12812 - protein, 10 aa, Severe acute respiratory syndrome coronavirus 2
  REGION 1..10: note = Table B: HLA-DRB1*04:03L HLA-DRB1*14:17L
YIDINGNLHP

SEQ ID NO: 12813 - protein, 10 aa, Severe acute respiratory syndrome coronavirus 2
  REGION 1..10: note = Table B: HLA-DRB1*04:03L HLA-DQA1*03:01-B1*03:02L HLA-DQA1*02:01-B1*03:03L
DINGNLHPDS

SEQ ID NO: 12814 - protein, 11 aa, Severe acute respiratory syndrome coronavirus 2
  REGION 1..11: note = Table B: HLA-DRB1*04:03L HLA-DRB1*13:02L HLA-DRB1*12:01L
GNLHPDSATLV

SEQ ID NO: 12815 - protein, 11 aa, Severe acute respiratory syndrome coronavirus 2
  REGION 1..11: note = Table B: HLA-DRB1*04:03L HLA-DRB1*13:03L HLA-DRB1*14:01L HLA-DQA1*05:01-B1*02:01L HLA-DRB1*14:17L HLA-DRB1*16:01L
LHPDSATLVSD

SEQ ID NO: 12816 - protein, 12 aa, Severe acute respiratory syndrome coronavirus 2
  REGION 1..12: note = Table B: HLA-DRB1*04:03L
SATLVSDIDITF

SEQ ID NO: 12817 - protein, 13 aa, Severe acute respiratory syndrome coronavirus 2
  REGION 1..13: note = Table B: HLA-DRB1*04:03L HLA-DRB1*03:01L
ATLVSDIDITFLK

SEQ ID NO: 12818 - protein, 11 aa, Severe acute respiratory syndrome coronavirus 2
  REGION 1..11: note = Table B: HLA-DRB1*04:03L HLA-DRB1*13:02L HLA-DRB1*13:03L HLA-DRB1*01:03L HLA-DRB1*04:02L HLA-DRB1*01:02L HLA-DRB1*14:01L HLA-DQA1*05:01-B1*02:01L HLA-DRB1*12:01L HLA-DRB3*01:01L HLA-DQA1*03:01-B1*03:02L HLA-DRB1*14:54L HLA-DRB1*14:17L
  REGION 1..11: note = CONT. FROM ABOVE: HLA-DRB1*16:01L HLA-DRB1*15:03L
FLKKDAPYIVG

SEQ ID NO: 12819 - protein, 10 aa, Severe acute respiratory syndrome coronavirus 2
  REGION 1..10: note = Table B: HLA-DRB1*04:03L HLA-DRB1*14:17L
YIVGDVVQEG

SEQ ID NO: 12820 - protein, 12 aa, Severe acute respiratory syndrome coronavirus 2
  REGION 1..12: note = Table B: HLA-DRB1*04:03L HLA-DRB1*14:17L
VGDVVQEGVLTA

SEQ ID NO: 12821 - protein, 11 aa, Severe acute respiratory syndrome coronavirus 2
  REGION 1..11: note = Table B: HLA-DRB1*04:03L HLA-DRB1*14:17L
VVQEGVLTAVV

SEQ ID NO: 12822 - protein, 10 aa, Severe acute respiratory syndrome coronavirus 2
  REGION 1..10: note = Table B: HLA-DRB1*04:03L HLA-DRB1*04:02L HLA-DRB1*14:17L
VVIPTKKAGG

SEQ ID NO: 12823 - protein, 11 aa, Severe acute respiratory syndrome coronavirus 2
  REGION 1..11: note = Table B: HLA-DRB1*04:03L HLA-DRB1*13:03L HLA-DRB1*01:03L HLA-DRB1*04:02L HLA-DRB4*03:01NL HLA-DRB1*14:01L HLA-DRB1*11:04L HLA-DQA1*03:01-B1*03:02L HLA-DRB1*14:54L HLA-DRB1*14:17L HLA-DRB1*04:08L
VIPTKKAGGTT

SEQ ID NO: 12824 - protein, 10 aa, Severe acute respiratory syndrome coronavirus 2
  REGION 1..10: note = Table B: HLA-DRB1*04:03L HLA-DRB1*13:02L HLA-DRB1*13:03L HLA-DRB1*01:03L HLA-DRB1*04:02L HLA-DRB1*01:02L HLA-DRB4*03:01NL HLA-DRB1*14:01L HLA-DRB1*14:02L HLA-DQA1*01-B1*05L HLA-DRB1*12:01L HLA-DQA1*03:01-B1*03:02L HLA-DRB1*14:17L
  REGION 1..10: note = CONT. FROM ABOVE: HLA-DRB1*16:01L HLA-DQA1*02:01-B1*03:03L HLA-D RB1*15:03L
TTYPGQGLNG

SEQ ID NO: 12825 - protein, 10 aa, Severe acute respiratory syndrome coronavirus 2
  REGION 1..10: note = Table B: HLA-DRB1*04:03L HLA-DQA1*01-B1*05L HLA-DQA1*03:01-B1*03:02L HLA-DQA1*02:01-B1*03:03L
LNGYTVEEAK

SEQ ID NO: 12826 - protein, 11 aa, Severe acute respiratory syndrome coronavirus 2
  REGION 1..11: note = Table B: HLA-DRB1*04:03L HLA-DRB1*04:05L HLA-DQA1*01-B1*05L HLA-DRB1*14:17L
SAFYILPSIIS

SEQ ID NO: 12827 - protein, 10 aa, Severe acute respiratory syndrome coronavirus 2
  REGION 1..10: note = Table B: HLA-DRB1*04:03L HLA-DRB1*04:02L HLA-DQA1*03:01-B1*03:02L HLA-DRB1*14:17L HLA-DQA1*02:01-B1*03:03L
YILPSIISNE

SEQ ID NO: 12828 - protein, 10 aa, Severe acute respiratory syndrome coronavirus 2
  REGION 1..10: note = Table B: HLA-DRB1*04:03L HLA-DRB1*04:02L HLA-DQA1*03:01-B1*03:02L HLA-DQA1*05:05-B1*03:01L HLA-DRB1*14:17L HLA-DQA1*01:03-B1*06:01L HLA-DQA1*02:01-B1*03:03L
ILPSIISNEK

SEQ ID NO: 12829 - protein, 13 aa, Severe acute respiratory syndrome coronavirus 2
  REGION 1..13: note = Table B: HLA-DRB1*04:03L
NEKQEILGTVSWN

SEQ ID NO: 12830 - protein, 13 aa, Severe acute respiratory syndrome coronavirus 2
  REGION 1..13: note = Table B: HLA-DRB1*04:03L HLA-DRB1*13:03L HLA-DRB1*04:05L HLA-DRB1*01:02L HLA-DRB4*03:01NL HLA-DPA1*01:03-B1*03:01L HLA-DRB1*14:01L HLA-DRB1*11:03L HLA-DQA1*01-B1*05L HLA-DRB1*12:02L HLA-DPA1*02:01-B1*13:01L
  REGION 1..13: note = CONT. FROM ABOVE: HLA-DQA1*05:05-B1*03:01L HLA-DPA1*01:02-B1*04: 01L HLA-DQA1*01:03-B1*06:01L HLA-DRB1*04:08L
EKQEILGTVSWNL

SEQ ID NO: 12831 - protein, 12 aa, Severe acute respiratory syndrome coronavirus 2
  REGION 1..12: note = Table B: HLA-DRB1*04:03L HLA-DRB1*01:03L HLA-DRB1*04:02L HLA-DRB1*04:05L HLA-DQA1*01:02-B1*06:02L HLA-DRB1*01:02L HLA-DRB1*14:01L HLA-DRB3*01:01L HLA-DRB1*04:08L HLA-DRB1*15:03L
REMLAHAEETRK

SEQ ID NO: 12832 - protein, 11 aa, Severe acute respiratory syndrome coronavirus 2
  REGION 1..11: note = Table B: HLA-DRB1*04:03L HLA-DQA1*01:02-B1*06:02L HLA-DQA1*05:05-B1*03:01L
VETKAIVSTIQ

SEQ ID NO: 12833 - protein, 13 aa, Severe acute respiratory syndrome coronavirus 2
  REGION 1..13: note = Table B: HLA-DRB1*04:03L HLA-DPA1*03:01-B1*04:02L
GARFYFYTSKTTV

SEQ ID NO: 12834 - protein, 10 aa, Severe acute respiratory syndrome coronavirus 2
  REGION 1..10: note = Table B: HLA-DRB1*04:03L HLA-DQA1*01-B1*05L HLA-DPA1*01:02-B1*04:01L HLA-DRB1*16:01L
YFYTSKTTVA

SEQ ID NO: 12835 - protein, 12 aa, Severe acute respiratory syndrome coronavirus 2
  REGION 1..12: note = Table B: HLA-DRB1*04:03L HLA-DRB1*04:04L HLA-DRB1*04:05L HLA-DRB4*03:01NL HLA-DRB1*08:04L HLA-DQA1*01:01-B1*05:01L HLA-DRB1*04:10L HLA-DRB1*12:01L HLA-DPA1*02:01-B1*13:01L HLA-DRB1*14:54L HLA-DQA1*05:05-B1*03:01L HLA-DRB1*14:17L
  REGION 1..12: note = CONT. FROM ABOVE: HLA-DRB1*04:08L HLA-DRB1*08:03L
YTSKTTVASLIN

SEQ ID NO: 12836 - protein, 12 aa, Severe acute respiratory syndrome coronavirus 2
  REGION 1..12: note = Table B: HLA-DRB1*04:03L
TSKTTVASLINT

SEQ ID NO: 12837 - protein, 12 aa, Severe acute respiratory syndrome coronavirus 2
  REGION 1..12: note = Table B: HLA-DRB1*04:03L HLA-DQA1*05:05-B1*03:01L
KTTVASLINTLN

SEQ ID NO: 12838 - protein, 12 aa, Severe acute respiratory syndrome coronavirus 2
  REGION 1..12: note = Table B: HLA-DRB1*04:03L HLA-DRB1*04:02L HLA-DQA1*05:05-B1*03:01L HLA-DRB1*14:17L
TTVASLINTLND

SEQ ID NO: 12839 - protein, 10 aa, Severe acute respiratory syndrome coronavirus 2
  REGION 1..10: note = Table B: HLA-DRB1*04:03L HLA-DQA1*01-B1*05L HLA-DRB1*14:17L
LINTLNDLNE

SEQ ID NO: 12840 - protein, 10 aa, Severe acute respiratory syndrome coronavirus 2
  REGION 1..10: note = Table B: HLA-DRB1*04:03L HLA-DRB1*04:02L HLA-DRB1*04:05L HLA-DRB4*03:01NL HLA-DQA1*01-B1*05L HLA-DQA1*05:01-B1*02:01L HLA-DRB1*04:10L HLA-DQA1*03:01-B1*03:02L HLA-DRB1*14:54L HLA-DRB1*14:17L HLA-DRB1*16:01L
INTLNDLNET

SEQ ID NO: 12841 - protein, 12 aa, Severe acute respiratory syndrome coronavirus 2
  REGION 1..12: note = Table B: HLA-DRB1*04:03L HLA-DPA1*01:02-B1*04:01L HLA-DQA1*01:03-B1*06:01L
ETLVTMPLGYVT

SEQ ID NO: 12842 - protein, 10 aa, Severe acute respiratory syndrome coronavirus 2
  REGION 1..10: note = Table B: HLA-DRB1*04:03L HLA-DRB1*13:03L HLA-DRB1*04:02L HLA-DRB4*03:01NL HLA-DRB1*12:01L HLA-DQA1*03:01-B1*03:02L HLA-DQA1*05:05-B1*03:01L HLA-DRB1*14:17L HLA-DQA1*02:01-B1*03:03L
VTMPLGYVTH

SEQ ID NO: 12843 - protein, 11 aa, Severe acute respiratory syndrome coronavirus 2
  REGION 1..11: note = Table B: HLA-DRB1*04:03L HLA-DRB1*04:02L
MPLGYVTHGLN

SEQ ID NO: 12844 - protein, 10 aa, Severe acute respiratory syndrome coronavirus 2
  REGION 1..10: note = Table B: HLA-DRB1*04:03L HLA-DRB1*04:02L HLA-DRB4*03:01NL HLA-DQA1*03:01-B1*03:02L HLA-DRB1*14:17L HLA-DQA1*02:01-B1*03:03L
YVTHGLNLEE

SEQ ID NO: 12845 - protein, 11 aa, Severe acute respiratory syndrome coronavirus 2
  REGION 1..11: note = Table B: HLA-DRB1*04:03L
MRSLKVPATVS

SEQ ID NO: 12846 - protein, 13 aa, Severe acute respiratory syndrome coronavirus 2
  REGION 1..13: note = Table B: HLA-DRB1*04:03L
TVSVSSPDAVTAY

SEQ ID NO: 12847 - protein, 14 aa, Severe acute respiratory syndrome coronavirus 2
  REGION 1..14: note = Table B: HLA-DRB1*04:03L
VSVSSPDAVTAYNG

SEQ ID NO: 12848 - protein, 12 aa, Severe acute respiratory syndrome coronavirus 2
  REGION 1..12: note = Table B: HLA-DRB1*04:03L HLA-DRB1*04:02L HLA-DRB1*16:01L HLA-DQA1*01:03-B1*06:01L HLA-DRB1*15:01L HLA-DRB1*15:03L
AVTAYNGYLTSS

SEQ ID NO: 12849 - protein, 10 aa, Severe acute respiratory syndrome coronavirus 2
  REGION 1..10: note = Table B: HLA-DRB1*04:03L HLA-DRB1*04:02L HLA-DQA1*03:01-B1*03:02L HLA-DRB1*14:17L
YNGYLTSSSK

SEQ ID NO: 12850 - protein, 10 aa, Severe acute respiratory syndrome coronavirus 2
  REGION 1..10: note = Table B: HLA-DRB1*04:03L HLA-DRB1*13:03L HLA-DRB1*04:02L HLA-DRB4*03:01NL HLA-DQA1*03:01-B1*03:02L HLA-DRB1*14:17L HLA-DRB1*16:01L HLA-DQA1*02:01-B1*03:03L
LTSSSKTPEE

SEQ ID NO: 12851 - protein, 13 aa, Severe acute respiratory syndrome coronavirus 2
  REGION 1..13: note = Table B: HLA-DRB1*04:03L
TPEEHFIETISLA

SEQ ID NO: 12852 - protein, 11 aa, Severe acute respiratory syndrome coronavirus 2
  REGION 1..11: note = Table B: HLA-DRB1*04:03L HLA-DRB1*14:17L
EHFIETISLAG

SEQ ID NO: 12853 - protein, 11 aa, Severe acute respiratory syndrome coronavirus 2
  REGION 1..11: note = Table B: HLA-DRB1*04:03L HLA-DRB1*04:02L HLA-DQA1*05:01-B1*02:01L
ETISLAGSYKD

SEQ ID NO: 12854 - protein, 11 aa, Severe acute respiratory syndrome coronavirus 2
  REGION 1..11: note = Table B: HLA-DRB1*04:03L HLA-DRB1*04:02L HLA-DQA1*01-B1*05L HLA-DQA1*05:01-B1*02:01L HLA-DPA1*03:01-B1*105:01L HLA-DQA1*03:01-B1*03:02L HLA-DRB1*14:17L
ISLAGSYKDWS

SEQ ID NO: 12855 - protein, 12 aa, Severe acute respiratory syndrome coronavirus 2
  REGION 1..12: note = Table B: HLA-DRB1*04:03L HLA-DRB1*04:02L HLA-DQA1*05:01-B1*02:01L HLA-DQA1*03:01-B1*03:02L HLA-DRB1*16:01L HLA-DRB1*15:03L
AGSYKDWSYSGQ

SEQ ID NO: 12856 - protein, 12 aa, Severe acute respiratory syndrome coronavirus 2
  REGION 1..12: note = Table B: HLA-DRB1*04:03L HLA-DQA1*05:01-B1*02:01L HLA-DQA1*03:01-B1*03:02L
GSYKDWSYSGQS

SEQ ID NO: 12857 - protein, 11 aa, Severe acute respiratory syndrome coronavirus 2
  REGION 1..11: note = Table B: HLA-DRB1*04:03L
WSYSGQSTQLG

SEQ ID NO: 12858 - protein, 11 aa, Severe acute respiratory syndrome coronavirus 2
  REGION 1..11: note = Table B: HLA-DRB1*04:03L HLA-DRB1*01:03L HLA-DRB1*04:02L HLA-DRB1*04:05L HLA-DQA1*01:02-B1*06:02L HLA-DRB4*03:01NL HLA-DQA1*05:05-B1*03:19L HLA-DRB1*04:10L HLA-DQA1*03:01-B1*03:02L HLA-DRB1*14:54L
  REGION 1..11: note = CONT. FROM ABOVE: HLA-DQA1*05:05-B1*03:01L HLA-DRB1*14:17L HLA-D RB1*16:01L HLA-DRB1*04:08L HLA-DQA1*02:01-B1*03:03L
YSGQSTQLGIE

SEQ ID NO: 12859 - protein, 11 aa, Severe acute respiratory syndrome coronavirus 2
  REGION 1..11: note = Table B: HLA-DRB1*04:03L HLA-DQA1*01-B1*05L
KSVYYTSNPTT

SEQ ID NO: 12860 - protein, 12 aa, Severe acute respiratory syndrome coronavirus 2
  REGION 1..12: note = Table B: HLA-DRB1*04:03L HLA-DRB1*13:02L HLA-DRB1*04:02L HLA-DRB1*04:05L HLA-DRB4*03:01NL HLA-DRB1*08:04L HLA-DPA1*01:03-B1*03:01L HLA-DQA1*01-B1*05L HLA-DRB1*04:10L HLA-DRB1*14:54L HLA-DQA1*05:05-B1*03:01L HLA-DRB1*14:17L
  REGION 1..12: note = CONT. FROM ABOVE: HLA-DRB1*04:08L
YTSNPTTFHLDG

SEQ ID NO: 12861 - protein, 11 aa, Severe acute respiratory syndrome coronavirus 2
  REGION 1..11: note = Table B: HLA-DRB1*04:03L HLA-DQA1*01-B1*05L HLA-DQA1*03:01-B1*03:02L HLA-DQA1*02:01-B1*03:03L
DGEVITFDNLK

SEQ ID NO: 12862 - protein, 10 aa, Severe acute respiratory syndrome coronavirus 2
  REGION 1..10: note = Table B: HLA-DRB1*04:03L HLA-DRB1*04:02L HLA-DQA1*01-B1*05L HLA-DPA1*03:01-B1*105:01L HLA-DQA1*03:01-B1*03:02L HLA-DRB1*14:17L HLA-DQA1*01:03-B1*06:01L HLA-DQA1*02:01-B1*03:03L
EVITFDNLKT

SEQ ID NO: 12863 - protein, 11 aa, Severe acute respiratory syndrome coronavirus 2
  REGION 1..11: note = Table B: HLA-DRB1*04:03L HLA-DRB1*14:17L
ITFDNLKTLLS

SEQ ID NO: 12864 - protein, 11 aa, Severe acute respiratory syndrome coronavirus 2
  REGION 1..11: note = Table B: HLA-DRB1*04:03L HLA-DRB1*01:03L HLA-DRB1*04:02L HLA-DRB1*14:17L HLA-DRB1*04:08L
FDNLKTLLSLR

SEQ ID NO: 12865 - protein, 11 aa, Severe acute respiratory syndrome coronavirus 2
  REGION 1..11: note = Table B: HLA-DRB1*04:03L HLA-DRB1*04:02L HLA-DRB1*04:05L HLA-DRB1*12:01L HLA-DQA1*03:01-B1*03:02L HLA-DRB1*14:17L
DNLKTLLSLRE

SEQ ID NO: 12866 - protein, 14 aa, Severe acute respiratory syndrome coronavirus 2
  REGION 1..14: note = Table B: HLA-DRB1*04:03L HLA-DRB1*04:04L HLA-DRB1*04:05L HLA-DRB1*14:01L
LLSLREVRTIKVFT

SEQ ID NO: 12867 - protein, 12 aa, Severe acute respiratory syndrome coronavirus 2
  REGION 1..12: note = Table B: HLA-DRB1*04:03L HLA-DRB1*01:03L HLA-DRB1*01:02L HLA-DRB1*14:01L HLA-DRB1*12:01L HLA-DRB1*14:17L HLA-DRB1*16:01L HLA-DRB1*04:08L HLA-DRB1*15:03L
LREVRTIKVFTT

SEQ ID NO: 12868 - protein, 10 aa, Severe acute respiratory syndrome coronavirus 2
  REGION 1..10: note = Table B: HLA-DRB1*04:03L HLA-DQA1*03:01-B1*03:02L HLA-DQA1*01:03-B1*06:01L HLA-DQA1*02:01-B1*03:03L
TIKVFTTVDN

SEQ ID NO: 12869 - protein, 10 aa, Severe acute respiratory syndrome coronavirus 2
  REGION 1..10: note = Table B: HLA-DRB1*04:03L HLA-DQA1*03:01-B1*03:02L HLA-DQA1*01:03-B1*06:01L HLA-DQA1*02:01-B1*03:03L
TTVDNINLHT

SEQ ID NO: 12870 - protein, 10 aa, Severe acute respiratory syndrome coronavirus 2
  REGION 1..10: note = Table B: HLA-DRB1*04:03L HLA-DRB1*04:02L HLA-DQA1*01-B1*05L HLA-DQA1*05:01-B1*02:01L HLA-DQA1*03:01-B1*03:02L HLA-DRB1*14:17L HLA-DQA1*02:01-B1*03:03L
NLHTQVVDMS

SEQ ID NO: 12871 - protein, 13 aa, Severe acute respiratory syndrome coronavirus 2
  REGION 1..13: note = Table B: HLA-DRB1*04:03L HLA-DRB1*04:02L HLA-DRB1*04:05L HLA-DRB4*03:01NL HLA-DRB1*04:10L HLA-DQA1*03:01-B1*03:02L HLA-DRB1*14:54L HLA-DRB1*14:17L HLA-DQA1*02:01-B1*03:03L
TQVVDMSMTYGQQ

SEQ ID NO: 12872 - protein, 12 aa, Severe acute respiratory syndrome coronavirus 2
  REGION 1..12: note = Table B: HLA-DRB1*04:03L
YLDGADVTKIKP

SEQ ID NO: 12873 - protein, 11 aa, Severe acute respiratory syndrome coronavirus 2
  REGION 1..11: note = Table B: HLA-DRB1*04:03L HLA-DRB1*01:03L HLA-DQA1*03:01-B1*03:02L HLA-DRB1*14:17L
IKPHNSHEGKT

SEQ ID NO: 12874 - protein, 11 aa, Severe acute respiratory syndrome coronavirus 2
  REGION 1..11: note = Table B: HLA-DRB1*04:03L HLA-DRB1*04:02L HLA-DRB1*04:05L HLA-DRB1*04:10L HLA-DRB1*14:17L HLA-DRB1*16:01L HLA-DQA1*02:01-B1*03:03L
KTFYVLPNDDT

SEQ ID NO: 12875 - protein, 10 aa, Severe acute respiratory syndrome coronavirus 2
  REGION 1..10: note = Table B: HLA-DRB1*04:03L HLA-DRB1*13:02L HLA-DRB1*13:03L HLA-DRB1*01:03L HLA-DRB1*04:02L HLA-DRB4*03:01NL HLA-DRB3*02:01L HLA-DRB1*14:01L HLA-DRB1*08:01L HLA-DRB5*01:01L HLA-DQA1*01-B1*05L HLA-DRB1*12:01L HLA-DPA1*03:01-B1*105:01L
  REGION 1..10: note = CONT. FROM ABOVE: HLA-DQA1*03:01-B1*03:02L HLA-DRB1*14:54L HLA-D QA1*05:05-B1*03:01L HLA-DRB1*14:17L HLA-DRB1*16:01L HLA-DQA1*01: 03-B1*06:01L HLA-DQA1*02:01-B1*03:03L
YVLPNDDTLR

SEQ ID NO: 12876 - protein, 11 aa, Severe acute respiratory syndrome coronavirus 2
  REGION 1..11: note = Table B: HLA-DRB1*04:03L HLA-DRB1*13:03L HLA-DRB1*04:02L HLA-DQA1*01-B1*05L HLA-DQA1*05:01-B1*02:01L HLA-DRB1*14:17L
VLPNDDTLRVE

SEQ ID NO: 12877 - protein, 13 aa, Severe acute respiratory syndrome coronavirus 2
  REGION 1..13: note = Table B: HLA-DRB1*04:03L HLA-DRB1*13:02L HLA-DRB1*04:04L HLA-DRB1*04:05L
DDTLRVEAFEYYH

SEQ ID NO: 12878 - protein, 11 aa, Severe acute respiratory syndrome coronavirus 2
  REGION 1..11: note = Table B: HLA-DRB1*04:03L HLA-DQA1*03:01-B1*03:02L HLA-DPA1*01:02-B1*04:01L
AFEYYHTTDPS

SEQ ID NO: 12879 - protein, 12 aa, Severe acute respiratory syndrome coronavirus 2
  REGION 1..12: note = Table B: HLA-DRB1*04:03L HLA-DRB1*04:05L HLA-DRB1*01:02L HLA-DRB1*14:17L HLA-DRB1*04:08L HLA-DQA1*02:01-B1*03:03L
LGRYMSALNHTK

SEQ ID NO: 12880 - protein, 11 aa, Severe acute respiratory syndrome coronavirus 2
  REGION 1..11: note = Table B: HLA-DRB1*04:03L HLA-DRB1*04:02L HLA-DRB4*03:01NL HLA-DRB1*12:01L HLA-DQA1*03:01-B1*03:02L HLA-DQA1*05:05-B1*03:01L HLA-DRB1*14:17L HLA-DQA1*02:01-B1*03:03L
YPQVNGLTSIK

SEQ ID NO: 12881 - protein, 14 aa, Severe acute respiratory syndrome coronavirus 2
  REGION 1..14: note = Table B: HLA-DRB1*04:03L HLA-DRB1*13:02L HLA-DRB1*01:03L HLA-DRB1*04:05L HLA-DRB1*01:02L HLA-DPA1*01:03-B1*03:01L HLA-DRB1*14:01L HLA-DRB1*12:01L HLA-DPA1*02:01-B1*13:01L HLA-DPA1*03:01-B1*105:01L HLA-DPA1*01:03-B1*104:01L
  REGION 1..14: note = CONT. FROM ABOVE: HLA-DRB1*16:01L HLA-DRB1*04:08L
TSIKWADNNCYLAT

SEQ ID NO: 12882 - protein, 11 aa, Severe acute respiratory syndrome coronavirus 2
  REGION 1..11: note = Table B: HLA-DRB1*04:03L HLA-DQA1*01:02-B1*06:02L HLA-DRB1*01:02L HLA-DQA1*05:01-B1*02:01L HLA-DRB1*12:01L HLA-DPA1*03:01-B1*105:01L HLA-DPA1*01:02-B1*04:01L HLA-DRB1*16:01L HLA-DQA1*01:03-B1*06:01L
ALLTLQQIELK

SEQ ID NO: 12883 - protein, 12 aa, Severe acute respiratory syndrome coronavirus 2
  REGION 1..12: note = Table B: HLA-DRB1*04:03L HLA-DRB1*13:03L HLA-DRB1*04:02L HLA-DRB1*04:05L HLA-DQA1*01:02-B1*06:02L HLA-DRB4*03:01NL HLA-DRB1*08:04L HLA-DRB1*14:01L HLA-DRB1*08:01L HLA-DRB1*04:10L HLA-DRB1*12:01L HLA-DQA1*03:01-B1*03:02L HLA-DRB1*14:54L
  REGION 1..12: note = CONT. FROM ABOVE: HLA-DRB1*14:17L HLA-DRB1*16:01L HLA-DRB1*04:08 L HLA-DQA1*02:01-B1*03:03L
LQQIELKFNPPA

SEQ ID NO: 12884 - protein, 11 aa, Severe acute respiratory syndrome coronavirus 2
  REGION 1..11: note = Table B: HLA-DRB1*04:03L HLA-DRB1*04:02L HLA-DRB1*14:01L HLA-DRB1*14:17L
IELKFNPPALQ

SEQ ID NO: 12885 - protein, 11 aa, Severe acute respiratory syndrome coronavirus 2
  REGION 1..11: note = Table B: HLA-DRB1*04:03L
LKFNPPALQDA

SEQ ID NO: 12886 - protein, 10 aa, Severe acute respiratory syndrome coronavirus 2
  REGION 1..10: note = Table B: HLA-DRB1*04:03L HLA-DRB1*01:03L HLA-DQA1*03:01-B1*03:02L HLA-DRB1*16:01L HLA-DQA1*02:01-B1*03:03L
YRARAGEAAN

SEQ ID NO: 12887 - protein, 13 aa, Severe acute respiratory syndrome coronavirus 2
  REGION 1..13: note = Table B: HLA-DRB1*04:03L HLA-DRB1*13:02L HLA-DRB1*04:05L HLA-DQA1*02:01-B1*03:03L
GDVRETMSYLFQH

SEQ ID NO: 12888 - protein, 12 aa, Severe acute respiratory syndrome coronavirus 2
  REGION 1..12: note = Table B: HLA-DRB1*04:03L HLA-DRB1*04:05L HLA-DQA1*01:02-B1*06:02L HLA-DPA1*03:01-B1*04:02L HLA-DPA1*03:01-B1*105:01L HLA-DPA1*01:02-B1*04:01L HLA-DRB1*15:03L
TMSYLFQHANLD

SEQ ID NO: 12889 - protein, 11 aa, Severe acute respiratory syndrome coronavirus 2
  REGION 1..11: note = Table B: HLA-DRB1*04:03L HLA-DQA1*03:01-B1*03:02L
GQQQTTLKGVE

SEQ ID NO: 12890 - protein, 12 aa, Severe acute respiratory syndrome coronavirus 2
  REGION 1..12: note = Table B: HLA-DRB1*04:03L HLA-DPA1*03:01-B1*04:02L
VEAVMYMGTLSY

SEQ ID NO: 12891 - protein, 11 aa, Severe acute respiratory syndrome coronavirus 2
  REGION 1..11: note = Table B: HLA-DRB1*04:03L
AVMYMGTLSYE

SEQ ID NO: 12892 - protein, 11 aa, Severe acute respiratory syndrome coronavirus 2
  REGION 1..11: note = Table B: HLA-DRB1*04:03L HLA-DRB1*14:17L
VMYMGTLSYEQ

SEQ ID NO: 12893 - protein, 11 aa, Severe acute respiratory syndrome coronavirus 2
  REGION 1..11: note = Table B: HLA-DRB1*04:03L HLA-DRB1*04:05L
MYMGTLSYEQF

SEQ ID NO: 12894 - protein, 11 aa, Severe acute respiratory syndrome coronavirus 2
  REGION 1..11: note = Table B: HLA-DRB1*04:03L HLA-DRB1*13:03L HLA-DRB1*04:02L HLA-DRB1*04:05L HLA-DRB4*03:01NL HLA-DRB1*04:10L HLA-DRB1*14:54L HLA-DRB1*14:17L HLA-DRB1*16:01L HLA-DRB1*04:08L
SPFVMMSAPPA

SEQ ID NO: 12895 - protein, 10 aa, Severe acute respiratory syndrome coronavirus 2
  REGION 1..10: note = Table B: HLA-DRB1*04:03L HLA-DRB1*01:03L HLA-DRB1*04:02L HLA-DRB1*04:04L HLA-DRB1*04:05L HLA-DRB1*01:02L HLA-DRB4*03:01NL HLA-DRB1*04:10L HLA-DRB1*12:01L HLA-DRB1*14:54L HLA-DRB1*14:17L HLA-DRB1*10:01L HLA-DRB1*16:01L HLA-DRB1*04:08L HLA-DRB1*15:03L
FVMMSAPPAQ

SEQ ID NO: 12896 - protein, 14 aa, Severe acute respiratory syndrome coronavirus 2
  REGION 1..14: note = Table B: HLA-DRB1*04:03L HLA-DRB1*13:02L HLA-DRB1*01:03L HLA-DRB1*04:05L HLA-DRB1*01:02L HLA-DRB1*08:04L HLA-DRB1*14:01L HLA-DRB1*11:04L HLA-DRB1*08:01L HLA-DRB1*11:01L HLA-DRB3*01:01L HLA-DPA1*01:03-B1*02:01L HLA-DPA1*01:02-B1*04:01L
  REGION 1..14: note = CONT. FROM ABOVE: HLA-DRB1*04:08L HLA-DQA1*02:01-B1*03:03L
ASEYTGNYQCGHYK

SEQ ID NO: 12897 - protein, 12 aa, Severe acute respiratory syndrome coronavirus 2
  REGION 1..12: note = Table B: HLA-DRB1*04:03L HLA-DRB1*01:03L HLA-DRB1*04:02L HLA-DQA1*01:02-B1*06:02L HLA-DRB1*01:02L HLA-DPA1*03:01-B1*105:01L HLA-DQA1*03:01-B1*03:02L HLA-DRB1*14:17L HLA-DPA1*01:02-B1*04:01L HLA-DRB1*16:01L
  REGION 1..12: note = CONT. FROM ABOVE: HLA-DQA1*01:03-B1*06:01L HLA-DRB1*04:08L HLA-D QA1*02:01-B1*03:03L
ITSKETLYCIDG

SEQ ID NO: 12898 - protein, 13 aa, Severe acute respiratory syndrome coronavirus 2
  REGION 1..13: note = Table B: HLA-DRB1*04:03L HLA-DRB1*01:02L HLA-DRB1*12:01L HLA-DRB1*15:03L
KETLYCIDGALLT

SEQ ID NO: 12899 - protein, 11 aa, Severe acute respiratory syndrome coronavirus 2
  REGION 1..11: note = Table B: HLA-DRB1*04:03L HLA-DRB1*01:03L HLA-DRB1*04:02L HLA-DQA1*01:01-B1*05:01L HLA-DQA1*05:01-B1*02:01L HLA-DPA1*01:03-B1*04:02L HLA-DPA1*03:01-B1*105:01L HLA-DRB1*04:08L
IDGALLTKSSE

SEQ ID NO: 12900 - protein, 14 aa, Severe acute respiratory syndrome coronavirus 2
  REGION 1..14: note = Table B: HLA-DRB1*04:03L HLA-DRB1*04:02L HLA-DRB1*04:05L HLA-DRB1*01:02L HLA-DRB1*12:01L HLA-DRB1*16:01L HLA-DRB1*15:03L
DGALLTKSSEYKGP

SEQ ID NO: 12901 - protein, 14 aa, Severe acute respiratory syndrome coronavirus 2
  REGION 1..14: note = Table B: HLA-DRB1*04:03L HLA-DRB1*04:02L HLA-DRB1*01:02L
GALLTKSSEYKGPI

SEQ ID NO: 12902 - protein, 13 aa, Severe acute respiratory syndrome coronavirus 2
  REGION 1..13: note = Table B: HLA-DRB1*04:03L HLA-DRB1*04:02L HLA-DRB1*16:01L HLA-DRB1*15:03L
LTKSSEYKGPITD

SEQ ID NO: 12903 - protein, 12 aa, Severe acute respiratory syndrome coronavirus 2
  REGION 1..12: note = Table B: HLA-DRB1*04:03L HLA-DRB1*04:02L HLA-DQA1*03:01-B1*03:02L HLA-DRB1*14:17L
TDVFYKENSYTT

SEQ ID NO: 12904 - protein, 11 aa, Severe acute respiratory syndrome coronavirus 2
  REGION 1..11: note = Table B: HLA-DRB1*04:03L
VFYKENSYTTT

SEQ ID NO: 12905 - protein, 12 aa, Severe acute respiratory syndrome coronavirus 2
  REGION 1..12: note = Table B: HLA-DRB1*04:03L
YKENSYTTTIKP

SEQ ID NO: 12906 - protein, 10 aa, Severe acute respiratory syndrome coronavirus 2
  REGION 1..10: note = Table B: HLA-DRB1*04:03L HLA-DRB1*01:03L HLA-DRB1*04:05L HLA-DQA1*01:02-B1*06:02L HLA-DRB1*01:01L HLA-DQA1*01:01-B1*05:01L HLA-DPA1*02:01-B1*13:01M HLA-DRB1*16:01L HLA-DQA1*01:03-B1*06:01M
  REGION 1..10: note = CONT. FROM ABOVE: HLA-DQA1*02:01-B1*03:03L HLA-DRB1*15:03L
NYYKKDNSYF

SEQ ID NO: 12907 - protein, 14 aa, Severe acute respiratory syndrome coronavirus 2
  REGION 1..14: note = Table B: HLA-DRB1*04:03L HLA-DRB1*04:02L HLA-DRB1*04:05L HLA-DRB1*01:02L HLA-DQA1*01:01-B1*05:01L HLA-DRB1*12:01L HLA-DPA1*03:01-B1*105:01L HLA-DRB1*04:08L
YKKDNSYFTEQPID

SEQ ID NO: 12908 - protein, 12 aa, Severe acute respiratory syndrome coronavirus 2
  REGION 1..12: note = Table B: HLA-DRB1*04:03L HLA-DRB1*13:03L HLA-DRB1*04:02L HLA-DQA1*01:02-B1*06:02L HLA-DRB4*03:01NL HLA-DRB3*02:01L HLA-DPA1*03:01-B1*04:02L HLA-DPA1*01:03-B1*04:01L HLA-DRB1*09:01L HLA-DRB1*12:01L HLA-DPA1*03:01-B1*105:01L
  REGION 1..12: note = CONT. FROM ABOVE: HLA-DPA1*01:02-B1*04:01L
DNSYFTEQPIDL

SEQ ID NO: 12909 - protein, 10 aa, Severe acute respiratory syndrome coronavirus 2
  REGION 1..10: note = Table B: HLA-DRB1*04:03L
TEQPIDLVPN

SEQ ID NO: 12910 - protein, 11 aa, Severe acute respiratory syndrome coronavirus 2
  REGION 1..11: note = Table B: HLA-DRB1*04:03L
PIDLVPNQPYP

SEQ ID NO: 12911 - protein, 10 aa, Severe acute respiratory syndrome coronavirus 2
  REGION 1..10: note = Table B: HLA-DRB1*04:03L HLA-DRB1*13:03L HLA-DRB1*04:02L HLA-DQA1*03:01-B1*03:02L HLA-DRB1*14:17L
VPNQPYPNAS

SEQ ID NO: 12912 - protein, 10 aa, Severe acute respiratory syndrome coronavirus 2
  REGION 1..10: note = Table B: HLA-DRB1*04:03L HLA-DQA1*01-B1*05L HLA-DQA1*03:01-B1*03:02L HLA-DQA1*02:01-B1*03:03L
QPYPNASFDN

SEQ ID NO: 12913 - protein, 10 aa, Severe acute respiratory syndrome coronavirus 2
  REGION 1..10: note = Table B: HLA-DRB1*04:03L HLA-DRB1*01:03L HLA-DRB1*04:05M HLA-DQA1*01:02-B1*06:02L HLA-DRB1*01:01L HLA-DRB1*01:02L HLA-DQA1*01:01-B1*05:01L HLA-DPA1*02:01-B1*13:01M HLA-DPA1*03:01-B1*105:01L HLA-DRB1*16:01L
  REGION 1..10: note = CONT. FROM ABOVE: HLA-DQA1*01:03-B1*06:01M HLA-DRB1*15:03L
PYPNASFDNF

SEQ ID NO: 12914 - protein, 10 aa, Severe acute respiratory syndrome coronavirus 2
  REGION 1..10: note = Table B: HLA-DRB1*04:03L HLA-DQA1*01-B1*05L
NIKFADDLNQ

SEQ ID NO: 12915 - protein, 12 aa, Severe acute respiratory syndrome coronavirus 2
  REGION 1..12: note = Table B: HLA-DRB1*04:03L HLA-DRB1*01:03L HLA-DRB1*04:02L HLA-DRB1*01:02L HLA-DRB1*14:01L HLA-DRB1*12:01L HLA-DRB1*14:17L HLA-DRB1*16:01L HLA-DRB1*04:08L HLA-DQA1*02:01-B1*03:03L HLA-DRB1*15:03L
DLNQLTGYKKPA

SEQ ID NO: 12916 - protein, 11 aa, Severe acute respiratory syndrome coronavirus 2
  REGION 1..11: note = Table B: HLA-DRB1*04:03L HLA-DRB1*13:03L HLA-DRB1*04:02L HLA-DRB1*14:01L HLA-DQA1*03:01-B1*03:02L HLA-DRB1*14:17L HLA-DRB1*16:01L HLA-DQA1*02:01-B1*03:03L
NQLTGYKKPAS

SEQ ID NO: 12917 - protein, 11 aa, Severe acute respiratory syndrome coronavirus 2
  REGION 1..11: note = Table B: HLA-DRB1*04:03L
LKVTFFPDLNG

SEQ ID NO: 12918 - protein, 11 aa, Severe acute respiratory syndrome coronavirus 2
  REGION 1..11: note = Table B: HLA-DRB1*04:03L HLA-DRB1*13:03L HLA-DRB1*01:03L HLA-DRB1*04:02L HLA-DRB1*04:05L HLA-DRB4*03:01NL HLA-DRB1*14:54L HLA-DRB1*14:17L HLA-DRB1*16:01L
FFPDLNGDVVA

SEQ ID NO: 12919 - protein, 12 aa, Severe acute respiratory syndrome coronavirus 2
  REGION 1..12: note = Table B: HLA-DRB1*04:03L HLA-DRB1*04:02L HLA-DRB1*14:54L HLA-DRB1*14:17L
GDVVAIDYKHYT

SEQ ID NO: 12920 - protein, 12 aa, Severe acute respiratory syndrome coronavirus 2
  REGION 1..12: note = Table B: HLA-DRB1*04:03L HLA-DRB1*04:02L HLA-DRB1*01:02L HLA-DRB1*08:04L HLA-DRB3*01:01L HLA-DRB1*14:54L HLA-DRB1*14:17L
DVVAIDYKHYTP

SEQ ID NO: 12921 - protein, 11 aa, Severe acute respiratory syndrome coronavirus 2
  REGION 1..11: note = Table B: HLA-DRB1*04:03L HLA-DRB1*13:02L HLA-DRB1*13:03L HLA-DRB1*01:03L HLA-DRB1*04:02L HLA-DRB4*03:01NL HLA-DRB1*14:01L HLA-DRB1*12:01L HLA-DQA1*03:01-B1*03:02L HLA-DRB1*14:54L HLA-DRB1*14:17L HLA-DPA1*01:02-B1*04:01L HLA-DRB1*16:01L
  REGION 1..11: note = CONT. FROM ABOVE: HLA-DRB1*04:08L
VAIDYKHYTPS

SEQ ID NO: 12922 - protein, 11 aa, Severe acute respiratory syndrome coronavirus 2
  REGION 1..11: note = Table B: HLA-DRB1*04:03L HLA-DRB1*04:02L HLA-DQA1*03:01-B1*03:02L HLA-DRB1*14:17L
PIVWHVNNATN

SEQ ID NO: 12923 - protein, 10 aa, Severe acute respiratory syndrome coronavirus 2
  REGION 1..10: note = Table B: HLA-DRB1*04:03L HLA-DRB1*01:03L HLA-DRB1*04:02L HLA-DQA1*03:01-B1*03:02L HLA-DRB1*14:17L HLA-DRB1*16:01L HLA-DQA1*02:01-B1*03:03L
TNKATYKPNT

SEQ ID NO: 12924 - protein, 10 aa, Severe acute respiratory syndrome coronavirus 2
  REGION 1..10: note = Table B: HLA-DRB1*04:03L HLA-DQA1*03:01-B1*03:02L
KPVETSNSFD

SEQ ID NO: 12925 - protein, 10 aa, Severe acute respiratory syndrome coronavirus 2
  REGION 1..10: note = Table B: HLA-DRB1*04:03L HLA-DQA1*03:01-B1*03:02L HLA-DRB1*14:17L
SFDVLKSEDA

SEQ ID NO: 12926 - protein, 10 aa, Severe acute respiratory syndrome coronavirus 2
  REGION 1..10: note = Table B: HLA-DRB1*04:03L HLA-DRB1*14:17L
FDVLKSEDAQ

SEQ ID NO: 12927 - protein, 10 aa, Severe acute respiratory syndrome coronavirus 2
  REGION 1..10: note = Table B: HLA-DRB1*04:03L HLA-DRB1*04:02L HLA-DQA1*01-B1*05L HLA-DQA1*03:01-B1*03:02L HLA-DRB1*14:17L HLA-DQA1*02:01-B1*03:03L
DVLKSEDAQG

SEQ ID NO: 12928 - protein, 11 aa, Severe acute respiratory syndrome coronavirus 2
  REGION 1..11: note = Table B: HLA-DRB1*04:03L HLA-DRB1*04:02L HLA-DRB1*04:05L HLA-DRB4*03:01NL HLA-DQA1*01-B1*05L HLA-DQA1*05:01-B1*02:01L HLA-DQA1*03:01-B1*03:02L HLA-DRB1*14:17L HLA-DRB1*16:01L HLA-DQA1*01:03-B1*06:01L HLA-DQA1*02:01-B1*03:03L
VLKSEDAQGMD

SEQ ID NO: 12929 - protein, 10 aa, Severe acute respiratory syndrome coronavirus 2
  REGION 1..10: note = Table B: HLA-DRB1*04:03L HLA-DQA1*01-B1*05L HLA-DQA1*05:01-B1*02:01L HLA-DQA1*03:01-B1*03:02L HLA-DQA1*02:01-B1*03:03L
LKPVSEEVVE

SEQ ID NO: 12930 - protein, 12 aa, Severe acute respiratory syndrome coronavirus 2
  REGION 1..12: note = Table B: HLA-DRB1*04:03L HLA-DRB1*04:05L HLA-DRB1*08:04L HLA-DRB1*11:03L HLA-DRB1*04:10L HLA-DPA1*01:02-B1*04:01L HLA-DRB1*07:01L HLA-DRB1*10:01L HLA-DRB1*04:08L
SEEVVENPTIQK

SEQ ID NO: 12931 - protein, 12 aa, Severe acute respiratory syndrome coronavirus 2
  REGION 1..12: note = Table B: HLA-DRB1*04:03L HLA-DQA1*01:01-B1*05:01L HLA-DRB1*12:01L
VENPTIQKDVLE

SEQ ID NO: 12932 - protein, 14 aa, Severe acute respiratory syndrome coronavirus 2
  REGION 1..14: note = Table B: HLA-DRB1*04:03L HLA-DRB1*13:02L HLA-DRB1*01:03L HLA-DRB1*04:05L HLA-DQA1*01:02-B1*06:02L HLA-DRB1*01:02L HLA-DRB1*03:01L HLA-DRB1*14:01L HLA-DRB1*14:02L HLA-DRB1*08:01L HLA-DRB1*12:01L HLA-DRB3*01:01L HLA-DPA1*02:01-B1*13:01L
  REGION 1..14: note = CONT. FROM ABOVE: HLA-DPA1*03:01-B1*105:01L HLA-DPA1*01:02-B1*04 :01L HLA-DRB1*16:01L HLA-DQA1*01:03-B1*06:01L HLA-DRB1*04:08L HL A-DRB1*15:03L
NPTIQKDVLECNVK

SEQ ID NO: 12933 - protein, 12 aa, Severe acute respiratory syndrome coronavirus 2
  REGION 1..12: note = Table B: HLA-DRB1*04:03L
TTEVVGDIILKP

SEQ ID NO: 12934 - protein, 12 aa, Severe acute respiratory syndrome coronavirus 2
  REGION 1..12: note = Table B: HLA-DRB1*04:03L HLA-DRB1*04:02L
TEVVGDIILKPA

SEQ ID NO: 12935 - protein, 10 aa, Severe acute respiratory syndrome coronavirus 2
  REGION 1..10: note = Table B: HLA-DRB1*04:03L HLA-DRB1*04:02L HLA-DQA1*03:01-B1*03:02L HLA-DRB1*14:17L HLA-DQA1*02:01-B1*03:03L
DIILKPANNS

SEQ ID NO: 12936 - protein, 10 aa, Severe acute respiratory syndrome coronavirus 2
  REGION 1..10: note = Table B: HLA-DRB1*04:03L HLA-DRB1*04:02L HLA-DQA1*03:01-B1*03:02L HLA-DRB1*14:17L
ILKPANNSLK

SEQ ID NO: 12937 - protein, 12 aa, Severe acute respiratory syndrome coronavirus 2
  REGION 1..12: note = Table B: HLA-DRB1*04:03L HLA-DQA1*01:02-B1*06:02L HLA-DRB1*15:03L
NSLKITEEVGHT

SEQ ID NO: 12938 - protein, 10 aa, Severe acute respiratory syndrome coronavirus 2
  REGION 1..10: note = Table B: HLA-DRB1*04:03L HLA-DRB1*04:02L HLA-DQA1*03:01-B1*03:02L HLA-DRB1*14:17L HLA-DRB1*16:01L HLA-DQA1*01:03-B1*06:01L HLA-DQA1*02:01-B1*03:03L
KITEEVGHTD

SEQ ID NO: 12939 - protein, 11 aa, Severe acute respiratory syndrome coronavirus 2
  REGION 1..11: note = Table B: HLA-DRB1*04:03L HLA-DQA1*05:01-B1*02:01L HLA-DQA1*03:01-B1*03:02L HLA-DQA1*01:03-B1*06:01L
DLMAAYVDNSS

SEQ ID NO: 12940 - protein, 10 aa, Severe acute respiratory syndrome coronavirus 2
  REGION 1..10: note = Table B: HLA-DRB1*04:03L HLA-DQA1*01-B1*05L
AAYVDNSSLT

SEQ ID NO: 12941 - protein, 10 aa, Severe acute respiratory syndrome coronavirus 2
  REGION 1..10: note = Table B: HLA-DRB1*04:03L HLA-DRB1*04:02L HLA-DRB4*03:01NL HLA-DQA1*03:01-B1*03:02L HLA-DRB1*14:17L HLA-DQA1*01:03-B1*06:01L HLA-DQA1*02:01-B1*03:03L
NSSLTIKKPN

SEQ ID NO: 12942 - protein, 10 aa, Severe acute respiratory syndrome coronavirus 2
  REGION 1..10: note = Table B: HLA-DRB1*04:03L HLA-DRB1*04:02L HLA-DQA1*03:01-B1*03:02L HLA-DRB1*14:17L HLA-DQA1*01:03-B1*06:01L HLA-DQA1*02:01-B1*03:03L
SSLTIKKPNE

SEQ ID NO: 12943 - protein, 10 aa, Severe acute respiratory syndrome coronavirus 2
  REGION 1..10: note = Table B: HLA-DRB1*04:03L HLA-DRB1*04:02L HLA-DRB1*14:17L
VLGLKTLATH

SEQ ID NO: 12944 - protein, 11 aa, Severe acute respiratory syndrome coronavirus 2
  REGION 1..11: note = Table B: HLA-DRB1*04:03L HLA-DRB1*01:02L HLA-DRB1*15:03L
GLKTLATHGLA

SEQ ID NO: 12945 - protein, 11 aa, Severe acute respiratory syndrome coronavirus 2
  REGION 1..11: note = Table B: HLA-DRB1*04:03L HLA-DRB1*01:02L HLA-DRB1*14:17L
LKTLATHGLAA

SEQ ID NO: 12946 - protein, 12 aa, Severe acute respiratory syndrome coronavirus 2
  REGION 1..12: note = Table B: HLA-DRB1*04:03L
TLATHGLAAVNS

SEQ ID NO: 12947 - protein, 11 aa, Severe acute respiratory syndrome coronavirus 2
  REGION 1..11: note = Table B: HLA-DRB1*04:03L HLA-DQA1*05:01-B1*02:01L HLA-DRB1*12:01L HLA-DQA1*03:01-B1*03:02L
GLAAVNSVPWD

SEQ ID NO: 12948 - protein, 11 aa, Severe acute respiratory syndrome coronavirus 2
  REGION 1..11: note = Table B: HLA-DRB1*04:03L HLA-DQA1*02:01-B1*03:03L
LAAVNSVPWDT

SEQ ID NO: 12949 - protein, 10 aa, Severe acute respiratory syndrome coronavirus 2
  REGION 1..10: note = Table B: HLA-DRB1*04:03L HLA-DRB1*04:02L HLA-DQA1*01-B1*05L HLA-DQA1*03:01-B1*03:02L HLA-DQA1*02:01-B1*03:03L
IANYAKPFLN

SEQ ID NO: 12950 - protein, 10 aa, Severe acute respiratory syndrome coronavirus 2
  REGION 1..10: note = Table B: HLA-DRB1*04:03L HLA-DQA1*03:01-B1*03:02L HLA-DRB1*14:17L HLA-DQA1*02:01-B1*03:03L
LNKVVSTTTN

SEQ ID NO: 12951 - protein, 11 aa, Severe acute respiratory syndrome coronavirus 2
  REGION 1..11: note = Table B: HLA-DRB1*04:03L HLA-DRB1*12:01L HLA-DRB1*16:01L
NKVVSTTTNIV

SEQ ID NO: 12952 - protein, 13 aa, Severe acute respiratory syndrome coronavirus 2
  REGION 1..13: note = Table B: HLA-DRB1*04:03L HLA-DQA1*01:02-B1*06:02L HLA-DRB4*03:01NL HLA-DRB1*08:77L HLA-DPA1*01:03-B1*03:01L HLA-DPA1*03:01-B1*04:02L HLA-DRB1*09:01L HLA-DRB1*12:02L HLA-DPA1*03:01-B1*105:01L
NSRIKASMPTTIA

SEQ ID NO: 12953 - protein, 10 aa, Severe acute respiratory syndrome coronavirus 2
  REGION 1..10: note = Table B: HLA-DRB1*04:03L HLA-DRB1*04:02L HLA-DQA1*03:01-B1*03:02L HLA-DRB1*14:17L
SMPTTIAKNT

SEQ ID NO: 12954 - protein, 10 aa, Severe acute respiratory syndrome coronavirus 2
  REGION 1..10: note = Table B: HLA-DRB1*04:03L HLA-DRB1*13:03L HLA-DRB1*01:03L HLA-DQA1*03:01-B1*03:02L HLA-DRB1*14:17L HLA-DRB1*16:01L HLA-DQA1*02:01-B1*03:03L
NYLKSPNFSK

SEQ ID NO: 12955 - protein, 12 aa, Severe acute respiratory syndrome coronavirus 2
  REGION 1..12: note = Table B: HLA-DRB1*04:03L HLA-DRB1*13:02L HLA-DRB1*01:02L HLA-DRB3*02:01L HLA-DPA1*01:03-B1*03:01L HLA-DPA1*03:01-B1*04:02L HLA-DRB1*14:01L HLA-DRB1*12:01L HLA-DQA1*05:05-B1*03:01L HLA-DRB1*16:01L HLA-DRB1*15:03L
SPNFSKLINIII

SEQ ID NO: 12956 - protein, 11 aa, Severe acute respiratory syndrome coronavirus 2
  REGION 1..11: note = Table B: HLA-DRB1*04:03L HLA-DRB1*14:17L
GSLIYSTAALG

SEQ ID NO: 12957 - protein, 11 aa, Severe acute respiratory syndrome coronavirus 2
  REGION 1..11: note = Table B: HLA-DRB1*04:03L HLA-DQA1*01:02-B1*06:02L HLA-DQA1*05:05-B1*03:01L HLA-DRB1*14:17L HLA-DQA1*01:03-B1*06:01L
AALGVLMSNLG

SEQ ID NO: 12958 - protein, 10 aa, Severe acute respiratory syndrome coronavirus 2
  REGION 1..10: note = Table B: HLA-DRB1*04:03L HLA-DRB1*14:17L
VLMSNLGMPS

SEQ ID NO: 12959 - protein, 10 aa, Severe acute respiratory syndrome coronavirus 2
  REGION 1..10: note = Table B: HLA-DRB1*04:03L HLA-DRB1*14:17L
YLNSTNVTIA

SEQ ID NO: 12960 - protein, 13 aa, Severe acute respiratory syndrome coronavirus 2
  REGION 1..13: note = Table B: HLA-DRB1*04:03L HLA-DQA1*01:02-B1*06:02L HLA-DRB1*01:02L HLA-DQA1*05:05-B1*03:19L HLA-DQA1*05:01-B1*02:01L HLA-DRB1*12:01L HLA-DPA1*03:01-B1*105:01L HLA-DQA1*05:05-B1*03:01L
  REGION 1..13: note = CONT. FROM ABOVE: HLA-DRB1*14:17L HLA-DQA1*01:03-B1*06:01L HLA-D QA1*02:01-B1*03:03L HLA-DRB1*15:03L
NVTIATYCTGSIP

SEQ ID NO: 12961 - protein, 12 aa, Severe acute respiratory syndrome coronavirus 2
  REGION 1..12: note = Table B: HLA-DRB1*04:03L HLA-DRB1*04:02L HLA-DRB1*04:05L HLA-DRB4*03:01NL HLA-DQA1*01-B1*05L HLA-DQA1*05:01-B1*02:01L HLA-DRB1*04:10L HLA-DQA1*03:01-B1*03:02L HLA-DRB1*14:54L HLA-DRB1*14:17L HLA-DRB1*16:01L HLA-DQA1*02:01-B1*03:03L
LSGLDSLDTYPS

SEQ ID NO: 12962 - protein, 12 aa, Severe acute respiratory syndrome coronavirus 2
  REGION 1..12: note = Table B: HLA-DRB1*04:03L HLA-DRB1*14:17L
SGLDSLDTYPSL

SEQ ID NO: 12963 - protein, 11 aa, Severe acute respiratory syndrome coronavirus 2
  REGION 1..11: note = Table B: HLA-DRB1*04:03L HLA-DRB1*04:02L HLA-DRB1*04:05L HLA-DQA1*01-B1*05L HLA-DQA1*05:01-B1*02:01L HLA-DRB1*04:10L HLA-DQA1*03:01-B1*03:02L HLA-DRB1*14:17L HLA-DRB1*16:01L
LDSLDTYPSLE

SEQ ID NO: 12964 - protein, 11 aa, Severe acute respiratory syndrome coronavirus 2
  REGION 1..11: note = Table B: HLA-DRB1*04:03L HLA-DRB1*04:02L HLA-DQA1*01-B1*05L HLA-DRB1*14:17L
DSLDTYPSLET

SEQ ID NO: 12965 - protein, 11 aa, Severe acute respiratory syndrome coronavirus 2
  REGION 1..11: note = Table B: HLA-DRB1*04:03L HLA-DRB1*04:02L HLA-DQA1*02:01-B1*03:03L
LDTYPSLETIQ

SEQ ID NO: 12966 - protein, 13 aa, Severe acute respiratory syndrome coronavirus 2
  REGION 1..13: note = Table B: HLA-DRB1*04:03L HLA-DQA1*01:02-B1*06:02L HLA-DQA1*01:03-B1*06:01L
YPSLETIQITISS

SEQ ID NO: 12967 - protein, 12 aa, Severe acute respiratory syndrome coronavirus 2
  REGION 1..12: note = Table B: HLA-DRB1*04:03L
LETIQITISSFK

SEQ ID NO: 12968 - protein, 11 aa, Severe acute respiratory syndrome coronavirus 2
  REGION 1..11: note = Table B: HLA-DRB1*04:03L HLA-DRB1*04:05L HLA-DQA1*01-B1*05L HLA-DRB1*14:17L
SSFKWDLTAFG

SEQ ID NO: 12969 - protein, 10 aa, Severe acute respiratory syndrome coronavirus 2
  REGION 1..10: note = Table B: HLA-DRB1*04:03L HLA-DRB1*01:03L HLA-DRB1*04:05L HLA-DQA1*01:02-B1*06:02L HLA-DRB1*01:01L HLA-DPA1*03:01-B1*04:02L HLA-DRB1*14:02L HLA-DQA1*05:05-B1*03:19L HLA-DQA1*05:01-B1*02:01L
  REGION 1..10: note = CONT. FROM ABOVE: HLA-DRB4*01:01L HLA-DPA1*01:03-B1*04:01L HLA-D PA1*02:01-B1*13:01M HLA-DPA1*01:03-B1*104:01L HLA-DRB1*16:01L HL A-DQA1*01:03-B1*06:01M HLA-DQA1*02:01-B1*03:03L HLA-DRB1*15:03L
AYILFTRFFY

SEQ ID NO: 12970 - protein, 10 aa, Severe acute respiratory syndrome coronavirus 2
  REGION 1..10: note = Table B: HLA-DRB1*04:03L HLA-DRB1*04:05L HLA-DQA1*01:02-B1*06:02L HLA-DPA1*02:01-B1*13:01M HLA-DQA1*01:03-B1*06:01L HLA-DRB1*15:03L
LFFSYFAVHF

SEQ ID NO: 12971 - protein, 10 aa, Severe acute respiratory syndrome coronavirus 2
  REGION 1..10: note = Table B: HLA-DRB1*04:03L HLA-DRB1*01:03L HLA-DRB1*04:05M HLA-DQA1*01:02-B1*06:02L HLA-DRB1*01:01L HLA-DQA1*01:01-B1*05:01L HLA-DQA1*05:05-B1*03:19L HLA-DRB4*01:01L HLA-DPA1*01:03-B1*04:01L
  REGION 1..10: note = CONT. FROM ABOVE: HLA-DPA1*02:01-B1*13:01M HLA-DPA1*03:01-B1*105 :01L HLA-DRB1*16:01L HLA-DQA1*01:03-B1*06:01M HLA-DQA1*02:01-B1* 03:03L HLA-DRB1*15:03L
HFISNSWLMW

SEQ ID NO: 12972 - protein, 11 aa, Severe acute respiratory syndrome coronavirus 2
  REGION 1..11: note = Table B: HLA-DRB1*04:03L HLA-DRB1*14:17L
INLVQMAPISA

SEQ ID NO: 12973 - protein, 14 aa, Severe acute respiratory syndrome coronavirus 2
  REGION 1..14: note = Table B: HLA-DRB1*04:03L HLA-DRB1*01:01L HLA-DRB1*11:02L HLA-DRB1*11:03L HLA-DRB1*14:02L HLA-DQA1*05:05-B1*03:01L HLA-DRB1*07:01L HLA-DRB1*08:02L HLA-DRB1*08:03L
SFYYVWKSYVHVVD

SEQ ID NO: 12974 - protein, 11 aa, Severe acute respiratory syndrome coronavirus 2
  REGION 1..11: note = Table B: HLA-DRB1*04:03L
VHVVDGCNSST

SEQ ID NO: 12975 - protein, 11 aa, Severe acute respiratory syndrome coronavirus 2
  REGION 1..11: note = Table B: HLA-DRB1*04:03L
GSTFISDEVAR

SEQ ID NO: 12976 - protein, 11 aa, Severe acute respiratory syndrome coronavirus 2
  REGION 1..11: note = Table B: HLA-DRB1*04:03L HLA-DRB1*04:05L HLA-DRB3*02:01L HLA-DRB1*09:01L HLA-DPA1*01:03-B1*104:01L HLA-DRB1*08:02L
DEVARDLSLQF

SEQ ID NO: 12977 - protein, 11 aa, Severe acute respiratory syndrome coronavirus 2
  REGION 1..11: note = Table B: HLA-DRB1*04:03L HLA-DRB3*01:01L
EVARDLSLQFK

SEQ ID NO: 12978 - protein, 10 aa, Severe acute respiratory syndrome coronavirus 2
  REGION 1..10: note = Table B: HLA-DRB1*04:03L HLA-DRB1*13:03L HLA-DRB1*04:02L HLA-DRB1*04:05L HLA-DRB1*08:01L HLA-DQA1*03:01-B1*03:02L HLA-DQA1*02:01-B1*03:03L
FKRPINPTDQ

SEQ ID NO: 12979 - protein, 11 aa, Severe acute respiratory syndrome coronavirus 2
  REGION 1..11: note = Table B: HLA-DRB1*04:03L HLA-DRB1*13:02L HLA-DRB1*01:03L HLA-DRB1*04:02L HLA-DRB4*03:01NL HLA-DRB1*14:01L HLA-DQA1*01-B1*05L HLA-DQA1*05:01-B1*02:01L HLA-DRB1*12:01L HLA-DRB1*14:54L HLA-DQA1*05:05-B1*03:01L HLA-DRB1*14:17L
  REGION 1..11: note = CONT. FROM ABOVE: HLA-DRB1*16:01L
SSYIVDSVTVK

SEQ ID NO: 12980 - protein, 10 aa, Severe acute respiratory syndrome coronavirus 2
  REGION 1..10: note = Table B: HLA-DRB1*04:03L HLA-DRB1*13:02L HLA-DRB1*13:03L HLA-DRB1*01:03L HLA-DRB1*04:02L HLA-DRB1*04:05L HLA-DRB1*01:02L HLA-DRB4*03:01NL HLA-DRB1*08:77L HLA-DRB1*14:01L HLA-DRB1*14:02L HLA-DQA1*05:01-B1*02:01L HLA-DRB1*12:01L
  REGION 1..10: note = CONT. FROM ABOVE: HLA-DQA1*03:01-B1*03:02L HLA-DRB1*14:54L HLA-D RB1*14:17L HLA-DRB1*16:01L HLA-DRB1*04:08L HLA-DQA1*02:01-B1*03: 03L
YIVDSVTVKN

SEQ ID NO: 12981 - protein, 11 aa, Severe acute respiratory syndrome coronavirus 2
  REGION 1..11: note = Table B: HLA-DRB1*04:03L HLA-DRB1*04:02L HLA-DQA1*01-B1*05L HLA-DRB1*14:17L
GSIHLYFDKAG

SEQ ID NO: 12982 - protein, 11 aa, Severe acute respiratory syndrome coronavirus 2
  REGION 1..11: note = Table B: HLA-DRB1*04:03L HLA-DRB1*01:03L HLA-DRB1*04:02L HLA-DRB1*01:02L HLA-DRB1*14:17L HLA-DRB1*16:01L HLA-DRB1*04:08L HLA-DRB1*15:03L
IHLYFDKAGQK

SEQ ID NO: 12983 - protein, 10 aa, Severe acute respiratory syndrome coronavirus 2
  REGION 1..10: note = Table B: HLA-DRB1*04:03L HLA-DRB1*13:03L HLA-DRB1*01:03L HLA-DRB1*04:02L HLA-DRB1*04:05L HLA-DRB1*01:02L HLA-DRB4*03:01NL HLA-DQA1*01-B1*05L HLA-DRB1*12:01L HLA-DQA1*03:01-B1*03:02L HLA-DRB1*14:17L HLA-DPA1*01:02-B1*04:01L HLA-DRB1*16:01L
  REGION 1..10: note = CONT. FROM ABOVE: HLA-DRB1*04:08L HLA-DQA1*02:01-B1*03:03L
LYFDKAGQKT

SEQ ID NO: 12984 - protein, 11 aa, Severe acute respiratory syndrome coronavirus 2
  REGION 1..11: note = Table B: HLA-DRB1*04:03L HLA-DRB1*13:03L HLA-DRB1*01:03L HLA-DRB1*04:02L HLA-DRB1*04:05L HLA-DRB4*03:01NL HLA-DRB1*04:10L HLA-DRB1*14:54L HLA-DRB1*14:17L HLA-DRB1*16:01L HLA-DRB1*04:08L
SHFVNLDNLRA

SEQ ID NO: 12985 - protein, 10 aa, Severe acute respiratory syndrome coronavirus 2
  REGION 1..10: note = Table B: HLA-DRB1*04:03L HLA-DRB1*04:02L HLA-DRB4*03:01NL HLA-DQA1*03:01-B1*03:02L HLA-DRB1*14:17L
VNLDNLRANN

SEQ ID NO: 12986 - protein, 12 aa, Severe acute respiratory syndrome coronavirus 2
  REGION 1..12: note = Table B: HLA-DRB1*04:03L HLA-DRB1*14:17L
LDNLRANNTKGS

SEQ ID NO: 12987 - protein, 13 aa, Severe acute respiratory syndrome coronavirus 2
  REGION 1..13: note = Table B: HLA-DRB1*04:03L HLA-DRB1*14:01L
DNLRANNTKGSLP

SEQ ID NO: 12988 - protein, 12 aa, Severe acute respiratory syndrome coronavirus 2
  REGION 1..12: note = Table B: HLA-DRB1*04:03L HLA-DQA1*03:01-B1*03:02L
GSLPINVIVFDG

SEQ ID NO: 12989 - protein, 12 aa, Severe acute respiratory syndrome coronavirus 2
  REGION 1..12: note = Table B: HLA-DRB1*04:03L
SLPINVIVFDGK

SEQ ID NO: 12990 - protein, 10 aa, Severe acute respiratory syndrome coronavirus 2
  REGION 1..10: note = Table B: HLA-DRB1*04:03L HLA-DRB1*04:02L HLA-DQA1*03:01-B1*03:02L HLA-DRB1*14:17L HLA-DQA1*02:01-B1*03:03L
NVIVFDGKSK

SEQ ID NO: 12991 - protein, 12 aa, Severe acute respiratory syndrome coronavirus 2
  REGION 1..12: note = Table B: HLA-DRB1*04:03L HLA-DRB1*13:02L HLA-DRB1*13:03L HLA-DRB1*04:02L HLA-DRB1*04:05L HLA-DQA1*01:02-B1*06:02L HLA-DRB1*01:02L HLA-DRB1*08:04L HLA-DRB1*08:77L HLA-DPA1*01:03-B1*03:01L HLA-DPA1*03:01-B1*04:02L
  REGION 1..12: note = CONT. FROM ABOVE: HLA-DRB1*11:03L HLA-DRB1*11:04L HLA-DRB1*14:02 L HLA-DRB1*08:01L HLA-DRB1*11:01L HLA-DQA1*05:01-B1*02:01L HLA-D RB1*12:01L HLA-DPA1*03:01-B1*105:01L HLA-DRB1*14:54L HLA-DRB1*04 :08L HLA-DRB1*15:03L
VIVFDGKSKCEE

SEQ ID NO: 12992 - protein, 15 aa, Severe acute respiratory syndrome coronavirus 2
  REGION 1..15: note = Table B: HLA-DRB1*04:03L HLA-DRB1*01:03L HLA-DPA1*01:03-B1*03:01L HLA-DRB1*16:01L HLA-DRB1*04:08L HLA-DRB1*15:03L
DGKSKCEESSAKSAS

SEQ ID NO: 12993 - protein, 12 aa, Severe acute respiratory syndrome coronavirus 2
  REGION 1..12: note = Table B: HLA-DRB1*04:03L HLA-DPA1*01:03-B1*03:01L
SAKSASVYYSQL

SEQ ID NO: 12994 - protein, 12 aa, Severe acute respiratory syndrome coronavirus 2
  REGION 1..12: note = Table B: HLA-DRB1*04:03L HLA-DRB1*13:02L HLA-DRB1*04:02L HLA-DRB1*14:01L HLA-DQA1*05:01-B1*02:01L HLA-DRB1*12:01L HLA-DRB1*12:02L HLA-DRB1*14:54L HLA-DRB1*14:17L HLA-DRB1*16:01L HLA-DRB1*15:03L
QPILLLDQALVS

SEQ ID NO: 12995 - protein, 12 aa, Severe acute respiratory syndrome coronavirus 2
  REGION 1..12: note = Table B: HLA-DRB1*04:03L HLA-DRB1*15:03L
PILLLDQALVSD

SEQ ID NO: 12996 - protein, 12 aa, Severe acute respiratory syndrome coronavirus 2
  REGION 1..12: note = Table B: HLA-DRB1*04:03L HLA-DRB1*04:02L HLA-DQA1*01:02-B1*06:02L HLA-DQA1*01-B1*05L HLA-DQA1*05:01-B1*02:01L HLA-DPA1*03:01-B1*105:01L HLA-DQA1*03:01-B1*03:02L HLA-DRB1*14:17L HLA-DRB1*16:01L
  REGION 1..12: note = CONT. FROM ABOVE: HLA-DQA1*02:01-B1*03:03L
LLLDQALVSDVG

SEQ ID NO: 12997 - protein, 12 aa, Severe acute respiratory syndrome coronavirus 2
  REGION 1..12: note = Table B: HLA-DRB1*04:03L HLA-DQA1*01-B1*05L HLA-DQA1*05:01-B1*02:01L
DQALVSDVGDSA

SEQ ID NO: 12998 - protein, 11 aa, Severe acute respiratory syndrome coronavirus 2
  REGION 1..11: note = Table B: HLA-DRB1*04:03L HLA-DQA1*01-B1*05L HLA-DQA1*05:01-B1*02:01L
ALVSDVGDSAE

SEQ ID NO: 12999 - protein, 12 aa, Severe acute respiratory syndrome coronavirus 2
  REGION 1..12: note = Table B: HLA-DRB1*04:03L
SAEVAVKMFDAY

SEQ ID NO: 13000 - protein, 11 aa, Severe acute respiratory syndrome coronavirus 2
  REGION 1..11: note = Table B: HLA-DRB1*04:03L HLA-DRB1*04:02L HLA-DQA1*01:02-B1*06:02L HLA-DQA1*01-B1*05L HLA-DQA1*05:01-B1*02:01L HLA-DQA1*03:01-B1*03:02L HLA-DRB1*14:17L HLA-DQA1*01:03-B1*06:01L
  REGION 1..11: note = CONT. FROM ABOVE: HLA-DQA1*02:01-B1*03:03L
VAVKMFDAYVN

SEQ ID NO: 13001 - protein, 10 aa, Severe acute respiratory syndrome coronavirus 2
  REGION 1..10: note = Table B: HLA-DRB1*04:03L HLA-DQA1*01-B1*05L
VKMFDAYVNT

SEQ ID NO: 13002 - protein, 11 aa, Severe acute respiratory syndrome coronavirus 2
  REGION 1..11: note = Table B: HLA-DRB1*04:03L HLA-DQA1*01-B1*05L HLA-DRB1*14:17L
FDAYVNTFSST

SEQ ID NO: 13003 - protein, 10 aa, Severe acute respiratory syndrome coronavirus 2
  REGION 1..10: note = Table B: HLA-DRB1*04:03L HLA-DRB1*01:03L HLA-DRB1*04:05M HLA-DQA1*01:02-B1*06:02L HLA-DRB1*01:01L HLA-DRB1*01:02L HLA-DRB1*08:77L HLA-DRB1*11:03L HLA-DRB1*14:02L HLA-DQA1*01:01-B1*05:01L HLA-DRB1*11:01L HLA-DRB4*01:01L
  REGION 1..10: note = CONT. FROM ABOVE: HLA-DPA1*02:01-B1*13:01M HLA-DPA1*03:01-B1*105 :01L HLA-DRB1*16:01L HLA-DQA1*01:03-B1*06:01M HLA-DQA1*02:01-B1* 03:03L HLA-DRB1*15:03L
AYVNTFSSTF

SEQ ID NO: 13004 - protein, 13 aa, Severe acute respiratory syndrome coronavirus 2
  REGION 1..13: note = Table B: HLA-DRB1*04:03L HLA-DRB1*04:02L HLA-DRB1*12:01L HLA-DRB1*14:17L
NVPMEKLKTLVAT

SEQ ID NO: 13005 - protein, 13 aa, Severe acute respiratory syndrome coronavirus 2
  REGION 1..13: note = Table B: HLA-DRB1*04:03L HLA-DRB1*14:17L
VPMEKLKTLVATA

SEQ ID NO: 13006 - protein, 12 aa, Severe acute respiratory syndrome coronavirus 2
  REGION 1..12: note = Table B: HLA-DRB1*04:03L
EKLKTLVATAEA

SEQ ID NO: 13007 - protein, 11 aa, Severe acute respiratory syndrome coronavirus 2
  REGION 1..11: note = Table B: HLA-DRB1*04:03L HLA-DQA1*03:01-B1*03:02L
LKTLVATAEAE

SEQ ID NO: 13008 - protein, 12 aa, Severe acute respiratory syndrome coronavirus 2
  REGION 1..12: note = Table B: HLA-DRB1*04:03L HLA-DRB1*16:01L HLA-DQA1*01:03-B1*06:01L HLA-DRB1*15:03L
KTLVATAEAELA

SEQ ID NO: 13009 - protein, 11 aa, Severe acute respiratory syndrome coronavirus 2
  REGION 1..11: note = Table B: HLA-DRB1*04:03L HLA-DQA1*01-B1*05L HLA-DRB1*14:17L
KNVSLDNVLST

SEQ ID NO: 13010 - protein, 10 aa, Severe acute respiratory syndrome coronavirus 2
  REGION 1..10: note = Table B: HLA-DRB1*04:03L HLA-DRB1*01:03L HLA-DRB1*04:05M HLA-DQA1*01:02-B1*06:02L HLA-DRB1*01:01L HLA-DRB1*01:02L HLA-DRB1*08:77L HLA-DRB1*11:03L HLA-DRB1*14:02L HLA-DQA1*01:01-B1*05:01L HLA-DRB1*11:01L
  REGION 1..10: note = CONT. FROM ABOVE: HLA-DQA1*05:05-B1*03:19L HLA-DRB4*01:01L HLA-D PA1*01:03-B1*04:01L HLA-DQA1*05:05-B1*03:116L HLA-DPA1*02:01-B1* 13:01M HLA-DPA1*03:01-B1*105:01L HLA-DRB1*16:01L HLA-DQA1*01:03- B1*06:01M HLA-DQA1*02:01-B1*03:03L HLA-DRB1*15:03L
TFISAARQGF

SEQ ID NO: 13011 - protein, 10 aa, Severe acute respiratory syndrome coronavirus 2
  REGION 1..10: note = Table B: HLA-DRB1*04:03L HLA-DRB1*13:02L HLA-DRB1*13:03L HLA-DRB1*04:02L HLA-DRB4*03:01NL HLA-DQA1*01-B1*05L HLA-DQA1*05:01-B1*02:01L HLA-DRB1*12:01L HLA-DQA1*03:01-B1*03:02L HLA-DQA1*05:05-B1*03:01L
  REGION 1..10: note = CONT. FROM ABOVE: HLA-DRB1*14:17L HLA-DRB1*16:01L HLA-DQA1*02:01 -B1*03:03L
GFVDSDVETK

SEQ ID NO: 13012 - protein, 13 aa, Severe acute respiratory syndrome coronavirus 2
  REGION 1..13: note = Table B: HLA-DRB1*04:03L
QSDIEVTGDSCNN

SEQ ID NO: 13013 - protein, 10 aa, Severe acute respiratory syndrome coronavirus 2
  REGION 1..10: note = Table B: HLA-DRB1*04:03L HLA-DRB1*04:02L HLA-DQA1*01-B1*05L HLA-DQA1*03:01-B1*03:02L HLA-DRB1*14:17L HLA-DPA1*01:02-B1*04:01L HLA-DQA1*02:01-B1*03:03L
YMLTYNKVEN

SEQ ID NO: 13014 - protein, 10 aa, Severe acute respiratory syndrome coronavirus 2
  REGION 1..10: note = Table B: HLA-DRB1*04:03L HLA-DRB1*13:03L HLA-DRB1*01:03L HLA-DRB1*04:02L HLA-DQA1*03:01-B1*03:02L HLA-DRB1*14:17L HLA-DQA1*02:01-B1*03:03L
YNKVENMTPR

SEQ ID NO: 13015 - protein, 10 aa, Severe acute respiratory syndrome coronavirus 2
  REGION 1..10: note = Table B: HLA-DRB1*04:03L HLA-DQA1*03:01-B1*03:02L HLA-DQA1*02:01-B1*03:03L
AQVAKSHNIA

SEQ ID NO: 13016 - protein, 10 aa, Severe acute respiratory syndrome coronavirus 2
  REGION 1..10: note = Table B: HLA-DRB1*04:03L HLA-DQA1*01:02-B1*06:02L
NIALIWNVKD

SEQ ID NO: 13017 - protein, 12 aa, Severe acute respiratory syndrome coronavirus 2
  REGION 1..12: note = Table B: HLA-DRB1*04:03L HLA-DRB1*04:02L HLA-DRB1*04:05L HLA-DQA1*01:02-B1*06:02L HLA-DRB1*01:02L HLA-DRB1*12:01L HLA-DRB1*16:01L HLA-DRB1*04:08L HLA-DRB1*15:03L
VKDFMSLSEQLR

SEQ ID NO: 13018 - protein, 13 aa, Severe acute respiratory syndrome coronavirus 2
  REGION 1..13: note = Table B: HLA-DRB1*04:03L HLA-DRB1*13:03L HLA-DRB1*04:02L HLA-DRB1*04:04L HLA-DRB1*04:05L HLA-DQA1*01:02-B1*06:02L HLA-DRB1*14:01L HLA-DRB1*12:01L HLA-DRB3*01:01L HLA-DRB1*15:03L
EQLRKQIRSAAKK

SEQ ID NO: 13019 - protein, 12 aa, Severe acute respiratory syndrome coronavirus 2
  REGION 1..12: note = Table B: HLA-DRB1*04:03L HLA-DQA1*03:01-B1*03:02L HLA-DRB1*14:17L HLA-DQA1*02:01-B1*03:03L
ATTRQVVNVVTT

SEQ ID NO: 13020 - protein, 12 aa, Severe acute respiratory syndrome coronavirus 2
  REGION 1..12: note = Table B: HLA-DRB1*04:03L
TTRQVVNVVTTK

SEQ ID NO: 13021 - protein, 12 aa, Severe acute respiratory syndrome coronavirus 2
  REGION 1..12: note = Table B: HLA-DRB1*04:03L
TRQVVNVVTTKI

SEQ ID NO: 13022 - protein, 10 aa, Severe acute respiratory syndrome coronavirus 2
  REGION 1..10: note = Table B: HLA-DRB1*04:03L HLA-DRB1*04:02L HLA-DQA1*03:01-B1*03:02L HLA-DRB1*14:17L HLA-DQA1*01:03-B1*06:01L HLA-DQA1*02:01-B1*03:03L
VVTTKIALKG

SEQ ID NO: 13023 - protein, 11 aa, Severe acute respiratory syndrome coronavirus 2
  REGION 1..11: note = Table B: HLA-DRB1*04:03L
AAIFYLITPVH

SEQ ID NO: 13024 - protein, 11 aa, Severe acute respiratory syndrome coronavirus 2
  REGION 1..11: note = Table B: HLA-DRB1*04:03L HLA-DQA1*03:01-B1*03:02L
VMSKHTDFSSE

SEQ ID NO: 13025 - protein, 11 aa, Severe acute respiratory syndrome coronavirus 2
  REGION 1..11: note = Table B: HLA-DRB1*04:03L HLA-DQA1*01:01-B1*05:01L
TDFSSEIIGYK

SEQ ID NO: 13026 - protein, 11 aa, Severe acute respiratory syndrome coronavirus 2
  REGION 1..11: note = Table B: HLA-DRB1*04:03L HLA-DRB1*04:02L HLA-DQA1*01-B1*05L
SSEIIGYKAID

SEQ ID NO: 13027 - protein, 10 aa, Severe acute respiratory syndrome coronavirus 2
  REGION 1..10: note = Table B: HLA-DRB1*04:03L HLA-DRB1*04:02L HLA-DQA1*01-B1*05L HLA-DQA1*03:01-B1*03:02L HLA-DRB1*14:17L HLA-DQA1*01:03-B1*06:01L HLA-DQA1*02:01-B1*03:03L
EIIGYKAIDG

SEQ ID NO: 13028 - protein, 10 aa, Severe acute respiratory syndrome coronavirus 2
  REGION 1..10: note = Table B: HLA-DRB1*04:03L HLA-DRB1*04:02L HLA-DQA1*01-B1*05L HLA-DRB1*14:17L HLA-DRB1*16:01L
IIGYKAIDGG

SEQ ID NO: 13029 - protein, 10 aa, Severe acute respiratory syndrome coronavirus 2
  REGION 1..10: note = Table B: HLA-DRB1*04:03L HLA-DRB1*13:02L HLA-DRB1*13:03L HLA-DRB1*01:03L HLA-DRB1*04:02L HLA-DRB1*01:01L HLA-DRB1*01:02L HLA-DRB4*03:01NL HLA-DRB1*14:01L HLA-DRB1*11:04L HLA-DRB1*08:01L HLA-DRB5*01:01L HLA-DRB1*12:01L HLA-DRB1*12:02L
  REGION 1..10: note = CONT. FROM ABOVE: HLA-DQA1*03:01-B1*03:02L HLA-DRB1*14:54L HLA-D QA1*05:05-B1*03:01L HLA-DRB1*14:17L HLA-DRB1*16:01L HLA-DRB1*04: 08L HLA-DQA1*02:01-B1*03:03L
YKAIDGGVTR

SEQ ID NO: 13030 - protein, 11 aa, Severe acute respiratory syndrome coronavirus 2
  REGION 1..11: note = Table B: HLA-DRB1*04:03L HLA-DRB1*13:03L HLA-DRB1*01:03L HLA-DRB1*04:02L HLA-DRB4*03:01NL HLA-DPA1*01:03-B1*03:01L HLA-DQA1*01:01-B1*05:01L HLA-DPA1*01:03-B1*04:02L HLA-DRB1*12:01L HLA-DRB1*14:17L
AIDGGVTRDIA

SEQ ID NO: 13031 - protein, 11 aa, Severe acute respiratory syndrome coronavirus 2
  REGION 1..11: note = Table B: HLA-DRB1*04:03L HLA-DRB1*04:02L HLA-DQA1*01:01-B1*05:01L
IDGGVTRDIAS

SEQ ID NO: 13032 - protein, 10 aa, Severe acute respiratory syndrome coronavirus 2
  REGION 1..10: note = Table B: HLA-DRB1*04:03L HLA-DRB1*04:02L HLA-DQA1*03:01-B1*03:02L HLA-DRB1*14:17L HLA-DQA1*02:01-B1*03:03L
GVTRDIASTD

SEQ ID NO: 13033 - protein, 10 aa, Severe acute respiratory syndrome coronavirus 2
  REGION 1..10: note = Table B: HLA-DRB1*04:03L HLA-DRB1*04:02L HLA-DQA1*01-B1*05L HLA-DQA1*03:01-B1*03:02L HLA-DRB1*14:17L HLA-DQA1*02:01-B1*03:03L
VTRDIASTDT

SEQ ID NO: 13034 - protein, 12 aa, Severe acute respiratory syndrome coronavirus 2
  REGION 1..12: note = Table B: HLA-DRB1*04:03L HLA-DQA1*01:02-B1*06:02L
RDIASTDTCFAN

SEQ ID NO: 13035 - protein, 12 aa, Severe acute respiratory syndrome coronavirus 2
  REGION 1..12: note = Table B: HLA-DRB1*04:03L HLA-DRB1*04:02L HLA-DQA1*03:01-B1*03:02L
ADFDTWFSQRGG

SEQ ID NO: 13036 - protein, 12 aa, Severe acute respiratory syndrome coronavirus 2
  REGION 1..12: note = Table B: HLA-DRB1*04:03L
DFDTWFSQRGGS

SEQ ID NO: 13037 - protein, 12 aa, Severe acute respiratory syndrome coronavirus 2
  REGION 1..12: note = Table B: HLA-DRB1*04:03L HLA-DRB1*13:02L HLA-DRB1*04:02L HLA-DRB1*04:05L HLA-DRB1*01:02L HLA-DRB3*02:01L HLA-DRB1*12:02L HLA-DRB1*14:54L
FDTWFSQRGGSY

SEQ ID NO: 13038 - protein, 12 aa, Severe acute respiratory syndrome coronavirus 2
  REGION 1..12: note = Table B: HLA-DRB1*04:03L HLA-DRB1*13:02L HLA-DRB1*04:02L HLA-DRB1*04:05L HLA-DRB1*01:02L HLA-DRB4*03:01NL HLA-DRB3*02:01L HLA-DRB1*11:03L HLA-DRB1*08:01L HLA-DRB1*09:01L HLA-DRB1*12:02L HLA-DRB1*14:54L HLA-DRB1*14:17L HLA-DRB1*07:01L HLA-DRB1*04:08L
DTWFSQRGGSYT

SEQ ID NO: 13039 - protein, 12 aa, Severe acute respiratory syndrome coronavirus 2
  REGION 1..12: note = Table B: HLA-DRB1*04:03L HLA-DRB1*13:02L HLA-DRB1*01:03L HLA-DQA1*01:02-B1*06:02L HLA-DRB1*01:02L HLA-DRB1*08:04L HLA-DPA1*01:03-B1*03:01L HLA-DPA1*03:01-B1*04:02L HLA-DRB1*03:01L HLA-DRB1*14:01L HLA-DRB1*14:02L
  REGION 1..12: note = CONT. FROM ABOVE: HLA-DQA1*01-B1*05L HLA-DQA1*05:01-B1*02:01L HL A-DPA1*01:03-B1*04:02L HLA-DRB1*12:01L HLA-DRB3*01:01L HLA-DPA1* 03:01-B1*105:01L HLA-DPA1*01:02-B1*04:01L HLA-DRB1*16:01L HLA-DR B1*04:08L
SYTNDKACPLIA

SEQ ID NO: 13040 - protein, 14 aa, Severe acute respiratory syndrome coronavirus 2
  REGION 1..14: note = Table B: HLA-DRB1*04:03L HLA-DRB1*13:02L HLA-DRB1*04:05L HLA-DRB1*15:03L
TNDKACPLIAAVIT

SEQ ID NO: 13041 - protein, 11 aa, Severe acute respiratory syndrome coronavirus 2
  REGION 1..11: note = Table B: HLA-DRB1*04:03L
ITREVGFVVPG

SEQ ID NO: 13042 - protein, 11 aa, Severe acute respiratory syndrome coronavirus 2
  REGION 1..11: note = Table B: HLA-DRB1*04:03L HLA-DRB1*13:02L HLA-DRB1*04:02L
FVVPGLPGTIL

SEQ ID NO: 13043 - protein, 10 aa, Severe acute respiratory syndrome coronavirus 2
  REGION 1..10: note = Table B: HLA-DRB1*04:03L HLA-DRB1*01:03L HLA-DRB1*04:05L HLA-DQA1*01:02-B1*06:02L HLA-DRB1*01:01L HLA-DRB1*01:02L HLA-DQA1*01:01-B1*05:01L HLA-DPA1*02:01-B1*13:01L HLA-DPA1*03:01-B1*105:01L HLA-DPA1*01:02-B1*04:01L
  REGION 1..10: note = CONT. FROM ABOVE: HLA-DRB1*16:01L HLA-DQA1*01:03-B1*06:01M HLA-D QA1*02:01-B1*03:03L HLA-DRB1*15:03L
DFLHFLPRVF

SEQ ID NO: 13044 - protein, 15 aa, Severe acute respiratory syndrome coronavirus 2
  REGION 1..15: note = Table B: HLA-DRB1*04:03L HLA-DRB1*01:03L HLA-DRB1*01:01L HLA-DRB1*12:01L HLA-DPA1*03:01-B1*105:01L
PRVFSAVGNICYTPS

SEQ ID NO: 13045 - protein, 13 aa, Severe acute respiratory syndrome coronavirus 2
  REGION 1..13: note = Table B: HLA-DRB1*04:03L HLA-DRB1*01:03L HLA-DRB1*04:02L HLA-DRB1*04:04L HLA-DRB1*04:05L HLA-DQA1*01:02-B1*06:02L HLA-DRB1*08:04L HLA-DRB1*03:01L HLA-DRB1*11:04L HLA-DRB1*14:02L HLA-DQA1*01:01-B1*05:01L HLA-DRB1*08:01L HLA-DRB1*11:01L
  REGION 1..13: note = CONT. FROM ABOVE: HLA-DRB5*01:01L HLA-DQA1*01-B1*05L HLA-DQA1*05 :05-B1*03:19L HLA-DRB5*02:02L HLA-DRB4*01:01L HLA-DRB1*04:10L HL A-DPA1*01:03-B1*04:02L HLA-DRB1*12:02L HLA-DRB3*01:01L HLA-DPA1* 02:01-B1*13:01L HLA-DRB1*14:54L HLA-DPA1*01:03-B1*104:01L
  REGION 1..13: note = CONT. FROM ABOVE: HLA-DRB1*14:17L HLA-DRB1*10:01L HLA-DRB1*08:03 L HLA-DRB1*15:01L
VGNICYTPSKLIE

SEQ ID NO: 13046 - protein, 13 aa, Severe acute respiratory syndrome coronavirus 2
  REGION 1..13: note = Table B: HLA-DRB1*04:03L HLA-DRB1*04:02L HLA-DRB1*04:05L HLA-DRB1*01:02L HLA-DPA1*03:01-B1*04:02L HLA-DRB1*04:10L HLA-DRB1*12:01L HLA-DPA1*02:01-B1*13:01L HLA-DPA1*03:01-B1*105:01L HLA-DRB1*14:54L HLA-DRB1*14:17L
  REGION 1..13: note = CONT. FROM ABOVE: HLA-DRB1*16:01L HLA-DRB1*04:08L HLA-DRB1*15:03 L
TPSKLIEYTDFAT

SEQ ID NO: 13047 - protein, 11 aa, Severe acute respiratory syndrome coronavirus 2
  REGION 1..11: note = Table B: HLA-DRB1*04:03L HLA-DRB1*01:03L HLA-DRB1*04:02L HLA-DRB1*01:02L HLA-DPA1*01:03-B1*03:01L HLA-DPA1*03:01-B1*04:02L HLA-DQA1*05:01-B1*02:01L HLA-DPA1*01:03-B1*04:01L HLA-DPA1*01:03-B1*04:02L
  REGION 1..11: note = CONT. FROM ABOVE: HLA-DRB1*12:01L HLA-DPA1*03:01-B1*105:01L HLA- DRB1*14:17L HLA-DPA1*01:02-B1*04:01L HLA-DRB1*16:01L HLA-DQA1*01 :03-B1*06:01L HLA-DRB1*04:08L HLA-DQA1*02:01-B1*03:03L HLA-DRB1* 15:03L
KLIEYTDFATS

SEQ ID NO: 13048 - protein, 11 aa, Severe acute respiratory syndrome coronavirus 2
  REGION 1..11: note = Table B: HLA-DRB1*04:03L HLA-DRB1*12:01L
LIEYTDFATSA

SEQ ID NO: 13049 - protein, 10 aa, Severe acute respiratory syndrome coronavirus 2
  REGION 1..10: note = Table B: HLA-DRB1*04:03L HLA-DRB1*04:02L HLA-DQA1*01-B1*05L HLA-DQA1*03:01-B1*03:02L HLA-DRB1*14:17L
TIFKDASGKP

SEQ ID NO: 13050 - protein, 10 aa, Severe acute respiratory syndrome coronavirus 2
  REGION 1..10: note = Table B: HLA-DRB1*04:03L HLA-DRB1*01:02L HLA-DQA1*03:01-B1*03:02L HLA-DRB1*16:01L HLA-DQA1*02:01-B1*03:03L HLA-DRB1*15:03L
FKDASGKPVP

SEQ ID NO: 13051 - protein, 13 aa, Severe acute respiratory syndrome coronavirus 2
  REGION 1..13: note = Table B: HLA-DRB1*04:03L HLA-DRB1*04:02L HLA-DRB1*04:05L HLA-DQA1*05:01-B1*02:01L HLA-DRB1*04:10L HLA-DPA1*02:01-B1*13:01L HLA-DQA1*03:01-B1*03:02L HLA-DRB1*14:17L HLA-DRB1*16:01L HLA-DRB1*04:08L HLA-DRB1*15:03L
KPVPYCYDTNVLE

SEQ ID NO: 13052 - protein, 12 aa, Severe acute respiratory syndrome coronavirus 2
  REGION 1..12: note = Table B: HLA-DRB1*04:03L HLA-DRB1*14:17L
TNVLEGSVAYES

SEQ ID NO: 13053 - protein, 12 aa, Severe acute respiratory syndrome coronavirus 2
  REGION 1..12: note = Table B: HLA-DRB1*04:03L HLA-DPA1*03:01-B1*105:01L
NVLEGSVAYESL

SEQ ID NO: 13054 - protein, 13 aa, Severe acute respiratory syndrome coronavirus 2
  REGION 1..13: note = Table B: HLA-DRB1*04:03L HLA-DRB1*04:02L HLA-DRB1*01:02L
VLEGSVAYESLRP

SEQ ID NO: 13055 - protein, 12 aa, Severe acute respiratory syndrome coronavirus 2
  REGION 1..12: note = Table B: HLA-DRB1*04:03L HLA-DRB1*04:02L HLA-DRB1*01:02L HLA-DRB1*08:04L HLA-DRB1*14:54L
YESLRPDTRYVL

SEQ ID NO: 13056 - protein, 13 aa, Severe acute respiratory syndrome coronavirus 2
  REGION 1..13: note = Table B: HLA-DRB1*04:03L HLA-DPA1*01:03-B1*03:01L HLA-DQA1*05:01-B1*02:01L HLA-DRB1*13:01L HLA-DRB1*04:08L
SLRPDTRYVLMDG

SEQ ID NO: 13057 - protein, 10 aa, Severe acute respiratory syndrome coronavirus 2
  REGION 1..10: note = Table B: HLA-DRB1*04:03L HLA-DRB1*13:02L HLA-DRB1*04:02L HLA-DRB1*01:02L HLA-DRB4*03:01NL HLA-DRB1*08:77L HLA-DRB1*14:01L HLA-DQA1*05:01-B1*02:01L HLA-DRB1*12:01L HLA-DRB1*14:17L HLA-DRB1*16:01L HLA-DQA1*02:01-B1*03:03L HLA-DRB1*15:03L
YVLMDGSIIQ

SEQ ID NO: 13058 - protein, 11 aa, Severe acute respiratory syndrome coronavirus 2
  REGION 1..11: note = Table B: HLA-DRB1*04:03L HLA-DRB1*12:01L HLA-DQA1*05:05-B1*03:01L HLA-DPA1*01:02-B1*04:01L
DGSIIQFPNTY

SEQ ID NO: 13059 - protein, 10 aa, Severe acute respiratory syndrome coronavirus 2
  REGION 1..10: note = Table B: HLA-DRB1*04:03L HLA-DRB1*04:02L HLA-DRB1*04:04L HLA-DQA1*01:02-B1*06:02L HLA-DRB1*01:02L HLA-DPA1*03:01-B1*04:02L HLA-DQA1*01-B1*05L HLA-DRB1*12:01L HLA-DRB1*14:17L HLA-DRB1*16:01L HLA-DRB1*04:08L
  REGION 1..10: note = CONT. FROM ABOVE: HLA-DQA1*02:01-B1*03:03L HLA-DRB1*15:01L HLA-D RB1*15:03L
IIQFPNTYLE

SEQ ID NO: 13060 - protein, 10 aa, Severe acute respiratory syndrome coronavirus 2
  REGION 1..10: note = Table B: HLA-DRB1*04:03L HLA-DRB1*14:17L
YLEGSVRVVT

SEQ ID NO: 13061 - protein, 11 aa, Severe acute respiratory syndrome coronavirus 2
  REGION 1..11: note = Table B: HLA-DRB1*04:03L HLA-DRB1*04:02L HLA-DRB1*14:17L
GSVRVVTTFDS

SEQ ID NO: 13062 - protein, 11 aa, Severe acute respiratory syndrome coronavirus 2
  REGION 1..11: note = Table B: HLA-DRB1*04:03L
SVRVVTTFDSE

SEQ ID NO: 13063 - protein, 12 aa, Severe acute respiratory syndrome coronavirus 2
  REGION 1..12: note = Table B: HLA-DRB1*04:03L HLA-DRB1*01:03L HLA-DRB1*01:02L HLA-DRB1*12:01L HLA-DRB1*16:01L HLA-DRB1*04:08L HLA-DRB1*15:03L
VVTTFDSEYCRH

SEQ ID NO: 13064 - protein, 12 aa, Severe acute respiratory syndrome coronavirus 2
  REGION 1..12: note = Table B: HLA-DRB1*04:03L HLA-DRB1*13:03L HLA-DRB1*01:03L HLA-DRB1*04:02L HLA-DRB1*04:05L HLA-DRB1*01:02L HLA-DRB1*14:01L HLA-DRB1*08:01L HLA-DRB1*12:01L HLA-DQA1*03:01-B1*03:02L HLA-DRB1*14:17L HLA-DRB1*04:08L
SGRWVLNNDYYR

SEQ ID NO: 13065 - protein, 13 aa, Severe acute respiratory syndrome coronavirus 2
  REGION 1..13: note = Table B: HLA-DRB1*04:03L HLA-DRB1*04:02L HLA-DRB1*04:10L HLA-DRB1*12:01L HLA-DRB1*14:17L HLA-DRB1*16:01L
VDAVNLLTNMFTP

SEQ ID NO: 13066 - protein, 11 aa, Severe acute respiratory syndrome coronavirus 2
  REGION 1..11: note = Table B: HLA-DRB1*04:03L HLA-DPA1*03:01-B1*04:02L HLA-DRB1*12:01L HLA-DPA1*01:02-B1*04:01L
VNLLTNMFTPL

SEQ ID NO: 13067 - protein, 14 aa, Severe acute respiratory syndrome coronavirus 2
  REGION 1..14: note = Table B: HLA-DRB1*04:03L HLA-DRB1*01:02L HLA-DQA1*01-B1*05L HLA-DQA1*05:01-B1*02:01L HLA-DPA1*01:03-B1*04:02L HLA-DRB1*12:01L HLA-DRB1*16:01L HLA-DRB1*04:08L HLA-DRB1*15:03L
NLLTNMFTPLIQPI

SEQ ID NO: 13068 - protein, 11 aa, Severe acute respiratory syndrome coronavirus 2
  REGION 1..11: note = Table B: HLA-DRB1*04:03L HLA-DRB1*13:03L HLA-DRB1*01:03L HLA-DRB1*04:02L HLA-DRB1*01:02L HLA-DRB4*03:01NL HLA-DRB1*08:04L HLA-DRB1*14:01L HLA-DRB1*08:01L HLA-DRB1*04:10L HLA-DPA1*01:03-B1*04:02L HLA-DRB1*12:01L
  REGION 1..11: note = CONT. FROM ABOVE: HLA-DPA1*02:01-B1*13:01L HLA-DRB1*14:54L HLA-D RB1*14:17L HLA-DRB1*16:01L HLA-DRB1*04:08L HLA-DRB1*08:03L HLA-D RB1*15:03L
NMFTPLIQPIG

SEQ ID NO: 13069 - protein, 10 aa, Severe acute respiratory syndrome coronavirus 2
  REGION 1..10: note = Table B: HLA-DRB1*04:03L HLA-DRB1*14:17L
IQPIGALDIS

SEQ ID NO: 13070 - protein, 14 aa, Severe acute respiratory syndrome coronavirus 2
  REGION 1..14: note = Table B: HLA-DRB1*04:03L HLA-DQA1*05:05-B1*03:01L HLA-DQA1*01:03-B1*06:01L
QPIGALDISASIVA

SEQ ID NO: 13071 - protein, 12 aa, Severe acute respiratory syndrome coronavirus 2
  REGION 1..12: note = Table B: HLA-DRB1*04:03L
GALDISASIVAG

SEQ ID NO: 13072 - protein, 14 aa, Severe acute respiratory syndrome coronavirus 2
  REGION 1..14: note = Table B: HLA-DRB1*04:03L HLA-DRB1*01:03L HLA-DPA1*01:03-B1*03:01L HLA-DRB1*12:01L
ASIVAGGIVAIVVT

SEQ ID NO: 13073 - protein, 10 aa, Severe acute respiratory syndrome coronavirus 2
  REGION 1..10: note = Table B: HLA-DRB1*04:03L HLA-DRB1*04:05L HLA-DQA1*01:02-B1*06:02L HLA-DRB1*01:01L HLA-DPA1*02:01-B1*13:01M HLA-DPA1*03:01-B1*105:01L HLA-DRB1*16:01L HLA-DQA1*01:03-B1*06:01L HLA-DRB1*15:03L
TFYLTNDVSF

SEQ ID NO: 13074 - protein, 10 aa, Severe acute respiratory syndrome coronavirus 2
  REGION 1..10: note = Table B: HLA-DRB1*04:03L HLA-DRB1*13:02L HLA-DRB1*13:03L HLA-DRB1*01:03L HLA-DRB1*04:02L HLA-DRB4*03:01NL HLA-DRB1*14:01L HLA-DQA1*05:01-B1*02:01L HLA-DRB1*12:01L HLA-DPA1*03:01-B1*105:01L HLA-DQA1*03:01-B1*03:02L
  REGION 1..10: note = CONT. FROM ABOVE: HLA-DRB1*14:54L HLA-DQA1*05:05-B1*03:01L HLA-D RB1*14:17L HLA-DRB1*16:01L HLA-DQA1*01:03-B1*06:01L HLA-DQA1*02: 01-B1*03:03L
LTNDVSFLAH

SEQ ID NO: 13075 - protein, 13 aa, Severe acute respiratory syndrome coronavirus 2
  REGION 1..13: note = Table B: HLA-DRB1*04:03L HLA-DRB1*13:02L HLA-DRB1*04:02L HLA-DRB1*04:04L HLA-DRB1*14:01L HLA-DRB1*08:01L HLA-DPA1*03:01-B1*105:01L HLA-DQA1*03:01-B1*03:02L HLA-DPA1*01:02-B1*04:01L HLA-DRB1*07:01L HLA-DRB1*15:01L
TKHFYWFFSNYLK

SEQ ID NO: 13076 - protein, 13 aa, Severe acute respiratory syndrome coronavirus 2
  REGION 1..13: note = Table B: HLA-DRB1*04:03L HLA-DRB1*13:02L HLA-DRB1*04:02L HLA-DRB1*04:04L HLA-DRB1*01:01L HLA-DRB1*14:01L HLA-DRB3*01:01L HLA-DQA1*03:01-B1*03:02L HLA-DRB1*07:01L
KHFYWFFSNYLKR

SEQ ID NO: 13077 - protein, 13 aa, Severe acute respiratory syndrome coronavirus 2
  REGION 1..13: note = Table B: HLA-DRB1*04:03L HLA-DRB1*04:05L HLA-DRB1*01:02L HLA-DRB1*12:01L HLA-DRB1*16:01L HLA-DRB1*04:08L
KRRVVFNGVSFST

SEQ ID NO: 13078 - protein, 10 aa, Severe acute respiratory syndrome coronavirus 2
  REGION 1..10: note = Table B: HLA-DRB1*04:03L HLA-DRB1*01:03L HLA-DRB1*04:05L HLA-DQA1*01:02-B1*06:02L HLA-DRB1*01:01L HLA-DRB1*08:77L HLA-DPA1*02:01-B1*13:01M HLA-DPA1*03:01-B1*105:01L HLA-DRB1*16:01L HLA-DQA1*01:03-B1*06:01M
  REGION 1..10: note = CONT. FROM ABOVE: HLA-DQA1*02:01-B1*03:03L HLA-DRB1*15:03L
VFNGVSFSTF

SEQ ID NO: 13079 - protein, 13 aa, Severe acute respiratory syndrome coronavirus 2
  REGION 1..13: note = Table B: HLA-DRB1*04:03L HLA-DRB1*08:04L HLA-DPA1*01:03-B1*02:01L HLA-DPA1*01:03-B1*104:01L
FNGVSFSTFEEAA

SEQ ID NO: 13080 - protein, 12 aa, Severe acute respiratory syndrome coronavirus 2
  REGION 1..12: note = Table B: HLA-DRB1*04:03L HLA-DRB1*01:03L HLA-DRB1*04:02L HLA-DRB1*04:05L HLA-DRB1*01:02L HLA-DRB1*14:01L HLA-DRB1*04:10L HLA-DRB1*14:54L HLA-DRB1*04:08L HLA-DQA1*02:01-B1*03:03L
SDVLLPLTQYNR

SEQ ID NO: 13081 - protein, 14 aa, Severe acute respiratory syndrome coronavirus 2
  REGION 1..14: note = Table B: HLA-DRB1*04:03L HLA-DRB1*04:02L HLA-DRB1*04:05L HLA-DRB1*11:03L HLA-DRB1*11:04L HLA-DRB3*01:01L HLA-DPA1*01:03-B1*02:01L HLA-DRB1*08:03L
LPLTQYNRYLALYN

SEQ ID NO: 13082 - protein, 11 aa, Severe acute respiratory syndrome coronavirus 2
  REGION 1..11: note = Table B: HLA-DRB1*04:03L HLA-DRB1*13:02L HLA-DRB1*04:05L HLA-DRB1*01:02L HLA-DRB1*11:01L
RYLALYNKYKY

SEQ ID NO: 13083 - protein, 13 aa, Severe acute respiratory syndrome coronavirus 2
  REGION 1..13: note = Table B: HLA-DRB1*04:03L HLA-DRB1*13:03L HLA-DRB1*08:03L
YLALYNKYKYFSG

SEQ ID NO: 13084 - protein, 12 aa, Severe acute respiratory syndrome coronavirus 2
  REGION 1..12: note = Table B: HLA-DRB1*04:03L HLA-DRB1*01:03L HLA-DRB1*04:02L HLA-DRB1*04:05L HLA-DRB1*01:02L HLA-DRB1*08:01L HLA-DRB1*12:01L HLA-DQA1*03:01-B1*03:02L HLA-DRB1*14:17L HLA-DRB1*16:01L HLA-DRB1*04:08L HLA-DRB1*15:03L
YNKYKYFSGAMD

SEQ ID NO: 13085 - protein, 12 aa, Severe acute respiratory syndrome coronavirus 2
  REGION 1..12: note = Table B: HLA-DRB1*04:03L HLA-DRB1*13:03L HLA-DRB1*01:03L HLA-DRB1*04:02L HLA-DRB1*04:05L HLA-DQA1*01:02-B1*06:02L HLA-DRB1*01:02L HLA-DRB4*03:01NL HLA-DRB1*08:01L HLA-DRB1*04:10L HLA-DRB1*12:01L HLA-DPA1*02:01-B1*13:01L
  REGION 1..12: note = CONT. FROM ABOVE: HLA-DQA1*03:01-B1*03:02L HLA-DRB1*14:17L HLA-D RB1*16:01L HLA-DRB1*04:08L HLA-DRB1*08:03L HLA-DQA1*02:01-B1*03: 03L HLA-DRB1*15:03L
NKYKYFSGAMDT

SEQ ID NO: 13086 - protein, 11 aa, Severe acute respiratory syndrome coronavirus 2
  REGION 1..11: note = Table B: HLA-DRB1*04:03L HLA-DQA1*05:01-B1*02:01L HLA-DQA1*03:01-B1*03:02L HLA-DQA1*02:01-B1*03:03L
YKYFSGAMDTT

SEQ ID NO: 13087 - protein, 10 aa, Severe acute respiratory syndrome coronavirus 2
  REGION 1..10: note = Table B: HLA-DRB1*04:03L HLA-DRB1*04:02L HLA-DQA1*03:01-B1*03:02L HLA-DRB1*14:17L HLA-DQA1*02:01-B1*03:03L
GAMDTTSYRE

SEQ ID NO: 13088 - protein, 11 aa, Severe acute respiratory syndrome coronavirus 2
  REGION 1..11: note = Table B: HLA-DRB1*04:03L HLA-DQA1*02:01-B1*03:03L
HLAKALNDFSN

SEQ ID NO: 13089 - protein, 11 aa, Severe acute respiratory syndrome coronavirus 2
  REGION 1..11: note = Table B: HLA-DRB1*04:03L HLA-DRB1*04:02L HLA-DQA1*01-B1*05L HLA-DRB1*14:17L
AKALNDFSNSG

SEQ ID NO: 13090 - protein, 12 aa, Severe acute respiratory syndrome coronavirus 2
  REGION 1..12: note = Table B: HLA-DRB1*04:03L HLA-DRB1*04:02L HLA-DRB1*04:05L HLA-DQA1*01-B1*05L HLA-DQA1*05:01-B1*02:01L HLA-DRB1*04:10L HLA-DQA1*03:01-B1*03:02L HLA-DRB1*14:17L HLA-DRB1*16:01L
KALNDFSNSGSD

SEQ ID NO: 13091 - protein, 12 aa, Severe acute respiratory syndrome coronavirus 2
  REGION 1..12: note = Table B: HLA-DRB1*04:03L HLA-DQA1*01-B1*05L HLA-DQA1*05:01-B1*02:01L HLA-DQA1*03:01-B1*03:02L
ALNDFSNSGSDV

SEQ ID NO: 13092 - protein, 12 aa, Severe acute respiratory syndrome coronavirus 2
  REGION 1..12: note = Table B: HLA-DRB1*04:03L HLA-DRB1*13:02L HLA-DRB1*13:03L HLA-DRB1*04:02L HLA-DRB1*04:05L HLA-DRB4*03:01NL HLA-DRB1*08:77L HLA-DRB3*02:01L HLA-DQA1*05:05-B1*03:19L HLA-DRB1*09:01L HLA-DRB1*12:01L HLA-DRB1*12:02L HLA-DRB1*07:01L HLA-DRB1*16:01L
  REGION 1..12: note = CONT. FROM ABOVE: HLA-DQA1*02:01-B1*03:03L HLA-DRB1*15:03L
LNDFSNSGSDVL

SEQ ID NO: 13093 - protein, 15 aa, Severe acute respiratory syndrome coronavirus 2
  REGION 1..15: note = Table B: HLA-DRB1*04:03L HLA-DQA1*01:01-B1*05:01L HLA-DRB1*04:08L
DFSNSGSDVLYQPPQ

SEQ ID NO: 13094 - protein, 11 aa, Severe acute respiratory syndrome coronavirus 2
  REGION 1..11: note = Table B: HLA-DRB1*04:03L HLA-DRB1*04:02L HLA-DRB4*03:01NL HLA-DQA1*01-B1*05L HLA-DRB1*14:17L
VLYQPPQTSIT

SEQ ID NO: 13095 - protein, 11 aa, Severe acute respiratory syndrome coronavirus 2
  REGION 1..11: note = Table B: HLA-DRB1*04:03L HLA-DQA1*01:02-B1*06:02L HLA-DQA1*03:01-B1*03:02L HLA-DQA1*02:01-B1*03:03L
TSITSAVLQSG

SEQ ID NO: 13096 - protein, 11 aa, Severe acute respiratory syndrome coronavirus 2
  REGION 1..11: note = Table B: HLA-DRB1*04:03L HLA-DRB1*01:03L HLA-DRB1*04:02L HLA-DRB1*04:05L HLA-DRB1*01:02L HLA-DRB4*03:01NL HLA-DPA1*01:03-B1*03:01L HLA-DQA1*01:01-B1*05:01L HLA-DRB1*08:01L HLA-DRB4*02:01NL HLA-DPA1*01:03-B1*04:02L
  REGION 1..11: note = CONT. FROM ABOVE: HLA-DRB1*14:17L HLA-DPA1*01:02-B1*04:01L HLA-D RB1*16:01L HLA-DRB1*04:08L
ITSAVLQSGFR

SEQ ID NO: 13097 - protein, 13 aa, Severe acute respiratory syndrome coronavirus 2
  REGION 1..13: note = Table B: HLA-DRB1*04:03L HLA-DRB1*13:03L HLA-DRB1*04:02L HLA-DRB1*04:05L HLA-DQA1*01:02-B1*06:02L HLA-DPA1*01:03-B1*03:01L HLA-DRB1*14:02L HLA-DRB1*08:01L HLA-DPA1*01:03-B1*04:02L HLA-DRB1*12:01L
NGLWLDDVVYCPR

SEQ ID NO: 13098 - protein, 12 aa, Severe acute respiratory syndrome coronavirus 2
  REGION 1..12: note = Table B: HLA-DRB1*04:03L
VICTSEDMLNPN

SEQ ID NO: 13099 - protein, 13 aa, Severe acute respiratory syndrome coronavirus 2
  REGION 1..13: note = Table B: HLA-DRB1*04:03L HLA-DRB1*04:02L HLA-DRB1*04:05L HLA-DRB1*01:02L HLA-DRB1*04:08L
DMLNPNYEDLLIR

SEQ ID NO: 13100 - protein, 12 aa, Severe acute respiratory syndrome coronavirus 2
  REGION 1..12: note = Table B: HLA-DRB1*04:03L HLA-DRB1*04:02L HLA-DRB1*04:05L HLA-DRB1*16:01L HLA-DRB1*04:08L
NPNYEDLLIRKS

SEQ ID NO: 13101 - protein, 14 aa, Severe acute respiratory syndrome coronavirus 2
  REGION 1..14: note = Table B: HLA-DRB1*04:03L HLA-DRB3*01:01L HLA-DPA1*02:01-B1*13:01L HLA-DPA1*03:01-B1*105:01L
DLLIRKSNHNFLVQ

SEQ ID NO: 13102 - protein, 12 aa, Severe acute respiratory syndrome coronavirus 2
  REGION 1..12: note = Table B: HLA-DRB1*04:03L
AGNVQLRVIGHS

SEQ ID NO: 13103 - protein, 12 aa, Severe acute respiratory syndrome coronavirus 2
  REGION 1..12: note = Table B: HLA-DRB1*04:03L HLA-DRB1*04:05L HLA-DQA1*01:02-B1*06:02L HLA-DRB1*01:02L HLA-DRB1*08:04L HLA-DRB1*12:01L HLA-DRB1*14:17L HLA-DRB1*16:01L HLA-DRB1*04:08L HLA-DRB1*15:03L
NVQLRVIGHSMQ

SEQ ID NO: 13104 - protein, 10 aa, Severe acute respiratory syndrome coronavirus 2
  REGION 1..10: note = Table B: HLA-DRB1*04:03L HLA-DRB1*13:03L HLA-DRB1*01:03L HLA-DRB1*04:02L HLA-DRB1*14:01L HLA-DQA1*03:01-B1*03:02L HLA-DRB1*14:17L HLA-DRB1*16:01L HLA-DQA1*02:01-B1*03:03L
LRVIGHSMQN

SEQ ID NO: 13105 - protein, 11 aa, Severe acute respiratory syndrome coronavirus 2
  REGION 1..11: note = Table B: HLA-DRB1*04:03L
LKLKVDTANPK

SEQ ID NO: 13106 - protein, 11 aa, Severe acute respiratory syndrome coronavirus 2
  REGION 1..11: note = Table B: HLA-DRB1*04:03L HLA-DRB1*14:01L HLA-DRB1*14:17L HLA-DRB1*16:01L
LKVDTANPKTP

SEQ ID NO: 13107 - protein, 12 aa, Severe acute respiratory syndrome coronavirus 2
  REGION 1..12: note = Table B: HLA-DRB1*04:03L
RIQPGQTFSVLA

SEQ ID NO: 13108 - protein, 12 aa, Severe acute respiratory syndrome coronavirus 2
  REGION 1..12: note = Table B: HLA-DRB1*04:03L
FSVLACYNGSPS

SEQ ID NO: 13109 - protein, 12 aa, Severe acute respiratory syndrome coronavirus 2
  REGION 1..12: note = Table B: HLA-DRB1*04:03L HLA-DQA1*01-B1*05L
SVLACYNGSPSG

SEQ ID NO: 13110 - protein, 10 aa, Severe acute respiratory syndrome coronavirus 2
  REGION 1..10: note = Table B: HLA-DRB1*04:03L HLA-DRB1*04:02L HLA-DQA1*03:01-B1*03:02L HLA-DRB1*14:17L
FTIKGSFLNG

SEQ ID NO: 13111 - protein, 13 aa, Severe acute respiratory syndrome coronavirus 2
  REGION 1..13: note = Table B: HLA-DRB1*04:03L HLA-DRB1*14:01L HLA-DQA1*01-B1*05L HLA-DPA1*03:01-B1*105:01L HLA-DRB1*15:03L
GSVGFNIDYDCVS

SEQ ID NO: 13112 - protein, 10 aa, Severe acute respiratory syndrome coronavirus 2
  REGION 1..10: note = Table B: HLA-DRB1*04:03L HLA-DRB1*13:03L HLA-DRB1*04:02L HLA-DQA1*01-B1*05L HLA-DQA1*03:01-B1*03:02L HLA-DRB1*14:17L HLA-DQA1*02:01-B1*03:03L
GPFVDRQTAQ

SEQ ID NO: 13113 - protein, 11 aa, Severe acute respiratory syndrome coronavirus 2
  REGION 1..11: note = Table B: HLA-DRB1*04:03L HLA-DRB1*14:17L
FVDRQTAQAAG

SEQ ID NO: 13114 - protein, 12 aa, Severe acute respiratory syndrome coronavirus 2
  REGION 1..12: note = Table B: HLA-DRB1*04:03L HLA-DRB1*13:02L HLA-DRB1*13:03L HLA-DRB1*01:03L HLA-DRB1*04:02L HLA-DRB1*04:05L HLA-DQA1*01:02-B1*06:02L HLA-DRB1*01:02L HLA-DRB4*03:01NL HLA-DPA1*01:03-B1*03:01L HLA-DQA1*01:01-B1*05:01L
  REGION 1..12: note = CONT. FROM ABOVE: HLA-DQA1*01-B1*05L HLA-DQA1*05:05-B1*03:19L HL A-DQA1*05:01-B1*02:01L HLA-DRB1*04:10L HLA-DRB1*12:01L HLA-DPA1* 02:01-B1*13:01L HLA-DPA1*03:01-B1*105:01L HLA-DRB1*14:54L HLA-DP A1*01:03-B1*104:01L HLA-DQA1*05:05-B1*03:01L HLA-DRB1*14:17L
  REGION 1..12: note = CONT. FROM ABOVE: HLA-DRB1*16:01L HLA-DQA1*01:03-B1*06:01L HLA-D RB1*04:08L
VDRQTAQAAGTD

SEQ ID NO: 13115 - protein, 13 aa, Severe acute respiratory syndrome coronavirus 2
  REGION 1..13: note = Table B: HLA-DRB1*04:03L
AAGTDTTITVNVL

SEQ ID NO: 13116 - protein, 14 aa, Severe acute respiratory syndrome coronavirus 2
  REGION 1..14: note = Table B: HLA-DRB1*04:03L HLA-DQA1*05:05-B1*03:19L HLA-DQA1*05:05-B1*03:01L
VNVLAWLYAAVING

SEQ ID NO: 13117 - protein, 13 aa, Severe acute respiratory syndrome coronavirus 2
  REGION 1..13: note = Table B: HLA-DRB1*04:03L HLA-DRB1*13:02L HLA-DRB1*04:02L HLA-DRB1*04:04L HLA-DRB1*04:05L HLA-DRB1*11:04L HLA-DRB1*08:01L HLA-DRB1*11:01L HLA-DRB3*01:01L HLA-DPA1*01:03-B1*02:01L
AAVINGDRWFLNR

SEQ ID NO: 13118 - protein, 15 aa, Severe acute respiratory syndrome coronavirus 2
  REGION 1..15: note = Table B: HLA-DRB1*04:03L HLA-DRB1*11:02L HLA-DQA1*05:05-B1*03:01L HLA-DRB1*10:01L
GDRWFLNRFTTTLND

SEQ ID NO: 13119 - protein, 10 aa, Severe acute respiratory syndrome coronavirus 2
  REGION 1..10: note = Table B: HLA-DRB1*04:03L HLA-DQA1*01:02-B1*06:02L HLA-DQA1*01-B1*05L HLA-DQA1*05:01-B1*02:01L HLA-DPA1*03:01-B1*105:01L HLA-DQA1*03:01-B1*03:02L HLA-DQA1*01:03-B1*06:01L HLA-DQA1*02:01-B1*03:03L
RFTTTLNDFN

SEQ ID NO: 13120 - protein, 12 aa, Severe acute respiratory syndrome coronavirus 2
  REGION 1..12: note = Table B: HLA-DRB1*04:03L HLA-DQA1*01:02-B1*06:02L HLA-DPA1*03:01-B1*105:01L HLA-DQA1*01:03-B1*06:01L HLA-DQA1*02:01-B1*03:03L
FTTTLNDFNLVA

SEQ ID NO: 13121 - protein, 11 aa, Severe acute respiratory syndrome coronavirus 2
  REGION 1..11: note = Table B: HLA-DRB1*04:03L HLA-DRB1*04:02L HLA-DRB1*12:01L HLA-DQA1*05:05-B1*03:01L HLA-DRB1*14:17L
TLNDFNLVAMK

SEQ ID NO: 13122 - protein, 13 aa, Severe acute respiratory syndrome coronavirus 2
  REGION 1..13: note = Table B: HLA-DRB1*04:03L HLA-DRB1*01:03L HLA-DRB1*04:02L HLA-DRB1*04:05L HLA-DRB1*08:04L HLA-DRB1*08:01L HLA-DPA1*01:03-B1*04:01L HLA-DPA1*01:03-B1*04:02L HLA-DQA1*03:01-B1*03:02L HLA-DRB1*16:01L
  REGION 1..13: note = CONT. FROM ABOVE: HLA-DQA1*01:03-B1*06:01L HLA-DRB1*04:08L HLA-D QA1*02:01-B1*03:03L
FNLVAMKYNYEPL

SEQ ID NO: 13123 - protein, 12 aa, Severe acute respiratory syndrome coronavirus 2
  REGION 1..12: note = Table B: HLA-DRB1*04:03L HLA-DRB1*04:02L HLA-DQA1*01:02-B1*06:02L HLA-DPA1*03:01-B1*04:02L HLA-DRB1*14:01L HLA-DQA1*05:01-B1*02:01L HLA-DRB1*12:01L HLA-DPA1*03:01-B1*105:01L HLA-DQA1*03:01-B1*03:02L
  REGION 1..12: note = CONT. FROM ABOVE: HLA-DPA1*01:02-B1*04:01L HLA-DRB1*16:01L HLA-D QA1*01:03-B1*06:01L HLA-DRB1*04:08L HLA-DQA1*02:01-B1*03:03L HLA -DRB1*15:03L
LVAMKYNYEPLT

SEQ ID NO: 13124 - protein, 12 aa, Severe acute respiratory syndrome coronavirus 2
  REGION 1..12: note = Table B: HLA-DRB1*04:03L HLA-DRB1*04:02L HLA-DQA1*03:01-B1*03:02L HLA-DQA1*02:01-B1*03:03L
VAMKYNYEPLTQ

SEQ ID NO: 13125 - protein, 13 aa, Severe acute respiratory syndrome coronavirus 2
  REGION 1..13: note = Table B: HLA-DRB1*04:03L
TQDHVDILGPLSA

SEQ ID NO: 13126 - protein, 12 aa, Severe acute respiratory syndrome coronavirus 2
  REGION 1..12: note = Table B: HLA-DRB1*04:03L HLA-DRB1*04:02L HLA-DRB1*01:02L HLA-DRB4*03:01NL HLA-DRB1*12:01L HLA-DRB1*14:54L HLA-DRB1*14:17L HLA-DRB1*16:01L HLA-DQA1*02:01-B1*03:03L
DHVDILGPLSAQ

SEQ ID NO: 13127 - protein, 11 aa, Severe acute respiratory syndrome coronavirus 2
  REGION 1..11: note = Table B: HLA-DRB1*04:03L
VDILGPLSAQT

SEQ ID NO: 13128 - protein, 10 aa, Severe acute respiratory syndrome coronavirus 2
  REGION 1..10: note = Table B: HLA-DRB1*04:03L HLA-DRB1*14:17L
ILGPLSAQTG

SEQ ID NO: 13129 - protein, 13 aa, Severe acute respiratory syndrome coronavirus 2
  REGION 1..13: note = Table B: HLA-DRB1*04:03L HLA-DRB1*01:02L HLA-DRB1*12:01L HLA-DRB1*14:17L HLA-DRB1*16:01L HLA-DRB1*15:03L
LGPLSAQTGIAVL

SEQ ID NO: 13130 - protein, 13 aa, Severe acute respiratory syndrome coronavirus 2
  REGION 1..13: note = Table B: HLA-DRB1*04:03L HLA-DRB1*13:02L HLA-DRB1*13:03L HLA-DRB1*01:03L HLA-DRB1*04:02L HLA-DRB1*04:04L HLA-DRB1*04:05L HLA-DQA1*01:02-B1*06:02L HLA-DRB1*01:01L HLA-DRB1*01:02M HLA-DRB4*03:01NL HLA-DRB1*08:77L HLA-DRB3*02:01L
  REGION 1..13: note = CONT. FROM ABOVE: HLA-DPA1*01:03-B1*03:01L HLA-DRB1*14:01L HLA-D RB1*11:03L HLA-DRB1*14:02L HLA-DQA1*01-B1*05L HLA-DRB1*09:01L HL A-DRB1*12:01L HLA-DRB1*12:02L HLA-DPA1*03:01-B1*105:01L HLA-DRB1 *14:54L HLA-DRB1*14:17L HLA-DRB1*07:01L HLA-DRB1*10:01L
  REGION 1..13: note = CONT. FROM ABOVE: HLA-DRB1*16:01L HLA-DQA1*01:03-B1*06:01L HLA-D RB1*04:08L HLA-DRB1*15:03L
GPLSAQTGIAVLD

SEQ ID NO: 13131 - protein, 11 aa, Severe acute respiratory syndrome coronavirus 2
  REGION 1..11: note = Table B: HLA-DRB1*04:03L HLA-DQA1*01:02-B1*06:02L
IAVLDMCASLK

SEQ ID NO: 13132 - protein, 12 aa, Severe acute respiratory syndrome coronavirus 2
  REGION 1..12: note = Table B: HLA-DRB1*04:03L HLA-DRB1*01:02L HLA-DRB1*14:01L HLA-DQA1*05:01-B1*02:01L HLA-DRB1*12:01L HLA-DQA1*01:03-B1*06:01L
ASLKELLQNGMN

SEQ ID NO: 13133 - protein, 13 aa, Severe acute respiratory syndrome coronavirus 2
  REGION 1..13: note = Table B: HLA-DRB1*04:03L HLA-DQA1*01:02-B1*06:02L HLA-DRB1*01:02L HLA-DRB1*14:01L HLA-DPA1*03:01-B1*105:01L HLA-DQA1*01:03-B1*06:01L HLA-DQA1*02:01-B1*03:03L
LKELLQNGMNGRT

SEQ ID NO: 13134 - protein, 12 aa, Severe acute respiratory syndrome coronavirus 2
  REGION 1..12: note = Table B: HLA-DRB1*04:03L HLA-DQA1*01:02-B1*06:02L HLA-DQA1*01:03-B1*06:01L HLA-DQA1*02:01-B1*03:03L
ELLQNGMNGRTI

SEQ ID NO: 13135 - protein, 11 aa, Severe acute respiratory syndrome coronavirus 2
  REGION 1..11: note = Table B: HLA-DRB1*04:03L HLA-DPA1*03:01-B1*04:02L HLA-DPA1*03:01-B1*105:01L HLA-DQA1*03:01-B1*03:02L HLA-DPA1*01:02-B1*04:01L HLA-DQA1*01:03-B1*06:01L
ALLEDEFTPFD

SEQ ID NO: 13136 - protein, 11 aa, Severe acute respiratory syndrome coronavirus 2
  REGION 1..11: note = Table B: HLA-DRB1*04:03L HLA-DPA1*03:01-B1*04:02L HLA-DQA1*01:01-B1*05:01L
EDEFTPFDVVR

SEQ ID NO: 13137 - protein, 12 aa, Severe acute respiratory syndrome coronavirus 2
  REGION 1..12: note = Table B: HLA-DRB1*04:03L HLA-DQA1*01:02-B1*06:02L HLA-DPA1*03:01-B1*105:01L HLA-DRB1*04:08L
FTPFDVVRQCSG

SEQ ID NO: 13138 - protein, 13 aa, Severe acute respiratory syndrome coronavirus 2
  REGION 1..13: note = Table B: HLA-DRB1*04:03L HLA-DPA1*03:01-B1*105:01L HLA-DQA1*05:05-B1*03:01L HLA-DQA1*01:03-B1*06:01L HLA-DRB1*04:08L HLA-DQA1*02:01-B1*03:03L
TPFDVVRQCSGVT

SEQ ID NO: 13139 - protein, 14 aa, Severe acute respiratory syndrome coronavirus 2
  REGION 1..14: note = Table B: HLA-DRB1*04:03L HLA-DRB1*01:01L HLA-DRB1*14:02L HLA-DPA1*02:01-B1*13:01L HLA-DRB1*07:01L
SGVTFQSAVKRTIK

SEQ ID NO: 13140 - protein, 14 aa, Severe acute respiratory syndrome coronavirus 2
  REGION 1..14: note = Table B: HLA-DRB1*04:03L HLA-DRB1*01:01L HLA-DRB1*11:02L HLA-DRB1*14:02L HLA-DQA1*05:05-B1*03:19L HLA-DQA1*05:05-B1*03:116L HLA-DPA1*01:03-B1*04:02L HLA-DPA1*02:01-B1*13:01L HLA-DQA1*05:05-B1*03:01L
  REGION 1..14: note = CONT. FROM ABOVE: HLA-DRB1*07:01L HLA-DRB1*08:02L
GVTFQSAVKRTIKG

SEQ ID NO: 13141 - protein, 13 aa, Severe acute respiratory syndrome coronavirus 2
  REGION 1..13: note = Table B: HLA-DRB1*04:03L HLA-DRB1*01:02L HLA-DRB1*14:01L
TSLLVLVQSTQWS

SEQ ID NO: 13142 - protein, 13 aa, Severe acute respiratory syndrome coronavirus 2
  REGION 1..13: note = Table B: HLA-DRB1*04:03L HLA-DRB1*01:02L HLA-DPA1*01:03-B1*03:01L HLA-DRB1*14:01L HLA-DQA1*05:01-B1*02:01L HLA-DPA1*01:03-B1*04:01L HLA-DPA1*01:03-B1*04:02L HLA-DRB1*12:01L
  REGION 1..13: note = CONT. FROM ABOVE: HLA-DPA1*01:02-B1*04:01L HLA-DRB1*16:01L
ENAFLPFAMGIIA

SEQ ID NO: 13143 - protein, 12 aa, Severe acute respiratory syndrome coronavirus 2
  REGION 1..12: note = Table B: HLA-DRB1*04:03L HLA-DQA1*05:05-B1*03:19L HLA-DQA1*05:05-B1*03:01L HLA-DQA1*01:03-B1*06:01L
LPFAMGIIAMSA

SEQ ID NO: 13144 - protein, 12 aa, Severe acute respiratory syndrome coronavirus 2
  REGION 1..12: note = Table B: HLA-DRB1*04:03L HLA-DRB1*14:01L
AMGIIAMSAFAM

SEQ ID NO: 13145 - protein, 10 aa, Severe acute respiratory syndrome coronavirus 2
  REGION 1..10: note = Table B: HLA-DRB1*04:03L HLA-DQA1*01:02-B1*06:02L HLA-DRB1*01:02L HLA-DPA1*03:01-B1*04:02L HLA-DRB1*14:01L HLA-DQA1*05:01-B1*02:01L HLA-DRB1*12:01L HLA-DPA1*03:01-B1*105:01L HLA-DPA1*01:02-B1*04:01L
  REGION 1..10: note = CONT. FROM ABOVE: HLA-DQA1*01:03-B1*06:01L HLA-DRB1*15:03L
IIAMSAFAMM

SEQ ID NO: 13146 - protein, 13 aa, Severe acute respiratory syndrome coronavirus 2
  REGION 1..13: note = Table B: HLA-DRB1*04:03L HLA-DRB1*13:03L HLA-DRB1*04:04L HLA-DRB1*01:01L HLA-DRB1*08:04L HLA-DRB1*11:03L HLA-DRB1*11:04L HLA-DPA1*02:01-B1*13:01L HLA-DRB1*07:01L
SAFAMMFVKHKHA

SEQ ID NO: 13147 - protein, 11 aa, Severe acute respiratory syndrome coronavirus 2
  REGION 1..11: note = Table B: HLA-DRB1*04:03L HLA-DRB1*14:17L
LFLLPSLATVA

SEQ ID NO: 13148 - protein, 13 aa, Severe acute respiratory syndrome coronavirus 2
  REGION 1..13: note = Table B: HLA-DRB1*04:03L
ATVAYFNMVYMPA

SEQ ID NO: 13149 - protein, 12 aa, Severe acute respiratory syndrome coronavirus 2
  REGION 1..12: note = Table B: HLA-DRB1*04:03L HLA-DPA1*03:01-B1*04:02L HLA-DQA1*01-B1*05L HLA-DPA1*03:01-B1*105:01L
VAYFNMVYMPAS

SEQ ID NO: 13150 - protein, 13 aa, Severe acute respiratory syndrome coronavirus 2
  REGION 1..13: note = Table B: HLA-DRB1*04:03L HLA-DRB1*04:02L HLA-DRB1*04:05L HLA-DQA1*01:02-B1*06:02L HLA-DRB1*12:01L HLA-DRB1*16:01L HLA-DRB1*04:08L
VMRIMTWLDMVDT

SEQ ID NO: 13151 - protein, 12 aa, Severe acute respiratory syndrome coronavirus 2
  REGION 1..12: note = Table B: HLA-DRB1*04:03L HLA-DRB1*04:05L HLA-DQA1*01:02-B1*06:02L HLA-DPA1*03:01-B1*04:02L HLA-DQA1*05:01-B1*02:01L HLA-DPA1*03:01-B1*105:01L HLA-DRB1*15:03L
RIMTWLDMVDTS

SEQ ID NO: 13152 - protein, 10 aa, Severe acute respiratory syndrome coronavirus 2
  REGION 1..10: note = Table B: HLA-DRB1*04:03L HLA-DRB1*14:17L
LDMVDTSLSG

SEQ ID NO: 13153 - protein, 10 aa, Severe acute respiratory syndrome coronavirus 2
  REGION 1..10: note = Table B: HLA-DRB1*04:03L HLA-DRB1*04:02L HLA-DQA1*01:02-B1*06:02L HLA-DQA1*03:01-B1*03:02L HLA-DQA1*01:03-B1*06:01L HLA-DQA1*02:01-B1*03:03L
MTARTVYDDG

SEQ ID NO: 13154 - protein, 11 aa, Severe acute respiratory syndrome coronavirus 2
  REGION 1..11: note = Table B: HLA-DRB1*04:03L HLA-DRB1*04:02L HLA-DQA1*01-B1*05L HLA-DRB1*16:01L HLA-DQA1*02:01-B1*03:03L
TARTVYDDGAR

SEQ ID NO: 13155 - protein, 15 aa, Severe acute respiratory syndrome coronavirus 2
  REGION 1..15: note = Table B: HLA-DRB1*04:03L HLA-DRB1*01:03L HLA-DPA1*03:01-B1*04:02L HLA-DRB1*08:01L HLA-DRB1*11:01L HLA-DPA1*01:03-B1*04:01L HLA-DPA1*01:03-B1*04:02L HLA-DRB3*01:01L HLA-DQA1*03:01-B1*03:02L
  REGION 1..15: note = CONT. FROM ABOVE: HLA-DQA1*05:05-B1*03:01L HLA-DQA1*01:03-B1*06: 01L HLA-DQA1*02:01-B1*03:03L
DDGARRVWTLMNVLT

SEQ ID NO: 13156 - protein, 11 aa, Severe acute respiratory syndrome coronavirus 2
  REGION 1..11: note = Table B: HLA-DRB1*04:03L HLA-DQA1*01:03-B1*06:01L
TLMNVLTLVYK

SEQ ID NO: 13157 - protein, 13 aa, Severe acute respiratory syndrome coronavirus 2
  REGION 1..13: note = Table B: HLA-DRB1*04:03L HLA-DRB1*01:03L HLA-DRB1*01:02L HLA-DRB1*08:04L HLA-DPA1*01:03-B1*03:01L HLA-DRB1*08:01L HLA-DPA1*01:03-B1*04:01L HLA-DPA1*01:03-B1*04:02L HLA-DRB1*16:01L HLA-DQA1*01:03-B1*06:01L HLA-DRB1*04:08L
VLTLVYKVYYGNA

SEQ ID NO: 13158 - protein, 11 aa, Severe acute respiratory syndrome coronavirus 2
  REGION 1..11: note = Table B: HLA-DRB1*04:03L HLA-DRB1*01:02L HLA-DRB1*12:01L
VYKVYYGNALD

SEQ ID NO: 13159 - protein, 10 aa, Severe acute respiratory syndrome coronavirus 2
  REGION 1..10: note = Table B: HLA-DRB1*04:03L HLA-DRB1*04:02L HLA-DQA1*01-B1*05L HLA-DQA1*03:01-B1*03:02L HLA-DRB1*14:17L HLA-DRB1*16:01L HLA-DQA1*02:01-B1*03:03L HLA-DRB1*15:03L
KVYYGNALDQ

SEQ ID NO: 13160 - protein, 11 aa, Severe acute respiratory syndrome coronavirus 2
  REGION 1..11: note = Table B: HLA-DRB1*04:03L HLA-DQA1*01-B1*05L HLA-DQA1*05:01-B1*02:01L HLA-DQA1*03:01-B1*03:02L HLA-DRB1*14:17L
YYGNALDQAIS

SEQ ID NO: 13161 - protein, 13 aa, Severe acute respiratory syndrome coronavirus 2
  REGION 1..13: note = Table B: HLA-DRB1*04:03L HLA-DQA1*01:02-B1*06:02L HLA-DPA1*03:01-B1*105:01L HLA-DQA1*05:05-B1*03:01L
ISMWALIISVTSN

SEQ ID NO: 13162 - protein, 11 aa, Severe acute respiratory syndrome coronavirus 2
  REGION 1..11: note = Table B: HLA-DRB1*04:03L HLA-DRB1*14:17L
ALIISVTSNYS

SEQ ID NO: 13163 - protein, 10 aa, Severe acute respiratory syndrome coronavirus 2
  REGION 1..10: note = Table B: HLA-DRB1*04:03M HLA-DRB1*13:03L HLA-DRB1*01:03L HLA-DRB1*04:02L HLA-DRB1*04:04L HLA-DRB1*04:05L HLA-DRB4*03:01NL HLA-DRB1*11:04L HLA-DQA1*05:01-B1*02:01L HLA-DRB1*04:10M HLA-DRB1*12:01L HLA-DQA1*03:01-B1*03:02L HLA-DRB1*14:54L
  REGION 1..10: note = CONT. FROM ABOVE: HLA-DRB1*14:17M HLA-DRB1*10:01L HLA-DRB1*16:01 L HLA-DRB1*04:08L HLA-DRB1*08:03L HLA-DQA1*02:01-B1*03:03L
IISVTSNYSG

SEQ ID NO: 13164 - protein, 11 aa, Severe acute respiratory syndrome coronavirus 2
  REGION 1..11: note = Table B: HLA-DRB1*04:03L
ISVTSNYSGVV

SEQ ID NO: 13165 - protein, 11 aa, Severe acute respiratory syndrome coronavirus 2
  REGION 1..11: note = Table B: HLA-DRB1*04:03L HLA-DRB1*13:02L HLA-DRB1*01:03L HLA-DRB1*04:02L HLA-DRB4*03:01NL HLA-DRB1*08:77L HLA-DRB3*02:01L HLA-DPA1*01:03-B1*03:01L HLA-DPA1*01:03-B1*04:01L HLA-DPA1*01:03-B1*04:02L HLA-DRB1*12:01L HLA-DRB1*07:01L
  REGION 1..11: note = CONT. FROM ABOVE: HLA-DRB1*04:08L
SNYSGVVTTVM

SEQ ID NO: 13166 - protein, 11 aa, Severe acute respiratory syndrome coronavirus 2
  REGION 1..11: note = Table B: HLA-DRB1*04:03L HLA-DRB1*04:05L HLA-DRB4*01:01L
NYSGVVTTVMF

SEQ ID NO: 13167 - protein, 11 aa, Severe acute respiratory syndrome coronavirus 2
  REGION 1..11: note = Table B: HLA-DRB1*04:03L HLA-DRB1*01:03L HLA-DRB1*01:01L HLA-DRB1*14:02L HLA-DPA1*01:03-B1*04:01L HLA-DPA1*03:01-B1*105:01L HLA-DRB1*16:01L HLA-DQA1*02:01-B1*03:03L
VYDYLVSTQEF

SEQ ID NO: 13168 - protein, 11 aa, Severe acute respiratory syndrome coronavirus 2
  REGION 1..11: note = Table B: HLA-DRB1*04:03L HLA-DRB1*04:02L HLA-DRB1*14:17L
YDYLVSTQEFR

SEQ ID NO: 13169 - protein, 11 aa, Severe acute respiratory syndrome coronavirus 2
  REGION 1..11: note = Table B: HLA-DRB1*04:03L HLA-DRB1*04:02L HLA-DQA1*01-B1*05L HLA-DQA1*03:01-B1*03:02L HLA-DRB1*14:17L
TQEFRYMNSQG

SEQ ID NO: 13170 - protein, 10 aa, Severe acute respiratory syndrome coronavirus 2
  REGION 1..10: note = Table B: HLA-DRB1*04:03L HLA-DRB1*13:03L HLA-DRB1*04:02L HLA-DRB4*03:01NL HLA-DQA1*03:01-B1*03:02L HLA-DRB1*14:17L HLA-DQA1*01:03-B1*06:01L HLA-DQA1*02:01-B1*03:03L
MNSQGLLPPK

SEQ ID NO: 13171 - protein, 10 aa, Severe acute respiratory syndrome coronavirus 2
  REGION 1..10: note = Table B: HLA-DRB1*04:03L HLA-DQA1*03:01-B1*03:02L
GLLPPKNSID

SEQ ID NO: 13172 - protein, 10 aa, Severe acute respiratory syndrome coronavirus 2
  REGION 1..10: note = Table B: HLA-DRB1*04:03L HLA-DQA1*03:01-B1*03:02L HLA-DRB1*14:17L
LLPPKNSIDA

SEQ ID NO: 13173 - protein, 10 aa, Severe acute respiratory syndrome coronavirus 2
  REGION 1..10: note = Table B: HLA-DRB1*04:03L
IKLLGVGGKP

SEQ ID NO: 13174 - protein, 10 aa, Severe acute respiratory syndrome coronavirus 2
  REGION 1..10: note = Table B: HLA-DRB1*04:03L HLA-DQA1*03:01-B1*03:02L HLA-DQA1*01:03-B1*06:01L HLA-DQA1*02:01-B1*03:03L
IKVATVQSKM

SEQ ID NO: 13175 - protein, 11 aa, Severe acute respiratory syndrome coronavirus 2
  REGION 1..11: note = Table B: HLA-DRB1*04:03L
TSVVLLSVLQQ

SEQ ID NO: 13176 - protein, 11 aa, Severe acute respiratory syndrome coronavirus 2
  REGION 1..11: note = Table B: HLA-DRB1*04:03L HLA-DRB1*04:02L HLA-DQA1*01:02-B1*06:02L HLA-DRB1*12:01L HLA-DPA1*03:01-B1*105:01L HLA-DRB1*14:17L HLA-DPA1*01:02-B1*04:01L
VVLLSVLQQLR

SEQ ID NO: 13177 - protein, 10 aa, Severe acute respiratory syndrome coronavirus 2
  REGION 1..10: note = Table B: HLA-DRB1*04:03L HLA-DRB1*14:17L
VLQQLRVESS

SEQ ID NO: 13178 - protein, 11 aa, Severe acute respiratory syndrome coronavirus 2
  REGION 1..11: note = Table B: HLA-DRB1*04:03L HLA-DRB1*14:17L
LQQLRVESSSK

SEQ ID NO: 13179 - protein, 13 aa, Severe acute respiratory syndrome coronavirus 2
  REGION 1..13: note = Table B: HLA-DRB1*04:03L HLA-DQA1*01:02-B1*06:02L HLA-DPA1*03:01-B1*105:01L HLA-DQA1*01:03-B1*06:01L HLA-DQA1*02:01-B1*03:03L
VQLHNDILLAKDT

SEQ ID NO: 13180 - protein, 10 aa, Severe acute respiratory syndrome coronavirus 2
  REGION 1..10: note = Table B: HLA-DRB1*04:03L HLA-DQA1*01-B1*05L HLA-DQA1*05:01-B1*02:01L
LAKDTTEAFE

SEQ ID NO: 13181 - protein, 11 aa, Severe acute respiratory syndrome coronavirus 2
  REGION 1..11: note = Table B: HLA-DRB1*04:03L HLA-DRB1*14:17L
EAFEKMVSLLS

SEQ ID NO: 13182 - protein, 11 aa, Severe acute respiratory syndrome coronavirus 2
  REGION 1..11: note = Table B: HLA-DRB1*04:03L HLA-DRB1*04:02L HLA-DRB1*04:05L HLA-DQA1*01:02-B1*06:02L HLA-DRB1*01:02L HLA-DPA1*01:03-B1*03:01L HLA-DPA1*03:01-B1*04:02L HLA-DRB1*14:01L HLA-DRB1*12:01L HLA-DPA1*03:01-B1*105:01L
  REGION 1..11: note = CONT. FROM ABOVE: HLA-DRB1*14:17L HLA-DRB1*04:08L HLA-DQA1*02:01 -B1*03:03L HLA-DRB1*15:03L
FEKMVSLLSVL

SEQ ID NO: 13183 - protein, 12 aa, Severe acute respiratory syndrome coronavirus 2
  REGION 1..12: note = Table B: HLA-DRB1*04:03L
VSLLSVLLSMQG

SEQ ID NO: 13184 - protein, 11 aa, Severe acute respiratory syndrome coronavirus 2
  REGION 1..11: note = Table B: HLA-DRB1*04:03L
SVLLSMQGAVD

SEQ ID NO: 13185 - protein, 12 aa, Severe acute respiratory syndrome coronavirus 2
  REGION 1..12: note = Table B: HLA-DRB1*04:03L
VLLSMQGAVDIN

SEQ ID NO: 13186 - protein, 14 aa, Severe acute respiratory syndrome coronavirus 2
  REGION 1..14: note = Table B: HLA-DRB1*04:03L HLA-DRB1*01:03L HLA-DRB1*04:04L HLA-DPA1*03:01-B1*04:02L HLA-DRB1*14:01L HLA-DQA1*01-B1*05L HLA-DPA1*01:02-B1*04:01L HLA-DRB1*07:01L HLA-DRB1*04:08L
VDINKLCEEMLDNR

SEQ ID NO: 13187 - protein, 12 aa, Severe acute respiratory syndrome coronavirus 2
  REGION 1..12: note = Table B: HLA-DRB1*04:03L HLA-DRB1*04:05L
KLCEEMLDNRAT

SEQ ID NO: 13188 - protein, 11 aa, Severe acute respiratory syndrome coronavirus 2
  REGION 1..11: note = Table B: HLA-DRB1*04:03L HLA-DRB1*14:17L
EEMLDNRATLQ

SEQ ID NO: 13189 - protein, 12 aa, Severe acute respiratory syndrome coronavirus 2
  REGION 1..12: note = Table B: HLA-DRB1*04:03L HLA-DRB1*04:02L HLA-DRB1*04:05L HLA-DRB1*04:10L HLA-DRB1*12:01L HLA-DRB1*14:54L HLA-DRB1*14:17L
RATLQAIASEFS

SEQ ID NO: 13190 - protein, 12 aa, Severe acute respiratory syndrome coronavirus 2
  REGION 1..12: note = Table B: HLA-DRB1*04:03L HLA-DRB1*04:02L HLA-DRB1*04:10L HLA-DRB1*14:17L
ATLQAIASEFSS

SEQ ID NO: 13191 - protein, 11 aa, Severe acute respiratory syndrome coronavirus 2
  REGION 1..11: note = Table B: HLA-DRB1*04:03L
PSYAAFATAQE

SEQ ID NO: 13192 - protein, 11 aa, Severe acute respiratory syndrome coronavirus 2
  REGION 1..11: note = Table B: HLA-DRB1*04:03L
AAFATAQEAYE

SEQ ID NO: 13193 - protein, 12 aa, Severe acute respiratory syndrome coronavirus 2
  REGION 1..12: note = Table B: HLA-DRB1*04:03L HLA-DQA1*01-B1*05L HLA-DQA1*05:01-B1*02:01L HLA-DQA1*03:01-B1*03:02L
QEAYEQAVANGD

SEQ ID NO: 13194 - protein, 10 aa, Severe acute respiratory syndrome coronavirus 2
  REGION 1..10: note = Table B: HLA-DRB1*04:03L HLA-DRB1*04:05L HLA-DQA1*03:01-B1*03:02L HLA-DRB1*14:17L
YEQAVANGDS

SEQ ID NO: 13195 - protein, 12 aa, Severe acute respiratory syndrome coronavirus 2
  REGION 1..12: note = Table B: HLA-DRB1*04:03L HLA-DQA1*01-B1*05L HLA-DQA1*05:01-B1*02:01L HLA-DQA1*03:01-B1*03:02L HLA-DQA1*02:01-B1*03:03L
EQAVANGDSEVV

SEQ ID NO: 13196 - protein, 18 aa, Severe acute respiratory syndrome coronavirus 2
  REGION 1..18: note = Table B: HLA-DRB1*04:03L HLA-DPA1*01:03-B1*03:01L HLA-DQA1*05:05-B1*03:116L HLA-DPA1*01:03-B1*104:01L
GDSEVVLKKLKKSLNVAK

SEQ ID NO: 13197 - protein, 11 aa, Severe acute respiratory syndrome coronavirus 2
  REGION 1..11: note = Table B: HLA-DRB1*04:03L
KSLNVAKSEFD

SEQ ID NO: 13198 - protein, 10 aa, Severe acute respiratory syndrome coronavirus 2
  REGION 1..10: note = Table B: HLA-DRB1*04:03L HLA-DRB1*04:05L HLA-DQA1*03:01-B1*03:02L HLA-DRB1*14:17L HLA-DQA1*02:01-B1*03:03L
LNVAKSEFDR

SEQ ID NO: 13199 - protein, 11 aa, Severe acute respiratory syndrome coronavirus 2
  REGION 1..11: note = Table B: HLA-DRB1*04:03L HLA-DQA1*01-B1*05L HLA-DQA1*03:01-B1*03:02L HLA-DQA1*02:01-B1*03:03L
VAKSEFDRDAA

SEQ ID NO: 13200 - protein, 10 aa, Severe acute respiratory syndrome coronavirus 2
  REGION 1..10: note = Table B: HLA-DRB1*04:03L HLA-DRB1*13:02L HLA-DRB1*13:03L HLA-DRB1*01:03L HLA-DRB1*01:02L HLA-DRB1*03:01L HLA-DRB1*14:01L HLA-DRB3*01:01L HLA-DQA1*03:01-B1*03:02L HLA-DPA1*01:02-B1*04:01L HLA-DRB1*16:01L
FDRDAAMQRK

SEQ ID NO: 13201 - protein, 10 aa, Severe acute respiratory syndrome coronavirus 2
  REGION 1..10: note = Table B: HLA-DRB1*04:03L HLA-DQA1*01-B1*05L
LEKMADQAMT

SEQ ID NO: 13202 - protein, 13 aa, Severe acute respiratory syndrome coronavirus 2
  REGION 1..13: note = Table B: HLA-DRB1*04:03L HLA-DRB1*13:03L HLA-DRB1*01:03L HLA-DRB1*04:05L HLA-DRB1*01:02L HLA-DRB1*08:04L HLA-DRB1*11:04L HLA-DRB1*12:01L HLA-DRB1*14:54L HLA-DRB1*14:17L HLA-DRB1*16:01L HLA-DRB1*04:08L
DQAMTQMYKQARS

SEQ ID NO: 13203 - protein, 12 aa, Severe acute respiratory syndrome coronavirus 2
  REGION 1..12: note = Table B: HLA-DRB1*04:03L HLA-DRB1*01:03L HLA-DRB1*04:02L HLA-DQA1*01:02-B1*06:02L HLA-DRB1*01:02L HLA-DRB1*14:01L HLA-DRB1*12:01L HLA-DQA1*03:01-B1*03:02L HLA-DPA1*01:02-B1*04:01L HLA-DRB1*16:01L
  REGION 1..12: note = CONT. FROM ABOVE: HLA-DQA1*01:03-B1*06:01L HLA-DQA1*02:01-B1*03: 03L HLA-DRB1*15:03L
MTQMYKQARSED

SEQ ID NO: 13204 - protein, 12 aa, Severe acute respiratory syndrome coronavirus 2
  REGION 1..12: note = Table B: HLA-DRB1*04:03L HLA-DRB1*04:02L HLA-DRB1*04:05L HLA-DRB1*01:02L HLA-DQA1*05:01-B1*02:01L HLA-DRB1*12:01L HLA-DPA1*02:01-B1*13:01L HLA-DQA1*03:01-B1*03:02L HLA-DRB1*16:01L HLA-DRB1*04:08L HLA-DRB1*15:03L
TMLRKLDNDALN

SEQ ID NO: 13205 - protein, 11 aa, Severe acute respiratory syndrome coronavirus 2
  REGION 1..11: note = Table B: HLA-DRB1*04:03L HLA-DRB1*04:02L HLA-DQA1*03:01-B1*03:02L HLA-DRB1*14:17L HLA-DRB1*16:01L
LRKLDNDALNN

SEQ ID NO: 13206 - protein, 12 aa, Severe acute respiratory syndrome coronavirus 2
  REGION 1..12: note = Table B: HLA-DRB1*04:03L HLA-DRB1*04:02L HLA-DPA1*01:03-B1*03:01L HLA-DQA1*01-B1*05L
KLDNDALNNIIN

SEQ ID NO: 13207 - protein, 12 aa, Severe acute respiratory syndrome coronavirus 2
  REGION 1..12: note = Table B: HLA-DRB1*04:03L HLA-DQA1*01:02-B1*06:02L
NDALNNIINNAR

SEQ ID NO: 13208 - protein, 10 aa, Severe acute respiratory syndrome coronavirus 2
  REGION 1..10: note = Table B: HLA-DRB1*04:03L HLA-DQA1*03:01-B1*03:02L HLA-DRB1*14:17L
LNNIINNARD

SEQ ID NO: 13209 - protein, 11 aa, Severe acute respiratory syndrome coronavirus 2
  REGION 1..11: note = Table B: HLA-DRB1*04:03L
IINNARDGCVP

SEQ ID NO: 13210 - protein, 10 aa, Severe acute respiratory syndrome coronavirus 2
  REGION 1..10: note = Table B: HLA-DRB1*04:03L HLA-DRB1*13:02L HLA-DRB1*13:03L HLA-DRB1*04:02L HLA-DRB1*01:01L HLA-DRB4*03:01NL HLA-DRB1*14:01L HLA-DRB1*11:04L HLA-DRB1*08:01L HLA-DRB1*12:01L HLA-DQA1*03:01-B1*03:02L HLA-DQA1*05:05-B1*03:01L
  REGION 1..10: note = CONT. FROM ABOVE: HLA-DRB1*14:17L HLA-DRB1*16:01L HLA-DQA1*02:01 -B1*03:03L
NIIPLTTAAK

SEQ ID NO: 13211 - protein, 10 aa, Severe acute respiratory syndrome coronavirus 2
  REGION 1..10: note = Table B: HLA-DRB1*04:03L HLA-DQA1*01:02-B1*06:02L HLA-DQA1*03:01-B1*03:02L
KLMVVIPDYN

SEQ ID NO: 13212 - protein, 10 aa, Severe acute respiratory syndrome coronavirus 2
  REGION 1..10: note = Table B: HLA-DRB1*04:03L HLA-DRB1*13:02L HLA-DRB1*13:03L HLA-DRB1*01:03L HLA-DRB1*04:02L HLA-DRB4*03:01NL HLA-DRB1*14:01L HLA-DQA1*01-B1*05L HLA-DRB1*12:01L HLA-DQA1*03:01-B1*03:02L HLA-DRB1*14:54L HLA-DQA1*05:05-B1*03:01L HLA-DRB1*14:17L
  REGION 1..10: note = CONT. FROM ABOVE: HLA-DRB1*16:01L HLA-DQA1*02:01-B1*03:03L
VVIPDYNTYK

SEQ ID NO: 13213 - protein, 11 aa, Severe acute respiratory syndrome coronavirus 2
  REGION 1..11: note = Table B: HLA-DRB1*04:03L HLA-DRB1*04:02L HLA-DRB1*14:17L
VIPDYNTYKNT

SEQ ID NO: 13214 - protein, 12 aa, Severe acute respiratory syndrome coronavirus 2
  REGION 1..12: note = Table B: HLA-DRB1*04:03L HLA-DRB1*04:02L HLA-DRB1*04:05L HLA-DQA1*01-B1*05L HLA-DQA1*03:01-B1*03:02L HLA-DRB1*16:01L HLA-DRB1*04:08L
YNTYKNTCDGTT

SEQ ID NO: 13215 - protein, 12 aa, Severe acute respiratory syndrome coronavirus 2
  REGION 1..12: note = Table B: HLA-DRB1*04:03L HLA-DQA1*01-B1*05L HLA-DQA1*05:01-B1*02:01L HLA-DRB1*12:01L HLA-DRB1*14:17L HLA-DRB1*15:03L
GTTFTYASALWE

SEQ ID NO: 13216 - protein, 13 aa, Severe acute respiratory syndrome coronavirus 2
  REGION 1..13: note = Table B: HLA-DRB1*04:03L HLA-DRB1*01:03L HLA-DRB1*01:02L HLA-DPA1*01:03-B1*03:01L HLA-DRB1*12:01L HLA-DPA1*02:01-B1*13:01L HLA-DQA1*03:01-B1*03:02L HLA-DPA1*01:03-B1*02:01L
TFTYASALWEIQQ

SEQ ID NO: 13217 - protein, 12 aa, Severe acute respiratory syndrome coronavirus 2
  REGION 1..12: note = Table B: HLA-DRB1*04:03L
SALWEIQQVVDA

SEQ ID NO: 13218 - protein, 11 aa, Severe acute respiratory syndrome coronavirus 2
  REGION 1..11: note = Table B: HLA-DRB1*04:03L HLA-DRB1*14:17L
WEIQQVVDADS

SEQ ID NO: 13219 - protein, 12 aa, Severe acute respiratory syndrome coronavirus 2
  REGION 1..12: note = Table B: HLA-DRB1*04:03L HLA-DRB1*04:05L HLA-DRB4*03:01NL HLA-DRB1*14:54L HLA-DQA1*05:05-B1*03:01L HLA-DRB1*14:17L HLA-DRB1*04:08L
VDADSKIVQLSE

SEQ ID NO: 13220 - protein, 11 aa, Severe acute respiratory syndrome coronavirus 2
  REGION 1..11: note = Table B: HLA-DRB1*04:03L HLA-DRB1*13:02L HLA-DRB1*04:02L HLA-DRB1*01:02L HLA-DRB1*14:54L HLA-DRB1*14:17L HLA-DPA1*01:02-B1*04:01L HLA-DRB1*07:01L
SKIVQLSEISM

SEQ ID NO: 13221 - protein, 10 aa, Severe acute respiratory syndrome coronavirus 2
  REGION 1..10: note = Table B: HLA-DRB1*04:03L HLA-DRB1*04:02L HLA-DRB1*14:17L HLA-DRB1*16:01L
ISMDNSPNLA

SEQ ID NO: 13222 - protein, 10 aa, Severe acute respiratory syndrome coronavirus 2
  REGION 1..10: note = Table B: HLA-DRB1*04:03L HLA-DRB1*01:03L HLA-DRB1*04:02L HLA-DRB1*01:02L HLA-DQA1*03:01-B1*03:02L HLA-DRB1*14:17L HLA-DQA1*02:01-B1*03:03L
TALRANSAVK

SEQ ID NO: 13223 - protein, 10 aa, Severe acute respiratory syndrome coronavirus 2
  REGION 1..10: note = Table B: HLA-DRB1*04:03L HLA-DQA1*01:02-B1*06:02L HLA-DQA1*03:01-B1*03:02L HLA-DRB1*14:17L HLA-DQA1*01:03-B1*06:01L HLA-DQA1*02:01-B1*03:03L
NSAVKLQNNE

SEQ ID NO: 13224 - protein, 10 aa, Severe acute respiratory syndrome coronavirus 2
  REGION 1..10: note = Table B: HLA-DRB1*04:03L HLA-DRB1*14:17L
VKLQNNELSP

SEQ ID NO: 13225 - protein, 10 aa, Severe acute respiratory syndrome coronavirus 2
  REGION 1..10: note = Table B: HLA-DRB1*04:03L HLA-DRB1*04:02L HLA-DRB1*14:17L
KLQNNELSPV

SEQ ID NO: 13226 - protein, 10 aa, Severe acute respiratory syndrome coronavirus 2
  REGION 1..10: note = Table B: HLA-DRB1*04:03L
LQNNELSPVA

SEQ ID NO: 13227 - protein, 10 aa, Severe acute respiratory syndrome coronavirus 2
  REGION 1..10: note = Table B: HLA-DRB1*04:03L HLA-DRB1*01:03L HLA-DQA1*03:01-B1*03:02L HLA-DRB1*14:17L HLA-DQA1*02:01-B1*03:03L
NELSPVALRQ

SEQ ID NO: 13228 - protein, 13 aa, Severe acute respiratory syndrome coronavirus 2
  REGION 1..13: note = Table B: HLA-DRB1*04:03L
SPVALRQMSCAAG

SEQ ID NO: 13229 - protein, 12 aa, Severe acute respiratory syndrome coronavirus 2
  REGION 1..12: note = Table B: HLA-DRB1*04:03L HLA-DQA1*01:02-B1*06:02L HLA-DQA1*05:05-B1*03:01L HLA-DQA1*01:03-B1*06:01L HLA-DQA1*02:01-B1*03:03L
LRQMSCAAGTTQ

SEQ ID NO: 13230 - protein, 11 aa, Severe acute respiratory syndrome coronavirus 2
  REGION 1..11: note = Table B: HLA-DRB1*04:03L HLA-DRB1*04:02L HLA-DQA1*01-B1*05L
DNALAYYNTTK

SEQ ID NO: 13231 - protein, 11 aa, Severe acute respiratory syndrome coronavirus 2
  REGION 1..11: note = Table B: HLA-DRB1*04:03L HLA-DRB1*04:02L HLA-DQA1*03:01-B1*03:02L HLA-DRB1*14:17L HLA-DQA1*02:01-B1*03:03L
NALAYYNTTKG

SEQ ID NO: 13232 - protein, 11 aa, Severe acute respiratory syndrome coronavirus 2
  REGION 1..11: note = Table B: HLA-DRB1*04:03L
LAYYNTTKGGR

SEQ ID NO: 13233 - protein, 13 aa, Severe acute respiratory syndrome coronavirus 2
  REGION 1..13: note = Table B: HLA-DRB1*04:03L HLA-DRB1*04:05L HLA-DRB1*12:01L
GRFVLALLSDLQD

SEQ ID NO: 13234 - protein, 11 aa, Severe acute respiratory syndrome coronavirus 2
  REGION 1..11: note = Table B: HLA-DRB1*04:03L HLA-DQA1*01-B1*05L
VLALLSDLQDL

SEQ ID NO: 13235 - protein, 10 aa, Severe acute respiratory syndrome coronavirus 2
  REGION 1..10: note = Table B: HLA-DRB1*04:03L HLA-DRB1*13:03L HLA-DRB1*04:02L HLA-DRB1*04:05L HLA-DRB4*03:01NL HLA-DQA1*01-B1*05L HLA-DQA1*05:01-B1*02:01L HLA-DRB1*12:01L HLA-DPA1*03:01-B1*105:01L HLA-DQA1*03:01-B1*03:02L
  REGION 1..10: note = CONT. FROM ABOVE: HLA-DRB1*14:54L HLA-DRB1*14:17L HLA-DRB1*16:01 L HLA-DQA1*01:03-B1*06:01L HLA-DQA1*02:01-B1*03:03L
ALLSDLQDLK

SEQ ID NO: 13236 - protein, 11 aa, Severe acute respiratory syndrome coronavirus 2
  REGION 1..11: note = Table B: HLA-DRB1*04:03L HLA-DRB1*14:17L
WARFPKSDGTG

SEQ ID NO: 13237 - protein, 11 aa, Severe acute respiratory syndrome coronavirus 2
  REGION 1..11: note = Table B: HLA-DRB1*04:03L HLA-DRB1*01:03M HLA-DQA1*01:02-B1*06:02M HLA-DRB1*08:77L HLA-DPA1*01:03-B1*03:01L HLA-DRB1*03:01L HLA-DRB1*11:03L HLA-DRB1*14:02L HLA-DRB1*11:01L HLA-DRB5*01:01L
  REGION 1..11: note = CONT. FROM ABOVE: HLA-DQA1*05:01-B1*02:01L HLA-DPA1*01:03-B1*04: 01L HLA-DQA1*05:05-B1*03:116L HLA-DPA1*01:03-B1*04:02L HLA-DRB1* 12:01L HLA-DPA1*03:01-B1*105:01M HLA-DRB1*10:01L HLA-DRB1*16:01L HLA-DQA1*01:03-B1*06:01L HLA-DRB1*08:02L
  REGION 1..11: note = CONT. FROM ABOVE: HLA-DQA1*02:01-B1*03:03L HLA-DRB1*15:03L
FPKSDGTGTIY

SEQ ID NO: 13238 - protein, 11 aa, Severe acute respiratory syndrome coronavirus 2
  REGION 1..11: note = Table B: HLA-DRB1*04:03L HLA-DRB1*01:03L HLA-DPA1*03:01-B1*04:02L HLA-DRB1*12:01L HLA-DRB1*04:08L
TIYTELEPPCR

SEQ ID NO: 13239 - protein, 11 aa, Severe acute respiratory syndrome coronavirus 2
  REGION 1..11: note = Table B: HLA-DRB1*04:03L HLA-DRB1*04:05L HLA-DPA1*02:01-B1*13:01 M
IYTELEPPCRF

SEQ ID NO: 13240 - protein, 11 aa, Severe acute respiratory syndrome coronavirus 2
  REGION 1..11: note = Table B: HLA-DRB1*04:03L HLA-DQA1*01:02-B1*06:02L HLA-DPA1*03:01-B1*04:02L HLA-DQA1*03:01-B1*03:02L HLA-DPA1*01:02-B1*04:01L HLA-DRB1*16:01L
LYFIKGLNNLN

SEQ ID NO: 13241 - protein, 10 aa, Severe acute respiratory syndrome coronavirus 2
  REGION 1..10: note = Table B: HLA-DRB1*04:03L HLA-DRB1*01:03L HLA-DRB1*04:02L HLA-DQA1*03:01-B1*03:02L HLA-DRB1*14:17L HLA-DQA1*02:01-B1*03:03L
IKGLNNLNRG

SEQ ID NO: 13242 - protein, 13 aa, Severe acute respiratory syndrome coronavirus 2
  REGION 1..13: note = Table B: HLA-DRB1*04:03L HLA-DRB1*01:02L HLA-DPA1*01:03-B1*03:01L HLA-DQA1*05:01-B1*02:01L HLA-DRB1*15:03L
LNNLNRGMVLGSL

SEQ ID NO: 13243 - protein, 12 aa, Severe acute respiratory syndrome coronavirus 2
  REGION 1..12: note = Table B: HLA-DRB1*04:03L HLA-DRB1*01:02L
NLNRGMVLGSLA

SEQ ID NO: 13244 - protein, 10 aa, Severe acute respiratory syndrome coronavirus 2
  REGION 1..10: note = Table B: HLA-DRB1*04:03L HLA-DRB1*04:02L HLA-DQA1*01:02-B1*06:02L HLA-DRB1*14:01L HLA-DQA1*01:03-B1*06:01L HLA-DQA1*02:01-B1*03:03L
LAATVRLQAG

SEQ ID NO: 13245 - protein, 11 aa, Severe acute respiratory syndrome coronavirus 2
  REGION 1..11: note = Table B: HLA-DRB1*04:03L HLA-DRB1*04:02L HLA-DRB1*14:17L HLA-DQA1*02:01-B1*03:03L
ATVRLQAGNAT

SEQ ID NO: 13246 - protein, 11 aa, Severe acute respiratory syndrome coronavirus 2
  REGION 1..11: note = Table B: HLA-DRB1*04:03L
TVRLQAGNATE

SEQ ID NO: 13247 - protein, 12 aa, Severe acute respiratory syndrome coronavirus 2
  REGION 1..12: note = Table B: HLA-DRB1*04:03L
GNATEVPANSTV

SEQ ID NO: 13248 - protein, 11 aa, Severe acute respiratory syndrome coronavirus 2
  REGION 1..11: note = Table B: HLA-DRB1*04:03L HLA-DRB1*04:02L HLA-DRB1*14:01L HLA-DRB1*12:01L
ATEVPANSTVL

SEQ ID NO: 13249 - protein, 12 aa, Severe acute respiratory syndrome coronavirus 2
  REGION 1..12: note = Table B: HLA-DRB1*04:03L HLA-DRB4*03:01NL HLA-DPA1*01:03-B1*03:01L HLA-DRB1*03:01L HLA-DRB1*12:01L
TEVPANSTVLSF

SEQ ID NO: 13250 - protein, 12 aa, Severe acute respiratory syndrome coronavirus 2
  REGION 1..12: note = Table B: HLA-DRB1*04:03L HLA-DRB1*04:02L HLA-DRB1*16:01L HLA-DRB1*15:03L
DAAKAYKDYLAS

SEQ ID NO: 13251 - protein, 12 aa, Severe acute respiratory syndrome coronavirus 2
  REGION 1..12: note = Table B: HLA-DRB1*04:03L HLA-DRB1*04:02L HLA-DRB1*04:05L HLA-DRB1*01:02L HLA-DRB1*12:01L HLA-DPA1*02:01-B1*13:01L HLA-DQA1*03:01-B1*03:02L HLA-DRB1*16:01L HLA-DQA1*02:01-B1*03:03L HLA-DRB1*15:03L
AAKAYKDYLASG

SEQ ID NO: 13252 - protein, 12 aa, Severe acute respiratory syndrome coronavirus 2
  REGION 1..12: note = Table B: HLA-DRB1*04:03L HLA-DRB1*04:02L HLA-DRB1*16:01L HLA-DRB1*15:03L
AKAYKDYLASGG

SEQ ID NO: 13253 - protein, 13 aa, Severe acute respiratory syndrome coronavirus 2
  REGION 1..13: note = Table B: HLA-DRB1*04:03L HLA-DRB1*01:03L HLA-DRB1*04:05L HLA-DRB1*01:02L HLA-DRB1*12:01L HLA-DPA1*02:01-B1*13:01L HLA-DPA1*03:01-B1*105:01L HLA-DPA1*01:02-B1*04:01L HLA-DRB1*16:01L HLA-DRB1*04:08L HLA-DRB1*15:03L
KAYKDYLASGGQP

SEQ ID NO: 13254 - protein, 13 aa, Severe acute respiratory syndrome coronavirus 2
  REGION 1..13: note = Table B: HLA-DRB1*04:03L HLA-DRB1*01:03L HLA-DRB1*04:02L HLA-DQA1*01:01-B1*05:01L HLA-DQA1*05:01-B1*02:01L HLA-DRB1*04:08L
HTGTGQAITVTPE

SEQ ID NO: 13255 - protein, 10 aa, Severe acute respiratory syndrome coronavirus 2
  REGION 1..10: note = Table B: HLA-DRB1*04:03L HLA-DQA1*05:01-B1*02:01L HLA-DQA1*03:01-B1*03:02L HLA-DRB1*14:17L HLA-DQA1*02:01-B1*03:03L
ITVTPEANMD

SEQ ID NO: 13256 - protein, 11 aa, Severe acute respiratory syndrome coronavirus 2
  REGION 1..11: note = Table B: HLA-DRB1*04:03L HLA-DQA1*03:01-B1*03:02L HLA-DRB1*14:17L
VTPEANMDQES

SEQ ID NO: 13257 - protein, 10 aa, Severe acute respiratory syndrome coronavirus 2
  REGION 1..10: note = Table B: HLA-DRB1*04:03L
KGKYVQIPTT

SEQ ID NO: 13258 - protein, 10 aa, Severe acute respiratory syndrome coronavirus 2
  REGION 1..10: note = Table B: HLA-DRB1*04:03L HLA-DRB1*14:17L HLA-DRB1*04:08L
YVQIPTTCAN

SEQ ID NO: 13259 - protein, 12 aa, Severe acute respiratory syndrome coronavirus 2
  REGION 1..12: note = Table B: HLA-DRB1*04:03L
NDPVGFTLKNTV

SEQ ID NO: 13260 - protein, 13 aa, Severe acute respiratory syndrome coronavirus 2
  REGION 1..13: note = Table B: HLA-DRB1*04:03L HLA-DRB1*04:02L HLA-DQA1*01:02-B1*06:02L HLA-DQA1*03:01-B1*03:02L HLA-DQA1*01:03-B1*06:01L HLA-DQA1*02:01-B1*03:03L
DQLREPMLQSADA

SEQ ID NO: 13261 - protein, 12 aa, Severe acute respiratory syndrome coronavirus 2
  REGION 1..12: note = Table B: HLA-DRB1*04:03L HLA-DQA1*02:01-B1*03:03L
LREPMLQSADAQ

SEQ ID NO: 13262 - protein, 12 aa, Severe acute respiratory syndrome coronavirus 2
  REGION 1..12: note = Table B: HLA-DRB1*04:03L HLA-DRB1*04:02L HLA-DRB1*04:05L HLA-DQA1*01-B1*05L HLA-DRB1*04:10L HLA-DRB1*14:17L HLA-DQA1*02:01-B1*03:03L
REPMLQSADAQS

SEQ ID NO: 13263 - protein, 13 aa, Severe acute respiratory syndrome coronavirus 2
  REGION 1..13: note = Table B: HLA-DRB1*04:03L HLA-DRB1*04:02L HLA-DRB1*04:05L HLA-DQA1*01:02-B1*06:02L HLA-DRB1*04:10L HLA-DRB1*14:17L
AARLTPCGTGTST

SEQ ID NO: 13264 - protein, 13 aa, Severe acute respiratory syndrome coronavirus 2
  REGION 1..13: note = Table B: HLA-DRB1*04:03L HLA-DRB1*14:17L HLA-DQA1*01:03-B1*06:01L
ARLTPCGTGTSTD

SEQ ID NO: 13265 - protein, 12 aa, Severe acute respiratory syndrome coronavirus 2
  REGION 1..12: note = Table B: HLA-DRB1*04:03L
GTSTDVVYRAFD

SEQ ID NO: 13266 - protein, 10 aa, Severe acute respiratory syndrome coronavirus 2
  REGION 1..10: note = Table B: HLA-DRB1*04:03L HLA-DRB1*01:02L HLA-DQA1*01-B1*05L HLA-DRB1*16:01L HLA-DRB1*15:03L
VVYRAFDIYN

SEQ ID NO: 13267 - protein, 11 aa, Severe acute respiratory syndrome coronavirus 2
  REGION 1..11: note = Table B: HLA-DRB1*04:03L HLA-DRB1*13:03L HLA-DRB1*01:03L HLA-DRB1*04:05L HLA-DRB1*08:01L HLA-DQA1*01-B1*05L HLA-DPA1*01:02-B1*04:01L HLA-DRB1*16:01L HLA-DRB1*04:08L HLA-DQA1*02:01-B1*03:03L
VYRAFDIYNDK

SEQ ID NO: 13268 - protein, 11 aa, Severe acute respiratory syndrome coronavirus 2
  REGION 1..11: note = Table B: HLA-DRB1*04:03L HLA-DRB1*04:02L
RAFDIYNDKVA

SEQ ID NO: 13269 - protein, 10 aa, Severe acute respiratory syndrome coronavirus 2
  REGION 1..10: note = Table B: HLA-DRB1*04:03L HLA-DRB1*14:01L HLA-DQA1*01-B1*05L HLA-DQA1*05:01-B1*02:01L HLA-DPA1*03:01-B1*105:01L HLA-DQA1*03:01-B1*03:02L HLA-DPA1*01:02-B1*04:01L HLA-DRB1*16:01L HLA-DRB1*15:03L
IYNDKVAGFA

SEQ ID NO: 13270 - protein, 13 aa, Severe acute respiratory syndrome coronavirus 2
  REGION 1..13: note = Table B: HLA-DRB1*04:03L HLA-DRB1*13:03L HLA-DRB1*04:02L HLA-DRB1*04:04L HLA-DRB1*04:05L HLA-DRB1*08:04L HLA-DPA1*01:03-B1*03:01L HLA-DRB1*03:01L HLA-DRB1*11:04L HLA-DRB1*11:01L HLA-DQA1*01-B1*05L HLA-DQA1*05:05-B1*03:19L
  REGION 1..13: note = CONT. FROM ABOVE: HLA-DQA1*05:01-B1*02:01L HLA-DRB3*01:01L HLA-D PA1*02:01-B1*13:01L HLA-DPA1*01:03-B1*02:01L HLA-DQA1*05:05-B1*0 3:01L
DKVAGFAKFLKTN

SEQ ID NO: 13271 - protein, 12 aa, Severe acute respiratory syndrome coronavirus 2
  REGION 1..12: note = Table B: HLA-DRB1*04:03L
FQEKDEDDNLID

SEQ ID NO: 13272 - protein, 10 aa, Severe acute respiratory syndrome coronavirus 2
  REGION 1..10: note = Table B: HLA-DRB1*04:03L HLA-DRB1*01:03L HLA-DRB1*04:05L HLA-DQA1*01:02-B1*06:02L HLA-DRB1*01:01L HLA-DRB1*01:02L HLA-DQA1*01:01-B1*05:01L HLA-DRB1*11:01L HLA-DRB1*12:01L HLA-DPA1*02:01-B1*13:01L HLA-DPA1*01:02-B1*04:01L
  REGION 1..10: note = CONT. FROM ABOVE: HLA-DRB1*16:01L HLA-DQA1*01:03-B1*06:01M HLA-D QA1*02:01-B1*03:03L HLA-DRB1*15:03L
SYFVVKRHTF

SEQ ID NO: 13273 - protein, 11 aa, Severe acute respiratory syndrome coronavirus 2
  REGION 1..11: note = Table B: HLA-DRB1*04:03L HLA-DRB1*13:03L HLA-DRB1*04:02L HLA-DQA1*01:02-B1*06:02L HLA-DRB1*16:01L
HTFSNYQHEET

SEQ ID NO: 13274 - protein, 11 aa, Severe acute respiratory syndrome coronavirus 2
  REGION 1..11: note = Table B: HLA-DRB1*04:03L HLA-DRB1*14:17L
TIYNLLKDCPA

SEQ ID NO: 13275 - protein, 11 aa, Severe acute respiratory syndrome coronavirus 2
  REGION 1..11: note = Table B: HLA-DRB1*04:03L HLA-DRB1*04:02L HLA-DRB1*01:02L HLA-DRB1*14:17L HLA-DRB1*16:01L HLA-DRB1*04:08L
YNLLKDCPAVA

SEQ ID NO: 13276 - protein, 13 aa, Severe acute respiratory syndrome coronavirus 2
  REGION 1..13: note = Table B: HLA-DRB1*04:03L HLA-DRB1*04:05L HLA-DRB3*01:01L HLA-DPA1*01:02-B1*04:01L HLA-DRB1*15:03L
IDGDMVPHISRQR

SEQ ID NO: 13277 - protein, 13 aa, Severe acute respiratory syndrome coronavirus 2
  REGION 1..13: note = Table B: HLA-DRB1*04:03L HLA-DRB1*04:02L HLA-DRB1*03:01L HLA-DRB1*11:03L HLA-DRB1*11:01L HLA-DPA1*03:01-B1*105:01L HLA-DPA1*01:02-B1*04:01L
GDMVPHISRQRLT

SEQ ID NO: 13278 - protein, 12 aa, Severe acute respiratory syndrome coronavirus 2
  REGION 1..12: note = Table B: HLA-DRB1*04:03L HLA-DPA1*03:01-B1*105:01L HLA-DRB1*15:03L
LTKYTMADLVYA

SEQ ID NO: 13279 - protein, 13 aa, Severe acute respiratory syndrome coronavirus 2
  REGION 1..13: note = Table B: HLA-DRB1*04:03L HLA-DRB1*04:05L HLA-DRB1*12:01L HLA-DPA1*02:01-B1*13:01L HLA-DRB1*04:08L
YALRHFDEGNCDT

SEQ ID NO: 13280 - protein, 14 aa, Severe acute respiratory syndrome coronavirus 2
  REGION 1..14: note = Table B: HLA-DRB1*04:03L HLA-DRB1*04:05L HLA-DQA1*01:02-B1*06:02L HLA-DPA1*01:03-B1*03:01L HLA-DPA1*03:01-B1*105:01L
LKEILVTYNCCDDD

SEQ ID NO: 13281 - protein, 11 aa, Severe acute respiratory syndrome coronavirus 2
  REGION 1..11: note = Table B: HLA-DRB1*04:03L HLA-DRB1*01:01L HLA-DRB1*11:01L HLA-DQA1*05:05-B1*03:01L
FVENPDILRVY

SEQ ID NO: 13282 - protein, 12 aa, Severe acute respiratory syndrome coronavirus 2
  REGION 1..12: note = Table B: HLA-DRB1*04:03L
PDILRVYANLGE

SEQ ID NO: 13283 - protein, 11 aa, Severe acute respiratory syndrome coronavirus 2
  REGION 1..11: note = Table B: HLA-DRB1*04:03L HLA-DRB1*01:03L HLA-DRB1*04:02L HLA-DRB1*04:04L HLA-DRB1*04:05L HLA-DQA1*01:02-B1*06:02L HLA-DRB1*01:02L HLA-DQA1*01-B1*05L HLA-DRB1*04:10L HLA-DRB1*12:01L HLA-DQA1*03:01-B1*03:02L HLA-DRB1*16:01L
  REGION 1..11: note = CONT. FROM ABOVE: HLA-DRB1*04:08L HLA-DQA1*02:01-B1*03:03L HLA-D RB1*15:03L
ILRVYANLGER

SEQ ID NO: 13284 - protein, 11 aa, Severe acute respiratory syndrome coronavirus 2
  REGION 1..11: note = Table B: HLA-DRB1*04:03L HLA-DRB1*04:02L HLA-DRB1*04:05L HLA-DQA1*01:02-B1*06:02L HLA-DRB1*01:01L HLA-DRB4*03:01NL HLA-DRB1*11:03L HLA-DRB1*11:04L HLA-DRB1*11:01L HLA-DRB3*01:01L HLA-DPA1*03:01-B1*105:01L HLA-DRB1*14:54L HLA-DRB1*14:17L
VYANLGERVRQ

SEQ ID NO: 13285 - protein, 13 aa, Severe acute respiratory syndrome coronavirus 2
  REGION 1..13: note = Table B: HLA-DRB1*04:03L
LKTVQFCDAMRNA

SEQ ID NO: 13286 - protein, 11 aa, Severe acute respiratory syndrome coronavirus 2
  REGION 1..11: note = Table B: HLA-DRB1*04:03L HLA-DQA1*01:02-B1*06:02L HLA-DQA1*05:05-B1*03:01L HLA-DQA1*01:03-B1*06:01L HLA-DQA1*02:01-B1*03:03L
VQFCDAMRNAG

SEQ ID NO: 13287 - protein, 12 aa, Severe acute respiratory syndrome coronavirus 2
  REGION 1..12: note = Table B: HLA-DRB1*04:03L HLA-DQA1*03:01-B1*03:02L HLA-DRB1*14:17L HLA-DQA1*02:01-B1*03:03L
AGIVGVLTLDNQ

SEQ ID NO: 13288 - protein, 10 aa, Severe acute respiratory syndrome coronavirus 2
  REGION 1..10: note = Table B: HLA-DRB1*04:03L HLA-DRB1*04:02L HLA-DRB1*04:05L HLA-DQA1*01-B1*05L HLA-DQA1*05:01-B1*02:01L HLA-DRB1*04:10L HLA-DQA1*03:01-B1*03:02L HLA-DRB1*14:17L
VLTLDNQDLN

SEQ ID NO: 13289 - protein, 15 aa, Severe acute respiratory syndrome coronavirus 2
  REGION 1..15: note = Table B: HLA-DRB1*04:03L HLA-DRB1*13:02L HLA-DRB1*13:03L HLA-DRB1*04:02L HLA-DRB1*04:04L HLA-DRB1*04:05L HLA-DRB1*08:04L HLA-DRB3*02:01L HLA-DRB1*14:01L HLA-DRB1*11:04L HLA-DRB1*14:02L HLA-DQA1*01:01-B1*05:01L HLA-DRB1*11:01L HLA-DRB1*09:01L
  REGION 1..15: note = CONT. FROM ABOVE: HLA-DRB3*01:01L HLA-DPA1*02:01-B1*13:01L HLA-D PA1*01:03-B1*104:01L HLA-DRB1*10:01L HLA-DRB1*08:03L
GNWYDFGDFIQTTPG

SEQ ID NO: 13290 - protein, 10 aa, Severe acute respiratory syndrome coronavirus 2
  REGION 1..10: note = Table B: HLA-DRB1*04:03L HLA-DRB1*13:03L HLA-DRB1*04:02L HLA-DRB1*04:05L HLA-DRB4*03:01NL HLA-DQA1*01-B1*05L HLA-DQA1*03:01-B1*03:02L HLA-DRB1*14:17L
DFIQTTPGSG

SEQ ID NO: 13291 - protein, 13 aa, Severe acute respiratory syndrome coronavirus 2
  REGION 1..13: note = Table B: HLA-DRB1*04:03L HLA-DRB1*01:03L HLA-DQA1*01:02-B1*06:02L HLA-DRB4*03:01NL HLA-DQA1*01:01-B1*05:01L HLA-DQA1*05:01-B1*02:01L HLA-DQA1*05:05-B1*03:116L HLA-DPA1*03:01-B1*105:01L
  REGION 1..13: note = CONT. FROM ABOVE: HLA-DRB1*16:01L HLA-DRB1*04:08L
IQTTPGSGVPVVD

SEQ ID NO: 13292 - protein, 12 aa, Severe acute respiratory syndrome coronavirus 2
  REGION 1..12: note = Table B: HLA-DRB1*04:03L HLA-DRB1*13:03L HLA-DRB1*01:03L HLA-DRB1*08:77L HLA-DPA1*01:03-B1*03:01L HLA-DRB1*14:02L HLA-DQA1*01-B1*05L HLA-DQA1*05:05-B1*03:116L HLA-DPA1*01:03-B1*04:02L HLA-DRB1*12:01L
  REGION 1..12: note = CONT. FROM ABOVE: HLA-DPA1*03:01-B1*105:01L HLA-DPA1*01:03-B1*10 4:01L HLA-DRB1*16:01L HLA-DRB1*04:08L HLA-DRB1*15:03L
TPGSGVPVVDSY

SEQ ID NO: 13293 - protein, 14 aa, Severe acute respiratory syndrome coronavirus 2
  REGION 1..14: note = Table B: HLA-DRB1*04:03L HLA-DQA1*01:02-B1*06:02L HLA-DRB1*01:02L HLA-DPA1*03:01-B1*04:02L HLA-DRB1*12:01L HLA-DPA1*03:01-B1*105:01L HLA-DRB1*16:01L
VPVVDSYYSLLMPI

SEQ ID NO: 13294 - protein, 11 aa, Severe acute respiratory syndrome coronavirus 2
  REGION 1..11: note = Table B: HLA-DRB1*04:03L HLA-DRB1*04:02L HLA-DRB1*14:01L HLA-DRB1*14:54L HLA-DRB1*14:17L
MPILTLTRALT

SEQ ID NO: 13295 - protein, 11 aa, Severe acute respiratory syndrome coronavirus 2
  REGION 1..11: note = Table B: HLA-DRB1*04:03L HLA-DRB1*14:17L
ILTLTRALTAE

SEQ ID NO: 13296 - protein, 11 aa, Severe acute respiratory syndrome coronavirus 2
  REGION 1..11: note = Table B: HLA-DRB1*04:03L
LTLTRALTAES

SEQ ID NO: 13297 - protein, 10 aa, Severe acute respiratory syndrome coronavirus 2
  REGION 1..10: note = Table B: HLA-DRB1*04:03L HLA-DQA1*03:01-B1*03:02L HLA-DRB1*14:17L
LTRALTAESH

SEQ ID NO: 13298 - protein, 11 aa, Severe acute respiratory syndrome coronavirus 2
  REGION 1..11: note = Table B: HLA-DRB1*04:03L HLA-DQA1*01:03-B1*06:01L
TRALTAESHVD

SEQ ID NO: 13299 - protein, 10 aa, Severe acute respiratory syndrome coronavirus 2
  REGION 1..10: note = Table B: HLA-DRB1*04:03L HLA-DQA1*03:01-B1*03:02L
SHVDTDLTKP

SEQ ID NO: 13300 - protein, 11 aa, Severe acute respiratory syndrome coronavirus 2
  REGION 1..11: note = Table B: HLA-DRB1*04:03L HLA-DRB1*01:03L HLA-DQA1*01:03-B1*06:01L HLA-DQA1*02:01-B1*03:03L
VDTDLTKPYIK

SEQ ID NO: 13301 - protein, 12 aa, Severe acute respiratory syndrome coronavirus 2
  REGION 1..12: note = Table B: HLA-DRB1*04:03L HLA-DQA1*05:01-B1*02:01L HLA-DRB1*16:01L HLA-DRB1*15:03L
DLLKYDFTEERL

SEQ ID NO: 13302 - protein, 11 aa, Severe acute respiratory syndrome coronavirus 2
  REGION 1..11: note = Table B: HLA-DRB1*04:03L HLA-DRB1*13:02L HLA-DRB1*04:05L HLA-DRB1*03:01L HLA-DRB1*14:01L HLA-DRB1*08:01L HLA-DRB1*12:01L HLA-DRB3*01:01L HLA-DRB1*04:08L HLA-DRB1*15:03L
LKYDFTEERLK

SEQ ID NO: 13303 - protein, 11 aa, Severe acute respiratory syndrome coronavirus 2
  REGION 1..11: note = Table B: HLA-DRB1*04:03L HLA-DRB1*13:03L HLA-DRB1*01:03L HLA-DRB1*04:02L HLA-DRB1*04:05L HLA-DRB1*08:01L HLA-DRB1*04:08L
FKYWDQTYHPN

SEQ ID NO: 13304 - protein, 12 aa, Severe acute respiratory syndrome coronavirus 2
  REGION 1..12: note = Table B: HLA-DRB1*04:03L HLA-DPA1*03:01-B1*04:02L HLA-DRB1*12:01L HLA-DPA1*03:01-B1*105:01L HLA-DRB1*15:03L
FNVLFSTVFPPT

SEQ ID NO: 13305 - protein, 14 aa, Severe acute respiratory syndrome coronavirus 2
  REGION 1..14: note = Table B: HLA-DRB1*04:03L HLA-DRB1*13:02L HLA-DRB1*01:03L HLA-DRB1*04:02L HLA-DRB1*04:04L HLA-DRB1*04:05L HLA-DQA1*01:02-B1*06:02L HLA-DRB1*08:04L HLA-DPA1*01:03-B1*03:01L HLA-DPA1*03:01-B1*04:02L
  REGION 1..14: note = CONT. FROM ABOVE: HLA-DRB1*14:01L HLA-DRB1*08:01L HLA-DQA1*05:01 -B1*02:01L HLA-DPA1*01:03-B1*04:02L HLA-DRB1*12:01L HLA-DRB3*01: 01L HLA-DPA1*02:01-B1*13:01L HLA-DPA1*03:01-B1*105:01L HLA-DPA1* 01:02-B1*04:01L HLA-DQA1*01:03-B1*06:01L HLA-DRB1*04:08L
  REGION 1..14: note = CONT. FROM ABOVE: HLA-DQA1*02:01-B1*03:03L
GPLVRKIFVDGVPF

SEQ ID NO: 13306 - protein, 12 aa, Severe acute respiratory syndrome coronavirus 2
  REGION 1..12: note = Table B: HLA-DRB1*04:03L HLA-DRB1*13:02L HLA-DRB1*13:03L HLA-DRB1*01:03L HLA-DRB1*04:02L HLA-DRB1*04:05L HLA-DRB1*01:02L HLA-DQA1*01-B1*05L HLA-DRB1*12:01L HLA-DRB3*01:01L HLA-DRB1*04:08L
VRKIFVDGVPFV

SEQ ID NO: 13307 - protein, 10 aa, Severe acute respiratory syndrome coronavirus 2
  REGION 1..10: note = Table B: HLA-DRB1*04:03L HLA-DRB1*04:02L HLA-DQA1*01-B1*05L HLA-DQA1*03:01-B1*03:02L HLA-DQA1*02:01-B1*03:03L
VPFVVSTGYH

SEQ ID NO: 13308 - protein, 10 aa, Severe acute respiratory syndrome coronavirus 2
  REGION 1..10: note = Table B: HLA-DRB1*04:03L HLA-DRB1*01:03L HLA-DRB1*04:05M HLA-DQA1*01:02-B1*06:02L HLA-DRB1*01:01L HLA-DRB1*01:02L HLA-DRB1*08:77L HLA-DPA1*03:01-B1*04:02L HLA-DRB1*11:03L HLA-DQA1*01:01-B1*05:01L HLA-DRB1*11:01L
  REGION 1..10: note = CONT. FROM ABOVE: HLA-DQA1*05:05-B1*03:19L HLA-DRB1*12:01L HLA-D PA1*02:01-B1*13:01M HLA-DPA1*03:01-B1*105:01L HLA-DRB1*16:01L HL A-DQA1*01:03-B1*06:01M HLA-DQA1*02:01-B1*03:03L HLA-DRB1*15:03L
PFVVSTGYHF

SEQ ID NO: 13309 - protein, 11 aa, Severe acute respiratory syndrome coronavirus 2
  REGION 1..11: note = Table B: HLA-DRB1*04:03L HLA-DRB1*01:03L HLA-DRB1*04:02L HLA-DRB1*04:05L HLA-DRB1*01:02L HLA-DRB1*14:17L HLA-DRB1*10:01L HLA-DRB1*16:01L HLA-DRB1*04:08L HLA-DQA1*02:01-B1*03:03L
FRELGVVHNQD

SEQ ID NO: 13310 - protein, 13 aa, Severe acute respiratory syndrome coronavirus 2
  REGION 1..13: note = Table B: HLA-DRB1*04:03L HLA-DRB1*04:02L HLA-DRB1*04:05L HLA-DRB1*14:01L HLA-DRB1*08:01L HLA-DPA1*03:01-B1*105:01L
DVNLHSSRLSFKE

SEQ ID NO: 13311 - protein, 11 aa, Severe acute respiratory syndrome coronavirus 2
  REGION 1..11: note = Table B: HLA-DRB1*04:03L HLA-DQA1*01-B1*05L
KELLVYAADPA

SEQ ID NO: 13312 - protein, 10 aa, Severe acute respiratory syndrome coronavirus 2
  REGION 1..10: note = Table B: HLA-DRB1*04:03L
AADPAMHAAS

SEQ ID NO: 13313 - protein, 11 aa, Severe acute respiratory syndrome coronavirus 2
  REGION 1..11: note = Table B: HLA-DRB1*04:03L HLA-DRB1*13:03L HLA-DRB1*01:03L HLA-DRB1*04:02L HLA-DRB1*04:05L HLA-DRB1*01:02L HLA-DRB4*03:01NL HLA-DRB1*14:01L HLA-DRB1*11:03L HLA-DQA1*05:05-B1*03:19L HLA-DRB1*12:02L HLA-DQA1*05:05-B1*03:01L
  REGION 1..11: note = CONT. FROM ABOVE: HLA-DQA1*01:03-B1*06:01L
PAMHAASGNLL

SEQ ID NO: 13314 - protein, 11 aa, Severe acute respiratory syndrome coronavirus 2
  REGION 1..11: note = Table B: HLA-DRB1*04:03L HLA-DRB1*13:03L HLA-DRB1*04:02L HLA-DRB1*14:17L
HAASGNLLLDK

SEQ ID NO: 13315 - protein, 13 aa, Severe acute respiratory syndrome coronavirus 2
  REGION 1..13: note = Table B: HLA-DRB1*04:03L HLA-DRB1*13:03L HLA-DRB1*01:03L HLA-DRB1*04:02L HLA-DQA1*01:02-B1*06:02L HLA-DRB1*08:04L HLA-DRB1*08:77L HLA-DPA1*01:03-B1*03:01L HLA-DRB1*11:03L HLA-DRB1*11:04L HLA-DRB1*14:02L HLA-DRB1*08:01L HLA-DRB1*11:01L
  REGION 1..13: note = CONT. FROM ABOVE: HLA-DQA1*05:01-B1*02:01L HLA-DRB1*12:01L HLA-D RB1*14:54L HLA-DRB1*04:08L
GNLLLDKRTTCFS

SEQ ID NO: 13316 - protein, 10 aa, Severe acute respiratory syndrome coronavirus 2
  REGION 1..10: note = Table B: HLA-DRB1*04:03L HLA-DRB1*14:17L
AALTNNVAFQ

SEQ ID NO: 13317 - protein, 10 aa, Severe acute respiratory syndrome coronavirus 2
  REGION 1..10: note = Table B: HLA-DRB1*04:03L HLA-DRB1*04:02L HLA-DQA1*03:01-B1*03:02L HLA-DRB1*14:17L HLA-DPA1*01:02-B1*04:01L HLA-DQA1*01:03-B1*06:01L HLA-DQA1*02:01-B1*03:03L
NVAFQTVKPG

SEQ ID NO: 13318 - protein, 11 aa, Severe acute respiratory syndrome coronavirus 2
  REGION 1..11: note = Table B: HLA-DRB1*04:03L HLA-DRB1*04:02L HLA-DRB1*01:02L HLA-DRB1*14:17L HLA-DPA1*01:02-B1*04:01L HLA-DRB1*16:01L HLA-DQA1*01:03-B1*06:01L
FAVSKGFFKEG

SEQ ID NO: 13319 - protein, 12 aa, Severe acute respiratory syndrome coronavirus 2
  REGION 1..12: note = Table B: HLA-DRB1*04:03L HLA-DQA1*01:02-B1*06:02L
SKGFFKEGSSVE

SEQ ID NO: 13320 - protein, 10 aa, Severe acute respiratory syndrome coronavirus 2
  REGION 1..10: note = Table B: HLA-DRB1*04:03L
FFFAQDGNAA

SEQ ID NO: 13321 - protein, 10 aa, Severe acute respiratory syndrome coronavirus 2
  REGION 1..10: note = Table B: HLA-DRB1*04:03L HLA-DRB1*14:17L
FAQDGNAAIS

SEQ ID NO: 13322 - protein, 10 aa, Severe acute respiratory syndrome coronavirus 2
  REGION 1..10: note = Table B: HLA-DRB1*04:03L HLA-DRB1*13:02L HLA-DRB1*13:03L HLA-DRB1*04:02L HLA-DRB4*03:01NL HLA-DRB1*12:01L HLA-DPA1*03:01-B1*105:01L HLA-DQA1*03:01-B1*03:02L HLA-DQA1*05:05-B1*03:01L HLA-DRB1*14:17L
  REGION 1..10: note = CONT. FROM ABOVE: HLA-DPA1*01:02-B1*04:01L HLA-DQA1*01:03-B1*06: 01L HLA-DQA1*02:01-B1*03:03L
AAISDYDYYR

SEQ ID NO: 13323 - protein, 13 aa, Severe acute respiratory syndrome coronavirus 2
  REGION 1..13: note = Table B: HLA-DRB1*04:03L HLA-DRB1*04:05L HLA-DRB1*08:04L HLA-DRB3*02:01L HLA-DPA1*01:03-B1*04:01L HLA-DPA1*01:03-B1*04:02L HLA-DPA1*01:03-B1*104:01L HLA-DRB1*07:01L HLA-DRB1*04:08L
YDYYRYNLPTMCD

SEQ ID NO: 13324 - protein, 13 aa, Severe acute respiratory syndrome coronavirus 2
  REGION 1..13: note = Table B: HLA-DRB1*04:03L HLA-DRB1*01:03L HLA-DQA1*01:02-B1*06:02L HLA-DRB1*01:02L HLA-DRB1*08:04L HLA-DRB1*08:01L HLA-DQA1*01-B1*05L HLA-DRB1*04:10L HLA-DRB1*12:01L HLA-DPA1*02:01-B1*13:01L
  REGION 1..13: note = CONT. FROM ABOVE: HLA-DPA1*03:01-B1*105:01L HLA-DQA1*03:01-B1*03 :02L HLA-DRB1*16:01L HLA-DRB1*04:08L HLA-DRB1*15:03L
IRQLLFVVEVVDK

SEQ ID NO: 13325 - protein, 14 aa, Severe acute respiratory syndrome coronavirus 2
  REGION 1..14: note = Table B: HLA-DRB1*04:03L HLA-DRB1*01:03L HLA-DRB1*04:05L HLA-DQA1*01:02-B1*06:02L HLA-DQA1*01-B1*05L HLA-DRB1*12:01L HLA-DPA1*02:01-B1*13:01L HLA-DQA1*05:05-B1*03:01L HLA-DRB1*04:08L
VDKYFDCYDGGCIN

SEQ ID NO: 13326 - protein, 10 aa, Severe acute respiratory syndrome coronavirus 2
  REGION 1..10: note = Table B: HLA-DRB1*04:03L HLA-DRB1*04:02L HLA-DRB1*04:05L HLA-DRB4*03:01NL HLA-DRB1*04:10L HLA-DQA1*03:01-B1*03:02L HLA-DRB1*14:17L HLA-DQA1*01:03-B1*06:01L HLA-DQA1*02:01-B1*03:03L
NQVIVNNLDK

SEQ ID NO: 13327 - protein, 10 aa, Severe acute respiratory syndrome coronavirus 2
  REGION 1..10: note = Table B: HLA-DRB1*04:03L HLA-DRB1*14:17L
VIVNNLDKSA

SEQ ID NO: 13328 - protein, 13 aa, Severe acute respiratory syndrome coronavirus 2
  REGION 1..13: note = Table B: HLA-DRB1*04:03L HLA-DRB1*01:03L HLA-DRB1*04:02L HLA-DRB1*04:05L HLA-DRB1*01:02L HLA-DQA1*05:01-B1*02:01L HLA-DRB1*12:01L HLA-DPA1*02:01-B1*13:01L HLA-DPA1*03:01-B1*105:01L HLA-DQA1*03:01-B1*03:02L
  REGION 1..13: note = CONT. FROM ABOVE: HLA-DRB1*16:01L HLA-DRB1*04:08L HLA-DRB1*15:03 L
GKARLYYDSMSYE

SEQ ID NO: 13329 - protein, 12 aa, Severe acute respiratory syndrome coronavirus 2
  REGION 1..12: note = Table B: HLA-DRB1*04:03L
ARLYYDSMSYED

SEQ ID NO: 13330 - protein, 12 aa, Severe acute respiratory syndrome coronavirus 2
  REGION 1..12: note = Table B: HLA-DRB1*04:03L HLA-DRB1*04:05L HLA-DQA1*05:01-B1*02:01L HLA-DRB1*04:10L HLA-DPA1*03:01-B1*105:01L HLA-DQA1*03:01-B1*03:02L
RLYYDSMSYEDQ

SEQ ID NO: 13331 - protein, 12 aa, Severe acute respiratory syndrome coronavirus 2
  REGION 1..12: note = Table B: HLA-DRB1*04:03L HLA-DRB1*04:02L HLA-DRB1*04:05L HLA-DQA1*01:02-B1*06:02L HLA-DPA1*03:01-B1*04:02L HLA-DQA1*01:01-B1*05:01L HLA-DRB1*12:01L HLA-DPA1*02:01-B1*13:01L HLA-DPA1*03:01-B1*105:01L
  REGION 1..12: note = CONT. FROM ABOVE: HLA-DRB1*04:08L HLA-DQA1*02:01-B1*03:03L HLA-D RB1*15:03L
YDSMSYEDQDAL

SEQ ID NO: 13332 - protein, 12 aa, Severe acute respiratory syndrome coronavirus 2
  REGION 1..12: note = Table B: HLA-DRB1*04:03L HLA-DRB1*04:02L HLA-DPA1*03:01-B1*105:01L HLA-DRB1*14:17L HLA-DQA1*02:01-B1*03:03L
YEDQDALFAYTK

SEQ ID NO: 13333 - protein, 16 aa, Severe acute respiratory syndrome coronavirus 2
  REGION 1..16: note = Table B: HLA-DRB1*04:03L HLA-DPA1*01:03-B1*03:01L HLA-DQA1*05:05-B1*03:19L HLA-DQA1*05:01-B1*02:01L HLA-DQA1*05:05-B1*03:01L
EDQDALFAYTKRNVIP

SEQ ID NO: 13334 - protein, 10 aa, Severe acute respiratory syndrome coronavirus 2
  REGION 1..10: note = Table B: HLA-DRB1*04:03L HLA-DRB1*13:03L HLA-DRB1*01:03L HLA-DRB1*04:02L HLA-DRB1*01:02L HLA-DRB4*03:01NL HLA-DRB1*14:01L HLA-DRB1*08:01L HLA-DRB1*12:01L HLA-DQA1*03:01-B1*03:02L HLA-DRB1*14:54L HLA-DRB1*14:17L HLA-DPA1*01:02-B1*04:01L
  REGION 1..10: note = CONT. FROM ABOVE: HLA-DRB1*16:01L HLA-DRB1*04:08L HLA-DQA1*02:01 -B1*03:03L
AYTKRNVIPT

SEQ ID NO: 13335 - protein, 12 aa, Severe acute respiratory syndrome coronavirus 2
  REGION 1..12: note = Table B: HLA-DRB1*04:03L HLA-DRB1*04:05L HLA-DQA1*01:02-B1*06:02L HLA-DRB1*12:01L
KRNVIPTITQMN

SEQ ID NO: 13336 - protein, 12 aa, Severe acute respiratory syndrome coronavirus 2
  REGION 1..12: note = Table B: HLA-DRB1*04:03L HLA-DRB1*12:01L HLA-DRB1*14:17L
RNVIPTITQMNL

SEQ ID NO: 13337 - protein, 11 aa, Severe acute respiratory syndrome coronavirus 2
  REGION 1..11: note = Table B: HLA-DRB1*04:03L HLA-DRB1*04:02L HLA-DQA1*01:02-B1*06:02L HLA-DRB4*03:01NL HLA-DRB1*12:01L HLA-DPA1*03:01-B1*105:01L HLA-DQA1*05:05-B1*03:01L HLA-DRB1*14:17L HLA-DRB1*16:01L HLA-DQA1*01:03-B1*06:01L
VIPTITQMNLK

SEQ ID NO: 13338 - protein, 12 aa, Severe acute respiratory syndrome coronavirus 2
  REGION 1..12: note = Table B: HLA-DRB1*04:03L HLA-DRB1*04:02L HLA-DRB1*14:01L HLA-DPA1*03:01-B1*105:01L HLA-DRB1*14:17L HLA-DRB1*15:03L
IPTITQMNLKYA

SEQ ID NO: 13339 - protein, 11 aa, Severe acute respiratory syndrome coronavirus 2
  REGION 1..11: note = Table B: HLA-DRB1*04:03L
MNLKYAISAKN

SEQ ID NO: 13340 - protein, 11 aa, Severe acute respiratory syndrome coronavirus 2
  REGION 1..11: note = Table B: HLA-DRB1*04:03L HLA-DRB1*13:03L HLA-DRB1*04:02L HLA-DRB1*04:05L HLA-DRB1*01:02L HLA-DRB1*14:01L HLA-DRB1*12:01L HLA-DRB1*04:08L
LKYAISAKNRA

SEQ ID NO: 13341 - protein, 13 aa, Severe acute respiratory syndrome coronavirus 2
  REGION 1..13: note = Table B: HLA-DRB1*04:03L HLA-DRB1*04:02L HLA-DRB1*14:17L HLA-DQA1*02:01-B1*03:03L
VAGVSICSTMTNR

SEQ ID NO: 13342 - protein, 11 aa, Severe acute respiratory syndrome coronavirus 2
  REGION 1..11: note = Table B: HLA-DRB1*04:03L HLA-DRB1*04:02L HLA-DQA1*01:02-B1*06:02L HLA-DQA1*03:01-B1*03:02L HLA-DQA1*05:05-B1*03:01L HLA-DRB1*14:17L HLA-DQA1*01:03-B1*06:01L HLA-DQA1*02:01-B1*03:03L
VSICSTMTNRQ

SEQ ID NO: 13343 - protein, 10 aa, Severe acute respiratory syndrome coronavirus 2
  REGION 1..10: note = Table B: HLA-DRB1*04:03L HLA-DQA1*03:01-B1*03:02L HLA-DRB1*14:17L
LLKSIAATRG

SEQ ID NO: 13344 - protein, 11 aa, Severe acute respiratory syndrome coronavirus 2
  REGION 1..11: note = Table B: HLA-DRB1*04:03L HLA-DRB1*04:02L HLA-DQA1*03:01-B1*03:02L HLA-DRB1*14:17L
LKSIAATRGAT

SEQ ID NO: 13345 - protein, 10 aa, Severe acute respiratory syndrome coronavirus 2
  REGION 1..10: note = Table B: HLA-DRB1*04:03L HLA-DRB1*04:02L HLA-DRB1*14:01L HLA-DRB1*14:17L HLA-DQA1*02:01-B1*03:03L
VVIGTSKFYG

SEQ ID NO: 13346 - protein, 11 aa, Severe acute respiratory syndrome coronavirus 2
  REGION 1..11: note = Table B: HLA-DRB1*04:03L HLA-DQA1*05:01-B1*02:01L HLA-DPA1*03:01-B1*105:01L HLA-DPA1*01:02-B1*04:01L
NMLKTVYSDVE

SEQ ID NO: 13347 - protein, 11 aa, Severe acute respiratory syndrome coronavirus 2
  REGION 1..11: note = Table B: HLA-DRB1*04:03L HLA-DQA1*01-B1*05L HLA-DQA1*03:01-B1*03:02L
NPHLMGWDYPK

SEQ ID NO: 13348 - protein, 14 aa, Severe acute respiratory syndrome coronavirus 2
  REGION 1..14: note = Table B: HLA-DRB1*04:03L
PNMLRIMASLVLAR

SEQ ID NO: 13349 - protein, 13 aa, Severe acute respiratory syndrome coronavirus 2
  REGION 1..13: note = Table B: HLA-DRB1*04:03L HLA-DRB1*13:02L HLA-DRB1*13:03L HLA-DRB1*04:04L HLA-DQA1*01:02-B1*06:02L HLA-DRB1*01:01L HLA-DPA1*01:03-B1*03:01L HLA-DRB1*11:04L HLA-DRB1*11:01L HLA-DRB3*01:01L HLA-DQA1*03:01-B1*03:02L
  REGION 1..13: note = CONT. FROM ABOVE: HLA-DPA1*01:02-B1*04:01L HLA-DRB1*07:01L HLA-D QA1*02:01-B1*03:03L HLA-DRB1*15:03L
SHRFYRLANECAQ

SEQ ID NO: 13350 - protein, 13 aa, Severe acute respiratory syndrome coronavirus 2
  REGION 1..13: note = Table B: HLA-DRB1*04:03L HLA-DRB1*13:02L HLA-DRB1*04:05L HLA-DPA1*01:03-B1*104:01L HLA-DQA1*05:05-B1*03:01L
FYRLANECAQVLS

SEQ ID NO: 13351 - protein, 13 aa, Severe acute respiratory syndrome coronavirus 2
  REGION 1..13: note = Table B: HLA-DRB1*04:03L HLA-DPA1*01:03-B1*03:01L HLA-DRB1*12:01L HLA-DPA1*03:01-B1*105:01L HLA-DQA1*05:05-B1*03:01L
YRLANECAQVLSE

SEQ ID NO: 13352 - protein, 14 aa, Severe acute respiratory syndrome coronavirus 2
  REGION 1..14: note = Table B: HLA-DRB1*04:03L HLA-DPA1*03:01-B1*105:01L HLA-DQA1*05:05-B1*03:01L HLA-DQA1*01:03-B1*06:01L
AQVLSEMVMCGGSL

SEQ ID NO: 13353 - protein, 15 aa, Severe acute respiratory syndrome coronavirus 2
  REGION 1..15: note = Table B: HLA-DRB1*04:03L HLA-DRB1*01:03L HLA-DRB1*14:01L HLA-DQA1*05:05-B1*03:19L HLA-DRB1*12:01L HLA-DRB1*16:01L HLA-DRB1*04:08L
SEMVMCGGSLYVKPG

SEQ ID NO: 13354 - protein, 10 aa, Severe acute respiratory syndrome coronavirus 2
  REGION 1..10: note = Table B: HLA-DRB1*04:03L HLA-DRB1*04:02L HLA-DQA1*03:01-B1*03:02L HLA-DRB1*14:17L HLA-DQA1*02:01-B1*03:03L
SLYVKPGGTS

SEQ ID NO: 13355 - protein, 10 aa, Severe acute respiratory syndrome coronavirus 2
  REGION 1..10: note = Table B: HLA-DRB1*04:03L HLA-DRB1*14:17L
YVKPGGTSSG

SEQ ID NO: 13356 - protein, 15 aa, Severe acute respiratory syndrome coronavirus 2
  REGION 1..15: note = Table B: HLA-DRB1*04:03L HLA-DQA1*01:03-B1*06:01L
VKPGGTSSGDATTAY

SEQ ID NO: 13357 - protein, 16 aa, Severe acute respiratory syndrome coronavirus 2
  REGION 1..16: note = Table B: HLA-DRB1*04:03L HLA-DRB1*04:02L HLA-DRB1*01:02L HLA-DQA1*01:01-B1*05:01L HLA-DRB1*08:01L HLA-DRB1*11:01L HLA-DQA1*05:05-B1*03:116L HLA-DRB1*04:08L
KPGGTSSGDATTAYAN

SEQ ID NO: 13358 - protein, 11 aa, Severe acute respiratory syndrome coronavirus 2
  REGION 1..11: note = Table B: HLA-DRB1*04:03L
ATTAYANSVFN

SEQ ID NO: 13359 - protein, 14 aa, Severe acute respiratory syndrome coronavirus 2
  REGION 1..14: note = Table B: HLA-DRB1*04:03L HLA-DRB1*08:04L HLA-DRB1*14:01L HLA-DRB1*11:04L
TTAYANSVFNICQA

SEQ ID NO: 13360 - protein, 13 aa, Severe acute respiratory syndrome coronavirus 2
  REGION 1..13: note = Table B: HLA-DRB1*04:03L
ANSVFNICQAVTA

SEQ ID NO: 13361 - protein, 12 aa, Severe acute respiratory syndrome coronavirus 2
  REGION 1..12: note = Table B: HLA-DRB1*04:03L
AVTANVNALLST

SEQ ID NO: 13362 - protein, 12 aa, Severe acute respiratory syndrome coronavirus 2
  REGION 1..12: note = Table B: HLA-DRB1*04:03L
VTANVNALLSTD

SEQ ID NO: 13363 - protein, 12 aa, Severe acute respiratory syndrome coronavirus 2
  REGION 1..12: note = Table B: HLA-DRB1*04:03L
TANVNALLSTDG

SEQ ID NO: 13364 - protein, 12 aa, Severe acute respiratory syndrome coronavirus 2
  REGION 1..12: note = Table B: HLA-DRB1*04:03L HLA-DRB1*04:02L HLA-DQA1*01:02-B1*06:02L HLA-DQA1*03:01-B1*03:02L HLA-DQA1*01:03-B1*06:01L HLA-DQA1*02:01-B1*03:03L
ANVNALLSTDGN

SEQ ID NO: 13365 - protein, 11 aa, Severe acute respiratory syndrome coronavirus 2
  REGION 1..11: note = Table B: HLA-DRB1*04:03L HLA-DQA1*03:01-B1*03:02L
VNALLSTDGNK

SEQ ID NO: 13366 - protein, 10 aa, Severe acute respiratory syndrome coronavirus 2
  REGION 1..10: note = Table B: HLA-DRB1*04:03L HLA-DRB1*04:02L HLA-DQA1*03:01-B1*03:02L HLA-DRB1*14:17L
LSTDGNKIAD

SEQ ID NO: 13367 - protein, 10 aa, Severe acute respiratory syndrome coronavirus 2
  REGION 1..10: note = Table B: HLA-DRB1*04:03L HLA-DRB1*13:02L HLA-DRB1*13:03L HLA-DRB1*04:02L HLA-DRB1*01:01L HLA-DRB4*03:01NL HLA-DRB1*11:04L HLA-DRB1*08:01L HLA-DRB5*01:01L HLA-DRB1*12:01L HLA-DQA1*03:01-B1*03:02L HLA-DQA1*05:05-B1*03:01L
  REGION 1..10: note = CONT. FROM ABOVE: HLA-DRB1*14:17L HLA-DRB1*16:01L HLA-DQA1*02:01 -B1*03:03L
STDGNKIADK

SEQ ID NO: 13368 - protein, 13 aa, Severe acute respiratory syndrome coronavirus 2
  REGION 1..13: note = Table B: HLA-DRB1*04:03L HLA-DRB1*04:02L HLA-DQA1*01:02-B1*06:02L HLA-DRB3*02:01L HLA-DPA1*03:01-B1*04:02L HLA-DRB1*11:03L HLA-DRB1*11:01L HLA-DPA1*02:01-B1*13:01L HLA-DPA1*03:01-B1*105:01L
IADKYVRNLQHRL

SEQ ID NO: 13369 - protein, 11 aa, Severe acute respiratory syndrome coronavirus 2
  REGION 1..11: note = Table B: HLA-DRB1*04:03L HLA-DRB1*13:03L HLA-DRB1*04:02L HLA-DRB1*04:05L HLA-DRB1*11:03L HLA-DRB1*11:04L HLA-DRB1*08:01L HLA-DRB3*01:01L HLA-DQA1*03:01-B1*03:02L HLA-DRB1*04:08L
YVRNLQHRLYE

SEQ ID NO: 13370 - protein, 11 aa, Severe acute respiratory syndrome coronavirus 2
  REGION 1..11: note = Table B: HLA-DRB1*04:03L HLA-DRB1*01:03L HLA-DRB1*04:05L HLA-DPA1*03:01-B1*04:02L HLA-DRB1*14:01L HLA-DRB4*01:01L HLA-DQA1*05:05-B1*03:116L HLA-DPA1*01:03-B1*04:02L HLA-DRB1*12:01L HLA-DQA1*03:01-B1*03:02L
  REGION 1..11: note = CONT. FROM ABOVE: HLA-DPA1*01:02-B1*04:01L
RDVDTDFVNEF

SEQ ID NO: 13371 - protein, 11 aa, Severe acute respiratory syndrome coronavirus 2
  REGION 1..11: note = Table B: HLA-DRB1*04:03L HLA-DRB1*01:03L HLA-DRB4*03:01NL HLA-DPA1*03:01-B1*04:02L HLA-DRB1*11:03L HLA-DPA1*01:03-B1*04:02L HLA-DPA1*01:02-B1*04:01L HLA-DRB1*08:02L
DVDTDFVNEFY

SEQ ID NO: 13372 - protein, 14 aa, Severe acute respiratory syndrome coronavirus 2
  REGION 1..14: note = Table B: HLA-DRB1*04:03L HLA-DRB1*04:05L HLA-DRB1*14:02L HLA-DQA1*03:01-B1*03:02L HLA-DQA1*05:05-B1*03:01L
VDTDFVNEFYAYLR

SEQ ID NO: 13373 - protein, 13 aa, Severe acute respiratory syndrome coronavirus 2
  REGION 1..13: note = Table B: HLA-DRB1*04:03L HLA-DRB1*13:02L HLA-DRB1*04:04L HLA-DRB1*04:05L HLA-DRB1*14:01L HLA-DQA1*02:01-B1*03:03L
TDFVNEFYAYLRK

SEQ ID NO: 13374 - protein, 13 aa, Severe acute respiratory syndrome coronavirus 2
  REGION 1..13: note = Table B: HLA-DRB1*04:03L HLA-DPA1*02:01-B1*13:01L
DFVNEFYAYLRKH

SEQ ID NO: 13375 - protein, 14 aa, Severe acute respiratory syndrome coronavirus 2
  REGION 1..14: note = Table B: HLA-DRB1*04:03L HLA-DRB1*13:02L HLA-DRB1*01:03L HLA-DRB1*04:04L HLA-DQA1*01-B1*05L HLA-DPA1*01:03-B1*104:01L HLA-DQA1*05:05-B1*03:01L
LRKHFSMMILSDDA

SEQ ID NO: 13376 - protein, 11 aa, Severe acute respiratory syndrome coronavirus 2
  REGION 1..11: note = Table B: HLA-DRB1*04:03L HLA-DRB1*14:01L HLA-DRB1*14:02L HLA-DQA1*05:01-B1*02:01L HLA-DPA1*03:01-B1*105:01L HLA-DRB1*14:17L
ILSDDAVVCFN

SEQ ID NO: 13377 - protein, 13 aa, Severe acute respiratory syndrome coronavirus 2
  REGION 1..13: note = Table B: HLA-DRB1*04:03L
DDAVVCFNSTYAS

SEQ ID NO: 13378 - protein, 13 aa, Severe acute respiratory syndrome coronavirus 2
  REGION 1..13: note = Table B: HLA-DRB1*04:03L HLA-DRB1*04:02L HLA-DRB1*01:02L HLA-DQA1*01-B1*05L HLA-DRB1*12:01L HLA-DRB1*14:17L HLA-DRB1*16:01L HLA-DRB1*15:03L
DAVVCFNSTYASQ

SEQ ID NO: 13379 - protein, 12 aa, Severe acute respiratory syndrome coronavirus 2
  REGION 1..12: note = Table B: HLA-DRB1*04:03L HLA-DRB1*04:02L HLA-DRB1*14:17L HLA-DRB1*15:03L
VVCFNSTYASQG

SEQ ID NO: 13380 - protein, 11 aa, Severe acute respiratory syndrome coronavirus 2
  REGION 1..11: note = Table B: HLA-DRB1*04:03L HLA-DRB1*01:03L HLA-DRB1*04:02L HLA-DRB4*03:01NL HLA-DPA1*03:01-B1*105:01L HLA-DRB1*14:17L
YASQGLVASIK

SEQ ID NO: 13381 - protein, 10 aa, Severe acute respiratory syndrome coronavirus 2
  REGION 1..10: note = Table B: HLA-DRB1*04:03L
LVASIKNFKS

SEQ ID NO: 13382 - protein, 11 aa, Severe acute respiratory syndrome coronavirus 2
  REGION 1..11: note = Table B: HLA-DRB1*04:03L HLA-DRB1*04:02L HLA-DQA1*01-B1*05L HLA-DRB1*12:01L HLA-DQA1*03:01-B1*03:02L HLA-DRB1*14:17L HLA-DRB1*16:01L HLA-DQA1*02:01-B1*03:03L HLA-DRB1*15:03L
VASIKNFKSVL

SEQ ID NO: 13383 - protein, 11 aa, Severe acute respiratory syndrome coronavirus 2
  REGION 1..11: note = Table B: HLA-DRB1*04:03L HLA-DRB1*01:02L HLA-DRB1*12:01L HLA-DRB1*16:01L
IKNFKSVLYYQ

SEQ ID NO: 13384 - protein, 12 aa, Severe acute respiratory syndrome coronavirus 2
  REGION 1..12: note = Table B: HLA-DRB1*04:03L HLA-DRB1*04:02L HLA-DQA1*01:02-B1*06:02L HLA-DRB1*01:02L HLA-DPA1*03:01-B1*04:02L HLA-DRB1*14:01L HLA-DQA1*05:01-B1*02:01L HLA-DRB1*12:01L
  REGION 1..12: note = CONT. FROM ABOVE: HLA-DPA1*03:01-B1*105:01L
VLYYQNNVFMSE

SEQ ID NO: 13385 - protein, 15 aa, Severe acute respiratory syndrome coronavirus 2
  REGION 1..15: note = Table B: HLA-DRB1*04:03L HLA-DRB1*01:03L HLA-DRB1*14:02L HLA-DRB1*08:01L HLA-DRB1*12:01L HLA-DPA1*02:01-B1*13:01L HLA-DPA1*01:03-B1*02:01L HLA-DRB1*16:01L
NNVFMSEAKCWTETD

SEQ ID NO: 13386 - protein, 11 aa, Severe acute respiratory syndrome coronavirus 2
  REGION 1..11: note = Table B: HLA-DRB1*04:03L
HTMLVKQGDDY

SEQ ID NO: 13387 - protein, 12 aa, Severe acute respiratory syndrome coronavirus 2
  REGION 1..12: note = Table B: HLA-DRB1*04:03L
TMLVKQGDDYVY

SEQ ID NO: 13388 - protein, 11 aa, Severe acute respiratory syndrome coronavirus 2
  REGION 1..11: note = Table B: HLA-DRB1*04:03L HLA-DRB1*01:03L HLA-DRB1*14:17L
LPYPDPSRILG

SEQ ID NO: 13389 - protein, 10 aa, Severe acute respiratory syndrome coronavirus 2
  REGION 1..10: note = Table B: HLA-DRB1*04:03L
PDPSRILGAG

SEQ ID NO: 13390 - protein, 10 aa, Severe acute respiratory syndrome coronavirus 2
  REGION 1..10: note = Table B: HLA-DRB1*04:03L HLA-DRB1*04:02L HLA-DQA1*01-B1*05L HLA-DQA1*03:01-B1*03:02L HLA-DRB1*14:17L HLA-DQA1*02:01-B1*03:03L
FVDDIVKTDG

SEQ ID NO: 13391 - protein, 11 aa, Severe acute respiratory syndrome coronavirus 2
  REGION 1..11: note = Table B: HLA-DRB1*04:03L HLA-DQA1*02:01-B1*03:03L
VDDIVKTDGTL

SEQ ID NO: 13392 - protein, 11 aa, Severe acute respiratory syndrome coronavirus 2
  REGION 1..11: note = Table B: HLA-DRB1*04:03L HLA-DRB1*13:02L HLA-DRB1*01:03L HLA-DRB1*04:02L HLA-DRB1*01:02L HLA-DRB4*03:01NL HLA-DRB1*08:77L HLA-DPA1*01:03-B1*03:01L HLA-DRB1*14:01L HLA-DRB1*14:02L HLA-DQA1*05:01-B1*02:01L HLA-DRB1*12:01L HLA-DRB1*12:02L
  REGION 1..11: note = CONT. FROM ABOVE: HLA-DRB1*14:54L HLA-DRB1*14:17L HLA-DRB1*16:01 L HLA-DQA1*02:01-B1*03:03L HLA-DRB1*15:03L
IVKTDGTLMIE

SEQ ID NO: 13393 - protein, 11 aa, Severe acute respiratory syndrome coronavirus 2
  REGION 1..11: note = Table B: HLA-DRB1*04:03L HLA-DRB1*01:03L
VKTDGTLMIER

SEQ ID NO: 13394 - protein, 11 aa, Severe acute respiratory syndrome coronavirus 2
  REGION 1..11: note = Table B: HLA-DRB1*04:03L HLA-DRB1*13:02L HLA-DRB1*13:03L HLA-DRB1*04:05L HLA-DRB1*08:04L HLA-DRB1*08:77L HLA-DRB3*02:01L HLA-DRB1*11:03L HLA-DRB1*11:04L HLA-DRB1*09:01L HLA-DRB3*01:01L HLA-DPA1*01:03-B1*02:01L HLA-DRB1*07:01L HLA-DRB1*08:03L
GTLMIERFVSL

SEQ ID NO: 13395 - protein, 11 aa, Severe acute respiratory syndrome coronavirus 2
  REGION 1..11: note = Table B: HLA-DRB1*04:03L HLA-DQA1*01-B1*05L HLA-DRB1*15:03L
IERFVSLAIDA

SEQ ID NO: 13396 - protein, 12 aa, Severe acute respiratory syndrome coronavirus 2
  REGION 1..12: note = Table B: HLA-DRB1*04:03L HLA-DRB1*01:02L HLA-DPA1*01:03-B1*03:01L HLA-DPA1*03:01-B1*04:02L HLA-DQA1*05:01-B1*02:01L HLA-DRB1*12:01L HLA-DPA1*03:01-B1*105:01L HLA-DRB1*16:01L HLA-DRB1*15:03L
RFVSLAIDAYPL

SEQ ID NO: 13397 - protein, 11 aa, Severe acute respiratory syndrome coronavirus 2
  REGION 1..11: note = Table B: HLA-DRB1*04:03L HLA-DRB1*04:02L
IDAYPLTKHPN

SEQ ID NO: 13398 - protein, 10 aa, Severe acute respiratory syndrome coronavirus 2
  REGION 1..10: note = Table B: HLA-DRB1*04:03L HLA-DRB1*13:03L HLA-DRB1*01:03L HLA-DRB1*04:02L HLA-DQA1*03:01-B1*03:02L HLA-DRB1*14:17L HLA-DRB1*16:01L HLA-DQA1*02:01-B1*03:03L
YPLTKHPNQE

SEQ ID NO: 13399 - protein, 13 aa, Severe acute respiratory syndrome coronavirus 2
  REGION 1..13: note = Table B: HLA-DRB1*04:03L HLA-DRB1*04:02L HLA-DRB1*04:04L HLA-DRB1*07:01L
ADVFHLYLQYIRK

SEQ ID NO: 13400 - protein, 11 aa, Severe acute respiratory syndrome coronavirus 2
  REGION 1..11: note = Table B: HLA-DRB1*04:03L HLA-DRB1*04:05L HLA-DRB1*12:01L HLA-DRB1*16:01L
YIRKLHDELTG

SEQ ID NO: 13401 - protein, 14 aa, Severe acute respiratory syndrome coronavirus 2
  REGION 1..14: note = Table B: HLA-DRB1*04:03L HLA-DRB1*04:04L HLA-DQA1*01:02-B1*06:02L HLA-DRB3*01:01L
IRKLHDELTGHMLD

SEQ ID NO: 13402 - protein, 13 aa, Severe acute respiratory syndrome coronavirus 2
  REGION 1..13: note = Table B: HLA-DRB1*04:03L HLA-DRB1*04:08L
HDELTGHMLDMYS

SEQ ID NO: 13403 - protein, 13 aa, Severe acute respiratory syndrome coronavirus 2
  REGION 1..13: note = Table B: HLA-DRB1*04:03L
TGHMLDMYSVMLT

SEQ ID NO: 13404 - protein, 13 aa, Severe acute respiratory syndrome coronavirus 2
  REGION 1..13: note = Table B: HLA-DRB1*04:03L HLA-DRB1*04:02L HLA-DRB1*01:02L HLA-DQA1*01-B1*05L HLA-DRB1*12:01L HLA-DRB1*16:01L
GHMLDMYSVMLTN

SEQ ID NO: 13405 - protein, 11 aa, Severe acute respiratory syndrome coronavirus 2
  REGION 1..11: note = Table B: HLA-DRB1*04:03L HLA-DRB1*14:17L
YSVMLTNDNTS

SEQ ID NO: 13406 - protein, 10 aa, Severe acute respiratory syndrome coronavirus 2
  REGION 1..10: note = Table B: HLA-DRB1*04:03M HLA-DRB1*13:03L HLA-DRB1*01:03L HLA-DRB1*04:02L HLA-DRB1*04:04L HLA-DRB1*04:05L HLA-DRB4*03:01NL HLA-DRB1*11:04L HLA-DRB1*04:10L HLA-DRB1*12:01L HLA-DQA1*03:01-B1*03:02L HLA-DRB1*14:54L HLA-DRB1*14:17L
  REGION 1..10: note = CONT. FROM ABOVE: HLA-DRB1*10:01L HLA-DRB1*16:01L HLA-DRB1*04:08 L HLA-DQA1*02:01-B1*03:03L
VMLTNDNTSR

SEQ ID NO: 13407 - protein, 12 aa, Severe acute respiratory syndrome coronavirus 2
  REGION 1..12: note = Table B: HLA-DRB1*04:03L HLA-DRB1*13:02L HLA-DRB1*13:03L HLA-DRB1*04:05L HLA-DRB1*08:04L HLA-DRB1*11:04L HLA-DRB3*01:01L HLA-DPA1*01:03-B1*02:01L HLA-DRB1*08:03L
SRYWEPEFYEAM

SEQ ID NO: 13408 - protein, 10 aa, Severe acute respiratory syndrome coronavirus 2
  REGION 1..10: note = Table B: HLA-DRB1*04:03L HLA-DRB1*01:03L HLA-DRB1*04:02L HLA-DRB1*01:02L HLA-DRB1*14:01L HLA-DRB1*12:01L HLA-DRB1*14:17L HLA-DRB1*16:01L HLA-DQA1*02:01-B1*03:03L HLA-DRB1*15:03L
AMYTPHTVLQ

SEQ ID NO: 13409 - protein, 11 aa, Severe acute respiratory syndrome coronavirus 2
  REGION 1..11: note = Table B: HLA-DRB1*04:03L HLA-DRB1*13:03L HLA-DRB1*01:03L HLA-DRB1*04:02L HLA-DRB1*04:05L HLA-DQA1*01:02-B1*06:02L HLA-DRB1*01:02L HLA-DRB4*03:01NL HLA-DRB1*14:01L HLA-DQA1*01-B1*05L HLA-DRB1*04:10L HLA-DRB1*12:01L
  REGION 1..11: note = CONT. FROM ABOVE: HLA-DRB1*14:54L HLA-DRB1*14:17L HLA-DPA1*01:02 -B1*04:01L HLA-DRB1*04:08L HLA-DQA1*02:01-B1*03:03L
YTPHTVLQAVG

SEQ ID NO: 13410 - protein, 11 aa, Severe acute respiratory syndrome coronavirus 2
  REGION 1..11: note = Table B: HLA-DRB1*04:03L HLA-DRB1*13:03L HLA-DRB1*04:02L HLA-DRB1*04:05L HLA-DQA1*01-B1*05L HLA-DRB1*14:17L HLA-DRB1*16:01L HLA-DQA1*02:01-B1*03:03L
TPHTVLQAVGA

SEQ ID NO: 13411 - protein, 10 aa, Severe acute respiratory syndrome coronavirus 2
  REGION 1..10: note = Table B: HLA-DRB1*04:03L HLA-DQA1*01:02-B1*06:02L HLA-DQA1*03:01-B1*03:02L HLA-DRB1*14:17L HLA-DQA1*01:03-B1*06:01L HLA-DQA1*02:01-B1*03:03L
VLCNSQTSLR

SEQ ID NO: 13412 - protein, 12 aa, Severe acute respiratory syndrome coronavirus 2
  REGION 1..12: note = Table B: HLA-DRB1*04:03L HLA-DQA1*01:02-B1*06:02L
YDHVISTSHKLV

SEQ ID NO: 13413 - protein, 12 aa, Severe acute respiratory syndrome coronavirus 2
  REGION 1..12: note = Table B: HLA-DRB1*04:03L HLA-DRB1*13:02L HLA-DRB1*13:03L HLA-DRB1*04:02L HLA-DRB1*01:02L HLA-DRB1*08:04L HLA-DRB1*11:04L HLA-DRB1*12:02L HLA-DRB3*01:01L
DHVISTSHKLVL

SEQ ID NO: 13414 - protein, 11 aa, Severe acute respiratory syndrome coronavirus 2
  REGION 1..11: note = Table B: HLA-DRB1*04:03L
HKLVLSVNPYV

SEQ ID NO: 13415 - protein, 13 aa, Severe acute respiratory syndrome coronavirus 2
  REGION 1..13: note = Table B: HLA-DRB1*04:03L HLA-DQA1*01:02-B1*06:02L HLA-DPA1*03:01-B1*04:02L HLA-DPA1*01:03-B1*04:02L HLA-DPA1*01:02-B1*04:01L HLA-DQA1*01:03-B1*06:01L HLA-DQA1*02:01-B1*03:03L
VLSVNPYVCNAPG

SEQ ID NO: 13416 - protein, 13 aa, Severe acute respiratory syndrome coronavirus 2
  REGION 1..13: note = Table B: HLA-DRB1*04:03L HLA-DRB1*12:01L HLA-DQA1*05:05-B1*03:01L
VTDVTQLYLGGMS

SEQ ID NO: 13417 - protein, 19 aa, Severe acute respiratory syndrome coronavirus 2
  REGION 1..19: note = Table B: HLA-DRB1*04:03L
VTQLYLGGMSYYCKSHKPP

SEQ ID NO: 13418 - protein, 10 aa, Severe acute respiratory syndrome coronavirus 2
  REGION 1..10: note = Table B: HLA-DRB1*04:03L HLA-DRB1*01:03L HLA-DQA1*03:01-B1*03:02L HLA-DPA1*01:02-B1*04:01L HLA-DRB1*16:01L HLA-DQA1*02:01-B1*03:03L
SHKPPISFPL

SEQ ID NO: 13419 - protein, 11 aa, Severe acute respiratory syndrome coronavirus 2
  REGION 1..11: note = Table B: HLA-DRB1*04:03L
GDYILANTCTE

SEQ ID NO: 13420 - protein, 10 aa, Severe acute respiratory syndrome coronavirus 2
  REGION 1..10: note = Table B: HLA-DRB1*04:03L HLA-DRB1*04:02L HLA-DQA1*03:01-B1*03:02L HLA-DRB1*14:17L HLA-DQA1*02:01-B1*03:03L
YILANTCTER

SEQ ID NO: 13421 - protein, 12 aa, Severe acute respiratory syndrome coronavirus 2
  REGION 1..12: note = Table B: HLA-DRB1*04:03L HLA-DRB1*01:03L HLA-DRB1*04:05L HLA-DQA1*01:02-B1*06:02L HLA-DRB1*08:01L HLA-DQA1*03:01-B1*03:02L HLA-DRB1*07:01L HLA-DQA1*01:03-B1*06:01L HLA-DRB1*04:08L
  REGION 1..12: note = CONT. FROM ABOVE: HLA-DQA1*02:01-B1*03:03L HLA-DRB1*15:01L
ERLKLFAAETLK

SEQ ID NO: 13422 - protein, 10 aa, Severe acute respiratory syndrome coronavirus 2
  REGION 1..10: note = Table B: HLA-DRB1*04:03L HLA-DQA1*01:02-B1*06:02L HLA-DPA1*03:01-B1*105:01L HLA-DQA1*01:03-B1*06:01L HLA-DQA1*02:01-B1*03:03L
LFAAETLKAT

SEQ ID NO: 13423 - protein, 10 aa, Severe acute respiratory syndrome coronavirus 2
  REGION 1..10: note = Table B: HLA-DRB1*04:03L HLA-DRB1*04:02L HLA-DQA1*03:01-B1*03:02L HLA-DRB1*14:17L HLA-DQA1*02:01-B1*03:03L
AAETLKATEE

SEQ ID NO: 13424 - protein, 10 aa, Severe acute respiratory syndrome coronavirus 2
  REGION 1..10: note = Table B: HLA-DRB1*04:03L HLA-DQA1*03:01-B1*03:02L HLA-DQA1*01:03-B1*06:01L HLA-DQA1*02:01-B1*03:03L
TLKATEETFK

SEQ ID NO: 13425 - protein, 13 aa, Severe acute respiratory syndrome coronavirus 2
  REGION 1..13: note = Table B: HLA-DRB1*04:03L HLA-DRB1*04:05L HLA-DQA1*01:02-B1*06:02L HLA-DRB1*11:03L HLA-DRB1*07:01L HLA-DRB1*10:01L HLA-DQA1*01:03-B1*06:01L
ETFKLSYGIATVR

SEQ ID NO: 13426 - protein, 10 aa, Severe acute respiratory syndrome coronavirus 2
  REGION 1..10: note = Table B: HLA-DRB1*04:03L HLA-DQA1*01:02-B1*06:02L HLA-DQA1*03:01-B1*03:02L HLA-DQA1*01:03-B1*06:01L HLA-DQA1*02:01-B1*03:03L
IATVREVLSD

SEQ ID NO: 13427 - protein, 11 aa, Severe acute respiratory syndrome coronavirus 2
  REGION 1..11: note = Table B: HLA-DRB1*04:03L
ATVREVLSDRE

SEQ ID NO: 13428 - protein, 12 aa, Severe acute respiratory syndrome coronavirus 2
  REGION 1..12: note = Table B: HLA-DRB1*04:03L HLA-DRB1*04:02L HLA-DRB1*04:05L HLA-DRB4*03:01NL HLA-DRB1*08:04L HLA-DRB1*11:04L HLA-DRB3*01:01L HLA-DRB1*14:54L HLA-DRB1*14:17L HLA-DRB1*04:08L
VREVLSDRELHL

SEQ ID NO: 13429 - protein, 11 aa, Severe acute respiratory syndrome coronavirus 2
  REGION 1..11: note = Table B: HLA-DRB1*04:03L
EVLSDRELHLS

SEQ ID NO: 13430 - protein, 11 aa, Severe acute respiratory syndrome coronavirus 2
  REGION 1..11: note = Table B: HLA-DRB1*04:03L HLA-DRB1*01:03L HLA-DQA1*01:02-B1*06:02L HLA-DRB1*01:02L HLA-DQA1*05:05-B1*03:01L HLA-DRB1*16:01L HLA-DQA1*01:03-B1*06:01L
LSWEVGKPRPP

SEQ ID NO: 13431 - protein, 19 aa, Severe acute respiratory syndrome coronavirus 2
  REGION 1..19: note = Table B: HLA-DRB1*04:03L HLA-DRB1*11:02L HLA-DRB1*11:03L HLA-DQA1*05:05-B1*03:19L
KPRPPLNRNYVFTGYRVTK

SEQ ID NO: 13432 - protein, 19 aa, Severe acute respiratory syndrome coronavirus 2
  REGION 1..19: note = Table B: HLA-DRB1*04:03L HLA-DRB1*08:04L HLA-DRB1*03:01L HLA-DRB1*11:02L HLA-DRB1*14:02L HLA-DPA1*01:03-B1*104:01L
PRPPLNRNYVFTGYRVTKN

SEQ ID NO: 13433 - protein, 13 aa, Severe acute respiratory syndrome coronavirus 2
  REGION 1..13: note = Table B: HLA-DRB1*04:03L HLA-DRB1*04:02L HLA-DRB1*04:05L HLA-DQA1*01:01-B1*05:01L HLA-DRB1*08:01L HLA-DRB1*04:08L
VTKNSKVQIGEYT

SEQ ID NO: 13434 - protein, 13 aa, Severe acute respiratory syndrome coronavirus 2
  REGION 1..13: note = Table B: HLA-DRB1*04:03L HLA-DRB1*04:02L HLA-DRB1*04:05L HLA-DQA1*01:02-B1*06:02L HLA-DRB1*16:01L HLA-DQA1*01:03-B1*06:01L
SKVQIGEYTFEKG

SEQ ID NO: 13435 - protein, 12 aa, Severe acute respiratory syndrome coronavirus 2
  REGION 1..12: note = Table B: HLA-DRB1*04:03L HLA-DQA1*01:02-B1*06:02L HLA-DQA1*01-B1*05L HLA-DPA1*03:01-B1*105:01L HLA-DQA1*01:03-B1*06:01L HLA-DQA1*02:01-B1*03:03L
VQIGEYTFEKGD

SEQ ID NO: 13436 - protein, 11 aa, Severe acute respiratory syndrome coronavirus 2
  REGION 1..11: note = Table B: HLA-DRB1*04:03L HLA-DRB1*13:03L HLA-DRB1*01:03L HLA-DRB1*04:02L HLA-DRB1*04:05L HLA-DRB1*04:10L HLA-DRB1*14:54L HLA-DRB1*14:17L HLA-DRB1*04:08L HLA-DQA1*02:01-B1*03:03L
GEYTFEKGDYG

SEQ ID NO: 13437 - protein, 13 aa, Severe acute respiratory syndrome coronavirus 2
  REGION 1..13: note = Table B: HLA-DRB1*04:03L
TFEKGDYGDAVVY

SEQ ID NO: 13438 - protein, 12 aa, Severe acute respiratory syndrome coronavirus 2
  REGION 1..12: note = Table B: HLA-DRB1*04:03L
KGDYGDAVVYRG

SEQ ID NO: 13439 - protein, 10 aa, Severe acute respiratory syndrome coronavirus 2
  REGION 1..10: note = Table B: HLA-DRB1*04:03L HLA-DRB1*01:03L HLA-DRB1*04:05M HLA-DQA1*01:02-B1*06:02L HLA-DRB1*01:01L HLA-DRB1*01:02L HLA-DRB1*08:77L HLA-DPA1*03:01-B1*04:02L HLA-DRB1*11:03L HLA-DRB1*14:02L HLA-DQA1*01:01-B1*05:01L
  REGION 1..10: note = CONT. FROM ABOVE: HLA-DQA1*05:05-B1*03:19L HLA-DQA1*05:01-B1*02: 01L HLA-DPA1*01:03-B1*04:01L HLA-DRB1*12:01L HLA-DPA1*02:01-B1*1 3:01M HLA-DPA1*03:01-B1*105:01L HLA-DRB1*16:01L HLA-DQA1*01:03-B 1*06:01M HLA-DQA1*02:01-B1*03:03L HLA-DRB1*15:03L
TYKLNVGDYF

SEQ ID NO: 13440 - protein, 12 aa, Severe acute respiratory syndrome coronavirus 2
  REGION 1..12: note = Table B: HLA-DRB1*04:03L HLA-DRB1*13:02L HLA-DRB1*13:03L HLA-DRB1*01:03L HLA-DRB1*04:02L HLA-DRB1*04:04L HLA-DRB4*03:01NL HLA-DRB1*08:04L HLA-DRB3*02:01L HLA-DPA1*01:03-B1*03:01L HLA-DRB1*14:01L HLA-DRB1*11:03L HLA-DRB1*11:04L HLA-DRB1*14:02L
  REGION 1..12: note = CONT. FROM ABOVE: HLA-DQA1*01:01-B1*05:01L HLA-DRB1*08:01L HLA-D RB1*11:01L HLA-DRB4*01:01L HLA-DPA1*01:03-B1*04:01L HLA-DRB1*04: 10L HLA-DRB1*09:01L HLA-DPA1*01:03-B1*04:02L HLA-DRB1*12:02L HLA -DRB3*01:01L HLA-DRB1*14:54L HLA-DQA1*05:05-B1*03:01L
  REGION 1..12: note = CONT. FROM ABOVE: HLA-DRB1*14:17L HLA-DRB1*07:01L HLA-DRB1*10:01 L HLA-DRB1*04:08L HLA-DRB1*08:03L
VGDYFVLTSHTV

SEQ ID NO: 13441 - protein, 10 aa, Severe acute respiratory syndrome coronavirus 2
  REGION 1..10: note = Table B: HLA-DRB1*04:03L HLA-DRB1*14:01L
FVLTSHTVMP

SEQ ID NO: 13442 - protein, 11 aa, Severe acute respiratory syndrome coronavirus 2
  REGION 1..11: note = Table B: HLA-DRB1*04:03L HLA-DQA1*01:03-B1*06:01L
VLTSHTVMPLS

SEQ ID NO: 13443 - protein, 11 aa, Severe acute respiratory syndrome coronavirus 2
  REGION 1..11: note = Table B: HLA-DRB1*04:03L HLA-DRB1*14:17L
SHTVMPLSAPT

SEQ ID NO: 13444 - protein, 12 aa, Severe acute respiratory syndrome coronavirus 2
  REGION 1..12: note = Table B: HLA-DRB1*04:03L HLA-DQA1*01:02-B1*06:02L HLA-DQA1*05:05-B1*03:01L
PLSAPTLVPQEH

SEQ ID NO: 13445 - protein, 10 aa, Severe acute respiratory syndrome coronavirus 2
  REGION 1..10: note = Table B: HLA-DRB1*04:03L HLA-DRB1*04:02L HLA-DQA1*03:01-B1*03:02L HLA-DRB1*14:17L HLA-DQA1*02:01-B1*03:03L
YVRITGLYPT

SEQ ID NO: 13446 - protein, 13 aa, Severe acute respiratory syndrome coronavirus 2
  REGION 1..13: note = Table B: HLA-DRB1*04:03L HLA-DRB1*01:02L HLA-DQA1*05:05-B1*03:19L HLA-DRB1*10:01L HLA-DRB1*16:01L HLA-DRB1*15:03L
VRITGLYPTLNIS

SEQ ID NO: 13447 - protein, 10 aa, Severe acute respiratory syndrome coronavirus 2
  REGION 1..10: note = Table B: HLA-DRB1*04:03L HLA-DRB1*04:05L HLA-DQA1*01-B1*05L HLA-DQA1*03:01-B1*03:02L HLA-DRB1*14:17L HLA-DQA1*02:01-B1*03:03L
LYPTLNISDE

SEQ ID NO: 13448 - protein, 10 aa, Severe acute respiratory syndrome coronavirus 2
  REGION 1..10: note = Table B: HLA-DRB1*04:03L
LNISDEFSSN

SEQ ID NO: 13449 - protein, 11 aa, Severe acute respiratory syndrome coronavirus 2
  REGION 1..11: note = Table B: HLA-DRB1*04:03L HLA-DRB1*13:02L HLA-DRB1*04:05L HLA-DRB1*14:17L
DEFSSNVANYQ

SEQ ID NO: 13450 - protein, 10 aa, Severe acute respiratory syndrome coronavirus 2
  REGION 1..10: note = Table B: HLA-DRB1*04:03L HLA-DRB1*04:02L HLA-DRB1*14:01L HLA-DQA1*01-B1*05L HLA-DQA1*03:01-B1*03:02L HLA-DRB1*14:17L HLA-DQA1*02:01-B1*03:03L
VANYQKVGMQ

SEQ ID NO: 13451 - protein, 13 aa, Severe acute respiratory syndrome coronavirus 2
  REGION 1..13: note = Table B: HLA-DRB1*04:03L HLA-DRB1*04:02L HLA-DQA1*01:02-B1*06:02L HLA-DPA1*03:01-B1*105:01L HLA-DQA1*03:01-B1*03:02L HLA-DRB1*14:17L HLA-DRB1*16:01L HLA-DQA1*01:03-B1*06:01L HLA-DQA1*02:01-B1*03:03L
VGMQKYSTLQGPP

SEQ ID NO: 13452 - protein, 10 aa, Severe acute respiratory syndrome coronavirus 2
  REGION 1..10: note = Table B: HLA-DRB1*04:03L
KYSTLQGPPG

SEQ ID NO: 13453 - protein, 11 aa, Severe acute respiratory syndrome coronavirus 2
  REGION 1..11: note = Table B: HLA-DRB1*04:03L HLA-DRB1*01:03L HLA-DRB1*01:02L HLA-DRB1*14:17L HLA-DRB1*16:01L HLA-DRB1*04:08L
YSTLQGPPGTG

SEQ ID NO: 13454 - protein, 10 aa, Severe acute respiratory syndrome coronavirus 2
  REGION 1..10: note = Table B: HLA-DRB1*04:03L HLA-DRB1*13:03L HLA-DRB1*01:03L HLA-DRB1*04:02L HLA-DRB4*03:01NL HLA-DQA1*03:01-B1*03:02L HLA-DRB1*14:17L
QGPPGTGKSH

SEQ ID NO: 13455 - protein, 13 aa, Severe acute respiratory syndrome coronavirus 2
  REGION 1..13: note = Table B: HLA-DRB1*04:03L HLA-DPA1*01:02-B1*04:01L
SHFAIGLALYYPS

SEQ ID NO: 13456 - protein, 10 aa, Severe acute respiratory syndrome coronavirus 2
  REGION 1..10: note = Table B: HLA-DRB1*04:03L
IVYTACSHAA

SEQ ID NO: 13457 - protein, 10 aa, Severe acute respiratory syndrome coronavirus 2
  REGION 1..10: note = Table B: HLA-DRB1*04:03L HLA-DRB1*01:03L HLA-DRB1*04:02L HLA-DRB1*04:05L HLA-DRB1*01:02L HLA-DRB1*08:01L HLA-DRB1*12:01L HLA-DQA1*03:01-B1*03:02L HLA-DRB1*14:17L HLA-DPA1*01:02-B1*04:01L HLA-DRB1*16:01L HLA-DRB1*04:08L
  REGION 1..10: note = CONT. FROM ABOVE: HLA-DQA1*02:01-B1*03:03L HLA-DRB1*15:03L
KALKYLPIDK

SEQ ID NO: 13458 - protein, 11 aa, Severe acute respiratory syndrome coronavirus 2
  REGION 1..11: note = Table B: HLA-DRB1*04:03L HLA-DRB1*01:03L HLA-DRB1*08:77L HLA-DPA1*01:03-B1*03:01L HLA-DPA1*03:01-B1*04:02L HLA-DRB1*14:01L HLA-DRB1*14:02L HLA-DQA1*01-B1*05L HLA-DRB4*01:01L HLA-DPA1*01:03-B1*04:01L
  REGION 1..11: note = CONT. FROM ABOVE: HLA-DQA1*05:05-B1*03:116L HLA-DPA1*01:03-B1*04 :02L HLA-DRB1*12:01L HLA-DPA1*02:01-B1*13:01L HLA-DPA1*01:03-B1* 104:01L HLA-DQA1*05:05-B1*03:01L HLA-DPA1*01:02-B1*04:01L HLA-DR B1*16:01L
KVNSTLEQYVF

SEQ ID NO: 13459 - protein, 12 aa, Severe acute respiratory syndrome coronavirus 2
  REGION 1..12: note = Table B: HLA-DRB1*04:03L HLA-DQA1*01:02-B1*06:02L HLA-DPA1*03:01-B1*105:01L HLA-DQA1*01:03-B1*06:01L
QYVFCTVNALPE

SEQ ID NO: 13460 - protein, 12 aa, Severe acute respiratory syndrome coronavirus 2
  REGION 1..12: note = Table B: HLA-DRB1*04:03L HLA-DQA1*01:02-B1*06:02L HLA-DPA1*03:01-B1*105:01L HLA-DQA1*05:05-B1*03:01L HLA-DQA1*01:03-B1*06:01L
YVFCTVNALPET

SEQ ID NO: 13461 - protein, 11 aa, Severe acute respiratory syndrome coronavirus 2
  REGION 1..11: note = Table B: HLA-DRB1*04:03L HLA-DQA1*02:01-B1*03:03L
TVNALPETTAD

SEQ ID NO: 13462 - protein, 11 aa, Severe acute respiratory syndrome coronavirus 2
  REGION 1..11: note = Table B: HLA-DRB1*04:03L HLA-DRB1*12:01L HLA-DRB1*16:01L
DIVVFDEISMA

SEQ ID NO: 13463 - protein, 11 aa, Severe acute respiratory syndrome coronavirus 2
  REGION 1..11: note = Table B: HLA-DRB1*04:03L HLA-DRB1*14:17L
IVVFDEISMAT

SEQ ID NO: 13464 - protein, 11 aa, Severe acute respiratory syndrome coronavirus 2
  REGION 1..11: note = Table B: HLA-DRB1*04:03L HLA-DRB1*04:02L HLA-DQA1*01-B1*05L HLA-DQA1*05:01-B1*02:01L HLA-DQA1*03:01-B1*03:02L HLA-DRB1*14:17L HLA-DQA1*02:01-B1*03:03L
VVFDEISMATN

SEQ ID NO: 13465 - protein, 11 aa, Severe acute respiratory syndrome coronavirus 2
  REGION 1..11: note = Table B: HLA-DRB1*04:03L HLA-DQA1*03:01-B1*03:02L HLA-DRB1*14:17L
FDEISMATNYD

SEQ ID NO: 13466 - protein, 10 aa, Severe acute respiratory syndrome coronavirus 2
  REGION 1..10: note = Table B: HLA-DRB1*04:03L HLA-DRB1*14:17L
ISMATNYDLS

SEQ ID NO: 13467 - protein, 10 aa, Severe acute respiratory syndrome coronavirus 2
  REGION 1..10: note = Table B: HLA-DRB1*04:03L HLA-DRB1*13:02L HLA-DRB1*13:03L HLA-DRB1*01:03L HLA-DRB1*04:02L HLA-DRB4*03:01NL HLA-DRB1*08:01L HLA-DRB5*01:01L HLA-DPA1*01:03-B1*04:02L HLA-DRB1*12:01L HLA-DQA1*03:01-B1*03:02L HLA-DQA1*05:05-B1*03:01L
  REGION 1..10: note = CONT. FROM ABOVE: HLA-DRB1*14:17L HLA-DRB1*16:01L HLA-DQA1*01:03 -B1*06:01L HLA-DQA1*02:01-B1*03:03L
NYDLSVVNAR

SEQ ID NO: 13468 - protein, 11 aa, Severe acute respiratory syndrome coronavirus 2
  REGION 1..11: note = Table B: HLA-DRB1*04:03L HLA-DRB1*04:02L HLA-DQA1*01-B1*05L HLA-DRB1*14:17L HLA-DRB1*16:01L
YVYIGDPAQLP

SEQ ID NO: 13469 - protein, 11 aa, Severe acute respiratory syndrome coronavirus 2
  REGION 1..11: note = Table B: HLA-DRB1*04:03L HLA-DRB1*04:02L HLA-DQA1*03:01-B1*03:02L HLA-DRB1*14:17L
TLLTKGTLEPE

SEQ ID NO: 13470 - protein, 18 aa, Severe acute respiratory syndrome coronavirus 2
  REGION 1..18: note = Table B: HLA-DRB1*04:03L HLA-DPA1*01:03-B1*03:01L HLA-DRB1*11:02L HLA-DPA1*01:03-B1*04:02L HLA-DRB3*01:01L HLA-DPA1*01:03-B1*02:01L HLA-DPA1*01:03-B1*104:01L HLA-DRB1*08:02L HLA-DRB1*08:03L
EPEYFNSVCRLMKTIGPD

SEQ ID NO: 13471 - protein, 12 aa, Severe acute respiratory syndrome coronavirus 2
  REGION 1..12: note = Table B: HLA-DRB1*04:03L HLA-DQA1*01-B1*05L HLA-DRB1*16:01L
DTVSALVYDNKL

SEQ ID NO: 13472 - protein, 10 aa, Severe acute respiratory syndrome coronavirus 2
  REGION 1..10: note = Table B: HLA-DRB1*04:03L HLA-DRB1*04:02L HLA-DRB1*14:01L HLA-DRB1*14:17L HLA-DRB1*16:01L
ALVYDNKLKA

SEQ ID NO: 13473 - protein, 10 aa, Severe acute respiratory syndrome coronavirus 2
  REGION 1..10: note = Table B: HLA-DRB1*04:03L HLA-DRB1*13:02L HLA-DRB1*13:03L HLA-DRB1*01:03L HLA-DRB1*04:02L HLA-DRB1*04:05L HLA-DRB1*01:02L HLA-DRB4*03:01NL HLA-DRB1*14:01L HLA-DRB1*11:04L HLA-DRB1*08:01L HLA-DRB1*11:01L HLA-DRB1*12:01L HLA-DRB3*01:01L
  REGION 1..10: note = CONT. FROM ABOVE: HLA-DQA1*03:01-B1*03:02L HLA-DRB1*14:54L HLA-D RB1*14:17L HLA-DRB1*16:01L HLA-DRB1*04:08L HLA-DRB1*15:03L
LVYDNKLKAH

SEQ ID NO: 13474 - protein, 13 aa, Severe acute respiratory syndrome coronavirus 2
  REGION 1..13: note = Table B: HLA-DRB1*04:03L HLA-DRB1*01:03L HLA-DRB1*04:02L HLA-DRB1*04:04L HLA-DRB1*04:05L HLA-DQA1*01:02-B1*06:02L HLA-DRB1*01:02L HLA-DRB1*14:01L HLA-DRB1*08:01L HLA-DQA1*01-B1*05L HLA-DRB1*04:10L HLA-DRB1*12:01L
  REGION 1..13: note = CONT. FROM ABOVE: HLA-DQA1*03:01-B1*03:02L HLA-DRB1*14:17L HLA-D RB1*16:01L HLA-DRB1*04:08L HLA-DQA1*02:01-B1*03:03L HLA-DRB1*15: 03L
DNKLKAHKDKSAQ

SEQ ID NO: 13475 - protein, 11 aa, Severe acute respiratory syndrome coronavirus 2
  REGION 1..11: note = Table B: HLA-DRB1*04:03L HLA-DRB1*13:02L HLA-DRB1*13:03L HLA-DRB1*01:03L HLA-DRB1*04:02L HLA-DRB1*04:05L HLA-DRB1*01:02L HLA-DRB4*03:01NL HLA-DPA1*01:03-B1*03:01L HLA-DRB1*14:01L HLA-DQA1*01:01-B1*05:01L HLA-DRB1*08:01L HLA-DRB4*02:01NL
  REGION 1..11: note = CONT. FROM ABOVE: HLA-DQA1*05:05-B1*03:116L HLA-DRB1*04:10L HLA- DPA1*01:03-B1*04:02L HLA-DRB1*12:01L HLA-DRB1*14:54L HLA-DRB1*14 :17L HLA-DPA1*01:02-B1*04:01L HLA-DRB1*16:01L HLA-DRB1*04:08L HL A-DRB1*15:03L
VSSAINRPQIG

SEQ ID NO: 13476 - protein, 10 aa, Severe acute respiratory syndrome coronavirus 2
  REGION 1..10: note = Table B: HLA-DRB1*04:03L HLA-DRB1*14:01L HLA-DQA1*03:01-B1*03:02L HLA-DQA1*02:01-B1*03:03L
AINRPQIGVV

SEQ ID NO: 13477 - protein, 13 aa, Severe acute respiratory syndrome coronavirus 2
  REGION 1..13: note = Table B: HLA-DRB1*04:03L HLA-DRB1*04:02L HLA-DRB1*04:05L HLA-DRB1*12:01L HLA-DRB1*04:08L
RPQIGVVREFLTR

SEQ ID NO: 13478 - protein, 13 aa, Severe acute respiratory syndrome coronavirus 2
  REGION 1..13: note = Table B: HLA-DRB1*04:03L HLA-DRB1*01:03L HLA-DRB1*04:02L HLA-DRB1*04:05L HLA-DQA1*01:02-B1*06:02L HLA-DRB1*01:02L HLA-DRB1*14:01L HLA-DRB1*08:01L HLA-DRB1*12:01L HLA-DQA1*03:01-B1*03:02L HLA-DRB1*14:17L HLA-DRB1*16:01L
  REGION 1..13: note = CONT. FROM ABOVE: HLA-DRB1*04:08L HLA-DQA1*02:01-B1*03:03L
IGVVREFLTRNPA

SEQ ID NO: 13479 - protein, 10 aa, Severe acute respiratory syndrome coronavirus 2
  REGION 1..10: note = Table B: HLA-DRB1*04:03L HLA-DRB1*13:03L HLA-DRB1*01:03L HLA-DRB1*04:02L HLA-DRB1*08:01L HLA-DQA1*03:01-B1*03:02L HLA-DRB1*14:17L HLA-DRB1*04:08L HLA-DQA1*02:01-B1*03:03L
EFLTRNPAWR

SEQ ID NO: 13480 - protein, 10 aa, Severe acute respiratory syndrome coronavirus 2
  REGION 1..10: note = Table B: HLA-DRB1*04:03L HLA-DQA1*01-B1*05L HLA-DQA1*03:01-B1*03:02L HLA-DRB1*14:17L
VFISPYNSQN

SEQ ID NO: 13481 - protein, 10 aa, Severe acute respiratory syndrome coronavirus 2
  REGION 1..10: note = Table B: HLA-DRB1*04:03L HLA-DQA1*01-B1*05L HLA-DRB1*16:01L
ISPYNSQNAV

SEQ ID NO: 13482 - protein, 11 aa, Severe acute respiratory syndrome coronavirus 2
  REGION 1..11: note = Table B: HLA-DRB1*04:03L HLA-DRB1*04:02L HLA-DRB4*03:01NL HLA-DRB1*14:54L HLA-DRB1*14:17L
SPYNSQNAVAS

SEQ ID NO: 13483 - protein, 10 aa, Severe acute respiratory syndrome coronavirus 2
  REGION 1..10: note = Table B: HLA-DRB1*04:03L HLA-DRB1*13:03L HLA-DRB1*04:02L HLA-DRB4*03:01NL HLA-DRB1*12:01L HLA-DQA1*03:01-B1*03:02L HLA-DRB1*14:17L HLA-DRB1*16:01L
YNSQNAVASK

SEQ ID NO: 13484 - protein, 12 aa, Severe acute respiratory syndrome coronavirus 2
  REGION 1..12: note = Table B: HLA-DRB1*04:03L
LGLPTQTVDSSQ

SEQ ID NO: 13485 - protein, 11 aa, Severe acute respiratory syndrome coronavirus 2
  REGION 1..11: note = Table B: HLA-DRB1*04:03L HLA-DQA1*01-B1*05L HLA-DQA1*05:01-B1*02:01L HLA-DQA1*03:01-B1*03:02L HLA-DRB1*14:17L
LPTQTVDSSQG

SEQ ID NO: 13486 - protein, 11 aa, Severe acute respiratory syndrome coronavirus 2
  REGION 1..11: note = Table B: HLA-DRB1*04:03L HLA-DQA1*01-B1*05L HLA-DQA1*03:01-B1*03:02L
DYVIFTQTTET

SEQ ID NO: 13487 - protein, 11 aa, Severe acute respiratory syndrome coronavirus 2
  REGION 1..11: note = Table B: HLA-DRB1*04:03L HLA-DRB1*14:17L
YVIFTQTTETA

SEQ ID NO: 13488 - protein, 10 aa, Severe acute respiratory syndrome coronavirus 2
  REGION 1..10: note = Table B: HLA-DRB1*04:03L HLA-DRB1*13:03L HLA-DRB1*01:03L HLA-DRB1*04:02L HLA-DRB1*04:05L HLA-DRB4*03:01NL HLA-DQA1*01-B1*05L HLA-DQA1*05:01-B1*02:01L HLA-DRB1*04:10L HLA-DRB1*12:01L HLA-DQA1*03:01-B1*03:02L HLA-DRB1*14:54L
  REGION 1..10: note = CONT. FROM ABOVE: HLA-DRB1*14:17L HLA-DRB1*16:01L HLA-DRB1*04:08 L HLA-DQA1*02:01-B1*03:03L
IFTQTTETAH

SEQ ID NO: 13489 - protein, 13 aa, Severe acute respiratory syndrome coronavirus 2
  REGION 1..13: note = Table B: HLA-DRB1*04:03L HLA-DRB1*01:03L HLA-DRB1*01:02L HLA-DPA1*01:03-B1*03:01L HLA-DQA1*05:01-B1*02:01L HLA-DPA1*01:03-B1*04:02L HLA-DRB1*16:01L HLA-DRB1*04:08L
TQTTETAHSCNVN

SEQ ID NO: 13490 - protein, 12 aa, Severe acute respiratory syndrome coronavirus 2
  REGION 1..12: note = Table B: HLA-DRB1*04:03L HLA-DQA1*01:02-B1*06:02L
VGILCIMSDRDL

SEQ ID NO: 13491 - protein, 10 aa, Severe acute respiratory syndrome coronavirus 2
  REGION 1..10: note = Table B: HLA-DRB1*04:03L HLA-DRB1*13:03L HLA-DRB1*01:03L HLA-DRB1*04:02L HLA-DRB1*04:04L HLA-DRB1*04:05L HLA-DRB4*03:01NL HLA-DRB1*08:01L HLA-DQA1*01-B1*05L HLA-DRB1*04:10L HLA-DRB1*12:01L HLA-DQA1*03:01-B1*03:02L HLA-DRB1*14:54L
  REGION 1..10: note = CONT. FROM ABOVE: HLA-DRB1*14:17L HLA-DRB1*16:01L HLA-DRB1*04:08 L HLA-DQA1*02:01-B1*03:03L
IMSDRDLYDK

SEQ ID NO: 13492 - protein, 10 aa, Severe acute respiratory syndrome coronavirus 2
  REGION 1..10: note = Table B: HLA-DRB1*04:03L HLA-DRB1*04:02L HLA-DQA1*01-B1*05L HLA-DPA1*03:01-B1*105:01L HLA-DQA1*03:01-B1*03:02L HLA-DRB1*14:17L HLA-DPA1*01:02-B1*04:01L HLA-DQA1*01:03-B1*06:01L HLA-DQA1*02:01-B1*03:03L
LQFTSLEIPR

SEQ ID NO: 13493 - protein, 10 aa, Severe acute respiratory syndrome coronavirus 2
  REGION 1..10: note = Table B: HLA-DRB1*04:03L HLA-DRB1*04:02L HLA-DQA1*03:01-B1*03:02L HLA-DRB1*14:17L HLA-DQA1*02:01-B1*03:03L
RNVATLQAEN

SEQ ID NO: 13494 - protein, 10 aa, Severe acute respiratory syndrome coronavirus 2
  REGION 1..10: note = Table B: HLA-DRB1*04:03L HLA-DQA1*05:01-B1*02:01L HLA-DRB1*12:01L HLA-DQA1*03:01-B1*03:02L HLA-DQA1*01:03-B1*06:01L HLA-DQA1*02:01-B1*03:03L
VATLQAENVT

SEQ ID NO: 13495 - protein, 10 aa, Severe acute respiratory syndrome coronavirus 2
  REGION 1..10: note = Table B: HLA-DRB1*04:03L HLA-DRB1*14:17L
ATLQAENVTG

SEQ ID NO: 13496 - protein, 12 aa, Severe acute respiratory syndrome coronavirus 2
  REGION 1..12: note = Table B: HLA-DRB1*04:03L HLA-DRB1*01:02L HLA-DRB1*12:01L HLA-DQA1*05:05-B1*03:01L HLA-DRB1*14:17L
TLQAENVTGLFK

SEQ ID NO: 13497 - protein, 12 aa, Severe acute respiratory syndrome coronavirus 2
  REGION 1..12: note = Table B: HLA-DRB1*04:03L
LQAENVTGLFKD

SEQ ID NO: 13498 - protein, 13 aa, Severe acute respiratory syndrome coronavirus 2
  REGION 1..13: note = Table B: HLA-DRB1*04:03L HLA-DRB1*13:02L HLA-DRB1*13:03L HLA-DRB1*01:03L HLA-DRB1*04:02L HLA-DRB1*04:05L HLA-DRB1*01:02L HLA-DRB1*14:01L HLA-DRB1*08:01L HLA-DRB1*12:01L HLA-DRB3*01:01L HLA-DRB1*14:54L HLA-DRB1*14:17L HLA-DRB1*16:01L HLA-DRB1*04:08L
APTHLSVDTKFKT

SEQ ID NO: 13499 - protein, 10 aa, Severe acute respiratory syndrome coronavirus 2
  REGION 1..10: note = Table B: HLA-DRB1*04:03L HLA-DRB1*13:03L HLA-DRB1*01:03L HLA-DRB1*04:02L HLA-DQA1*03:01-B1*03:02L HLA-DRB1*14:17L HLA-DPA1*01:02-B1*04:01L HLA-DRB1*16:01L HLA-DQA1*02:01-B1*03:03L
SVDTKFKTEG

SEQ ID NO: 13500 - protein, 12 aa, Severe acute respiratory syndrome coronavirus 2
  REGION 1..12: note = Table B: HLA-DRB1*04:03L HLA-DPA1*03:01-B1*105:01L
LISMMGFKMNYQ

SEQ ID NO: 13501 - protein, 14 aa, Severe acute respiratory syndrome coronavirus 2
  REGION 1..14: note = Table B: HLA-DRB1*04:03L HLA-DRB1*01:02L HLA-DRB1*08:04L HLA-DRB1*04:08L HLA-DRB1*15:03L
ISMMGFKMNYQVNG

SEQ ID NO: 13502 - protein, 11 aa, Severe acute respiratory syndrome coronavirus 2
  REGION 1..11: note = Table B: HLA-DRB1*04:03L HLA-DRB1*04:02L HLA-DRB1*16:01L HLA-DRB1*15:03L
VNGYPNMFITR

SEQ ID NO: 13503 - protein, 13 aa, Severe acute respiratory syndrome coronavirus 2
  REGION 1..13: note = Table B: HLA-DRB1*04:03L HLA-DRB1*13:03L HLA-DRB1*04:02L HLA-DRB1*04:05L HLA-DRB4*03:01NL HLA-DRB1*08:77L HLA-DRB3*02:01L HLA-DPA1*01:03-B1*03:01L HLA-DRB1*11:03L HLA-DRB1*11:04L HLA-DRB1*14:02L HLA-DQA1*01:01-B1*05:01L
  REGION 1..13: note = CONT. FROM ABOVE: HLA-DQA1*05:05-B1*03:19L HLA-DPA1*01:03-B1*04: 01L HLA-DRB1*04:10L HLA-DRB1*09:01L HLA-DRB1*12:02L HLA-DRB3*01: 01L HLA-DPA1*02:01-B1*13:01L HLA-DRB1*14:54L HLA-DQA1*05:05-B1*0 3:01L HLA-DRB1*14:17L HLA-DRB1*08:03L
YPNMFITREEAIR

SEQ ID NO: 13504 - protein, 12 aa, Severe acute respiratory syndrome coronavirus 2
  REGION 1..12: note = Table B: HLA-DRB1*04:03L HLA-DRB1*04:02L HLA-DRB1*01:02L HLA-DRB1*14:01L HLA-DRB1*08:01L HLA-DRB1*14:17L
EEAIRHVRAWIG

SEQ ID NO: 13505 - protein, 12 aa, Severe acute respiratory syndrome coronavirus 2
  REGION 1..12: note = Table B: HLA-DRB1*04:03L HLA-DRB1*04:05L HLA-DQA1*01:02-B1*06:02L HLA-DRB1*01:02L HLA-DRB1*12:01L HLA-DPA1*02:01-B1*13:01L HLA-DRB1*16:01L HLA-DRB1*04:08L
RHVRAWIGFDVE

SEQ ID NO: 13506 - protein, 12 aa, Severe acute respiratory syndrome coronavirus 2
  REGION 1..12: note = Table B: HLA-DRB1*04:03L HLA-DRB1*04:02L HLA-DQA1*01:02-B1*06:02L HLA-DRB1*01:02L HLA-DRB1*12:01L HLA-DRB1*16:01L HLA-DQA1*01:03-B1*06:01L HLA-DQA1*02:01-B1*03:03L HLA-DRB1*15:01L
HVRAWIGFDVEG

SEQ ID NO: 13507 - protein, 14 aa, Severe acute respiratory syndrome coronavirus 2
  REGION 1..14: note = Table B: HLA-DRB1*04:03L HLA-DRB1*01:03L HLA-DRB1*04:05L HLA-DRB1*01:02L HLA-DQA1*01:01-B1*05:01L HLA-DPA1*02:01-B1*13:01L HLA-DRB1*16:01L HLA-DRB1*15:03L
FDVEGCHATREAVG

SEQ ID NO: 13508 - protein, 13 aa, Severe acute respiratory syndrome coronavirus 2
  REGION 1..13: note = Table B: HLA-DRB1*04:03L
STGVNLVAVPTGY

SEQ ID NO: 13509 - protein, 12 aa, Severe acute respiratory syndrome coronavirus 2
  REGION 1..12: note = Table B: HLA-DRB1*04:03L HLA-DRB1*14:17L
GVNLVAVPTGYV

SEQ ID NO: 13510 - protein, 10 aa, Severe acute respiratory syndrome coronavirus 2
  REGION 1..10: note = Table B: HLA-DRB1*04:03L HLA-DRB1*04:02L HLA-DQA1*05:01-B1*02:01L HLA-DQA1*03:01-B1*03:02L HLA-DRB1*14:17L HLA-DQA1*02:01-B1*03:03L
LVAVPTGYVD

SEQ ID NO: 13511 - protein, 10 aa, Severe acute respiratory syndrome coronavirus 2
  REGION 1..10: note = Table B: HLA-DRB1*04:03L HLA-DQA1*01-B1*05L HLA-DQA1*03:01-B1*03:02L
GYVDTPNNTD

SEQ ID NO: 13512 - protein, 11 aa, Severe acute respiratory syndrome coronavirus 2
  REGION 1..11: note = Table B: HLA-DRB1*04:03L HLA-DRB1*04:02L HLA-DRB1*14:17L
FSRVSAKPPPG

SEQ ID NO: 13513 - protein, 13 aa, Severe acute respiratory syndrome coronavirus 2
  REGION 1..13: note = Table B: HLA-DRB1*04:03L HLA-DRB1*13:02L HLA-DRB1*01:01L HLA-DRB1*14:01L HLA-DRB1*08:01L HLA-DRB1*11:01L HLA-DRB3*01:01L HLA-DRB1*07:01L
DQFKHLIPLMYKG

SEQ ID NO: 13514 - protein, 13 aa, Severe acute respiratory syndrome coronavirus 2
  REGION 1..13: note = Table B: HLA-DRB1*04:03L HLA-DRB1*01:03L HLA-DRB1*04:02L HLA-DRB1*04:04L HLA-DRB1*04:05L HLA-DQA1*01:02-B1*06:02L HLA-DRB1*01:02L HLA-DRB1*08:04L HLA-DPA1*01:03-B1*03:01L HLA-DPA1*03:01-B1*04:02L HLA-DRB1*14:01L HLA-DRB1*08:01L
  REGION 1..13: note = CONT. FROM ABOVE: HLA-DRB1*04:10L HLA-DRB1*12:01L HLA-DPA1*02:01 -B1*13:01L HLA-DPA1*03:01-B1*105:01L HLA-DQA1*03:01-B1*03:02L HL A-DRB1*14:17L HLA-DPA1*01:02-B1*04:01L HLA-DRB1*16:01L HLA-DRB1* 04:08L HLA-DQA1*02:01-B1*03:03L HLA-DRB1*15:03L
VVRIKIVQMLSDT

SEQ ID NO: 13515 - protein, 10 aa, Severe acute respiratory syndrome coronavirus 2
  REGION 1..10: note = Table B: HLA-DRB1*04:03L HLA-DRB1*04:02L HLA-DRB1*01:02L HLA-DQA1*01-B1*05L HLA-DQA1*05:01-B1*02:01L HLA-DRB1*12:01L HLA-DPA1*03:01-B1*105:01L HLA-DQA1*03:01-B1*03:02L HLA-DRB1*14:17L HLA-DRB1*16:01L HLA-DQA1*01:03-B1*06:01L
  REGION 1..10: note = CONT. FROM ABOVE: HLA-DQA1*02:01-B1*03:03L HLA-DRB1*15:03L
IVQMLSDTLK

SEQ ID NO: 13516 - protein, 10 aa, Severe acute respiratory syndrome coronavirus 2
  REGION 1..10: note = Table B: HLA-DRB1*04:03L HLA-DRB1*14:17L
VQMLSDTLKN

SEQ ID NO: 13517 - protein, 11 aa, Severe acute respiratory syndrome coronavirus 2
  REGION 1..11: note = Table B: HLA-DRB1*04:03L HLA-DQA1*01-B1*05L HLA-DQA1*03:01-B1*03:02L
DTLKNLSDRVV

SEQ ID NO: 13518 - protein, 11 aa, Severe acute respiratory syndrome coronavirus 2
  REGION 1..11: note = Table B: HLA-DRB1*04:03L HLA-DRB1*01:03L HLA-DQA1*01:02-B1*06:02L HLA-DRB1*01:02L HLA-DPA1*01:03-B1*03:01L HLA-DRB1*04:08L
VLWAHGFELTS

SEQ ID NO: 13519 - protein, 11 aa, Severe acute respiratory syndrome coronavirus 2
  REGION 1..11: note = Table B: HLA-DRB1*04:03L
PFMIDVQQWGF

SEQ ID NO: 13520 - protein, 12 aa, Severe acute respiratory syndrome coronavirus 2
  REGION 1..12: note = Table B: HLA-DRB1*04:03L HLA-DRB1*04:02L HLA-DRB1*04:05L HLA-DRB4*03:01NL HLA-DRB1*04:10L HLA-DRB1*14:17L HLA-DRB1*16:01L
VQQWGFTGNLQS

SEQ ID NO: 13521 - protein, 12 aa, Severe acute respiratory syndrome coronavirus 2
  REGION 1..12: note = Table B: HLA-DRB1*04:03L HLA-DRB1*13:02L HLA-DRB1*01:03L HLA-DRB1*04:02L HLA-DRB1*04:05L HLA-DRB1*01:02L HLA-DRB3*02:01L HLA-DPA1*01:03-B1*03:01L HLA-DPA1*03:01-B1*04:02L HLA-DRB1*14:01L HLA-DQA1*01:01-B1*05:01L HLA-DRB1*08:01L
  REGION 1..12: note = CONT. FROM ABOVE: HLA-DPA1*01:03-B1*04:01L HLA-DPA1*01:03-B1*04: 02L HLA-DRB1*12:01L HLA-DPA1*02:01-B1*13:01L HLA-DPA1*01:02-B1*0 4:01L HLA-DRB1*04:08L HLA-DRB1*15:03L
RVDWTIEYPIIG

SEQ ID NO: 13522 - protein, 13 aa, Severe acute respiratory syndrome coronavirus 2
  REGION 1..13: note = Table B: HLA-DRB1*04:03L HLA-DRB1*01:03L HLA-DRB1*04:02L HLA-DRB1*04:05L HLA-DPA1*01:03-B1*03:01L HLA-DPA1*03:01-B1*04:02L HLA-DRB1*14:02L HLA-DPA1*01:03-B1*04:02L HLA-DRB1*12:01L
  REGION 1..13: note = CONT. FROM ABOVE: HLA-DPA1*02:01-B1*13:01L HLA-DRB1*14:17L HLA-D RB1*10:01L HLA-DRB1*04:08L HLA-DRB1*15:03L
VDWTIEYPIIGDE

SEQ ID NO: 13523 - protein, 11 aa, Severe acute respiratory syndrome coronavirus 2
  REGION 1..11: note = Table B: HLA-DRB1*04:03L HLA-DRB1*04:02L HLA-DRB1*04:05L HLA-DRB4*03:01NL HLA-DQA1*01:01-B1*05:01L HLA-DQA1*05:05-B1*03:01L HLA-DRB1*14:17L
IEYPIIGDELK

SEQ ID NO: 13524 - protein, 11 aa, Severe acute respiratory syndrome coronavirus 2
  REGION 1..11: note = Table B: HLA-DRB1*04:03L HLA-DQA1*05:01-B1*02:01L HLA-DQA1*03:01-B1*03:02L HLA-DQA1*02:01-B1*03:03L
YPIIGDELKIN

SEQ ID NO: 13525 - protein, 12 aa, Severe acute respiratory syndrome coronavirus 2
  REGION 1..12: note = Table B: HLA-DRB1*04:03L HLA-DRB1*01:03L HLA-DRB1*04:02L HLA-DRB1*04:05L HLA-DQA1*01:02-B1*06:02L HLA-DRB1*14:01L HLA-DQA1*05:01-B1*02:01L HLA-DPA1*03:01-B1*105:01L HLA-DQA1*03:01-B1*03:02L HLA-DRB1*14:17L
  REGION 1..12: note = CONT. FROM ABOVE: HLA-DPA1*01:02-B1*04:01L HLA-DRB1*16:01L HLA-D QA1*01:03-B1*06:01L HLA-DQA1*02:01-B1*03:03L
PIIGDELKINAA

SEQ ID NO: 13526 - protein, 12 aa, Severe acute respiratory syndrome coronavirus 2
  REGION 1..12: note = Table B: HLA-DRB1*04:03L HLA-DRB1*13:02L HLA-DRB1*13:03L HLA-DRB1*08:04L HLA-DPA1*01:03-B1*03:01L HLA-DRB1*11:04L HLA-DRB1*08:01L HLA-DRB3*01:01L HLA-DRB1*14:54L HLA-DPA1*01:03-B1*02:01L HLA-DRB1*04:08L
KAALLADKFPVL

SEQ ID NO: 13527 - protein, 13 aa, Severe acute respiratory syndrome coronavirus 2
  REGION 1..13: note = Table B: HLA-DRB1*04:03L HLA-DRB1*13:03L HLA-DRB1*04:02L HLA-DRB1*04:04L HLA-DRB1*04:05L
AALLADKFPVLHD

SEQ ID NO: 13528 - protein, 10 aa, Severe acute respiratory syndrome coronavirus 2
  REGION 1..10: note = Table B: HLA-DRB1*04:03L HLA-DRB1*13:03L HLA-DRB1*01:03L HLA-DRB1*04:02L HLA-DQA1*03:01-B1*03:02L HLA-DRB1*14:17L HLA-DRB1*16:01L HLA-DQA1*02:01-B1*03:03L
PVLHDIGNPK

SEQ ID NO: 13529 - protein, 10 aa, Severe acute respiratory syndrome coronavirus 2
  REGION 1..10: note = Table B: HLA-DRB1*04:03L HLA-DRB1*04:02L HLA-DQA1*03:01-B1*03:02L HLA-DRB1*14:17L HLA-DQA1*02:01-B1*03:03L
HDIGNPKAIK

SEQ ID NO: 13530 - protein, 13 aa, Severe acute respiratory syndrome coronavirus 2
  REGION 1..13: note = Table B: HLA-DRB1*04:03L HLA-DRB1*01:03L HLA-DRB1*04:02L HLA-DQA1*01:02-B1*06:02L HLA-DRB1*12:01L HLA-DPA1*03:01-B1*105:01L HLA-DQA1*01:03-B1*06:01L HLA-DRB1*04:08L HLA-DQA1*02:01-B1*03:03L
DVEWKFYDAQPCS

SEQ ID NO: 13531 - protein, 10 aa, Severe acute respiratory syndrome coronavirus 2
  REGION 1..10: note = Table B: HLA-DRB1*04:03L HLA-DRB1*13:03L HLA-DRB1*01:03L HLA-DRB1*04:02L HLA-DRB1*04:05L HLA-DRB4*03:01NL HLA-DQA1*01-B1*05L HLA-DRB1*04:10L HLA-DPA1*03:01-B1*105:01L HLA-DQA1*03:01-B1*03:02L HLA-DRB1*14:17L HLA-DRB1*16:01L
  REGION 1..10: note = CONT. FROM ABOVE: HLA-DRB1*04:08L HLA-DQA1*02:01-B1*03:03L
FYDAQPCSDK

SEQ ID NO: 13532 - protein, 14 aa, Severe acute respiratory syndrome coronavirus 2
  REGION 1..14: note = Table B: HLA-DRB1*04:03L HLA-DRB1*13:02L HLA-DRB1*14:01L HLA-DRB1*08:01L HLA-DRB1*11:01L HLA-DPA1*01:03-B1*02:01L HLA-DRB1*08:03L
DKAYKIEELFYSYA

SEQ ID NO: 13533 - protein, 17 aa, Severe acute respiratory syndrome coronavirus 2
  REGION 1..17: note = Table B: HLA-DRB1*04:03L HLA-DRB1*13:02L HLA-DRB1*04:04L HLA-DRB1*08:04L HLA-DRB1*11:04L HLA-DRB1*08:01L HLA-DRB3*01:01L
YPANSIVCRFDTRVLSN

SEQ ID NO: 13534 - protein, 10 aa, Severe acute respiratory syndrome coronavirus 2
  REGION 1..10: note = Table B: HLA-DRB1*04:03L HLA-DRB1*04:02L HLA-DRB1*14:17L
RVLSNLNLPG

SEQ ID NO: 13535 - protein, 11 aa, Severe acute respiratory syndrome coronavirus 2
  REGION 1..11: note = Table B: HLA-DRB1*04:03L HLA-DRB1*13:03L HLA-DRB1*01:03L HLA-DRB1*04:02L HLA-DQA1*03:01-B1*03:02L HLA-DRB1*14:17L HLA-DPA1*01:02-B1*04:01L HLA-DRB1*16:01L HLA-DRB1*04:08L
YVNKHAFHTPA

SEQ ID NO: 13536 - protein, 11 aa, Severe acute respiratory syndrome coronavirus 2
  REGION 1..11: note = Table B: HLA-DRB1*04:03L HLA-DRB1*13:02L HLA-DRB1*13:03L HLA-DRB1*01:03L HLA-DRB1*04:05L HLA-DQA1*01:02-B1*06:02L HLA-DRB1*01:02L HLA-DRB1*08:77L HLA-DRB3*02:01L HLA-DPA1*01:03-B1*03:01L HLA-DRB1*14:01L HLA-DRB1*08:01L
  REGION 1..11: note = CONT. FROM ABOVE: HLA-DQA1*01-B1*05L HLA-DQA1*05:05-B1*03:19L HL A-DPA1*01:03-B1*04:02L HLA-DRB1*12:01L HLA-DPA1*02:01-B1*13:01L HLA-DPA1*01:03-B1*104:01L HLA-DRB1*07:01L HLA-DRB1*04:08L
PAFDKSAFVNL

SEQ ID NO: 13537 - protein, 12 aa, Severe acute respiratory syndrome coronavirus 2
  REGION 1..12: note = Table B: HLA-DRB1*04:03L HLA-DRB1*04:02L HLA-DQA1*05:01-B1*02:01L HLA-DRB1*14:17L HLA-DRB1*16:01L HLA-DRB1*15:03L
LPFFYYSDSPCE

SEQ ID NO: 13538 - protein, 11 aa, Severe acute respiratory syndrome coronavirus 2
  REGION 1..11: note = Table B: HLA-DRB1*04:03L HLA-DRB1*04:02L HLA-DRB1*14:17L HLA-DRB1*04:08L
YYSDSPCESHG

SEQ ID NO: 13539 - protein, 11 aa, Severe acute respiratory syndrome coronavirus 2
  REGION 1..11: note = Table B: HLA-DRB1*04:03L HLA-DRB1*01:03L HLA-DRB1*01:01L HLA-DRB1*01:02L HLA-DRB1*16:01L HLA-DRB1*04:08L HLA-DRB1*15:03L
YVPLKSATCIT

SEQ ID NO: 13540 - protein, 11 aa, Severe acute respiratory syndrome coronavirus 2
  REGION 1..11: note = Table B: HLA-DRB1*04:03L HLA-DRB1*04:02L HLA-DRB1*04:05L HLA-DRB1*04:10L HLA-DRB1*14:17L
NEYRLYLDAYN

SEQ ID NO: 13541 - protein, 12 aa, Severe acute respiratory syndrome coronavirus 2
  REGION 1..12: note = Table B: HLA-DRB1*04:03L HLA-DRB1*04:02L HLA-DQA1*01-B1*05L HLA-DQA1*05:01-B1*02:01L HLA-DPA1*03:01-B1*105:01L HLA-DQA1*03:01-B1*03:02L HLA-DRB1*14:17L HLA-DQA1*02:01-B1*03:03L
YLDAYNMMISAG

SEQ ID NO: 13542 - protein, 10 aa, Severe acute respiratory syndrome coronavirus 2
  REGION 1..10: note = Table B: HLA-DRB1*04:03L HLA-DRB1*04:05L HLA-DQA1*01:02-B1*06:02L HLA-DRB1*01:01L HLA-DPA1*02:01-B1*13:01M HLA-DRB1*16:01L HLA-DQA1*01:03-B1*06:01M HLA-DRB1*15:03L
AYNMMISAGF

SEQ ID NO: 13543 - protein, 15 aa, Severe acute respiratory syndrome coronavirus 2
  REGION 1..15: note = Table B: HLA-DRB1*04:03L HLA-DRB1*13:02L HLA-DRB1*01:03L HLA-DRB1*14:01L HLA-DPA1*01:03-B1*02:01L HLA-DPA1*01:03-B1*104:01L
ISAGFSLWVYKQFDT

SEQ ID NO: 13544 - protein, 11 aa, Severe acute respiratory syndrome coronavirus 2
  REGION 1..11: note = Table B: HLA-DRB1*04:03L HLA-DRB1*01:03L HLA-DRB1*04:05L HLA-DRB1*01:01L HLA-DRB1*01:02L HLA-DPA1*03:01-B1*04:02L HLA-DRB1*14:02L HLA-DQA1*01:01-B1*05:01L HLA-DQA1*05:05-B1*03:19L HLA-DQA1*05:01-B1*02:01L
  REGION 1..11: note = CONT. FROM ABOVE: HLA-DRB4*01:01L HLA-DPA1*01:03-B1*04:01L HLA-D PA1*03:01-B1*105:01L
VYKQFDTYNLW

SEQ ID NO: 13545 - protein, 12 aa, Severe acute respiratory syndrome coronavirus 2
  REGION 1..12: note = Table B: HLA-DRB1*04:03L HLA-DRB1*01:03L HLA-DRB1*04:02L HLA-DRB1*01:02L HLA-DRB1*12:01L HLA-DPA1*03:01-B1*105:01L HLA-DRB1*04:08L
YKQFDTYNLWNT

SEQ ID NO: 13546 - protein, 12 aa, Severe acute respiratory syndrome coronavirus 2
  REGION 1..12: note = Table B: HLA-DRB1*04:03L HLA-DRB1*01:03L HLA-DRB1*04:05L HLA-DQA1*01:02-B1*06:02L HLA-DRB1*01:02L HLA-DPA1*03:01-B1*04:02L HLA-DQA1*01-B1*05L HLA-DRB1*04:08L HLA-DRB1*15:03L
FDTYNLWNTFTR

SEQ ID NO: 13547 - protein, 12 aa, Severe acute respiratory syndrome coronavirus 2
  REGION 1..12: note = Table B: HLA-DRB1*04:03L HLA-DRB1*13:02L HLA-DRB1*01:03L HLA-DRB1*14:01L HLA-DRB1*14:02L HLA-DRB1*12:01L HLA-DRB1*04:08L
TYNLWNTFTRLQ

SEQ ID NO: 13548 - protein, 12 aa, Severe acute respiratory syndrome coronavirus 2
  REGION 1..12: note = Table B: HLA-DRB1*04:03L HLA-DRB1*13:02L HLA-DRB1*01:03L HLA-DRB1*04:02L HLA-DRB1*04:05L HLA-DRB1*11:01L HLA-DRB1*12:01L HLA-DRB1*04:08L
YNLWNTFTRLQS

SEQ ID NO: 13549 - protein, 11 aa, Severe acute respiratory syndrome coronavirus 2
  REGION 1..11: note = Table B: HLA-DRB1*04:03L HLA-DRB1*01:03L HLA-DRB1*04:02L HLA-DRB1*04:04L HLA-DRB1*04:05L HLA-DRB1*01:02L HLA-DRB4*03:01NL HLA-DQA1*01-B1*05L HLA-DRB1*04:10L HLA-DRB1*12:01L HLA-DPA1*03:01-B1*105:01L HLA-DQA1*03:01-B1*03:02L
  REGION 1..11: note = CONT. FROM ABOVE: HLA-DRB1*14:54L HLA-DRB1*14:17L HLA-DRB1*10:01 L HLA-DRB1*16:01L HLA-DRB1*04:08L HLA-DQA1*02:01-B1*03:03L HLA-D RB1*15:03L
FTRLQSLENVA

SEQ ID NO: 13550 - protein, 10 aa, Severe acute respiratory syndrome coronavirus 2
  REGION 1..10: note = Table B: HLA-DRB1*04:03L
LQSLENVAFN

SEQ ID NO: 13551 - protein, 11 aa, Severe acute respiratory syndrome coronavirus 2
  REGION 1..11: note = Table B: HLA-DRB1*04:03L HLA-DRB1*01:03L HLA-DRB1*04:02L HLA-DQA1*01:02-B1*06:02L HLA-DRB1*04:08L
LENVAFNVVNK

SEQ ID NO: 13552 - protein, 10 aa, Severe acute respiratory syndrome coronavirus 2
  REGION 1..10: note = Table B: HLA-DRB1*04:03L HLA-DQA1*03:01-B1*03:02L HLA-DQA1*01:03-B1*06:01L HLA-DQA1*02:01-B1*03:03L
NVAFNVVNKG

SEQ ID NO: 13553 - protein, 12 aa, Severe acute respiratory syndrome coronavirus 2
  REGION 1..12: note = Table B: HLA-DRB1*04:03L HLA-DQA1*01:02-B1*06:02L HLA-DRB1*14:01L HLA-DRB1*14:17L HLA-DQA1*01:03-B1*06:01L
NVVNKGHFDGQQ

SEQ ID NO: 13554 - protein, 12 aa, Severe acute respiratory syndrome coronavirus 2
  REGION 1..12: note = Table B: HLA-DRB1*04:03L HLA-DRB1*04:02L HLA-DQA1*03:01-B1*03:02L
VVNKGHFDGQQG

SEQ ID NO: 13555 - protein, 11 aa, Severe acute respiratory syndrome coronavirus 2
  REGION 1..11: note = Table B: HLA-DRB1*04:03L HLA-DQA1*01-B1*05L HLA-DQA1*05:01-B1*02:01L HLA-DQA1*03:01-B1*03:02L HLA-DQA1*02:01-B1*03:03L
GHFDGQQGEVP

SEQ ID NO: 13556 - protein, 14 aa, Severe acute respiratory syndrome coronavirus 2
  REGION 1..14: note = Table B: HLA-DRB1*04:03L HLA-DRB1*13:02L HLA-DRB1*13:03L HLA-DRB1*04:02L HLA-DRB1*04:05L HLA-DRB1*01:02L HLA-DRB4*03:01NL HLA-DRB1*08:01L HLA-DRB1*04:10L HLA-DPA1*01:03-B1*04:02L HLA-DRB1*14:17L
DGQQGEVPVSIINN

SEQ ID NO: 13557 - protein, 11 aa, Severe acute respiratory syndrome coronavirus 2
  REGION 1..11: note = Table B: HLA-DRB1*04:03L HLA-DRB1*13:02L HLA-DRB1*01:03L HLA-DRB1*04:02L HLA-DRB4*03:01NL HLA-DRB1*08:77L HLA-DRB1*03:01L HLA-DRB1*14:02L HLA-DRB4*01:01L HLA-DPA1*01:03-B1*04:01L HLA-DPA1*01:03-B1*04:02L HLA-DRB1*12:01L
  REGION 1..11: note = CONT. FROM ABOVE: HLA-DPA1*01:03-B1*104:01L HLA-DQA1*05:05-B1*03 :01L HLA-DRB1*14:17L HLA-DRB1*10:01L HLA-DQA1*01:03-B1*06:01L HL A-DRB1*08:02L
VPVSIINNTVY

SEQ ID NO: 13558 - protein, 10 aa, Severe acute respiratory syndrome coronavirus 2
  REGION 1..10: note = Table B: HLA-DRB1*04:03L HLA-DRB1*12:01L HLA-DRB1*14:17L
VSIINNTVYT

SEQ ID NO: 13559 - protein, 11 aa, Severe acute respiratory syndrome coronavirus 2
  REGION 1..11: note = Table B: HLA-DRB1*04:03L HLA-DRB1*04:02L HLA-DRB1*14:17L HLA-DQA1*01:03-B1*06:01L HLA-DQA1*02:01-B1*03:03L
INNTVYTKVDG

SEQ ID NO: 13560 - protein, 12 aa, Severe acute respiratory syndrome coronavirus 2
  REGION 1..12: note = Table B: HLA-DRB1*04:03L HLA-DRB1*13:03L HLA-DRB1*04:02L HLA-DRB1*04:05L HLA-DRB1*01:02L HLA-DRB4*03:01NL HLA-DRB1*14:01L HLA-DQA1*01-B1*05L HLA-DRB1*04:10L HLA-DRB1*12:01L HLA-DRB1*14:54L HLA-DRB1*14:17L HLA-DRB1*16:01L HLA-DRB1*04:08L
  REGION 1..12: note = CONT. FROM ABOVE: HLA-DQA1*02:01-B1*03:03L HLA-DRB1*15:03L
VELFENKTTLPV

SEQ ID NO: 13561 - protein, 10 aa, Severe acute respiratory syndrome coronavirus 2
  REGION 1..10: note = Table B: HLA-DRB1*04:03L HLA-DQA1*03:01-B1*03:02L HLA-DQA1*01:03-B1*06:01L HLA-DQA1*02:01-B1*03:03L
TTLPVNVAFE

SEQ ID NO: 13562 - protein, 12 aa, Severe acute respiratory syndrome coronavirus 2
  REGION 1..12: note = Table B: HLA-DRB1*04:03L HLA-DRB1*13:02L HLA-DRB1*13:03L HLA-DRB1*04:04L HLA-DQA1*01:02-B1*06:02L HLA-DPA1*01:03-B1*03:01L HLA-DRB1*14:01L HLA-DRB1*11:04L HLA-DRB1*11:01L HLA-DRB3*01:01L HLA-DRB1*07:01L HLA-DRB1*04:08L
  REGION 1..12: note = CONT. FROM ABOVE: HLA-DRB1*15:03L
LWAKRNIKPVPE

SEQ ID NO: 13563 - protein, 13 aa, Severe acute respiratory syndrome coronavirus 2
  REGION 1..13: note = Table B: HLA-DRB1*04:03L HLA-DRB1*04:05L
KRNIKPVPEVKIL

SEQ ID NO: 13564 - protein, 13 aa, Severe acute respiratory syndrome coronavirus 2
  REGION 1..13: note = Table B: HLA-DRB1*04:03L HLA-DRB1*04:05L HLA-DQA1*01:02-B1*06:02L
RNIKPVPEVKILN

SEQ ID NO: 13565 - protein, 10 aa, Severe acute respiratory syndrome coronavirus 2
  REGION 1..10: note = Table B: HLA-DRB1*04:03L HLA-DQA1*03:01-B1*03:02L HLA-DQA1*02:01-B1*03:03L
PVPEVKILNN

SEQ ID NO: 13566 - protein, 11 aa, Severe acute respiratory syndrome coronavirus 2
  REGION 1..11: note = Table B: HLA-DRB1*04:03L HLA-DRB1*04:02L HLA-DRB1*04:10L HLA-DRB1*14:17L
VPEVKILNNLG

SEQ ID NO: 13567 - protein, 10 aa, Severe acute respiratory syndrome coronavirus 2
  REGION 1..10: note = Table B: HLA-DRB1*04:03L HLA-DRB1*04:02L HLA-DRB1*04:04L HLA-DRB1*04:05L HLA-DRB1*01:02L HLA-DRB4*03:01NL HLA-DRB1*14:01L HLA-DQA1*01-B1*05L HLA-DRB1*04:10L HLA-DRB1*12:01L HLA-DQA1*03:01-B1*03:02L HLA-DRB1*14:54L HLA-DRB1*14:17L
  REGION 1..10: note = CONT. FROM ABOVE: HLA-DRB1*16:01L HLA-DQA1*02:01-B1*03:03L HLA-D RB1*15:03L
VKILNNLGVD

SEQ ID NO: 13568 - protein, 11 aa, Severe acute respiratory syndrome coronavirus 2
  REGION 1..11: note = Table B: HLA-DRB1*04:03L
ILNNLGVDIAA

SEQ ID NO: 13569 - protein, 11 aa, Severe acute respiratory syndrome coronavirus 2
  REGION 1..11: note = Table B: HLA-DRB1*04:03L HLA-DRB1*14:17L
LNNLGVDIAAN

SEQ ID NO: 13570 - protein, 11 aa, Severe acute respiratory syndrome coronavirus 2
  REGION 1..11: note = Table B: HLA-DRB1*04:03L
VDIAANTVIWD

SEQ ID NO: 13571 - protein, 13 aa, Severe acute respiratory syndrome coronavirus 2
  REGION 1..13: note = Table B: HLA-DRB1*04:03L HLA-DRB1*01:03L HLA-DRB1*04:02L HLA-DQA1*01:02-B1*06:02L HLA-DRB1*08:01L HLA-DRB1*12:01L HLA-DRB1*14:54L HLA-DRB1*14:17L HLA-DRB1*04:08L HLA-DRB1*15:03L
ANTVIWDYKRDAP

SEQ ID NO: 13572 - protein, 11 aa, Severe acute respiratory syndrome coronavirus 2
  REGION 1..11: note = Table B: HLA-DRB1*04:03L HLA-DRB1*13:03L HLA-DRB1*01:03L HLA-DRB1*04:02L HLA-DRB1*14:01L HLA-DRB1*14:17L HLA-DRB1*16:01L
VIWDYKRDAPA

SEQ ID NO: 13573 - protein, 11 aa, Severe acute respiratory syndrome coronavirus 2
  REGION 1..11: note = Table B: HLA-DRB1*04:03L HLA-DRB1*13:03L HLA-DRB1*01:03L HLA-DRB1*04:02L HLA-DRB1*01:02L HLA-DRB4*03:01NL HLA-DRB1*08:04L HLA-DRB1*08:77L HLA-DRB3*02:01L HLA-DPA1*01:03-B1*03:01L HLA-DRB1*03:01L HLA-DRB1*11:03L HLA-DRB1*11:04L HLA-DRB1*14:02L
  REGION 1..11: note = CONT. FROM ABOVE: HLA-DQA1*05:01-B1*02:01L HLA-DRB1*12:01L HLA-D RB3*01:01L HLA-DQA1*03:01-B1*03:02L HLA-DRB1*14:54L HLA-DRB1*14: 17L HLA-DPA1*01:02-B1*04:01L HLA-DRB1*04:08L HLA-DQA1*02:01-B1*0 3:03L HLA-DRB1*15:03L
DYKRDAPAHIS

SEQ ID NO: 13574 - protein, 13 aa, Severe acute respiratory syndrome coronavirus 2
  REGION 1..13: note = Table B: HLA-DRB1*04:03L
DAPAHISTIGVCS

SEQ ID NO: 13575 - protein, 14 aa, Severe acute respiratory syndrome coronavirus 2
  REGION 1..14: note = Table B: HLA-DRB1*04:03L HLA-DRB1*13:02L HLA-DQA1*05:05-B1*03:19L HLA-DPA1*01:03-B1*04:02L HLA-DPA1*01:03-B1*104:01L HLA-DQA1*05:05-B1*03:01L
APAHISTIGVCSMT

SEQ ID NO: 13576 - protein, 10 aa, Severe acute respiratory syndrome coronavirus 2
  REGION 1..10: note = Table B: HLA-DRB1*04:03L HLA-DRB1*04:02L HLA-DQA1*03:01-B1*03:02L HLA-DQA1*02:01-B1*03:03L
MTDIAKKPTE

SEQ ID NO: 13577 - protein, 11 aa, Severe acute respiratory syndrome coronavirus 2
  REGION 1..11: note = Table B: HLA-DRB1*04:03L HLA-DRB1*04:02L HLA-DQA1*01-B1*05L HLA-DRB1*14:17L
GQVDLFRNARN

SEQ ID NO: 13578 - protein, 10 aa, Severe acute respiratory syndrome coronavirus 2
  REGION 1..10: note = Table B: HLA-DRB1*04:03L HLA-DRB1*04:02L HLA-DQA1*03:01-B1*03:02L HLA-DRB1*14:17L HLA-DQA1*02:01-B1*03:03L
GVLITEGSVK

SEQ ID NO: 13579 - protein, 10 aa, Severe acute respiratory syndrome coronavirus 2
  REGION 1..10: note = Table B: HLA-DRB1*04:03L HLA-DRB1*13:03L HLA-DRB1*01:03L HLA-DRB1*04:02L HLA-DRB1*04:05L HLA-DRB4*03:01NL HLA-DRB1*04:10L HLA-DRB1*12:01L HLA-DQA1*03:01-B1*03:02L HLA-DRB1*14:54L HLA-DRB1*14:17L HLA-DRB1*16:01L HLA-DQA1*02:01-B1*03:03L
VLITEGSVKG

SEQ ID NO: 13580 - protein, 11 aa, Severe acute respiratory syndrome coronavirus 2
  REGION 1..11: note = Table B: HLA-DRB1*04:03L HLA-DRB1*14:17L
LITEGSVKGLQ

SEQ ID NO: 13581 - protein, 11 aa, Severe acute respiratory syndrome coronavirus 2
  REGION 1..11: note = Table B: HLA-DRB1*04:03L HLA-DQA1*03:01-B1*03:02L HLA-DRB1*14:17L HLA-DQA1*02:01-B1*03:03L
VKGLQPSVGPK

SEQ ID NO: 13582 - protein, 10 aa, Severe acute respiratory syndrome coronavirus 2
  REGION 1..10: note = Table B: HLA-DRB1*04:03L HLA-DRB1*04:02L HLA-DQA1*03:01-B1*03:02L HLA-DRB1*14:17L
LQPSVGPKQA

SEQ ID NO: 13583 - protein, 13 aa, Severe acute respiratory syndrome coronavirus 2
  REGION 1..13: note = Table B: HLA-DRB1*04:03L HLA-DQA1*05:05-B1*03:01L HLA-DQA1*02:01-B1*03:03L
QPSVGPKQASLNG

SEQ ID NO: 13584 - protein, 10 aa, Severe acute respiratory syndrome coronavirus 2
  REGION 1..10: note = Table B: HLA-DRB1*04:03L HLA-DQA1*03:01-B1*03:02L HLA-DQA1*01:03-B1*06:01L HLA-DQA1*02:01-B1*03:03L
GVTLIGEAVK

SEQ ID NO: 13585 - protein, 10 aa, Severe acute respiratory syndrome coronavirus 2
  REGION 1..10: note = Table B: HLA-DRB1*04:03L HLA-DQA1*03:01-B1*03:02L HLA-DRB1*14:17L HLA-DQA1*02:01-B1*03:03L
VTLIGEAVKT

SEQ ID NO: 13586 - protein, 10 aa, Severe acute respiratory syndrome coronavirus 2
  REGION 1..10: note = Table B: HLA-DRB1*04:03L HLA-DRB1*01:03L HLA-DRB1*04:02L HLA-DRB4*03:01NL HLA-DQA1*03:01-B1*03:02L HLA-DRB1*14:17L HLA-DRB1*16:01L
YKKVDGVVQQ

SEQ ID NO: 13587 - protein, 14 aa, Severe acute respiratory syndrome coronavirus 2
  REGION 1..14: note = Table B: HLA-DRB1*04:03L HLA-DQA1*01:02-B1*06:02L HLA-DRB1*01:02L HLA-DPA1*03:01-B1*105:01L HLA-DRB1*16:01L HLA-DRB1*15:03L
VQQLPETYFTQSRN

SEQ ID NO: 13588 - protein, 10 aa, Severe acute respiratory syndrome coronavirus 2
  REGION 1..10: note = Table B: HLA-DRB1*04:03L HLA-DRB1*13:03L HLA-DRB1*04:02L HLA-DRB1*14:17L HLA-DRB1*16:01L HLA-DRB1*04:08L
YFTQSRNLQE

SEQ ID NO: 13589 - protein, 12 aa, Severe acute respiratory syndrome coronavirus 2
  REGION 1..12: note = Table B: HLA-DRB1*04:03L HLA-DRB1*04:08L
FTQSRNLQEFKP

SEQ ID NO: 13590 - protein, 10 aa, Severe acute respiratory syndrome coronavirus 2
  REGION 1..10: note = Table B: HLA-DRB1*04:03L HLA-DRB1*01:03L HLA-DQA1*03:01-B1*03:02L HLA-DRB1*14:17L HLA-DQA1*02:01-B1*03:03L
NLQEFKPRSQ

SEQ ID NO: 13591 - protein, 17 aa, Severe acute respiratory syndrome coronavirus 2
  REGION 1..17: note = Table B: HLA-DRB1*04:03L HLA-DRB1*01:03L HLA-DRB1*08:04L HLA-DPA1*01:03-B1*03:01L HLA-DPA1*01:03-B1*04:01L HLA-DPA1*01:03-B1*02:01L HLA-DRB1*04:08L
KPRSQMEIDFLELAMDE

SEQ ID NO: 13592 - protein, 14 aa, Severe acute respiratory syndrome coronavirus 2
  REGION 1..14: note = Table B: HLA-DRB1*04:03L HLA-DRB1*04:05L HLA-DRB1*01:02L HLA-DPA1*03:01-B1*04:02L HLA-DQA1*05:01-B1*02:01L
IDFLELAMDEFIER

SEQ ID NO: 13593 - protein, 15 aa, Severe acute respiratory syndrome coronavirus 2
  REGION 1..15: note = Table B: HLA-DRB1*04:03L HLA-DRB1*04:04L HLA-DRB1*14:01L HLA-DRB1*11:04L HLA-DRB3*01:01L
RYKLEGYAFEHIVYG

SEQ ID NO: 13594 - protein, 13 aa, Severe acute respiratory syndrome coronavirus 2
  REGION 1..13: note = Table B: HLA-DRB1*04:03L HLA-DRB1*08:04L HLA-DRB1*08:01L HLA-DPA1*01:03-B1*02:01L
GYAFEHIVYGDFS

SEQ ID NO: 13595 - protein, 11 aa, Severe acute respiratory syndrome coronavirus 2
  REGION 1..11: note = Table B: HLA-DRB1*04:03L HLA-DQA1*03:01-B1*03:02L
KNYFITDAQTG

SEQ ID NO: 13596 - protein, 10 aa, Severe acute respiratory syndrome coronavirus 2
  REGION 1..10: note = Table B: HLA-DRB1*04:03L HLA-DRB1*13:03L HLA-DQA1*05:01-B1*02:01L HLA-DRB1*14:17L
FITDAQTGSS

SEQ ID NO: 13597 - protein, 10 aa, Severe acute respiratory syndrome coronavirus 2
  REGION 1..10: note = Table B: HLA-DRB1*04:03L HLA-DPA1*03:01-B1*04:02L HLA-DQA1*01-B1*05L HLA-DQA1*05:01-B1*02:01L HLA-DPA1*01:03-B1*04:01L HLA-DPA1*01:03-B1*04:02L HLA-DPA1*03:01-B1*105:01L HLA-DQA1*03:01-B1*03:02L
  REGION 1..10: note = CONT. FROM ABOVE: HLA-DPA1*01:02-B1*04:01L HLA-DRB1*16:01L HLA-D QA1*01:03-B1*06:01L HLA-DQA1*02:01-B1*03:03L
LLDDFVEIIK

SEQ ID NO: 13598 - protein, 11 aa, Severe acute respiratory syndrome coronavirus 2
  REGION 1..11: note = Table B: HLA-DRB1*04:03L HLA-DRB1*13:03L HLA-DRB1*01:03L HLA-DRB1*04:02L HLA-DRB1*04:05L HLA-DRB4*03:01NL HLA-DRB1*08:04L HLA-DRB1*14:01L HLA-DQA1*01:01-B1*05:01L HLA-DRB1*08:01L HLA-DQA1*05:05-B1*03:19L HLA-DPA1*01:03-B1*04:02L
  REGION 1..11: note = CONT. FROM ABOVE: HLA-DRB1*14:54L HLA-DQA1*05:05-B1*03:01L HLA-D RB1*14:17L HLA-DRB1*16:01L HLA-DRB1*04:08L
DDFVEIIKSQD

SEQ ID NO: 13599 - protein, 10 aa, Severe acute respiratory syndrome coronavirus 2
  REGION 1..10: note = Table B: HLA-DRB1*04:03L HLA-DQA1*01-B1*05L HLA-DQA1*05:01-B1*02:01L HLA-DQA1*03:01-B1*03:02L HLA-DRB1*16:01L HLA-DRB1*15:03L
IIKSQDLSVV

SEQ ID NO: 13600 - protein, 12 aa, Severe acute respiratory syndrome coronavirus 2
  REGION 1..12: note = Table B: HLA-DRB1*04:03L HLA-DRB1*04:02L HLA-DRB1*04:05L HLA-DQA1*01:02-B1*06:02L HLA-DQA1*01-B1*05L HLA-DRB1*04:10L HLA-DRB1*12:01L HLA-DQA1*03:01-B1*03:02L HLA-DRB1*14:17L HLA-DRB1*15:03L
SKVVKVTIDYTE

SEQ ID NO: 13601 - protein, 11 aa, Severe acute respiratory syndrome coronavirus 2
  REGION 1..11: note = Table B: HLA-DRB1*04:03L HLA-DQA1*01-B1*05L HLA-DQA1*05:01-B1*02:01L HLA-DQA1*03:01-B1*03:02L
VKVTIDYTEIS

SEQ ID NO: 13602 - protein, 13 aa, Severe acute respiratory syndrome coronavirus 2
  REGION 1..13: note = Table B: HLA-DRB1*04:03L HLA-DRB1*04:02L HLA-DRB1*04:05L HLA-DRB1*14:17L HLA-DRB1*15:03L
DGHVETFYPKLQS

SEQ ID NO: 13603 - protein, 10 aa, Severe acute respiratory syndrome coronavirus 2
  REGION 1..10: note = Table B: HLA-DRB1*04:03L HLA-DRB1*13:03L HLA-DRB1*04:02L HLA-DRB1*14:01L HLA-DQA1*03:01-B1*03:02L HLA-DRB1*14:17L HLA-DPA1*01:02-B1*04:01L HLA-DQA1*02:01-B1*03:03L
TFYPKLQSSQ

SEQ ID NO: 13604 - protein, 11 aa, Severe acute respiratory syndrome coronavirus 2
  REGION 1..11: note = Table B: HLA-DRB1*04:03L HLA-DRB1*01:03L HLA-DRB1*04:05L HLA-DRB1*08:77L HLA-DQA1*05:05-B1*03:19L HLA-DPA1*01:03-B1*04:01L HLA-DRB1*16:01L HLA-DQA1*01:03-B1*06:01L
FYPKLQSSQAW

SEQ ID NO: 13605 - protein, 12 aa, Severe acute respiratory syndrome coronavirus 2
  REGION 1..12: note = Table B: HLA-DRB1*04:03L HLA-DRB1*04:02L HLA-DQA1*01:02-B1*06:02L HLA-DQA1*05:01-B1*02:01L HLA-DQA1*01:03-B1*06:01L HLA-DQA1*02:01-B1*03:03L
SQAWQPGVAMPN

SEQ ID NO: 13606 - protein, 11 aa, Severe acute respiratory syndrome coronavirus 2
  REGION 1..11: note = Table B: HLA-DRB1*04:03L HLA-DRB1*01:02L HLA-DPA1*01:03-B1*03:01L HLA-DRB1*14:02L HLA-DQA1*05:05-B1*03:116L HLA-DPA1*01:03-B1*04:02L HLA-DRB1*12:01L HLA-DPA1*02:01-B1*13:01L HLA-DRB1*16:01L
  REGION 1..11: note = CONT. FROM ABOVE: HLA-DRB1*15:03L
AWQPGVAMPNL

SEQ ID NO: 13607 - protein, 10 aa, Severe acute respiratory syndrome coronavirus 2
  REGION 1..10: note = Table B: HLA-DRB1*04:03L HLA-DRB1*13:02L HLA-DRB1*13:03L HLA-DRB1*01:03L HLA-DRB1*04:02L HLA-DRB4*03:01NL HLA-DQA1*01-B1*05L HLA-DRB1*12:01L HLA-DQA1*03:01-B1*03:02L HLA-DQA1*05:05-B1*03:01L HLA-DRB1*14:17L HLA-DRB1*16:01L
  REGION 1..10: note = CONT. FROM ABOVE: HLA-DQA1*02:01-B1*03:03L
NYGDSATLPK

SEQ ID NO: 13608 - protein, 10 aa, Severe acute respiratory syndrome coronavirus 2
  REGION 1..10: note = Table B: HLA-DRB1*04:03L HLA-DRB1*13:02L HLA-DRB1*04:02L HLA-DRB1*01:02L HLA-DRB1*14:01L HLA-DRB1*12:01L HLA-DQA1*03:01-B1*03:02L HLA-DRB1*14:54L HLA-DRB1*14:17L HLA-DRB1*16:01L HLA-DQA1*02:01-B1*03:03L HLA-DRB1*15:03L
IMMNVAKYTQ

SEQ ID NO: 13609 - protein, 13 aa, Severe acute respiratory syndrome coronavirus 2
  REGION 1..13: note = Table B: HLA-DRB1*04:03L HLA-DRB1*01:03L HLA-DRB1*04:05L HLA-DRB1*01:02L HLA-DRB1*08:04L HLA-DPA1*01:03-B1*03:01L HLA-DRB1*08:01L HLA-DPA1*01:03-B1*04:02L HLA-DRB1*12:01L HLA-DPA1*02:01-B1*13:01L HLA-DQA1*03:01-B1*03:02L
  REGION 1..13: note = CONT. FROM ABOVE: HLA-DPA1*01:03-B1*104:01L HLA-DQA1*05:05-B1*03 :01L HLA-DRB1*10:01L HLA-DRB1*16:01L HLA-DRB1*04:08L HLA-DQA1*02 :01-B1*03:03L HLA-DRB1*15:03L
VAKYTQLCQYLNT

SEQ ID NO: 13610 - protein, 12 aa, Severe acute respiratory syndrome coronavirus 2
  REGION 1..12: note = Table B: HLA-DRB1*04:03L HLA-DQA1*05:01-B1*02:01L HLA-DRB1*12:01L HLA-DRB1*15:03L
LNTLTLAVPYNM

SEQ ID NO: 13611 - protein, 10 aa, Severe acute respiratory syndrome coronavirus 2
  REGION 1..10: note = Table B: HLA-DRB1*04:03L HLA-DRB1*04:02L HLA-DQA1*03:01-B1*03:02L HLA-DRB1*14:17L HLA-DQA1*02:01-B1*03:03L
VIHFGAGSDK

SEQ ID NO: 13612 - protein, 12 aa, Severe acute respiratory syndrome coronavirus 2
  REGION 1..12: note = Table B: HLA-DRB1*04:03L HLA-DRB1*13:03L HLA-DRB1*04:02L HLA-DRB1*01:02L HLA-DRB4*03:01NL HLA-DRB1*08:04L HLA-DRB1*08:77L HLA-DRB3*02:01L HLA-DPA1*01:03-B1*03:01L HLA-DRB1*11:03L HLA-DRB1*11:04L HLA-DRB1*12:01L HLA-DRB1*12:02L HLA-DRB1*14:54L
  REGION 1..12: note = CONT. FROM ABOVE: HLA-DQA1*05:05-B1*03:01L HLA-DRB1*14:17L HLA-D RB1*07:01L HLA-DRB1*04:08L
RQWLPTGTLLVD

SEQ ID NO: 13613 - protein, 11 aa, Severe acute respiratory syndrome coronavirus 2
  REGION 1..11: note = Table B: HLA-DRB1*04:03L HLA-DRB1*14:17L
GTLLVDSDLND

SEQ ID NO: 13614 - protein, 13 aa, Severe acute respiratory syndrome coronavirus 2
  REGION 1..13: note = Table B: HLA-DRB1*04:03L
SDLNDFVSDADST

SEQ ID NO: 13615 - protein, 13 aa, Severe acute respiratory syndrome coronavirus 2
  REGION 1..13: note = Table B: HLA-DRB1*04:03L HLA-DQA1*05:05-B1*03:19L HLA-DQA1*05:01-B1*02:01L HLA-DPA1*03:01-B1*105:01L
ADSTLIGDCATVH

SEQ ID NO: 13616 - protein, 12 aa, Severe acute respiratory syndrome coronavirus 2
  REGION 1..12: note = Table B: HLA-DRB1*04:03L HLA-DQA1*01:02-B1*06:02L HLA-DQA1*03:01-B1*03:02L HLA-DQA1*02:01-B1*03:03L
STLIGDCATVHT

SEQ ID NO: 13617 - protein, 10 aa, Severe acute respiratory syndrome coronavirus 2
  REGION 1..10: note = Table B: HLA-DRB1*04:03L HLA-DRB1*04:02L HLA-DRB1*04:05L HLA-DRB4*03:01NL HLA-DQA1*01-B1*05L HLA-DRB1*04:10L HLA-DQA1*03:01-B1*03:02L HLA-DRB1*14:54L HLA-DRB1*14:17L HLA-DQA1*02:01-B1*03:03L
LIISDMYDPK

SEQ ID NO: 13618 - protein, 10 aa, Severe acute respiratory syndrome coronavirus 2
  REGION 1..10: note = Table B: HLA-DRB1*04:03L HLA-DRB1*04:02L HLA-DRB1*04:05L HLA-DQA1*01-B1*05L HLA-DQA1*05:01-B1*02:01L HLA-DQA1*03:01-B1*03:02L HLA-DRB1*14:17L HLA-DRB1*16:01L
IISDMYDPKT

SEQ ID NO: 13619 - protein, 10 aa, Severe acute respiratory syndrome coronavirus 2
  REGION 1..10: note = Table B: HLA-DRB1*04:03L HLA-DRB1*04:02L HLA-DQA1*01-B1*05L HLA-DQA1*03:01-B1*03:02L HLA-DRB1*14:17L
ISDMYDPKTK

SEQ ID NO: 13620 - protein, 10 aa, Severe acute respiratory syndrome coronavirus 2
  REGION 1..10: note = Table B: HLA-DRB1*04:03L HLA-DQA1*03:01-B1*03:02L
VTKENDSKEG

SEQ ID NO: 13621 - protein, 10 aa, Severe acute respiratory syndrome coronavirus 2
  REGION 1..10: note = Table B: HLA-DRB1*04:03L
IQQKLALGGS

SEQ ID NO: 13622 - protein, 11 aa, Severe acute respiratory syndrome coronavirus 2
  REGION 1..11: note = Table B: HLA-DRB1*04:03L HLA-DRB1*04:02L HLA-DQA1*01:02-B1*06:02L HLA-DRB1*14:17L
GSVAIKITEHS

SEQ ID NO: 13623 - protein, 11 aa, Severe acute respiratory syndrome coronavirus 2
  REGION 1..11: note = Table B: HLA-DRB1*04:03L HLA-DRB1*04:02L HLA-DRB1*04:05L HLA-DRB1*14:01L HLA-DRB1*12:01L HLA-DQA1*03:01-B1*03:02L HLA-DRB1*14:54L HLA-DRB1*14:17L HLA-DRB1*16:01L
VAIKITEHSWN

SEQ ID NO: 13624 - protein, 10 aa, Severe acute respiratory syndrome coronavirus 2
  REGION 1..10: note = Table B: HLA-DRB1*04:03L HLA-DQA1*01-B1*05L HLA-DQA1*05:01-B1*02:01L HLA-DQA1*03:01-B1*03:02L HLA-DRB1*16:01L HLA-DQA1*02:01-B1*03:03L
EHSWNADLYK

SEQ ID NO: 13625 - protein, 10 aa, Severe acute respiratory syndrome coronavirus 2
  REGION 1..10: note = Table B: HLA-DRB1*04:03L HLA-DRB1*01:03L HLA-DRB1*04:05L HLA-DQA1*01:02-B1*06:02L HLA-DRB1*01:01L HLA-DPA1*02:01-B1*13:01L HLA-DRB1*16:01L HLA-DQA1*01:03-B1*06:01L
LYKLMGHFAW

SEQ ID NO: 13626 - protein, 13 aa, Severe acute respiratory syndrome coronavirus 2
  REGION 1..13: note = Table B: HLA-DRB1*04:03L HLA-DRB1*13:02L HLA-DRB1*01:03L HLA-DRB3*02:01L HLA-DRB1*08:01L HLA-DQA1*03:01-B1*03:02L HLA-DPA1*01:03-B1*104:01L
HFAWWTAFVTNVN

SEQ ID NO: 13627 - protein, 11 aa, Severe acute respiratory syndrome coronavirus 2
  REGION 1..11: note = Table B: HLA-DRB1*04:03L
WTAFVTNVNAS

SEQ ID NO: 13628 - protein, 11 aa, Severe acute respiratory syndrome coronavirus 2
  REGION 1..11: note = Table B: HLA-DRB1*04:03L HLA-DRB1*13:03L HLA-DRB1*04:02L HLA-DRB4*03:01NL HLA-DRB1*14:54L HLA-DRB1*14:17L HLA-DRB1*16:01L
TAFVTNVNASS

SEQ ID NO: 13629 - protein, 10 aa, Severe acute respiratory syndrome coronavirus 2
  REGION 1..10: note = Table B: HLA-DRB1*04:03L HLA-DRB1*14:54L HLA-DRB1*14:17L
FVTNVNASSS

SEQ ID NO: 13630 - protein, 10 aa, Severe acute respiratory syndrome coronavirus 2
  REGION 1..10: note = Table B: HLA-DRB1*04:03L HLA-DRB1*14:17L
VTNVNASSSE

SEQ ID NO: 13631 - protein, 11 aa, Severe acute respiratory syndrome coronavirus 2
  REGION 1..11: note = Table B: HLA-DRB1*04:03L HLA-DRB3*02:01L HLA-DQA1*01-B1*05L HLA-DRB1*12:01L HLA-DQA1*05:05-B1*03:01L HLA-DRB1*07:01L HLA-DRB1*16:01L
NVNASSSEAFL

SEQ ID NO: 13632 - protein, 13 aa, Severe acute respiratory syndrome coronavirus 2
  REGION 1..13: note = Table B: HLA-DRB1*04:03L HLA-DQA1*01:02-B1*06:02L HLA-DRB1*01:02L HLA-DPA1*03:01-B1*04:02L HLA-DPA1*01:03-B1*04:02L HLA-DPA1*01:02-B1*04:01L HLA-DRB1*16:01L HLA-DRB1*04:08L HLA-DRB1*15:03L
EAFLIGCNYLGKP

SEQ ID NO: 13633 - protein, 11 aa, Severe acute respiratory syndrome coronavirus 2
  REGION 1..11: note = Table B: HLA-DRB1*04:03L HLA-DRB1*04:02L HLA-DQA1*01:02-B1*06:02L HLA-DQA1*01-B1*05L HLA-DQA1*05:01-B1*02:01L HLA-DRB1*14:17L HLA-DQA1*01:03-B1*06:01L HLA-DQA1*02:01-B1*03:03L
EQIDGYVMHAN

SEQ ID NO: 13634 - protein, 10 aa, Severe acute respiratory syndrome coronavirus 2
  REGION 1..10: note = Table B: HLA-DRB1*04:03L HLA-DRB1*01:03L HLA-DRB1*04:05L HLA-DQA1*01:02-B1*06:02L HLA-DRB1*01:01L HLA-DRB1*01:02L HLA-DQA1*01:01-B1*05:01L HLA-DPA1*02:01-B1*13:01M HLA-DRB1*16:01L HLA-DQA1*01:03-B1*06:01M
  REGION 1..10: note = CONT. FROM ABOVE: HLA-DQA1*02:01-B1*03:03L HLA-DRB1*15:03L
GYVMHANYIF

SEQ ID NO: 13635 - protein, 10 aa, Severe acute respiratory syndrome coronavirus 2
  REGION 1..10: note = Table B: HLA-DRB1*04:03L HLA-DRB1*01:03L HLA-DRB1*04:05L HLA-DQA1*01:02-B1*06:02L HLA-DRB1*01:01L HLA-DRB1*01:02L HLA-DRB1*08:77L HLA-DPA1*03:01-B1*04:02L HLA-DRB1*14:02L HLA-DQA1*01:01-B1*05:01L HLA-DQA1*05:05-B1*03:19L
  REGION 1..10: note = CONT. FROM ABOVE: HLA-DQA1*05:01-B1*02:01L HLA-DRB4*01:01L HLA-D PA1*01:03-B1*04:01L HLA-DQA1*05:05-B1*03:116L HLA-DPA1*01:03-B1* 04:02L HLA-DRB1*12:01L HLA-DPA1*02:01-B1*13:01M HLA-DPA1*03:01-B 1*105:01L HLA-DRB1*16:01L HLA-DQA1*01:03-B1*06:01M
  REGION 1..10: note = CONT. FROM ABOVE: HLA-DQA1*02:01-B1*03:03L HLA-DRB1*15:03L
YVMHANYIFW

SEQ ID NO: 13636 - protein, 12 aa, Severe acute respiratory syndrome coronavirus 2
  REGION 1..12: note = Table B: HLA-DRB1*04:03L HLA-DRB1*04:02L HLA-DPA1*03:01-B1*04:02L HLA-DQA1*01-B1*05L HLA-DPA1*03:01-B1*105:01L HLA-DQA1*03:01-B1*03:02L HLA-DPA1*01:02-B1*04:01L HLA-DRB1*16:01L
  REGION 1..12: note = CONT. FROM ABOVE: HLA-DQA1*02:01-B1*03:03L HLA-DRB1*15:03L
ANYIFWRNTNPI

SEQ ID NO: 13637 - protein, 11 aa, Severe acute respiratory syndrome coronavirus 2
  REGION 1..11: note = Table B: HLA-DRB1*04:03L
WRNTNPIQLSS

SEQ ID NO: 13638 - protein, 12 aa, Severe acute respiratory syndrome coronavirus 2
  REGION 1..12: note = Table B: HLA-DRB1*04:03L HLA-DRB1*01:02L HLA-DRB1*14:01L HLA-DQA1*05:05-B1*03:01L HLA-DRB1*16:01L
NPIQLSSYSLFD

SEQ ID NO: 13639 - protein, 10 aa, Severe acute respiratory syndrome coronavirus 2
  REGION 1..10: note = Table B: HLA-DRB1*04:03L HLA-DRB1*04:05L HLA-DRB1*01:01L HLA-DPA1*02:01-B1*13:01M HLA-DQA1*01:03-B1*06:01M
SYSLFDMSKF

SEQ ID NO: 13640 - protein, 10 aa, Severe acute respiratory syndrome coronavirus 2
  REGION 1..10: note = Table B: HLA-DRB1*04:03L HLA-DRB1*01:03L HLA-DRB1*04:02L HLA-DRB1*14:01L HLA-DQA1*03:01-B1*03:02L HLA-DRB1*14:17L HLA-DPA1*01:02-B1*04:01L HLA-DRB1*16:01L HLA-DQA1*02:01-B1*03:03L
LFDMSKFPLK

SEQ ID NO: 13641 - protein, 15 aa, Severe acute respiratory syndrome coronavirus 2
  REGION 1..15: note = Table B: HLA-DRB1*04:03L HLA-DQA1*05:05-B1*03:19L
FPLKLRGTAVMSLKE

SEQ ID NO: 13642 - protein, 14 aa, Severe acute respiratory syndrome coronavirus 2
  REGION 1..14: note = Table B: HLA-DRB1*04:03L
EGQINDMILSLLSK

SEQ ID NO: 13643 - protein, 10 aa, Severe acute respiratory syndrome coronavirus 2
  REGION 1..10: note = Table B: HLA-DRB1*04:03L HLA-DRB1*14:17L
DMILSLLSKG

SEQ ID NO: 13644 - protein, 12 aa, Severe acute respiratory syndrome coronavirus 2
  REGION 1..12: note = Table B: HLA-DRB1*04:03L HLA-DRB1*01:03L HLA-DRB1*04:02L HLA-DRB1*04:05L HLA-DRB1*01:02L HLA-DRB1*14:01L HLA-DRB1*08:01L HLA-DRB1*12:01L HLA-DPA1*01:02-B1*04:01L HLA-DRB1*16:01L HLA-DRB1*04:08L HLA-DRB1*15:03L
GRLIIRENNRVV

SEQ ID NO: 13645 - protein, 11 aa, Severe acute respiratory syndrome coronavirus 2
  REGION 1..11: note = Table B: HLA-DRB1*04:03L HLA-DRB1*13:02L HLA-DRB1*13:03L HLA-DRB1*01:03L HLA-DRB1*04:02L HLA-DRB1*01:02L HLA-DRB1*08:04L HLA-DRB1*11:04L HLA-DRB1*12:01L HLA-DRB1*12:02L HLA-DRB3*01:01L HLA-DRB1*14:54L HLA-DRB1*14:17L HLA-DPA1*01:02-B1*04:01L
  REGION 1..11: note = CONT. FROM ABOVE: HLA-DRB1*04:08L HLA-DRB1*15:03L
IIRENNRVVIS

SEQ ID NO: 13646 - protein, 10 aa, Severe acute respiratory syndrome coronavirus 2
  REGION 1..10: note = Table B: HLA-DRB1*04:03L HLA-DRB1*14:17L
VVISSDVLVN

SEQ ID NO: 13647 - protein, 10 aa, Severe acute respiratory syndrome coronavirus 2
  REGION 1..10: note = Table B: HLA-DRB1*04:03L HLA-DRB1*14:17L
LVLLPLVSSQ

SEQ ID NO: 13648 - protein, 12 aa, Severe acute respiratory syndrome coronavirus 2
  REGION 1..12: note = Table B: HLA-DRB1*04:03L HLA-DRB1*01:03L HLA-DQA1*01:02-B1*06:02L HLA-DRB1*01:01L HLA-DQA1*05:05-B1*03:19L HLA-DRB1*12:01L HLA-DPA1*03:01-B1*105:01L HLA-DQA1*05:05-B1*03:01L
  REGION 1..12: note = CONT. FROM ABOVE: HLA-DRB1*10:01L HLA-DRB1*16:01L HLA-DRB1*04:08 L HLA-DRB1*15:03L
VLLPLVSSQCVN

SEQ ID NO: 13649 - protein, 11 aa, Severe acute respiratory syndrome coronavirus 2
  REGION 1..11: note = Table B: HLA-DRB1*04:03L HLA-DRB1*04:02L HLA-DRB1*14:01L HLA-DRB1*14:54L HLA-DRB1*14:17L
VNLTTRTQLPP

SEQ ID NO: 13650 - protein, 13 aa, Severe acute respiratory syndrome coronavirus 2
  REGION 1..13: note = Table B: HLA-DRB1*04:03L HLA-DRB1*04:02L
YTNSFTRGVYYPD

SEQ ID NO: 13651 - protein, 11 aa, Severe acute respiratory syndrome coronavirus 2
  REGION 1..11: note = Table B: HLA-DRB1*04:03L HLA-DRB1*13:03L HLA-DRB1*04:05L HLA-DRB1*01:02L HLA-DRB1*08:01L HLA-DQA1*01-B1*05L HLA-DRB1*12:01L HLA-DPA1*03:01-B1*105:01L HLA-DRB1*14:17L HLA-DRB1*04:08L HLA-DRB1*15:03L
SFTRGVYYPDK

SEQ ID NO: 13652 - protein, 11 aa, Severe acute respiratory syndrome coronavirus 2
  REGION 1..11: note = Table B: HLA-DRB1*04:03L HLA-DRB1*01:03L HLA-DRB1*04:05L HLA-DRB1*01:02L HLA-DRB1*14:54L HLA-DPA1*01:02-B1*04:01L HLA-DRB1*04:08L HLA-DRB1*15:03L
GVYYPDKVFRS

SEQ ID NO: 13653 - protein, 11 aa, Severe acute respiratory syndrome coronavirus 2
  REGION 1..11: note = Table B: HLA-DRB1*04:03L HLA-DRB1*13:03L HLA-DRB1*01:03L HLA-DRB1*04:02L HLA-DRB1*14:01L HLA-DQA1*03:01-B1*03:02L HLA-DRB1*14:17L HLA-DPA1*01:02-B1*04:01L HLA-DRB1*16:01L HLA-DRB1*04:08L HLA-DQA1*02:01-B1*03:03L
VYYPDKVFRSS

SEQ ID NO: 13654 - protein, 14 aa, Severe acute respiratory syndrome coronavirus 2
  REGION 1..14: note = Table B: HLA-DRB1*04:03L HLA-DRB1*13:02L HLA-DRB1*01:03L HLA-DRB1*04:02L HLA-DRB1*04:05L HLA-DRB1*01:02L HLA-DPA1*01:03-B1*03:01L HLA-DPA1*03:01-B1*04:02L HLA-DRB1*14:01L HLA-DRB1*08:01L HLA-DRB1*12:01L
  REGION 1..14: note = CONT. FROM ABOVE: HLA-DQA1*01:03-B1*06:01L HLA-DRB1*04:08L HLA-D QA1*02:01-B1*03:03L HLA-DRB1*15:03L
YPDKVFRSSVLHST

SEQ ID NO: 13655 - protein, 14 aa, Severe acute respiratory syndrome coronavirus 2
  REGION 1..14: note = Table B: HLA-DRB1*04:03L HLA-DRB1*04:05L
PDKVFRSSVLHSTQ

SEQ ID NO: 13656 - protein, 13 aa, Severe acute respiratory syndrome coronavirus 2
  REGION 1..13: note = Table B: HLA-DRB1*04:03L HLA-DRB1*13:02L HLA-DRB1*04:02L HLA-DRB1*04:05L HLA-DRB1*01:02L HLA-DRB3*02:01L HLA-DRB1*14:54L HLA-DRB1*14:17L
SSVLHSTQDLFLP

SEQ ID NO: 13657 - protein, 12 aa, Severe acute respiratory syndrome coronavirus 2
  REGION 1..12: note = Table B: HLA-DRB1*04:03L HLA-DPA1*03:01-B1*04:02L HLA-DRB1*14:01L HLA-DQA1*05:01-B1*02:01L HLA-DRB1*12:01L HLA-DPA1*03:01-B1*105:01L HLA-DPA1*01:02-B1*04:01L HLA-DRB1*16:01L HLA-DRB1*15:03L
VLHSTQDLFLPF

SEQ ID NO: 13658 - protein, 10 aa, Severe acute respiratory syndrome coronavirus 2
  REGION 1..10: note = Table B: HLA-DRB1*04:03L HLA-DRB1*01:03L HLA-DRB1*04:05L HLA-DQA1*01:02-B1*06:02L HLA-DRB1*01:01L HLA-DRB1*01:02L HLA-DRB1*08:77L HLA-DRB1*14:02L HLA-DQA1*05:05-B1*03:19L HLA-DRB4*01:01L HLA-DPA1*01:03-B1*04:01L
  REGION 1..10: note = CONT. FROM ABOVE: HLA-DQA1*05:05-B1*03:116L HLA-DPA1*02:01-B1*13 :01M HLA-DPA1*03:01-B1*105:01L HLA-DRB1*16:01L HLA-DQA1*01:03-B1 *06:01M HLA-DQA1*02:01-B1*03:03L HLA-DRB1*15:03L
FLPFFSNVTW

SEQ ID NO: 13659 - protein, 12 aa, Severe acute respiratory syndrome coronavirus 2
  REGION 1..12: note = Table B: HLA-DRB1*04:03L HLA-DPA1*03:01-B1*04:02L HLA-DRB1*14:01L HLA-DQA1*01-B1*05L HLA-DRB1*12:01L HLA-DPA1*01:02-B1*04:01L HLA-DRB1*16:01L
LPFFSNVTWFHA

SEQ ID NO: 13660 - protein, 11 aa, Severe acute respiratory syndrome coronavirus 2
  REGION 1..11: note = Table B: HLA-DRB1*04:03L HLA-DRB1*01:03L HLA-DRB1*04:02L HLA-DRB1*04:05L HLA-DRB1*01:02L HLA-DRB1*14:01L HLA-DRB1*12:01L HLA-DPA1*03:01-B1*105:01L HLA-DRB1*14:17L HLA-DPA1*01:02-B1*04:01L HLA-DQA1*01:03-B1*06:01L
  REGION 1..11: note = CONT. FROM ABOVE: HLA-DRB1*04:08L HLA-DQA1*02:01-B1*03:03L
VTWFHAIHVSG

SEQ ID NO: 13661 - protein, 11 aa, Severe acute respiratory syndrome coronavirus 2
  REGION 1..11: note = Table B: HLA-DRB1*04:03L HLA-DRB1*14:17L
FHAIHVSGTNG

SEQ ID NO: 13662 - protein, 10 aa, Severe acute respiratory syndrome coronavirus 2
  REGION 1..10: note = Table B: HLA-DRB1*04:03L HLA-DRB1*01:03L HLA-DRB1*04:02L HLA-DRB1*04:05L HLA-DRB4*03:01NL HLA-DQA1*03:01-B1*03:02L HLA-DRB1*14:17L
IHVSGTNGTK

SEQ ID NO: 13663 - protein, 10 aa, Severe acute respiratory syndrome coronavirus 2
  REGION 1..10: note = Table B: HLA-DRB1*04:03L HLA-DRB1*04:05L HLA-DQA1*01:02-B1*06:02L HLA-DRB1*01:01L HLA-DPA1*02:01-B1*13:01L HLA-DPA1*03:01-B1*105:01L HLA-DQA1*01:03-B1*06:01L HLA-DRB1*15:03L
VLPFNDGVYF

SEQ ID NO: 13664 - protein, 11 aa, Severe acute respiratory syndrome coronavirus 2
  REGION 1..11: note = Table B: HLA-DRB1*04:03L HLA-DQA1*01:02-B1*06:02L HLA-DRB1*01:02L HLA-DPA1*03:01-B1*105:01L HLA-DRB1*14:54L HLA-DPA1*01:02-B1*04:01L HLA-DRB1*04:08L
FASTEKSNIIR

SEQ ID NO: 13665 - protein, 10 aa, Severe acute respiratory syndrome coronavirus 2
  REGION 1..10: note = Table B: HLA-DRB1*04:03L HLA-DRB1*13:03L HLA-DRB1*01:03L HLA-DRB1*04:02L HLA-DRB4*03:01NL HLA-DQA1*03:01-B1*03:02L HLA-DRB1*14:17L HLA-DRB1*16:01L HLA-DQA1*02:01-B1*03:03L
STEKSNIIRG

SEQ ID NO: 13666 - protein, 10 aa, Severe acute respiratory syndrome coronavirus 2
  REGION 1..10: note = Table B: HLA-DRB1*04:03L HLA-DQA1*01-B1*05L HLA-DQA1*03:01-B1*03:02L HLA-DQA1*02:01-B1*03:03L
IFGTTLDSKT

SEQ ID NO: 13667 - protein, 10 aa, Severe acute respiratory syndrome coronavirus 2
  REGION 1..10: note = Table B: HLA-DRB1*04:03L HLA-DQA1*03:01-B1*03:02L HLA-DQA1*02:01-B1*03:03L
GTTLDSKTQS

SEQ ID NO: 13668 - protein, 11 aa, Severe acute respiratory syndrome coronavirus 2
  REGION 1..11: note = Table B: HLA-DRB1*04:03L HLA-DQA1*01:03-B1*06:01L
SKTQSLLIVNN

SEQ ID NO: 13669 - protein, 10 aa, Severe acute respiratory syndrome coronavirus 2
  REGION 1..10: note = Table B: HLA-DRB1*04:03L HLA-DRB1*14:17L
SLLIVNNATN

SEQ ID NO: 13670 - protein, 15 aa, Severe acute respiratory syndrome coronavirus 2
  REGION 1..15: note = Table B: HLA-DRB1*04:03L HLA-DRB1*04:04L
NKSWMESEFRVYSSA

SEQ ID NO: 13671 - protein, 15 aa, Severe acute respiratory syndrome coronavirus 2
  REGION 1..15: note = Table B: HLA-DRB1*04:03L
KSWMESEFRVYSSAN

SEQ ID NO: 13672 - protein, 10 aa, Severe acute respiratory syndrome coronavirus 2
  REGION 1..10: note = Table B: HLA-DRB1*04:03L HLA-DQA1*01-B1*05L HLA-DQA1*03:01-B1*03:02L
EFRVYSSANN

SEQ ID NO: 13673 - protein, 11 aa, Severe acute respiratory syndrome coronavirus 2
  REGION 1..11: note = Table B: HLA-DRB1*04:03L
FRVYSSANNCT

SEQ ID NO: 13674 - protein, 10 aa, Severe acute respiratory syndrome coronavirus 2
  REGION 1..10: note = Table B: HLA-DRB1*04:03L HLA-DRB1*01:03L HLA-DRB1*04:05L HLA-DQA1*01:02-B1*06:02L HLA-DRB1*01:01L HLA-DPA1*02:01-B1*13:01M HLA-DRB1*16:01L HLA-DQA1*01:03-B1*06:01M HLA-DRB1*15:03L
VYSSANNCTF

SEQ ID NO: 13675 - protein, 11 aa, Severe acute respiratory syndrome coronavirus 2
  REGION 1..11: note = Table B: HLA-DRB1*04:03L HLA-DRB1*13:03L HLA-DRB1*04:02L HLA-DRB1*04:05L HLA-DQA1*03:01-B1*03:02L HLA-DRB1*14:17L
PFLMDLEGKQG

SEQ ID NO: 13676 - protein, 10 aa, Severe acute respiratory syndrome coronavirus 2
  REGION 1..10: note = Table B: HLA-DRB1*04:03L HLA-DRB1*04:02L HLA-DRB1*14:17L
PINLVRDLPQ

SEQ ID NO: 13677 - protein, 10 aa, Severe acute respiratory syndrome coronavirus 2
  REGION 1..10: note = Table B: HLA-DRB1*04:03M HLA-DRB1*13:03L HLA-DRB1*01:03L HLA-DRB1*04:02L HLA-DRB1*04:04L HLA-DRB1*04:05L HLA-DRB4*03:01NL HLA-DRB1*14:01L HLA-DRB1*11:04L HLA-DQA1*01-B1*05L HLA-DRB1*04:10L HLA-DRB1*12:01L HLA-DQA1*03:01-B1*03:02L
  REGION 1..10: note = CONT. FROM ABOVE: HLA-DRB1*14:54L HLA-DRB1*14:17L HLA-DRB1*16:01 L HLA-DRB1*04:08L HLA-DRB1*08:03L
INLVRDLPQG

SEQ ID NO: 13678 - protein, 10 aa, Severe acute respiratory syndrome coronavirus 2
  REGION 1..10: note = Table B: HLA-DRB1*04:03L HLA-DRB1*13:02L HLA-DRB1*13:03L HLA-DRB1*01:03L HLA-DRB1*04:02L HLA-DRB1*14:01L HLA-DRB1*14:02L HLA-DQA1*01-B1*05L HLA-DQA1*05:01-B1*02:01L HLA-DRB1*12:01L HLA-DRB3*01:01L HLA-DQA1*03:01-B1*03:02L HLA-DRB1*16:01L
  REGION 1..10: note = CONT. FROM ABOVE: HLA-DRB1*15:03L
LVRDLPQGFS

SEQ ID NO: 13679 - protein, 12 aa, Severe acute respiratory syndrome coronavirus 2
  REGION 1..12: note = Table B: HLA-DRB1*04:03L
FSALEPLVDLPI

SEQ ID NO: 13680 - protein, 11 aa, Severe acute respiratory syndrome coronavirus 2
  REGION 1..11: note = Table B: HLA-DRB1*04:03L HLA-DRB1*04:02L HLA-DRB1*14:17L
LPIGINITRFQ

SEQ ID NO: 13681 - protein, 11 aa, Severe acute respiratory syndrome coronavirus 2
  REGION 1..11: note = Table B: HLA-DRB1*04:03L HLA-DRB1*01:03L HLA-DRB1*04:02L HLA-DRB1*04:04L HLA-DRB1*04:05L HLA-DQA1*01:02-B1*06:02L HLA-DRB1*01:02L HLA-DPA1*01:03-B1*03:01L HLA-DRB1*12:01L HLA-DPA1*03:01-B1*105:01L HLA-DQA1*03:01-B1*03:02L
  REGION 1..11: note = CONT. FROM ABOVE: HLA-DRB1*14:17L HLA-DPA1*01:02-B1*04:01L HLA-D RB1*16:01L HLA-DRB1*04:08L HLA-DQA1*02:01-B1*03:03L HLA-DRB1*15: 03L
ITRFQTLLALH

SEQ ID NO: 13682 - protein, 13 aa, Severe acute respiratory syndrome coronavirus 2
  REGION 1..13: note = Table B: HLA-DRB1*04:03L HLA-DRB1*13:02L HLA-DRB1*04:02L HLA-DRB1*08:04L HLA-DRB1*11:04L HLA-DRB1*08:01L HLA-DRB1*04:08L
TLLALHRSYLTPG

SEQ ID NO: 13683 - protein, 12 aa, Severe acute respiratory syndrome coronavirus 2
  REGION 1..12: note = Table B: HLA-DRB1*04:03L HLA-DRB1*04:05L HLA-DQA1*01:02-B1*06:02L HLA-DRB1*01:02L HLA-DPA1*01:03-B1*03:01L HLA-DQA1*01-B1*05L HLA-DRB1*12:01L HLA-DPA1*02:01-B1*13:01L HLA-DQA1*03:01-B1*03:02L
  REGION 1..12: note = CONT. FROM ABOVE: HLA-DRB1*16:01L HLA-DQA1*01:03-B1*06:01L HLA-D QA1*02:01-B1*03:03L
ALHRSYLTPGDS

SEQ ID NO: 13684 - protein, 10 aa, Severe acute respiratory syndrome coronavirus 2
  REGION 1..10: note = Table B: HLA-DRB1*04:03L HLA-DRB1*14:17L
YLTPGDSSSG

SEQ ID NO: 13685 - protein, 15 aa, Severe acute respiratory syndrome coronavirus 2
  REGION 1..15: note = Table B: HLA-DRB1*04:03L HLA-DRB1*13:03L HLA-DRB1*04:02L HLA-DRB1*04:05L HLA-DRB1*01:02L HLA-DRB4*03:01NL HLA-DPA1*01:03-B1*03:01L HLA-DRB1*08:01L HLA-DRB1*11:01L HLA-DQA1*01-B1*05L HLA-DPA1*01:03-B1*04:02L HLA-DRB1*12:01L
  REGION 1..15: note = CONT. FROM ABOVE: HLA-DPA1*03:01-B1*105:01L HLA-DPA1*01:03-B1*10 4:01L HLA-DRB1*14:17L HLA-DRB1*16:01L HLA-DRB1*04:08L
TPGDSSSGWTAGAAA

SEQ ID NO: 13686 - protein, 13 aa, Severe acute respiratory syndrome coronavirus 2
  REGION 1..13: note = Table B: HLA-DRB1*04:03L HLA-DRB1*01:03L HLA-DRB1*01:02L HLA-DQA1*01:01-B1*05:01L HLA-DQA1*05:05-B1*03:116L HLA-DPA1*01:03-B1*04:02L HLA-DRB1*12:01L
SGWTAGAAAYYVG

SEQ ID NO: 13687 - protein, 11 aa, Severe acute respiratory syndrome coronavirus 2
  REGION 1..11: note = Table B: HLA-DRB1*04:03L HLA-DRB1*13:02L HLA-DRB1*04:02L HLA-DRB1*14:01L HLA-DRB1*12:01L HLA-DRB1*14:17L HLA-DRB1*16:01L HLA-DQA1*02:01-B1*03:03L HLA-DRB1*15:03L
LLKYNENGTIT

SEQ ID NO: 13688 - protein, 11 aa, Severe acute respiratory syndrome coronavirus 2
  REGION 1..11: note = Table B: HLA-DRB1*04:03L HLA-DRB1*13:02L HLA-DRB1*04:02L HLA-DRB1*14:01L HLA-DQA1*01-B1*05L HLA-DRB1*12:01L HLA-DQA1*03:01-B1*03:02L HLA-DRB1*14:17L HLA-DRB1*16:01L HLA-DQA1*02:01-B1*03:03L
LKYNENGTITD

SEQ ID NO: 13689 - protein, 11 aa, Severe acute respiratory syndrome coronavirus 2
  REGION 1..11: note = Table B: HLA-DRB1*04:03L
KYNENGTITDA

SEQ ID NO: 13690 - protein, 14 aa, Severe acute respiratory syndrome coronavirus 2
  REGION 1..14: note = Table B: HLA-DRB1*04:03L HLA-DQA1*01:02-B1*06:02L HLA-DQA1*01-B1*05L HLA-DPA1*03:01-B1*105:01L HLA-DQA1*03:01-B1*03:02L HLA-DQA1*01:03-B1*06:01L HLA-DQA1*02:01-B1*03:03L
GTITDAVDCALDPL

SEQ ID NO: 13691 - protein, 12 aa, Severe acute respiratory syndrome coronavirus 2
  REGION 1..12: note = Table B: HLA-DRB1*04:03L HLA-DQA1*01-B1*05L HLA-DQA1*05:01-B1*02:01L HLA-DRB1*14:17L
DAVDCALDPLSE

SEQ ID NO: 13692 - protein, 12 aa, Severe acute respiratory syndrome coronavirus 2
  REGION 1..12: note = Table B: HLA-DRB1*04:03L HLA-DRB1*14:17L
AVDCALDPLSET

SEQ ID NO: 13693 - protein, 12 aa, Severe acute respiratory syndrome coronavirus 2
  REGION 1..12: note = Table B: HLA-DRB1*04:03L HLA-DQA1*01:02-B1*06:02L HLA-DPA1*03:01-B1*105:01L HLA-DQA1*03:01-B1*03:02L HLA-DQA1*01:03-B1*06:01L HLA-DQA1*02:01-B1*03:03L
VDCALDPLSETK

SEQ ID NO: 13694 - protein, 10 aa, Severe acute respiratory syndrome coronavirus 2
  REGION 1..10: note = Table B: HLA-DRB1*04:03L HLA-DRB1*13:03L HLA-DRB1*04:02L HLA-DQA1*03:01-B1*03:02L HLA-DRB1*14:17L HLA-DRB1*16:01L HLA-DQA1*02:01-B1*03:03L
FTVEKGIYQT

SEQ ID NO: 13695 - protein, 11 aa, Severe acute respiratory syndrome coronavirus 2
  REGION 1..11: note = Table B: HLA-DRB1*04:03L HLA-DQA1*03:01-B1*03:02L HLA-DRB1*14:17L HLA-DQA1*01:03-B1*06:01L HLA-DQA1*02:01-B1*03:03L
TVEKGIYQTSN

SEQ ID NO: 13696 - protein, 10 aa, Severe acute respiratory syndrome coronavirus 2
  REGION 1..10: note = Table B: HLA-DRB1*04:03L HLA-DQA1*03:01-B1*03:02L HLA-DQA1*02:01-B1*03:03L
TSNFRVQPTE

SEQ ID NO: 13697 - protein, 10 aa, Severe acute respiratory syndrome coronavirus 2
  REGION 1..10: note = Table B: HLA-DRB1*04:03L HLA-DQA1*03:01-B1*03:02L
SNFRVQPTES

SEQ ID NO: 13698 - protein, 10 aa, Severe acute respiratory syndrome coronavirus 2
  REGION 1..10: note = Table B: HLA-DRB1*04:03L HLA-DQA1*03:01-B1*03:02L HLA-DPA1*01:02-B1*04:01L HLA-DQA1*01:03-B1*06:01L HLA-DQA1*02:01-B1*03:03L
PTESIVRFPN

SEQ ID NO: 13699 - protein, 13 aa, Severe acute respiratory syndrome coronavirus 2
  REGION 1..13: note = Table B: HLA-DRB1*04:03L HLA-DQA1*01:02-B1*06:02L HLA-DRB1*01:02L HLA-DPA1*03:01-B1*04:02L HLA-DQA1*05:01-B1*02:01L HLA-DRB1*12:01L HLA-DPA1*03:01-B1*105:01L HLA-DQA1*03:01-B1*03:02L
  REGION 1..13: note = CONT. FROM ABOVE: HLA-DQA1*05:05-B1*03:01L HLA-DQA1*01:03-B1*06: 01L HLA-DQA1*02:01-B1*03:03L HLA-DRB1*15:03L
FPNITNLCPFGEV

SEQ ID NO: 13700 - protein, 12 aa, Severe acute respiratory syndrome coronavirus 2
  REGION 1..12: note = Table B: HLA-DRB1*04:03L HLA-DRB1*13:02L HLA-DRB1*13:03L HLA-DRB1*04:05L HLA-DRB1*08:04L HLA-DRB3*02:01L HLA-DRB1*11:04L HLA-DRB1*08:01L HLA-DRB1*11:01L HLA-DRB1*14:54L HLA-DPA1*01:03-B1*02:01L HLA-DRB1*04:08L
GEVFNATRFASV

SEQ ID NO: 13701 - protein, 12 aa, Severe acute respiratory syndrome coronavirus 2
  REGION 1..12: note = Table B: HLA-DRB1*04:03L HLA-DRB1*04:04L HLA-DRB3*01:01L
VFNATRFASVYA

SEQ ID NO: 13702 - protein, 13 aa, Severe acute respiratory syndrome coronavirus 2
  REGION 1..13: note = Table B: HLA-DRB1*04:03L HLA-DRB1*04:02L HLA-DRB1*01:01L HLA-DRB1*03:01L HLA-DRB1*14:01L HLA-DRB1*11:04L HLA-DRB3*01:01L HLA-DPA1*03:01-B1*105:01L
ATRFASVYAWNRK

SEQ ID NO: 13703 - protein, 14 aa, Severe acute respiratory syndrome coronavirus 2
  REGION 1..14: note = Table B: HLA-DRB1*04:03L HLA-DRB1*04:04L HLA-DRB1*01:01L HLA-DPA1*01:03-B1*03:01L HLA-DPA1*03:01-B1*105:01L HLA-DQA1*01:03-B1*06:01L
FASVYAWNRKRISN

SEQ ID NO: 13704 - protein, 13 aa, Severe acute respiratory syndrome coronavirus 2
  REGION 1..13: note = Table B: HLA-DRB1*04:03L HLA-DRB1*01:02L HLA-DQA1*02:01-B1*03:03L HLA-DRB1*15:03L
KRISNCVADYSVL

SEQ ID NO: 13705 - protein, 11 aa, Severe acute respiratory syndrome coronavirus 2
  REGION 1..11: note = Table B: HLA-DRB1*04:03L HLA-DRB1*14:17L
ADYSVLYNSAS

SEQ ID NO: 13706 - protein, 11 aa, Severe acute respiratory syndrome coronavirus 2
  REGION 1..11: note = Table B: HLA-DRB1*04:03L HLA-DPA1*02:01-B1*13:01L
DYSVLYNSASF

SEQ ID NO: 13707 - protein, 11 aa, Severe acute respiratory syndrome coronavirus 2
  REGION 1..11: note = Table B: HLA-DRB1*04:03L HLA-DRB1*04:02L HLA-DRB1*04:04L HLA-DRB1*04:05L HLA-DRB4*03:01NL HLA-DRB1*04:10L HLA-DRB1*14:17L HLA-DRB1*16:01L HLA-DRB1*04:08L
YSVLYNSASFS

SEQ ID NO: 13708 - protein, 10 aa, Severe acute respiratory syndrome coronavirus 2
  REGION 1..10: note = Table B: HLA-DRB1*04:03L HLA-DRB1*01:03L HLA-DRB1*04:05L HLA-DQA1*01:02-B1*06:02L HLA-DRB1*01:01L HLA-DRB1*08:77L HLA-DQA1*01:01-B1*05:01L HLA-DPA1*02:01-B1*13:01M HLA-DPA1*03:01-B1*105:01L HLA-DRB1*16:01L
  REGION 1..10: note = CONT. FROM ABOVE: HLA-DQA1*01:03-B1*06:01M HLA-DQA1*02:01-B1*03: 03L HLA-DRB1*15:03L
LYNSASFSTF

SEQ ID NO: 13709 - protein, 15 aa, Severe acute respiratory syndrome coronavirus 2
  REGION 1..15: note = Table B: HLA-DRB1*04:03L HLA-DRB1*13:02L HLA-DRB1*04:02L HLA-DRB1*04:04L HLA-DRB1*01:01L HLA-DRB3*02:01L HLA-DPA1*01:03-B1*03:01L HLA-DPA1*03:01-B1*04:02L HLA-DRB1*14:01L HLA-DRB1*11:03L HLA-DRB1*11:04L HLA-DRB1*14:02L
  REGION 1..15: note = CONT. FROM ABOVE: HLA-DQA1*05:05-B1*03:19L HLA-DPA1*01:03-B1*04: 02L HLA-DRB3*01:01L HLA-DPA1*02:01-B1*13:01L HLA-DQA1*03:01-B1*0 3:02L HLA-DQA1*05:05-B1*03:01L HLA-DRB1*07:01L HLA-DRB1*10:01L H LA-DRB1*15:01L
SASFSTFKCYGVSPT

SEQ ID NO: 13710 - protein, 16 aa, Severe acute respiratory syndrome coronavirus 2
  REGION 1..16: note = Table B: HLA-DRB1*04:03L HLA-DRB1*01:03L HLA-DQA1*03:01-B1*03:02L HLA-DRB1*16:01L
SPTKLNDLCFTNVYAD

SEQ ID NO: 13711 - protein, 11 aa, Severe acute respiratory syndrome coronavirus 2
  REGION 1..11: note = Table B: HLA-DRB1*04:03L
NVYADSFVIRG

SEQ ID NO: 13712 - protein, 10 aa, Severe acute respiratory syndrome coronavirus 2
  REGION 1..10: note = Table B: HLA-DRB1*04:03L HLA-DRB1*01:03L HLA-DRB1*04:02L HLA-DRB1*01:02L HLA-DQA1*03:01-B1*03:02L HLA-DRB1*14:17L HLA-DRB1*16:01L HLA-DRB1*04:08L HLA-DQA1*02:01-B1*03:03L
FVIRGDEVRQ

SEQ ID NO: 13713 - protein, 10 aa, Severe acute respiratory syndrome coronavirus 2
  REGION 1..10: note = Table B: HLA-DRB1*04:03L HLA-DQA1*03:01-B1*03:02L
VRQIAPGQTG

SEQ ID NO: 13714 - protein, 10 aa, Severe acute respiratory syndrome coronavirus 2
  REGION 1..10: note = Table B: HLA-DRB1*04:03L HLA-DQA1*01-B1*05L HLA-DQA1*03:01-B1*03:02L
NYKLPDDFTG

SEQ ID NO: 13715 - protein, 10 aa, Severe acute respiratory syndrome coronavirus 2
  REGION 1..10: note = Table B: HLA-DRB1*04:03L HLA-DRB1*04:02L HLA-DRB1*04:05L HLA-DQA1*01-B1*05L HLA-DRB1*04:10L HLA-DRB1*14:17L
IAWNSNNLDS

SEQ ID NO: 13716 - protein, 11 aa, Severe acute respiratory syndrome coronavirus 2
  REGION 1..11: note = Table B: HLA-DRB1*04:03L HLA-DQA1*02:01-B1*03:03L
WNSNNLDSKVG

SEQ ID NO: 13717 - protein, 10 aa, Severe acute respiratory syndrome coronavirus 2
  REGION 1..10: note = Table B: HLA-DRB1*04:03L HLA-DQA1*03:01-B1*03:02L HLA-DRB1*14:17L
NNLDSKVGGN

SEQ ID NO: 13718 - protein, 11 aa, Severe acute respiratory syndrome coronavirus 2
  REGION 1..11: note = Table B: HLA-DRB1*04:03L HLA-DQA1*01-B1*05L HLA-DQA1*03:01-B1*03:02L
LKPFERDISTE

SEQ ID NO: 13719 - protein, 12 aa, Severe acute respiratory syndrome coronavirus 2
  REGION 1..12: note = Table B: HLA-DRB1*04:03L HLA-DRB1*13:02L HLA-DRB1*13:03L HLA-DRB1*01:03L HLA-DRB1*01:02L HLA-DRB1*08:04L HLA-DRB3*02:01L HLA-DPA1*01:03-B1*04:02L HLA-DRB1*12:01L HLA-DRB3*01:01L HLA-DPA1*03:01-B1*105:01L HLA-DPA1*01:02-B1*04:01L
  REGION 1..12: note = CONT. FROM ABOVE: HLA-DRB1*04:08L
KPFERDISTEIY

SEQ ID NO: 13720 - protein, 11 aa, Severe acute respiratory syndrome coronavirus 2
  REGION 1..11: note = Table B: HLA-DRB1*04:03L HLA-DRB1*14:17L
FERDISTEIYQ

SEQ ID NO: 13721 - protein, 12 aa, Severe acute respiratory syndrome coronavirus 2
  REGION 1..12: note = Table B: HLA-DRB1*04:03L HLA-DQA1*01:02-B1*06:02L HLA-DQA1*05:01-B1*02:01L HLA-DQA1*02:01-B1*03:03L
ERDISTEIYQAG

SEQ ID NO: 13722 - protein, 11 aa, Severe acute respiratory syndrome coronavirus 2
  REGION 1..11: note = Table B: HLA-DRB1*04:03L HLA-DQA1*05:05-B1*03:01L
IYQAGSTPCNG

SEQ ID NO: 13723 - protein, 12 aa, Severe acute respiratory syndrome coronavirus 2
  REGION 1..12: note = Table B: HLA-DRB1*04:03L HLA-DPA1*03:01-B1*04:02L HLA-DQA1*01-B1*05L HLA-DPA1*03:01-B1*105:01L HLA-DQA1*03:01-B1*03:02L HLA-DPA1*01:02-B1*04:01L HLA-DQA1*02:01-B1*03:03L
FPLQSYGFQPTN

SEQ ID NO: 13724 - protein, 10 aa, Severe acute respiratory syndrome coronavirus 2
  REGION 1..10: note = Table B: HLA-DRB1*04:03L HLA-DRB1*04:02L HLA-DRB4*03:01NL HLA-DQA1*01-B1*05L HLA-DQA1*03:01-B1*03:02L HLA-DRB1*14:17L HLA-DQA1*02:01-B1*03:03L
YGFQPTNGVG

SEQ ID NO: 13725 - protein, 13 aa, Severe acute respiratory syndrome coronavirus 2
  REGION 1..13: note = Table B: HLA-DRB1*04:03L HLA-DRB1*01:03L HLA-DRB1*04:02L HLA-DRB1*04:05L HLA-DRB1*01:02L HLA-DRB1*08:04L HLA-DPA1*01:03-B1*03:01L HLA-DRB1*14:01L HLA-DRB1*08:01L HLA-DQA1*01-B1*05L HLA-DQA1*05:01-B1*02:01L
  REGION 1..13: note = CONT. FROM ABOVE: HLA-DPA1*01:03-B1*04:01L HLA-DPA1*01:03-B1*04: 02L HLA-DRB1*12:01L HLA-DQA1*03:01-B1*03:02L HLA-DPA1*01:03-B1*0 2:01L HLA-DRB1*14:17L HLA-DRB1*16:01L HLA-DQA1*01:03-B1*06:01L H LA-DRB1*04:08L HLA-DQA1*02:01-B1*03:03L
VVVLSFELLHAPA

SEQ ID NO: 13726 - protein, 15 aa, Severe acute respiratory syndrome coronavirus 2
  REGION 1..15: note = Table B: HLA-DRB1*04:03L HLA-DRB1*13:02L HLA-DRB1*08:77L HLA-DRB1*07:01L
VNFNFNGLTGTGVLT

SEQ ID NO: 13727 - protein, 13 aa, Severe acute respiratory syndrome coronavirus 2
  REGION 1..13: note = Table B: HLA-DRB1*04:03L
NGLTGTGVLTESN

SEQ ID NO: 13728 - protein, 12 aa, Severe acute respiratory syndrome coronavirus 2
  REGION 1..12: note = Table B: HLA-DRB1*04:03L HLA-DRB1*13:02L HLA-DRB1*01:03L HLA-DRB1*04:02L HLA-DRB1*04:05L HLA-DQA1*01:02-B1*06:02L HLA-DRB1*01:02L HLA-DRB1*14:01L HLA-DRB1*08:01L HLA-DRB1*12:01L HLA-DPA1*02:01-B1*13:01L HLA-DPA1*03:01-B1*105:01L
  REGION 1..12: note = CONT. FROM ABOVE: HLA-DQA1*01:03-B1*06:01L HLA-DRB1*04:08L
KKFLPFQQFGRD

SEQ ID NO: 13729 - protein, 13 aa, Severe acute respiratory syndrome coronavirus 2
  REGION 1..13: note = Table B: HLA-DRB1*04:03L HLA-DRB1*01:02L HLA-DRB1*11:04L HLA-DRB1*11:01L HLA-DRB1*12:01L HLA-DRB1*14:54L HLA-DRB1*14:17L HLA-DRB1*08:03L HLA-DRB1*15:03L
LPFQQFGRDIADT

SEQ ID NO: 13730 - protein, 11 aa, Severe acute respiratory syndrome coronavirus 2
  REGION 1..11: note = Table B: HLA-DRB1*04:03L HLA-DQA1*03:01-B1*03:02L HLA-DRB1*14:17L
FGRDIADTTDA

SEQ ID NO: 13731 - protein, 11 aa, Severe acute respiratory syndrome coronavirus 2
  REGION 1..11: note = Table B: HLA-DRB1*04:03L HLA-DQA1*01:03-B1*06:01L
TDAVRDPQTLE

SEQ ID NO: 13732 - protein, 13 aa, Severe acute respiratory syndrome coronavirus 2
  REGION 1..13: note = Table B: HLA-DRB1*04:03L HLA-DPA1*03:01-B1*04:02L HLA-DRB1*12:01L HLA-DPA1*03:01-B1*105:01L HLA-DRB1*16:01L HLA-DRB1*15:03L
DPQTLEILDITPC

SEQ ID NO: 13733 - protein, 12 aa, Severe acute respiratory syndrome coronavirus 2
  REGION 1..12: note = Table B: HLA-DRB1*04:03L HLA-DRB1*01:03L HLA-DRB1*04:02L HLA-DPA1*01:03-B1*03:01L HLA-DQA1*01:01-B1*05:01L HLA-DPA1*03:01-B1*105:01L HLA-DRB1*04:08L
FGGVSVITPGTN

SEQ ID NO: 13734 - protein, 12 aa, Severe acute respiratory syndrome coronavirus 2
  REGION 1..12: note = Table B: HLA-DRB1*04:03L
GGVSVITPGTNT

SEQ ID NO: 13735 - protein, 10 aa, Severe acute respiratory syndrome coronavirus 2
  REGION 1..10: note = Table B: HLA-DRB1*04:03L HLA-DRB1*14:17L
VITPGTNTSN

SEQ ID NO: 13736 - protein, 15 aa, Severe acute respiratory syndrome coronavirus 2
  REGION 1..15: note = Table B: HLA-DRB1*04:03L
TPGTNTSNQVAVLYQ

SEQ ID NO: 13737 - protein, 12 aa, Severe acute respiratory syndrome coronavirus 2
  REGION 1..12: note = Table B: HLA-DRB1*04:03L HLA-DQA1*01-B1*05L HLA-DRB1*15:03L
VAVLYQDVNCTE

SEQ ID NO: 13738 - protein, 14 aa, Severe acute respiratory syndrome coronavirus 2
  REGION 1..14: note = Table B: HLA-DRB1*04:03L HLA-DQA1*01-B1*05L HLA-DQA1*05:01-B1*02:01L
AVLYQDVNCTEVPV

SEQ ID NO: 13739 - protein, 11 aa, Severe acute respiratory syndrome coronavirus 2
  REGION 1..11: note = Table B: HLA-DRB1*04:03L HLA-DRB1*04:02L HLA-DRB1*14:17L
TEVPVAIHADQ

SEQ ID NO: 13740 - protein, 12 aa, Severe acute respiratory syndrome coronavirus 2
  REGION 1..12: note = Table B: HLA-DRB1*04:03L
VPVAIHADQLTP

SEQ ID NO: 13741 - protein, 11 aa, Severe acute respiratory syndrome coronavirus 2
  REGION 1..11: note = Table B: HLA-DRB1*04:03L HLA-DRB1*04:02L HLA-DRB4*03:01NL HLA-DQA1*03:01-B1*03:02L HLA-DRB1*14:54L HLA-DRB1*14:17L HLA-DRB1*16:01L
VAIHADQLTPT

SEQ ID NO: 13742 - protein, 13 aa, Severe acute respiratory syndrome coronavirus 2
  REGION 1..13: note = Table B: HLA-DRB1*04:03L HLA-DRB1*13:02L HLA-DRB1*04:05L HLA-DRB1*01:02L HLA-DPA1*03:01-B1*04:02L HLA-DRB1*11:02L HLA-DRB1*11:03L HLA-DRB1*11:04L HLA-DRB1*11:01L HLA-DQA1*05:05-B1*03:116L HLA-DRB1*12:01L HLA-DRB3*01:01L
  REGION 1..13: note = CONT. FROM ABOVE: HLA-DPA1*01:03-B1*02:01L HLA-DRB1*14:17L HLA-D RB1*04:08L HLA-DRB1*08:02L HLA-DRB1*08:03L
DQLTPTWRVYSTG

SEQ ID NO: 13743 - protein, 10 aa, Severe acute respiratory syndrome coronavirus 2
  REGION 1..10: note = Table B: HLA-DRB1*04:03L HLA-DRB4*03:01NL HLA-DRB1*12:01L HLA-DRB1*16:01L HLA-DQA1*02:01-B1*03:03L
VYSTGSNVFQ

SEQ ID NO: 13744 - protein, 10 aa, Severe acute respiratory syndrome coronavirus 2
  REGION 1..10: note = Table B: HLA-DRB1*04:03L HLA-DQA1*03:01-B1*03:02L
GAEHVNNSYE

SEQ ID NO: 13745 - protein, 10 aa, Severe acute respiratory syndrome coronavirus 2
  REGION 1..10: note = Table B: HLA-DRB1*04:03L HLA-DRB1*13:03L HLA-DRB1*01:03L HLA-DRB1*04:02L HLA-DRB4*03:01NL HLA-DRB1*08:01L HLA-DRB1*12:01L HLA-DQA1*03:01-B1*03:02L HLA-DRB1*14:17L HLA-DRB1*16:01L HLA-DQA1*02:01-B1*03:03L
YQTQTNSPRR

SEQ ID NO: 13746 - protein, 12 aa, Severe acute respiratory syndrome coronavirus 2
  REGION 1..12: note = Table B: HLA-DRB1*04:03L HLA-DQA1*01:02-B1*06:02L
SQSIIAYTMSLG

SEQ ID NO: 13747 - protein, 11 aa, Severe acute respiratory syndrome coronavirus 2
  REGION 1..11: note = Table B: HLA-DRB1*04:03L HLA-DRB1*14:17L
IIAYTMSLGAE

SEQ ID NO: 13748 - protein, 11 aa, Severe acute respiratory syndrome coronavirus 2
  REGION 1..11: note = Table B: HLA-DRB1*04:03L HLA-DRB1*04:02L HLA-DRB1*04:05L HLA-DRB4*03:01NL HLA-DRB1*04:10L HLA-DQA1*03:01-B1*03:02L HLA-DRB1*14:17L HLA-DQA1*02:01-B1*03:03L
IAYTMSLGAEN

SEQ ID NO: 13749 - protein, 13 aa, Severe acute respiratory syndrome coronavirus 2
  REGION 1..13: note = Table B: HLA-DRB1*04:03L
SLGAENSVAYSNN

SEQ ID NO: 13750 - protein, 11 aa, Severe acute respiratory syndrome coronavirus 2
  REGION 1..11: note = Table B: HLA-DRB1*04:03L HLA-DRB1*14:17L
NSVAYSNNSIA

SEQ ID NO: 13751 - protein, 12 aa, Severe acute respiratory syndrome coronavirus 2
  REGION 1..12: note = Table B: HLA-DRB1*04:03L HLA-DRB1*04:02L HLA-DRB1*04:05L HLA-DRB4*03:01NL HLA-DQA1*01-B1*05L HLA-DRB1*04:10L HLA-DRB1*12:01L HLA-DQA1*03:01-B1*03:02L HLA-DRB1*14:54L HLA-DRB1*14:17L HLA-DRB1*16:01L HLA-DQA1*02:01-B1*03:03L
VAYSNNSIAIPT

SEQ ID NO: 13752 - protein, 13 aa, Severe acute respiratory syndrome coronavirus 2
  REGION 1..13: note = Table B: HLA-DRB1*04:03L
SNNSIAIPTNFTI

SEQ ID NO: 13753 - protein, 13 aa, Severe acute respiratory syndrome coronavirus 2
  REGION 1..13: note = Table B: HLA-DRB1*04:03L HLA-DQA1*01-B1*05L HLA-DQA1*05:01-B1*02:01L HLA-DRB1*12:01L
NNSIAIPTNFTIS

SEQ ID NO: 13754 - protein, 15 aa, Severe acute respiratory syndrome coronavirus 2
  REGION 1..15: note = Table B: HLA-DRB1*04:03L HLA-DRB1*13:02L HLA-DQA1*01:02-B1*06:02L HLA-DRB1*01:02L HLA-DPA1*03:01-B1*04:02L HLA-DRB1*14:01L HLA-DRB1*12:01L HLA-DPA1*03:01-B1*105:01L HLA-DQA1*05:05-B1*03:01L
  REGION 1..15: note = CONT. FROM ABOVE: HLA-DRB1*16:01L HLA-DRB1*15:03L
IPTNFTISVTTEILP

SEQ ID NO: 13755 - protein, 12 aa, Severe acute respiratory syndrome coronavirus 2
  REGION 1..12: note = Table B: HLA-DRB1*04:03L
VTTEILPVSMTK

SEQ ID NO: 13756 - protein, 10 aa, Severe acute respiratory syndrome coronavirus 2
  REGION 1..10: note = Table B: HLA-DRB1*04:03L
ILPVSMTKTS

SEQ ID NO: 13757 - protein, 13 aa, Severe acute respiratory syndrome coronavirus 2
  REGION 1..13: note = Table B: HLA-DRB1*04:03L HLA-DRB1*01:03L HLA-DQA1*01:02-B1*06:02L HLA-DPA1*03:01-B1*04:02L HLA-DQA1*01-B1*05L HLA-DRB1*12:01L HLA-DQA1*01:03-B1*06:01L HLA-DRB1*04:08L HLA-DRB1*15:01L
SNLLLQYGSFCTQ

SEQ ID NO: 13758 - protein, 13 aa, Severe acute respiratory syndrome coronavirus 2
  REGION 1..13: note = Table B: HLA-DRB1*04:03L HLA-DRB1*04:05L HLA-DQA1*05:05-B1*03:19L HLA-DRB1*12:01L HLA-DRB1*15:03L
LLQYGSFCTQLNR

SEQ ID NO: 13759 - protein, 10 aa, Severe acute respiratory syndrome coronavirus 2
  REGION 1..10: note = Table B: HLA-DRB1*04:03L HLA-DRB1*01:03L HLA-DRB1*01:02L HLA-DRB1*14:17L HLA-DRB1*16:01L
RALTGIAVEQ

SEQ ID NO: 13760 - protein, 10 aa, Severe acute respiratory syndrome coronavirus 2
  REGION 1..10: note = Table B: HLA-DRB1*04:03L HLA-DRB1*04:02L HLA-DRB1*04:05L HLA-DRB4*03:01NL HLA-DQA1*01-B1*05L HLA-DQA1*05:01-B1*02:01L HLA-DRB1*04:10L HLA-DQA1*03:01-B1*03:02L HLA-DRB1*14:54L HLA-DRB1*14:17L HLA-DQA1*02:01-B1*03:03L
IAVEQDKNTQ

SEQ ID NO: 13761 - protein, 10 aa, Severe acute respiratory syndrome coronavirus 2
  REGION 1..10: note = Table B: HLA-DRB1*04:03L HLA-DRB1*14:17L
AVEQDKNTQE

SEQ ID NO: 13762 - protein, 14 aa, Severe acute respiratory syndrome coronavirus 2
  REGION 1..14: note = Table B: HLA-DRB1*04:03L HLA-DRB1*04:05L HLA-DRB3*01:01L HLA-DRB1*04:08L
EVFAQVKQIYKTPP

SEQ ID NO: 13763 - protein, 13 aa, Severe acute respiratory syndrome coronavirus 2
  REGION 1..13: note = Table B: HLA-DRB1*04:03L HLA-DRB1*13:02L HLA-DRB1*13:03L HLA-DRB1*01:03L HLA-DRB1*04:04L HLA-DRB1*04:05L HLA-DQA1*01:02-B1*06:02L HLA-DRB1*01:02L HLA-DRB1*08:04L HLA-DRB1*11:04L HLA-DRB1*08:01L HLA-DRB1*11:01L HLA-DRB1*12:01L
  REGION 1..13: note = CONT. FROM ABOVE: HLA-DRB3*01:01L HLA-DRB1*04:08L HLA-DQA1*02:01 -B1*03:03L
AQVKQIYKTPPIK

SEQ ID NO: 13764 - protein, 10 aa, Severe acute respiratory syndrome coronavirus 2
  REGION 1..10: note = Table B: HLA-DRB1*04:03L HLA-DRB1*01:03L HLA-DRB1*04:05L HLA-DQA1*01:02-B1*06:02L HLA-DRB1*01:01L HLA-DRB1*01:02L HLA-DRB1*08:77L HLA-DRB1*14:02L HLA-DQA1*01:01-B1*05:01L HLA-DRB1*11:01L HLA-DQA1*05:05-B1*03:19L
  REGION 1..10: note = CONT. FROM ABOVE: HLA-DPA1*01:03-B1*04:01L HLA-DRB1*12:01L HLA-D PA1*02:01-B1*13:01M HLA-DPA1*03:01-B1*105:01L HLA-DRB1*16:01L HL A-DQA1*01:03-B1*06:01M HLA-DQA1*02:01-B1*03:03L HLA-DRB1*15:03L
IYKTPPIKDF

SEQ ID NO: 13765 - protein, 13 aa, Severe acute respiratory syndrome coronavirus 2
  REGION 1..13: note = Table B: HLA-DRB1*04:03L HLA-DRB1*01:03L HLA-DPA1*01:03-B1*03:01L HLA-DQA1*05:05-B1*03:19L HLA-DRB1*12:01L HLA-DPA1*02:01-B1*13:01L HLA-DQA1*05:05-B1*03:01L HLA-DRB1*16:01L HLA-DRB1*04:08L
  REGION 1..13: note = CONT. FROM ABOVE: HLA-DQA1*02:01-B1*03:03L HLA-DRB1*15:03L
FGGFNFSQILPDP

SEQ ID NO: 13766 - protein, 11 aa, Severe acute respiratory syndrome coronavirus 2
  REGION 1..11: note = Table B: HLA-DRB1*04:03L HLA-DRB1*14:17L HLA-DQA1*02:01-B1*03:03L
NFSQILPDPSK

SEQ ID NO: 13767 - protein, 11 aa, Severe acute respiratory syndrome coronavirus 2
  REGION 1..11: note = Table B: HLA-DRB1*04:03L HLA-DRB1*08:04L HLA-DPA1*01:03-B1*03:01L HLA-DRB1*14:01L HLA-DRB1*08:01L HLA-DPA1*01:03-B1*02:01L
FIEDLLFNKVT

SEQ ID NO: 13768 - protein, 13 aa, Severe acute respiratory syndrome coronavirus 2
  REGION 1..13: note = Table B: HLA-DRB1*04:03L HLA-DRB1*13:02L HLA-DRB1*13:03L HLA-DRB1*04:02L HLA-DRB1*04:05L HLA-DRB1*01:02L HLA-DRB4*03:01NL HLA-DRB1*08:04L HLA-DRB3*02:01L HLA-DPA1*01:03-B1*03:01L HLA-DRB1*11:03L HLA-DRB1*11:04L HLA-DRB1*14:02L HLA-DRB1*08:01L
  REGION 1..13: note = CONT. FROM ABOVE: HLA-DRB1*12:02L HLA-DRB1*14:54L HLA-DQA1*05:05 -B1*03:01L HLA-DRB1*14:17L
IEDLLFNKVTLAD

SEQ ID NO: 13769 - protein, 11 aa, Severe acute respiratory syndrome coronavirus 2
  REGION 1..11: note = Table B: HLA-DRB1*04:03L HLA-DRB1*14:01L
LLFNKVTLADA

SEQ ID NO: 13770 - protein, 11 aa, Severe acute respiratory syndrome coronavirus 2
  REGION 1..11: note = Table B: HLA-DRB1*04:03L HLA-DQA1*03:01-B1*03:02L
LFNKVTLADAG

SEQ ID NO: 13771 - protein, 13 aa, Severe acute respiratory syndrome coronavirus 2
  REGION 1..13: note = Table B: HLA-DRB1*04:03L HLA-DQA1*01-B1*05L HLA-DRB1*16:01L HLA-DRB1*15:03L
DAGFIKQYGDCLG

SEQ ID NO: 13772 - protein, 13 aa, Severe acute respiratory syndrome coronavirus 2
  REGION 1..13: note = Table B: HLA-DRB1*04:03L HLA-DRB1*01:02L HLA-DQA1*01-B1*05L HLA-DRB1*12:01L HLA-DRB1*16:01L
AGFIKQYGDCLGD

SEQ ID NO: 13773 - protein, 13 aa, Severe acute respiratory syndrome coronavirus 2
  REGION 1..13: note = Table B: HLA-DRB1*04:03L HLA-DRB1*01:03L HLA-DQA1*01:02-B1*06:02L HLA-DRB1*01:02L HLA-DRB1*12:01L HLA-DPA1*02:01-B1*13:01L HLA-DPA1*03:01-B1*105:01L HLA-DRB1*04:08L
GFIKQYGDCLGDI

SEQ ID NO: 13774 - protein, 12 aa, Severe acute respiratory syndrome coronavirus 2
  REGION 1..12: note = Table B: HLA-DRB1*04:03L HLA-DRB1*04:05L HLA-DQA1*01:02-B1*06:02L HLA-DRB1*01:02L HLA-DPA1*01:03-B1*03:01L HLA-DQA1*01-B1*05L HLA-DQA1*05:01-B1*02:01L HLA-DRB1*12:01L
  REGION 1..12: note = CONT. FROM ABOVE: HLA-DPA1*02:01-B1*13:01L HLA-DPA1*03:01-B1*105 :01L HLA-DQA1*03:01-B1*03:02L HLA-DRB1*16:01L HLA-DQA1*01:03-B1* 06:01L HLA-DRB1*04:08L HLA-DQA1*02:01-B1*03:03L HLA-DRB1*15:03L
IKQYGDCLGDIA

SEQ ID NO: 13775 - protein, 13 aa, Severe acute respiratory syndrome coronavirus 2
  REGION 1..13: note = Table B: HLA-DRB1*04:03L HLA-DRB1*04:05L HLA-DQA1*01:02-B1*06:02L HLA-DPA1*03:01-B1*105:01L HLA-DRB1*16:01L HLA-DRB1*04:08L
AQKFNGLTVLPPL

SEQ ID NO: 13776 - protein, 13 aa, Severe acute respiratory syndrome coronavirus 2
  REGION 1..13: note = Table B: HLA-DRB1*04:03L HLA-DQA1*01:02-B1*06:02L HLA-DPA1*03:01-B1*105:01L
NGLTVLPPLLTDE

SEQ ID NO: 13777 - protein, 13 aa, Severe acute respiratory syndrome coronavirus 2
  REGION 1..13: note = Table B: HLA-DRB1*04:03L HLA-DPA1*03:01-B1*04:02L HLA-DRB1*12:01L HLA-DPA1*03:01-B1*105:01L HLA-DRB1*15:03L
LPPLLTDEMIAQY

SEQ ID NO: 13778 - protein, 11 aa, Severe acute respiratory syndrome coronavirus 2
  REGION 1..11: note = Table B: HLA-DRB1*04:03L HLA-DQA1*01-B1*05L HLA-DQA1*05:01-B1*02:01L HLA-DQA1*03:01-B1*03:02L HLA-DQA1*02:01-B1*03:03L
DEMIAQYTSAL

SEQ ID NO: 13779 - protein, 11 aa, Severe acute respiratory syndrome coronavirus 2
  REGION 1..11: note = Table B: HLA-DRB1*04:03L HLA-DRB1*04:02L HLA-DRB1*01:02L HLA-DQA1*01-B1*05L HLA-DRB1*12:01L HLA-DRB1*14:17L HLA-DRB1*16:01L HLA-DQA1*01:03-B1*06:01L HLA-DRB1*04:08L HLA-DQA1*02:01-B1*03:03L HLA-DRB1*15:01L HLA-DRB1*15:03L
IAQYTSALLAG

SEQ ID NO: 13780 - protein, 13 aa, Severe acute respiratory syndrome coronavirus 2
  REGION 1..13: note = Table B: HLA-DRB1*04:03L HLA-DRB1*01:03L HLA-DRB1*04:02L HLA-DRB1*01:02L HLA-DPA1*01:03-B1*03:01L HLA-DPA1*03:01-B1*04:02L HLA-DQA1*05:01-B1*02:01L HLA-DRB1*12:01L HLA-DPA1*01:02-B1*04:01L HLA-DRB1*16:01L
  REGION 1..13: note = CONT. FROM ABOVE: HLA-DRB1*04:08L HLA-DRB1*15:03L
AQYTSALLAGTIT

SEQ ID NO: 13781 - protein, 13 aa, Severe acute respiratory syndrome coronavirus 2
  REGION 1..13: note = Table B: HLA-DRB1*04:03L HLA-DQA1*03:01-B1*03:02L
SALLAGTITSGWT

SEQ ID NO: 13782 - protein, 12 aa, Severe acute respiratory syndrome coronavirus 2
  REGION 1..12: note = Table B: HLA-DRB1*04:03L HLA-DRB1*01:03L HLA-DRB1*01:02L HLA-DPA1*01:03-B1*03:01L HLA-DQA1*05:01-B1*02:01L HLA-DPA1*01:03-B1*04:02L HLA-DPA1*03:01-B1*105:01L HLA-DRB1*04:08L
FGAGAALQIPFA

SEQ ID NO: 13783 - protein, 13 aa, Severe acute respiratory syndrome coronavirus 2
  REGION 1..13: note = Table B: HLA-DRB1*04:03L HLA-DRB1*01:03L HLA-DRB1*04:05L HLA-DRB1*04:08L
IPFAMQMAYRFNG

SEQ ID NO: 13784 - protein, 10 aa, Severe acute respiratory syndrome coronavirus 2
  REGION 1..10: note = Table B: HLA-DRB1*04:03L HLA-DQA1*01-B1*05L HLA-DQA1*03:01-B1*03:02L HLA-DRB1*14:17L HLA-DQA1*02:01-B1*03:03L
RFNGIGVTQN

SEQ ID NO: 13785 - protein, 11 aa, Severe acute respiratory syndrome coronavirus 2
  REGION 1..11: note = Table B: HLA-DRB1*04:03L HLA-DQA1*05:05-B1*03:19L HLA-DQA1*05:05-B1*03:01L
FNGIGVTQNVL

SEQ ID NO: 13786 - protein, 11 aa, Severe acute respiratory syndrome coronavirus 2
  REGION 1..11: note = Table B: HLA-DRB1*04:03L HLA-DRB1*13:02L HLA-DRB4*03:01NL HLA-DRB3*02:01L HLA-DPA1*03:01-B1*04:02L HLA-DRB1*14:01L HLA-DRB1*11:02L HLA-DQA1*01-B1*05L HLA-DRB4*01:01L HLA-DQA1*05:05-B1*03:116L HLA-DPA1*01:03-B1*04:02L
  REGION 1..11: note = CONT. FROM ABOVE: HLA-DRB1*12:02L HLA-DPA1*02:01-B1*13:01L HLA-D QA1*05:05-B1*03:01L HLA-DRB1*14:17L HLA-DPA1*01:02-B1*04:01L HLA -DRB1*10:01L HLA-DRB1*08:02L
NGIGVTQNVLY

SEQ ID NO: 13787 - protein, 12 aa, Severe acute respiratory syndrome coronavirus 2
  REGION 1..12: note = Table B: HLA-DRB1*04:03L HLA-DQA1*05:01-B1*02:01L HLA-DRB1*12:01L HLA-DQA1*03:01-B1*03:02L HLA-DRB1*14:17L HLA-DQA1*01:03-B1*06:01L
IGVTQNVLYENQ

SEQ ID NO: 13788 - protein, 10 aa, Severe acute respiratory syndrome coronavirus 2
  REGION 1..10: note = Table B: HLA-DRB1*04:03L HLA-DRB1*04:02L HLA-DRB1*01:02L HLA-DRB1*14:01L HLA-DQA1*01-B1*05L HLA-DQA1*03:01-B1*03:02L HLA-DRB1*16:01L HLA-DQA1*02:01-B1*03:03L HLA-DRB1*15:03L
VLYENQKLIA

SEQ ID NO: 13789 - protein, 11 aa, Severe acute respiratory syndrome coronavirus 2
  REGION 1..11: note = Table B: HLA-DRB1*04:03L HLA-DQA1*03:01-B1*03:02L
ENQKLIANQFN

SEQ ID NO: 13790 - protein, 11 aa, Severe acute respiratory syndrome coronavirus 2
  REGION 1..11: note = Table B: HLA-DRB1*04:03L HLA-DRB1*01:03L HLA-DRB1*04:02L HLA-DQA1*01:02-B1*06:02L HLA-DPA1*03:01-B1*04:02L HLA-DQA1*01-B1*05L HLA-DQA1*05:01-B1*02:01L HLA-DPA1*01:03-B1*04:01L HLA-DPA1*01:03-B1*04:02L
  REGION 1..11: note = CONT. FROM ABOVE: HLA-DRB1*12:01L HLA-DPA1*03:01-B1*105:01L HLA- DRB1*14:17L HLA-DPA1*01:02-B1*04:01L HLA-DRB1*16:01L HLA-DQA1*01 :03-B1*06:01L HLA-DRB1*04:08L HLA-DQA1*02:01-B1*03:03L
LIANQFNSAIG

SEQ ID NO: 13791 - protein, 11 aa, Severe acute respiratory syndrome coronavirus 2
  REGION 1..11: note = Table B: HLA-DRB1*04:03L HLA-DRB1*13:03L HLA-DRB1*01:03L HLA-DRB1*04:02L HLA-DRB4*03:01NL HLA-DQA1*01-B1*05L HLA-DRB1*12:01L HLA-DRB1*14:54L HLA-DQA1*05:05-B1*03:01L HLA-DRB1*14:17L HLA-DPA1*01:02-B1*04:01L HLA-DRB1*16:01L
  REGION 1..11: note = CONT. FROM ABOVE: HLA-DQA1*02:01-B1*03:03L
IANQFNSAIGK

SEQ ID NO: 13792 - protein, 10 aa, Severe acute respiratory syndrome coronavirus 2
  REGION 1..10: note = Table B: HLA-DRB1*04:03L HLA-DQA1*01:02-B1*06:02L HLA-DQA1*03:01-B1*03:02L HLA-DQA1*01:03-B1*06:01L HLA-DQA1*02:01-B1*03:03L
AIGKIQDSLS

SEQ ID NO: 13793 - protein, 10 aa, Severe acute respiratory syndrome coronavirus 2
  REGION 1..10: note = Table B: HLA-DRB1*04:03L HLA-DRB1*04:02L HLA-DQA1*03:01-B1*03:02L HLA-DRB1*14:17L
IGKIQDSLSS

SEQ ID NO: 13794 - protein, 12 aa, Severe acute respiratory syndrome coronavirus 2
  REGION 1..12: note = Table B: HLA-DRB1*04:03L
GKIQDSLSSTAS

SEQ ID NO: 13795 - protein, 12 aa, Severe acute respiratory syndrome coronavirus 2
  REGION 1..12: note = Table B: HLA-DRB1*04:03L
KIQDSLSSTASA

SEQ ID NO: 13796 - protein, 10 aa, Severe acute respiratory syndrome coronavirus 2
  REGION 1..10: note = Table B: HLA-DRB1*04:03L HLA-DRB1*13:03L HLA-DRB1*01:03L HLA-DRB1*04:02L HLA-DRB4*03:01NL HLA-DRB1*12:01L HLA-DQA1*03:01-B1*03:02L HLA-DRB1*14:54L HLA-DQA1*05:05-B1*03:01L HLA-DRB1*14:17L HLA-DRB1*16:01L
  REGION 1..10: note = CONT. FROM ABOVE: HLA-DQA1*01:03-B1*06:01L HLA-DQA1*02:01-B1*03: 03L
LSSTASALGK

SEQ ID NO: 13797 - protein, 10 aa, Severe acute respiratory syndrome coronavirus 2
  REGION 1..10: note = Table B: HLA-DRB1*04:03L HLA-DQA1*03:01-B1*03:02L HLA-DQA1*02:01-B1*03:03L
GKLQDVVNQN

SEQ ID NO: 13798 - protein, 10 aa, Severe acute respiratory syndrome coronavirus 2
  REGION 1..10: note = Table B: HLA-DRB1*04:03L HLA-DRB1*04:02L HLA-DRB1*04:05L HLA-DQA1*05:01-B1*02:01L HLA-DRB1*04:10L HLA-DQA1*03:01-B1*03:02L HLA-DRB1*14:54L HLA-DRB1*14:17L
LQDVVNQNAQ

SEQ ID NO: 13799 - protein, 10 aa, Severe acute respiratory syndrome coronavirus 2
  REGION 1..10: note = Table B: HLA-DRB1*04:03L HLA-DRB1*13:02L HLA-DRB1*13:03L HLA-DRB1*01:03L HLA-DRB1*04:02L HLA-DRB1*01:02L HLA-DRB4*03:01NL HLA-DRB1*08:77L HLA-DRB1*14:01L HLA-DQA1*05:01-B1*02:01L HLA-DRB1*12:01L HLA-DRB1*12:02L HLA-DQA1*03:01-B1*03:02L
  REGION 1..10: note = CONT. FROM ABOVE: HLA-DRB1*14:54L HLA-DRB1*14:17L HLA-DRB1*16:01 L HLA-DQA1*02:01-B1*03:03L HLA-DRB1*15:03L
VVNQNAQALN

SEQ ID NO: 13800 - protein, 12 aa, Severe acute respiratory syndrome coronavirus 2
  REGION 1..12: note = Table B: HLA-DRB1*04:03L HLA-DRB1*04:02L
NQNAQALNTLVK

SEQ ID NO: 13801 - protein, 10 aa, Severe acute respiratory syndrome coronavirus 2
  REGION 1..10: note = Table B: HLA-DRB1*04:03L HLA-DRB1*04:02L HLA-DRB4*03:01NL HLA-DQA1*03:01-B1*03:02L HLA-DRB1*14:17L HLA-DQA1*01:03-B1*06:01L HLA-DQA1*02:01-B1*03:03L
AQALNTLVKQ

SEQ ID NO: 13802 - protein, 10 aa, Severe acute respiratory syndrome coronavirus 2
  REGION 1..10: note = Table B: HLA-DRB1*04:03L HLA-DRB1*04:02L HLA-DQA1*01:02-B1*06:02L HLA-DQA1*03:01-B1*03:02L HLA-DRB1*14:17L HLA-DQA1*01:03-B1*06:01L HLA-DQA1*02:01-B1*03:03L
NTLVKQLSSN

SEQ ID NO: 13803 - protein, 10 aa, Severe acute respiratory syndrome coronavirus 2
  REGION 1..10: note = Table B: HLA-DRB1*04:03L HLA-DRB1*04:02L HLA-DRB1*12:01L HLA-DQA1*03:01-B1*03:02L HLA-DRB1*14:17L HLA-DQA1*02:01-B1*03:03L
LVKQLSSNFG

SEQ ID NO: 13804 - protein, 11 aa, Severe acute respiratory syndrome coronavirus 2
  REGION 1..11: note = Table B: HLA-DRB1*04:03L
VKQLSSNFGAI

SEQ ID NO: 13805 - protein, 10 aa, Severe acute respiratory syndrome coronavirus 2
  REGION 1..10: note = Table B: HLA-DRB1*04:03L HLA-DQA1*01-B1*05L HLA-DQA1*05:01-B1*02:01L HLA-DPA1*03:01-B1*105:01L HLA-DQA1*03:01-B1*03:02L HLA-DQA1*01:03-B1*06:01L HLA-DQA1*02:01-B1*03:03L
VLNDILSRLD

SEQ ID NO: 13806 - protein, 11 aa, Severe acute respiratory syndrome coronavirus 2
  REGION 1..11: note = Table B: HLA-DRB1*04:03L HLA-DRB1*04:02L HLA-DQA1*03:01-B1*03:02L
ILSRLDKVEAE

SEQ ID NO: 13807 - protein, 11 aa, Severe acute respiratory syndrome coronavirus 2
  REGION 1..11: note = Table B: HLA-DRB1*04:03L HLA-DQA1*01-B1*05L HLA-DRB1*14:17L HLA-DQA1*02:01-B1*03:03L
SRLDKVEAEVQ

SEQ ID NO: 13808 - protein, 12 aa, Severe acute respiratory syndrome coronavirus 2
  REGION 1..12: note = Table B: HLA-DRB1*04:03L HLA-DRB1*01:02L HLA-DQA1*05:01-B1*02:01L HLA-DPA1*03:01-B1*105:01L HLA-DRB1*14:54L
EVQIDRLITGRL

SEQ ID NO: 13809 - protein, 12 aa, Severe acute respiratory syndrome coronavirus 2
  REGION 1..12: note = Table B: HLA-DRB1*04:03L HLA-DRB1*04:05L HLA-DQA1*01:02-B1*06:02L HLA-DRB1*01:02L HLA-DQA1*05:01-B1*02:01L HLA-DPA1*03:01-B1*105:01L HLA-DRB1*04:08L
VQIDRLITGRLQ

SEQ ID NO: 13810 - protein, 11 aa, Severe acute respiratory syndrome coronavirus 2
  REGION 1..11: note = Table B: HLA-DRB1*04:03L HLA-DRB1*14:17L
GRLQSLQTYVT

SEQ ID NO: 13811 - protein, 11 aa, Severe acute respiratory syndrome coronavirus 2
  REGION 1..11: note = Table B: HLA-DRB1*04:03L HLA-DRB1*04:02L HLA-DRB1*14:17L
LQSLQTYVTQQ

SEQ ID NO: 13812 - protein, 11 aa, Severe acute respiratory syndrome coronavirus 2
  REGION 1..11: note = Table B: HLA-DRB1*04:03L
QSLQTYVTQQL

SEQ ID NO: 13813 - protein, 11 aa, Severe acute respiratory syndrome coronavirus 2
  REGION 1..11: note = Table B: HLA-DRB1*04:03L HLA-DQA1*01:02-B1*06:02L HLA-DRB1*01:02L HLA-DQA1*01-B1*05L HLA-DRB1*15:03L
LQTYVTQQLIR

SEQ ID NO: 13814 - protein, 10 aa, Severe acute respiratory syndrome coronavirus 2
  REGION 1..10: note = Table B: HLA-DRB1*04:03L HLA-DPA1*03:01-B1*04:02L HLA-DPA1*03:01-B1*105:01L HLA-DQA1*03:01-B1*03:02L HLA-DPA1*01:02-B1*04:01L HLA-DQA1*01:03-B1*06:01L HLA-DQA1*02:01-B1*03:03L
YVTQQLIRAA

SEQ ID NO: 13815 - protein, 10 aa, Severe acute respiratory syndrome coronavirus 2
  REGION 1..10: note = Table B: HLA-DRB1*04:03L HLA-DQA1*01:02-B1*06:02L HLA-DQA1*03:01-B1*03:02L HLA-DQA1*01:03-B1*06:01L HLA-DQA1*02:01-B1*03:03L
LIRAAEIRAS

SEQ ID NO: 13816 - protein, 11 aa, Severe acute respiratory syndrome coronavirus 2
  REGION 1..11: note = Table B: HLA-DRB1*04:03L HLA-DRB1*01:03L HLA-DRB1*04:02L HLA-DRB1*01:02L HLA-DQA1*01:01-B1*05:01L HLA-DRB1*08:01L HLA-DQA1*05:01-B1*02:01L HLA-DPA1*01:03-B1*04:02L HLA-DRB1*12:01L HLA-DRB1*14:17L HLA-DPA1*01:02-B1*04:01L
  REGION 1..11: note = CONT. FROM ABOVE: HLA-DRB1*16:01L HLA-DRB1*04:08L
IRAAEIRASAN

SEQ ID NO: 13817 - protein, 11 aa, Severe acute respiratory syndrome coronavirus 2
  REGION 1..11: note = Table B: HLA-DRB1*04:03L HLA-DRB1*13:03L HLA-DRB1*04:02L HLA-DRB1*04:05L HLA-DRB1*04:10L HLA-DRB1*14:54L HLA-DRB1*14:17L HLA-DRB1*16:01L
AEIRASANLAA

SEQ ID NO: 13818 - protein, 10 aa, Severe acute respiratory syndrome coronavirus 2
  REGION 1..10: note = Table B: HLA-DRB1*04:03L HLA-DRB1*04:02L HLA-DRB1*14:17L
IRASANLAAT

SEQ ID NO: 13819 - protein, 15 aa, Severe acute respiratory syndrome coronavirus 2
  REGION 1..15: note = Table B: HLA-DRB1*04:03L
LAATKMSECVLGQSK

SEQ ID NO: 13820 - protein, 12 aa, Severe acute respiratory syndrome coronavirus 2
  REGION 1..12: note = Table B: HLA-DRB1*04:03L HLA-DQA1*01:02-B1*06:02L HLA-DPA1*03:01-B1*105:01L
GYHLMSFPQSAP

SEQ ID NO: 13821 - protein, 10 aa, Severe acute respiratory syndrome coronavirus 2
  REGION 1..10: note = Table B: HLA-DRB1*04:03L HLA-DRB1*04:02L HLA-DQA1*03:01-B1*03:02L HLA-DRB1*14:17L HLA-DQA1*02:01-B1*03:03L
LMSFPQSAPH

SEQ ID NO: 13822 - protein, 11 aa, Severe acute respiratory syndrome coronavirus 2
  REGION 1..11: note = Table B: HLA-DRB1*04:03L
SFPQSAPHGVV

SEQ ID NO: 13823 - protein, 12 aa, Severe acute respiratory syndrome coronavirus 2
  REGION 1..12: note = Table B: HLA-DRB1*04:03L HLA-DRB1*01:02L HLA-DPA1*03:01-B1*04:02L HLA-DRB1*14:01L HLA-DRB1*12:01L HLA-DPA1*03:01-B1*105:01L HLA-DPA1*01:02-B1*04:01L HLA-DRB1*15:03L
GVVFLHVTYVPA

SEQ ID NO: 13824 - protein, 10 aa, Severe acute respiratory syndrome coronavirus 2
  REGION 1..10: note = Table B: HLA-DRB1*04:03L HLA-DQA1*03:01-B1*03:02L HLA-DRB1*14:17L HLA-DQA1*01:03-B1*06:01L HLA-DQA1*02:01-B1*03:03L
LHVTYVPAQE

SEQ ID NO: 13825 - protein, 10 aa, Severe acute respiratory syndrome coronavirus 2
  REGION 1..10: note = Table B: HLA-DRB1*04:03L HLA-DRB1*01:03L HLA-DRB1*04:05M HLA-DQA1*01:02-B1*06:02L HLA-DRB1*01:01L HLA-DRB1*01:02L HLA-DRB1*08:77L HLA-DPA1*03:01-B1*04:02L HLA-DRB1*11:03L HLA-DRB1*14:02L HLA-DQA1*01:01-B1*05:01L HLA-DRB1*11:01L
  REGION 1..10: note = CONT. FROM ABOVE: HLA-DQA1*05:05-B1*03:19L HLA-DQA1*05:01-B1*02: 01L HLA-DRB4*01:01L HLA-DPA1*01:03-B1*04:01L HLA-DQA1*05:05-B1*0 3:116L HLA-DPA1*01:03-B1*04:02L HLA-DRB1*12:01L HLA-DPA1*02:01-B 1*13:01M HLA-DPA1*03:01-B1*105:01L HLA-DRB1*16:01L
  REGION 1..10: note = CONT. FROM ABOVE: HLA-DQA1*01:03-B1*06:01M HLA-DQA1*02:01-B1*03: 03L HLA-DRB1*15:03L
TYVPAQEKNF

SEQ ID NO: 13826 - protein, 13 aa, Severe acute respiratory syndrome coronavirus 2
  REGION 1..13: note = Table B: HLA-DRB1*04:03L HLA-DRB1*13:02L HLA-DRB1*13:03L HLA-DRB1*01:02L HLA-DRB1*11:04L HLA-DRB1*08:01L HLA-DRB1*13:01L HLA-DRB1*12:01L HLA-DRB1*14:17L HLA-DRB1*04:08L HLA-DRB1*15:03L
PAICHDGKAHFPR

SEQ ID NO: 13827 - protein, 10 aa, Severe acute respiratory syndrome coronavirus 2
  REGION 1..10: note = Table B: HLA-DRB1*04:03L HLA-DRB1*01:03L HLA-DRB1*04:05M HLA-DQA1*01:02-B1*06:02L HLA-DRB1*01:01L HLA-DRB1*01:02L HLA-DRB1*08:77L HLA-DPA1*03:01-B1*04:02L HLA-DRB1*11:03L HLA-DRB1*14:02L HLA-DQA1*01:01-B1*05:01L HLA-DRB1*11:01L
  REGION 1..10: note = CONT. FROM ABOVE: HLA-DQA1*05:05-B1*03:19L HLA-DQA1*05:01-B1*02: 01L HLA-DRB4*01:01L HLA-DPA1*01:03-B1*04:01L HLA-DQA1*05:05-B1*0 3:116L HLA-DRB1*12:01L HLA-DPA1*02:01-B1*13:01M HLA-DPA1*03:01-B 1*105:01L HLA-DRB1*16:01L HLA-DQA1*01:03-B1*06:01M
  REGION 1..10: note = CONT. FROM ABOVE: HLA-DQA1*02:01-B1*03:03L HLA-DRB1*15:03L
VFVSNGTHWF

SEQ ID NO: 13828 - protein, 10 aa, Severe acute respiratory syndrome coronavirus 2
  REGION 1..10: note = Table B: HLA-DRB1*04:03L HLA-DQA1*03:01-B1*03:02L HLA-DRB1*14:17L HLA-DQA1*02:01-B1*03:03L
VTQRNFYEPQ

SEQ ID NO: 13829 - protein, 14 aa, Severe acute respiratory syndrome coronavirus 2
  REGION 1..14: note = Table B: HLA-DRB1*04:03L HLA-DRB1*04:05L HLA-DRB1*01:02L HLA-DPA1*01:03-B1*03:01L HLA-DPA1*03:01-B1*04:02L HLA-DRB1*12:01L HLA-DPA1*02:01-B1*13:01L HLA-DRB1*04:08L
TQRNFYEPQIITTD

SEQ ID NO: 13830 - protein, 10 aa, Severe acute respiratory syndrome coronavirus 2
  REGION 1..10: note = Table B: HLA-DRB1*04:03L HLA-DRB1*14:17L
IITTDNTFVS

SEQ ID NO: 13831 - protein, 11 aa, Severe acute respiratory syndrome coronavirus 2
  REGION 1..11: note = Table B: HLA-DRB1*04:03L
ITTDNTFVSGN

SEQ ID NO: 13832 - protein, 12 aa, Severe acute respiratory syndrome coronavirus 2
  REGION 1..12: note = Table B: HLA-DRB1*04:03L
DPLQPELDSFKE

SEQ ID NO: 13833 - protein, 12 aa, Severe acute respiratory syndrome coronavirus 2
  REGION 1..12: note = Table B: HLA-DRB1*04:03L HLA-DQA1*05:01-B1*02:01L HLA-DPA1*02:01-B1*13:01L HLA-DRB1*16:01L HLA-DQA1*01:03-B1*06:01L HLA-DQA1*02:01-B1*03:03L
QPELDSFKEELD

SEQ ID NO: 13834 - protein, 10 aa, Severe acute respiratory syndrome coronavirus 2
  REGION 1..10: note = Table B: HLA-DRB1*04:03L HLA-DRB1*04:02L HLA-DQA1*01-B1*05L HLA-DQA1*03:01-B1*03:02L
LDSFKEELDK

SEQ ID NO: 13835 - protein, 12 aa, Severe acute respiratory syndrome coronavirus 2
  REGION 1..12: note = Table B: HLA-DRB1*04:03L HLA-DRB1*13:03L HLA-DRB1*01:03L HLA-DRB1*04:02L HLA-DRB1*04:05L HLA-DQA1*01:02-B1*06:02L HLA-DRB1*01:02L HLA-DRB4*03:01NL HLA-DRB1*14:01L HLA-DRB1*08:01L HLA-DRB1*12:01L HLA-DRB1*14:54L HLA-DRB1*14:17L
  REGION 1..12: note = CONT. FROM ABOVE: HLA-DPA1*01:02-B1*04:01L HLA-DRB1*16:01L HLA-D RB1*04:08L HLA-DQA1*02:01-B1*03:03L
LDKYFKNHTSPD

SEQ ID NO: 13836 - protein, 12 aa, Severe acute respiratory syndrome coronavirus 2
  REGION 1..12: note = Table B: HLA-DRB1*04:03L HLA-DRB1*13:03L HLA-DRB1*01:03L HLA-DRB1*04:02L HLA-DRB1*04:05L HLA-DRB1*14:01L HLA-DRB1*08:01L HLA-DRB1*12:01L HLA-DRB1*14:54L HLA-DRB1*14:17L HLA-DRB1*16:01L HLA-DRB1*04:08L
DKYFKNHTSPDV

SEQ ID NO: 13837 - protein, 10 aa, Severe acute respiratory syndrome coronavirus 2
  REGION 1..10: note = Table B: HLA-DRB1*04:03L HLA-DQA1*03:01-B1*03:02L HLA-DRB1*16:01L HLA-DQA1*02:01-B1*03:03L
FKNHTSPDVD

SEQ ID NO: 13838 - protein, 12 aa, Severe acute respiratory syndrome coronavirus 2
  REGION 1..12: note = Table B: HLA-DRB1*04:03L HLA-DRB1*04:02L HLA-DQA1*05:01-B1*02:01L HLA-DRB1*12:01L HLA-DRB1*14:17L HLA-DRB1*16:01L
LGDISGINASVV

SEQ ID NO: 13839 - protein, 11 aa, Severe acute respiratory syndrome coronavirus 2
  REGION 1..11: note = Table B: HLA-DRB1*04:03L HLA-DRB1*04:02L HLA-DQA1*01:02-B1*06:02L HLA-DRB1*01:02L HLA-DRB4*03:01NL HLA-DQA1*05:01-B1*02:01L HLA-DRB1*12:01L HLA-DPA1*03:01-B1*105:01L HLA-DRB1*14:17L HLA-DRB1*16:01L
  REGION 1..11: note = CONT. FROM ABOVE: HLA-DQA1*01:03-B1*06:01L
DISGINASVVN

SEQ ID NO: 13840 - protein, 12 aa, Severe acute respiratory syndrome coronavirus 2
  REGION 1..12: note = Table B: HLA-DRB1*04:03L HLA-DRB1*04:02L HLA-DQA1*01:02-B1*06:02L HLA-DQA1*05:01-B1*02:01L HLA-DPA1*03:01-B1*105:01L HLA-DRB1*14:17L HLA-DQA1*01:03-B1*06:01L
ISGINASVVNIQ

SEQ ID NO: 13841 - protein, 13 aa, Severe acute respiratory syndrome coronavirus 2
  REGION 1..13: note = Table B: HLA-DRB1*04:03L HLA-DRB1*01:03L HLA-DRB1*04:02L HLA-DRB1*04:05L HLA-DRB1*01:02L HLA-DRB1*12:01L HLA-DRB1*16:01L HLA-DRB1*04:08L HLA-DQA1*02:01-B1*03:03L
IQKEIDRLNEVAK

SEQ ID NO: 13842 - protein, 10 aa, Severe acute respiratory syndrome coronavirus 2
  REGION 1..10: note = Table B: HLA-DRB1*04:03L HLA-DQA1*03:01-B1*03:02L HLA-DRB1*14:17L
LNEVAKNLNE

SEQ ID NO: 13843 - protein, 11 aa, Severe acute respiratory syndrome coronavirus 2
  REGION 1..11: note = Table B: HLA-DRB1*04:03L HLA-DRB1*12:02L
NEVAKNLNESL

SEQ ID NO: 13844 - protein, 12 aa, Severe acute respiratory syndrome coronavirus 2
  REGION 1..12: note = Table B: HLA-DRB1*04:03L HLA-DRB1*12:02L HLA-DRB1*14:54L
EVAKNLNESLID

SEQ ID NO: 13845 - protein, 13 aa, Severe acute respiratory syndrome coronavirus 2
  REGION 1..13: note = Table B: HLA-DRB1*04:03L HLA-DRB1*13:02L HLA-DRB1*04:05L HLA-DQA1*01:02-B1*06:02L HLA-DRB1*01:02L HLA-DRB3*02:01L HLA-DPA1*01:03-B1*03:01L HLA-DPA1*03:01-B1*04:02L HLA-DRB1*12:01L HLA-DPA1*03:01-B1*105:01L
  REGION 1..13: note = CONT. FROM ABOVE: HLA-DPA1*01:03-B1*104:01L HLA-DQA1*05:05-B1*03 :01L HLA-DPA1*01:02-B1*04:01L HLA-DRB1*16:01L HLA-DQA1*01:03-B1* 06:01L HLA-DQA1*02:01-B1*03:03L HLA-DRB1*15:03L
VAKNLNESLIDLQ

SEQ ID NO: 13846 - protein, 12 aa, Severe acute respiratory syndrome coronavirus 2
  REGION 1..12: note = Table B: HLA-DRB1*04:03L HLA-DRB1*04:02L HLA-DRB1*04:05L HLA-DQA1*01:02-B1*06:02L HLA-DQA1*05:01-B1*02:01L HLA-DRB1*04:10L HLA-DPA1*02:01-B1*13:01L HLA-DPA1*03:01-B1*105:01L HLA-DQA1*03:01-B1*03:02L
  REGION 1..12: note = CONT. FROM ABOVE: HLA-DRB1*16:01L HLA-DQA1*01:03-B1*06:01L HLA-D QA1*02:01-B1*03:03L
KNLNESLIDLQE

SEQ ID NO: 13847 - protein, 12 aa, Severe acute respiratory syndrome coronavirus 2
  REGION 1..12: note = Table B: HLA-DRB1*04:03L
NESLIDLQELGK

SEQ ID NO: 13848 - protein, 11 aa, Severe acute respiratory syndrome coronavirus 2
  REGION 1..11: note = Table B: HLA-DRB1*04:03L HLA-DRB1*13:03L HLA-DRB1*04:02L HLA-DRB1*14:01L HLA-DRB1*08:01L HLA-DRB1*14:54L HLA-DRB1*14:17L HLA-DQA1*02:01-B1*03:03L
IDLQELGKYEQ

SEQ ID NO: 13849 - protein, 10 aa, Severe acute respiratory syndrome coronavirus 2
  REGION 1..10: note = Table B: HLA-DRB1*04:03L HLA-DRB1*01:03L HLA-DRB1*04:05M HLA-DQA1*01:02-B1*06:02L HLA-DRB1*01:01L HLA-DRB1*01:02L HLA-DRB1*08:77L HLA-DQA1*01:01-B1*05:01L HLA-DRB1*11:01L HLA-DQA1*05:05-B1*03:19L HLA-DRB4*01:01L
  REGION 1..10: note = CONT. FROM ABOVE: HLA-DPA1*02:01-B1*13:01H HLA-DRB1*16:01L HLA-D QA1*01:03-B1*06:01M HLA-DQA1*02:01-B1*03:03L HLA-DRB1*15:03L
QYIKWPWYIW

SEQ ID NO: 13850 - protein, 11 aa, Severe acute respiratory syndrome coronavirus 2
  REGION 1..11: note = Table B: HLA-DRB1*04:03L HLA-DRB1*13:03L HLA-DRB1*14:02L HLA-DRB1*16:01L HLA-DQA1*02:01-B1*03:03L
KFDEDDSEPVL

SEQ ID NO: 13851 - protein, 11 aa, Severe acute respiratory syndrome coronavirus 2
  REGION 1..11: note = Table B: HLA-DRB1*04:03L HLA-DRB1*01:03L HLA-DRB1*04:02L HLA-DRB1*04:05L HLA-DRB4*03:01NL HLA-DRB1*14:02L HLA-DRB1*12:01L HLA-DRB1*14:54L HLA-DRB1*14:17L HLA-DRB1*16:01L HLA-DRB1*04:08L HLA-DQA1*02:01-B1*03:03L
FDEDDSEPVLK

SEQ ID NO: 13852 - protein, 14 aa, Severe acute respiratory syndrome coronavirus 2
  REGION 1..14: note = Table B: HLA-DRB1*04:03L HLA-DRB1*13:02L HLA-DRB1*11:04L HLA-DRB1*11:01L HLA-DRB3*01:01L HLA-DPA1*02:01-B1*13:01L HLA-DPA1*03:01-B1*105:01L HLA-DQA1*05:05-B1*03:01L
DSEPVLKGVKLHYT

SEQ ID NO: 13853 - protein, 11 aa, Severe acute respiratory syndrome coronavirus 2
  REGION 1..11: note = Table B: HLA-DRB1*04:03L
FMRIFTIGTVT

SEQ ID NO: 13854 - protein, 10 aa, Severe acute respiratory syndrome coronavirus 2
  REGION 1..10: note = Table B: HLA-DRB1*04:03L HLA-DRB1*13:02L HLA-DRB1*04:02L HLA-DRB4*03:01NL HLA-DRB1*12:01L HLA-DPA1*03:01-B1*105:01L HLA-DQA1*03:01-B1*03:02L HLA-DQA1*05:05-B1*03:01L HLA-DRB1*14:17L HLA-DRB1*16:01L HLA-DQA1*01:03-B1*06:01L
  REGION 1..10: note = CONT. FROM ABOVE: HLA-DQA1*02:01-B1*03:03L
IFTIGTVTLK

SEQ ID NO: 13855 - protein, 10 aa, Severe acute respiratory syndrome coronavirus 2
  REGION 1..10: note = Table B: HLA-DRB1*04:03L HLA-DRB1*04:02L HLA-DQA1*03:01-B1*03:02L HLA-DRB1*14:17L HLA-DQA1*01:03-B1*06:01L HLA-DQA1*02:01-B1*03:03L
TIGTVTLKQG

SEQ ID NO: 13856 - protein, 10 aa, Severe acute respiratory syndrome coronavirus 2
  REGION 1..10: note = Table B: HLA-DRB1*04:03L HLA-DQA1*01:02-B1*06:02L HLA-DQA1*03:01-B1*03:02L HLA-DQA1*01:03-B1*06:01L HLA-DQA1*02:01-B1*03:03L
IGTVTLKQGE

SEQ ID NO: 13857 - protein, 13 aa, Severe acute respiratory syndrome coronavirus 2
  REGION 1..13: note = Table B: HLA-DRB1*04:03L
TLKQGEIKDATPS

SEQ ID NO: 13858 - protein, 11 aa, Severe acute respiratory syndrome coronavirus 2
  REGION 1..11: note = Table B: HLA-DRB1*04:03L HLA-DQA1*02:01-B1*03:03L
QGEIKDATPSD

SEQ ID NO: 13859 - protein, 11 aa, Severe acute respiratory syndrome coronavirus 2
  REGION 1..11: note = Table B: HLA-DRB1*04:03L HLA-DRB1*04:02L HLA-DRB1*04:05L HLA-DRB3*02:01L HLA-DRB1*11:02L HLA-DRB4*01:01L HLA-DRB1*09:01L HLA-DPA1*01:03-B1*104:01L HLA-DRB1*10:01L HLA-DRB1*08:02L
GEIKDATPSDF

SEQ ID NO: 13860 - protein, 11 aa, Severe acute respiratory syndrome coronavirus 2
  REGION 1..11: note = Table B: HLA-DRB1*04:03L HLA-DQA1*01-B1*05L
DATPSDFVRAT

SEQ ID NO: 13861 - protein, 11 aa, Severe acute respiratory syndrome coronavirus 2
  REGION 1..11: note = Table B: HLA-DRB1*04:03L HLA-DRB1*14:17L HLA-DQA1*02:01-B1*03:03L
TIPIQASLPFG

SEQ ID NO: 13862 - protein, 11 aa, Severe acute respiratory syndrome coronavirus 2
  REGION 1..11: note = Table B: HLA-DRB1*04:03L HLA-DRB1*14:17L
VALLAVFQSAS

SEQ ID NO: 13863 - protein, 10 aa, Severe acute respiratory syndrome coronavirus 2
  REGION 1..10: note = Table B: HLA-DRB1*04:03L HLA-DRB1*14:17L
LLAVFQSASK

SEQ ID NO: 13864 - protein, 12 aa, Severe acute respiratory syndrome coronavirus 2
  REGION 1..12: note = Table B: HLA-DRB1*04:03L HLA-DRB1*01:03L HLA-DRB1*01:02L HLA-DPA1*01:03-B1*03:01L HLA-DRB1*12:01L HLA-DPA1*01:03-B1*02:01L HLA-DQA1*02:01-B1*03:03L
TVYSHLLLVAAG

SEQ ID NO: 13865 - protein, 13 aa, Severe acute respiratory syndrome coronavirus 2
  REGION 1..13: note = Table B: HLA-DRB1*04:03L HLA-DQA1*01:02-B1*06:02L
SHLLLVAAGLEAP

SEQ ID NO: 13866 - protein, 13 aa, Severe acute respiratory syndrome coronavirus 2
  REGION 1..13: note = Table B: HLA-DRB1*04:03L HLA-DQA1*01:02-B1*06:02L HLA-DPA1*03:01-B1*105:01L HLA-DRB1*15:03L
HLLLVAAGLEAPF

SEQ ID NO: 13867 - protein, 14 aa, Severe acute respiratory syndrome coronavirus 2
  REGION 1..14: note = Table B: HLA-DRB1*04:03L HLA-DRB1*01:03L HLA-DRB1*04:02L HLA-DRB1*04:05L HLA-DRB1*01:02L HLA-DPA1*01:03-B1*03:01L HLA-DRB1*08:01L HLA-DRB1*11:01L HLA-DRB4*02:01NL HLA-DPA1*01:03-B1*04:02L HLA-DRB1*12:01L HLA-DRB1*16:01L
NSVTSSIVITSGDG

SEQ ID NO: 13868 - protein, 12 aa, Severe acute respiratory syndrome coronavirus 2
  REGION 1..12: note = Table B: HLA-DRB1*04:03L HLA-DRB1*04:02L HLA-DQA1*05:01-B1*02:01L HLA-DQA1*03:01-B1*03:02L HLA-DRB1*14:17L HLA-DQA1*02:01-B1*03:03L
SSIVITSGDGTT

SEQ ID NO: 13869 - protein, 11 aa, Severe acute respiratory syndrome coronavirus 2
  REGION 1..11: note = Table B: HLA-DRB1*04:03L
HDYQIGGYTEK

SEQ ID NO: 13870 - protein, 11 aa, Severe acute respiratory syndrome coronavirus 2
  REGION 1..11: note = Table B: HLA-DRB1*04:03L HLA-DPA1*03:01-B1*04:02L HLA-DPA1*01:03-B1*04:01L HLA-DRB1*12:01L HLA-DPA1*03:01-B1*105:01L HLA-DRB1*16:01L HLA-DQA1*01:03-B1*06:01L HLA-DRB1*15:03L
VVLHSYFTSDY

SEQ ID NO: 13871 - protein, 12 aa, Severe acute respiratory syndrome coronavirus 2
  REGION 1..12: note = Table B: HLA-DRB1*04:03L HLA-DRB1*13:02L HLA-DRB1*01:02L HLA-DRB1*08:04L HLA-DRB3*02:01L HLA-DRB1*14:01L HLA-DRB1*08:01L HLA-DRB1*04:08L
HSYFTSDYYQLY

SEQ ID NO: 13872 - protein, 14 aa, Severe acute respiratory syndrome coronavirus 2
  REGION 1..14: note = Table B: HLA-DRB1*04:03L HLA-DRB1*13:02L HLA-DRB1*01:02L HLA-DRB1*08:04L HLA-DRB1*14:01L HLA-DRB1*08:01L HLA-DRB1*11:01L HLA-DRB3*01:01L
SYFTSDYYQLYSTQ

SEQ ID NO: 13873 - protein, 12 aa, Severe acute respiratory syndrome coronavirus 2
  REGION 1..12: note = Table B: HLA-DRB1*04:03L HLA-DRB1*08:77L HLA-DRB3*02:01L HLA-DPA1*01:03-B1*03:01L HLA-DRB1*14:01L HLA-DPA1*01:03-B1*04:01L HLA-DRB1*09:01L HLA-DPA1*01:03-B1*04:02L HLA-DQA1*05:05-B1*03:01L
TSDYYQLYSTQL

SEQ ID NO: 13874 - protein, 12 aa, Severe acute respiratory syndrome coronavirus 2
  REGION 1..12: note = Table B: HLA-DRB1*04:03L
SDYYQLYSTQLS

SEQ ID NO: 13875 - protein, 12 aa, Severe acute respiratory syndrome coronavirus 2
  REGION 1..12: note = Table B: HLA-DRB1*04:03L HLA-DRB1*01:03L HLA-DRB1*01:01L HLA-DRB1*14:17L HLA-DRB1*04:08L
DYYQLYSTQLST

SEQ ID NO: 13876 - protein, 11 aa, Severe acute respiratory syndrome coronavirus 2
  REGION 1..11: note = Table B: HLA-DRB1*04:03L HLA-DRB1*04:02L HLA-DQA1*01-B1*05L HLA-DRB1*14:17L HLA-DRB1*16:01L
YQLYSTQLSTD

SEQ ID NO: 13877 - protein, 10 aa, Severe acute respiratory syndrome coronavirus 2
  REGION 1..10: note = Table B: HLA-DRB1*04:03L HLA-DRB1*13:03L HLA-DRB1*04:02L HLA-DRB4*03:01NL HLA-DQA1*05:01-B1*02:01L HLA-DRB1*12:01L HLA-DQA1*03:01-B1*03:02L HLA-DRB1*14:17L HLA-DRB1*16:01L HLA-DQA1*02:01-B1*03:03L
QLSTDTGVEH

SEQ ID NO: 13878 - protein, 10 aa, Severe acute respiratory syndrome coronavirus 2
  REGION 1..10: note = Table B: HLA-DRB1*04:03L HLA-DRB1*14:17L
QIHTIDGSSG

SEQ ID NO: 13879 - protein, 11 aa, Severe acute respiratory syndrome coronavirus 2
  REGION 1..11: note = Table B: HLA-DRB1*04:03L HLA-DRB1*14:17L
IHTIDGSSGVV

SEQ ID NO: 13880 - protein, 12 aa, Severe acute respiratory syndrome coronavirus 2
  REGION 1..12: note = Table B: HLA-DRB1*04:03L
HTIDGSSGVVNP

SEQ ID NO: 13881 - protein, 12 aa, Severe acute respiratory syndrome coronavirus 2
  REGION 1..12: note = Table B: HLA-DRB1*04:03L HLA-DRB1*01:03L HLA-DRB1*04:02L HLA-DRB1*04:05L HLA-DRB1*01:02L HLA-DPA1*01:03-B1*03:01L HLA-DQA1*01:01-B1*05:01L HLA-DRB1*08:01L HLA-DQA1*01-B1*05L HLA-DPA1*01:03-B1*04:02L HLA-DRB1*12:01L
IDGSSGVVNPVM

SEQ ID NO: 13882 - protein, 12 aa, Severe acute respiratory syndrome coronavirus 2
  REGION 1..12: note = Table B: HLA-DRB1*04:03L HLA-DRB1*14:01L HLA-DQA1*03:01-B1*03:02L
SGVVNPVMEPIY

SEQ ID NO: 13883 - protein, 12 aa, Severe acute respiratory syndrome coronavirus 2
  REGION 1..12: note = Table B: HLA-DRB1*04:03L
GVVNPVMEPIYD

SEQ ID NO: 13884 - protein, 11 aa, Severe acute respiratory syndrome coronavirus 2
  REGION 1..11: note = Table B: HLA-DRB1*04:03L HLA-DQA1*01-B1*05L
PVMEPIYDEPT

SEQ ID NO: 13885 - protein, 13 aa, Severe acute respiratory syndrome coronavirus 2
  REGION 1..13: note = Table B: HLA-DRB1*04:03L
PIYDEPTTTTSVP

SEQ ID NO: 13886 - protein, 12 aa, Severe acute respiratory syndrome coronavirus 2
  REGION 1..12: note = Table B: HLA-DRB1*04:03L
EETGTLIVNSVL

SEQ ID NO: 13887 - protein, 11 aa, Severe acute respiratory syndrome coronavirus 2
  REGION 1..11: note = Table B: HLA-DRB1*04:03L
LVTLAILTALR

SEQ ID NO: 13888 - protein, 11 aa, Severe acute respiratory syndrome coronavirus 2
  REGION 1..11: note = Table B: HLA-DRB1*04:03L HLA-DRB1*08:77L HLA-DQA1*05:05-B1*03:19L HLA-DRB1*12:02L
VTLAILTALRL

SEQ ID NO: 13889 - protein, 10 aa, Severe acute respiratory syndrome coronavirus 2
  REGION 1..10: note = Table B: HLA-DRB1*04:03L HLA-DQA1*03:01-B1*03:02L HLA-DRB1*14:17L HLA-DQA1*01:03-B1*06:01L HLA-DQA1*02:01-B1*03:03L
NIVNVSLVKP

SEQ ID NO: 13890 - protein, 13 aa, Severe acute respiratory syndrome coronavirus 2
  REGION 1..13: note = Table B: HLA-DRB1*04:03L HLA-DRB1*04:04L HLA-DPA1*03:01-B1*105:01L HLA-DPA1*01:03-B1*02:01L HLA-DQA1*01:03-B1*06:01L
VKPSFYVYSRVKN

SEQ ID NO: 13891 - protein, 11 aa, Severe acute respiratory syndrome coronavirus 2
  REGION 1..11: note = Table B: HLA-DRB1*04:03L HLA-DRB1*01:03L HLA-DRB1*04:02L HLA-DRB1*14:17L HLA-DRB1*16:01L HLA-DRB1*04:08L
VYSRVKNLNSS

SEQ ID NO: 13892 - protein, 12 aa, Severe acute respiratory syndrome coronavirus 2
  REGION 1..12: note = Table B: HLA-DRB1*04:03L HLA-DRB1*01:03L HLA-DRB1*04:05L HLA-DRB1*01:02L HLA-DRB1*14:01L HLA-DRB1*12:01L HLA-DRB1*16:01L HLA-DRB1*04:08L HLA-DRB1*15:03L
SRVKNLNSSRVP

SEQ ID NO: 13893 - protein, 11 aa, Severe acute respiratory syndrome coronavirus 2
  REGION 1..11: note = Table B: HLA-DRB1*04:03L HLA-DRB1*01:03L HLA-DQA1*01-B1*05L HLA-DRB1*12:01L
SNGTITVEELK

SEQ ID NO: 13894 - protein, 13 aa, Severe acute respiratory syndrome coronavirus 2
  REGION 1..13: note = Table B: HLA-DRB1*04:03L HLA-DRB1*04:05L HLA-DQA1*01:02-B1*06:02L HLA-DPA1*01:03-B1*03:01L HLA-DPA1*03:01-B1*04:02L HLA-DQA1*05:01-B1*02:01L HLA-DPA1*01:02-B1*04:01L HLA-DRB1*16:01L
LKKLLEQWNLVIG

SEQ ID NO: 13895 - protein, 12 aa, Severe acute respiratory syndrome coronavirus 2
  REGION 1..12: note = Table B: HLA-DRB1*04:03L HLA-DRB1*04:02L HLA-DRB1*14:01L HLA-DRB1*14:17L
AAVYRINWITGG

SEQ ID NO: 13896 - protein, 10 aa, Severe acute respiratory syndrome coronavirus 2
  REGION 1..10: note = Table B: HLA-DRB1*04:03L HLA-DQA1*03:01-B1*03:02L
RINWITGGIA

SEQ ID NO: 13897 - protein, 13 aa, Severe acute respiratory syndrome coronavirus 2
  REGION 1..13: note = Table B: HLA-DRB1*04:03L HLA-DPA1*01:03-B1*03:01L HLA-DPA1*03:01-B1*04:02L HLA-DPA1*01:03-B1*04:02L HLA-DQA1*03:01-B1*03:02L HLA-DRB1*16:01L HLA-DRB1*04:08L
INWITGGIAIAMA

SEQ ID NO: 13898 - protein, 13 aa, Severe acute respiratory syndrome coronavirus 2
  REGION 1..13: note = Table B: HLA-DRB1*04:03L HLA-DPA1*03:01-B1*04:02L HLA-DQA1*05:05-B1*03:19L HLA-DRB1*12:01L HLA-DQA1*05:05-B1*03:01L HLA-DRB1*15:03L
TGGIAIAMACLVG

SEQ ID NO: 13899 - protein, 10 aa, Severe acute respiratory syndrome coronavirus 2
  REGION 1..10: note = Table B: HLA-DRB1*04:03L HLA-DRB1*01:03L HLA-DRB1*04:05L HLA-DQA1*01:02-B1*06:02L HLA-DRB1*01:01L HLA-DRB1*01:02L HLA-DPA1*03:01-B1*04:02L HLA-DRB1*14:02L HLA-DQA1*01:01-B1*05:01L HLA-DQA1*05:05-B1*03:19L
  REGION 1..10: note = CONT. FROM ABOVE: HLA-DRB4*01:01L HLA-DPA1*01:03-B1*04:01L HLA-D RB1*12:01L HLA-DPA1*02:01-B1*13:01M HLA-DPA1*03:01-B1*105:01L HL A-DPA1*01:02-B1*04:01L HLA-DRB1*16:01L HLA-DQA1*01:03-B1*06:01M HLA-DQA1*02:01-B1*03:03L HLA-DRB1*15:03L
SYFIASFRLF

SEQ ID NO: 13900 - protein, 10 aa, Severe acute respiratory syndrome coronavirus 2
  REGION 1..10: note = Table B: HLA-DRB1*04:03L HLA-DRB1*04:02L HLA-DRB1*12:01L HLA-DRB1*14:17L HLA-DRB1*16:01L
NILLNVPLHG

SEQ ID NO: 13901 - protein, 10 aa, Severe acute respiratory syndrome coronavirus 2
  REGION 1..10: note = Table B: HLA-DRB1*04:03L HLA-DRB1*04:02L HLA-DQA1*03:01-B1*03:02L HLA-DRB1*14:17L HLA-DPA1*01:02-B1*04:01L HLA-DRB1*16:01L HLA-DQA1*02:01-B1*03:03L
ILTRPLLESE

SEQ ID NO: 13902 - protein, 13 aa, Severe acute respiratory syndrome coronavirus 2
  REGION 1..13: note = Table B: HLA-DRB1*04:03L HLA-DQA1*01:02-B1*06:02L HLA-DPA1*01:03-B1*03:01L HLA-DPA1*03:01-B1*04:02L HLA-DQA1*05:01-B1*02:01L HLA-DPA1*03:01-B1*105:01L HLA-DQA1*01:03-B1*06:01L HLA-DRB1*15:03L
RPLLESELVIGAV

SEQ ID NO: 13903 - protein, 12 aa, Severe acute respiratory syndrome coronavirus 2
  REGION 1..12: note = Table B: HLA-DRB1*04:03L HLA-DQA1*01:02-B1*06:02L
SELVIGAVILRG

SEQ ID NO: 13904 - protein, 12 aa, Severe acute respiratory syndrome coronavirus 2
  REGION 1..12: note = Table B: HLA-DRB1*04:03L
ELVIGAVILRGH

SEQ ID NO: 13905 - protein, 12 aa, Severe acute respiratory syndrome coronavirus 2
  REGION 1..12: note = Table B: HLA-DRB1*04:03L HLA-DRB1*14:17L HLA-DQA1*02:01-B1*03:03L
DLPKEITVATSR

SEQ ID NO: 13906 - protein, 10 aa, Severe acute respiratory syndrome coronavirus 2
  REGION 1..10: note = Table B: HLA-DRB1*04:03L HLA-DRB1*04:02L HLA-DQA1*03:01-B1*03:02L HLA-DRB1*14:17L HLA-DQA1*01:03-B1*06:01L HLA-DQA1*02:01-B1*03:03L
ITVATSRTLS

SEQ ID NO: 13907 - protein, 13 aa, Severe acute respiratory syndrome coronavirus 2
  REGION 1..13: note = Table B: HLA-DRB1*04:03L HLA-DRB1*04:02L HLA-DRB1*04:05L HLA-DRB1*01:02L HLA-DRB1*08:01L HLA-DQA1*03:01-B1*03:02L HLA-DRB1*14:17L HLA-DRB1*16:01L HLA-DRB1*04:08L HLA-DQA1*02:01-B1*03:03L
SRTLSYYKLGASQ

SEQ ID NO: 13908 - protein, 12 aa, Severe acute respiratory syndrome coronavirus 2
  REGION 1..12: note = Table B: HLA-DRB1*04:03L HLA-DRB1*01:03L HLA-DRB1*04:02L HLA-DRB1*04:05L HLA-DQA1*01:02-B1*06:02L HLA-DRB1*01:02L HLA-DPA1*01:02-B1*04:01L HLA-DRB1*16:01L HLA-DRB1*04:08L
TLSYYKLGASQR

SEQ ID NO: 13909 - protein, 10 aa, Severe acute respiratory syndrome coronavirus 2
  REGION 1..10: note = Table B: HLA-DRB1*04:03L HLA-DRB1*13:03L HLA-DRB1*01:03L HLA-DRB1*04:02L HLA-DRB1*01:02L HLA-DRB4*03:01NL HLA-DRB1*08:77L HLA-DRB1*11:03L HLA-DRB1*14:02L HLA-DRB1*12:01L HLA-DQA1*03:01-B1*03:02L HLA-DRB1*14:17L
  REGION 1..10: note = CONT. FROM ABOVE: HLA-DPA1*01:02-B1*04:01L HLA-DRB1*16:01L HLA-D RB1*04:08L HLA-DQA1*02:01-B1*03:03L
LGASQRVAGD

SEQ ID NO: 13910 - protein, 14 aa, Severe acute respiratory syndrome coronavirus 2
  REGION 1..14: note = Table B: HLA-DRB1*04:03L HLA-DRB1*04:04L HLA-DRB1*01:01L HLA-DRB1*11:02L HLA-DQA1*05:05-B1*03:116L HLA-DRB1*07:01L
DSGFAAYSRYRIGN

SEQ ID NO: 13911 - protein, 11 aa, Severe acute respiratory syndrome coronavirus 2
  REGION 1..11: note = Table B: HLA-DRB1*04:03L HLA-DRB1*04:02L HLA-DQA1*01-B1*05L HLA-DRB1*14:17L HLA-DQA1*02:01-B1*03:03L
IGNYKLNTDHS

SEQ ID NO: 13912 - protein, 11 aa, Severe acute respiratory syndrome coronavirus 2
  REGION 1..11: note = Table B: HLA-DRB1*04:03L HLA-DRB1*13:03L HLA-DRB1*01:03L HLA-DRB1*04:02L HLA-DRB1*04:05L HLA-DRB4*03:01NL HLA-DRB1*14:54L HLA-DRB1*14:17L HLA-DRB1*16:01L
GNYKLNTDHSS

SEQ ID NO: 13913 - protein, 10 aa, Severe acute respiratory syndrome coronavirus 2
  REGION 1..10: note = Table B: HLA-DRB1*04:03L HLA-DRB1*01:03L HLA-DRB1*04:02L HLA-DRB4*03:01NL HLA-DRB1*14:54L HLA-DRB1*14:17L HLA-DRB1*16:01L
YKLNTDHSSS

SEQ ID NO: 13914 - protein, 10 aa, Severe acute respiratory syndrome coronavirus 2
  REGION 1..10: note = Table B: HLA-DRB1*04:03L HLA-DQA1*03:01-B1*03:02L
NTDHSSSSDN

SEQ ID NO: 13915 - protein, 14 aa, Severe acute respiratory syndrome coronavirus 2
  REGION 1..14: note = Table B: HLA-DRB1*04:03L HLA-DQA1*01:02-B1*06:02L HLA-DPA1*01:03-B1*03:01L HLA-DQA1*01:01-B1*05:01L HLA-DQA1*05:05-B1*03:19L HLA-DPA1*02:01-B1*13:01L HLA-DQA1*05:05-B1*03:01L
DHSSSSDNIALLVQ

SEQ ID NO: 13916 - protein, 13 aa, Severe acute respiratory syndrome coronavirus 2
  REGION 1..13: note = Table B: HLA-DRB1*04:03L HLA-DRB1*13:02L HLA-DRB1*01:02L HLA-DRB1*14:01L HLA-DRB1*16:01L HLA-DQA1*01:03-B1*06:01L
IAEILLIIMRTFK

SEQ ID NO: 13917 - protein, 10 aa, Severe acute respiratory syndrome coronavirus 2
  REGION 1..10: note = Table B: HLA-DRB1*04:03L HLA-DRB1*01:02L HLA-DRB1*14:01L HLA-DRB1*12:01L HLA-DPA1*01:02-B1*04:01L HLA-DRB1*16:01L HLA-DRB1*15:03L
LIIMRTFKVS

SEQ ID NO: 13918 - protein, 12 aa, Severe acute respiratory syndrome coronavirus 2
  REGION 1..12: note = Table B: HLA-DRB1*04:03L HLA-DRB1*13:02L HLA-DRB1*01:03L HLA-DRB1*04:05L HLA-DQA1*01:02-B1*06:02L HLA-DRB1*01:02L HLA-DRB1*08:04L HLA-DPA1*01:03-B1*03:01L HLA-DPA1*03:01-B1*04:02L HLA-DRB1*14:01L HLA-DRB1*12:01L
  REGION 1..12: note = CONT. FROM ABOVE: HLA-DPA1*02:01-B1*13:01L HLA-DPA1*03:01-B1*105 :01L HLA-DPA1*01:03-B1*104:01L HLA-DPA1*01:02-B1*04:01L HLA-DRB1 *16:01L HLA-DRB1*04:08L HLA-DRB1*15:03L
IIMRTFKVSIWN

SEQ ID NO: 13919 - protein, 11 aa, Severe acute respiratory syndrome coronavirus 2
  REGION 1..11: note = Table B: HLA-DRB1*04:03L
YIINLIIKNLS

SEQ ID NO: 13920 - protein, 10 aa, Severe acute respiratory syndrome coronavirus 2
  REGION 1..10: note = Table B: HLA-DRB1*04:03L HLA-DRB1*04:02L HLA-DRB1*14:17L
INLIIKNLSK

SEQ ID NO: 13921 - protein, 11 aa, Severe acute respiratory syndrome coronavirus 2
  REGION 1..11: note = Table B: HLA-DRB1*04:03L HLA-DRB1*04:02L HLA-DRB1*12:01L HLA-DRB1*14:17L HLA-DPA1*01:02-B1*04:01L HLA-DRB1*16:01L
LIIKNLSKSLT

SEQ ID NO: 13922 - protein, 11 aa, Severe acute respiratory syndrome coronavirus 2
  REGION 1..11: note = Table B: HLA-DRB1*04:03L HLA-DRB1*13:02L HLA-DRB1*13:03L HLA-DRB1*01:03L HLA-DRB1*04:02L HLA-DRB1*01:02L HLA-DRB4*03:01NL HLA-DRB1*08:04L HLA-DRB1*12:01L HLA-DRB1*14:54L HLA-DRB1*14:17L HLA-DRB1*16:01L HLA-DRB1*04:08L HLA-DRB1*15:03L
IIKNLSKSLTE

SEQ ID NO: 13923 - protein, 14 aa, Severe acute respiratory syndrome coronavirus 2
  REGION 1..14: note = Table B: HLA-DRB1*04:03L HLA-DRB1*04:05L HLA-DRB1*04:08L
IKNLSKSLTENKYS

SEQ ID NO: 13924 - protein, 14 aa, Severe acute respiratory syndrome coronavirus 2
  REGION 1..14: note = Table B: HLA-DRB1*04:03L HLA-DRB1*13:02L HLA-DRB1*04:05L HLA-DRB1*01:02L HLA-DPA1*02:01-B1*13:01L HLA-DRB1*04:08L
LSKSLTENKYSQLD

SEQ ID NO: 13925 - protein, 14 aa, Severe acute respiratory syndrome coronavirus 2
  REGION 1..14: note = Table B: HLA-DRB1*04:03L HLA-DRB1*01:03L HLA-DRB1*04:02L HLA-DRB1*04:05L HLA-DRB1*01:02L HLA-DRB1*08:04L HLA-DRB1*08:01L HLA-DRB1*04:08L
SKSLTENKYSQLDE

SEQ ID NO: 13926 - protein, 11 aa, Severe acute respiratory syndrome coronavirus 2
  REGION 1..11: note = Table B: HLA-DRB1*04:03L HLA-DRB1*16:01L HLA-DQA1*02:01-B1*03:03L
YSQLDEEQPME

SEQ ID NO: 13927 - protein, 12 aa, Severe acute respiratory syndrome coronavirus 2
  REGION 1..12: note = Table B: HLA-DRB1*04:03L HLA-DQA1*01:02-B1*06:02L HLA-DQA1*01:01-B1*05:01L HLA-DRB1*12:01L HLA-DPA1*02:01-B1*13:01L HLA-DPA1*03:01-B1*105:01L HLA-DRB1*16:01L HLA-DQA1*01:03-B1*06:01L
SQLDEEQPMEID

SEQ ID NO: 13928 - protein, 13 aa, Severe acute respiratory syndrome coronavirus 2
  REGION 1..13: note = Table B: HLA-DRB1*04:03L
LALITLATCELYH

SEQ ID NO: 13929 - protein, 14 aa, Severe acute respiratory syndrome coronavirus 2
  REGION 1..14: note = Table B: HLA-DRB1*04:03L HLA-DRB1*01:02L
TVLLKEPCSSGTYE

SEQ ID NO: 13930 - protein, 13 aa, Severe acute respiratory syndrome coronavirus 2
  REGION 1..13: note = Table B: HLA-DRB1*04:03L HLA-DRB1*04:02L HLA-DQA1*01:01-B1*05:01L HLA-DPA1*03:01-B1*105:01L
YEGNSPFHPLADN

SEQ ID NO: 13931 - protein, 10 aa, Severe acute respiratory syndrome coronavirus 2
  REGION 1..10: note = Table B: HLA-DRB1*04:03L HLA-DRB1*13:03L HLA-DRB1*01:03L HLA-DRB1*04:02L HLA-DRB4*03:01NL HLA-DQA1*01-B1*05L HLA-DQA1*03:01-B1*03:02L HLA-DRB1*14:17L HLA-DRB1*16:01L HLA-DQA1*02:01-B1*03:03L
SPFHPLADNK

SEQ ID NO: 13932 - protein, 10 aa, Severe acute respiratory syndrome coronavirus 2
  REGION 1..10: note = Table B: HLA-DRB1*04:03L HLA-DRB1*01:02L HLA-DRB1*12:01L HLA-DRB1*16:01L HLA-DRB1*15:03L
FHPLADNKFA

SEQ ID NO: 13933 - protein, 11 aa, Severe acute respiratory syndrome coronavirus 2
  REGION 1..11: note = Table B: HLA-DRB1*04:03L
HPLADNKFALT

SEQ ID NO: 13934 - protein, 13 aa, Severe acute respiratory syndrome coronavirus 2
  REGION 1..13: note = Table B: HLA-DRB1*04:03L HLA-DRB1*01:03L HLA-DRB1*04:05L HLA-DRB1*01:02L HLA-DRB1*08:04L HLA-DQA1*01-B1*05L HLA-DQA1*05:01-B1*02:01L HLA-DPA1*01:03-B1*04:01L HLA-DPA1*01:03-B1*02:01L HLA-DPA1*01:03-B1*104:01L
  REGION 1..13: note = CONT. FROM ABOVE: HLA-DRB1*15:03L
ADNKFALTCFSTQ

SEQ ID NO: 13935 - protein, 14 aa, Severe acute respiratory syndrome coronavirus 2
  REGION 1..14: note = Table B: HLA-DRB1*04:03L HLA-DRB1*13:02L HLA-DRB1*01:03L HLA-DRB1*04:05L HLA-DRB1*01:02L HLA-DRB1*08:04L HLA-DRB1*14:02L HLA-DRB1*11:01L HLA-DQA1*05:01-B1*02:01L HLA-DPA1*01:03-B1*04:01L HLA-DPA1*01:03-B1*02:01L
  REGION 1..14: note = CONT. FROM ABOVE: HLA-DPA1*01:03-B1*104:01L
DNKFALTCFSTQFA

SEQ ID NO: 13936 - protein, 14 aa, Severe acute respiratory syndrome coronavirus 2
  REGION 1..14: note = Table B: HLA-DRB1*04:03L HLA-DQA1*01:02-B1*06:02L HLA-DRB1*01:02L HLA-DRB1*15:03L
KFALTCFSTQFAFA

SEQ ID NO: 13937 - protein, 12 aa, Severe acute respiratory syndrome coronavirus 2
  REGION 1..12: note = Table B: HLA-DRB1*04:03L HLA-DQA1*01:02-B1*06:02L HLA-DQA1*05:05-B1*03:19L HLA-DPA1*03:01-B1*105:01L HLA-DQA1*03:01-B1*03:02L HLA-DQA1*05:05-B1*03:01L HLA-DQA1*01:03-B1*06:01L HLA-DQA1*02:01-B1*03:03L
FSTQFAFACPDG

SEQ ID NO: 13938 - protein, 13 aa, Severe acute respiratory syndrome coronavirus 2
  REGION 1..13: note = Table B: HLA-DRB1*04:03L HLA-DRB1*13:02L HLA-DRB1*13:03L HLA-DRB1*01:03L HLA-DRB1*04:02L HLA-DRB1*04:05L HLA-DRB4*03:01NL HLA-DRB1*08:04L HLA-DRB1*08:77L HLA-DRB3*02:01L HLA-DPA1*01:03-B1*03:01L HLA-DPA1*03:01-B1*04:02L
  REGION 1..13: note = CONT. FROM ABOVE: HLA-DRB1*14:01L HLA-DQA1*01:01-B1*05:01L HLA-D RB1*08:01L HLA-DQA1*01-B1*05L HLA-DPA1*01:03-B1*04:01L HLA-DRB1* 04:10L HLA-DRB1*09:01L HLA-DPA1*01:03-B1*04:02L HLA-DRB1*12:02L HLA-DPA1*02:01-B1*13:01L HLA-DPA1*01:03-B1*104:01L
  REGION 1..13: note = CONT. FROM ABOVE: HLA-DRB1*14:17L HLA-DPA1*01:02-B1*04:01L HLA-D RB1*07:01L HLA-DRB1*10:01L
STQFAFACPDGVK

SEQ ID NO: 13939 - protein, 13 aa, Severe acute respiratory syndrome coronavirus 2
  REGION 1..13: note = Table B: HLA-DRB1*04:03L HLA-DRB1*04:02L HLA-DRB1*04:05L HLA-DRB1*01:01L HLA-DRB1*08:01L HLA-DRB1*10:01L
TQFAFACPDGVKH

SEQ ID NO: 13940 - protein, 15 aa, Severe acute respiratory syndrome coronavirus 2
  REGION 1..15: note = Table B: HLA-DRB1*04:03L HLA-DRB1*04:04L HLA-DPA1*01:03-B1*03:01L HLA-DPA1*03:01-B1*04:02L HLA-DRB1*03:01L HLA-DRB1*11:02L HLA-DRB1*13:01L HLA-DRB1*14:54L HLA-DQA1*05:05-B1*03:01L HLA-DRB1*15:01L
VKHVYQLRARSVSPK

SEQ ID NO: 13941 - protein, 11 aa, Severe acute respiratory syndrome coronavirus 2
  REGION 1..11: note = Table B: HLA-DRB1*04:03L HLA-DRB1*13:02L HLA-DRB1*11:02L HLA-DRB4*01:01L HLA-DPA1*02:01-B1*13:01L HLA-DRB1*10:01L
FIRQEEVQELY

SEQ ID NO: 13942 - protein, 12 aa, Severe acute respiratory syndrome coronavirus 2
  REGION 1..12: note = Table B: HLA-DRB1*04:03L HLA-DRB1*01:02L HLA-DQA1*03:01-B1*03:02L
IRQEEVQELYSP

SEQ ID NO: 13943 - protein, 13 aa, Severe acute respiratory syndrome coronavirus 2
  REGION 1..13: note = Table B: HLA-DRB1*04:03L HLA-DRB1*13:02L HLA-DRB1*04:05L HLA-DQA1*05:05-B1*03:01L
RQEEVQELYSPIF

SEQ ID NO: 13944 - protein, 13 aa, Severe acute respiratory syndrome coronavirus 2
  REGION 1..13: note = Table B: HLA-DRB1*04:03L
QEEVQELYSPIFL

SEQ ID NO: 13945 - protein, 12 aa, Severe acute respiratory syndrome coronavirus 2
  REGION 1..12: note = Table B: HLA-DRB1*04:03L HLA-DRB1*13:02L HLA-DRB1*01:03L HLA-DRB1*04:05L HLA-DQA1*01:02-B1*06:02L HLA-DRB1*14:01L HLA-DRB1*11:04L HLA-DRB1*08:01L HLA-DRB1*11:01L HLA-DRB1*12:01L HLA-DRB3*01:01L HLA-DPA1*02:01-B1*13:01L
  REGION 1..12: note = CONT. FROM ABOVE: HLA-DPA1*03:01-B1*105:01L HLA-DPA1*01:02-B1*04 :01L HLA-DQA1*01:03-B1*06:01L HLA-DRB1*04:08L HLA-DQA1*02:01-B1* 03:03L HLA-DRB1*15:03L
ITLCFTLKRKTE

SEQ ID NO: 13946 - protein, 10 aa, Severe acute respiratory syndrome coronavirus 2
  REGION 1..10: note = Table B: HLA-DRB1*04:03L HLA-DQA1*03:01-B1*03:02L
SLELQDHNET

SEQ ID NO: 13947 - protein, 10 aa, Severe acute respiratory syndrome coronavirus 2
  REGION 1..10: note = Table B: HLA-DRB1*04:03L HLA-DRB1*04:02L HLA-DQA1*03:01-B1*03:02L HLA-DRB1*14:17L
GIITTVAAFH

SEQ ID NO: 13948 - protein, 10 aa, Severe acute respiratory syndrome coronavirus 2
  REGION 1..10: note = Table B: HLA-DRB1*04:03L HLA-DRB1*04:02L HLA-DRB1*04:05L HLA-DRB4*03:01NL HLA-DRB1*04:10L HLA-DRB1*12:01L HLA-DQA1*03:01-B1*03:02L HLA-DRB1*14:54L HLA-DRB1*14:17L HLA-DRB1*16:01L HLA-DQA1*02:01-B1*03:03L
IITTVAAFHQ

SEQ ID NO: 13949 - protein, 12 aa, Severe acute respiratory syndrome coronavirus 2
  REGION 1..12: note = Table B: HLA-DRB1*04:03L HLA-DRB1*04:02L HLA-DRB1*04:05L HLA-DRB1*12:01L HLA-DRB1*14:17L HLA-DRB1*16:01L
VAAFHQECSLQS

SEQ ID NO: 13950 - protein, 12 aa, Severe acute respiratory syndrome coronavirus 2
  REGION 1..12: note = Table B: HLA-DRB1*04:03L HLA-DRB1*13:02L HLA-DRB1*13:03L HLA-DRB1*01:03L HLA-DRB1*04:02L HLA-DRB1*04:05L HLA-DRB1*08:04L HLA-DRB1*14:01L HLA-DQA1*05:01-B1*02:01L HLA-DRB1*12:01L HLA-DRB3*01:01L HLA-DQA1*03:01-B1*03:02L HLA-DRB1*14:54L
  REGION 1..12: note = CONT. FROM ABOVE: HLA-DRB1*14:17L HLA-DRB1*16:01L
HQPYVVDDPCPI

SEQ ID NO: 13951 - protein, 10 aa, Severe acute respiratory syndrome coronavirus 2
  REGION 1..10: note = Table B: HLA-DRB1*04:03L HLA-DRB1*13:02L HLA-DRB1*13:03L HLA-DRB1*01:03L HLA-DRB1*04:02L HLA-DRB1*04:05L HLA-DRB1*01:02L HLA-DRB4*03:01NL HLA-DRB1*08:04L HLA-DRB1*08:77L HLA-DRB3*02:01L HLA-DPA1*01:03-B1*03:01L HLA-DPA1*03:01-B1*04:02L
  REGION 1..10: note = CONT. FROM ABOVE: HLA-DRB1*14:01L HLA-DRB1*11:03L HLA-DRB1*11:04 L HLA-DRB1*14:02L HLA-DQA1*01-B1*05L HLA-DQA1*05:01-B1*02:01L HL A-DRB1*12:01L HLA-DRB1*12:02L HLA-DRB3*01:01L HLA-DPA1*03:01-B1* 105:01L HLA-DQA1*03:01-B1*03:02L HLA-DRB1*14:54L HLA-DRB1*14:17L
  REGION 1..10: note = CONT. FROM ABOVE: HLA-DPA1*01:02-B1*04:01L HLA-DRB1*16:01L HLA-D RB1*04:08L HLA-DQA1*02:01-B1*03:03L HLA-DRB1*15:03L
YVVDDPCPIH

SEQ ID NO: 13952 - protein, 12 aa, Severe acute respiratory syndrome coronavirus 2
  REGION 1..12: note = Table B: HLA-DRB1*04:03L HLA-DRB1*04:05L HLA-DRB1*04:10L HLA-DRB1*14:17L
APLIELCVDEAG

SEQ ID NO: 13953 - protein, 11 aa, Severe acute respiratory syndrome coronavirus 2
  REGION 1..11: note = Table B: HLA-DRB1*04:03L HLA-DRB1*04:02L HLA-DQA1*01:02-B1*06:02L HLA-DRB1*14:17L
IELCVDEAGSK

SEQ ID NO: 13954 - protein, 11 aa, Severe acute respiratory syndrome coronavirus 2
  REGION 1..11: note = Table B: HLA-DRB1*04:03L HLA-DRB1*13:03L HLA-DRB1*01:03L HLA-DRB1*04:02L HLA-DRB1*04:05L HLA-DQA1*01:02-B1*06:02L HLA-DRB4*03:01NL HLA-DPA1*01:03-B1*03:01L HLA-DQA1*01:01-B1*05:01L HLA-DQA1*01-B1*05L
  REGION 1..11: note = CONT. FROM ABOVE: HLA-DQA1*05:05-B1*03:116L HLA-DPA1*01:03-B1*04 :02L HLA-DRB1*12:01L HLA-DPA1*03:01-B1*105:01L HLA-DRB1*14:54L H LA-DRB1*14:17L HLA-DRB1*16:01L HLA-DQA1*01:03-B1*06:01L HLA-DRB1 *04:08L
VDEAGSKSPIQ

SEQ ID NO: 13955 - protein, 10 aa, Severe acute respiratory syndrome coronavirus 2
  REGION 1..10: note = Table B: HLA-DRB1*04:03L HLA-DRB1*14:17L
YIDIGNYTVS

SEQ ID NO: 13956 - protein, 14 aa, Severe acute respiratory syndrome coronavirus 2
  REGION 1..14: note = Table B: HLA-DRB1*04:03L HLA-DRB1*01:02L HLA-DQA1*01-B1*05L HLA-DPA1*01:03-B1*04:02L HLA-DRB1*12:01L HLA-DPA1*02:01-B1*13:01L HLA-DPA1*01:03-B1*104:01L HLA-DRB1*15:03L
IDIGNYTVSCLPFT

SEQ ID NO: 13957 - protein, 14 aa, Severe acute respiratory syndrome coronavirus 2
  REGION 1..14: note = Table B: HLA-DRB1*04:03L HLA-DRB1*13:02L HLA-DRB1*01:03L HLA-DRB1*04:05L HLA-DRB1*01:02L HLA-DRB1*08:04L HLA-DRB3*02:01L HLA-DRB1*14:02L HLA-DRB1*08:01L HLA-DQA1*01-B1*05L HLA-DPA1*01:03-B1*04:01L HLA-DRB1*12:01L
  REGION 1..14: note = CONT. FROM ABOVE: HLA-DPA1*02:01-B1*13:01L HLA-DPA1*01:03-B1*104 :01L HLA-DPA1*01:02-B1*04:01L HLA-DRB1*16:01L HLA-DRB1*04:08L
IGNYTVSCLPFTIN

SEQ ID NO: 13958 - protein, 11 aa, Severe acute respiratory syndrome coronavirus 2
  REGION 1..11: note = Table B: HLA-DRB1*04:03L
QEPKLGSLVVR

SEQ ID NO: 13959 - protein, 11 aa, Severe acute respiratory syndrome coronavirus 2
  REGION 1..11: note = Table B: HLA-DRB1*04:03L HLA-DQA1*03:01-B1*03:02L HLA-DQA1*02:01-B1*03:03L
APRITFGGPSD

SEQ ID NO: 13960 - protein, 11 aa, Severe acute respiratory syndrome coronavirus 2
  REGION 1..11: note = Table B: HLA-DRB1*04:03L
RPQGLPNNTAS

SEQ ID NO: 13961 - protein, 10 aa, Severe acute respiratory syndrome coronavirus 2
  REGION 1..10: note = Table B: HLA-DRB1*04:03L
VPINTNSSPD

SEQ ID NO: 13962 - protein, 14 aa, Severe acute respiratory syndrome coronavirus 2
  REGION 1..14: note = Table B: HLA-DRB1*04:03L HLA-DRB1*01:03L HLA-DRB1*04:02L HLA-DRB1*01:02L HLA-DPA1*01:03-B1*03:01L HLA-DPA1*01:03-B1*04:02L HLA-DRB1*12:01L HLA-DRB1*04:08L HLA-DRB1*15:03L
YYLGTGPEAGLPYG

SEQ ID NO: 13963 - protein, 12 aa, Severe acute respiratory syndrome coronavirus 2
  REGION 1..12: note = Table B: HLA-DRB1*04:03L HLA-DRB1*01:03L HLA-DRB1*04:02L HLA-DQA1*01:01-B1*05:01L HLA-DRB1*08:01L HLA-DRB1*11:01L HLA-DPA1*01:03-B1*04:02L HLA-DPA1*03:01-B1*105:01L
GPEAGLPYGANK

SEQ ID NO: 13964 - protein, 10 aa, Severe acute respiratory syndrome coronavirus 2
  REGION 1..10: note = Table B: HLA-DRB1*04:03L HLA-DQA1*03:01-B1*03:02L HLA-DQA1*02:01-B1*03:03L
GLPYGANKDG

SEQ ID NO: 13965 - protein, 12 aa, Severe acute respiratory syndrome coronavirus 2
  REGION 1..12: note = Table B: HLA-DRB1*04:03L HLA-DRB1*13:02L HLA-DRB1*01:03L HLA-DRB1*08:77L HLA-DRB3*02:01L HLA-DPA1*01:03-B1*03:01L HLA-DRB1*14:02L HLA-DRB4*01:01L HLA-DPA1*01:03-B1*04:01L HLA-DPA1*01:03-B1*04:02L HLA-DRB1*12:01L
  REGION 1..12: note = CONT. FROM ABOVE: HLA-DPA1*01:03-B1*104:01L HLA-DQA1*05:05-B1*03 :01L
LPYGANKDGIIW

SEQ ID NO: 13966 - protein, 14 aa, Severe acute respiratory syndrome coronavirus 2
  REGION 1..14: note = Table B: HLA-DRB1*04:03L HLA-DRB1*13:02L HLA-DRB1*01:03L HLA-DRB1*04:05L HLA-DRB1*01:02L HLA-DPA1*01:03-B1*03:01L HLA-DQA1*01:01-B1*05:01L HLA-DRB1*08:01L HLA-DRB1*11:01L HLA-DQA1*05:01-B1*02:01L HLA-DPA1*01:03-B1*04:02L
  REGION 1..14: note = CONT. FROM ABOVE: HLA-DRB1*12:01L HLA-DPA1*02:01-B1*13:01L HLA-D PA1*01:03-B1*104:01L HLA-DRB1*16:01L HLA-DRB1*04:08L HLA-DRB1*15 :03L
GANKDGIIWVATEG

SEQ ID NO: 13967 - protein, 12 aa, Severe acute respiratory syndrome coronavirus 2
  REGION 1..12: note = Table B: HLA-DRB1*04:03L HLA-DRB1*14:17L
KDGIIWVATEGA

SEQ ID NO: 13968 - protein, 12 aa, Severe acute respiratory syndrome coronavirus 2
  REGION 1..12: note = Table B: HLA-DRB1*04:03L HLA-DQA1*01:02-B1*06:02L HLA-DQA1*05:01-B1*02:01L HLA-DQA1*03:01-B1*03:02L HLA-DRB1*14:17L
DGIIWVATEGAL

SEQ ID NO: 13969 - protein, 11 aa, Severe acute respiratory syndrome coronavirus 2
  REGION 1..11: note = Table B: HLA-DRB1*04:03L HLA-DRB1*04:02L HLA-DRB1*04:04L HLA-DRB1*04:05L HLA-DQA1*01:02-B1*06:02L HLA-DRB1*01:02L HLA-DRB4*03:01NL HLA-DQA1*05:05-B1*03:19L HLA-DQA1*05:01-B1*02:01L HLA-DRB1*04:10L HLA-DRB1*12:01L
  REGION 1..11: note = CONT. FROM ABOVE: HLA-DQA1*03:01-B1*03:02L HLA-DRB1*14:54L HLA-D QA1*05:05-B1*03:01L HLA-DRB1*14:17L HLA-DRB1*16:01L HLA-DRB1*04: 08L HLA-DQA1*02:01-B1*03:03L
IIWVATEGALN

SEQ ID NO: 13970 - protein, 11 aa, Severe acute respiratory syndrome coronavirus 2
  REGION 1..11: note = Table B: HLA-DRB1*04:03L HLA-DRB1*01:03L HLA-DRB1*14:54L HLA-DQA1*05:05-B1*03:01L HLA-DRB1*16:01L HLA-DQA1*01:03-B1*06:01L HLA-DQA1*02:01-B1*03:03L
VATEGALNTPK

SEQ ID NO: 13971 - protein, 11 aa, Severe acute respiratory syndrome coronavirus 2
  REGION 1..11: note = Table B: HLA-DRB1*04:03L HLA-DQA1*05:01-B1*02:01L HLA-DQA1*01:03-B1*06:01L
ATEGALNTPKD

SEQ ID NO: 13972 - protein, 10 aa, Severe acute respiratory syndrome coronavirus 2
  REGION 1..10: note = Table B: HLA-DRB1*04:03L HLA-DQA1*03:01-B1*03:02L
ALNTPKDHIG

SEQ ID NO: 13973 - protein, 10 aa, Severe acute respiratory syndrome coronavirus 2
  REGION 1..10: note = Table B: HLA-DRB1*04:03L HLA-DRB1*13:03L HLA-DRB1*01:03L HLA-DRB1*04:02L HLA-DRB1*04:05L HLA-DRB4*03:01NL HLA-DQA1*01-B1*05L HLA-DQA1*03:01-B1*03:02L HLA-DRB1*14:17L HLA-DRB1*16:01L
GTRNPANNAA

SEQ ID NO: 13974 - protein, 11 aa, Severe acute respiratory syndrome coronavirus 2
  REGION 1..11: note = Table B: HLA-DRB1*04:03L
TRNPANNAAIV

SEQ ID NO: 13975 - protein, 10 aa, Severe acute respiratory syndrome coronavirus 2
  REGION 1..10: note = Table B: HLA-DRB1*04:03L HLA-DRB1*13:03L HLA-DRB1*04:02L HLA-DRB4*03:01NL HLA-DRB1*12:01L HLA-DQA1*03:01-B1*03:02L HLA-DQA1*05:05-B1*03:01L HLA-DRB1*14:17L HLA-DQA1*02:01-B1*03:03L
QLPQGTTLPK

SEQ ID NO: 13976 - protein, 10 aa, Severe acute respiratory syndrome coronavirus 2
  REGION 1..10: note = Table B: HLA-DRB1*04:03L HLA-DRB1*13:03L HLA-DQA1*03:01-B1*03:02L HLA-DQA1*02:01-B1*03:03L
LPQGTTLPKG

SEQ ID NO: 13977 - protein, 10 aa, Severe acute respiratory syndrome coronavirus 2
  REGION 1..10: note = Table B: HLA-DRB1*04:03L HLA-DRB1*13:03L HLA-DRB1*01:03L HLA-DRB1*04:02L HLA-DQA1*03:01-B1*03:02L HLA-DRB1*14:17L
YAEGSRGGSQ

SEQ ID NO: 13978 - protein, 11 aa, Severe acute respiratory syndrome coronavirus 2
  REGION 1..11: note = Table B: HLA-DRB1*04:03L HLA-DRB1*01:03L HLA-DRB1*04:02L HLA-DRB4*03:01NL HLA-DQA1*03:01-B1*03:02L HLA-DRB1*14:17L HLA-DRB1*16:01L
TPGSSRGTSPA

SEQ ID NO: 13979 - protein, 11 aa, Severe acute respiratory syndrome coronavirus 2
  REGION 1..11: note = Table B: HLA-DRB1*04:03L HLA-DQA1*03:01-B1*03:02L
SPARMAGNGGD

SEQ ID NO: 13980 - protein, 10 aa, Severe acute respiratory syndrome coronavirus 2
  REGION 1..10: note = Table B: HLA-DRB1*04:03L HLA-DRB1*14:01L
ALLLLDRLNQ

SEQ ID NO: 13981 - protein, 10 aa, Severe acute respiratory syndrome coronavirus 2
  REGION 1..10: note = Table B: HLA-DRB1*04:03L HLA-DPA1*03:01-B1*04:02L HLA-DRB1*14:01L HLA-DPA1*03:01-B1*105:01L HLA-DPA1*01:02-B1*04:01L
LLLDRLNQLE

SEQ ID NO: 13982 - protein, 12 aa, Severe acute respiratory syndrome coronavirus 2
  REGION 1..12: note = Table B: HLA-DRB1*04:03L HLA-DRB1*01:02L HLA-DRB1*14:17L
DRLNQLESKMSG

SEQ ID NO: 13983 - protein, 14 aa, Severe acute respiratory syndrome coronavirus 2
  REGION 1..14: note = Table B: HLA-DRB1*04:03L HLA-DRB1*13:03L HLA-DRB1*01:03L HLA-DRB1*04:05L HLA-DRB1*01:02L HLA-DRB1*08:04L HLA-DRB1*14:01L HLA-DRB1*11:04L HLA-DRB1*11:01L HLA-DRB1*16:01L HLA-DRB1*04:08L HLA-DRB1*08:03L
LNQLESKMSGKGQQ

SEQ ID NO: 13984 - protein, 11 aa, Severe acute respiratory syndrome coronavirus 2
  REGION 1..11: note = Table B: HLA-DRB1*04:03L HLA-DQA1*03:01-B1*03:02L
SGKGQQQQGQT

SEQ ID NO: 13985 - protein, 11 aa, Severe acute respiratory syndrome coronavirus 2
  REGION 1..11: note = Table B: HLA-DRB1*04:03L HLA-DQA1*03:01-B1*03:02L HLA-DRB1*14:17L
GQTVTKKSAAE

SEQ ID NO: 13986 - protein, 14 aa, Severe acute respiratory syndrome coronavirus 2
  REGION 1..14: note = Table B: HLA-DRB1*04:03L HLA-DQA1*01:01-B1*05:01L HLA-DPA1*02:01-B1*13:01L HLA-DRB1*15:03L
TVTKKSAAEASKKP

SEQ ID NO: 13987 - protein, 11 aa, Severe acute respiratory syndrome coronavirus 2
  REGION 1..11: note = Table B: HLA-DRB1*04:03L HLA-DQA1*03:01-B1*03:02L HLA-DRB1*14:17L
TKAYNVTQAFG

SEQ ID NO: 13988 - protein, 13 aa, Severe acute respiratory syndrome coronavirus 2
  REGION 1..13: note = Table B: HLA-DRB1*04:03L HLA-DRB1*14:01L
YNVTQAFGRRGPE

SEQ ID NO: 13989 - protein, 13 aa, Severe acute respiratory syndrome coronavirus 2
  REGION 1..13: note = Table B: HLA-DRB1*04:03L HLA-DQA1*01:01-B1*05:01L HLA-DQA1*01-B1*05L HLA-DQA1*05:05-B1*03:01L HLA-DRB1*16:01L HLA-DQA1*01:03-B1*06:01L HLA-DQA1*02:01-B1*03:03L
GPEQTQGNFGDQE

SEQ ID NO: 13990 - protein, 12 aa, Severe acute respiratory syndrome coronavirus 2
  REGION 1..12: note = Table B: HLA-DRB1*04:03L HLA-DRB1*04:02L HLA-DRB1*04:05L HLA-DQA1*01:01-B1*05:01L HLA-DRB1*12:01L HLA-DPA1*02:01-B1*13:01L HLA-DPA1*03:01-B1*105:01L HLA-DRB1*15:03L
TQGNFGDQELIR

SEQ ID NO: 13991 - protein, 12 aa, Severe acute respiratory syndrome coronavirus 2
  REGION 1..12: note = Table B: HLA-DRB1*04:03L HLA-DRB1*16:01L
QGNFGDQELIRQ

SEQ ID NO: 13992 - protein, 10 aa, Severe acute respiratory syndrome coronavirus 2
  REGION 1..10: note = Table B: HLA-DRB1*04:03L HLA-DQA1*01-B1*05L HLA-DQA1*05:01-B1*02:01L HLA-DQA1*03:01-B1*03:02L HLA-DRB1*16:01L HLA-DQA1*02:01-B1*03:03L
FGDQELIRQG

SEQ ID NO: 13993 - protein, 12 aa, Severe acute respiratory syndrome coronavirus 2
  REGION 1..12: note = Table B: HLA-DRB1*04:03L HLA-DRB1*04:02L HLA-DQA1*01:03-B1*06:01L
DQELIRQGTDYK

SEQ ID NO: 13994 - protein, 12 aa, Severe acute respiratory syndrome coronavirus 2
  REGION 1..12: note = Table B: HLA-DRB1*04:03L HLA-DRB1*01:03L HLA-DRB1*04:05L HLA-DQA1*01:02-B1*06:02L HLA-DRB1*01:02L HLA-DRB1*08:01L HLA-DRB1*12:01L HLA-DQA1*03:01-B1*03:02L HLA-DPA1*01:02-B1*04:01L HLA-DRB1*16:01L HLA-DRB1*04:08L
  REGION 1..12: note = CONT. FROM ABOVE: HLA-DQA1*02:01-B1*03:03L
IRQGTDYKHWPQ

SEQ ID NO: 13995 - protein, 11 aa, Severe acute respiratory syndrome coronavirus 2
  REGION 1..11: note = Table B: HLA-DRB1*04:03L HLA-DRB1*13:03L HLA-DRB1*04:02L HLA-DRB1*04:05L HLA-DQA1*01-B1*05L HLA-DQA1*03:01-B1*03:02L HLA-DRB1*14:17L HLA-DPA1*01:02-B1*04:01L HLA-DRB1*16:01L HLA-DRB1*04:08L
TDYKHWPQIAQ

SEQ ID NO: 13996 - protein, 13 aa, Severe acute respiratory syndrome coronavirus 2
  REGION 1..13: note = Table B: HLA-DRB1*04:03L HLA-DRB1*01:02L HLA-DQA1*03:01-B1*03:02L
YKHWPQIAQFAPS

SEQ ID NO: 13997 - protein, 12 aa, Severe acute respiratory syndrome coronavirus 2
  REGION 1..12: note = Table B: HLA-DRB1*04:03L HLA-DRB1*14:17L
PQIAQFAPSASA

SEQ ID NO: 13998 - protein, 10 aa, Severe acute respiratory syndrome coronavirus 2
  REGION 1..10: note = Table B: HLA-DRB1*04:03L HLA-DRB1*01:03L HLA-DRB1*04:05L HLA-DQA1*01:02-B1*06:02L HLA-DRB1*01:01L HLA-DRB1*08:77L HLA-DPA1*02:01-B1*13:01M HLA-DPA1*03:01-B1*105:01L HLA-DRB1*16:01L HLA-DQA1*01:03-B1*06:01M
  REGION 1..10: note = CONT. FROM ABOVE: HLA-DQA1*02:01-B1*03:03L HLA-DRB1*15:03L
QFAPSASAFF

SEQ ID NO: 13999 - protein, 10 aa, Severe acute respiratory syndrome coronavirus 2
  REGION 1..10: note = Table B: HLA-DRB1*04:03L HLA-DRB1*04:05L HLA-DQA1*03:01-B1*03:02L HLA-DRB1*14:17L
RIGMEVTPSG

SEQ ID NO: 14000 - protein, 14 aa, Severe acute respiratory syndrome coronavirus 2
  REGION 1..14: note = Table B: HLA-DRB1*04:03L HLA-DRB1*04:02L HLA-DRB1*01:02L HLA-DQA1*05:05-B1*03:01L
MEVTPSGTWLTYTG

SEQ ID NO: 14001 - protein, 10 aa, Severe acute respiratory syndrome coronavirus 2
  REGION 1..10: note = Table B: HLA-DRB1*04:03L HLA-DRB1*13:03L HLA-DRB1*01:03L HLA-DRB1*04:02L HLA-DRB1*04:05L HLA-DRB4*03:01NL HLA-DQA1*01-B1*05L HLA-DQA1*03:01-B1*03:02L HLA-DRB1*14:54L HLA-DRB1*14:17L HLA-DRB1*16:01L HLA-DQA1*02:01-B1*03:03L
AIKLDDKDPN

SEQ ID NO: 14002 - protein, 11 aa, Severe acute respiratory syndrome coronavirus 2
  REGION 1..11: note = Table B: HLA-DRB1*04:03L HLA-DRB1*13:02L HLA-DRB1*13:03L HLA-DRB1*01:03L HLA-DRB1*04:02L HLA-DRB1*04:05L HLA-DRB1*01:02L HLA-DRB4*03:01NL HLA-DRB1*08:04L HLA-DRB1*03:01L HLA-DRB1*14:01L HLA-DRB1*11:04L HLA-DRB1*08:01L HLA-DRB1*12:01L HLA-DRB3*01:01L
  REGION 1..11: note = CONT. FROM ABOVE: HLA-DRB1*14:54L HLA-DRB1*14:17L HLA-DRB1*16:01 L HLA-DRB1*04:08L HLA-DRB1*15:03L
IKLDDKDPNFK

SEQ ID NO: 14003 - protein, 13 aa, Severe acute respiratory syndrome coronavirus 2
  REGION 1..13: note = Table B: HLA-DRB1*04:03L HLA-DRB1*01:03L HLA-DRB1*04:02L HLA-DRB1*04:04L HLA-DRB1*04:05L HLA-DQA1*01:02-B1*06:02L HLA-DRB1*01:02L HLA-DRB1*08:04L HLA-DPA1*01:03-B1*03:01L HLA-DPA1*03:01-B1*04:02L HLA-DRB1*08:01L HLA-DRB1*11:01L
  REGION 1..13: note = CONT. FROM ABOVE: HLA-DPA1*01:03-B1*04:02L HLA-DRB1*12:01L HLA-D PA1*02:01-B1*13:01L HLA-DPA1*03:01-B1*105:01L HLA-DRB1*14:54L HL A-DPA1*01:03-B1*02:01L HLA-DRB1*14:17L HLA-DRB1*16:01L HLA-DQA1* 01:03-B1*06:01L HLA-DRB1*04:08L HLA-DQA1*02:01-B1*03:03L
  REGION 1..13: note = CONT. FROM ABOVE: HLA-DRB1*15:03L
DPNFKDQVILLNK

SEQ ID NO: 14004 - protein, 10 aa, Severe acute respiratory syndrome coronavirus 2
  REGION 1..10: note = Table B: HLA-DRB1*04:03L HLA-DRB1*13:03L HLA-DRB1*01:03L HLA-DRB1*04:02L HLA-DRB1*04:05L HLA-DQA1*01:02-B1*06:02L HLA-DRB4*03:01NL HLA-DRB1*08:04L HLA-DRB1*14:01L HLA-DRB1*11:04L HLA-DRB1*08:01L HLA-DRB1*04:10L HLA-DRB1*12:01L
  REGION 1..10: note = CONT. FROM ABOVE: HLA-DQA1*03:01-B1*03:02L HLA-DRB1*14:54L HLA-D RB1*14:17L HLA-DRB1*16:01L HLA-DRB1*04:08L HLA-DRB1*08:03L HLA-D QA1*02:01-B1*03:03L
VILLNKHIDA

SEQ ID NO: 14005 - protein, 10 aa, Severe acute respiratory syndrome coronavirus 2
  REGION 1..10: note = Table B: HLA-DRB1*04:03L HLA-DRB1*04:02L HLA-DQA1*01-B1*05L
IDAYKTFPPT

SEQ ID NO: 14006 - protein, 11 aa, Severe acute respiratory syndrome coronavirus 2
  REGION 1..11: note = Table B: HLA-DRB1*04:03L HLA-DRB1*04:05L HLA-DRB1*01:02L HLA-DRB1*08:77L HLA-DPA1*01:03-B1*03:01L HLA-DQA1*01:01-B1*05:01L HLA-DQA1*05:05-B1*03:19L HLA-DRB4*02:01NL HLA-DPA1*01:02-B1*04:01L HLA-DRB1*04:08L
  REGION 1..11: note = CONT. FROM ABOVE: HLA-DRB1*15:03L
DETQALPQRQK

SEQ ID NO: 14007 - protein, 12 aa, Severe acute respiratory syndrome coronavirus 2
  REGION 1..12: note = Table B: HLA-DRB1*04:03L HLA-DQA1*05:01-B1*02:01L HLA-DRB1*12:01L
QQTVTLLPAADL

SEQ ID NO: 14008 - protein, 11 aa, Severe acute respiratory syndrome coronavirus 2
  REGION 1..11: note = Table B: HLA-DRB1*04:03L HLA-DQA1*03:01-B1*03:02L
LLPAADLDDFS

SEQ ID NO: 14009 - protein, 11 aa, Severe acute respiratory syndrome coronavirus 2
  REGION 1..11: note = Table B: HLA-DRB1*04:03L HLA-DQA1*05:01-B1*02:01L HLA-DQA1*03:01-B1*03:02L HLA-DQA1*02:01-B1*03:03L
LPAADLDDFSK

SEQ ID NO: 14010 - protein, 12 aa, Severe acute respiratory syndrome coronavirus 2
  REGION 1..12: note = Table B: HLA-DRB1*04:03L HLA-DRB1*04:02L
ADLDDFSKQLQQ

SEQ ID NO: 14011 - protein, 11 aa, Severe acute respiratory syndrome coronavirus 2
  REGION 1..11: note = Table B: HLA-DRB1*04:03L HLA-DRB1*04:02L HLA-DRB1*14:17L HLA-DPA1*01:02-B1*04:01L
LDDFSKQLQQS

SEQ ID NO: 14012 - protein, 13 aa, Severe acute respiratory syndrome coronavirus 2
  REGION 1..13: note = Table B: HLA-DRB1*04:03L
DDFSKQLQQSMSS

SEQ ID NO: 14013 - protein, 12 aa, Severe acute respiratory syndrome coronavirus 2
  REGION 1..12: note = Table B: HLA-DRB1*04:03L HLA-DRB1*14:17L
SKQLQQSMSSAD

SEQ ID NO: 14014 - protein, 13 aa, Severe acute respiratory syndrome coronavirus 2
  REGION 1..13: note = Table B: HLA-DRB1*04:03L HLA-DRB1*04:02L HLA-DRB1*04:05L HLA-DRB1*04:10L HLA-DQA1*03:01-B1*03:02L HLA-DRB1*14:17L
KQLQQSMSSADST

SEQ ID NO: 14015 - protein, 10 aa, Severe acute respiratory syndrome coronavirus 2
  REGION 1..10: note = Table B: HLA-DRB1*04:03L HLA-DQA1*05:01-B1*02:01L HLA-DRB1*12:01L HLA-DRB1*15:03L
YINVFAFPFT

SEQ ID NO: 14016 - protein, 12 aa, Severe acute respiratory syndrome coronavirus 2
  REGION 1..12: note = Table B: HLA-DRB1*04:03L HLA-DRB1*01:02L HLA-DQA1*03:01-B1*03:02L
INVFAFPFTIYS

SEQ ID NO: 14017 - protein, 11 aa, Severe acute respiratory syndrome coronavirus 2
  REGION 1..11: note = Table B: HLA-DRB1*04:03L HLA-DRB1*04:02L HLA-DRB4*03:01NL HLA-DQA1*01-B1*05L HLA-DRB1*12:01L HLA-DRB1*14:17L
AQVDVVNFNLT

SEQ ID NO: 14018 - protein, 10 aa, Severe acute respiratory syndrome coronavirus 2
  REGION 1..10: note = Table B: HLA-DRB1*13:02L HLA-DRB1*13:03L HLA-DRB1*04:02L HLA-DQA1*01:02-B1*06:02L HLA-DRB1*01:01L HLA-DRB4*03:01NL HLA-DRB3*02:01L HLA-DRB1*14:01L HLA-DRB1*11:04L HLA-DRB1*08:01L HLA-DRB5*01:01L HLA-DPA1*01:03-B1*04:02L HLA-DRB1*12:01M
  REGION 1..10: note = CONT. FROM ABOVE: HLA-DRB1*12:02L HLA-DPA1*03:01-B1*105:01L HLA- DQA1*03:01-B1*03:02M HLA-DQA1*05:05-B1*03:01M HLA-DRB1*14:17L HL A-DRB1*16:01L HLA-DQA1*01:03-B1*06:01L HLA-DQA1*02:01-B1*03:03L
ESLVPGFNEK

SEQ ID NO: 14019 - protein, 16 aa, Severe acute respiratory syndrome coronavirus 2
  REGION 1..16: note = Table B: HLA-DRB1*13:02L HLA-DRB1*01:02L HLA-DRB1*11:01L HLA-DPA1*02:01-B1*13:01L HLA-DQA1*05:05-B1*03:01L HLA-DRB1*15:03L
VPGFNEKTHVQLSLPV

SEQ ID NO: 14020 - protein, 13 aa, Severe acute respiratory syndrome coronavirus 2
  REGION 1..13: note = Table B: HLA-DRB1*13:02L HLA-DRB1*04:04L HLA-DRB1*01:01L HLA-DRB1*11:03L HLA-DRB1*11:04L HLA-DRB3*01:01L HLA-DRB1*07:01L HLA-DQA1*01:03-B1*06:01L HLA-DRB1*15:01L
LPVLQVRDVLVRG

SEQ ID NO: 14021 - protein, 13 aa, Severe acute respiratory syndrome coronavirus 2
  REGION 1..13: note = Table B: HLA-DRB1*13:02L HLA-DRB1*08:04L HLA-DRB1*14:01L HLA-DRB1*11:04L HLA-DQA1*05:05-B1*03:19L HLA-DPA1*01:03-B1*04:01L HLA-DRB1*12:02L HLA-DRB1*14:54L HLA-DPA1*01:03-B1*104:01L HLA-DRB1*10:01L HLA-DRB1*08:03L
  REGION 1..13: note = CONT. FROM ABOVE: HLA-DRB1*15:01L
DVLVRGFGDSVEE

SEQ ID NO: 14022 - protein, 14 aa, Severe acute respiratory syndrome coronavirus 2
  REGION 1..14: note = Table B: HLA-DRB1*13:02L HLA-DPA1*01:03-B1*03:01L HLA-DPA1*01:03-B1*104:01L
VLVRGFGDSVEEVL

SEQ ID NO: 14023 - protein, 10 aa, Severe acute respiratory syndrome coronavirus 2
  REGION 1..10: note = Table B: HLA-DRB1*13:02L HLA-DRB1*13:03L HLA-DRB4*03:01NL HLA-DRB5*01:01L HLA-DRB1*12:01L HLA-DQA1*03:01-B1*03:02L HLA-DQA1*05:05-B1*03:01L HLA-DQA1*02:01-B1*03:03L
SVEEVLSEAR

SEQ ID NO: 14024 - protein, 12 aa, Severe acute respiratory syndrome coronavirus 2
  REGION 1..12: note = Table B: HLA-DRB1*13:02L HLA-DRB1*12:02L HLA-DRB1*14:54L HLA-DRB1*16:01L
VEEVLSEARQHL

SEQ ID NO: 14025 - protein, 11 aa, Severe acute respiratory syndrome coronavirus 2
  REGION 1..11: note = Table B: HLA-DRB1*13:02L HLA-DRB1*01:03L HLA-DRB1*16:01L
EVLSEARQHLK

SEQ ID NO: 14026 - protein, 12 aa, Severe acute respiratory syndrome coronavirus 2
  REGION 1..12: note = Table B: HLA-DRB1*13:02L HLA-DRB1*04:02L HLA-DRB1*04:05L HLA-DQA1*01:02-B1*06:02L HLA-DRB1*01:02L HLA-DRB1*08:04L HLA-DRB1*11:03L HLA-DRB1*12:01L HLA-DRB3*01:01L HLA-DRB1*08:03L
QPYVFIKRSDAR

SEQ ID NO: 14027 - protein, 16 aa, Severe acute respiratory syndrome coronavirus 2
  REGION 1..16: note = Table B: HLA-DRB1*13:02L HLA-DRB1*01:03L HLA-DRB1*04:04L HLA-DRB1*08:04L HLA-DQA1*05:05-B1*03:19L HLA-DPA1*01:03-B1*04:02L HLA-DPA1*01:03-B1*02:01L HLA-DQA1*05:05-B1*03:01L HLA-DRB1*04:08L
  REGION 1..16: note = CONT. FROM ABOVE: HLA-DQA1*02:01-B1*03:03L
APHGHVMVELVAELEG

SEQ ID NO: 14028 - protein, 13 aa, Severe acute respiratory syndrome coronavirus 2
  REGION 1..13: note = Table B: HLA-DRB1*13:02L HLA-DRB1*04:02L HLA-DRB1*04:04L HLA-DRB1*04:05L HLA-DRB1*01:02L HLA-DRB3*02:01L HLA-DRB1*04:10L HLA-DRB1*12:02L HLA-DQA1*03:01-B1*03:02L HLA-DRB1*14:54L HLA-DQA1*05:05-B1*03:01L
VELVAELEGIQYG

SEQ ID NO: 14029 - protein, 13 aa, Severe acute respiratory syndrome coronavirus 2
  REGION 1..13: note = Table B: HLA-DRB1*13:02L HLA-DRB1*01:03L HLA-DRB4*03:01NL HLA-DRB1*08:01L HLA-DPA1*01:03-B1*04:02L HLA-DRB1*12:02L HLA-DRB1*14:54L HLA-DRB1*14:17L
SGETLGVLVPHVG

SEQ ID NO: 14030 - protein, 13 aa, Severe acute respiratory syndrome coronavirus 2
  REGION 1..13: note = Table B: HLA-DRB1*13:02L HLA-DRB1*01:03L HLA-DRB1*04:04L HLA-DQA1*01:02-B1*06:02L HLA-DRB1*01:02L HLA-DRB4*03:01NL HLA-DPA1*01:03-B1*03:01L HLA-DQA1*05:05-B1*03:19L HLA-DQA1*05:01-B1*02:01L HLA-DRB1*04:10L HLA-DRB1*12:01L
  REGION 1..13: note = CONT. FROM ABOVE: HLA-DPA1*03:01-B1*105:01L HLA-DRB1*14:54L HLA- DQA1*05:05-B1*03:01L HLA-DQA1*01:03-B1*06:01L HLA-DRB1*04:08L HL A-DRB1*15:03L
GVLVPHVGEIPVA

SEQ ID NO: 14031 - protein, 10 aa, Severe acute respiratory syndrome coronavirus 2
  REGION 1..10: note = Table B: HLA-DRB1*13:02L HLA-DRB1*13:03L HLA-DRB1*01:01L HLA-DRB4*03:01NL HLA-DRB1*11:04L HLA-DRB1*08:01L HLA-DRB5*01:01L HLA-DRB1*12:01L HLA-DQA1*03:01-B1*03:02L HLA-DQA1*05:05-B1*03:01L HLA-DQA1*02:01-B1*03:03L
HVGEIPVAYR

SEQ ID NO: 14032 - protein, 13 aa, Severe acute respiratory syndrome coronavirus 2
  REGION 1..13: note = Table B: HLA-DRB1*13:02L HLA-DRB1*04:05L HLA-DRB1*14:01L HLA-DRB1*08:01L HLA-DRB1*12:01L HLA-DRB3*01:01L HLA-DPA1*01:02-B1*04:01L HLA-DRB1*15:03L
IPVAYRKVLLRKN

SEQ ID NO: 14033 - protein, 15 aa, Severe acute respiratory syndrome coronavirus 2
  REGION 1..15: note = Table B: HLA-DRB1*13:02L HLA-DRB1*08:77L HLA-DRB4*01:01L HLA-DRB1*09:01L HLA-DRB3*01:01L HLA-DRB1*14:54L HLA-DPA1*01:03-B1*104:01L HLA-DRB1*14:17L HLA-DRB1*10:01L HLA-DRB1*08:03L
GDELGTDPYEDFQEN

SEQ ID NO: 14034 - protein, 15 aa, Severe acute respiratory syndrome coronavirus 2
  REGION 1..15: note = Table B: HLA-DRB1*13:02L HLA-DRB1*08:04L HLA-DPA1*01:03-B1*03:01L HLA-DRB1*14:01L HLA-DQA1*01:01-B1*05:01L HLA-DRB1*12:01L HLA-DRB3*01:01L HLA-DQA1*05:05-B1*03:01L HLA-DPA1*01:02-B1*04:01L
DPYEDFQENWNTKHS

SEQ ID NO: 14035 - protein, 14 aa, Severe acute respiratory syndrome coronavirus 2
  REGION 1..14: note = Table B: HLA-DRB1*13:02L HLA-DRB1*11:04L HLA-DQA1*05:01-B1*02:01L HLA-DRB1*12:01L HLA-DRB3*01:01L HLA-DPA1*02:01-B1*13:01L HLA-DPA1*03:01-B1*105:01L HLA-DQA1*05:05-B1*03:01L HLA-DQA1*01:03-B1*06:01L
  REGION 1..14: note = CONT. FROM ABOVE: HLA-DRB1*08:03L HLA-DRB1*15:03L
EDFQENWNTKHSSG

SEQ ID NO: 14036 - protein, 14 aa, Severe acute respiratory syndrome coronavirus 2
  REGION 1..14: note = Table B: HLA-DRB1*13:02L HLA-DRB1*04:05L HLA-DRB1*01:02L HLA-DRB1*08:04L HLA-DPA1*01:03-B1*03:01L HLA-DRB1*14:01L HLA-DQA1*01:01-B1*05:01L HLA-DRB1*11:01L HLA-DQA1*01-B1*05L HLA-DQA1*05:05-B1*03:19L HLA-DQA1*05:01-B1*02:01L
  REGION 1..14: note = CONT. FROM ABOVE: HLA-DPA1*01:03-B1*04:02L HLA-DRB1*12:01L HLA-D PA1*02:01-B1*13:01L HLA-DPA1*03:01-B1*105:01L HLA-DPA1*01:02-B1* 04:01L HLA-DRB1*04:08L HLA-DRB1*08:03L HLA-DRB1*15:03L
FQENWNTKHSSGVT

SEQ ID NO: 14037 - protein, 10 aa, Severe acute respiratory syndrome coronavirus 2
  REGION 1..10: note = Table B: HLA-DRB1*13:02M HLA-DRB1*13:03L HLA-DRB1*01:01L HLA-DRB4*03:01NL HLA-DRB1*14:01L HLA-DRB1*11:04L HLA-DRB1*08:01M HLA-DRB5*01:01L HLA-DRB1*12:01L HLA-DRB3*01:01L HLA-DQA1*03:01-B1*03:02M HLA-DQA1*05:05-B1*03:01L
  REGION 1..10: note = CONT. FROM ABOVE: HLA-DRB1*14:17L HLA-DRB1*16:01L HLA-DRB1*15:01 L
NTKHSSGVTR

SEQ ID NO: 14038 - protein, 16 aa, Severe acute respiratory syndrome coronavirus 2
  REGION 1..16: note = Table B: HLA-DRB1*13:02L HLA-DRB1*04:04L HLA-DRB1*14:02L HLA-DRB1*15:01L
GGAYTRYVDNNFCGPD

SEQ ID NO: 14039 - protein, 15 aa, Severe acute respiratory syndrome coronavirus 2
  REGION 1..15: note = Table B: HLA-DRB1*13:02L HLA-DRB1*04:04L HLA-DRB1*11:01L HLA-DRB1*07:01L
LLARAGKASCTLSEQ

SEQ ID NO: 14040 - protein, 10 aa, Severe acute respiratory syndrome coronavirus 2
  REGION 1..10: note = Table B: HLA-DRB1*13:02L HLA-DRB1*13:03L HLA-DRB4*03:01NL HLA-DRB1*08:01L HLA-DRB5*01:01L HLA-DRB1*12:01L HLA-DQA1*03:01-B1*03:02L HLA-DQA1*05:05-B1*03:01L
EQLDFIDTKR

SEQ ID NO: 14041 - protein, 14 aa, Severe acute respiratory syndrome coronavirus 2
  REGION 1..14: note = Table B: HLA-DRB1*13:02L HLA-DPA1*01:03-B1*03:01L HLA-DRB1*04:08L HLA-DQA1*02:01-B1*03:03L
IDTKRGVYCCREHE

SEQ ID NO: 14042 - protein, 14 aa, Severe acute respiratory syndrome coronavirus 2
  REGION 1..14: note = Table B: HLA-DRB1*13:02L HLA-DRB3*01:01L HLA-DPA1*01:02-B1*04:01L
HEHEIAWYTERSEK

SEQ ID NO: 14043 - protein, 13 aa, Severe acute respiratory syndrome coronavirus 2
  REGION 1..13: note = Table B: HLA-DRB1*13:02L HLA-DRB1*08:04L HLA-DRB3*02:01L
EIAWYTERSEKSY

SEQ ID NO: 14044 - protein, 13 aa, Severe acute respiratory syndrome coronavirus 2
  REGION 1..13: note = Table B: HLA-DRB1*13:02L HLA-DRB1*13:03L HLA-DRB1*01:03L HLA-DRB1*04:04L HLA-DRB1*01:02L HLA-DRB1*08:01L HLA-DRB1*04:10L HLA-DRB1*12:01L HLA-DPA1*01:03-B1*104:01L HLA-DPA1*01:02-B1*04:01L HLA-DRB1*07:01L HLA-DRB1*04:08L
  REGION 1..13: note = CONT. FROM ABOVE: HLA-DRB1*15:03L
RSEKSYELQTPFE

SEQ ID NO: 14045 - protein, 12 aa, Severe acute respiratory syndrome coronavirus 2
  REGION 1..12: note = Table B: HLA-DRB1*13:02L HLA-DRB1*04:05L HLA-DRB1*01:02L HLA-DRB1*04:08L
TPFEIKLAKKFD

SEQ ID NO: 14046 - protein, 14 aa, Severe acute respiratory syndrome coronavirus 2
  REGION 1..14: note = Table B: HLA-DRB1*13:02L HLA-DRB1*01:03L HLA-DRB1*01:02L HLA-DRB1*11:04L HLA-DRB1*11:01L HLA-DRB1*16:01L HLA-DRB1*04:08L HLA-DRB1*15:03L
PFEIKLAKKFDTFN

SEQ ID NO: 14047 - protein, 14 aa, Severe acute respiratory syndrome coronavirus 2
  REGION 1..14: note = Table B: HLA-DRB1*13:02L HLA-DRB1*04:05L HLA-DRB1*01:02L HLA-DRB3*01:01L HLA-DPA1*03:01-B1*105:01L HLA-DRB1*15:03L
EIKLAKKFDTFNGE

SEQ ID NO: 14048 - protein, 14 aa, Severe acute respiratory syndrome coronavirus 2
  REGION 1..14: note = Table B: HLA-DRB1*13:02L HLA-DRB1*01:03L HLA-DRB1*04:04L HLA-DQA1*01:02-B1*06:02L HLA-DRB1*01:02L HLA-DPA1*01:03-B1*03:01L HLA-DRB1*12:01L HLA-DPA1*02:01-B1*13:01L HLA-DPA1*03:01-B1*105:01L
  REGION 1..14: note = CONT. FROM ABOVE: HLA-DPA1*01:03-B1*104:01L HLA-DRB1*07:01L HLA- DRB1*04:08L HLA-DRB1*15:03L
LAKKFDTFNGECPN

SEQ ID NO: 14049 - protein, 10 aa, Severe acute respiratory syndrome coronavirus 2
  REGION 1..10: note = Table B: HLA-DRB1*13:02L HLA-DRB1*13:03L HLA-DRB1*04:02L HLA-DRB4*03:01NL HLA-DRB1*08:01L HLA-DRB1*12:01L HLA-DQA1*03:01-B1*03:02L HLA-DQA1*05:05-B1*03:01L HLA-DRB1*14:17L HLA-DQA1*01:03-B1*06:01L
  REGION 1..10: note = CONT. FROM ABOVE: HLA-DQA1*02:01-B1*03:03L
NSIIKTIQPR

SEQ ID NO: 14050 - protein, 10 aa, Severe acute respiratory syndrome coronavirus 2
  REGION 1..10: note = Table B: HLA-DRB1*13:02L HLA-DRB1*13:03L HLA-DRB1*08:01L HLA-DRB1*12:01L HLA-DQA1*03:01-B1*03:02L
KTIQPRVEKK

SEQ ID NO: 14051 - protein, 11 aa, Severe acute respiratory syndrome coronavirus 2
  REGION 1..11: note = Table B: HLA-DRB1*13:02L HLA-DQA1*01:02-B1*06:02L HLA-DQA1*01:01-B1*05:01L HLA-DQA1*01-B1*05L HLA-DRB1*12:01L HLA-DRB1*14:17L HLA-DRB1*16:01L
ETSWQTGDFVK

SEQ ID NO: 14052 - protein, 16 aa, Severe acute respiratory syndrome coronavirus 2
  REGION 1..16: note = Table B: HLA-DRB1*13:02L HLA-DRB1*04:04L HLA-DRB1*01:01L HLA-DRB1*08:04L HLA-DRB1*11:04L HLA-DRB1*08:01L HLA-DRB1*11:01L HLA-DPA1*01:03-B1*04:02L HLA-DRB3*01:01L HLA-DPA1*01:03-B1*104:01L HLA-DPA1*01:02-B1*04:01L
LPQNAVVKIYCPACHN

SEQ ID NO: 14053 - protein, 14 aa, Severe acute respiratory syndrome coronavirus 2
  REGION 1..14: note = Table B: HLA-DRB1*13:02L HLA-DRB1*01:03L HLA-DRB1*04:04L HLA-DRB1*11:01L HLA-DPA1*01:03-B1*104:01L HLA-DPA1*01:02-B1*04:01L HLA-DRB1*07:01L HLA-DRB1*16:01L HLA-DRB1*04:08L HLA-DQA1*02:01-B1*03:03L
AVVKIYCPACHNSE

SEQ ID NO: 14054 - protein, 15 aa, Severe acute respiratory syndrome coronavirus 2
  REGION 1..15: note = Table B: HLA-DRB1*13:02L
VGPEHSLAEYHNESG

SEQ ID NO: 14055 - protein, 13 aa, Severe acute respiratory syndrome coronavirus 2
  REGION 1..13: note = Table B: HLA-DRB1*13:02L HLA-DRB1*13:03L HLA-DRB1*04:02L HLA-DRB1*08:04L HLA-DRB1*11:03L HLA-DRB1*12:01L HLA-DRB3*01:01L HLA-DRB1*16:01L
SGLKTILRKGGRT

SEQ ID NO: 14056 - protein, 15 aa, Severe acute respiratory syndrome coronavirus 2
  REGION 1..15: note = Table B: HLA-DRB1*13:02L HLA-DRB1*11:04L HLA-DRB1*08:01L HLA-DRB1*11:01L HLA-DRB3*01:01L
LKTILRKGGRTIAFG

SEQ ID NO: 14057 - protein, 16 aa, Severe acute respiratory syndrome coronavirus 2
  REGION 1..16: note = Table B: HLA-DRB1*13:02L HLA-DRB1*01:03L HLA-DRB1*14:01L HLA-DRB1*13:01L HLA-DRB1*12:01L HLA-DRB3*01:01L HLA-DRB1*16:01L HLA-DRB1*04:08L HLA-DRB1*15:03L
FSYVGCHNKCAYWVPR

SEQ ID NO: 14058 - protein, 11 aa, Severe acute respiratory syndrome coronavirus 2
  REGION 1..11: note = Table B: HLA-DRB1*13:02L HLA-DRB1*04:05L HLA-DQA1*01:02-B1*06:02L HLA-DRB1*01:02L HLA-DRB1*08:01L HLA-DRB1*12:01L HLA-DPA1*03:01-B1*105:01L HLA-DRB1*14:54L HLA-DQA1*01:03-B1*06:01L HLA-DRB1*04:08L HLA-DRB1*15:03L
YWVPRASANIG

SEQ ID NO: 14059 - protein, 13 aa, Severe acute respiratory syndrome coronavirus 2
  REGION 1..13: note = Table B: HLA-DRB1*13:02L HLA-DRB1*04:04L HLA-DPA1*02:01-B1*13:01L HLA-DPA1*01:03-B1*104:01L HLA-DRB1*04:08L
WVPRASANIGCNH

SEQ ID NO: 14060 - protein, 17 aa, Severe acute respiratory syndrome coronavirus 2
  REGION 1..17: note = Table B: HLA-DRB1*13:02L
GSEGLNDNLLEILQKEK

SEQ ID NO: 14061 - protein, 12 aa, Severe acute respiratory syndrome coronavirus 2
  REGION 1..12: note = Table B: HLA-DRB1*13:02L HLA-DRB1*01:03L HLA-DRB1*04:05L HLA-DQA1*01:02-B1*06:02L HLA-DRB1*01:02L HLA-DRB1*11:03L HLA-DRB1*11:04L HLA-DRB1*11:01L HLA-DQA1*05:01-B1*02:01L HLA-DRB1*12:01L HLA-DRB3*01:01L HLA-DRB1*04:08L HLA-DRB1*15:03L
LEILQKEKVNIN

SEQ ID NO: 14062 - protein, 13 aa, Severe acute respiratory syndrome coronavirus 2
  REGION 1..13: note = Table B: HLA-DRB1*13:02L HLA-DRB1*01:03L HLA-DRB1*04:04L HLA-DRB1*01:02L HLA-DPA1*01:03-B1*03:01L HLA-DRB1*14:01L HLA-DRB1*08:01L HLA-DRB1*04:10L HLA-DPA1*03:01-B1*105:01L HLA-DPA1*01:02-B1*04:01L HLA-DRB1*16:01L HLA-DRB1*04:08L
  REGION 1..13: note = CONT. FROM ABOVE: HLA-DRB1*15:03L
KEKVNINIVGDFK

SEQ ID NO: 14063 - protein, 14 aa, Severe acute respiratory syndrome coronavirus 2
  REGION 1..14: note = Table B: HLA-DRB1*13:02L HLA-DPA1*01:03-B1*03:01L
EKVNINIVGDFKLN

SEQ ID NO: 14064 - protein, 12 aa, Severe acute respiratory syndrome coronavirus 2
  REGION 1..12: note = Table B: HLA-DRB1*13:02L HLA-DPA1*03:01-B1*04:02L HLA-DRB1*14:01L HLA-DQA1*05:01-B1*02:01L HLA-DRB1*12:01L HLA-DRB1*16:01L HLA-DRB1*15:03L
VGDFKLNEEIAI

SEQ ID NO: 14065 - protein, 12 aa, Severe acute respiratory syndrome coronavirus 2
  REGION 1..12: note = Table B: HLA-DRB1*13:02L HLA-DRB3*02:01L HLA-DPA1*03:01-B1*04:02L HLA-DRB1*14:01L HLA-DQA1*05:01-B1*02:01L HLA-DRB1*12:01L HLA-DRB1*16:01L
GDFKLNEEIAII

SEQ ID NO: 14066 - protein, 12 aa, Severe acute respiratory syndrome coronavirus 2
  REGION 1..12: note = Table B: HLA-DRB1*13:02L HLA-DRB1*14:01L HLA-DRB1*12:01L HLA-DPA1*03:01-B1*105:01L
DFKLNEEIAIIL

SEQ ID NO: 14067 - protein, 14 aa, Severe acute respiratory syndrome coronavirus 2
  REGION 1..14: note = Table B: HLA-DRB1*13:02L HLA-DRB3*01:01L
TVKGLDYKAFKQIV

SEQ ID NO: 14068 - protein, 12 aa, Severe acute respiratory syndrome coronavirus 2
  REGION 1..12: note = Table B: HLA-DRB1*13:02L HLA-DRB1*04:04L HLA-DRB1*08:04L HLA-DPA1*01:03-B1*03:01L HLA-DRB3*01:01L HLA-DPA1*02:01-B1*13:01L HLA-DRB1*14:17L HLA-DRB1*08:03L
GLDYKAFKQIVE

SEQ ID NO: 14069 - protein, 14 aa, Severe acute respiratory syndrome coronavirus 2
  REGION 1..14: note = Table B: HLA-DRB1*13:02L HLA-DRB1*01:03L HLA-DRB1*04:04L HLA-DRB1*01:01L HLA-DRB1*08:01L HLA-DRB1*11:01L HLA-DQA1*03:01-B1*03:02L HLA-DPA1*01:03-B1*104:01L HLA-DPA1*01:02-B1*04:01L HLA-DRB1*07:01L HLA-DRB1*16:01L
  REGION 1..14: note = CONT. FROM ABOVE: HLA-DRB1*04:08L HLA-DQA1*02:01-B1*03:03L HLA-D RB1*15:03L
KAFKQIVESCGNFK

SEQ ID NO: 14070 - protein, 15 aa, Severe acute respiratory syndrome coronavirus 2
  REGION 1..15: note = Table B: HLA-DRB1*13:02L HLA-DRB1*04:02L HLA-DRB1*01:01L HLA-DRB1*08:01L HLA-DRB3*01:01L HLA-DQA1*03:01-B1*03:02L
KQIVESCGNFKVTKG

SEQ ID NO: 14071 - protein, 14 aa, Severe acute respiratory syndrome coronavirus 2
  REGION 1..14: note = Table B: HLA-DRB1*13:02L HLA-DRB1*01:03L HLA-DRB1*04:04L HLA-DRB1*04:05L HLA-DRB1*08:04L HLA-DPA1*01:03-B1*03:01L HLA-DRB1*04:10L HLA-DRB1*04:08L
AWNIGEQKSILSPL

SEQ ID NO: 14072 - protein, 14 aa, Severe acute respiratory syndrome coronavirus 2
  REGION 1..14: note = Table B: HLA-DRB1*13:02L HLA-DRB1*04:04L HLA-DRB3*01:01L HLA-DPA1*02:01-B1*13:01L HLA-DPA1*03:01-B1*105:01L
AARVVRSIFSRTLE

SEQ ID NO: 14073 - protein, 14 aa, Severe acute respiratory syndrome coronavirus 2
  REGION 1..14: note = Table B: HLA-DRB1*13:02L HLA-DRB1*04:02L HLA-DRB1*04:04L HLA-DRB1*01:01L HLA-DRB3*01:01L HLA-DRB1*07:01L HLA-DRB1*15:01L
ARVVRSIFSRTLET

SEQ ID NO: 14074 - protein, 15 aa, Severe acute respiratory syndrome coronavirus 2
  REGION 1..15: note = Table B: HLA-DRB1*13:02L HLA-DRB1*11:04L HLA-DRB1*11:01L HLA-DRB3*01:01L HLA-DPA1*01:03-B1*104:01L HLA-DRB1*08:03L
VVRSIFSRTLETAQN

SEQ ID NO: 14075 - protein, 13 aa, Severe acute respiratory syndrome coronavirus 2
  REGION 1..13: note = Table B: HLA-DRB1*13:02L HLA-DRB1*04:04L HLA-DRB1*04:10L HLA-DQA1*05:05-B1*03:01L HLA-DRB1*07:01L
IFSRTLETAQNSV

SEQ ID NO: 14076 - protein, 10 aa, Severe acute respiratory syndrome coronavirus 2
  REGION 1..10: note = Table B: HLA-DRB1*13:02L HLA-DRB1*13:03L HLA-DRB4*03:01NL HLA-DRB1*08:01L HLA-DRB1*12:01L HLA-DQA1*03:01-B1*03:02L HLA-DQA1*05:05-B1*03:01L HLA-DRB1*14:17L HLA-DQA1*02:01-B1*03:03L
AQNSVRVLQK

SEQ ID NO: 14077 - protein, 14 aa, Severe acute respiratory syndrome coronavirus 2
  REGION 1..14: note = Table B: HLA-DRB1*13:02L
YSLRLIDAMMFTSD

SEQ ID NO: 14078 - protein, 14 aa, Severe acute respiratory syndrome coronavirus 2
  REGION 1..14: note = Table B: HLA-DRB1*13:02L HLA-DRB1*13:03L HLA-DRB1*01:03L HLA-DRB1*04:04L HLA-DRB1*01:02L HLA-DRB1*08:77L HLA-DRB3*02:01L HLA-DPA1*01:03-B1*03:01L HLA-DRB1*14:01L HLA-DRB1*14:02L HLA-DQA1*01:01-B1*05:01L HLA-DPA1*01:03-B1*04:02L
  REGION 1..14: note = CONT. FROM ABOVE: HLA-DPA1*02:01-B1*13:01L HLA-DPA1*01:03-B1*104 :01L
IDAMMFTSDLATNN

SEQ ID NO: 14079 - protein, 13 aa, Severe acute respiratory syndrome coronavirus 2
  REGION 1..13: note = Table B: HLA-DRB1*13:02L HLA-DRB1*04:08L
AMMFTSDLATNNL

SEQ ID NO: 14080 - protein, 12 aa, Severe acute respiratory syndrome coronavirus 2
  REGION 1..12: note = Table B: HLA-DRB1*13:02L HLA-DRB1*14:54L HLA-DRB1*14:17L
FTSDLATNNLVV

SEQ ID NO: 14081 - protein, 12 aa, Severe acute respiratory syndrome coronavirus 2
  REGION 1..12: note = Table B: HLA-DRB1*13:02L HLA-DRB1*08:77L HLA-DRB3*02:01L HLA-DPA1*01:03-B1*03:01L HLA-DPA1*03:01-B1*04:02L HLA-DRB1*14:01L HLA-DQA1*05:05-B1*03:01L HLA-DPA1*01:02-B1*04:01L
TSDLATNNLVVM

SEQ ID NO: 14082 - protein, 11 aa, Severe acute respiratory syndrome coronavirus 2
  REGION 1..11: note = Table B: HLA-DRB1*13:02L HLA-DRB1*04:02L HLA-DRB1*01:02L HLA-DRB4*03:01NL HLA-DRB1*08:77L HLA-DQA1*01-B1*05L HLA-DQA1*05:05-B1*03:19L HLA-DRB1*12:01L HLA-DPA1*03:01-B1*105:01L HLA-DQA1*05:05-B1*03:01L
  REGION 1..11: note = CONT. FROM ABOVE: HLA-DRB1*14:17L HLA-DRB1*07:01L HLA-DRB1*16:01 L HLA-DQA1*01:03-B1*06:01L HLA-DRB1*15:03L
VMAYITGGVVQ

SEQ ID NO: 14083 - protein, 13 aa, Severe acute respiratory syndrome coronavirus 2
  REGION 1..13: note = Table B: HLA-DRB1*13:02L HLA-DRB1*04:04L HLA-DRB1*04:05L HLA-DRB4*03:01NL HLA-DRB1*08:77L HLA-DRB3*02:01L HLA-DRB1*14:01L HLA-DRB1*11:03L HLA-DQA1*01-B1*05L HLA-DQA1*03:01-B1*03:02L HLA-DRB1*14:54L HLA-DRB1*07:01L
GGVVQLTSQWLTN

SEQ ID NO: 14084 - protein, 14 aa, Severe acute respiratory syndrome coronavirus 2
  REGION 1..14: note = Table B: HLA-DRB1*13:02L HLA-DRB1*04:04L HLA-DRB1*04:05L HLA-DRB1*08:04L HLA-DRB1*11:04L HLA-DRB1*08:01L HLA-DRB1*11:01L HLA-DRB3*01:01L
SQWLTNIFGTVYEK

SEQ ID NO: 14085 - protein, 15 aa, Severe acute respiratory syndrome coronavirus 2
  REGION 1..15: note = Table B: HLA-DRB1*13:02L
EKLKPVLDWLEEKFK

SEQ ID NO: 14086 - protein, 15 aa, Severe acute respiratory syndrome coronavirus 2
  REGION 1..15: note = Table B: HLA-DRB1*13:02L
PVLDWLEEKFKEGVE

SEQ ID NO: 14087 - protein, 12 aa, Severe acute respiratory syndrome coronavirus 2
  REGION 1..12: note = Table B: HLA-DRB1*13:02L HLA-DRB1*04:05L HLA-DRB1*01:02L HLA-DPA1*01:03-B1*03:01L HLA-DRB1*12:01L HLA-DPA1*02:01-B1*13:01L HLA-DPA1*01:02-B1*04:01L HLA-DRB1*16:01L HLA-DRB1*04:08L
KFKEGVEFLRDG

SEQ ID NO: 14088 - protein, 11 aa, Severe acute respiratory syndrome coronavirus 2
  REGION 1..11: note = Table B: HLA-DRB1*13:02L HLA-DRB1*13:03L HLA-DRB1*12:01L
SVQTFFKLVNK

SEQ ID NO: 14089 - protein, 12 aa, Severe acute respiratory syndrome coronavirus 2
  REGION 1..12: note = Table B: HLA-DRB1*13:02L HLA-DRB1*04:05L HLA-DRB1*01:02L HLA-DRB1*08:04L HLA-DPA1*01:03-B1*03:01L HLA-DPA1*03:01-B1*04:02L HLA-DRB1*14:01L HLA-DQA1*01-B1*05L HLA-DPA1*01:03-B1*04:02L HLA-DRB1*12:01L
VQTFFKLVNKFL

SEQ ID NO: 14090 - protein, 12 aa, Severe acute respiratory syndrome coronavirus 2
  REGION 1..12: note = Table B: HLA-DRB1*13:02L HLA-DRB1*04:05L HLA-DRB1*08:03L
TFFKLVNKFLAL

SEQ ID NO: 14091 - protein, 12 aa, Severe acute respiratory syndrome coronavirus 2
  REGION 1..12: note = Table B: HLA-DRB1*13:02L HLA-DRB1*04:04L HLA-DRB1*08:04L HLA-DPA1*01:03-B1*03:01L HLA-DRB1*11:04L HLA-DRB1*08:01L HLA-DRB1*11:01L HLA-DPA1*01:03-B1*02:01L
IIIGGAKLKALN

SEQ ID NO: 14092 - protein, 14 aa, Severe acute respiratory syndrome coronavirus 2
  REGION 1..14: note = Table B: HLA-DRB1*13:02L HLA-DPA1*01:03-B1*03:01L HLA-DQA1*05:01-B1*02:01L HLA-DRB1*12:01L HLA-DPA1*02:01-B1*13:01L HLA-DRB1*15:03L
ALNLGETFVTHSKG

SEQ ID NO: 14093 - protein, 10 aa, Severe acute respiratory syndrome coronavirus 2
  REGION 1..10: note = Table B: HLA-DRB1*13:02L HLA-DRB1*13:03L HLA-DRB1*01:03L HLA-DRB1*01:01L HLA-DRB1*01:02L HLA-DRB4*03:01NL HLA-DRB1*14:01L HLA-DRB1*11:04L HLA-DRB1*08:01L HLA-DRB1*11:01L HLA-DRB1*12:01L HLA-DRB3*01:01L HLA-DQA1*03:01-B1*03:02L HLA-DRB1*14:17L
  REGION 1..10: note = CONT. FROM ABOVE: HLA-DRB1*16:01L HLA-DQA1*02:01-B1*03:03L
VTHSKGLYRK

SEQ ID NO: 14094 - protein, 14 aa, Severe acute respiratory syndrome coronavirus 2
  REGION 1..14: note = Table B: HLA-DRB1*13:02L HLA-DQA1*01:02-B1*06:02L HLA-DRB1*14:01L HLA-DRB1*12:01L HLA-DRB3*01:01L
KGLYRKCVKSREET

SEQ ID NO: 14095 - protein, 14 aa, Severe acute respiratory syndrome coronavirus 2
  REGION 1..14: note = Table B: HLA-DRB1*13:02L HLA-DRB1*01:02L HLA-DRB1*14:01L HLA-DRB1*11:02L HLA-DRB1*12:01L HLA-DRB3*01:01L HLA-DPA1*02:01-B1*13:01L HLA-DRB1*08:02L
GLYRKCVKSREETG

SEQ ID NO: 14096 - protein, 14 aa, Severe acute respiratory syndrome coronavirus 2
  REGION 1..14: note = Table B: HLA-DRB1*13:02L HLA-DRB1*08:04L HLA-DQA1*05:05-B1*03:01L
GLLMPLKAPKEIIF

SEQ ID NO: 14097 - protein, 16 aa, Severe acute respiratory syndrome coronavirus 2
  REGION 1..16: note = Table B: HLA-DRB1*13:02L HLA-DRB1*04:05L HLA-DRB1*01:02L HLA-DRB1*12:01L
MPLKAPKEIIFLEGET

SEQ ID NO: 14098 - protein, 10 aa, Severe acute respiratory syndrome coronavirus 2
  REGION 1..10: note = Table B: HLA-DRB1*13:02M HLA-DRB1*13:03M HLA-DRB1*04:02L HLA-DQA1*01:02-B1*06:02L HLA-DRB1*01:01L HLA-DRB4*03:01NL HLA-DRB3*02:01L HLA-DRB1*14:01L HLA-DRB1*11:04L HLA-DRB1*14:02L HLA-DRB1*08:01M HLA-DRB5*01:01L HLA-DPA1*01:03-B1*04:02L
  REGION 1..10: note = CONT. FROM ABOVE: HLA-DRB1*12:01M HLA-DRB1*12:02L HLA-DPA1*03:01 -B1*105:01L HLA-DQA1*03:01-B1*03:02L HLA-DQA1*05:05-B1*03:01M HL A-DRB1*14:17L HLA-DRB1*16:01L HLA-DQA1*01:03-B1*06:01L HLA-DQA1* 02:01-B1*03:03L HLA-DRB1*15:01L
EVLTEEVVLK

SEQ ID NO: 14099 - protein, 14 aa, Severe acute respiratory syndrome coronavirus 2
  REGION 1..14: note = Table B: HLA-DRB1*13:02L HLA-DPA1*02:01-B1*13:01L
EEVVLKTGDLQPLE

SEQ ID NO: 14100 - protein, 14 aa, Severe acute respiratory syndrome coronavirus 2
  REGION 1..14: note = Table B: HLA-DRB1*13:02L HLA-DRB1*08:01L HLA-DPA1*01:03-B1*04:01L HLA-DPA1*02:01-B1*13:01L HLA-DPA1*01:03-B1*104:01L
VVLKTGDLQPLEQP

SEQ ID NO: 14101 - protein, 15 aa, Severe acute respiratory syndrome coronavirus 2
  REGION 1..15: note = Table B: HLA-DRB1*13:02L HLA-DPA1*01:03-B1*104:01L
GDLQPLEQPTSEAVE

SEQ ID NO: 14102 - protein, 13 aa, Severe acute respiratory syndrome coronavirus 2
  REGION 1..13: note = Table B: HLA-DRB1*13:02L HLA-DPA1*01:03-B1*02:01L
EAPLVGTPVCING

SEQ ID NO: 14103 - protein, 14 aa, Severe acute respiratory syndrome coronavirus 2
  REGION 1..14: note = Table B: HLA-DRB1*13:02L HLA-DRB1*04:04L HLA-DRB1*08:04L HLA-DRB1*14:01L HLA-DRB1*11:04L HLA-DRB1*11:01L HLA-DQA1*05:01-B1*02:01L HLA-DPA1*01:03-B1*04:01L HLA-DRB3*01:01L HLA-DPA1*01:03-B1*02:01L
  REGION 1..14: note = CONT. FROM ABOVE: HLA-DPA1*01:03-B1*104:01L HLA-DQA1*05:05-B1*03 :01L HLA-DRB1*07:01L HLA-DRB1*15:03L
EIKDTEKYCALAPN

SEQ ID NO: 14104 - protein, 13 aa, Severe acute respiratory syndrome coronavirus 2
  REGION 1..13: note = Table B: HLA-DRB1*13:02L HLA-DRB1*01:02L HLA-DRB1*08:04L HLA-DRB1*08:77L HLA-DRB3*02:01L HLA-DPA1*03:01-B1*04:02L HLA-DRB1*11:03L HLA-DRB1*11:04L HLA-DRB1*14:02L HLA-DPA1*01:03-B1*04:01L HLA-DRB1*09:01L HLA-DRB1*07:01L
APNMMVTNNTFTL

SEQ ID NO: 14105 - protein, 15 aa, Severe acute respiratory syndrome coronavirus 2
  REGION 1..15: note = Table B: HLA-DRB1*13:02L HLA-DRB1*08:04L HLA-DPA1*03:01-B1*04:02L
VTFGDDTVIEVQGYK

SEQ ID NO: 14106 - protein, 13 aa, Severe acute respiratory syndrome coronavirus 2
  REGION 1..13: note = Table B: HLA-DRB1*13:02L HLA-DPA1*02:01-B1*13:01L HLA-DPA1*01:02-B1*04:01L
GDDTVIEVQGYKS

SEQ ID NO: 14107 - protein, 12 aa, Severe acute respiratory syndrome coronavirus 2
  REGION 1..12: note = Table B: HLA-DRB1*13:02L HLA-DRB1*08:04L HLA-DRB3*02:01L HLA-DPA1*01:03-B1*04:01L HLA-DPA1*02:01-B1*13:01L HLA-DRB1*10:01L
TVIEVQGYKSVN

SEQ ID NO: 14108 - protein, 13 aa, Severe acute respiratory syndrome coronavirus 2
  REGION 1..13: note = Table B: HLA-DRB1*13:02L HLA-DRB1*04:04L HLA-DRB1*04:10L HLA-DRB3*01:01L
VNITFELDERIDK

SEQ ID NO: 14109 - protein, 10 aa, Severe acute respiratory syndrome coronavirus 2
  REGION 1..10: note = Table B: HLA-DRB1*13:02L HLA-DRB1*13:03L HLA-DRB1*01:03L HLA-DRB1*04:02L HLA-DRB1*01:01L HLA-DRB4*03:01NL HLA-DRB1*11:04L HLA-DRB1*08:01L HLA-DRB1*12:01L HLA-DQA1*03:01-B1*03:02M HLA-DQA1*05:05-B1*03:01L HLA-DRB1*14:17L HLA-DRB1*16:01L
  REGION 1..10: note = CONT. FROM ABOVE: HLA-DQA1*02:01-B1*03:03L
ERIDKVLNEK

SEQ ID NO: 14110 - protein, 13 aa, Severe acute respiratory syndrome coronavirus 2
  REGION 1..13: note = Table B: HLA-DRB1*13:02L HLA-DRB1*13:03L HLA-DRB1*01:03L HLA-DRB1*04:02L HLA-DRB1*04:04L HLA-DRB1*04:05L HLA-DRB1*01:01L HLA-DRB4*03:01NL HLA-DRB1*08:77L HLA-DRB1*11:03L HLA-DRB1*14:02L HLA-DRB1*14:54L HLA-DRB1*04:08L
SAYTVELGTEVNE

SEQ ID NO: 14111 - protein, 13 aa, Severe acute respiratory syndrome coronavirus 2
  REGION 1..13: note = Table B: HLA-DRB1*13:02L HLA-DRB1*08:77L HLA-DRB1*14:01L HLA-DRB1*11:03L HLA-DRB1*14:02L HLA-DRB4*01:01L HLA-DRB3*01:01L HLA-DPA1*02:01-B1*13:01L HLA-DRB1*08:03L
YEYGTEDDYQGKP

SEQ ID NO: 14112 - protein, 13 aa, Severe acute respiratory syndrome coronavirus 2
  REGION 1..13: note = Table B: HLA-DRB1*13:02L
EYGTEDDYQGKPL

SEQ ID NO: 14113 - protein, 11 aa, Severe acute respiratory syndrome coronavirus 2
  REGION 1..11: note = Table B: HLA-DRB1*13:02L HLA-DRB1*01:03L HLA-DRB1*04:05L HLA-DQA1*01:02-B1*06:02L HLA-DRB4*03:01NL HLA-DPA1*01:03-B1*03:01L HLA-DPA1*03:01-B1*04:02L HLA-DRB1*14:02L HLA-DQA1*01:01-B1*05:01L HLA-DRB1*12:01L
  REGION 1..11: note = CONT. FROM ABOVE: HLA-DPA1*03:01-B1*105:01L HLA-DQA1*05:05-B1*03 :01L HLA-DRB1*14:17L HLA-DRB1*15:03L
TEDDYQGKPLE

SEQ ID NO: 14114 - protein, 14 aa, Severe acute respiratory syndrome coronavirus 2
  REGION 1..14: note = Table B: HLA-DRB1*13:02L HLA-DRB1*01:02L HLA-DRB1*11:01L HLA-DPA1*01:03-B1*104:01L HLA-DRB1*08:03L
EDDYQGKPLEFGAT

SEQ ID NO: 14115 - protein, 14 aa, Severe acute respiratory syndrome coronavirus 2
  REGION 1..14: note = Table B: HLA-DRB1*13:02L HLA-DRB1*01:02L HLA-DPA1*01:03-B1*03:01L HLA-DRB1*11:04L HLA-DRB1*11:01L HLA-DRB1*12:01L
DDYQGKPLEFGATS

SEQ ID NO: 14116 - protein, 14 aa, Severe acute respiratory syndrome coronavirus 2
  REGION 1..14: note = Table B: HLA-DRB1*13:02L HLA-DRB1*01:03L HLA-DRB1*04:04L HLA-DRB1*01:02L HLA-DRB4*03:01NL HLA-DRB1*08:04L HLA-DRB1*08:77L HLA-DPA1*01:03-B1*03:01L HLA-DQA1*05:01-B1*02:01L HLA-DRB1*04:10L HLA-DRB1*12:01L HLA-DRB1*12:02L
  REGION 1..14: note = CONT. FROM ABOVE: HLA-DPA1*02:01-B1*13:01L HLA-DPA1*03:01-B1*105 :01L HLA-DRB1*14:54L HLA-DPA1*01:03-B1*104:01L HLA-DRB1*10:01L H LA-DRB1*04:08L HLA-DRB1*15:03L
KPLEFGATSAALQP

SEQ ID NO: 14117 - protein, 14 aa, Severe acute respiratory syndrome coronavirus 2
  REGION 1..14: note = Table B: HLA-DRB1*13:02L HLA-DRB1*13:03L HLA-DRB1*01:02L HLA-DRB1*14:02L HLA-DRB1*11:01L HLA-DRB4*02:01NL HLA-DQA1*05:05-B1*03:116L HLA-DRB3*01:01L HLA-DPA1*02:01-B1*13:01L HLA-DPA1*01:03-B1*104:01L
  REGION 1..14: note = CONT. FROM ABOVE: HLA-DRB1*14:17L HLA-DRB1*15:03L
FGATSAALQPEEEQ

SEQ ID NO: 14118 - protein, 15 aa, Severe acute respiratory syndrome coronavirus 2
  REGION 1..15: note = Table B: HLA-DRB1*13:02L HLA-DPA1*01:03-B1*104:01L HLA-DRB1*15:03L
GATSAALQPEEEQEE

SEQ ID NO: 14119 - protein, 13 aa, Severe acute respiratory syndrome coronavirus 2
  REGION 1..13: note = Table B: HLA-DRB1*13:02L HLA-DRB1*13:03L HLA-DRB1*01:03L HLA-DRB1*04:02L HLA-DRB4*03:01NL HLA-DRB1*08:04L HLA-DRB1*08:77L HLA-DRB3*01:01L HLA-DRB1*14:54L HLA-DRB1*14:17L
EDWLDDDSQQTVG

SEQ ID NO: 14120 - protein, 15 aa, Severe acute respiratory syndrome coronavirus 2
  REGION 1..15: note = Table B: HLA-DRB1*13:02L HLA-DRB1*13:03L HLA-DRB4*03:01NL HLA-DRB1*11:01L HLA-DQA1*01-B1*05L HLA-DQA1*05:05-B1*03:116L HLA-DRB3*01:01L HLA-DPA1*02:01-B1*13:01L HLA-DPA1*01:03-B1*104:01L
GSEDNQTTTIQTIVE

SEQ ID NO: 14121 - protein, 16 aa, Severe acute respiratory syndrome coronavirus 2
  REGION 1..16: note = Table B: HLA-DRB1*13:02L HLA-DRB1*13:03L HLA-DPA1*01:03-B1*03:01L HLA-DPA1*03:01-B1*04:02L HLA-DRB1*14:01L HLA-DPA1*02:01-B1*13:01L HLA-DPA1*01:03-B1*104:01L HLA-DPA1*01:02-B1*04:01L
DNQTTTIQTIVEVQPQ

SEQ ID NO: 14122 - protein, 12 aa, Severe acute respiratory syndrome coronavirus 2
  REGION 1..12: note = Table B: HLA-DRB1*13:02L HLA-DRB1*01:03L HLA-DRB1*04:02L HLA-DRB1*04:05L HLA-DRB1*01:02L HLA-DRB4*03:01NL HLA-DRB3*02:01L HLA-DPA1*01:03-B1*03:01L HLA-DRB1*11:03L HLA-DQA1*01-B1*05L HLA-DRB1*04:10L HLA-DRB1*09:01L HLA-DRB1*12:02L HLA-DRB1*14:54L
  REGION 1..12: note = CONT. FROM ABOVE: HLA-DQA1*05:05-B1*03:01L HLA-DRB1*14:17L HLA-D RB1*07:01L HLA-DRB1*04:08L
TPVVQTIEVNSF

SEQ ID NO: 14123 - protein, 13 aa, Severe acute respiratory syndrome coronavirus 2
  REGION 1..13: note = Table B: HLA-DRB1*13:02L HLA-DRB1*01:03L HLA-DRB1*04:04L HLA-DRB1*04:05L HLA-DRB4*03:01NL HLA-DRB3*02:01L HLA-DPA1*01:03-B1*03:01L HLA-DRB1*04:10L HLA-DRB1*12:02L HLA-DRB1*14:54L HLA-DRB1*04:08L
PVVQTIEVNSFSG

SEQ ID NO: 14124 - protein, 10 aa, Severe acute respiratory syndrome coronavirus 2
  REGION 1..10: note = Table B: HLA-DRB1*13:02L HLA-DRB1*13:03M HLA-DQA1*01:02-B1*06:02L HLA-DRB1*01:01L HLA-DRB4*03:01NL HLA-DRB3*02:01L HLA-DRB1*14:01L HLA-DRB1*11:04L HLA-DRB1*08:01M HLA-DRB5*01:01L HLA-DPA1*01:03-B1*04:02L HLA-DRB1*12:01M
  REGION 1..10: note = CONT. FROM ABOVE: HLA-DRB1*12:02L HLA-DPA1*03:01-B1*105:01L HLA- DQA1*03:01-B1*03:02M HLA-DQA1*05:05-B1*03:01M HLA-DRB1*14:17L HL A-DQA1*01:03-B1*06:01L HLA-DQA1*02:01-B1*03:03L HLA-DRB1*15:01L
EVNSFSGYLK

SEQ ID NO: 14125 - protein, 12 aa, Severe acute respiratory syndrome coronavirus 2
  REGION 1..12: note = Table B: HLA-DRB1*13:02L HLA-DQA1*01:02-B1*06:02L HLA-DRB1*08:04L HLA-DRB1*08:77L HLA-DRB3*02:01L HLA-DPA1*01:03-B1*03:01L HLA-DPA1*03:01-B1*04:02L HLA-DRB1*11:04L HLA-DRB1*14:02L HLA-DQA1*05:05-B1*03:19L
  REGION 1..12: note = CONT. FROM ABOVE: HLA-DRB1*12:02L HLA-DQA1*05:05-B1*03:01L HLA-D RB1*10:01L HLA-DRB1*08:03L
NVYIKNADIVEE

SEQ ID NO: 14126 - protein, 12 aa, Severe acute respiratory syndrome coronavirus 2
  REGION 1..12: note = Table B: HLA-DRB1*13:02L HLA-DQA1*01:02-B1*06:02L HLA-DRB1*08:04L HLA-DPA1*01:03-B1*03:01L HLA-DPA1*03:01-B1*04:02L HLA-DRB1*08:01L HLA-DQA1*05:05-B1*03:19L HLA-DQA1*05:05-B1*03:01L
VYIKNADIVEEA

SEQ ID NO: 14127 - protein, 12 aa, Severe acute respiratory syndrome coronavirus 2
  REGION 1..12: note = Table B: HLA-DRB1*13:02L HLA-DRB1*13:03L HLA-DRB1*01:03L HLA-DRB1*04:04L HLA-DRB1*04:05L HLA-DRB1*01:02L HLA-DRB4*03:01NL HLA-DPA1*01:03-B1*03:01L HLA-DRB1*08:01L HLA-DQA1*05:05-B1*03:19L HLA-DRB1*04:10L HLA-DRB1*12:01L
  REGION 1..12: note = CONT. FROM ABOVE: HLA-DPA1*02:01-B1*13:01L HLA-DPA1*01:02-B1*04: 01L HLA-DRB1*04:08L HLA-DRB1*15:03L
YIKNADIVEEAK

SEQ ID NO: 14128 - protein, 12 aa, Severe acute respiratory syndrome coronavirus 2
  REGION 1..12: note = Table B: HLA-DRB1*13:02L HLA-DRB1*08:04L HLA-DRB1*11:01L HLA-DRB3*01:01L HLA-DQA1*01:03-B1*06:01L HLA-DRB1*15:03L
DIVEEAKKVKPT

SEQ ID NO: 14129 - protein, 12 aa, Severe acute respiratory syndrome coronavirus 2
  REGION 1..12: note = Table B: HLA-DRB1*13:02L HLA-DRB1*04:05L HLA-DQA1*01:02-B1*06:02L HLA-DRB1*01:01L HLA-DRB1*08:77L HLA-DRB1*11:03L HLA-DRB1*11:04L HLA-DRB1*08:01L HLA-DQA1*05:01-B1*02:01L HLA-DRB1*12:02L
  REGION 1..12: note = CONT. FROM ABOVE: HLA-DPA1*03:01-B1*105:01L HLA-DRB1*14:54L HLA- DRB1*07:01L HLA-DRB1*04:08L HLA-DRB1*15:03L
NVYLKHGGGVAG

SEQ ID NO: 14130 - protein, 14 aa, Severe acute respiratory syndrome coronavirus 2
  REGION 1..14: note = Table B: HLA-DRB1*13:02L HLA-DRB1*04:05L HLA-DRB1*01:01L HLA-DRB1*08:04L HLA-DRB1*14:02L HLA-DQA1*05:01-B1*02:01L HLA-DPA1*02:01-B1*13:01L HLA-DPA1*01:03-B1*104:01L
VYLKHGGGVAGALN

SEQ ID NO: 14131 - protein, 12 aa, Severe acute respiratory syndrome coronavirus 2
  REGION 1..12: note = Table B: HLA-DRB1*13:02L HLA-DRB1*04:05L HLA-DRB1*01:02L HLA-DPA1*01:03-B1*03:01L HLA-DQA1*01:01-B1*05:01L HLA-DRB1*08:01L HLA-DPA1*01:03-B1*04:02L HLA-DRB1*15:03L
GGVAGALNKATN

SEQ ID NO: 14132 - protein, 14 aa, Severe acute respiratory syndrome coronavirus 2
  REGION 1..14: note = Table B: HLA-DRB1*13:02L HLA-DRB1*01:02L HLA-DRB1*04:10L HLA-DPA1*02:01-B1*13:01L
KATNNAMQVESDDY

SEQ ID NO: 14133 - protein, 15 aa, Severe acute respiratory syndrome coronavirus 2
  REGION 1..15: note = Table B: HLA-DRB1*13:02L HLA-DRB1*14:01L HLA-DRB1*14:02L HLA-DQA1*05:05-B1*03:01L
NNAMQVESDDYIATN

SEQ ID NO: 14134 - protein, 12 aa, Severe acute respiratory syndrome coronavirus 2
  REGION 1..12: note = Table B: HLA-DRB1*13:02L HLA-DRB1*01:03L HLA-DRB1*04:05L HLA-DQA1*01:02-B1*06:02L HLA-DPA1*01:03-B1*03:01L HLA-DRB1*12:01L HLA-DPA1*03:01-B1*105:01L
VGPNVNKGEDIQ

SEQ ID NO: 14135 - protein, 12 aa, Severe acute respiratory syndrome coronavirus 2
  REGION 1..12: note = Table B: HLA-DRB1*13:02L HLA-DRB1*04:04L HLA-DRB1*01:02L HLA-DRB1*08:04L HLA-DRB3*02:01L HLA-DRB1*14:01L HLA-DRB1*11:03L HLA-DRB1*11:04L HLA-DQA1*01:01-B1*05:01L HLA-DRB1*08:01L HLA-DRB1*12:02L HLA-DPA1*02:01-B1*13:01L
  REGION 1..12: note = CONT. FROM ABOVE: HLA-DPA1*03:01-B1*105:01L HLA-DQA1*05:05-B1*03 :01L HLA-DQA1*01:03-B1*06:01L HLA-DRB1*08:03L
EDIQLLKSAYEN

SEQ ID NO: 14136 - protein, 12 aa, Severe acute respiratory syndrome coronavirus 2
  REGION 1..12: note = Table B: HLA-DRB1*13:02L HLA-DRB1*01:03L HLA-DRB1*08:04L HLA-DRB3*02:01L HLA-DPA1*01:03-B1*03:01L HLA-DQA1*01:01-B1*05:01L HLA-DRB1*08:01L HLA-DQA1*05:05-B1*03:01L HLA-DRB1*07:01L HLA-DRB1*04:08L
SAYENFNQHEVL

SEQ ID NO: 14137 - protein, 13 aa, Severe acute respiratory syndrome coronavirus 2
  REGION 1..13: note = Table B: HLA-DRB1*13:02L HLA-DRB1*13:03L HLA-DRB1*01:03L HLA-DRB1*04:02L HLA-DRB1*01:02L HLA-DRB1*08:04L HLA-DPA1*01:03-B1*03:01L HLA-DRB1*08:01L HLA-DPA1*01:03-B1*04:01L HLA-DPA1*01:03-B1*04:02L
  REGION 1..13: note = CONT. FROM ABOVE: HLA-DRB1*12:01L HLA-DQA1*05:05-B1*03:01L HLA-D RB1*04:08L
ENFNQHEVLLAPL

SEQ ID NO: 14138 - protein, 14 aa, Severe acute respiratory syndrome coronavirus 2
  REGION 1..14: note = Table B: HLA-DRB1*13:02L HLA-DRB1*01:03L HLA-DRB1*08:04L HLA-DPA1*01:03-B1*03:01L HLA-DRB1*14:01L HLA-DQA1*01:01-B1*05:01L HLA-DRB1*08:01L HLA-DQA1*05:05-B1*03:19L HLA-DQA1*05:01-B1*02:01L
  REGION 1..14: note = CONT. FROM ABOVE: HLA-DPA1*02:01-B1*13:01L HLA-DPA1*01:03-B1*104 :01L HLA-DRB1*10:01L HLA-DRB1*04:08L
NQHEVLLAPLLSAG

SEQ ID NO: 14139 - protein, 14 aa, Severe acute respiratory syndrome coronavirus 2
  REGION 1..14: note = Table B: HLA-DRB1*13:02L HLA-DRB1*04:04L HLA-DRB1*08:04L HLA-DRB1*14:01L HLA-DRB1*08:01L HLA-DQA1*05:05-B1*03:19L HLA-DPA1*01:03-B1*04:01L HLA-DPA1*01:03-B1*04:02L HLA-DPA1*01:03-B1*104:01L
TVRTNVYLAVFDKN

SEQ ID NO: 14140 - protein, 12 aa, Severe acute respiratory syndrome coronavirus 2
  REGION 1..12: note = Table B: HLA-DRB1*13:02L HLA-DRB1*08:04L HLA-DRB3*02:01L HLA-DRB1*08:01L HLA-DRB1*04:08L
VYLAVFDKNLYD

SEQ ID NO: 14141 - protein, 12 aa, Severe acute respiratory syndrome coronavirus 2
  REGION 1..12: note = Table B: HLA-DRB1*13:02L HLA-DRB1*04:05L HLA-DQA1*01:02-B1*06:02L HLA-DRB1*01:02L HLA-DPA1*02:01-B1*13:01L HLA-DPA1*01:03-B1*104:01L HLA-DRB1*15:03L
YDKLVSSFLEMK

SEQ ID NO: 14142 - protein, 13 aa, Severe acute respiratory syndrome coronavirus 2
  REGION 1..13: note = Table B: HLA-DRB1*13:02L HLA-DQA1*05:05-B1*03:19L HLA-DRB1*08:02L
SSFLEMKSEKQVE

SEQ ID NO: 14143 - protein, 11 aa, Severe acute respiratory syndrome coronavirus 2
  REGION 1..11: note = Table B: HLA-DRB1*13:02L HLA-DRB1*13:03L HLA-DRB1*01:03L HLA-DRB1*08:01L HLA-DRB1*12:01L HLA-DRB1*14:17L HLA-DQA1*02:01-B1*03:03L
EMKSEKQVEQK

SEQ ID NO: 14144 - protein, 13 aa, Severe acute respiratory syndrome coronavirus 2
  REGION 1..13: note = Table B: HLA-DRB1*13:02L HLA-DRB1*01:03L HLA-DRB1*04:02L HLA-DRB1*04:05L HLA-DRB1*08:04L HLA-DRB1*11:03L HLA-DRB1*11:04L HLA-DRB1*11:01L HLA-DRB3*01:01L HLA-DRB1*04:08L HLA-DRB1*08:03L
EQKIAEIPKEEVK

SEQ ID NO: 14145 - protein, 12 aa, Severe acute respiratory syndrome coronavirus 2
  REGION 1..12: note = Table B: HLA-DRB1*13:02L HLA-DRB1*04:05L HLA-DRB1*08:04L HLA-DRB1*11:04L HLA-DRB1*08:01L HLA-DRB1*11:01L HLA-DRB1*12:01L HLA-DRB3*01:01L HLA-DRB1*04:08L
KIAEIPKEEVKP

SEQ ID NO: 14146 - protein, 11 aa, Severe acute respiratory syndrome coronavirus 2
  REGION 1..11: note = Table B: HLA-DRB1*13:02L HLA-DRB4*03:01NL HLA-DRB1*08:77L HLA-DPA1*03:01-B1*04:02L HLA-DRB1*03:01L HLA-DQA1*01-B1*05L HLA-DRB4*01:01L HLA-DQA1*05:05-B1*03:116L HLA-DPA1*01:03-B1*04:02L HLA-DRB1*12:01L
  REGION 1..11: note = CONT. FROM ABOVE: HLA-DPA1*02:01-B1*13:01L HLA-DPA1*01:03-B1*104 :01L HLA-DRB1*10:01L HLA-DRB1*08:02L
AEIPKEEVKPF

SEQ ID NO: 14147 - protein, 10 aa, Severe acute respiratory syndrome coronavirus 2
  REGION 1..10: note = Table B: HLA-DRB1*13:02L HLA-DRB1*13:03L HLA-DRB1*08:01L HLA-DRB1*12:01L HLA-DQA1*03:01-B1*03:02L HLA-DQA1*05:05-B1*03:01L
EVKPFITESK

SEQ ID NO: 14148 - protein, 10 aa, Severe acute respiratory syndrome coronavirus 2
  REGION 1..10: note = Table B: HLA-DRB1*13:02L HLA-DRB1*13:03L HLA-DRB1*01:01L HLA-DRB4*03:01NL HLA-DRB3*02:01L HLA-DRB1*11:04L HLA-DRB1*08:01L HLA-DRB5*01:01L HLA-DPA1*01:03-B1*04:02L HLA-DRB1*12:01L HLA-DQA1*03:01-B1*03:02L HLA-DQA1*05:05-B1*03:01L
  REGION 1..10: note = CONT. FROM ABOVE: HLA-DRB1*14:17L
TESKPSVEQR

SEQ ID NO: 14149 - protein, 10 aa, Severe acute respiratory syndrome coronavirus 2
  REGION 1..10: note = Table B: HLA-DRB1*13:02L HLA-DRB1*13:03L HLA-DRB4*03:01NL HLA-DRB1*08:01L HLA-DRB1*12:01L HLA-DQA1*03:01-B1*03:02L HLA-DQA1*05:05-B1*03:01L
ESKPSVEQRK

SEQ ID NO: 14150 - protein, 13 aa, Severe acute respiratory syndrome coronavirus 2
  REGION 1..13: note = Table B: HLA-DRB1*13:02L HLA-DRB1*08:04L HLA-DRB1*11:04L HLA-DRB1*11:01L
VTTTLEETKFLTE

SEQ ID NO: 14151 - protein, 12 aa, Severe acute respiratory syndrome coronavirus 2
  REGION 1..12: note = Table B: HLA-DRB1*13:02L HLA-DRB1*13:03L HLA-DRB1*04:02L HLA-DRB1*04:04L HLA-DRB1*04:05L HLA-DRB4*03:01NL HLA-DRB1*08:77L HLA-DRB3*02:01L HLA-DRB1*11:03L HLA-DRB1*14:02L HLA-DQA1*05:05-B1*03:19L HLA-DRB3*01:01L HLA-DRB1*14:54L
  REGION 1..12: note = CONT. FROM ABOVE: HLA-DRB1*14:17L HLA-DRB1*07:01L HLA-DRB1*10:01 L HLA-DRB1*08:03L
TTLEETKFLTEN

SEQ ID NO: 14152 - protein, 11 aa, Severe acute respiratory syndrome coronavirus 2
  REGION 1..11: note = Table B: HLA-DRB1*13:02L
NLHPDSATLVS

SEQ ID NO: 14153 - protein, 13 aa, Severe acute respiratory syndrome coronavirus 2
  REGION 1..13: note = Table B: HLA-DRB1*13:02L HLA-DRB1*01:03L HLA-DRB1*04:02L HLA-DRB1*04:05L HLA-DRB1*01:02L HLA-DRB4*03:01NL HLA-DRB1*08:04L HLA-DRB1*08:77L HLA-DRB3*02:01L HLA-DPA1*03:01-B1*04:02L HLA-DRB1*03:01L HLA-DRB1*14:02L HLA-DRB1*08:01L HLA-DRB4*01:01L
  REGION 1..13: note = CONT. FROM ABOVE: HLA-DQA1*05:05-B1*03:116L HLA-DPA1*01:03-B1*04 :02L HLA-DRB1*12:01L HLA-DRB3*01:01L HLA-DPA1*02:01-B1*13:01L HL A-DPA1*01:03-B1*104:01L HLA-DPA1*01:02-B1*04:01L HLA-DRB1*04:08L HLA-DRB1*15:03L
LHPDSATLVSDID

SEQ ID NO: 14154 - protein, 14 aa, Severe acute respiratory syndrome coronavirus 2
  REGION 1..14: note = Table B: HLA-DRB1*13:02L HLA-DRB1*04:05L HLA-DRB1*01:02L
IDITFLKKDAPYIV

SEQ ID NO: 14155 - protein, 18 aa, Severe acute respiratory syndrome coronavirus 2
  REGION 1..18: note = Table B: HLA-DRB1*13:02L
IVGDVVQEGVLTAVVIPT

SEQ ID NO: 14156 - protein, 15 aa, Severe acute respiratory syndrome coronavirus 2
  REGION 1..15: note = Table B: HLA-DRB1*13:02L HLA-DRB1*04:05L HLA-DRB1*11:04L HLA-DRB3*01:01L
GTTEMLAKALRKVPT

SEQ ID NO: 14157 - protein, 15 aa, Severe acute respiratory syndrome coronavirus 2
  REGION 1..15: note = Table B: HLA-DRB1*13:02L HLA-DRB1*11:01L HLA-DPA1*03:01-B1*105:01L HLA-DRB1*16:01L HLA-DRB1*15:03L
TEMLAKALRKVPTDN

SEQ ID NO: 14158 - protein, 14 aa, Severe acute respiratory syndrome coronavirus 2
  REGION 1..14: note = Table B: HLA-DRB1*13:02L HLA-DRB1*01:03L HLA-DRB1*04:04L HLA-DRB1*01:02L HLA-DRB1*08:04L HLA-DRB1*08:77L HLA-DRB3*02:01L HLA-DPA1*01:03-B1*03:01L HLA-DPA1*03:01-B1*04:02L HLA-DRB1*14:01L HLA-DRB1*11:03L HLA-DRB1*11:04L HLA-DRB1*14:02L
  REGION 1..14: note = CONT. FROM ABOVE: HLA-DQA1*01:01-B1*05:01L HLA-DRB1*08:01L HLA-D RB1*11:01L HLA-DPA1*01:03-B1*04:01L HLA-DQA1*05:05-B1*03:116L HL A-DRB1*09:01L HLA-DPA1*01:03-B1*04:02L HLA-DRB1*12:02L HLA-DPA1* 02:01-B1*13:01L HLA-DPA1*01:03-B1*104:01L
  REGION 1..14: note = CONT. FROM ABOVE: HLA-DPA1*01:02-B1*04:01L HLA-DRB1*07:01L HLA-D RB1*10:01L HLA-DRB1*08:03L HLA-DRB1*15:03L
VPTDNYITTYPGQG

SEQ ID NO: 14159 - protein, 12 aa, Severe acute respiratory syndrome coronavirus 2
  REGION 1..12: note = Table B: HLA-DRB1*13:02L HLA-DRB1*08:77L HLA-DRB1*14:01L HLA-DPA1*01:03-B1*04:01L HLA-DRB1*09:01L HLA-DRB1*12:02L HLA-DRB1*07:01L
DNYITTYPGQGL

SEQ ID NO: 14160 - protein, 11 aa, Severe acute respiratory syndrome coronavirus 2
  REGION 1..11: note = Table B: HLA-DRB1*13:02L HLA-DRB1*04:04L HLA-DRB1*04:05L HLA-DRB4*03:01NL HLA-DRB1*08:77L HLA-DRB1*11:03L HLA-DRB1*14:02L HLA-DRB1*08:01L HLA-DRB1*09:01L HLA-DRB1*12:02L HLA-DRB1*14:54L HLA-DRB1*07:01L
YITTYPGQGLN

SEQ ID NO: 14161 - protein, 15 aa, Severe acute respiratory syndrome coronavirus 2
  REGION 1..15: note = Table B: HLA-DRB1*13:02L HLA-DRB1*13:03L HLA-DRB1*01:03L HLA-DRB1*04:04L HLA-DRB1*01:02L HLA-DRB4*03:01NL HLA-DPA1*01:03-B1*03:01L HLA-DPA1*03:01-B1*04:02L HLA-DQA1*01:01-B1*05:01L HLA-DRB1*08:01L
  REGION 1..15: note = CONT. FROM ABOVE: HLA-DPA1*01:03-B1*04:02L HLA-DRB1*12:01L HLA-D PA1*02:01-B1*13:01L HLA-DPA1*03:01-B1*105:01L HLA-DRB1*14:54L HL A-DPA1*01:03-B1*104:01L HLA-DPA1*01:02-B1*04:01L HLA-DRB1*04:08L HLA-DRB1*15:03L
YPGQGLNGYTVEEAK

SEQ ID NO: 14162 - protein, 12 aa, Severe acute respiratory syndrome coronavirus 2
  REGION 1..12: note = Table B: HLA-DRB1*13:02L HLA-DRB1*13:03L HLA-DRB1*01:03L HLA-DRB1*01:02L HLA-DRB1*08:77L HLA-DRB3*02:01L HLA-DPA1*01:03-B1*03:01L HLA-DPA1*03:01-B1*04:02L HLA-DRB1*14:01L HLA-DPA1*01:03-B1*04:01L HLA-DRB1*12:02L
  REGION 1..12: note = CONT. FROM ABOVE: HLA-DRB1*14:54L HLA-DQA1*05:05-B1*03:01L HLA-D PA1*01:02-B1*04:01L HLA-DRB1*04:08L
LNGYTVEEAKTV

SEQ ID NO: 14163 - protein, 10 aa, Severe acute respiratory syndrome coronavirus 2
  REGION 1..10: note = Table B: HLA-DRB1*13:02L HLA-DRB1*13:03L HLA-DRB1*01:03L HLA-DRB1*04:02L HLA-DRB1*01:01L HLA-DRB4*03:01NL HLA-DRB1*08:01L HLA-DRB5*01:01L HLA-DRB1*12:01L HLA-DQA1*03:01-B1*03:02L HLA-DQA1*05:05-B1*03:01L HLA-DRB1*14:17L HLA-DRB1*16:01L
  REGION 1..10: note = CONT. FROM ABOVE: HLA-DQA1*02:01-B1*03:03L
TVEEAKTVLK

SEQ ID NO: 14164 - protein, 15 aa, Severe acute respiratory syndrome coronavirus 2
  REGION 1..15: note = Table B: HLA-DRB1*13:02L HLA-DRB1*04:05L HLA-DPA1*01:03-B1*03:01L HLA-DRB1*12:01L HLA-DPA1*02:01-B1*13:01L HLA-DPA1*03:01-B1*105:01L HLA-DRB1*16:01L
TVLKKCKSAFYILPS

SEQ ID NO: 14165 - protein, 12 aa, Severe acute respiratory syndrome coronavirus 2
  REGION 1..12: note = Table B: HLA-DRB1*13:02L HLA-DRB1*13:03L HLA-DRB1*08:04L HLA-DRB1*12:01L HLA-DRB1*12:02L HLA-DRB1*14:54L HLA-DRB1*16:01L
LPSIISNEKQEI

SEQ ID NO: 14166 - protein, 12 aa, Severe acute respiratory syndrome coronavirus 2
  REGION 1..12: note = Table B: HLA-DRB1*13:02L HLA-DRB1*13:03L HLA-DQA1*01:02-B1*06:02L HLA-DRB1*08:04L HLA-DRB1*08:77L HLA-DRB1*14:02L HLA-DRB1*12:02L
PSIISNEKQEIL

SEQ ID NO: 14167 - protein, 11 aa, Severe acute respiratory syndrome coronavirus 2
  REGION 1..11: note = Table B: HLA-DRB1*13:02L HLA-DRB1*13:03L HLA-DRB1*01:03L HLA-DRB1*04:05L HLA-DQA1*01:02-B1*06:02L HLA-DRB1*01:02L HLA-DRB4*03:01NL HLA-DRB1*08:04L HLA-DRB1*08:77L HLA-DPA1*01:03-B1*03:01L HLA-DRB1*03:01L HLA-DRB1*11:03L
  REGION 1..11: note = CONT. FROM ABOVE: HLA-DRB1*11:04L HLA-DRB1*14:02L HLA-DRB1*11:01 L HLA-DQA1*05:05-B1*03:19L HLA-DRB1*04:10L HLA-DRB1*12:02L HLA-D RB3*01:01L HLA-DPA1*03:01-B1*105:01L HLA-DQA1*05:05-B1*03:01L HL A-DRB1*14:17L HLA-DRB1*10:01L HLA-DQA1*01:03-B1*06:01L
  REGION 1..11: note = CONT. FROM ABOVE: HLA-DRB1*04:08L HLA-DRB1*08:03L
IISNEKQEILG

SEQ ID NO: 14168 - protein, 12 aa, Severe acute respiratory syndrome coronavirus 2
  REGION 1..12: note = Table B: HLA-DRB1*13:02L HLA-DRB3*02:01L HLA-DPA1*03:01-B1*04:02L HLA-DRB1*12:01L HLA-DRB1*07:01L HLA-DRB1*16:01L
KQEILGTVSWNL

SEQ ID NO: 14169 - protein, 11 aa, Severe acute respiratory syndrome coronavirus 2
  REGION 1..11: note = Table B: HLA-DRB1*13:02L HLA-DRB1*13:03L HLA-DRB1*01:03L HLA-DRB1*04:02L HLA-DRB1*04:05L HLA-DRB4*03:01NL HLA-DRB1*08:77L HLA-DRB3*02:01L HLA-DPA1*03:01-B1*04:02L HLA-DRB1*14:01L HLA-DRB1*11:03L HLA-DQA1*05:05-B1*03:19L
  REGION 1..11: note = CONT. FROM ABOVE: HLA-DPA1*01:03-B1*04:01L HLA-DRB1*12:02L HLA-D RB1*14:17L HLA-DRB1*07:01L HLA-DRB1*04:08L
EILGTVSWNLR

SEQ ID NO: 14170 - protein, 13 aa, Severe acute respiratory syndrome coronavirus 2
  REGION 1..13: note = Table B: HLA-DRB1*13:02L HLA-DRB1*01:03L HLA-DRB1*01:02L HLA-DRB3*01:01L HLA-DRB1*16:01L HLA-DRB1*15:03L
GTVSWNLREMLAH

SEQ ID NO: 14171 - protein, 10 aa, Severe acute respiratory syndrome coronavirus 2
  REGION 1..10: note = Table B: HLA-DRB1*13:02L HLA-DRB1*13:03L HLA-DRB1*01:01L HLA-DRB4*03:01NL HLA-DRB1*11:04L HLA-DRB1*08:01L HLA-DRB5*01:01L HLA-DRB1*12:01L HLA-DQA1*03:01-B1*03:02M HLA-DQA1*05:05-B1*03:01L HLA-DRB1*14:17L
  REGION 1..10: note = CONT. FROM ABOVE: HLA-DQA1*01:03-B1*06:01L HLA-DQA1*02:01-B1*03: 03L
EMLAHAEETR

SEQ ID NO: 14172 - protein, 13 aa, Severe acute respiratory syndrome coronavirus 2
  REGION 1..13: note = Table B: HLA-DRB1*13:02L HLA-DRB1*04:04L HLA-DRB1*07:01L
ETRKLMPVCVETK

SEQ ID NO: 14173 - protein, 11 aa, Severe acute respiratory syndrome coronavirus 2
  REGION 1..11: note = Table B: HLA-DRB1*13:02M HLA-DRB1*01:01L HLA-DRB4*03:01NL HLA-DRB1*14:01L HLA-DRB1*11:04L HLA-DRB5*01:01L HLA-DRB1*12:01M HLA-DRB1*12:02L HLA-DQA1*05:05-B1*03:01M HLA-DRB1*15:01L
ETKAIVSTIQR

SEQ ID NO: 14174 - protein, 14 aa, Severe acute respiratory syndrome coronavirus 2
  REGION 1..14: note = Table B: HLA-DRB1*13:02L HLA-DRB1*01:03L HLA-DRB1*08:01L HLA-DRB3*01:01L HLA-DRB1*04:08L
VSTIQRKYKGIKIQ

SEQ ID NO: 14175 - protein, 14 aa, Severe acute respiratory syndrome coronavirus 2
  REGION 1..14: note = Table B: HLA-DRB1*13:02L HLA-DRB3*01:01L HLA-DRB1*07:01L
TIQRKYKGIKIQEG

SEQ ID NO: 14176 - protein, 12 aa, Severe acute respiratory syndrome coronavirus 2
  REGION 1..12: note = Table B: HLA-DRB1*13:02L HLA-DRB1*13:03L HLA-DRB1*04:04L HLA-DRB1*08:04L HLA-DPA1*01:03-B1*03:01L HLA-DRB1*11:04L HLA-DRB1*08:01L HLA-DPA1*01:03-B1*04:02L HLA-DRB1*12:02L HLA-DPA1*02:01-B1*13:01L HLA-DPA1*01:03-B1*104:01L
  REGION 1..12: note = CONT. FROM ABOVE: HLA-DPA1*01:02-B1*04:01L HLA-DRB1*10:01L HLA-D RB1*08:03L
YKGIKIQEGVVD

SEQ ID NO: 14177 - protein, 12 aa, Severe acute respiratory syndrome coronavirus 2
  REGION 1..12: note = Table B: HLA-DRB1*13:02L HLA-DRB1*04:04L HLA-DRB3*02:01L HLA-DPA1*03:01-B1*04:02L HLA-DPA1*02:01-B1*13:01L HLA-DRB1*10:01L
GIKIQEGVVDYG

SEQ ID NO: 14178 - protein, 13 aa, Severe acute respiratory syndrome coronavirus 2
  REGION 1..13: note = Table B: HLA-DRB1*13:02L HLA-DRB1*04:04L HLA-DRB1*01:01L HLA-DRB1*11:03L HLA-DRB1*11:04L HLA-DRB1*14:02L HLA-DRB1*11:01L HLA-DRB3*01:01L HLA-DRB1*07:01L HLA-DRB1*15:01L
ARFYFYTSKTTVA

SEQ ID NO: 14179 - protein, 12 aa, Severe acute respiratory syndrome coronavirus 2
  REGION 1..12: note = Table B: HLA-DRB1*13:02L HLA-DRB1*04:04L HLA-DRB1*01:01L HLA-DRB1*08:04L HLA-DRB1*08:77L HLA-DPA1*01:03-B1*03:01L HLA-DRB1*11:03L HLA-DRB1*11:04L HLA-DRB1*14:02L HLA-DQA1*01:01-B1*05:01L HLA-DRB1*11:01L
  REGION 1..12: note = CONT. FROM ABOVE: HLA-DPA1*01:03-B1*04:01L HLA-DRB1*09:01L HLA-D PA1*01:03-B1*04:02L HLA-DRB1*12:02L HLA-DRB3*01:01L HLA-DRB1*07: 01L HLA-DRB1*10:01L HLA-DRB1*08:03L HLA-DRB1*15:01L
FYFYTSKTTVAS

SEQ ID NO: 14180 - protein, 14 aa, Severe acute respiratory syndrome coronavirus 2
  REGION 1..14: note = Table B: HLA-DRB1*13:02L HLA-DRB1*01:03L HLA-DPA1*02:01-B1*13:01L HLA-DPA1*01:03-B1*104:01L
SKTTVASLINTLND

SEQ ID NO: 14181 - protein, 15 aa, Severe acute respiratory syndrome coronavirus 2
  REGION 1..15: note = Table B: HLA-DRB1*13:02L HLA-DRB1*11:04L HLA-DRB1*08:01L
NETLVTMPLGYVTHG

SEQ ID NO: 14182 - protein, 14 aa, Severe acute respiratory syndrome coronavirus 2
  REGION 1..14: note = Table B: HLA-DRB1*13:02L HLA-DPA1*01:03-B1*04:02L HLA-DPA1*01:03-B1*104:01L
LVTMPLGYVTHGLN

SEQ ID NO: 14183 - protein, 15 aa, Severe acute respiratory syndrome coronavirus 2
  REGION 1..15: note = Table B: HLA-DRB1*13:02L HLA-DQA1*05:05-B1*03:19L HLA-DRB1*04:10L HLA-DQA1*05:05-B1*03:01L
MPLGYVTHGLNLEEA

SEQ ID NO: 14184 - protein, 11 aa, Severe acute respiratory syndrome coronavirus 2
  REGION 1..11: note = Table B: HLA-DRB1*13:02L HLA-DRB1*04:05L HLA-DQA1*01:02-B1*06:02L HLA-DRB1*11:04L HLA-DRB1*11:01L HLA-DRB1*15:03L
RYMRSLKVPAT

SEQ ID NO: 14185 - protein, 14 aa, Severe acute respiratory syndrome coronavirus 2
  REGION 1..14: note = Table B: HLA-DRB1*13:02L HLA-DRB1*01:03L HLA-DRB1*04:05L HLA-DRB4*03:01NL HLA-DPA1*01:03-B1*03:01L HLA-DQA1*05:01-B1*02:01L HLA-DRB1*04:10L HLA-DRB1*12:01L HLA-DPA1*01:03-B1*104:01L HLA-DRB1*04:08L
SLKVPATVSVSSPD

SEQ ID NO: 14186 - protein, 14 aa, Severe acute respiratory syndrome coronavirus 2
  REGION 1..14: note = Table B: HLA-DRB1*13:02L HLA-DRB1*13:03L HLA-DRB1*01:03L HLA-DRB1*04:02L HLA-DRB1*04:05L HLA-DQA1*01:02-B1*06:02L HLA-DRB1*01:02L HLA-DRB4*03:01NL HLA-DRB1*08:77L HLA-DPA1*01:03-B1*03:01L HLA-DRB1*04:10L HLA-DRB1*12:01L
  REGION 1..14: note = CONT. FROM ABOVE: HLA-DRB1*12:02L HLA-DPA1*02:01-B1*13:01L HLA-D PA1*03:01-B1*105:01L HLA-DRB1*14:54L HLA-DRB1*14:17L HLA-DRB1*07 :01L HLA-DRB1*16:01L HLA-DQA1*01:03-B1*06:01L HLA-DRB1*04:08L HL A-DRB1*15:03L
VPATVSVSSPDAVT

SEQ ID NO: 14187 - protein, 11 aa, Severe acute respiratory syndrome coronavirus 2
  REGION 1..11: note = Table B: HLA-DRB1*13:02L HLA-DRB5*01:01L
SVSSPDAVTAY

SEQ ID NO: 14188 - protein, 15 aa, Severe acute respiratory syndrome coronavirus 2
  REGION 1..15: note = Table B: HLA-DRB1*13:02L HLA-DRB1*11:02L HLA-DRB1*11:03L HLA-DRB1*11:04L HLA-DRB1*08:01L HLA-DRB1*08:03L
SPDAVTAYNGYLTSS

SEQ ID NO: 14189 - protein, 10 aa, Severe acute respiratory syndrome coronavirus 2
  REGION 1..10: note = Table B: HLA-DRB1*13:02L HLA-DRB1*13:03L HLA-DQA1*01:02-B1*06:02L HLA-DRB1*01:01L HLA-DRB4*03:01NL HLA-DRB3*02:01L HLA-DRB1*14:01L HLA-DRB1*11:04L HLA-DRB1*08:01L HLA-DRB5*01:01L HLA-DPA1*01:03-B1*04:02L HLA-DRB1*12:01L
  REGION 1..10: note = CONT. FROM ABOVE: HLA-DRB1*12:02L HLA-DPA1*03:01-B1*105:01L HLA- DQA1*03:01-B1*03:02L HLA-DQA1*05:05-B1*03:01M HLA-DRB1*14:17L HL A-DQA1*01:03-B1*06:01L HLA-DQA1*02:01-B1*03:03L HLA-DRB1*15:01L
ETISLAGSYK

SEQ ID NO: 14190 - protein, 14 aa, Severe acute respiratory syndrome coronavirus 2
  REGION 1..14: note = Table B: HLA-DRB1*13:02L HLA-DRB1*01:03L HLA-DRB1*08:04L HLA-DRB1*14:02L HLA-DRB1*08:01L HLA-DPA1*01:03-B1*04:02L
TISLAGSYKDWSYS

SEQ ID NO: 14191 - protein, 16 aa, Severe acute respiratory syndrome coronavirus 2
  REGION 1..16: note = Table B: HLA-DRB1*13:02L HLA-DRB1*14:02L
ISLAGSYKDWSYSGQS

SEQ ID NO: 14192 - protein, 14 aa, Severe acute respiratory syndrome coronavirus 2
  REGION 1..14: note = Table B: HLA-DRB1*13:02L HLA-DRB1*01:03L HLA-DRB1*04:04L HLA-DRB1*01:02L HLA-DRB1*08:04L HLA-DPA1*03:01-B1*04:02L HLA-DRB1*14:02L HLA-DQA1*01:01-B1*05:01L HLA-DPA1*01:03-B1*04:01L HLA-DPA1*01:03-B1*04:02L
  REGION 1..14: note = CONT. FROM ABOVE: HLA-DRB1*12:01L HLA-DPA1*01:03-B1*02:01L HLA-D PA1*01:03-B1*104:01L HLA-DPA1*01:02-B1*04:01L HLA-DRB1*07:01L HL A-DRB1*10:01L HLA-DRB1*15:03L
GSYKDWSYSGQSTQ

SEQ ID NO: 14193 - protein, 14 aa, Severe acute respiratory syndrome coronavirus 2
  REGION 1..14: note = Table B: HLA-DRB1*13:02L HLA-DRB1*04:05L HLA-DRB1*08:04L HLA-DRB1*12:01L HLA-DRB3*01:01L HLA-DPA1*02:01-B1*13:01L HLA-DRB1*15:03L
TQLGIEFLKRGDKS

SEQ ID NO: 14194 - protein, 17 aa, Severe acute respiratory syndrome coronavirus 2
  REGION 1..17: note = Table B: HLA-DRB1*13:02L HLA-DRB1*04:05L HLA-DRB1*12:01L HLA-DPA1*02:01-B1*13:01L
IEFLKRGDKSVYYTSNP

SEQ ID NO: 14195 - protein, 12 aa, Severe acute respiratory syndrome coronavirus 2
  REGION 1..12: note = Table B: HLA-DRB1*13:02L HLA-DRB1*04:02L HLA-DRB3*02:01L HLA-DRB1*12:02L HLA-DQA1*03:01-B1*03:02L HLA-DRB1*14:54L
KSVYYTSNPTTF

SEQ ID NO: 14196 - protein, 12 aa, Severe acute respiratory syndrome coronavirus 2
  REGION 1..12: note = Table B: HLA-DRB1*13:02L HLA-DQA1*01-B1*05L HLA-DQA1*05:05-B1*03:01L HLA-DRB1*14:17L
FHLDGEVITFDN

SEQ ID NO: 14197 - protein, 11 aa, Severe acute respiratory syndrome coronavirus 2
  REGION 1..11: note = Table B: HLA-DRB1*13:02L HLA-DRB1*13:03L HLA-DRB1*01:03L HLA-DRB1*04:05L HLA-DQA1*01:02-B1*06:02L HLA-DRB1*01:02L HLA-DRB4*03:01NL HLA-DRB1*08:77L HLA-DRB3*02:01L HLA-DPA1*01:03-B1*03:01L HLA-DRB1*14:02L HLA-DRB1*08:01L
  REGION 1..11: note = CONT. FROM ABOVE: HLA-DQA1*05:05-B1*03:19L HLA-DRB4*01:01L HLA-D PA1*01:03-B1*04:01L HLA-DQA1*05:05-B1*03:116L HLA-DRB1*09:01L HL A-DPA1*01:03-B1*04:02L HLA-DPA1*02:01-B1*13:01L HLA-DPA1*01:03-B 1*104:01L HLA-DQA1*05:05-B1*03:01L HLA-DRB1*07:01L
  REGION 1..11: note = CONT. FROM ABOVE: HLA-DRB1*10:01L HLA-DRB1*04:08L HLA-DRB1*08:03 L
EVITFDNLKTL

SEQ ID NO: 14198 - protein, 12 aa, Severe acute respiratory syndrome coronavirus 2
  REGION 1..12: note = Table B: HLA-DRB1*13:02L HLA-DRB1*01:03L HLA-DRB1*04:04L HLA-DRB1*04:05L HLA-DRB1*01:02L HLA-DRB1*08:04L HLA-DPA1*01:03-B1*03:01L HLA-DRB1*04:10L HLA-DRB1*14:54L HLA-DRB1*04:08L
VITFDNLKTLLS

SEQ ID NO: 14199 - protein, 15 aa, Severe acute respiratory syndrome coronavirus 2
  REGION 1..15: note = Table B: HLA-DRB1*13:02L
FDNLKTLLSLREVRT

SEQ ID NO: 14200 - protein, 13 aa, Severe acute respiratory syndrome coronavirus 2
  REGION 1..13: note = Table B: HLA-DRB1*13:02L HLA-DRB1*13:03L HLA-DRB1*08:04L HLA-DRB3*02:01L HLA-DPA1*03:01-B1*04:02L HLA-DPA1*01:03-B1*04:02L HLA-DRB1*12:02L HLA-DPA1*02:01-B1*13:01L HLA-DPA1*01:03-B1*104:01L
  REGION 1..13: note = CONT. FROM ABOVE: HLA-DPA1*01:02-B1*04:01L HLA-DRB1*10:01L HLA-D RB1*08:03L
EVRTIKVFTTVDN

SEQ ID NO: 14201 - protein, 13 aa, Severe acute respiratory syndrome coronavirus 2
  REGION 1..13: note = Table B: HLA-DRB1*13:02L HLA-DRB1*04:04L HLA-DRB1*08:04L HLA-DRB1*08:01L HLA-DRB1*10:01L HLA-DRB1*08:03L
RTIKVFTTVDNIN

SEQ ID NO: 14202 - protein, 12 aa, Severe acute respiratory syndrome coronavirus 2
  REGION 1..12: note = Table B: HLA-DRB1*13:02L HLA-DRB1*13:03L HLA-DRB1*01:03L HLA-DRB1*04:05L HLA-DRB4*03:01NL HLA-DPA1*01:03-B1*03:01L HLA-DRB1*14:01L HLA-DRB1*11:03L HLA-DPA1*01:03-B1*04:01L HLA-DRB1*04:10L HLA-DRB1*12:02L HLA-DPA1*02:01-B1*13:01L
  REGION 1..12: note = CONT. FROM ABOVE: HLA-DRB1*14:54L HLA-DPA1*01:02-B1*04:01L HLA-D RB1*07:01L HLA-DRB1*04:08L
IKVFTTVDNINL

SEQ ID NO: 14203 - protein, 12 aa, Severe acute respiratory syndrome coronavirus 2
  REGION 1..12: note = Table B: HLA-DRB1*13:02L HLA-DRB1*01:02L HLA-DRB1*08:04L HLA-DPA1*01:03-B1*03:01L HLA-DRB1*08:01L HLA-DRB1*04:10L HLA-DRB1*12:02L HLA-DPA1*02:01-B1*13:01L HLA-DRB1*04:08L HLA-DRB1*15:03L
VDNINLHTQVVD

SEQ ID NO: 14204 - protein, 13 aa, Severe acute respiratory syndrome coronavirus 2
  REGION 1..13: note = Table B: HLA-DRB1*13:02L HLA-DRB1*08:77L HLA-DRB3*02:01L HLA-DRB1*12:02L HLA-DRB1*16:01L HLA-DQA1*02:01-B1*03:03L
VVDMSMTYGQQFG

SEQ ID NO: 14205 - protein, 11 aa, Severe acute respiratory syndrome coronavirus 2
  REGION 1..11: note = Table B: HLA-DRB1*13:02L HLA-DRB1*11:02L HLA-DQA1*05:05-B1*03:01L
MTYGQQFGPTY

SEQ ID NO: 14206 - protein, 10 aa, Severe acute respiratory syndrome coronavirus 2
  REGION 1..10: note = Table B: HLA-DRB1*13:02L HLA-DRB1*13:03L HLA-DRB4*03:01NL HLA-DRB1*08:01L HLA-DRB1*12:01L HLA-DQA1*03:01-B1*03:02L HLA-DQA1*05:05-B1*03:01L
TYLDGADVTK

SEQ ID NO: 14207 - protein, 14 aa, Severe acute respiratory syndrome coronavirus 2
  REGION 1..14: note = Table B: HLA-DRB1*13:02L
DVTKIKPHNSHEGK

SEQ ID NO: 14208 - protein, 18 aa, Severe acute respiratory syndrome coronavirus 2
  REGION 1..18: note = Table B: HLA-DRB1*13:02L HLA-DQA1*05:05-B1*03:19L HLA-DPA1*01:03-B1*04:02L HLA-DRB1*12:01L HLA-DPA1*01:03-B1*104:01L HLA-DPA1*01:02-B1*04:01L HLA-DRB1*15:03L
KPHNSHEGKTFYVLPNDD

SEQ ID NO: 14209 - protein, 13 aa, Severe acute respiratory syndrome coronavirus 2
  REGION 1..13: note = Table B: HLA-DRB1*13:02L HLA-DRB1*08:04L HLA-DPA1*03:01-B1*04:02L HLA-DQA1*05:05-B1*03:19L HLA-DPA1*01:02-B1*04:01L
EGKTFYVLPNDDT

SEQ ID NO: 14210 - protein, 13 aa, Severe acute respiratory syndrome coronavirus 2
  REGION 1..13: note = Table B: HLA-DRB1*13:02L HLA-DRB1*08:04L HLA-DRB1*08:77L HLA-DRB3*02:01L HLA-DRB1*14:01L HLA-DRB1*11:03L HLA-DPA1*01:03-B1*04:01L HLA-DPA1*01:03-B1*104:01L
GKTFYVLPNDDTL

SEQ ID NO: 14211 - protein, 14 aa, Severe acute respiratory syndrome coronavirus 2
  REGION 1..14: note = Table B: HLA-DRB1*13:02L HLA-DRB1*08:04L
DTLRVEAFEYYHTT

SEQ ID NO: 14212 - protein, 14 aa, Severe acute respiratory syndrome coronavirus 2
  REGION 1..14: note = Table B: HLA-DRB1*13:02L HLA-DRB1*04:04L HLA-DRB3*01:01L HLA-DPA1*01:03-B1*02:01L
RVEAFEYYHTTDPS

SEQ ID NO: 14213 - protein, 10 aa, Severe acute respiratory syndrome coronavirus 2
  REGION 1..10: note = Table B: HLA-DRB1*13:02L HLA-DRB1*13:03L HLA-DRB1*08:01L HLA-DRB1*12:01L HLA-DQA1*03:01-B1*03:02L HLA-DRB1*16:01L
RYMSALNHTK

SEQ ID NO: 14214 - protein, 13 aa, Severe acute respiratory syndrome coronavirus 2
  REGION 1..13: note = Table B: HLA-DRB1*13:02L HLA-DRB1*01:03L HLA-DQA1*01:02-B1*06:02L HLA-DRB1*08:04L HLA-DRB1*03:01L HLA-DRB1*11:03L HLA-DRB1*11:04L HLA-DRB1*08:01L HLA-DRB1*11:01L HLA-DRB1*13:01L HLA-DRB1*14:54L HLA-DRB1*04:08L HLA-DRB1*15:03L
SALNHTKKWKYPQ

SEQ ID NO: 14215 - protein, 12 aa, Severe acute respiratory syndrome coronavirus 2
  REGION 1..12: note = Table B: HLA-DRB1*13:02L HLA-DRB1*04:04L HLA-DRB1*04:05L HLA-DRB1*01:02L HLA-DPA1*01:03-B1*03:01L HLA-DRB1*12:01L HLA-DPA1*02:01-B1*13:01L HLA-DPA1*01:02-B1*04:01L HLA-DRB1*16:01L HLA-DRB1*04:08L
NHTKKWKYPQVN

SEQ ID NO: 14216 - protein, 12 aa, Severe acute respiratory syndrome coronavirus 2
  REGION 1..12: note = Table B: HLA-DRB1*13:02L HLA-DRB1*04:04L HLA-DRB1*04:05L HLA-DRB1*01:02L HLA-DRB1*12:01L HLA-DPA1*02:01-B1*13:01L HLA-DPA1*01:02-B1*04:01L HLA-DRB1*07:01L
HTKKWKYPQVNG

SEQ ID NO: 14217 - protein, 12 aa, Severe acute respiratory syndrome coronavirus 2
  REGION 1..12: note = Table B: HLA-DRB1*13:02L HLA-DRB1*04:05L HLA-DRB1*01:02L HLA-DRB3*02:01L HLA-DPA1*01:03-B1*03:01L HLA-DPA1*03:01-B1*04:02L HLA-DRB1*14:01L HLA-DRB1*11:03L HLA-DRB1*09:01L HLA-DRB1*12:02L HLA-DRB1*14:54L HLA-DRB1*07:01L
  REGION 1..12: note = CONT. FROM ABOVE: HLA-DRB1*16:01L
YPQVNGLTSIKW

SEQ ID NO: 14218 - protein, 12 aa, Severe acute respiratory syndrome coronavirus 2
  REGION 1..12: note = Table B: HLA-DRB1*13:02L HLA-DRB1*04:02L HLA-DRB1*04:05L HLA-DRB3*02:01L HLA-DRB1*14:01L HLA-DRB1*12:02L HLA-DQA1*05:05-B1*03:01L HLA-DRB1*14:17L HLA-DRB1*04:08L
TALLTLQQIELK

SEQ ID NO: 14219 - protein, 12 aa, Severe acute respiratory syndrome coronavirus 2
  REGION 1..12: note = Table B: HLA-DRB1*13:02L HLA-DRB1*01:03L HLA-DRB1*04:04L HLA-DRB1*04:05L HLA-DQA1*01:02-B1*06:02L HLA-DRB1*01:02L HLA-DRB4*03:01NL HLA-DRB1*08:04L HLA-DRB1*08:77L HLA-DRB3*02:01L HLA-DPA1*01:03-B1*03:01L HLA-DRB1*11:03L HLA-DRB1*11:04L
  REGION 1..12: note = CONT. FROM ABOVE: HLA-DRB1*14:02L HLA-DRB1*08:01L HLA-DQA1*01-B1 *05L HLA-DQA1*05:01-B1*02:01L HLA-DRB1*04:10L HLA-DRB1*12:01L HL A-DRB1*12:02L HLA-DRB3*01:01L HLA-DPA1*02:01-B1*13:01L HLA-DPA1* 03:01-B1*105:01L HLA-DRB1*14:54L HLA-DQA1*05:05-B1*03:01L
  REGION 1..12: note = CONT. FROM ABOVE: HLA-DRB1*04:08L HLA-DRB1*15:03L
IELKFNPPALQD

SEQ ID NO: 14220 - protein, 12 aa, Severe acute respiratory syndrome coronavirus 2
  REGION 1..12: note = Table B: HLA-DRB1*13:02L HLA-DRB1*14:01L HLA-DRB1*12:01L HLA-DRB1*15:03L
ELKFNPPALQDA

SEQ ID NO: 14221 - protein, 14 aa, Severe acute respiratory syndrome coronavirus 2
  REGION 1..14: note = Table B: HLA-DRB1*13:02L HLA-DRB1*08:04L HLA-DQA1*05:05-B1*03:19L HLA-DRB1*04:08L
ALILAYCNKTVGEL

SEQ ID NO: 14222 - protein, 10 aa, Severe acute respiratory syndrome coronavirus 2
  REGION 1..10: note = Table B: HLA-DRB1*13:02L HLA-DRB1*13:03L HLA-DRB1*04:02L HLA-DRB1*01:01L HLA-DRB4*03:01NL HLA-DRB1*11:04L HLA-DRB1*08:01L HLA-DRB5*01:01L HLA-DRB1*12:01L HLA-DQA1*03:01-B1*03:02M HLA-DQA1*05:05-B1*03:01L HLA-DRB1*14:17L HLA-DRB1*16:01L
  REGION 1..10: note = CONT. FROM ABOVE: HLA-DQA1*01:03-B1*06:01L HLA-DQA1*02:01-B1*03: 03L
KTVGELGDVR

SEQ ID NO: 14223 - protein, 13 aa, Severe acute respiratory syndrome coronavirus 2
  REGION 1..13: note = Table B: HLA-DRB1*13:02L HLA-DPA1*01:03-B1*03:01L HLA-DRB1*14:01L HLA-DRB1*11:04L HLA-DQA1*01:01-B1*05:01L HLA-DRB1*11:01L HLA-DPA1*01:03-B1*04:02L HLA-DRB1*12:02L HLA-DRB3*01:01L
TMSYLFQHANLDS

SEQ ID NO: 14224 - protein, 14 aa, Severe acute respiratory syndrome coronavirus 2
  REGION 1..14: note = Table B: HLA-DRB1*13:02L HLA-DQA1*01:03-B1*06:01L
GVEAVMYMGTLSYE

SEQ ID NO: 14225 - protein, 14 aa, Severe acute respiratory syndrome coronavirus 2
  REGION 1..14: note = Table B: HLA-DRB1*13:02L HLA-DRB1*04:04L HLA-DRB3*02:01L HLA-DRB1*08:01L HLA-DRB1*09:01L HLA-DRB1*07:01L HLA-DRB1*08:03L
AVMYMGTLSYEQFK

SEQ ID NO: 14226 - protein, 13 aa, Severe acute respiratory syndrome coronavirus 2
  REGION 1..13: note = Table B: HLA-DRB1*13:02L HLA-DRB1*14:02L HLA-DPA1*02:01-B1*13:01L HLA-DRB1*08:02L HLA-DRB1*08:03L HLA-DRB1*15:03L
LSYEQFKKGVQIP

SEQ ID NO: 14227 - protein, 12 aa, Severe acute respiratory syndrome coronavirus 2
  REGION 1..12: note = Table B: HLA-DRB1*13:02L HLA-DRB1*13:03L HLA-DRB4*03:01NL HLA-DRB1*08:04L HLA-DRB3*02:01L HLA-DPA1*01:03-B1*03:01L HLA-DRB1*14:01L HLA-DRB1*14:02L HLA-DRB1*08:01L HLA-DRB1*04:10L HLA-DRB1*09:01L HLA-DRB1*12:02L HLA-DRB1*14:54L
  REGION 1..12: note = CONT. FROM ABOVE: HLA-DPA1*01:03-B1*104:01L HLA-DRB1*14:17L HLA- DRB1*07:01L HLA-DRB1*04:08L HLA-DRB1*08:03L
ATKYLVQQESPF

SEQ ID NO: 14228 - protein, 12 aa, Severe acute respiratory syndrome coronavirus 2
  REGION 1..12: note = Table B: HLA-DRB1*13:02L HLA-DRB1*13:03L HLA-DRB4*03:01NL HLA-DRB1*08:04L HLA-DRB3*02:01L HLA-DPA1*01:03-B1*03:01L HLA-DRB1*08:01L HLA-DRB1*04:10L HLA-DRB1*12:02L HLA-DRB1*14:54L HLA-DRB1*14:17L HLA-DRB1*07:01L HLA-DRB1*04:08L
TKYLVQQESPFV

SEQ ID NO: 14229 - protein, 11 aa, Severe acute respiratory syndrome coronavirus 2
  REGION 1..11: note = Table B: HLA-DRB1*13:02L HLA-DRB1*04:02L HLA-DRB1*04:05L HLA-DRB3*02:01L HLA-DPA1*01:03-B1*03:01L HLA-DQA1*05:05-B1*03:01L HLA-DRB1*14:17L
YLVQQESPFVM

SEQ ID NO: 14230 - protein, 14 aa, Severe acute respiratory syndrome coronavirus 2
  REGION 1..14: note = Table B: HLA-DRB1*13:02L HLA-DRB1*04:05L HLA-DRB1*11:04L HLA-DRB3*01:01L HLA-DQA1*02:01-B1*03:03L
GNYQCGHYKHITSK

SEQ ID NO: 14231 - protein, 10 aa, Severe acute respiratory syndrome coronavirus 2
  REGION 1..10: note = Table B: HLA-DRB1*13:02L HLA-DRB1*13:03L HLA-DRB1*01:03L HLA-DRB4*03:01NL HLA-DRB1*14:01L HLA-DRB1*12:01L HLA-DPA1*03:01-B1*105:01L HLA-DQA1*03:01-B1*03:02L HLA-DQA1*05:05-B1*03:01L HLA-DRB1*16:01L
  REGION 1..10: note = CONT. FROM ABOVE: HLA-DQA1*02:01-B1*03:03L
YCIDGALLTK

SEQ ID NO: 14232 - protein, 15 aa, Severe acute respiratory syndrome coronavirus 2
  REGION 1..15: note = Table B: HLA-DRB1*13:02L HLA-DRB1*13:03L HLA-DRB1*08:04L HLA-DPA1*02:01-B1*13:01L HLA-DRB1*14:17L
IDGALLTKSSEYKGP

SEQ ID NO: 14233 - protein, 16 aa, Severe acute respiratory syndrome coronavirus 2
  REGION 1..16: note = Table B: HLA-DRB1*13:02L HLA-DPA1*01:03-B1*03:01L HLA-DRB3*01:01L
DGALLTKSSEYKGPIT

SEQ ID NO: 14234 - protein, 15 aa, Severe acute respiratory syndrome coronavirus 2
  REGION 1..15: note = Table B: HLA-DRB1*13:02L HLA-DRB1*13:03L HLA-DRB1*14:01L HLA-DRB1*04:10L HLA-DRB1*08:03L
GPITDVFYKENSYTT

SEQ ID NO: 14235 - protein, 17 aa, Severe acute respiratory syndrome coronavirus 2
  REGION 1..17: note = Table B: HLA-DRB1*13:02L HLA-DRB1*04:05L HLA-DQA1*05:05-B1*03:19L HLA-DPA1*01:03-B1*04:02L HLA-DRB1*16:01L HLA-DRB1*15:03L
PVTYKLDGVVCTEIDPK

SEQ ID NO: 14236 - protein, 13 aa, Severe acute respiratory syndrome coronavirus 2
  REGION 1..13: note = Table B: HLA-DRB1*13:02L HLA-DRB1*13:03L HLA-DRB1*01:03L HLA-DRB1*04:05L HLA-DQA1*01:02-B1*06:02L HLA-DRB1*01:02L HLA-DRB1*14:01L HLA-DQA1*01:01-B1*05:01L HLA-DRB1*12:01L HLA-DPA1*02:01-B1*13:01L HLA-DPA1*01:02-B1*04:01L
  REGION 1..13: note = CONT. FROM ABOVE: HLA-DRB1*16:01L HLA-DQA1*01:03-B1*06:01L HLA-D RB1*04:08L HLA-DQA1*02:01-B1*03:03L HLA-DRB1*15:03L
IDPKLDNYYKKDN

SEQ ID NO: 14237 - protein, 13 aa, Severe acute respiratory syndrome coronavirus 2
  REGION 1..13: note = Table B: HLA-DRB1*13:02L HLA-DRB1*01:02L HLA-DQA1*01-B1*05L
LDNYYKKDNSYFT

SEQ ID NO: 14238 - protein, 13 aa, Severe acute respiratory syndrome coronavirus 2
  REGION 1..13: note = Table B: HLA-DRB1*13:02L HLA-DRB1*01:02L HLA-DRB3*01:01L HLA-DRB1*14:17L
DNYYKKDNSYFTE

SEQ ID NO: 14239 - protein, 16 aa, Severe acute respiratory syndrome coronavirus 2
  REGION 1..16: note = Table B: HLA-DRB1*13:02L HLA-DRB1*08:04L HLA-DPA1*01:03-B1*03:01L HLA-DPA1*03:01-B1*04:02L HLA-DRB1*14:02L HLA-DRB1*08:01L HLA-DPA1*01:03-B1*04:02L
NYYKKDNSYFTEQPID

SEQ ID NO: 14240 - protein, 11 aa, Severe acute respiratory syndrome coronavirus 2
  REGION 1..11: note = Table B: HLA-DRB1*13:02L HLA-DRB1*01:03L HLA-DRB1*04:05L HLA-DQA1*01:02-B1*06:02L HLA-DRB1*01:02L HLA-DRB1*08:04L HLA-DRB1*08:77L HLA-DRB1*11:03L HLA-DRB1*11:04L HLA-DRB1*14:02L HLA-DQA1*05:05-B1*03:19L HLA-DQA1*05:01-B1*02:01L
  REGION 1..11: note = CONT. FROM ABOVE: HLA-DRB1*04:10L HLA-DRB1*12:02L HLA-DRB1*14:54 L HLA-DQA1*05:05-B1*03:01L HLA-DRB1*04:08L HLA-DRB1*15:03L
LVPNQPYPNAS

SEQ ID NO: 14241 - protein, 13 aa, Severe acute respiratory syndrome coronavirus 2
  REGION 1..13: note = Table B: HLA-DRB1*13:02L HLA-DRB1*01:02L HLA-DRB1*11:04L HLA-DQA1*01:01-B1*05:01L HLA-DRB1*11:01L HLA-DRB1*04:10L HLA-DRB1*12:01L HLA-DRB1*12:02L HLA-DRB3*01:01L HLA-DRB1*14:54L HLA-DPA1*01:03-B1*104:01L HLA-DRB1*07:01L HLA-DRB1*04:08L
  REGION 1..13: note = CONT. FROM ABOVE: HLA-DRB1*08:03L
VPNQPYPNASFDN

SEQ ID NO: 14242 - protein, 19 aa, Severe acute respiratory syndrome coronavirus 2
  REGION 1..19: note = Table B: HLA-DRB1*13:02L HLA-DPA1*01:03-B1*03:01L HLA-DPA1*01:03-B1*104:01L
QPYPNASFDNFKFVCDNIK

SEQ ID NO: 14243 - protein, 14 aa, Severe acute respiratory syndrome coronavirus 2
  REGION 1..14: note = Table B: HLA-DRB1*13:02L HLA-DRB1*01:03L HLA-DRB1*04:05L HLA-DRB1*14:01L HLA-DRB1*08:01L HLA-DRB1*12:01L HLA-DPA1*02:01-B1*13:01L HLA-DRB1*04:08L
NFKFVCDNIKFADD

SEQ ID NO: 14244 - protein, 12 aa, Severe acute respiratory syndrome coronavirus 2
  REGION 1..12: note = Table B: HLA-DRB1*13:02L HLA-DQA1*01:02-B1*06:02L HLA-DRB1*01:02L HLA-DRB1*08:04L HLA-DPA1*01:03-B1*03:01L HLA-DRB1*08:01L HLA-DRB1*12:02L HLA-DQA1*05:05-B1*03:01L HLA-DRB1*10:01L HLA-DQA1*01:03-B1*06:01L
DNIKFADDLNQL

SEQ ID NO: 14245 - protein, 13 aa, Severe acute respiratory syndrome coronavirus 2
  REGION 1..13: note = Table B: HLA-DRB1*13:02L HLA-DRB1*04:05L HLA-DQA1*01:02-B1*06:02L HLA-DPA1*03:01-B1*105:01L HLA-DRB1*14:54L HLA-DQA1*01:03-B1*06:01L
ADDLNQLTGYKKP

SEQ ID NO: 14246 - protein, 13 aa, Severe acute respiratory syndrome coronavirus 2
  REGION 1..13: note = Table B: HLA-DRB1*13:02L HLA-DRB1*04:04L HLA-DRB1*04:05L HLA-DQA1*01:02-B1*06:02L HLA-DRB1*01:01L HLA-DRB1*11:03L HLA-DRB1*08:01L HLA-DQA1*01-B1*05L HLA-DPA1*03:01-B1*105:01L HLA-DRB1*14:54L HLA-DRB1*10:01L HLA-DQA1*01:03-B1*06:01L
  REGION 1..13: note = CONT. FROM ABOVE: HLA-DRB1*15:01L
DDLNQLTGYKKPA

SEQ ID NO: 14247 - protein, 13 aa, Severe acute respiratory syndrome coronavirus 2
  REGION 1..13: note = Table B: HLA-DRB1*13:02L HLA-DQA1*01:03-B1*06:01L
DLNQLTGYKKPAS

SEQ ID NO: 14248 - protein, 12 aa, Severe acute respiratory syndrome coronavirus 2
  REGION 1..12: note = Table B: HLA-DRB1*13:02L HLA-DRB1*04:04L HLA-DRB1*04:05L HLA-DQA1*01:02-B1*06:02L HLA-DRB1*01:02L HLA-DRB1*08:04L HLA-DRB1*11:03L HLA-DRB1*11:04L HLA-DRB1*11:01L HLA-DRB1*04:10L HLA-DRB1*12:01L HLA-DRB3*01:01L HLA-DRB1*14:54L
  REGION 1..12: note = CONT. FROM ABOVE: HLA-DPA1*01:02-B1*04:01L HLA-DRB1*04:08L HLA-D RB1*08:03L HLA-DRB1*15:03L
NQLTGYKKPASR

SEQ ID NO: 14249 - protein, 14 aa, Severe acute respiratory syndrome coronavirus 2
  REGION 1..14: note = Table B: HLA-DRB1*13:02L HLA-DRB1*11:01L HLA-DRB3*01:01L
QLTGYKKPASRELK

SEQ ID NO: 14250 - protein, 14 aa, Severe acute respiratory syndrome coronavirus 2
  REGION 1..14: note = Table B: HLA-DRB1*13:02L HLA-DRB1*13:03L HLA-DRB1*08:04L HLA-DPA1*01:03-B1*03:01L HLA-DRB1*11:04L HLA-DRB1*08:01L HLA-DRB4*01:01L HLA-DRB3*01:01L HLA-DPA1*01:03-B1*02:01L HLA-DPA1*01:03-B1*104:01L HLA-DQA1*05:05-B1*03:01L
  REGION 1..14: note = CONT. FROM ABOVE: HLA-DRB1*10:01L HLA-DRB1*08:03L
ELKVTFFPDLNGDV

SEQ ID NO: 14251 - protein, 12 aa, Severe acute respiratory syndrome coronavirus 2
  REGION 1..12: note = Table B: HLA-DRB1*13:02L HLA-DRB1*04:05L HLA-DQA1*01:02-B1*06:02L HLA-DRB1*01:02L HLA-DRB1*14:01L HLA-DRB1*11:04L HLA-DRB1*12:01L HLA-DRB3*01:01L HLA-DPA1*01:02-B1*04:01L
KHYTPSFKKGAK

SEQ ID NO: 14252 - protein, 14 aa, Severe acute respiratory syndrome coronavirus 2
  REGION 1..14: note = Table B: HLA-DRB1*13:02L HLA-DRB1*13:03L HLA-DRB1*04:05L HLA-DQA1*01:02-B1*06:02L HLA-DRB1*08:04L HLA-DRB1*14:01L HLA-DRB1*11:03L HLA-DRB1*12:01L HLA-DRB3*01:01L HLA-DQA1*02:01-B1*03:03L HLA-DRB1*15:03L
TPSFKKGAKLLHKP

SEQ ID NO: 14253 - protein, 15 aa, Severe acute respiratory syndrome coronavirus 2
  REGION 1..15: note = Table B: HLA-DRB1*13:02L
KGAKLLHKPIVWHVN

SEQ ID NO: 14254 - protein, 15 aa, Severe acute respiratory syndrome coronavirus 2
  REGION 1..15: note = Table B: HLA-DRB1*13:02L HLA-DRB1*01:03L HLA-DRB1*14:01L HLA-DQA1*02:01-B1*03:03L
GAKLLHKPIVWHVNN

SEQ ID NO: 14255 - protein, 13 aa, Severe acute respiratory syndrome coronavirus 2
  REGION 1..13: note = Table B: HLA-DRB1*13:02L HLA-DRB1*04:02L HLA-DRB1*04:05L HLA-DPA1*01:03-B1*03:01L HLA-DQA1*01:01-B1*05:01L HLA-DPA1*02:01-B1*13:01L HLA-DRB1*15:03L
TKPVETSNSFDVL

SEQ ID NO: 14256 - protein, 10 aa, Severe acute respiratory syndrome coronavirus 2
  REGION 1..10: note = Table B: HLA-DRB1*13:02L HLA-DRB1*13:03L HLA-DQA1*01:02-B1*06:02L HLA-DRB1*01:01L HLA-DRB4*03:01NL HLA-DRB3*02:01L HLA-DRB1*14:01L HLA-DRB1*11:04L HLA-DRB1*08:01L HLA-DRB5*01:01L HLA-DPA1*01:03-B1*04:02L HLA-DRB1*12:01M
  REGION 1..10: note = CONT. FROM ABOVE: HLA-DRB1*12:02L HLA-DPA1*03:01-B1*105:01L HLA- DQA1*03:01-B1*03:02L HLA-DQA1*05:05-B1*03:01M HLA-DRB1*14:17L HL A-DQA1*01:03-B1*06:01L HLA-DQA1*02:01-B1*03:03L HLA-DRB1*15:01L
ETSNSFDVLK

SEQ ID NO: 14257 - protein, 10 aa, Severe acute respiratory syndrome coronavirus 2
  REGION 1..10: note = Table B: HLA-DRB1*13:02L HLA-DRB1*13:03L HLA-DRB4*03:01NL HLA-DRB1*12:01L HLA-DQA1*03:01-B1*03:02L HLA-DQA1*05:05-B1*03:01L
TEVVGDIILK

SEQ ID NO: 14258 - protein, 13 aa, Severe acute respiratory syndrome coronavirus 2
  REGION 1..13: note = Table B: HLA-DRB1*13:02L HLA-DRB1*13:03L HLA-DRB1*01:03L HLA-DRB1*04:04L HLA-DRB4*03:01NL HLA-DPA1*01:03-B1*03:01L HLA-DQA1*01:01-B1*05:01L HLA-DRB1*08:01L HLA-DQA1*05:05-B1*03:19L HLA-DRB1*04:10L HLA-DRB1*14:54L
  REGION 1..13: note = CONT. FROM ABOVE: HLA-DQA1*05:05-B1*03:01L HLA-DPA1*01:02-B1*04: 01L HLA-DRB1*07:01L HLA-DRB1*04:08L
NSLKITEEVGHTD

SEQ ID NO: 14259 - protein, 14 aa, Severe acute respiratory syndrome coronavirus 2
  REGION 1..14: note = Table B: HLA-DRB1*13:02L
EVGHTDLMAAYVDN

SEQ ID NO: 14260 - protein, 12 aa, Severe acute respiratory syndrome coronavirus 2
  REGION 1..12: note = Table B: HLA-DRB1*13:02L HLA-DRB1*13:03L HLA-DRB1*01:03L HLA-DRB1*04:05L HLA-DRB1*01:02L HLA-DRB1*08:04L HLA-DRB1*08:77L HLA-DRB3*02:01L HLA-DPA1*01:03-B1*03:01L HLA-DPA1*03:01-B1*04:02L HLA-DRB1*08:01L
  REGION 1..12: note = CONT. FROM ABOVE: HLA-DQA1*05:01-B1*02:01L HLA-DPA1*01:03-B1*04: 01L HLA-DRB1*12:02L HLA-DPA1*02:01-B1*13:01L HLA-DPA1*03:01-B1*1 05:01L HLA-DRB1*14:54L HLA-DQA1*05:05-B1*03:01L HLA-DRB1*07:01L HLA-DRB1*04:08L HLA-DRB1*15:03L
NSSLTIKKPNEL

SEQ ID NO: 14261 - protein, 10 aa, Severe acute respiratory syndrome coronavirus 2
  REGION 1..10: note = Table B: HLA-DRB1*13:02L HLA-DRB1*13:03L HLA-DRB1*01:03L HLA-DRB1*01:01L HLA-DRB4*03:01NL HLA-DRB1*11:04L HLA-DRB1*08:01L HLA-DRB1*12:01L HLA-DQA1*03:01-B1*03:02M HLA-DQA1*05:05-B1*03:01L HLA-DRB1*14:17L HLA-DRB1*16:01L
TIKKPNELSR

SEQ ID NO: 14262 - protein, 14 aa, Severe acute respiratory syndrome coronavirus 2
  REGION 1..14: note = Table B: HLA-DRB1*13:02L HLA-DRB1*13:03L HLA-DRB1*01:01L HLA-DRB1*11:03L HLA-DPA1*02:01-B1*13:01L HLA-DPA1*03:01-B1*105:01L HLA-DQA1*05:05-B1*03:01L HLA-DRB1*07:01L HLA-DRB1*10:01L HLA-DRB1*08:03L
LSRVLGLKTLATHG

SEQ ID NO: 14263 - protein, 12 aa, Severe acute respiratory syndrome coronavirus 2
  REGION 1..12: note = Table B: HLA-DRB1*13:02L HLA-DPA1*01:03-B1*03:01L HLA-DPA1*03:01-B1*04:02L HLA-DQA1*05:01-B1*02:01L HLA-DRB1*12:02L HLA-DPA1*03:01-B1*105:01L HLA-DQA1*01:03-B1*06:01L HLA-DRB1*15:03L
VLGLKTLATHGL

SEQ ID NO: 14264 - protein, 14 aa, Severe acute respiratory syndrome coronavirus 2
  REGION 1..14: note = Table B: HLA-DRB1*13:02L HLA-DRB1*04:05L
GLKTLATHGLAAVN

SEQ ID NO: 14265 - protein, 13 aa, Severe acute respiratory syndrome coronavirus 2
  REGION 1..13: note = Table B: HLA-DRB1*13:02L HLA-DRB1*13:03L HLA-DRB1*04:04L HLA-DRB4*03:01NL HLA-DRB1*08:04L HLA-DRB3*02:01L HLA-DRB1*14:01L HLA-DRB1*08:01L HLA-DRB1*14:54L HLA-DPA1*01:03-B1*02:01L
AAVNSVPWDTIAN

SEQ ID NO: 14266 - protein, 15 aa, Severe acute respiratory syndrome coronavirus 2
  REGION 1..15: note = Table B: HLA-DRB1*13:02L HLA-DRB1*08:04L HLA-DRB3*01:01L
VNSVPWDTIANYAKP

SEQ ID NO: 14267 - protein, 13 aa, Severe acute respiratory syndrome coronavirus 2
  REGION 1..13: note = Table B: HLA-DRB1*13:02L HLA-DRB1*08:04L HLA-DRB3*02:01L HLA-DRB1*08:01L HLA-DRB1*04:10L HLA-DPA1*01:03-B1*04:02L HLA-DRB1*12:02L HLA-DRB1*14:54L HLA-DPA1*01:03-B1*104:01L
VPWDTIANYAKPF

SEQ ID NO: 14268 - protein, 12 aa, Severe acute respiratory syndrome coronavirus 2
  REGION 1..12: note = Table B: HLA-DRB1*13:02L HLA-DRB1*04:05L HLA-DRB1*01:02L HLA-DRB1*08:04L HLA-DRB3*02:01L HLA-DRB1*08:01L HLA-DRB1*12:02L HLA-DRB1*14:54L HLA-DRB1*04:08L
DTIANYAKPFLN

SEQ ID NO: 14269 - protein, 14 aa, Severe acute respiratory syndrome coronavirus 2
  REGION 1..14: note = Table B: HLA-DRB1*13:02L HLA-DPA1*01:03-B1*03:01L HLA-DPA1*03:01-B1*04:02L HLA-DRB1*11:04L HLA-DRB1*14:02L HLA-DQA1*01:01-B1*05:01L HLA-DRB1*11:01L HLA-DQA1*05:01-B1*02:01L HLA-DPA1*01:03-B1*04:02L
  REGION 1..14: note = CONT. FROM ABOVE: HLA-DRB1*14:54L HLA-DPA1*01:03-B1*104:01L HLA- DRB1*10:01L
AKPFLNKVVSTTTN

SEQ ID NO: 14270 - protein, 14 aa, Severe acute respiratory syndrome coronavirus 2
  REGION 1..14: note = Table B: HLA-DRB1*13:02L HLA-DRB1*01:02L HLA-DPA1*03:01-B1*105:01L HLA-DPA1*01:03-B1*104:01L HLA-DRB1*15:03L
LNRVCTNYMPYFFT

SEQ ID NO: 14271 - protein, 10 aa, Severe acute respiratory syndrome coronavirus 2
  REGION 1..10: note = Table B: HLA-DRB1*13:02L HLA-DRB1*13:03L HLA-DRB4*03:01NL HLA-DRB1*08:01L HLA-DRB1*12:01L HLA-DQA1*03:01-B1*03:02L HLA-DQA1*05:05-B1*03:01L
KASMPTTIAK

SEQ ID NO: 14272 - protein, 11 aa, Severe acute respiratory syndrome coronavirus 2
  REGION 1..11: note = Table B: HLA-DRB1*13:02L HLA-DRB3*02:01L HLA-DRB1*11:04L HLA-DRB1*14:02L HLA-DQA1*01:01-B1*05:01L HLA-DRB5*01:01L HLA-DPA1*01:03-B1*04:02L HLA-DRB1*12:01L HLA-DRB1*12:02L HLA-DRB1*14:54L
MPTTIAKNTVK

SEQ ID NO: 14273 - protein, 15 aa, Severe acute respiratory syndrome coronavirus 2
  REGION 1..15: note = Table B: HLA-DRB1*13:02L HLA-DRB1*04:05L
SVGKFCLEASFNYLK

SEQ ID NO: 14274 - protein, 17 aa, Severe acute respiratory syndrome coronavirus 2
  REGION 1..17: note = Table B: HLA-DRB1*13:02L HLA-DPA1*01:03-B1*03:01L HLA-DPA1*01:03-B1*104:01L
VGKFCLEASFNYLKSPN

SEQ ID NO: 14275 - protein, 11 aa, Severe acute respiratory syndrome coronavirus 2
  REGION 1..11: note = Table B: HLA-DRB1*13:02L HLA-DRB1*01:03L HLA-DRB3*02:01L HLA-DPA1*01:03-B1*03:01L HLA-DRB1*14:01L HLA-DRB1*14:02L HLA-DPA1*01:03-B1*04:01L HLA-DRB1*09:01L HLA-DRB1*12:02L HLA-DQA1*05:05-B1*03:01L HLA-DRB1*07:01L
ASFNYLKSPNF

SEQ ID NO: 14276 - protein, 11 aa, Severe acute respiratory syndrome coronavirus 2
  REGION 1..11: note = Table B: HLA-DRB1*13:02L HLA-DRB1*12:02L
SFNYLKSPNFS

SEQ ID NO: 14277 - protein, 11 aa, Severe acute respiratory syndrome coronavirus 2
  REGION 1..11: note = Table B: HLA-DRB1*13:02L HLA-DRB1*04:08L
FNYLKSPNFSK

SEQ ID NO: 14278 - protein, 12 aa, Severe acute respiratory syndrome coronavirus 2
  REGION 1..12: note = Table B: HLA-DRB1*13:02L HLA-DRB1*01:03L HLA-DRB1*04:02L HLA-DRB1*04:05L HLA-DRB4*03:01NL HLA-DRB1*11:03L HLA-DPA1*01:03-B1*04:01L HLA-DPA1*01:03-B1*104:01L HLA-DRB1*14:17L HLA-DRB1*04:08L
SLIYSTAALGVL

SEQ ID NO: 14279 - protein, 14 aa, Severe acute respiratory syndrome coronavirus 2
  REGION 1..14: note = Table B: HLA-DRB1*13:02L HLA-DRB1*13:03L HLA-DRB1*04:04L HLA-DRB1*08:04L HLA-DRB3*02:01L HLA-DRB1*14:01L HLA-DRB1*11:04L HLA-DRB1*14:02L HLA-DQA1*01:01-B1*05:01L HLA-DRB1*08:01L HLA-DRB1*11:01L HLA-DPA1*01:03-B1*04:01L HLA-DRB1*04:10L
  REGION 1..14: note = CONT. FROM ABOVE: HLA-DRB3*01:01L HLA-DPA1*01:03-B1*02:01L HLA-D RB1*07:01L HLA-DRB1*10:01L HLA-DRB1*08:03L
TGYREGYLNSTNVT

SEQ ID NO: 14280 - protein, 12 aa, Severe acute respiratory syndrome coronavirus 2
  REGION 1..12: note = Table B: HLA-DRB1*13:02L HLA-DRB1*04:02L HLA-DRB3*02:01L HLA-DQA1*05:01-B1*02:01L HLA-DRB1*12:01L
REGYLNSTNVTI

SEQ ID NO: 14281 - protein, 12 aa, Severe acute respiratory syndrome coronavirus 2
  REGION 1..12: note = Table B: HLA-DRB1*13:02L HLA-DRB1*13:03L HLA-DRB1*04:02L HLA-DRB4*03:01NL HLA-DRB3*02:01L HLA-DPA1*01:03-B1*03:01L HLA-DRB1*11:03L HLA-DRB1*11:04L HLA-DQA1*01-B1*05L HLA-DQA1*05:01-B1*02:01L HLA-DPA1*01:03-B1*04:01L
  REGION 1..12: note = CONT. FROM ABOVE: HLA-DRB1*12:02L HLA-DRB1*14:54L HLA-DQA1*05:05 -B1*03:01L HLA-DRB1*07:01L HLA-DRB1*04:08L
EGYLNSTNVTIA

SEQ ID NO: 14282 - protein, 11 aa, Severe acute respiratory syndrome coronavirus 2
  REGION 1..11: note = Table B: HLA-DRB1*13:02L HLA-DRB1*13:03L HLA-DRB1*04:02L HLA-DRB4*03:01NL HLA-DRB1*08:77L HLA-DRB1*14:01L HLA-DRB1*12:01L HLA-DRB1*14:54L HLA-DRB1*16:01L HLA-DQA1*02:01-B1*03:03L
YLNSTNVTIAT

SEQ ID NO: 14283 - protein, 14 aa, Severe acute respiratory syndrome coronavirus 2
  REGION 1..14: note = Table B: HLA-DRB1*13:02L HLA-DRB1*08:04L HLA-DPA1*01:03-B1*03:01L HLA-DRB1*11:02L HLA-DRB1*11:03L HLA-DRB1*14:02L HLA-DRB1*08:01L HLA-DPA1*01:03-B1*04:01L HLA-DRB1*09:01L HLA-DPA1*01:03-B1*04:02L HLA-DRB1*12:02L
  REGION 1..14: note = CONT. FROM ABOVE: HLA-DPA1*01:02-B1*04:01L HLA-DRB1*07:01L HLA-D RB1*10:01L HLA-DRB1*08:03L
LDSLDTYPSLETIQ

SEQ ID NO: 14284 - protein, 15 aa, Severe acute respiratory syndrome coronavirus 2
  REGION 1..15: note = Table B: HLA-DRB1*13:02L HLA-DPA1*01:03-B1*03:01L HLA-DRB1*14:02L
DSLDTYPSLETIQIT

SEQ ID NO: 14285 - protein, 11 aa, Severe acute respiratory syndrome coronavirus 2
  REGION 1..11: note = Table B: HLA-DRB1*13:02L HLA-DQA1*03:01-B1*03:02L HLA-DRB1*14:17L
ETIQITISSFK

SEQ ID NO: 14286 - protein, 14 aa, Severe acute respiratory syndrome coronavirus 2
  REGION 1..14: note = Table B: HLA-DRB1*13:02L HLA-DRB1*01:03L HLA-DRB1*04:05L HLA-DRB1*08:04L HLA-DPA1*01:03-B1*03:01L
TIQITISSFKWDLT

SEQ ID NO: 14287 - protein, 14 aa, Severe acute respiratory syndrome coronavirus 2
  REGION 1..14: note = Table B: HLA-DRB1*13:02L HLA-DRB1*01:03L HLA-DRB1*08:04L HLA-DPA1*01:03-B1*03:01L
IQITISSFKWDLTA

SEQ ID NO: 14288 - protein, 14 aa, Severe acute respiratory syndrome coronavirus 2
  REGION 1..14: note = Table B: HLA-DRB1*13:02L HLA-DRB1*11:04L
SSFKWDLTAFGLVA

SEQ ID NO: 14289 - protein, 14 aa, Severe acute respiratory syndrome coronavirus 2
  REGION 1..14: note = Table B: HLA-DRB1*13:02L HLA-DRB3*01:01L
SFKWDLTAFGLVAE

SEQ ID NO: 14290 - protein, 14 aa, Severe acute respiratory syndrome coronavirus 2
  REGION 1..14: note = Table B: HLA-DRB1*13:02L HLA-DRB1*01:02L HLA-DRB1*08:04L HLA-DRB1*14:01L
LAYILFTRFFYVLG

SEQ ID NO: 14291 - protein, 14 aa, Severe acute respiratory syndrome coronavirus 2
  REGION 1..14: note = Table B: HLA-DRB1*13:02L
FSYFAVHFISNSWL

SEQ ID NO: 14292 - protein, 12 aa, Severe acute respiratory syndrome coronavirus 2
  REGION 1..12: note = Table B: HLA-DRB1*13:02L HLA-DRB1*04:04L HLA-DRB3*02:01L HLA-DPA1*01:03-B1*03:01L HLA-DPA1*03:01-B1*04:02L HLA-DQA1*05:05-B1*03:19L HLA-DRB1*12:02L HLA-DRB1*14:54L HLA-DPA1*01:02-B1*04:01L
LIINLVQMAPIS

SEQ ID NO: 14293 - protein, 10 aa, Severe acute respiratory syndrome coronavirus 2
  REGION 1..10: note = Table B: HLA-DRB1*13:02L HLA-DRB1*13:03L HLA-DRB4*03:01NL HLA-DRB1*08:01L HLA-DRB5*01:01L HLA-DRB1*12:01L HLA-DQA1*03:01-B1*03:02L HLA-DQA1*05:05-B1*03:01L HLA-DQA1*01:03-B1*06:01L HLA-DQA1*02:01-B1*03:03L
QMAPISAMVR

SEQ ID NO: 14294 - protein, 10 aa, Severe acute respiratory syndrome coronavirus 2
  REGION 1..10: note = Table B: HLA-DRB1*13:02L HLA-DRB1*01:03L HLA-DRB1*01:02L HLA-DRB1*14:01L HLA-DRB1*12:01L HLA-DPA1*01:02-B1*04:01L HLA-DRB1*16:01L HLA-DRB1*04:08L HLA-DQA1*02:01-B1*03:03L HLA-DRB1*15:03L
YKRNRATRVE

SEQ ID NO: 14295 - protein, 15 aa, Severe acute respiratory syndrome coronavirus 2
  REGION 1..15: note = Table B: HLA-DRB1*13:02L HLA-DRB1*11:01L HLA-DPA1*01:03-B1*104:01L
RATRVECTTIVNGVR

SEQ ID NO: 14296 - protein, 15 aa, Severe acute respiratory syndrome coronavirus 2
  REGION 1..15: note = Table B: HLA-DRB1*13:02L HLA-DRB1*04:04L HLA-DQA1*01:02-B1*06:02L HLA-DPA1*01:03-B1*03:01L HLA-DQA1*03:01-B1*03:02L HLA-DRB1*16:01L HLA-DRB1*04:08L HLA-DQA1*02:01-B1*03:03L
VNGVRRSFYVYANGG

SEQ ID NO: 14297 - protein, 14 aa, Severe acute respiratory syndrome coronavirus 2
  REGION 1..14: note = Table B: HLA-DRB1*13:02L HLA-DRB1*04:04L HLA-DQA1*01:02-B1*06:02L HLA-DPA1*01:03-B1*03:01L HLA-DRB1*08:01L HLA-DRB1*12:01L HLA-DPA1*02:01-B1*13:01L HLA-DPA1*01:02-B1*04:01L HLA-DRB1*07:01L HLA-DRB1*15:03L
GVRRSFYVYANGGK

SEQ ID NO: 14298 - protein, 10 aa, Severe acute respiratory syndrome coronavirus 2
  REGION 1..10: note = Table B: HLA-DRB1*13:02L HLA-DRB1*13:03L HLA-DRB1*04:02L HLA-DRB1*01:01L HLA-DRB4*03:01NL HLA-DRB3*02:01L HLA-DRB1*14:01L HLA-DRB1*11:04L HLA-DRB1*08:01L HLA-DRB5*01:01L HLA-DQA1*01-B1*05L HLA-DPA1*01:03-B1*04:02L HLA-DRB1*12:01L
  REGION 1..10: note = CONT. FROM ABOVE: HLA-DRB1*12:02L HLA-DQA1*03:01-B1*03:02M HLA-D QA1*05:05-B1*03:01L HLA-DRB1*14:17L HLA-DRB1*16:01L HLA-DQA1*01: 03-B1*06:01L HLA-DQA1*02:01-B1*03:03L
STFISDEVAR

SEQ ID NO: 14299 - protein, 14 aa, Severe acute respiratory syndrome coronavirus 2
  REGION 1..14: note = Table B: HLA-DRB1*13:02L HLA-DRB1*13:03L HLA-DRB1*01:03L HLA-DRB1*04:05L HLA-DRB1*01:02L HLA-DRB1*08:04L HLA-DRB1*11:03L HLA-DRB1*11:04L HLA-DRB1*11:01L HLA-DRB1*13:01L HLA-DRB1*12:01L HLA-DRB3*01:01L HLA-DRB1*14:54L HLA-DRB1*04:08L HLA-DRB1*15:03L
RDLSLQFKRPINPT

SEQ ID NO: 14300 - protein, 15 aa, Severe acute respiratory syndrome coronavirus 2
  REGION 1..15: note = Table B: HLA-DRB1*13:02L HLA-DRB1*11:04L HLA-DRB1*11:01L HLA-DQA1*05:05-B1*03:19L HLA-DQA1*05:01-B1*02:01L HLA-DRB3*01:01L HLA-DQA1*05:05-B1*03:01L HLA-DQA1*01:03-B1*06:01L HLA-DRB1*08:02L
DLSLQFKRPINPTDQ

SEQ ID NO: 14301 - protein, 13 aa, Severe acute respiratory syndrome coronavirus 2
  REGION 1..13: note = Table B: HLA-DRB1*13:02L HLA-DRB1*13:03L HLA-DRB1*11:04L HLA-DRB1*11:01L HLA-DRB3*01:01L HLA-DPA1*03:01-B1*105:01L HLA-DQA1*01:03-B1*06:01L
GSIHLYFDKAGQK

SEQ ID NO: 14302 - protein, 12 aa, Severe acute respiratory syndrome coronavirus 2
  REGION 1..12: note = Table B: HLA-DRB1*13:02L HLA-DRB1*04:04L HLA-DQA1*01:02-B1*06:02L HLA-DRB1*14:01L HLA-DRB1*08:01L HLA-DRB3*01:01L HLA-DPA1*02:01-B1*13:01L
IHLYFDKAGQKT

SEQ ID NO: 14303 - protein, 10 aa, Severe acute respiratory syndrome coronavirus 2
  REGION 1..10: note = Table B: HLA-DRB1*13:02L HLA-DRB1*13:03L HLA-DRB1*01:03L HLA-DRB1*08:01L HLA-DRB1*12:01L HLA-DQA1*03:01-B1*03:02L HLA-DRB1*16:01L
KTYERHSLSH

SEQ ID NO: 14304 - protein, 14 aa, Severe acute respiratory syndrome coronavirus 2
  REGION 1..14: note = Table B: HLA-DRB1*13:02L HLA-DPA1*01:03-B1*03:01L
YERHSLSHFVNLDN

SEQ ID NO: 14305 - protein, 15 aa, Severe acute respiratory syndrome coronavirus 2
  REGION 1..15: note = Table B: HLA-DRB1*13:02L HLA-DRB1*04:05L HLA-DRB1*08:04L HLA-DRB3*02:01L HLA-DPA1*01:03-B1*03:01L HLA-DRB1*03:01L HLA-DRB1*11:03L HLA-DRB1*11:04L HLA-DRB1*14:02L HLA-DRB1*08:01L HLA-DQA1*05:05-B1*03:19L HLA-DRB1*12:02L HLA-DRB3*01:01L
  REGION 1..15: note = CONT. FROM ABOVE: HLA-DPA1*02:01-B1*13:01L HLA-DPA1*03:01-B1*105 :01L HLA-DRB1*14:54L HLA-DRB1*04:08L HLA-DRB1*15:03L
DNLRANNTKGSLPIN

SEQ ID NO: 14306 - protein, 16 aa, Severe acute respiratory syndrome coronavirus 2
  REGION 1..16: note = Table B: HLA-DRB1*13:02L HLA-DRB1*04:05L HLA-DRB1*12:01L
NNTKGSLPINVIVFDG

SEQ ID NO: 14307 - protein, 12 aa, Severe acute respiratory syndrome coronavirus 2
  REGION 1..12: note = Table B: HLA-DRB1*13:02L HLA-DRB1*13:03L HLA-DRB1*01:03L HLA-DRB1*01:02L HLA-DRB1*08:04L HLA-DRB1*08:77L HLA-DPA1*01:03-B1*03:01L HLA-DRB1*11:03L HLA-DRB1*11:04L HLA-DRB1*14:02L HLA-DRB1*12:01L HLA-DRB1*14:54L HLA-DRB1*04:08L
  REGION 1..12: note = CONT. FROM ABOVE: HLA-DRB1*15:03L
NVIVFDGKSKCE

SEQ ID NO: 14308 - protein, 12 aa, Severe acute respiratory syndrome coronavirus 2
  REGION 1..12: note = Table B: HLA-DRB1*13:02L HLA-DRB1*01:02L HLA-DRB1*08:04L HLA-DPA1*01:03-B1*03:01L HLA-DRB3*01:01L HLA-DRB1*04:08L HLA-DRB1*15:03L
IVFDGKSKCEES

SEQ ID NO: 14309 - protein, 13 aa, Severe acute respiratory syndrome coronavirus 2
  REGION 1..13: note = Table B: HLA-DRB1*13:02L HLA-DRB1*13:03L HLA-DRB3*02:01L HLA-DPA1*01:03-B1*03:01L HLA-DPA1*03:01-B1*04:02L HLA-DRB1*14:02L HLA-DRB1*08:01L HLA-DRB1*04:10L HLA-DRB1*12:02L HLA-DPA1*01:02-B1*04:01L HLA-DRB1*07:01L
KTLVATAEAELAK

SEQ ID NO: 14310 - protein, 11 aa, Severe acute respiratory syndrome coronavirus 2
  REGION 1..11: note = Table B: HLA-DRB1*13:02L HLA-DRB1*13:03L HLA-DRB1*04:04L HLA-DRB1*04:05L HLA-DRB1*01:02L HLA-DRB1*08:77L HLA-DRB3*02:01L HLA-DPA1*01:03-B1*03:01L HLA-DPA1*03:01-B1*04:02L HLA-DRB1*14:01L HLA-DRB1*11:04L HLA-DRB1*14:02L HLA-DRB1*08:01L
  REGION 1..11: note = CONT. FROM ABOVE: HLA-DRB1*11:01L HLA-DQA1*01-B1*05L HLA-DPA1*01 :03-B1*04:01L HLA-DQA1*05:05-B1*03:116L HLA-DRB1*04:10L HLA-DRB1 *12:02L HLA-DPA1*02:01-B1*13:01L HLA-DRB1*14:54L HLA-DPA1*01:03- B1*02:01L HLA-DPA1*01:03-B1*104:01L HLA-DRB1*07:01L
  REGION 1..11: note = CONT. FROM ABOVE: HLA-DRB1*08:03L HLA-DRB1*15:03L
VATAEAELAKN

SEQ ID NO: 14311 - protein, 11 aa, Severe acute respiratory syndrome coronavirus 2
  REGION 1..11: note = Table B: HLA-DRB1*13:02L HLA-DRB1*13:03L HLA-DRB1*01:03L HLA-DQA1*01:02-B1*06:02L HLA-DRB1*08:77L HLA-DPA1*03:01-B1*04:02L HLA-DRB1*03:01L HLA-DRB1*14:01L HLA-DRB1*11:02L HLA-DRB1*14:02L HLA-DRB1*08:01L
  REGION 1..11: note = CONT. FROM ABOVE: HLA-DQA1*01-B1*05L HLA-DRB4*01:01L HLA-DPA1*01 :03-B1*04:01L HLA-DQA1*05:05-B1*03:116M HLA-DRB1*09:01M HLA-DPA1 *01:03-B1*04:02M HLA-DRB1*12:01L HLA-DPA1*03:01-B1*105:01L HLA-D PA1*01:03-B1*104:01L HLA-DPA1*01:02-B1*04:01L HLA-DRB1*10:01L
  REGION 1..11: note = CONT. FROM ABOVE: HLA-DRB1*16:01L HLA-DQA1*01:03-B1*06:01L HLA-D QA1*02:01-B1*03:03L HLA-DRB1*15:03L
AEAELAKNVSL

SEQ ID NO: 14312 - protein, 12 aa, Severe acute respiratory syndrome coronavirus 2
  REGION 1..12: note = Table B: HLA-DRB1*13:02L HLA-DQA1*01:02-B1*06:02L HLA-DRB1*08:04L HLA-DRB1*14:01L HLA-DQA1*01:01-B1*05:01L HLA-DRB1*08:01L HLA-DRB1*04:10L HLA-DRB1*12:02L
EAELAKNVSLDN

SEQ ID NO: 14313 - protein, 13 aa, Severe acute respiratory syndrome coronavirus 2
  REGION 1..13: note = Table B: HLA-DRB1*13:02L HLA-DRB1*01:02L HLA-DRB1*08:04L HLA-DRB3*02:01L HLA-DPA1*01:03-B1*03:01L HLA-DPA1*03:01-B1*04:02L HLA-DQA1*05:05-B1*03:19L HLA-DPA1*02:01-B1*13:01L HLA-DPA1*01:02-B1*04:01L
  REGION 1..13: note = CONT. FROM ABOVE: HLA-DRB1*04:08L
AELAKNVSLDNVL

SEQ ID NO: 14314 - protein, 13 aa, Severe acute respiratory syndrome coronavirus 2
  REGION 1..13: note = Table B: HLA-DRB1*13:02L HLA-DRB1*13:03L HLA-DRB1*01:03L HLA-DRB1*04:04L HLA-DQA1*01:02-B1*06:02L HLA-DRB1*01:02L HLA-DRB1*14:01L HLA-DPA1*02:01-B1*13:01L HLA-DPA1*03:01-B1*105:01L HLA-DRB1*04:08L HLA-DRB1*15:03L
LAKNVSLDNVLST

SEQ ID NO: 14315 - protein, 13 aa, Severe acute respiratory syndrome coronavirus 2
  REGION 1..13: note = Table B: HLA-DRB1*13:02L HLA-DRB1*01:02L HLA-DRB1*08:04L HLA-DPA1*01:03-B1*03:01L
AKNVSLDNVLSTF

SEQ ID NO: 14316 - protein, 14 aa, Severe acute respiratory syndrome coronavirus 2
  REGION 1..14: note = Table B: HLA-DRB1*13:02L HLA-DRB1*01:02L HLA-DRB1*08:04L HLA-DPA1*01:03-B1*03:01L HLA-DRB1*03:01L
KNVSLDNVLSTFIS

SEQ ID NO: 14317 - protein, 13 aa, Severe acute respiratory syndrome coronavirus 2
  REGION 1..13: note = Table B: HLA-DRB1*13:02L HLA-DRB1*04:04L HLA-DRB3*02:01L HLA-DPA1*01:03-B1*03:01L HLA-DPA1*03:01-B1*04:02L HLA-DRB1*14:01L HLA-DRB1*08:01L HLA-DRB1*04:10L HLA-DPA1*01:03-B1*04:02L HLA-DPA1*02:01-B1*13:01L
  REGION 1..13: note = CONT. FROM ABOVE: HLA-DRB1*14:54L HLA-DPA1*01:02-B1*04:01L
DNVLSTFISAARQ

SEQ ID NO: 14318 - protein, 13 aa, Severe acute respiratory syndrome coronavirus 2
  REGION 1..13: note = Table B: HLA-DRB1*13:02L HLA-DRB1*04:04L HLA-DRB1*08:04L HLA-DRB3*02:01L HLA-DPA1*03:01-B1*04:02L HLA-DRB1*14:01L HLA-DRB1*04:10L HLA-DPA1*01:03-B1*04:02L HLA-DPA1*02:01-B1*13:01L HLA-DRB1*14:54L HLA-DRB1*08:03L
  REGION 1..13: note = CONT. FROM ABOVE: HLA-DRB1*15:01L
NVLSTFISAARQG

SEQ ID NO: 14319 - protein, 12 aa, Severe acute respiratory syndrome coronavirus 2
  REGION 1..12: note = Table B: HLA-DRB1*13:02L HLA-DRB1*08:04L HLA-DRB3*02:01L HLA-DPA1*01:03-B1*03:01L HLA-DRB1*08:01L HLA-DRB1*12:02L HLA-DRB1*14:54L
STFISAARQGFV

SEQ ID NO: 14320 - protein, 11 aa, Severe acute respiratory syndrome coronavirus 2
  REGION 1..11: note = Table B: HLA-DRB1*13:02L HLA-DRB1*13:03L HLA-DRB1*01:03L HLA-DRB1*04:05L HLA-DRB1*01:02L HLA-DRB1*08:04L HLA-DRB1*08:77L HLA-DRB3*02:01L HLA-DPA1*01:03-B1*03:01L HLA-DPA1*03:01-B1*04:02L HLA-DRB1*11:03L HLA-DRB1*11:04L
  REGION 1..11: note = CONT. FROM ABOVE: HLA-DRB1*14:02L HLA-DRB1*08:01L HLA-DPA1*01:03 -B1*04:02L HLA-DRB1*12:01L HLA-DRB1*12:02L HLA-DRB1*14:54L HLA-D PA1*01:02-B1*04:01L HLA-DRB1*16:01L HLA-DRB1*04:08L
FISAARQGFVD

SEQ ID NO: 14321 - protein, 14 aa, Severe acute respiratory syndrome coronavirus 2
  REGION 1..14: note = Table B: HLA-DRB1*13:02L HLA-DRB1*13:03L HLA-DRB3*02:01L HLA-DRB1*14:02L HLA-DRB1*08:01L HLA-DPA1*01:03-B1*04:01L HLA-DRB1*04:10L HLA-DPA1*01:03-B1*04:02L HLA-DPA1*01:03-B1*104:01L HLA-DPA1*01:02-B1*04:01L
  REGION 1..14: note = CONT. FROM ABOVE: HLA-DRB1*08:03L
ISAARQGFVDSDVE

SEQ ID NO: 14322 - protein, 15 aa, Severe acute respiratory syndrome coronavirus 2
  REGION 1..15: note = Table B: HLA-DRB1*13:02L HLA-DRB1*04:04L HLA-DPA1*01:03-B1*03:01L HLA-DRB3*01:01L HLA-DPA1*01:03-B1*104:01L HLA-DPA1*01:02-B1*04:01L HLA-DRB1*16:01L HLA-DRB1*15:03L
VETKDVVECLKLSHQ

SEQ ID NO: 14323 - protein, 14 aa, Severe acute respiratory syndrome coronavirus 2
  REGION 1..14: note = Table B: HLA-DRB1*13:02L HLA-DRB1*01:03L HLA-DRB1*04:02L HLA-DRB1*04:05L HLA-DRB1*01:02L HLA-DRB1*12:01L HLA-DRB3*01:01L HLA-DRB1*16:01L HLA-DRB1*15:03L
KDVVECLKLSHQSD

SEQ ID NO: 14324 - protein, 15 aa, Severe acute respiratory syndrome coronavirus 2
  REGION 1..15: note = Table B: HLA-DRB1*13:02L HLA-DRB1*04:04L HLA-DRB1*08:01L HLA-DPA1*02:01-B1*13:01L HLA-DPA1*01:03-B1*104:01L
LKLSHQSDIEVTGDS

SEQ ID NO: 14325 - protein, 13 aa, Severe acute respiratory syndrome coronavirus 2
  REGION 1..13: note = Table B: HLA-DRB1*13:02L
NNYMLTYNKVENM

SEQ ID NO: 14326 - protein, 14 aa, Severe acute respiratory syndrome coronavirus 2
  REGION 1..14: note = Table B: HLA-DRB1*13:02L HLA-DRB1*04:05L HLA-DRB1*14:02L HLA-DRB1*08:01L HLA-DQA1*05:05-B1*03:19L HLA-DQA1*05:05-B1*03:01L
NYMLTYNKVENMTP

SEQ ID NO: 14327 - protein, 13 aa, Severe acute respiratory syndrome coronavirus 2
  REGION 1..13: note = Table B: HLA-DRB1*13:02L HLA-DPA1*01:03-B1*03:01L HLA-DQA1*05:05-B1*03:01L
TYNKVENMTPRDL

SEQ ID NO: 14328 - protein, 13 aa, Severe acute respiratory syndrome coronavirus 2
  REGION 1..13: note = Table B: HLA-DRB1*13:02L HLA-DRB1*04:04L HLA-DRB1*08:04L HLA-DRB1*08:77L HLA-DRB3*02:01L HLA-DPA1*01:03-B1*03:01L HLA-DPA1*03:01-B1*04:02L HLA-DRB1*14:02L HLA-DQA1*01:01-B1*05:01L HLA-DRB1*08:01L HLA-DRB1*04:10L
  REGION 1..13: note = CONT. FROM ABOVE: HLA-DRB1*12:02L HLA-DPA1*01:03-B1*104:01L HLA- DRB1*07:01L HLA-DRB1*10:01L HLA-DRB1*04:08L HLA-DRB1*08:03L
YNKVENMTPRDLG

SEQ ID NO: 14329 - protein, 14 aa, Severe acute respiratory syndrome coronavirus 2
  REGION 1..14: note = Table B: HLA-DRB1*13:02L HLA-DRB1*01:01L HLA-DPA1*01:03-B1*03:01L HLA-DRB1*11:04L HLA-DRB1*11:01L HLA-DRB1*04:10L HLA-DRB3*01:01L HLA-DPA1*01:03-B1*104:01L HLA-DRB1*07:01L
SARHINAQVAKSHN

SEQ ID NO: 14330 - protein, 13 aa, Severe acute respiratory syndrome coronavirus 2
  REGION 1..13: note = Table B: HLA-DRB1*13:02L HLA-DRB3*02:01L HLA-DRB4*01:01L HLA-DPA1*01:03-B1*04:02L HLA-DRB1*12:02L HLA-DPA1*01:03-B1*104:01L HLA-DRB1*10:01L HLA-DRB1*08:03L
SHNIALIWNVKDF

SEQ ID NO: 14331 - protein, 14 aa, Severe acute respiratory syndrome coronavirus 2
  REGION 1..14: note = Table B: HLA-DRB1*13:02L HLA-DRB1*04:04L HLA-DPA1*01:03-B1*104:01L
IALIWNVKDFMSLS

SEQ ID NO: 14332 - protein, 13 aa, Severe acute respiratory syndrome coronavirus 2
  REGION 1..13: note = Table B: HLA-DRB1*13:02L HLA-DRB1*13:03L HLA-DRB1*04:04L HLA-DRB1*01:01L HLA-DRB1*14:01L HLA-DRB1*08:01L HLA-DRB3*01:01L HLA-DPA1*01:02-B1*04:01L HLA-DRB1*07:01L
VKDFMSLSEQLRK

SEQ ID NO: 14333 - protein, 12 aa, Severe acute respiratory syndrome coronavirus 2
  REGION 1..12: note = Table B: HLA-DRB1*13:02L HLA-DRB1*04:05L HLA-DQA1*01:02-B1*06:02L HLA-DRB1*01:01L HLA-DRB1*14:01L HLA-DQA1*01-B1*05L HLA-DPA1*03:01-B1*105:01L HLA-DRB1*07:01L HLA-DRB1*04:08L
DFMSLSEQLRKQ

SEQ ID NO: 14334 - protein, 15 aa, Severe acute respiratory syndrome coronavirus 2
  REGION 1..15: note = Table B: HLA-DRB1*13:02L HLA-DPA1*02:01-B1*13:01L HLA-DRB1*07:01L HLA-DQA1*02:01-B1*03:03L
EQLRKQIRSAAKKNN

SEQ ID NO: 14335 - protein, 14 aa, Severe acute respiratory syndrome coronavirus 2
  REGION 1..14: note = Table B: HLA-DRB1*13:02L HLA-DRB1*13:03L HLA-DRB1*01:03L HLA-DRB1*04:02L HLA-DRB1*04:05L HLA-DRB1*01:02L HLA-DRB1*08:04L HLA-DRB1*11:03L HLA-DRB1*11:04L HLA-DRB1*11:01L HLA-DRB1*12:01L HLA-DRB3*01:01L HLA-DRB1*16:01L HLA-DRB1*04:08L HLA-DRB1*15:03L
KQIRSAAKKNNLPF

SEQ ID NO: 14336 - protein, 10 aa, Severe acute respiratory syndrome coronavirus 2
  REGION 1..10: note = Table B: HLA-DRB1*13:02L HLA-DRB1*13:03L HLA-DRB4*03:01NL HLA-DRB1*08:01L HLA-DRB1*12:01L HLA-DQA1*03:01-B1*03:02M HLA-DQA1*05:05-B1*03:01L HLA-DRB1*14:17L
RQVVNVVTTK

SEQ ID NO: 14337 - protein, 14 aa, Severe acute respiratory syndrome coronavirus 2
  REGION 1..14: note = Table B: HLA-DRB1*13:02L HLA-DRB1*13:03L HLA-DRB1*04:04L HLA-DRB1*11:04L HLA-DRB1*11:01L HLA-DRB3*01:01L HLA-DPA1*02:01-B1*13:01L HLA-DQA1*05:05-B1*03:01L
VNVVTTKIALKGGK

SEQ ID NO: 14338 - protein, 13 aa, Severe acute respiratory syndrome coronavirus 2
  REGION 1..13: note = Table B: HLA-DRB1*13:02L HLA-DPA1*01:03-B1*03:01L HLA-DPA1*03:01-B1*105:01L
KGGKIVNNWLKQL

SEQ ID NO: 14339 - protein, 12 aa, Severe acute respiratory syndrome coronavirus 2
  REGION 1..12: note = Table B: HLA-DRB1*13:02L HLA-DRB1*01:03L HLA-DRB1*04:05L HLA-DRB1*01:02L HLA-DRB1*08:01L HLA-DRB1*12:01L HLA-DRB3*01:01L HLA-DRB1*04:08L
KIVNNWLKQLIK

SEQ ID NO: 14340 - protein, 12 aa, Severe acute respiratory syndrome coronavirus 2
  REGION 1..12: note = Table B: HLA-DRB1*13:02L HLA-DRB1*04:02L HLA-DRB3*02:01L HLA-DPA1*01:03-B1*03:01L HLA-DRB1*14:54L HLA-DRB1*14:17L HLA-DRB1*04:08L
AAIFYLITPVHV

SEQ ID NO: 14341 - protein, 11 aa, Severe acute respiratory syndrome coronavirus 2
  REGION 1..11: note = Table B: HLA-DRB1*13:02L HLA-DPA1*01:03-B1*03:01L HLA-DRB4*01:01L HLA-DRB1*04:08L
IFYLITPVHVM

SEQ ID NO: 14342 - protein, 13 aa, Severe acute respiratory syndrome coronavirus 2
  REGION 1..13: note = Table B: HLA-DRB1*13:02L HLA-DRB1*04:05L HLA-DRB1*01:02L HLA-DRB1*11:02L HLA-DRB1*11:03L HLA-DQA1*05:05-B1*03:116L HLA-DRB1*12:01L HLA-DRB3*01:01L HLA-DRB1*14:54L HLA-DRB1*08:02L HLA-DRB1*08:03L HLA-DRB1*15:03L
TPVHVMSKHTDFS

SEQ ID NO: 14343 - protein, 12 aa, Severe acute respiratory syndrome coronavirus 2
  REGION 1..12: note = Table B: HLA-DRB1*13:02L HLA-DRB1*04:04L HLA-DQA1*01:02-B1*06:02L HLA-DRB1*01:01L HLA-DRB1*01:02L HLA-DRB1*08:04L HLA-DRB1*08:77L HLA-DRB3*02:01L HLA-DPA1*01:03-B1*03:01L HLA-DPA1*03:01-B1*04:02L
  REGION 1..12: note = CONT. FROM ABOVE: HLA-DRB1*14:01L HLA-DRB1*11:03L HLA-DRB1*11:04 L HLA-DRB1*14:02L HLA-DQA1*01:01-B1*05:01L HLA-DRB1*08:01L HLA-D RB1*11:01L HLA-DQA1*05:05-B1*03:19L HLA-DPA1*01:03-B1*04:01L HLA -DRB1*09:01L HLA-DPA1*01:03-B1*04:02L HLA-DRB1*12:02L
  REGION 1..12: note = CONT. FROM ABOVE: HLA-DRB3*01:01L HLA-DPA1*02:01-B1*13:01L HLA-D PA1*03:01-B1*105:01L HLA-DPA1*01:03-B1*104:01L HLA-DQA1*05:05-B1 *03:01L HLA-DPA1*01:02-B1*04:01L HLA-DRB1*07:01L HLA-DRB1*10:01L HLA-DQA1*01:03-B1*06:01L HLA-DRB1*08:03L HLA-DRB1*15:01L
  REGION 1..12: note = CONT. FROM ABOVE: HLA-DRB1*15:03M
IIGYKAIDGGVT

SEQ ID NO: 14344 - protein, 12 aa, Severe acute respiratory syndrome coronavirus 2
  REGION 1..12: note = Table B: HLA-DRB1*13:02L HLA-DRB1*04:05L HLA-DRB1*08:01L HLA-DRB1*14:54L HLA-DRB1*04:08L
AIDGGVTRDIAS

SEQ ID NO: 14345 - protein, 13 aa, Severe acute respiratory syndrome coronavirus 2
  REGION 1..13: note = Table B: HLA-DRB1*13:02L HLA-DPA1*01:03-B1*03:01L HLA-DRB1*12:01L HLA-DPA1*02:01-B1*13:01L HLA-DPA1*03:01-B1*105:01L HLA-DRB1*04:08L
DGGVTRDIASTDT

SEQ ID NO: 14346 - protein, 11 aa, Severe acute respiratory syndrome coronavirus 2
  REGION 1..11: note = Table B: HLA-DRB1*13:02L HLA-DRB1*01:03L HLA-DRB1*04:02L HLA-DRB4*03:01NL HLA-DRB1*08:01L HLA-DRB5*01:01L HLA-DRB1*12:01L
VVPGLPGTILR

SEQ ID NO: 14347 - protein, 12 aa, Severe acute respiratory syndrome coronavirus 2
  REGION 1..12: note = Table B: HLA-DRB1*13:02L HLA-DRB1*04:02L HLA-DRB4*03:01NL HLA-DRB1*09:01L HLA-DRB1*12:02L HLA-DRB1*14:54L
GTILRTTNGDFL

SEQ ID NO: 14348 - protein, 12 aa, Severe acute respiratory syndrome coronavirus 2
  REGION 1..12: note = Table B: HLA-DRB1*13:02L HLA-DRB1*04:05L HLA-DQA1*01:02-B1*06:02L HLA-DPA1*03:01-B1*105:01L HLA-DRB1*14:17L HLA-DRB1*04:08L
TILRTTNGDFLH

SEQ ID NO: 14349 - protein, 13 aa, Severe acute respiratory syndrome coronavirus 2
  REGION 1..13: note = Table B: HLA-DRB1*13:02L HLA-DRB1*13:03L HLA-DRB1*04:02L HLA-DRB3*01:01L
GDFLHFLPRVFSA

SEQ ID NO: 14350 - protein, 14 aa, Severe acute respiratory syndrome coronavirus 2
  REGION 1..14: note = Table B: HLA-DRB1*13:02L
FLHFLPRVFSAVGN

SEQ ID NO: 14351 - protein, 14 aa, Severe acute respiratory syndrome coronavirus 2
  REGION 1..14: note = Table B: HLA-DRB1*13:02L HLA-DRB1*13:03L HLA-DRB1*04:04L HLA-DRB3*02:01L HLA-DRB1*14:02L HLA-DRB1*11:01L HLA-DRB4*02:01NL HLA-DPA1*01:03-B1*04:01L HLA-DQA1*05:05-B1*03:116L HLA-DPA1*02:01-B1*13:01L HLA-DRB1*14:54L
  REGION 1..14: note = CONT. FROM ABOVE: HLA-DPA1*01:03-B1*104:01L HLA-DRB1*07:01L HLA- DRB1*08:03L HLA-DRB1*15:03L
VLEGSVAYESLRPD

SEQ ID NO: 14352 - protein, 13 aa, Severe acute respiratory syndrome coronavirus 2
  REGION 1..13: note = Table B: HLA-DRB1*13:02L HLA-DRB1*04:04L HLA-DRB1*01:02L HLA-DRB1*08:04L HLA-DPA1*01:03-B1*03:01L HLA-DRB1*14:01L HLA-DRB1*11:04L HLA-DPA1*01:03-B1*04:01L HLA-DRB1*12:02L HLA-DPA1*02:01-B1*13:01L HLA-DRB1*14:54L
  REGION 1..13: note = CONT. FROM ABOVE: HLA-DPA1*01:03-B1*02:01L HLA-DPA1*01:03-B1*104 :01L HLA-DRB1*08:03L HLA-DRB1*15:03L
EGSVAYESLRPDT

SEQ ID NO: 14353 - protein, 13 aa, Severe acute respiratory syndrome coronavirus 2
  REGION 1..13: note = Table B: HLA-DRB1*13:02L HLA-DPA1*01:03-B1*03:01L HLA-DRB1*11:04L HLA-DQA1*05:05-B1*03:19L HLA-DRB3*01:01L HLA-DPA1*01:03-B1*02:01L HLA-DRB1*08:03L
GSVAYESLRPDTR

SEQ ID NO: 14354 - protein, 13 aa, Severe acute respiratory syndrome coronavirus 2
  REGION 1..13: note = Table B: HLA-DRB1*13:02L
SVAYESLRPDTRY

SEQ ID NO: 14355 - protein, 11 aa, Severe acute respiratory syndrome coronavirus 2
  REGION 1..11: note = Table B: HLA-DRB1*13:02L HLA-DRB3*01:01L
ESLRPDTRYVL

SEQ ID NO: 14356 - protein, 12 aa, Severe acute respiratory syndrome coronavirus 2
  REGION 1..12: note = Table B: HLA-DRB1*13:02L HLA-DRB1*01:03L HLA-DRB1*01:02L HLA-DRB1*03:01L HLA-DRB1*14:01L HLA-DRB3*01:01L HLA-DRB1*16:01L
LRPDTRYVLMDG

SEQ ID NO: 14357 - protein, 12 aa, Severe acute respiratory syndrome coronavirus 2
  REGION 1..12: note = Table B: HLA-DRB1*13:02L HLA-DRB1*08:04L HLA-DRB1*11:03L HLA-DRB1*11:04L HLA-DRB1*08:01L HLA-DRB1*07:01L HLA-DRB1*08:03L
DGSIIQFPNTYL

SEQ ID NO: 14358 - protein, 12 aa, Severe acute respiratory syndrome coronavirus 2
  REGION 1..12: note = Table B: HLA-DRB1*13:02L HLA-DRB1*11:03L HLA-DRB1*11:04L HLA-DRB1*08:01L HLA-DQA1*05:05-B1*03:01L HLA-DRB1*08:03L
GSIIQFPNTYLE

SEQ ID NO: 14359 - protein, 11 aa, Severe acute respiratory syndrome coronavirus 2
  REGION 1..11: note = Table B: HLA-DRB1*13:02L HLA-DRB1*01:03L HLA-DRB1*04:05L HLA-DRB4*03:01NL HLA-DQA1*01:01-B1*05:01L HLA-DRB1*08:01L HLA-DRB5*01:01L HLA-DQA1*05:05-B1*03:19L HLA-DPA1*01:03-B1*04:02L HLA-DRB1*12:01L
  REGION 1..11: note = CONT. FROM ABOVE: HLA-DPA1*03:01-B1*105:01L HLA-DRB1*14:54L HLA- DRB1*04:08L HLA-DRB1*15:03L
FPNTYLEGSVR

SEQ ID NO: 14360 - protein, 13 aa, Severe acute respiratory syndrome coronavirus 2
  REGION 1..13: note = Table B: HLA-DRB1*13:02L HLA-DRB4*03:01NL HLA-DRB1*08:04L HLA-DRB1*08:77L HLA-DRB1*11:03L HLA-DRB1*11:04L HLA-DRB3*01:01L HLA-DRB1*14:54L HLA-DRB1*15:03L
SGRWVLNNDYYRS

SEQ ID NO: 14361 - protein, 14 aa, Severe acute respiratory syndrome coronavirus 2
  REGION 1..14: note = Table B: HLA-DRB1*13:02L HLA-DRB1*08:04L HLA-DRB1*14:02L HLA-DRB1*08:01L HLA-DQA1*01-B1*05L HLA-DRB1*12:01L HLA-DRB3*01:01L HLA-DPA1*02:01-B1*13:01L
GRWVLNNDYYRSLP

SEQ ID NO: 14362 - protein, 12 aa, Severe acute respiratory syndrome coronavirus 2
  REGION 1..12: note = Table B: HLA-DRB1*13:02L HLA-DRB3*02:01L
NNDYYRSLPGVF

SEQ ID NO: 14363 - protein, 13 aa, Severe acute respiratory syndrome coronavirus 2
  REGION 1..13: note = Table B: HLA-DRB1*13:02L
NDYYRSLPGVFCG

SEQ ID NO: 14364 - protein, 14 aa, Severe acute respiratory syndrome coronavirus 2
  REGION 1..14: note = Table B: HLA-DRB1*13:02L
DYYRSLPGVFCGVD

SEQ ID NO: 14365 - protein, 16 aa, Severe acute respiratory syndrome coronavirus 2
  REGION 1..16: note = Table B: HLA-DRB1*13:02L HLA-DRB1*01:03L HLA-DRB1*14:01L HLA-DRB1*14:02L HLA-DPA1*01:03-B1*104:01L HLA-DRB1*10:01L HLA-DRB1*04:08L
LPGVFCGVDAVNLLTN

SEQ ID NO: 14366 - protein, 12 aa, Severe acute respiratory syndrome coronavirus 2
  REGION 1..12: note = Table B: HLA-DRB1*13:02L HLA-DRB1*04:04L HLA-DRB1*08:77L HLA-DRB3*02:01L HLA-DPA1*01:03-B1*03:01L HLA-DRB1*11:03L HLA-DRB1*11:04L HLA-DRB1*14:02L HLA-DQA1*01:01-B1*05:01L HLA-DRB1*11:01L HLA-DPA1*01:03-B1*04:01L HLA-DRB1*09:01L
  REGION 1..12: note = CONT. FROM ABOVE: HLA-DRB1*12:02L HLA-DPA1*01:03-B1*02:01L HLA-D PA1*01:03-B1*104:01L HLA-DRB1*07:01L HLA-DRB1*10:01L
TNMFTPLIQPIG

SEQ ID NO: 14367 - protein, 17 aa, Severe acute respiratory syndrome coronavirus 2
  REGION 1..17: note = Table B: HLA-DRB1*13:02L HLA-DRB1*04:04L HLA-DRB1*16:01L HLA-DRB1*04:08L
QPIGALDISASIVAGGI

SEQ ID NO: 14368 - protein, 14 aa, Severe acute respiratory syndrome coronavirus 2
  REGION 1..14: note = Table B: HLA-DRB1*13:02L HLA-DRB1*08:04L HLA-DPA1*01:03-B1*04:02L HLA-DRB1*15:03L
AYYFMRFRRAFGEY

SEQ ID NO: 14369 - protein, 14 aa, Severe acute respiratory syndrome coronavirus 2
  REGION 1..14: note = Table B: HLA-DRB1*13:02L HLA-DRB1*04:04L HLA-DRB1*01:01L HLA-DRB1*11:01L HLA-DRB1*07:01L
RFRRAFGEYSHVVA

SEQ ID NO: 14370 - protein, 15 aa, Severe acute respiratory syndrome coronavirus 2
  REGION 1..15: note = Table B: HLA-DRB1*13:02L HLA-DRB1*08:04L HLA-DRB1*14:01L
FRRAFGEYSHVVAFN

SEQ ID NO: 14371 - protein, 11 aa, Severe acute respiratory syndrome coronavirus 2
  REGION 1..11: note = Table B: HLA-DRB1*13:02L HLA-DRB1*01:03L HLA-DRB4*03:01NL HLA-DRB1*08:77L HLA-DQA1*01:01-B1*05:01L HLA-DRB1*09:01L HLA-DPA1*01:03-B1*104:01L HLA-DRB1*07:01L HLA-DRB1*10:01L HLA-DRB1*04:08L HLA-DRB1*08:03L
EYSHVVAFNTL

SEQ ID NO: 14372 - protein, 12 aa, Severe acute respiratory syndrome coronavirus 2
  REGION 1..12: note = Table B: HLA-DRB1*13:02L HLA-DPA1*01:03-B1*03:01L
SHVVAFNTLLFL

SEQ ID NO: 14373 - protein, 11 aa, Severe acute respiratory syndrome coronavirus 2
  REGION 1..11: note = Table B: HLA-DRB1*13:02L HLA-DRB1*04:05L HLA-DRB1*08:02L
SFLPGVYSVIY

SEQ ID NO: 14374 - protein, 12 aa, Severe acute respiratory syndrome coronavirus 2
  REGION 1..12: note = Table B: HLA-DRB1*13:02L HLA-DRB1*01:02L HLA-DRB1*08:04L HLA-DRB3*02:01L HLA-DRB1*12:02L HLA-DRB1*14:54L
TNDVSFLAHIQW

SEQ ID NO: 14375 - protein, 13 aa, Severe acute respiratory syndrome coronavirus 2
  REGION 1..13: note = Table B: HLA-DRB1*13:02L HLA-DRB1*14:01L HLA-DRB3*01:01L
HFYWFFSNYLKRR

SEQ ID NO: 14376 - protein, 14 aa, Severe acute respiratory syndrome coronavirus 2
  REGION 1..14: note = Table B: HLA-DRB1*13:02L HLA-DPA1*03:01-B1*04:02L
FYWFFSNYLKRRVV

SEQ ID NO: 14377 - protein, 15 aa, Severe acute respiratory syndrome coronavirus 2
  REGION 1..15: note = Table B: HLA-DRB1*13:02L HLA-DRB3*01:01L
YWFFSNYLKRRVVFN

SEQ ID NO: 14378 - protein, 15 aa, Severe acute respiratory syndrome coronavirus 2
  REGION 1..15: note = Table B: HLA-DRB1*13:02L HLA-DRB3*01:01L
WFFSNYLKRRVVFNG

SEQ ID NO: 14379 - protein, 14 aa, Severe acute respiratory syndrome coronavirus 2
  REGION 1..14: note = Table B: HLA-DRB1*13:02L HLA-DRB1*04:04L HLA-DPA1*01:03-B1*03:01L HLA-DPA1*02:01-B1*13:01L HLA-DRB1*15:03L
LKRRVVFNGVSFST

SEQ ID NO: 14380 - protein, 13 aa, Severe acute respiratory syndrome coronavirus 2
  REGION 1..13: note = Table B: HLA-DRB1*13:02L HLA-DRB1*08:04L HLA-DRB1*11:04L HLA-DRB1*08:01L HLA-DRB1*11:01L HLA-DPA1*01:03-B1*02:01L
RVVFNGVSFSTFE

SEQ ID NO: 14381 - protein, 14 aa, Severe acute respiratory syndrome coronavirus 2
  REGION 1..14: note = Table B: HLA-DRB1*13:02L HLA-DRB1*08:04L HLA-DRB1*14:01L
VVFNGVSFSTFEEA

SEQ ID NO: 14382 - protein, 13 aa, Severe acute respiratory syndrome coronavirus 2
  REGION 1..13: note = Table B: HLA-DRB1*13:02L HLA-DRB1*04:02L HLA-DRB1*08:04L HLA-DRB3*02:01L HLA-DRB1*14:01L HLA-DRB1*14:02L HLA-DRB1*08:01L HLA-DPA1*01:03-B1*104:01L
NGVSFSTFEEAAL

SEQ ID NO: 14383 - protein, 13 aa, Severe acute respiratory syndrome coronavirus 2
  REGION 1..13: note = Table B: HLA-DRB1*13:02L HLA-DRB1*04:05L HLA-DPA1*01:03-B1*03:01L HLA-DRB1*14:01L HLA-DRB1*08:01L HLA-DPA1*01:03-B1*04:01L HLA-DRB3*01:01L HLA-DPA1*02:01-B1*13:01L HLA-DQA1*03:01-B1*03:02L
  REGION 1..13: note = CONT. FROM ABOVE: HLA-DPA1*01:03-B1*02:01L HLA-DRB1*15:03L
LKLRSDVLLPLTQ

SEQ ID NO: 14384 - protein, 14 aa, Severe acute respiratory syndrome coronavirus 2
  REGION 1..14: note = Table B: HLA-DRB1*13:02L HLA-DPA1*02:01-B1*13:01L
KLRSDVLLPLTQYN

SEQ ID NO: 14385 - protein, 10 aa, Severe acute respiratory syndrome coronavirus 2
  REGION 1..10: note = Table B: HLA-DRB1*13:02L HLA-DRB1*13:03L HLA-DRB4*03:01NL HLA-DRB1*08:01L HLA-DRB1*12:01L HLA-DQA1*03:01-B1*03:02L HLA-DQA1*05:05-B1*03:01L
VLLPLTQYNR

SEQ ID NO: 14386 - protein, 12 aa, Severe acute respiratory syndrome coronavirus 2
  REGION 1..12: note = Table B: HLA-DRB1*13:02L HLA-DRB3*01:01L HLA-DRB1*04:08L
YLALYNKYKYFS

SEQ ID NO: 14387 - protein, 12 aa, Severe acute respiratory syndrome coronavirus 2
  REGION 1..12: note = Table B: HLA-DRB1*13:02L HLA-DRB1*01:03L HLA-DRB1*04:02L HLA-DRB1*04:05L HLA-DQA1*01:02-B1*06:02L HLA-DRB1*01:02L HLA-DRB1*08:04L HLA-DPA1*03:01-B1*04:02L HLA-DRB1*11:03L HLA-DRB1*11:04L HLA-DRB1*08:01L HLA-DRB1*11:01L HLA-DRB1*12:01L
  REGION 1..12: note = CONT. FROM ABOVE: HLA-DRB3*01:01L HLA-DPA1*03:01-B1*105:01L HLA- DPA1*01:02-B1*04:01L HLA-DRB1*16:01L HLA-DRB1*04:08L
LALYNKYKYFSG

SEQ ID NO: 14388 - protein, 14 aa, Severe acute respiratory syndrome coronavirus 2
  REGION 1..14: note = Table B: HLA-DRB1*13:02L HLA-DRB1*01:03L HLA-DQA1*01:02-B1*06:02L HLA-DRB1*01:02L HLA-DPA1*01:03-B1*03:01L HLA-DQA1*01:01-B1*05:01L HLA-DPA1*02:01-B1*13:01L HLA-DPA1*03:01-B1*105:01L
  REGION 1..14: note = CONT. FROM ABOVE: HLA-DQA1*05:05-B1*03:01L HLA-DQA1*01:03-B1*06: 01L
LAKALNDFSNSGSD

SEQ ID NO: 14389 - protein, 13 aa, Severe acute respiratory syndrome coronavirus 2
  REGION 1..13: note = Table B: HLA-DRB1*13:02L HLA-DRB3*02:01L HLA-DPA1*01:03-B1*03:01L HLA-DRB1*04:10L HLA-DRB1*12:02L HLA-DRB1*14:54L HLA-DRB1*04:08L
SDVLYQPPQTSIT

SEQ ID NO: 14390 - protein, 12 aa, Severe acute respiratory syndrome coronavirus 2
  REGION 1..12: note = Table B: HLA-DRB1*13:02L HLA-DRB1*13:03L HLA-DRB1*04:04L HLA-DRB1*14:02L HLA-DRB1*11:01L HLA-DRB1*04:10L HLA-DPA1*01:03-B1*02:01L HLA-DPA1*01:03-B1*104:01L
SITSAVLQSGFR

SEQ ID NO: 14391 - protein, 16 aa, Severe acute respiratory syndrome coronavirus 2
  REGION 1..16: note = Table B: HLA-DRB1*13:02L HLA-DRB1*11:02L HLA-DQA1*05:05-B1*03:19L HLA-DPA1*01:03-B1*04:02L HLA-DRB1*12:01L HLA-DPA1*03:01-B1*105:01L HLA-DRB1*15:03L
SAVLQSGFRKMAFPSG

SEQ ID NO: 14392 - protein, 12 aa, Severe acute respiratory syndrome coronavirus 2
  REGION 1..12: note = Table B: HLA-DRB1*13:02L HLA-DRB1*01:03L HLA-DRB1*01:02L HLA-DRB1*08:04L HLA-DPA1*03:01-B1*04:02L HLA-DRB1*03:01L HLA-DRB1*14:01L HLA-DQA1*05:01-B1*02:01L HLA-DRB3*01:01L HLA-DRB1*16:01L HLA-DRB1*04:08L HLA-DRB1*15:03L
GLWLDDVVYCPR

SEQ ID NO: 14393 - protein, 14 aa, Severe acute respiratory syndrome coronavirus 2
  REGION 1..14: note = Table B: HLA-DRB1*13:02L HLA-DRB1*01:03L HLA-DRB1*01:02L HLA-DRB1*08:01L HLA-DRB3*01:01L HLA-DRB1*04:08L
LDDVVYCPRHVICT

SEQ ID NO: 14394 - protein, 16 aa, Severe acute respiratory syndrome coronavirus 2
  REGION 1..16: note = Table B: HLA-DRB1*13:02L HLA-DRB1*01:03L HLA-DRB1*01:02L HLA-DRB1*11:02L HLA-DRB1*14:02L HLA-DPA1*01:03-B1*04:02L HLA-DRB1*12:01L HLA-DPA1*03:01-B1*105:01L HLA-DRB1*16:01L HLA-DRB1*15:03L
DDVVYCPRHVICTSED

SEQ ID NO: 14395 - protein, 15 aa, Severe acute respiratory syndrome coronavirus 2
  REGION 1..15: note = Table B: HLA-DRB1*13:02L HLA-DRB1*01:03L HLA-DRB1*14:02L
SEDMLNPNYEDLLIR

SEQ ID NO: 14396 - protein, 12 aa, Severe acute respiratory syndrome coronavirus 2
  REGION 1..12: note = Table B: HLA-DRB1*13:02L HLA-DRB1*01:03L HLA-DRB1*04:02L HLA-DRB1*04:05L HLA-DRB1*01:02L HLA-DRB1*08:04L HLA-DRB1*08:01L HLA-DRB1*12:01L HLA-DRB1*14:54L HLA-DRB1*16:01L HLA-DRB1*04:08L HLA-DRB1*15:03L
DLLIRKSNHNFL

SEQ ID NO: 14397 - protein, 13 aa, Severe acute respiratory syndrome coronavirus 2
  REGION 1..13: note = Table B: HLA-DRB1*13:02L HLA-DRB1*16:01L
LLIRKSNHNFLVQ

SEQ ID NO: 14398 - protein, 14 aa, Severe acute respiratory syndrome coronavirus 2
  REGION 1..14: note = Table B: HLA-DRB1*13:02L HLA-DRB1*04:05L HLA-DPA1*02:01-B1*13:01L
LIRKSNHNFLVQAG

SEQ ID NO: 14399 - protein, 12 aa, Severe acute respiratory syndrome coronavirus 2
  REGION 1..12: note = Table B: HLA-DRB1*13:02L HLA-DRB1*04:04L HLA-DRB1*01:02L HLA-DRB1*08:04L HLA-DPA1*03:01-B1*04:02L HLA-DRB1*14:01L HLA-DRB1*12:02L HLA-DPA1*02:01-B1*13:01L HLA-DPA1*01:02-B1*04:01L HLA-DRB1*10:01L HLA-DRB1*08:03L
  REGION 1..12: note = CONT. FROM ABOVE: HLA-DRB1*15:03L
NHNFLVQAGNVQ

SEQ ID NO: 14400 - protein, 12 aa, Severe acute respiratory syndrome coronavirus 2
  REGION 1..12: note = Table B: HLA-DRB1*13:02L HLA-DRB1*13:03L HLA-DRB1*01:03L HLA-DRB1*04:02L HLA-DRB1*04:04L HLA-DRB1*04:05L HLA-DRB1*01:02L HLA-DRB4*03:01NL HLA-DRB1*14:01L HLA-DRB1*08:01L HLA-DRB1*04:10L HLA-DRB1*12:01L HLA-DRB3*01:01L HLA-DRB1*14:54L HLA-DRB1*16:01L
  REGION 1..12: note = CONT. FROM ABOVE: HLA-DRB1*04:08L HLA-DQA1*02:01-B1*03:03L HLA-D RB1*15:03L
VLKLKVDTANPK

SEQ ID NO: 14401 - protein, 12 aa, Severe acute respiratory syndrome coronavirus 2
  REGION 1..12: note = Table B: HLA-DRB1*13:02L HLA-DRB1*01:03L HLA-DRB1*01:02L HLA-DRB1*03:01L HLA-DQA1*05:01-B1*02:01L HLA-DRB1*12:01L HLA-DRB3*01:01L HLA-DRB1*15:03L
KLKVDTANPKTP

SEQ ID NO: 14402 - protein, 10 aa, Severe acute respiratory syndrome coronavirus 2
  REGION 1..10: note = Table B: HLA-DRB1*13:02L HLA-DRB1*13:03L HLA-DRB1*01:03L HLA-DRB1*04:02L HLA-DRB1*01:01L HLA-DRB4*03:01NL HLA-DRB1*14:01L HLA-DRB1*11:04L HLA-DRB1*08:01L HLA-DRB1*12:01L HLA-DRB3*01:01L HLA-DQA1*03:01-B1*03:02L HLA-DQA1*05:05-B1*03:01L
  REGION 1..10: note = CONT. FROM ABOVE: HLA-DRB1*14:17L HLA-DRB1*16:01L HLA-DQA1*02:01 -B1*03:03L
TANPKTPKYK

SEQ ID NO: 14403 - protein, 15 aa, Severe acute respiratory syndrome coronavirus 2
  REGION 1..15: note = Table B: HLA-DRB1*13:02L HLA-DRB1*04:04L HLA-DRB1*01:01L HLA-DRB3*02:01L HLA-DRB1*03:01L HLA-DRB1*11:02L HLA-DRB1*11:03L HLA-DRB1*11:04L HLA-DRB1*14:02L HLA-DQA1*05:01-B1*02:01L HLA-DPA1*01:03-B1*04:01L HLA-DQA1*05:05-B1*03:116L
  REGION 1..15: note = CONT. FROM ABOVE: HLA-DRB1*04:10L HLA-DRB3*01:01L HLA-DRB1*14:54 L HLA-DPA1*01:03-B1*02:01L HLA-DPA1*01:03-B1*104:01L HLA-DRB1*14 :17L HLA-DRB1*07:01L HLA-DRB1*10:01L HLA-DRB1*08:02L HLA-DRB1*08 :03L
SPSGVYQCAMRPNFT

SEQ ID NO: 14404 - protein, 13 aa, Severe acute respiratory syndrome coronavirus 2
  REGION 1..13: note = Table B: HLA-DRB1*13:02L HLA-DRB4*03:01NL HLA-DRB1*11:03L HLA-DRB1*11:04L HLA-DRB1*14:02L HLA-DRB1*11:01L HLA-DRB1*04:10L HLA-DRB3*01:01L HLA-DPA1*02:01-B1*13:01L HLA-DRB1*14:54L HLA-DPA1*01:02-B1*04:01L HLA-DRB1*10:01L HLA-DRB1*08:02L
  REGION 1..13: note = CONT. FROM ABOVE: HLA-DRB1*15:03L
RPNFTIKGSFLNG

SEQ ID NO: 14405 - protein, 14 aa, Severe acute respiratory syndrome coronavirus 2
  REGION 1..14: note = Table B: HLA-DRB1*13:02L HLA-DRB1*04:04L HLA-DRB1*01:02L HLA-DRB1*08:77L HLA-DRB1*14:02L HLA-DRB1*08:01L HLA-DQA1*05:05-B1*03:116L HLA-DPA1*01:03-B1*04:02L HLA-DRB3*01:01L HLA-DPA1*02:01-B1*13:01L
  REGION 1..14: note = CONT. FROM ABOVE: HLA-DPA1*03:01-B1*105:01L HLA-DRB1*14:54L HLA- DPA1*01:03-B1*104:01L HLA-DRB1*07:01L HLA-DRB1*15:03L
LPTGVHAGTDLEGN

SEQ ID NO: 14406 - protein, 12 aa, Severe acute respiratory syndrome coronavirus 2
  REGION 1..12: note = Table B: HLA-DRB1*13:02L HLA-DRB3*02:01L HLA-DPA1*03:01-B1*04:02L HLA-DRB4*01:01L HLA-DQA1*05:05-B1*03:116L HLA-DPA1*02:01-B1*13:01L HLA-DQA1*05:05-B1*03:01L HLA-DPA1*01:02-B1*04:01L
VHAGTDLEGNFY

SEQ ID NO: 14407 - protein, 15 aa, Severe acute respiratory syndrome coronavirus 2
  REGION 1..15: note = Table B: HLA-DRB1*13:02L HLA-DRB1*08:04L HLA-DPA1*01:03-B1*03:01L HLA-DRB1*14:01L
GTDLEGNFYGPFVDR

SEQ ID NO: 14408 - protein, 14 aa, Severe acute respiratory syndrome coronavirus 2
  REGION 1..14: note = Table B: HLA-DRB1*13:02L HLA-DRB1*04:04L HLA-DQA1*01:01-B1*05:01L HLA-DRB1*04:10L HLA-DPA1*01:03-B1*04:02L
GNFYGPFVDRQTAQ

SEQ ID NO: 14409 - protein, 14 aa, Severe acute respiratory syndrome coronavirus 2
  REGION 1..14: note = Table B: HLA-DRB1*13:02L HLA-DRB1*13:03L HLA-DRB1*01:03L HLA-DRB1*04:02L HLA-DRB1*04:05L HLA-DRB4*03:01NL HLA-DPA1*01:03-B1*03:01L HLA-DRB1*12:01L HLA-DPA1*03:01-B1*105:01L HLA-DRB1*14:17L HLA-DRB1*04:08L
TAQAAGTDTTITVN

SEQ ID NO: 14410 - protein, 14 aa, Severe acute respiratory syndrome coronavirus 2
  REGION 1..14: note = Table B: HLA-DRB1*13:02L HLA-DRB1*04:04L HLA-DRB1*08:04L HLA-DPA1*03:01-B1*04:02L HLA-DRB1*14:02L HLA-DQA1*01-B1*05L HLA-DPA1*02:01-B1*13:01L HLA-DPA1*01:03-B1*104:01L
VLAWLYAAVINGDR

SEQ ID NO: 14411 - protein, 14 aa, Severe acute respiratory syndrome coronavirus 2
  REGION 1..14: note = Table B: HLA-DRB1*13:02L
AWLYAAVINGDRWF

SEQ ID NO: 14412 - protein, 14 aa, Severe acute respiratory syndrome coronavirus 2
  REGION 1..14: note = Table B: HLA-DRB1*13:02L HLA-DRB1*04:05L HLA-DRB1*08:01L HLA-DRB3*01:01L
AVINGDRWFLNRFT

SEQ ID NO: 14413 - protein, 14 aa, Severe acute respiratory syndrome coronavirus 2
  REGION 1..14: note = Table B: HLA-DRB1*13:02L HLA-DRB1*13:03L HLA-DRB1*04:04L HLA-DPA1*01:03-B1*03:01L HLA-DRB1*11:04L HLA-DRB1*14:02L HLA-DRB3*01:01L HLA-DPA1*01:03-B1*104:01L HLA-DRB1*08:03L
GDRWFLNRFTTTLN

SEQ ID NO: 14414 - protein, 14 aa, Severe acute respiratory syndrome coronavirus 2
  REGION 1..14: note = Table B: HLA-DRB1*13:02L HLA-DRB1*04:04L HLA-DRB1*04:05L HLA-DPA1*01:03-B1*03:01L HLA-DRB1*14:01L HLA-DRB1*11:04L HLA-DRB3*01:01L
DRWFLNRFTTTLND

SEQ ID NO: 14415 - protein, 14 aa, Severe acute respiratory syndrome coronavirus 2
  REGION 1..14: note = Table B: HLA-DRB1*13:02L HLA-DRB1*04:04L HLA-DRB1*11:04L HLA-DRB1*14:02L HLA-DRB1*11:01L HLA-DPA1*01:03-B1*104:01L HLA-DRB1*14:17L HLA-DRB1*08:03L
DFNLVAMKYNYEPL

SEQ ID NO: 14416 - protein, 12 aa, Severe acute respiratory syndrome coronavirus 2
  REGION 1..12: note = Table B: HLA-DRB1*13:02L HLA-DRB1*01:02L HLA-DRB1*08:04L HLA-DRB3*02:01L HLA-DPA1*01:03-B1*03:01L HLA-DPA1*03:01-B1*04:02L HLA-DRB1*14:01L HLA-DRB1*14:02L HLA-DQA1*01:01-B1*05:01L HLA-DRB1*08:01L
  REGION 1..12: note = CONT. FROM ABOVE: HLA-DPA1*01:03-B1*04:01L HLA-DRB1*09:01L HLA-D PA1*01:03-B1*04:02L HLA-DPA1*02:01-B1*13:01L HLA-DRB1*14:54L HLA -DPA1*01:03-B1*104:01L HLA-DQA1*05:05-B1*03:01L HLA-DRB1*10:01L HLA-DRB1*08:03L
YNYEPLTQDHVD

SEQ ID NO: 14417 - protein, 14 aa, Severe acute respiratory syndrome coronavirus 2
  REGION 1..14: note = Table B: HLA-DRB1*13:02L HLA-DRB1*01:01L HLA-DRB1*14:02L HLA-DPA1*01:03-B1*04:02L HLA-DPA1*02:01-B1*13:01L HLA-DPA1*01:03-B1*104:01L HLA-DRB1*15:03L
VDILGPLSAQTGIA

SEQ ID NO: 14418 - protein, 10 aa, Severe acute respiratory syndrome coronavirus 2
  REGION 1..10: note = Table B: HLA-DRB1*13:02L HLA-DRB1*13:03M HLA-DRB1*01:01L HLA-DRB4*03:01NL HLA-DRB3*02:01L HLA-DRB1*11:04L HLA-DRB1*08:01M HLA-DRB5*01:01L HLA-DRB1*12:01M HLA-DRB1*12:02L HLA-DQA1*03:01-B1*03:02M HLA-DQA1*05:05-B1*03:01M
  REGION 1..10: note = CONT. FROM ABOVE: HLA-DRB1*14:17L HLA-DRB1*08:02L
ELLQNGMNGR

SEQ ID NO: 14419 - protein, 13 aa, Severe acute respiratory syndrome coronavirus 2
  REGION 1..13: note = Table B: HLA-DRB1*13:02L HLA-DRB1*13:03L HLA-DRB1*04:02L HLA-DRB1*04:05L HLA-DRB4*03:01NL HLA-DRB1*08:04L HLA-DRB1*14:01L HLA-DQA1*05:05-B1*03:19L HLA-DRB1*04:10L HLA-DPA1*02:01-B1*13:01L HLA-DPA1*01:03-B1*02:01L
  REGION 1..13: note = CONT. FROM ABOVE: HLA-DPA1*01:03-B1*104:01L HLA-DRB1*14:17L
GRTILGSALLEDE

SEQ ID NO: 14420 - protein, 13 aa, Severe acute respiratory syndrome coronavirus 2
  REGION 1..13: note = Table B: HLA-DRB1*13:02L HLA-DRB1*04:02L HLA-DRB1*08:04L HLA-DRB1*11:03L HLA-DRB3*01:01L HLA-DPA1*03:01-B1*105:01L HLA-DRB1*14:54L HLA-DQA1*01:03-B1*06:01L HLA-DRB1*08:03L
GVTFQSAVKRTIK

SEQ ID NO: 14421 - protein, 13 aa, Severe acute respiratory syndrome coronavirus 2
  REGION 1..13: note = Table B: HLA-DRB1*13:02L HLA-DRB1*04:02L HLA-DRB1*11:03L HLA-DRB3*01:01L
VTFQSAVKRTIKG

SEQ ID NO: 14422 - protein, 10 aa, Severe acute respiratory syndrome coronavirus 2
  REGION 1..10: note = Table B: HLA-DRB1*13:02L HLA-DRB1*01:03L HLA-DRB1*08:01L HLA-DQA1*03:01-B1*03:02L HLA-DRB1*16:01L HLA-DQA1*02:01-B1*03:03L
RTIKGTHHWL

SEQ ID NO: 14423 - protein, 12 aa, Severe acute respiratory syndrome coronavirus 2
  REGION 1..12: note = Table B: HLA-DRB1*13:02L HLA-DRB1*01:03L HLA-DRB1*01:02L HLA-DRB1*08:04L HLA-DRB1*14:01L HLA-DRB1*11:04L HLA-DRB1*08:01L HLA-DRB1*11:01L HLA-DRB1*12:01L HLA-DRB3*01:01L HLA-DRB1*16:01L HLA-DRB1*04:08L HLA-DRB1*15:03L
AMMFVKHKHAFL

SEQ ID NO: 14424 - protein, 10 aa, Severe acute respiratory syndrome coronavirus 2
  REGION 1..10: note = Table B: HLA-DRB1*13:02L HLA-DRB1*13:03L HLA-DRB1*04:02L HLA-DRB1*01:01L HLA-DRB4*03:01NL HLA-DRB1*08:01L HLA-DRB1*12:01L HLA-DQA1*03:01-B1*03:02L HLA-DQA1*05:05-B1*03:01L HLA-DRB1*14:17L HLA-DRB1*16:01L HLA-DQA1*01:03-B1*06:01L
  REGION 1..10: note = CONT. FROM ABOVE: HLA-DQA1*02:01-B1*03:03L
VYMPASWVMR

SEQ ID NO: 14425 - protein, 10 aa, Severe acute respiratory syndrome coronavirus 2
  REGION 1..10: note = Table B: HLA-DRB1*13:02L HLA-DRB1*13:03L HLA-DRB4*03:01NL HLA-DRB1*08:01L HLA-DRB5*01:01L HLA-DRB1*12:01L HLA-DQA1*03:01-B1*03:02L HLA-DQA1*05:05-B1*03:01L HLA-DQA1*02:01-B1*03:03L
DTSLSGFKLK

SEQ ID NO: 14426 - protein, 10 aa, Severe acute respiratory syndrome coronavirus 2
  REGION 1..10: note = Table B: HLA-DRB1*13:02L HLA-DRB1*13:03L HLA-DRB1*01:03L HLA-DRB1*08:01L HLA-DRB1*12:01L HLA-DQA1*03:01-B1*03:02L HLA-DRB1*16:01L
RTVYDDGARR

SEQ ID NO: 14427 - protein, 13 aa, Severe acute respiratory syndrome coronavirus 2
  REGION 1..13: note = Table B: HLA-DRB1*13:02L HLA-DRB1*04:04L HLA-DRB1*01:02L HLA-DPA1*01:03-B1*03:01L HLA-DPA1*03:01-B1*105:01L HLA-DPA1*01:03-B1*104:01L HLA-DRB1*07:01L HLA-DRB1*16:01L HLA-DRB1*04:08L HLA-DRB1*15:03L
GARRVWTLMNVLT

SEQ ID NO: 14428 - protein, 14 aa, Severe acute respiratory syndrome coronavirus 2
  REGION 1..14: note = Table B: HLA-DRB1*13:02L HLA-DRB1*01:03L HLA-DRB1*01:01L HLA-DQA1*05:05-B1*03:01L HLA-DRB1*04:08L
RVWTLMNVLTLVYK

SEQ ID NO: 14429 - protein, 12 aa, Severe acute respiratory syndrome coronavirus 2
  REGION 1..12: note = Table B: HLA-DRB1*13:02L HLA-DRB1*08:04L HLA-DRB1*14:54L
NVLTLVYKVYYG

SEQ ID NO: 14430 - protein, 12 aa, Severe acute respiratory syndrome coronavirus 2
  REGION 1..12: note = Table B: HLA-DRB1*13:02L HLA-DRB1*01:03L HLA-DRB1*04:02L HLA-DRB1*04:05L HLA-DPA1*01:03-B1*03:01L HLA-DPA1*01:03-B1*04:01L HLA-DRB1*09:01L HLA-DPA1*02:01-B1*13:01L
TLVYKVYYGNAL

SEQ ID NO: 14431 - protein, 12 aa, Severe acute respiratory syndrome coronavirus 2
  REGION 1..12: note = Table B: HLA-DRB1*13:02L HLA-DRB1*01:03L HLA-DRB1*04:02L HLA-DRB1*04:05L HLA-DQA1*01:02-B1*06:02L HLA-DPA1*01:03-B1*03:01L HLA-DRB1*08:01L HLA-DQA1*05:05-B1*03:19L HLA-DPA1*01:03-B1*04:01L
  REGION 1..12: note = CONT. FROM ABOVE: HLA-DPA1*02:01-B1*13:01L HLA-DQA1*05:05-B1*03: 01L HLA-DRB1*14:17L HLA-DRB1*15:01L
LVYKVYYGNALD

SEQ ID NO: 14432 - protein, 12 aa, Severe acute respiratory syndrome coronavirus 2
  REGION 1..12: note = Table B: HLA-DRB1*13:02L HLA-DRB1*04:04L HLA-DQA1*01:02-B1*06:02L HLA-DRB1*01:01L HLA-DRB3*02:01L HLA-DPA1*01:03-B1*03:01L HLA-DPA1*03:01-B1*04:02L HLA-DRB1*11:03L HLA-DRB1*14:02L HLA-DRB1*08:01L
  REGION 1..12: note = CONT. FROM ABOVE: HLA-DQA1*05:05-B1*03:19L HLA-DRB1*04:10L HLA-D PA1*02:01-B1*13:01L HLA-DQA1*05:05-B1*03:01L HLA-DRB1*07:01L HLA -DRB1*08:03L
YKVYYGNALDQA

SEQ ID NO: 14433 - protein, 12 aa, Severe acute respiratory syndrome coronavirus 2
  REGION 1..12: note = Table B: HLA-DRB1*13:02L HLA-DRB1*01:02L HLA-DRB1*08:04L HLA-DRB1*14:01L HLA-DRB1*11:03L HLA-DQA1*01-B1*05L HLA-DRB1*12:02L HLA-DQA1*05:05-B1*03:01L
ALIISVTSNYSG

SEQ ID NO: 14434 - protein, 15 aa, Severe acute respiratory syndrome coronavirus 2
  REGION 1..15: note = Table B: HLA-DRB1*13:02L HLA-DPA1*02:01-B1*13:01L HLA-DPA1*01:03-B1*104:01L
SGVVTTVMFLARGIV

SEQ ID NO: 14435 - protein, 12 aa, Severe acute respiratory syndrome coronavirus 2
  REGION 1..12: note = Table B: HLA-DRB1*13:02L HLA-DRB1*13:03L HLA-DRB1*01:03L HLA-DRB1*04:05L HLA-DRB1*01:02L HLA-DRB4*03:01NL HLA-DRB1*08:04L HLA-DRB3*02:01L HLA-DPA1*01:03-B1*03:01L HLA-DRB1*14:01L HLA-DRB1*11:03L HLA-DRB1*11:04L HLA-DRB1*08:01L
  REGION 1..12: note = CONT. FROM ABOVE: HLA-DPA1*01:03-B1*04:01L HLA-DRB1*12:02L HLA-D RB3*01:01L HLA-DPA1*02:01-B1*13:01L HLA-DPA1*03:01-B1*105:01L HL A-DRB1*14:54L HLA-DQA1*01:03-B1*06:01L HLA-DRB1*04:08L
TQEFRYMNSQGL

SEQ ID NO: 14436 - protein, 13 aa, Severe acute respiratory syndrome coronavirus 2
  REGION 1..13: note = Table B: HLA-DRB1*13:02L HLA-DRB1*01:02L HLA-DRB1*11:02L HLA-DRB1*11:03L HLA-DRB1*14:02L HLA-DQA1*05:05-B1*03:116L HLA-DPA1*01:03-B1*04:02L HLA-DRB3*01:01L HLA-DRB1*04:08L HLA-DRB1*08:02L HLA-DRB1*15:03L
DAFKLNIKLLGVG

SEQ ID NO: 14437 - protein, 14 aa, Severe acute respiratory syndrome coronavirus 2
  REGION 1..14: note = Table B: HLA-DRB1*13:02L HLA-DRB1*04:05L HLA-DPA1*01:03-B1*03:01L HLA-DRB1*08:01L HLA-DRB3*01:01L HLA-DPA1*03:01-B1*105:01L HLA-DPA1*01:02-B1*04:01L
FKLNIKLLGVGGKP

SEQ ID NO: 14438 - protein, 14 aa, Severe acute respiratory syndrome coronavirus 2
  REGION 1..14: note = Table B: HLA-DRB1*13:02L HLA-DRB1*01:02L
VGGKPCIKVATVQS

SEQ ID NO: 14439 - protein, 13 aa, Severe acute respiratory syndrome coronavirus 2
  REGION 1..13: note = Table B: HLA-DRB1*13:02L HLA-DRB1*04:05L HLA-DQA1*01:02-B1*06:02L HLA-DRB1*01:02L HLA-DPA1*01:03-B1*03:01L HLA-DRB1*12:01L HLA-DPA1*02:01-B1*13:01L HLA-DPA1*01:03-B1*104:01L
SSSKLWAQCVQLH

SEQ ID NO: 14440 - protein, 13 aa, Severe acute respiratory syndrome coronavirus 2
  REGION 1..13: note = Table B: HLA-DRB1*13:02L HLA-DRB1*12:01L HLA-DPA1*03:01-B1*105:01L HLA-DQA1*03:01-B1*03:02L HLA-DPA1*01:03-B1*104:01L HLA-DRB1*16:01L HLA-DQA1*02:01-B1*03:03L
SSKLWAQCVQLHN

SEQ ID NO: 14441 - protein, 12 aa, Severe acute respiratory syndrome coronavirus 2
  REGION 1..12: note = Table B: HLA-DRB1*13:02L HLA-DRB1*08:04L HLA-DRB1*12:02L
DILLAKDTTEAF

SEQ ID NO: 14442 - protein, 12 aa, Severe acute respiratory syndrome coronavirus 2
  REGION 1..12: note = Table B: HLA-DRB1*13:02L HLA-DRB1*04:04L HLA-DRB1*01:02L HLA-DRB1*08:04L HLA-DRB3*02:01L HLA-DPA1*01:03-B1*03:01L HLA-DRB1*03:01L HLA-DRB4*01:01L HLA-DRB3*01:01L HLA-DRB1*10:01L HLA-DRB1*04:08L
ILLAKDTTEAFE

SEQ ID NO: 14443 - protein, 14 aa, Severe acute respiratory syndrome coronavirus 2
  REGION 1..14: note = Table B: HLA-DRB1*13:02L HLA-DRB3*02:01L HLA-DPA1*03:01-B1*04:02L HLA-DRB1*14:01L
AVDINKLCEEMLDN

SEQ ID NO: 14444 - protein, 13 aa, Severe acute respiratory syndrome coronavirus 2
  REGION 1..13: note = Table B: HLA-DRB1*13:02L HLA-DPA1*03:01-B1*105:01L HLA-DPA1*01:03-B1*104:01L
DINKLCEEMLDNR

SEQ ID NO: 14445 - protein, 12 aa, Severe acute respiratory syndrome coronavirus 2
  REGION 1..12: note = Table B: HLA-DRB1*13:02L HLA-DRB4*03:01NL HLA-DRB1*14:54L
EEMLDNRATLQA

SEQ ID NO: 14446 - protein, 13 aa, Severe acute respiratory syndrome coronavirus 2
  REGION 1..13: note = Table B: HLA-DRB1*13:02L
DNRATLQAIASEF

SEQ ID NO: 14447 - protein, 13 aa, Severe acute respiratory syndrome coronavirus 2
  REGION 1..13: note = Table B: HLA-DRB1*13:02L HLA-DRB1*01:03L HLA-DRB1*04:04L HLA-DRB1*01:02L HLA-DPA1*03:01-B1*04:02L HLA-DRB1*11:03L HLA-DRB1*11:04L HLA-DRB1*09:01L HLA-DRB1*12:02L HLA-DQA1*05:05-B1*03:01L HLA-DRB1*08:03L
IASEFSSLPSYAA

SEQ ID NO: 14448 - protein, 13 aa, Severe acute respiratory syndrome coronavirus 2
  REGION 1..13: note = Table B: HLA-DRB1*13:02L HLA-DRB1*08:04L HLA-DRB1*08:77L HLA-DRB1*11:04L HLA-DRB1*11:01L HLA-DRB1*09:01L HLA-DRB1*08:03L
SEFSSLPSYAAFA

SEQ ID NO: 14449 - protein, 12 aa, Severe acute respiratory syndrome coronavirus 2
  REGION 1..12: note = Table B: HLA-DRB1*13:02L HLA-DRB1*04:02L HLA-DRB1*04:04L HLA-DRB1*04:05L HLA-DRB1*01:02L HLA-DRB4*03:01NL HLA-DRB1*08:04L HLA-DRB3*02:01L HLA-DPA1*03:01-B1*04:02L HLA-DQA1*01:01-B1*05:01L HLA-DRB1*08:01L HLA-DQA1*01-B1*05L
  REGION 1..12: note = CONT. FROM ABOVE: HLA-DRB1*04:10L HLA-DRB1*12:01L HLA-DRB1*12:02 L HLA-DRB1*14:54L HLA-DPA1*01:03-B1*104:01L HLA-DRB1*14:17L HLA- DRB1*10:01L HLA-DRB1*04:08L HLA-DRB1*08:03L
YAAFATAQEAYE

SEQ ID NO: 14450 - protein, 12 aa, Severe acute respiratory syndrome coronavirus 2
  REGION 1..12: note = Table B: HLA-DRB1*13:02L HLA-DRB1*04:04L HLA-DQA1*01:02-B1*06:02L HLA-DRB1*01:02L HLA-DRB1*08:04L HLA-DRB1*08:77L HLA-DPA1*01:03-B1*03:01L HLA-DRB1*11:03L HLA-DRB1*11:04L HLA-DQA1*01:01-B1*05:01L HLA-DRB5*01:01L
  REGION 1..12: note = CONT. FROM ABOVE: HLA-DQA1*05:05-B1*03:19L HLA-DRB1*12:02L HLA-D PA1*03:01-B1*105:01L HLA-DQA1*01:03-B1*06:01L
AYEQAVANGDSE

SEQ ID NO: 14451 - protein, 13 aa, Severe acute respiratory syndrome coronavirus 2
  REGION 1..13: note = Table B: HLA-DRB1*13:02L HLA-DRB1*01:03L HLA-DRB1*08:77L HLA-DPA1*01:03-B1*03:01L HLA-DRB1*14:02L HLA-DQA1*01:01-B1*05:01L HLA-DPA1*02:01-B1*13:01L HLA-DPA1*03:01-B1*105:01L HLA-DRB1*04:08L HLA-DRB1*15:03L
YEQAVANGDSEVV

SEQ ID NO: 14452 - protein, 14 aa, Severe acute respiratory syndrome coronavirus 2
  REGION 1..14: note = Table B: HLA-DRB1*13:02L HLA-DRB1*04:05L HLA-DRB1*11:02L HLA-DRB1*11:03L HLA-DRB1*14:54L HLA-DRB1*08:02L HLA-DRB1*08:03L HLA-DRB1*15:03L
EVVLKKLKKSLNVA

SEQ ID NO: 14453 - protein, 14 aa, Severe acute respiratory syndrome coronavirus 2
  REGION 1..14: note = Table B: HLA-DRB1*13:02L HLA-DRB1*04:04L HLA-DRB1*04:05L HLA-DRB1*11:03L HLA-DPA1*02:01-B1*13:01L HLA-DRB1*07:01L HLA-DRB1*08:03L HLA-DRB1*15:03L
VVLKKLKKSLNVAK

SEQ ID NO: 14454 - protein, 13 aa, Severe acute respiratory syndrome coronavirus 2
  REGION 1..13: note = Table B: HLA-DRB1*13:02L HLA-DPA1*01:03-B1*03:01L HLA-DPA1*01:02-B1*04:01L HLA-DRB1*07:01L HLA-DQA1*02:01-B1*03:03L HLA-DRB1*15:03L
KKLKKSLNVAKSE

SEQ ID NO: 14455 - protein, 14 aa, Severe acute respiratory syndrome coronavirus 2
  REGION 1..14: note = Table B: HLA-DRB1*13:02L HLA-DPA1*01:03-B1*104:01L HLA-DRB1*07:01L HLA-DRB1*15:03L
KLKKSLNVAKSEFD

SEQ ID NO: 14456 - protein, 15 aa, Severe acute respiratory syndrome coronavirus 2
  REGION 1..15: note = Table B: HLA-DRB1*13:02L HLA-DPA1*01:03-B1*03:01L HLA-DRB1*11:01L
KKSLNVAKSEFDRDA

SEQ ID NO: 14457 - protein, 14 aa, Severe acute respiratory syndrome coronavirus 2
  REGION 1..14: note = Table B: HLA-DRB1*13:02L HLA-DRB1*04:04L HLA-DRB1*08:04L HLA-DPA1*01:03-B1*03:01L HLA-DRB1*11:04L HLA-DQA1*05:05-B1*03:19L HLA-DRB3*01:01L HLA-DRB1*08:03L
SLNVAKSEFDRDAA

SEQ ID NO: 14458 - protein, 10 aa, Severe acute respiratory syndrome coronavirus 2
  REGION 1..10: note = Table B: HLA-DRB1*13:02L HLA-DRB1*13:03L HLA-DRB4*03:01NL HLA-DRB1*08:01L HLA-DRB5*01:01L HLA-DRB1*12:01L HLA-DQA1*03:01-B1*03:02L HLA-DQA1*05:05-B1*03:01L HLA-DRB1*14:17L
EFDRDAAMQR

SEQ ID NO: 14459 - protein, 16 aa, Severe acute respiratory syndrome coronavirus 2
  REGION 1..16: note = Table B: HLA-DRB1*13:02L HLA-DRB1*04:05L HLA-DRB1*08:04L HLA-DRB1*12:01L HLA-DRB3*01:01L HLA-DPA1*02:01-B1*13:01L HLA-DRB1*15:03L
DRDAAMQRKLEKMADQ

SEQ ID NO: 14460 - protein, 14 aa, Severe acute respiratory syndrome coronavirus 2
  REGION 1..14: note = Table B: HLA-DRB1*13:02L HLA-DQA1*01:02-B1*06:02L
MQRKLEKMADQAMT

SEQ ID NO: 14461 - protein, 12 aa, Severe acute respiratory syndrome coronavirus 2
  REGION 1..12: note = Table B: HLA-DRB1*13:02L HLA-DRB1*13:03L HLA-DRB1*01:03L HLA-DRB1*04:04L HLA-DQA1*01:02-B1*06:02L HLA-DRB1*01:02L HLA-DPA1*01:03-B1*03:01L HLA-DRB1*14:01L HLA-DPA1*02:01-B1*13:01L HLA-DPA1*01:03-B1*104:01L
  REGION 1..12: note = CONT. FROM ABOVE: HLA-DRB1*07:01L HLA-DRB1*04:08L HLA-DRB1*15:03 L
KLEKMADQAMTQ

SEQ ID NO: 14462 - protein, 14 aa, Severe acute respiratory syndrome coronavirus 2
  REGION 1..14: note = Table B: HLA-DRB1*13:02L HLA-DRB1*04:05L HLA-DRB1*08:04L HLA-DRB1*03:01L HLA-DRB1*11:04L HLA-DRB1*08:01L HLA-DRB1*13:01L HLA-DRB3*01:01L HLA-DPA1*03:01-B1*105:01L HLA-DRB1*04:08L
QAMTQMYKQARSED

SEQ ID NO: 14463 - protein, 16 aa, Severe acute respiratory syndrome coronavirus 2
  REGION 1..16: note = Table B: HLA-DRB1*13:02L HLA-DPA1*01:03-B1*104:01L
DKRAKVTSAMQTMLFT

SEQ ID NO: 14464 - protein, 14 aa, Severe acute respiratory syndrome coronavirus 2
  REGION 1..14: note = Table B: HLA-DRB1*13:02L HLA-DPA1*02:01-B1*13:01L
MQTMLFTMLRKLDN

SEQ ID NO: 14465 - protein, 14 aa, Severe acute respiratory syndrome coronavirus 2
  REGION 1..14: note = Table B: HLA-DRB1*13:02L
QTMLFTMLRKLDND

SEQ ID NO: 14466 - protein, 14 aa, Severe acute respiratory syndrome coronavirus 2
  REGION 1..14: note = Table B: HLA-DRB1*13:02L HLA-DQA1*05:05-B1*03:116L HLA-DRB3*01:01L HLA-DPA1*02:01-B1*13:01L HLA-DPA1*01:03-B1*02:01L HLA-DRB1*08:02L
TMLFTMLRKLDNDA

SEQ ID NO: 14467 - protein, 13 aa, Severe acute respiratory syndrome coronavirus 2
  REGION 1..13: note = Table B: HLA-DRB1*13:02L HLA-DRB1*13:03L HLA-DRB1*01:03L HLA-DRB1*04:05L HLA-DRB1*01:02L HLA-DPA1*03:01-B1*04:02L HLA-DRB1*14:01L HLA-DQA1*01:01-B1*05:01L HLA-DRB1*08:01L HLA-DRB1*12:01L HLA-DRB3*01:01L HLA-DPA1*02:01-B1*13:01L
  REGION 1..13: note = CONT. FROM ABOVE: HLA-DQA1*05:05-B1*03:01L HLA-DPA1*01:02-B1*04: 01L HLA-DRB1*04:08L
RKLDNDALNNIIN

SEQ ID NO: 14468 - protein, 10 aa, Severe acute respiratory syndrome coronavirus 2
  REGION 1..10: note = Table B: HLA-DRB1*13:02L HLA-DRB1*13:03L HLA-DRB1*01:01L HLA-DRB4*03:01NL HLA-DRB3*02:01L HLA-DRB1*11:04L HLA-DRB1*08:01L HLA-DRB5*01:01L HLA-DPA1*01:03-B1*04:02L HLA-DRB1*12:01L HLA-DRB1*12:02L HLA-DQA1*03:01-B1*03:02M
  REGION 1..10: note = CONT. FROM ABOVE: HLA-DQA1*05:05-B1*03:01L HLA-DRB1*14:17L HLA-D QA1*02:01-B1*03:03L
ALNNIINNAR

SEQ ID NO: 14469 - protein, 13 aa, Severe acute respiratory syndrome coronavirus 2
  REGION 1..13: note = Table B: HLA-DRB1*13:02L HLA-DRB1*01:02L HLA-DRB1*08:04L HLA-DPA1*01:03-B1*03:01L HLA-DRB3*01:01L
NNIINNARDGCVP

SEQ ID NO: 14470 - protein, 14 aa, Severe acute respiratory syndrome coronavirus 2
  REGION 1..14: note = Table B: HLA-DRB1*13:02L HLA-DRB1*01:02L HLA-DRB1*08:04L HLA-DPA1*01:03-B1*03:01L HLA-DRB1*03:01L HLA-DRB1*14:02L HLA-DQA1*05:05-B1*03:19L HLA-DRB1*12:01L HLA-DPA1*03:01-B1*105:01L HLA-DQA1*05:05-B1*03:01L
  REGION 1..14: note = CONT. FROM ABOVE: HLA-DRB1*16:01L
NIINNARDGCVPLN

SEQ ID NO: 14471 - protein, 15 aa, Severe acute respiratory syndrome coronavirus 2
  REGION 1..15: note = Table B: HLA-DRB1*13:02L HLA-DRB1*04:05L HLA-DRB1*01:02L HLA-DRB1*12:01L
NNARDGCVPLNIIPL

SEQ ID NO: 14472 - protein, 11 aa, Severe acute respiratory syndrome coronavirus 2
  REGION 1..11: note = Table B: HLA-DRB1*13:02L
IIPLTTAAKLM

SEQ ID NO: 14473 - protein, 15 aa, Severe acute respiratory syndrome coronavirus 2
  REGION 1..15: note = Table B: HLA-DRB1*13:02L HLA-DRB1*01:03L HLA-DRB1*04:02L HLA-DRB1*04:05L HLA-DRB1*01:02L HLA-DRB1*08:04L HLA-DRB3*02:01L HLA-DPA1*01:03-B1*03:01L HLA-DPA1*03:01-B1*04:02L HLA-DRB1*14:02L HLA-DRB1*08:01L HLA-DPA1*01:03-B1*04:02L
  REGION 1..15: note = CONT. FROM ABOVE: HLA-DRB1*12:01L HLA-DPA1*02:01-B1*13:01L HLA-D RB1*14:54L HLA-DPA1*01:03-B1*104:01L HLA-DRB1*14:17L HLA-DPA1*01 :02-B1*04:01L HLA-DRB1*16:01L HLA-DRB1*04:08L HLA-DRB1*15:03L
IPLTTAAKLMVVIPD

SEQ ID NO: 14474 - protein, 14 aa, Severe acute respiratory syndrome coronavirus 2
  REGION 1..14: note = Table B: HLA-DRB1*13:02L HLA-DRB1*01:03L HLA-DRB1*04:02L HLA-DRB3*02:01L HLA-DRB1*04:10L HLA-DPA1*01:03-B1*04:02L HLA-DPA1*01:02-B1*04:01L HLA-DRB1*04:08L
TTAAKLMVVIPDYN

SEQ ID NO: 14475 - protein, 15 aa, Severe acute respiratory syndrome coronavirus 2
  REGION 1..15: note = Table B: HLA-DRB1*13:02L HLA-DRB3*02:01L HLA-DPA1*01:03-B1*03:01L HLA-DPA1*03:01-B1*04:02L HLA-DRB1*14:02L HLA-DQA1*01:01-B1*05:01L HLA-DQA1*05:05-B1*03:19L HLA-DPA1*01:03-B1*04:02L
  REGION 1..15: note = CONT. FROM ABOVE: HLA-DRB3*01:01L HLA-DPA1*01:03-B1*104:01L HLA- DQA1*05:05-B1*03:01L HLA-DPA1*01:02-B1*04:01L
IPDYNTYKNTCDGTT

SEQ ID NO: 14476 - protein, 16 aa, Severe acute respiratory syndrome coronavirus 2
  REGION 1..16: note = Table B: HLA-DRB1*13:02L HLA-DPA1*03:01-B1*04:02L
SPNLAWPLIVTALRAN

SEQ ID NO: 14477 - protein, 10 aa, Severe acute respiratory syndrome coronavirus 2
  REGION 1..10: note = Table B: HLA-DRB1*13:02L HLA-DRB1*14:01L HLA-DRB1*12:01L HLA-DRB1*16:01L HLA-DRB1*15:03L
LRANSAVKLQ

SEQ ID NO: 14478 - protein, 14 aa, Severe acute respiratory syndrome coronavirus 2
  REGION 1..14: note = Table B: HLA-DRB1*13:02L HLA-DRB3*02:01L HLA-DPA1*01:03-B1*03:01L HLA-DQA1*01:01-B1*05:01L HLA-DRB1*08:01L HLA-DRB1*12:02L HLA-DPA1*02:01-B1*13:01L HLA-DPA1*01:03-B1*104:01L
ANSAVKLQNNELSP

SEQ ID NO: 14479 - protein, 13 aa, Severe acute respiratory syndrome coronavirus 2
  REGION 1..13: note = Table B: HLA-DRB1*13:02L HLA-DRB1*08:04L HLA-DPA1*01:03-B1*03:01L HLA-DPA1*03:01-B1*04:02L HLA-DRB1*11:03L HLA-DQA1*01:01-B1*05:01L HLA-DQA1*05:05-B1*03:19L HLA-DPA1*02:01-B1*13:01L
  REGION 1..13: note = CONT. FROM ABOVE: HLA-DRB1*10:01L
DDNALAYYNTTKG

SEQ ID NO: 14480 - protein, 10 aa, Severe acute respiratory syndrome coronavirus 2
  REGION 1..10: note = Table B: HLA-DRB1*13:02L HLA-DRB1*13:03L HLA-DRB1*01:03L HLA-DRB1*04:02L HLA-DRB1*01:01L HLA-DRB4*03:01NL HLA-DRB1*11:04L HLA-DRB1*08:01L HLA-DRB5*01:01L HLA-DRB1*12:01L HLA-DQA1*03:01-B1*03:02M HLA-DQA1*05:05-B1*03:01L
  REGION 1..10: note = CONT. FROM ABOVE: HLA-DRB1*14:17L HLA-DRB1*16:01L HLA-DQA1*02:01 -B1*03:03L
AYYNTTKGGR

SEQ ID NO: 14481 - protein, 13 aa, Severe acute respiratory syndrome coronavirus 2
  REGION 1..13: note = Table B: HLA-DRB1*13:02L HLA-DRB1*04:05L HLA-DRB1*01:02L
KGGRFVLALLSDL

SEQ ID NO: 14482 - protein, 14 aa, Severe acute respiratory syndrome coronavirus 2
  REGION 1..14: note = Table B: HLA-DRB1*13:02L HLA-DRB1*04:05L HLA-DRB1*11:04L HLA-DRB1*11:01L HLA-DRB3*01:01L HLA-DQA1*03:01-B1*03:02L HLA-DPA1*01:03-B1*02:01L
LSDLQDLKWARFPK

SEQ ID NO: 14483 - protein, 17 aa, Severe acute respiratory syndrome coronavirus 2
  REGION 1..17: note = Table B: HLA-DRB1*13:02L HLA-DPA1*01:03-B1*04:02L
TPKGPKVKYLYFIKGLN

SEQ ID NO: 14484 - protein, 14 aa, Severe acute respiratory syndrome coronavirus 2
  REGION 1..14: note = Table B: HLA-DRB1*13:02L HLA-DRB1*04:05L HLA-DRB1*01:02L HLA-DRB1*11:03L HLA-DRB1*12:01L HLA-DRB3*01:01L HLA-DRB1*16:01L HLA-DRB1*04:08L HLA-DRB1*15:03L
IKGLNNLNRGMVLG

SEQ ID NO: 14485 - protein, 11 aa, Severe acute respiratory syndrome coronavirus 2
  REGION 1..11: note = Table B: HLA-DRB1*13:02L HLA-DRB1*04:05L HLA-DRB1*01:01L HLA-DRB3*02:01L HLA-DPA1*01:03-B1*03:01L HLA-DRB1*14:01L HLA-DRB1*12:02L
MVLGSLAATVR

SEQ ID NO: 14486 - protein, 14 aa, Severe acute respiratory syndrome coronavirus 2
  REGION 1..14: note = Table B: HLA-DRB1*13:02L HLA-DRB1*01:03L HLA-DRB1*04:05L HLA-DQA1*01:02-B1*06:02L HLA-DRB4*03:01NL HLA-DPA1*01:03-B1*03:01L HLA-DQA1*05:01-B1*02:01L HLA-DRB1*12:01L HLA-DPA1*03:01-B1*105:01L HLA-DRB1*16:01L
  REGION 1..14: note = CONT. FROM ABOVE: HLA-DRB1*04:08L
TVRLQAGNATEVPA

SEQ ID NO: 14487 - protein, 14 aa, Severe acute respiratory syndrome coronavirus 2
  REGION 1..14: note = Table B: HLA-DRB1*13:02L HLA-DRB1*13:03L HLA-DRB1*01:03L HLA-DRB1*04:05L HLA-DRB1*01:02L HLA-DRB4*03:01NL HLA-DRB1*08:04L HLA-DRB1*08:77L HLA-DPA1*01:03-B1*03:01L HLA-DRB1*14:02L HLA-DRB1*08:01L HLA-DRB1*11:01L HLA-DPA1*01:03-B1*04:02L
  REGION 1..14: note = CONT. FROM ABOVE: HLA-DRB1*12:01L HLA-DRB1*12:02L HLA-DPA1*02:01 -B1*13:01L HLA-DPA1*03:01-B1*105:01L HLA-DPA1*01:03-B1*104:01L H LA-DRB1*07:01L HLA-DRB1*16:01L HLA-DRB1*15:03L
VRLQAGNATEVPAN

SEQ ID NO: 14488 - protein, 13 aa, Severe acute respiratory syndrome coronavirus 2
  REGION 1..13: note = Table B: HLA-DRB1*13:02L HLA-DRB1*13:03L HLA-DQA1*01:02-B1*06:02L HLA-DPA1*01:03-B1*03:01L HLA-DPA1*03:01-B1*04:02L HLA-DPA1*03:01-B1*105:01L HLA-DRB1*04:08L HLA-DRB1*15:01L
DAAKAYKDYLASG

SEQ ID NO: 14489 - protein, 14 aa, Severe acute respiratory syndrome coronavirus 2
  REGION 1..14: note = Table B: HLA-DRB1*13:02L HLA-DPA1*01:03-B1*03:01L HLA-DPA1*01:03-B1*104:01L
AAKAYKDYLASGGQ

SEQ ID NO: 14490 - protein, 15 aa, Severe acute respiratory syndrome coronavirus 2
  REGION 1..15: note = Table B: HLA-DRB1*13:02L HLA-DRB1*11:02L HLA-DRB1*11:03L HLA-DRB1*15:03L
GQPITNCVKMLCTHT

SEQ ID NO: 14491 - protein, 12 aa, Severe acute respiratory syndrome coronavirus 2
  REGION 1..12: note = Table B: HLA-DRB1*13:02L HLA-DRB1*04:02L HLA-DRB4*03:01NL HLA-DRB1*08:77L HLA-DRB3*02:01L HLA-DRB1*14:01L HLA-DRB1*04:10L HLA-DRB1*12:01L HLA-DRB1*12:02L HLA-DRB1*14:54L HLA-DRB1*14:17L HLA-DRB1*07:01L HLA-DRB1*16:01L HLA-DRB1*15:03L
GQAITVTPEANM

SEQ ID NO: 14492 - protein, 13 aa, Severe acute respiratory syndrome coronavirus 2
  REGION 1..13: note = Table B: HLA-DRB1*13:02L HLA-DRB1*01:02L HLA-DRB1*15:03L
QAITVTPEANMDQ

SEQ ID NO: 14493 - protein, 16 aa, Severe acute respiratory syndrome coronavirus 2
  REGION 1..16: note = Table B: HLA-DRB1*13:02L HLA-DRB1*01:03L HLA-DRB1*04:05L HLA-DQA1*01:02-B1*06:02L HLA-DRB1*03:01L HLA-DRB1*11:04L HLA-DRB1*08:01L HLA-DRB1*11:01L HLA-DRB3*01:01L HLA-DPA1*02:01-B1*13:01L HLA-DQA1*03:01-B1*03:02L
  REGION 1..16: note = CONT. FROM ABOVE: HLA-DQA1*01:03-B1*06:01L HLA-DRB1*04:08L HLA-D QA1*02:01-B1*03:03L
HPNPKGFCDLKGKYVQ

SEQ ID NO: 14494 - protein, 13 aa, Severe acute respiratory syndrome coronavirus 2
  REGION 1..13: note = Table B: HLA-DRB1*13:02L HLA-DRB1*01:01L HLA-DPA1*01:03-B1*03:01L HLA-DRB1*14:01L HLA-DRB1*11:03L HLA-DRB1*14:02L HLA-DQA1*01-B1*05L HLA-DRB3*01:01L HLA-DPA1*02:01-B1*13:01L HLA-DPA1*03:01-B1*105:01L
  REGION 1..13: note = CONT. FROM ABOVE: HLA-DPA1*01:02-B1*04:01L
KGKYVQIPTTCAN

SEQ ID NO: 14495 - protein, 14 aa, Severe acute respiratory syndrome coronavirus 2
  REGION 1..14: note = Table B: HLA-DRB1*13:02L HLA-DRB1*13:03L HLA-DRB1*01:02L HLA-DRB1*08:04L HLA-DRB1*14:01L HLA-DRB1*08:01L HLA-DPA1*01:03-B1*104:01L HLA-DRB1*15:03L
YVQIPTTCANDPVG

SEQ ID NO: 14496 - protein, 10 aa, Severe acute respiratory syndrome coronavirus 2
  REGION 1..10: note = Table B: HLA-DRB1*13:02L HLA-DRB1*13:03L HLA-DRB4*03:01NL HLA-DRB1*12:01L HLA-DQA1*03:01-B1*03:02L HLA-DQA1*05:05-B1*03:01L
ANDPVGFTLK

SEQ ID NO: 14497 - protein, 16 aa, Severe acute respiratory syndrome coronavirus 2
  REGION 1..16: note = Table B: HLA-DRB1*13:02L HLA-DRB1*01:03L HLA-DRB1*01:02L HLA-DPA1*01:03-B1*03:01L HLA-DRB1*11:02L HLA-DRB1*11:04L HLA-DRB1*14:02L HLA-DRB1*11:01L HLA-DPA1*01:03-B1*04:02L HLA-DRB1*12:01L HLA-DPA1*01:03-B1*104:01L
  REGION 1..16: note = CONT. FROM ABOVE: HLA-DQA1*05:05-B1*03:01L HLA-DRB1*04:08L HLA-D RB1*08:02L
DPVGFTLKNTVCTVCG

SEQ ID NO: 14498 - protein, 16 aa, Severe acute respiratory syndrome coronavirus 2
  REGION 1..16: note = Table B: HLA-DRB1*13:02L HLA-DRB1*04:05L HLA-DRB1*01:01L HLA-DPA1*01:03-B1*03:01L HLA-DRB1*11:04L HLA-DRB1*08:01L HLA-DRB1*11:01L HLA-DPA1*02:01-B1*13:01L
DAQSFLNRVCGVSAAR

SEQ ID NO: 14499 - protein, 12 aa, Severe acute respiratory syndrome coronavirus 2
  REGION 1..12: note = Table B: HLA-DRB1*13:02L HLA-DRB1*04:04L HLA-DRB3*02:01L HLA-DRB1*14:01L HLA-DRB1*11:04L HLA-DQA1*01:01-B1*05:01L HLA-DRB1*08:01L HLA-DRB3*01:01L HLA-DRB1*10:01L HLA-DRB1*08:03L HLA-DRB1*15:01L
RAFDIYNDKVAG

SEQ ID NO: 14500 - protein, 10 aa, Severe acute respiratory syndrome coronavirus 2
  REGION 1..10: note = Table B: HLA-DRB1*13:02L HLA-DQA1*03:01-B1*03:02L
KVAGFAKFLK

SEQ ID NO: 14501 - protein, 16 aa, Severe acute respiratory syndrome coronavirus 2
  REGION 1..16: note = Table B: HLA-DRB1*13:02L
VAGFAKFLKTNCCRFQ

SEQ ID NO: 14502 - protein, 10 aa, Severe acute respiratory syndrome coronavirus 2
  REGION 1..10: note = Table B: HLA-DRB1*13:02L HLA-DRB1*13:03L HLA-DRB1*04:02L HLA-DRB4*03:01NL HLA-DRB1*14:01L HLA-DRB1*08:01L HLA-DRB1*12:01L HLA-DPA1*03:01-B1*105:01L HLA-DQA1*03:01-B1*03:02L HLA-DQA1*05:05-B1*03:01L HLA-DQA1*02:01-B1*03:03L
NLIDSYFVVK

SEQ ID NO: 14503 - protein, 12 aa, Severe acute respiratory syndrome coronavirus 2
  REGION 1..12: note = Table B: HLA-DRB1*13:02L HLA-DRB1*04:02L HLA-DRB1*08:04L HLA-DRB3*02:01L HLA-DRB1*11:03L HLA-DRB1*11:04L HLA-DRB3*01:01L HLA-DPA1*03:01-B1*105:01L HLA-DRB1*14:54L HLA-DRB1*08:03L
IDSYFVVKRHTF

SEQ ID NO: 14504 - protein, 12 aa, Severe acute respiratory syndrome coronavirus 2
  REGION 1..12: note = Table B: HLA-DRB1*13:02L HLA-DRB1*13:03L HLA-DRB1*04:02L HLA-DRB1*08:04L HLA-DRB1*11:03L HLA-DRB1*11:04L HLA-DRB3*01:01L HLA-DRB1*14:54L HLA-DRB1*08:03L
DSYFVVKRHTFS

SEQ ID NO: 14505 - protein, 12 aa, Severe acute respiratory syndrome coronavirus 2
  REGION 1..12: note = Table B: HLA-DRB1*13:02L HLA-DRB1*13:03L HLA-DRB1*08:04L HLA-DRB1*14:01L HLA-DRB1*11:04L HLA-DRB3*01:01L HLA-DRB1*04:08L HLA-DRB1*08:03L
SYFVVKRHTFSN

SEQ ID NO: 14506 - protein, 12 aa, Severe acute respiratory syndrome coronavirus 2
  REGION 1..12: note = Table B: HLA-DRB1*13:02L HLA-DRB1*01:02L HLA-DRB1*08:04L HLA-DRB1*14:01L HLA-DRB1*08:01L HLA-DRB1*12:01L HLA-DPA1*01:02-B1*04:01L HLA-DRB1*16:01L HLA-DRB1*04:08L HLA-DRB1*15:03L
FVVKRHTFSNYQ

SEQ ID NO: 14507 - protein, 14 aa, Severe acute respiratory syndrome coronavirus 2
  REGION 1..14: note = Table B: HLA-DRB1*13:02L
VVKRHTFSNYQHEE

SEQ ID NO: 14508 - protein, 14 aa, Severe acute respiratory syndrome coronavirus 2
  REGION 1..14: note = Table B: HLA-DRB1*13:02L
VKRHTFSNYQHEET

SEQ ID NO: 14509 - protein, 12 aa, Severe acute respiratory syndrome coronavirus 2
  REGION 1..12: note = Table B: HLA-DRB1*13:02L HLA-DRB1*04:04L HLA-DRB1*01:02L HLA-DRB1*08:04L HLA-DRB3*02:01L HLA-DPA1*03:01-B1*04:02L HLA-DRB1*14:01L HLA-DRB1*08:01L HLA-DRB1*09:01L HLA-DRB1*12:02L HLA-DQA1*05:05-B1*03:01L HLA-DRB1*08:03L
FSNYQHEETIYN

SEQ ID NO: 14510 - protein, 14 aa, Severe acute respiratory syndrome coronavirus 2
  REGION 1..14: note = Table B: HLA-DRB1*13:02L HLA-DPA1*01:03-B1*03:01L
LLKDCPAVAKHDFF

SEQ ID NO: 14511 - protein, 10 aa, Severe acute respiratory syndrome coronavirus 2
  REGION 1..10: note = Table B: HLA-DRB1*13:02L HLA-DRB1*13:03L HLA-DRB1*01:03L HLA-DRB1*01:01L HLA-DRB4*03:01NL HLA-DRB1*14:01L HLA-DRB1*11:04L HLA-DRB1*08:01L HLA-DRB5*01:01L HLA-DRB1*12:01L HLA-DQA1*03:01-B1*03:02M HLA-DQA1*05:05-B1*03:01L
  REGION 1..10: note = CONT. FROM ABOVE: HLA-DRB1*14:17L HLA-DRB1*16:01L HLA-DQA1*01:03 -B1*06:01L HLA-DQA1*02:01-B1*03:03L
DMVPHISRQR

SEQ ID NO: 14512 - protein, 16 aa, Severe acute respiratory syndrome coronavirus 2
  REGION 1..16: note = Table B: HLA-DRB1*13:02L HLA-DQA1*01:02-B1*06:02L HLA-DRB1*14:01L HLA-DRB1*12:01L HLA-DRB3*01:01L HLA-DRB1*04:08L HLA-DRB1*15:03L
VPHISRQRLTKYTMAD

SEQ ID NO: 14513 - protein, 15 aa, Severe acute respiratory syndrome coronavirus 2
  REGION 1..15: note = Table B: HLA-DRB1*13:02L HLA-DPA1*01:03-B1*03:01L HLA-DRB1*15:03L
ISRQRLTKYTMADLV

SEQ ID NO: 14514 - protein, 16 aa, Severe acute respiratory syndrome coronavirus 2
  REGION 1..16: note = Table B: HLA-DRB1*13:02L HLA-DPA1*01:03-B1*104:01L
SRQRLTKYTMADLVYA

SEQ ID NO: 14515 - protein, 10 aa, Severe acute respiratory syndrome coronavirus 2
  REGION 1..10: note = Table B: HLA-DRB1*13:02L HLA-DRB1*13:03L HLA-DRB4*03:01NL HLA-DRB1*08:01L HLA-DRB1*12:01L HLA-DQA1*03:01-B1*03:02L HLA-DQA1*05:05-B1*03:01L HLA-DQA1*01:03-B1*06:01L HLA-DQA1*02:01-B1*03:03L
TMADLVYALR

SEQ ID NO: 14516 - protein, 13 aa, Severe acute respiratory syndrome coronavirus 2
  REGION 1..13: note = Table B: HLA-DRB1*13:02L HLA-DRB1*01:03L HLA-DRB1*01:02L HLA-DRB1*11:03L HLA-DQA1*05:05-B1*03:116L HLA-DRB1*12:01L HLA-DRB3*01:01L HLA-DQA1*03:01-B1*03:02L HLA-DRB1*14:54L HLA-DPA1*01:02-B1*04:01L
ADLVYALRHFDEG

SEQ ID NO: 14517 - protein, 15 aa, Severe acute respiratory syndrome coronavirus 2
  REGION 1..15: note = Table B: HLA-DRB1*13:02L HLA-DPA1*01:03-B1*03:01L
YALRHFDEGNCDTLK

SEQ ID NO: 14518 - protein, 15 aa, Severe acute respiratory syndrome coronavirus 2
  REGION 1..15: note = Table B: HLA-DRB1*13:02L HLA-DRB1*04:02L HLA-DPA1*01:03-B1*04:01L HLA-DRB3*01:01L HLA-DQA1*05:05-B1*03:01L
DDDYFNKKDWYDFVE

SEQ ID NO: 14519 - protein, 14 aa, Severe acute respiratory syndrome coronavirus 2
  REGION 1..14: note = Table B: HLA-DRB1*13:02L HLA-DRB1*13:03L HLA-DRB1*01:03L HLA-DRB1*04:02L HLA-DRB1*01:02L HLA-DPA1*01:03-B1*03:01L HLA-DPA1*03:01-B1*04:02L HLA-DRB1*08:01L HLA-DRB1*12:01L
FNKKDWYDFVENPD

SEQ ID NO: 14520 - protein, 14 aa, Severe acute respiratory syndrome coronavirus 2
  REGION 1..14: note = Table B: HLA-DRB1*13:02L HLA-DRB1*13:03L HLA-DRB1*08:04L HLA-DRB1*14:01L HLA-DRB1*11:04L HLA-DPA1*02:01-B1*13:01L HLA-DPA1*01:03-B1*104:01L HLA-DRB1*08:03L
NAGIVGVLTLDNQD

SEQ ID NO: 14521 - protein, 16 aa, Severe acute respiratory syndrome coronavirus 2
  REGION 1..16: note = Table B: HLA-DRB1*13:02L HLA-DRB3*02:01L HLA-DRB1*14:02L HLA-DPA1*01:03-B1*04:01L HLA-DPA1*01:03-B1*104:01L
VPVVDSYYSLLMPILT

SEQ ID NO: 14522 - protein, 10 aa, Severe acute respiratory syndrome coronavirus 2
  REGION 1..10: note = Table B: HLA-DRB1*13:02L HLA-DRB1*12:01L HLA-DQA1*03:01-B1*03:02L HLA-DQA1*05:05-B1*03:01L
LLMPILTLTR

SEQ ID NO: 14523 - protein, 14 aa, Severe acute respiratory syndrome coronavirus 2
  REGION 1..14: note = Table B: HLA-DRB1*13:02L HLA-DPA1*01:03-B1*03:01L HLA-DRB1*15:03L
LTRALTAESHVDTD

SEQ ID NO: 14524 - protein, 15 aa, Severe acute respiratory syndrome coronavirus 2
  REGION 1..15: note = Table B: HLA-DRB1*13:02L HLA-DPA1*01:03-B1*03:01L
DLTKPYIKWDLLKYD

SEQ ID NO: 14525 - protein, 14 aa, Severe acute respiratory syndrome coronavirus 2
  REGION 1..14: note = Table B: HLA-DRB1*13:02L HLA-DRB1*08:04L HLA-DPA1*01:03-B1*03:01L HLA-DRB1*14:01L HLA-DPA1*01:03-B1*04:02L HLA-DRB3*01:01L HLA-DPA1*01:03-B1*02:01L
KPYIKWDLLKYDFT

SEQ ID NO: 14526 - protein, 14 aa, Severe acute respiratory syndrome coronavirus 2
  REGION 1..14: note = Table B: HLA-DRB1*13:02L HLA-DRB1*01:02L HLA-DRB1*12:01L HLA-DRB3*01:01L HLA-DRB1*04:08L HLA-DRB1*15:03L
ERLKLFDRYFKYWD

SEQ ID NO: 14527 - protein, 14 aa, Severe acute respiratory syndrome coronavirus 2
  REGION 1..14: note = Table B: HLA-DRB1*13:02L HLA-DRB1*01:02L HLA-DRB1*14:01L HLA-DRB1*12:01L HLA-DRB3*01:01L HLA-DPA1*01:02-B1*04:01L
RLKLFDRYFKYWDQ

SEQ ID NO: 14528 - protein, 14 aa, Severe acute respiratory syndrome coronavirus 2
  REGION 1..14: note = Table B: HLA-DRB1*13:02L HLA-DRB1*04:05L HLA-DRB1*01:02L HLA-DRB1*08:04L HLA-DPA1*03:01-B1*04:02L HLA-DRB1*11:01L HLA-DRB1*12:01L HLA-DRB3*01:01L HLA-DPA1*03:01-B1*105:01L HLA-DPA1*01:02-B1*04:01L HLA-DRB1*08:03L
LKLFDRYFKYWDQT

SEQ ID NO: 14529 - protein, 15 aa, Severe acute respiratory syndrome coronavirus 2
  REGION 1..15: note = Table B: HLA-DRB1*13:02L
LFDRYFKYWDQTYHP

SEQ ID NO: 14530 - protein, 13 aa, Severe acute respiratory syndrome coronavirus 2
  REGION 1..13: note = Table B: HLA-DRB1*13:02L HLA-DRB1*11:01L HLA-DRB3*01:01L HLA-DRB1*08:03L
RYFKYWDQTYHPN

SEQ ID NO: 14531 - protein, 14 aa, Severe acute respiratory syndrome coronavirus 2
  REGION 1..14: note = Table B: HLA-DRB1*13:02L HLA-DRB1*01:02L HLA-DRB1*08:04L HLA-DPA1*03:01-B1*04:02L HLA-DRB1*14:01L HLA-DRB1*14:02L HLA-DRB1*11:01L HLA-DQA1*05:05-B1*03:19L HLA-DPA1*01:03-B1*04:02L HLA-DRB1*12:01L
  REGION 1..14: note = CONT. FROM ABOVE: HLA-DPA1*02:01-B1*13:01L HLA-DRB1*15:03L
FKYWDQTYHPNCVN

SEQ ID NO: 14532 - protein, 16 aa, Severe acute respiratory syndrome coronavirus 2
  REGION 1..16: note = Table B: HLA-DRB1*13:02L HLA-DRB1*01:03L HLA-DRB1*04:04L HLA-DRB1*01:01L HLA-DRB3*02:01L HLA-DRB1*14:02L HLA-DRB1*08:01L HLA-DPA1*01:03-B1*04:01L HLA-DPA1*01:03-B1*02:01L HLA-DRB1*10:01L
NVLFSTVFPPTSFGPL

SEQ ID NO: 14533 - protein, 11 aa, Severe acute respiratory syndrome coronavirus 2
  REGION 1..11: note = Table B: HLA-DRB1*13:02L HLA-DRB1*13:03L HLA-DRB1*01:03L HLA-DRB1*04:02L HLA-DPA1*01:03-B1*03:01L HLA-DRB1*12:01L HLA-DRB1*14:17L
IFVDGVPFVVS

SEQ ID NO: 14534 - protein, 10 aa, Severe acute respiratory syndrome coronavirus 2
  REGION 1..10: note = Table B: HLA-DRB1*13:02L HLA-DRB1*01:02L HLA-DRB1*12:01L HLA-DRB1*16:01L
FVVSTGYHFR

SEQ ID NO: 14535 - protein, 14 aa, Severe acute respiratory syndrome coronavirus 2
  REGION 1..14: note = Table B: HLA-DRB1*13:02L HLA-DRB1*13:03L HLA-DRB1*14:02L HLA-DPA1*01:03-B1*04:02L HLA-DRB3*01:01L HLA-DPA1*01:03-B1*02:01L HLA-DQA1*05:05-B1*03:01L HLA-DRB1*07:01L
GYHFRELGVVHNQD

SEQ ID NO: 14536 - protein, 12 aa, Severe acute respiratory syndrome coronavirus 2
  REGION 1..12: note = Table B: HLA-DRB1*13:02L HLA-DRB1*01:02L HLA-DRB1*08:01L HLA-DPA1*02:01-B1*13:01L HLA-DRB1*04:08L HLA-DRB1*15:03L
RELGVVHNQDVN

SEQ ID NO: 14537 - protein, 11 aa, Severe acute respiratory syndrome coronavirus 2
  REGION 1..11: note = Table B: HLA-DRB1*13:02L HLA-DRB1*04:10L HLA-DRB1*04:08L
GVVHNQDVNLH

SEQ ID NO: 14538 - protein, 15 aa, Severe acute respiratory syndrome coronavirus 2
  REGION 1..15: note = Table B: HLA-DRB1*13:02L HLA-DRB1*01:01L HLA-DRB1*11:01L HLA-DRB1*07:01L
NQDVNLHSSRLSFKE

SEQ ID NO: 14539 - protein, 13 aa, Severe acute respiratory syndrome coronavirus 2
  REGION 1..13: note = Table B: HLA-DRB1*13:02L HLA-DRB1*01:03L HLA-DRB1*01:02L HLA-DRB1*08:04L HLA-DRB1*11:04L HLA-DRB1*12:01L HLA-DRB1*04:08L HLA-DRB1*15:03L
SGNLLLDKRTTCF

SEQ ID NO: 14540 - protein, 12 aa, Severe acute respiratory syndrome coronavirus 2
  REGION 1..12: note = Table B: HLA-DRB1*13:02L HLA-DRB1*01:02L HLA-DRB1*03:01L HLA-DRB1*14:01L HLA-DRB3*01:01L HLA-DRB1*16:01L HLA-DRB1*15:03L
NLLLDKRTTCFS

SEQ ID NO: 14541 - protein, 12 aa, Severe acute respiratory syndrome coronavirus 2
  REGION 1..12: note = Table B: HLA-DRB1*13:02L HLA-DPA1*01:03-B1*03:01L HLA-DRB1*09:01L
SVAALTNNVAFQ

SEQ ID NO: 14542 - protein, 12 aa, Severe acute respiratory syndrome coronavirus 2
  REGION 1..12: note = Table B: HLA-DRB1*13:02L
VAALTNNVAFQT

SEQ ID NO: 14543 - protein, 14 aa, Severe acute respiratory syndrome coronavirus 2
  REGION 1..14: note = Table B: HLA-DRB1*13:02L HLA-DRB1*12:02L
ALTNNVAFQTVKPG

SEQ ID NO: 14544 - protein, 10 aa, Severe acute respiratory syndrome coronavirus 2
  REGION 1..10: note = Table B: HLA-DRB1*13:02L HLA-DRB1*13:03L HLA-DRB1*01:01L HLA-DRB4*03:01NL HLA-DRB1*14:01L HLA-DRB1*11:04L HLA-DRB1*08:01L HLA-DRB5*01:01L HLA-DRB1*12:01L HLA-DQA1*03:01-B1*03:02M HLA-DQA1*05:05-B1*03:01L HLA-DRB1*14:17L HLA-DRB1*15:01L
QTVKPGNFNK

SEQ ID NO: 14545 - protein, 14 aa, Severe acute respiratory syndrome coronavirus 2
  REGION 1..14: note = Table B: HLA-DRB1*13:02L HLA-DPA1*01:03-B1*03:01L HLA-DPA1*01:03-B1*04:02L HLA-DPA1*01:03-B1*104:01L
NFNKDFYDFAVSKG

SEQ ID NO: 14546 - protein, 12 aa, Severe acute respiratory syndrome coronavirus 2
  REGION 1..12: note = Table B: HLA-DRB1*13:02L HLA-DRB1*08:04L HLA-DRB3*02:01L HLA-DRB1*08:01L HLA-DRB1*09:01L HLA-DRB1*07:01L HLA-DRB1*04:08L
KDFYDFAVSKGF

SEQ ID NO: 14547 - protein, 13 aa, Severe acute respiratory syndrome coronavirus 2
  REGION 1..13: note = Table B: HLA-DRB1*13:02L HLA-DRB1*08:01L HLA-DRB1*07:01L
DFYDFAVSKGFFK

SEQ ID NO: 14548 - protein, 14 aa, Severe acute respiratory syndrome coronavirus 2
  REGION 1..14: note = Table B: HLA-DRB1*13:02L HLA-DRB1*08:04L HLA-DRB1*11:04L HLA-DQA1*01:01-B1*05:01L HLA-DRB1*08:03L
SKGFFKEGSSVELK

SEQ ID NO: 14549 - protein, 16 aa, Severe acute respiratory syndrome coronavirus 2
  REGION 1..16: note = Table B: HLA-DRB1*13:02L HLA-DRB1*04:05L HLA-DRB3*01:01L HLA-DPA1*02:01-B1*13:01L
EGSSVELKHFFFAQDG

SEQ ID NO: 14550 - protein, 16 aa, Severe acute respiratory syndrome coronavirus 2
  REGION 1..16: note = Table B: HLA-DRB1*13:02L HLA-DPA1*01:03-B1*03:01L HLA-DPA1*01:03-B1*04:01L HLA-DRB3*01:01L HLA-DPA1*01:03-B1*02:01L HLA-DPA1*01:03-B1*104:01L
GSSVELKHFFFAQDGN

SEQ ID NO: 14551 - protein, 11 aa, Severe acute respiratory syndrome coronavirus 2
  REGION 1..11: note = Table B: HLA-DRB1*13:02L HLA-DRB1*13:03L HLA-DRB1*01:03L HLA-DRB1*04:02L HLA-DRB4*03:01NL HLA-DRB1*08:77L HLA-DRB1*14:01L HLA-DRB1*11:03L HLA-DRB1*14:02L HLA-DQA1*05:01-B1*02:01L HLA-DRB1*12:01L HLA-DRB1*14:54L HLA-DRB1*10:01L HLA-DRB1*16:01L
  REGION 1..11: note = CONT. FROM ABOVE: HLA-DRB1*04:08L
FFAQDGNAAIS

SEQ ID NO: 14552 - protein, 11 aa, Severe acute respiratory syndrome coronavirus 2
  REGION 1..11: note = Table B: HLA-DRB1*13:02L HLA-DRB1*13:03L HLA-DRB1*01:03L HLA-DRB1*04:02L HLA-DRB4*03:01NL HLA-DRB1*14:01L HLA-DQA1*05:01-B1*02:01L HLA-DRB1*12:01L HLA-DRB1*14:54L HLA-DRB1*16:01L
FAQDGNAAISD

SEQ ID NO: 14553 - protein, 11 aa, Severe acute respiratory syndrome coronavirus 2
  REGION 1..11: note = Table B: HLA-DRB1*13:02L HLA-DRB1*13:03L HLA-DRB1*01:03L HLA-DRB1*04:05L HLA-DRB1*01:02L HLA-DRB1*08:04L HLA-DRB1*14:54L HLA-DRB1*04:08L
FVVEVVDKYFD

SEQ ID NO: 14554 - protein, 15 aa, Severe acute respiratory syndrome coronavirus 2
  REGION 1..15: note = Table B: HLA-DRB1*13:02L HLA-DRB1*01:03L HLA-DRB1*04:05L HLA-DRB1*01:02L HLA-DRB1*08:01L HLA-DPA1*01:03-B1*04:02L HLA-DRB1*12:01L HLA-DRB1*04:08L
VVEVVDKYFDCYDGG

SEQ ID NO: 14555 - protein, 11 aa, Severe acute respiratory syndrome coronavirus 2
  REGION 1..11: note = Table B: HLA-DRB1*13:02L HLA-DRB1*14:01L HLA-DRB1*04:08L HLA-DRB1*15:03L
NQVIVNNLDKS

SEQ ID NO: 14556 - protein, 12 aa, Severe acute respiratory syndrome coronavirus 2
  REGION 1..12: note = Table B: HLA-DRB1*13:02L HLA-DRB1*01:03L HLA-DRB1*04:02L HLA-DRB1*04:05L HLA-DQA1*01:02-B1*06:02L HLA-DRB1*01:02L HLA-DRB4*03:01NL HLA-DRB1*08:04L HLA-DRB3*02:01L HLA-DPA1*03:01-B1*04:02L HLA-DRB1*11:03L HLA-DRB1*11:04L
  REGION 1..12: note = CONT. FROM ABOVE: HLA-DRB1*14:02L HLA-DPA1*01:03-B1*04:01L HLA-D RB1*04:10L HLA-DRB1*09:01L HLA-DRB1*12:02L HLA-DPA1*03:01-B1*105 :01L HLA-DRB1*14:54L HLA-DQA1*05:05-B1*03:01L HLA-DRB1*14:17L HL A-DPA1*01:02-B1*04:01L HLA-DRB1*07:01L HLA-DRB1*04:08L
VNNLDKSAGFPF

SEQ ID NO: 14557 - protein, 12 aa, Severe acute respiratory syndrome coronavirus 2
  REGION 1..12: note = Table B: HLA-DRB1*13:02L HLA-DQA1*01:02-B1*06:02L HLA-DRB1*01:02L HLA-DRB1*12:01L HLA-DPA1*03:01-B1*105:01L HLA-DQA1*01:03-B1*06:01L HLA-DRB1*04:08L HLA-DRB1*15:03L
FPFNKWGKARLY

SEQ ID NO: 14558 - protein, 14 aa, Severe acute respiratory syndrome coronavirus 2
  REGION 1..14: note = Table B: HLA-DRB1*13:02L HLA-DRB1*04:04L HLA-DQA1*01:02-B1*06:02L HLA-DRB1*08:01L HLA-DPA1*01:02-B1*04:01L HLA-DQA1*01:03-B1*06:01L HLA-DQA1*02:01-B1*03:03L
GKARLYYDSMSYED

SEQ ID NO: 14559 - protein, 14 aa, Severe acute respiratory syndrome coronavirus 2
  REGION 1..14: note = Table B: HLA-DRB1*13:02L HLA-DRB1*04:04L HLA-DRB1*01:02L HLA-DRB1*08:04L HLA-DPA1*01:03-B1*03:01L HLA-DPA1*01:02-B1*04:01L HLA-DQA1*01:03-B1*06:01L HLA-DRB1*08:03L
KARLYYDSMSYEDQ

SEQ ID NO: 14560 - protein, 15 aa, Severe acute respiratory syndrome coronavirus 2
  REGION 1..15: note = Table B: HLA-DRB1*13:02L HLA-DRB1*04:04L HLA-DQA1*01:01-B1*05:01L HLA-DPA1*01:03-B1*04:01L HLA-DPA1*01:03-B1*02:01L HLA-DQA1*05:05-B1*03:01L HLA-DRB1*08:03L
ARLYYDSMSYEDQDA

SEQ ID NO: 14561 - protein, 15 aa, Severe acute respiratory syndrome coronavirus 2
  REGION 1..15: note = Table B: HLA-DRB1*13:02L HLA-DRB1*08:04L HLA-DRB1*14:01L HLA-DRB1*11:03L HLA-DRB1*11:04L HLA-DRB1*11:01L HLA-DRB3*01:01L HLA-DPA1*01:03-B1*02:01L
SMSYEDQDALFAYTK

SEQ ID NO: 14562 - protein, 14 aa, Severe acute respiratory syndrome coronavirus 2
  REGION 1..14: note = Table B: HLA-DRB1*13:02L HLA-DPA1*03:01-B1*105:01L HLA-DPA1*01:03-B1*104:01L HLA-DQA1*05:05-B1*03:01L
YTKRNVIPTITQMN

SEQ ID NO: 14563 - protein, 14 aa, Severe acute respiratory syndrome coronavirus 2
  REGION 1..14: note = Table B: HLA-DRB1*13:02L HLA-DRB1*01:03L HLA-DRB1*04:04L HLA-DRB1*04:05L HLA-DRB1*01:02L HLA-DRB1*08:04L HLA-DPA1*03:01-B1*04:02L HLA-DRB1*11:04L HLA-DRB1*08:01L HLA-DRB1*11:01L HLA-DRB1*04:10L HLA-DPA1*01:03-B1*04:02L
  REGION 1..14: note = CONT. FROM ABOVE: HLA-DRB1*14:54L HLA-DPA1*01:03-B1*02:01L HLA-D QA1*05:05-B1*03:01L HLA-DQA1*01:03-B1*06:01L HLA-DRB1*04:08L
IPTITQMNLKYAIS

SEQ ID NO: 14564 - protein, 13 aa, Severe acute respiratory syndrome coronavirus 2
  REGION 1..13: note = Table B: HLA-DRB1*13:02L HLA-DRB1*13:03L HLA-DQA1*01:02-B1*06:02L HLA-DRB1*01:02L HLA-DRB1*11:04L HLA-DRB1*11:01L HLA-DRB3*01:01L HLA-DRB1*16:01L HLA-DRB1*04:08L
AISAKNRARTVAG

SEQ ID NO: 14565 - protein, 14 aa, Severe acute respiratory syndrome coronavirus 2
  REGION 1..14: note = Table B: HLA-DRB1*13:02L HLA-DRB1*04:05L HLA-DRB1*01:02L HLA-DPA1*01:03-B1*03:01L HLA-DRB1*12:01L HLA-DPA1*01:03-B1*104:01L
NRARTVAGVSICST

SEQ ID NO: 14566 - protein, 10 aa, Severe acute respiratory syndrome coronavirus 2
  REGION 1..10: note = Table B: HLA-DRB1*13:02L HLA-DRB1*13:03L HLA-DRB1*01:03L HLA-DRB1*11:04L HLA-DRB1*08:01L HLA-DRB1*12:01L HLA-DQA1*03:01-B1*03:02L HLA-DRB1*14:17L HLA-DRB1*16:01L HLA-DQA1*02:01-B1*03:03L
TMTNRQFHQK

SEQ ID NO: 14567 - protein, 14 aa, Severe acute respiratory syndrome coronavirus 2
  REGION 1..14: note = Table B: HLA-DRB1*13:02L HLA-DRB1*04:05L HLA-DRB1*14:01L HLA-DRB1*11:01L HLA-DRB3*01:01L HLA-DPA1*02:01-B1*13:01L HLA-DRB1*15:03L
TNRQFHQKLLKSIA

SEQ ID NO: 14568 - protein, 15 aa, Severe acute respiratory syndrome coronavirus 2
  REGION 1..15: note = Table B: HLA-DRB1*13:02L HLA-DRB1*04:04L HLA-DPA1*01:03-B1*04:01L HLA-DPA1*01:03-B1*04:02L HLA-DPA1*02:01-B1*13:01L HLA-DQA1*01:03-B1*06:01L HLA-DQA1*02:01-B1*03:03L
NRQFHQKLLKSIAAT

SEQ ID NO: 14569 - protein, 14 aa, Severe acute respiratory syndrome coronavirus 2
  REGION 1..14: note = Table B: HLA-DRB1*13:02L HLA-DRB1*13:03L HLA-DRB4*03:01NL HLA-DRB1*08:04L HLA-DPA1*01:03-B1*03:01L HLA-DRB1*11:03L HLA-DRB1*11:01L HLA-DQA1*01-B1*05L HLA-DQA1*05:05-B1*03:19L HLA-DRB3*01:01L HLA-DPA1*02:01-B1*13:01L HLA-DRB1*14:54L
  REGION 1..14: note = CONT. FROM ABOVE: HLA-DRB1*07:01L HLA-DRB1*08:03L HLA-DRB1*15:01 L
QKLLKSIAATRGAT

SEQ ID NO: 14570 - protein, 13 aa, Severe acute respiratory syndrome coronavirus 2
  REGION 1..13: note = Table B: HLA-DRB1*13:02L HLA-DRB4*03:01NL HLA-DQA1*05:01-B1*02:01L HLA-DPA1*02:01-B1*13:01L HLA-DRB1*16:01L
AATRGATVVIGTS

SEQ ID NO: 14571 - protein, 14 aa, Severe acute respiratory syndrome coronavirus 2
  REGION 1..14: note = Table B: HLA-DRB1*13:02L HLA-DRB1*11:01L
VVIGTSKFYGGWHN

SEQ ID NO: 14572 - protein, 14 aa, Severe acute respiratory syndrome coronavirus 2
  REGION 1..14: note = Table B: HLA-DRB1*13:02L HLA-DRB1*01:03L HLA-DRB1*01:02L HLA-DRB1*04:08L HLA-DRB1*15:03L
YGGWHNMLKTVYSD

SEQ ID NO: 14573 - protein, 14 aa, Severe acute respiratory syndrome coronavirus 2
  REGION 1..14: note = Table B: HLA-DRB1*13:02L HLA-DRB1*01:02L HLA-DRB1*14:01L HLA-DRB1*08:01L HLA-DRB1*04:08L
GWHNMLKTVYSDVE

SEQ ID NO: 14574 - protein, 18 aa, Severe acute respiratory syndrome coronavirus 2
  REGION 1..18: note = Table B: HLA-DRB1*13:02L HLA-DRB1*08:04L HLA-DPA1*01:03-B1*03:01L HLA-DRB1*03:01L HLA-DRB1*14:02L HLA-DQA1*05:05-B1*03:19L HLA-DQA1*05:01-B1*02:01L HLA-DPA1*01:03-B1*04:01L HLA-DPA1*01:03-B1*04:02L
  REGION 1..18: note = CONT. FROM ABOVE: HLA-DPA1*01:03-B1*104:01L HLA-DQA1*05:05-B1*03 :01L HLA-DQA1*02:01-B1*03:03L
NPHLMGWDYPKCDRAMPN

SEQ ID NO: 14575 - protein, 10 aa, Severe acute respiratory syndrome coronavirus 2
  REGION 1..10: note = Table B: HLA-DRB1*13:02L HLA-DRB1*13:03L HLA-DRB1*12:01L HLA-DQA1*03:01-B1*03:02L
RIMASLVLAR

SEQ ID NO: 14576 - protein, 13 aa, Severe acute respiratory syndrome coronavirus 2
  REGION 1..13: note = Table B: HLA-DRB1*13:02L HLA-DRB1*04:05L HLA-DRB1*08:04L HLA-DRB1*11:04L HLA-DRB1*11:01L HLA-DPA1*03:01-B1*105:01L HLA-DRB1*14:54L HLA-DPA1*01:02-B1*04:01L HLA-DRB1*04:08L HLA-DRB1*15:03L
IMASLVLARKHTT

SEQ ID NO: 14577 - protein, 14 aa, Severe acute respiratory syndrome coronavirus 2
  REGION 1..14: note = Table B: HLA-DRB1*13:02L HLA-DRB1*01:01L HLA-DPA1*01:03-B1*03:01L HLA-DRB1*11:01L HLA-DPA1*01:02-B1*04:01L HLA-DRB1*04:08L HLA-DQA1*02:01-B1*03:03L
VLARKHTTCCSLSH

SEQ ID NO: 14578 - protein, 14 aa, Severe acute respiratory syndrome coronavirus 2
  REGION 1..14: note = Table B: HLA-DRB1*13:02L HLA-DRB1*01:01L HLA-DRB1*11:01L HLA-DPA1*01:02-B1*04:01L
LARKHTTCCSLSHR

SEQ ID NO: 14579 - protein, 16 aa, Severe acute respiratory syndrome coronavirus 2
  REGION 1..16: note = Table B: HLA-DRB1*13:02L HLA-DRB1*14:02L
LSEMVMCGGSLYVKPG

SEQ ID NO: 14580 - protein, 14 aa, Severe acute respiratory syndrome coronavirus 2
  REGION 1..14: note = Table B: HLA-DRB1*13:02L HLA-DRB1*01:02L HLA-DRB1*08:04L HLA-DPA1*01:03-B1*03:01L HLA-DRB1*11:03L HLA-DRB1*11:04L HLA-DRB1*14:02L HLA-DRB1*11:01L HLA-DRB1*04:10L HLA-DRB1*12:02L HLA-DRB1*08:03L HLA-DRB1*15:03L
GGSLYVKPGGTSSG

SEQ ID NO: 14581 - protein, 14 aa, Severe acute respiratory syndrome coronavirus 2
  REGION 1..14: note = Table B: HLA-DRB1*13:02L HLA-DRB1*04:04L HLA-DRB1*08:77L HLA-DPA1*03:01-B1*04:02L HLA-DRB1*14:02L HLA-DPA1*01:03-B1*04:01L HLA-DRB3*01:01L HLA-DRB1*07:01L
SGDATTAYANSVFN

SEQ ID NO: 14582 - protein, 15 aa, Severe acute respiratory syndrome coronavirus 2
  REGION 1..15: note = Table B: HLA-DRB1*13:02L
DATTAYANSVFNICQ

SEQ ID NO: 14583 - protein, 16 aa, Severe acute respiratory syndrome coronavirus 2
  REGION 1..16: note = Table B: HLA-DRB1*13:02L HLA-DRB1*11:02L HLA-DRB1*14:02L
TTAYANSVFNICQAVT

SEQ ID NO: 14584 - protein, 14 aa, Severe acute respiratory syndrome coronavirus 2
  REGION 1..14: note = Table B: HLA-DRB1*13:02L HLA-DRB1*08:04L HLA-DRB3*02:01L HLA-DPA1*03:01-B1*04:02L HLA-DPA1*01:03-B1*04:02L HLA-DPA1*02:01-B1*13:01L HLA-DPA1*01:02-B1*04:01L
ANSVFNICQAVTAN

SEQ ID NO: 14585 - protein, 13 aa, Severe acute respiratory syndrome coronavirus 2
  REGION 1..13: note = Table B: HLA-DRB1*13:02L HLA-DRB1*14:01L HLA-DRB1*12:01L HLA-DRB1*15:03L
QAVTANVNALLST

SEQ ID NO: 14586 - protein, 13 aa, Severe acute respiratory syndrome coronavirus 2
  REGION 1..13: note = Table B: HLA-DRB1*13:02L HLA-DQA1*01:02-B1*06:02L HLA-DRB1*14:01L HLA-DRB1*12:01L HLA-DRB1*15:03L
AVTANVNALLSTD

SEQ ID NO: 14587 - protein, 11 aa, Severe acute respiratory syndrome coronavirus 2
  REGION 1..11: note = Table B: HLA-DRB1*13:02L
NALLSTDGNKI

SEQ ID NO: 14588 - protein, 13 aa, Severe acute respiratory syndrome coronavirus 2
  REGION 1..13: note = Table B: HLA-DRB1*13:02L
TDGNKIADKYVRN

SEQ ID NO: 14589 - protein, 13 aa, Severe acute respiratory syndrome coronavirus 2
  REGION 1..13: note = Table B: HLA-DRB1*13:02L HLA-DPA1*01:03-B1*03:01L HLA-DPA1*01:02-B1*04:01L
DGNKIADKYVRNL

SEQ ID NO: 14590 - protein, 13 aa, Severe acute respiratory syndrome coronavirus 2
  REGION 1..13: note = Table B: HLA-DRB1*13:02L HLA-DRB1*04:05L HLA-DRB1*01:02L HLA-DPA1*01:02-B1*04:01L
GNKIADKYVRNLQ

SEQ ID NO: 14591 - protein, 14 aa, Severe acute respiratory syndrome coronavirus 2
  REGION 1..14: note = Table B: HLA-DRB1*13:02L HLA-DPA1*01:03-B1*03:01L HLA-DQA1*02:01-B1*03:03L HLA-DRB1*15:03L
LQHRLYECLYRNRD

SEQ ID NO: 14592 - protein, 14 aa, Severe acute respiratory syndrome coronavirus 2
  REGION 1..14: note = Table B: HLA-DRB1*13:02L HLA-DRB1*04:05L HLA-DRB1*14:01L HLA-DPA1*01:03-B1*04:02L HLA-DRB1*12:01L HLA-DRB3*01:01L HLA-DPA1*02:01-B1*13:01L HLA-DPA1*01:02-B1*04:01L HLA-DRB1*15:03L
HRLYECLYRNRDVD

SEQ ID NO: 14593 - protein, 14 aa, Severe acute respiratory syndrome coronavirus 2
  REGION 1..14: note = Table B: HLA-DRB1*13:02L HLA-DRB1*04:05L HLA-DRB1*01:02L HLA-DRB3*01:01L
RLYECLYRNRDVDT

SEQ ID NO: 14594 - protein, 12 aa, Severe acute respiratory syndrome coronavirus 2
  REGION 1..12: note = Table B: HLA-DRB1*13:02L HLA-DRB1*01:02L HLA-DRB3*02:01L HLA-DQA1*05:05-B1*03:01L
RDVDTDFVNEFY

SEQ ID NO: 14595 - protein, 12 aa, Severe acute respiratory syndrome coronavirus 2
  REGION 1..12: note = Table B: HLA-DRB1*13:02L HLA-DRB1*01:02L HLA-DRB1*08:04L HLA-DRB1*11:04L HLA-DPA1*01:03-B1*04:02L HLA-DRB1*08:03L
EFYAYLRKHFSM

SEQ ID NO: 14596 - protein, 14 aa, Severe acute respiratory syndrome coronavirus 2
  REGION 1..14: note = Table B: HLA-DRB1*13:02L
YLRKHFSMMILSDD

SEQ ID NO: 14597 - protein, 13 aa, Severe acute respiratory syndrome coronavirus 2
  REGION 1..13: note = Table B: HLA-DRB1*13:02L HLA-DRB1*08:04L HLA-DRB4*01:01L
MMILSDDAVVCFN

SEQ ID NO: 14598 - protein, 14 aa, Severe acute respiratory syndrome coronavirus 2
  REGION 1..14: note = Table B: HLA-DRB1*13:02L HLA-DRB1*08:04L HLA-DRB3*02:01L HLA-DRB1*11:02L HLA-DRB4*01:01L HLA-DRB3*01:01L HLA-DRB1*04:08L
MILSDDAVVCFNST

SEQ ID NO: 14599 - protein, 14 aa, Severe acute respiratory syndrome coronavirus 2
  REGION 1..14: note = Table B: HLA-DRB1*13:02L HLA-DRB1*01:03L HLA-DRB1*04:04L HLA-DRB1*04:05L HLA-DRB1*14:01L HLA-DQA1*05:05-B1*03:19L HLA-DRB1*04:10L HLA-DPA1*03:01-B1*105:01L HLA-DQA1*03:01-B1*03:02L HLA-DQA1*05:05-B1*03:01L
  REGION 1..14: note = CONT. FROM ABOVE: HLA-DQA1*01:03-B1*06:01L HLA-DRB1*04:08L HLA-D QA1*02:01-B1*03:03L HLA-DRB1*15:01L
DAVVCFNSTYASQG

SEQ ID NO: 14600 - protein, 12 aa, Severe acute respiratory syndrome coronavirus 2
  REGION 1..12: note = Table B: HLA-DRB1*13:02L HLA-DRB1*13:03L HLA-DRB1*04:05L HLA-DRB1*01:02L HLA-DRB1*08:04L HLA-DPA1*01:03-B1*03:01L HLA-DQA1*01:01-B1*05:01L HLA-DRB1*08:01L HLA-DQA1*05:01-B1*02:01L HLA-DQA1*05:05-B1*03:116L
  REGION 1..12: note = CONT. FROM ABOVE: HLA-DPA1*01:03-B1*04:02L HLA-DRB1*12:01L HLA-D PA1*01:02-B1*04:01L HLA-DRB1*16:01L HLA-DRB1*04:08L HLA-DRB1*15: 03L
YASQGLVASIKN

SEQ ID NO: 14601 - protein, 13 aa, Severe acute respiratory syndrome coronavirus 2
  REGION 1..13: note = Table B: HLA-DRB1*13:02L HLA-DRB1*13:03L HLA-DRB1*08:04L HLA-DRB1*11:04L HLA-DRB1*08:01L
SQGLVASIKNFKS

SEQ ID NO: 14602 - protein, 14 aa, Severe acute respiratory syndrome coronavirus 2
  REGION 1..14: note = Table B: HLA-DRB1*13:02L HLA-DPA1*01:03-B1*104:01L
KNFKSVLYYQNNVF

SEQ ID NO: 14603 - protein, 13 aa, Severe acute respiratory syndrome coronavirus 2
  REGION 1..13: note = Table B: HLA-DRB1*13:02L HLA-DRB1*01:03L HLA-DRB1*08:04L HLA-DPA1*01:03-B1*03:01L HLA-DPA1*01:03-B1*04:02L HLA-DRB1*14:17L HLA-DPA1*01:02-B1*04:01L HLA-DQA1*01:03-B1*06:01L HLA-DRB1*04:08L
VLYYQNNVFMSEA

SEQ ID NO: 14604 - protein, 12 aa, Severe acute respiratory syndrome coronavirus 2
  REGION 1..12: note = Table B: HLA-DRB1*13:02L HLA-DRB1*04:04L HLA-DRB1*04:05L HLA-DRB1*01:02L HLA-DRB1*08:04L HLA-DPA1*01:03-B1*03:01L HLA-DPA1*03:01-B1*04:02L HLA-DRB1*14:01L HLA-DRB1*11:04L HLA-DRB1*08:01L HLA-DRB1*11:01L HLA-DQA1*01-B1*05L
  REGION 1..12: note = CONT. FROM ABOVE: HLA-DPA1*01:03-B1*04:01L HLA-DRB1*12:01L HLA-D RB1*14:54L HLA-DPA1*01:03-B1*02:01L HLA-DRB1*04:08L HLA-DRB1*15: 03L
YYQNNVFMSEAK

SEQ ID NO: 14605 - protein, 16 aa, Severe acute respiratory syndrome coronavirus 2
  REGION 1..16: note = Table B: HLA-DRB1*13:02L HLA-DRB1*04:04L HLA-DQA1*01:02-B1*06:02L HLA-DPA1*01:03-B1*03:01L HLA-DRB1*12:01L HLA-DPA1*02:01-B1*13:01L HLA-DPA1*03:01-B1*105:01L HLA-DPA1*01:03-B1*104:01L
  REGION 1..16: note = CONT. FROM ABOVE: HLA-DRB1*07:01L HLA-DRB1*15:03L
SEAKCWTETDLTKGPH

SEQ ID NO: 14606 - protein, 12 aa, Severe acute respiratory syndrome coronavirus 2
  REGION 1..12: note = Table B: HLA-DRB1*13:02L HLA-DRB3*02:01L HLA-DRB1*14:01L HLA-DRB1*09:01L HLA-DPA1*02:01-B1*13:01L HLA-DQA1*05:05-B1*03:01L
TETDLTKGPHEF

SEQ ID NO: 14607 - protein, 18 aa, Severe acute respiratory syndrome coronavirus 2
  REGION 1..18: note = Table B: HLA-DRB1*13:02L HLA-DRB1*01:02L HLA-DRB1*08:04L
TMLVKQGDDYVYLPYPDP

SEQ ID NO: 14608 - protein, 18 aa, Severe acute respiratory syndrome coronavirus 2
  REGION 1..18: note = Table B: HLA-DRB1*13:02L
MLVKQGDDYVYLPYPDPS

SEQ ID NO: 14609 - protein, 12 aa, Severe acute respiratory syndrome coronavirus 2
  REGION 1..12: note = Table B: HLA-DRB1*13:02L HLA-DRB1*04:04L HLA-DRB3*02:01L HLA-DRB3*01:01L HLA-DQA1*05:05-B1*03:01L HLA-DRB1*07:01L HLA-DRB1*04:08L HLA-DRB1*15:01L
YLPYPDPSRILG

SEQ ID NO: 14610 - protein, 13 aa, Severe acute respiratory syndrome coronavirus 2
  REGION 1..13: note = Table B: HLA-DRB1*13:02L HLA-DRB1*11:04L HLA-DRB1*14:02L HLA-DQA1*01:01-B1*05:01L HLA-DRB1*11:01L HLA-DQA1*05:01-B1*02:01L HLA-DPA1*02:01-B1*13:01L HLA-DPA1*03:01-B1*105:01L HLA-DPA1*01:02-B1*04:01L
  REGION 1..13: note = CONT. FROM ABOVE: HLA-DRB1*15:03L
IDAYPLTKHPNQE

SEQ ID NO: 14611 - protein, 14 aa, Severe acute respiratory syndrome coronavirus 2
  REGION 1..14: note = Table B: HLA-DRB1*13:02L HLA-DRB1*04:05L
VFHLYLQYIRKLHD

SEQ ID NO: 14612 - protein, 12 aa, Severe acute respiratory syndrome coronavirus 2
  REGION 1..12: note = Table B: HLA-DRB1*13:02L HLA-DRB1*01:03L HLA-DRB1*04:05L HLA-DRB1*01:02L HLA-DRB3*01:01L HLA-DPA1*01:02-B1*04:01L HLA-DRB1*16:01L HLA-DRB1*15:03L
LYLQYIRKLHDE

SEQ ID NO: 14613 - protein, 13 aa, Severe acute respiratory syndrome coronavirus 2
  REGION 1..13: note = Table B: HLA-DRB1*13:02L HLA-DRB1*04:02L HLA-DRB1*04:04L HLA-DPA1*03:01-B1*04:02L HLA-DQA1*01-B1*05L HLA-DRB1*04:10L HLA-DRB3*01:01L HLA-DPA1*02:01-B1*13:01L HLA-DPA1*03:01-B1*105:01L HLA-DQA1*03:01-B1*03:02L
  REGION 1..13: note = CONT. FROM ABOVE: HLA-DRB1*14:17L HLA-DPA1*01:02-B1*04:01L HLA-D RB1*08:03L HLA-DQA1*02:01-B1*03:03L
LQYIRKLHDELTG

SEQ ID NO: 14614 - protein, 15 aa, Severe acute respiratory syndrome coronavirus 2
  REGION 1..15: note = Table B: HLA-DRB1*13:02L HLA-DRB1*01:03L HLA-DRB1*01:01L HLA-DRB1*08:04L HLA-DRB3*02:01L HLA-DPA1*03:01-B1*04:02L HLA-DRB1*14:01L HLA-DRB1*14:02L HLA-DRB1*08:01L HLA-DRB1*09:01L HLA-DPA1*01:03-B1*04:02L HLA-DPA1*02:01-B1*13:01L
  REGION 1..15: note = CONT. FROM ABOVE: HLA-DPA1*01:03-B1*104:01L HLA-DRB1*10:01L HLA- DRB1*08:03L HLA-DRB1*15:01L
GHMLDMYSVMLTNDN

SEQ ID NO: 14615 - protein, 13 aa, Severe acute respiratory syndrome coronavirus 2
  REGION 1..13: note = Table B: HLA-DRB1*13:02L HLA-DRB1*04:05L HLA-DRB1*01:02L HLA-DRB4*03:01NL HLA-DRB1*08:04L HLA-DRB1*11:03L HLA-DRB1*11:04L HLA-DRB1*08:01L HLA-DRB1*11:01L HLA-DRB3*01:01L HLA-DRB1*14:54L HLA-DQA1*05:05-B1*03:01L HLA-DRB1*14:17L HLA-DRB1*04:08L
LTNDNTSRYWEPE

SEQ ID NO: 14616 - protein, 14 aa, Severe acute respiratory syndrome coronavirus 2
  REGION 1..14: note = Table B: HLA-DRB1*13:02L HLA-DPA1*01:03-B1*104:01L HLA-DRB1*04:08L
DNTSRYWEPEFYEA

SEQ ID NO: 14617 - protein, 14 aa, Severe acute respiratory syndrome coronavirus 2
  REGION 1..14: note = Table B: HLA-DRB1*13:02L HLA-DRB1*04:05L HLA-DRB1*08:04L HLA-DRB1*14:01L HLA-DRB1*11:04L HLA-DRB1*11:01L HLA-DRB3*01:01L
YWEPEFYEAMYTPH

SEQ ID NO: 14618 - protein, 16 aa, Severe acute respiratory syndrome coronavirus 2
  REGION 1..16: note = Table B: HLA-DRB1*13:02L HLA-DRB1*08:04L
HVISTSHKLVLSVNPY

SEQ ID NO: 14619 - protein, 13 aa, Severe acute respiratory syndrome coronavirus 2
  REGION 1..13: note = Table B: HLA-DRB1*13:02L HLA-DRB1*04:05L HLA-DRB3*01:01L HLA-DPA1*02:01-B1*13:01L HLA-DRB1*08:03L HLA-DRB1*15:03L
MSYYCKSHKPPIS

SEQ ID NO: 14620 - protein, 12 aa, Severe acute respiratory syndrome coronavirus 2
  REGION 1..12: note = Table B: HLA-DRB1*13:02L HLA-DRB1*01:02L HLA-DRB1*08:04L HLA-DPA1*01:03-B1*03:01L HLA-DPA1*03:01-B1*04:02L HLA-DRB1*14:01L HLA-DQA1*05:05-B1*03:19L HLA-DQA1*05:01-B1*02:01L HLA-DRB1*12:01L
DYILANTCTERL

SEQ ID NO: 14621 - protein, 13 aa, Severe acute respiratory syndrome coronavirus 2
  REGION 1..13: note = Table B: HLA-DRB1*13:02L HLA-DRB1*08:04L HLA-DPA1*01:03-B1*03:01L HLA-DRB1*14:01L HLA-DRB1*11:04L HLA-DRB1*08:01L HLA-DRB1*11:01L HLA-DPA1*01:03-B1*04:01L HLA-DRB1*04:10L HLA-DPA1*02:01-B1*13:01L HLA-DRB1*10:01L
LKLFAAETLKATE

SEQ ID NO: 14622 - protein, 12 aa, Severe acute respiratory syndrome coronavirus 2
  REGION 1..12: note = Table B: HLA-DRB1*13:02L HLA-DRB1*13:03L HLA-DRB1*04:05L HLA-DRB1*01:02L HLA-DRB1*08:04L HLA-DRB3*02:01L HLA-DPA1*01:03-B1*03:01L HLA-DPA1*03:01-B1*04:02L HLA-DRB1*14:01L HLA-DRB1*14:02L HLA-DQA1*01:01-B1*05:01L
  REGION 1..12: note = CONT. FROM ABOVE: HLA-DRB1*08:01L HLA-DPA1*01:03-B1*04:01L HLA-D RB1*04:10L HLA-DPA1*02:01-B1*13:01L HLA-DPA1*01:03-B1*02:01L HLA -DPA1*01:03-B1*104:01L HLA-DRB1*15:03L
FAAETLKATEET

SEQ ID NO: 14623 - protein, 11 aa, Severe acute respiratory syndrome coronavirus 2
  REGION 1..11: note = Table B: HLA-DRB1*13:02L HLA-DRB1*04:02L HLA-DRB1*08:01L HLA-DRB1*14:17L
ETLKATEETFK

SEQ ID NO: 14624 - protein, 10 aa, Severe acute respiratory syndrome coronavirus 2
  REGION 1..10: note = Table B: HLA-DRB1*13:02L HLA-DRB1*13:03L HLA-DRB1*12:01L HLA-DQA1*03:01-B1*03:02L HLA-DQA1*05:05-B1*03:01L
KLSYGIATVR

SEQ ID NO: 14625 - protein, 16 aa, Severe acute respiratory syndrome coronavirus 2
  REGION 1..16: note = Table B: HLA-DRB1*13:02L HLA-DRB1*04:02L HLA-DRB1*04:04L HLA-DRB1*14:01L HLA-DRB3*01:01L HLA-DPA1*02:01-B1*13:01L HLA-DPA1*03:01-B1*105:01L HLA-DRB1*07:01L
DRELHLSWEVGKPRPP

SEQ ID NO: 14626 - protein, 10 aa, Severe acute respiratory syndrome coronavirus 2
  REGION 1..10: note = Table B: HLA-DRB1*13:02L HLA-DRB1*13:03L HLA-DRB4*03:01NL HLA-DRB1*08:01L HLA-DQA1*01-B1*05L HLA-DRB1*12:01L HLA-DQA1*03:01-B1*03:02L HLA-DQA1*05:05-B1*03:01L HLA-DQA1*02:01-B1*03:03L
GDYGDAVVYR

SEQ ID NO: 14627 - protein, 12 aa, Severe acute respiratory syndrome coronavirus 2
  REGION 1..12: note = Table B: HLA-DRB1*13:02L HLA-DRB1*01:03L HLA-DRB3*02:01L HLA-DRB1*11:03L HLA-DRB1*14:02L HLA-DQA1*05:05-B1*03:01L HLA-DRB1*04:08L
GDYFVLTSHTVM

SEQ ID NO: 14628 - protein, 12 aa, Severe acute respiratory syndrome coronavirus 2
  REGION 1..12: note = Table B: HLA-DRB1*13:02L HLA-DRB1*01:03L HLA-DRB1*01:01L HLA-DRB3*02:01L HLA-DPA1*01:03-B1*03:01L HLA-DRB1*11:03L HLA-DRB1*14:02L HLA-DRB1*09:01L HLA-DQA1*05:05-B1*03:01L HLA-DRB1*07:01L HLA-DRB1*10:01L HLA-DRB1*04:08L
DYFVLTSHTVMP

SEQ ID NO: 14629 - protein, 14 aa, Severe acute respiratory syndrome coronavirus 2
  REGION 1..14: note = Table B: HLA-DRB1*13:02L HLA-DRB1*01:03L HLA-DRB1*04:04L HLA-DRB1*04:05L HLA-DRB1*01:02L HLA-DPA1*01:03-B1*03:01L HLA-DRB1*08:01L HLA-DPA1*01:03-B1*04:02L HLA-DRB1*12:01L HLA-DPA1*01:03-B1*104:01L HLA-DPA1*01:02-B1*04:01L
  REGION 1..14: note = CONT. FROM ABOVE: HLA-DRB1*16:01L HLA-DRB1*04:08L HLA-DRB1*15:03 L
VLTSHTVMPLSAPT

SEQ ID NO: 14630 - protein, 12 aa, Severe acute respiratory syndrome coronavirus 2
  REGION 1..12: note = Table B: HLA-DRB1*13:02L HLA-DRB1*04:05L HLA-DRB4*03:01NL HLA-DPA1*01:03-B1*03:01L HLA-DRB1*11:03L HLA-DRB1*04:10L HLA-DRB1*12:02L HLA-DRB1*14:54L HLA-DQA1*05:05-B1*03:01L
SHTVMPLSAPTL

SEQ ID NO: 14631 - protein, 13 aa, Severe acute respiratory syndrome coronavirus 2
  REGION 1..13: note = Table B: HLA-DRB1*13:02L HLA-DRB1*04:05L HLA-DRB1*12:02L HLA-DRB1*04:08L
TVMPLSAPTLVPQ

SEQ ID NO: 14632 - protein, 14 aa, Severe acute respiratory syndrome coronavirus 2
  REGION 1..14: note = Table B: HLA-DRB1*13:02L HLA-DRB1*01:02L HLA-DRB1*04:08L
MPLSAPTLVPQEHY

SEQ ID NO: 14633 - protein, 12 aa, Severe acute respiratory syndrome coronavirus 2
  REGION 1..12: note = Table B: HLA-DRB1*13:02L HLA-DRB1*04:05L HLA-DRB1*01:02L HLA-DQA1*01:01-B1*05:01L HLA-DRB1*08:01L HLA-DRB1*14:54L HLA-DRB1*14:17L HLA-DRB1*04:08L
APTLVPQEHYVR

SEQ ID NO: 14634 - protein, 14 aa, Severe acute respiratory syndrome coronavirus 2
  REGION 1..14: note = Table B: HLA-DRB1*13:02L HLA-DRB1*01:03L HLA-DRB1*01:02L HLA-DRB1*03:01L HLA-DRB1*12:01L HLA-DRB3*01:01L HLA-DRB1*04:08L
PTLVPQEHYVRITG

SEQ ID NO: 14635 - protein, 15 aa, Severe acute respiratory syndrome coronavirus 2
  REGION 1..15: note = Table B: HLA-DRB1*13:02L HLA-DRB1*04:04L HLA-DRB4*03:01NL HLA-DRB1*08:04L HLA-DRB3*02:01L HLA-DPA1*01:03-B1*03:01L HLA-DPA1*03:01-B1*04:02L HLA-DRB1*11:03L HLA-DRB1*11:04L HLA-DRB1*14:02L HLA-DQA1*01:01-B1*05:01L HLA-DRB1*11:01L
  REGION 1..15: note = CONT. FROM ABOVE: HLA-DQA1*05:01-B1*02:01L HLA-DRB1*04:10L HLA-D PA1*01:03-B1*04:02L HLA-DRB1*12:02L HLA-DRB3*01:01L HLA-DPA1*02: 01-B1*13:01L HLA-DRB1*14:54L HLA-DPA1*01:03-B1*02:01L HLA-DQA1*0 5:05-B1*03:01L HLA-DRB1*07:01L HLA-DRB1*10:01L
  REGION 1..15: note = CONT. FROM ABOVE: HLA-DQA1*01:03-B1*06:01L HLA-DRB1*08:02L HLA-D RB1*08:03L
VPQEHYVRITGLYPT

SEQ ID NO: 14636 - protein, 13 aa, Severe acute respiratory syndrome coronavirus 2
  REGION 1..13: note = Table B: HLA-DRB1*13:02L HLA-DRB1*13:03L HLA-DRB1*01:03L HLA-DRB1*04:04L HLA-DRB1*01:02L HLA-DRB1*08:04L HLA-DPA1*01:03-B1*03:01L HLA-DPA1*03:01-B1*04:02L HLA-DRB1*14:01L HLA-DRB1*11:04L HLA-DQA1*01:01-B1*05:01L
  REGION 1..13: note = CONT. FROM ABOVE: HLA-DRB1*08:01L HLA-DRB1*12:01L HLA-DRB1*12:02 L HLA-DPA1*02:01-B1*13:01L HLA-DRB1*14:54L HLA-DPA1*01:03-B1*104 :01L HLA-DRB1*10:01L HLA-DRB1*04:08L HLA-DRB1*08:03L HLA-DRB1*15 :03L
ITGLYPTLNISDE

SEQ ID NO: 14637 - protein, 12 aa, Severe acute respiratory syndrome coronavirus 2
  REGION 1..12: note = Table B: HLA-DRB1*13:02L HLA-DRB1*14:54L HLA-DRB1*16:01L
SNVANYQKVGMQ

SEQ ID NO: 14638 - protein, 10 aa, Severe acute respiratory syndrome coronavirus 2
  REGION 1..10: note = Table B: HLA-DRB1*13:02L HLA-DRB1*13:03L HLA-DRB1*04:02L HLA-DRB1*01:01L HLA-DRB4*03:01NL HLA-DRB1*08:01L HLA-DRB1*12:01L HLA-DQA1*03:01-B1*03:02L HLA-DQA1*05:05-B1*03:01L HLA-DRB1*14:17L HLA-DRB1*16:01L HLA-DQA1*02:01-B1*03:03L
ANYQKVGMQK

SEQ ID NO: 14639 - protein, 14 aa, Severe acute respiratory syndrome coronavirus 2
  REGION 1..14: note = Table B: HLA-DRB1*13:02L HLA-DRB1*04:05L HLA-DRB1*01:02L HLA-DPA1*01:03-B1*02:01L HLA-DQA1*05:05-B1*03:01L HLA-DRB1*04:08L
KSHFAIGLALYYPS

SEQ ID NO: 14640 - protein, 15 aa, Severe acute respiratory syndrome coronavirus 2
  REGION 1..15: note = Table B: HLA-DRB1*13:02L HLA-DRB1*04:04L HLA-DRB1*04:05L HLA-DRB1*11:01L HLA-DRB3*01:01L
SHFAIGLALYYPSAR

SEQ ID NO: 14641 - protein, 14 aa, Severe acute respiratory syndrome coronavirus 2
  REGION 1..14: note = Table B: HLA-DRB1*13:02L HLA-DPA1*01:03-B1*03:01L HLA-DRB1*08:01L
AIGLALYYPSARIV

SEQ ID NO: 14642 - protein, 14 aa, Severe acute respiratory syndrome coronavirus 2
  REGION 1..14: note = Table B: HLA-DRB1*13:02L HLA-DPA1*01:03-B1*104:01L HLA-DRB1*04:08L HLA-DRB1*15:03L
YPSARIVYTACSHA

SEQ ID NO: 14643 - protein, 16 aa, Severe acute respiratory syndrome coronavirus 2
  REGION 1..16: note = Table B: HLA-DRB1*13:02L HLA-DPA1*02:01-B1*13:01L HLA-DPA1*03:01-B1*105:01L HLA-DRB1*16:01L
AVDALCEKALKYLPID

SEQ ID NO: 14644 - protein, 15 aa, Severe acute respiratory syndrome coronavirus 2
  REGION 1..15: note = Table B: HLA-DRB1*13:02L HLA-DRB3*01:01L
ALKYLPIDKCSRIIP

SEQ ID NO: 14645 - protein, 15 aa, Severe acute respiratory syndrome coronavirus 2
  REGION 1..15: note = Table B: HLA-DRB1*13:02L HLA-DRB1*04:05L HLA-DRB1*08:04L HLA-DRB1*11:04L HLA-DRB1*11:01L HLA-DRB1*12:01L
LKYLPIDKCSRIIPA

SEQ ID NO: 14646 - protein, 16 aa, Severe acute respiratory syndrome coronavirus 2
  REGION 1..16: note = Table B: HLA-DRB1*13:02L HLA-DRB1*01:03L HLA-DRB1*04:05L HLA-DQA1*01:02-B1*06:02L HLA-DRB1*12:01L HLA-DPA1*02:01-B1*13:01L HLA-DRB1*15:03L
IPARARVECFDKFKVN

SEQ ID NO: 14647 - protein, 14 aa, Severe acute respiratory syndrome coronavirus 2
  REGION 1..14: note = Table B: HLA-DRB1*13:02L HLA-DRB1*01:03L HLA-DRB1*04:05L HLA-DRB1*01:02L HLA-DRB1*11:04L HLA-DRB1*08:01L HLA-DRB1*11:01L HLA-DRB1*12:01L HLA-DRB3*01:01L HLA-DRB1*04:08L HLA-DRB1*15:03L
ARVECFDKFKVNST

SEQ ID NO: 14648 - protein, 14 aa, Severe acute respiratory syndrome coronavirus 2
  REGION 1..14: note = Table B: HLA-DRB1*13:02L HLA-DRB1*04:02L HLA-DRB1*01:02L HLA-DRB4*03:01NL HLA-DPA1*01:03-B1*03:01L HLA-DPA1*01:03-B1*04:02L HLA-DPA1*02:01-B1*13:01L
ALPETTADIVVFDE

SEQ ID NO: 14649 - protein, 13 aa, Severe acute respiratory syndrome coronavirus 2
  REGION 1..13: note = Table B: HLA-DRB1*13:02L HLA-DRB1*01:03L HLA-DRB1*04:04L HLA-DRB1*04:05L HLA-DQA1*01:02-B1*06:02L HLA-DRB3*02:01L HLA-DRB1*04:08L HLA-DRB1*15:01L
ADIVVFDEISMAT

SEQ ID NO: 14650 - protein, 13 aa, Severe acute respiratory syndrome coronavirus 2
  REGION 1..13: note = Table B: HLA-DRB1*13:02L HLA-DRB1*04:05L HLA-DQA1*01:02-B1*06:02L HLA-DRB1*14:01L HLA-DRB1*08:01L HLA-DRB3*01:01L
DLSVVNARLRAKH

SEQ ID NO: 14651 - protein, 16 aa, Severe acute respiratory syndrome coronavirus 2
  REGION 1..16: note = Table B: HLA-DRB1*13:02L HLA-DRB3*01:01L HLA-DPA1*02:01-B1*13:01L
VNARLRAKHYVYIGDP

SEQ ID NO: 14652 - protein, 16 aa, Severe acute respiratory syndrome coronavirus 2
  REGION 1..16: note = Table B: HLA-DRB1*13:02L HLA-DRB1*04:04L HLA-DRB1*04:05L HLA-DRB1*14:01L HLA-DPA1*02:01-B1*13:01L
NARLRAKHYVYIGDPA

SEQ ID NO: 14653 - protein, 13 aa, Severe acute respiratory syndrome coronavirus 2
  REGION 1..13: note = Table B: HLA-DRB1*13:02L HLA-DRB1*14:01L HLA-DRB1*14:02L
HYVYIGDPAQLPA

SEQ ID NO: 14654 - protein, 13 aa, Severe acute respiratory syndrome coronavirus 2
  REGION 1..13: note = Table B: HLA-DRB1*13:02L HLA-DQA1*01:02-B1*06:02L HLA-DRB1*01:02L HLA-DRB1*08:04L HLA-DRB3*02:01L HLA-DPA1*01:03-B1*03:01L HLA-DPA1*03:01-B1*04:02L HLA-DRB1*14:01L HLA-DRB1*14:02L HLA-DRB1*12:02L
YVYIGDPAQLPAP

SEQ ID NO: 14655 - protein, 11 aa, Severe acute respiratory syndrome coronavirus 2
  REGION 1..11: note = Table B: HLA-DRB1*13:02L HLA-DQA1*01:02-B1*06:02L HLA-DRB1*01:02L HLA-DRB1*08:77L HLA-DRB3*02:01L HLA-DPA1*01:03-B1*03:01L HLA-DPA1*03:01-B1*04:02L HLA-DRB1*14:01L HLA-DRB1*11:03L HLA-DRB1*11:04L HLA-DRB1*14:02L
  REGION 1..11: note = CONT. FROM ABOVE: HLA-DQA1*01:01-B1*05:01L HLA-DRB1*08:01L HLA-D RB5*01:01L HLA-DQA1*05:05-B1*03:19L HLA-DPA1*01:03-B1*04:01L HLA -DQA1*05:05-B1*03:116L HLA-DRB1*09:01L HLA-DPA1*01:03-B1*04:02L HLA-DRB1*12:01L HLA-DRB1*12:02L HLA-DRB3*01:01L
  REGION 1..11: note = CONT. FROM ABOVE: HLA-DPA1*02:01-B1*13:01L HLA-DPA1*03:01-B1*105 :01L HLA-DRB1*14:54L HLA-DRB1*14:17L HLA-DPA1*01:02-B1*04:01L HL A-DRB1*10:01L HLA-DRB1*15:03L
DPAQLPAPRTL

SEQ ID NO: 14656 - protein, 12 aa, Severe acute respiratory syndrome coronavirus 2
  REGION 1..12: note = Table B: HLA-DRB1*13:02L HLA-DRB1*01:02L HLA-DRB3*02:01L HLA-DRB1*12:02L HLA-DQA1*05:05-B1*03:01L
EIVDTVSALVYD

SEQ ID NO: 14657 - protein, 12 aa, Severe acute respiratory syndrome coronavirus 2
  REGION 1..12: note = Table B: HLA-DRB1*13:02L HLA-DRB1*13:03L HLA-DRB1*01:03L HLA-DRB1*04:05L HLA-DRB1*01:02L HLA-DRB4*03:01NL HLA-DRB1*08:04L HLA-DRB1*08:77L HLA-DRB1*11:03L HLA-DRB1*11:04L HLA-DRB1*14:02L HLA-DRB1*08:01L HLA-DRB1*11:01L HLA-DQA1*05:01-B1*02:01L
  REGION 1..12: note = CONT. FROM ABOVE: HLA-DRB1*12:01L HLA-DRB1*12:02L HLA-DRB3*01:01 L HLA-DPA1*01:02-B1*04:01L HLA-DRB1*04:08L HLA-DRB1*08:03L HLA-D RB1*15:03L
VSALVYDNKLKA

SEQ ID NO: 14658 - protein, 12 aa, Severe acute respiratory syndrome coronavirus 2
  REGION 1..12: note = Table B: HLA-DRB1*13:02L HLA-DRB1*04:05L HLA-DQA1*01:02-B1*06:02L HLA-DRB1*03:01L HLA-DRB1*14:01L HLA-DRB1*11:01L HLA-DRB1*12:01L HLA-DQA1*02:01-B1*03:03L HLA-DRB1*15:03L
VYDNKLKAHKDK

SEQ ID NO: 14659 - protein, 12 aa, Severe acute respiratory syndrome coronavirus 2
  REGION 1..12: note = Table B: HLA-DRB1*13:02L HLA-DRB1*13:03L HLA-DRB1*04:05L HLA-DPA1*01:03-B1*03:01L HLA-DPA1*03:01-B1*04:02L HLA-DRB1*14:01L HLA-DRB1*08:01L HLA-DQA1*05:05-B1*03:19L HLA-DQA1*05:01-B1*02:01L HLA-DRB1*12:01L
  REGION 1..12: note = CONT. FROM ABOVE: HLA-DPA1*02:01-B1*13:01L HLA-DRB1*15:03L
MFYKGVITHDVS

SEQ ID NO: 14660 - protein, 11 aa, Severe acute respiratory syndrome coronavirus 2
  REGION 1..11: note = Table B: HLA-DRB1*13:02L HLA-DRB1*13:03L HLA-DRB1*08:01L HLA-DRB1*12:01L
ITHDVSSAINR

SEQ ID NO: 14661 - protein, 10 aa, Severe acute respiratory syndrome coronavirus 2
  REGION 1..10: note = Table B: HLA-DRB1*13:02L HLA-DRB1*13:03L HLA-DRB1*01:03L HLA-DRB1*08:01L HLA-DRB1*12:01L HLA-DQA1*03:01-B1*03:02L HLA-DRB1*14:17L HLA-DQA1*02:01-B1*03:03L
INRPQIGVVR

SEQ ID NO: 14662 - protein, 16 aa, Severe acute respiratory syndrome coronavirus 2
  REGION 1..16: note = Table B: HLA-DRB1*13:02L HLA-DRB1*04:04L HLA-DRB1*01:01L HLA-DRB1*07:01L HLA-DRB1*15:01L
RPQIGVVREFLTRNPA

SEQ ID NO: 14663 - protein, 14 aa, Severe acute respiratory syndrome coronavirus 2
  REGION 1..14: note = Table B: HLA-DRB1*13:02L HLA-DRB1*04:04L HLA-DRB1*11:04L HLA-DRB1*11:01L HLA-DRB1*07:01L
VVREFLTRNPAWRK

SEQ ID NO: 14664 - protein, 12 aa, Severe acute respiratory syndrome coronavirus 2
  REGION 1..12: note = Table B: HLA-DRB1*13:02L HLA-DRB1*04:05L HLA-DRB1*12:01L HLA-DRB3*01:01L HLA-DPA1*01:02-B1*04:01L HLA-DRB1*15:03L
EFLTRNPAWRKA

SEQ ID NO: 14665 - protein, 13 aa, Severe acute respiratory syndrome coronavirus 2
  REGION 1..13: note = Table B: HLA-DRB1*13:02L HLA-DRB1*13:03L HLA-DRB1*04:04L HLA-DRB4*03:01NL HLA-DRB1*08:04L HLA-DPA1*01:03-B1*03:01L HLA-DRB1*14:01L HLA-DRB1*08:01L HLA-DPA1*01:03-B1*04:01L HLA-DPA1*01:03-B1*04:02L HLA-DPA1*02:01-B1*13:01L
RKAVFISPYNSQN

SEQ ID NO: 14666 - protein, 14 aa, Severe acute respiratory syndrome coronavirus 2
  REGION 1..14: note = Table B: HLA-DRB1*13:02L HLA-DRB1*08:04L HLA-DPA1*01:03-B1*04:01L HLA-DPA1*01:03-B1*04:02L HLA-DPA1*01:03-B1*104:01L HLA-DRB1*10:01L
KAVFISPYNSQNAV

SEQ ID NO: 14667 - protein, 12 aa, Severe acute respiratory syndrome coronavirus 2
  REGION 1..12: note = Table B: HLA-DRB1*13:02L HLA-DQA1*01:02-B1*06:02L HLA-DRB1*01:01L HLA-DRB1*08:01L HLA-DQA1*05:05-B1*03:01L HLA-DRB1*10:01L HLA-DRB1*08:03L
FISPYNSQNAVA

SEQ ID NO: 14668 - protein, 12 aa, Severe acute respiratory syndrome coronavirus 2
  REGION 1..12: note = Table B: HLA-DRB1*13:02L HLA-DRB1*04:04L HLA-DRB1*08:04L HLA-DRB1*08:77L HLA-DRB3*02:01L HLA-DPA1*01:03-B1*03:01L HLA-DRB1*11:03L HLA-DRB1*11:04L HLA-DRB1*12:02L HLA-DRB1*07:01L
SKILGLPTQTVD

SEQ ID NO: 14669 - protein, 11 aa, Severe acute respiratory syndrome coronavirus 2
  REGION 1..11: note = Table B: HLA-DRB1*13:02L HLA-DRB1*04:04L HLA-DRB1*08:77L HLA-DRB1*11:03L HLA-DRB1*11:04L HLA-DRB1*12:02L HLA-DRB1*10:01L HLA-DRB1*04:08L HLA-DRB1*08:03L
ILGLPTQTVDS

SEQ ID NO: 14670 - protein, 11 aa, Severe acute respiratory syndrome coronavirus 2
  REGION 1..11: note = Table B: HLA-DRB1*13:02L HLA-DRB1*04:02L HLA-DRB1*11:01L HLA-DPA1*03:01-B1*105:01L HLA-DQA1*02:01-B1*03:03L
QTVDSSQGSEY

SEQ ID NO: 14671 - protein, 14 aa, Severe acute respiratory syndrome coronavirus 2
  REGION 1..14: note = Table B: HLA-DRB1*13:02L HLA-DRB1*13:03L HLA-DRB1*04:02L HLA-DRB1*04:04L HLA-DRB1*04:05L HLA-DRB1*14:01L HLA-DRB1*11:04L HLA-DRB1*14:02L HLA-DRB1*11:01L HLA-DQA1*05:05-B1*03:19L HLA-DRB3*01:01L HLA-DRB1*10:01L HLA-DRB1*08:03L
GSEYDYVIFTQTTE

SEQ ID NO: 14672 - protein, 10 aa, Severe acute respiratory syndrome coronavirus 2
  REGION 1..10: note = Table B: HLA-DRB1*13:02L HLA-DRB1*13:03M HLA-DRB1*01:01L HLA-DRB4*03:01NL HLA-DRB1*14:01L HLA-DRB1*11:04L HLA-DRB1*08:01M HLA-DRB5*01:01L HLA-DRB1*12:01L HLA-DQA1*03:01-B1*03:02M HLA-DQA1*05:05-B1*03:01M HLA-DQA1*01:03-B1*06:01L
  REGION 1..10: note = CONT. FROM ABOVE: HLA-DQA1*02:01-B1*03:03L HLA-DRB1*15:01L
ETAHSCNVNR

SEQ ID NO: 14673 - protein, 11 aa, Severe acute respiratory syndrome coronavirus 2
  REGION 1..11: note = Table B: HLA-DRB1*13:02L HLA-DRB1*13:03L HLA-DRB1*01:03L HLA-DRB1*08:01L HLA-DRB1*12:01L HLA-DRB1*16:01L
NVNRFNVAITR

SEQ ID NO: 14674 - protein, 11 aa, Severe acute respiratory syndrome coronavirus 2
  REGION 1..11: note = Table B: HLA-DRB1*13:02L HLA-DRB1*04:05L HLA-DRB1*01:02L HLA-DQA1*01:01-B1*05:01L HLA-DRB1*08:01L HLA-DQA1*05:05-B1*03:19L HLA-DQA1*05:01-B1*02:01L HLA-DRB1*12:01L HLA-DPA1*03:01-B1*105:01L HLA-DRB1*14:54L
  REGION 1..11: note = CONT. FROM ABOVE: HLA-DQA1*05:05-B1*03:01L HLA-DRB1*04:08L HLA-D RB1*15:03L
FNVAITRAKVG

SEQ ID NO: 14675 - protein, 12 aa, Severe acute respiratory syndrome coronavirus 2
  REGION 1..12: note = Table B: HLA-DRB1*13:02L HLA-DRB1*04:05L HLA-DPA1*01:03-B1*03:01L HLA-DPA1*03:01-B1*04:02L HLA-DRB1*14:54L
NVAITRAKVGIL

SEQ ID NO: 14676 - protein, 14 aa, Severe acute respiratory syndrome coronavirus 2
  REGION 1..14: note = Table B: HLA-DRB1*13:02L HLA-DRB1*04:04L HLA-DPA1*01:03-B1*104:01L HLA-DPA1*01:02-B1*04:01L HLA-DRB1*07:01L HLA-DRB1*04:08L
TRAKVGILCIMSDR

SEQ ID NO: 14677 - protein, 14 aa, Severe acute respiratory syndrome coronavirus 2
  REGION 1..14: note = Table B: HLA-DRB1*13:02L HLA-DRB1*04:04L HLA-DPA1*01:03-B1*03:01L HLA-DPA1*01:03-B1*104:01L
RAKVGILCIMSDRD

SEQ ID NO: 14678 - protein, 14 aa, Severe acute respiratory syndrome coronavirus 2
  REGION 1..14: note = Table B: HLA-DRB1*13:02L HLA-DRB1*04:05L HLA-DRB1*01:02L HLA-DRB1*08:04L
DRDLYDKLQFTSLE

SEQ ID NO: 14679 - protein, 15 aa, Severe acute respiratory syndrome coronavirus 2
  REGION 1..15: note = Table B: HLA-DRB1*13:02L
DLYDKLQFTSLEIPR

SEQ ID NO: 14680 - protein, 12 aa, Severe acute respiratory syndrome coronavirus 2
  REGION 1..12: note = Table B: HLA-DRB1*13:02L HLA-DRB1*13:03L HLA-DRB1*01:03L HLA-DRB1*04:04L HLA-DRB1*04:05L HLA-DRB4*03:01NL HLA-DRB1*08:77L HLA-DRB3*02:01L HLA-DPA1*01:03-B1*03:01L HLA-DPA1*03:01-B1*04:02L HLA-DRB1*14:01L HLA-DRB1*11:03L
  REGION 1..12: note = CONT. FROM ABOVE: HLA-DRB1*14:02L HLA-DQA1*01-B1*05L HLA-DQA1*05 :05-B1*03:19L HLA-DRB1*04:10L HLA-DRB1*09:01L HLA-DRB1*12:02L HL A-DPA1*02:01-B1*13:01L HLA-DRB1*14:54L HLA-DPA1*01:02-B1*04:01L HLA-DRB1*07:01L HLA-DRB1*10:01L HLA-DRB1*04:08L
RNVATLQAENVT

SEQ ID NO: 14681 - protein, 12 aa, Severe acute respiratory syndrome coronavirus 2
  REGION 1..12: note = Table B: HLA-DRB1*13:02L HLA-DRB1*01:01L HLA-DRB1*08:77L HLA-DRB1*14:01L HLA-DRB1*11:03L HLA-DRB1*14:02L HLA-DRB1*12:02L HLA-DRB1*07:01L
NVATLQAENVTG

SEQ ID NO: 14682 - protein, 12 aa, Severe acute respiratory syndrome coronavirus 2
  REGION 1..12: note = Table B: HLA-DRB1*13:02L HLA-DRB1*08:77L HLA-DRB3*02:01L HLA-DPA1*01:03-B1*03:01L HLA-DQA1*01-B1*05L HLA-DPA1*01:03-B1*04:01L HLA-DRB1*12:02L HLA-DRB1*07:01L
VATLQAENVTGL

SEQ ID NO: 14683 - protein, 13 aa, Severe acute respiratory syndrome coronavirus 2
  REGION 1..13: note = Table B: HLA-DRB1*13:02L HLA-DRB1*04:02L HLA-DRB1*11:03L HLA-DRB1*12:01L HLA-DRB3*01:01L HLA-DRB1*14:54L
TGLFKDCSKVITG

SEQ ID NO: 14684 - protein, 11 aa, Severe acute respiratory syndrome coronavirus 2
  REGION 1..11: note = Table B: HLA-DRB1*13:02L HLA-DQA1*01:02-B1*06:02L HLA-DPA1*03:01-B1*04:02L HLA-DQA1*05:05-B1*03:116L HLA-DQA1*01:03-B1*06:01L HLA-DRB1*15:03L
GLHPTQAPTHL

SEQ ID NO: 14685 - protein, 11 aa, Severe acute respiratory syndrome coronavirus 2
  REGION 1..11: note = Table B: HLA-DRB1*13:02L HLA-DRB4*03:01NL HLA-DRB1*03:01L HLA-DRB1*14:01L HLA-DQA1*05:01-B1*02:01L HLA-DRB3*01:01L HLA-DRB1*14:54L HLA-DRB1*04:08L
LSVDTKFKTEG

SEQ ID NO: 14686 - protein, 15 aa, Severe acute respiratory syndrome coronavirus 2
  REGION 1..15: note = Table B: HLA-DRB1*13:02L HLA-DRB1*04:05L HLA-DRB1*03:01L HLA-DRB1*12:01L HLA-DRB1*04:08L
IPGIPKDMTYRRLIS

SEQ ID NO: 14687 - protein, 11 aa, Severe acute respiratory syndrome coronavirus 2
  REGION 1..11: note = Table B: HLA-DRB1*13:02L HLA-DRB1*13:03L HLA-DQA1*01:02-B1*06:02L HLA-DRB1*01:02L HLA-DRB3*02:01L HLA-DPA1*01:03-B1*03:01L HLA-DRB1*14:01L HLA-DPA1*01:03-B1*04:01L HLA-DPA1*01:03-B1*04:02L
MNYQVNGYPNM

SEQ ID NO: 14688 - protein, 10 aa, Severe acute respiratory syndrome coronavirus 2
  REGION 1..10: note = Table B: HLA-DRB1*13:02L HLA-DRB1*13:03L HLA-DRB1*01:01L HLA-DRB4*03:01NL HLA-DRB3*02:01L HLA-DRB1*11:04L HLA-DRB1*08:01L HLA-DRB5*01:01L HLA-DPA1*01:03-B1*04:02L HLA-DRB1*12:01L HLA-DRB1*12:02L HLA-DQA1*03:01-B1*03:02M
  REGION 1..10: note = CONT. FROM ABOVE: HLA-DQA1*05:05-B1*03:01L HLA-DRB1*14:17L HLA-D QA1*01:03-B1*06:01L HLA-DQA1*02:01-B1*03:03L
NGYPNMFITR

SEQ ID NO: 14689 - protein, 12 aa, Severe acute respiratory syndrome coronavirus 2
  REGION 1..12: note = Table B: HLA-DRB1*13:02L HLA-DRB1*04:05L HLA-DQA1*01:02-B1*06:02L HLA-DRB1*14:01L HLA-DRB3*01:01L HLA-DRB1*15:03L
FITREEAIRHVR

SEQ ID NO: 14690 - protein, 14 aa, Severe acute respiratory syndrome coronavirus 2
  REGION 1..14: note = Table B: HLA-DRB1*13:02L HLA-DRB1*04:05L HLA-DRB1*01:01L HLA-DRB1*08:04L HLA-DRB1*11:04L HLA-DRB1*11:01L HLA-DRB3*01:01L HLA-DPA1*02:01-B1*13:01L HLA-DRB1*07:01L HLA-DRB1*15:01L
EEAIRHVRAWIGFD

SEQ ID NO: 14691 - protein, 13 aa, Severe acute respiratory syndrome coronavirus 2
  REGION 1..13: note = Table B: HLA-DRB1*13:02L HLA-DRB1*01:03L HLA-DRB1*04:04L HLA-DPA1*01:03-B1*03:01L HLA-DPA1*03:01-B1*04:02L HLA-DRB1*08:01L HLA-DPA1*03:01-B1*105:01L HLA-DQA1*03:01-B1*03:02L HLA-DPA1*01:02-B1*04:01L
  REGION 1..13: note = CONT. FROM ABOVE: HLA-DRB1*07:01L
RHVRAWIGFDVEG

SEQ ID NO: 14692 - protein, 12 aa, Severe acute respiratory syndrome coronavirus 2
  REGION 1..12: note = Table B: HLA-DRB1*13:02L HLA-DRB1*04:02L HLA-DPA1*01:03-B1*03:01L HLA-DRB1*14:01L HLA-DQA1*01:01-B1*05:01L HLA-DQA1*01-B1*05L HLA-DRB1*12:01L HLA-DQA1*05:05-B1*03:01L HLA-DRB1*16:01L
EAVGTNLPLQLG

SEQ ID NO: 14693 - protein, 13 aa, Severe acute respiratory syndrome coronavirus 2
  REGION 1..13: note = Table B: HLA-DRB1*13:02L HLA-DRB1*13:03L HLA-DRB1*04:02L HLA-DRB1*04:05L HLA-DRB1*01:02L HLA-DRB4*03:01NL HLA-DRB1*08:77L HLA-DRB3*02:01L HLA-DPA1*01:03-B1*03:01L HLA-DPA1*03:01-B1*04:02L HLA-DRB1*14:01L HLA-DRB1*11:03L
  REGION 1..13: note = CONT. FROM ABOVE: HLA-DPA1*01:03-B1*04:01L HLA-DRB1*09:01L HLA-D RB1*12:01L HLA-DRB1*12:02L HLA-DRB1*14:54L HLA-DRB1*14:17L HLA-D RB1*07:01L HLA-DRB1*16:01L HLA-DRB1*15:03L
LPLQLGFSTGVNL

SEQ ID NO: 14694 - protein, 10 aa, Severe acute respiratory syndrome coronavirus 2
  REGION 1..10: note = Table B: HLA-DRB1*13:02L HLA-DRB1*13:03L HLA-DRB4*03:01NL HLA-DRB1*08:01L HLA-DRB5*01:01L HLA-DRB1*12:01L HLA-DQA1*03:01-B1*03:02L HLA-DQA1*05:05-B1*03:01L
DTPNNTDFSR

SEQ ID NO: 14695 - protein, 14 aa, Severe acute respiratory syndrome coronavirus 2
  REGION 1..14: note = Table B: HLA-DRB1*13:02L HLA-DRB1*04:04L HLA-DRB1*11:04L HLA-DRB1*11:01L HLA-DRB3*01:01L HLA-DPA1*02:01-B1*13:01L HLA-DPA1*03:01-B1*105:01L HLA-DQA1*05:05-B1*03:01L HLA-DRB1*07:01L HLA-DRB1*10:01L HLA-DQA1*01:03-B1*06:01L
  REGION 1..14: note = CONT. FROM ABOVE: HLA-DRB1*08:03L
NTDFSRVSAKPPPG

SEQ ID NO: 14696 - protein, 14 aa, Severe acute respiratory syndrome coronavirus 2
  REGION 1..14: note = Table B: HLA-DRB1*13:02L HLA-DRB1*04:04L HLA-DPA1*01:03-B1*03:01L HLA-DRB1*14:01L HLA-DQA1*01:01-B1*05:01L HLA-DRB1*11:01L HLA-DQA1*01-B1*05L HLA-DPA1*03:01-B1*105:01L HLA-DRB1*14:54L
  REGION 1..14: note = CONT. FROM ABOVE: HLA-DPA1*01:03-B1*104:01L HLA-DPA1*01:02-B1*04 :01L HLA-DRB1*07:01L HLA-DRB1*08:03L HLA-DRB1*15:03L
DFSRVSAKPPPGDQ

SEQ ID NO: 14697 - protein, 16 aa, Severe acute respiratory syndrome coronavirus 2
  REGION 1..16: note = Table B: HLA-DRB1*13:02L HLA-DRB1*14:01L HLA-DRB1*08:01L HLA-DRB1*07:01L
PPPGDQFKHLIPLMYK

SEQ ID NO: 14698 - protein, 13 aa, Severe acute respiratory syndrome coronavirus 2
  REGION 1..13: note = Table B: HLA-DRB1*13:02L HLA-DRB1*04:05L HLA-DRB1*08:04L HLA-DPA1*01:03-B1*03:01L HLA-DPA1*01:03-B1*04:01L HLA-DPA1*01:03-B1*04:02L HLA-DPA1*01:03-B1*02:01L HLA-DQA1*05:05-B1*03:01L
GLPWNVVRIKIVQ

SEQ ID NO: 14699 - protein, 14 aa, Severe acute respiratory syndrome coronavirus 2
  REGION 1..14: note = Table B: HLA-DRB1*13:02L
NVVRIKIVQMLSDT

SEQ ID NO: 14700 - protein, 15 aa, Severe acute respiratory syndrome coronavirus 2
  REGION 1..15: note = Table B: HLA-DRB1*13:02L
VVRIKIVQMLSDTLK

SEQ ID NO: 14701 - protein, 13 aa, Severe acute respiratory syndrome coronavirus 2
  REGION 1..13: note = Table B: HLA-DRB1*13:02L HLA-DRB1*01:01L HLA-DRB3*02:01L HLA-DPA1*01:03-B1*03:01L HLA-DRB1*11:03L HLA-DRB1*11:04L HLA-DRB1*08:01L HLA-DRB3*01:01L HLA-DQA1*05:05-B1*03:01L HLA-DRB1*07:01L HLA-DRB1*08:03L HLA-DRB1*15:01L
IKIVQMLSDTLKN

SEQ ID NO: 14702 - protein, 14 aa, Severe acute respiratory syndrome coronavirus 2
  REGION 1..14: note = Table B: HLA-DRB1*13:02L HLA-DRB1*08:04L HLA-DPA1*02:01-B1*13:01L
IVQMLSDTLKNLSD

SEQ ID NO: 14703 - protein, 12 aa, Severe acute respiratory syndrome coronavirus 2
  REGION 1..12: note = Table B: HLA-DRB1*13:02L HLA-DRB1*04:08L
RVVFVLWAHGFE

SEQ ID NO: 14704 - protein, 13 aa, Severe acute respiratory syndrome coronavirus 2
  REGION 1..13: note = Table B: HLA-DRB1*13:02L HLA-DRB1*01:03L HLA-DRB1*08:04L HLA-DPA1*01:03-B1*03:01L HLA-DRB1*14:02L HLA-DRB1*08:01L HLA-DQA1*05:05-B1*03:19L HLA-DPA1*01:03-B1*02:01L HLA-DPA1*01:03-B1*104:01L HLA-DQA1*05:05-B1*03:01L
VVFVLWAHGFELT

SEQ ID NO: 14705 - protein, 14 aa, Severe acute respiratory syndrome coronavirus 2
  REGION 1..14: note = Table B: HLA-DRB1*13:02L HLA-DRB1*11:04L HLA-DRB1*14:02L HLA-DRB1*11:01L HLA-DPA1*01:03-B1*104:01L
FVLWAHGFELTSMK

SEQ ID NO: 14706 - protein, 16 aa, Severe acute respiratory syndrome coronavirus 2
  REGION 1..16: note = Table B: HLA-DRB1*13:02L HLA-DPA1*01:03-B1*03:01L HLA-DPA1*01:03-B1*04:02L HLA-DRB3*01:01L HLA-DPA1*01:03-B1*02:01L HLA-DQA1*05:05-B1*03:01L
GFELTSMKYFVKIGPE

SEQ ID NO: 14707 - protein, 13 aa, Severe acute respiratory syndrome coronavirus 2
  REGION 1..13: note = Table B: HLA-DRB1*13:02L HLA-DRB1*04:05L HLA-DRB1*01:02L HLA-DRB1*12:01L HLA-DPA1*02:01-B1*13:01L
TSMKYFVKIGPER

SEQ ID NO: 14708 - protein, 12 aa, Severe acute respiratory syndrome coronavirus 2
  REGION 1..12: note = Table B: HLA-DRB1*13:02L HLA-DRB1*04:04L HLA-DRB1*08:04L HLA-DPA1*01:03-B1*03:01L HLA-DRB1*11:04L HLA-DQA1*01:01-B1*05:01L HLA-DRB1*11:01L HLA-DRB1*04:10L HLA-DRB3*01:01L HLA-DPA1*02:01-B1*13:01L HLA-DRB1*14:54L
  REGION 1..12: note = CONT. FROM ABOVE: HLA-DRB1*07:01L HLA-DRB1*10:01L HLA-DRB1*08:03 L
MKYFVKIGPERT

SEQ ID NO: 14709 - protein, 14 aa, Severe acute respiratory syndrome coronavirus 2
  REGION 1..14: note = Table B: HLA-DRB1*13:02L HLA-DPA1*03:01-B1*04:02L HLA-DRB1*11:02L HLA-DRB1*11:03L HLA-DRB1*11:04L HLA-DRB1*14:02L HLA-DQA1*05:05-B1*03:19L HLA-DQA1*05:05-B1*03:116L HLA-DRB1*12:01L HLA-DRB3*01:01L HLA-DPA1*01:03-B1*02:01L
  REGION 1..14: note = CONT. FROM ABOVE: HLA-DRB1*08:02L HLA-DRB1*15:03L
SDTYACWHHSIGFD

SEQ ID NO: 14710 - protein, 12 aa, Severe acute respiratory syndrome coronavirus 2
  REGION 1..12: note = Table B: HLA-DRB1*13:02L HLA-DRB1*04:05L HLA-DRB1*01:02L HLA-DRB3*02:01L HLA-DPA1*01:03-B1*03:01L HLA-DRB1*14:01L HLA-DPA1*01:03-B1*04:02L HLA-DQA1*05:05-B1*03:01L
SIGFDYVYNPFM

SEQ ID NO: 14711 - protein, 13 aa, Severe acute respiratory syndrome coronavirus 2
  REGION 1..13: note = Table B: HLA-DRB1*13:02L HLA-DRB1*01:02L HLA-DRB1*08:04L HLA-DRB3*02:01L HLA-DPA1*01:03-B1*03:01L HLA-DRB1*03:01L HLA-DPA1*01:03-B1*04:02L HLA-DQA1*05:05-B1*03:01L HLA-DRB1*04:08L
NPFMIDVQQWGFT

SEQ ID NO: 14712 - protein, 13 aa, Severe acute respiratory syndrome coronavirus 2
  REGION 1..13: note = Table B: HLA-DRB1*13:02L HLA-DRB1*04:02L HLA-DRB1*08:04L HLA-DRB1*14:01L HLA-DRB1*14:17L
TGNLQSNHDLYCQ

SEQ ID NO: 14713 - protein, 14 aa, Severe acute respiratory syndrome coronavirus 2
  REGION 1..14: note = Table B: HLA-DRB1*13:02L HLA-DRB1*01:02L HLA-DRB1*08:04L HLA-DPA1*03:01-B1*04:02L HLA-DRB1*14:01L HLA-DRB3*01:01L HLA-DPA1*01:02-B1*04:01L HLA-DQA1*01:03-B1*06:01L HLA-DRB1*04:08L
GNLQSNHDLYCQVH

SEQ ID NO: 14714 - protein, 14 aa, Severe acute respiratory syndrome coronavirus 2
  REGION 1..14: note = Table B: HLA-DRB1*13:02L HLA-DPA1*01:03-B1*03:01L HLA-DRB1*11:04L HLA-DPA1*02:01-B1*13:01L HLA-DRB1*07:01L
GNAHVASCDAIMTR

SEQ ID NO: 14715 - protein, 13 aa, Severe acute respiratory syndrome coronavirus 2
  REGION 1..13: note = Table B: HLA-DRB1*13:02L HLA-DRB1*04:04L HLA-DRB1*01:02L HLA-DRB4*03:01NL HLA-DRB1*08:04L HLA-DPA1*01:03-B1*03:01L HLA-DRB1*08:01L HLA-DRB1*04:10L HLA-DPA1*01:03-B1*04:02L HLA-DRB1*12:01L HLA-DRB1*14:54L HLA-DQA1*05:05-B1*03:01L
  REGION 1..13: note = CONT. FROM ABOVE: HLA-DRB1*04:08L
YPIIGDELKINAA

SEQ ID NO: 14716 - protein, 13 aa, Severe acute respiratory syndrome coronavirus 2
  REGION 1..13: note = Table B: HLA-DRB1*13:02L HLA-DRB1*13:03L HLA-DRB1*04:05L HLA-DRB1*11:03L
ELKINAACRKVQH

SEQ ID NO: 14717 - protein, 14 aa, Severe acute respiratory syndrome coronavirus 2
  REGION 1..14: note = Table B: HLA-DRB1*13:02L HLA-DRB1*04:04L HLA-DRB1*04:05L HLA-DRB1*08:04L HLA-DPA1*01:03-B1*03:01L HLA-DRB1*11:03L HLA-DRB1*11:04L HLA-DRB1*11:01L HLA-DRB3*01:01L HLA-DPA1*02:01-B1*13:01L HLA-DPA1*03:01-B1*105:01L
  REGION 1..14: note = CONT. FROM ABOVE: HLA-DPA1*01:03-B1*02:01L HLA-DRB1*07:01L HLA-D RB1*04:08M HLA-DRB1*08:03L HLA-DRB1*15:03L
VQHMVVKAALLADK

SEQ ID NO: 14718 - protein, 12 aa, Severe acute respiratory syndrome coronavirus 2
  REGION 1..12: note = Table B: HLA-DRB1*13:02L HLA-DRB1*08:04L HLA-DPA1*01:03-B1*03:01L HLA-DRB1*11:04L HLA-DRB1*08:01L HLA-DRB1*11:01L HLA-DRB3*01:01L HLA-DPA1*01:03-B1*02:01L
AALLADKFPVLH

SEQ ID NO: 14719 - protein, 12 aa, Severe acute respiratory syndrome coronavirus 2
  REGION 1..12: note = Table B: HLA-DRB1*13:02L HLA-DRB1*04:04L HLA-DRB1*01:02L HLA-DRB1*08:04L HLA-DRB1*08:77L HLA-DRB1*14:01L HLA-DRB1*11:04L HLA-DQA1*05:01-B1*02:01L HLA-DRB1*04:10L HLA-DRB3*01:01L HLA-DPA1*02:01-B1*13:01L HLA-DRB1*10:01L
FPVLHDIGNPKA

SEQ ID NO: 14720 - protein, 14 aa, Severe acute respiratory syndrome coronavirus 2
  REGION 1..14: note = Table B: HLA-DRB1*13:02L HLA-DRB1*13:03L HLA-DRB1*01:03L HLA-DRB1*04:02L HLA-DRB1*04:04L HLA-DRB1*04:05L HLA-DRB1*01:02L HLA-DRB4*03:01NL HLA-DRB1*08:04L HLA-DRB1*08:77L HLA-DRB3*02:01L HLA-DPA1*01:03-B1*03:01L HLA-DPA1*03:01-B1*04:02L
  REGION 1..14: note = CONT. FROM ABOVE: HLA-DRB1*14:01L HLA-DRB1*11:03L HLA-DRB1*11:04 L HLA-DRB1*14:02L HLA-DQA1*01:01-B1*05:01L HLA-DRB1*08:01L HLA-D RB1*11:01L HLA-DQA1*01-B1*05L HLA-DQA1*05:01-B1*02:01L HLA-DPA1* 01:03-B1*04:01L HLA-DRB1*04:10L HLA-DRB1*09:01L
  REGION 1..14: note = CONT. FROM ABOVE: HLA-DPA1*01:03-B1*04:02L HLA-DRB1*12:01M HLA-D RB1*12:02L HLA-DRB3*01:01L HLA-DPA1*02:01-B1*13:01L HLA-DRB1*14: 54L HLA-DPA1*01:03-B1*02:01L HLA-DPA1*01:03-B1*104:01L HLA-DRB1* 14:17L HLA-DPA1*01:02-B1*04:01L HLA-DRB1*07:01L HLA-DRB1*10:01L
  REGION 1..14: note = CONT. FROM ABOVE: HLA-DRB1*16:01L HLA-DRB1*04:08L HLA-DRB1*08:02 L HLA-DRB1*08:03L HLA-DRB1*15:03L
NPKAIKCVPQADVE

SEQ ID NO: 14721 - protein, 14 aa, Severe acute respiratory syndrome coronavirus 2
  REGION 1..14: note = Table B: HLA-DRB1*13:02L HLA-DRB1*01:03L HLA-DRB1*04:05L HLA-DRB1*01:02L HLA-DPA1*02:01-B1*13:01L HLA-DQA1*03:01-B1*03:02L HLA-DQA1*02:01-B1*03:03L
DAQPCSDKAYKIEE

SEQ ID NO: 14722 - protein, 14 aa, Severe acute respiratory syndrome coronavirus 2
  REGION 1..14: note = Table B: HLA-DRB1*13:02L HLA-DRB1*08:01L HLA-DPA1*01:03-B1*02:01L
KAYKIEELFYSYAT

SEQ ID NO: 14723 - protein, 14 aa, Severe acute respiratory syndrome coronavirus 2
  REGION 1..14: note = Table B: HLA-DRB1*13:02L HLA-DRB1*01:02L HLA-DRB1*08:04L HLA-DRB1*08:01L HLA-DRB1*12:01L HLA-DPA1*01:03-B1*02:01L HLA-DRB1*04:08L
AYKIEELFYSYATH

SEQ ID NO: 14724 - protein, 14 aa, Severe acute respiratory syndrome coronavirus 2
  REGION 1..14: note = Table B: HLA-DRB1*13:02L HLA-DRB1*08:04L HLA-DPA1*03:01-B1*04:02L HLA-DRB3*01:01L HLA-DQA1*05:05-B1*03:01L
FYSYATHSDKFTDG

SEQ ID NO: 14725 - protein, 13 aa, Severe acute respiratory syndrome coronavirus 2
  REGION 1..13: note = Table B: HLA-DRB1*13:02L HLA-DRB1*04:05L
NVDRYPANSIVCR

SEQ ID NO: 14726 - protein, 14 aa, Severe acute respiratory syndrome coronavirus 2
  REGION 1..14: note = Table B: HLA-DRB1*13:02L HLA-DRB1*04:04L HLA-DRB1*04:05L HLA-DQA1*01:02-B1*06:02L HLA-DPA1*01:03-B1*03:01L HLA-DPA1*03:01-B1*105:01L HLA-DPA1*01:03-B1*104:01L HLA-DRB1*07:01L HLA-DRB1*04:08L HLA-DRB1*15:03L
IVCRFDTRVLSNLN

SEQ ID NO: 14727 - protein, 13 aa, Severe acute respiratory syndrome coronavirus 2
  REGION 1..13: note = Table B: HLA-DRB1*13:02L HLA-DRB1*13:03L HLA-DRB1*04:05L HLA-DQA1*01:02-B1*06:02L HLA-DRB1*08:04L HLA-DRB1*11:04L HLA-DRB1*11:01L HLA-DRB1*12:01L HLA-DRB1*04:08L
GSLYVNKHAFHTP

SEQ ID NO: 14728 - protein, 13 aa, Severe acute respiratory syndrome coronavirus 2
  REGION 1..13: note = Table B: HLA-DRB1*13:02L HLA-DRB1*04:05L HLA-DRB1*11:03L HLA-DRB3*01:01L HLA-DRB1*08:03L HLA-DQA1*02:01-B1*03:03L
SLYVNKHAFHTPA

SEQ ID NO: 14729 - protein, 13 aa, Severe acute respiratory syndrome coronavirus 2
  REGION 1..13: note = Table B: HLA-DRB1*13:02L HLA-DRB1*01:03L HLA-DRB1*04:04L HLA-DRB1*01:01L HLA-DPA1*01:03-B1*03:01L HLA-DQA1*01:01-B1*05:01L HLA-DRB1*11:01L HLA-DRB1*04:10L HLA-DRB3*01:01L HLA-DPA1*01:03-B1*104:01L
  REGION 1..13: note = CONT. FROM ABOVE: HLA-DPA1*01:02-B1*04:01L HLA-DRB1*07:01L HLA-D RB1*04:08L HLA-DRB1*15:03L
VNKHAFHTPAFDK

SEQ ID NO: 14730 - protein, 14 aa, Severe acute respiratory syndrome coronavirus 2
  REGION 1..14: note = Table B: HLA-DRB1*13:02L HLA-DRB1*04:04L HLA-DPA1*01:03-B1*03:01L
NKHAFHTPAFDKSA

SEQ ID NO: 14731 - protein, 16 aa, Severe acute respiratory syndrome coronavirus 2
  REGION 1..16: note = Table B: HLA-DRB1*13:02L HLA-DRB1*03:01L HLA-DRB1*11:01L HLA-DQA1*05:05-B1*03:19L
PFFYYSDSPCESHGKQ

SEQ ID NO: 14732 - protein, 13 aa, Severe acute respiratory syndrome coronavirus 2
  REGION 1..13: note = Table B: HLA-DRB1*13:02L HLA-DRB1*13:03L HLA-DRB1*01:03L HLA-DRB1*04:04L HLA-DQA1*01:02-B1*06:02L HLA-DRB1*01:02L HLA-DRB4*03:01NL HLA-DRB1*08:04L HLA-DPA1*01:03-B1*03:01L HLA-DPA1*03:01-B1*04:02L HLA-DRB1*04:10L HLA-DRB1*12:01L
  REGION 1..13: note = CONT. FROM ABOVE: HLA-DPA1*02:01-B1*13:01L HLA-DPA1*03:01-B1*105 :01L HLA-DPA1*01:02-B1*04:01L HLA-DQA1*01:03-B1*06:01L HLA-DRB1* 04:08L HLA-DQA1*02:01-B1*03:03L
GKQVVSDIDYVPL

SEQ ID NO: 14733 - protein, 13 aa, Severe acute respiratory syndrome coronavirus 2
  REGION 1..13: note = Table B: HLA-DRB1*13:02L
DYVPLKSATCITR

SEQ ID NO: 14734 - protein, 13 aa, Severe acute respiratory syndrome coronavirus 2
  REGION 1..13: note = Table B: HLA-DRB1*13:02L HLA-DRB1*04:05L HLA-DRB3*01:01L
GGAVCRHHANEYR

SEQ ID NO: 14735 - protein, 13 aa, Severe acute respiratory syndrome coronavirus 2
  REGION 1..13: note = Table B: HLA-DRB1*13:02L HLA-DRB1*08:04L HLA-DRB1*14:01L HLA-DRB1*08:01L
NEYRLYLDAYNMM

SEQ ID NO: 14736 - protein, 14 aa, Severe acute respiratory syndrome coronavirus 2
  REGION 1..14: note = Table B: HLA-DRB1*13:02L HLA-DRB1*01:03L HLA-DRB1*04:05L HLA-DRB1*01:02L HLA-DPA1*01:03-B1*02:01L HLA-DRB1*04:08L
RLYLDAYNMMISAG

SEQ ID NO: 14737 - protein, 12 aa, Severe acute respiratory syndrome coronavirus 2
  REGION 1..12: note = Table B: HLA-DRB1*13:02L HLA-DRB1*04:02L HLA-DRB1*04:05L HLA-DRB1*08:04L HLA-DRB3*02:01L HLA-DRB1*11:04L HLA-DRB1*11:01L HLA-DPA1*01:03-B1*104:01L HLA-DQA1*05:05-B1*03:01L
SLWVYKQFDTYN

SEQ ID NO: 14738 - protein, 12 aa, Severe acute respiratory syndrome coronavirus 2
  REGION 1..12: note = Table B: HLA-DRB1*13:02L HLA-DRB3*02:01L HLA-DPA1*01:03-B1*104:01L HLA-DQA1*05:05-B1*03:01L
WVYKQFDTYNLW

SEQ ID NO: 14739 - protein, 11 aa, Severe acute respiratory syndrome coronavirus 2
  REGION 1..11: note = Table B: HLA-DRB1*13:02L HLA-DRB1*13:03L HLA-DRB1*04:02L HLA-DRB4*03:01NL HLA-DRB1*08:01L HLA-DRB5*01:01L HLA-DRB1*12:01L HLA-DQA1*05:05-B1*03:01L HLA-DRB1*14:17L HLA-DRB1*16:01L HLA-DQA1*01:03-B1*06:01L HLA-DQA1*02:01-B1*03:03L
DTYNLWNTFTR

SEQ ID NO: 14740 - protein, 13 aa, Severe acute respiratory syndrome coronavirus 2
  REGION 1..13: note = Table B: HLA-DRB1*13:02L HLA-DRB1*13:03L HLA-DRB1*01:03L HLA-DRB1*01:02L HLA-DRB1*11:02L HLA-DRB1*11:04L HLA-DQA1*05:05-B1*03:19L HLA-DQA1*05:05-B1*03:116L HLA-DPA1*01:03-B1*02:01L HLA-DQA1*05:05-B1*03:01L
  REGION 1..13: note = CONT. FROM ABOVE: HLA-DRB1*16:01L HLA-DRB1*08:02L HLA-DRB1*08:03 L HLA-DRB1*15:03L
NLWNTFTRLQSLE

SEQ ID NO: 14741 - protein, 13 aa, Severe acute respiratory syndrome coronavirus 2
  REGION 1..13: note = Table B: HLA-DRB1*13:02L HLA-DRB1*13:03L HLA-DRB1*04:02L HLA-DRB1*04:04L HLA-DRB1*04:05L HLA-DRB4*03:01NL HLA-DRB1*08:04L HLA-DRB1*08:77L HLA-DRB3*02:01L HLA-DRB1*11:03L HLA-DRB1*11:04L HLA-DRB1*14:02L HLA-DRB1*11:01L HLA-DRB1*09:01L HLA-DRB3*01:01L
  REGION 1..13: note = CONT. FROM ABOVE: HLA-DRB1*14:54L HLA-DPA1*01:03-B1*104:01L HLA- DQA1*05:05-B1*03:01L HLA-DRB1*14:17L HLA-DRB1*07:01L HLA-DRB1*10 :01L HLA-DRB1*08:03L
LQSLENVAFNVVN

SEQ ID NO: 14742 - protein, 10 aa, Severe acute respiratory syndrome coronavirus 2
  REGION 1..10: note = Table B: HLA-DRB1*13:02L HLA-DRB1*13:03L HLA-DRB1*01:01L HLA-DRB4*03:01NL HLA-DRB1*11:04L HLA-DRB1*08:01L HLA-DRB5*01:01L HLA-DPA1*01:03-B1*04:02L HLA-DRB1*12:01L HLA-DRB1*12:02L HLA-DQA1*03:01-B1*03:02L HLA-DQA1*05:05-B1*03:01L
  REGION 1..10: note = CONT. FROM ABOVE: HLA-DQA1*01:03-B1*06:01L HLA-DQA1*02:01-B1*03: 03L HLA-DRB1*15:01L
ENVAFNVVNK

SEQ ID NO: 14743 - protein, 12 aa, Severe acute respiratory syndrome coronavirus 2
  REGION 1..12: note = Table B: HLA-DRB1*13:02L HLA-DRB1*11:03L HLA-DRB1*11:04L HLA-DRB1*11:01L HLA-DRB1*12:01L HLA-DRB1*04:08L HLA-DRB1*08:03L
AFNVVNKGHFDG

SEQ ID NO: 14744 - protein, 12 aa, Severe acute respiratory syndrome coronavirus 2
  REGION 1..12: note = Table B: HLA-DRB1*13:02L HLA-DRB1*13:03L HLA-DRB1*01:03L HLA-DRB1*04:04L HLA-DRB1*04:05L HLA-DRB4*03:01NL HLA-DRB1*08:04L HLA-DRB1*08:77L HLA-DRB3*02:01L HLA-DPA1*01:03-B1*03:01L HLA-DRB1*03:01L HLA-DRB1*11:03L HLA-DRB1*11:04L HLA-DRB1*14:02L
  REGION 1..12: note = CONT. FROM ABOVE: HLA-DRB1*08:01L HLA-DRB1*11:01L HLA-DQA1*01-B1 *05L HLA-DPA1*01:03-B1*04:01L HLA-DRB1*04:10L HLA-DRB1*09:01L HL A-DPA1*01:03-B1*04:02L HLA-DRB1*12:02L HLA-DRB3*01:01L HLA-DPA1* 02:01-B1*13:01L HLA-DRB1*14:54L HLA-DPA1*01:03-B1*02:01L
  REGION 1..12: note = CONT. FROM ABOVE: HLA-DQA1*05:05-B1*03:01L HLA-DRB1*07:01L HLA-D RB1*10:01L HLA-DRB1*04:08L HLA-DRB1*08:03L
IINNTVYTKVDG

SEQ ID NO: 14745 - protein, 11 aa, Severe acute respiratory syndrome coronavirus 2
  REGION 1..11: note = Table B: HLA-DRB1*13:02L HLA-DRB1*01:03L HLA-DRB1*04:04L HLA-DQA1*01:02-B1*06:02L HLA-DRB1*01:02L HLA-DRB1*08:04L HLA-DRB1*08:77L HLA-DRB3*02:01L HLA-DPA1*01:03-B1*03:01L HLA-DPA1*03:01-B1*04:02L HLA-DRB1*14:01L HLA-DRB1*11:03L
  REGION 1..11: note = CONT. FROM ABOVE: HLA-DRB1*11:04L HLA-DRB1*14:02L HLA-DQA1*01:01 -B1*05:01L HLA-DRB1*08:01L HLA-DRB5*01:01L HLA-DQA1*05:05-B1*03: 19L HLA-DPA1*01:03-B1*04:01L HLA-DRB1*09:01L HLA-DRB1*12:02L HLA -DPA1*02:01-B1*13:01L HLA-DPA1*03:01-B1*105:01L
  REGION 1..11: note = CONT. FROM ABOVE: HLA-DQA1*05:05-B1*03:01L HLA-DRB1*07:01L HLA-D RB1*10:01L HLA-DRB1*04:08L HLA-DRB1*08:03L HLA-DRB1*15:03L
VYTKVDGVDVE

SEQ ID NO: 14746 - protein, 13 aa, Severe acute respiratory syndrome coronavirus 2
  REGION 1..13: note = Table B: HLA-DRB1*13:02L HLA-DRB1*08:04L HLA-DPA1*03:01-B1*04:02L HLA-DQA1*05:01-B1*02:01L HLA-DRB1*12:02L HLA-DPA1*01:02-B1*04:01L
DVELFENKTTLPV

SEQ ID NO: 14747 - protein, 13 aa, Severe acute respiratory syndrome coronavirus 2
  REGION 1..13: note = Table B: HLA-DRB1*13:02L HLA-DRB1*13:03L HLA-DRB1*01:03L HLA-DQA1*01:02-B1*06:02L HLA-DRB1*01:02L HLA-DRB1*08:04L HLA-DRB1*11:03L HLA-DRB1*11:04L HLA-DRB1*08:01L HLA-DRB1*11:01L HLA-DRB1*12:01L HLA-DRB3*01:01L HLA-DRB1*16:01L HLA-DRB1*04:08L
  REGION 1..13: note = CONT. FROM ABOVE: HLA-DRB1*15:03L
VAFELWAKRNIKP

SEQ ID NO: 14748 - protein, 13 aa, Severe acute respiratory syndrome coronavirus 2
  REGION 1..13: note = Table B: HLA-DRB1*13:02L HLA-DRB1*13:03L HLA-DRB1*04:04L HLA-DQA1*01:02-B1*06:02L HLA-DRB1*01:01L HLA-DPA1*01:03-B1*03:01L HLA-DRB1*11:01L HLA-DRB3*01:01L HLA-DPA1*01:03-B1*104:01L HLA-DRB1*07:01L HLA-DRB1*15:03L
WAKRNIKPVPEVK

SEQ ID NO: 14749 - protein, 12 aa, Severe acute respiratory syndrome coronavirus 2
  REGION 1..12: note = Table B: HLA-DRB1*13:02L HLA-DRB1*07:01L HLA-DRB1*04:08L
RNIKPVPEVKIL

SEQ ID NO: 14750 - protein, 12 aa, Severe acute respiratory syndrome coronavirus 2
  REGION 1..12: note = Table B: HLA-DRB1*13:02L
NIKPVPEVKILN

SEQ ID NO: 14751 - protein, 12 aa, Severe acute respiratory syndrome coronavirus 2
  REGION 1..12: note = Table B: HLA-DRB1*13:02L HLA-DRB1*14:01L HLA-DRB1*12:01L HLA-DRB1*15:03L
KILNNLGVDIAA

SEQ ID NO: 14752 - protein, 12 aa, Severe acute respiratory syndrome coronavirus 2
  REGION 1..12: note = Table B: HLA-DRB1*13:02L HLA-DRB1*04:05L HLA-DRB1*08:04L HLA-DRB3*02:01L HLA-DPA1*03:01-B1*04:02L HLA-DRB1*14:01L HLA-DRB1*14:02L HLA-DRB1*08:01L HLA-DRB1*04:10L HLA-DPA1*01:03-B1*04:02L HLA-DRB1*12:02L
  REGION 1..12: note = CONT. FROM ABOVE: HLA-DPA1*02:01-B1*13:01L HLA-DRB1*14:54L HLA-D RB1*04:08L
DIAANTVIWDYK

SEQ ID NO: 14753 - protein, 12 aa, Severe acute respiratory syndrome coronavirus 2
  REGION 1..12: note = Table B: HLA-DRB1*13:02L HLA-DRB1*04:05L HLA-DQA1*01:02-B1*06:02L HLA-DRB1*01:02L HLA-DRB4*03:01NL HLA-DRB1*08:04L HLA-DRB1*11:04L HLA-DRB1*08:01L HLA-DQA1*01-B1*05L HLA-DRB1*04:10L HLA-DRB1*12:01L
  REGION 1..12: note = CONT. FROM ABOVE: HLA-DRB3*01:01L HLA-DQA1*03:01-B1*03:02L HLA-D RB1*14:54L HLA-DPA1*01:02-B1*04:01L HLA-DRB1*04:08L HLA-DRB1*08: 03L HLA-DQA1*02:01-B1*03:03L HLA-DRB1*15:03L
TVIWDYKRDAPA

SEQ ID NO: 14754 - protein, 12 aa, Severe acute respiratory syndrome coronavirus 2
  REGION 1..12: note = Table B: HLA-DRB1*13:02L HLA-DQA1*01:02-B1*06:02L HLA-DRB1*01:02L HLA-DRB1*08:04L HLA-DRB1*11:04L HLA-DRB1*11:01L HLA-DRB1*04:10L HLA-DRB1*12:01L HLA-DRB3*01:01L HLA-DRB1*08:03L HLA-DQA1*02:01-B1*03:03L
VIWDYKRDAPAH

SEQ ID NO: 14755 - protein, 10 aa, Severe acute respiratory syndrome coronavirus 2
  REGION 1..10: note = Table B: HLA-DRB1*13:02L HLA-DRB1*14:01L HLA-DRB1*16:01L
YKRDAPAHIS

SEQ ID NO: 14756 - protein, 13 aa, Severe acute respiratory syndrome coronavirus 2
  REGION 1..13: note = Table B: HLA-DRB1*13:02L HLA-DRB1*13:03L HLA-DRB1*01:03L HLA-DRB1*04:04L HLA-DRB1*04:05L HLA-DRB1*01:02L HLA-DRB4*03:01NL HLA-DPA1*03:01-B1*04:02L HLA-DRB1*14:01L HLA-DRB1*08:01L HLA-DRB1*04:10L HLA-DRB1*12:01L HLA-DRB1*12:02L
  REGION 1..13: note = CONT. FROM ABOVE: HLA-DPA1*02:01-B1*13:01L HLA-DPA1*03:01-B1*105 :01L HLA-DRB1*14:54L HLA-DRB1*14:17L HLA-DRB1*04:08L HLA-DRB1*08 :03L HLA-DRB1*15:01L
APLTVFFDGRVDG

SEQ ID NO: 14757 - protein, 12 aa, Severe acute respiratory syndrome coronavirus 2
  REGION 1..12: note = Table B: HLA-DRB1*13:02L HLA-DRB1*13:03L HLA-DRB1*01:03L HLA-DRB1*04:05L HLA-DRB1*01:02L HLA-DRB4*03:01NL HLA-DRB1*08:04L HLA-DRB3*02:01L HLA-DPA1*01:03-B1*03:01L HLA-DPA1*03:01-B1*04:02L HLA-DRB1*03:01L HLA-DRB1*14:01L
  REGION 1..12: note = CONT. FROM ABOVE: HLA-DRB1*14:02L HLA-DQA1*01:01-B1*05:01L HLA-D RB1*08:01L HLA-DRB1*04:10L HLA-DPA1*01:03-B1*04:02L HLA-DRB1*12: 01L HLA-DRB3*01:01L HLA-DPA1*02:01-B1*13:01L HLA-DRB1*14:54L HLA -DRB1*14:17L HLA-DPA1*01:02-B1*04:01L HLA-DRB1*16:01L
  REGION 1..12: note = CONT. FROM ABOVE: HLA-DRB1*04:08L HLA-DRB1*08:03L HLA-DRB1*15:03 L
VFFDGRVDGQVD

SEQ ID NO: 14758 - protein, 15 aa, Severe acute respiratory syndrome coronavirus 2
  REGION 1..15: note = Table B: HLA-DRB1*13:02L HLA-DRB1*04:04L HLA-DPA1*01:03-B1*104:01L HLA-DRB1*07:01L
RNARNGVLITEGSVK

SEQ ID NO: 14759 - protein, 14 aa, Severe acute respiratory syndrome coronavirus 2
  REGION 1..14: note = Table B: HLA-DRB1*13:02L HLA-DRB1*08:04L HLA-DRB1*14:01L HLA-DRB1*11:03L HLA-DRB1*14:02L HLA-DQA1*01:01-B1*05:01L HLA-DRB1*08:01L HLA-DRB1*11:01L HLA-DQA1*01-B1*05L HLA-DRB1*09:01L HLA-DRB1*12:02L HLA-DRB3*01:01L
  REGION 1..14: note = CONT. FROM ABOVE: HLA-DPA1*02:01-B1*13:01L HLA-DPA1*01:03-B1*104 :01L HLA-DRB1*07:01L
EGSVKGLQPSVGPK

SEQ ID NO: 14760 - protein, 12 aa, Severe acute respiratory syndrome coronavirus 2
  REGION 1..12: note = Table B: HLA-DRB1*13:02L HLA-DRB1*01:02L HLA-DRB1*14:01L HLA-DQA1*05:05-B1*03:19L HLA-DQA1*05:01-B1*02:01L HLA-DRB1*12:01L HLA-DRB1*12:02L HLA-DRB1*14:54L HLA-DQA1*05:05-B1*03:01L HLA-DRB1*16:01L HLA-DRB1*15:03L
GLQPSVGPKQAS

SEQ ID NO: 14761 - protein, 16 aa, Severe acute respiratory syndrome coronavirus 2
  REGION 1..16: note = Table B: HLA-DRB1*13:02L HLA-DPA1*01:03-B1*03:01L HLA-DQA1*05:01-B1*02:01L HLA-DRB1*12:01L HLA-DPA1*02:01-B1*13:01L HLA-DPA1*03:01-B1*105:01L HLA-DPA1*01:03-B1*104:01L HLA-DRB1*15:03L
GPKQASLNGVTLIGEA

SEQ ID NO: 14762 - protein, 13 aa, Severe acute respiratory syndrome coronavirus 2
  REGION 1..13: note = Table B: HLA-DRB1*13:02L HLA-DRB1*04:04L HLA-DRB1*08:04L HLA-DRB3*02:01L HLA-DQA1*01:01-B1*05:01L HLA-DRB1*08:01L HLA-DRB1*04:10L HLA-DPA1*01:03-B1*02:01L
VTLIGEAVKTQFN

SEQ ID NO: 14763 - protein, 16 aa, Severe acute respiratory syndrome coronavirus 2
  REGION 1..16: note = Table B: HLA-DRB1*13:02L HLA-DRB3*01:01L
IGEAVKTQFNYYKKVD

SEQ ID NO: 14764 - protein, 13 aa, Severe acute respiratory syndrome coronavirus 2
  REGION 1..13: note = Table B: HLA-DRB1*13:02L HLA-DRB1*12:01L HLA-DRB3*01:01L HLA-DPA1*02:01-B1*13:01L HLA-DRB1*14:54L HLA-DRB1*15:03L
VKTQFNYYKKVDG

SEQ ID NO: 14765 - protein, 14 aa, Severe acute respiratory syndrome coronavirus 2
  REGION 1..14: note = Table B: HLA-DRB1*13:02L HLA-DRB1*04:04L HLA-DRB1*08:04L HLA-DRB1*11:04L HLA-DRB1*11:01L HLA-DRB3*01:01L
YFTQSRNLQEFKPR

SEQ ID NO: 14766 - protein, 16 aa, Severe acute respiratory syndrome coronavirus 2
  REGION 1..16: note = Table B: HLA-DRB1*13:02L HLA-DRB3*01:01L HLA-DPA1*03:01-B1*105:01L
SRNLQEFKPRSQMEID

SEQ ID NO: 14767 - protein, 10 aa, Severe acute respiratory syndrome coronavirus 2
  REGION 1..10: note = Table B: HLA-DRB1*13:02L HLA-DRB1*13:03L HLA-DRB4*03:01NL HLA-DRB1*08:01L HLA-DRB5*01:01L HLA-DPA1*01:03-B1*04:02L HLA-DRB1*12:01L HLA-DQA1*03:01-B1*03:02M HLA-DQA1*05:05-B1*03:01L HLA-DRB1*14:17L
  REGION 1..10: note = CONT. FROM ABOVE: HLA-DQA1*01:03-B1*06:01L HLA-DQA1*02:01-B1*03: 03L
ELAMDEFIER

SEQ ID NO: 14768 - protein, 12 aa, Severe acute respiratory syndrome coronavirus 2
  REGION 1..12: note = Table B: HLA-DRB1*13:02L HLA-DRB1*13:03L HLA-DRB1*01:02L HLA-DRB1*08:04L HLA-DPA1*03:01-B1*04:02L HLA-DRB1*14:01L HLA-DRB1*11:04L HLA-DRB1*11:01L HLA-DRB1*12:01L HLA-DPA1*01:02-B1*04:01L HLA-DRB1*04:08L HLA-DRB1*08:03L
  REGION 1..12: note = CONT. FROM ABOVE: HLA-DRB1*15:03L
EFIERYKLEGYA

SEQ ID NO: 14769 - protein, 14 aa, Severe acute respiratory syndrome coronavirus 2
  REGION 1..14: note = Table B: HLA-DRB1*13:02L HLA-DRB1*08:03L
ERYKLEGYAFEHIV

SEQ ID NO: 14770 - protein, 14 aa, Severe acute respiratory syndrome coronavirus 2
  REGION 1..14: note = Table B: HLA-DRB1*13:02L HLA-DRB1*04:05L HLA-DRB1*08:04L HLA-DRB1*11:01L HLA-DPA1*01:03-B1*02:01L
YKLEGYAFEHIVYG

SEQ ID NO: 14771 - protein, 14 aa, Severe acute respiratory syndrome coronavirus 2
  REGION 1..14: note = Table B: HLA-DRB1*13:02L HLA-DRB1*08:04L HLA-DRB1*08:01L HLA-DRB1*10:01L
LEGYAFEHIVYGDF

SEQ ID NO: 14772 - protein, 14 aa, Severe acute respiratory syndrome coronavirus 2
  REGION 1..14: note = Table B: HLA-DRB1*13:02L
EGYAFEHIVYGDFS

SEQ ID NO: 14773 - protein, 14 aa, Severe acute respiratory syndrome coronavirus 2
  REGION 1..14: note = Table B: HLA-DRB1*13:02L HLA-DRB1*11:01L HLA-DRB3*01:01L
GYAFEHIVYGDFSH

SEQ ID NO: 14774 - protein, 14 aa, Severe acute respiratory syndrome coronavirus 2
  REGION 1..14: note = Table B: HLA-DRB1*13:02L
AFEHIVYGDFSHSQ

SEQ ID NO: 14775 - protein, 13 aa, Severe acute respiratory syndrome coronavirus 2
  REGION 1..13: note = Table B: HLA-DRB1*13:02L HLA-DRB1*04:04L HLA-DRB1*11:04L HLA-DRB3*01:01L
EHIVYGDFSHSQL

SEQ ID NO: 14776 - protein, 14 aa, Severe acute respiratory syndrome coronavirus 2
  REGION 1..14: note = Table B: HLA-DRB1*13:02L HLA-DRB3*01:01L
HIVYGDFSHSQLGG

SEQ ID NO: 14777 - protein, 12 aa, Severe acute respiratory syndrome coronavirus 2
  REGION 1..12: note = Table B: HLA-DRB1*13:02L HLA-DRB1*13:03L HLA-DRB1*04:05L HLA-DRB1*08:04L HLA-DPA1*01:03-B1*03:01L HLA-DRB1*14:01L HLA-DQA1*01:01-B1*05:01L HLA-DRB1*11:01L HLA-DPA1*02:01-B1*13:01L HLA-DPA1*01:03-B1*02:01L
  REGION 1..12: note = CONT. FROM ABOVE: HLA-DRB1*15:03L
GDFSHSQLGGLH

SEQ ID NO: 14778 - protein, 16 aa, Severe acute respiratory syndrome coronavirus 2
  REGION 1..16: note = Table B: HLA-DRB1*13:02L HLA-DRB1*08:04L HLA-DPA1*02:01-B1*13:01L
GLHLLIGLAKRFKESP

SEQ ID NO: 14779 - protein, 15 aa, Severe acute respiratory syndrome coronavirus 2
  REGION 1..15: note = Table B: HLA-DRB1*13:02L HLA-DRB1*01:03L HLA-DRB1*08:04L HLA-DRB1*11:04L HLA-DRB1*11:01L HLA-DRB1*04:08L
HLLIGLAKRFKESPF

SEQ ID NO: 14780 - protein, 14 aa, Severe acute respiratory syndrome coronavirus 2
  REGION 1..14: note = Table B: HLA-DRB1*13:02L HLA-DRB1*08:04L HLA-DRB1*11:04L HLA-DRB1*11:01L HLA-DRB3*01:01L HLA-DRB1*08:03L
LIGLAKRFKESPFE

SEQ ID NO: 14781 - protein, 15 aa, Severe acute respiratory syndrome coronavirus 2
  REGION 1..15: note = Table B: HLA-DRB1*13:02L
IGLAKRFKESPFELE

SEQ ID NO: 14782 - protein, 13 aa, Severe acute respiratory syndrome coronavirus 2
  REGION 1..13: note = Table B: HLA-DRB1*13:02L HLA-DRB1*13:03L HLA-DRB1*04:05L HLA-DRB1*14:01L HLA-DRB1*11:04L HLA-DRB1*11:01L HLA-DPA1*01:03-B1*04:02L HLA-DRB3*01:01L HLA-DQA1*03:01-B1*03:02L HLA-DPA1*01:03-B1*02:01L
  REGION 1..13: note = CONT. FROM ABOVE: HLA-DQA1*02:01-B1*03:03L
AKRFKESPFELED

SEQ ID NO: 14783 - protein, 13 aa, Severe acute respiratory syndrome coronavirus 2
  REGION 1..13: note = Table B: HLA-DRB1*13:02L HLA-DRB1*04:05L HLA-DRB1*14:02L HLA-DQA1*05:05-B1*03:19L HLA-DRB3*01:01L HLA-DRB1*08:03L
ESPFELEDFIPMD

SEQ ID NO: 14784 - protein, 12 aa, Severe acute respiratory syndrome coronavirus 2
  REGION 1..12: note = Table B: HLA-DRB1*13:02L HLA-DRB1*01:02L HLA-DRB1*08:04L HLA-DRB1*14:01L HLA-DRB1*14:02L HLA-DPA1*02:01-B1*13:01L
DLLLDDFVEIIK

SEQ ID NO: 14785 - protein, 11 aa, Severe acute respiratory syndrome coronavirus 2
  REGION 1..11: note = Table B: HLA-DRB1*13:02L HLA-DRB1*01:03L HLA-DRB1*01:02L HLA-DRB4*03:01NL HLA-DRB1*08:04L HLA-DRB3*02:01L HLA-DPA1*01:03-B1*03:01L HLA-DRB1*14:02L HLA-DQA1*05:05-B1*03:19L HLA-DPA1*01:03-B1*04:01L
  REGION 1..11: note = CONT. FROM ABOVE: HLA-DQA1*05:05-B1*03:116L HLA-DRB1*04:10L HLA- DPA1*01:03-B1*04:02L HLA-DRB1*12:01L HLA-DPA1*02:01-B1*13:01L HL A-DRB1*14:54L HLA-DQA1*05:05-B1*03:01L HLA-DRB1*04:08L HLA-DRB1* 08:03L
DFVEIIKSQDL

SEQ ID NO: 14786 - protein, 12 aa, Severe acute respiratory syndrome coronavirus 2
  REGION 1..12: note = Table B: HLA-DRB1*13:02L HLA-DRB1*01:03L HLA-DRB1*04:04L HLA-DRB1*08:77L HLA-DRB3*02:01L HLA-DPA1*01:03-B1*03:01L HLA-DPA1*03:01-B1*04:02L HLA-DRB1*14:02L HLA-DRB1*12:02L HLA-DQA1*05:05-B1*03:01L HLA-DRB1*04:08L
VEIIKSQDLSVV

SEQ ID NO: 14787 - protein, 10 aa, Severe acute respiratory syndrome coronavirus 2
  REGION 1..10: note = Table B: HLA-DRB1*13:02L HLA-DRB1*13:03L HLA-DRB1*01:01L HLA-DRB4*03:01NL HLA-DRB1*11:04L HLA-DRB1*08:01L HLA-DRB5*01:01L HLA-DRB1*12:01L HLA-DRB1*12:02L HLA-DRB3*01:01L HLA-DQA1*03:01-B1*03:02M HLA-DQA1*05:05-B1*03:01L
  REGION 1..10: note = CONT. FROM ABOVE: HLA-DRB1*14:17L HLA-DRB1*16:01L HLA-DQA1*02:01 -B1*03:03L
KSQDLSVVSK

SEQ ID NO: 14788 - protein, 15 aa, Severe acute respiratory syndrome coronavirus 2
  REGION 1..15: note = Table B: HLA-DRB1*13:02L
LSVVSKVVKVTIDYT

SEQ ID NO: 14789 - protein, 14 aa, Severe acute respiratory syndrome coronavirus 2
  REGION 1..14: note = Table B: HLA-DRB1*13:02L HLA-DRB1*08:04L HLA-DQA1*05:05-B1*03:01L
VVSKVVKVTIDYTE

SEQ ID NO: 14790 - protein, 11 aa, Severe acute respiratory syndrome coronavirus 2
  REGION 1..11: note = Table B: HLA-DRB1*13:02L HLA-DRB1*01:02L HLA-DRB3*02:01L HLA-DRB1*09:01L HLA-DQA1*05:05-B1*03:01L HLA-DRB1*04:08L
VTIDYTEISFM

SEQ ID NO: 14791 - protein, 14 aa, Severe acute respiratory syndrome coronavirus 2
  REGION 1..14: note = Table B: HLA-DRB1*13:02L HLA-DRB1*01:02L HLA-DRB1*12:01L HLA-DPA1*02:01-B1*13:01L HLA-DRB1*08:03L HLA-DRB1*15:03L
GHVETFYPKLQSSQ

SEQ ID NO: 14792 - protein, 13 aa, Severe acute respiratory syndrome coronavirus 2
  REGION 1..13: note = Table B: HLA-DRB1*13:02L HLA-DRB1*13:03L HLA-DRB1*01:03L HLA-DRB1*04:02L HLA-DRB1*04:05L HLA-DQA1*01:02-B1*06:02L HLA-DRB1*01:02L HLA-DRB1*08:04L HLA-DRB1*11:04L HLA-DRB1*08:01L HLA-DRB1*11:01L HLA-DRB1*12:01L HLA-DRB3*01:01L HLA-DRB1*14:54L
  REGION 1..13: note = CONT. FROM ABOVE: HLA-DPA1*01:02-B1*04:01L HLA-DRB1*16:01L HLA-D RB1*04:08L HLA-DRB1*15:03L
MPNLYKMQRMLLE

SEQ ID NO: 14793 - protein, 13 aa, Severe acute respiratory syndrome coronavirus 2
  REGION 1..13: note = Table B: HLA-DRB1*13:02L HLA-DRB1*13:03L HLA-DRB1*01:03L HLA-DRB1*04:02L HLA-DRB1*04:04L HLA-DRB1*04:05L HLA-DRB4*03:01NL HLA-DRB1*08:77L HLA-DRB3*02:01L HLA-DPA1*03:01-B1*04:02L HLA-DRB1*14:01L HLA-DRB1*11:03L HLA-DRB1*14:02L
  REGION 1..13: note = CONT. FROM ABOVE: HLA-DQA1*01-B1*05L HLA-DRB1*04:10L HLA-DRB1*09 :01L HLA-DRB1*12:02L HLA-DPA1*02:01-B1*13:01L HLA-DRB1*14:54L HL A-DPA1*01:03-B1*104:01L HLA-DPA1*01:02-B1*04:01L HLA-DRB1*07:01L HLA-DRB1*10:01L HLA-DRB1*04:08L
LNTLTLAVPYNMR

SEQ ID NO: 14794 - protein, 14 aa, Severe acute respiratory syndrome coronavirus 2
  REGION 1..14: note = Table B: HLA-DRB1*13:02L HLA-DRB1*11:04L HLA-DRB1*11:01L HLA-DRB1*12:01L
AVPYNMRVIHFGAG

SEQ ID NO: 14795 - protein, 15 aa, Severe acute respiratory syndrome coronavirus 2
  REGION 1..15: note = Table B: HLA-DRB1*13:02L HLA-DPA1*01:03-B1*03:01L HLA-DRB1*11:04L HLA-DRB1*11:01L HLA-DPA1*01:03-B1*04:02L HLA-DRB1*12:01L HLA-DRB3*01:01L HLA-DPA1*01:03-B1*02:01L HLA-DPA1*01:03-B1*104:01L HLA-DQA1*05:05-B1*03:01L
VPYNMRVIHFGAGSD

SEQ ID NO: 14796 - protein, 11 aa, Severe acute respiratory syndrome coronavirus 2
  REGION 1..11: note = Table B: HLA-DRB1*13:02L HLA-DRB1*01:03L HLA-DRB1*04:02L HLA-DRB1*04:05L HLA-DRB1*08:77L HLA-DPA1*03:01-B1*04:02L HLA-DRB1*12:01L HLA-DRB1*14:17L HLA-DQA1*02:01-B1*03:03L
NDFVSDADSTL

SEQ ID NO: 14797 - protein, 12 aa, Severe acute respiratory syndrome coronavirus 2
  REGION 1..12: note = Table B: HLA-DRB1*13:02L HLA-DRB1*01:01L HLA-DRB1*01:02L HLA-DRB1*08:04L HLA-DRB3*02:01L HLA-DPA1*01:03-B1*03:01L HLA-DRB1*03:01L HLA-DRB1*11:01L HLA-DRB5*01:01L HLA-DRB4*01:01L HLA-DRB1*09:01L HLA-DRB1*12:02L HLA-DRB3*01:01L
  REGION 1..12: note = CONT. FROM ABOVE: HLA-DPA1*03:01-B1*105:01L HLA-DRB1*08:03L HLA- DQA1*02:01-B1*03:03L HLA-DRB1*15:03L
DFVSDADSTLIG

SEQ ID NO: 14798 - protein, 15 aa, Severe acute respiratory syndrome coronavirus 2
  REGION 1..15: note = Table B: HLA-DRB1*13:02L HLA-DPA1*02:01-B1*13:01L
DADSTLIGDCATVHT

SEQ ID NO: 14799 - protein, 11 aa, Severe acute respiratory syndrome coronavirus 2
  REGION 1..11: note = Table B: HLA-DRB1*13:02L HLA-DRB1*01:03L HLA-DRB1*11:04L HLA-DRB1*11:01L
MYDPKTKNVTK

SEQ ID NO: 14800 - protein, 14 aa, Severe acute respiratory syndrome coronavirus 2
  REGION 1..14: note = Table B: HLA-DRB1*13:02L HLA-DRB1*13:03L HLA-DRB1*01:03L HLA-DRB1*04:05L HLA-DRB3*02:01L HLA-DPA1*01:03-B1*03:01L HLA-DQA1*05:01-B1*02:01L HLA-DPA1*02:01-B1*13:01L HLA-DPA1*03:01-B1*105:01L HLA-DPA1*01:03-B1*104:01L
  REGION 1..14: note = CONT. FROM ABOVE: HLA-DRB1*07:01L HLA-DRB1*16:01L HLA-DRB1*04:08 L HLA-DRB1*15:03L
IQQKLALGGSVAIK

SEQ ID NO: 14801 - protein, 11 aa, Severe acute respiratory syndrome coronavirus 2
  REGION 1..11: note = Table B: HLA-DRB1*13:02L HLA-DRB1*01:02L HLA-DPA1*03:01-B1*04:02L HLA-DRB1*14:01L HLA-DQA1*05:01-B1*02:01L HLA-DPA1*03:01-B1*105:01L HLA-DRB1*16:01L HLA-DRB1*15:03L
ALGGSVAIKIT

SEQ ID NO: 14802 - protein, 14 aa, Severe acute respiratory syndrome coronavirus 2
  REGION 1..14: note = Table B: HLA-DRB1*13:02L HLA-DRB1*04:04L HLA-DRB1*11:04L HLA-DRB3*01:01L
SVAIKITEHSWNAD

SEQ ID NO: 14803 - protein, 14 aa, Severe acute respiratory syndrome coronavirus 2
  REGION 1..14: note = Table B: HLA-DRB1*13:02L HLA-DPA1*01:03-B1*03:01L HLA-DPA1*03:01-B1*04:02L
VAIKITEHSWNADL

SEQ ID NO: 14804 - protein, 14 aa, Severe acute respiratory syndrome coronavirus 2
  REGION 1..14: note = Table B: HLA-DRB1*13:02L HLA-DRB1*08:01L
IKITEHSWNADLYK

SEQ ID NO: 14805 - protein, 15 aa, Severe acute respiratory syndrome coronavirus 2
  REGION 1..15: note = Table B: HLA-DRB1*13:02L HLA-DRB1*08:04L HLA-DRB1*14:01L HLA-DRB1*11:04L
EHSWNADLYKLMGHF

SEQ ID NO: 14806 - protein, 14 aa, Severe acute respiratory syndrome coronavirus 2
  REGION 1..14: note = Table B: HLA-DRB1*13:02L HLA-DRB1*14:02L HLA-DRB1*11:01L HLA-DPA1*01:03-B1*04:02L HLA-DQA1*05:05-B1*03:01L HLA-DRB1*04:08L
ADLYKLMGHFAWWT

SEQ ID NO: 14807 - protein, 12 aa, Severe acute respiratory syndrome coronavirus 2
  REGION 1..12: note = Table B: HLA-DRB1*13:02L HLA-DRB1*04:02L HLA-DRB4*03:01NL HLA-DRB3*02:01L HLA-DPA1*01:03-B1*03:01L HLA-DPA1*03:01-B1*04:02L HLA-DQA1*01-B1*05L HLA-DRB1*12:01L HLA-DRB1*12:02L HLA-DRB1*14:54L HLA-DQA1*05:05-B1*03:01L
  REGION 1..12: note = CONT. FROM ABOVE: HLA-DRB1*16:01L
VTNVNASSSEAF

SEQ ID NO: 14808 - protein, 14 aa, Severe acute respiratory syndrome coronavirus 2
  REGION 1..14: note = Table B: HLA-DRB1*13:02L
TNVNASSSEAFLIG

SEQ ID NO: 14809 - protein, 13 aa, Severe acute respiratory syndrome coronavirus 2
  REGION 1..13: note = Table B: HLA-DRB1*13:02L HLA-DRB1*04:08L
DGYVMHANYIFWR

SEQ ID NO: 14810 - protein, 14 aa, Severe acute respiratory syndrome coronavirus 2
  REGION 1..14: note = Table B: HLA-DRB1*13:02L HLA-DRB1*14:01L HLA-DRB1*04:08L
GYVMHANYIFWRNT

SEQ ID NO: 14811 - protein, 13 aa, Severe acute respiratory syndrome coronavirus 2
  REGION 1..13: note = Table B: HLA-DRB1*13:02L HLA-DRB1*04:02L HLA-DRB1*04:05L HLA-DRB1*08:77L HLA-DRB3*02:01L HLA-DPA1*01:03-B1*03:01L HLA-DRB1*14:17L
TNPIQLSSYSLFD

SEQ ID NO: 14812 - protein, 15 aa, Severe acute respiratory syndrome coronavirus 2
  REGION 1..15: note = Table B: HLA-DRB1*13:02L HLA-DRB1*01:03L HLA-DRB1*04:02L HLA-DRB1*04:04L HLA-DRB1*04:05L HLA-DRB1*08:04L HLA-DRB3*02:01L HLA-DRB1*14:02L HLA-DQA1*01:01-B1*05:01L HLA-DRB1*08:01L HLA-DRB1*04:10L HLA-DRB3*01:01L HLA-DPA1*01:03-B1*02:01L
  REGION 1..15: note = CONT. FROM ABOVE: HLA-DPA1*01:03-B1*104:01L HLA-DRB1*07:01L HLA- DRB1*04:08L HLA-DRB1*08:03L
NPIQLSSYSLFDMSK

SEQ ID NO: 14813 - protein, 14 aa, Severe acute respiratory syndrome coronavirus 2
  REGION 1..14: note = Table B: HLA-DRB1*13:02L HLA-DRB1*01:03L HLA-DRB1*08:04L HLA-DPA1*01:03-B1*04:01L HLA-DRB1*04:08L
LSSYSLFDMSKFPL

SEQ ID NO: 14814 - protein, 11 aa, Severe acute respiratory syndrome coronavirus 2
  REGION 1..11: note = Table B: HLA-DRB1*13:02L HLA-DRB1*13:03L HLA-DRB1*04:05L HLA-DQA1*01:02-B1*06:02L HLA-DRB1*01:02L HLA-DRB4*03:01NL HLA-DRB1*08:04L HLA-DRB1*11:04L HLA-DRB1*08:01L HLA-DRB1*11:01L HLA-DRB1*12:01L HLA-DRB3*01:01L HLA-DRB1*14:54L
  REGION 1..11: note = CONT. FROM ABOVE: HLA-DQA1*05:05-B1*03:01L HLA-DQA1*01:03-B1*06: 01L HLA-DRB1*04:08L
SLFDMSKFPLK

SEQ ID NO: 14815 - protein, 14 aa, Severe acute respiratory syndrome coronavirus 2
  REGION 1..14: note = Table B: HLA-DRB1*13:02L HLA-DRB1*01:03L HLA-DQA1*05:05-B1*03:01L HLA-DRB1*07:01L HLA-DRB1*04:08L
FPLKLRGTAVMSLK

SEQ ID NO: 14816 - protein, 11 aa, Severe acute respiratory syndrome coronavirus 2
  REGION 1..11: note = Table B: HLA-DRB1*13:02L HLA-DRB1*13:03L HLA-DRB1*04:05L HLA-DRB1*01:02L HLA-DRB4*03:01NL HLA-DRB1*08:77L HLA-DRB3*02:01L HLA-DPA1*03:01-B1*04:02L HLA-DQA1*01-B1*05L HLA-DRB1*04:10L HLA-DRB1*12:02L HLA-DQA1*05:05-B1*03:01L
  REGION 1..11: note = CONT. FROM ABOVE: HLA-DPA1*01:02-B1*04:01L HLA-DRB1*07:01L
AVMSLKEGQIN

SEQ ID NO: 14817 - protein, 13 aa, Severe acute respiratory syndrome coronavirus 2
  REGION 1..13: note = Table B: HLA-DRB1*13:02L HLA-DRB1*04:05L HLA-DQA1*01:02-B1*06:02L HLA-DRB1*11:04L HLA-DRB1*11:01L HLA-DRB1*04:08L
ILSLLSKGRLIIR

SEQ ID NO: 14818 - protein, 14 aa, Severe acute respiratory syndrome coronavirus 2
  REGION 1..14: note = Table B: HLA-DRB1*13:02L HLA-DQA1*01:02-B1*06:02L HLA-DRB1*04:08L HLA-DRB1*15:03L
LSLLSKGRLIIREN

SEQ ID NO: 14819 - protein, 14 aa, Severe acute respiratory syndrome coronavirus 2
  REGION 1..14: note = Table B: HLA-DRB1*13:02L HLA-DRB1*01:02L HLA-DRB1*04:08L HLA-DRB1*15:03L
SLLSKGRLIIRENN

SEQ ID NO: 14820 - protein, 13 aa, Severe acute respiratory syndrome coronavirus 2
  REGION 1..13: note = Table B: HLA-DRB1*13:02L HLA-DRB1*13:03L HLA-DRB1*04:04L HLA-DQA1*01:02-B1*06:02L HLA-DRB1*11:04L HLA-DRB1*11:01L HLA-DRB3*01:01L HLA-DPA1*02:01-B1*13:01L HLA-DRB1*14:17L HLA-DQA1*02:01-B1*03:03L
KGRLIIRENNRVV

SEQ ID NO: 14821 - protein, 13 aa, Severe acute respiratory syndrome coronavirus 2
  REGION 1..13: note = Table B: HLA-DRB1*13:02L HLA-DRB3*01:01L
GRLIIRENNRVVI

SEQ ID NO: 14822 - protein, 12 aa, Severe acute respiratory syndrome coronavirus 2
  REGION 1..12: note = Table B: HLA-DRB1*13:02L HLA-DRB1*01:03L HLA-DRB1*01:02L HLA-DRB1*14:01L HLA-DRB1*12:01L HLA-DRB1*16:01L
IRENNRVVISSD

SEQ ID NO: 14823 - protein, 14 aa, Severe acute respiratory syndrome coronavirus 2
  REGION 1..14: note = Table B: HLA-DRB1*13:02L HLA-DRB1*04:05L HLA-DRB1*01:02L HLA-DRB4*03:01NL HLA-DRB1*08:04L HLA-DRB3*02:01L HLA-DRB1*14:01L HLA-DRB1*11:03L HLA-DRB1*11:04L HLA-DRB1*08:01L HLA-DRB1*04:10L HLA-DRB1*09:01L HLA-DRB1*12:02L HLA-DRB3*01:01L HLA-DRB1*14:54L
  REGION 1..14: note = CONT. FROM ABOVE: HLA-DQA1*05:05-B1*03:01L HLA-DRB1*07:01L HLA-D RB1*04:08L HLA-DRB1*08:03L
LPPAYTNSFTRGVY

SEQ ID NO: 14824 - protein, 16 aa, Severe acute respiratory syndrome coronavirus 2
  REGION 1..16: note = Table B: HLA-DRB1*13:02L HLA-DRB1*04:05L HLA-DQA1*05:05-B1*03:01L HLA-DRB1*04:08L
PPAYTNSFTRGVYYPD

SEQ ID NO: 14825 - protein, 13 aa, Severe acute respiratory syndrome coronavirus 2
  REGION 1..13: note = Table B: HLA-DRB1*13:02L HLA-DRB1*04:04L HLA-DRB4*03:01NL HLA-DRB1*08:04L HLA-DPA1*01:03-B1*03:01L HLA-DPA1*03:01-B1*04:02L HLA-DRB1*11:04L HLA-DQA1*01:01-B1*05:01L HLA-DRB1*11:01L
  REGION 1..13: note = CONT. FROM ABOVE: HLA-DQA1*05:01-B1*02:01L HLA-DPA1*01:03-B1*04: 01L HLA-DRB1*04:10L HLA-DPA1*01:03-B1*04:02L HLA-DRB3*01:01L HLA -DPA1*02:01-B1*13:01L HLA-DRB1*14:54L HLA-DPA1*01:03-B1*02:01L H LA-DRB1*08:03L
TNSFTRGVYYPDK

SEQ ID NO: 14826 - protein, 10 aa, Severe acute respiratory syndrome coronavirus 2
  REGION 1..10: note = Table B: HLA-DRB1*13:02L HLA-DRB1*13:03L HLA-DRB1*04:02L HLA-DRB1*01:01L HLA-DRB4*03:01NL HLA-DRB3*02:01L HLA-DRB1*14:01L HLA-DRB1*11:04L HLA-DRB1*08:01L HLA-DRB5*01:01L HLA-DPA1*01:03-B1*04:02L HLA-DRB1*12:01L HLA-DRB1*12:02L
  REGION 1..10: note = CONT. FROM ABOVE: HLA-DQA1*03:01-B1*03:02M HLA-DQA1*05:05-B1*03: 01L HLA-DRB1*14:17L HLA-DRB1*16:01L HLA-DQA1*02:01-B1*03:03L HLA -DRB1*15:01L
GVYYPDKVFR

SEQ ID NO: 14827 - protein, 12 aa, Severe acute respiratory syndrome coronavirus 2
  REGION 1..12: note = Table B: HLA-DRB1*13:02L HLA-DRB1*04:05L HLA-DRB1*01:02L HLA-DRB1*08:04L HLA-DPA1*01:03-B1*03:01L HLA-DPA1*03:01-B1*04:02L HLA-DRB1*14:02L HLA-DRB1*08:01L HLA-DQA1*05:01-B1*02:01L HLA-DPA1*01:03-B1*04:02L
  REGION 1..12: note = CONT. FROM ABOVE: HLA-DRB1*12:01L HLA-DRB1*15:03L
VYYPDKVFRSSV

SEQ ID NO: 14828 - protein, 14 aa, Severe acute respiratory syndrome coronavirus 2
  REGION 1..14: note = Table B: HLA-DRB1*13:02L HLA-DRB1*13:03L HLA-DRB1*04:04L HLA-DRB1*08:04L HLA-DRB1*14:01L HLA-DRB1*14:02L
DKVFRSSVLHSTQD

SEQ ID NO: 14829 - protein, 10 aa, Severe acute respiratory syndrome coronavirus 2
  REGION 1..10: note = Table B: HLA-DRB1*13:02L HLA-DRB1*13:03L HLA-DRB1*01:01L HLA-DRB4*03:01NL HLA-DRB1*11:04L HLA-DRB1*08:01L HLA-DRB5*01:01L HLA-DRB1*12:01L HLA-DQA1*03:01-B1*03:02M HLA-DQA1*05:05-B1*03:01L
HVSGTNGTKR

SEQ ID NO: 14830 - protein, 13 aa, Severe acute respiratory syndrome coronavirus 2
  REGION 1..13: note = Table B: HLA-DRB1*13:02L HLA-DRB1*04:05L HLA-DQA1*01:02-B1*06:02L HLA-DRB1*01:02L HLA-DPA1*01:03-B1*03:01L HLA-DRB1*12:01L HLA-DPA1*02:01-B1*13:01L HLA-DQA1*03:01-B1*03:02L
  REGION 1..13: note = CONT. FROM ABOVE: HLA-DPA1*01:03-B1*104:01L HLA-DPA1*01:02-B1*04 :01L HLA-DRB1*16:01L HLA-DRB1*04:08L HLA-DQA1*02:01-B1*03:03L HL A-DRB1*15:03L
GTKRFDNPVLPFN

SEQ ID NO: 14831 - protein, 14 aa, Severe acute respiratory syndrome coronavirus 2
  REGION 1..14: note = Table B: HLA-DRB1*13:02L HLA-DPA1*01:03-B1*104:01L HLA-DRB1*15:03L
TKRFDNPVLPFNDG

SEQ ID NO: 14832 - protein, 13 aa, Severe acute respiratory syndrome coronavirus 2
  REGION 1..13: note = Table B: HLA-DRB1*13:02L HLA-DRB1*04:04L HLA-DRB1*08:01L HLA-DRB1*04:10L HLA-DRB1*14:54L
DNPVLPFNDGVYF

SEQ ID NO: 14833 - protein, 17 aa, Severe acute respiratory syndrome coronavirus 2
  REGION 1..17: note = Table B: HLA-DRB1*13:02L HLA-DRB1*08:04L HLA-DQA1*01:01-B1*05:01L HLA-DRB1*11:01L HLA-DPA1*01:03-B1*02:01L
NPVLPFNDGVYFASTEK

SEQ ID NO: 14834 - protein, 12 aa, Severe acute respiratory syndrome coronavirus 2
  REGION 1..12: note = Table B: HLA-DRB1*13:02L HLA-DRB1*04:04L HLA-DRB1*08:04L HLA-DRB1*08:77L HLA-DRB1*11:03L HLA-DRB1*11:04L HLA-DRB1*14:02L HLA-DRB5*01:01L HLA-DPA1*01:03-B1*04:01L HLA-DRB1*09:01L HLA-DRB1*12:02L HLA-DPA1*02:01-B1*13:01L
  REGION 1..12: note = CONT. FROM ABOVE: HLA-DPA1*01:03-B1*104:01L HLA-DRB1*07:01L HLA- DRB1*08:03L
DGVYFASTEKSN

SEQ ID NO: 14835 - protein, 12 aa, Severe acute respiratory syndrome coronavirus 2
  REGION 1..12: note = Table B: HLA-DRB1*13:02L HLA-DRB1*08:04L HLA-DRB1*14:02L HLA-DPA1*01:03-B1*04:01L HLA-DPA1*01:03-B1*104:01L
VYFASTEKSNII

SEQ ID NO: 14836 - protein, 14 aa, Severe acute respiratory syndrome coronavirus 2
  REGION 1..14: note = Table B: HLA-DRB1*13:02L HLA-DRB1*04:05L HLA-DRB1*08:01L HLA-DPA1*01:03-B1*02:01L HLA-DPA1*01:03-B1*104:01L
SNIIRGWIFGTTLD

SEQ ID NO: 14837 - protein, 11 aa, Severe acute respiratory syndrome coronavirus 2
  REGION 1..11: note = Table B: HLA-DRB1*13:02L HLA-DRB1*04:04L HLA-DQA1*01:02-B1*06:02L HLA-DRB1*01:02L HLA-DRB1*08:77L HLA-DPA1*01:03-B1*03:01L HLA-DPA1*03:01-B1*04:02L HLA-DRB1*14:01L HLA-DRB1*11:03L HLA-DRB1*11:04L HLA-DRB1*14:02L
  REGION 1..11: note = CONT. FROM ABOVE: HLA-DQA1*01:01-B1*05:01L HLA-DRB5*01:01L HLA-D RB1*12:02L HLA-DPA1*03:01-B1*105:01L HLA-DPA1*01:02-B1*04:01L HL A-DRB1*10:01L HLA-DRB1*15:03L
IFGTTLDSKTQ

SEQ ID NO: 14838 - protein, 13 aa, Severe acute respiratory syndrome coronavirus 2
  REGION 1..13: note = Table B: HLA-DRB1*13:02L HLA-DRB1*13:03L HLA-DRB1*01:02L HLA-DRB1*04:10L HLA-DPA1*01:03-B1*104:01L
LDSKTQSLLIVNN

SEQ ID NO: 14839 - protein, 14 aa, Severe acute respiratory syndrome coronavirus 2
  REGION 1..14: note = Table B: HLA-DRB1*13:02L HLA-DRB1*01:02L HLA-DPA1*01:03-B1*104:01L
DSKTQSLLIVNNAT

SEQ ID NO: 14840 - protein, 13 aa, Severe acute respiratory syndrome coronavirus 2
  REGION 1..13: note = Table B: HLA-DRB1*13:02L HLA-DRB1*14:01L HLA-DRB1*15:03L
TQSLLIVNNATNV

SEQ ID NO: 14841 - protein, 16 aa, Severe acute respiratory syndrome coronavirus 2
  REGION 1..16: note = Table B: HLA-DRB1*13:02L
TNVVIKVCEFQFCNDP

SEQ ID NO: 14842 - protein, 12 aa, Severe acute respiratory syndrome coronavirus 2
  REGION 1..12: note = Table B: HLA-DRB1*13:02L HLA-DRB1*08:04L HLA-DRB1*08:01L HLA-DRB1*04:08L
GVYYHKNNKSWM

SEQ ID NO: 14843 - protein, 14 aa, Severe acute respiratory syndrome coronavirus 2
  REGION 1..14: note = Table B: HLA-DRB1*13:02L
VYYHKNNKSWMESE

SEQ ID NO: 14844 - protein, 14 aa, Severe acute respiratory syndrome coronavirus 2
  REGION 1..14: note = Table B: HLA-DRB1*13:02L HLA-DRB1*04:05L HLA-DRB1*08:04L HLA-DRB1*11:01L HLA-DRB3*01:01L
NNKSWMESEFRVYS

SEQ ID NO: 14845 - protein, 14 aa, Severe acute respiratory syndrome coronavirus 2
  REGION 1..14: note = Table B: HLA-DRB1*13:02L HLA-DRB1*04:05L HLA-DRB1*01:02L HLA-DRB1*08:04L HLA-DRB1*14:01L HLA-DRB1*11:04L HLA-DRB1*11:01L HLA-DRB3*01:01L
KSWMESEFRVYSSA

SEQ ID NO: 14846 - protein, 12 aa, Severe acute respiratory syndrome coronavirus 2
  REGION 1..12: note = Table B: HLA-DRB1*13:02L HLA-DRB1*04:04L HLA-DRB1*08:04L HLA-DRB1*08:77L HLA-DRB3*02:01L HLA-DRB1*11:03L HLA-DRB1*11:04L HLA-DRB1*08:01L HLA-DQA1*05:05-B1*03:19L HLA-DRB1*09:01L HLA-DPA1*01:03-B1*04:02L HLA-DRB1*12:02L
  REGION 1..12: note = CONT. FROM ABOVE: HLA-DPA1*02:01-B1*13:01L HLA-DPA1*01:03-B1*104 :01L HLA-DRB1*10:01L HLA-DRB1*08:03L
ESEFRVYSSANN

SEQ ID NO: 14847 - protein, 13 aa, Severe acute respiratory syndrome coronavirus 2
  REGION 1..13: note = Table B: HLA-DRB1*13:02L HLA-DRB1*04:04L HLA-DRB1*01:01L HLA-DRB3*02:01L HLA-DRB1*11:03L HLA-DRB1*11:04L HLA-DRB1*14:02L HLA-DRB1*08:01L HLA-DRB1*11:01L HLA-DQA1*05:05-B1*03:19L HLA-DPA1*01:03-B1*04:01L HLA-DPA1*01:03-B1*04:02L
  REGION 1..13: note = CONT. FROM ABOVE: HLA-DRB3*01:01L HLA-DPA1*01:03-B1*104:01L HLA- DRB1*07:01L HLA-DRB1*10:01L HLA-DRB1*15:01L
SEFRVYSSANNCT

SEQ ID NO: 14848 - protein, 14 aa, Severe acute respiratory syndrome coronavirus 2
  REGION 1..14: note = Table B: HLA-DRB1*13:02L HLA-DRB3*02:01L HLA-DRB1*14:01L HLA-DRB1*11:04L HLA-DRB1*10:01L HLA-DRB1*08:03L
TFEYVSQPFLMDLE

SEQ ID NO: 14849 - protein, 14 aa, Severe acute respiratory syndrome coronavirus 2
  REGION 1..14: note = Table B: HLA-DRB1*13:02L HLA-DRB1*14:01L HLA-DRB3*01:01L
FKNLREFVFKNIDG

SEQ ID NO: 14850 - protein, 13 aa, Severe acute respiratory syndrome coronavirus 2
  REGION 1..13: note = Table B: HLA-DRB1*13:02L HLA-DRB1*01:02L HLA-DRB1*08:04L HLA-DRB1*08:01L HLA-DRB1*04:08L
LREFVFKNIDGYF

SEQ ID NO: 14851 - protein, 11 aa, Severe acute respiratory syndrome coronavirus 2
  REGION 1..11: note = Table B: HLA-DRB1*13:02L HLA-DRB1*13:03L HLA-DRB1*04:02L HLA-DRB1*01:02L HLA-DRB1*14:01L HLA-DRB1*08:01L HLA-DRB1*12:01L HLA-DRB1*14:17L HLA-DRB1*04:08L
FVFKNIDGYFK

SEQ ID NO: 14852 - protein, 14 aa, Severe acute respiratory syndrome coronavirus 2
  REGION 1..14: note = Table B: HLA-DRB1*13:02L HLA-DRB1*04:05L HLA-DRB1*11:01L HLA-DRB1*12:01L HLA-DRB1*15:03L
FKNIDGYFKIYSKH

SEQ ID NO: 14853 - protein, 12 aa, Severe acute respiratory syndrome coronavirus 2
  REGION 1..12: note = Table B: HLA-DRB1*13:02L HLA-DRB3*01:01L HLA-DPA1*02:01-B1*13:01L HLA-DPA1*03:01-B1*105:01L HLA-DRB1*15:03L
YFKIYSKHTPIN

SEQ ID NO: 14854 - protein, 10 aa, Severe acute respiratory syndrome coronavirus 2
  REGION 1..10: note = Table B: HLA-DRB1*13:02L HLA-DRB1*13:03L HLA-DRB1*01:01L HLA-DRB4*03:01NL HLA-DRB1*11:04L HLA-DRB1*08:01L HLA-DRB5*01:01L HLA-DPA1*01:03-B1*04:02L HLA-DRB1*12:01L HLA-DQA1*03:01-B1*03:02M HLA-DQA1*05:05-B1*03:01M
  REGION 1..10: note = CONT. FROM ABOVE: HLA-DQA1*01:03-B1*06:01L HLA-DQA1*02:01-B1*03: 03L
DLPIGINITR

SEQ ID NO: 14855 - protein, 13 aa, Severe acute respiratory syndrome coronavirus 2
  REGION 1..13: note = Table B: HLA-DRB1*13:02L HLA-DRB1*04:04L HLA-DRB1*04:10L HLA-DPA1*01:03-B1*104:01L
ALHRSYLTPGDSS

SEQ ID NO: 14856 - protein, 17 aa, Severe acute respiratory syndrome coronavirus 2
  REGION 1..17: note = Table B: HLA-DRB1*13:02L HLA-DRB1*08:04L HLA-DPA1*02:01-B1*13:01L
TPGDSSSGWTAGAAAYY

SEQ ID NO: 14857 - protein, 12 aa, Severe acute respiratory syndrome coronavirus 2
  REGION 1..12: note = Table B: HLA-DRB1*13:02L HLA-DRB1*04:04L HLA-DRB1*08:04L HLA-DRB3*02:01L HLA-DPA1*01:03-B1*03:01L HLA-DRB1*14:01L HLA-DRB1*11:03L HLA-DQA1*01:01-B1*05:01L HLA-DRB1*08:01L HLA-DQA1*05:05-B1*03:19L HLA-DPA1*01:03-B1*04:01L
  REGION 1..12: note = CONT. FROM ABOVE: HLA-DRB1*04:10L HLA-DRB1*12:02L HLA-DPA1*02:01 -B1*13:01L HLA-DRB1*14:54L HLA-DQA1*05:05-B1*03:01L HLA-DRB1*10: 01L HLA-DRB1*08:03L
AAYYVGYLQPRT

SEQ ID NO: 14858 - protein, 14 aa, Severe acute respiratory syndrome coronavirus 2
  REGION 1..14: note = Table B: HLA-DRB1*13:02L
VGYLQPRTFLLKYN

SEQ ID NO: 14859 - protein, 16 aa, Severe acute respiratory syndrome coronavirus 2
  REGION 1..16: note = Table B: HLA-DRB1*13:02L HLA-DPA1*03:01-B1*04:02L HLA-DRB1*11:01L HLA-DRB4*01:01L HLA-DPA1*01:03-B1*04:02L HLA-DRB1*14:54L HLA-DPA1*01:03-B1*02:01L HLA-DPA1*01:03-B1*104:01L HLA-DPA1*01:02-B1*04:01L
ITDAVDCALDPLSETK

SEQ ID NO: 14860 - protein, 11 aa, Severe acute respiratory syndrome coronavirus 2
  REGION 1..11: note = Table B: HLA-DRB1*13:02L HLA-DRB1*13:03L HLA-DRB1*04:05L HLA-DRB1*01:02L HLA-DRB1*08:04L HLA-DRB1*08:77L HLA-DRB3*02:01L HLA-DRB1*03:01L HLA-DRB1*14:01L HLA-DRB1*11:02L HLA-DRB1*11:04L HLA-DRB1*08:01L HLA-DRB1*11:01L HLA-DRB4*01:01L
  REGION 1..11: note = CONT. FROM ABOVE: HLA-DQA1*05:05-B1*03:116L HLA-DQA1*03:01-B1*03 :02L HLA-DRB1*10:01L
VFNATRFASVY

SEQ ID NO: 14861 - protein, 12 aa, Severe acute respiratory syndrome coronavirus 2
  REGION 1..12: note = Table B: HLA-DRB1*13:02L HLA-DRB1*13:03L HLA-DRB1*01:03L HLA-DRB1*04:04L HLA-DRB1*04:05L HLA-DRB1*01:02L HLA-DPA1*01:03-B1*03:01L HLA-DRB1*08:01L HLA-DRB1*11:01L HLA-DPA1*02:01-B1*13:01L HLA-DPA1*01:03-B1*104:01L
  REGION 1..12: note = CONT. FROM ABOVE: HLA-DPA1*01:02-B1*04:01L HLA-DRB1*07:01L HLA-D RB1*16:01L HLA-DRB1*04:08L HLA-DRB1*15:03L
ATRFASVYAWNR

SEQ ID NO: 14862 - protein, 12 aa, Severe acute respiratory syndrome coronavirus 2
  REGION 1..12: note = Table B: HLA-DRB1*13:02L HLA-DRB1*04:05L HLA-DRB1*01:02L HLA-DRB1*11:04L HLA-DRB1*08:01L HLA-DRB1*11:01L HLA-DRB1*12:01L HLA-DRB3*01:01L HLA-DPA1*01:02-B1*04:01L HLA-DRB1*16:01L HLA-DRB1*04:08L HLA-DRB1*15:03L
ASVYAWNRKRIS

SEQ ID NO: 14863 - protein, 12 aa, Severe acute respiratory syndrome coronavirus 2
  REGION 1..12: note = Table B: HLA-DRB1*13:02L HLA-DRB1*04:02L HLA-DRB1*04:05L HLA-DRB1*11:02L HLA-DRB1*11:03L HLA-DRB1*13:01L HLA-DRB1*12:01L HLA-DRB1*14:54L HLA-DPA1*01:02-B1*04:01L HLA-DRB1*08:03L HLA-DRB1*15:03L
SVYAWNRKRISN

SEQ ID NO: 14864 - protein, 13 aa, Severe acute respiratory syndrome coronavirus 2
  REGION 1..13: note = Table B: HLA-DRB1*13:02L HLA-DRB1*04:04L HLA-DRB1*04:05L HLA-DQA1*01:02-B1*06:02L HLA-DPA1*01:03-B1*03:01L HLA-DRB1*12:01L HLA-DQA1*03:01-B1*03:02L HLA-DRB1*16:01L HLA-DQA1*02:01-B1*03:03L HLA-DRB1*15:03L
NRKRISNCVADYS

SEQ ID NO: 14865 - protein, 14 aa, Severe acute respiratory syndrome coronavirus 2
  REGION 1..14: note = Table B: HLA-DRB1*13:02L HLA-DRB1*04:05L HLA-DRB1*01:02L HLA-DPA1*03:01-B1*04:02L HLA-DRB1*12:01L HLA-DPA1*03:01-B1*105:01L HLA-DPA1*01:03-B1*104:01L HLA-DPA1*01:02-B1*04:01L HLA-DRB1*15:03L
SPTKLNDLCFTNVY

SEQ ID NO: 14866 - protein, 13 aa, Severe acute respiratory syndrome coronavirus 2
  REGION 1..13: note = Table B: HLA-DRB1*13:02L HLA-DRB1*08:04L HLA-DRB1*11:04L HLA-DRB1*04:10L HLA-DRB3*01:01L HLA-DPA1*02:01-B1*13:01L HLA-DPA1*03:01-B1*105:01L HLA-DPA1*01:02-B1*04:01L HLA-DRB1*08:03L
ADSFVIRGDEVRQ

SEQ ID NO: 14867 - protein, 14 aa, Severe acute respiratory syndrome coronavirus 2
  REGION 1..14: note = Table B: HLA-DRB1*13:02L HLA-DRB3*01:01L HLA-DRB1*15:03L
SFVIRGDEVRQIAP

SEQ ID NO: 14868 - protein, 10 aa, Severe acute respiratory syndrome coronavirus 2
  REGION 1..10: note = Table B: HLA-DRB1*13:02L HLA-DRB1*13:03L HLA-DRB1*01:03L HLA-DRB1*01:01L HLA-DRB4*03:01NL HLA-DRB1*14:01L HLA-DRB1*11:04L HLA-DRB1*08:01L HLA-DRB1*12:01L HLA-DRB3*01:01L HLA-DQA1*03:01-B1*03:02L HLA-DQA1*05:05-B1*03:01L
  REGION 1..10: note = CONT. FROM ABOVE: HLA-DRB1*16:01L
RQIAPGQTGK

SEQ ID NO: 14869 - protein, 12 aa, Severe acute respiratory syndrome coronavirus 2
  REGION 1..12: note = Table B: HLA-DRB1*13:02L
QIAPGQTGKIAD

SEQ ID NO: 14870 - protein, 13 aa, Severe acute respiratory syndrome coronavirus 2
  REGION 1..13: note = Table B: HLA-DRB1*13:02L HLA-DRB1*04:05L HLA-DRB3*02:01L HLA-DRB1*11:01L HLA-DRB4*02:01NL HLA-DQA1*05:05-B1*03:116L HLA-DPA1*02:01-B1*13:01L
IAPGQTGKIADYN

SEQ ID NO: 14871 - protein, 14 aa, Severe acute respiratory syndrome coronavirus 2
  REGION 1..14: note = Table B: HLA-DRB1*13:02L HLA-DRB1*04:04L HLA-DRB1*04:05L HLA-DRB1*11:01L HLA-DRB3*01:01L HLA-DPA1*02:01-B1*13:01L HLA-DPA1*01:02-B1*04:01L HLA-DRB1*07:01L
APGQTGKIADYNYK

SEQ ID NO: 14872 - protein, 16 aa, Severe acute respiratory syndrome coronavirus 2
  REGION 1..16: note = Table B: HLA-DRB1*13:02L HLA-DRB1*04:02L HLA-DPA1*03:01-B1*04:02L HLA-DRB1*14:02L HLA-DQA1*01:01-B1*05:01L HLA-DRB1*11:01L HLA-DQA1*01-B1*05L HLA-DPA1*01:02-B1*04:01L HLA-DRB1*10:01L
LPDDFTGCVIAWNSNN

SEQ ID NO: 14873 - protein, 11 aa, Severe acute respiratory syndrome coronavirus 2
  REGION 1..11: note = Table B: HLA-DRB1*13:02L HLA-DRB1*13:03L HLA-DRB1*01:03L HLA-DRB1*04:04L HLA-DRB1*08:77L HLA-DRB1*14:01L HLA-DRB1*11:03L HLA-DRB1*11:04L HLA-DRB1*12:02L HLA-DRB1*14:54L HLA-DRB1*10:01L HLA-DRB1*04:08L HLA-DRB1*08:03L
VIAWNSNNLDS

SEQ ID NO: 14874 - protein, 13 aa, Severe acute respiratory syndrome coronavirus 2
  REGION 1..13: note = Table B: HLA-DRB1*13:02L HLA-DRB1*04:05L
GGNYNYLYRLFRK

SEQ ID NO: 14875 - protein, 13 aa, Severe acute respiratory syndrome coronavirus 2
  REGION 1..13: note = Table B: HLA-DRB1*13:02L HLA-DRB1*04:05L HLA-DRB1*08:04L HLA-DRB1*11:03L HLA-DRB1*15:03L
GNYNYLYRLFRKS

SEQ ID NO: 14876 - protein, 13 aa, Severe acute respiratory syndrome coronavirus 2
  REGION 1..13: note = Table B: HLA-DRB1*13:02L HLA-DPA1*01:03-B1*02:01L
NYNYLYRLFRKSN

SEQ ID NO: 14877 - protein, 13 aa, Severe acute respiratory syndrome coronavirus 2
  REGION 1..13: note = Table B: HLA-DRB1*13:02L HLA-DRB1*14:01L HLA-DRB1*11:04L HLA-DRB1*11:01L HLA-DRB1*12:01L HLA-DRB3*01:01L HLA-DRB1*15:03L
YLYRLFRKSNLKP

SEQ ID NO: 14878 - protein, 13 aa, Severe acute respiratory syndrome coronavirus 2
  REGION 1..13: note = Table B: HLA-DRB1*13:02L HLA-DRB1*04:05L HLA-DQA1*01:02-B1*06:02L HLA-DRB1*11:04L HLA-DRB1*11:01L HLA-DRB3*01:01L HLA-DPA1*02:01-B1*13:01L HLA-DQA1*03:01-B1*03:02L HLA-DQA1*02:01-B1*03:03L
YRLFRKSNLKPFE

SEQ ID NO: 14879 - protein, 14 aa, Severe acute respiratory syndrome coronavirus 2
  REGION 1..14: note = Table B: HLA-DRB1*13:02L HLA-DRB1*04:05L HLA-DRB3*01:01L HLA-DPA1*02:01-B1*13:01L
RLFRKSNLKPFERD

SEQ ID NO: 14880 - protein, 13 aa, Severe acute respiratory syndrome coronavirus 2
  REGION 1..13: note = Table B: HLA-DRB1*13:02L HLA-DRB1*01:03L HLA-DRB1*04:05L HLA-DQA1*01:02-B1*06:02L HLA-DRB1*01:02L HLA-DRB1*08:04L HLA-DRB1*11:03L HLA-DRB1*11:04L HLA-DRB1*11:01L HLA-DRB1*12:01L HLA-DRB3*01:01L HLA-DRB1*14:54L HLA-DRB1*14:17L HLA-DRB1*04:08L
  REGION 1..13: note = CONT. FROM ABOVE: HLA-DRB1*08:03L HLA-DRB1*15:03L
SNLKPFERDISTE

SEQ ID NO: 14881 - protein, 12 aa, Severe acute respiratory syndrome coronavirus 2
  REGION 1..12: note = Table B: HLA-DRB1*13:02L HLA-DRB1*13:03L HLA-DRB1*01:03L HLA-DRB1*04:02L HLA-DRB1*04:05L HLA-DRB1*01:02L HLA-DRB4*03:01NL HLA-DRB1*08:04L HLA-DRB3*02:01L HLA-DRB1*14:01L HLA-DRB1*11:03L HLA-DRB1*11:04L HLA-DRB1*12:01L HLA-DRB1*12:02L HLA-DRB3*01:01L
  REGION 1..12: note = CONT. FROM ABOVE: HLA-DPA1*03:01-B1*105:01L HLA-DQA1*03:01-B1*03 :02L HLA-DRB1*14:54L HLA-DQA1*05:05-B1*03:01L HLA-DPA1*01:02-B1* 04:01L HLA-DRB1*04:08L
PFERDISTEIYQ

SEQ ID NO: 14882 - protein, 12 aa, Severe acute respiratory syndrome coronavirus 2
  REGION 1..12: note = Table B: HLA-DRB1*13:02L HLA-DQA1*01:02-B1*06:02L HLA-DRB1*01:02L HLA-DRB4*03:01NL HLA-DRB1*08:77L HLA-DRB3*02:01L HLA-DRB1*14:01L HLA-DQA1*05:01-B1*02:01L HLA-DRB1*12:01L HLA-DRB1*12:02L HLA-DPA1*03:01-B1*105:01L HLA-DRB1*14:54L
  REGION 1..12: note = CONT. FROM ABOVE: HLA-DRB1*14:17L HLA-DRB1*16:01L HLA-DQA1*01:03 -B1*06:01L HLA-DRB1*04:08L HLA-DRB1*15:03L
TEIYQAGSTPCN

SEQ ID NO: 14883 - protein, 12 aa, Severe acute respiratory syndrome coronavirus 2
  REGION 1..12: note = Table B: HLA-DRB1*13:02L HLA-DRB1*13:03L HLA-DRB1*01:03L HLA-DRB1*04:04L HLA-DRB1*04:05L HLA-DQA1*01:02-B1*06:02L HLA-DRB1*01:01L HLA-DRB1*01:02L HLA-DRB4*03:01NL HLA-DRB1*08:77L HLA-DPA1*01:03-B1*03:01L HLA-DRB1*14:01L HLA-DRB1*11:03L
  REGION 1..12: note = CONT. FROM ABOVE: HLA-DRB1*14:02L HLA-DQA1*05:01-B1*02:01L HLA-D RB1*12:01L HLA-DPA1*03:01-B1*105:01L HLA-DRB1*14:54L HLA-DRB1*14 :17L HLA-DRB1*10:01L HLA-DRB1*16:01L HLA-DQA1*01:03-B1*06:01L HL A-DRB1*04:08L HLA-DRB1*15:03L
EIYQAGSTPCNG

SEQ ID NO: 14884 - protein, 13 aa, Severe acute respiratory syndrome coronavirus 2
  REGION 1..13: note = Table B: HLA-DRB1*13:02L HLA-DRB1*13:03L HLA-DRB1*01:03L HLA-DRB1*04:04L HLA-DQA1*01:02-B1*06:02L HLA-DRB1*01:02L HLA-DRB1*08:04L HLA-DRB1*08:77L HLA-DRB3*02:01L HLA-DPA1*01:03-B1*03:01L HLA-DPA1*03:01-B1*04:02L
  REGION 1..13: note = CONT. FROM ABOVE: HLA-DRB1*14:01L HLA-DRB1*11:03L HLA-DRB1*11:04 L HLA-DRB1*14:02L HLA-DRB1*08:01L HLA-DRB1*04:10L HLA-DRB1*09:01 L HLA-DRB1*12:01L HLA-DRB1*12:02L HLA-DPA1*02:01-B1*13:01L HLA-D PA1*03:01-B1*105:01L HLA-DRB1*10:01L HLA-DRB1*04:08L
  REGION 1..13: note = CONT. FROM ABOVE: HLA-DRB1*08:03L HLA-DRB1*15:03L
LQSYGFQPTNGVG

SEQ ID NO: 14885 - protein, 13 aa, Severe acute respiratory syndrome coronavirus 2
  REGION 1..13: note = Table B: HLA-DRB1*13:02L HLA-DRB1*04:05L HLA-DRB1*01:02L HLA-DRB1*08:01L HLA-DPA1*01:03-B1*04:02L HLA-DRB1*04:08L
FQPTNGVGYQPYR

SEQ ID NO: 14886 - protein, 16 aa, Severe acute respiratory syndrome coronavirus 2
  REGION 1..16: note = Table B: HLA-DRB1*13:02L HLA-DPA1*01:03-B1*03:01L HLA-DPA1*01:03-B1*04:02L
QPTNGVGYQPYRVVVL

SEQ ID NO: 14887 - protein, 13 aa, Severe acute respiratory syndrome coronavirus 2
  REGION 1..13: note = Table B: HLA-DRB1*13:02L HLA-DRB1*04:02L HLA-DPA1*01:03-B1*03:01L HLA-DPA1*01:03-B1*04:02L HLA-DQA1*05:05-B1*03:01L
GVGYQPYRVVVLS

SEQ ID NO: 14888 - protein, 14 aa, Severe acute respiratory syndrome coronavirus 2
  REGION 1..14: note = Table B: HLA-DRB1*13:02L HLA-DPA1*01:03-B1*03:01L HLA-DPA1*01:03-B1*04:02L HLA-DQA1*05:05-B1*03:01L HLA-DRB1*07:01L HLA-DRB1*15:01L
VGYQPYRVVVLSFE

SEQ ID NO: 14889 - protein, 14 aa, Severe acute respiratory syndrome coronavirus 2
  REGION 1..14: note = Table B: HLA-DRB1*13:02L HLA-DRB1*04:04L HLA-DRB1*11:04L HLA-DRB1*11:01L HLA-DRB3*01:01L
RVVVLSFELLHAPA

SEQ ID NO: 14890 - protein, 12 aa, Severe acute respiratory syndrome coronavirus 2
  REGION 1..12: note = Table B: HLA-DRB1*13:02L HLA-DRB1*04:04L HLA-DQA1*01:02-B1*06:02L HLA-DRB1*08:04L HLA-DRB3*02:01L HLA-DPA1*01:03-B1*03:01L HLA-DRB1*14:01L HLA-DRB1*11:03L HLA-DRB1*11:04L HLA-DRB1*08:01L HLA-DQA1*05:05-B1*03:19L
  REGION 1..12: note = CONT. FROM ABOVE: HLA-DPA1*01:03-B1*04:01L HLA-DRB1*04:10L HLA-D PA1*01:03-B1*04:02L HLA-DRB1*12:02L HLA-DPA1*02:01-B1*13:01L HLA -DRB1*14:54L HLA-DPA1*01:03-B1*02:01L HLA-DPA1*01:03-B1*104:01L HLA-DQA1*05:05-B1*03:01L HLA-DRB1*10:01L
  REGION 1..12: note = CONT. FROM ABOVE: HLA-DQA1*01:03-B1*06:01L HLA-DRB1*08:03L
VLSFELLHAPAT

SEQ ID NO: 14891 - protein, 12 aa, Severe acute respiratory syndrome coronavirus 2
  REGION 1..12: note = Table B: HLA-DRB1*13:02L HLA-DRB1*13:03L HLA-DRB1*01:03L HLA-DRB1*04:04L HLA-DRB1*04:05L HLA-DRB1*01:02L HLA-DPA1*01:03-B1*03:01L HLA-DRB1*08:01L HLA-DRB1*11:01L HLA-DRB1*12:01L HLA-DPA1*02:01-B1*13:01L
  REGION 1..12: note = CONT. FROM ABOVE: HLA-DPA1*01:02-B1*04:01L HLA-DRB1*07:01L HLA-D RB1*16:01L HLA-DRB1*04:08L HLA-DQA1*02:01-B1*03:03L
GPKKSTNLVKNK

SEQ ID NO: 14892 - protein, 12 aa, Severe acute respiratory syndrome coronavirus 2
  REGION 1..12: note = Table B: HLA-DRB1*13:02L HLA-DRB1*01:02L HLA-DRB1*14:01L HLA-DRB1*12:01L HLA-DRB1*15:03L
TNLVKNKCVNFN

SEQ ID NO: 14893 - protein, 14 aa, Severe acute respiratory syndrome coronavirus 2
  REGION 1..14: note = Table B: HLA-DRB1*13:02L HLA-DRB1*01:02L HLA-DRB1*14:01L HLA-DRB1*12:01L
NLVKNKCVNFNFNG

SEQ ID NO: 14894 - protein, 14 aa, Severe acute respiratory syndrome coronavirus 2
  REGION 1..14: note = Table B: HLA-DRB1*13:02L HLA-DRB1*04:04L HLA-DRB1*11:01L HLA-DRB1*04:10L HLA-DPA1*02:01-B1*13:01L HLA-DPA1*01:03-B1*104:01L HLA-DRB1*15:03L
NGLTGTGVLTESNK

SEQ ID NO: 14895 - protein, 14 aa, Severe acute respiratory syndrome coronavirus 2
  REGION 1..14: note = Table B: HLA-DRB1*13:02L HLA-DRB1*04:08L
VLTESNKKFLPFQQ

SEQ ID NO: 14896 - protein, 14 aa, Severe acute respiratory syndrome coronavirus 2
  REGION 1..14: note = Table B: HLA-DRB1*13:02L
KFLPFQQFGRDIAD

SEQ ID NO: 14897 - protein, 14 aa, Severe acute respiratory syndrome coronavirus 2
  REGION 1..14: note = Table B: HLA-DRB1*13:02L
FLPFQQFGRDIADT

SEQ ID NO: 14898 - protein, 10 aa, Severe acute respiratory syndrome coronavirus 2
  REGION 1..10: note = Table B: HLA-DRB1*13:02L HLA-DRB1*13:03M HLA-DRB1*04:02L HLA-DRB1*01:01L HLA-DRB4*03:01NL HLA-DRB3*02:01L HLA-DRB1*14:01L HLA-DRB1*11:04L HLA-DRB1*14:02L HLA-DRB1*08:01L HLA-DRB5*01:01L HLA-DPA1*01:03-B1*04:02L HLA-DRB1*12:01M HLA-DRB1*12:02L
  REGION 1..10: note = CONT. FROM ABOVE: HLA-DPA1*03:01-B1*105:01L HLA-DQA1*03:01-B1*03 :02L HLA-DQA1*05:05-B1*03:01L HLA-DRB1*14:17L HLA-DRB1*16:01L HL A-DQA1*01:03-B1*06:01L HLA-DRB1*08:03L HLA-DQA1*02:01-B1*03:03L
DIADTTDAVR

SEQ ID NO: 14899 - protein, 12 aa, Severe acute respiratory syndrome coronavirus 2
  REGION 1..12: note = Table B: HLA-DRB1*13:02L HLA-DRB1*13:03L HLA-DRB1*01:03L HLA-DRB1*04:05L HLA-DQA1*01:02-B1*06:02L HLA-DRB1*01:02L HLA-DRB1*08:77L HLA-DPA1*01:03-B1*03:01L HLA-DRB1*14:01L HLA-DRB1*14:02L HLA-DQA1*05:05-B1*03:19L HLA-DRB1*04:10L
  REGION 1..12: note = CONT. FROM ABOVE: HLA-DRB1*12:01L HLA-DRB1*12:02L HLA-DPA1*02:01 -B1*13:01L HLA-DPA1*03:01-B1*105:01L HLA-DRB1*14:54L HLA-DRB1*04 :08L HLA-DRB1*15:03L
IADTTDAVRDPQ

SEQ ID NO: 14900 - protein, 11 aa, Severe acute respiratory syndrome coronavirus 2
  REGION 1..11: note = Table B: HLA-DRB1*13:02L HLA-DQA1*01:02-B1*06:02L HLA-DPA1*01:03-B1*03:01L HLA-DQA1*05:05-B1*03:19L HLA-DRB1*04:10L HLA-DRB1*12:02L HLA-DPA1*03:01-B1*105:01L HLA-DRB1*04:08L
DTTDAVRDPQT

SEQ ID NO: 14901 - protein, 12 aa, Severe acute respiratory syndrome coronavirus 2
  REGION 1..12: note = Table B: HLA-DRB1*13:02L HLA-DRB1*13:03L HLA-DRB1*01:03L HLA-DRB1*04:02L HLA-DRB1*04:05L HLA-DRB1*01:02L HLA-DRB4*03:01NL HLA-DRB3*02:01L HLA-DRB1*14:01L HLA-DRB1*08:01L HLA-DRB1*04:10L HLA-DPA1*02:01-B1*13:01L HLA-DPA1*01:03-B1*104:01L
  REGION 1..12: note = CONT. FROM ABOVE: HLA-DRB1*04:08L
SNQVAVLYQDVN

SEQ ID NO: 14902 - protein, 14 aa, Severe acute respiratory syndrome coronavirus 2
  REGION 1..14: note = Table B: HLA-DRB1*13:02L HLA-DRB1*01:03L HLA-DRB1*04:02L HLA-DRB1*04:05L HLA-DQA1*01:02-B1*06:02L HLA-DRB1*01:02L HLA-DRB1*08:04L HLA-DPA1*01:03-B1*03:01L HLA-DPA1*03:01-B1*04:02L HLA-DRB1*14:01L HLA-DRB1*14:02L
  REGION 1..14: note = CONT. FROM ABOVE: HLA-DQA1*05:01-B1*02:01L HLA-DRB4*01:01L HLA-D PA1*01:03-B1*04:02L HLA-DRB1*12:01L HLA-DPA1*02:01-B1*13:01L HLA -DPA1*03:01-B1*105:01L HLA-DQA1*03:01-B1*03:02L HLA-DRB1*14:17L HLA-DRB1*16:01L HLA-DRB1*04:08L
VAVLYQDVNCTEVP

SEQ ID NO: 14903 - protein, 14 aa, Severe acute respiratory syndrome coronavirus 2
  REGION 1..14: note = Table B: HLA-DRB1*13:02L HLA-DRB1*01:03L HLA-DRB1*04:02L HLA-DRB1*04:04L HLA-DRB1*04:05L HLA-DRB1*08:04L HLA-DPA1*01:03-B1*03:01L HLA-DPA1*03:01-B1*04:02L HLA-DRB1*08:01L HLA-DPA1*01:03-B1*04:02L HLA-DRB1*12:01L
  REGION 1..14: note = CONT. FROM ABOVE: HLA-DPA1*02:01-B1*13:01L HLA-DPA1*01:03-B1*104 :01L HLA-DRB1*16:01L HLA-DRB1*04:08L HLA-DRB1*15:03L
YQDVNCTEVPVAIH

SEQ ID NO: 14904 - protein, 13 aa, Severe acute respiratory syndrome coronavirus 2
  REGION 1..13: note = Table B: HLA-DRB1*13:02L HLA-DRB1*04:05L HLA-DRB1*01:02L HLA-DPA1*01:03-B1*03:01L HLA-DQA1*05:05-B1*03:19L HLA-DRB1*12:01L HLA-DPA1*02:01-B1*13:01L HLA-DPA1*01:03-B1*104:01L HLA-DRB1*04:08L
FQTRAGCLIGAEH

SEQ ID NO: 14905 - protein, 16 aa, Severe acute respiratory syndrome coronavirus 2
  REGION 1..16: note = Table B: HLA-DRB1*13:02L HLA-DRB1*04:05L HLA-DRB1*01:02L HLA-DPA1*01:03-B1*03:01L HLA-DRB1*12:01L HLA-DPA1*02:01-B1*13:01L HLA-DPA1*01:03-B1*104:01L HLA-DRB1*15:03L
GAEHVNNSYECDIPIG

SEQ ID NO: 14906 - protein, 13 aa, Severe acute respiratory syndrome coronavirus 2
  REGION 1..13: note = Table B: HLA-DRB1*13:02L HLA-DRB1*13:03L HLA-DRB1*08:04L HLA-DPA1*01:03-B1*03:01L HLA-DPA1*03:01-B1*04:02L HLA-DRB1*11:04L HLA-DRB1*14:02L HLA-DPA1*01:03-B1*04:02L HLA-DRB3*01:01L HLA-DPA1*02:01-B1*13:01L HLA-DRB1*14:54L
  REGION 1..13: note = CONT. FROM ABOVE: HLA-DRB1*10:01L
NNSYECDIPIGAG

SEQ ID NO: 14907 - protein, 13 aa, Severe acute respiratory syndrome coronavirus 2
  REGION 1..13: note = Table B: HLA-DRB1*13:02L HLA-DRB1*13:03L HLA-DRB1*08:77L HLA-DRB1*11:03L HLA-DRB1*12:02L HLA-DPA1*02:01-B1*13:01L
IIAYTMSLGAENS

SEQ ID NO: 14908 - protein, 12 aa, Severe acute respiratory syndrome coronavirus 2
  REGION 1..12: note = Table B: HLA-DRB1*13:02L
AYSNNSIAIPTN

SEQ ID NO: 14909 - protein, 14 aa, Severe acute respiratory syndrome coronavirus 2
  REGION 1..14: note = Table B: HLA-DRB1*13:02L HLA-DRB1*04:02L HLA-DRB1*04:05L HLA-DRB1*01:02L HLA-DPA1*01:03-B1*03:01L HLA-DRB1*14:01L HLA-DRB1*14:17L HLA-DRB1*16:01L
SNNSIAIPTNFTIS

SEQ ID NO: 14910 - protein, 12 aa, Severe acute respiratory syndrome coronavirus 2
  REGION 1..12: note = Table B: HLA-DRB1*13:02L HLA-DRB1*04:04L HLA-DRB1*01:02L HLA-DRB1*08:04L HLA-DPA1*01:03-B1*03:01L HLA-DRB1*04:08L HLA-DRB1*15:03L
ILPVSMTKTSVD

SEQ ID NO: 14911 - protein, 16 aa, Severe acute respiratory syndrome coronavirus 2
  REGION 1..16: note = Table B: HLA-DRB1*13:02L
SNLLLQYGSFCTQLNR

SEQ ID NO: 14912 - protein, 13 aa, Severe acute respiratory syndrome coronavirus 2
  REGION 1..13: note = Table B: HLA-DRB1*13:02L HLA-DPA1*02:01-B1*13:01L HLA-DPA1*01:03-B1*104:01L
QLNRALTGIAVEQ

SEQ ID NO: 14913 - protein, 13 aa, Severe acute respiratory syndrome coronavirus 2
  REGION 1..13: note = Table B: HLA-DRB1*13:02L HLA-DQA1*01:01-B1*05:01L HLA-DPA1*01:03-B1*104:01L
LNRALTGIAVEQD

SEQ ID NO: 14914 - protein, 12 aa, Severe acute respiratory syndrome coronavirus 2
  REGION 1..12: note = Table B: HLA-DRB1*13:02L HLA-DRB1*04:04L HLA-DRB1*08:04L HLA-DRB1*11:03L HLA-DRB1*11:04L HLA-DRB1*12:02L HLA-DPA1*02:01-B1*13:01L HLA-DPA1*01:02-B1*04:01L HLA-DRB1*07:01L HLA-DRB1*08:03L
RALTGIAVEQDK

SEQ ID NO: 14915 - protein, 14 aa, Severe acute respiratory syndrome coronavirus 2
  REGION 1..14: note = Table B: HLA-DRB1*13:02L HLA-DPA1*01:03-B1*104:01L
ALTGIAVEQDKNTQ

SEQ ID NO: 14916 - protein, 10 aa, Severe acute respiratory syndrome coronavirus 2
  REGION 1..10: note = Table B: HLA-DRB1*13:02L HLA-DRB1*13:03L HLA-DQA1*01:02-B1*06:02L HLA-DRB4*03:01NL HLA-DRB1*08:01L HLA-DRB5*01:01L HLA-DPA1*01:03-B1*04:02L HLA-DRB1*12:01L HLA-DPA1*03:01-B1*105:01L HLA-DQA1*03:01-B1*03:02L
  REGION 1..10: note = CONT. FROM ABOVE: HLA-DQA1*05:05-B1*03:01L HLA-DPA1*01:02-B1*04: 01L HLA-DQA1*01:03-B1*06:01L HLA-DQA1*02:01-B1*03:03L
NTQEVFAQVK

SEQ ID NO: 14917 - protein, 13 aa, Severe acute respiratory syndrome coronavirus 2
  REGION 1..13: note = Table B: HLA-DRB1*13:02L HLA-DRB4*03:01NL HLA-DRB1*08:04L HLA-DRB1*11:04L HLA-DRB1*14:02L HLA-DRB1*11:01L HLA-DRB1*12:02L HLA-DPA1*01:03-B1*104:01L HLA-DRB1*10:01L
GFNFSQILPDPSK

SEQ ID NO: 14918 - protein, 13 aa, Severe acute respiratory syndrome coronavirus 2
  REGION 1..13: note = Table B: HLA-DRB1*13:02L HLA-DRB1*13:03L HLA-DRB1*04:04L HLA-DRB1*08:04L HLA-DPA1*01:03-B1*03:01L HLA-DRB1*14:02L HLA-DQA1*01:01-B1*05:01L HLA-DRB1*08:01L HLA-DPA1*02:01-B1*13:01L HLA-DPA1*01:03-B1*02:01L
  REGION 1..13: note = CONT. FROM ABOVE: HLA-DPA1*01:03-B1*104:01L HLA-DRB1*15:03L
FNFSQILPDPSKP

SEQ ID NO: 14919 - protein, 10 aa, Severe acute respiratory syndrome coronavirus 2
  REGION 1..10: note = Table B: HLA-DRB1*13:02L HLA-DRB1*13:03L HLA-DRB4*03:01NL HLA-DPA1*01:03-B1*04:02L HLA-DRB1*12:01L HLA-DPA1*03:01-B1*105:01L HLA-DQA1*03:01-B1*03:02L HLA-DQA1*05:05-B1*03:01L HLA-DPA1*01:02-B1*04:01L
  REGION 1..10: note = CONT. FROM ABOVE: HLA-DQA1*02:01-B1*03:03L
SFIEDLLFNK

SEQ ID NO: 14920 - protein, 12 aa, Severe acute respiratory syndrome coronavirus 2
  REGION 1..12: note = Table B: HLA-DRB1*13:02L HLA-DRB1*13:03L HLA-DRB1*04:02L HLA-DQA1*01:02-B1*06:02L HLA-DRB1*08:04L HLA-DRB1*12:01L HLA-DRB1*14:54L HLA-DRB1*16:01L HLA-DRB1*15:03L
DLLFNKVTLADA

SEQ ID NO: 14921 - protein, 15 aa, Severe acute respiratory syndrome coronavirus 2
  REGION 1..15: note = Table B: HLA-DRB1*13:02L HLA-DQA1*05:05-B1*03:01L HLA-DQA1*01:03-B1*06:01L HLA-DQA1*02:01-B1*03:03L
DAGFIKQYGDCLGDI

SEQ ID NO: 14922 - protein, 13 aa, Severe acute respiratory syndrome coronavirus 2
  REGION 1..13: note = Table B: HLA-DRB1*13:02L HLA-DRB1*04:05L HLA-DQA1*01:02-B1*06:02L HLA-DRB1*01:02L HLA-DPA1*01:03-B1*03:01L HLA-DRB1*12:01L HLA-DPA1*02:01-B1*13:01L
IAARDLICAQKFN

SEQ ID NO: 14923 - protein, 13 aa, Severe acute respiratory syndrome coronavirus 2
  REGION 1..13: note = Table B: HLA-DRB1*13:02L HLA-DRB1*01:02L HLA-DRB1*11:04L HLA-DRB1*11:01L HLA-DRB3*01:01L
RDLICAQKFNGLT

SEQ ID NO: 14924 - protein, 15 aa, Severe acute respiratory syndrome coronavirus 2
  REGION 1..15: note = Table B: HLA-DRB1*13:02L HLA-DRB1*08:04L HLA-DPA1*03:01-B1*04:02L HLA-DRB1*14:02L HLA-DRB1*11:01L HLA-DRB4*02:01NL HLA-DPA1*01:03-B1*104:01L HLA-DRB1*15:03L
AGTITSGWTFGAGAA

SEQ ID NO: 14925 - protein, 15 aa, Severe acute respiratory syndrome coronavirus 2
  REGION 1..15: note = Table B: HLA-DRB1*13:02L HLA-DRB1*04:05L HLA-DQA1*01:01-B1*05:01L HLA-DRB1*11:01L HLA-DPA1*02:01-B1*13:01L
GWTFGAGAALQIPFA

SEQ ID NO: 14926 - protein, 14 aa, Severe acute respiratory syndrome coronavirus 2
  REGION 1..14: note = Table B: HLA-DRB1*13:02L HLA-DRB1*08:04L
QMAYRFNGIGVTQN

SEQ ID NO: 14927 - protein, 13 aa, Severe acute respiratory syndrome coronavirus 2
  REGION 1..13: note = Table B: HLA-DRB1*13:02L HLA-DRB1*04:02L HLA-DRB1*01:02L HLA-DRB1*14:01L HLA-DRB1*14:54L
GIGVTQNVLYENQ

SEQ ID NO: 14928 - protein, 14 aa, Severe acute respiratory syndrome coronavirus 2
  REGION 1..14: note = Table B: HLA-DRB1*13:02L HLA-DRB1*04:05L HLA-DRB1*08:04L HLA-DRB3*02:01L HLA-DPA1*02:01-B1*13:01L HLA-DRB1*04:08L
VTQNVLYENQKLIA

SEQ ID NO: 14929 - protein, 12 aa, Severe acute respiratory syndrome coronavirus 2
  REGION 1..12: note = Table B: HLA-DRB1*13:02L HLA-DRB1*13:03L HLA-DRB1*01:03L HLA-DRB1*04:02L HLA-DRB1*04:05L HLA-DQA1*01:02-B1*06:02L HLA-DRB1*01:02L HLA-DRB4*03:01NL HLA-DRB1*08:04L HLA-DRB1*08:77L HLA-DRB3*02:01L HLA-DPA1*01:03-B1*03:01L HLA-DRB1*08:01L
  REGION 1..12: note = CONT. FROM ABOVE: HLA-DQA1*01-B1*05L HLA-DQA1*05:01-B1*02:01L HL A-DPA1*01:03-B1*04:01L HLA-DPA1*01:03-B1*04:02L HLA-DRB1*12:01L HLA-DRB1*12:02L HLA-DPA1*02:01-B1*13:01L HLA-DRB1*14:54L HLA-DPA 1*01:03-B1*104:01L HLA-DQA1*05:05-B1*03:01L HLA-DRB1*14:17L
  REGION 1..12: note = CONT. FROM ABOVE: HLA-DQA1*01:03-B1*06:01L HLA-DRB1*04:08L
NQKLIANQFNSA

SEQ ID NO: 14930 - protein, 12 aa, Severe acute respiratory syndrome coronavirus 2
  REGION 1..12: note = Table B: HLA-DRB1*13:02L HLA-DRB1*13:03L HLA-DRB1*04:04L HLA-DRB1*04:05L HLA-DRB1*01:02L HLA-DRB1*08:04L HLA-DPA1*01:03-B1*03:01L HLA-DRB1*11:04L HLA-DRB1*08:01L HLA-DRB1*11:01L HLA-DRB1*04:10L HLA-DPA1*02:01-B1*13:01L
  REGION 1..12: note = CONT. FROM ABOVE: HLA-DRB1*14:54L HLA-DPA1*01:03-B1*02:01L HLA-D QA1*05:05-B1*03:01L HLA-DRB1*10:01L
KLIANQFNSAIG

SEQ ID NO: 14931 - protein, 12 aa, Severe acute respiratory syndrome coronavirus 2
  REGION 1..12: note = Table B: HLA-DRB1*13:02L HLA-DRB1*08:04L HLA-DRB1*08:77L HLA-DRB3*02:01L HLA-DPA1*01:03-B1*03:01L HLA-DPA1*03:01-B1*04:02L HLA-DRB1*08:01L HLA-DRB1*04:10L HLA-DRB1*09:01L HLA-DRB1*12:02L HLA-DPA1*02:01-B1*13:01L
ANQFNSAIGKIQ

SEQ ID NO: 14932 - protein, 13 aa, Severe acute respiratory syndrome coronavirus 2
  REGION 1..13: note = Table B: HLA-DRB1*13:02L HLA-DRB1*04:04L HLA-DRB1*01:01L HLA-DRB1*08:04L HLA-DPA1*01:03-B1*03:01L HLA-DPA1*03:01-B1*04:02L HLA-DRB1*11:03L HLA-DRB1*11:04L HLA-DRB1*14:02L HLA-DQA1*01:01-B1*05:01L HLA-DRB1*08:01L
  REGION 1..13: note = CONT. FROM ABOVE: HLA-DRB1*11:01L HLA-DRB1*04:10L HLA-DPA1*01:03 -B1*04:02L HLA-DRB1*12:02L HLA-DPA1*02:01-B1*13:01L HLA-DRB1*07: 01L HLA-DRB1*10:01L HLA-DRB1*08:03L
NQFNSAIGKIQDS

SEQ ID NO: 14933 - protein, 14 aa, Severe acute respiratory syndrome coronavirus 2
  REGION 1..14: note = Table B: HLA-DRB1*13:02L HLA-DRB1*08:04L HLA-DRB1*11:01L HLA-DPA1*02:01-B1*13:01L HLA-DPA1*01:03-B1*104:01L HLA-DRB1*08:03L
STASALGKLQDVVN

SEQ ID NO: 14934 - protein, 13 aa, Severe acute respiratory syndrome coronavirus 2
  REGION 1..13: note = Table B: HLA-DRB1*13:02L HLA-DPA1*01:03-B1*03:01L HLA-DPA1*02:01-B1*13:01L
ALGKLQDVVNQNA

SEQ ID NO: 14935 - protein, 10 aa, Severe acute respiratory syndrome coronavirus 2
  REGION 1..10: note = Table B: HLA-DRB1*13:02L HLA-DRB1*13:03L HLA-DRB1*04:02L HLA-DRB4*03:01NL HLA-DRB1*08:01L HLA-DRB5*01:01L HLA-DRB1*12:01L HLA-DQA1*03:01-B1*03:02M HLA-DQA1*05:05-B1*03:01L HLA-DRB1*14:17L HLA-DQA1*01:03-B1*06:01L
  REGION 1..10: note = CONT. FROM ABOVE: HLA-DQA1*02:01-B1*03:03L
SSVLNDILSR

SEQ ID NO: 14936 - protein, 12 aa, Severe acute respiratory syndrome coronavirus 2
  REGION 1..12: note = Table B: HLA-DRB1*13:02L HLA-DRB1*01:03L HLA-DRB1*04:02L HLA-DRB1*04:04L HLA-DRB1*04:05L HLA-DQA1*01:02-B1*06:02L HLA-DRB1*01:02L HLA-DRB4*03:01NL HLA-DPA1*01:03-B1*03:01L HLA-DQA1*01-B1*05L HLA-DQA1*05:01-B1*02:01L HLA-DRB1*04:10L
  REGION 1..12: note = CONT. FROM ABOVE: HLA-DPA1*02:01-B1*13:01L HLA-DQA1*05:05-B1*03: 01L HLA-DRB1*14:17L HLA-DRB1*07:01L HLA-DRB1*04:08L
LDKVEAEVQIDR

SEQ ID NO: 14937 - protein, 14 aa, Severe acute respiratory syndrome coronavirus 2
  REGION 1..14: note = Table B: HLA-DRB1*13:02L HLA-DPA1*01:03-B1*03:01L
GRLQSLQTYVTQQL

SEQ ID NO: 14938 - protein, 10 aa, Severe acute respiratory syndrome coronavirus 2
  REGION 1..10: note = Table B: HLA-DRB1*13:02L HLA-DRB1*13:03L HLA-DRB1*04:02L HLA-DRB4*03:01NL HLA-DRB1*08:01L HLA-DRB1*12:01L HLA-DQA1*03:01-B1*03:02L HLA-DQA1*05:05-B1*03:01L HLA-DRB1*14:17L HLA-DRB1*16:01L HLA-DQA1*01:03-B1*06:01L
  REGION 1..10: note = CONT. FROM ABOVE: HLA-DQA1*02:01-B1*03:03L
QTYVTQQLIR

SEQ ID NO: 14939 - protein, 14 aa, Severe acute respiratory syndrome coronavirus 2
  REGION 1..14: note = Table B: HLA-DRB1*13:02L HLA-DPA1*01:03-B1*03:01L HLA-DPA1*02:01-B1*13:01L
VTQQLIRAAEIRAS

SEQ ID NO: 14940 - protein, 12 aa, Severe acute respiratory syndrome coronavirus 2
  REGION 1..12: note = Table B: HLA-DRB1*13:02L HLA-DRB1*04:04L HLA-DRB1*04:05L HLA-DPA1*01:03-B1*03:01L HLA-DRB1*11:01L HLA-DRB4*02:01NL HLA-DPA1*01:03-B1*02:01L HLA-DPA1*01:03-B1*104:01L HLA-DRB1*08:03L HLA-DRB1*15:03L
LIRAAEIRASAN

SEQ ID NO: 14941 - protein, 10 aa, Severe acute respiratory syndrome coronavirus 2
  REGION 1..10: note = Table B: HLA-DRB1*13:02L HLA-DRB1*13:03L HLA-DRB1*01:03L HLA-DRB1*04:02L HLA-DRB1*01:01L HLA-DRB4*03:01NL HLA-DRB1*08:01L HLA-DRB1*12:01L HLA-DQA1*03:01-B1*03:02L HLA-DQA1*05:05-B1*03:01L HLA-DRB1*14:17L HLA-DRB1*16:01L
  REGION 1..10: note = CONT. FROM ABOVE: HLA-DQA1*02:01-B1*03:03L
RASANLAATK

SEQ ID NO: 14942 - protein, 15 aa, Severe acute respiratory syndrome coronavirus 2
  REGION 1..15: note = Table B: HLA-DRB1*13:02L HLA-DRB1*04:05L HLA-DRB1*08:04L HLA-DPA1*01:03-B1*03:01L HLA-DRB1*14:02L HLA-DRB1*08:01L HLA-DRB1*11:01L HLA-DPA1*02:01-B1*13:01L HLA-DPA1*01:03-B1*104:01L
SANLAATKMSECVLG

SEQ ID NO: 14943 - protein, 14 aa, Severe acute respiratory syndrome coronavirus 2
  REGION 1..14: note = Table B: HLA-DRB1*13:02L HLA-DRB1*01:03L HLA-DRB1*04:04L HLA-DRB1*04:05L HLA-DRB1*01:02L HLA-DRB1*12:01L HLA-DQA1*03:01-B1*03:02L HLA-DPA1*01:03-B1*104:01L HLA-DRB1*04:08L
AATKMSECVLGQSK

SEQ ID NO: 14944 - protein, 14 aa, Severe acute respiratory syndrome coronavirus 2
  REGION 1..14: note = Table B: HLA-DRB1*13:02L HLA-DRB1*01:01L HLA-DPA1*01:03-B1*03:01L HLA-DRB1*03:01L HLA-DRB1*11:03L HLA-DRB1*14:02L HLA-DPA1*01:03-B1*04:02L HLA-DRB3*01:01L HLA-DPA1*02:01-B1*13:01L HLA-DPA1*01:03-B1*02:01L
  REGION 1..14: note = CONT. FROM ABOVE: HLA-DRB1*07:01L HLA-DQA1*01:03-B1*06:01L
KGYHLMSFPQSAPH

SEQ ID NO: 14945 - protein, 14 aa, Severe acute respiratory syndrome coronavirus 2
  REGION 1..14: note = Table B: HLA-DRB1*13:02L HLA-DRB1*01:01L HLA-DPA1*03:01-B1*04:02L HLA-DRB1*14:02L HLA-DPA1*01:03-B1*04:02L HLA-DRB3*01:01L HLA-DPA1*01:03-B1*02:01L HLA-DPA1*01:03-B1*104:01L
GYHLMSFPQSAPHG

SEQ ID NO: 14946 - protein, 13 aa, Severe acute respiratory syndrome coronavirus 2
  REGION 1..13: note = Table B: HLA-DRB1*13:02L HLA-DRB1*01:03L HLA-DRB1*04:02L HLA-DRB1*04:05L HLA-DRB1*08:04L HLA-DRB3*02:01L HLA-DRB1*08:01L HLA-DQA1*01-B1*05L HLA-DPA1*02:01-B1*13:01L HLA-DQA1*03:01-B1*03:02L HLA-DPA1*01:03-B1*02:01L
  REGION 1..13: note = CONT. FROM ABOVE: HLA-DPA1*01:03-B1*104:01L HLA-DQA1*05:05-B1*03 :01L HLA-DRB1*14:17L HLA-DQA1*01:03-B1*06:01L
GVVFLHVTYVPAQ

SEQ ID NO: 14947 - protein, 10 aa, Severe acute respiratory syndrome coronavirus 2
  REGION 1..10: note = Table B: HLA-DRB1*13:02L HLA-DRB1*13:03L HLA-DRB1*04:02L HLA-DRB4*03:01NL HLA-DRB1*08:01L HLA-DRB5*01:01L HLA-DRB1*12:01L HLA-DQA1*03:01-B1*03:02L HLA-DQA1*05:05-B1*03:01L HLA-DRB1*14:17L HLA-DQA1*02:01-B1*03:03L
HVTYVPAQEK

SEQ ID NO: 14948 - protein, 12 aa, Severe acute respiratory syndrome coronavirus 2
  REGION 1..12: note = Table B: HLA-DRB1*13:02L HLA-DRB1*08:04L HLA-DRB3*02:01L HLA-DPA1*01:03-B1*03:01L HLA-DRB1*09:01L HLA-DRB1*12:02L HLA-DRB1*07:01L
VTYVPAQEKNFT

SEQ ID NO: 14949 - protein, 13 aa, Severe acute respiratory syndrome coronavirus 2
  REGION 1..13: note = Table B: HLA-DRB1*13:02L HLA-DRB1*01:03L HLA-DRB1*08:04L HLA-DRB1*14:01L HLA-DRB3*01:01L HLA-DRB1*16:01L
APAICHDGKAHFP

SEQ ID NO: 14950 - protein, 15 aa, Severe acute respiratory syndrome coronavirus 2
  REGION 1..15: note = Table B: HLA-DRB1*13:02L HLA-DPA1*01:03-B1*104:01L HLA-DRB1*15:03L
AHFPREGVFVSNGTH

SEQ ID NO: 14951 - protein, 14 aa, Severe acute respiratory syndrome coronavirus 2
  REGION 1..14: note = Table B: HLA-DRB1*13:02L HLA-DRB1*04:02L HLA-DRB1*11:04L HLA-DRB1*11:01L HLA-DQA1*03:01-B1*03:02L HLA-DRB1*08:03L
GTHWFVTQRNFYEP

SEQ ID NO: 14952 - protein, 13 aa, Severe acute respiratory syndrome coronavirus 2
  REGION 1..13: note = Table B: HLA-DRB1*13:02L HLA-DRB1*14:02L HLA-DRB1*11:01L HLA-DPA1*01:03-B1*04:02L HLA-DRB3*01:01L HLA-DRB1*08:02L
HWFVTQRNFYEPQ

SEQ ID NO: 14953 - protein, 14 aa, Severe acute respiratory syndrome coronavirus 2
  REGION 1..14: note = Table B: HLA-DRB1*13:02L HLA-DPA1*01:03-B1*104:01L
VTQRNFYEPQIITT

SEQ ID NO: 14954 - protein, 13 aa, Severe acute respiratory syndrome coronavirus 2
  REGION 1..13: note = Table B: HLA-DRB1*13:02L HLA-DRB1*01:03L HLA-DRB1*04:04L HLA-DRB1*01:02L HLA-DRB1*08:04L HLA-DPA1*01:03-B1*03:01L HLA-DPA1*03:01-B1*04:02L HLA-DQA1*01:01-B1*05:01L HLA-DRB1*08:01L HLA-DPA1*01:03-B1*04:02L HLA-DRB1*12:01L
  REGION 1..13: note = CONT. FROM ABOVE: HLA-DPA1*02:01-B1*13:01L HLA-DRB1*14:54L HLA-D PA1*01:02-B1*04:01L HLA-DRB1*10:01L HLA-DRB1*08:03L HLA-DRB1*15: 03L
RNFYEPQIITTDN

SEQ ID NO: 14955 - protein, 11 aa, Severe acute respiratory syndrome coronavirus 2
  REGION 1..11: note = Table B: HLA-DRB1*13:02L HLA-DRB1*13:03L HLA-DRB1*04:02L HLA-DRB4*03:01NL HLA-DRB1*14:01L HLA-DQA1*05:01-B1*02:01L HLA-DRB1*12:01L HLA-DRB1*14:54L HLA-DRB1*16:01L
IITTDNTFVSG

SEQ ID NO: 14956 - protein, 14 aa, Severe acute respiratory syndrome coronavirus 2
  REGION 1..14: note = Table B: HLA-DRB1*13:02L HLA-DRB1*13:03L HLA-DRB1*01:03L HLA-DRB1*04:02L HLA-DRB1*04:04L HLA-DRB1*04:05L HLA-DRB1*01:02L HLA-DRB4*03:01NL HLA-DRB1*08:04L HLA-DRB1*08:77L HLA-DRB3*02:01L HLA-DPA1*01:03-B1*03:01L HLA-DPA1*03:01-B1*04:02L
  REGION 1..14: note = CONT. FROM ABOVE: HLA-DRB1*14:01L HLA-DRB1*11:03L HLA-DRB1*11:04 L HLA-DRB1*14:02L HLA-DQA1*01:01-B1*05:01L HLA-DRB1*08:01L HLA-D RB1*11:01L HLA-DQA1*01-B1*05L HLA-DPA1*01:03-B1*04:01L HLA-DQA1* 05:05-B1*03:116L HLA-DRB1*04:10L HLA-DRB1*09:01L
  REGION 1..14: note = CONT. FROM ABOVE: HLA-DPA1*01:03-B1*04:02L HLA-DRB1*12:01L HLA-D RB1*12:02L HLA-DPA1*02:01-B1*13:01L HLA-DRB1*14:54L HLA-DPA1*01: 03-B1*02:01L HLA-DPA1*01:03-B1*104:01L HLA-DRB1*14:17L HLA-DPA1* 01:02-B1*04:01L HLA-DRB1*07:01L HLA-DRB1*10:01L HLA-DRB1*16:01L
  REGION 1..14: note = CONT. FROM ABOVE: HLA-DRB1*04:08L HLA-DRB1*08:03L HLA-DRB1*15:03L
DNTFVSGNCDVVIG

SEQ ID NO: 14957 - protein, 15 aa, Severe acute respiratory syndrome coronavirus 2
  REGION 1..15: note = Table B: HLA-DRB1*13:02L HLA-DRB1*01:03L HLA-DRB1*01:02L HLA-DPA1*01:03-B1*03:01L HLA-DRB1*08:01L HLA-DRB3*01:01L HLA-DQA1*05:05-B1*03:01L HLA-DRB1*04:08L HLA-DRB1*08:03L
DPLQPELDSFKEELD

SEQ ID NO: 14958 - protein, 14 aa, Severe acute respiratory syndrome coronavirus 2
  REGION 1..14: note = Table B: HLA-DRB1*13:02L HLA-DRB1*04:04L HLA-DRB1*11:04L HLA-DQA1*01-B1*05L HLA-DRB3*01:01L
EELDKYFKNHTSPD

SEQ ID NO: 14959 - protein, 13 aa, Severe acute respiratory syndrome coronavirus 2
  REGION 1..13: note = Table B: HLA-DRB1*13:02L HLA-DRB1*08:04L HLA-DRB1*11:04L HLA-DRB1*11:01L HLA-DRB1*04:10L HLA-DRB3*01:01L HLA-DPA1*02:01-B1*13:01L HLA-DRB1*08:03L HLA-DRB1*15:03L
LDKYFKNHTSPDV

SEQ ID NO: 14960 - protein, 12 aa, Severe acute respiratory syndrome coronavirus 2
  REGION 1..12: note = Table B: HLA-DRB1*13:02L HLA-DRB1*13:03L HLA-DRB1*01:03L HLA-DRB1*04:04L HLA-DRB1*04:05L HLA-DRB1*01:01L HLA-DRB1*08:04L HLA-DRB1*08:77L HLA-DRB3*02:01L HLA-DPA1*01:03-B1*03:01L HLA-DPA1*03:01-B1*04:02L HLA-DRB1*14:01L HLA-DRB1*11:03L
  REGION 1..12: note = CONT. FROM ABOVE: HLA-DRB1*11:04L HLA-DRB1*14:02L HLA-DQA1*01:01 -B1*05:01L HLA-DRB1*08:01L HLA-DRB5*01:01L HLA-DQA1*01-B1*05L HL A-DRB4*01:01L HLA-DRB1*04:10L HLA-DPA1*01:03-B1*04:02L HLA-DRB1* 12:02L HLA-DPA1*02:01-B1*13:01L HLA-DRB1*14:54L HLA-DRB1*07:01L
  REGION 1..12: note = CONT. FROM ABOVE: HLA-DRB1*10:01L HLA-DRB1*04:08L HLA-DRB1*08:03 L HLA-DRB1*15:03L
GDISGINASVVN

SEQ ID NO: 14961 - protein, 15 aa, Severe acute respiratory syndrome coronavirus 2
  REGION 1..15: note = Table B: HLA-DRB1*13:02L HLA-DRB1*04:04L HLA-DRB1*08:04L HLA-DPA1*01:03-B1*04:02L
AKNLNESLIDLQELG

SEQ ID NO: 14962 - protein, 10 aa, Severe acute respiratory syndrome coronavirus 2
  REGION 1..10: note = Table B: HLA-DRB1*13:02L HLA-DRB1*13:03L HLA-DRB1*04:02L HLA-DQA1*01:02-B1*06:02L HLA-DRB1*01:01L HLA-DRB4*03:01NL HLA-DRB3*02:01L HLA-DRB1*14:01L HLA-DRB1*11:04L HLA-DRB1*08:01L HLA-DRB5*01:01L HLA-DPA1*01:03-B1*04:02L HLA-DRB1*12:01L
  REGION 1..10: note = CONT. FROM ABOVE: HLA-DRB1*12:02L HLA-DPA1*03:01-B1*105:01L HLA- DQA1*03:01-B1*03:02M HLA-DQA1*05:05-B1*03:01L HLA-DRB1*14:17L HL A-DRB1*16:01L HLA-DQA1*01:03-B1*06:01L HLA-DQA1*02:01-B1*03:03L
SLIDLQELGK

SEQ ID NO: 14963 - protein, 14 aa, Severe acute respiratory syndrome coronavirus 2
  REGION 1..14: note = Table B: HLA-DRB1*13:02L HLA-DRB1*04:05L HLA-DRB1*11:03L HLA-DRB1*11:04L HLA-DRB1*11:01L HLA-DRB3*01:01L HLA-DPA1*01:03-B1*02:01L HLA-DRB1*08:03L
IDLQELGKYEQYIK

SEQ ID NO: 14964 - protein, 16 aa, Severe acute respiratory syndrome coronavirus 2
  REGION 1..16: note = Table B: HLA-DRB1*13:02L
DLQELGKYEQYIKWPW

SEQ ID NO: 14965 - protein, 12 aa, Severe acute respiratory syndrome coronavirus 2
  REGION 1..12: note = Table B: HLA-DRB1*13:02L HLA-DRB1*01:03L HLA-DRB1*01:02L HLA-DRB1*08:04L HLA-DRB1*14:01L HLA-DRB1*08:01L HLA-DPA1*03:01-B1*105:01L HLA-DRB1*04:08L
GKYEQYIKWPWY

SEQ ID NO: 14966 - protein, 13 aa, Severe acute respiratory syndrome coronavirus 2
  REGION 1..13: note = Table B: HLA-DRB1*13:02L HLA-DRB1*01:03L HLA-DRB1*04:04L HLA-DRB1*04:05L HLA-DQA1*01:02-B1*06:02L HLA-DRB1*01:02L HLA-DRB1*08:04L HLA-DPA1*01:03-B1*03:01L HLA-DPA1*03:01-B1*04:02L HLA-DRB1*14:01L HLA-DQA1*01-B1*05L
  REGION 1..13: note = CONT. FROM ABOVE: HLA-DPA1*01:03-B1*04:02L HLA-DRB1*12:01L HLA-D PA1*02:01-B1*13:01L HLA-DPA1*01:03-B1*104:01L HLA-DQA1*05:05-B1* 03:01L HLA-DRB1*16:01L HLA-DRB1*04:08L HLA-DRB1*15:03L
DLFMRIFTIGTVT

SEQ ID NO: 14967 - protein, 12 aa, Severe acute respiratory syndrome coronavirus 2
  REGION 1..12: note = Table B: HLA-DRB1*13:02L HLA-DRB1*01:02L HLA-DRB3*02:01L
IPIQASLPFGWL

SEQ ID NO: 14968 - protein, 10 aa, Severe acute respiratory syndrome coronavirus 2
  REGION 1..10: note = Table B: HLA-DRB1*13:02L HLA-DRB1*13:03L HLA-DQA1*01:02-B1*06:02L HLA-DRB4*03:01NL HLA-DRB1*08:01L HLA-DRB1*12:01L HLA-DPA1*03:01-B1*105:01L HLA-DQA1*03:01-B1*03:02L HLA-DQA1*05:05-B1*03:01L
  REGION 1..10: note = CONT. FROM ABOVE: HLA-DQA1*01:03-B1*06:01L HLA-DQA1*02:01-B1*03: 03L
QSASKIITLK

SEQ ID NO: 14969 - protein, 10 aa, Severe acute respiratory syndrome coronavirus 2
  REGION 1..10: note = Table B: HLA-DRB1*13:02L HLA-DRB1*13:03L HLA-DRB1*08:01L HLA-DRB1*12:01L HLA-DQA1*03:01-B1*03:02L HLA-DQA1*05:05-B1*03:01L HLA-DQA1*01:03-B1*06:01L HLA-DQA1*02:01-B1*03:03L
SASKIITLKK

SEQ ID NO: 14970 - protein, 12 aa, Severe acute respiratory syndrome coronavirus 2
  REGION 1..12: note = Table B: HLA-DRB1*13:02L HLA-DRB1*04:05L HLA-DRB1*12:01L HLA-DRB3*01:01L HLA-DRB1*14:54L HLA-DPA1*01:02-B1*04:01L HLA-DRB1*15:03L
ASKIITLKKRWQ

SEQ ID NO: 14971 - protein, 12 aa, Severe acute respiratory syndrome coronavirus 2
  REGION 1..12: note = Table B: HLA-DRB1*13:02L HLA-DRB1*13:03L HLA-DRB1*01:03L HLA-DRB1*04:05L HLA-DRB1*01:02L HLA-DRB1*11:02L HLA-DRB1*11:03L HLA-DRB1*12:01L HLA-DRB3*01:01L HLA-DRB1*04:08L HLA-DRB1*15:03L
KIITLKKRWQLA

SEQ ID NO: 14972 - protein, 14 aa, Severe acute respiratory syndrome coronavirus 2
  REGION 1..14: note = Table B: HLA-DRB1*13:02L HLA-DRB1*01:03L HLA-DRB1*01:02L HLA-DRB3*01:01L HLA-DRB1*04:08L
IITLKKRWQLALSK

SEQ ID NO: 14973 - protein, 12 aa, Severe acute respiratory syndrome coronavirus 2
  REGION 1..12: note = Table B: HLA-DRB1*13:02L HLA-DRB1*13:03L HLA-DRB1*04:05L HLA-DRB1*01:01L HLA-DRB1*14:01L HLA-DRB1*11:04L HLA-DRB1*11:01L HLA-DRB3*01:01L HLA-DPA1*02:01-B1*13:01L
KRWQLALSKGVH

SEQ ID NO: 14974 - protein, 12 aa, Severe acute respiratory syndrome coronavirus 2
  REGION 1..12: note = Table B: HLA-DRB1*13:02L HLA-DRB1*01:03L
YFLQSINFVRII

SEQ ID NO: 14975 - protein, 11 aa, Severe acute respiratory syndrome coronavirus 2
  REGION 1..11: note = Table B: HLA-DRB1*13:02L
QSINFVRIIMR

SEQ ID NO: 14976 - protein, 12 aa, Severe acute respiratory syndrome coronavirus 2
  REGION 1..12: note = Table B: HLA-DRB1*13:02L HLA-DRB1*04:02L HLA-DRB1*04:05L HLA-DRB1*01:02L HLA-DRB1*08:04L HLA-DPA1*01:03-B1*03:01L HLA-DPA1*03:01-B1*04:02L HLA-DRB1*12:01L HLA-DRB1*12:02L HLA-DPA1*02:01-B1*13:01L HLA-DRB1*14:54L
  REGION 1..12: note = CONT. FROM ABOVE: HLA-DPA1*01:02-B1*04:01L
KNPLLYDANYFL

SEQ ID NO: 14977 - protein, 14 aa, Severe acute respiratory syndrome coronavirus 2
  REGION 1..14: note = Table B: HLA-DRB1*13:02L HLA-DRB1*01:03L HLA-DQA1*01:02-B1*06:02L HLA-DRB1*01:02L HLA-DRB1*08:04L HLA-DPA1*03:01-B1*04:02L HLA-DRB1*14:01L HLA-DRB1*08:01L HLA-DRB1*11:01L HLA-DPA1*01:03-B1*04:02L
  REGION 1..14: note = CONT. FROM ABOVE: HLA-DPA1*03:01-B1*105:01L HLA-DRB1*16:01L HLA- DRB1*04:08L HLA-DRB1*15:03L
DANYFLCWHTNCYD

SEQ ID NO: 14978 - protein, 14 aa, Severe acute respiratory syndrome coronavirus 2
  REGION 1..14: note = Table B: HLA-DRB1*13:02L HLA-DRB1*01:02L HLA-DRB1*15:03L
VTSSIVITSGDGTT

SEQ ID NO: 14979 - protein, 14 aa, Severe acute respiratory syndrome coronavirus 2
  REGION 1..14: note = Table B: HLA-DRB1*13:02L HLA-DRB1*01:03L HLA-DQA1*01:02-B1*06:02L HLA-DRB1*01:02L HLA-DRB1*12:01L HLA-DPA1*03:01-B1*105:01L HLA-DRB1*14:54L HLA-DRB1*16:01L HLA-DQA1*01:03-B1*06:01L
SIVITSGDGTTSPI

SEQ ID NO: 14980 - protein, 13 aa, Severe acute respiratory syndrome coronavirus 2
  REGION 1..13: note = Table B: HLA-DRB1*13:02L HLA-DRB1*01:02L HLA-DRB1*11:01L HLA-DRB1*04:10L HLA-DRB3*01:01L HLA-DRB1*14:54L
SGDGTTSPISEHD

SEQ ID NO: 14981 - protein, 10 aa, Severe acute respiratory syndrome coronavirus 2
  REGION 1..10: note = Table B: HLA-DRB1*13:02L HLA-DRB1*13:03L HLA-DRB1*04:02L HLA-DRB4*03:01NL HLA-DRB1*08:01L HLA-DRB5*01:01L HLA-DRB1*12:01L HLA-DQA1*03:01-B1*03:02L HLA-DQA1*05:05-B1*03:01L HLA-DRB1*14:17L HLA-DQA1*01:03-B1*06:01L
  REGION 1..10: note = CONT. FROM ABOVE: HLA-DQA1*02:01-B1*03:03L
DYQIGGYTEK

SEQ ID NO: 14982 - protein, 14 aa, Severe acute respiratory syndrome coronavirus 2
  REGION 1..14: note = Table B: HLA-DRB1*13:02L HLA-DRB1*14:01L HLA-DRB1*11:04L HLA-DRB1*11:01L HLA-DRB3*01:01L HLA-DQA1*05:05-B1*03:01L
IGGYTEKWESGVKD

SEQ ID NO: 14983 - protein, 14 aa, Severe acute respiratory syndrome coronavirus 2
  REGION 1..14: note = Table B: HLA-DRB1*13:02L HLA-DRB1*01:03L HLA-DRB1*04:05L HLA-DRB1*01:02L HLA-DRB1*04:08L
DTGVEHVTFFIYNK

SEQ ID NO: 14984 - protein, 15 aa, Severe acute respiratory syndrome coronavirus 2
  REGION 1..15: note = Table B: HLA-DRB1*13:02L HLA-DRB1*01:03L HLA-DRB1*04:05L HLA-DPA1*01:03-B1*04:01L HLA-DQA1*02:01-B1*03:03L
GVEHVTFFIYNKIVD

SEQ ID NO: 14985 - protein, 14 aa, Severe acute respiratory syndrome coronavirus 2
  REGION 1..14: note = Table B: HLA-DRB1*13:02L HLA-DRB1*01:03L HLA-DRB1*01:02L HLA-DRB1*14:01L HLA-DRB1*14:02L HLA-DRB1*11:01L HLA-DRB1*12:01L HLA-DRB1*08:03L
HVTFFIYNKIVDEP

SEQ ID NO: 14986 - protein, 13 aa, Severe acute respiratory syndrome coronavirus 2
  REGION 1..13: note = Table B: HLA-DRB1*13:02L HLA-DRB1*01:03L HLA-DRB1*04:04L HLA-DRB1*04:05L HLA-DRB4*03:01NL HLA-DRB1*08:77L HLA-DPA1*01:03-B1*03:01L HLA-DRB1*14:01L HLA-DQA1*01:01-B1*05:01L HLA-DQA1*01-B1*05L HLA-DRB1*04:10L
  REGION 1..13: note = CONT. FROM ABOVE: HLA-DPA1*02:01-B1*13:01L HLA-DRB1*14:54L HLA-D PA1*01:03-B1*104:01L HLA-DRB1*10:01L HLA-DRB1*16:01L HLA-DQA1*01 :03-B1*06:01L HLA-DRB1*04:08L
IHTIDGSSGVVNP

SEQ ID NO: 14987 - protein, 16 aa, Severe acute respiratory syndrome coronavirus 2
  REGION 1..16: note = Table B: HLA-DRB1*13:02L HLA-DRB3*01:01L HLA-DPA1*02:01-B1*13:01L HLA-DPA1*01:03-B1*104:01L
TIDGSSGVVNPVMEPI

SEQ ID NO: 14988 - protein, 14 aa, Severe acute respiratory syndrome coronavirus 2
  REGION 1..14: note = Table B: HLA-DRB1*13:02L HLA-DRB1*01:02L HLA-DPA1*02:01-B1*13:01L HLA-DQA1*05:05-B1*03:01L
VVNPVMEPIYDEPT

SEQ ID NO: 14989 - protein, 14 aa, Severe acute respiratory syndrome coronavirus 2
  REGION 1..14: note = Table B: HLA-DRB1*13:02L HLA-DQA1*01:02-B1*06:02L HLA-DRB1*14:01L HLA-DPA1*02:01-B1*13:01L HLA-DPA1*03:01-B1*105:01L
VNPVMEPIYDEPTT

SEQ ID NO: 14990 - protein, 14 aa, Severe acute respiratory syndrome coronavirus 2
  REGION 1..14: note = Table B: HLA-DRB1*13:02L HLA-DRB1*01:03L HLA-DRB1*04:02L HLA-DRB1*04:04L HLA-DRB1*04:05L HLA-DRB4*03:01NL HLA-DRB1*14:02L HLA-DQA1*01:01-B1*05:01L HLA-DRB1*08:01L HLA-DRB1*11:01L HLA-DRB4*02:01NL HLA-DPA1*01:03-B1*04:01L
  REGION 1..14: note = CONT. FROM ABOVE: HLA-DPA1*01:03-B1*04:02L HLA-DRB1*12:01L HLA-D RB3*01:01L HLA-DRB1*14:17L HLA-DRB1*04:08M
VSEETGTLIVNSVL

SEQ ID NO: 14991 - protein, 12 aa, Severe acute respiratory syndrome coronavirus 2
  REGION 1..12: note = Table B: HLA-DRB1*13:02L HLA-DRB1*14:01L HLA-DPA1*03:01-B1*105:01L HLA-DRB1*16:01L
TGTLIVNSVLLF

SEQ ID NO: 14992 - protein, 13 aa, Severe acute respiratory syndrome coronavirus 2
  REGION 1..13: note = Table B: HLA-DRB1*13:02L HLA-DRB1*04:05L HLA-DRB1*11:04L HLA-DRB1*11:01L HLA-DRB3*01:01L HLA-DPA1*02:01-B1*13:01L HLA-DPA1*01:03-B1*02:01L HLA-DRB1*08:03L
PSFYVYSRVKNLN

SEQ ID NO: 14993 - protein, 12 aa, Severe acute respiratory syndrome coronavirus 2
  REGION 1..12: note = Table B: HLA-DRB1*13:02L HLA-DRB1*13:03L HLA-DRB1*04:04L HLA-DRB1*04:05L HLA-DRB1*08:04L HLA-DRB1*14:01L HLA-DRB1*11:04L HLA-DRB1*08:01L HLA-DRB1*11:01L HLA-DRB1*14:54L
YVYSRVKNLNSS

SEQ ID NO: 14994 - protein, 13 aa, Severe acute respiratory syndrome coronavirus 2
  REGION 1..13: note = Table B: HLA-DRB1*13:02L HLA-DRB1*13:03L HLA-DRB1*01:02L HLA-DRB4*03:01NL HLA-DPA1*01:03-B1*03:01L HLA-DPA1*01:03-B1*04:01L HLA-DQA1*05:05-B1*03:116L HLA-DRB1*04:10L HLA-DRB3*01:01L HLA-DRB1*14:17L
  REGION 1..13: note = CONT. FROM ABOVE: HLA-DPA1*01:02-B1*04:01L HLA-DRB1*07:01L HLA-D RB1*15:03L
ADSNGTITVEELK

SEQ ID NO: 14995 - protein, 13 aa, Severe acute respiratory syndrome coronavirus 2
  REGION 1..13: note = Table B: HLA-DRB1*13:02L HLA-DPA1*01:03-B1*04:02L HLA-DRB3*01:01L HLA-DRB1*14:54L HLA-DPA1*01:03-B1*02:01L
TITVEELKKLLEQ

SEQ ID NO: 14996 - protein, 14 aa, Severe acute respiratory syndrome coronavirus 2
  REGION 1..14: note = Table B: HLA-DRB1*13:02L HLA-DRB1*11:02L HLA-DPA1*02:01-B1*13:01L HLA-DQA1*05:05-B1*03:01L HLA-DRB1*08:02L
ITVEELKKLLEQWN

SEQ ID NO: 14997 - protein, 14 aa, Severe acute respiratory syndrome coronavirus 2
  REGION 1..14: note = Table B: HLA-DRB1*13:02L HLA-DPA1*01:03-B1*104:01L HLA-DQA1*02:01-B1*03:03L
ELKKLLEQWNLVIG

SEQ ID NO: 14998 - protein, 12 aa, Severe acute respiratory syndrome coronavirus 2
  REGION 1..12: note = Table B: HLA-DRB1*13:02L HLA-DRB1*04:05L HLA-DRB1*08:04L
LLQFAYANRNRF

SEQ ID NO: 14999 - protein, 12 aa, Severe acute respiratory syndrome coronavirus 2
  REGION 1..12: note = Table B: HLA-DRB1*13:02L HLA-DRB1*04:05L HLA-DRB1*08:04L HLA-DRB1*11:04L HLA-DRB1*11:01L HLA-DRB3*01:01L
LQFAYANRNRFL

SEQ ID NO: 15000 - protein, 14 aa, Severe acute respiratory syndrome coronavirus 2
  REGION 1..14: note = Table B: HLA-DRB1*13:02L HLA-DRB1*08:01L HLA-DRB1*12:01L HLA-DRB3*01:01L HLA-DRB1*04:08L
FAYANRNRFLYIIK

SEQ ID NO: 15001 - protein, 13 aa, Severe acute respiratory syndrome coronavirus 2
  REGION 1..13: note = Table B: HLA-DRB1*13:02L HLA-DPA1*01:03-B1*04:02L HLA-DRB3*01:01L
LSYFIASFRLFAR

SEQ ID NO: 15002 - protein, 13 aa, Severe acute respiratory syndrome coronavirus 2
  REGION 1..13: note = Table B: HLA-DRB1*13:02L HLA-DRB3*01:01L
SYFIASFRLFART

SEQ ID NO: 15003 - protein, 12 aa, Severe acute respiratory syndrome coronavirus 2
  REGION 1..12: note = Table B: HLA-DRB1*13:02L HLA-DQA1*01:02-B1*06:02L HLA-DRB1*01:02L HLA-DRB1*14:01L HLA-DRB1*12:01L HLA-DRB3*01:01L HLA-DRB1*16:01L HLA-DRB1*04:08L HLA-DRB1*15:03L
FIASFRLFARTR

SEQ ID NO: 15004 - protein, 13 aa, Severe acute respiratory syndrome coronavirus 2
  REGION 1..13: note = Table B: HLA-DRB1*13:02L HLA-DRB1*04:02L HLA-DRB1*11:02L HLA-DRB1*11:03L HLA-DQA1*05:05-B1*03:116L HLA-DPA1*01:03-B1*04:02L HLA-DPA1*02:01-B1*13:01L HLA-DRB1*08:02L HLA-DRB1*08:03L
IASFRLFARTRSM

SEQ ID NO: 15005 - protein, 16 aa, Severe acute respiratory syndrome coronavirus 2
  REGION 1..16: note = Table B: HLA-DRB1*13:02L HLA-DPA1*01:03-B1*104:01L
LFARTRSMWSFNPETN

SEQ ID NO: 15006 - protein, 12 aa, Severe acute respiratory syndrome coronavirus 2
  REGION 1..12: note = Table B: HLA-DRB1*13:02L HLA-DRB1*08:04L
NILLNVPLHGTI

SEQ ID NO: 15007 - protein, 12 aa, Severe acute respiratory syndrome coronavirus 2
  REGION 1..12: note = Table B: HLA-DRB1*13:02L HLA-DQA1*05:05-B1*03:01L
ILLNVPLHGTIL

SEQ ID NO: 15008 - protein, 16 aa, Severe acute respiratory syndrome coronavirus 2
  REGION 1..16: note = Table B: HLA-DRB1*13:02L HLA-DPA1*01:03-B1*03:01L HLA-DPA1*02:01-B1*13:01L HLA-DPA1*01:03-B1*104:01L
VPLHGTILTRPLLESE

SEQ ID NO: 15009 - protein, 10 aa, Severe acute respiratory syndrome coronavirus 2
  REGION 1..10: note = Table B: HLA-DRB1*13:02L HLA-DRB1*13:03L HLA-DRB4*03:01NL HLA-DRB1*08:01L HLA-DRB1*12:01L HLA-DQA1*03:01-B1*03:02L HLA-DQA1*05:05-B1*03:01L
ELVIGAVILR

SEQ ID NO: 15010 - protein, 14 aa, Severe acute respiratory syndrome coronavirus 2
  REGION 1..14: note = Table B: HLA-DRB1*13:02L HLA-DRB1*04:05L HLA-DRB1*11:04L HLA-DRB1*08:01L HLA-DRB1*12:01L
IGAVILRGHLRIAG

SEQ ID NO: 15011 - protein, 13 aa, Severe acute respiratory syndrome coronavirus 2
  REGION 1..13: note = Table B: HLA-DRB1*13:02L HLA-DRB1*04:05L HLA-DRB1*14:01L HLA-DRB1*12:01L HLA-DRB3*01:01L HLA-DRB1*16:01L
VILRGHLRIAGHH

SEQ ID NO: 15012 - protein, 12 aa, Severe acute respiratory syndrome coronavirus 2
  REGION 1..12: note = Table B: HLA-DRB1*13:02L HLA-DQA1*01:02-B1*06:02L HLA-DRB1*01:02L HLA-DRB1*12:01L HLA-DRB3*01:01L HLA-DPA1*01:02-B1*04:01L HLA-DRB1*08:03L HLA-DRB1*15:03L
RGHLRIAGHHLG

SEQ ID NO: 15013 - protein, 12 aa, Severe acute respiratory syndrome coronavirus 2
  REGION 1..12: note = Table B: HLA-DRB1*13:02L HLA-DQA1*01:02-B1*06:02L HLA-DRB1*01:02L HLA-DRB3*01:01L HLA-DRB1*15:03L
GHLRIAGHHLGR

SEQ ID NO: 15014 - protein, 10 aa, Severe acute respiratory syndrome coronavirus 2
  REGION 1..10: note = Table B: HLA-DRB1*13:02L HLA-DRB1*13:03L HLA-DRB1*01:01L HLA-DRB4*03:01NL HLA-DRB1*11:04L HLA-DRB1*08:01L HLA-DRB5*01:01L HLA-DRB1*12:01L HLA-DQA1*03:01-B1*03:02M HLA-DQA1*05:05-B1*03:01L HLA-DRB1*14:17L
  REGION 1..10: note = CONT. FROM ABOVE: HLA-DQA1*02:01-B1*03:03L
SYYKLGASQR

SEQ ID NO: 15015 - protein, 14 aa, Severe acute respiratory syndrome coronavirus 2
  REGION 1..14: note = Table B: HLA-DRB1*13:02L HLA-DRB1*11:01L HLA-DRB3*01:01L HLA-DPA1*02:01-B1*13:01L
VAGDSGFAAYSRYR

SEQ ID NO: 15016 - protein, 12 aa, Severe acute respiratory syndrome coronavirus 2
  REGION 1..12: note = Table B: HLA-DRB1*13:02L HLA-DRB1*13:03L HLA-DRB1*04:02L HLA-DRB1*04:05L HLA-DRB1*01:02L HLA-DRB1*08:04L HLA-DRB1*11:04L HLA-DRB1*08:01L HLA-DRB1*11:01L HLA-DRB1*12:01L HLA-DRB3*01:01L HLA-DRB1*16:01L HLA-DRB1*04:08L HLA-DRB1*15:03L
SGFAAYSRYRIG

SEQ ID NO: 15017 - protein, 14 aa, Severe acute respiratory syndrome coronavirus 2
  REGION 1..14: note = Table B: HLA-DRB1*13:02L HLA-DRB1*04:04L HLA-DRB1*11:04L HLA-DRB1*11:01L HLA-DRB3*01:01L HLA-DPA1*02:01-B1*13:01L HLA-DPA1*03:01-B1*105:01L HLA-DRB1*15:03L
SRYRIGNYKLNTDH

SEQ ID NO: 15018 - protein, 12 aa, Severe acute respiratory syndrome coronavirus 2
  REGION 1..12: note = Table B: HLA-DRB1*13:02L HLA-DRB1*01:02L HLA-DRB1*08:04L HLA-DQA1*01-B1*05L HLA-DQA1*05:01-B1*02:01L HLA-DQA1*03:01-B1*03:02L HLA-DQA1*02:01-B1*03:03L HLA-DRB1*15:03L
YKLNTDHSSSSD

SEQ ID NO: 15019 - protein, 13 aa, Severe acute respiratory syndrome coronavirus 2
  REGION 1..13: note = Table B: HLA-DRB1*13:02L HLA-DQA1*01:02-B1*06:02L HLA-DRB1*01:02L HLA-DPA1*01:03-B1*03:01L HLA-DRB1*04:10L HLA-DRB3*01:01L HLA-DPA1*02:01-B1*13:01L HLA-DPA1*03:01-B1*105:01L HLA-DRB1*04:08L HLA-DRB1*15:03L
LNTDHSSSSDNIA

SEQ ID NO: 15020 - protein, 16 aa, Severe acute respiratory syndrome coronavirus 2
  REGION 1..16: note = Table B: HLA-DRB1*13:02L HLA-DPA1*01:03-B1*104:01L
NTDHSSSSDNIALLVQ

SEQ ID NO: 15021 - protein, 13 aa, Severe acute respiratory syndrome coronavirus 2
  REGION 1..13: note = Table B: HLA-DRB1*13:02L HLA-DRB1*01:03L
EILLIIMRTFKVS

SEQ ID NO: 15022 - protein, 12 aa, Severe acute respiratory syndrome coronavirus 2
  REGION 1..12: note = Table B: HLA-DRB1*13:02L HLA-DRB1*11:03L HLA-DPA1*01:03-B1*04:02L HLA-DRB3*01:01L HLA-DPA1*03:01-B1*105:01L HLA-DPA1*01:03-B1*02:01L HLA-DRB1*08:03L HLA-DRB1*15:03L
IINLIIKNLSKS

SEQ ID NO: 15023 - protein, 12 aa, Severe acute respiratory syndrome coronavirus 2
  REGION 1..12: note = Table B: HLA-DRB1*13:02L HLA-DRB1*01:02L HLA-DPA1*03:01-B1*04:02L HLA-DPA1*01:02-B1*04:01L HLA-DRB1*16:01L
INLIIKNLSKSL

SEQ ID NO: 15024 - protein, 12 aa, Severe acute respiratory syndrome coronavirus 2
  REGION 1..12: note = Table B: HLA-DRB1*13:02L HLA-DRB1*08:04L HLA-DRB1*14:54L
NLIIKNLSKSLT

SEQ ID NO: 15025 - protein, 15 aa, Severe acute respiratory syndrome coronavirus 2
  REGION 1..15: note = Table B: HLA-DRB1*13:02L HLA-DRB1*04:04L HLA-DPA1*01:03-B1*03:01L HLA-DRB1*11:04L HLA-DPA1*02:01-B1*13:01L HLA-DPA1*01:03-B1*02:01L
SKSLTENKYSQLDEE

SEQ ID NO: 15026 - protein, 13 aa, Severe acute respiratory syndrome coronavirus 2
  REGION 1..13: note = Table B: HLA-DRB1*13:02L HLA-DRB1*13:03L HLA-DRB1*01:03L HLA-DRB1*04:02L HLA-DRB1*04:05L HLA-DRB1*01:02L HLA-DRB3*02:01L HLA-DPA1*01:03-B1*03:01L HLA-DPA1*03:01-B1*04:02L HLA-DRB1*14:02L HLA-DPA1*01:03-B1*04:01L
  REGION 1..13: note = CONT. FROM ABOVE: HLA-DPA1*01:03-B1*04:02L HLA-DQA1*05:05-B1*03: 01L HLA-DPA1*01:02-B1*04:01L HLA-DRB1*04:08L
YSQLDEEQPMEID

SEQ ID NO: 15027 - protein, 12 aa, Severe acute respiratory syndrome coronavirus 2
  REGION 1..12: note = Table B: HLA-DRB1*13:02L HLA-DRB1*01:03L HLA-DRB1*04:05L HLA-DRB1*01:02L HLA-DRB4*03:01NL HLA-DRB1*08:04L HLA-DRB1*08:77L HLA-DRB3*02:01L HLA-DPA1*01:03-B1*03:01L HLA-DRB1*14:01L HLA-DRB1*11:03L HLA-DRB1*11:04L HLA-DRB1*14:02L
  REGION 1..12: note = CONT. FROM ABOVE: HLA-DQA1*01:01-B1*05:01L HLA-DQA1*05:05-B1*03: 19L HLA-DRB1*04:10L HLA-DRB1*12:01L HLA-DRB1*12:02L HLA-DRB1*14: 54L HLA-DQA1*05:05-B1*03:01L HLA-DRB1*10:01L HLA-DRB1*04:08L HLA -DRB1*15:03L
SGTYEGNSPFHP

SEQ ID NO: 15028 - protein, 12 aa, Severe acute respiratory syndrome coronavirus 2
  REGION 1..12: note = Table B: HLA-DRB1*13:02L HLA-DRB1*01:03L HLA-DRB1*04:05L HLA-DQA1*01:02-B1*06:02L HLA-DRB1*01:02L HLA-DRB4*03:01NL HLA-DRB1*08:04L HLA-DPA1*01:03-B1*03:01L HLA-DPA1*03:01-B1*04:02L HLA-DRB1*14:01L HLA-DRB1*14:02L
  REGION 1..12: note = CONT. FROM ABOVE: HLA-DRB1*12:01L HLA-DRB1*12:02L HLA-DPA1*03:01 -B1*105:01L HLA-DRB1*14:54L HLA-DQA1*05:05-B1*03:01L HLA-DQA1*01 :03-B1*06:01L HLA-DRB1*04:08L HLA-DRB1*15:03L
GTYEGNSPFHPL

SEQ ID NO: 15029 - protein, 16 aa, Severe acute respiratory syndrome coronavirus 2
  REGION 1..16: note = Table B: HLA-DRB1*13:02L HLA-DRB1*14:02L
HPLADNKFALTCFSTQ

SEQ ID NO: 15030 - protein, 10 aa, Severe acute respiratory syndrome coronavirus 2
  REGION 1..10: note = Table B: HLA-DRB1*13:02L HLA-DRB1*12:01L HLA-DQA1*03:01-B1*03:02L
RSVSPKLFIR

SEQ ID NO: 15031 - protein, 14 aa, Severe acute respiratory syndrome coronavirus 2
  REGION 1..14: note = Table B: HLA-DRB1*13:02L HLA-DRB1*14:01L HLA-DPA1*03:01-B1*105:01L
IVFITLCFTLKRKT

SEQ ID NO: 15032 - protein, 14 aa, Severe acute respiratory syndrome coronavirus 2
  REGION 1..14: note = Table B: HLA-DRB1*13:02L HLA-DRB1*01:03L HLA-DRB1*04:02L HLA-DRB1*04:05L HLA-DRB1*01:02L HLA-DRB1*08:04L HLA-DRB1*14:01M HLA-DRB1*11:03L HLA-DRB1*11:04L HLA-DRB1*08:01L HLA-DRB1*11:01L HLA-DRB1*12:01L HLA-DRB3*01:01L HLA-DPA1*02:01-B1*13:01L
  REGION 1..14: note = CONT. FROM ABOVE: HLA-DPA1*01:02-B1*04:01L HLA-DRB1*04:08L HLA-D RB1*15:03L
DPCPIHFYSKWYIR

SEQ ID NO: 15033 - protein, 14 aa, Severe acute respiratory syndrome coronavirus 2
  REGION 1..14: note = Table B: HLA-DRB1*13:02L HLA-DQA1*01:02-B1*06:02L HLA-DRB1*01:01L HLA-DRB1*14:01L HLA-DRB1*11:04L HLA-DRB1*11:01L HLA-DRB3*01:01L HLA-DRB1*07:01L HLA-DQA1*02:01-B1*03:03L
SKWYIRVGARKSAP

SEQ ID NO: 15034 - protein, 15 aa, Severe acute respiratory syndrome coronavirus 2
  REGION 1..15: note = Table B: HLA-DRB1*13:02L HLA-DRB1*04:05L HLA-DRB1*01:02L
VGARKSAPLIELCVD

SEQ ID NO: 15035 - protein, 15 aa, Severe acute respiratory syndrome coronavirus 2
  REGION 1..15: note = Table B: HLA-DRB1*13:02L HLA-DRB1*04:05L HLA-DRB1*01:02L HLA-DRB1*12:01L
GARKSAPLIELCVDE

SEQ ID NO: 15036 - protein, 14 aa, Severe acute respiratory syndrome coronavirus 2
  REGION 1..14: note = Table B: HLA-DRB1*13:02L HLA-DRB1*01:02L HLA-DPA1*01:03-B1*03:01L
AGSKSPIQYIDIGN

SEQ ID NO: 15037 - protein, 12 aa, Severe acute respiratory syndrome coronavirus 2
  REGION 1..12: note = Table B: HLA-DRB1*13:02L HLA-DRB1*04:02L HLA-DRB1*04:05L HLA-DRB1*01:02L HLA-DRB3*02:01L HLA-DRB1*14:54L HLA-DRB1*14:17L HLA-DRB1*04:08L
KSPIQYIDIGNY

SEQ ID NO: 15038 - protein, 12 aa, Severe acute respiratory syndrome coronavirus 2
  REGION 1..12: note = Table B: HLA-DRB1*13:02L HLA-DRB1*04:02L HLA-DRB1*04:04L HLA-DRB1*04:05L HLA-DRB1*01:02L HLA-DRB1*08:04L HLA-DRB3*02:01L HLA-DRB1*11:03L HLA-DRB1*11:04L HLA-DQA1*01:01-B1*05:01L HLA-DRB1*08:01L HLA-DRB5*01:01L HLA-DRB1*04:10L HLA-DRB1*09:01L
  REGION 1..12: note = CONT. FROM ABOVE: HLA-DRB1*12:02L HLA-DRB3*01:01L HLA-DRB1*14:54 L HLA-DRB1*14:17L HLA-DRB1*07:01L HLA-DRB1*04:08L HLA-DRB1*08:03 L
SPIQYIDIGNYT

SEQ ID NO: 15039 - protein, 13 aa, Severe acute respiratory syndrome coronavirus 2
  REGION 1..13: note = Table B: HLA-DRB1*13:02L HLA-DRB1*13:03L HLA-DRB1*01:03L HLA-DRB1*04:05L HLA-DRB1*01:02L HLA-DRB1*08:04L HLA-DRB3*02:01L HLA-DPA1*01:03-B1*03:01L HLA-DPA1*03:01-B1*04:02L HLA-DRB1*14:02L HLA-DRB1*08:01L HLA-DQA1*01-B1*05L
  REGION 1..13: note = CONT. FROM ABOVE: HLA-DQA1*05:05-B1*03:19L HLA-DQA1*05:01-B1*02: 01L HLA-DRB1*12:01L HLA-DRB3*01:01L HLA-DPA1*02:01-B1*13:01L HLA -DPA1*03:01-B1*105:01L HLA-DRB1*14:54L HLA-DQA1*05:05-B1*03:01L HLA-DPA1*01:02-B1*04:01L HLA-DRB1*04:08L
LPFTINCQEPKLG

SEQ ID NO: 15040 - protein, 12 aa, Severe acute respiratory syndrome coronavirus 2
  REGION 1..12: note = Table B: HLA-DRB1*13:02L HLA-DRB1*01:03L HLA-DRB1*04:02L HLA-DRB1*04:04L HLA-DRB1*04:05L HLA-DRB1*08:04L HLA-DRB3*02:01L HLA-DPA1*01:03-B1*03:01L HLA-DRB1*14:01L HLA-DRB1*14:02L HLA-DRB1*08:01L HLA-DPA1*01:03-B1*04:01L HLA-DRB1*12:01L
  REGION 1..12: note = CONT. FROM ABOVE: HLA-DRB3*01:01L HLA-DQA1*05:05-B1*03:01L HLA-D RB1*14:17L HLA-DRB1*04:08L HLA-DRB1*15:01L
FLEYHDVRVVLD

SEQ ID NO: 15041 - protein, 14 aa, Severe acute respiratory syndrome coronavirus 2
  REGION 1..14: note = Table B: HLA-DRB1*13:02L HLA-DRB1*13:03L HLA-DRB1*01:03L HLA-DRB1*04:05L HLA-DRB1*01:02L HLA-DRB4*03:01NL HLA-DRB1*08:04L HLA-DPA1*01:03-B1*03:01L HLA-DQA1*01:01-B1*05:01L HLA-DRB1*08:01L HLA-DRB1*11:01L HLA-DRB1*04:10L
  REGION 1..14: note = CONT. FROM ABOVE: HLA-DPA1*01:03-B1*04:02L HLA-DRB1*12:01L HLA-D PA1*02:01-B1*13:01L HLA-DPA1*03:01-B1*105:01L HLA-DPA1*01:03-B1* 104:01L HLA-DRB1*14:17L HLA-DRB1*16:01L HLA-DRB1*04:08L HLA-DRB1 *15:03L
APRITFGGPSDSTG

SEQ ID NO: 15042 - protein, 11 aa, Severe acute respiratory syndrome coronavirus 2
  REGION 1..11: note = Table B: HLA-DRB1*13:02L HLA-DRB4*03:01NL HLA-DRB5*01:01L HLA-DRB1*14:17L HLA-DQA1*01:03-B1*06:01L HLA-DQA1*02:01-B1*03:03L
DSTGSNQNGER

SEQ ID NO: 15043 - protein, 16 aa, Severe acute respiratory syndrome coronavirus 2
  REGION 1..16: note = Table B: HLA-DRB1*13:02L HLA-DRB3*02:01L HLA-DPA1*02:01-B1*13:01L HLA-DRB1*07:01L HLA-DRB1*04:08L
GKEDLKFPRGQGVPIN

SEQ ID NO: 15044 - protein, 12 aa, Severe acute respiratory syndrome coronavirus 2
  REGION 1..12: note = Table B: HLA-DRB1*13:02L HLA-DRB1*04:05L HLA-DRB1*01:02L HLA-DRB1*14:01L HLA-DRB1*11:04L HLA-DRB1*08:01L HLA-DRB1*11:01L HLA-DRB1*12:01L HLA-DRB3*01:01L HLA-DRB1*16:01L HLA-DRB1*04:08L HLA-DRB1*15:03L
DQIGYYRRATRR

SEQ ID NO: 15045 - protein, 16 aa, Severe acute respiratory syndrome coronavirus 2
  REGION 1..16: note = Table B: HLA-DRB1*13:02L HLA-DQA1*01:02-B1*06:02L HLA-DRB1*03:01L HLA-DRB1*11:03L
IGYYRRATRRIRGGDG

SEQ ID NO: 15046 - protein, 14 aa, Severe acute respiratory syndrome coronavirus 2
  REGION 1..14: note = Table B: HLA-DRB1*13:02L HLA-DRB1*13:03L HLA-DRB1*04:05L HLA-DRB4*03:01NL HLA-DRB1*08:04L HLA-DPA1*01:03-B1*03:01L HLA-DRB1*11:04L HLA-DRB1*14:02L HLA-DQA1*01-B1*05L HLA-DQA1*05:05-B1*03:116L HLA-DRB1*04:10L HLA-DRB3*01:01L
  REGION 1..14: note = CONT. FROM ABOVE: HLA-DPA1*02:01-B1*13:01L HLA-DPA1*01:03-B1*104 :01L HLA-DRB1*14:17L HLA-DRB1*16:01L HLA-DRB1*08:03L HLA-DRB1*15 :03L
GPEAGLPYGANKDG

SEQ ID NO: 15047 - protein, 16 aa, Severe acute respiratory syndrome coronavirus 2
  REGION 1..16: note = Table B: HLA-DRB1*13:02L HLA-DRB1*04:04L HLA-DPA1*01:03-B1*03:01L HLA-DRB1*14:01L HLA-DRB1*11:01L HLA-DQA1*05:05-B1*03:19L HLA-DRB3*01:01L HLA-DPA1*03:01-B1*105:01L HLA-DPA1*01:03-B1*104:01L
  REGION 1..16: note = CONT. FROM ABOVE: HLA-DRB1*07:01L HLA-DRB1*15:03L
TPKDHIGTRNPANNAA

SEQ ID NO: 15048 - protein, 13 aa, Severe acute respiratory syndrome coronavirus 2
  REGION 1..13: note = Table B: HLA-DRB1*13:02L HLA-DRB3*02:01L HLA-DPA1*01:03-B1*03:01L HLA-DPA1*03:01-B1*04:02L HLA-DRB1*11:03L HLA-DRB1*12:02L HLA-DRB1*10:01L
NAAIVLQLPQGTT

SEQ ID NO: 15049 - protein, 13 aa, Severe acute respiratory syndrome coronavirus 2
  REGION 1..13: note = Table B: HLA-DRB1*13:02L HLA-DRB1*01:03L HLA-DRB1*04:05L HLA-DQA1*01:02-B1*06:02L HLA-DPA1*01:03-B1*03:01L HLA-DRB1*14:01L HLA-DQA1*05:05-B1*03:19L HLA-DRB1*04:10L HLA-DPA1*03:01-B1*105:01L HLA-DRB1*14:54L
  REGION 1..13: note = CONT. FROM ABOVE: HLA-DQA1*01:03-B1*06:01L HLA-DRB1*04:08L
IVLQLPQGTTLPK

SEQ ID NO: 15050 - protein, 11 aa, Severe acute respiratory syndrome coronavirus 2
  REGION 1..11: note = Table B: HLA-DRB1*13:02L HLA-DRB1*13:03L HLA-DRB1*01:03L HLA-DRB4*03:01NL HLA-DRB1*08:01L HLA-DRB1*12:01L HLA-DQA1*05:05-B1*03:01L
GSRGGSQASSR

SEQ ID NO: 15051 - protein, 11 aa, Severe acute respiratory syndrome coronavirus 2
  REGION 1..11: note = Table B: HLA-DRB1*13:02L HLA-DRB4*03:01NL HLA-DRB1*08:01L HLA-DRB1*12:01L HLA-DQA1*05:05-B1*03:01L HLA-DRB1*14:17L
SSRNSTPGSSR

SEQ ID NO: 15052 - protein, 14 aa, Severe acute respiratory syndrome coronavirus 2
  REGION 1..14: note = Table B: HLA-DRB1*13:02L HLA-DQA1*01:02-B1*06:02L HLA-DRB1*01:02L HLA-DPA1*01:03-B1*03:01L HLA-DRB1*14:01L HLA-DQA1*01-B1*05L HLA-DRB1*12:01L HLA-DPA1*02:01-B1*13:01L HLA-DQA1*01:03-B1*06:01L
SPARMAGNGGDAAL

SEQ ID NO: 15053 - protein, 14 aa, Severe acute respiratory syndrome coronavirus 2
  REGION 1..14: note = Table B: HLA-DRB1*13:02L HLA-DRB1*04:05L HLA-DQA1*05:05-B1*03:19L HLA-DPA1*01:03-B1*104:01L
GDAALALLLLDRLN

SEQ ID NO: 15054 - protein, 12 aa, Severe acute respiratory syndrome coronavirus 2
  REGION 1..12: note = Table B: HLA-DRB1*13:02L HLA-DRB1*01:03L HLA-DRB1*01:02L HLA-DRB1*11:04L HLA-DRB1*11:01L HLA-DRB1*04:08L
LALLLLDRLNQL

SEQ ID NO: 15055 - protein, 12 aa, Severe acute respiratory syndrome coronavirus 2
  REGION 1..12: note = Table B: HLA-DRB1*13:02L HLA-DRB1*01:02L HLA-DRB1*11:02L HLA-DRB1*11:03L HLA-DRB1*11:04L HLA-DRB1*11:01L HLA-DRB3*01:01L HLA-DRB1*14:54L HLA-DPA1*01:03-B1*02:01L HLA-DRB1*08:02L
ALLLLDRLNQLE

SEQ ID NO: 15056 - protein, 13 aa, Severe acute respiratory syndrome coronavirus 2
  REGION 1..13: note = Table B: HLA-DRB1*13:02L HLA-DRB1*04:05L HLA-DRB3*01:01L HLA-DPA1*01:03-B1*02:01L
LLLLDRLNQLESK

SEQ ID NO: 15057 - protein, 10 aa, Severe acute respiratory syndrome coronavirus 2
  REGION 1..10: note = Table B: HLA-DRB1*13:02L HLA-DRB1*13:03L HLA-DRB1*01:03L HLA-DRB1*04:02L HLA-DRB1*01:01L HLA-DRB4*03:01NL HLA-DRB1*11:04L HLA-DRB1*08:01L HLA-DRB5*01:01L HLA-DRB1*12:01L HLA-DQA1*03:01-B1*03:02M HLA-DQA1*05:05-B1*03:01L
  REGION 1..10: note = CONT. FROM ABOVE: HLA-DRB1*14:17L HLA-DRB1*16:01L HLA-DQA1*02:01 -B1*03:03L
QQQGQTVTKK

SEQ ID NO: 15058 - protein, 10 aa, Severe acute respiratory syndrome coronavirus 2
  REGION 1..10: note = Table B: HLA-DRB1*13:02L HLA-DRB1*13:03L HLA-DRB1*01:03L HLA-DRB1*04:02L HLA-DRB1*01:01L HLA-DRB4*03:01NL HLA-DRB1*14:01L HLA-DRB1*11:04L HLA-DRB1*08:01L HLA-DRB5*01:01L HLA-DRB1*12:01L HLA-DRB1*12:02L HLA-DQA1*03:01-B1*03:02M
  REGION 1..10: note = CONT. FROM ABOVE: HLA-DQA1*05:05-B1*03:01L HLA-DRB1*14:17L HLA-D RB1*16:01L HLA-DQA1*01:03-B1*06:01L HLA-DQA1*02:01-B1*03:03L
SAAEASKKPR

SEQ ID NO: 15059 - protein, 10 aa, Severe acute respiratory syndrome coronavirus 2
  REGION 1..10: note = Table B: HLA-DRB1*13:02L HLA-DRB1*13:03L HLA-DRB1*11:04L HLA-DRB1*08:01L HLA-DRB1*12:01L HLA-DQA1*03:01-B1*03:02L
EASKKPRQKR

SEQ ID NO: 15060 - protein, 13 aa, Severe acute respiratory syndrome coronavirus 2
  REGION 1..13: note = Table B: HLA-DRB1*13:02L HLA-DRB1*04:04L HLA-DRB1*07:01L
QKRTATKAYNVTQ

SEQ ID NO: 15061 - protein, 13 aa, Severe acute respiratory syndrome coronavirus 2
  REGION 1..13: note = Table B: HLA-DRB1*13:02L HLA-DRB1*04:04L HLA-DRB1*04:05L HLA-DRB1*01:02L HLA-DPA1*01:03-B1*03:01L HLA-DPA1*03:01-B1*04:02L HLA-DRB1*14:01L HLA-DQA1*01:01-B1*05:01L HLA-DRB1*08:01L HLA-DRB1*04:10L
  REGION 1..13: note = CONT. FROM ABOVE: HLA-DRB1*12:02L HLA-DPA1*02:01-B1*13:01L HLA-D PA1*03:01-B1*105:01L HLA-DRB1*14:54L HLA-DPA1*01:03-B1*104:01L H LA-DRB1*04:08L HLA-DRB1*15:03L
TATKAYNVTQAFG

SEQ ID NO: 15062 - protein, 10 aa, Severe acute respiratory syndrome coronavirus 2
  REGION 1..10: note = Table B: HLA-DRB1*13:02L HLA-DRB1*13:03L HLA-DRB4*03:01NL HLA-DRB1*08:01L HLA-DRB1*12:01L HLA-DQA1*03:01-B1*03:02L HLA-DQA1*05:05-B1*03:01L
AYNVTQAFGR

SEQ ID NO: 15063 - protein, 14 aa, Severe acute respiratory syndrome coronavirus 2
  REGION 1..14: note = Table B: HLA-DRB1*13:02L HLA-DRB1*04:05L HLA-DRB1*01:02L HLA-DPA1*01:03-B1*03:01L HLA-DRB1*12:01L HLA-DPA1*02:01-B1*13:01L HLA-DQA1*03:01-B1*03:02L HLA-DPA1*01:03-B1*104:01L HLA-DRB1*07:01L
  REGION 1..14: note = CONT. FROM ABOVE: HLA-DQA1*02:01-B1*03:03L
FGRRGPEQTQGNFG

SEQ ID NO: 15064 - protein, 16 aa, Severe acute respiratory syndrome coronavirus 2
  REGION 1..16: note = Table B: HLA-DRB1*13:02L HLA-DRB1*13:03L HLA-DRB1*04:04L HLA-DRB1*08:04L HLA-DRB3*02:01L HLA-DRB1*14:01L HLA-DRB1*14:02L HLA-DRB1*08:01L HLA-DPA1*01:03-B1*04:01L HLA-DRB3*01:01L HLA-DPA1*01:03-B1*104:01L HLA-DRB1*07:01L HLA-DRB1*08:03L
GPEQTQGNFGDQELIR

SEQ ID NO: 15065 - protein, 14 aa, Severe acute respiratory syndrome coronavirus 2
  REGION 1..14: note = Table B: HLA-DRB1*13:02L HLA-DRB1*08:04L HLA-DPA1*01:03-B1*03:01L HLA-DPA1*03:01-B1*04:02L HLA-DRB1*14:01L HLA-DRB1*14:02L HLA-DRB1*08:01L HLA-DRB1*04:10L HLA-DPA1*01:03-B1*04:02L HLA-DRB3*01:01L
  REGION 1..14: note = CONT. FROM ABOVE: HLA-DQA1*05:05-B1*03:01L
TQGNFGDQELIRQG

SEQ ID NO: 15066 - protein, 13 aa, Severe acute respiratory syndrome coronavirus 2
  REGION 1..13: note = Table B: HLA-DRB1*13:02L HLA-DRB1*04:04L HLA-DRB1*14:01L HLA-DPA1*02:01-B1*13:01L HLA-DRB1*15:03L
LIRQGTDYKHWPQ

SEQ ID NO: 15067 - protein, 15 aa, Severe acute respiratory syndrome coronavirus 2
  REGION 1..15: note = Table B: HLA-DRB1*13:02L HLA-DRB1*04:04L HLA-DRB1*11:04L HLA-DRB1*14:02L HLA-DPA1*01:03-B1*04:02L
GTDYKHWPQIAQFAP

SEQ ID NO: 15068 - protein, 14 aa, Severe acute respiratory syndrome coronavirus 2
  REGION 1..14: note = Table B: HLA-DRB1*13:02L HLA-DRB1*04:02L HLA-DRB1*04:05L HLA-DRB1*01:02L HLA-DRB1*08:04L HLA-DPA1*01:03-B1*03:01L HLA-DPA1*03:01-B1*04:02L HLA-DQA1*01-B1*05L HLA-DPA1*01:03-B1*04:01L HLA-DPA1*01:03-B1*04:02L
  REGION 1..14: note = CONT. FROM ABOVE: HLA-DPA1*02:01-B1*13:01L HLA-DPA1*01:03-B1*104 :01L HLA-DRB1*04:08L HLA-DRB1*15:03L
APSASAFFGMSRIG

SEQ ID NO: 15069 - protein, 13 aa, Severe acute respiratory syndrome coronavirus 2
  REGION 1..13: note = Table B: HLA-DRB1*13:02L HLA-DRB1*01:03L HLA-DRB1*04:02L HLA-DRB1*04:05L HLA-DRB1*01:02L HLA-DRB1*11:03L HLA-DRB1*14:02L HLA-DQA1*05:05-B1*03:116L HLA-DPA1*02:01-B1*13:01L HLA-DRB1*08:02L
ASAFFGMSRIGME

SEQ ID NO: 15070 - protein, 14 aa, Severe acute respiratory syndrome coronavirus 2
  REGION 1..14: note = Table B: HLA-DRB1*13:02L HLA-DRB1*13:03L HLA-DRB1*01:03L HLA-DRB1*04:05L HLA-DRB4*03:01NL HLA-DPA1*01:03-B1*03:01L HLA-DQA1*01:01-B1*05:01L HLA-DRB1*08:01L HLA-DQA1*05:05-B1*03:19L HLA-DQA1*05:01-B1*02:01L
  REGION 1..14: note = CONT. FROM ABOVE: HLA-DRB1*04:10L HLA-DPA1*01:03-B1*04:02L HLA-D RB1*12:01L HLA-DPA1*02:01-B1*13:01L HLA-DPA1*03:01-B1*105:01L HL A-DPA1*01:03-B1*104:01L HLA-DQA1*05:05-B1*03:01L HLA-DPA1*01:02- B1*04:01L HLA-DRB1*04:08L HLA-DRB1*15:03L
TPSGTWLTYTGAIK

SEQ ID NO: 15071 - protein, 12 aa, Severe acute respiratory syndrome coronavirus 2
  REGION 1..12: note = Table B: HLA-DRB1*13:02L HLA-DRB1*13:03L HLA-DRB1*01:03L HLA-DRB1*04:05L HLA-DRB4*03:01NL HLA-DPA1*01:03-B1*03:01L HLA-DRB1*11:03L HLA-DQA1*05:01-B1*02:01L HLA-DPA1*01:03-B1*04:01L HLA-DRB1*09:01L HLA-DRB1*12:02L
  REGION 1..12: note = CONT. FROM ABOVE: HLA-DPA1*02:01-B1*13:01L HLA-DPA1*03:01-B1*105 :01L HLA-DQA1*05:05-B1*03:01L HLA-DRB1*04:08L
GTWLTYTGAIKL

SEQ ID NO: 15072 - protein, 16 aa, Severe acute respiratory syndrome coronavirus 2
  REGION 1..16: note = Table B: HLA-DRB1*13:02L
DDKDPNFKDQVILLNK

SEQ ID NO: 15073 - protein, 12 aa, Severe acute respiratory syndrome coronavirus 2
  REGION 1..12: note = Table B: HLA-DRB1*13:02L HLA-DRB1*11:01L HLA-DPA1*02:01-B1*13:01L
KDQVILLNKHID

SEQ ID NO: 15074 - protein, 12 aa, Severe acute respiratory syndrome coronavirus 2
  REGION 1..12: note = Table B: HLA-DRB1*13:02L HLA-DRB1*01:02L HLA-DRB1*11:03L HLA-DRB1*11:01L HLA-DRB3*01:01L
VILLNKHIDAYK

SEQ ID NO: 15075 - protein, 15 aa, Severe acute respiratory syndrome coronavirus 2
  REGION 1..15: note = Table B: HLA-DRB1*13:02L HLA-DPA1*03:01-B1*04:02L HLA-DPA1*02:01-B1*13:01L
NKHIDAYKTFPPTEP

SEQ ID NO: 15076 - protein, 14 aa, Severe acute respiratory syndrome coronavirus 2
  REGION 1..14: note = Table B: HLA-DRB1*13:02L HLA-DRB1*01:03L HLA-DRB1*04:04L HLA-DRB1*08:77L HLA-DRB3*02:01L HLA-DPA1*01:03-B1*03:01L HLA-DPA1*03:01-B1*04:02L HLA-DRB1*14:01L HLA-DRB1*11:03L HLA-DQA1*01:01-B1*05:01L HLA-DRB1*09:01L HLA-DRB1*12:02L
  REGION 1..14: note = CONT. FROM ABOVE: HLA-DPA1*02:01-B1*13:01L HLA-DRB1*07:01L HLA-D RB1*10:01L HLA-DRB1*04:08L HLA-DRB1*08:03L
QQTVTLLPAADLDD

SEQ ID NO: 15077 - protein, 15 aa, Severe acute respiratory syndrome coronavirus 2
  REGION 1..15: note = Table B: HLA-DRB1*13:02L
VTLLPAADLDDFSKQ

SEQ ID NO: 15078 - protein, 16 aa, Severe acute respiratory syndrome coronavirus 2
  REGION 1..16: note = Table B: HLA-DRB1*13:02L
DDFSKQLQQSMSSADS

SEQ ID NO: 15079 - protein, 12 aa, Severe acute respiratory syndrome coronavirus 2
  REGION 1..12: note = Table B: HLA-DRB1*13:02L HLA-DRB1*04:04L HLA-DRB1*08:04L HLA-DRB3*02:01L HLA-DPA1*03:01-B1*04:02L HLA-DRB1*14:01L HLA-DRB1*11:04L HLA-DRB1*09:01L HLA-DPA1*01:03-B1*04:02L HLA-DRB1*12:02L HLA-DPA1*01:03-B1*104:01L HLA-DRB1*07:01L
  REGION 1..12: note = CONT. FROM ABOVE: HLA-DRB1*10:01L HLA-DRB1*08:03L
SRNYIAQVDVVN

SEQ ID NO: 15080 - protein, 11 aa, Severe acute respiratory syndrome coronavirus 2
  REGION 1..11: note = Table B: HLA-DRB1*13:03L HLA-DRB1*08:01L
QPYVFIKRSDA

SEQ ID NO: 15081 - protein, 10 aa, Severe acute respiratory syndrome coronavirus 2
  REGION 1..10: note = Table B: HLA-DRB1*13:03L HLA-DRB1*08:01L
YVFIKRSDAR

SEQ ID NO: 15082 - protein, 10 aa, Severe acute respiratory syndrome coronavirus 2
  REGION 1..10: note = Table B: HLA-DRB1*13:03L HLA-DRB1*01:03L HLA-DQA1*01:02-B1*06:02L HLA-DRB1*14:02L HLA-DQA1*05:05-B1*03:19L HLA-DQA1*05:01-B1*02:01L HLA-DPA1*03:01-B1*105:01L HLA-DQA1*02:01-B1*03:03L
PHVGEIPVAY

SEQ ID NO: 15083 - protein, 10 aa, Severe acute respiratory syndrome coronavirus 2
  REGION 1..10: note = Table B: HLA-DRB1*13:03L HLA-DRB1*01:03L HLA-DQA1*01:02-B1*06:02L HLA-DRB1*03:01L HLA-DRB1*14:02L HLA-DRB1*11:01L HLA-DQA1*05:05-B1*03:19L HLA-DQA1*05:01-B1*02:01L HLA-DPA1*01:03-B1*04:02L
  REGION 1..10: note = CONT. FROM ABOVE: HLA-DRB1*08:02L HLA-DQA1*02:01-B1*03:03L
GNKGAGGHSY

SEQ ID NO: 15084 - protein, 14 aa, Severe acute respiratory syndrome coronavirus 2
  REGION 1..14: note = Table B: HLA-DRB1*13:03L HLA-DRB1*04:02L HLA-DRB1*04:10L
GDELGTDPYEDFQE

SEQ ID NO: 15085 - protein, 13 aa, Severe acute respiratory syndrome coronavirus 2
  REGION 1..13: note = Table B: HLA-DRB1*13:03L HLA-DRB1*01:03L HLA-DRB1*04:04L HLA-DRB1*14:01L HLA-DRB1*08:01L HLA-DPA1*02:01-B1*13:01L HLA-DPA1*03:01-B1*105:01L HLA-DRB1*15:01L
EHEIAWYTERSEK

SEQ ID NO: 15086 - protein, 11 aa, Severe acute respiratory syndrome coronavirus 2
  REGION 1..11: note = Table B: HLA-DRB1*13:03L HLA-DRB1*01:03L HLA-DRB1*04:05L HLA-DRB1*01:02L HLA-DRB4*03:01NL HLA-DRB1*04:10L HLA-DRB1*12:01L HLA-DRB1*14:54L HLA-DPA1*01:02-B1*04:01L HLA-DRB1*16:01L HLA-DRB1*04:08L HLA-DQA1*02:01-B1*03:03L HLA-DRB1*15:03L
IAWYTERSEKS

SEQ ID NO: 15087 - protein, 10 aa, Severe acute respiratory syndrome coronavirus 2
  REGION 1..10: note = Table B: HLA-DRB1*13:03L HLA-DRB1*08:01L HLA-DQA1*03:01-B1*03:02L HLA-DQA1*02:01-B1*03:03L
TPFEIKLAKK

SEQ ID NO: 15088 - protein, 16 aa, Severe acute respiratory syndrome coronavirus 2
  REGION 1..16: note = Table B: HLA-DRB1*13:03L HLA-DRB1*08:01L HLA-DRB3*01:01L HLA-DQA1*01:03-B1*06:01L
IKLAKKFDTFNGECPN

SEQ ID NO: 15089 - protein, 10 aa, Severe acute respiratory syndrome coronavirus 2
  REGION 1..10: note = Table B: HLA-DRB1*13:03L HLA-DRB1*01:03L HLA-DQA1*01:02-B1*06:02L HLA-DPA1*01:03-B1*03:01L HLA-DQA1*05:05-B1*03:19L HLA-DQA1*05:01-B1*02:01L HLA-DPA1*03:01-B1*105:01L HLA-DQA1*02:01-B1*03:03L
VGPEHSLAEY

SEQ ID NO: 15090 - protein, 13 aa, Severe acute respiratory syndrome coronavirus 2
  REGION 1..13: note = Table B: HLA-DRB1*13:03L HLA-DRB1*01:03L HLA-DQA1*01:02-B1*06:02L HLA-DRB3*01:01L HLA-DRB1*16:01L HLA-DRB1*04:08L
ESGLKTILRKGGR

SEQ ID NO: 15091 - protein, 14 aa, Severe acute respiratory syndrome coronavirus 2
  REGION 1..14: note = Table B: HLA-DRB1*13:03L HLA-DRB1*03:01L HLA-DQA1*01:01-B1*05:01L HLA-DRB1*11:01L HLA-DRB3*01:01L HLA-DRB1*07:01L
QKEKVNINIVGDFK

SEQ ID NO: 15092 - protein, 12 aa, Severe acute respiratory syndrome coronavirus 2
  REGION 1..12: note = Table B: HLA-DRB1*13:03L HLA-DRB1*04:02L HLA-DRB1*08:04L HLA-DPA1*03:01-B1*04:02L HLA-DRB1*14:01L HLA-DRB1*08:01L HLA-DPA1*01:02-B1*04:01L HLA-DRB1*16:01L
TSAFVETVKGLD

SEQ ID NO: 15093 - protein, 12 aa, Severe acute respiratory syndrome coronavirus 2
  REGION 1..12: note = Table B: HLA-DRB1*13:03L HLA-DRB1*01:03L HLA-DRB1*04:04L HLA-DRB1*04:05L HLA-DQA1*01:02-B1*06:02L HLA-DRB1*01:01L HLA-DRB1*08:04L HLA-DRB3*02:01L HLA-DPA1*01:03-B1*03:01L HLA-DPA1*03:01-B1*04:02L HLA-DRB1*14:01L HLA-DRB1*11:03L
  REGION 1..12: note = CONT. FROM ABOVE: HLA-DRB1*11:04L HLA-DRB1*14:02L HLA-DRB1*04:10 L HLA-DRB1*09:01L HLA-DRB1*12:02L HLA-DRB1*14:54L HLA-DPA1*01:03 -B1*104:01L HLA-DPA1*01:02-B1*04:01L HLA-DRB1*10:01L HLA-DRB1*04 :08L HLA-DRB1*08:03L HLA-DRB1*15:01L
VVMAYITGGVVQ

SEQ ID NO: 15094 - protein, 12 aa, Severe acute respiratory syndrome coronavirus 2
  REGION 1..12: note = Table B: HLA-DRB1*13:03L HLA-DRB1*04:02L HLA-DRB1*04:04L HLA-DRB1*04:05L HLA-DRB1*08:04L HLA-DRB3*02:01L HLA-DRB1*11:03L HLA-DRB1*14:02L HLA-DPA1*02:01-B1*13:01L HLA-DQA1*05:05-B1*03:01L HLA-DRB1*07:01L HLA-DRB1*08:03L
VEFLRDGWEIVK

SEQ ID NO: 15095 - protein, 12 aa, Severe acute respiratory syndrome coronavirus 2
  REGION 1..12: note = Table B: HLA-DRB1*13:03L HLA-DQA1*01:02-B1*06:02L HLA-DRB1*14:54L
GGQIVTCAKEIK

SEQ ID NO: 15096 - protein, 13 aa, Severe acute respiratory syndrome coronavirus 2
  REGION 1..13: note = Table B: HLA-DRB1*13:03L HLA-DRB1*11:01L
VQTFFKLVNKFLA

SEQ ID NO: 15097 - protein, 10 aa, Severe acute respiratory syndrome coronavirus 2
  REGION 1..10: note = Table B: HLA-DRB1*13:03L HLA-DRB1*01:03L HLA-DQA1*01:02-B1*06:02L HLA-DRB1*08:04L HLA-DPA1*03:01-B1*04:02L HLA-DRB1*14:01L HLA-DRB1*11:04L HLA-DRB1*08:01L HLA-DRB1*11:01L HLA-DQA1*05:05-B1*03:19L
  REGION 1..10: note = CONT. FROM ABOVE: HLA-DPA1*01:03-B1*04:01L HLA-DPA1*01:03-B1*04: 02L HLA-DRB1*12:01L HLA-DPA1*02:01-B1*13:01L HLA-DPA1*03:01-B1*1 05:01L HLA-DPA1*01:02-B1*04:01L HLA-DRB1*16:01L HLA-DQA1*01:03-B 1*06:01L HLA-DRB1*04:08L HLA-DQA1*02:01-B1*03:03L
  REGION 1..10: note = CONT. FROM ABOVE: HLA-DRB1*15:03L
FKLVNKFLAL

SEQ ID NO: 15098 - protein, 10 aa, Severe acute respiratory syndrome coronavirus 2
  REGION 1..10: note = Table B: HLA-DRB1*13:03L HLA-DRB4*03:01NL HLA-DRB1*12:01L HLA-DQA1*03:01-B1*03:02L HLA-DRB1*14:17L HLA-DQA1*02:01-B1*03:03L
SIIIGGAKLK

SEQ ID NO: 15099 - protein, 12 aa, Severe acute respiratory syndrome coronavirus 2
  REGION 1..12: note = Table B: HLA-DRB1*13:03L HLA-DRB1*01:03L HLA-DRB1*04:05L HLA-DRB1*11:04L HLA-DRB1*11:01L HLA-DRB1*16:01L HLA-DRB1*04:08L
GLYRKCVKSREE

SEQ ID NO: 15100 - protein, 11 aa, Severe acute respiratory syndrome coronavirus 2
  REGION 1..11: note = Table B: HLA-DRB1*13:03L HLA-DRB1*01:03L HLA-DPA1*01:03-B1*03:01L HLA-DRB1*14:01L HLA-DQA1*05:05-B1*03:19L HLA-DQA1*05:01-B1*02:01L HLA-DPA1*03:01-B1*105:01L HLA-DQA1*03:01-B1*03:02L
  REGION 1..11: note = CONT. FROM ABOVE: HLA-DPA1*01:02-B1*04:01L HLA-DRB1*16:01L HLA-D RB1*15:03L
MPLKAPKEIIF

SEQ ID NO: 15101 - protein, 14 aa, Severe acute respiratory syndrome coronavirus 2
  REGION 1..14: note = Table B: HLA-DRB1*13:03L HLA-DRB1*01:03L HLA-DRB1*04:02L HLA-DRB1*04:05L HLA-DQA1*01:02-B1*06:02L HLA-DRB1*08:04L HLA-DPA1*01:03-B1*03:01L HLA-DRB1*14:02L HLA-DQA1*05:05-B1*03:19L HLA-DPA1*01:03-B1*04:01L
  REGION 1..14: note = CONT. FROM ABOVE: HLA-DPA1*02:01-B1*13:01L HLA-DPA1*03:01-B1*105 :01L HLA-DPA1*01:03-B1*104:01L HLA-DQA1*05:05-B1*03:01L HLA-DRB1 *14:17L HLA-DQA1*01:03-B1*06:01L HLA-DRB1*04:08L
APKEIIFLEGETLP

SEQ ID NO: 15102 - protein, 10 aa, Severe acute respiratory syndrome coronavirus 2
  REGION 1..10: note = Table B: HLA-DRB1*13:03L HLA-DQA1*01:02-B1*06:02L HLA-DPA1*03:01-B1*105:01L
LPTEVLTEEV

SEQ ID NO: 15103 - protein, 15 aa, Severe acute respiratory syndrome coronavirus 2
  REGION 1..15: note = Table B: HLA-DRB1*13:03L HLA-DRB4*03:01NL HLA-DRB1*04:10L
VVLKTGDLQPLEQPT

SEQ ID NO: 15104 - protein, 10 aa, Severe acute respiratory syndrome coronavirus 2
  REGION 1..10: note = Table B: HLA-DRB1*13:03L HLA-DRB1*04:05L HLA-DQA1*01-B1*05L
QPLEQPTSEA

SEQ ID NO: 15105 - protein, 10 aa, Severe acute respiratory syndrome coronavirus 2
  REGION 1..10: note = Table B: HLA-DRB1*13:03L HLA-DQA1*01:02-B1*06:02L HLA-DRB1*08:77L HLA-DPA1*01:03-B1*03:01L HLA-DRB1*03:01L HLA-DQA1*05:05-B1*03:19L HLA-DQA1*05:01-B1*02:01L HLA-DPA1*01:03-B1*04:01L HLA-DPA1*01:03-B1*104:01L
  REGION 1..10: note = CONT. FROM ABOVE: HLA-DRB1*10:01L HLA-DRB1*16:01L
DDTVIEVQGY

SEQ ID NO: 15106 - protein, 16 aa, Severe acute respiratory syndrome coronavirus 2
  REGION 1..16: note = Table B: HLA-DRB1*13:03L HLA-DRB1*14:02L HLA-DQA1*01:01-B1*05:01L HLA-DRB1*11:01L HLA-DPA1*01:03-B1*04:02L HLA-DRB3*01:01L HLA-DPA1*01:03-B1*104:01L HLA-DPA1*01:02-B1*04:01L
  REGION 1..16: note = CONT. FROM ABOVE: HLA-DRB1*08:02L
VQGYKSVNITFELDER

SEQ ID NO: 15107 - protein, 11 aa, Severe acute respiratory syndrome coronavirus 2
  REGION 1..11: note = Table B: HLA-DRB1*13:03L HLA-DRB1*01:03L HLA-DRB1*04:02L HLA-DRB1*04:05L HLA-DRB1*01:02L HLA-DRB4*03:01NL HLA-DRB1*14:01L HLA-DRB1*12:01L HLA-DRB1*14:54L HLA-DRB1*14:17L HLA-DRB1*04:08L
ITFELDERIDK

SEQ ID NO: 15108 - protein, 10 aa, Severe acute respiratory syndrome coronavirus 2
  REGION 1..10: note = Table B: HLA-DRB1*13:03L HLA-DQA1*01:02-B1*06:02L HLA-DRB1*08:77L HLA-DPA1*01:03-B1*03:01L HLA-DRB1*03:01L HLA-DRB1*11:02L HLA-DQA1*01-B1*05L HLA-DQA1*05:05-B1*03:19M HLA-DQA1*05:01-B1*02:01M HLA-DRB4*01:01L
  REGION 1..10: note = CONT. FROM ABOVE: HLA-DPA1*01:03-B1*04:01L HLA-DQA1*05:05-B1*03: 116L HLA-DPA1*01:03-B1*104:01L HLA-DRB1*10:01L HLA-DRB1*16:01L
DLDEWSMATY

SEQ ID NO: 15109 - protein, 16 aa, Severe acute respiratory syndrome coronavirus 2
  REGION 1..16: note = Table B: HLA-DRB1*13:03L HLA-DRB1*01:03L HLA-DRB1*04:02L HLA-DRB1*14:02L HLA-DQA1*05:05-B1*03:01L
EPSTQYEYGTEDDYQG

SEQ ID NO: 15110 - protein, 10 aa, Severe acute respiratory syndrome coronavirus 2
  REGION 1..10: note = Table B: HLA-DRB1*13:03L HLA-DRB1*04:05L HLA-DQA1*01-B1*05L HLA-DRB1*16:01L
KPLEFGATSA

SEQ ID NO: 15111 - protein, 14 aa, Severe acute respiratory syndrome coronavirus 2
  REGION 1..14: note = Table B: HLA-DRB1*13:03L HLA-DRB1*01:02L HLA-DPA1*02:01-B1*13:01L
GATSAALQPEEEQE

SEQ ID NO: 15112 - protein, 16 aa, Severe acute respiratory syndrome coronavirus 2
  REGION 1..16: note = Table B: HLA-DRB1*13:03L HLA-DRB1*01:02L HLA-DPA1*01:03-B1*03:01L HLA-DRB1*08:01L HLA-DPA1*01:03-B1*04:02L HLA-DPA1*02:01-B1*13:01L
DDSQQTVGQQDGSEDN

SEQ ID NO: 15113 - protein, 10 aa, Severe acute respiratory syndrome coronavirus 2
  REGION 1..10: note = Table B: HLA-DRB1*13:03L HLA-DQA1*03:01-B1*03:02L HLA-DRB1*16:01L
KVKPTVVVNA

SEQ ID NO: 15114 - protein, 10 aa, Severe acute respiratory syndrome coronavirus 2
  REGION 1..10: note = Table B: HLA-DRB1*13:03L HLA-DQA1*01:02-B1*06:02L HLA-DRB1*08:77L HLA-DRB1*14:02L HLA-DQA1*05:05-B1*03:19L HLA-DQA1*05:01-B1*02:01L HLA-DPA1*03:01-B1*105:01L HLA-DQA1*02:01-B1*03:03L
TVVVNAANVY

SEQ ID NO: 15115 - protein, 10 aa, Severe acute respiratory syndrome coronavirus 2
  REGION 1..10: note = Table B: HLA-DRB1*13:03L HLA-DRB1*01:03L HLA-DQA1*03:01-B1*03:02L HLA-DQA1*02:01-B1*03:03L
VYLKHGGGVA

SEQ ID NO: 15116 - protein, 10 aa, Severe acute respiratory syndrome coronavirus 2
  REGION 1..10: note = Table B: HLA-DRB1*13:03L HLA-DRB4*03:01NL HLA-DRB1*12:01L HLA-DQA1*03:01-B1*03:02L HLA-DRB1*14:17L
LHVVGPNVNK

SEQ ID NO: 15117 - protein, 11 aa, Severe acute respiratory syndrome coronavirus 2
  REGION 1..11: note = Table B: HLA-DRB1*13:03L HLA-DRB1*01:03L HLA-DRB1*01:01L HLA-DRB1*14:01L HLA-DQA1*05:05-B1*03:01L HLA-DRB1*08:02L
VYLAVFDKNLY

SEQ ID NO: 15118 - protein, 12 aa, Severe acute respiratory syndrome coronavirus 2
  REGION 1..12: note = Table B: HLA-DRB1*13:03L HLA-DRB1*08:01L HLA-DRB1*12:01L HLA-DRB1*14:54L
QKIAEIPKEEVK

SEQ ID NO: 15119 - protein, 11 aa, Severe acute respiratory syndrome coronavirus 2
  REGION 1..11: note = Table B: HLA-DRB1*13:03L HLA-DRB1*14:54L
FITESKPSVEQ

SEQ ID NO: 15120 - protein, 12 aa, Severe acute respiratory syndrome coronavirus 2
  REGION 1..12: note = Table B: HLA-DRB1*13:03L HLA-DRB1*04:02L HLA-DRB1*08:04L HLA-DRB1*08:01L HLA-DRB1*12:01L HLA-DPA1*02:01-B1*13:01L HLA-DPA1*03:01-B1*105:01L HLA-DRB1*04:08L HLA-DRB1*15:03L
IDITFLKKDAPY

SEQ ID NO: 15121 - protein, 12 aa, Severe acute respiratory syndrome coronavirus 2
  REGION 1..12: note = Table B: HLA-DRB1*13:03L HLA-DRB1*01:03L HLA-DQA1*01:02-B1*06:02L HLA-DRB1*08:04L HLA-DRB1*14:01L HLA-DRB1*08:01L HLA-DRB1*14:54L
AVVIPTKKAGGT

SEQ ID NO: 15122 - protein, 11 aa, Severe acute respiratory syndrome coronavirus 2
  REGION 1..11: note = Table B: HLA-DRB1*13:03L HLA-DQA1*03:01-B1*03:02L
IPTKKAGGTTE

SEQ ID NO: 15123 - protein, 10 aa, Severe acute respiratory syndrome coronavirus 2
  REGION 1..10: note = Table B: HLA-DRB1*13:03L HLA-DQA1*01:02-B1*06:02L HLA-DPA1*03:01-B1*105:01L
VPTDNYITTY

SEQ ID NO: 15124 - protein, 14 aa, Severe acute respiratory syndrome coronavirus 2
  REGION 1..14: note = Table B: HLA-DRB1*13:03L HLA-DPA1*03:01-B1*04:02L HLA-DPA1*02:01-B1*13:01L
GQGLNGYTVEEAKT

SEQ ID NO: 15125 - protein, 10 aa, Severe acute respiratory syndrome coronavirus 2
  REGION 1..10: note = Table B: HLA-DRB1*13:03L HLA-DQA1*03:01-B1*03:02L HLA-DRB1*14:17L HLA-DQA1*02:01-B1*03:03L
VEEAKTVLKK

SEQ ID NO: 15126 - protein, 10 aa, Severe acute respiratory syndrome coronavirus 2
  REGION 1..10: note = Table B: HLA-DRB1*13:03L HLA-DRB1*08:01L HLA-DQA1*03:01-B1*03:02L HLA-DQA1*02:01-B1*03:03L
TKAIVSTIQR

SEQ ID NO: 15127 - protein, 13 aa, Severe acute respiratory syndrome coronavirus 2
  REGION 1..13: note = Table B: HLA-DRB1*13:03L HLA-DRB1*04:04L HLA-DQA1*01:02-B1*06:02L HLA-DRB1*14:01L HLA-DRB1*11:04L HLA-DRB1*12:01L HLA-DPA1*02:01-B1*13:01L HLA-DPA1*01:02-B1*04:01L HLA-DQA1*02:01-B1*03:03L
  REGION 1..13: note = CONT. FROM ABOVE: HLA-DRB1*15:03L
IQRKYKGIKIQEG

SEQ ID NO: 15128 - protein, 11 aa, Severe acute respiratory syndrome coronavirus 2
  REGION 1..11: note = Table B: HLA-DRB1*13:03L HLA-DRB4*03:01NL HLA-DRB1*08:77L HLA-DPA1*01:03-B1*03:01L HLA-DPA1*03:01-B1*04:02L HLA-DRB1*03:01L HLA-DQA1*01-B1*05L HLA-DRB4*01:01L HLA-DPA1*01:03-B1*04:01L HLA-DQA1*05:05-B1*03:116L
  REGION 1..11: note = CONT. FROM ABOVE: HLA-DPA1*01:03-B1*04:02L HLA-DRB1*12:01L HLA-D PA1*01:03-B1*104:01L HLA-DRB1*10:01L HLA-DRB1*16:01L
QEGVVDYGARF

SEQ ID NO: 15129 - protein, 11 aa, Severe acute respiratory syndrome coronavirus 2
  REGION 1..11: note = Table B: HLA-DRB1*13:03L HLA-DQA1*01-B1*05L HLA-DQA1*05:01-B1*02:01L HLA-DPA1*03:01-B1*105:01L HLA-DPA1*01:02-B1*04:01L HLA-DRB1*16:01L HLA-DQA1*01:03-B1*06:01L
YVTHGLNLEEA

SEQ ID NO: 15130 - protein, 15 aa, Severe acute respiratory syndrome coronavirus 2
  REGION 1..15: note = Table B: HLA-DRB1*13:03L HLA-DRB1*04:04L HLA-DRB1*03:01L HLA-DQA1*01:01-B1*05:01L HLA-DRB3*01:01L HLA-DRB1*14:54L HLA-DRB1*07:01L
RSLKVPATVSVSSPD

SEQ ID NO: 15131 - protein, 10 aa, Severe acute respiratory syndrome coronavirus 2
  REGION 1..10: note = Table B: HLA-DRB1*13:03L
SVSSPDAVTA

SEQ ID NO: 15132 - protein, 11 aa, Severe acute respiratory syndrome coronavirus 2
  REGION 1..11: note = Table B: HLA-DRB1*13:03L HLA-DRB4*03:01NL HLA-DQA1*02:01-B1*03:03L
AYNGYLTSSSK

SEQ ID NO: 15133 - protein, 10 aa, Severe acute respiratory syndrome coronavirus 2
  REGION 1..10: note = Table B: HLA-DRB1*13:03L HLA-DQA1*01:02-B1*06:02L HLA-DRB1*08:77L HLA-DPA1*01:03-B1*03:01L HLA-DRB1*03:01L HLA-DRB1*11:02L HLA-DQA1*01-B1*05L HLA-DQA1*05:05-B1*03:19L HLA-DQA1*05:01-B1*02:01L HLA-DRB4*01:01L
  REGION 1..10: note = CONT. FROM ABOVE: HLA-DPA1*01:03-B1*04:01L HLA-DPA1*01:03-B1*104 :01L HLA-DRB1*10:01L HLA-DRB1*16:01L
TQVVDMSMTY

SEQ ID NO: 15134 - protein, 14 aa, Severe acute respiratory syndrome coronavirus 2
  REGION 1..14: note = Table B: HLA-DRB1*13:03L HLA-DRB1*01:01L HLA-DRB3*02:01L HLA-DPA1*03:01-B1*04:02L HLA-DRB1*11:03L HLA-DRB1*11:04L HLA-DRB1*14:02L HLA-DRB5*01:01L HLA-DQA1*01-B1*05L HLA-DRB1*09:01L HLA-DPA1*02:01-B1*13:01L HLA-DRB1*04:08L
  REGION 1..14: note = CONT. FROM ABOVE: HLA-DRB1*15:01L
VDMSMTYGQQFGPT

SEQ ID NO: 15135 - protein, 13 aa, Severe acute respiratory syndrome coronavirus 2
  REGION 1..13: note = Table B: HLA-DRB1*13:03L HLA-DRB4*03:01NL HLA-DRB1*14:54L HLA-DQA1*01:03-B1*06:01L HLA-DRB1*15:03L
DVTKIKPHNSHEG

SEQ ID NO: 15136 - protein, 13 aa, Severe acute respiratory syndrome coronavirus 2
  REGION 1..13: note = Table B: HLA-DRB1*13:03L HLA-DRB4*03:01NL HLA-DRB1*11:04L HLA-DRB3*01:01L HLA-DRB1*14:54L HLA-DPA1*01:02-B1*04:01L HLA-DRB1*15:03L
VTKIKPHNSHEGK

SEQ ID NO: 15137 - protein, 12 aa, Severe acute respiratory syndrome coronavirus 2
  REGION 1..12: note = Table B: HLA-DRB1*13:03L HLA-DRB1*01:03L HLA-DRB1*01:02L HLA-DPA1*01:03-B1*03:01L HLA-DQA1*01:01-B1*05:01L HLA-DRB1*08:01L HLA-DRB1*12:01L HLA-DQA1*05:05-B1*03:01L HLA-DRB1*04:08L
KTFYVLPNDDTL

SEQ ID NO: 15138 - protein, 11 aa, Severe acute respiratory syndrome coronavirus 2
  REGION 1..11: note = Table B: HLA-DRB1*13:03L
LPNDDTLRVEA

SEQ ID NO: 15139 - protein, 10 aa, Severe acute respiratory syndrome coronavirus 2
  REGION 1..10: note = Table B: HLA-DRB1*13:03L HLA-DRB1*01:03L HLA-DQA1*03:01-B1*03:02L HLA-DRB1*14:17L HLA-DRB1*16:01L HLA-DQA1*02:01-B1*03:03L
YMSALNHTKK

SEQ ID NO: 15140 - protein, 14 aa, Severe acute respiratory syndrome coronavirus 2
  REGION 1..14: note = Table B: HLA-DRB1*13:03L HLA-DRB1*04:02L HLA-DRB1*04:05L
MSALNHTKKWKYPQ

SEQ ID NO: 15141 - protein, 13 aa, Severe acute respiratory syndrome coronavirus 2
  REGION 1..13: note = Table B: HLA-DRB1*13:03L HLA-DRB1*01:01L HLA-DRB1*08:01L HLA-DRB1*11:01L HLA-DRB3*01:01L HLA-DQA1*03:01-B1*03:02L HLA-DPA1*01:03-B1*104:01L HLA-DQA1*02:01-B1*03:03L HLA-DRB1*15:03L
NHTKKWKYPQVNG

SEQ ID NO: 15142 - protein, 13 aa, Severe acute respiratory syndrome coronavirus 2
  REGION 1..13: note = Table B: HLA-DRB1*13:03L HLA-DRB1*04:04L HLA-DRB1*11:03L HLA-DRB1*11:04L HLA-DRB1*14:02L HLA-DQA1*01:01-B1*05:01L HLA-DRB1*08:01L HLA-DRB1*11:01L HLA-DPA1*01:03-B1*02:01L HLA-DPA1*01:03-B1*104:01L HLA-DRB1*10:01L HLA-DRB1*08:03L
VNGLTSIKWADNN

SEQ ID NO: 15143 - protein, 10 aa, Severe acute respiratory syndrome coronavirus 2
  REGION 1..10: note = Table B: HLA-DRB1*13:03L HLA-DQA1*01:02-B1*06:02L HLA-DPA1*03:01-B1*105:01L
NPPALQDAYY

SEQ ID NO: 15144 - protein, 10 aa, Severe acute respiratory syndrome coronavirus 2
  REGION 1..10: note = Table B: HLA-DRB1*13:03L HLA-DQA1*01:02-B1*06:02L HLA-DRB1*08:77L HLA-DPA1*01:03-B1*03:01M HLA-DRB1*03:01L HLA-DRB1*11:02L HLA-DQA1*01-B1*05L HLA-DQA1*05:05-B1*03:19M HLA-DQA1*05:01-B1*02:01M HLA-DRB4*01:01L
  REGION 1..10: note = CONT. FROM ABOVE: HLA-DPA1*01:03-B1*04:01L HLA-DRB1*12:01L HLA-D PA1*01:03-B1*104:01M HLA-DRB1*10:01L HLA-DRB1*16:01M
LGDVRETMSY

SEQ ID NO: 15145 - protein, 11 aa, Severe acute respiratory syndrome coronavirus 2
  REGION 1..11: note = Table B: HLA-DRB1*13:03L HLA-DRB1*01:03L HLA-DQA1*01:02-B1*06:02L HLA-DRB1*01:02L HLA-DRB1*08:04L HLA-DPA1*03:01-B1*04:02L HLA-DRB1*14:01L HLA-DRB1*11:04L HLA-DRB1*11:01L HLA-DPA1*01:03-B1*04:01L
  REGION 1..11: note = CONT. FROM ABOVE: HLA-DPA1*01:03-B1*04:02L HLA-DRB1*12:01L HLA-D PA1*03:01-B1*105:01L HLA-DQA1*03:01-B1*03:02L HLA-DPA1*01:03-B1* 02:01L HLA-DRB1*16:01L HLA-DQA1*01:03-B1*06:01L HLA-DRB1*04:08L HLA-DQA1*02:01-B1*03:03L
LSYEQFKKGVQ

SEQ ID NO: 15146 - protein, 12 aa, Severe acute respiratory syndrome coronavirus 2
  REGION 1..12: note = Table B: HLA-DRB1*13:03L HLA-DRB1*04:02L HLA-DRB1*08:04L HLA-DRB1*14:01L HLA-DRB1*08:01L HLA-DRB1*12:01L HLA-DQA1*03:01-B1*03:02L HLA-DRB1*14:54L HLA-DRB1*04:08L
DNYYKKDNSYFT

SEQ ID NO: 15147 - protein, 14 aa, Severe acute respiratory syndrome coronavirus 2
  REGION 1..14: note = Table B: HLA-DRB1*13:03L HLA-DRB3*01:01L HLA-DQA1*05:05-B1*03:01L HLA-DRB1*07:01L
ADDLNQLTGYKKPA

SEQ ID NO: 15148 - protein, 10 aa, Severe acute respiratory syndrome coronavirus 2
  REGION 1..10: note = Table B: HLA-DRB1*13:03L HLA-DRB1*01:03L HLA-DRB1*08:01L HLA-DQA1*03:01-B1*03:02L HLA-DRB1*16:01L HLA-DQA1*02:01-B1*03:03L
LTGYKKPASR

SEQ ID NO: 15149 - protein, 11 aa, Severe acute respiratory syndrome coronavirus 2
  REGION 1..11: note = Table B: HLA-DRB1*13:03L HLA-DRB1*08:01L HLA-DRB1*11:01L HLA-DRB1*16:01L HLA-DRB1*04:08L
HYTPSFKKGAK

SEQ ID NO: 15150 - protein, 12 aa, Severe acute respiratory syndrome coronavirus 2
  REGION 1..12: note = Table B: HLA-DRB1*13:03L HLA-DRB1*01:03L HLA-DRB1*04:04L HLA-DRB1*04:05L HLA-DQA1*01:02-B1*06:02L HLA-DRB1*01:02L HLA-DRB4*03:01NL HLA-DRB1*14:01L HLA-DQA1*01-B1*05L HLA-DRB1*04:10L HLA-DRB1*12:01L HLA-DRB1*14:54L HLA-DRB1*16:01L
  REGION 1..12: note = CONT. FROM ABOVE: HLA-DRB1*04:08L HLA-DQA1*02:01-B1*03:03L HLA-D RB1*15:03L
KPIVWHVNNATN

SEQ ID NO: 15151 - protein, 13 aa, Severe acute respiratory syndrome coronavirus 2
  REGION 1..13: note = Table B: HLA-DRB1*13:03L HLA-DRB1*08:77L HLA-DRB3*02:01L HLA-DRB1*11:03L HLA-DRB1*14:02L
IVWHVNNATNKAT

SEQ ID NO: 15152 - protein, 10 aa, Severe acute respiratory syndrome coronavirus 2
  REGION 1..10: note = Table B: HLA-DRB1*13:03L HLA-DRB1*01:03L HLA-DQA1*01:02-B1*06:02L HLA-DQA1*02:01-B1*03:03L
TKPVETSNSF

SEQ ID NO: 15153 - protein, 11 aa, Severe acute respiratory syndrome coronavirus 2
  REGION 1..11: note = Table B: HLA-DRB1*13:03L HLA-DRB1*04:02L HLA-DRB1*04:05L HLA-DRB4*03:01NL HLA-DQA1*01-B1*05L HLA-DQA1*05:01-B1*02:01L HLA-DRB1*04:10L HLA-DRB1*12:01L HLA-DRB1*14:54L HLA-DRB1*16:01L
NSFDVLKSEDA

SEQ ID NO: 15154 - protein, 11 aa, Severe acute respiratory syndrome coronavirus 2
  REGION 1..11: note = Table B: HLA-DRB1*13:03L HLA-DQA1*05:01-B1*02:01L HLA-DRB1*12:01L HLA-DRB1*16:01L HLA-DRB1*15:03L
DVLKSEDAQGM

SEQ ID NO: 15155 - protein, 12 aa, Severe acute respiratory syndrome coronavirus 2
  REGION 1..12: note = Table B: HLA-DRB1*13:03L HLA-DRB1*01:03L HLA-DRB1*08:77L HLA-DPA1*01:03-B1*03:01L HLA-DPA1*03:01-B1*04:02L HLA-DPA1*01:03-B1*04:01L HLA-DRB1*09:01L HLA-DPA1*02:01-B1*13:01L HLA-DRB1*14:17L
  REGION 1..12: note = CONT. FROM ABOVE: HLA-DPA1*01:02-B1*04:01L HLA-DRB1*07:01L HLA-D RB1*04:08L
EDLKPVSEEVVE

SEQ ID NO: 15156 - protein, 14 aa, Severe acute respiratory syndrome coronavirus 2
  REGION 1..14: note = Table B: HLA-DRB1*13:03L HLA-DRB1*04:04L HLA-DRB1*08:77L HLA-DPA1*01:03-B1*03:01L HLA-DRB1*08:01L HLA-DQA1*05:05-B1*03:19L HLA-DRB3*01:01L HLA-DRB1*07:01L HLA-DRB1*04:08L
DLKPVSEEVVENPT

SEQ ID NO: 15157 - protein, 11 aa, Severe acute respiratory syndrome coronavirus 2
  REGION 1..11: note = Table B: HLA-DRB1*13:03L HLA-DRB1*04:02L HLA-DRB1*08:77L HLA-DPA1*03:01-B1*04:02L HLA-DRB1*14:01L HLA-DRB1*14:02L HLA-DRB1*08:01L HLA-DPA1*01:03-B1*04:01L HLA-DQA1*05:05-B1*03:116L HLA-DPA1*01:02-B1*04:01L
  REGION 1..11: note = CONT. FROM ABOVE: HLA-DRB1*15:03L
VENPTIQKDVL

SEQ ID NO: 15158 - protein, 11 aa, Severe acute respiratory syndrome coronavirus 2
  REGION 1..11: note = Table B: HLA-DRB1*13:03L HLA-DRB4*03:01NL HLA-DRB1*14:54L
GDIILKPANNS

SEQ ID NO: 15159 - protein, 10 aa, Severe acute respiratory syndrome coronavirus 2
  REGION 1..10: note = Table B: HLA-DRB1*13:03L HLA-DRB1*01:03L HLA-DQA1*01:02-B1*06:02L HLA-DRB1*03:01L HLA-DQA1*05:05-B1*03:19L HLA-DQA1*05:01-B1*02:01L HLA-DPA1*03:01-B1*105:01L HLA-DRB1*16:01L
  REGION 1..10: note = CONT. FROM ABOVE: HLA-DQA1*02:01-B1*03:03L
VGHTDLMAAY

SEQ ID NO: 15160 - protein, 13 aa, Severe acute respiratory syndrome coronavirus 2
  REGION 1..13: note = Table B: HLA-DRB1*13:03L HLA-DRB1*01:03L HLA-DRB1*04:04L HLA-DRB1*04:05L HLA-DRB1*01:02L HLA-DRB4*03:01NL HLA-DPA1*01:03-B1*03:01L HLA-DPA1*03:01-B1*04:02L HLA-DRB1*04:10L HLA-DRB1*12:01L HLA-DPA1*02:01-B1*13:01L
  REGION 1..13: note = CONT. FROM ABOVE: HLA-DPA1*03:01-B1*105:01L HLA-DRB1*14:54L HLA- DRB1*04:08L HLA-DRB1*15:03L
HTDLMAAYVDNSS

SEQ ID NO: 15161 - protein, 12 aa, Severe acute respiratory syndrome coronavirus 2
  REGION 1..12: note = Table B: HLA-DRB1*13:03L HLA-DRB1*01:03L HLA-DRB1*04:05L HLA-DRB1*01:02L HLA-DQA1*01:01-B1*05:01L HLA-DRB1*08:01L HLA-DQA1*05:05-B1*03:19L HLA-DRB1*12:01L HLA-DPA1*03:01-B1*105:01L HLA-DQA1*05:05-B1*03:01L
  REGION 1..12: note = CONT. FROM ABOVE: HLA-DRB1*16:01L
VDNSSLTIKKPN

SEQ ID NO: 15162 - protein, 12 aa, Severe acute respiratory syndrome coronavirus 2
  REGION 1..12: note = Table B: HLA-DRB1*13:03L HLA-DRB1*01:03L HLA-DQA1*01:01-B1*05:01L HLA-DRB1*08:01L HLA-DPA1*03:01-B1*105:01L HLA-DQA1*05:05-B1*03:01L HLA-DRB1*16:01L
DNSSLTIKKPNE

SEQ ID NO: 15163 - protein, 10 aa, Severe acute respiratory syndrome coronavirus 2
  REGION 1..10: note = Table B: HLA-DRB1*13:03L HLA-DRB1*01:03L HLA-DQA1*01:02-B1*06:02L HLA-DRB1*08:77L HLA-DPA1*01:03-B1*03:01L HLA-DRB1*03:01L HLA-DRB1*14:02L HLA-DQA1*01-B1*05L HLA-DQA1*05:05-B1*03:19L
  REGION 1..10: note = CONT. FROM ABOVE: HLA-DQA1*05:01-B1*02:01L HLA-DRB4*01:01L HLA-D PA1*01:03-B1*04:01L HLA-DPA1*02:01-B1*13:01L HLA-DPA1*03:01-B1*1 05:01L HLA-DPA1*01:03-B1*104:01L HLA-DRB1*10:01L HLA-DRB1*16:01L HLA-DQA1*02:01-B1*03:03L HLA-DRB1*15:03L
SVPWDTIANY

SEQ ID NO: 15164 - protein, 13 aa, Severe acute respiratory syndrome coronavirus 2
  REGION 1..13: note = Table B: HLA-DRB1*13:03L HLA-DRB1*04:04L HLA-DRB1*04:05L HLA-DRB1*08:04L HLA-DRB1*14:01L HLA-DRB1*08:01L HLA-DQA1*01-B1*05L HLA-DRB1*04:10L HLA-DRB1*12:01L HLA-DPA1*02:01-B1*13:01L HLA-DPA1*01:02-B1*04:01L
  REGION 1..13: note = CONT. FROM ABOVE: HLA-DRB1*08:03L
KPFLNKVVSTTTN

SEQ ID NO: 15165 - protein, 11 aa, Severe acute respiratory syndrome coronavirus 2
  REGION 1..11: note = Table B: HLA-DRB1*13:03L HLA-DRB1*01:03L HLA-DRB1*04:02L HLA-DRB4*03:01NL HLA-DRB1*12:01L HLA-DRB1*14:17L HLA-DRB1*16:01L HLA-DQA1*02:01-B1*03:03L
IAKNTVKSVGK

SEQ ID NO: 15166 - protein, 12 aa, Severe acute respiratory syndrome coronavirus 2
  REGION 1..12: note = Table B: HLA-DRB1*13:03L HLA-DRB4*03:01NL HLA-DRB1*08:04L HLA-DRB1*11:03L HLA-DRB1*04:10L HLA-DRB1*14:54L HLA-DRB1*04:08L
EASFNYLKSPNF

SEQ ID NO: 15167 - protein, 12 aa, Severe acute respiratory syndrome coronavirus 2
  REGION 1..12: note = Table B: HLA-DRB1*13:03L HLA-DRB1*04:04L HLA-DRB1*01:01L HLA-DRB4*03:01NL HLA-DRB1*08:04L HLA-DRB1*11:03L HLA-DRB1*11:04L HLA-DRB1*08:01L HLA-DRB4*01:01L HLA-DRB1*04:10L HLA-DPA1*01:03-B1*04:02L HLA-DRB3*01:01L HLA-DRB1*14:54L
  REGION 1..12: note = CONT. FROM ABOVE: HLA-DPA1*01:03-B1*104:01L HLA-DRB1*10:01L HLA- DRB1*04:08L HLA-DRB1*08:03L
ASFNYLKSPNFS

SEQ ID NO: 15168 - protein, 10 aa, Severe acute respiratory syndrome coronavirus 2
  REGION 1..10: note = Table B: HLA-DRB1*13:03L HLA-DQA1*01-B1*05L HLA-DQA1*05:05-B1*03:116L HLA-DPA1*02:01-B1*13:01L
SPNFSKLINI

SEQ ID NO: 15169 - protein, 13 aa, Severe acute respiratory syndrome coronavirus 2
  REGION 1..13: note = Table B: HLA-DRB1*13:03L HLA-DRB1*04:04L HLA-DRB1*01:01L HLA-DRB1*08:04L HLA-DRB1*11:02L HLA-DRB1*11:04L HLA-DRB1*14:02L HLA-DRB1*11:01L HLA-DRB5*01:01L HLA-DRB5*02:02L HLA-DRB4*01:01L HLA-DQA1*05:05-B1*03:116L HLA-DRB1*04:10L
  REGION 1..13: note = CONT. FROM ABOVE: HLA-DPA1*01:03-B1*04:02L HLA-DRB1*12:02L HLA-D RB1*14:54L HLA-DRB1*10:01L HLA-DRB1*08:03L
GSLIYSTAALGVL

SEQ ID NO: 15170 - protein, 12 aa, Severe acute respiratory syndrome coronavirus 2
  REGION 1..12: note = Table B: HLA-DRB1*13:03L HLA-DRB1*01:03L HLA-DRB1*04:04L HLA-DQA1*01:02-B1*06:02L HLA-DRB1*01:02L HLA-DRB4*03:01NL HLA-DRB1*14:01L HLA-DRB1*11:04L HLA-DRB1*12:01L HLA-DPA1*03:01-B1*105:01L HLA-DRB1*14:54L
  REGION 1..12: note = CONT. FROM ABOVE: HLA-DQA1*01:03-B1*06:01L HLA-DRB1*04:08L HLA-D QA1*02:01-B1*03:03L HLA-DRB1*15:03L
LDSLDTYPSLET

SEQ ID NO: 15171 - protein, 11 aa, Severe acute respiratory syndrome coronavirus 2
  REGION 1..11: note = Table B: HLA-DRB1*13:03L HLA-DRB1*04:05L HLA-DQA1*01:02-B1*06:02L HLA-DPA1*03:01-B1*105:01L HLA-DQA1*03:01-B1*03:02L HLA-DRB1*16:01L HLA-DQA1*01:03-B1*06:01L HLA-DRB1*04:08L
  REGION 1..11: note = CONT. FROM ABOVE: HLA-DQA1*02:01-B1*03:03L
VWKSYVHVVDG

SEQ ID NO: 15172 - protein, 10 aa, Severe acute respiratory syndrome coronavirus 2
  REGION 1..10: note = Table B: HLA-DRB1*13:03L HLA-DQA1*01-B1*05L
RPINPTDQSS

SEQ ID NO: 15173 - protein, 10 aa, Severe acute respiratory syndrome coronavirus 2
  REGION 1..10: note = Table B: HLA-DRB1*13:03L HLA-DQA1*03:01-B1*03:02L HLA-DQA1*02:01-B1*03:03L
SYIVDSVTVK

SEQ ID NO: 15174 - protein, 13 aa, Severe acute respiratory syndrome coronavirus 2
  REGION 1..13: note = Table B: HLA-DRB1*13:03L HLA-DRB1*01:03L HLA-DRB1*04:04L HLA-DRB1*04:05L HLA-DRB4*03:01NL HLA-DRB1*14:01L HLA-DQA1*01:01-B1*05:01L HLA-DRB1*08:01L HLA-DRB1*04:10L HLA-DRB1*12:01L HLA-DRB1*14:54L HLA-DPA1*01:02-B1*04:01L
  REGION 1..13: note = CONT. FROM ABOVE: HLA-DRB1*04:08L HLA-DRB1*15:03L
LPINVIVFDGKSK

SEQ ID NO: 15175 - protein, 13 aa, Severe acute respiratory syndrome coronavirus 2
  REGION 1..13: note = Table B: HLA-DRB1*13:03L HLA-DRB1*04:05L HLA-DQA1*01:02-B1*06:02L HLA-DRB1*14:02L HLA-DRB1*08:01L HLA-DRB1*11:01L HLA-DQA1*05:01-B1*02:01L HLA-DRB1*12:01L HLA-DPA1*03:01-B1*105:01L HLA-DQA1*03:01-B1*03:02L
IVFDGKSKCEESS

SEQ ID NO: 15176 - protein, 11 aa, Severe acute respiratory syndrome coronavirus 2
  REGION 1..11: note = Table B: HLA-DRB1*13:03L HLA-DRB1*01:03L HLA-DRB1*04:05L HLA-DQA1*01-B1*05L HLA-DQA1*05:01-B1*02:01L HLA-DRB1*12:01L HLA-DRB1*14:54L HLA-DQA1*05:05-B1*03:01L HLA-DRB1*16:01L
AELAKNVSLDN

SEQ ID NO: 15177 - protein, 11 aa, Severe acute respiratory syndrome coronavirus 2
  REGION 1..11: note = Table B: HLA-DRB1*13:03L HLA-DQA1*01:02-B1*06:02L HLA-DRB4*03:01NL HLA-DRB1*12:01L HLA-DRB1*14:17L
NVLSTFISAAR

SEQ ID NO: 15178 - protein, 13 aa, Severe acute respiratory syndrome coronavirus 2
  REGION 1..13: note = Table B: HLA-DRB1*13:03L HLA-DRB1*01:03L HLA-DRB1*04:02L HLA-DRB1*01:02L HLA-DRB1*08:04L HLA-DRB1*11:04L HLA-DRB1*11:01L HLA-DRB1*04:08L
TKDVVECLKLSHQ

SEQ ID NO: 15179 - protein, 10 aa, Severe acute respiratory syndrome coronavirus 2
  REGION 1..10: note = Table B: HLA-DRB1*13:03L HLA-DQA1*01:02-B1*06:02M HLA-DPA1*01:03-B1*03:01L HLA-DRB1*03:01L HLA-DQA1*05:05-B1*03:19L HLA-DQA1*05:01-B1*02:01L HLA-DPA1*01:03-B1*04:01L HLA-DPA1*03:01-B1*105:01L
  REGION 1..10: note = CONT. FROM ABOVE: HLA-DQA1*02:01-B1*03:03L HLA-DRB1*15:03L
EVTGDSCNNY

SEQ ID NO: 15180 - protein, 13 aa, Severe acute respiratory syndrome coronavirus 2
  REGION 1..13: note = Table B: HLA-DRB1*13:03L HLA-DRB1*04:05L HLA-DRB1*14:01L HLA-DRB1*11:04L HLA-DRB1*11:01L HLA-DRB1*12:01L HLA-DRB3*01:01L HLA-DRB1*16:01L
SEQLRKQIRSAAK

SEQ ID NO: 15181 - protein, 12 aa, Severe acute respiratory syndrome coronavirus 2
  REGION 1..12: note = Table B: HLA-DRB1*13:03L HLA-DRB1*04:02L HLA-DRB1*08:04L HLA-DRB1*08:01L HLA-DRB1*12:02L HLA-DRB1*14:17L
AIFYLITPVHVM

SEQ ID NO: 15182 - protein, 10 aa, Severe acute respiratory syndrome coronavirus 2
  REGION 1..10: note = Table B: HLA-DRB1*13:03L HLA-DQA1*03:01-B1*03:02L HLA-DQA1*02:01-B1*03:03L
LITPVHVMSK

SEQ ID NO: 15183 - protein, 11 aa, Severe acute respiratory syndrome coronavirus 2
  REGION 1..11: note = Table B: HLA-DRB1*13:03L HLA-DRB1*01:03L HLA-DRB1*04:02L HLA-DRB1*14:01L HLA-DRB1*08:01L HLA-DQA1*03:01-B1*03:02L HLA-DRB1*14:17L HLA-DRB1*16:01L
TPVHVMSKHTD

SEQ ID NO: 15184 - protein, 11 aa, Severe acute respiratory syndrome coronavirus 2
  REGION 1..11: note = Table B: HLA-DRB1*13:03L HLA-DRB1*04:04L HLA-DRB1*04:05L HLA-DRB4*03:01NL HLA-DRB1*04:10L HLA-DRB1*12:01L HLA-DRB1*14:54L HLA-DRB1*16:01L HLA-DRB1*04:08L HLA-DRB1*15:01L HLA-DRB1*15:03L
SEIIGYKAIDG

SEQ ID NO: 15185 - protein, 13 aa, Severe acute respiratory syndrome coronavirus 2
  REGION 1..13: note = Table B: HLA-DRB1*13:03L HLA-DRB1*04:05L HLA-DRB4*03:01NL HLA-DQA1*01-B1*05L HLA-DRB1*12:01L
IDGGVTRDIASTD

SEQ ID NO: 15186 - protein, 16 aa, Severe acute respiratory syndrome coronavirus 2
  REGION 1..16: note = Table B: HLA-DRB1*13:03L HLA-DRB1*03:01L HLA-DRB1*11:03L HLA-DPA1*01:03-B1*104:01L HLA-DPA1*01:02-B1*04:01L HLA-DRB1*07:01L HLA-DRB1*10:01L HLA-DRB1*08:03L
VTRDIASTDTCFANKH

SEQ ID NO: 15187 - protein, 13 aa, Severe acute respiratory syndrome coronavirus 2
  REGION 1..13: note = Table B: HLA-DRB1*13:03L HLA-DRB1*08:04L
DTCFANKHADFDT

SEQ ID NO: 15188 - protein, 13 aa, Severe acute respiratory syndrome coronavirus 2
  REGION 1..13: note = Table B: HLA-DRB1*13:03L HLA-DRB1*04:04L HLA-DRB1*12:02L HLA-DRB1*14:54L HLA-DPA1*01:02-B1*04:01L HLA-DRB1*10:01L HLA-DRB1*15:01L
AVITREVGFVVPG

SEQ ID NO: 15189 - protein, 15 aa, Severe acute respiratory syndrome coronavirus 2
  REGION 1..15: note = Table B: HLA-DRB1*13:03L HLA-DRB1*04:04L HLA-DRB1*08:01L HLA-DRB1*12:02L HLA-DPA1*01:02-B1*04:01L
VITREVGFVVPGLPG

SEQ ID NO: 15190 - protein, 10 aa, Severe acute respiratory syndrome coronavirus 2
  REGION 1..10: note = Table B: HLA-DRB1*13:03L HLA-DQA1*03:01-B1*03:02L
VPGLPGTILR

SEQ ID NO: 15191 - protein, 14 aa, Severe acute respiratory syndrome coronavirus 2
  REGION 1..14: note = Table B: HLA-DRB1*13:03L HLA-DRB1*01:03L HLA-DRB1*04:04L HLA-DQA1*01:02-B1*06:02L HLA-DRB1*01:02L HLA-DRB4*03:01NL HLA-DRB1*08:04L HLA-DRB1*14:01L HLA-DRB1*08:01L HLA-DRB1*12:01L HLA-DPA1*03:01-B1*105:01L HLA-DQA1*02:01-B1*03:03L
KPVPYCYDTNVLEG

SEQ ID NO: 15192 - protein, 11 aa, Severe acute respiratory syndrome coronavirus 2
  REGION 1..11: note = Table B: HLA-DRB1*13:03L HLA-DRB1*01:03L HLA-DQA1*01:02-B1*06:02L HLA-DRB1*08:77L HLA-DPA1*01:03-B1*03:01L HLA-DRB1*03:01L HLA-DQA1*01-B1*05L HLA-DPA1*01:03-B1*04:01L HLA-DPA1*03:01-B1*105:01L
  REGION 1..11: note = CONT. FROM ABOVE: HLA-DPA1*01:03-B1*104:01L HLA-DRB1*16:01L HLA- DQA1*02:01-B1*03:03L HLA-DRB1*15:03L
DTNVLEGSVAY

SEQ ID NO: 15193 - protein, 10 aa, Severe acute respiratory syndrome coronavirus 2
  REGION 1..10: note = Table B: HLA-DRB1*13:03L HLA-DQA1*03:01-B1*03:02L HLA-DQA1*02:01-B1*03:03L
AYESLRPDTR

SEQ ID NO: 15194 - protein, 14 aa, Severe acute respiratory syndrome coronavirus 2
  REGION 1..14: note = Table B: HLA-DRB1*13:03L HLA-DRB1*04:02L HLA-DRB1*04:05L HLA-DQA1*01:02-B1*06:02L HLA-DRB1*01:01L HLA-DRB4*03:01NL HLA-DRB1*08:04L HLA-DRB1*08:77L HLA-DPA1*03:01-B1*04:02L HLA-DRB1*11:02L HLA-DRB1*11:03L HLA-DRB1*11:04L HLA-DRB1*14:02L
  REGION 1..14: note = CONT. FROM ABOVE: HLA-DRB1*08:01L HLA-DRB1*11:01L HLA-DRB5*01:01 L HLA-DQA1*05:05-B1*03:19L HLA-DRB1*12:01L HLA-DPA1*03:01-B1*105 :01L HLA-DRB1*14:54L HLA-DRB1*14:17L HLA-DPA1*01:02-B1*04:01L HL A-DRB1*10:01L HLA-DRB1*15:03L
ESLRPDTRYVLMDG

SEQ ID NO: 15195 - protein, 10 aa, Severe acute respiratory syndrome coronavirus 2
  REGION 1..10: note = Table B: HLA-DRB1*13:03L HLA-DQA1*01:02-B1*06:02M HLA-DPA1*01:03-B1*04:01L HLA-DPA1*02:01-B1*13:01L HLA-DPA1*03:01-B1*105:01L HLA-DQA1*01:03-B1*06:01L HLA-DQA1*02:01-B1*03:03L HLA-DRB1*15:03L
DAVNLLTNMF

SEQ ID NO: 15196 - protein, 10 aa, Severe acute respiratory syndrome coronavirus 2
  REGION 1..10: note = Table B: HLA-DRB1*13:03L HLA-DQA1*01-B1*05L HLA-DQA1*03:01-B1*03:02L
TPLIQPIGAL

SEQ ID NO: 15197 - protein, 10 aa, Severe acute respiratory syndrome coronavirus 2
  REGION 1..10: note = Table B: HLA-DRB1*13:03L HLA-DQA1*01:02-B1*06:02L HLA-DRB1*08:77L HLA-DPA1*01:03-B1*03:01L HLA-DQA1*01-B1*05L HLA-DQA1*05:05-B1*03:19L HLA-DQA1*05:01-B1*02:01L HLA-DPA1*01:03-B1*04:01L HLA-DPA1*01:03-B1*104:01L
  REGION 1..10: note = CONT. FROM ABOVE: HLA-DRB1*16:01L HLA-DQA1*02:01-B1*03:03L
FSGAMDTTSY

SEQ ID NO: 15198 - protein, 15 aa, Severe acute respiratory syndrome coronavirus 2
  REGION 1..15: note = Table B: HLA-DRB1*13:03L HLA-DRB1*03:01L HLA-DPA1*01:03-B1*04:02L HLA-DPA1*01:03-B1*02:01L
DTTSYREAACCHLAK

SEQ ID NO: 15199 - protein, 10 aa, Severe acute respiratory syndrome coronavirus 2
  REGION 1..10: note = Table B: HLA-DRB1*13:03L HLA-DQA1*01:02-B1*06:02L HLA-DRB1*08:77L HLA-DPA1*01:03-B1*03:01L HLA-DRB1*03:01L HLA-DRB1*11:02L HLA-DQA1*01-B1*05L HLA-DQA1*05:05-B1*03:19L HLA-DQA1*05:01-B1*02:01L HLA-DRB4*01:01L
  REGION 1..10: note = CONT. FROM ABOVE: HLA-DPA1*01:03-B1*04:01L HLA-DPA1*01:03-B1*104 :01L HLA-DRB1*16:01L
FSNSGSDVLY

SEQ ID NO: 15200 - protein, 11 aa, Severe acute respiratory syndrome coronavirus 2
  REGION 1..11: note = Table B: HLA-DRB1*13:03L
YQPPQTSITSA

SEQ ID NO: 15201 - protein, 10 aa, Severe acute respiratory syndrome coronavirus 2
  REGION 1..10: note = Table B: HLA-DRB1*13:03L HLA-DQA1*01:02-B1*06:02L HLA-DRB1*08:77L HLA-DPA1*01:03-B1*03:01M HLA-DRB1*03:01L HLA-DRB1*11:02M HLA-DQA1*01-B1*05L HLA-DQA1*05:05-B1*03:19M HLA-DQA1*05:01-B1*02:01M HLA-DRB4*01:01L
  REGION 1..10: note = CONT. FROM ABOVE: HLA-DPA1*01:03-B1*04:01L HLA-DRB1*12:01L HLA-D PA1*01:03-B1*104:01M HLA-DRB1*10:01L HLA-DRB1*16:01M
TSEDMLNPNY

SEQ ID NO: 15202 - protein, 13 aa, Severe acute respiratory syndrome coronavirus 2
  REGION 1..13: note = Table B: HLA-DRB1*13:03L HLA-DRB1*01:03L HLA-DRB1*14:54L
GNVQLRVIGHSMQ

SEQ ID NO: 15203 - protein, 12 aa, Severe acute respiratory syndrome coronavirus 2
  REGION 1..12: note = Table B: HLA-DRB1*13:03L HLA-DRB1*01:03L HLA-DRB1*04:02L HLA-DRB1*04:05L HLA-DQA1*01:02-B1*06:02L HLA-DRB1*01:02L HLA-DRB1*14:01L HLA-DRB1*11:04L HLA-DRB1*08:01L HLA-DRB1*11:01L HLA-DRB1*12:01L HLA-DRB3*01:01L HLA-DQA1*03:01-B1*03:02L
  REGION 1..12: note = CONT. FROM ABOVE: HLA-DRB1*14:17L HLA-DPA1*01:02-B1*04:01L HLA-D RB1*16:01L HLA-DRB1*04:08L HLA-DQA1*02:01-B1*03:03L HLA-DRB1*15: 03L
TPKYKFVRIQPG

SEQ ID NO: 15204 - protein, 12 aa, Severe acute respiratory syndrome coronavirus 2
  REGION 1..12: note = Table B: HLA-DRB1*13:03L HLA-DRB1*08:04L HLA-DRB1*08:01L HLA-DRB1*04:08L
PNFTIKGSFLNG

SEQ ID NO: 15205 - protein, 12 aa, Severe acute respiratory syndrome coronavirus 2
  REGION 1..12: note = Table B: HLA-DRB1*13:03L HLA-DRB1*01:03L HLA-DRB1*04:05L HLA-DRB1*08:77L HLA-DPA1*01:03-B1*03:01L HLA-DPA1*03:01-B1*04:02L HLA-DRB1*14:02L HLA-DPA1*01:03-B1*04:01L HLA-DPA1*01:03-B1*04:02L
  REGION 1..12: note = CONT. FROM ABOVE: HLA-DRB1*12:01L HLA-DPA1*02:01-B1*13:01L HLA-D PA1*01:03-B1*104:01L
GVHAGTDLEGNF

SEQ ID NO: 15206 - protein, 10 aa, Severe acute respiratory syndrome coronavirus 2
  REGION 1..10: note = Table B: HLA-DRB1*13:03L HLA-DQA1*01:02-B1*06:02L HLA-DRB1*08:77L HLA-DPA1*01:03-B1*03:01L HLA-DRB1*03:01L HLA-DQA1*01-B1*05L HLA-DQA1*05:05-B1*03:19L HLA-DQA1*05:01-B1*02:01L HLA-DPA1*01:03-B1*104:01L
  REGION 1..10: note = CONT. FROM ABOVE: HLA-DRB1*16:01L
AGTDLEGNFY

SEQ ID NO: 15207 - protein, 10 aa, Severe acute respiratory syndrome coronavirus 2
  REGION 1..10: note = Table B: HLA-DRB1*13:03L HLA-DRB1*08:01L HLA-DRB1*12:01L HLA-DQA1*03:01-B1*03:02L HLA-DQA1*05:05-B1*03:01L HLA-DQA1*02:01-B1*03:03L
GNFYGPFVDR

SEQ ID NO: 15208 - protein, 12 aa, Severe acute respiratory syndrome coronavirus 2
  REGION 1..12: note = Table B: HLA-DRB1*13:03L HLA-DRB1*01:03L HLA-DRB1*04:02L HLA-DRB1*04:05L HLA-DRB4*03:01NL HLA-DRB1*08:01L HLA-DQA1*03:01-B1*03:02L HLA-DRB1*04:08L HLA-DQA1*02:01-B1*03:03L
PFVDRQTAQAAG

SEQ ID NO: 15209 - protein, 13 aa, Severe acute respiratory syndrome coronavirus 2
  REGION 1..13: note = Table B: HLA-DRB1*13:03L HLA-DRB1*08:04L HLA-DRB1*08:01L HLA-DPA1*01:03-B1*04:01L HLA-DPA1*01:03-B1*04:02L
LNRFTTTLNDFNL

SEQ ID NO: 15210 - protein, 10 aa, Severe acute respiratory syndrome coronavirus 2
  REGION 1..10: note = Table B: HLA-DRB1*13:03L HLA-DRB1*08:01L HLA-DRB1*12:01L HLA-DQA1*03:01-B1*03:02L HLA-DQA1*02:01-B1*03:03L
GVTFQSAVKR

SEQ ID NO: 15211 - protein, 13 aa, Severe acute respiratory syndrome coronavirus 2
  REGION 1..13: note = Table B: HLA-DRB1*13:03L HLA-DRB1*04:04L HLA-DRB1*01:01L HLA-DRB1*11:03L HLA-DRB1*14:02L HLA-DPA1*01:03-B1*04:02L HLA-DPA1*01:03-B1*104:01L
TLVYKVYYGNALD

SEQ ID NO: 15212 - protein, 11 aa, Severe acute respiratory syndrome coronavirus 2
  REGION 1..11: note = Table B: HLA-DRB1*13:03L HLA-DRB1*01:03L HLA-DRB1*04:05L HLA-DRB1*01:02L HLA-DRB4*03:01NL HLA-DRB1*14:01L HLA-DRB1*12:01L HLA-DQA1*01:03-B1*06:01L HLA-DRB1*04:08L HLA-DRB1*15:01L
YKVYYGNALDQ

SEQ ID NO: 15213 - protein, 11 aa, Severe acute respiratory syndrome coronavirus 2
  REGION 1..11: note = Table B: HLA-DRB1*13:03L HLA-DRB1*08:04L HLA-DRB1*14:01L HLA-DRB1*08:01L
DAFKLNIKLLG

SEQ ID NO: 15214 - protein, 11 aa, Severe acute respiratory syndrome coronavirus 2
  REGION 1..11: note = Table B: HLA-DRB1*13:03L HLA-DRB1*04:05L HLA-DRB4*03:01NL HLA-DRB1*04:10L HLA-DRB1*12:01L HLA-DRB1*14:54L HLA-DRB1*16:01L HLA-DQA1*01:03-B1*06:01L
NDILLAKDTTE

SEQ ID NO: 15215 - protein, 10 aa, Severe acute respiratory syndrome coronavirus 2
  REGION 1..10: note = Table B: HLA-DRB1*13:03L HLA-DRB4*03:01NL HLA-DRB1*12:01L HLA-DQA1*03:01-B1*03:02L HLA-DQA1*05:05-B1*03:01L HLA-DQA1*01:03-B1*06:01L HLA-DQA1*02:01-B1*03:03L
ANGDSEVVLK

SEQ ID NO: 15216 - protein, 13 aa, Severe acute respiratory syndrome coronavirus 2
  REGION 1..13: note = Table B: HLA-DRB1*13:03L HLA-DRB1*01:03L HLA-DRB1*04:02L HLA-DQA1*01:02-B1*06:02L HLA-DRB1*01:02L HLA-DRB1*08:04L HLA-DRB1*14:01L HLA-DRB1*11:04L HLA-DRB1*11:01L HLA-DRB1*12:01L HLA-DRB3*01:01L HLA-DRB1*16:01L HLA-DRB1*04:08L
VVLKKLKKSLNVA

SEQ ID NO: 15217 - protein, 15 aa, Severe acute respiratory syndrome coronavirus 2
  REGION 1..15: note = Table B: HLA-DRB1*13:03L HLA-DRB1*01:01L HLA-DRB1*03:01L HLA-DQA1*01:01-B1*05:01L HLA-DRB1*08:01L HLA-DRB1*11:01L
KKLKKSLNVAKSEFD

SEQ ID NO: 15218 - protein, 12 aa, Severe acute respiratory syndrome coronavirus 2
  REGION 1..12: note = Table B: HLA-DRB1*13:03L HLA-DRB4*03:01NL HLA-DRB1*08:01L HLA-DRB1*16:01L HLA-DRB1*04:08L HLA-DRB1*08:03L
KSLNVAKSEFDR

SEQ ID NO: 15219 - protein, 13 aa, Severe acute respiratory syndrome coronavirus 2
  REGION 1..13: note = Table B: HLA-DRB1*13:03L HLA-DRB1*01:03L HLA-DRB1*01:02L HLA-DRB1*12:01L HLA-DPA1*02:01-B1*13:01L HLA-DRB1*15:03L
SLNVAKSEFDRDA

SEQ ID NO: 15220 - protein, 13 aa, Severe acute respiratory syndrome coronavirus 2
  REGION 1..13: note = Table B: HLA-DRB1*13:03L HLA-DRB1*01:02L HLA-DRB4*03:01NL HLA-DRB1*14:01L HLA-DRB1*08:01L HLA-DRB1*12:01L HLA-DPA1*02:01-B1*13:01L HLA-DRB1*14:54L HLA-DRB1*15:03L
LNVAKSEFDRDAA

SEQ ID NO: 15221 - protein, 10 aa, Severe acute respiratory syndrome coronavirus 2
  REGION 1..10: note = Table B: HLA-DRB1*13:03L HLA-DRB1*08:01L HLA-DQA1*03:01-B1*03:02L HLA-DQA1*01:03-B1*06:01L HLA-DQA1*02:01-B1*03:03L
DAAMQRKLEK

SEQ ID NO: 15222 - protein, 13 aa, Severe acute respiratory syndrome coronavirus 2
  REGION 1..13: note = Table B: HLA-DRB1*13:03L HLA-DPA1*01:03-B1*02:01L HLA-DRB1*08:03L
QTMLFTMLRKLDN

SEQ ID NO: 15223 - protein, 13 aa, Severe acute respiratory syndrome coronavirus 2
  REGION 1..13: note = Table B: HLA-DRB1*13:03L HLA-DRB1*08:03L
TMLFTMLRKLDND

SEQ ID NO: 15224 - protein, 12 aa, Severe acute respiratory syndrome coronavirus 2
  REGION 1..12: note = Table B: HLA-DRB1*13:03L HLA-DRB1*08:04L HLA-DRB1*11:01L HLA-DRB1*08:03L
LFTMLRKLDNDA

SEQ ID NO: 15225 - protein, 12 aa, Severe acute respiratory syndrome coronavirus 2
  REGION 1..12: note = Table B: HLA-DRB1*13:03L HLA-DRB1*01:03L HLA-DRB1*04:02L HLA-DRB1*04:04L HLA-DRB1*04:05L HLA-DRB1*01:02L HLA-DRB4*03:01NL HLA-DQA1*01-B1*05L HLA-DRB1*04:10L HLA-DRB1*12:01L HLA-DRB1*14:54L HLA-DRB1*16:01L HLA-DRB1*04:08L HLA-DRB1*15:03L
SAVKLQNNELSP

SEQ ID NO: 15226 - protein, 16 aa, Severe acute respiratory syndrome coronavirus 2
  REGION 1..16: note = Table B: HLA-DRB1*13:03L HLA-DPA1*03:01-B1*04:02L HLA-DRB1*11:02L HLA-DRB1*11:03L HLA-DRB1*14:02L HLA-DRB4*01:01L HLA-DRB3*01:01L HLA-DPA1*01:03-B1*02:01L HLA-DPA1*01:02-B1*04:01L HLA-DRB1*07:01L HLA-DRB1*08:02L
  REGION 1..16: note = CONT. FROM ABOVE: HLA-DRB1*08:03L
SPVALRQMSCAAGTTQ

SEQ ID NO: 15227 - protein, 13 aa, Severe acute respiratory syndrome coronavirus 2
  REGION 1..13: note = Table B: HLA-DRB1*13:03L HLA-DRB1*04:05L HLA-DRB1*01:02L HLA-DRB1*08:04L HLA-DRB1*14:01L HLA-DRB1*11:04L HLA-DRB1*11:01L HLA-DRB1*12:01L HLA-DQA1*03:01-B1*03:02L HLA-DRB1*16:01L
LKWARFPKSDGTG

SEQ ID NO: 15228 - protein, 12 aa, Severe acute respiratory syndrome coronavirus 2
  REGION 1..12: note = Table B: HLA-DRB1*13:03L HLA-DRB1*01:03L HLA-DRB1*04:05L HLA-DQA1*01:02-B1*06:02L HLA-DRB1*01:02L HLA-DRB1*08:04L HLA-DPA1*03:01-B1*04:02L HLA-DRB1*14:01L HLA-DRB1*11:04L HLA-DRB1*08:01L HLA-DRB1*11:01L HLA-DPA1*01:03-B1*04:02L
  REGION 1..12: note = CONT. FROM ABOVE: HLA-DRB1*12:01L HLA-DPA1*02:01-B1*13:01L HLA-D PA1*03:01-B1*105:01L HLA-DPA1*01:02-B1*04:01L HLA-DRB1*16:01L HL A-DRB1*04:08L HLA-DRB1*08:03L HLA-DQA1*02:01-B1*03:03L HLA-DRB1* 15:03L
VKYLYFIKGLNN

SEQ ID NO: 15229 - protein, 10 aa, Severe acute respiratory syndrome coronavirus 2
  REGION 1..10: note = Table B: HLA-DRB1*13:03L HLA-DRB4*03:01NL HLA-DRB1*08:01L HLA-DRB1*12:01L HLA-DQA1*03:01-B1*03:02L HLA-DRB1*14:17L
FIKGLNNLNR

SEQ ID NO: 15230 - protein, 13 aa, Severe acute respiratory syndrome coronavirus 2
  REGION 1..13: note = Table B: HLA-DRB1*13:03L HLA-DQA1*01:02-B1*06:02L HLA-DRB1*08:04L HLA-DRB1*11:04L HLA-DRB1*08:01L HLA-DRB1*11:01L HLA-DRB1*14:54L
IKGLNNLNRGMVL

SEQ ID NO: 15231 - protein, 13 aa, Severe acute respiratory syndrome coronavirus 2
  REGION 1..13: note = Table B: HLA-DRB1*13:03L HLA-DRB1*04:05L HLA-DPA1*03:01-B1*04:02L HLA-DRB1*11:03L HLA-DRB1*09:01L HLA-DPA1*03:01-B1*105:01L
TGQAITVTPEANM

SEQ ID NO: 15232 - protein, 13 aa, Severe acute respiratory syndrome coronavirus 2
  REGION 1..13: note = Table B: HLA-DRB1*13:03L HLA-DRB1*01:03L HLA-DRB1*04:04L HLA-DRB1*01:02L HLA-DRB1*04:08L HLA-DRB1*15:03L
AITVTPEANMDQE

SEQ ID NO: 15233 - protein, 13 aa, Severe acute respiratory syndrome coronavirus 2
  REGION 1..13: note = Table B: HLA-DRB1*13:03L HLA-DRB1*04:04L HLA-DRB1*04:08L
ITVTPEANMDQES

SEQ ID NO: 15234 - protein, 11 aa, Severe acute respiratory syndrome coronavirus 2
  REGION 1..11: note = Table B: HLA-DRB1*13:03L HLA-DQA1*01:02-B1*06:02L HLA-DQA1*05:01-B1*02:01L HLA-DPA1*03:01-B1*105:01L
TPEANMDQESF

SEQ ID NO: 15235 - protein, 10 aa, Severe acute respiratory syndrome coronavirus 2
  REGION 1..10: note = Table B: HLA-DRB1*13:03L HLA-DQA1*01:02-B1*06:02L HLA-DRB1*14:02L HLA-DPA1*03:01-B1*105:01L HLA-DQA1*02:01-B1*03:03L HLA-DRB1*15:03L
MLQSADAQSF

SEQ ID NO: 15236 - protein, 10 aa, Severe acute respiratory syndrome coronavirus 2
  REGION 1..10: note = Table B: HLA-DRB1*13:03L HLA-DQA1*01:02-B1*06:02L HLA-DPA1*01:03-B1*03:01L HLA-DQA1*05:05-B1*03:19L HLA-DQA1*05:01-B1*02:01L HLA-DPA1*01:03-B1*04:01L HLA-DPA1*03:01-B1*105:01L HLA-DRB1*15:03L
DVVYRAFDIY

SEQ ID NO: 15237 - protein, 11 aa, Severe acute respiratory syndrome coronavirus 2
  REGION 1..11: note = Table B: HLA-DRB1*13:03L HLA-DRB1*01:03L HLA-DQA1*01:02-B1*06:02L HLA-DRB1*08:01L HLA-DRB1*16:01L HLA-DRB1*04:08L
IDSYFVVKRHT

SEQ ID NO: 15238 - protein, 12 aa, Severe acute respiratory syndrome coronavirus 2
  REGION 1..12: note = Table B: HLA-DRB1*13:03L HLA-DRB1*01:03L HLA-DRB1*04:02L HLA-DRB1*04:05L HLA-DQA1*01:02-B1*06:02L HLA-DRB4*03:01NL HLA-DRB1*08:04L HLA-DPA1*03:01-B1*04:02L HLA-DRB1*14:01L HLA-DRB1*08:01L HLA-DQA1*01-B1*05L HLA-DRB1*04:10L
  REGION 1..12: note = CONT. FROM ABOVE: HLA-DRB1*12:01L HLA-DPA1*03:01-B1*105:01L HLA- DQA1*03:01-B1*03:02L HLA-DRB1*14:54L HLA-DPA1*01:02-B1*04:01L HL A-DRB1*16:01L HLA-DRB1*04:08L HLA-DQA1*02:01-B1*03:03L HLA-DRB1* 15:03L
ETIYNLLKDCPA

SEQ ID NO: 15239 - protein, 12 aa, Severe acute respiratory syndrome coronavirus 2
  REGION 1..12: note = Table B: HLA-DRB1*13:03L HLA-DRB1*04:02L HLA-DRB1*04:05L HLA-DQA1*01:02-B1*06:02L HLA-DRB1*08:04L HLA-DRB1*14:01L HLA-DRB1*11:04L HLA-DRB1*11:01L HLA-DRB1*08:03L
ADLVYALRHFDE

SEQ ID NO: 15240 - protein, 12 aa, Severe acute respiratory syndrome coronavirus 2
  REGION 1..12: note = Table B: HLA-DRB1*13:03L HLA-DRB1*04:02L HLA-DRB1*04:05L HLA-DQA1*01:02-B1*06:02L HLA-DRB1*08:04L HLA-DRB1*14:01L HLA-DRB1*11:04L HLA-DRB1*11:01L HLA-DRB1*16:01L HLA-DRB1*04:08L HLA-DRB1*08:03L
DLVYALRHFDEG

SEQ ID NO: 15241 - protein, 14 aa, Severe acute respiratory syndrome coronavirus 2
  REGION 1..14: note = Table B: HLA-DRB1*13:03L HLA-DRB1*01:03L HLA-DRB1*01:02L HLA-DPA1*03:01-B1*04:02L HLA-DRB1*14:02L HLA-DPA1*01:03-B1*04:02L HLA-DRB1*12:01L HLA-DQA1*03:01-B1*03:02L HLA-DRB1*04:08L HLA-DRB1*08:02L
  REGION 1..14: note = CONT. FROM ABOVE: HLA-DRB1*15:03L
DDYFNKKDWYDFVE

SEQ ID NO: 15242 - protein, 14 aa, Severe acute respiratory syndrome coronavirus 2
  REGION 1..14: note = Table B: HLA-DRB1*13:03L HLA-DRB1*08:04L HLA-DRB1*14:01L HLA-DPA1*02:01-B1*13:01L
AGIVGVLTLDNQDL

SEQ ID NO: 15243 - protein, 13 aa, Severe acute respiratory syndrome coronavirus 2
  REGION 1..13: note = Table B: HLA-DRB1*13:03L
GVLTLDNQDLNGN

SEQ ID NO: 15244 - protein, 10 aa, Severe acute respiratory syndrome coronavirus 2
  REGION 1..10: note = Table B: HLA-DRB1*13:03L HLA-DQA1*01:02-B1*06:02L HLA-DQA1*05:05-B1*03:19L HLA-DQA1*05:01-B1*02:01L HLA-DPA1*03:01-B1*105:01L
DNQDLNGNWY

SEQ ID NO: 15245 - protein, 10 aa, Severe acute respiratory syndrome coronavirus 2
  REGION 1..10: note = Table B: HLA-DRB1*13:03L HLA-DQA1*01:02-B1*06:02L HLA-DPA1*01:03-B1*03:01L HLA-DRB1*14:02L HLA-DQA1*05:05-B1*03:19L HLA-DQA1*05:01-B1*02:01L HLA-DPA1*03:01-B1*105:01L HLA-DPA1*01:03-B1*104:01L
  REGION 1..10: note = CONT. FROM ABOVE: HLA-DRB1*16:01L HLA-DQA1*02:01-B1*03:03L
SGVPVVDSYY

SEQ ID NO: 15246 - protein, 12 aa, Severe acute respiratory syndrome coronavirus 2
  REGION 1..12: note = Table B: HLA-DRB1*13:03L HLA-DRB1*01:03L HLA-DRB1*01:02L HLA-DRB1*08:04L HLA-DRB1*11:04L HLA-DRB1*08:01L HLA-DRB1*12:01L HLA-DPA1*01:02-B1*04:01L HLA-DRB1*16:01L HLA-DRB1*04:08L HLA-DRB1*15:03L
MPILTLTRALTA

SEQ ID NO: 15247 - protein, 13 aa, Severe acute respiratory syndrome coronavirus 2
  REGION 1..13: note = Table B: HLA-DRB1*13:03L HLA-DRB1*01:03L HLA-DRB1*01:02L HLA-DRB1*14:01L HLA-DQA1*01:01-B1*05:01L HLA-DRB1*08:01L HLA-DRB1*12:01L HLA-DPA1*02:01-B1*13:01L HLA-DRB1*04:08L
TRALTAESHVDTD

SEQ ID NO: 15248 - protein, 12 aa, Severe acute respiratory syndrome coronavirus 2
  REGION 1..12: note = Table B: HLA-DRB1*13:03L HLA-DQA1*01:02-B1*06:02L HLA-DRB1*08:04L HLA-DPA1*01:03-B1*03:01L HLA-DPA1*03:01-B1*04:02L HLA-DRB1*14:02L HLA-DQA1*05:01-B1*02:01L HLA-DPA1*02:01-B1*13:01L
  REGION 1..12: note = CONT. FROM ABOVE: HLA-DPA1*03:01-B1*105:01L
LLKYDFTEERLK

SEQ ID NO: 15249 - protein, 10 aa, Severe acute respiratory syndrome coronavirus 2
  REGION 1..10: note = Table B: HLA-DRB1*13:03L HLA-DQA1*01:02-B1*06:02L HLA-DRB1*08:77L HLA-DPA1*01:03-B1*03:01L HLA-DRB1*03:01L HLA-DRB1*14:02L HLA-DQA1*05:05-B1*03:19L HLA-DQA1*05:01-B1*02:01L HLA-DPA1*01:03-B1*04:01L
  REGION 1..10: note = CONT. FROM ABOVE: HLA-DPA1*03:01-B1*105:01L HLA-DRB1*16:01L HLA- DQA1*02:01-B1*03:03L
GVPFVVSTGY

SEQ ID NO: 15250 - protein, 10 aa, Severe acute respiratory syndrome coronavirus 2
  REGION 1..10: note = Table B: HLA-DRB1*13:03L HLA-DRB1*12:01L HLA-DQA1*03:01-B1*03:02L HLA-DQA1*05:05-B1*03:01L HLA-DRB1*14:17L HLA-DQA1*01:03-B1*06:01L HLA-DQA1*02:01-B1*03:03L
NQDVNLHSSR

SEQ ID NO: 15251 - protein, 11 aa, Severe acute respiratory syndrome coronavirus 2
  REGION 1..11: note = Table B: HLA-DRB1*13:03L HLA-DRB1*08:01L
AASGNLLLDKR

SEQ ID NO: 15252 - protein, 12 aa, Severe acute respiratory syndrome coronavirus 2
  REGION 1..12: note = Table B: HLA-DRB1*13:03L HLA-DRB1*04:04L HLA-DRB1*04:05L HLA-DQA1*01:02-B1*06:02L HLA-DRB1*14:01L HLA-DQA1*01:01-B1*05:01L HLA-DRB1*08:01L HLA-DQA1*05:01-B1*02:01L HLA-DRB1*04:10L HLA-DRB1*12:01L
  REGION 1..12: note = CONT. FROM ABOVE: HLA-DRB1*14:54L HLA-DQA1*05:05-B1*03:01L HLA-D RB1*04:08L
TNNVAFQTVKPG

SEQ ID NO: 15253 - protein, 16 aa, Severe acute respiratory syndrome coronavirus 2
  REGION 1..16: note = Table B: HLA-DRB1*13:03L HLA-DRB1*11:04L HLA-DRB1*11:01L
KPGNFNKDFYDFAVSK

SEQ ID NO: 15254 - protein, 11 aa, Severe acute respiratory syndrome coronavirus 2
  REGION 1..11: note = Table B: HLA-DRB1*13:03L HLA-DRB4*03:01NL HLA-DPA1*01:03-B1*03:01L HLA-DRB1*03:01L HLA-DRB1*14:01L HLA-DRB1*11:03L HLA-DQA1*05:05-B1*03:01L HLA-DRB1*08:02L
DFYDFAVSKGF

SEQ ID NO: 15255 - protein, 13 aa, Severe acute respiratory syndrome coronavirus 2
  REGION 1..13: note = Table B: HLA-DRB1*13:03L HLA-DRB1*08:01L
SKGFFKEGSSVEL

SEQ ID NO: 15256 - protein, 12 aa, Severe acute respiratory syndrome coronavirus 2
  REGION 1..12: note = Table B: HLA-DRB1*13:03L HLA-DQA1*01:02-B1*06:02L HLA-DRB1*01:02L HLA-DRB1*08:01L HLA-DQA1*05:05-B1*03:19L HLA-DRB1*04:10L HLA-DRB1*12:01L HLA-DPA1*03:01-B1*105:01L HLA-DQA1*05:05-B1*03:01L HLA-DRB1*10:01L HLA-DRB1*04:08L
GFFKEGSSVELK

SEQ ID NO: 15257 - protein, 12 aa, Severe acute respiratory syndrome coronavirus 2
  REGION 1..12: note = Table B: HLA-DRB1*13:03L HLA-DRB1*01:03L HLA-DRB1*04:02L HLA-DRB1*01:02L HLA-DRB4*03:01NL HLA-DRB1*08:01L HLA-DRB1*04:10L HLA-DRB1*12:01L HLA-DRB1*14:54L HLA-DRB1*16:01L HLA-DRB1*04:08L HLA-DQA1*02:01-B1*03:03L
KHFFFAQDGNAA

SEQ ID NO: 15258 - protein, 10 aa, Severe acute respiratory syndrome coronavirus 2
  REGION 1..10: note = Table B: HLA-DRB1*13:03L HLA-DQA1*01:02-B1*06:02L HLA-DPA1*01:03-B1*03:01L HLA-DQA1*05:05-B1*03:19L HLA-DQA1*05:01-B1*02:01L HLA-DPA1*01:03-B1*104:01L HLA-DRB1*16:01L
NAAISDYDYY

SEQ ID NO: 15259 - protein, 10 aa, Severe acute respiratory syndrome coronavirus 2
  REGION 1..10: note = Table B: HLA-DRB1*13:03L HLA-DRB1*01:03L HLA-DRB1*08:01L HLA-DQA1*03:01-B1*03:02L HLA-DPA1*01:02-B1*04:01L HLA-DRB1*16:01L HLA-DQA1*02:01-B1*03:03L
FPFNKWGKAR

SEQ ID NO: 15260 - protein, 11 aa, Severe acute respiratory syndrome coronavirus 2
  REGION 1..11: note = Table B: HLA-DRB1*13:03L
IPTITQMNLKY

SEQ ID NO: 15261 - protein, 11 aa, Severe acute respiratory syndrome coronavirus 2
  REGION 1..11: note = Table B: HLA-DRB1*13:03L HLA-DRB1*01:02L HLA-DRB1*12:01L HLA-DRB1*04:08L
NLKYAISAKNR

SEQ ID NO: 15262 - protein, 15 aa, Severe acute respiratory syndrome coronavirus 2
  REGION 1..15: note = Table B: HLA-DRB1*13:03L HLA-DRB1*08:77L HLA-DRB1*03:01L HLA-DPA1*01:03-B1*04:01L HLA-DRB1*12:02L HLA-DRB1*14:54L HLA-DPA1*01:03-B1*02:01L
NSVFNICQAVTANVN

SEQ ID NO: 15263 - protein, 12 aa, Severe acute respiratory syndrome coronavirus 2
  REGION 1..12: note = Table B: HLA-DRB1*13:03L HLA-DRB1*01:03L HLA-DRB1*04:02L HLA-DRB1*04:05L HLA-DRB4*03:01NL HLA-DRB1*08:04L HLA-DRB3*02:01L HLA-DPA1*01:03-B1*03:01L HLA-DRB1*11:03L HLA-DRB1*11:04L HLA-DRB1*11:01L HLA-DRB5*01:01L HLA-DQA1*01-B1*05L
  REGION 1..12: note = CONT. FROM ABOVE: HLA-DRB1*04:10L HLA-DRB1*12:02M HLA-DRB3*01:01 L HLA-DRB1*14:54L HLA-DQA1*05:05-B1*03:01L HLA-DRB1*14:17L HLA-D RB1*04:08L
VNALLSTDGNKI

SEQ ID NO: 15264 - protein, 11 aa, Severe acute respiratory syndrome coronavirus 2
  REGION 1..11: note = Table B: HLA-DRB1*13:03L HLA-DRB1*01:03L HLA-DRB1*04:02L HLA-DRB1*04:05L HLA-DRB1*08:04L HLA-DPA1*01:03-B1*03:01L HLA-DRB1*11:03L HLA-DRB1*11:04L HLA-DRB5*01:01L HLA-DRB1*04:10L HLA-DRB1*12:02L HLA-DRB1*14:54L HLA-DQA1*05:05-B1*03:01L
  REGION 1..11: note = CONT. FROM ABOVE: HLA-DRB1*04:08L
ALLSTDGNKIA

SEQ ID NO: 15265 - protein, 13 aa, Severe acute respiratory syndrome coronavirus 2
  REGION 1..13: note = Table B: HLA-DRB1*13:03L HLA-DRB1*11:04L
HRLYECLYRNRDV

SEQ ID NO: 15266 - protein, 12 aa, Severe acute respiratory syndrome coronavirus 2
  REGION 1..12: note = Table B: HLA-DRB1*13:03L HLA-DQA1*01:02-B1*06:02L HLA-DRB1*08:04L HLA-DRB1*11:04L HLA-DRB1*11:01L HLA-DRB1*04:08L HLA-DRB1*08:03L
LYECLYRNRDVD

SEQ ID NO: 15267 - protein, 14 aa, Severe acute respiratory syndrome coronavirus 2
  REGION 1..14: note = Table B: HLA-DRB1*13:03L HLA-DRB1*01:01L HLA-DQA1*03:01-B1*03:02L
DTDFVNEFYAYLRK

SEQ ID NO: 15268 - protein, 14 aa, Severe acute respiratory syndrome coronavirus 2
  REGION 1..14: note = Table B: HLA-DRB1*13:03L HLA-DRB1*01:01L HLA-DRB1*11:02L HLA-DRB1*11:03L HLA-DRB1*11:04L HLA-DRB1*14:02L HLA-DPA1*01:03-B1*04:01L HLA-DRB1*09:01L HLA-DPA1*01:03-B1*04:02L HLA-DRB3*01:01L
  REGION 1..14: note = CONT. FROM ABOVE: HLA-DPA1*01:03-B1*104:01L HLA-DRB1*07:01L HLA- DRB1*10:01L HLA-DRB1*08:03L
KSVLYYQNNVFMSE

SEQ ID NO: 15269 - protein, 10 aa, Severe acute respiratory syndrome coronavirus 2
  REGION 1..10: note = Table B: HLA-DRB1*13:03L
YPDPSRILGA

SEQ ID NO: 15270 - protein, 10 aa, Severe acute respiratory syndrome coronavirus 2
  REGION 1..10: note = Table B: HLA-DRB1*13:03L HLA-DQA1*01:02-B1*06:02L HLA-DRB1*08:04L HLA-DRB1*14:01L HLA-DRB1*11:04L HLA-DRB1*08:01L HLA-DRB1*11:01L HLA-DRB1*04:08L
LQYIRKLHDE

SEQ ID NO: 15271 - protein, 16 aa, Severe acute respiratory syndrome coronavirus 2
  REGION 1..16: note = Table B: HLA-DRB1*13:03L HLA-DRB3*02:01L HLA-DRB1*03:01L HLA-DRB1*11:02L HLA-DRB1*09:01L HLA-DRB1*14:17L HLA-DRB1*07:01L HLA-DRB1*08:02L HLA-DRB1*08:03L HLA-DRB1*15:01L
HKLVLSVNPYVCNAPG

SEQ ID NO: 15272 - protein, 10 aa, Severe acute respiratory syndrome coronavirus 2
  REGION 1..10: note = Table B: HLA-DRB1*13:03L HLA-DRB1*01:03L HLA-DQA1*01:02-B1*06:02L HLA-DRB1*08:77L HLA-DPA1*01:03-B1*03:01L HLA-DRB1*03:01L HLA-DRB1*11:02L HLA-DRB1*14:02L HLA-DQA1*01-B1*05L HLA-DQA1*05:05-B1*03:19L
  REGION 1..10: note = CONT. FROM ABOVE: HLA-DQA1*05:01-B1*02:01L HLA-DRB4*01:01L HLA-D PA1*01:03-B1*04:01L HLA-DPA1*01:03-B1*04:02L HLA-DPA1*01:03-B1*1 04:01L HLA-DRB1*10:01L HLA-DRB1*16:01L HLA-DQA1*02:01-B1*03:03L HLA-DRB1*15:03L
TQLYLGGMSY

SEQ ID NO: 15273 - protein, 12 aa, Severe acute respiratory syndrome coronavirus 2
  REGION 1..12: note = Table B: HLA-DRB1*13:03L HLA-DRB1*01:03L HLA-DQA1*01:02-B1*06:02L HLA-DRB1*01:02L HLA-DRB1*08:04L HLA-DRB1*11:04L HLA-DRB1*08:01L HLA-DRB1*11:01L HLA-DRB1*12:01L HLA-DRB1*16:01L HLA-DRB1*04:08L
SYYCKSHKPPIS

SEQ ID NO: 15274 - protein, 11 aa, Severe acute respiratory syndrome coronavirus 2
  REGION 1..11: note = Table B: HLA-DRB1*13:03L HLA-DRB1*08:01L HLA-DRB1*12:01L
EVGKPRPPLNR

SEQ ID NO: 15275 - protein, 13 aa, Severe acute respiratory syndrome coronavirus 2
  REGION 1..13: note = Table B: HLA-DRB1*13:03L HLA-DRB1*04:02L HLA-DRB1*11:04L HLA-DRB1*08:01L HLA-DRB1*11:01L HLA-DPA1*01:03-B1*04:01L HLA-DPA1*01:03-B1*04:02L HLA-DRB3*01:01L HLA-DRB1*14:17L
GDYFVLTSHTVMP

SEQ ID NO: 15276 - protein, 10 aa, Severe acute respiratory syndrome coronavirus 2
  REGION 1..10: note = Table B: HLA-DRB1*13:03L HLA-DQA1*01:02-B1*06:02L HLA-DPA1*02:01-B1*13:01L HLA-DPA1*03:01-B1*105:01L HLA-DRB1*15:03L
YPTLNISDEF

SEQ ID NO: 15277 - protein, 11 aa, Severe acute respiratory syndrome coronavirus 2
  REGION 1..11: note = Table B: HLA-DRB1*13:03L HLA-DRB1*01:03L HLA-DRB4*03:01NL HLA-DRB1*14:01L HLA-DQA1*01:01-B1*05:01L HLA-DQA1*01-B1*05L HLA-DRB1*12:01L HLA-DRB1*14:54L HLA-DRB1*16:01L HLA-DRB1*15:03L
SSNVANYQKVG

SEQ ID NO: 15278 - protein, 11 aa, Severe acute respiratory syndrome coronavirus 2
  REGION 1..11: note = Table B: HLA-DRB1*13:03L HLA-DQA1*01:02-B1*06:02L HLA-DQA1*05:01-B1*02:01L HLA-DPA1*03:01-B1*105:01L HLA-DRB1*15:03L
LPETTADIVVF

SEQ ID NO: 15279 - protein, 14 aa, Severe acute respiratory syndrome coronavirus 2
  REGION 1..14: note = Table B: HLA-DRB1*13:03L HLA-DQA1*03:01-B1*03:02L HLA-DQA1*01:03-B1*06:01L HLA-DQA1*02:01-B1*03:03L
TADIVVFDEISMAT

SEQ ID NO: 15280 - protein, 11 aa, Severe acute respiratory syndrome coronavirus 2
  REGION 1..11: note = Table B: HLA-DRB1*13:03L HLA-DQA1*01:02-B1*06:02L HLA-DRB1*11:02L HLA-DRB4*01:01L HLA-DPA1*01:03-B1*04:01L HLA-DQA1*05:05-B1*03:116L HLA-DRB1*10:01L
VFDEISMATNY

SEQ ID NO: 15281 - protein, 14 aa, Severe acute respiratory syndrome coronavirus 2
  REGION 1..14: note = Table B: HLA-DRB1*13:03L HLA-DRB1*04:05L HLA-DQA1*01:02-B1*06:02L HLA-DRB1*08:01L HLA-DRB1*04:08L HLA-DQA1*02:01-B1*03:03L
APRTLLTKGTLEPE

SEQ ID NO: 15282 - protein, 10 aa, Severe acute respiratory syndrome coronavirus 2
  REGION 1..10: note = Table B: HLA-DRB1*13:03L HLA-DRB1*01:03L HLA-DRB1*11:04L HLA-DRB1*08:01L HLA-DRB3*01:01L HLA-DQA1*03:01-B1*03:02L HLA-DRB1*14:17L HLA-DRB1*16:01L HLA-DRB1*04:08L
VYDNKLKAHK

SEQ ID NO: 15283 - protein, 13 aa, Severe acute respiratory syndrome coronavirus 2
  REGION 1..13: note = Table B: HLA-DRB1*13:03L HLA-DRB4*03:01NL HLA-DRB1*08:01L HLA-DRB1*14:54L HLA-DRB1*08:03L
AVFISPYNSQNAV

SEQ ID NO: 15284 - protein, 10 aa, Severe acute respiratory syndrome coronavirus 2
  REGION 1..10: note = Table B: HLA-DRB1*13:03L HLA-DQA1*01-B1*05L
SPYNSQNAVA

SEQ ID NO: 15285 - protein, 10 aa, Severe acute respiratory syndrome coronavirus 2
  REGION 1..10: note = Table B: HLA-DRB1*13:03L HLA-DQA1*01:02-B1*06:02L HLA-DPA1*01:03-B1*03:01L HLA-DQA1*05:05-B1*03:19L HLA-DQA1*05:01-B1*02:01L HLA-DPA1*03:01-B1*105:01L HLA-DPA1*01:03-B1*104:01L HLA-DRB1*16:01L
DSSQGSEYDY

SEQ ID NO: 15286 - protein, 13 aa, Severe acute respiratory syndrome coronavirus 2
  REGION 1..13: note = Table B: HLA-DRB1*13:03L HLA-DRB1*04:05L HLA-DQA1*01:02-B1*06:02L HLA-DRB1*01:02L HLA-DRB1*08:04L HLA-DRB1*12:01L HLA-DRB1*16:01L HLA-DRB1*04:08L HLA-DRB1*15:03L
VTGLFKDCSKVIT

SEQ ID NO: 15287 - protein, 12 aa, Severe acute respiratory syndrome coronavirus 2
  REGION 1..12: note = Table B: HLA-DRB1*13:03L HLA-DRB1*01:03L HLA-DRB1*04:05L HLA-DQA1*01:02-B1*06:02L HLA-DRB1*01:02L HLA-DRB1*08:04L HLA-DRB1*14:01L HLA-DRB1*11:04L HLA-DRB1*08:01L HLA-DRB1*11:01L HLA-DRB1*16:01L HLA-DRB1*04:08L HLA-DRB1*08:03L
GLFKDCSKVITG

SEQ ID NO: 15288 - protein, 17 aa, Severe acute respiratory syndrome coronavirus 2
  REGION 1..17: note = Table B: HLA-DRB1*13:03L HLA-DPA1*01:03-B1*03:01L HLA-DPA1*03:01-B1*04:02L HLA-DRB1*11:03L HLA-DRB1*14:02L HLA-DPA1*01:03-B1*04:02L HLA-DPA1*01:03-B1*02:01L HLA-DQA1*05:05-B1*03:01L HLA-DQA1*01:03-B1*06:01L
  REGION 1..17: note = CONT. FROM ABOVE: HLA-DRB1*08:02L
IPKDMTYRRLISMMGFK

SEQ ID NO: 15289 - protein, 11 aa, Severe acute respiratory syndrome coronavirus 2
  REGION 1..11: note = Table B: HLA-DRB1*13:03L
GVNLVAVPTGY

SEQ ID NO: 15290 - protein, 15 aa, Severe acute respiratory syndrome coronavirus 2
  REGION 1..15: note = Table B: HLA-DRB1*13:03L HLA-DRB1*03:01L HLA-DRB1*11:04L HLA-DRB1*11:01L HLA-DPA1*01:03-B1*04:02L HLA-DPA1*01:03-B1*02:01L HLA-DQA1*05:05-B1*03:01L
IVQMLSDTLKNLSDR

SEQ ID NO: 15291 - protein, 14 aa, Severe acute respiratory syndrome coronavirus 2
  REGION 1..14: note = Table B: HLA-DRB1*13:03L HLA-DRB1*04:02L HLA-DRB1*11:02L HLA-DRB1*11:03L HLA-DRB1*11:04L HLA-DRB1*11:01L HLA-DRB4*01:01L HLA-DRB3*01:01L HLA-DRB1*07:01L HLA-DRB1*10:01L HLA-DRB1*08:02L HLA-DRB1*08:03L
SDRVVFVLWAHGFE

SEQ ID NO: 15292 - protein, 13 aa, Severe acute respiratory syndrome coronavirus 2
  REGION 1..13: note = Table B: HLA-DRB1*13:03L HLA-DRB1*01:03L HLA-DRB1*04:05L HLA-DRB1*01:02L HLA-DRB1*08:04L
LTSMKYFVKIGPE

SEQ ID NO: 15293 - protein, 10 aa, Severe acute respiratory syndrome coronavirus 2
  REGION 1..10: note = Table B: HLA-DRB1*13:03L HLA-DRB1*08:01L HLA-DQA1*03:01-B1*03:02L HLA-DQA1*02:01-B1*03:03L
KYFVKIGPER

SEQ ID NO: 15294 - protein, 14 aa, Severe acute respiratory syndrome coronavirus 2
  REGION 1..14: note = Table B: HLA-DRB1*13:03L HLA-DRB1*04:04L HLA-DRB1*11:03L HLA-DRB1*14:02L HLA-DRB1*09:01L HLA-DRB3*01:01L HLA-DPA1*01:03-B1*104:01L HLA-DRB1*07:01L HLA-DRB1*08:03L
VKRVDWTIEYPIIG

SEQ ID NO: 15295 - protein, 14 aa, Severe acute respiratory syndrome coronavirus 2
  REGION 1..14: note = Table B: HLA-DRB1*13:03L HLA-DRB1*04:04L HLA-DPA1*01:03-B1*03:01L HLA-DPA1*03:01-B1*04:02L HLA-DRB1*11:02L HLA-DRB1*14:02L HLA-DRB1*13:01L HLA-DPA1*02:01-B1*13:01L HLA-DPA1*03:01-B1*105:01L
  REGION 1..14: note = CONT. FROM ABOVE: HLA-DQA1*03:01-B1*03:02L HLA-DRB1*07:01L
GDELKINAACRKVQ

SEQ ID NO: 15296 - protein, 14 aa, Severe acute respiratory syndrome coronavirus 2
  REGION 1..14: note = Table B: HLA-DRB1*13:03L HLA-DRB1*04:04L HLA-DPA1*01:03-B1*03:01L HLA-DRB1*14:01L HLA-DRB1*11:02L HLA-DRB1*11:03L HLA-DRB1*11:01L HLA-DRB1*09:01L HLA-DPA1*01:03-B1*04:02L HLA-DRB3*01:01L HLA-DRB1*14:17L
  REGION 1..14: note = CONT. FROM ABOVE: HLA-DRB1*08:03L
DVEWKFYDAQPCSD

SEQ ID NO: 15297 - protein, 17 aa, Severe acute respiratory syndrome coronavirus 2
  REGION 1..17: note = Table B: HLA-DRB1*13:03L HLA-DRB1*09:01L
SDKAYKIEELFYSYATH

SEQ ID NO: 15298 - protein, 12 aa, Severe acute respiratory syndrome coronavirus 2
  REGION 1..12: note = Table B: HLA-DRB1*13:03L HLA-DRB1*04:02L HLA-DRB1*04:05L HLA-DQA1*01:02-B1*06:02L HLA-DRB1*14:01L HLA-DRB1*08:01L HLA-DRB1*12:01L HLA-DQA1*03:01-B1*03:02L HLA-DRB1*14:54L HLA-DRB1*04:08L HLA-DQA1*02:01-B1*03:03L
GGSLYVNKHAFH

SEQ ID NO: 15299 - protein, 10 aa, Severe acute respiratory syndrome coronavirus 2
  REGION 1..10: note = Table B: HLA-DRB1*13:03L HLA-DRB1*08:01L HLA-DQA1*03:01-B1*03:02L HLA-DQA1*02:01-B1*03:03L
HAFHTPAFDK

SEQ ID NO: 15300 - protein, 14 aa, Severe acute respiratory syndrome coronavirus 2
  REGION 1..14: note = Table B: HLA-DRB1*13:03L HLA-DRB1*08:04L HLA-DRB1*08:77L HLA-DRB3*02:01L HLA-DRB1*03:01L HLA-DRB1*11:02L HLA-DRB1*11:04L HLA-DRB1*08:01L HLA-DRB1*09:01L HLA-DPA1*01:03-B1*02:01L HLA-DPA1*01:03-B1*104:01L HLA-DRB1*08:03L HLA-DRB1*15:01L
DIDYVPLKSATCIT

SEQ ID NO: 15301 - protein, 14 aa, Severe acute respiratory syndrome coronavirus 2
  REGION 1..14: note = Table B: HLA-DRB1*13:03L HLA-DRB1*03:01L HLA-DRB1*13:01L HLA-DPA1*02:01-B1*13:01L HLA-DRB1*15:01L
IDYVPLKSATCITR

SEQ ID NO: 15302 - protein, 12 aa, Severe acute respiratory syndrome coronavirus 2
  REGION 1..12: note = Table B: HLA-DRB1*13:03L HLA-DRB1*04:04L HLA-DRB1*01:02L HLA-DRB1*08:04L HLA-DRB3*02:01L HLA-DRB1*14:01L HLA-DRB1*08:01L HLA-DPA1*02:01-B1*13:01L HLA-DPA1*03:01-B1*105:01L HLA-DRB1*14:54L HLA-DQA1*05:05-B1*03:01L
  REGION 1..12: note = CONT. FROM ABOVE: HLA-DQA1*01:03-B1*06:01L HLA-DRB1*04:08L HLA-D RB1*08:03L
ANEYRLYLDAYN

SEQ ID NO: 15303 - protein, 13 aa, Severe acute respiratory syndrome coronavirus 2
  REGION 1..13: note = Table B: HLA-DRB1*13:03L HLA-DRB1*11:04L HLA-DRB1*08:03L
YNLWNTFTRLQSL

SEQ ID NO: 15304 - protein, 11 aa, Severe acute respiratory syndrome coronavirus 2
  REGION 1..11: note = Table B: HLA-DRB1*13:03L HLA-DRB1*01:03L HLA-DPA1*03:01-B1*04:02L HLA-DRB1*14:01L HLA-DRB1*14:02L HLA-DQA1*05:05-B1*03:19L HLA-DRB1*12:01L HLA-DPA1*03:01-B1*105:01L HLA-DRB1*16:01L HLA-DRB1*15:03L
VAFNVVNKGHF

SEQ ID NO: 15305 - protein, 10 aa, Severe acute respiratory syndrome coronavirus 2
  REGION 1..10: note = Table B: HLA-DRB1*13:03L HLA-DRB1*04:02L HLA-DQA1*01:02-B1*06:02L HLA-DRB1*08:04L HLA-DRB1*14:01L HLA-DRB1*08:01L HLA-DRB1*14:54L
FNVVNKGHFD

SEQ ID NO: 15306 - protein, 11 aa, Severe acute respiratory syndrome coronavirus 2
  REGION 1..11: note = Table B: HLA-DRB1*13:03L HLA-DRB1*04:05L HLA-DRB1*15:03L
TVYTKVDGVDV

SEQ ID NO: 15307 - protein, 10 aa, Severe acute respiratory syndrome coronavirus 2
  REGION 1..10: note = Table B: HLA-DRB1*13:03L HLA-DQA1*01:02-B1*06:02M HLA-DPA1*02:01-B1*13:01L HLA-DPA1*03:01-B1*105:01M HLA-DQA1*01:03-B1*06:01L HLA-DRB1*15:03L
LPVNVAFELW

SEQ ID NO: 15308 - protein, 10 aa, Severe acute respiratory syndrome coronavirus 2
  REGION 1..10: note = Table B: HLA-DRB1*13:03L HLA-DQA1*01:02-B1*06:02L HLA-DRB1*08:77L HLA-DPA1*01:03-B1*03:01L HLA-DQA1*05:05-B1*03:19L HLA-DQA1*05:01-B1*02:01L HLA-DRB4*01:01L HLA-DPA1*01:03-B1*04:01L
  REGION 1..10: note = CONT. FROM ABOVE: HLA-DPA1*03:01-B1*105:01L HLA-DPA1*01:03-B1*10 4:01L HLA-DRB1*16:01L HLA-DQA1*02:01-B1*03:03L
IAANTVIWDY

SEQ ID NO: 15309 - protein, 10 aa, Severe acute respiratory syndrome coronavirus 2
  REGION 1..10: note = Table B: HLA-DRB1*13:03L HLA-DRB1*08:01L HLA-DQA1*03:01-B1*03:02L
WDYKRDAPAH

SEQ ID NO: 15310 - protein, 12 aa, Severe acute respiratory syndrome coronavirus 2
  REGION 1..12: note = Table B: HLA-DRB1*13:03L HLA-DRB1*01:03L HLA-DRB1*04:04L HLA-DRB1*04:05L HLA-DQA1*01:02-B1*06:02L HLA-DRB1*01:02L HLA-DRB4*03:01NL HLA-DRB1*14:01L HLA-DRB1*08:01L HLA-DRB1*04:10L HLA-DRB1*12:01L HLA-DRB1*14:54L HLA-DRB1*16:01L
  REGION 1..12: note = CONT. FROM ABOVE: HLA-DQA1*01:03-B1*06:01L HLA-DRB1*04:08L HLA-D QA1*02:01-B1*03:03L HLA-DRB1*15:03L
GQVDLFRNARNG

SEQ ID NO: 15311 - protein, 10 aa, Severe acute respiratory syndrome coronavirus 2
  REGION 1..10: note = Table B: HLA-DRB1*13:03L
QPSVGPKQAS

SEQ ID NO: 15312 - protein, 11 aa, Severe acute respiratory syndrome coronavirus 2
  REGION 1..11: note = Table B: HLA-DRB1*13:03L HLA-DRB1*01:03L HLA-DRB1*04:02L HLA-DRB1*04:05L HLA-DQA1*01:02-B1*06:02L HLA-DRB1*08:04L HLA-DRB1*14:01L HLA-DRB1*11:04L HLA-DRB1*11:01L HLA-DQA1*03:01-B1*03:02L HLA-DRB1*16:01L HLA-DRB1*04:08L
  REGION 1..11: note = CONT. FROM ABOVE: HLA-DRB1*08:03L HLA-DQA1*02:01-B1*03:03L
TQFNYYKKVDG

SEQ ID NO: 15313 - protein, 10 aa, Severe acute respiratory syndrome coronavirus 2
  REGION 1..10: note = Table B: HLA-DRB1*13:03L HLA-DRB1*01:03L HLA-DRB1*08:01L HLA-DQA1*01-B1*05L HLA-DQA1*03:01-B1*03:02L HLA-DRB1*16:01L HLA-DRB1*04:08L HLA-DQA1*02:01-B1*03:03L
YYKKVDGVVQ

SEQ ID NO: 15314 - protein, 10 aa, Severe acute respiratory syndrome coronavirus 2
  REGION 1..10: note = Table B: HLA-DRB1*13:03L HLA-DQA1*01:02-B1*06:02L HLA-DPA1*03:01-B1*105:01L
KPRSQMEIDF

SEQ ID NO: 15315 - protein, 11 aa, Severe acute respiratory syndrome coronavirus 2
  REGION 1..11: note = Table B: HLA-DRB1*13:03L HLA-DRB1*08:04L
DEFIERYKLEG

SEQ ID NO: 15316 - protein, 12 aa, Severe acute respiratory syndrome coronavirus 2
  REGION 1..12: note = Table B: HLA-DRB1*13:03L HLA-DRB1*04:05L HLA-DRB1*01:02L HLA-DRB4*03:01NL HLA-DRB1*08:04L HLA-DPA1*01:03-B1*03:01L HLA-DRB1*14:01L HLA-DRB1*08:01L HLA-DRB1*04:10L HLA-DRB1*12:01L HLA-DPA1*02:01-B1*13:01L HLA-DRB1*14:54L
  REGION 1..12: note = CONT. FROM ABOVE: HLA-DPA1*01:03-B1*02:01L HLA-DQA1*05:05-B1*03: 01L
EHIVYGDFSHSQ

SEQ ID NO: 15317 - protein, 11 aa, Severe acute respiratory syndrome coronavirus 2
  REGION 1..11: note = Table B: HLA-DRB1*13:03L HLA-DRB1*08:77L HLA-DRB3*02:01L HLA-DPA1*01:03-B1*03:01L HLA-DRB1*14:01L HLA-DRB1*08:01L HLA-DRB1*09:01L HLA-DRB1*12:01L HLA-DPA1*01:03-B1*104:01L HLA-DRB1*10:01L HLA-DRB1*08:03L
IVYGDFSHSQL

SEQ ID NO: 15318 - protein, 10 aa, Severe acute respiratory syndrome coronavirus 2
  REGION 1..10: note = Table B: HLA-DRB1*13:03L HLA-DQA1*01:02-B1*06:02L HLA-DQA1*05:05-B1*03:19L HLA-DQA1*05:01-B1*02:01L HLA-DPA1*03:01-B1*105:01L
QPGVAMPNLY

SEQ ID NO: 15319 - protein, 12 aa, Severe acute respiratory syndrome coronavirus 2
  REGION 1..12: note = Table B: HLA-DRB1*13:03L HLA-DRB1*08:04L HLA-DRB1*11:03L HLA-DRB1*11:04L HLA-DRB1*11:01L HLA-DRB1*12:02L HLA-DPA1*01:03-B1*02:01L HLA-DRB1*07:01L
GIMMNVAKYTQL

SEQ ID NO: 15320 - protein, 11 aa, Severe acute respiratory syndrome coronavirus 2
  REGION 1..11: note = Table B: HLA-DRB1*13:03L HLA-DRB1*01:03L HLA-DRB1*08:01L HLA-DRB1*16:01L
RVIHFGAGSDK

SEQ ID NO: 15321 - protein, 12 aa, Severe acute respiratory syndrome coronavirus 2
  REGION 1..12: note = Table B: HLA-DRB1*13:03L HLA-DRB1*04:02L HLA-DRB1*04:05L HLA-DRB1*04:10L HLA-DRB1*12:01L HLA-DRB1*16:01L HLA-DRB1*04:08L
GTLLVDSDLNDF

SEQ ID NO: 15322 - protein, 12 aa, Severe acute respiratory syndrome coronavirus 2
  REGION 1..12: note = Table B: HLA-DRB1*13:03L HLA-DRB1*01:03L HLA-DRB1*04:04L HLA-DQA1*01:02-B1*06:02L HLA-DRB1*01:02L HLA-DPA1*03:01-B1*04:02L HLA-DRB1*12:01L HLA-DPA1*02:01-B1*13:01L HLA-DPA1*03:01-B1*105:01L
  REGION 1..12: note = CONT. FROM ABOVE: HLA-DQA1*01:03-B1*06:01L HLA-DRB1*15:03L
DLIISDMYDPKT

SEQ ID NO: 15323 - protein, 11 aa, Severe acute respiratory syndrome coronavirus 2
  REGION 1..11: note = Table B: HLA-DRB1*13:03L HLA-DRB1*01:03L HLA-DRB1*04:04L HLA-DRB1*01:02L HLA-DRB4*03:01NL HLA-DRB1*04:10L HLA-DRB1*12:01L HLA-DRB1*14:54L HLA-DRB1*04:08L HLA-DQA1*02:01-B1*03:03L
IISDMYDPKTK

SEQ ID NO: 15324 - protein, 10 aa, Severe acute respiratory syndrome coronavirus 2
  REGION 1..10: note = Table B: HLA-DRB1*13:03L HLA-DRB1*08:01L HLA-DQA1*03:01-B1*03:02L
YDPKTKNVTK

SEQ ID NO: 15325 - protein, 13 aa, Severe acute respiratory syndrome coronavirus 2
  REGION 1..13: note = Table B: HLA-DRB1*13:03L HLA-DRB1*04:05L HLA-DQA1*01:02-B1*06:02L HLA-DRB1*08:01L HLA-DQA1*02:01-B1*03:03L
DPKTKNVTKENDS

SEQ ID NO: 15326 - protein, 13 aa, Severe acute respiratory syndrome coronavirus 2
  REGION 1..13: note = Table B: HLA-DRB1*13:03L HLA-DRB1*01:03L HLA-DRB1*04:04L HLA-DRB1*01:02L HLA-DRB4*03:01NL HLA-DRB1*08:01L HLA-DQA1*01-B1*05L HLA-DRB1*12:01L HLA-DRB1*14:54L HLA-DRB1*16:01L HLA-DRB1*04:08L
TKNVTKENDSKEG

SEQ ID NO: 15327 - protein, 15 aa, Severe acute respiratory syndrome coronavirus 2
  REGION 1..15: note = Table B: HLA-DRB1*13:03L HLA-DPA1*01:03-B1*104:01L HLA-DPA1*01:02-B1*04:01L
KLALGGSVAIKITEH

SEQ ID NO: 15328 - protein, 12 aa, Severe acute respiratory syndrome coronavirus 2
  REGION 1..12: note = Table B: HLA-DRB1*13:03L HLA-DRB1*01:03L HLA-DRB1*04:05L HLA-DRB1*01:02L HLA-DRB4*03:01NL HLA-DPA1*01:03-B1*03:01L HLA-DRB1*14:01L HLA-DQA1*01:01-B1*05:01L HLA-DRB1*08:01L HLA-DQA1*05:05-B1*03:19L HLA-DQA1*05:01-B1*02:01L
  REGION 1..12: note = CONT. FROM ABOVE: HLA-DRB1*04:10L HLA-DRB1*12:01L HLA-DPA1*03:01 -B1*105:01L HLA-DRB1*14:54L HLA-DRB1*16:01L HLA-DRB1*04:08L
GGSVAIKITEHS

SEQ ID NO: 15329 - protein, 11 aa, Severe acute respiratory syndrome coronavirus 2
  REGION 1..11: note = Table B: HLA-DRB1*13:03L HLA-DRB1*04:02L HLA-DRB4*03:01NL HLA-DRB1*16:01L
AFVTNVNASSS

SEQ ID NO: 15330 - protein, 16 aa, Severe acute respiratory syndrome coronavirus 2
  REGION 1..16: note = Table B: HLA-DRB1*13:03L HLA-DRB1*14:02L HLA-DPA1*02:01-B1*13:01L HLA-DRB1*07:01L HLA-DRB1*08:02L HLA-DRB1*08:03L
SSEAFLIGCNYLGKPR

SEQ ID NO: 15331 - protein, 11 aa, Severe acute respiratory syndrome coronavirus 2
  REGION 1..11: note = Table B: HLA-DRB1*13:03L HLA-DRB1*01:03L HLA-DQA1*01:02-B1*06:02L HLA-DRB1*08:77L HLA-DPA1*03:01-B1*04:02L HLA-DRB1*11:02L HLA-DRB1*14:02L HLA-DRB4*01:01L HLA-DPA1*01:03-B1*04:01L
  REGION 1..11: note = CONT. FROM ABOVE: HLA-DQA1*05:05-B1*03:116L HLA-DPA1*01:03-B1*04 :02L HLA-DRB1*12:01L HLA-DRB1*10:01L HLA-DRB1*15:03L
QIDGYVMHANY

SEQ ID NO: 15332 - protein, 14 aa, Severe acute respiratory syndrome coronavirus 2
  REGION 1..14: note = Table B: HLA-DRB1*13:03L HLA-DRB1*04:02L HLA-DRB1*11:03L HLA-DRB1*11:04L HLA-DRB1*08:01L HLA-DRB1*11:01L HLA-DRB3*01:01L
IDGYVMHANYIFWR

SEQ ID NO: 15333 - protein, 10 aa, Severe acute respiratory syndrome coronavirus 2
  REGION 1..10: note = Table B: HLA-DRB1*13:03L HLA-DRB1*04:05L HLA-DQA1*01:02-B1*06:02L HLA-DPA1*02:01-B1*13:01M HLA-DPA1*03:01-B1*105:01L HLA-DQA1*01:03-B1*06:01L HLA-DRB1*15:03L
LPFFSNVTWF

SEQ ID NO: 15334 - protein, 13 aa, Severe acute respiratory syndrome coronavirus 2
  REGION 1..13: note = Table B: HLA-DRB1*13:03L HLA-DRB1*04:04L HLA-DRB1*01:01L HLA-DRB3*02:01L HLA-DPA1*03:01-B1*04:02L HLA-DRB1*11:03L HLA-DRB3*01:01L HLA-DQA1*03:01-B1*03:02L HLA-DQA1*05:05-B1*03:01L HLA-DRB1*07:01L
SNVTWFHAIHVSG

SEQ ID NO: 15335 - protein, 11 aa, Severe acute respiratory syndrome coronavirus 2
  REGION 1..11: note = Table B: HLA-DRB1*13:03L HLA-DRB1*12:01L HLA-DRB1*16:01L HLA-DQA1*02:01-B1*03:03L
AIHVSGTNGTK

SEQ ID NO: 15336 - protein, 11 aa, Severe acute respiratory syndrome coronavirus 2
  REGION 1..11: note = Table B: HLA-DRB1*13:03L HLA-DRB1*01:03L HLA-DRB1*04:02L HLA-DRB1*04:05L HLA-DQA1*01:02-B1*06:02L HLA-DRB4*03:01NL HLA-DPA1*01:03-B1*03:01L HLA-DRB1*04:10L HLA-DRB1*12:01L HLA-DPA1*03:01-B1*105:01L HLA-DRB1*14:54L HLA-DRB1*14:17L
  REGION 1..11: note = CONT. FROM ABOVE: HLA-DRB1*16:01L
FDNPVLPFNDG

SEQ ID NO: 15337 - protein, 13 aa, Severe acute respiratory syndrome coronavirus 2
  REGION 1..13: note = Table B: HLA-DRB1*13:03L HLA-DRB1*11:04L HLA-DRB3*01:01L
GVYYHKNNKSWME

SEQ ID NO: 15338 - protein, 12 aa, Severe acute respiratory syndrome coronavirus 2
  REGION 1..12: note = Table B: HLA-DRB1*13:03L HLA-DRB1*01:03L HLA-DRB1*04:05L HLA-DQA1*01:02-B1*06:02L HLA-DRB1*01:02L HLA-DRB1*08:04L HLA-DRB1*14:01L HLA-DRB1*08:01L HLA-DRB1*11:01L HLA-DRB1*12:01L HLA-DQA1*03:01-B1*03:02L HLA-DPA1*01:02-B1*04:01L
  REGION 1..12: note = CONT. FROM ABOVE: HLA-DRB1*16:01L HLA-DRB1*04:08L HLA-DQA1*02:01 -B1*03:03L HLA-DRB1*15:03L
DGYFKIYSKHTP

SEQ ID NO: 15339 - protein, 12 aa, Severe acute respiratory syndrome coronavirus 2
  REGION 1..12: note = Table B: HLA-DRB1*13:03L HLA-DRB1*01:03L HLA-DRB1*01:02L HLA-DRB1*14:01L HLA-DRB1*08:01L HLA-DRB1*11:01L HLA-DPA1*01:02-B1*04:01L HLA-DRB1*16:01L HLA-DRB1*04:08L
GYFKIYSKHTPI

SEQ ID NO: 15340 - protein, 11 aa, Severe acute respiratory syndrome coronavirus 2
  REGION 1..11: note = Table B: HLA-DRB1*13:03L HLA-DRB1*01:03L HLA-DRB1*04:04L HLA-DRB1*04:05L HLA-DRB4*03:01NL HLA-DRB1*14:01L HLA-DRB1*11:04L HLA-DQA1*01-B1*05L HLA-DQA1*05:01-B1*02:01L HLA-DRB1*04:10L HLA-DRB1*12:01L HLA-DQA1*03:01-B1*03:02L HLA-DRB1*14:54L
  REGION 1..11: note = CONT. FROM ABOVE: HLA-DRB1*16:01L HLA-DRB1*04:08L HLA-DRB1*08:03 L HLA-DQA1*02:01-B1*03:03L
TPINLVRDLPQ

SEQ ID NO: 15341 - protein, 14 aa, Severe acute respiratory syndrome coronavirus 2
  REGION 1..14: note = Table B: HLA-DRB1*13:03L HLA-DRB1*04:05L HLA-DRB1*11:02L HLA-DRB1*11:03L HLA-DRB1*11:01L HLA-DRB3*01:01L HLA-DRB1*14:54L
QTLLALHRSYLTPG

SEQ ID NO: 15342 - protein, 14 aa, Severe acute respiratory syndrome coronavirus 2
  REGION 1..14: note = Table B: HLA-DRB1*13:03L HLA-DPA1*03:01-B1*04:02L HLA-DQA1*05:05-B1*03:19L HLA-DRB1*07:01L
LALHRSYLTPGDSS

SEQ ID NO: 15343 - protein, 10 aa, Severe acute respiratory syndrome coronavirus 2
  REGION 1..10: note = Table B: HLA-DRB1*13:03L HLA-DQA1*01:02-B1*06:02L HLA-DPA1*03:01-B1*105:01L
LTPGDSSSGW

SEQ ID NO: 15344 - protein, 10 aa, Severe acute respiratory syndrome coronavirus 2
  REGION 1..10: note = Table B: HLA-DRB1*13:03L HLA-DQA1*01:02-B1*06:02L HLA-DQA1*05:05-B1*03:19L HLA-DQA1*05:01-B1*02:01L
SGWTAGAAAY

SEQ ID NO: 15345 - protein, 10 aa, Severe acute respiratory syndrome coronavirus 2
  REGION 1..10: note = Table B: HLA-DRB1*13:03L HLA-DQA1*01:02-B1*06:02L HLA-DRB1*08:77L HLA-DPA1*01:03-B1*03:01L HLA-DRB1*03:01L HLA-DRB1*14:02L HLA-DQA1*05:05-B1*03:19L HLA-DQA1*05:01-B1*02:01L HLA-DRB4*01:01L
  REGION 1..10: note = CONT. FROM ABOVE: HLA-DPA1*01:03-B1*04:01L HLA-DRB1*16:01L HLA-D QA1*02:01-B1*03:03L HLA-DRB1*15:03L
GWTAGAAAYY

SEQ ID NO: 15346 - protein, 10 aa, Severe acute respiratory syndrome coronavirus 2
  REGION 1..10: note = Table B: HLA-DRB1*13:03L HLA-DRB1*04:02L HLA-DQA1*01-B1*05L HLA-DRB1*12:01L HLA-DQA1*03:01-B1*03:02L HLA-DPA1*01:02-B1*04:01L HLA-DRB1*16:01L HLA-DQA1*01:03-B1*06:01L HLA-DQA1*02:01-B1*03:03L
AYYVGYLQPR

SEQ ID NO: 15347 - protein, 13 aa, Severe acute respiratory syndrome coronavirus 2
  REGION 1..13: note = Table B: HLA-DRB1*13:03L HLA-DRB1*01:03L HLA-DRB1*04:05L HLA-DQA1*01:02-B1*06:02L HLA-DRB1*08:04L HLA-DQA1*03:01-B1*03:02L HLA-DRB1*16:01L HLA-DRB1*04:08L HLA-DRB1*08:03L
QPRTFLLKYNENG

SEQ ID NO: 15348 - protein, 14 aa, Severe acute respiratory syndrome coronavirus 2
  REGION 1..14: note = Table B: HLA-DRB1*13:03L HLA-DRB1*04:04L HLA-DRB4*03:01NL HLA-DRB1*08:04L HLA-DPA1*01:03-B1*03:01L HLA-DRB1*14:01L HLA-DRB1*11:04L HLA-DQA1*01:01-B1*05:01L HLA-DRB1*08:01L HLA-DQA1*05:05-B1*03:19L HLA-DRB1*12:01L HLA-DRB3*01:01L
  REGION 1..14: note = CONT. FROM ABOVE: HLA-DPA1*02:01-B1*13:01L HLA-DRB1*08:03L
DAVDCALDPLSETK

SEQ ID NO: 15349 - protein, 13 aa, Severe acute respiratory syndrome coronavirus 2
  REGION 1..13: note = Table B: HLA-DRB1*13:03L HLA-DRB1*08:01L
EKGIYQTSNFRVQ

SEQ ID NO: 15350 - protein, 11 aa, Severe acute respiratory syndrome coronavirus 2
  REGION 1..11: note = Table B: HLA-DRB1*13:03L HLA-DQA1*01:02-B1*06:02L HLA-DRB1*01:02L HLA-DRB1*08:04L HLA-DRB1*14:01L HLA-DRB1*11:04L HLA-DRB1*11:01L HLA-DRB3*01:01L HLA-DRB1*16:01L HLA-DRB1*04:08L
VYAWNRKRISN

SEQ ID NO: 15351 - protein, 11 aa, Severe acute respiratory syndrome coronavirus 2
  REGION 1..11: note = Table B: HLA-DRB1*13:03L HLA-DRB1*08:01L HLA-DQA1*02:01-B1*03:03L
DSFVIRGDEVR

SEQ ID NO: 15352 - protein, 10 aa, Severe acute respiratory syndrome coronavirus 2
  REGION 1..10: note = Table B: HLA-DRB1*13:03L HLA-DQA1*01-B1*05L
APGQTGKIAD

SEQ ID NO: 15353 - protein, 11 aa, Severe acute respiratory syndrome coronavirus 2
  REGION 1..11: note = Table B: HLA-DRB1*13:03L HLA-DRB1*04:02L HLA-DRB4*03:01NL HLA-DQA1*02:01-B1*03:03L
SNNLDSKVGGN

SEQ ID NO: 15354 - protein, 13 aa, Severe acute respiratory syndrome coronavirus 2
  REGION 1..13: note = Table B: HLA-DRB1*13:03L HLA-DRB1*01:03L HLA-DRB1*04:05L HLA-DRB1*01:02L HLA-DRB1*08:04L HLA-DRB1*11:04L HLA-DRB1*11:01L HLA-DRB1*12:01L HLA-DPA1*01:02-B1*04:01L
VGGNYNYLYRLFR

SEQ ID NO: 15355 - protein, 12 aa, Severe acute respiratory syndrome coronavirus 2
  REGION 1..12: note = Table B: HLA-DRB1*13:03L HLA-DRB1*01:03L HLA-DRB1*01:02L HLA-DRB1*14:01L HLA-DRB1*11:04L HLA-DRB1*11:01L HLA-DRB1*12:01L HLA-DRB3*01:01L HLA-DRB1*16:01L HLA-DRB1*04:08L
GNYNYLYRLFRK

SEQ ID NO: 15356 - protein, 12 aa, Severe acute respiratory syndrome coronavirus 2
  REGION 1..12: note = Table B: HLA-DRB1*13:03L HLA-DRB1*04:02L HLA-DRB1*14:01L HLA-DRB1*08:01L HLA-DRB1*16:01L
SNLKPFERDIST

SEQ ID NO: 15357 - protein, 13 aa, Severe acute respiratory syndrome coronavirus 2
  REGION 1..13: note = Table B: HLA-DRB1*13:03L HLA-DRB1*01:03L HLA-DRB1*04:04L HLA-DRB1*04:05L HLA-DRB1*08:04L HLA-DRB1*11:03L HLA-DRB1*11:04L HLA-DRB1*14:02L HLA-DRB1*04:10L HLA-DRB1*09:01L HLA-DRB1*10:01L
STEIYQAGSTPCN

SEQ ID NO: 15358 - protein, 11 aa, Severe acute respiratory syndrome coronavirus 2
  REGION 1..11: note = Table B: HLA-DRB1*13:03L HLA-DRB1*01:03L HLA-DRB1*01:02L HLA-DPA1*03:01-B1*04:02L HLA-DRB1*04:08L
LSFELLHAPAT

SEQ ID NO: 15359 - protein, 15 aa, Severe acute respiratory syndrome coronavirus 2
  REGION 1..15: note = Table B: HLA-DRB1*13:03L HLA-DRB1*08:04L HLA-DRB3*02:01L HLA-DRB1*03:01L HLA-DRB1*11:03L HLA-DPA1*01:03-B1*02:01L HLA-DRB1*08:02L
SFELLHAPATVCGPK

SEQ ID NO: 15360 - protein, 15 aa, Severe acute respiratory syndrome coronavirus 2
  REGION 1..15: note = Table B: HLA-DRB1*13:03L HLA-DPA1*03:01-B1*04:02L HLA-DRB1*11:04L HLA-DRB1*14:02L HLA-DQA1*01-B1*05L HLA-DPA1*01:03-B1*04:01L HLA-DRB3*01:01L HLA-DPA1*01:03-B1*02:01L HLA-DPA1*01:02-B1*04:01L
  REGION 1..15: note = CONT. FROM ABOVE: HLA-DRB1*07:01L
FNGLTGTGVLTESNK

SEQ ID NO: 15361 - protein, 14 aa, Severe acute respiratory syndrome coronavirus 2
  REGION 1..14: note = Table B: HLA-DRB1*13:03L HLA-DRB1*04:04L HLA-DPA1*01:03-B1*03:01L HLA-DRB1*11:04L HLA-DQA1*01:01-B1*05:01L HLA-DRB1*11:01L HLA-DRB3*01:01L HLA-DPA1*01:03-B1*104:01L HLA-DRB1*07:01L
SNKKFLPFQQFGRD

SEQ ID NO: 15362 - protein, 12 aa, Severe acute respiratory syndrome coronavirus 2
  REGION 1..12: note = Table B: HLA-DRB1*13:03L HLA-DRB1*01:03L HLA-DRB1*04:02L HLA-DRB1*04:05L HLA-DQA1*01:02-B1*06:02L HLA-DRB1*08:04L HLA-DRB1*14:01L HLA-DRB1*08:01L HLA-DQA1*03:01-B1*03:02L HLA-DPA1*01:02-B1*04:01L HLA-DRB1*16:01L HLA-DRB1*04:08L
  REGION 1..12: note = CONT. FROM ABOVE: HLA-DQA1*02:01-B1*03:03L
LPFQQFGRDIAD

SEQ ID NO: 15363 - protein, 10 aa, Severe acute respiratory syndrome coronavirus 2
  REGION 1..10: note = Table B: HLA-DRB1*13:03L
TPGTNTSNQV

SEQ ID NO: 15364 - protein, 10 aa, Severe acute respiratory syndrome coronavirus 2
  REGION 1..10: note = Table B: HLA-DRB1*13:03L HLA-DRB1*01:03L HLA-DQA1*01:02-B1*06:02L HLA-DRB1*08:77L HLA-DRB1*14:02L HLA-DQA1*05:05-B1*03:19L HLA-DQA1*05:01-B1*02:01L HLA-DPA1*03:01-B1*105:01L HLA-DQA1*02:01-B1*03:03L
SLGAENSVAY

SEQ ID NO: 15365 - protein, 11 aa, Severe acute respiratory syndrome coronavirus 2
  REGION 1..11: note = Table B: HLA-DRB1*13:03L HLA-DRB1*01:03L HLA-DRB4*03:01NL HLA-DRB1*08:01L HLA-DQA1*01-B1*05L HLA-DRB1*12:01L HLA-DPA1*03:01-B1*105:01L HLA-DRB1*14:17L HLA-DRB1*04:08L
ALTGIAVEQDK

SEQ ID NO: 15366 - protein, 12 aa, Severe acute respiratory syndrome coronavirus 2
  REGION 1..12: note = Table B: HLA-DRB1*13:03L HLA-DRB1*12:01L HLA-DPA1*03:01-B1*105:01L
TGIAVEQDKNTQ

SEQ ID NO: 15367 - protein, 10 aa, Severe acute respiratory syndrome coronavirus 2
  REGION 1..10: note = Table B: HLA-DRB1*13:03L HLA-DQA1*01:02-B1*06:02L HLA-DPA1*03:01-B1*105:01L
TPPIKDFGGF

SEQ ID NO: 15368 - protein, 12 aa, Severe acute respiratory syndrome coronavirus 2
  REGION 1..12: note = Table B: HLA-DRB1*13:03L HLA-DRB1*04:02L HLA-DRB1*04:05L HLA-DRB1*01:02L HLA-DPA1*01:03-B1*03:01L HLA-DRB1*08:01L HLA-DRB1*12:01L HLA-DPA1*02:01-B1*13:01L HLA-DPA1*01:03-B1*02:01L HLA-DRB1*15:03L
GFNFSQILPDPS

SEQ ID NO: 15369 - protein, 10 aa, Severe acute respiratory syndrome coronavirus 2
  REGION 1..10: note = Table B: HLA-DRB1*13:03L HLA-DRB1*01:03L HLA-DRB1*08:01L HLA-DQA1*03:01-B1*03:02L HLA-DRB1*14:17L
LPDPSKPSKR

SEQ ID NO: 15370 - protein, 10 aa, Severe acute respiratory syndrome coronavirus 2
  REGION 1..10: note = Table B: HLA-DRB1*13:03L HLA-DQA1*01:02-B1*06:02L HLA-DPA1*03:01-B1*105:01L
DPSKPSKRSF

SEQ ID NO: 15371 - protein, 10 aa, Severe acute respiratory syndrome coronavirus 2
  REGION 1..10: note = Table B: HLA-DRB1*13:03L HLA-DRB1*01:03L HLA-DQA1*01:02-B1*06:02L HLA-DRB1*08:77L HLA-DPA1*01:03-B1*03:01L HLA-DRB1*03:01L HLA-DRB1*11:02L HLA-DRB1*14:02L HLA-DQA1*01-B1*05L HLA-DQA1*05:05-B1*03:19M
  REGION 1..10: note = CONT. FROM ABOVE: HLA-DQA1*05:01-B1*02:01M HLA-DRB4*01:01L HLA-D PA1*01:03-B1*04:01L HLA-DQA1*05:05-B1*03:116L HLA-DPA1*01:03-B1* 04:02L HLA-DPA1*01:03-B1*104:01L HLA-DRB1*10:01L HLA-DRB1*16:01L
LLTDEMIAQY

SEQ ID NO: 15372 - protein, 15 aa, Severe acute respiratory syndrome coronavirus 2
  REGION 1..15: note = Table B: HLA-DRB1*13:03L HLA-DRB1*04:02L HLA-DPA1*01:03-B1*03:01L HLA-DRB1*03:01L HLA-DRB1*11:02L HLA-DRB1*11:03L HLA-DRB1*11:04L HLA-DRB1*14:02L HLA-DRB1*08:01L HLA-DRB1*11:01L HLA-DPA1*01:03-B1*04:01L
  REGION 1..15: note = CONT. FROM ABOVE: HLA-DQA1*05:05-B1*03:116L HLA-DPA1*01:03-B1*04 :02L HLA-DRB3*01:01L HLA-DPA1*01:03-B1*02:01L HLA-DPA1*01:03-B1* 104:01L HLA-DQA1*05:05-B1*03:01L HLA-DRB1*08:02L HLA-DRB1*08:03L
IPFAMQMAYRFNGIG

SEQ ID NO: 15373 - protein, 11 aa, Severe acute respiratory syndrome coronavirus 2
  REGION 1..11: note = Table B: HLA-DRB1*13:03L HLA-DRB1*01:03L HLA-DRB1*04:02L HLA-DRB1*04:05L HLA-DQA1*01:02-B1*06:02L HLA-DRB1*01:02L HLA-DRB4*03:01NL HLA-DRB1*14:01L HLA-DQA1*01-B1*05L HLA-DQA1*05:01-B1*02:01L HLA-DRB1*12:01L HLA-DRB1*14:54L
  REGION 1..11: note = CONT. FROM ABOVE: HLA-DQA1*05:05-B1*03:01L HLA-DRB1*14:17L HLA-D RB1*04:08L
NQFNSAIGKIQ

SEQ ID NO: 15374 - protein, 12 aa, Severe acute respiratory syndrome coronavirus 2
  REGION 1..12: note = Table B: HLA-DRB1*13:03L HLA-DRB1*01:02L HLA-DRB1*14:01L HLA-DRB1*11:04L HLA-DQA1*05:01-B1*02:01L HLA-DRB1*12:01L
IGKIQDSLSSTA

SEQ ID NO: 15375 - protein, 12 aa, Severe acute respiratory syndrome coronavirus 2
  REGION 1..12: note = Table B: HLA-DRB1*13:03L HLA-DRB1*04:05L HLA-DRB1*01:02L HLA-DPA1*01:03-B1*03:01L HLA-DPA1*01:03-B1*04:02L HLA-DRB1*14:54L HLA-DRB1*04:08L
SSTASALGKLQD

SEQ ID NO: 15376 - protein, 12 aa, Severe acute respiratory syndrome coronavirus 2
  REGION 1..12: note = Table B: HLA-DRB1*13:03L HLA-DRB1*01:03L HLA-DRB1*01:02L HLA-DRB4*03:01NL HLA-DPA1*01:03-B1*03:01L HLA-DRB1*08:01L HLA-DQA1*01-B1*05L HLA-DRB1*12:01L HLA-DRB1*14:54L HLA-DRB1*04:08L HLA-DRB1*15:03L
ASALGKLQDVVN

SEQ ID NO: 15377 - protein, 13 aa, Severe acute respiratory syndrome coronavirus 2
  REGION 1..13: note = Table B: HLA-DRB1*13:03L HLA-DRB1*04:05L HLA-DRB1*11:04L HLA-DRB1*08:01L HLA-DRB1*11:01L
AQALNTLVKQLSS

SEQ ID NO: 15378 - protein, 12 aa, Severe acute respiratory syndrome coronavirus 2
  REGION 1..12: note = Table B: HLA-DRB1*13:03L HLA-DRB1*01:02L HLA-DRB1*08:04L HLA-DRB1*11:04L HLA-DRB1*08:01L HLA-DRB1*11:01L HLA-DQA1*05:05-B1*03:19L HLA-DPA1*03:01-B1*105:01L HLA-DRB1*14:54L HLA-DQA1*05:05-B1*03:01L
ALNTLVKQLSSN

SEQ ID NO: 15379 - protein, 13 aa, Severe acute respiratory syndrome coronavirus 2
  REGION 1..13: note = Table B: HLA-DRB1*13:03L HLA-DRB1*01:03L HLA-DRB1*04:04L HLA-DQA1*01-B1*05L HLA-DRB1*15:03L
SSNFGAISSVLND

SEQ ID NO: 15380 - protein, 12 aa, Severe acute respiratory syndrome coronavirus 2
  REGION 1..12: note = Table B: HLA-DRB1*13:03L HLA-DRB1*01:03L HLA-DRB1*04:05L HLA-DQA1*01:02-B1*06:02L HLA-DRB1*01:02L HLA-DRB1*08:04L HLA-DRB1*14:01L HLA-DRB1*11:04L HLA-DRB1*08:01L HLA-DRB1*12:01L HLA-DRB1*14:54L HLA-DRB1*14:17L HLA-DRB1*16:01L HLA-DRB1*04:08L
  REGION 1..12: note = CONT. FROM ABOVE: HLA-DRB1*08:03L HLA-DQA1*02:01-B1*03:03L
DILSRLDKVEAE

SEQ ID NO: 15381 - protein, 11 aa, Severe acute respiratory syndrome coronavirus 2
  REGION 1..11: note = Table B: HLA-DRB1*13:03L HLA-DQA1*01-B1*05L
VPAQEKNFTTA

SEQ ID NO: 15382 - protein, 13 aa, Severe acute respiratory syndrome coronavirus 2
  REGION 1..13: note = Table B: HLA-DRB1*13:03L HLA-DRB1*01:03L HLA-DRB1*04:05L HLA-DRB1*01:02L HLA-DRB1*08:04L HLA-DRB1*14:01L HLA-DRB1*04:08L HLA-DRB1*15:03L
THWFVTQRNFYEP

SEQ ID NO: 15383 - protein, 11 aa, Severe acute respiratory syndrome coronavirus 2
  REGION 1..11: note = Table B: HLA-DRB1*13:03L HLA-DQA1*01:02-B1*06:02L HLA-DQA1*05:01-B1*02:01L HLA-DQA1*02:01-B1*03:03L
EPQIITTDNTF

SEQ ID NO: 15384 - protein, 11 aa, Severe acute respiratory syndrome coronavirus 2
  REGION 1..11: note = Table B: HLA-DRB1*13:03L HLA-DRB1*01:03L HLA-DRB1*04:02L HLA-DRB4*03:01NL HLA-DRB1*04:10L HLA-DRB1*12:01L HLA-DRB1*14:54L HLA-DRB1*14:17L HLA-DRB1*04:08L
VYDPLQPELDS

SEQ ID NO: 15385 - protein, 11 aa, Severe acute respiratory syndrome coronavirus 2
  REGION 1..11: note = Table B: HLA-DRB1*13:03L HLA-DRB1*04:05L HLA-DRB4*03:01NL HLA-DRB1*14:01L HLA-DQA1*01:01-B1*05:01L HLA-DRB1*08:01L HLA-DQA1*01-B1*05L HLA-DRB1*04:10L HLA-DRB1*12:01L HLA-DRB1*14:54L HLA-DRB1*16:01L
ASVVNIQKEID

SEQ ID NO: 15386 - protein, 10 aa, Severe acute respiratory syndrome coronavirus 2
  REGION 1..10: note = Table B: HLA-DRB1*13:03L HLA-DQA1*03:01-B1*03:02L
EIDRLNEVAK

SEQ ID NO: 15387 - protein, 12 aa, Severe acute respiratory syndrome coronavirus 2
  REGION 1..12: note = Table B: HLA-DRB1*13:03L HLA-DRB1*01:03L HLA-DRB1*04:02L HLA-DRB1*04:05L HLA-DQA1*01:02-B1*06:02L HLA-DRB1*08:04L HLA-DRB1*14:01L HLA-DRB1*08:01L HLA-DRB1*12:01L HLA-DRB1*14:54L HLA-DRB1*04:08L HLA-DQA1*02:01-B1*03:03L
DRLNEVAKNLNE

SEQ ID NO: 15388 - protein, 12 aa, Severe acute respiratory syndrome coronavirus 2
  REGION 1..12: note = Table B: HLA-DRB1*13:03L HLA-DQA1*01:02-B1*06:02L HLA-DRB1*14:01L HLA-DRB1*08:01L
RLNEVAKNLNES

SEQ ID NO: 15389 - protein, 11 aa, Severe acute respiratory syndrome coronavirus 2
  REGION 1..11: note = Table B: HLA-DRB1*13:03L HLA-DPA1*03:01-B1*105:01L
DLQELGKYEQY

SEQ ID NO: 15390 - protein, 10 aa, Severe acute respiratory syndrome coronavirus 2
  REGION 1..10: note = Table B: HLA-DRB1*13:03L
TPSDFVRATA

SEQ ID NO: 15391 - protein, 11 aa, Severe acute respiratory syndrome coronavirus 2
  REGION 1..11: note = Table B: HLA-DRB1*13:03L HLA-DRB1*01:03L HLA-DRB1*04:02L HLA-DQA1*01:02-B1*06:02L HLA-DRB1*01:02L HLA-DRB1*08:04L HLA-DRB1*11:04L HLA-DRB1*11:01L HLA-DRB1*16:01L HLA-DRB1*04:08L
SKIITLKKRWQ

SEQ ID NO: 15392 - protein, 10 aa, Severe acute respiratory syndrome coronavirus 2
  REGION 1..10: note = Table B: HLA-DRB1*13:03L HLA-DRB1*08:01L HLA-DRB1*12:01L HLA-DQA1*03:01-B1*03:02L HLA-DPA1*01:02-B1*04:01L HLA-DQA1*01:03-B1*06:01L HLA-DQA1*02:01-B1*03:03L
SINFVRIIMR

SEQ ID NO: 15393 - protein, 15 aa, Severe acute respiratory syndrome coronavirus 2
  REGION 1..15: note = Table B: HLA-DRB1*13:03L HLA-DRB1*04:04L HLA-DRB1*04:05L HLA-DRB1*08:77L HLA-DPA1*01:03-B1*03:01L HLA-DRB1*11:03L HLA-DRB1*11:04L HLA-DRB1*04:10L HLA-DRB1*12:02L HLA-DRB1*04:08L
SSIVITSGDGTTSPI

SEQ ID NO: 15394 - protein, 13 aa, Severe acute respiratory syndrome coronavirus 2
  REGION 1..13: note = Table B: HLA-DRB1*13:03L HLA-DRB1*04:02L HLA-DRB4*03:01NL HLA-DPA1*01:03-B1*04:02L HLA-DRB1*12:01L
TSGDGTTSPISEH

SEQ ID NO: 15395 - protein, 12 aa, Severe acute respiratory syndrome coronavirus 2
  REGION 1..12: note = Table B: HLA-DRB1*13:03L HLA-DPA1*01:03-B1*03:01L HLA-DRB1*08:01L HLA-DQA1*05:05-B1*03:116L HLA-DPA1*01:03-B1*04:02L HLA-DPA1*03:01-B1*105:01L
GDGTTSPISEHD

SEQ ID NO: 15396 - protein, 13 aa, Severe acute respiratory syndrome coronavirus 2
  REGION 1..13: note = Table B: HLA-DRB1*13:03L HLA-DRB1*04:02L HLA-DRB1*04:05L HLA-DRB4*03:01NL HLA-DRB1*08:77L HLA-DRB1*11:03L HLA-DRB1*14:02L HLA-DRB1*14:54L HLA-DQA1*05:05-B1*03:01L HLA-DRB1*10:01L
SDYYQLYSTQLST

SEQ ID NO: 15397 - protein, 13 aa, Severe acute respiratory syndrome coronavirus 2
  REGION 1..13: note = Table B: HLA-DRB1*13:03L HLA-DRB1*04:05L
HVTFFIYNKIVDE

SEQ ID NO: 15398 - protein, 11 aa, Severe acute respiratory syndrome coronavirus 2
  REGION 1..11: note = Table B: HLA-DRB1*13:03L HLA-DRB1*01:03L HLA-DRB4*03:01NL HLA-DRB1*12:01L HLA-DPA1*02:01-B1*13:01L HLA-DRB1*14:54L
YNKIVDEPEEH

SEQ ID NO: 15399 - protein, 11 aa, Severe acute respiratory syndrome coronavirus 2
  REGION 1..11: note = Table B: HLA-DRB1*13:03L HLA-DRB1*01:03L HLA-DQA1*01:02-B1*06:02L HLA-DRB1*08:01L HLA-DQA1*03:01-B1*03:02L HLA-DPA1*01:02-B1*04:01L HLA-DRB1*16:01L HLA-DRB1*04:08L HLA-DQA1*02:01-B1*03:03L
PSFYVYSRVKN

SEQ ID NO: 15400 - protein, 12 aa, Severe acute respiratory syndrome coronavirus 2
  REGION 1..12: note = Table B: HLA-DRB1*13:03L HLA-DRB1*01:03L HLA-DRB1*04:02L HLA-DRB1*04:05L HLA-DQA1*01:02-B1*06:02L HLA-DRB1*01:02L HLA-DRB1*14:01L HLA-DRB1*11:04L HLA-DRB1*11:01L HLA-DRB1*16:01L HLA-DRB1*04:08L HLA-DRB1*08:03L
ITVEELKKLLEQ

SEQ ID NO: 15401 - protein, 12 aa, Severe acute respiratory syndrome coronavirus 2
  REGION 1..12: note = Table B: HLA-DRB1*13:03L HLA-DRB1*08:04L HLA-DRB1*14:01L HLA-DRB1*04:08L
SYFIASFRLFAR

SEQ ID NO: 15402 - protein, 12 aa, Severe acute respiratory syndrome coronavirus 2
  REGION 1..12: note = Table B: HLA-DRB1*13:03L HLA-DRB1*04:05L HLA-DQA1*01:02-B1*06:02L HLA-DRB1*01:02L HLA-DRB1*14:01L HLA-DRB1*11:04L HLA-DRB1*11:01L HLA-DRB1*12:01L HLA-DRB3*01:01L HLA-DRB1*16:01L HLA-DRB1*04:08L HLA-DRB1*15:03L
IASFRLFARTRS

SEQ ID NO: 15403 - protein, 12 aa, Severe acute respiratory syndrome coronavirus 2
  REGION 1..12: note = Table B: HLA-DRB1*13:03L HLA-DRB1*01:03L HLA-DRB1*04:05L HLA-DQA1*01:02-B1*06:02L HLA-DRB1*01:02L HLA-DRB1*08:04L HLA-DRB1*14:01L HLA-DRB1*11:04L HLA-DRB1*11:01L HLA-DRB3*01:01L HLA-DRB1*16:01L HLA-DRB1*04:08L
ASFRLFARTRSM

SEQ ID NO: 15404 - protein, 10 aa, Severe acute respiratory syndrome coronavirus 2
  REGION 1..10: note = Table B: HLA-DRB1*13:03L HLA-DQA1*03:01-B1*03:02L
VPLHGTILTR

SEQ ID NO: 15405 - protein, 16 aa, Severe acute respiratory syndrome coronavirus 2
  REGION 1..16: note = Table B: HLA-DRB1*13:03L HLA-DRB1*04:02L HLA-DRB1*11:02L
IGAVILRGHLRIAGHH

SEQ ID NO: 15406 - protein, 11 aa, Severe acute respiratory syndrome coronavirus 2
  REGION 1..11: note = Table B: HLA-DRB1*13:03L HLA-DRB1*01:03L HLA-DRB1*04:02L HLA-DRB1*04:05L HLA-DRB1*14:01L HLA-DRB1*11:04L HLA-DRB1*08:01L HLA-DRB1*11:01L HLA-DRB1*16:01L HLA-DRB1*04:08L
GHLRIAGHHLG

SEQ ID NO: 15407 - protein, 10 aa, Severe acute respiratory syndrome coronavirus 2
  REGION 1..10: note = Table B: HLA-DRB1*13:03L HLA-DRB1*01:03L HLA-DRB1*11:04L HLA-DRB1*08:01L HLA-DRB1*11:01L HLA-DRB1*12:01L HLA-DQA1*03:01-B1*03:02L HLA-DRB1*16:01L
LRIAGHHLGR

SEQ ID NO: 15408 - protein, 11 aa, Severe acute respiratory syndrome coronavirus 2
  REGION 1..11: note = Table B: HLA-DRB1*13:03L
LPKEITVATSR

SEQ ID NO: 15409 - protein, 10 aa, Severe acute respiratory syndrome coronavirus 2
  REGION 1..10: note = Table B: HLA-DRB1*13:03L HLA-DRB1*01:03L HLA-DQA1*01:02-B1*06:02L HLA-DRB1*14:02L HLA-DQA1*02:01-B1*03:03L
SQRVAGDSGF

SEQ ID NO: 15410 - protein, 10 aa, Severe acute respiratory syndrome coronavirus 2
  REGION 1..10: note = Table B: HLA-DRB1*13:03L HLA-DQA1*01:02-B1*06:02L HLA-DQA1*05:05-B1*03:19L HLA-DQA1*05:01-B1*02:01L HLA-DPA1*03:01-B1*105:01L HLA-DRB1*16:01L HLA-DQA1*02:01-B1*03:03L HLA-DRB1*15:03L
VAGDSGFAAY

SEQ ID NO: 15411 - protein, 11 aa, Severe acute respiratory syndrome coronavirus 2
  REGION 1..11: note = Table B: HLA-DRB1*13:03L HLA-DQA1*05:05-B1*03:01L HLA-DQA1*01:03-B1*06:01L
AGDSGFAAYSR

SEQ ID NO: 15412 - protein, 15 aa, Severe acute respiratory syndrome coronavirus 2
  REGION 1..15: note = Table B: HLA-DRB1*13:03L HLA-DPA1*03:01-B1*04:02L HLA-DRB1*14:01L HLA-DPA1*01:03-B1*04:02L HLA-DPA1*01:03-B1*02:01L
YSRYRIGNYKLNTDH

SEQ ID NO: 15413 - protein, 11 aa, Severe acute respiratory syndrome coronavirus 2
  REGION 1..11: note = Table B: HLA-DRB1*13:03L HLA-DRB1*01:03L HLA-DRB1*04:04L HLA-DRB1*04:05L HLA-DQA1*01:02-B1*06:02L HLA-DRB1*01:02L HLA-DRB4*03:01NL HLA-DRB1*08:04L HLA-DRB1*14:01L HLA-DRB1*11:04L HLA-DRB1*08:01L HLA-DRB1*11:01L HLA-DRB1*12:01L
  REGION 1..11: note = CONT. FROM ABOVE: HLA-DQA1*03:01-B1*03:02L HLA-DRB1*14:54L HLA-D PA1*01:02-B1*04:01L HLA-DRB1*16:01L HLA-DRB1*04:08L HLA-DQA1*02: 01-B1*03:03L
IINLIIKNLSK

SEQ ID NO: 15414 - protein, 13 aa, Severe acute respiratory syndrome coronavirus 2
  REGION 1..13: note = Table B: HLA-DRB1*13:03L HLA-DRB1*01:03L HLA-DRB1*04:02L HLA-DQA1*01:02-B1*06:02L HLA-DRB1*01:02L HLA-DQA1*01:01-B1*05:01L HLA-DRB1*08:01L HLA-DRB1*04:10L HLA-DRB1*12:01L HLA-DPA1*02:01-B1*13:01L
  REGION 1..13: note = CONT. FROM ABOVE: HLA-DQA1*05:05-B1*03:01L HLA-DQA1*01:03-B1*06: 01L HLA-DRB1*04:08L HLA-DRB1*15:03L
NKYSQLDEEQPME

SEQ ID NO: 15415 - protein, 10 aa, Severe acute respiratory syndrome coronavirus 2
  REGION 1..10: note = Table B: HLA-DRB1*13:03L HLA-DRB1*01:03L HLA-DRB1*01:02L HLA-DRB1*08:01L HLA-DRB1*11:01L HLA-DRB1*12:01L HLA-DQA1*03:01-B1*03:02L HLA-DRB1*14:17L HLA-DPA1*01:02-B1*04:01L HLA-DRB1*16:01L HLA-DRB1*04:08L
  REGION 1..10: note = CONT. FROM ABOVE: HLA-DQA1*02:01-B1*03:03L
QLRARSVSPK

SEQ ID NO: 15416 - protein, 10 aa, Severe acute respiratory syndrome coronavirus 2
  REGION 1..10: note = Table B: HLA-DRB1*13:03L HLA-DRB1*01:03L HLA-DQA1*03:01-B1*03:02L HLA-DRB1*14:17L HLA-DQA1*02:01-B1*03:03L
GPQNQRNAPR

SEQ ID NO: 15417 - protein, 10 aa, Severe acute respiratory syndrome coronavirus 2
  REGION 1..10: note = Table B: HLA-DRB1*13:03L HLA-DRB1*08:01L HLA-DRB1*12:01L HLA-DQA1*03:01-B1*03:02L HLA-DQA1*05:05-B1*03:01L
STGSNQNGER

SEQ ID NO: 15418 - protein, 10 aa, Severe acute respiratory syndrome coronavirus 2
  REGION 1..10: note = Table B: HLA-DRB1*13:03L HLA-DQA1*03:01-B1*03:02L
SPDDQIGYYR

SEQ ID NO: 15419 - protein, 10 aa, Severe acute respiratory syndrome coronavirus 2
  REGION 1..10: note = Table B: HLA-DRB1*13:03L HLA-DRB1*04:02L HLA-DRB4*03:01NL HLA-DRB1*12:01L HLA-DQA1*03:01-B1*03:02L HLA-DRB1*14:17L
ATEGALNTPK

SEQ ID NO: 15420 - protein, 10 aa, Severe acute respiratory syndrome coronavirus 2
  REGION 1..10: note = Table B: HLA-DRB1*13:03L
NPANNAAIVL

SEQ ID NO: 15421 - protein, 10 aa, Severe acute respiratory syndrome coronavirus 2
  REGION 1..10: note = Table B: HLA-DRB1*13:03L HLA-DRB1*01:03L HLA-DQA1*03:01-B1*03:02L
SRNSTPGSSR

SEQ ID NO: 15422 - protein, 10 aa, Severe acute respiratory syndrome coronavirus 2
  REGION 1..10: note = Table B: HLA-DRB1*13:03L
TPGSSRGTSP

SEQ ID NO: 15423 - protein, 11 aa, Severe acute respiratory syndrome coronavirus 2
  REGION 1..11: note = Table B: HLA-DRB1*13:03L HLA-DRB1*04:02L HLA-DRB1*08:04L HLA-DRB1*08:01L HLA-DQA1*05:01-B1*02:01L HLA-DPA1*01:03-B1*04:01L HLA-DRB1*12:01L HLA-DPA1*02:01-B1*13:01L HLA-DRB1*16:01L
  REGION 1..11: note = CONT. FROM ABOVE: HLA-DQA1*01:03-B1*06:01L
ALLLLDRLNQL

SEQ ID NO: 15424 - protein, 12 aa, Severe acute respiratory syndrome coronavirus 2
  REGION 1..12: note = Table B: HLA-DRB1*13:03L HLA-DRB1*01:02L HLA-DRB1*11:04L HLA-DRB1*08:01L HLA-DRB1*11:01L HLA-DRB1*14:54L
LLLLDRLNQLES

SEQ ID NO: 15425 - protein, 12 aa, Severe acute respiratory syndrome coronavirus 2
  REGION 1..12: note = Table B: HLA-DRB1*13:03L HLA-DRB1*04:02L HLA-DQA1*02:01-B1*03:03L
GQTVTKKSAAEA

SEQ ID NO: 15426 - protein, 10 aa, Severe acute respiratory syndrome coronavirus 2
  REGION 1..10: note = Table B: HLA-DRB1*13:03L HLA-DRB1*08:01L HLA-DRB1*12:01L HLA-DQA1*03:01-B1*03:02L HLA-DQA1*05:05-B1*03:01L HLA-DQA1*02:01-B1*03:03L
ELIRQGTDYK

SEQ ID NO: 15427 - protein, 10 aa, Severe acute respiratory syndrome coronavirus 2
  REGION 1..10: note = Table B: HLA-DRB1*13:03L HLA-DRB1*08:01L HLA-DRB1*12:01L HLA-DQA1*03:01-B1*03:02L HLA-DQA1*05:05-B1*03:01L HLA-DQA1*01:03-B1*06:01L HLA-DQA1*02:01-B1*03:03L
SASAFFGMSR

SEQ ID NO: 15428 - protein, 10 aa, Severe acute respiratory syndrome coronavirus 2
  REGION 1..10: note = Table B: HLA-DRB1*13:03L HLA-DRB1*01:03L HLA-DRB1*04:02L HLA-DRB1*08:01L HLA-DQA1*03:01-B1*03:02L HLA-DQA1*01:03-B1*06:01L HLA-DQA1*02:01-B1*03:03L
YTGAIKLDDK

SEQ ID NO: 15429 - protein, 10 aa, Severe acute respiratory syndrome coronavirus 2
  REGION 1..10: note = Table B: HLA-DRB1*13:03L HLA-DRB4*03:01NL HLA-DRB1*12:01L HLA-DQA1*03:01-B1*03:02L HLA-DQA1*05:05-B1*03:01L HLA-DQA1*02:01-B1*03:03L
ADETQALPQR

SEQ ID NO: 15430 - protein, 10 aa, Severe acute respiratory syndrome coronavirus 2
  REGION 1..10: note = Table B: HLA-DRB1*13:03L HLA-DRB1*08:01L HLA-DRB1*12:01L HLA-DQA1*03:01-B1*03:02L HLA-DQA1*05:05-B1*03:01L HLA-DQA1*02:01-B1*03:03L
TQALPQRQKK

SEQ ID NO: 15431 - protein, 11 aa, Severe acute respiratory syndrome coronavirus 2
  REGION 1..11: note = Table B: HLA-DRB1*13:03L HLA-DRB1*01:03L HLA-DRB1*04:02L HLA-DRB1*01:02L HLA-DRB4*03:01NL HLA-DPA1*01:03-B1*03:01L HLA-DQA1*01:01-B1*05:01L HLA-DRB1*08:01L HLA-DQA1*05:05-B1*03:19L HLA-DRB1*04:10L HLA-DRB1*12:01L
  REGION 1..11: note = CONT. FROM ABOVE: HLA-DPA1*02:01-B1*13:01L HLA-DPA1*03:01-B1*105 :01L HLA-DRB1*14:54L HLA-DQA1*05:05-B1*03:01L HLA-DRB1*14:17L HL A-DPA1*01:02-B1*04:01L HLA-DRB1*16:01L HLA-DRB1*04:08L HLA-DRB1* 15:03L
RNYIAQVDVVN

SEQ ID NO: 15432 - protein, 15 aa, Severe acute respiratory syndrome coronavirus 2
  REGION 1..15: note = Table B: HLA-DRB1*01:03L HLA-DRB1*04:05L HLA-DRB1*16:01L
EKTHVQLSLPVLQVR

SEQ ID NO: 15433 - protein, 13 aa, Severe acute respiratory syndrome coronavirus 2
  REGION 1..13: note = Table B: HLA-DRB1*01:03L HLA-DRB1*01:02L HLA-DRB1*14:01L HLA-DRB1*14:54L HLA-DRB1*04:08L HLA-DRB1*15:03L
DSVEEVLSEARQH

SEQ ID NO: 15434 - protein, 11 aa, Severe acute respiratory syndrome coronavirus 2
  REGION 1..11: note = Table B: HLA-DRB1*01:03L
VLSEARQHLKD

SEQ ID NO: 15435 - protein, 14 aa, Severe acute respiratory syndrome coronavirus 2
  REGION 1..14: note = Table B: HLA-DRB1*01:03L HLA-DRB1*04:08L
VLPQLEQPYVFIKR

SEQ ID NO: 15436 - protein, 15 aa, Severe acute respiratory syndrome coronavirus 2
  REGION 1..15: note = Table B: HLA-DRB1*01:03L HLA-DRB1*04:05L HLA-DRB1*12:01L HLA-DRB1*16:01L HLA-DRB1*04:08L
LPQLEQPYVFIKRSD

SEQ ID NO: 15437 - protein, 12 aa, Severe acute respiratory syndrome coronavirus 2
  REGION 1..12: note = Table B: HLA-DRB1*01:03L HLA-DRB1*04:02L HLA-DRB1*04:05L HLA-DQA1*01:02-B1*06:02L HLA-DRB1*08:04L HLA-DRB1*14:01L HLA-DRB1*11:04L HLA-DRB1*11:01L HLA-DRB1*14:54L HLA-DPA1*01:02-B1*04:01L HLA-DRB1*16:01L HLA-DRB1*04:08L
  REGION 1..12: note = CONT. FROM ABOVE: HLA-DRB1*08:03L HLA-DQA1*02:01-B1*03:03L
EQPYVFIKRSDA

SEQ ID NO: 15438 - protein, 11 aa, Severe acute respiratory syndrome coronavirus 2
  REGION 1..11: note = Table B: HLA-DRB1*01:03L HLA-DRB1*14:01L HLA-DRB1*11:04L HLA-DRB1*11:01L HLA-DRB1*16:01L HLA-DRB1*04:08L
PYVFIKRSDAR

SEQ ID NO: 15439 - protein, 11 aa, Severe acute respiratory syndrome coronavirus 2
  REGION 1..11: note = Table B: HLA-DRB1*01:03L HLA-DQA1*03:01-B1*03:02L HLA-DRB1*16:01L HLA-DQA1*02:01-B1*03:03L
IKRSDARTAPH

SEQ ID NO: 15440 - protein, 13 aa, Severe acute respiratory syndrome coronavirus 2
  REGION 1..13: note = Table B: HLA-DRB1*01:03L HLA-DRB1*04:02L HLA-DRB1*04:04L HLA-DRB1*04:05L HLA-DRB1*08:04L HLA-DPA1*01:03-B1*03:01L HLA-DRB1*11:03L HLA-DRB1*11:04L HLA-DRB1*14:02L HLA-DQA1*01:01-B1*05:01L HLA-DRB1*11:01L HLA-DQA1*01-B1*05L
  REGION 1..13: note = CONT. FROM ABOVE: HLA-DQA1*05:05-B1*03:19L HLA-DPA1*01:03-B1*04: 01L HLA-DRB1*04:10L HLA-DRB1*12:02L HLA-DPA1*02:01-B1*13:01L HLA -DPA1*01:03-B1*02:01L HLA-DPA1*01:03-B1*104:01L HLA-DRB1*10:01L HLA-DRB1*04:08L HLA-DRB1*08:03L
VAELEGIQYGRSG

SEQ ID NO: 15441 - protein, 12 aa, Severe acute respiratory syndrome coronavirus 2
  REGION 1..12: note = Table B: HLA-DRB1*01:03L HLA-DQA1*01:02-B1*06:02L HLA-DPA1*01:03-B1*03:01L HLA-DQA1*01:01-B1*05:01L HLA-DQA1*05:01-B1*02:01L HLA-DPA1*01:03-B1*04:02L HLA-DPA1*03:01-B1*105:01L HLA-DRB1*16:01L HLA-DRB1*04:08L
LEGIQYGRSGET

SEQ ID NO: 15442 - protein, 16 aa, Severe acute respiratory syndrome coronavirus 2
  REGION 1..16: note = Table B: HLA-DRB1*01:03L HLA-DRB1*01:01L HLA-DRB1*10:01L
GETLGVLVPHVGEIPV

SEQ ID NO: 15443 - protein, 14 aa, Severe acute respiratory syndrome coronavirus 2
  REGION 1..14: note = Table B: HLA-DRB1*01:03L HLA-DRB1*01:02L HLA-DRB1*11:04L HLA-DRB1*08:01L
VGEIPVAYRKVLLR

SEQ ID NO: 15444 - protein, 12 aa, Severe acute respiratory syndrome coronavirus 2
  REGION 1..12: note = Table B: HLA-DRB1*01:03L HLA-DRB1*01:02L HLA-DRB1*16:01L HLA-DRB1*04:08L
IPVAYRKVLLRK

SEQ ID NO: 15445 - protein, 14 aa, Severe acute respiratory syndrome coronavirus 2
  REGION 1..14: note = Table B: HLA-DRB1*01:03L HLA-DRB1*04:08L
PVAYRKVLLRKNGN

SEQ ID NO: 15446 - protein, 13 aa, Severe acute respiratory syndrome coronavirus 2
  REGION 1..13: note = Table B: HLA-DRB1*01:03L HLA-DRB1*01:02L HLA-DRB1*04:08L
YRKVLLRKNGNKG

SEQ ID NO: 15447 - protein, 13 aa, Severe acute respiratory syndrome coronavirus 2
  REGION 1..13: note = Table B: HLA-DRB1*01:03L HLA-DRB1*01:02L HLA-DRB1*04:08L
KVLLRKNGNKGAG

SEQ ID NO: 15448 - protein, 14 aa, Severe acute respiratory syndrome coronavirus 2
  REGION 1..14: note = Table B: HLA-DRB1*01:03L HLA-DRB1*01:02L
VLLRKNGNKGAGGH

SEQ ID NO: 15449 - protein, 12 aa, Severe acute respiratory syndrome coronavirus 2
  REGION 1..12: note = Table B: HLA-DRB1*01:03L HLA-DQA1*01:02-B1*06:02L HLA-DQA1*05:05-B1*03:19L HLA-DQA1*05:05-B1*03:01L HLA-DRB1*04:08L
GAGGHSYGADLK

SEQ ID NO: 15450 - protein, 14 aa, Severe acute respiratory syndrome coronavirus 2
  REGION 1..14: note = Table B: HLA-DRB1*01:03L HLA-DRB1*04:02L HLA-DRB1*04:05L HLA-DRB1*01:02L HLA-DPA1*01:03-B1*03:01L HLA-DRB1*14:01L HLA-DRB1*14:02L HLA-DQA1*01:01-B1*05:01L HLA-DRB1*08:01L
DELGTDPYEDFQEN

SEQ ID NO: 15451 - protein, 14 aa, Severe acute respiratory syndrome coronavirus 2
  REGION 1..14: note = Table B: HLA-DRB1*01:03L HLA-DRB1*04:05L HLA-DRB1*01:02L HLA-DRB1*08:01L HLA-DRB1*04:08L
DPYEDFQENWNTKH

SEQ ID NO: 15452 - protein, 11 aa, Severe acute respiratory syndrome coronavirus 2
  REGION 1..11: note = Table B: HLA-DRB1*01:03L
WNTKHSSGVTR

SEQ ID NO: 15453 - protein, 11 aa, Severe acute respiratory syndrome coronavirus 2
  REGION 1..11: note = Table B: HLA-DRB1*01:03L HLA-DQA1*02:01-B1*03:03L
NTKHSSGVTRE

SEQ ID NO: 15454 - protein, 12 aa, Severe acute respiratory syndrome coronavirus 2
  REGION 1..12: note = Table B: HLA-DRB1*01:03L HLA-DPA1*01:03-B1*04:02L HLA-DRB1*04:08L
LNGGAYTRYVDN

SEQ ID NO: 15455 - protein, 12 aa, Severe acute respiratory syndrome coronavirus 2
  REGION 1..12: note = Table B: HLA-DRB1*01:03L HLA-DQA1*01:01-B1*05:01L HLA-DRB1*08:01L HLA-DQA1*05:01-B1*02:01L HLA-DPA1*01:03-B1*04:02L
NGGAYTRYVDNN

SEQ ID NO: 15456 - protein, 14 aa, Severe acute respiratory syndrome coronavirus 2
  REGION 1..14: note = Table B: HLA-DRB1*01:03L HLA-DRB1*01:02L HLA-DQA1*01-B1*05L HLA-DRB1*12:01L HLA-DPA1*02:01-B1*13:01L HLA-DPA1*03:01-B1*105:01L HLA-DRB1*16:01L HLA-DRB1*15:03L
YTRYVDNNFCGPDG

SEQ ID NO: 15457 - protein, 12 aa, Severe acute respiratory syndrome coronavirus 2
  REGION 1..12: note = Table B: HLA-DRB1*01:03L HLA-DRB1*04:02L HLA-DRB1*04:04L HLA-DRB1*04:05L HLA-DQA1*01:02-B1*06:02L HLA-DRB1*01:02L HLA-DRB1*08:01L HLA-DRB1*16:01L
YPLECIKDLLAR

SEQ ID NO: 15458 - protein, 14 aa, Severe acute respiratory syndrome coronavirus 2
  REGION 1..14: note = Table B: HLA-DRB1*01:03L
PLECIKDLLARAGK

SEQ ID NO: 15459 - protein, 13 aa, Severe acute respiratory syndrome coronavirus 2
  REGION 1..13: note = Table B: HLA-DRB1*01:03L HLA-DRB1*04:05L HLA-DRB1*16:01L
KRGVYCCREHEHE

SEQ ID NO: 15460 - protein, 13 aa, Severe acute respiratory syndrome coronavirus 2
  REGION 1..13: note = Table B: HLA-DRB1*01:03L HLA-DRB1*04:08L
EIKLAKKFDTFNG

SEQ ID NO: 15461 - protein, 10 aa, Severe acute respiratory syndrome coronavirus 2
  REGION 1..10: note = Table B: HLA-DRB1*01:03L HLA-DQA1*03:01-B1*03:02L
TIQPRVEKKK

SEQ ID NO: 15462 - protein, 16 aa, Severe acute respiratory syndrome coronavirus 2
  REGION 1..16: note = Table B: HLA-DRB1*01:03L HLA-DRB1*04:08L
IQPRVEKKKLDGFMGR

SEQ ID NO: 15463 - protein, 14 aa, Severe acute respiratory syndrome coronavirus 2
  REGION 1..14: note = Table B: HLA-DRB1*01:03L HLA-DRB1*04:05L HLA-DQA1*01:02-B1*06:02L HLA-DRB1*08:01L HLA-DRB1*12:01L HLA-DPA1*02:01-B1*13:01L HLA-DRB1*04:08L HLA-DQA1*02:01-B1*03:03L HLA-DRB1*15:03L
VEKKKLDGFMGRIR

SEQ ID NO: 15464 - protein, 16 aa, Severe acute respiratory syndrome coronavirus 2
  REGION 1..16: note = Table B: HLA-DRB1*01:03L HLA-DRB1*12:01L HLA-DRB1*04:08L
KKKLDGFMGRIRSVYP

SEQ ID NO: 15465 - protein, 12 aa, Severe acute respiratory syndrome coronavirus 2
  REGION 1..12: note = Table B: HLA-DRB1*01:03L HLA-DRB1*04:04L HLA-DRB1*04:05L HLA-DRB1*01:02L HLA-DRB1*12:01L HLA-DRB1*16:01L HLA-DRB1*04:08L HLA-DRB1*15:03L
RIRSVYPVASPN

SEQ ID NO: 15466 - protein, 12 aa, Severe acute respiratory syndrome coronavirus 2
  REGION 1..12: note = Table B: HLA-DRB1*01:03L HLA-DRB1*01:02L HLA-DPA1*01:03-B1*03:01L HLA-DRB1*14:01L HLA-DPA1*01:03-B1*04:02L HLA-DPA1*02:01-B1*13:01L HLA-DRB1*04:08L HLA-DRB1*15:03L
ETSWQTGDFVKA

SEQ ID NO: 15467 - protein, 17 aa, Severe acute respiratory syndrome coronavirus 2
  REGION 1..17: note = Table B: HLA-DRB1*01:03L HLA-DPA1*03:01-B1*105:01L HLA-DRB1*08:03L
VVKIYCPACHNSEVGPE

SEQ ID NO: 15468 - protein, 13 aa, Severe acute respiratory syndrome coronavirus 2
  REGION 1..13: note = Table B: HLA-DRB1*01:03L HLA-DRB1*04:04L HLA-DQA1*01:02-B1*06:02L HLA-DRB1*01:02L HLA-DRB1*12:01L HLA-DRB1*04:08L HLA-DRB1*15:01L
HSLAEYHNESGLK

SEQ ID NO: 15469 - protein, 12 aa, Severe acute respiratory syndrome coronavirus 2
  REGION 1..12: note = Table B: HLA-DRB1*01:03L HLA-DRB1*04:08L
EYHNESGLKTIL

SEQ ID NO: 15470 - protein, 12 aa, Severe acute respiratory syndrome coronavirus 2
  REGION 1..12: note = Table B: HLA-DRB1*01:03L HLA-DRB1*04:08L
YHNESGLKTILR

SEQ ID NO: 15471 - protein, 12 aa, Severe acute respiratory syndrome coronavirus 2
  REGION 1..12: note = Table B: HLA-DRB1*01:03L HLA-DQA1*01:02-B1*06:02L HLA-DRB1*01:02L HLA-DRB1*14:01L HLA-DRB1*11:04L HLA-DRB1*08:01L HLA-DRB1*11:01L HLA-DRB1*04:08L
GLKTILRKGGRT

SEQ ID NO: 15472 - protein, 13 aa, Severe acute respiratory syndrome coronavirus 2
  REGION 1..13: note = Table B: HLA-DRB1*01:03L HLA-DRB1*01:02L HLA-DRB1*14:01L HLA-DRB1*12:01L HLA-DRB1*16:01L HLA-DRB1*04:08L HLA-DRB1*15:03L
LKTILRKGGRTIA

SEQ ID NO: 15473 - protein, 13 aa, Severe acute respiratory syndrome coronavirus 2
  REGION 1..13: note = Table B: HLA-DRB1*01:03L HLA-DQA1*01:02-B1*06:02L HLA-DRB1*01:02L
TILRKGGRTIAFG

SEQ ID NO: 15474 - protein, 14 aa, Severe acute respiratory syndrome coronavirus 2
  REGION 1..14: note = Table B: HLA-DRB1*01:03L HLA-DRB1*14:54L
HTGVVGEGSEGLND

SEQ ID NO: 15475 - protein, 14 aa, Severe acute respiratory syndrome coronavirus 2
  REGION 1..14: note = Table B: HLA-DRB1*01:03L HLA-DRB1*04:08L HLA-DRB1*15:03L
GLNDNLLEILQKEK

SEQ ID NO: 15476 - protein, 13 aa, Severe acute respiratory syndrome coronavirus 2
  REGION 1..13: note = Table B: HLA-DRB1*01:03L HLA-DRB1*04:04L HLA-DRB1*04:05L HLA-DRB1*04:08L
KVNINIVGDFKLN

SEQ ID NO: 15477 - protein, 14 aa, Severe acute respiratory syndrome coronavirus 2
  REGION 1..14: note = Table B: HLA-DRB1*01:03L HLA-DRB1*11:02L HLA-DPA1*01:03-B1*04:02L
VGDFKLNEEIAIIL

SEQ ID NO: 15478 - protein, 14 aa, Severe acute respiratory syndrome coronavirus 2
  REGION 1..14: note = Table B: HLA-DRB1*01:03L HLA-DRB1*04:05L HLA-DRB1*11:04L HLA-DRB1*04:10L HLA-DRB1*14:54L HLA-DQA1*05:05-B1*03:01L HLA-DRB1*04:08L HLA-DQA1*02:01-B1*03:03L
NEEIAIILASFSAS

SEQ ID NO: 15479 - protein, 10 aa, Severe acute respiratory syndrome coronavirus 2
  REGION 1..10: note = Table B: HLA-DRB1*01:03L HLA-DQA1*01:02-B1*06:02L HLA-DRB1*14:02L HLA-DQA1*05:01-B1*02:01L HLA-DPA1*01:03-B1*04:01L HLA-DPA1*03:01-B1*105:01L HLA-DQA1*01:03-B1*06:01L HLA-DQA1*02:01-B1*03:03L
TVKGLDYKAF

SEQ ID NO: 15480 - protein, 12 aa, Severe acute respiratory syndrome coronavirus 2
  REGION 1..12: note = Table B: HLA-DRB1*01:03L HLA-DPA1*01:03-B1*04:01L HLA-DPA1*01:03-B1*04:02L HLA-DRB1*04:08L
KGLDYKAFKQIV

SEQ ID NO: 15481 - protein, 14 aa, Severe acute respiratory syndrome coronavirus 2
  REGION 1..14: note = Table B: HLA-DRB1*01:03L HLA-DRB1*12:01L HLA-DRB1*16:01L HLA-DRB1*04:08L
QIVESCGNFKVTKG

SEQ ID NO: 15482 - protein, 10 aa, Severe acute respiratory syndrome coronavirus 2
  REGION 1..10: note = Table B: HLA-DRB1*01:03L HLA-DRB1*01:02L HLA-DQA1*03:01-B1*03:02L HLA-DRB1*16:01L HLA-DRB1*04:08L
NFKVTKGKAK

SEQ ID NO: 15483 - protein, 10 aa, Severe acute respiratory syndrome coronavirus 2
  REGION 1..10: note = Table B: HLA-DRB1*01:03L HLA-DRB1*01:02L HLA-DRB1*12:01L HLA-DRB1*16:01L HLA-DRB1*04:08L
FKVTKGKAKK

SEQ ID NO: 15484 - protein, 14 aa, Severe acute respiratory syndrome coronavirus 2
  REGION 1..14: note = Table B: HLA-DRB1*01:03L HLA-DRB1*04:05L HLA-DQA1*01:02-B1*06:02L HLA-DRB1*01:02L HLA-DRB1*08:01L HLA-DRB1*12:01L HLA-DPA1*02:01-B1*13:01L HLA-DRB1*16:01L HLA-DRB1*04:08L HLA-DQA1*02:01-B1*03:03L
GKAKKGAWNIGEQK

SEQ ID NO: 15485 - protein, 13 aa, Severe acute respiratory syndrome coronavirus 2
  REGION 1..13: note = Table B: HLA-DRB1*01:03L HLA-DRB1*04:05L HLA-DPA1*03:01-B1*04:02L HLA-DRB1*08:01L
AARVVRSIFSRTL

SEQ ID NO: 15486 - protein, 12 aa, Severe acute respiratory syndrome coronavirus 2
  REGION 1..12: note = Table B: HLA-DRB1*01:03L HLA-DQA1*01:02-B1*06:02L HLA-DRB1*04:08L
RVVRSIFSRTLE

SEQ ID NO: 15487 - protein, 11 aa, Severe acute respiratory syndrome coronavirus 2
  REGION 1..11: note = Table B: HLA-DRB1*01:03L HLA-DRB1*04:02L
TAQNSVRVLQK

SEQ ID NO: 15488 - protein, 13 aa, Severe acute respiratory syndrome coronavirus 2
  REGION 1..13: note = Table B: HLA-DRB1*01:03L HLA-DRB1*04:05L HLA-DRB1*01:02L HLA-DRB4*03:01NL HLA-DRB1*08:04L HLA-DQA1*01:01-B1*05:01L HLA-DRB1*08:01L HLA-DRB1*04:10L HLA-DPA1*02:01-B1*13:01L HLA-DRB1*14:54L HLA-DQA1*05:05-B1*03:01L HLA-DRB1*04:08L
DGISQYSLRLIDA

SEQ ID NO: 15489 - protein, 12 aa, Severe acute respiratory syndrome coronavirus 2
  REGION 1..12: note = Table B: HLA-DRB1*01:03L HLA-DQA1*01:02-B1*06:02L HLA-DRB1*01:01L HLA-DQA1*05:05-B1*03:19L HLA-DRB1*10:01L HLA-DQA1*01:03-B1*06:01L HLA-DRB1*04:08L
GVVQLTSQWLTN

SEQ ID NO: 15490 - protein, 13 aa, Severe acute respiratory syndrome coronavirus 2
  REGION 1..13: note = Table B: HLA-DRB1*01:03L HLA-DRB1*01:02L HLA-DRB1*04:08L
TSQWLTNIFGTVY

SEQ ID NO: 15491 - protein, 12 aa, Severe acute respiratory syndrome coronavirus 2
  REGION 1..12: note = Table B: HLA-DRB1*01:03L HLA-DRB1*01:02L HLA-DPA1*01:03-B1*02:01L HLA-DPA1*01:02-B1*04:01L HLA-DQA1*01:03-B1*06:01L HLA-DRB1*04:08L
WLTNIFGTVYEK

SEQ ID NO: 15492 - protein, 10 aa, Severe acute respiratory syndrome coronavirus 2
  REGION 1..10: note = Table B: HLA-DRB1*01:03L HLA-DPA1*03:01-B1*04:02L HLA-DPA1*01:03-B1*04:01L HLA-DPA1*01:03-B1*04:02L HLA-DPA1*03:01-B1*105:01L HLA-DPA1*01:02-B1*04:01L HLA-DRB1*16:01L HLA-DQA1*01:03-B1*06:01L HLA-DRB1*04:08L
IFGTVYEKLK

SEQ ID NO: 15493 - protein, 14 aa, Severe acute respiratory syndrome coronavirus 2
  REGION 1..14: note = Table B: HLA-DRB1*01:03L HLA-DRB1*04:04L HLA-DRB1*12:01L HLA-DPA1*02:01-B1*13:01L
YEKLKPVLDWLEEK

SEQ ID NO: 15494 - protein, 13 aa, Severe acute respiratory syndrome coronavirus 2
  REGION 1..13: note = Table B: HLA-DRB1*01:03L
LKPVLDWLEEKFK

SEQ ID NO: 15495 - protein, 11 aa, Severe acute respiratory syndrome coronavirus 2
  REGION 1..11: note = Table B: HLA-DRB1*01:03L HLA-DQA1*01:02-B1*06:02L HLA-DPA1*03:01-B1*04:02L HLA-DQA1*01-B1*05L HLA-DPA1*01:03-B1*04:01L HLA-DPA1*01:03-B1*04:02L HLA-DPA1*03:01-B1*105:01L HLA-DPA1*01:02-B1*04:01L
  REGION 1..11: note = CONT. FROM ABOVE: HLA-DRB1*16:01L HLA-DRB1*04:08L
WLEEKFKEGVE

SEQ ID NO: 15496 - protein, 13 aa, Severe acute respiratory syndrome coronavirus 2
  REGION 1..13: note = Table B: HLA-DRB1*01:03L HLA-DRB1*04:04L HLA-DQA1*01:02-B1*06:02L HLA-DRB1*08:01L HLA-DRB1*11:01L HLA-DPA1*01:03-B1*104:01L HLA-DRB1*07:01L HLA-DQA1*02:01-B1*03:03L HLA-DRB1*15:03L
EKFKEGVEFLRDG

SEQ ID NO: 15497 - protein, 14 aa, Severe acute respiratory syndrome coronavirus 2
  REGION 1..14: note = Table B: HLA-DRB1*01:03L HLA-DRB1*04:04L HLA-DRB1*08:01L HLA-DPA1*01:03-B1*04:02L HLA-DPA1*01:03-B1*104:01L HLA-DQA1*02:01-B1*03:03L
KFKEGVEFLRDGWE

SEQ ID NO: 15498 - protein, 10 aa, Severe acute respiratory syndrome coronavirus 2
  REGION 1..10: note = Table B: HLA-DRB1*01:03L HLA-DQA1*01:02-B1*06:02L HLA-DPA1*02:01-B1*13:01L HLA-DRB1*16:01L HLA-DQA1*01:03-B1*06:01L HLA-DQA1*02:01-B1*03:03L
LRDGWEIVKF

SEQ ID NO: 15499 - protein, 10 aa, Severe acute respiratory syndrome coronavirus 2
  REGION 1..10: note = Table B: HLA-DRB1*01:03L HLA-DPA1*03:01-B1*04:02L HLA-DQA1*01-B1*05L HLA-DPA1*01:03-B1*04:01L HLA-DPA1*01:03-B1*04:02L HLA-DPA1*03:01-B1*105:01L HLA-DPA1*01:02-B1*04:01L HLA-DRB1*16:01L
  REGION 1..10: note = CONT. FROM ABOVE: HLA-DQA1*01:03-B1*06:01L HLA-DRB1*04:08L
GWEIVKFIST

SEQ ID NO: 15500 - protein, 12 aa, Severe acute respiratory syndrome coronavirus 2
  REGION 1..12: note = Table B: HLA-DRB1*01:03L HLA-DRB1*01:02L HLA-DPA1*01:03-B1*04:02L HLA-DRB1*04:08L
EIVGGQIVTCAK

SEQ ID NO: 15501 - protein, 12 aa, Severe acute respiratory syndrome coronavirus 2
  REGION 1..12: note = Table B: HLA-DRB1*01:03L HLA-DRB1*01:02L HLA-DPA1*01:03-B1*03:01L HLA-DRB1*08:01L HLA-DPA1*01:03-B1*04:02L HLA-DRB1*04:08L
IVGGQIVTCAKE

SEQ ID NO: 15502 - protein, 13 aa, Severe acute respiratory syndrome coronavirus 2
  REGION 1..13: note = Table B: HLA-DRB1*01:03L HLA-DRB1*04:02L HLA-DRB1*04:05L HLA-DRB1*01:02L HLA-DRB1*08:04L HLA-DRB1*12:01L HLA-DQA1*03:01-B1*03:02L HLA-DPA1*01:02-B1*04:01L HLA-DRB1*16:01L HLA-DRB1*04:08L HLA-DRB1*15:03L
VGGQIVTCAKEIK

SEQ ID NO: 15503 - protein, 10 aa, Severe acute respiratory syndrome coronavirus 2
  REGION 1..10: note = Table B: HLA-DRB1*01:03L HLA-DRB1*08:01L HLA-DPA1*03:01-B1*105:01L HLA-DQA1*03:01-B1*03:02L HLA-DPA1*01:02-B1*04:01L HLA-DRB1*16:01L HLA-DQA1*01:03-B1*06:01L HLA-DRB1*04:08L
  REGION 1..10: note = CONT. FROM ABOVE: HLA-DQA1*02:01-B1*03:03L
VQTFFKLVNK

SEQ ID NO: 15504 - protein, 15 aa, Severe acute respiratory syndrome coronavirus 2
  REGION 1..15: note = Table B: HLA-DRB1*01:03L HLA-DQA1*01:02-B1*06:02L HLA-DRB1*01:01L HLA-DQA1*05:05-B1*03:01L HLA-DRB1*10:01L HLA-DRB1*04:08L
VNKFLALCADSIIIG

SEQ ID NO: 15505 - protein, 12 aa, Severe acute respiratory syndrome coronavirus 2
  REGION 1..12: note = Table B: HLA-DRB1*01:03L HLA-DRB1*04:05L HLA-DQA1*01:02-B1*06:02L HLA-DRB1*01:02L HLA-DRB1*12:01L HLA-DRB1*16:01L HLA-DQA1*01:03-B1*06:01L
GAKLKALNLGET

SEQ ID NO: 15506 - protein, 15 aa, Severe acute respiratory syndrome coronavirus 2
  REGION 1..15: note = Table B: HLA-DRB1*01:03L HLA-DRB1*04:04L HLA-DRB1*16:01L
LKALNLGETFVTHSK

SEQ ID NO: 15507 - protein, 12 aa, Severe acute respiratory syndrome coronavirus 2
  REGION 1..12: note = Table B: HLA-DRB1*01:03L HLA-DRB1*11:04L HLA-DRB1*11:01L HLA-DRB1*16:01L HLA-DRB1*04:08L
KGLYRKCVKSRE

SEQ ID NO: 15508 - protein, 15 aa, Severe acute respiratory syndrome coronavirus 2
  REGION 1..15: note = Table B: HLA-DRB1*01:03L HLA-DRB1*04:04L HLA-DRB1*08:04L HLA-DRB1*08:77L HLA-DPA1*03:01-B1*04:02L HLA-DRB1*03:01L HLA-DRB1*11:03L HLA-DRB4*01:01L HLA-DPA1*01:03-B1*04:01L HLA-DRB3*01:01L HLA-DPA1*01:03-B1*104:01L HLA-DRB1*10:01L
  REGION 1..15: note = CONT. FROM ABOVE: HLA-DRB1*04:08L
LPTEVLTEEVVLKTG

SEQ ID NO: 15509 - protein, 14 aa, Severe acute respiratory syndrome coronavirus 2
  REGION 1..14: note = Table B: HLA-DRB1*01:03L HLA-DRB1*01:02L HLA-DRB1*08:04L
TEEVVLKTGDLQPL

SEQ ID NO: 15510 - protein, 14 aa, Severe acute respiratory syndrome coronavirus 2
  REGION 1..14: note = Table B: HLA-DRB1*01:03L HLA-DRB1*08:04L HLA-DRB1*14:01L HLA-DPA1*02:01-B1*13:01L HLA-DPA1*01:03-B1*02:01L
INGLMLLEIKDTEK

SEQ ID NO: 15511 - protein, 14 aa, Severe acute respiratory syndrome coronavirus 2
  REGION 1..14: note = Table B: HLA-DRB1*01:03L HLA-DRB1*01:01L HLA-DRB1*10:01L HLA-DRB1*04:08L
TEKYCALAPNMMVT

SEQ ID NO: 15512 - protein, 14 aa, Severe acute respiratory syndrome coronavirus 2
  REGION 1..14: note = Table B: HLA-DRB1*01:03L HLA-DRB1*01:01L HLA-DRB1*12:01L HLA-DQA1*05:05-B1*03:01L HLA-DRB1*10:01L HLA-DRB1*04:08L
EKYCALAPNMMVTN

SEQ ID NO: 15513 - protein, 12 aa, Severe acute respiratory syndrome coronavirus 2
  REGION 1..12: note = Table B: HLA-DRB1*01:03L HLA-DRB1*04:02L HLA-DRB1*04:05L HLA-DPA1*01:03-B1*04:02L HLA-DPA1*03:01-B1*105:01L HLA-DRB1*04:08L
GDDTVIEVQGYK

SEQ ID NO: 15514 - protein, 12 aa, Severe acute respiratory syndrome coronavirus 2
  REGION 1..12: note = Table B: HLA-DRB1*01:03L HLA-DRB1*04:05L HLA-DRB1*01:02L HLA-DRB1*14:01L HLA-DQA1*01-B1*05L HLA-DRB1*04:10L HLA-DRB1*12:02L HLA-DPA1*03:01-B1*105:01L HLA-DRB1*14:54L HLA-DRB1*15:03L
DDTVIEVQGYKS

SEQ ID NO: 15515 - protein, 10 aa, Severe acute respiratory syndrome coronavirus 2
  REGION 1..10: note = Table B: HLA-DRB1*01:03L HLA-DRB1*04:05L HLA-DQA1*01:02-B1*06:02L HLA-DPA1*02:01-B1*13:01L HLA-DPA1*03:01-B1*105:01L HLA-DRB1*16:01L HLA-DQA1*01:03-B1*06:01L HLA-DQA1*02:01-B1*03:03L
  REGION 1..10: note = CONT. FROM ABOVE: HLA-DRB1*15:03L
QGYKSVNITF

SEQ ID NO: 15516 - protein, 15 aa, Severe acute respiratory syndrome coronavirus 2
  REGION 1..15: note = Table B: HLA-DRB1*01:03L HLA-DRB1*04:04L HLA-DRB1*08:04L HLA-DRB1*08:01L HLA-DRB1*04:08L
IKTLQPVSELLTPLG

SEQ ID NO: 15517 - protein, 16 aa, Severe acute respiratory syndrome coronavirus 2
  REGION 1..16: note = Table B: HLA-DRB1*01:03L HLA-DPA1*01:03-B1*03:01L HLA-DPA1*01:03-B1*04:01L HLA-DRB1*12:01L HLA-DRB1*16:01L HLA-DRB1*04:08L HLA-DRB1*15:03L
EFKLASHMYCSFYPPD

SEQ ID NO: 15518 - protein, 11 aa, Severe acute respiratory syndrome coronavirus 2
  REGION 1..11: note = Table B: HLA-DRB1*01:03L HLA-DRB1*04:02L HLA-DRB1*11:03L HLA-DRB1*14:02L HLA-DRB1*14:54L HLA-DRB1*08:02L HLA-DQA1*02:01-B1*03:03L
EEEEFEPSTQY

SEQ ID NO: 15519 - protein, 13 aa, Severe acute respiratory syndrome coronavirus 2
  REGION 1..13: note = Table B: HLA-DRB1*01:03L HLA-DRB4*03:01NL HLA-DRB1*14:54L HLA-DRB1*14:17L
SAALQPEEEQEED

SEQ ID NO: 15520 - protein, 14 aa, Severe acute respiratory syndrome coronavirus 2
  REGION 1..14: note = Table B: HLA-DRB1*01:03L HLA-DRB1*04:05L HLA-DQA1*01:02-B1*06:02L HLA-DQA1*01-B1*05L HLA-DRB1*04:08L
LDDDSQQTVGQQDG

SEQ ID NO: 15521 - protein, 15 aa, Severe acute respiratory syndrome coronavirus 2
  REGION 1..15: note = Table B: HLA-DRB1*01:03L HLA-DRB4*03:01NL HLA-DQA1*01-B1*05L HLA-DRB1*12:01L HLA-DPA1*03:01-B1*105:01L HLA-DRB1*04:08L
DSQQTVGQQDGSEDN

SEQ ID NO: 15522 - protein, 10 aa, Severe acute respiratory syndrome coronavirus 2
  REGION 1..10: note = Table B: HLA-DRB1*01:03L HLA-DQA1*03:01-B1*03:02L HLA-DRB1*16:01L
IVEEAKKVKP

SEQ ID NO: 15523 - protein, 13 aa, Severe acute respiratory syndrome coronavirus 2
  REGION 1..13: note = Table B: HLA-DRB1*01:03L HLA-DRB1*04:04L HLA-DRB1*01:02L HLA-DRB1*12:01L HLA-DRB1*04:08L
KKVKPTVVVNAAN

SEQ ID NO: 15524 - protein, 11 aa, Severe acute respiratory syndrome coronavirus 2
  REGION 1..11: note = Table B: HLA-DRB1*01:03L HLA-DRB1*04:05L HLA-DRB1*08:04L HLA-DRB1*11:03L HLA-DRB1*11:04L HLA-DRB1*04:10L HLA-DRB1*12:02L HLA-DRB1*14:54L HLA-DQA1*01:03-B1*06:01L HLA-DRB1*04:08L
VVVNAANVYLK

SEQ ID NO: 15525 - protein, 14 aa, Severe acute respiratory syndrome coronavirus 2
  REGION 1..14: note = Table B: HLA-DRB1*01:03L HLA-DRB1*04:05L HLA-DRB1*16:01L HLA-DRB1*04:08L HLA-DRB1*15:03L
VVNAANVYLKHGGG

SEQ ID NO: 15526 - protein, 15 aa, Severe acute respiratory syndrome coronavirus 2
  REGION 1..15: note = Table B: HLA-DRB1*01:03L HLA-DRB1*04:02L HLA-DRB1*04:08L
NKATNNAMQVESDDY

SEQ ID NO: 15527 - protein, 14 aa, Severe acute respiratory syndrome coronavirus 2
  REGION 1..14: note = Table B: HLA-DRB1*01:03L HLA-DRB1*04:04L HLA-DRB1*01:02L HLA-DRB4*03:01NL HLA-DRB1*14:54L HLA-DRB1*10:01L HLA-DRB1*04:08L HLA-DRB1*08:03L
NNAMQVESDDYIAT

SEQ ID NO: 15528 - protein, 14 aa, Severe acute respiratory syndrome coronavirus 2
  REGION 1..14: note = Table B: HLA-DRB1*01:03L HLA-DRB1*04:05L HLA-DRB1*01:02L HLA-DPA1*03:01-B1*04:02L HLA-DRB1*12:01L HLA-DPA1*02:01-B1*13:01L HLA-DRB1*04:08L
NAMQVESDDYIATN

SEQ ID NO: 15529 - protein, 14 aa, Severe acute respiratory syndrome coronavirus 2
  REGION 1..14: note = Table B: HLA-DRB1*01:03L HLA-DRB1*01:02L
VGGSCVLSGHNLAK

SEQ ID NO: 15530 - protein, 15 aa, Severe acute respiratory syndrome coronavirus 2
  REGION 1..15: note = Table B: HLA-DRB1*01:03L HLA-DQA1*01:03-B1*06:01L HLA-DRB1*04:08L HLA-DQA1*02:01-B1*03:03L
GHNLAKHCLHVVGPN

SEQ ID NO: 15531 - protein, 14 aa, Severe acute respiratory syndrome coronavirus 2
  REGION 1..14: note = Table B: HLA-DRB1*01:03L HLA-DRB1*04:05L HLA-DRB1*01:02L HLA-DPA1*01:03-B1*03:01L HLA-DRB1*08:01L HLA-DRB1*12:01L HLA-DPA1*02:01-B1*13:01L HLA-DPA1*01:02-B1*04:01L HLA-DRB1*04:08L HLA-DRB1*15:03L
GPNVNKGEDIQLLK

SEQ ID NO: 15532 - protein, 15 aa, Severe acute respiratory syndrome coronavirus 2
  REGION 1..15: note = Table B: HLA-DRB1*01:03L HLA-DRB1*04:02L HLA-DRB1*04:05L HLA-DRB1*01:02L HLA-DPA1*01:03-B1*03:01L HLA-DPA1*03:01-B1*04:02L HLA-DQA1*01:01-B1*05:01L HLA-DRB1*08:01L HLA-DPA1*01:03-B1*04:01L HLA-DRB1*12:01L
  REGION 1..15: note = CONT. FROM ABOVE: HLA-DPA1*02:01-B1*13:01L HLA-DPA1*01:03-B1*104 :01L HLA-DPA1*01:02-B1*04:01L HLA-DRB1*16:01L HLA-DRB1*04:08L HL A-DRB1*15:03L
APLLSAGIFGADPIH

SEQ ID NO: 15533 - protein, 14 aa, Severe acute respiratory syndrome coronavirus 2
  REGION 1..14: note = Table B: HLA-DRB1*01:03L HLA-DRB1*04:05L HLA-DRB1*01:02L HLA-DRB1*08:01L HLA-DPA1*02:01-B1*13:01L HLA-DQA1*03:01-B1*03:02L HLA-DRB1*16:01L HLA-DRB1*04:08L HLA-DQA1*02:01-B1*03:03L
DPIHSLRVCVDTVR

SEQ ID NO: 15534 - protein, 14 aa, Severe acute respiratory syndrome coronavirus 2
  REGION 1..14: note = Table B: HLA-DRB1*01:03L HLA-DRB1*04:08L
IHSLRVCVDTVRTN

SEQ ID NO: 15535 - protein, 13 aa, Severe acute respiratory syndrome coronavirus 2
  REGION 1..13: note = Table B: HLA-DRB1*01:03L HLA-DRB1*01:02L HLA-DPA1*03:01-B1*04:02L HLA-DRB1*12:01L HLA-DRB1*16:01L HLA-DRB1*04:08L HLA-DRB1*15:03L
TVRTNVYLAVFDK

SEQ ID NO: 15536 - protein, 11 aa, Severe acute respiratory syndrome coronavirus 2
  REGION 1..11: note = Table B: HLA-DRB1*01:03L HLA-DPA1*01:03-B1*03:01L HLA-DPA1*03:01-B1*04:02L HLA-DQA1*01-B1*05L HLA-DPA1*01:03-B1*04:01L HLA-DPA1*01:03-B1*04:02L HLA-DRB1*12:01L HLA-DRB1*16:01L HLA-DQA1*01:03-B1*06:01L
  REGION 1..11: note = CONT. FROM ABOVE: HLA-DRB1*04:08L HLA-DQA1*02:01-B1*03:03L
DKLVSSFLEMK

SEQ ID NO: 15537 - protein, 13 aa, Severe acute respiratory syndrome coronavirus 2
  REGION 1..13: note = Table B: HLA-DRB1*01:03L HLA-DRB1*04:02L HLA-DRB1*04:05L HLA-DRB1*08:01L HLA-DQA1*02:01-B1*03:03L
EKQVEQKIAEIPK

SEQ ID NO: 15538 - protein, 15 aa, Severe acute respiratory syndrome coronavirus 2
  REGION 1..15: note = Table B: HLA-DRB1*01:03L HLA-DRB1*04:04L HLA-DRB1*04:05L HLA-DRB1*14:01L HLA-DQA1*01:01-B1*05:01L HLA-DRB1*04:10L HLA-DPA1*02:01-B1*13:01L HLA-DPA1*03:01-B1*105:01L HLA-DPA1*01:02-B1*04:01L
IPKEEVKPFITESKP

SEQ ID NO: 15539 - protein, 13 aa, Severe acute respiratory syndrome coronavirus 2
  REGION 1..13: note = Table B: HLA-DRB1*01:03L HLA-DRB1*04:04L HLA-DRB1*04:05L HLA-DRB4*03:01NL HLA-DRB1*14:01L HLA-DRB1*04:10L HLA-DPA1*03:01-B1*105:01L HLA-DRB1*14:54L HLA-DPA1*01:02-B1*04:01L
EEVKPFITESKPS

SEQ ID NO: 15540 - protein, 12 aa, Severe acute respiratory syndrome coronavirus 2
  REGION 1..12: note = Table B: HLA-DRB1*01:03L HLA-DRB1*04:05L HLA-DQA1*01:02-B1*06:02L HLA-DRB1*01:02L HLA-DRB1*08:04L HLA-DRB1*14:01L HLA-DRB1*11:04L HLA-DRB1*14:02L HLA-DRB1*08:01L HLA-DRB1*12:01L HLA-DPA1*03:01-B1*105:01L HLA-DRB1*04:08L
  REGION 1..12: note = CONT. FROM ABOVE: HLA-DRB1*15:03L
PFITESKPSVEQ

SEQ ID NO: 15541 - protein, 11 aa, Severe acute respiratory syndrome coronavirus 2
  REGION 1..11: note = Table B: HLA-DRB1*01:03L HLA-DRB1*14:01L HLA-DRB1*12:02L
ITESKPSVEQR

SEQ ID NO: 15542 - protein, 12 aa, Severe acute respiratory syndrome coronavirus 2
  REGION 1..12: note = Table B: HLA-DRB1*01:03L HLA-DRB1*08:01L HLA-DRB1*04:08L
PSVEQRKQDDKK

SEQ ID NO: 15543 - protein, 15 aa, Severe acute respiratory syndrome coronavirus 2
  REGION 1..15: note = Table B: HLA-DRB1*01:03L HLA-DRB1*04:05L HLA-DQA1*01:02-B1*06:02L HLA-DPA1*03:01-B1*04:02L HLA-DRB1*14:01L HLA-DRB1*12:01L HLA-DRB1*04:08L
ENLLLYIDINGNLHP

SEQ ID NO: 15544 - protein, 12 aa, Severe acute respiratory syndrome coronavirus 2
  REGION 1..12: note = Table B: HLA-DRB1*01:03L HLA-DRB1*04:05L HLA-DRB1*01:02L HLA-DRB4*03:01NL HLA-DRB1*08:04L HLA-DRB1*08:77L HLA-DRB3*02:01L HLA-DPA1*01:03-B1*03:01L HLA-DRB1*03:01L HLA-DRB1*11:03L HLA-DRB1*11:04L HLA-DRB1*14:02L HLA-DRB1*11:01L HLA-DRB5*01:01L
  REGION 1..12: note = CONT. FROM ABOVE: HLA-DRB1*13:01L HLA-DRB1*04:10L HLA-DRB1*09:01 L HLA-DRB1*12:02L HLA-DRB3*01:01L HLA-DPA1*03:01-B1*105:01L HLA- DRB1*14:54L HLA-DRB1*14:17L HLA-DRB1*07:01L HLA-DRB1*10:01L HLA- DRB1*04:08L HLA-DRB1*08:03L HLA-DRB1*15:03L
GNLHPDSATLVS

SEQ ID NO: 15545 - protein, 12 aa, Severe acute respiratory syndrome coronavirus 2
  REGION 1..12: note = Table B: HLA-DRB1*01:03L HLA-DRB1*04:02L HLA-DRB1*01:02L HLA-DRB4*03:01NL HLA-DRB1*08:04L HLA-DRB1*08:77L HLA-DRB3*02:01L HLA-DPA1*01:03-B1*03:01L HLA-DRB1*03:01L HLA-DRB1*11:03L HLA-DRB1*11:04L HLA-DRB1*14:02L HLA-DRB1*12:01L HLA-DRB1*12:02L
  REGION 1..12: note = CONT. FROM ABOVE: HLA-DRB3*01:01L HLA-DQA1*03:01-B1*03:02L HLA-D RB1*14:54L HLA-DQA1*02:01-B1*03:03L HLA-DRB1*15:03L
NLHPDSATLVSD

SEQ ID NO: 15546 - protein, 14 aa, Severe acute respiratory syndrome coronavirus 2
  REGION 1..14: note = Table B: HLA-DRB1*01:03L HLA-DRB1*04:02L HLA-DRB1*04:05L HLA-DRB1*08:01L HLA-DRB1*12:01L HLA-DPA1*02:01-B1*13:01L HLA-DRB1*04:08L
HPDSATLVSDIDIT

SEQ ID NO: 15547 - protein, 12 aa, Severe acute respiratory syndrome coronavirus 2
  REGION 1..12: note = Table B: HLA-DRB1*01:03L HLA-DRB1*01:02L HLA-DRB1*04:10L HLA-DRB1*04:08L
IVGDVVQEGVLT

SEQ ID NO: 15548 - protein, 15 aa, Severe acute respiratory syndrome coronavirus 2
  REGION 1..15: note = Table B: HLA-DRB1*01:03L HLA-DRB1*04:05L HLA-DPA1*01:03-B1*03:01L HLA-DQA1*01:01-B1*05:01L HLA-DRB1*12:01L HLA-DRB1*04:08L
DVVQEGVLTAVVIPT

SEQ ID NO: 15549 - protein, 13 aa, Severe acute respiratory syndrome coronavirus 2
  REGION 1..13: note = Table B: HLA-DRB1*01:03L HLA-DRB1*16:01L HLA-DRB1*04:08L
GGTTEMLAKALRK

SEQ ID NO: 15550 - protein, 13 aa, Severe acute respiratory syndrome coronavirus 2
  REGION 1..13: note = Table B: HLA-DRB1*01:03L HLA-DQA1*01:02-B1*06:02L HLA-DRB1*14:01L HLA-DRB1*08:01L HLA-DRB1*04:08L
TEMLAKALRKVPT

SEQ ID NO: 15551 - protein, 13 aa, Severe acute respiratory syndrome coronavirus 2
  REGION 1..13: note = Table B: HLA-DRB1*01:03L HLA-DRB1*04:04L HLA-DRB1*01:02L HLA-DRB1*12:01L HLA-DRB1*14:54L HLA-DRB1*04:08L HLA-DRB1*15:03L
QGLNGYTVEEAKT

SEQ ID NO: 15552 - protein, 16 aa, Severe acute respiratory syndrome coronavirus 2
  REGION 1..16: note = Table B: HLA-DRB1*01:03L HLA-DRB1*14:01L HLA-DRB1*04:08L
KTVLKKCKSAFYILPS

SEQ ID NO: 15553 - protein, 15 aa, Severe acute respiratory syndrome coronavirus 2
  REGION 1..15: note = Table B: HLA-DRB1*01:03L HLA-DPA1*02:01-B1*13:01L HLA-DPA1*03:01-B1*105:01L HLA-DRB1*16:01L HLA-DRB1*15:03L
VSWNLREMLAHAEET

SEQ ID NO: 15554 - protein, 12 aa, Severe acute respiratory syndrome coronavirus 2
  REGION 1..12: note = Table B: HLA-DRB1*01:03L HLA-DQA1*01:02-B1*06:02L HLA-DRB1*01:02L HLA-DRB1*14:01L HLA-DPA1*03:01-B1*105:01L HLA-DRB1*04:08L HLA-DRB1*15:03L
EMLAHAEETRKL

SEQ ID NO: 15555 - protein, 15 aa, Severe acute respiratory syndrome coronavirus 2
  REGION 1..15: note = Table B: HLA-DRB1*01:03L HLA-DRB1*01:01L HLA-DRB3*01:01L HLA-DRB1*16:01L
AEETRKLMPVCVETK

SEQ ID NO: 15556 - protein, 12 aa, Severe acute respiratory syndrome coronavirus 2
  REGION 1..12: note = Table B: HLA-DRB1*01:03L HLA-DRB1*04:02L HLA-DRB1*04:05L HLA-DQA1*01:01-B1*05:01L HLA-DRB1*14:17L HLA-DRB1*04:08L
VETKAIVSTIQR

SEQ ID NO: 15557 - protein, 11 aa, Severe acute respiratory syndrome coronavirus 2
  REGION 1..11: note = Table B: HLA-DRB1*01:03L HLA-DRB1*01:02L HLA-DRB1*08:01L HLA-DQA1*03:01-B1*03:02L HLA-DRB1*16:01L HLA-DRB1*04:08L
RKYKGIKIQEG

SEQ ID NO: 15558 - protein, 11 aa, Severe acute respiratory syndrome coronavirus 2
  REGION 1..11: note = Table B: HLA-DRB1*01:03L HLA-DRB1*04:05L HLA-DRB1*01:02L HLA-DRB4*03:01NL HLA-DRB1*14:01L HLA-DQA1*01:01-B1*05:01L HLA-DQA1*05:05-B1*03:19L HLA-DRB1*04:10L HLA-DRB1*12:01L HLA-DRB1*14:54L HLA-DRB1*14:17L HLA-DRB1*16:01L HLA-DRB1*04:08L
  REGION 1..11: note = CONT. FROM ABOVE: HLA-DRB1*15:03L
KGIKIQEGVVD

SEQ ID NO: 15559 - protein, 10 aa, Severe acute respiratory syndrome coronavirus 2
  REGION 1..10: note = Table B: HLA-DRB1*01:03L HLA-DQA1*01:02-B1*06:02L HLA-DPA1*01:03-B1*03:01L HLA-DQA1*05:05-B1*03:19L HLA-DQA1*05:01-B1*02:01L HLA-DRB1*16:01L HLA-DQA1*02:01-B1*03:03L
IKIQEGVVDY

SEQ ID NO: 15560 - protein, 12 aa, Severe acute respiratory syndrome coronavirus 2
  REGION 1..12: note = Table B: HLA-DRB1*01:03L HLA-DRB1*04:05L HLA-DRB1*01:02L HLA-DRB1*08:01L HLA-DQA1*01-B1*05L HLA-DRB1*12:01L HLA-DQA1*03:01-B1*03:02L HLA-DPA1*01:02-B1*04:01L HLA-DRB1*16:01L HLA-DRB1*04:08L HLA-DQA1*02:01-B1*03:03L
  REGION 1..12: note = CONT. FROM ABOVE: HLA-DRB1*15:03L
GARFYFYTSKTT

SEQ ID NO: 15561 - protein, 14 aa, Severe acute respiratory syndrome coronavirus 2
  REGION 1..14: note = Table B: HLA-DRB1*01:03L HLA-DPA1*01:03-B1*04:02L HLA-DRB1*12:01L HLA-DRB1*04:08L
MPLGYVTHGLNLEE

SEQ ID NO: 15562 - protein, 14 aa, Severe acute respiratory syndrome coronavirus 2
  REGION 1..14: note = Table B: HLA-DRB1*01:03L HLA-DRB1*01:02L HLA-DRB1*16:01L HLA-DRB1*15:03L
EEAARYMRSLKVPA

SEQ ID NO: 15563 - protein, 12 aa, Severe acute respiratory syndrome coronavirus 2
  REGION 1..12: note = Table B: HLA-DRB1*01:03L HLA-DRB1*04:05L HLA-DRB1*01:02L HLA-DRB1*08:01L HLA-DQA1*01-B1*05L HLA-DRB1*04:10L HLA-DRB1*12:01L HLA-DRB1*14:54L HLA-DQA1*05:05-B1*03:01L HLA-DRB1*10:01L HLA-DRB1*16:01L HLA-DRB1*04:08L HLA-DRB1*15:03L
TAYNGYLTSSSK

SEQ ID NO: 15564 - protein, 13 aa, Severe acute respiratory syndrome coronavirus 2
  REGION 1..13: note = Table B: HLA-DRB1*01:03L HLA-DRB1*04:02L HLA-DRB1*04:04L HLA-DRB1*04:05L HLA-DRB1*08:04L HLA-DRB3*02:01L HLA-DRB1*14:01L HLA-DPA1*01:02-B1*04:01L HLA-DRB1*04:08L
EHFIETISLAGSY

SEQ ID NO: 15565 - protein, 12 aa, Severe acute respiratory syndrome coronavirus 2
  REGION 1..12: note = Table B: HLA-DRB1*01:03L HLA-DRB1*04:04L HLA-DRB1*04:05L HLA-DRB1*08:04L HLA-DRB1*04:10L HLA-DRB1*10:01L HLA-DRB1*04:08L HLA-DRB1*15:03L
FIETISLAGSYK

SEQ ID NO: 15566 - protein, 12 aa, Severe acute respiratory syndrome coronavirus 2
  REGION 1..12: note = Table B: HLA-DRB1*01:03L HLA-DRB1*04:04L HLA-DRB1*04:05L HLA-DRB1*08:04L HLA-DPA1*01:03-B1*03:01L HLA-DQA1*01:01-B1*05:01L HLA-DQA1*01-B1*05L HLA-DRB1*04:10L HLA-DRB1*10:01L HLA-DRB1*16:01L HLA-DRB1*04:08L HLA-DRB1*08:03L
  REGION 1..12: note = CONT. FROM ABOVE: HLA-DRB1*15:03L
IETISLAGSYKD

SEQ ID NO: 15567 - protein, 15 aa, Severe acute respiratory syndrome coronavirus 2
  REGION 1..15: note = Table B: HLA-DRB1*01:03L HLA-DRB1*08:04L HLA-DRB1*08:01L
ISLAGSYKDWSYSGQ

SEQ ID NO: 15568 - protein, 13 aa, Severe acute respiratory syndrome coronavirus 2
  REGION 1..13: note = Table B: HLA-DRB1*01:03L HLA-DRB1*04:02L HLA-DRB1*04:05L HLA-DRB1*01:02L HLA-DPA1*01:03-B1*03:01L HLA-DQA1*01:01-B1*05:01L HLA-DRB1*08:01L HLA-DPA1*01:03-B1*04:02L HLA-DRB1*16:01L HLA-DRB1*04:08L
KDWSYSGQSTQLG

SEQ ID NO: 15569 - protein, 13 aa, Severe acute respiratory syndrome coronavirus 2
  REGION 1..13: note = Table B: HLA-DRB1*01:03L HLA-DRB1*01:02L HLA-DRB1*16:01L HLA-DQA1*01:03-B1*06:01L HLA-DQA1*02:01-B1*03:03L
TQLGIEFLKRGDK

SEQ ID NO: 15570 - protein, 12 aa, Severe acute respiratory syndrome coronavirus 2
  REGION 1..12: note = Table B: HLA-DRB1*01:03L HLA-DQA1*01:02-B1*06:02L HLA-DRB1*01:02L HLA-DRB1*14:01L HLA-DRB1*16:01L
LGIEFLKRGDKS

SEQ ID NO: 15571 - protein, 10 aa, Severe acute respiratory syndrome coronavirus 2
  REGION 1..10: note = Table B: HLA-DRB1*01:03L HLA-DQA1*01:02-B1*06:02L HLA-DRB1*03:01L HLA-DRB1*14:02L HLA-DRB1*11:01L HLA-DPA1*01:03-B1*04:02L HLA-DQA1*02:01-B1*03:03L
FLKRGDKSVY

SEQ ID NO: 15572 - protein, 13 aa, Severe acute respiratory syndrome coronavirus 2
  REGION 1..13: note = Table B: HLA-DRB1*01:03L HLA-DRB1*04:04L HLA-DQA1*01:02-B1*06:02L HLA-DRB1*01:02L HLA-DRB1*08:01L HLA-DRB1*16:01L HLA-DRB1*04:08L HLA-DQA1*02:01-B1*03:03L HLA-DRB1*15:03L
DNLKTLLSLREVR

SEQ ID NO: 15573 - protein, 13 aa, Severe acute respiratory syndrome coronavirus 2
  REGION 1..13: note = Table B: HLA-DRB1*01:03L HLA-DRB1*12:01L HLA-DRB1*16:01L HLA-DRB1*04:08L
KTLLSLREVRTIK

SEQ ID NO: 15574 - protein, 13 aa, Severe acute respiratory syndrome coronavirus 2
  REGION 1..13: note = Table B: HLA-DRB1*01:03L HLA-DRB1*12:01L HLA-DRB1*04:08L
LSLREVRTIKVFT

SEQ ID NO: 15575 - protein, 12 aa, Severe acute respiratory syndrome coronavirus 2
  REGION 1..12: note = Table B: HLA-DRB1*01:03L HLA-DRB1*01:02L HLA-DRB1*16:01L HLA-DRB1*04:08L
TKIKPHNSHEGK

SEQ ID NO: 15576 - protein, 10 aa, Severe acute respiratory syndrome coronavirus 2
  REGION 1..10: note = Table B: HLA-DRB1*01:03L HLA-DPA1*03:01-B1*04:02L HLA-DPA1*01:03-B1*04:01L HLA-DPA1*01:03-B1*04:02L HLA-DPA1*03:01-B1*105:01L HLA-DPA1*01:02-B1*04:01L HLA-DRB1*16:01L HLA-DRB1*04:08L
LRVEAFEYYH

SEQ ID NO: 15577 - protein, 14 aa, Severe acute respiratory syndrome coronavirus 2
  REGION 1..14: note = Table B: HLA-DRB1*01:03L HLA-DRB1*01:02L HLA-DRB1*08:01L HLA-DRB1*12:01L HLA-DRB1*16:01L HLA-DRB1*04:08L HLA-DQA1*02:01-B1*03:03L HLA-DRB1*15:03L
DPSFLGRYMSALNH

SEQ ID NO: 15578 - protein, 11 aa, Severe acute respiratory syndrome coronavirus 2
  REGION 1..11: note = Table B: HLA-DRB1*01:03L
GRYMSALNHTK

SEQ ID NO: 15579 - protein, 14 aa, Severe acute respiratory syndrome coronavirus 2
  REGION 1..14: note = Table B: HLA-DRB1*01:03L HLA-DQA1*01:02-B1*06:02L HLA-DRB1*08:04L HLA-DRB1*11:01L
ALNHTKKWKYPQVN

SEQ ID NO: 15580 - protein, 14 aa, Severe acute respiratory syndrome coronavirus 2
  REGION 1..14: note = Table B: HLA-DRB1*01:03L HLA-DQA1*01:02-B1*06:02L HLA-DRB1*14:01L HLA-DRB1*11:04L
LNHTKKWKYPQVNG

SEQ ID NO: 15581 - protein, 14 aa, Severe acute respiratory syndrome coronavirus 2
  REGION 1..14: note = Table B: HLA-DRB1*01:03L HLA-DRB1*04:05L HLA-DQA1*01:02-B1*06:02L HLA-DRB1*15:03L
TKKWKYPQVNGLTS

SEQ ID NO: 15582 - protein, 14 aa, Severe acute respiratory syndrome coronavirus 2
  REGION 1..14: note = Table B: HLA-DRB1*01:03L HLA-DRB1*04:05L HLA-DRB1*04:08L
LTSIKWADNNCYLA

SEQ ID NO: 15583 - protein, 13 aa, Severe acute respiratory syndrome coronavirus 2
  REGION 1..13: note = Table B: HLA-DRB1*01:03L HLA-DRB1*04:04L HLA-DPA1*01:03-B1*03:01L HLA-DRB1*11:03L HLA-DQA1*01-B1*05L HLA-DRB1*04:10L HLA-DPA1*02:01-B1*13:01L HLA-DRB1*14:54L HLA-DRB1*07:01L HLA-DRB1*10:01L
ATALLTLQQIELK

SEQ ID NO: 15584 - protein, 16 aa, Severe acute respiratory syndrome coronavirus 2
  REGION 1..16: note = Table B: HLA-DRB1*01:03L HLA-DPA1*01:03-B1*03:01L HLA-DRB1*14:02L HLA-DPA1*01:03-B1*04:02L HLA-DPA1*02:01-B1*13:01L
TALLTLQQIELKFNPP

SEQ ID NO: 15585 - protein, 13 aa, Severe acute respiratory syndrome coronavirus 2
  REGION 1..13: note = Table B: HLA-DRB1*01:03L HLA-DRB1*04:04L HLA-DQA1*01:02-B1*06:02L HLA-DRB1*01:02L HLA-DRB1*11:04L HLA-DRB1*08:01L HLA-DQA1*01-B1*05L HLA-DRB1*04:10L HLA-DRB1*12:01L HLA-DRB1*14:54L HLA-DRB1*04:08L HLA-DRB1*15:03L
QQIELKFNPPALQ

SEQ ID NO: 15586 - protein, 15 aa, Severe acute respiratory syndrome coronavirus 2
  REGION 1..15: note = Table B: HLA-DRB1*01:03L HLA-DRB1*01:02L HLA-DRB1*08:01L HLA-DPA1*01:02-B1*04:01L HLA-DRB1*16:01L HLA-DQA1*01:03-B1*06:01L HLA-DRB1*04:08L HLA-DQA1*02:01-B1*03:03L
NPPALQDAYYRARAG

SEQ ID NO: 15587 - protein, 16 aa, Severe acute respiratory syndrome coronavirus 2
  REGION 1..16: note = Table B: HLA-DRB1*01:03L HLA-DRB1*01:02L HLA-DRB1*04:08L
ILAYCNKTVGELGDVR

SEQ ID NO: 15588 - protein, 14 aa, Severe acute respiratory syndrome coronavirus 2
  REGION 1..14: note = Table B: HLA-DRB1*01:03L HLA-DRB1*04:08L
LGDVRETMSYLFQH

SEQ ID NO: 15589 - protein, 14 aa, Severe acute respiratory syndrome coronavirus 2
  REGION 1..14: note = Table B: HLA-DRB1*01:03L HLA-DPA1*02:01-B1*13:01L HLA-DRB1*04:08L
GDVRETMSYLFQHA

SEQ ID NO: 15590 - protein, 11 aa, Severe acute respiratory syndrome coronavirus 2
  REGION 1..11: note = Table B: HLA-DRB1*01:03L HLA-DQA1*01:02-B1*06:02L HLA-DRB1*01:02L HLA-DQA1*03:01-B1*03:02L HLA-DRB1*16:01L HLA-DRB1*04:08L HLA-DQA1*02:01-B1*03:03L
FQHANLDSCKR

SEQ ID NO: 15591 - protein, 10 aa, Severe acute respiratory syndrome coronavirus 2
  REGION 1..10: note = Table B: HLA-DRB1*01:03L HLA-DPA1*03:01-B1*04:02L HLA-DPA1*01:03-B1*04:01L HLA-DPA1*03:01-B1*105:01L HLA-DQA1*03:01-B1*03:02L HLA-DPA1*01:02-B1*04:01L HLA-DRB1*16:01L HLA-DQA1*01:03-B1*06:01L HLA-DRB1*04:08L
  REGION 1..10: note = CONT. FROM ABOVE: HLA-DQA1*02:01-B1*03:03L
TLSYEQFKKG

SEQ ID NO: 15592 - protein, 14 aa, Severe acute respiratory syndrome coronavirus 2
  REGION 1..14: note = Table B: HLA-DRB1*01:03L HLA-DRB1*15:03L
SYEQFKKGVQIPCT

SEQ ID NO: 15593 - protein, 14 aa, Severe acute respiratory syndrome coronavirus 2
  REGION 1..14: note = Table B: HLA-DRB1*01:03L HLA-DRB1*01:02L HLA-DRB1*08:01L HLA-DRB1*04:08L
SEYTGNYQCGHYKH

SEQ ID NO: 15594 - protein, 12 aa, Severe acute respiratory syndrome coronavirus 2
  REGION 1..12: note = Table B: HLA-DRB1*01:03L HLA-DQA1*01:02-B1*06:02L HLA-DRB1*01:02L HLA-DRB1*08:01L HLA-DRB1*11:01L HLA-DPA1*01:03-B1*04:01L HLA-DPA1*01:03-B1*04:02L HLA-DRB1*12:01L HLA-DPA1*01:03-B1*02:01L
  REGION 1..12: note = CONT. FROM ABOVE: HLA-DQA1*01:03-B1*06:01L HLA-DRB1*15:03L
GNYQCGHYKHIT

SEQ ID NO: 15595 - protein, 12 aa, Severe acute respiratory syndrome coronavirus 2
  REGION 1..12: note = Table B: HLA-DRB1*01:03L
NYQCGHYKHITS

SEQ ID NO: 15596 - protein, 10 aa, Severe acute respiratory syndrome coronavirus 2
  REGION 1..10: note = Table B: HLA-DRB1*01:03L HLA-DRB1*04:05L HLA-DRB1*01:02L HLA-DRB1*08:01L HLA-DQA1*03:01-B1*03:02L HLA-DPA1*01:02-B1*04:01L HLA-DRB1*16:01L HLA-DRB1*04:08L HLA-DQA1*02:01-B1*03:03L
HYKHITSKET

SEQ ID NO: 15597 - protein, 15 aa, Severe acute respiratory syndrome coronavirus 2
  REGION 1..15: note = Table B: HLA-DRB1*01:03L HLA-DRB1*04:05L HLA-DRB1*08:04L HLA-DRB1*08:01L HLA-DRB1*12:01L HLA-DPA1*02:01-B1*13:01L HLA-DRB1*16:01L HLA-DRB1*04:08L
GALLTKSSEYKGPIT

SEQ ID NO: 15598 - protein, 14 aa, Severe acute respiratory syndrome coronavirus 2
  REGION 1..14: note = Table B: HLA-DRB1*01:03L HLA-DRB1*04:08L
DVFYKENSYTTTIK

SEQ ID NO: 15599 - protein, 14 aa, Severe acute respiratory syndrome coronavirus 2
  REGION 1..14: note = Table B: HLA-DRB1*01:03L HLA-DRB1*01:02L HLA-DRB1*12:01L HLA-DRB1*16:01L HLA-DRB1*04:08L HLA-DRB1*15:03L
KPVTYKLDGVVCTE

SEQ ID NO: 15600 - protein, 14 aa, Severe acute respiratory syndrome coronavirus 2
  REGION 1..14: note = Table B: HLA-DRB1*01:03L HLA-DRB1*01:02L HLA-DPA1*03:01-B1*105:01L
YKLDGVVCTEIDPK

SEQ ID NO: 15601 - protein, 14 aa, Severe acute respiratory syndrome coronavirus 2
  REGION 1..14: note = Table B: HLA-DRB1*01:03L HLA-DRB1*08:04L HLA-DPA1*03:01-B1*04:02L HLA-DPA1*01:03-B1*04:02L HLA-DPA1*02:01-B1*13:01L HLA-DRB1*15:03L
ASFDNFKFVCDNIK

SEQ ID NO: 15602 - protein, 13 aa, Severe acute respiratory syndrome coronavirus 2
  REGION 1..13: note = Table B: HLA-DRB1*01:03L HLA-DQA1*01:02-B1*06:02L HLA-DRB1*14:01L HLA-DQA1*01-B1*05L HLA-DRB1*12:01L HLA-DPA1*03:01-B1*105:01L HLA-DRB1*16:01L HLA-DRB1*04:08L
DNFKFVCDNIKFA

SEQ ID NO: 15603 - protein, 12 aa, Severe acute respiratory syndrome coronavirus 2
  REGION 1..12: note = Table B: HLA-DRB1*01:03L HLA-DRB1*04:04L HLA-DRB1*04:10L HLA-DRB1*04:08L
NIKFADDLNQLT

SEQ ID NO: 15604 - protein, 10 aa, Severe acute respiratory syndrome coronavirus 2
  REGION 1..10: note = Table B: HLA-DRB1*01:03L HLA-DQA1*03:01-B1*03:02L HLA-DRB1*16:01L HLA-DQA1*02:01-B1*03:03L
TGYKKPASRE

SEQ ID NO: 15605 - protein, 10 aa, Severe acute respiratory syndrome coronavirus 2
  REGION 1..10: note = Table B: HLA-DRB1*01:03L HLA-DQA1*03:01-B1*03:02L
YKKPASRELK

SEQ ID NO: 15606 - protein, 12 aa, Severe acute respiratory syndrome coronavirus 2
  REGION 1..12: note = Table B: HLA-DRB1*01:03L HLA-DPA1*01:03-B1*04:02L HLA-DRB1*12:01L HLA-DRB1*04:08L HLA-DRB1*15:03L
SRELKVTFFPDL

SEQ ID NO: 15607 - protein, 12 aa, Severe acute respiratory syndrome coronavirus 2
  REGION 1..12: note = Table B: HLA-DRB1*01:03L HLA-DQA1*01:02-B1*06:02L HLA-DRB1*01:02L HLA-DPA1*01:03-B1*03:01L HLA-DRB1*08:01L HLA-DRB1*12:01L HLA-DPA1*02:01-B1*13:01L HLA-DRB1*04:08L HLA-DQA1*02:01-B1*03:03L HLA-DRB1*15:03L
RELKVTFFPDLN

SEQ ID NO: 15608 - protein, 12 aa, Severe acute respiratory syndrome coronavirus 2
  REGION 1..12: note = Table B: HLA-DRB1*01:03L HLA-DRB1*04:04L HLA-DQA1*01:02-B1*06:02L HLA-DRB1*01:02L HLA-DPA1*03:01-B1*04:02L HLA-DRB1*14:01L HLA-DRB1*12:01L HLA-DPA1*02:01-B1*13:01L HLA-DPA1*03:01-B1*105:01L
  REGION 1..12: note = CONT. FROM ABOVE: HLA-DRB1*14:54L HLA-DRB1*04:08L
KVTFFPDLNGDV

SEQ ID NO: 15609 - protein, 13 aa, Severe acute respiratory syndrome coronavirus 2
  REGION 1..13: note = Table B: HLA-DRB1*01:03L HLA-DRB1*04:02L HLA-DRB1*04:05L HLA-DRB1*04:08L
PDLNGDVVAIDYK

SEQ ID NO: 15610 - protein, 11 aa, Severe acute respiratory syndrome coronavirus 2
  REGION 1..11: note = Table B: HLA-DRB1*01:03L HLA-DRB1*08:01L HLA-DPA1*01:02-B1*04:01L HLA-DRB1*04:08L
IDYKHYTPSFK

SEQ ID NO: 15611 - protein, 11 aa, Severe acute respiratory syndrome coronavirus 2
  REGION 1..11: note = Table B: HLA-DRB1*01:03L HLA-DRB1*01:02L HLA-DRB1*16:01L
YKHYTPSFKKG

SEQ ID NO: 15612 - protein, 10 aa, Severe acute respiratory syndrome coronavirus 2
  REGION 1..10: note = Table B: HLA-DRB1*01:03L
YTPSFKKGAK

SEQ ID NO: 15613 - protein, 13 aa, Severe acute respiratory syndrome coronavirus 2
  REGION 1..13: note = Table B: HLA-DRB1*01:03L HLA-DRB1*01:02L HLA-DRB1*11:04L HLA-DRB1*08:01L HLA-DRB1*11:01L HLA-DRB1*16:01L HLA-DRB1*04:08L
TPSFKKGAKLLHK

SEQ ID NO: 15614 - protein, 13 aa, Severe acute respiratory syndrome coronavirus 2
  REGION 1..13: note = Table B: HLA-DRB1*01:03L HLA-DRB1*08:01L HLA-DRB1*11:01L HLA-DRB1*04:08L
PSFKKGAKLLHKP

SEQ ID NO: 15615 - protein, 14 aa, Severe acute respiratory syndrome coronavirus 2
  REGION 1..14: note = Table B: HLA-DRB1*01:03L HLA-DRB1*04:08L
KKGAKLLHKPIVWH

SEQ ID NO: 15616 - protein, 12 aa, Severe acute respiratory syndrome coronavirus 2
  REGION 1..12: note = Table B: HLA-DRB1*01:03L HLA-DRB1*04:05L HLA-DRB1*01:02L HLA-DRB1*12:01L HLA-DRB1*16:01L HLA-DRB1*04:08L HLA-DQA1*02:01-B1*03:03L HLA-DRB1*15:03L
PIVWHVNNATNK

SEQ ID NO: 15617 - protein, 13 aa, Severe acute respiratory syndrome coronavirus 2
  REGION 1..13: note = Table B: HLA-DRB1*01:03L HLA-DRB1*04:02L HLA-DRB1*04:05L HLA-DRB1*01:02L HLA-DPA1*01:03-B1*03:01L HLA-DQA1*01:01-B1*05:01L HLA-DPA1*02:01-B1*13:01L HLA-DRB1*07:01L HLA-DRB1*04:08L HLA-DRB1*15:03L
KPVETSNSFDVLK

SEQ ID NO: 15618 - protein, 12 aa, Severe acute respiratory syndrome coronavirus 2
  REGION 1..12: note = Table B: HLA-DRB1*01:03L HLA-DPA1*03:01-B1*04:02L HLA-DQA1*05:01-B1*02:01L HLA-DPA1*01:03-B1*04:01L HLA-DPA1*01:03-B1*04:02L HLA-DQA1*03:01-B1*03:02L HLA-DQA1*05:05-B1*03:01L HLA-DRB1*16:01L HLA-DRB1*04:08L
  REGION 1..12: note = CONT. FROM ABOVE: HLA-DQA1*02:01-B1*03:03L
DNLACEDLKPVS

SEQ ID NO: 15619 - protein, 13 aa, Severe acute respiratory syndrome coronavirus 2
  REGION 1..13: note = Table B: HLA-DRB1*01:03L HLA-DRB1*04:02L HLA-DQA1*01:02-B1*06:02L HLA-DRB4*03:01NL HLA-DRB1*04:10L HLA-DRB1*12:01L HLA-DPA1*02:01-B1*13:01L HLA-DRB1*14:17L
LKPVSEEVVENPT

SEQ ID NO: 15620 - protein, 15 aa, Severe acute respiratory syndrome coronavirus 2
  REGION 1..15: note = Table B: HLA-DRB1*01:03L HLA-DRB1*04:02L HLA-DRB1*04:05L HLA-DRB1*03:01L HLA-DRB1*11:02L HLA-DRB1*11:03L HLA-DRB1*11:04L HLA-DRB1*11:01L HLA-DRB3*01:01L HLA-DRB1*04:08L
KDVLECNVKTTEVVG

SEQ ID NO: 15621 - protein, 12 aa, Severe acute respiratory syndrome coronavirus 2
  REGION 1..12: note = Table B: HLA-DRB1*01:03L HLA-DRB1*04:05L HLA-DRB4*03:01NL HLA-DQA1*01:01-B1*05:01L HLA-DRB1*14:17L HLA-DRB1*16:01L HLA-DRB1*04:08L
EVVGDIILKPAN

SEQ ID NO: 15622 - protein, 12 aa, Severe acute respiratory syndrome coronavirus 2
  REGION 1..12: note = Table B: HLA-DRB1*01:03L HLA-DQA1*01:01-B1*05:01L HLA-DRB1*08:01L HLA-DRB1*04:08L
VVGDIILKPANN

SEQ ID NO: 15623 - protein, 15 aa, Severe acute respiratory syndrome coronavirus 2
  REGION 1..15: note = Table B: HLA-DRB1*01:03L HLA-DRB1*04:08L
IKKPNELSRVLGLKT

SEQ ID NO: 15624 - protein, 15 aa, Severe acute respiratory syndrome coronavirus 2
  REGION 1..15: note = Table B: HLA-DRB1*01:03L HLA-DRB1*12:01L HLA-DRB1*04:08L
KPNELSRVLGLKTLA

SEQ ID NO: 15625 - protein, 11 aa, Severe acute respiratory syndrome coronavirus 2
  REGION 1..11: note = Table B: HLA-DRB1*01:03L HLA-DRB1*04:08L
RVLGLKTLATH

SEQ ID NO: 15626 - protein, 12 aa, Severe acute respiratory syndrome coronavirus 2
  REGION 1..12: note = Table B: HLA-DRB1*01:03L HLA-DRB1*04:02L HLA-DRB1*01:01L HLA-DRB1*04:08L
GLKTLATHGLAA

SEQ ID NO: 15627 - protein, 14 aa, Severe acute respiratory syndrome coronavirus 2
  REGION 1..14: note = Table B: HLA-DRB1*01:03L HLA-DRB1*12:01L HLA-DRB1*16:01L HLA-DRB1*04:08L HLA-DRB1*15:03L
TNIVTRCLNRVCTN

SEQ ID NO: 15628 - protein, 14 aa, Severe acute respiratory syndrome coronavirus 2
  REGION 1..14: note = Table B: HLA-DRB1*01:03L HLA-DRB1*01:02L HLA-DRB1*04:08L
LLQLCTFTRSTNSR

SEQ ID NO: 15629 - protein, 16 aa, Severe acute respiratory syndrome coronavirus 2
  REGION 1..16: note = Table B: HLA-DRB1*01:03L HLA-DRB1*08:04L HLA-DRB1*15:03L
AKNTVKSVGKFCLEAS

SEQ ID NO: 15630 - protein, 14 aa, Severe acute respiratory syndrome coronavirus 2
  REGION 1..14: note = Table B: HLA-DRB1*01:03L HLA-DQA1*01:02-B1*06:02L HLA-DRB1*01:02L HLA-DRB1*14:01L HLA-DPA1*02:01-B1*13:01L HLA-DPA1*03:01-B1*105:01L HLA-DRB1*16:01L HLA-DRB1*04:08L
VGKFCLEASFNYLK

SEQ ID NO: 15631 - protein, 13 aa, Severe acute respiratory syndrome coronavirus 2
  REGION 1..13: note = Table B: HLA-DRB1*01:03L HLA-DRB1*04:05L HLA-DRB1*14:02L HLA-DPA1*01:03-B1*04:01L HLA-DPA1*01:03-B1*04:02L HLA-DPA1*01:03-B1*104:01L HLA-DRB1*07:01L HLA-DRB1*10:01L HLA-DRB1*04:08L
SPNFSKLINIIIW

SEQ ID NO: 15632 - protein, 14 aa, Severe acute respiratory syndrome coronavirus 2
  REGION 1..14: note = Table B: HLA-DRB1*01:03L HLA-DRB1*04:04L HLA-DRB1*04:05L HLA-DRB1*01:02L HLA-DRB4*03:01NL HLA-DRB1*11:04L HLA-DRB1*12:01L HLA-DPA1*03:01-B1*105:01L HLA-DRB1*10:01L HLA-DRB1*16:01L HLA-DRB1*04:08L HLA-DRB1*15:03L
AALGVLMSNLGMPS

SEQ ID NO: 15633 - protein, 15 aa, Severe acute respiratory syndrome coronavirus 2
  REGION 1..15: note = Table B: HLA-DRB1*01:03L HLA-DRB1*04:02L HLA-DRB1*04:04L HLA-DRB1*04:05L HLA-DRB1*08:04L HLA-DRB3*02:01L HLA-DRB1*04:10L HLA-DPA1*01:03-B1*104:01L HLA-DRB1*16:01L HLA-DRB1*04:08L
YPSLETIQITISSFK

SEQ ID NO: 15634 - protein, 13 aa, Severe acute respiratory syndrome coronavirus 2
  REGION 1..13: note = Table B: HLA-DRB1*01:03L HLA-DRB1*04:02L HLA-DRB1*04:04L HLA-DRB1*04:05L HLA-DRB1*07:01L HLA-DRB1*04:08L
ETIQITISSFKWD

SEQ ID NO: 15635 - protein, 10 aa, Severe acute respiratory syndrome coronavirus 2
  REGION 1..10: note = Table B: HLA-DRB1*01:03L HLA-DQA1*01:02-B1*06:02L HLA-DRB1*14:02L HLA-DQA1*05:01-B1*02:01L HLA-DPA1*02:01-B1*13:01L HLA-DPA1*03:01-B1*105:01L HLA-DQA1*01:03-B1*06:01L HLA-DQA1*02:01-B1*03:03L
  REGION 1..10: note = CONT. FROM ABOVE: HLA-DRB1*15:03L
SSFKWDLTAF

SEQ ID NO: 15636 - protein, 12 aa, Severe acute respiratory syndrome coronavirus 2
  REGION 1..12: note = Table B: HLA-DRB1*01:03L HLA-DQA1*01:02-B1*06:02L HLA-DRB1*01:02L HLA-DPA1*01:03-B1*03:01L HLA-DRB1*14:01L HLA-DRB1*12:01L HLA-DPA1*01:03-B1*02:01L HLA-DRB1*04:08L HLA-DRB1*15:03L
FKWDLTAFGLVA

SEQ ID NO: 15637 - protein, 12 aa, Severe acute respiratory syndrome coronavirus 2
  REGION 1..12: note = Table B: HLA-DRB1*01:03L HLA-DQA1*01:02-B1*06:02L HLA-DRB1*01:02L HLA-DPA1*01:03-B1*03:01L HLA-DRB1*12:01L HLA-DPA1*01:03-B1*02:01L HLA-DRB1*04:08L HLA-DRB1*15:03L
KWDLTAFGLVAE

SEQ ID NO: 15638 - protein, 13 aa, Severe acute respiratory syndrome coronavirus 2
  REGION 1..13: note = Table B: HLA-DRB1*01:03L HLA-DRB1*01:02L HLA-DPA1*01:03-B1*03:01L HLA-DQA1*01-B1*05L HLA-DRB1*12:01L HLA-DPA1*01:03-B1*02:01L HLA-DRB1*16:01L HLA-DRB1*04:08L HLA-DRB1*15:03L
VAEWFLAYILFTR

SEQ ID NO: 15639 - protein, 12 aa, Severe acute respiratory syndrome coronavirus 2
  REGION 1..12: note = Table B: HLA-DRB1*01:03L HLA-DRB1*08:04L HLA-DPA1*01:03-B1*03:01L HLA-DRB1*08:01L HLA-DPA1*02:01-B1*13:01L HLA-DPA1*01:03-B1*02:01L
FSYFAVHFISNS

SEQ ID NO: 15640 - protein, 11 aa, Severe acute respiratory syndrome coronavirus 2
  REGION 1..11: note = Table B: HLA-DRB1*01:03L HLA-DRB1*08:01L HLA-DRB1*04:08L
SFYYVWKSYVH

SEQ ID NO: 15641 - protein, 12 aa, Severe acute respiratory syndrome coronavirus 2
  REGION 1..12: note = Table B: HLA-DRB1*01:03L HLA-DPA1*01:03-B1*04:02L HLA-DRB1*04:08L
FYYVWKSYVHVV

SEQ ID NO: 15642 - protein, 11 aa, Severe acute respiratory syndrome coronavirus 2
  REGION 1..11: note = Table B: HLA-DRB1*01:03L HLA-DQA1*01:02-B1*06:02L HLA-DRB1*01:02L HLA-DRB1*08:01L HLA-DPA1*01:03-B1*04:02L HLA-DRB1*12:01L HLA-DPA1*01:03-B1*02:01L HLA-DRB1*04:08L HLA-DQA1*02:01-B1*03:03L HLA-DRB1*15:03L
YVWKSYVHVVD

SEQ ID NO: 15643 - protein, 14 aa, Severe acute respiratory syndrome coronavirus 2
  REGION 1..14: note = Table B: HLA-DRB1*01:03L HLA-DRB1*04:04L HLA-DRB1*08:01L HLA-DRB1*12:01L HLA-DPA1*02:01-B1*13:01L HLA-DRB1*16:01L
KSYVHVVDGCNSST

SEQ ID NO: 15644 - protein, 14 aa, Severe acute respiratory syndrome coronavirus 2
  REGION 1..14: note = Table B: HLA-DRB1*01:03L HLA-DRB1*01:02L HLA-DRB1*14:01L HLA-DRB1*11:04L HLA-DRB1*08:01L HLA-DRB1*11:01L HLA-DRB3*01:01L HLA-DRB1*16:01L HLA-DRB1*04:08L
STCMMCYKRNRATR

SEQ ID NO: 15645 - protein, 14 aa, Severe acute respiratory syndrome coronavirus 2
  REGION 1..14: note = Table B: HLA-DRB1*01:03L HLA-DRB1*04:04L HLA-DRB1*04:05L HLA-DPA1*01:03-B1*03:01L HLA-DRB1*08:01L HLA-DRB1*12:01L HLA-DPA1*02:01-B1*13:01L HLA-DPA1*01:02-B1*04:01L HLA-DRB1*07:01L HLA-DRB1*16:01L HLA-DRB1*15:03L
ATRVECTTIVNGVR

SEQ ID NO: 15646 - protein, 14 aa, Severe acute respiratory syndrome coronavirus 2
  REGION 1..14: note = Table B: HLA-DRB1*01:03L
TRVECTTIVNGVRR

SEQ ID NO: 15647 - protein, 13 aa, Severe acute respiratory syndrome coronavirus 2
  REGION 1..13: note = Table B: HLA-DRB1*01:03L HLA-DRB1*04:05L HLA-DRB1*01:02L HLA-DRB1*16:01L HLA-DRB1*04:08L HLA-DQA1*02:01-B1*03:03L
VRRSFYVYANGGK

SEQ ID NO: 15648 - protein, 13 aa, Severe acute respiratory syndrome coronavirus 2
  REGION 1..13: note = Table B: HLA-DRB1*01:03L HLA-DRB1*01:02L HLA-DRB1*16:01L
KGFCKLHNWNCVN

SEQ ID NO: 15649 - protein, 15 aa, Severe acute respiratory syndrome coronavirus 2
  REGION 1..15: note = Table B: HLA-DRB1*01:03L HLA-DRB1*01:02L HLA-DRB1*11:01L HLA-DRB1*04:08L
VARDLSLQFKRPINP

SEQ ID NO: 15650 - protein, 14 aa, Severe acute respiratory syndrome coronavirus 2
  REGION 1..14: note = Table B: HLA-DRB1*01:03L HLA-DRB1*01:02L HLA-DRB1*04:08L HLA-DRB1*15:03L
DLSLQFKRPINPTD

SEQ ID NO: 15651 - protein, 12 aa, Severe acute respiratory syndrome coronavirus 2
  REGION 1..12: note = Table B: HLA-DRB1*01:03L HLA-DQA1*01:02-B1*06:02L HLA-DRB1*08:04L HLA-DRB1*04:10L HLA-DRB1*16:01L HLA-DRB1*04:08L HLA-DRB1*08:03L
LQFKRPINPTDQ

SEQ ID NO: 15652 - protein, 13 aa, Severe acute respiratory syndrome coronavirus 2
  REGION 1..13: note = Table B: HLA-DRB1*01:03L HLA-DRB1*04:04L HLA-DRB1*04:05L HLA-DRB1*01:02L HLA-DRB1*14:01L HLA-DRB1*12:01L HLA-DRB1*04:08L HLA-DRB1*15:01L
NGSIHLYFDKAGQ

SEQ ID NO: 15653 - protein, 10 aa, Severe acute respiratory syndrome coronavirus 2
  REGION 1..10: note = Table B: HLA-DRB1*01:03L HLA-DRB1*04:05L HLA-DQA1*01:02-B1*06:02L HLA-DPA1*02:01-B1*13:01L HLA-DRB1*16:01L HLA-DQA1*01:03-B1*06:01L HLA-DQA1*02:01-B1*03:03L
TYERHSLSHF

SEQ ID NO: 15654 - protein, 14 aa, Severe acute respiratory syndrome coronavirus 2
  REGION 1..14: note = Table B: HLA-DRB1*01:03L HLA-DRB1*04:04L HLA-DRB1*12:01L
RHSLSHFVNLDNLR

SEQ ID NO: 15655 - protein, 14 aa, Severe acute respiratory syndrome coronavirus 2
  REGION 1..14: note = Table B: HLA-DRB1*01:03L HLA-DRB1*04:02L HLA-DQA1*01:02-B1*06:02L HLA-DRB1*01:02L
DNLRANNTKGSLPI

SEQ ID NO: 15656 - protein, 14 aa, Severe acute respiratory syndrome coronavirus 2
  REGION 1..14: note = Table B: HLA-DRB1*01:03L HLA-DRB1*01:02L HLA-DRB1*12:01L
NLRANNTKGSLPIN

SEQ ID NO: 15657 - protein, 11 aa, Severe acute respiratory syndrome coronavirus 2
  REGION 1..11: note = Table B: HLA-DRB1*01:03L HLA-DRB1*03:01L HLA-DRB1*16:01L
IVFDGKSKCEE

SEQ ID NO: 15658 - protein, 15 aa, Severe acute respiratory syndrome coronavirus 2
  REGION 1..15: note = Table B: HLA-DRB1*01:03L HLA-DPA1*01:03-B1*04:01L HLA-DRB1*16:01L HLA-DRB1*04:08L
YSQLMCQPILLLDQA

SEQ ID NO: 15659 - protein, 12 aa, Severe acute respiratory syndrome coronavirus 2
  REGION 1..12: note = Table B: HLA-DRB1*01:03L HLA-DRB1*04:05L HLA-DPA1*01:03-B1*03:01L HLA-DRB1*14:01L HLA-DRB1*11:03L HLA-DRB1*11:04L HLA-DRB1*14:02L HLA-DRB5*01:01L HLA-DQA1*05:05-B1*03:19L HLA-DPA1*01:03-B1*04:01L
  REGION 1..12: note = CONT. FROM ABOVE: HLA-DRB1*04:10L HLA-DRB1*09:01L HLA-DRB1*12:02 L HLA-DRB1*14:54L HLA-DQA1*05:05-B1*03:01L HLA-DPA1*01:02-B1*04: 01L HLA-DRB1*04:08L
NTFSSTFNVPME

SEQ ID NO: 15660 - protein, 14 aa, Severe acute respiratory syndrome coronavirus 2
  REGION 1..14: note = Table B: HLA-DRB1*01:03L HLA-DRB1*04:04L HLA-DQA1*01:02-B1*06:02L HLA-DRB1*01:02L HLA-DRB1*16:01L HLA-DRB1*04:08L
NVPMEKLKTLVATA

SEQ ID NO: 15661 - protein, 11 aa, Severe acute respiratory syndrome coronavirus 2
  REGION 1..11: note = Table B: HLA-DRB1*01:03L
ISAARQGFVDS

SEQ ID NO: 15662 - protein, 12 aa, Severe acute respiratory syndrome coronavirus 2
  REGION 1..12: note = Table B: HLA-DRB1*01:03L HLA-DRB1*04:02L HLA-DRB1*04:05L HLA-DQA1*01:02-B1*06:02L HLA-DRB1*01:02L HLA-DQA1*01:01-B1*05:01L HLA-DRB1*12:01L HLA-DPA1*02:01-B1*13:01L HLA-DPA1*03:01-B1*105:01L
  REGION 1..12: note = CONT. FROM ABOVE: HLA-DRB1*04:08L HLA-DQA1*02:01-B1*03:03L HLA-D RB1*15:03L
AARQGFVDSDVE

SEQ ID NO: 15663 - protein, 13 aa, Severe acute respiratory syndrome coronavirus 2
  REGION 1..13: note = Table B: HLA-DRB1*01:03L HLA-DRB1*01:02L HLA-DQA1*01:01-B1*05:01L HLA-DRB1*04:10L HLA-DPA1*02:01-B1*13:01L HLA-DRB1*15:03L
ARQGFVDSDVETK

SEQ ID NO: 15664 - protein, 13 aa, Severe acute respiratory syndrome coronavirus 2
  REGION 1..13: note = Table B: HLA-DRB1*01:03L HLA-DRB1*04:05L HLA-DRB1*04:10L
LSHQSDIEVTGDS

SEQ ID NO: 15665 - protein, 14 aa, Severe acute respiratory syndrome coronavirus 2
  REGION 1..14: note = Table B: HLA-DRB1*01:03L HLA-DRB1*01:02L HLA-DRB1*08:04L HLA-DRB1*14:01L HLA-DRB1*11:04L HLA-DRB1*08:01L HLA-DRB1*11:01L HLA-DRB3*01:01L HLA-DRB1*04:08L
GACIDCSARHINAQ

SEQ ID NO: 15666 - protein, 12 aa, Severe acute respiratory syndrome coronavirus 2
  REGION 1..12: note = Table B: HLA-DRB1*01:03L HLA-DRB1*04:04L HLA-DRB1*01:02L HLA-DRB1*08:04L HLA-DPA1*01:03-B1*03:01L HLA-DRB1*08:01L HLA-DRB1*04:10L HLA-DRB1*04:08L
HNIALIWNVKDF

SEQ ID NO: 15667 - protein, 12 aa, Severe acute respiratory syndrome coronavirus 2
  REGION 1..12: note = Table B: HLA-DRB1*01:03L HLA-DQA1*01:02-B1*06:02L HLA-DRB1*01:02L HLA-DPA1*01:03-B1*03:01L HLA-DRB1*08:01L HLA-DQA1*05:01-B1*02:01L HLA-DPA1*01:03-B1*04:01L HLA-DRB1*12:01L HLA-DPA1*01:03-B1*02:01L HLA-DRB1*16:01L
  REGION 1..12: note = CONT. FROM ABOVE: HLA-DQA1*01:03-B1*06:01L HLA-DRB1*04:08L HLA-D RB1*15:03L
WNVKDFMSLSEQ

SEQ ID NO: 15668 - protein, 14 aa, Severe acute respiratory syndrome coronavirus 2
  REGION 1..14: note = Table B: HLA-DRB1*01:03L HLA-DRB1*14:01L HLA-DRB3*01:01L
FMSLSEQLRKQIRS

SEQ ID NO: 15669 - protein, 12 aa, Severe acute respiratory syndrome coronavirus 2
  REGION 1..12: note = Table B: HLA-DRB1*01:03L HLA-DRB1*01:02L HLA-DRB1*08:01L HLA-DRB1*04:08L
EQLRKQIRSAAK

SEQ ID NO: 15670 - protein, 11 aa, Severe acute respiratory syndrome coronavirus 2
  REGION 1..11: note = Table B: HLA-DRB1*01:03L HLA-DRB1*04:08L
LRKQIRSAAKK

SEQ ID NO: 15671 - protein, 12 aa, Severe acute respiratory syndrome coronavirus 2
  REGION 1..12: note = Table B: HLA-DRB1*01:03L HLA-DRB1*04:05L HLA-DRB1*01:02L HLA-DRB1*14:01L HLA-DRB1*08:01L HLA-DRB1*12:01L HLA-DRB1*16:01L HLA-DRB1*04:08L
RKQIRSAAKKNN

SEQ ID NO: 15672 - protein, 10 aa, Severe acute respiratory syndrome coronavirus 2
  REGION 1..10: note = Table B: HLA-DRB1*01:03L HLA-DQA1*03:01-B1*03:02L
AAKKNNLPFK

SEQ ID NO: 15673 - protein, 12 aa, Severe acute respiratory syndrome coronavirus 2
  REGION 1..12: note = Table B: HLA-DRB1*01:03L HLA-DRB1*01:02L HLA-DRB1*12:01L HLA-DRB1*16:01L HLA-DRB1*04:08L HLA-DRB1*15:03L
LPFKLTCATTRQ

SEQ ID NO: 15674 - protein, 14 aa, Severe acute respiratory syndrome coronavirus 2
  REGION 1..14: note = Table B: HLA-DRB1*01:03L HLA-DRB1*15:03L
PFKLTCATTRQVVN

SEQ ID NO: 15675 - protein, 12 aa, Severe acute respiratory syndrome coronavirus 2
  REGION 1..12: note = Table B: HLA-DRB1*01:03L HLA-DRB1*04:10L HLA-DRB1*04:08L
RQVVNVVTTKIA

SEQ ID NO: 15676 - protein, 13 aa, Severe acute respiratory syndrome coronavirus 2
  REGION 1..13: note = Table B: HLA-DRB1*01:03L HLA-DRB1*04:04L HLA-DRB1*04:08L
QVVNVVTTKIALK

SEQ ID NO: 15677 - protein, 12 aa, Severe acute respiratory syndrome coronavirus 2
  REGION 1..12: note = Table B: HLA-DRB1*01:03L HLA-DRB1*04:05L HLA-DQA1*01:02-B1*06:02L HLA-DRB1*01:02L HLA-DRB1*14:01L HLA-DRB1*08:01L HLA-DRB1*04:10L HLA-DRB1*12:01L HLA-DRB1*14:54L HLA-DRB1*16:01L HLA-DRB1*04:08L
VNVVTTKIALKG

SEQ ID NO: 15678 - protein, 12 aa, Severe acute respiratory syndrome coronavirus 2
  REGION 1..12: note = Table B: HLA-DRB1*01:03L HLA-DRB1*04:02L HLA-DRB1*04:05L HLA-DQA1*01:02-B1*06:02L HLA-DPA1*03:01-B1*04:02L HLA-DQA1*01-B1*05L HLA-DQA1*05:01-B1*02:01L HLA-DPA1*01:03-B1*04:01L HLA-DPA1*01:03-B1*04:02L
  REGION 1..12: note = CONT. FROM ABOVE: HLA-DRB1*12:01L HLA-DPA1*03:01-B1*105:01L HLA- DRB1*14:17L HLA-DPA1*01:02-B1*04:01L HLA-DRB1*16:01L HLA-DQA1*01 :03-B1*06:01L HLA-DRB1*04:08L HLA-DQA1*02:01-B1*03:03L HLA-DRB1* 15:03L
VAAIFYLITPVH

SEQ ID NO: 15679 - protein, 11 aa, Severe acute respiratory syndrome coronavirus 2
  REGION 1..11: note = Table B: HLA-DRB1*01:03L HLA-DRB1*04:05L HLA-DRB1*11:03L HLA-DRB1*14:02L HLA-DPA1*01:03-B1*04:02L HLA-DPA1*02:01-B1*13:01L HLA-DPA1*03:01-B1*105:01L HLA-DPA1*01:02-B1*04:01L HLA-DRB1*08:02L
  REGION 1..11: note = CONT. FROM ABOVE: HLA-DQA1*02:01-B1*03:03L
HTDFSSEIIGY

SEQ ID NO: 15680 - protein, 12 aa, Severe acute respiratory syndrome coronavirus 2
  REGION 1..12: note = Table B: HLA-DRB1*01:03L HLA-DPA1*01:03-B1*03:01L HLA-DRB1*08:01L HLA-DPA1*01:03-B1*04:02L HLA-DPA1*03:01-B1*105:01L HLA-DRB1*16:01L HLA-DRB1*04:08L
IDGGVTRDIAST

SEQ ID NO: 15681 - protein, 13 aa, Severe acute respiratory syndrome coronavirus 2
  REGION 1..13: note = Table B: HLA-DRB1*01:03L HLA-DRB1*04:04L HLA-DRB1*04:05L HLA-DRB1*01:02L HLA-DRB1*16:01L HLA-DRB1*04:08L
RDIASTDTCFANK

SEQ ID NO: 15682 - protein, 14 aa, Severe acute respiratory syndrome coronavirus 2
  REGION 1..14: note = Table B: HLA-DRB1*01:03L HLA-DRB1*04:04L HLA-DQA1*01:02-B1*06:02L HLA-DRB1*01:02L HLA-DRB1*12:01L HLA-DPA1*03:01-B1*105:01L HLA-DQA1*02:01-B1*03:03L
HADFDTWFSQRGGS

SEQ ID NO: 15683 - protein, 11 aa, Severe acute respiratory syndrome coronavirus 2
  REGION 1..11: note = Table B: HLA-DRB1*01:03L HLA-DRB1*04:02L HLA-DRB1*01:02L
ILRTTNGDFLH

SEQ ID NO: 15684 - protein, 12 aa, Severe acute respiratory syndrome coronavirus 2
  REGION 1..12: note = Table B: HLA-DRB1*01:03L HLA-DQA1*01:02-B1*06:02L HLA-DRB1*01:02L HLA-DRB1*08:04L HLA-DPA1*03:01-B1*04:02L HLA-DRB1*11:04L HLA-DRB1*08:01L HLA-DRB1*11:01L HLA-DPA1*01:03-B1*04:01L HLA-DPA1*01:03-B1*04:02L
  REGION 1..12: note = CONT. FROM ABOVE: HLA-DRB1*12:01L HLA-DPA1*03:01-B1*105:01L HLA- DPA1*01:03-B1*02:01L HLA-DRB1*16:01L HLA-DRB1*04:08L HLA-DRB1*15 :03L
LHFLPRVFSAVG

SEQ ID NO: 15685 - protein, 12 aa, Severe acute respiratory syndrome coronavirus 2
  REGION 1..12: note = Table B: HLA-DRB1*01:03L HLA-DQA1*01:02-B1*06:02L HLA-DPA1*03:01-B1*105:01L HLA-DRB1*16:01L HLA-DRB1*04:08L
HFLPRVFSAVGN

SEQ ID NO: 15686 - protein, 14 aa, Severe acute respiratory syndrome coronavirus 2
  REGION 1..14: note = Table B: HLA-DRB1*01:03L
GNICYTPSKLIEYT

SEQ ID NO: 15687 - protein, 14 aa, Severe acute respiratory syndrome coronavirus 2
  REGION 1..14: note = Table B: HLA-DRB1*01:03L HLA-DPA1*01:03-B1*03:01L HLA-DQA1*01:01-B1*05:01L HLA-DRB1*08:01L HLA-DQA1*05:01-B1*02:01L HLA-DPA1*01:03-B1*04:02L HLA-DPA1*03:01-B1*105:01L HLA-DQA1*03:01-B1*03:02L
  REGION 1..14: note = CONT. FROM ABOVE: HLA-DRB1*04:08L
DASGKPVPYCYDTN

SEQ ID NO: 15688 - protein, 13 aa, Severe acute respiratory syndrome coronavirus 2
  REGION 1..13: note = Table B: HLA-DRB1*01:03L HLA-DRB1*04:02L HLA-DRB1*01:02L HLA-DPA1*01:03-B1*04:02L
NVLEGSVAYESLR

SEQ ID NO: 15689 - protein, 12 aa, Severe acute respiratory syndrome coronavirus 2
  REGION 1..12: note = Table B: HLA-DRB1*01:03L HLA-DRB1*04:05L HLA-DRB4*03:01NL HLA-DQA1*01:01-B1*05:01L HLA-DRB1*08:01L HLA-DQA1*05:05-B1*03:19L HLA-DRB1*04:10L HLA-DPA1*01:03-B1*04:02L HLA-DRB1*12:01L HLA-DRB1*14:17L
  REGION 1..12: note = CONT. FROM ABOVE: HLA-DRB1*16:01L HLA-DRB1*04:08L
EGSVAYESLRPD

SEQ ID NO: 15690 - protein, 10 aa, Severe acute respiratory syndrome coronavirus 2
  REGION 1..10: note = Table B: HLA-DRB1*01:03L HLA-DRB1*14:01L HLA-DQA1*03:01-B1*03:02L HLA-DRB1*16:01L HLA-DQA1*02:01-B1*03:03L
SLRPDTRYVL

SEQ ID NO: 15691 - protein, 11 aa, Severe acute respiratory syndrome coronavirus 2
  REGION 1..11: note = Table B: HLA-DRB1*01:03L HLA-DRB1*04:04L HLA-DRB1*04:05L HLA-DRB4*03:01NL HLA-DRB1*04:10L HLA-DRB1*12:02L HLA-DRB1*14:54L HLA-DRB1*04:08L HLA-DRB1*15:01L
GSIIQFPNTYL

SEQ ID NO: 15692 - protein, 12 aa, Severe acute respiratory syndrome coronavirus 2
  REGION 1..12: note = Table B: HLA-DRB1*01:03L HLA-DRB1*04:05L HLA-DQA1*01:02-B1*06:02L HLA-DRB1*01:02L HLA-DQA1*01-B1*05L HLA-DRB1*12:01L HLA-DPA1*03:01-B1*105:01L HLA-DQA1*03:01-B1*03:02L HLA-DRB1*16:01L
  REGION 1..12: note = CONT. FROM ABOVE: HLA-DQA1*01:03-B1*06:01L HLA-DRB1*04:08L HLA-D QA1*02:01-B1*03:03L HLA-DRB1*15:03L
VTTFDSEYCRHG

SEQ ID NO: 15693 - protein, 14 aa, Severe acute respiratory syndrome coronavirus 2
  REGION 1..14: note = Table B: HLA-DRB1*01:03L HLA-DRB1*01:02L HLA-DRB1*08:01L HLA-DRB1*04:08L
ERSEAGVCVSTSGR

SEQ ID NO: 15694 - protein, 13 aa, Severe acute respiratory syndrome coronavirus 2
  REGION 1..13: note = Table B: HLA-DRB1*01:03L HLA-DRB1*04:08L
RWVLNNDYYRSLP

SEQ ID NO: 15695 - protein, 12 aa, Severe acute respiratory syndrome coronavirus 2
  REGION 1..12: note = Table B: HLA-DRB1*01:03L HLA-DQA1*01:02-B1*06:02L HLA-DRB1*12:01L HLA-DPA1*03:01-B1*105:01L HLA-DRB1*04:08L HLA-DRB1*15:03L
YRSLPGVFCGVD

SEQ ID NO: 15696 - protein, 14 aa, Severe acute respiratory syndrome coronavirus 2
  REGION 1..14: note = Table B: HLA-DRB1*01:03L HLA-DPA1*01:03-B1*04:02L
AVNLLTNMFTPLIQ

SEQ ID NO: 15697 - protein, 14 aa, Severe acute respiratory syndrome coronavirus 2
  REGION 1..14: note = Table B: HLA-DRB1*01:03L HLA-DPA1*01:03-B1*03:01L HLA-DPA1*01:03-B1*04:02L HLA-DRB1*12:01L HLA-DRB1*16:01L
ALDISASIVAGGIV

SEQ ID NO: 15698 - protein, 13 aa, Severe acute respiratory syndrome coronavirus 2
  REGION 1..13: note = Table B: HLA-DRB1*01:03L HLA-DRB1*04:02L HLA-DRB1*01:02L HLA-DPA1*01:03-B1*03:01L HLA-DQA1*01:01-B1*05:01L HLA-DPA1*01:03-B1*04:02L HLA-DRB1*12:01L HLA-DRB1*16:01L
DISASIVAGGIVA

SEQ ID NO: 15699 - protein, 12 aa, Severe acute respiratory syndrome coronavirus 2
  REGION 1..12: note = Table B: HLA-DRB1*01:03L HLA-DQA1*01:02-B1*06:02L HLA-DRB1*01:02L HLA-DRB1*08:01L HLA-DRB1*11:01L HLA-DPA1*01:02-B1*04:01L HLA-DRB1*16:01L HLA-DRB1*04:08L
AYYFMRFRRAFG

SEQ ID NO: 15700 - protein, 11 aa, Severe acute respiratory syndrome coronavirus 2
  REGION 1..11: note = Table B: HLA-DRB1*01:03L
RFRRAFGEYSH

SEQ ID NO: 15701 - protein, 13 aa, Severe acute respiratory syndrome coronavirus 2
  REGION 1..13: note = Table B: HLA-DRB1*01:03L HLA-DQA1*01:02-B1*06:02L HLA-DPA1*02:01-B1*13:01L HLA-DRB1*15:03L
FRRAFGEYSHVVA

SEQ ID NO: 15702 - protein, 14 aa, Severe acute respiratory syndrome coronavirus 2
  REGION 1..14: note = Table B: HLA-DRB1*01:03L HLA-DRB1*11:04L HLA-DRB1*11:01L HLA-DRB1*15:03L
RRAFGEYSHVVAFN

SEQ ID NO: 15703 - protein, 14 aa, Severe acute respiratory syndrome coronavirus 2
  REGION 1..14: note = Table B: HLA-DRB1*01:03L HLA-DRB1*08:01L
RAFGEYSHVVAFNT

SEQ ID NO: 15704 - protein, 13 aa, Severe acute respiratory syndrome coronavirus 2
  REGION 1..13: note = Table B: HLA-DRB1*01:03L HLA-DPA1*01:03-B1*04:02L HLA-DRB1*04:08L
PVYSFLPGVYSVI

SEQ ID NO: 15705 - protein, 12 aa, Severe acute respiratory syndrome coronavirus 2
  REGION 1..12: note = Table B: HLA-DRB1*01:03L HLA-DRB1*04:05L HLA-DRB1*01:02L HLA-DRB1*12:01L HLA-DRB1*04:08L
KHFYWFFSNYLK

SEQ ID NO: 15706 - protein, 10 aa, Severe acute respiratory syndrome coronavirus 2
  REGION 1..10: note = Table B: HLA-DRB1*01:03L HLA-DRB1*16:01L HLA-DRB1*15:03L
YWFFSNYLKR

SEQ ID NO: 15707 - protein, 10 aa, Severe acute respiratory syndrome coronavirus 2
  REGION 1..10: note = Table B: HLA-DRB1*01:03L HLA-DRB1*01:02L HLA-DRB1*08:01L HLA-DQA1*03:01-B1*03:02L HLA-DPA1*01:02-B1*04:01L HLA-DRB1*16:01L HLA-DRB1*04:08L HLA-DQA1*02:01-B1*03:03L
WFFSNYLKRR

SEQ ID NO: 15708 - protein, 14 aa, Severe acute respiratory syndrome coronavirus 2
  REGION 1..14: note = Table B: HLA-DRB1*01:03L HLA-DQA1*01:02-B1*06:02L HLA-DRB1*01:02L HLA-DRB1*16:01L HLA-DRB1*04:08L
FFSNYLKRRVVFNG

SEQ ID NO: 15709 - protein, 14 aa, Severe acute respiratory syndrome coronavirus 2
  REGION 1..14: note = Table B: HLA-DRB1*01:03L HLA-DRB1*04:05L HLA-DQA1*01:02-B1*06:02L HLA-DRB1*01:02L HLA-DRB1*08:04L HLA-DRB1*14:01L HLA-DRB1*11:01L HLA-DRB1*16:01L HLA-DRB1*04:08L HLA-DRB1*15:03L
SNYLKRRVVFNGVS

SEQ ID NO: 15710 - protein, 10 aa, Severe acute respiratory syndrome coronavirus 2
  REGION 1..10: note = Table B: HLA-DRB1*01:03L HLA-DQA1*02:01-B1*03:03L
RRVVFNGVSF

SEQ ID NO: 15711 - protein, 12 aa, Severe acute respiratory syndrome coronavirus 2
  REGION 1..12: note = Table B: HLA-DRB1*01:03L HLA-DRB1*04:05L HLA-DRB1*01:02L HLA-DPA1*01:03-B1*03:01L HLA-DQA1*05:05-B1*03:01L HLA-DRB1*04:08L
GVSFSTFEEAAL

SEQ ID NO: 15712 - protein, 11 aa, Severe acute respiratory syndrome coronavirus 2
  REGION 1..11: note = Table B: HLA-DRB1*01:03L HLA-DQA1*01:03-B1*06:01L HLA-DRB1*04:08L
LLNKEMYLKLR

SEQ ID NO: 15713 - protein, 12 aa, Severe acute respiratory syndrome coronavirus 2
  REGION 1..12: note = Table B: HLA-DRB1*01:03L HLA-DRB1*04:08L
LNKEMYLKLRSD

SEQ ID NO: 15714 - protein, 15 aa, Severe acute respiratory syndrome coronavirus 2
  REGION 1..15: note = Table B: HLA-DRB1*01:03L HLA-DRB1*04:08L
KEMYLKLRSDVLLPL

SEQ ID NO: 15715 - protein, 13 aa, Severe acute respiratory syndrome coronavirus 2
  REGION 1..13: note = Table B: HLA-DRB1*01:03L HLA-DQA1*01:02-B1*06:02L HLA-DRB1*01:02L HLA-DPA1*01:03-B1*03:01L HLA-DRB1*14:01L HLA-DQA1*01-B1*05L HLA-DQA1*05:01-B1*02:01L HLA-DPA1*01:03-B1*04:01L HLA-DPA1*01:03-B1*04:02L
  REGION 1..13: note = CONT. FROM ABOVE: HLA-DRB1*12:01L HLA-DPA1*02:01-B1*13:01L
YLKLRSDVLLPLT

SEQ ID NO: 15716 - protein, 12 aa, Severe acute respiratory syndrome coronavirus 2
  REGION 1..12: note = Table B: HLA-DRB1*01:03L HLA-DRB1*01:02L HLA-DRB1*12:01L HLA-DRB1*16:01L HLA-DRB1*04:08L
KLRSDVLLPLTQ

SEQ ID NO: 15717 - protein, 11 aa, Severe acute respiratory syndrome coronavirus 2
  REGION 1..11: note = Table B: HLA-DRB1*01:03L HLA-DRB1*14:02L HLA-DRB1*08:02L HLA-DQA1*02:01-B1*03:03L
RSDVLLPLTQY

SEQ ID NO: 15718 - protein, 13 aa, Severe acute respiratory syndrome coronavirus 2
  REGION 1..13: note = Table B: HLA-DRB1*01:03L HLA-DRB1*01:02L HLA-DRB1*16:01L HLA-DRB1*04:08L HLA-DRB1*15:03L
TTSYREAACCHLA

SEQ ID NO: 15719 - protein, 12 aa, Severe acute respiratory syndrome coronavirus 2
  REGION 1..12: note = Table B: HLA-DRB1*01:03L HLA-DRB1*04:05L HLA-DRB1*01:02L HLA-DRB1*12:01L HLA-DRB1*16:01L HLA-DRB1*04:08L HLA-DRB1*15:03L
SYREAACCHLAK

SEQ ID NO: 15720 - protein, 14 aa, Severe acute respiratory syndrome coronavirus 2
  REGION 1..14: note = Table B: HLA-DRB1*01:03L HLA-DQA1*01:02-B1*06:02L HLA-DRB1*01:02L HLA-DRB1*14:01L HLA-DRB1*11:04L HLA-DPA1*02:01-B1*13:01L HLA-DPA1*03:01-B1*105:01L HLA-DRB1*10:01L HLA-DQA1*01:03-B1*06:01L HLA-DRB1*08:03L
AKALNDFSNSGSDV

SEQ ID NO: 15721 - protein, 16 aa, Severe acute respiratory syndrome coronavirus 2
  REGION 1..16: note = Table B: HLA-DRB1*01:03L HLA-DRB1*01:02L HLA-DPA1*01:03-B1*04:02L HLA-DRB1*12:01L HLA-DRB1*15:03L
NDFSNSGSDVLYQPPQ

SEQ ID NO: 15722 - protein, 15 aa, Severe acute respiratory syndrome coronavirus 2
  REGION 1..15: note = Table B: HLA-DRB1*01:03L HLA-DRB1*04:02L HLA-DRB1*04:05L HLA-DRB1*01:02L HLA-DRB4*03:01NL HLA-DPA1*01:03-B1*03:01L HLA-DQA1*01:01-B1*05:01L HLA-DRB1*12:01L HLA-DRB1*14:17L HLA-DRB1*16:01L HLA-DRB1*04:08L
QPPQTSITSAVLQSG

SEQ ID NO: 15723 - protein, 14 aa, Severe acute respiratory syndrome coronavirus 2
  REGION 1..14: note = Table B: HLA-DRB1*01:03L HLA-DQA1*01:02-B1*06:02L HLA-DRB1*14:01L HLA-DRB1*04:08L
AVLQSGFRKMAFPS

SEQ ID NO: 15724 - protein, 12 aa, Severe acute respiratory syndrome coronavirus 2
  REGION 1..12: note = Table B: HLA-DRB1*01:03L HLA-DRB1*04:05L HLA-DRB1*01:02L HLA-DRB1*08:01L HLA-DRB1*12:01L HLA-DQA1*03:01-B1*03:02L HLA-DPA1*01:02-B1*04:01L HLA-DRB1*16:01L HLA-DRB1*04:08L
SGFRKMAFPSGK

SEQ ID NO: 15725 - protein, 12 aa, Severe acute respiratory syndrome coronavirus 2
  REGION 1..12: note = Table B: HLA-DRB1*01:03L HLA-DQA1*01:02-B1*06:02L HLA-DRB1*01:02L HLA-DRB1*16:01L HLA-DRB1*04:08L HLA-DRB1*15:03L
LWLDDVVYCPRH

SEQ ID NO: 15726 - protein, 14 aa, Severe acute respiratory syndrome coronavirus 2
  REGION 1..14: note = Table B: HLA-DRB1*01:03L
DMLNPNYEDLLIRK

SEQ ID NO: 15727 - protein, 15 aa, Severe acute respiratory syndrome coronavirus 2
  REGION 1..15: note = Table B: HLA-DRB1*01:03L HLA-DRB1*04:04L HLA-DPA1*01:03-B1*104:01L HLA-DQA1*05:05-B1*03:01L HLA-DRB1*07:01L
LIRKSNHNFLVQAGN

SEQ ID NO: 15728 - protein, 14 aa, Severe acute respiratory syndrome coronavirus 2
  REGION 1..14: note = Table B: HLA-DRB1*01:03L HLA-DRB1*01:02L HLA-DRB1*08:01L HLA-DRB1*04:08L
VQAGNVQLRVIGHS

SEQ ID NO: 15729 - protein, 13 aa, Severe acute respiratory syndrome coronavirus 2
  REGION 1..13: note = Table B: HLA-DRB1*01:03L HLA-DRB1*04:08L
RVIGHSMQNCVLK

SEQ ID NO: 15730 - protein, 15 aa, Severe acute respiratory syndrome coronavirus 2
  REGION 1..15: note = Table B: HLA-DRB1*01:03L HLA-DRB1*16:01L HLA-DRB1*15:03L
GQTFSVLACYNGSPS

SEQ ID NO: 15731 - protein, 13 aa, Severe acute respiratory syndrome coronavirus 2
  REGION 1..13: note = Table B: HLA-DRB1*01:03L HLA-DPA1*01:03-B1*03:01L HLA-DRB1*12:01L HLA-DPA1*01:03-B1*02:01L HLA-DQA1*01:03-B1*06:01L
NIDYDCVSFCYMH

SEQ ID NO: 15732 - protein, 12 aa, Severe acute respiratory syndrome coronavirus 2
  REGION 1..12: note = Table B: HLA-DRB1*01:03L HLA-DQA1*01:02-B1*06:02L HLA-DPA1*03:01-B1*04:02L HLA-DPA1*01:03-B1*04:02L HLA-DPA1*01:03-B1*02:01L HLA-DRB1*16:01L HLA-DRB1*04:08L
DYDCVSFCYMHH

SEQ ID NO: 15733 - protein, 14 aa, Severe acute respiratory syndrome coronavirus 2
  REGION 1..14: note = Table B: HLA-DRB1*01:03L HLA-DRB1*04:05L HLA-DRB1*01:02L HLA-DPA1*03:01-B1*04:02L HLA-DPA1*01:03-B1*04:01L HLA-DPA1*01:03-B1*04:02L HLA-DPA1*02:01-B1*13:01L HLA-DRB1*04:08L HLA-DRB1*15:03L
TDLEGNFYGPFVDR

SEQ ID NO: 15734 - protein, 14 aa, Severe acute respiratory syndrome coronavirus 2
  REGION 1..14: note = Table B: HLA-DRB1*01:03L HLA-DRB1*04:05L HLA-DRB1*01:02L HLA-DPA1*01:03-B1*03:01L HLA-DPA1*03:01-B1*04:02L HLA-DPA1*01:03-B1*04:01L HLA-DPA1*01:03-B1*04:02L HLA-DPA1*02:01-B1*13:01L HLA-DRB1*04:08L HLA-DRB1*15:03L
DLEGNFYGPFVDRQ

SEQ ID NO: 15735 - protein, 13 aa, Severe acute respiratory syndrome coronavirus 2
  REGION 1..13: note = Table B: HLA-DRB1*01:03L HLA-DRB1*01:02L HLA-DPA1*03:01-B1*04:02L
GNFYGPFVDRQTA

SEQ ID NO: 15736 - protein, 11 aa, Severe acute respiratory syndrome coronavirus 2
  REGION 1..11: note = Table B: HLA-DRB1*01:03L HLA-DRB4*03:01NL HLA-DQA1*05:01-B1*02:01L HLA-DRB1*14:54L HLA-DPA1*01:02-B1*04:01L
YGPFVDRQTAQ

SEQ ID NO: 15737 - protein, 13 aa, Severe acute respiratory syndrome coronavirus 2
  REGION 1..13: note = Table B: HLA-DRB1*01:03L HLA-DRB4*03:01NL HLA-DPA1*01:03-B1*03:01L HLA-DRB1*16:01L HLA-DRB1*04:08L
DRQTAQAAGTDTT

SEQ ID NO: 15738 - protein, 12 aa, Severe acute respiratory syndrome coronavirus 2
  REGION 1..12: note = Table B: HLA-DRB1*01:03L HLA-DRB1*12:01L HLA-DRB1*16:01L HLA-DRB1*04:08L
AVINGDRWFLNR

SEQ ID NO: 15739 - protein, 11 aa, Severe acute respiratory syndrome coronavirus 2
  REGION 1..11: note = Table B: HLA-DRB1*01:03L HLA-DPA1*03:01-B1*04:02L HLA-DQA1*01-B1*05L HLA-DPA1*01:03-B1*04:01L HLA-DPA1*03:01-B1*105:01L HLA-DRB1*16:01L HLA-DRB1*04:08L
DRWFLNRFTTT

SEQ ID NO: 15740 - protein, 12 aa, Severe acute respiratory syndrome coronavirus 2
  REGION 1..12: note = Table B: HLA-DRB1*01:03L HLA-DRB1*04:08L
RWFLNRFTTTLN

SEQ ID NO: 15741 - protein, 12 aa, Severe acute respiratory syndrome coronavirus 2
  REGION 1..12: note = Table B: HLA-DRB1*01:03L HLA-DQA1*01-B1*05L HLA-DPA1*01:03-B1*02:01L HLA-DRB1*04:08L
WFLNRFTTTLND

SEQ ID NO: 15742 - protein, 12 aa, Severe acute respiratory syndrome coronavirus 2
  REGION 1..12: note = Table B: HLA-DRB1*01:03L HLA-DRB1*08:02L
TLNDFNLVAMKY

SEQ ID NO: 15743 - protein, 13 aa, Severe acute respiratory syndrome coronavirus 2
  REGION 1..13: note = Table B: HLA-DRB1*01:03L HLA-DRB1*08:77L HLA-DRB3*01:01L
YEPLTQDHVDILG

SEQ ID NO: 15744 - protein, 13 aa, Severe acute respiratory syndrome coronavirus 2
  REGION 1..13: note = Table B: HLA-DRB1*01:03L HLA-DRB1*04:04L HLA-DRB1*04:05L HLA-DRB1*04:10L HLA-DRB1*10:01L HLA-DRB1*04:08L
DHVDILGPLSAQT

SEQ ID NO: 15745 - protein, 15 aa, Severe acute respiratory syndrome coronavirus 2
  REGION 1..15: note = Table B: HLA-DRB1*01:03L HLA-DRB1*15:03L
AQTGIAVLDMCASLK

SEQ ID NO: 15746 - protein, 13 aa, Severe acute respiratory syndrome coronavirus 2
  REGION 1..13: note = Table B: HLA-DRB1*01:03L HLA-DPA1*01:03-B1*04:01L HLA-DRB1*04:08L HLA-DRB1*15:03L
LLEDEFTPFDVVR

SEQ ID NO: 15747 - protein, 16 aa, Severe acute respiratory syndrome coronavirus 2
  REGION 1..16: note = Table B: HLA-DRB1*01:03L HLA-DPA1*01:03-B1*03:01L HLA-DPA1*02:01-B1*13:01L HLA-DPA1*01:03-B1*104:01L
DVVRQCSGVTFQSAVK

SEQ ID NO: 15748 - protein, 12 aa, Severe acute respiratory syndrome coronavirus 2
  REGION 1..12: note = Table B: HLA-DRB1*01:03L HLA-DQA1*01:02-B1*06:02L HLA-DRB1*01:02L HLA-DRB1*08:04L HLA-DRB1*14:01L HLA-DRB1*11:04L HLA-DRB1*11:01L HLA-DRB1*16:01L HLA-DRB1*04:08L
TFQSAVKRTIKG

SEQ ID NO: 15749 - protein, 11 aa, Severe acute respiratory syndrome coronavirus 2
  REGION 1..11: note = Table B: HLA-DRB1*01:03L
AVKRTIKGTHH

SEQ ID NO: 15750 - protein, 10 aa, Severe acute respiratory syndrome coronavirus 2
  REGION 1..10: note = Table B: HLA-DRB1*01:03L HLA-DQA1*02:01-B1*03:03L
KRTIKGTHHW

SEQ ID NO: 15751 - protein, 10 aa, Severe acute respiratory syndrome coronavirus 2
  REGION 1..10: note = Table B: HLA-DRB1*01:03L HLA-DQA1*03:01-B1*03:02L HLA-DPA1*01:02-B1*04:01L HLA-DRB1*16:01L
FAMMFVKHKH

SEQ ID NO: 15752 - protein, 15 aa, Severe acute respiratory syndrome coronavirus 2
  REGION 1..15: note = Table B: HLA-DRB1*01:03L HLA-DPA1*01:02-B1*04:01L HLA-DRB1*16:01L
HKHAFLCLFLLPSLA

SEQ ID NO: 15753 - protein, 14 aa, Severe acute respiratory syndrome coronavirus 2
  REGION 1..14: note = Table B: HLA-DRB1*01:03L HLA-DQA1*01:02-B1*06:02L HLA-DRB1*01:02L HLA-DRB4*01:01L HLA-DRB1*12:01L HLA-DRB1*10:01L
IMTWLDMVDTSLSG

SEQ ID NO: 15754 - protein, 12 aa, Severe acute respiratory syndrome coronavirus 2
  REGION 1..12: note = Table B: HLA-DRB1*01:03L HLA-DRB1*04:05L HLA-DQA1*01:01-B1*05:01L HLA-DRB1*08:01L HLA-DRB1*04:08L
MTARTVYDDGAR

SEQ ID NO: 15755 - protein, 13 aa, Severe acute respiratory syndrome coronavirus 2
  REGION 1..13: note = Table B: HLA-DRB1*01:03L HLA-DRB1*04:04L HLA-DRB1*04:05L HLA-DRB4*03:01NL HLA-DPA1*01:03-B1*03:01L HLA-DPA1*03:01-B1*04:02L HLA-DRB1*14:01L HLA-DRB1*08:01L HLA-DQA1*05:01-B1*02:01L HLA-DPA1*01:03-B1*04:02L
  REGION 1..13: note = CONT. FROM ABOVE: HLA-DPA1*01:03-B1*02:01L HLA-DRB1*15:03L
SGVVTTVMFLARG

SEQ ID NO: 15756 - protein, 10 aa, Severe acute respiratory syndrome coronavirus 2
  REGION 1..10: note = Table B: HLA-DRB1*01:03L HLA-DQA1*01:02-B1*06:02L HLA-DRB1*03:01L HLA-DRB1*14:02L HLA-DQA1*05:05-B1*03:19L HLA-DPA1*01:03-B1*04:01L HLA-DPA1*02:01-B1*13:01L HLA-DRB1*16:01L HLA-DQA1*01:03-B1*06:01L
  REGION 1..10: note = CONT. FROM ABOVE: HLA-DQA1*02:01-B1*03:03L
RYFRLTLGVY

SEQ ID NO: 15757 - protein, 12 aa, Severe acute respiratory syndrome coronavirus 2
  REGION 1..12: note = Table B: HLA-DRB1*01:03L HLA-DRB1*04:04L HLA-DQA1*01:02-B1*06:02L HLA-DRB1*12:01L HLA-DPA1*03:01-B1*105:01L HLA-DRB1*10:01L HLA-DRB1*04:08L HLA-DRB1*15:03L
LGVYDYLVSTQE

SEQ ID NO: 15758 - protein, 13 aa, Severe acute respiratory syndrome coronavirus 2
  REGION 1..13: note = Table B: HLA-DRB1*01:03L
QEFRYMNSQGLLP

SEQ ID NO: 15759 - protein, 15 aa, Severe acute respiratory syndrome coronavirus 2
  REGION 1..15: note = Table B: HLA-DRB1*01:03L HLA-DRB1*04:04L HLA-DRB1*08:01L HLA-DRB1*07:01L HLA-DRB1*04:08L
LPPKNSIDAFKLNIK

SEQ ID NO: 15760 - protein, 12 aa, Severe acute respiratory syndrome coronavirus 2
  REGION 1..12: note = Table B: HLA-DRB1*01:03L HLA-DRB1*04:05L HLA-DQA1*01:02-B1*06:02L HLA-DRB1*11:04L HLA-DRB1*11:01L HLA-DRB1*14:54L HLA-DRB1*16:01L HLA-DRB1*04:08L HLA-DRB1*08:03L
IDAFKLNIKLLG

SEQ ID NO: 15761 - protein, 14 aa, Severe acute respiratory syndrome coronavirus 2
  REGION 1..14: note = Table B: HLA-DRB1*01:03L HLA-DRB1*04:02L HLA-DQA1*05:05-B1*03:19L HLA-DRB1*12:01L HLA-DRB1*16:01L
DAFKLNIKLLGVGG

SEQ ID NO: 15762 - protein, 13 aa, Severe acute respiratory syndrome coronavirus 2
  REGION 1..13: note = Table B: HLA-DRB1*01:03L HLA-DRB1*04:08L
KLNIKLLGVGGKP

SEQ ID NO: 15763 - protein, 12 aa, Severe acute respiratory syndrome coronavirus 2
  REGION 1..12: note = Table B: HLA-DRB1*01:03L HLA-DRB1*01:02L
KLLGVGGKPCIK

SEQ ID NO: 15764 - protein, 13 aa, Severe acute respiratory syndrome coronavirus 2
  REGION 1..13: note = Table B: HLA-DRB1*01:03L HLA-DRB1*04:05L HLA-DQA1*01:02-B1*06:02L HLA-DRB1*01:02L HLA-DRB1*04:08L
GKPCIKVATVQSK

SEQ ID NO: 15765 - protein, 12 aa, Severe acute respiratory syndrome coronavirus 2
  REGION 1..12: note = Table B: HLA-DRB1*01:03L HLA-DRB1*04:04L HLA-DRB1*04:05L HLA-DRB1*01:02L HLA-DRB1*14:01L HLA-DPA1*01:03-B1*04:02L HLA-DQA1*05:05-B1*03:01L HLA-DRB1*16:01L HLA-DRB1*04:08L
SVVLLSVLQQLR

SEQ ID NO: 15766 - protein, 12 aa, Severe acute respiratory syndrome coronavirus 2
  REGION 1..12: note = Table B: HLA-DRB1*01:03L HLA-DRB1*04:04L HLA-DRB1*04:05L HLA-DQA1*01:02-B1*06:02L HLA-DRB1*01:02L HLA-DRB1*08:04L HLA-DRB1*04:10L HLA-DRB1*12:01L HLA-DPA1*03:01-B1*105:01L HLA-DRB1*14:54L HLA-DRB1*04:08L HLA-DRB1*15:03L
SVLQQLRVESSS

SEQ ID NO: 15767 - protein, 13 aa, Severe acute respiratory syndrome coronavirus 2
  REGION 1..13: note = Table B: HLA-DRB1*01:03L HLA-DRB1*01:01L HLA-DRB1*04:08L
QQLRVESSSKLWA

SEQ ID NO: 15768 - protein, 12 aa, Severe acute respiratory syndrome coronavirus 2
  REGION 1..12: note = Table B: HLA-DRB1*01:03L HLA-DRB1*04:04L HLA-DRB1*04:05L HLA-DRB1*01:02L HLA-DRB1*12:01L HLA-DPA1*03:01-B1*105:01L HLA-DQA1*05:05-B1*03:01L HLA-DRB1*04:08L
LRVESSSKLWAQ

SEQ ID NO: 15769 - protein, 14 aa, Severe acute respiratory syndrome coronavirus 2
  REGION 1..14: note = Table B: HLA-DRB1*01:03L HLA-DRB1*01:02L HLA-DPA1*01:03-B1*03:01L HLA-DRB1*08:01L HLA-DPA1*01:03-B1*04:02L HLA-DPA1*02:01-B1*13:01L HLA-DRB1*04:08L
RVESSSKLWAQCVQ

SEQ ID NO: 15770 - protein, 14 aa, Severe acute respiratory syndrome coronavirus 2
  REGION 1..14: note = Table B: HLA-DRB1*01:03L HLA-DPA1*03:01-B1*04:02L HLA-DPA1*01:03-B1*04:02L HLA-DQA1*05:05-B1*03:01L HLA-DPA1*01:02-B1*04:01L HLA-DQA1*01:03-B1*06:01L HLA-DRB1*15:03L
SSKLWAQCVQLHND

SEQ ID NO: 15771 - protein, 12 aa, Severe acute respiratory syndrome coronavirus 2
  REGION 1..12: note = Table B: HLA-DRB1*01:03L HLA-DRB1*04:04L HLA-DQA1*01:02-B1*06:02L HLA-DRB1*14:01L HLA-DRB1*04:08L
HNDILLAKDTTE

SEQ ID NO: 15772 - protein, 10 aa, Severe acute respiratory syndrome coronavirus 2
  REGION 1..10: note = Table B: HLA-DRB1*01:03L HLA-DQA1*01:02-B1*06:02L HLA-DRB1*14:02L HLA-DPA1*02:01-B1*13:01L HLA-DPA1*03:01-B1*105:01L HLA-DQA1*01:03-B1*06:01L HLA-DQA1*02:01-B1*03:03L HLA-DRB1*15:03L
LLAKDTTEAF

SEQ ID NO: 15773 - protein, 12 aa, Severe acute respiratory syndrome coronavirus 2
  REGION 1..12: note = Table B: HLA-DRB1*01:03L HLA-DPA1*01:03-B1*04:02L HLA-DQA1*05:05-B1*03:01L HLA-DRB1*10:01L
AFEKMVSLLSVL

SEQ ID NO: 15774 - protein, 13 aa, Severe acute respiratory syndrome coronavirus 2
  REGION 1..13: note = Table B: HLA-DRB1*01:03L
ASEFSSLPSYAAF

SEQ ID NO: 15775 - protein, 11 aa, Severe acute respiratory syndrome coronavirus 2
  REGION 1..11: note = Table B: HLA-DRB1*01:03L HLA-DRB1*04:02L HLA-DRB1*04:04L HLA-DRB1*01:02L HLA-DRB4*03:01NL HLA-DQA1*01-B1*05L HLA-DQA1*03:01-B1*03:02L HLA-DRB1*14:54L HLA-DQA1*05:05-B1*03:01L HLA-DRB1*14:17L HLA-DRB1*10:01L
  REGION 1..11: note = CONT. FROM ABOVE: HLA-DRB1*04:08L
FSSLPSYAAFA

SEQ ID NO: 15776 - protein, 14 aa, Severe acute respiratory syndrome coronavirus 2
  REGION 1..14: note = Table B: HLA-DRB1*01:03L HLA-DRB1*01:02L
ANGDSEVVLKKLKK

SEQ ID NO: 15777 - protein, 13 aa, Severe acute respiratory syndrome coronavirus 2
  REGION 1..13: note = Table B: HLA-DRB1*01:03L HLA-DRB1*04:05L HLA-DRB1*01:02L HLA-DRB1*14:01L HLA-DRB1*16:01L HLA-DRB1*04:08L
GDSEVVLKKLKKS

SEQ ID NO: 15778 - protein, 13 aa, Severe acute respiratory syndrome coronavirus 2
  REGION 1..13: note = Table B: HLA-DRB1*01:03L HLA-DRB1*01:02L HLA-DRB1*08:04L HLA-DRB1*12:01L HLA-DRB3*01:01L HLA-DRB1*04:08L HLA-DRB1*15:03L
SEVVLKKLKKSLN

SEQ ID NO: 15779 - protein, 13 aa, Severe acute respiratory syndrome coronavirus 2
  REGION 1..13: note = Table B: HLA-DRB1*01:03L HLA-DRB1*01:02L HLA-DRB1*16:01L HLA-DRB1*04:08L
VLKKLKKSLNVAK

SEQ ID NO: 15780 - protein, 13 aa, Severe acute respiratory syndrome coronavirus 2
  REGION 1..13: note = Table B: HLA-DRB1*01:03L HLA-DRB1*15:03L
LKKLKKSLNVAKS

SEQ ID NO: 15781 - protein, 11 aa, Severe acute respiratory syndrome coronavirus 2
  REGION 1..11: note = Table B: HLA-DRB1*01:03L HLA-DRB1*04:02L HLA-DRB1*01:01L HLA-DRB3*02:01L HLA-DRB1*14:01L HLA-DRB1*11:04L HLA-DPA1*01:03-B1*04:02L HLA-DRB1*12:02L HLA-DRB3*01:01L HLA-DRB1*16:01L HLA-DRB1*08:02L HLA-DQA1*02:01-B1*03:03L
SEFDRDAAMQR

SEQ ID NO: 15782 - protein, 15 aa, Severe acute respiratory syndrome coronavirus 2
  REGION 1..15: note = Table B: HLA-DRB1*01:03L HLA-DRB1*16:01L HLA-DRB1*04:08L
RDAAMQRKLEKMADQ

SEQ ID NO: 15783 - protein, 15 aa, Severe acute respiratory syndrome coronavirus 2
  REGION 1..15: note = Table B: HLA-DRB1*01:03L HLA-DRB1*08:04L HLA-DRB1*16:01L HLA-DRB1*04:08L HLA-DRB1*15:03L
DAAMQRKLEKMADQA

SEQ ID NO: 15784 - protein, 13 aa, Severe acute respiratory syndrome coronavirus 2
  REGION 1..13: note = Table B: HLA-DRB1*01:03L HLA-DRB1*04:02L HLA-DRB1*04:04L HLA-DRB1*08:01L HLA-DRB1*14:17L HLA-DQA1*02:01-B1*03:03L
QRKLEKMADQAMT

SEQ ID NO: 15785 - protein, 10 aa, Severe acute respiratory syndrome coronavirus 2
  REGION 1..10: note = Table B: HLA-DRB1*01:03L
YKQARSEDKR

SEQ ID NO: 15786 - protein, 14 aa, Severe acute respiratory syndrome coronavirus 2
  REGION 1..14: note = Table B: HLA-DRB1*01:03L HLA-DRB1*04:05L HLA-DRB1*01:02L HLA-DPA1*02:01-B1*13:01L HLA-DRB1*04:08L
SEDKRAKVTSAMQT

SEQ ID NO: 15787 - protein, 12 aa, Severe acute respiratory syndrome coronavirus 2
  REGION 1..12: note = Table B: HLA-DRB1*01:03L HLA-DPA1*01:03-B1*04:01L HLA-DRB1*12:01L HLA-DRB1*16:01L HLA-DRB1*04:08L HLA-DQA1*02:01-B1*03:03L
SAMQTMLFTMLR

SEQ ID NO: 15788 - protein, 12 aa, Severe acute respiratory syndrome coronavirus 2
  REGION 1..12: note = Table B: HLA-DRB1*01:03L HLA-DPA1*01:03-B1*04:02L HLA-DRB1*12:01L HLA-DRB1*16:01L HLA-DRB1*04:08L
MQTMLFTMLRKL

SEQ ID NO: 15789 - protein, 12 aa, Severe acute respiratory syndrome coronavirus 2
  REGION 1..12: note = Table B: HLA-DRB1*01:03L HLA-DRB1*04:05L HLA-DRB1*01:02L HLA-DRB1*08:04L HLA-DRB1*14:01L HLA-DRB1*11:04L HLA-DRB1*11:01L HLA-DPA1*01:03-B1*04:02L HLA-DRB1*12:01L HLA-DPA1*03:01-B1*105:01L HLA-DRB1*16:01L HLA-DRB1*15:03L
TMLFTMLRKLDN

SEQ ID NO: 15790 - protein, 12 aa, Severe acute respiratory syndrome coronavirus 2
  REGION 1..12: note = Table B: HLA-DRB1*01:03L HLA-DRB1*08:04L HLA-DRB1*11:01L HLA-DPA1*01:03-B1*04:02L HLA-DPA1*03:01-B1*105:01L HLA-DRB1*16:01L
MLFTMLRKLDND

SEQ ID NO: 15791 - protein, 14 aa, Severe acute respiratory syndrome coronavirus 2
  REGION 1..14: note = Table B: HLA-DRB1*01:03L
LFTMLRKLDNDALN

SEQ ID NO: 15792 - protein, 12 aa, Severe acute respiratory syndrome coronavirus 2
  REGION 1..12: note = Table B: HLA-DRB1*01:03L HLA-DRB1*04:04L HLA-DRB1*04:05L HLA-DRB1*01:02L HLA-DRB1*04:10L HLA-DRB1*12:01L HLA-DPA1*02:01-B1*13:01L HLA-DRB1*04:08L HLA-DQA1*02:01-B1*03:03L HLA-DRB1*15:03L
MLRKLDNDALNN

SEQ ID NO: 15793 - protein, 13 aa, Severe acute respiratory syndrome coronavirus 2
  REGION 1..13: note = Table B: HLA-DRB1*01:03L HLA-DRB1*04:05L HLA-DRB1*01:02L HLA-DPA1*01:03-B1*03:01L HLA-DPA1*03:01-B1*04:02L HLA-DRB1*12:01L HLA-DPA1*02:01-B1*13:01L HLA-DPA1*01:02-B1*04:01L HLA-DRB1*04:08L
LRKLDNDALNNII

SEQ ID NO: 15794 - protein, 13 aa, Severe acute respiratory syndrome coronavirus 2
  REGION 1..13: note = Table B: HLA-DRB1*01:03L HLA-DRB1*04:05L HLA-DRB1*14:17L
KLDNDALNNIINN

SEQ ID NO: 15795 - protein, 14 aa, Severe acute respiratory syndrome coronavirus 2
  REGION 1..14: note = Table B: HLA-DRB1*01:03L HLA-DPA1*01:03-B1*03:01L HLA-DQA1*01:01-B1*05:01L HLA-DQA1*05:05-B1*03:19L
DNDALNNIINNARD

SEQ ID NO: 15796 - protein, 14 aa, Severe acute respiratory syndrome coronavirus 2
  REGION 1..14: note = Table B: HLA-DRB1*01:03L HLA-DRB1*04:02L HLA-DRB1*04:04L HLA-DRB1*01:02L HLA-DRB4*03:01NL HLA-DRB1*08:04L HLA-DRB1*12:01L HLA-DPA1*02:01-B1*13:01L HLA-DRB1*14:54L HLA-DRB1*10:01L HLA-DRB1*16:01L HLA-DQA1*02:01-B1*03:03L HLA-DRB1*15:03L
SALWEIQQVVDADS

SEQ ID NO: 15797 - protein, 13 aa, Severe acute respiratory syndrome coronavirus 2
  REGION 1..13: note = Table B: HLA-DRB1*01:03L HLA-DRB1*08:04L HLA-DPA1*01:03-B1*03:01L HLA-DRB1*14:02L HLA-DQA1*01-B1*05L HLA-DQA1*05:05-B1*03:19L HLA-DPA1*02:01-B1*13:01L
ADSKIVQLSEISM

SEQ ID NO: 15798 - protein, 13 aa, Severe acute respiratory syndrome coronavirus 2
  REGION 1..13: note = Table B: HLA-DRB1*01:03L HLA-DRB1*04:04L HLA-DRB1*08:04L HLA-DPA1*01:03-B1*03:01L HLA-DRB1*14:02L HLA-DQA1*01-B1*05L HLA-DQA1*05:05-B1*03:19L HLA-DPA1*02:01-B1*13:01L HLA-DQA1*01:03-B1*06:01L HLA-DRB1*04:08L
DSKIVQLSEISMD

SEQ ID NO: 15799 - protein, 11 aa, Severe acute respiratory syndrome coronavirus 2
  REGION 1..11: note = Table B: HLA-DRB1*01:03L HLA-DRB1*01:02L HLA-DRB1*08:04L HLA-DRB1*12:02L
ALRANSAVKLQ

SEQ ID NO: 15800 - protein, 11 aa, Severe acute respiratory syndrome coronavirus 2
  REGION 1..11: note = Table B: HLA-DRB1*01:03L HLA-DRB1*04:04L HLA-DQA1*01:02-B1*06:02L HLA-DRB1*04:10L HLA-DRB1*04:08L
LALLSDLQDLK

SEQ ID NO: 15801 - protein, 13 aa, Severe acute respiratory syndrome coronavirus 2
  REGION 1..13: note = Table B: HLA-DRB1*01:03L HLA-DRB1*01:02L HLA-DPA1*01:03-B1*03:01L HLA-DRB1*14:01L HLA-DQA1*01-B1*05L HLA-DQA1*05:01-B1*02:01L HLA-DPA1*01:03-B1*04:01L HLA-DPA1*01:03-B1*04:02L HLA-DRB1*12:01L
  REGION 1..13: note = CONT. FROM ABOVE: HLA-DPA1*02:01-B1*13:01L HLA-DQA1*01:03-B1*06: 01L HLA-DRB1*04:08L HLA-DRB1*15:03L
LSDLQDLKWARFP

SEQ ID NO: 15802 - protein, 12 aa, Severe acute respiratory syndrome coronavirus 2
  REGION 1..12: note = Table B: HLA-DRB1*01:03L HLA-DRB1*08:01L HLA-DRB1*16:01L HLA-DRB1*04:08L
DLQDLKWARFPK

SEQ ID NO: 15803 - protein, 12 aa, Severe acute respiratory syndrome coronavirus 2
  REGION 1..12: note = Table B: HLA-DRB1*01:03L HLA-DRB1*01:02L HLA-DRB1*12:01L HLA-DRB1*16:01L HLA-DRB1*04:08L
LQDLKWARFPKS

SEQ ID NO: 15804 - protein, 11 aa, Severe acute respiratory syndrome coronavirus 2
  REGION 1..11: note = Table B: HLA-DRB1*01:03L HLA-DQA1*01:02-B1*06:02L HLA-DRB1*08:01L HLA-DRB1*04:08L
LKWARFPKSDG

SEQ ID NO: 15805 - protein, 14 aa, Severe acute respiratory syndrome coronavirus 2
  REGION 1..14: note = Table B: HLA-DRB1*01:03L HLA-DRB1*16:01L HLA-DRB1*04:08L
SDGTGTIYTELEPP

SEQ ID NO: 15806 - protein, 12 aa, Severe acute respiratory syndrome coronavirus 2
  REGION 1..12: note = Table B: HLA-DRB1*01:03L HLA-DRB1*08:01L HLA-DPA1*01:02-B1*04:01L HLA-DRB1*16:01L HLA-DRB1*04:08L
GPKVKYLYFIKG

SEQ ID NO: 15807 - protein, 11 aa, Severe acute respiratory syndrome coronavirus 2
  REGION 1..11: note = Table B: HLA-DRB1*01:03L HLA-DRB1*04:08L HLA-DQA1*02:01-B1*03:03L
YFIKGLNNLNR

SEQ ID NO: 15808 - protein, 14 aa, Severe acute respiratory syndrome coronavirus 2
  REGION 1..14: note = Table B: HLA-DRB1*01:03L HLA-DRB1*04:02L HLA-DRB1*08:01L HLA-DPA1*01:03-B1*04:02L HLA-DRB1*12:01L HLA-DPA1*01:03-B1*104:01L HLA-DRB1*16:01L
LNNLNRGMVLGSLA

SEQ ID NO: 15809 - protein, 13 aa, Severe acute respiratory syndrome coronavirus 2
  REGION 1..13: note = Table B: HLA-DRB1*01:03L HLA-DRB1*04:04L HLA-DRB1*04:05L HLA-DRB1*16:01L HLA-DRB1*04:08L HLA-DRB1*15:03L
AATVRLQAGNATE

SEQ ID NO: 15810 - protein, 14 aa, Severe acute respiratory syndrome coronavirus 2
  REGION 1..14: note = Table B: HLA-DRB1*01:03L HLA-DRB1*04:05L HLA-DPA1*01:03-B1*03:01L HLA-DQA1*05:01-B1*02:01L HLA-DPA1*02:01-B1*13:01L HLA-DPA1*03:01-B1*105:01L HLA-DRB1*16:01L HLA-DRB1*04:08L
ATVRLQAGNATEVP

SEQ ID NO: 15811 - protein, 12 aa, Severe acute respiratory syndrome coronavirus 2
  REGION 1..12: note = Table B: HLA-DRB1*01:03L HLA-DRB1*04:05L HLA-DQA1*01:02-B1*06:02L HLA-DRB4*03:01NL HLA-DPA1*01:03-B1*03:01L HLA-DQA1*01:01-B1*05:01L HLA-DQA1*05:05-B1*03:01L HLA-DRB1*14:17L
NATEVPANSTVL

SEQ ID NO: 15812 - protein, 14 aa, Severe acute respiratory syndrome coronavirus 2
  REGION 1..14: note = Table B: HLA-DRB1*01:03L HLA-DRB1*01:02L HLA-DRB1*11:04L HLA-DRB1*08:01L HLA-DRB1*11:01L HLA-DRB3*01:01L HLA-DRB1*04:08L
GQPITNCVKMLCTH

SEQ ID NO: 15813 - protein, 13 aa, Severe acute respiratory syndrome coronavirus 2
  REGION 1..13: note = Table B: HLA-DRB1*01:03L HLA-DRB1*04:02L HLA-DRB1*04:05L HLA-DRB4*03:01NL HLA-DPA1*01:03-B1*03:01L HLA-DRB1*04:10L HLA-DRB1*12:01L HLA-DPA1*03:01-B1*105:01L HLA-DRB1*14:17L HLA-DRB1*04:08L
GTGQAITVTPEAN

SEQ ID NO: 15814 - protein, 16 aa, Severe acute respiratory syndrome coronavirus 2
  REGION 1..16: note = Table B: HLA-DRB1*01:03L HLA-DRB1*01:02L
PKGFCDLKGKYVQIPT

SEQ ID NO: 15815 - protein, 14 aa, Severe acute respiratory syndrome coronavirus 2
  REGION 1..14: note = Table B: HLA-DRB1*01:03L HLA-DPA1*01:03-B1*03:01L HLA-DRB1*12:01L HLA-DPA1*02:01-B1*13:01L HLA-DRB1*15:03L
KYVQIPTTCANDPV

SEQ ID NO: 15816 - protein, 11 aa, Severe acute respiratory syndrome coronavirus 2
  REGION 1..11: note = Table B: HLA-DRB1*01:03L HLA-DRB1*04:04L HLA-DQA1*01:02-B1*06:02L HLA-DPA1*03:01-B1*105:01L HLA-DRB1*08:03L
QSADAQSFLNR

SEQ ID NO: 15817 - protein, 15 aa, Severe acute respiratory syndrome coronavirus 2
  REGION 1..15: note = Table B: HLA-DRB1*01:03L HLA-DRB1*01:02L HLA-DRB1*04:08L
DAQSFLNRVCGVSAA

SEQ ID NO: 15818 - protein, 14 aa, Severe acute respiratory syndrome coronavirus 2
  REGION 1..14: note = Table B: HLA-DRB1*01:03L HLA-DRB1*04:08L
QSFLNRVCGVSAAR

SEQ ID NO: 15819 - protein, 14 aa, Severe acute respiratory syndrome coronavirus 2
  REGION 1..14: note = Table B: HLA-DRB1*01:03L HLA-DRB1*08:04L HLA-DRB1*14:01L HLA-DPA1*02:01-B1*13:01L
STDVVYRAFDIYND

SEQ ID NO: 15820 - protein, 12 aa, Severe acute respiratory syndrome coronavirus 2
  REGION 1..12: note = Table B: HLA-DRB1*01:03L HLA-DRB1*01:02L HLA-DRB1*14:01L HLA-DRB1*12:01L HLA-DRB1*16:01L HLA-DRB1*04:08L HLA-DRB1*15:03L
DKVAGFAKFLKT

SEQ ID NO: 15821 - protein, 13 aa, Severe acute respiratory syndrome coronavirus 2
  REGION 1..13: note = Table B: HLA-DRB1*01:03L HLA-DRB1*01:02L HLA-DPA1*03:01-B1*04:02L HLA-DRB1*12:01L HLA-DPA1*03:01-B1*105:01L HLA-DPA1*01:02-B1*04:01L HLA-DRB1*16:01L HLA-DRB1*04:08L HLA-DRB1*15:03L
FAKFLKTNCCRFQ

SEQ ID NO: 15822 - protein, 14 aa, Severe acute respiratory syndrome coronavirus 2
  REGION 1..14: note = Table B: HLA-DRB1*01:03L HLA-DRB1*01:02L HLA-DRB1*16:01L HLA-DRB1*04:08L
AKFLKTNCCRFQEK

SEQ ID NO: 15823 - protein, 12 aa, Severe acute respiratory syndrome coronavirus 2
  REGION 1..12: note = Table B: HLA-DRB1*01:03L HLA-DQA1*01:02-B1*06:02L HLA-DRB1*04:08L
DNLIDSYFVVKR

SEQ ID NO: 15824 - protein, 12 aa, Severe acute respiratory syndrome coronavirus 2
  REGION 1..12: note = Table B: HLA-DRB1*01:03L HLA-DRB1*01:02L HLA-DRB1*04:08L HLA-DRB1*15:03L
NLIDSYFVVKRH

SEQ ID NO: 15825 - protein, 10 aa, Severe acute respiratory syndrome coronavirus 2
  REGION 1..10: note = Table B: HLA-DRB1*01:03L HLA-DQA1*01:02-B1*06:02L HLA-DRB1*03:01L HLA-DQA1*02:01-B1*03:03L
VVKRHTFSNY

SEQ ID NO: 15826 - protein, 12 aa, Severe acute respiratory syndrome coronavirus 2
  REGION 1..12: note = Table B: HLA-DRB1*01:03L HLA-DRB1*04:05L HLA-DRB1*15:03L
YNLLKDCPAVAK

SEQ ID NO: 15827 - protein, 12 aa, Severe acute respiratory syndrome coronavirus 2
  REGION 1..12: note = Table B: HLA-DRB1*01:03L HLA-DRB1*04:05L HLA-DRB1*01:02L HLA-DRB1*12:01L HLA-DRB1*16:01L HLA-DRB1*04:08L HLA-DRB1*15:03L
NLLKDCPAVAKH

SEQ ID NO: 15828 - protein, 12 aa, Severe acute respiratory syndrome coronavirus 2
  REGION 1..12: note = Table B: HLA-DRB1*01:03L HLA-DRB1*04:05L HLA-DQA1*01:02-B1*06:02L HLA-DRB1*01:02L HLA-DRB1*12:01L HLA-DQA1*03:01-B1*03:02L HLA-DRB1*16:01L HLA-DRB1*04:08L HLA-DQA1*02:01-B1*03:03L HLA-DRB1*15:03L
LLKDCPAVAKHD

SEQ ID NO: 15829 - protein, 10 aa, Severe acute respiratory syndrome coronavirus 2
  REGION 1..10: note = Table B: HLA-DRB1*01:03L HLA-DQA1*02:01-B1*03:03L
HISRQRLTKY

SEQ ID NO: 15830 - protein, 15 aa, Severe acute respiratory syndrome coronavirus 2
  REGION 1..15: note = Table B: HLA-DRB1*01:03L HLA-DRB1*04:08L
RQRLTKYTMADLVYA

SEQ ID NO: 15831 - protein, 13 aa, Severe acute respiratory syndrome coronavirus 2
  REGION 1..13: note = Table B: HLA-DRB1*01:03L HLA-DRB1*04:05L HLA-DPA1*01:03-B1*04:02L HLA-DRB1*16:01L
TKYTMADLVYALR

SEQ ID NO: 15832 - protein, 13 aa, Severe acute respiratory syndrome coronavirus 2
  REGION 1..13: note = Table B: HLA-DRB1*01:03L HLA-DRB1*16:01L HLA-DRB1*04:08L
MADLVYALRHFDE

SEQ ID NO: 15833 - protein, 13 aa, Severe acute respiratory syndrome coronavirus 2
  REGION 1..13: note = Table B: HLA-DRB1*01:03L HLA-DRB1*01:02L HLA-DPA1*03:01-B1*04:02L HLA-DRB1*12:01L HLA-DPA1*02:01-B1*13:01L HLA-DPA1*03:01-B1*105:01L HLA-DQA1*03:01-B1*03:02L HLA-DRB1*15:03L
DLVYALRHFDEGN

SEQ ID NO: 15834 - protein, 14 aa, Severe acute respiratory syndrome coronavirus 2
  REGION 1..14: note = Table B: HLA-DRB1*01:03L HLA-DQA1*01:02-B1*06:02L
VYALRHFDEGNCDT

SEQ ID NO: 15835 - protein, 14 aa, Severe acute respiratory syndrome coronavirus 2
  REGION 1..14: note = Table B: HLA-DRB1*01:03L HLA-DRB1*04:05L HLA-DQA1*01:02-B1*06:02L HLA-DRB1*12:01L HLA-DRB1*04:08L
ALRHFDEGNCDTLK

SEQ ID NO: 15836 - protein, 14 aa, Severe acute respiratory syndrome coronavirus 2
  REGION 1..14: note = Table B: HLA-DRB1*01:03L
NKKDWYDFVENPDI

SEQ ID NO: 15837 - protein, 13 aa, Severe acute respiratory syndrome coronavirus 2
  REGION 1..13: note = Table B: HLA-DRB1*01:03L
NPDILRVYANLGE

SEQ ID NO: 15838 - protein, 10 aa, Severe acute respiratory syndrome coronavirus 2
  REGION 1..10: note = Table B: HLA-DRB1*01:03L HLA-DRB1*01:02L HLA-DQA1*03:01-B1*03:02L HLA-DRB1*16:01L HLA-DQA1*02:01-B1*03:03L
YANLGERVRQ

SEQ ID NO: 15839 - protein, 13 aa, Severe acute respiratory syndrome coronavirus 2
  REGION 1..13: note = Table B: HLA-DRB1*01:03L HLA-DPA1*01:03-B1*02:01L HLA-DRB1*16:01L
ALLKTVQFCDAMR

SEQ ID NO: 15840 - protein, 12 aa, Severe acute respiratory syndrome coronavirus 2
  REGION 1..12: note = Table B: HLA-DRB1*01:03L HLA-DQA1*01:02-B1*06:02L HLA-DRB1*01:02L HLA-DPA1*03:01-B1*04:02L HLA-DRB1*08:01L HLA-DPA1*01:03-B1*04:02L HLA-DRB1*12:01L HLA-DPA1*03:01-B1*105:01L HLA-DRB1*16:01L
  REGION 1..12: note = CONT. FROM ABOVE: HLA-DQA1*01:03-B1*06:01L HLA-DRB1*04:08L HLA-D RB1*15:03L
LKTVQFCDAMRN

SEQ ID NO: 15841 - protein, 13 aa, Severe acute respiratory syndrome coronavirus 2
  REGION 1..13: note = Table B: HLA-DRB1*01:03L HLA-DRB1*04:02L HLA-DRB1*04:04L HLA-DRB1*04:05L HLA-DRB1*12:01L HLA-DQA1*03:01-B1*03:02L HLA-DRB1*10:01L HLA-DRB1*16:01L
KTVQFCDAMRNAG

SEQ ID NO: 15842 - protein, 12 aa, Severe acute respiratory syndrome coronavirus 2
  REGION 1..12: note = Table B: HLA-DRB1*01:03L HLA-DRB1*01:02L HLA-DRB4*03:01NL HLA-DRB1*12:01L HLA-DPA1*03:01-B1*105:01L HLA-DRB1*16:01L HLA-DRB1*04:08L HLA-DQA1*02:01-B1*03:03L HLA-DRB1*15:03L
VLTLDNQDLNGN

SEQ ID NO: 15843 - protein, 14 aa, Severe acute respiratory syndrome coronavirus 2
  REGION 1..14: note = Table B: HLA-DRB1*01:03L HLA-DRB1*10:01L HLA-DRB1*16:01L HLA-DRB1*04:08L
SYYSLLMPILTLTR

SEQ ID NO: 15844 - protein, 12 aa, Severe acute respiratory syndrome coronavirus 2
  REGION 1..12: note = Table B: HLA-DRB1*01:03L HLA-DQA1*01:02-B1*06:02L HLA-DRB1*01:02L HLA-DRB1*08:04L HLA-DRB1*14:01L HLA-DRB1*12:01L HLA-DRB1*16:01L HLA-DRB1*04:08L HLA-DRB1*15:03L
PILTLTRALTAE

SEQ ID NO: 15845 - protein, 10 aa, Severe acute respiratory syndrome coronavirus 2
  REGION 1..10: note = Table B: HLA-DRB1*01:03L HLA-DRB1*04:05L HLA-DQA1*01:02-B1*06:02L HLA-DQA1*05:05-B1*03:19L HLA-DRB4*01:01L HLA-DPA1*01:03-B1*04:01L HLA-DPA1*02:01-B1*13:01M HLA-DRB1*16:01L
  REGION 1..10: note = CONT. FROM ABOVE: HLA-DQA1*01:03-B1*06:01L HLA-DQA1*02:01-B1*03: 03L
PYIKWDLLKY

SEQ ID NO: 15846 - protein, 14 aa, Severe acute respiratory syndrome coronavirus 2
  REGION 1..14: note = Table B: HLA-DRB1*01:03L HLA-DRB1*04:05L HLA-DQA1*01:02-B1*06:02L HLA-DRB1*01:02L HLA-DPA1*03:01-B1*04:02L HLA-DPA1*01:03-B1*04:02L HLA-DRB1*12:01L HLA-DPA1*02:01-B1*13:01L HLA-DRB1*04:08L
  REGION 1..14: note = CONT. FROM ABOVE: HLA-DRB1*15:03L
IKWDLLKYDFTEER

SEQ ID NO: 15847 - protein, 10 aa, Severe acute respiratory syndrome coronavirus 2
  REGION 1..10: note = Table B: HLA-DRB1*01:03L HLA-DRB1*01:02L HLA-DQA1*01-B1*05L HLA-DQA1*03:01-B1*03:02L HLA-DPA1*01:02-B1*04:01L HLA-DRB1*16:01L
KYDFTEERLK

SEQ ID NO: 15848 - protein, 11 aa, Severe acute respiratory syndrome coronavirus 2
  REGION 1..11: note = Table B: HLA-DRB1*01:03L HLA-DQA1*01:02-B1*06:02L HLA-DPA1*01:03-B1*03:01L
TEERLKLFDRY

SEQ ID NO: 15849 - protein, 13 aa, Severe acute respiratory syndrome coronavirus 2
  REGION 1..13: note = Table B: HLA-DRB1*01:03L HLA-DRB1*01:02L HLA-DRB1*12:01L HLA-DRB1*04:08L HLA-DRB1*15:03L
EERLKLFDRYFKY

SEQ ID NO: 15850 - protein, 10 aa, Severe acute respiratory syndrome coronavirus 2
  REGION 1..10: note = Table B: HLA-DRB1*01:03L HLA-DQA1*01:02-B1*06:02L HLA-DRB1*03:01L HLA-DRB1*14:02L HLA-DPA1*01:03-B1*04:01L HLA-DPA1*01:03-B1*04:02L HLA-DPA1*02:01-B1*13:01L HLA-DQA1*01:03-B1*06:01L HLA-DQA1*02:01-B1*03:03L
KLFDRYFKYW

SEQ ID NO: 15851 - protein, 10 aa, Severe acute respiratory syndrome coronavirus 2
  REGION 1..10: note = Table B: HLA-DRB1*01:03L HLA-DRB1*04:05L HLA-DQA1*01:02-B1*06:02L HLA-DRB1*03:01L HLA-DRB1*14:02L HLA-DQA1*05:05-B1*03:19L HLA-DQA1*05:01-B1*02:01L HLA-DRB4*01:01L HLA-DPA1*01:03-B1*04:01L
  REGION 1..10: note = CONT. FROM ABOVE: HLA-DQA1*05:05-B1*03:116L HLA-DPA1*01:03-B1*04 :02L HLA-DPA1*02:01-B1*13:01L HLA-DPA1*03:01-B1*105:01L HLA-DRB1 *16:01L HLA-DQA1*01:03-B1*06:01L HLA-DQA1*02:01-B1*03:03L
RYFKYWDQTY

SEQ ID NO: 15852 - protein, 12 aa, Severe acute respiratory syndrome coronavirus 2
  REGION 1..12: note = Table B: HLA-DRB1*01:03L HLA-DQA1*01:02-B1*06:02L HLA-DPA1*03:01-B1*105:01L HLA-DPA1*01:02-B1*04:01L HLA-DQA1*01:03-B1*06:01L
VFPPTSFGPLVR

SEQ ID NO: 15853 - protein, 11 aa, Severe acute respiratory syndrome coronavirus 2
  REGION 1..11: note = Table B: HLA-DRB1*01:03L HLA-DQA1*02:01-B1*03:03L
PPTSFGPLVRK

SEQ ID NO: 15854 - protein, 13 aa, Severe acute respiratory syndrome coronavirus 2
  REGION 1..13: note = Table B: HLA-DRB1*01:03L HLA-DRB1*04:05L HLA-DRB1*01:02L HLA-DQA1*01:01-B1*05:01L HLA-DRB1*08:01L HLA-DPA1*01:03-B1*04:02L HLA-DRB1*12:01L HLA-DQA1*05:05-B1*03:01L HLA-DRB1*14:17L
  REGION 1..13: note = CONT. FROM ABOVE: HLA-DPA1*01:02-B1*04:01L HLA-DRB1*04:08L
VDGVPFVVSTGYH

SEQ ID NO: 15855 - protein, 12 aa, Severe acute respiratory syndrome coronavirus 2
  REGION 1..12: note = Table B: HLA-DRB1*01:03L
TGYHFRELGVVH

SEQ ID NO: 15856 - protein, 11 aa, Severe acute respiratory syndrome coronavirus 2
  REGION 1..11: note = Table B: HLA-DRB1*01:03L HLA-DRB1*08:01L HLA-DRB1*16:01L HLA-DRB1*04:08L
YHFRELGVVHN

SEQ ID NO: 15857 - protein, 11 aa, Severe acute respiratory syndrome coronavirus 2
  REGION 1..11: note = Table B: HLA-DRB1*01:03L HLA-DPA1*01:03-B1*03:01L HLA-DRB1*04:10L HLA-DRB1*12:02L HLA-DPA1*03:01-B1*105:01L
ELGVVHNQDVN

SEQ ID NO: 15858 - protein, 12 aa, Severe acute respiratory syndrome coronavirus 2
  REGION 1..12: note = Table B: HLA-DRB1*01:03L HLA-DRB1*01:02L HLA-DRB1*16:01L HLA-DRB1*04:08L HLA-DRB1*15:03L
DVNLHSSRLSFK

SEQ ID NO: 15859 - protein, 14 aa, Severe acute respiratory syndrome coronavirus 2
  REGION 1..14: note = Table B: HLA-DRB1*01:03L HLA-DRB1*01:02L HLA-DPA1*01:03-B1*04:02L HLA-DRB1*16:01L HLA-DRB1*04:08L HLA-DRB1*15:03L
RLSFKELLVYAADP

SEQ ID NO: 15860 - protein, 12 aa, Severe acute respiratory syndrome coronavirus 2
  REGION 1..12: note = Table B: HLA-DRB1*01:03L HLA-DRB1*01:01L HLA-DRB1*01:02M HLA-DQA1*05:05-B1*03:19L HLA-DPA1*03:01-B1*105:01L HLA-DRB1*10:01L HLA-DRB1*16:01L HLA-DRB1*04:08L HLA-DRB1*15:03L
MHAASGNLLLDK

SEQ ID NO: 15861 - protein, 12 aa, Severe acute respiratory syndrome coronavirus 2
  REGION 1..12: note = Table B: HLA-DRB1*01:03L HLA-DRB1*01:02L HLA-DRB1*16:01L HLA-DRB1*04:08L
HAASGNLLLDKR

SEQ ID NO: 15862 - protein, 14 aa, Severe acute respiratory syndrome coronavirus 2
  REGION 1..14: note = Table B: HLA-DRB1*01:03L HLA-DQA1*01:02-B1*06:02L HLA-DRB1*08:04L HLA-DPA1*01:03-B1*03:01L HLA-DRB1*14:02L HLA-DQA1*05:01-B1*02:01L HLA-DPA1*03:01-B1*105:01L HLA-DRB1*04:08L
NLLLDKRTTCFSVA

SEQ ID NO: 15863 - protein, 14 aa, Severe acute respiratory syndrome coronavirus 2
  REGION 1..14: note = Table B: HLA-DRB1*01:03L
GNFNKDFYDFAVSK

SEQ ID NO: 15864 - protein, 13 aa, Severe acute respiratory syndrome coronavirus 2
  REGION 1..13: note = Table B: HLA-DRB1*01:03L HLA-DRB1*01:02L HLA-DPA1*03:01-B1*04:02L HLA-DQA1*01:01-B1*05:01L HLA-DRB1*08:01L HLA-DRB1*12:01L HLA-DQA1*01:03-B1*06:01L HLA-DRB1*15:03L
FNKDFYDFAVSKG

SEQ ID NO: 15865 - protein, 11 aa, Severe acute respiratory syndrome coronavirus 2
  REGION 1..11: note = Table B: HLA-DRB1*01:03L HLA-DRB1*01:02L HLA-DRB1*12:01L
YDFAVSKGFFK

SEQ ID NO: 15866 - protein, 12 aa, Severe acute respiratory syndrome coronavirus 2
  REGION 1..12: note = Table B: HLA-DRB1*01:03L HLA-DRB1*04:10L HLA-DRB1*12:01L HLA-DRB1*04:08L
KGFFKEGSSVEL

SEQ ID NO: 15867 - protein, 11 aa, Severe acute respiratory syndrome coronavirus 2
  REGION 1..11: note = Table B: HLA-DRB1*01:03L HLA-DRB1*04:02L HLA-DRB1*14:17L
FFKEGSSVELK

SEQ ID NO: 15868 - protein, 11 aa, Severe acute respiratory syndrome coronavirus 2
  REGION 1..11: note = Table B: HLA-DRB1*01:03L HLA-DRB1*01:02L
FKEGSSVELKH

SEQ ID NO: 15869 - protein, 11 aa, Severe acute respiratory syndrome coronavirus 2
  REGION 1..11: note = Table B: HLA-DRB1*01:03L HLA-DRB1*08:77L HLA-DPA1*03:01-B1*04:02L HLA-DRB1*03:01L HLA-DRB4*01:01L HLA-DPA1*01:03-B1*04:02L HLA-DPA1*01:02-B1*04:01L HLA-DRB1*16:01L
KEGSSVELKHF

SEQ ID NO: 15870 - protein, 15 aa, Severe acute respiratory syndrome coronavirus 2
  REGION 1..15: note = Table B: HLA-DRB1*01:03L HLA-DRB1*01:02L HLA-DRB1*08:04L HLA-DPA1*03:01-B1*04:02L HLA-DRB1*14:01L HLA-DRB1*08:01L HLA-DRB1*12:01L HLA-DPA1*03:01-B1*105:01L HLA-DPA1*01:02-B1*04:01L HLA-DRB1*16:01L HLA-DRB1*15:03L
GSSVELKHFFFAQDG

SEQ ID NO: 15871 - protein, 14 aa, Severe acute respiratory syndrome coronavirus 2
  REGION 1..14: note = Table B: HLA-DRB1*01:03L HLA-DRB1*04:05L HLA-DRB1*01:02L HLA-DRB1*08:04L HLA-DPA1*03:01-B1*04:02L HLA-DRB1*08:01L HLA-DRB1*12:01L HLA-DPA1*02:01-B1*13:01L HLA-DRB1*16:01L HLA-DRB1*04:08L HLA-DQA1*02:01-B1*03:03L HLA-DRB1*15:03L
SVELKHFFFAQDGN

SEQ ID NO: 15872 - protein, 12 aa, Severe acute respiratory syndrome coronavirus 2
  REGION 1..12: note = Table B: HLA-DRB1*01:03L HLA-DQA1*01:02-B1*06:02L HLA-DRB1*01:02L HLA-DRB1*12:01L HLA-DPA1*02:01-B1*13:01L HLA-DQA1*03:01-B1*03:02L HLA-DRB1*16:01L HLA-DRB1*04:08L HLA-DQA1*02:01-B1*03:03L HLA-DRB1*15:03L
RYNLPTMCDIRQ

SEQ ID NO: 15873 - protein, 11 aa, Severe acute respiratory syndrome coronavirus 2
  REGION 1..11: note = Table B: HLA-DRB1*01:03L HLA-DRB1*14:02L HLA-DPA1*02:01-B1*13:01L HLA-DQA1*01:03-B1*06:01L
SYEDQDALFAY

SEQ ID NO: 15874 - protein, 13 aa, Severe acute respiratory syndrome coronavirus 2
  REGION 1..13: note = Table B: HLA-DRB1*01:03L HLA-DRB1*01:02L HLA-DRB1*08:01L HLA-DQA1*05:05-B1*03:01L HLA-DRB1*04:08L
YEDQDALFAYTKR

SEQ ID NO: 15875 - protein, 12 aa, Severe acute respiratory syndrome coronavirus 2
  REGION 1..12: note = Table B: HLA-DRB1*01:03L HLA-DRB1*01:02L HLA-DRB1*08:04L HLA-DRB1*08:01L HLA-DRB1*11:01L HLA-DRB1*12:01L HLA-DRB1*04:08L HLA-DRB1*15:03L
ALFAYTKRNVIP

SEQ ID NO: 15876 - protein, 13 aa, Severe acute respiratory syndrome coronavirus 2
  REGION 1..13: note = Table B: HLA-DRB1*01:03L HLA-DRB1*04:04L HLA-DPA1*01:03-B1*03:01L HLA-DRB1*11:04L HLA-DRB1*10:01L HLA-DRB1*04:08L
RNVIPTITQMNLK

SEQ ID NO: 15877 - protein, 10 aa, Severe acute respiratory syndrome coronavirus 2
  REGION 1..10: note = Table B: HLA-DRB1*01:03L HLA-DRB1*08:01L HLA-DQA1*03:01-B1*03:02L HLA-DRB1*14:17L HLA-DRB1*16:01L HLA-DQA1*02:01-B1*03:03L
LKYAISAKNR

SEQ ID NO: 15878 - protein, 10 aa, Severe acute respiratory syndrome coronavirus 2
  REGION 1..10: note = Table B: HLA-DRB1*01:03L
AISAKNRART

SEQ ID NO: 15879 - protein, 12 aa, Severe acute respiratory syndrome coronavirus 2
  REGION 1..12: note = Table B: HLA-DRB1*01:03L HLA-DRB1*14:01L HLA-DRB1*08:01L
ISAKNRARTVAG

SEQ ID NO: 15880 - protein, 14 aa, Severe acute respiratory syndrome coronavirus 2
  REGION 1..14: note = Table B: HLA-DRB1*01:03L HLA-DRB1*04:04L HLA-DRB1*01:02L HLA-DRB1*08:04L HLA-DPA1*01:03-B1*03:01L HLA-DRB1*14:01L HLA-DRB1*11:04L HLA-DRB1*12:01L HLA-DRB1*10:01L HLA-DRB1*16:01L HLA-DRB1*04:08L HLA-DRB1*15:03L
VAGVSICSTMTNRQ

SEQ ID NO: 15881 - protein, 13 aa, Severe acute respiratory syndrome coronavirus 2
  REGION 1..13: note = Table B: HLA-DRB1*01:03L HLA-DRB1*04:04L HLA-DRB1*04:05L HLA-DRB1*16:01L HLA-DRB1*04:08L
VSICSTMTNRQFH

SEQ ID NO: 15882 - protein, 12 aa, Severe acute respiratory syndrome coronavirus 2
  REGION 1..12: note = Table B: HLA-DRB1*01:03L HLA-DPA1*01:02-B1*04:01L HLA-DRB1*16:01L HLA-DRB1*04:08L
RQFHQKLLKSIA

SEQ ID NO: 15883 - protein, 14 aa, Severe acute respiratory syndrome coronavirus 2
  REGION 1..14: note = Table B: HLA-DRB1*01:03L HLA-DRB1*04:08L
QFHQKLLKSIAATR

SEQ ID NO: 15884 - protein, 12 aa, Severe acute respiratory syndrome coronavirus 2
  REGION 1..12: note = Table B: HLA-DRB1*01:03L HLA-DRB1*04:02L HLA-DRB1*04:04L HLA-DRB1*04:05L HLA-DQA1*01:02-B1*06:02L HLA-DRB1*01:02L HLA-DRB1*14:01L HLA-DRB1*08:01L HLA-DRB1*04:10L HLA-DRB1*12:01L HLA-DRB1*16:01L HLA-DRB1*04:08L HLA-DQA1*02:01-B1*03:03L
  REGION 1..12: note = CONT. FROM ABOVE: HLA-DRB1*15:03L
QKLLKSIAATRG

SEQ ID NO: 15885 - protein, 12 aa, Severe acute respiratory syndrome coronavirus 2
  REGION 1..12: note = Table B: HLA-DRB1*01:03L HLA-DRB1*04:02L HLA-DRB1*04:05L HLA-DRB1*01:02L HLA-DPA1*01:03-B1*03:01L HLA-DRB1*12:01L HLA-DPA1*03:01-B1*105:01L HLA-DPA1*01:03-B1*104:01L HLA-DRB1*04:08L
ATRGATVVIGTS

SEQ ID NO: 15886 - protein, 13 aa, Severe acute respiratory syndrome coronavirus 2
  REGION 1..13: note = Table B: HLA-DRB1*01:03L HLA-DRB1*04:05L HLA-DRB1*08:04L HLA-DRB1*08:01L HLA-DPA1*01:03-B1*04:02L HLA-DPA1*01:03-B1*02:01L
VVIGTSKFYGGWH

SEQ ID NO: 15887 - protein, 12 aa, Severe acute respiratory syndrome coronavirus 2
  REGION 1..12: note = Table B: HLA-DRB1*01:03L HLA-DRB1*01:02L HLA-DRB1*08:01L HLA-DRB1*16:01L HLA-DRB1*04:08L
SKFYGGWHNMLK

SEQ ID NO: 15888 - protein, 14 aa, Severe acute respiratory syndrome coronavirus 2
  REGION 1..14: note = Table B: HLA-DRB1*01:03L HLA-DRB1*04:05L HLA-DQA1*01:02-B1*06:02L HLA-DRB1*01:02L HLA-DRB1*08:01L HLA-DRB1*12:01L HLA-DPA1*02:01-B1*13:01L HLA-DPA1*01:02-B1*04:01L HLA-DRB1*16:01L HLA-DRB1*04:08L
NPHLMGWDYPKCDR

SEQ ID NO: 15889 - protein, 11 aa, Severe acute respiratory syndrome coronavirus 2
  REGION 1..11: note = Table B: HLA-DRB1*01:03L HLA-DRB1*01:02L HLA-DRB1*16:01L HLA-DRB1*15:03L
LRIMASLVLAR

SEQ ID NO: 15890 - protein, 12 aa, Severe acute respiratory syndrome coronavirus 2
  REGION 1..12: note = Table B: HLA-DRB1*01:03L HLA-DRB1*01:02L HLA-DRB1*16:01L HLA-DRB1*04:08L HLA-DRB1*15:03L
RIMASLVLARKH

SEQ ID NO: 15891 - protein, 12 aa, Severe acute respiratory syndrome coronavirus 2
  REGION 1..12: note = Table B: HLA-DRB1*01:03L HLA-DRB1*04:02L HLA-DQA1*01:02-B1*06:02L HLA-DRB1*01:02L HLA-DRB1*08:01L HLA-DRB1*12:01L HLA-DRB1*16:01L HLA-DQA1*01:03-B1*06:01L
MASLVLARKHTT

SEQ ID NO: 15892 - protein, 14 aa, Severe acute respiratory syndrome coronavirus 2
  REGION 1..14: note = Table B: HLA-DRB1*01:03L HLA-DRB1*11:01L
ASLVLARKHTTCCS

SEQ ID NO: 15893 - protein, 16 aa, Severe acute respiratory syndrome coronavirus 2
  REGION 1..16: note = Table B: HLA-DRB1*01:03L HLA-DRB1*15:03L
SLVLARKHTTCCSLSH

SEQ ID NO: 15894 - protein, 15 aa, Severe acute respiratory syndrome coronavirus 2
  REGION 1..15: note = Table B: HLA-DRB1*01:03L HLA-DRB1*03:01L HLA-DRB3*01:01L HLA-DQA1*03:01-B1*03:02L HLA-DPA1*01:03-B1*104:01L HLA-DQA1*01:03-B1*06:01L HLA-DRB1*15:03L
VLARKHTTCCSLSHR

SEQ ID NO: 15895 - protein, 16 aa, Severe acute respiratory syndrome coronavirus 2
  REGION 1..16: note = Table B: HLA-DRB1*01:03L HLA-DRB1*16:01L
ARKHTTCCSLSHRFYR

SEQ ID NO: 15896 - protein, 12 aa, Severe acute respiratory syndrome coronavirus 2
  REGION 1..12: note = Table B: HLA-DRB1*01:03L HLA-DRB1*04:05L HLA-DRB1*01:02L HLA-DRB1*08:01L HLA-DRB1*12:01L HLA-DPA1*02:01-B1*13:01L HLA-DRB1*16:01L
HRFYRLANECAQ

SEQ ID NO: 15897 - protein, 13 aa, Severe acute respiratory syndrome coronavirus 2
  REGION 1..13: note = Table B: HLA-DRB1*01:03L HLA-DRB1*04:04L HLA-DRB1*04:05L HLA-DPA1*01:03-B1*104:01L
RFYRLANECAQVL

SEQ ID NO: 15898 - protein, 12 aa, Severe acute respiratory syndrome coronavirus 2
  REGION 1..12: note = Table B: HLA-DRB1*01:03L HLA-DRB1*04:05L HLA-DQA1*01:02-B1*06:02L HLA-DRB1*14:01L HLA-DQA1*01:01-B1*05:01L HLA-DRB1*08:01L HLA-DQA1*01-B1*05L HLA-DQA1*05:05-B1*03:19L HLA-DQA1*05:01-B1*02:01L
  REGION 1..12: note = CONT. FROM ABOVE: HLA-DRB1*12:01L HLA-DPA1*03:01-B1*105:01L HLA- DRB1*14:54L HLA-DQA1*05:05-B1*03:01L HLA-DRB1*16:01L HLA-DQA1*01 :03-B1*06:01L HLA-DRB1*04:08L
GGSLYVKPGGTS

SEQ ID NO: 15899 - protein, 14 aa, Severe acute respiratory syndrome coronavirus 2
  REGION 1..14: note = Table B: HLA-DRB1*01:03L HLA-DRB1*04:02L HLA-DQA1*01:02-B1*06:02L HLA-DPA1*01:03-B1*03:01L HLA-DQA1*01:03-B1*06:01L HLA-DRB1*04:08L
LYVKPGGTSSGDAT

SEQ ID NO: 15900 - protein, 14 aa, Severe acute respiratory syndrome coronavirus 2
  REGION 1..14: note = Table B: HLA-DRB1*01:03L HLA-DQA1*01:02-B1*06:02L HLA-DQA1*01:03-B1*06:01L HLA-DRB1*04:08L
YVKPGGTSSGDATT

SEQ ID NO: 15901 - protein, 12 aa, Severe acute respiratory syndrome coronavirus 2
  REGION 1..12: note = Table B: HLA-DRB1*01:03L HLA-DRB1*04:02L HLA-DRB1*04:05L HLA-DRB1*01:02L HLA-DRB4*03:01NL HLA-DPA1*01:03-B1*03:01L HLA-DQA1*01:01-B1*05:01L HLA-DRB1*08:01L HLA-DQA1*01-B1*05L HLA-DQA1*05:05-B1*03:116L HLA-DPA1*01:03-B1*04:02L
  REGION 1..12: note = CONT. FROM ABOVE: HLA-DRB1*12:01L HLA-DRB1*16:01L HLA-DRB1*04:08 L
DATTAYANSVFN

SEQ ID NO: 15902 - protein, 12 aa, Severe acute respiratory syndrome coronavirus 2
  REGION 1..12: note = Table B: HLA-DRB1*01:03L HLA-DPA1*01:03-B1*03:01L HLA-DQA1*01-B1*05L HLA-DRB1*12:01L HLA-DPA1*01:03-B1*02:01L HLA-DRB1*16:01L HLA-DRB1*04:08L
TAYANSVFNICQ

SEQ ID NO: 15903 - protein, 14 aa, Severe acute respiratory syndrome coronavirus 2
  REGION 1..14: note = Table B: HLA-DRB1*01:03L HLA-DRB1*01:02L HLA-DRB1*08:04L HLA-DPA1*01:03-B1*03:01L HLA-DRB1*16:01L HLA-DRB1*15:03L
AYANSVFNICQAVT

SEQ ID NO: 15904 - protein, 13 aa, Severe acute respiratory syndrome coronavirus 2
  REGION 1..13: note = Table B: HLA-DRB1*01:03L HLA-DRB1*04:04L HLA-DRB1*04:05L HLA-DRB1*01:01L HLA-DRB3*02:01L HLA-DRB1*14:01L HLA-DRB1*14:02L HLA-DQA1*05:01-B1*02:01L HLA-DPA1*01:03-B1*04:02L HLA-DPA1*01:03-B1*104:01L HLA-DRB1*10:01L
VFNICQAVTANVN

SEQ ID NO: 15905 - protein, 14 aa, Severe acute respiratory syndrome coronavirus 2
  REGION 1..14: note = Table B: HLA-DRB1*01:03L HLA-DRB1*04:04L HLA-DQA1*01:02-B1*06:02L HLA-DRB1*14:01L HLA-DRB1*08:01L HLA-DRB3*01:01L HLA-DPA1*01:03-B1*104:01L HLA-DRB1*07:01L HLA-DQA1*01:03-B1*06:01L HLA-DRB1*04:08L HLA-DRB1*15:03L
DGNKIADKYVRNLQ

SEQ ID NO: 15906 - protein, 14 aa, Severe acute respiratory syndrome coronavirus 2
  REGION 1..14: note = Table B: HLA-DRB1*01:03L HLA-DRB1*04:04L HLA-DQA1*01:02-B1*06:02L HLA-DRB1*14:01L HLA-DRB1*08:01L HLA-DRB3*01:01L HLA-DRB1*07:01L HLA-DRB1*04:08L HLA-DRB1*15:03L
GNKIADKYVRNLQH

SEQ ID NO: 15907 - protein, 10 aa, Severe acute respiratory syndrome coronavirus 2
  REGION 1..10: note = Table B: HLA-DRB1*01:03L HLA-DRB1*08:01L HLA-DQA1*03:01-B1*03:02L
DKYVRNLQHR

SEQ ID NO: 15908 - protein, 10 aa, Severe acute respiratory syndrome coronavirus 2
  REGION 1..10: note = Table B: HLA-DRB1*01:03L HLA-DRB1*01:02L HLA-DRB1*12:01L HLA-DQA1*03:01-B1*03:02L HLA-DPA1*01:02-B1*04:01L HLA-DRB1*16:01L HLA-DQA1*02:01-B1*03:03L
KYVRNLQHRL

SEQ ID NO: 15909 - protein, 10 aa, Severe acute respiratory syndrome coronavirus 2
  REGION 1..10: note = Table B: HLA-DRB1*01:03L HLA-DRB1*01:02L HLA-DRB1*14:01L HLA-DRB1*12:01L HLA-DPA1*01:02-B1*04:01L HLA-DRB1*16:01L
VRNLQHRLYE

SEQ ID NO: 15910 - protein, 14 aa, Severe acute respiratory syndrome coronavirus 2
  REGION 1..14: note = Table B: HLA-DRB1*01:03L HLA-DRB1*16:01L
NLQHRLYECLYRNR

SEQ ID NO: 15911 - protein, 12 aa, Severe acute respiratory syndrome coronavirus 2
  REGION 1..12: note = Table B: HLA-DRB1*01:03L HLA-DRB1*01:02L HLA-DRB1*11:01L HLA-DRB1*16:01L HLA-DRB1*04:08L
HRLYECLYRNRD

SEQ ID NO: 15912 - protein, 13 aa, Severe acute respiratory syndrome coronavirus 2
  REGION 1..13: note = Table B: HLA-DRB1*01:03L HLA-DRB1*16:01L
RLYECLYRNRDVD

SEQ ID NO: 15913 - protein, 14 aa, Severe acute respiratory syndrome coronavirus 2
  REGION 1..14: note = Table B: HLA-DRB1*01:03L HLA-DRB1*01:02L
LYRNRDVDTDFVNE

SEQ ID NO: 15914 - protein, 13 aa, Severe acute respiratory syndrome coronavirus 2
  REGION 1..13: note = Table B: HLA-DRB1*01:03L HLA-DRB1*04:08L
VDTDFVNEFYAYL

SEQ ID NO: 15915 - protein, 10 aa, Severe acute respiratory syndrome coronavirus 2
  REGION 1..10: note = Table B: HLA-DRB1*01:03L HLA-DPA1*03:01-B1*04:02L HLA-DPA1*01:03-B1*04:01L HLA-DPA1*01:03-B1*04:02L HLA-DPA1*03:01-B1*105:01L HLA-DPA1*01:03-B1*02:01L HLA-DPA1*01:02-B1*04:01M HLA-DRB1*16:01L
  REGION 1..10: note = CONT. FROM ABOVE: HLA-DQA1*01:03-B1*06:01L HLA-DRB1*04:08L
FVNEFYAYLR

SEQ ID NO: 15916 - protein, 11 aa, Severe acute respiratory syndrome coronavirus 2
  REGION 1..11: note = Table B: HLA-DRB1*01:03L HLA-DRB1*01:02L HLA-DRB1*08:01L HLA-DQA1*03:01-B1*03:02L HLA-DRB1*16:01L HLA-DRB1*04:08L HLA-DQA1*02:01-B1*03:03L
VNEFYAYLRKH

SEQ ID NO: 15917 - protein, 10 aa, Severe acute respiratory syndrome coronavirus 2
  REGION 1..10: note = Table B: HLA-DRB1*01:03L HLA-DRB1*04:05L HLA-DQA1*01:02-B1*06:02L HLA-DQA1*05:05-B1*03:19L HLA-DPA1*02:01-B1*13:01L HLA-DPA1*03:01-B1*105:01L HLA-DPA1*01:02-B1*04:01L HLA-DRB1*16:01L
  REGION 1..10: note = CONT. FROM ABOVE: HLA-DQA1*01:03-B1*06:01L HLA-DQA1*02:01-B1*03: 03L HLA-DRB1*15:03L
EFYAYLRKHF

SEQ ID NO: 15918 - protein, 10 aa, Severe acute respiratory syndrome coronavirus 2
  REGION 1..10: note = Table B: HLA-DRB1*01:03L HLA-DQA1*01:02-B1*06:02L HLA-DRB1*14:01L HLA-DRB1*08:01L HLA-DRB1*11:01L HLA-DPA1*01:02-B1*04:01L HLA-DRB1*16:01L HLA-DRB1*04:08L
YAYLRKHFSM

SEQ ID NO: 15919 - protein, 15 aa, Severe acute respiratory syndrome coronavirus 2
  REGION 1..15: note = Table B: HLA-DRB1*01:03L HLA-DPA1*03:01-B1*04:02L HLA-DRB1*04:08L
AYLRKHFSMMILSDD

SEQ ID NO: 15920 - protein, 14 aa, Severe acute respiratory syndrome coronavirus 2
  REGION 1..14: note = Table B: HLA-DRB1*01:03L HLA-DRB1*15:03L
RKHFSMMILSDDAV

SEQ ID NO: 15921 - protein, 14 aa, Severe acute respiratory syndrome coronavirus 2
  REGION 1..14: note = Table B: HLA-DRB1*01:03L HLA-DPA1*03:01-B1*04:02L HLA-DRB1*11:02L HLA-DQA1*05:05-B1*03:19L HLA-DRB3*01:01L HLA-DQA1*05:05-B1*03:01L HLA-DRB1*04:08L
SMMILSDDAVVCFN

SEQ ID NO: 15922 - protein, 14 aa, Severe acute respiratory syndrome coronavirus 2
  REGION 1..14: note = Table B: HLA-DRB1*01:03L HLA-DRB1*04:04L HLA-DRB1*04:05L HLA-DRB1*14:01L HLA-DRB1*04:10L HLA-DPA1*03:01-B1*105:01L HLA-DQA1*05:05-B1*03:01L HLA-DRB1*04:08L HLA-DQA1*02:01-B1*03:03L HLA-DRB1*15:01L
DDAVVCFNSTYASQ

SEQ ID NO: 15923 - protein, 12 aa, Severe acute respiratory syndrome coronavirus 2
  REGION 1..12: note = Table B: HLA-DRB1*01:03L HLA-DRB1*04:04L HLA-DRB1*04:05L HLA-DQA1*01:02-B1*06:02L HLA-DRB1*01:02L HLA-DRB4*03:01NL HLA-DRB1*04:10L HLA-DRB1*12:01L HLA-DRB1*14:54L HLA-DRB1*16:01L HLA-DRB1*04:08L HLA-DRB1*15:03L
QGLVASIKNFKS

SEQ ID NO: 15924 - protein, 12 aa, Severe acute respiratory syndrome coronavirus 2
  REGION 1..12: note = Table B: HLA-DRB1*01:03L HLA-DRB1*04:04L HLA-DRB1*04:05L HLA-DQA1*01:02-B1*06:02L HLA-DRB1*01:02L HLA-DRB1*08:04L HLA-DRB1*12:01L HLA-DPA1*03:01-B1*105:01L HLA-DRB1*16:01L HLA-DRB1*04:08L HLA-DRB1*15:03L
GLVASIKNFKSV

SEQ ID NO: 15925 - protein, 12 aa, Severe acute respiratory syndrome coronavirus 2
  REGION 1..12: note = Table B: HLA-DRB1*01:03L HLA-DRB1*04:05L HLA-DRB1*01:02L HLA-DRB1*08:04L HLA-DRB1*08:01L HLA-DQA1*01-B1*05L HLA-DPA1*01:03-B1*04:01L HLA-DPA1*01:03-B1*04:02L HLA-DRB1*12:01L HLA-DPA1*02:01-B1*13:01L
  REGION 1..12: note = CONT. FROM ABOVE: HLA-DQA1*03:01-B1*03:02L HLA-DPA1*01:03-B1*02: 01L HLA-DRB1*16:01L HLA-DRB1*04:08L HLA-DRB1*15:03L
KNFKSVLYYQNN

SEQ ID NO: 15926 - protein, 14 aa, Severe acute respiratory syndrome coronavirus 2
  REGION 1..14: note = Table B: HLA-DRB1*01:03L HLA-DRB1*01:02L HLA-DRB1*04:08L
PHEFCSQHTMLVKQ

SEQ ID NO: 15927 - protein, 14 aa, Severe acute respiratory syndrome coronavirus 2
  REGION 1..14: note = Table B: HLA-DRB1*01:03L HLA-DRB1*01:02L HLA-DRB1*04:08L
HEFCSQHTMLVKQG

SEQ ID NO: 15928 - protein, 11 aa, Severe acute respiratory syndrome coronavirus 2
  REGION 1..11: note = Table B: HLA-DRB1*01:03L HLA-DQA1*05:05-B1*03:116L HLA-DPA1*02:01-B1*13:01L
KTDGTLMIERF

SEQ ID NO: 15929 - protein, 10 aa, Severe acute respiratory syndrome coronavirus 2
  REGION 1..10: note = Table B: HLA-DRB1*01:03L HLA-DPA1*01:03-B1*03:01L HLA-DPA1*03:01-B1*04:02L HLA-DPA1*01:03-B1*04:01L HLA-DPA1*01:03-B1*04:02L HLA-DRB1*12:01L HLA-DPA1*03:01-B1*105:01L HLA-DPA1*01:02-B1*04:01M
  REGION 1..10: note = CONT. FROM ABOVE: HLA-DRB1*16:01L HLA-DQA1*01:03-B1*06:01L HLA-D RB1*04:08L
LMIERFVSLA

SEQ ID NO: 15930 - protein, 12 aa, Severe acute respiratory syndrome coronavirus 2
  REGION 1..12: note = Table B: HLA-DRB1*01:03L HLA-DQA1*01:02-B1*06:02L HLA-DRB1*01:02L HLA-DRB1*08:01L HLA-DQA1*01-B1*05L HLA-DPA1*03:01-B1*105:01L HLA-DRB1*14:17L HLA-DPA1*01:02-B1*04:01L HLA-DRB1*16:01L HLA-DRB1*15:03L
AIDAYPLTKHPN

SEQ ID NO: 15931 - protein, 11 aa, Severe acute respiratory syndrome coronavirus 2
  REGION 1..11: note = Table B: HLA-DRB1*01:03L HLA-DRB1*01:02L HLA-DRB1*16:01L HLA-DRB1*04:08L HLA-DRB1*15:03L
VFHLYLQYIRK

SEQ ID NO: 15932 - protein, 12 aa, Severe acute respiratory syndrome coronavirus 2
  REGION 1..12: note = Table B: HLA-DRB1*01:03L HLA-DQA1*01:02-B1*06:02L HLA-DRB1*01:02L HLA-DRB1*14:01L HLA-DRB1*11:04L HLA-DRB1*08:01L HLA-DRB1*11:01L HLA-DRB1*16:01L HLA-DRB1*04:08L
HLYLQYIRKLHD

SEQ ID NO: 15933 - protein, 12 aa, Severe acute respiratory syndrome coronavirus 2
  REGION 1..12: note = Table B: HLA-DRB1*01:03L HLA-DRB1*01:02L HLA-DRB1*08:01L HLA-DRB1*04:08L HLA-DRB1*15:03L
QYIRKLHDELTG

SEQ ID NO: 15934 - protein, 12 aa, Severe acute respiratory syndrome coronavirus 2
  REGION 1..12: note = Table B: HLA-DRB1*01:03L HLA-DRB1*01:02L HLA-DRB1*04:08L HLA-DRB1*15:03L
YIRKLHDELTGH

SEQ ID NO: 15935 - protein, 12 aa, Severe acute respiratory syndrome coronavirus 2
  REGION 1..12: note = Table B: HLA-DRB1*01:03L HLA-DRB1*04:05L HLA-DRB1*01:02L HLA-DRB1*12:01L HLA-DRB1*04:08L HLA-DRB1*15:03L
IRKLHDELTGHM

SEQ ID NO: 15936 - protein, 14 aa, Severe acute respiratory syndrome coronavirus 2
  REGION 1..14: note = Table B: HLA-DRB1*01:03L HLA-DRB1*04:04L HLA-DQA1*01:02-B1*06:02L HLA-DRB1*14:01L HLA-DPA1*03:01-B1*105:01L HLA-DRB1*14:17L HLA-DRB1*04:08L
TGHMLDMYSVMLTN

SEQ ID NO: 15937 - protein, 13 aa, Severe acute respiratory syndrome coronavirus 2
  REGION 1..13: note = Table B: HLA-DRB1*01:03L HLA-DRB1*10:01L
LDMYSVMLTNDNT

SEQ ID NO: 15938 - protein, 13 aa, Severe acute respiratory syndrome coronavirus 2
  REGION 1..13: note = Table B: HLA-DRB1*01:03L HLA-DRB1*04:02L HLA-DQA1*01:02-B1*06:02L HLA-DRB1*01:02L HLA-DRB1*08:01L HLA-DPA1*01:03-B1*04:02L HLA-DRB1*12:01L HLA-DPA1*02:01-B1*13:01L HLA-DPA1*01:03-B1*02:01L
  REGION 1..13: note = CONT. FROM ABOVE: HLA-DQA1*05:05-B1*03:01L HLA-DRB1*04:08L HLA-D RB1*15:03L
WEPEFYEAMYTPH

SEQ ID NO: 15939 - protein, 13 aa, Severe acute respiratory syndrome coronavirus 2
  REGION 1..13: note = Table B: HLA-DRB1*01:03L HLA-DRB1*04:05L HLA-DQA1*01:02-B1*06:02L HLA-DRB1*11:03L HLA-DRB1*11:01L HLA-DRB1*04:08L
DHVISTSHKLVLS

SEQ ID NO: 15940 - protein, 12 aa, Severe acute respiratory syndrome coronavirus 2
  REGION 1..12: note = Table B: HLA-DRB1*01:03L HLA-DRB1*04:05L HLA-DQA1*01:02-B1*06:02L HLA-DRB1*01:02L HLA-DRB1*14:01L HLA-DRB1*11:04L HLA-DRB1*11:01L HLA-DQA1*03:01-B1*03:02L HLA-DPA1*01:02-B1*04:01L HLA-DRB1*16:01L HLA-DRB1*04:08L
  REGION 1..12: note = CONT. FROM ABOVE: HLA-DQA1*02:01-B1*03:03L
GMSYYCKSHKPP

SEQ ID NO: 15941 - protein, 14 aa, Severe acute respiratory syndrome coronavirus 2
  REGION 1..14: note = Table B: HLA-DRB1*01:03L HLA-DRB1*04:08L
QVFGLYKNTCVGSD

SEQ ID NO: 15942 - protein, 12 aa, Severe acute respiratory syndrome coronavirus 2
  REGION 1..12: note = Table B: HLA-DRB1*01:03L HLA-DRB1*04:08L
RLKLFAAETLKA

SEQ ID NO: 15943 - protein, 12 aa, Severe acute respiratory syndrome coronavirus 2
  REGION 1..12: note = Table B: HLA-DRB1*01:03L HLA-DRB1*12:01L HLA-DRB1*04:08L
LKLFAAETLKAT

SEQ ID NO: 15944 - protein, 11 aa, Severe acute respiratory syndrome coronavirus 2
  REGION 1..11: note = Table B: HLA-DRB1*01:03L HLA-DRB1*04:04L HLA-DRB1*04:05L HLA-DRB1*01:02L HLA-DPA1*03:01-B1*04:02L HLA-DQA1*05:05-B1*03:19L HLA-DPA1*01:03-B1*04:02L HLA-DRB1*12:01L HLA-DRB1*14:54L HLA-DRB1*04:08L HLA-DRB1*15:03L
LFAAETLKATE

SEQ ID NO: 15945 - protein, 11 aa, Severe acute respiratory syndrome coronavirus 2
  REGION 1..11: note = Table B: HLA-DRB1*01:03L HLA-DQA1*05:05-B1*03:19L HLA-DPA1*01:03-B1*04:02L HLA-DRB1*12:01L HLA-DRB1*14:54L HLA-DRB1*04:08L
FAAETLKATEE

SEQ ID NO: 15946 - protein, 12 aa, Severe acute respiratory syndrome coronavirus 2
  REGION 1..12: note = Table B: HLA-DRB1*01:03L HLA-DQA1*01:02-B1*06:02L HLA-DRB1*01:02L HLA-DPA1*03:01-B1*105:01L HLA-DRB1*16:01L HLA-DRB1*04:08L HLA-DRB1*15:03L
FKLSYGIATVRE

SEQ ID NO: 15947 - protein, 14 aa, Severe acute respiratory syndrome coronavirus 2
  REGION 1..14: note = Table B: HLA-DRB1*01:03L HLA-DRB1*08:01L
KLSYGIATVREVLS

SEQ ID NO: 15948 - protein, 14 aa, Severe acute respiratory syndrome coronavirus 2
  REGION 1..14: note = Table B: HLA-DRB1*01:03L
LSYGIATVREVLSD

SEQ ID NO: 15949 - protein, 14 aa, Severe acute respiratory syndrome coronavirus 2
  REGION 1..14: note = Table B: HLA-DRB1*01:03L
SYGIATVREVLSDR

SEQ ID NO: 15950 - protein, 12 aa, Severe acute respiratory syndrome coronavirus 2
  REGION 1..12: note = Table B: HLA-DRB1*01:03L HLA-DRB1*04:05L HLA-DQA1*01:02-B1*06:02L HLA-DRB1*01:02L HLA-DQA1*01:01-B1*05:01L HLA-DRB1*08:01L HLA-DRB1*04:08L
TVREVLSDRELH

SEQ ID NO: 15951 - protein, 14 aa, Severe acute respiratory syndrome coronavirus 2
  REGION 1..14: note = Table B: HLA-DRB1*01:03L HLA-DRB1*01:02L HLA-DRB1*04:08L
RPPLNRNYVFTGYR

SEQ ID NO: 15952 - protein, 11 aa, Severe acute respiratory syndrome coronavirus 2
  REGION 1..11: note = Table B: HLA-DRB1*01:03L HLA-DPA1*01:03-B1*04:01L HLA-DRB1*12:01L HLA-DRB1*04:08L
RNYVFTGYRVT

SEQ ID NO: 15953 - protein, 12 aa, Severe acute respiratory syndrome coronavirus 2
  REGION 1..12: note = Table B: HLA-DRB1*01:03L HLA-DRB1*04:08L HLA-DQA1*02:01-B1*03:03L
VFTGYRVTKNSK

SEQ ID NO: 15954 - protein, 11 aa, Severe acute respiratory syndrome coronavirus 2
  REGION 1..11: note = Table B: HLA-DRB1*01:03L HLA-DRB1*01:02L HLA-DRB1*14:01L HLA-DRB1*12:01L HLA-DPA1*01:02-B1*04:01L HLA-DRB1*04:08L HLA-DQA1*02:01-B1*03:03L HLA-DRB1*15:03L
TGYRVTKNSKV

SEQ ID NO: 15955 - protein, 10 aa, Severe acute respiratory syndrome coronavirus 2
  REGION 1..10: note = Table B: HLA-DRB1*01:03L HLA-DQA1*01:02-B1*06:02L HLA-DRB1*03:01L HLA-DRB1*14:02L HLA-DQA1*05:05-B1*03:19L HLA-DQA1*05:01-B1*02:01L HLA-DQA1*02:01-B1*03:03L
KNSKVQIGEY

SEQ ID NO: 15956 - protein, 14 aa, Severe acute respiratory syndrome coronavirus 2
  REGION 1..14: note = Table B: HLA-DRB1*01:03L HLA-DRB1*01:02L HLA-DPA1*02:01-B1*13:01L HLA-DRB1*04:08L HLA-DRB1*15:03L
EKGDYGDAVVYRGT

SEQ ID NO: 15957 - protein, 14 aa, Severe acute respiratory syndrome coronavirus 2
  REGION 1..14: note = Table B: HLA-DRB1*01:03L HLA-DRB1*01:02L HLA-DPA1*01:03-B1*02:01L HLA-DRB1*16:01L HLA-DRB1*04:08L
YKLNVGDYFVLTSH

SEQ ID NO: 15958 - protein, 14 aa, Severe acute respiratory syndrome coronavirus 2
  REGION 1..14: note = Table B: HLA-DRB1*01:03L HLA-DQA1*01-B1*05L HLA-DRB1*12:01L HLA-DRB1*04:08L
VRITGLYPTLNISD

SEQ ID NO: 15959 - protein, 12 aa, Severe acute respiratory syndrome coronavirus 2
  REGION 1..12: note = Table B: HLA-DRB1*01:03L HLA-DRB1*01:02L HLA-DPA1*03:01-B1*04:02L HLA-DQA1*01-B1*05L HLA-DQA1*05:05-B1*03:19L HLA-DPA1*01:03-B1*04:02L HLA-DQA1*05:05-B1*03:01L HLA-DRB1*16:01L HLA-DRB1*04:08L
AIGLALYYPSAR

SEQ ID NO: 15960 - protein, 13 aa, Severe acute respiratory syndrome coronavirus 2
  REGION 1..13: note = Table B: HLA-DRB1*01:03L HLA-DRB1*04:05L HLA-DRB3*02:01L HLA-DPA1*03:01-B1*04:02L HLA-DRB1*14:01L HLA-DPA1*02:01-B1*13:01L HLA-DQA1*05:05-B1*03:01L HLA-DRB1*04:08L HLA-DRB1*15:01L
IGLALYYPSARIV

SEQ ID NO: 15961 - protein, 15 aa, Severe acute respiratory syndrome coronavirus 2
  REGION 1..15: note = Table B: HLA-DRB1*01:03L HLA-DRB1*01:01L HLA-DPA1*03:01-B1*04:02L HLA-DRB1*14:01L HLA-DRB1*08:01L HLA-DRB1*11:01L HLA-DRB1*04:10L HLA-DRB3*01:01L HLA-DPA1*03:01-B1*105:01L HLA-DQA1*05:05-B1*03:01L
  REGION 1..15: note = CONT. FROM ABOVE: HLA-DRB1*07:01L HLA-DQA1*01:03-B1*06:01L
YPSARIVYTACSHAA

SEQ ID NO: 15962 - protein, 13 aa, Severe acute respiratory syndrome coronavirus 2
  REGION 1..13: note = Table B: HLA-DRB1*01:03L HLA-DRB1*01:02L HLA-DRB1*14:01L HLA-DRB1*12:01L HLA-DRB1*04:08L HLA-DRB1*15:03L
ARIVYTACSHAAV

SEQ ID NO: 15963 - protein, 11 aa, Severe acute respiratory syndrome coronavirus 2
  REGION 1..11: note = Table B: HLA-DRB1*01:03L HLA-DPA1*01:02-B1*04:01L HLA-DRB1*16:01L HLA-DRB1*04:08L
LKYLPIDKCSR

SEQ ID NO: 15964 - protein, 14 aa, Severe acute respiratory syndrome coronavirus 2
  REGION 1..14: note = Table B: HLA-DRB1*01:03L HLA-DRB1*01:02L HLA-DRB3*01:01L HLA-DRB1*16:01L HLA-DRB1*04:08L
KYLPIDKCSRIIPA

SEQ ID NO: 15965 - protein, 14 aa, Severe acute respiratory syndrome coronavirus 2
  REGION 1..14: note = Table B: HLA-DRB1*01:03L HLA-DRB1*11:04L HLA-DRB1*11:01L HLA-DRB1*12:01L HLA-DRB1*15:03L
RARVECFDKFKVNS

SEQ ID NO: 15966 - protein, 15 aa, Severe acute respiratory syndrome coronavirus 2
  REGION 1..15: note = Table B: HLA-DRB1*01:03L HLA-DRB1*04:04L HLA-DPA1*01:03-B1*03:01L HLA-DRB1*14:02L HLA-DRB1*09:01L HLA-DPA1*01:03-B1*04:02L HLA-DPA1*02:01-B1*13:01L HLA-DRB1*07:01L HLA-DRB1*04:08L HLA-DRB1*15:01L
DEISMATNYDLSVVN

SEQ ID NO: 15967 - protein, 10 aa, Severe acute respiratory syndrome coronavirus 2
  REGION 1..10: note = Table B: HLA-DRB1*01:03L HLA-DRB1*12:01L HLA-DQA1*03:01-B1*03:02L
SVVNARLRAK

SEQ ID NO: 15968 - protein, 10 aa, Severe acute respiratory syndrome coronavirus 2
  REGION 1..10: note = Table B: HLA-DRB1*01:03L
VVNARLRAKH

SEQ ID NO: 15969 - protein, 12 aa, Severe acute respiratory syndrome coronavirus 2
  REGION 1..12: note = Table B: HLA-DRB1*01:03L HLA-DRB1*16:01L HLA-DRB1*04:08L
ARLRAKHYVYIG

SEQ ID NO: 15970 - protein, 14 aa, Severe acute respiratory syndrome coronavirus 2
  REGION 1..14: note = Table B: HLA-DRB1*01:03L HLA-DRB1*01:02L HLA-DRB1*08:01L HLA-DRB1*16:01L HLA-DRB1*04:08L
RLRAKHYVYIGDPA

SEQ ID NO: 15971 - protein, 11 aa, Severe acute respiratory syndrome coronavirus 2
  REGION 1..11: note = Table B: HLA-DRB1*01:03L HLA-DPA1*03:01-B1*04:02L HLA-DPA1*01:03-B1*04:01L HLA-DPA1*01:03-B1*04:02L HLA-DPA1*03:01-B1*105:01L HLA-DPA1*01:02-B1*04:01L HLA-DRB1*04:08L
LEPEYFNSVCR

SEQ ID NO: 15972 - protein, 14 aa, Severe acute respiratory syndrome coronavirus 2
  REGION 1..14: note = Table B: HLA-DRB1*01:03L HLA-DRB1*01:02L HLA-DRB1*16:01L HLA-DRB1*04:08L
KTIGPDMFLGTCRR

SEQ ID NO: 15973 - protein, 12 aa, Severe acute respiratory syndrome coronavirus 2
  REGION 1..12: note = Table B: HLA-DRB1*01:03L HLA-DRB1*04:05L HLA-DRB1*01:02L HLA-DPA1*01:03-B1*03:01L HLA-DQA1*01-B1*05L HLA-DRB1*04:10L HLA-DRB1*16:01L HLA-DRB1*04:08L HLA-DRB1*15:03L
VDTVSALVYDNK

SEQ ID NO: 15974 - protein, 15 aa, Severe acute respiratory syndrome coronavirus 2
  REGION 1..15: note = Table B: HLA-DRB1*01:03L HLA-DRB1*16:01L HLA-DRB1*04:08L
NKLKAHKDKSAQCFK

SEQ ID NO: 15975 - protein, 10 aa, Severe acute respiratory syndrome coronavirus 2
  REGION 1..10: note = Table B: HLA-DRB1*01:03L HLA-DRB1*14:01L HLA-DRB1*16:01L
LTRNPAWRKA

SEQ ID NO: 15976 - protein, 12 aa, Severe acute respiratory syndrome coronavirus 2
  REGION 1..12: note = Table B: HLA-DRB1*01:03L HLA-DRB1*04:04L HLA-DRB1*04:05L HLA-DQA1*01:02-B1*06:02L HLA-DRB1*14:01L HLA-DRB1*04:10L HLA-DQA1*05:05-B1*03:01L HLA-DRB1*04:08L HLA-DRB1*15:01L
VFISPYNSQNAV

SEQ ID NO: 15977 - protein, 11 aa, Severe acute respiratory syndrome coronavirus 2
  REGION 1..11: note = Table B: HLA-DRB1*01:03L HLA-DRB1*04:02L HLA-DRB1*04:04L HLA-DRB1*04:05L HLA-DRB1*01:02L HLA-DRB4*03:01NL HLA-DPA1*03:01-B1*04:02L HLA-DRB1*14:01L HLA-DRB1*11:03L HLA-DRB1*11:04L HLA-DQA1*05:01-B1*02:01L HLA-DRB1*04:10L
  REGION 1..11: note = CONT. FROM ABOVE: HLA-DRB1*12:01L HLA-DQA1*03:01-B1*03:02L HLA-D RB1*14:54L HLA-DRB1*14:17L HLA-DQA1*01:03-B1*06:01L HLA-DRB1*04: 08L HLA-DQA1*02:01-B1*03:03L HLA-DRB1*15:01L HLA-DRB1*15:03L
ISPYNSQNAVA

SEQ ID NO: 15978 - protein, 12 aa, Severe acute respiratory syndrome coronavirus 2
  REGION 1..12: note = Table B: HLA-DRB1*01:03L HLA-DRB1*04:05L HLA-DRB4*03:01NL HLA-DPA1*01:03-B1*03:01L HLA-DQA1*01:01-B1*05:01L HLA-DRB1*08:01L HLA-DQA1*05:01-B1*02:01L HLA-DRB1*12:01L HLA-DRB1*14:17L HLA-DRB1*04:08L
NSQNAVASKILG

SEQ ID NO: 15979 - protein, 14 aa, Severe acute respiratory syndrome coronavirus 2
  REGION 1..14: note = Table B: HLA-DRB1*01:03L HLA-DRB1*01:02L HLA-DRB1*08:01L HLA-DRB1*12:01L HLA-DRB1*04:08L
SQNAVASKILGLPT

SEQ ID NO: 15980 - protein, 13 aa, Severe acute respiratory syndrome coronavirus 2
  REGION 1..13: note = Table B: HLA-DRB1*01:03L
LGLPTQTVDSSQG

SEQ ID NO: 15981 - protein, 12 aa, Severe acute respiratory syndrome coronavirus 2
  REGION 1..12: note = Table B: HLA-DRB1*01:03L HLA-DPA1*01:03-B1*03:01L HLA-DQA1*01-B1*05L HLA-DQA1*05:01-B1*02:01L HLA-DPA1*01:03-B1*04:01L HLA-DPA1*01:03-B1*04:02L HLA-DRB1*12:01L HLA-DPA1*02:01-B1*13:01L
  REGION 1..12: note = CONT. FROM ABOVE: HLA-DPA1*03:01-B1*105:01L HLA-DRB1*16:01L HLA- DQA1*01:03-B1*06:01L HLA-DRB1*04:08L HLA-DRB1*15:03L
GSEYDYVIFTQT

SEQ ID NO: 15982 - protein, 13 aa, Severe acute respiratory syndrome coronavirus 2
  REGION 1..13: note = Table B: HLA-DRB1*01:03L HLA-DQA1*01:02-B1*06:02L HLA-DPA1*01:03-B1*02:01L HLA-DRB1*16:01L HLA-DQA1*01:03-B1*06:01L HLA-DRB1*04:08L
SEYDYVIFTQTTE

SEQ ID NO: 15983 - protein, 12 aa, Severe acute respiratory syndrome coronavirus 2
  REGION 1..12: note = Table B: HLA-DRB1*01:03L HLA-DRB1*01:02L HLA-DRB1*04:08L
TTETAHSCNVNR

SEQ ID NO: 15984 - protein, 10 aa, Severe acute respiratory syndrome coronavirus 2
  REGION 1..10: note = Table B: HLA-DRB1*01:03L HLA-DRB1*01:02L HLA-DQA1*03:01-B1*03:02L HLA-DRB1*16:01L HLA-DQA1*02:01-B1*03:03L
RFNVAITRAK

SEQ ID NO: 15985 - protein, 16 aa, Severe acute respiratory syndrome coronavirus 2
  REGION 1..16: note = Table B: HLA-DRB1*01:03L HLA-DRB1*04:04L
AKVGILCIMSDRDLYD

SEQ ID NO: 15986 - protein, 13 aa, Severe acute respiratory syndrome coronavirus 2
  REGION 1..13: note = Table B: HLA-DRB1*01:03L HLA-DRB1*08:01L HLA-DRB1*12:01L HLA-DRB1*04:08L
RDLYDKLQFTSLE

SEQ ID NO: 15987 - protein, 12 aa, Severe acute respiratory syndrome coronavirus 2
  REGION 1..12: note = Table B: HLA-DRB1*01:03L HLA-DRB1*04:05L HLA-DQA1*01:02-B1*06:02L HLA-DRB1*08:01L HLA-DRB1*12:01L HLA-DRB1*16:01L HLA-DRB1*04:08L
DKLQFTSLEIPR

SEQ ID NO: 15988 - protein, 12 aa, Severe acute respiratory syndrome coronavirus 2
  REGION 1..12: note = Table B: HLA-DRB1*01:03L HLA-DRB1*04:05L HLA-DQA1*01:02-B1*06:02L HLA-DRB1*01:02L HLA-DRB1*08:01L HLA-DRB1*12:01L HLA-DRB1*16:01L HLA-DRB1*04:08L HLA-DRB1*15:03L
KLQFTSLEIPRR

SEQ ID NO: 15989 - protein, 14 aa, Severe acute respiratory syndrome coronavirus 2
  REGION 1..14: note = Table B: HLA-DRB1*01:03L HLA-DRB1*04:08L HLA-DRB1*15:03L
QFTSLEIPRRNVAT

SEQ ID NO: 15990 - protein, 13 aa, Severe acute respiratory syndrome coronavirus 2
  REGION 1..13: note = Table B: HLA-DRB1*01:03L HLA-DRB1*04:02L HLA-DRB1*01:01L HLA-DRB1*04:08L
ATLQAENVTGLFK

SEQ ID NO: 15991 - protein, 13 aa, Severe acute respiratory syndrome coronavirus 2
  REGION 1..13: note = Table B: HLA-DRB1*01:03L HLA-DRB1*16:01L HLA-DRB1*04:08L
AENVTGLFKDCSK

SEQ ID NO: 15992 - protein, 13 aa, Severe acute respiratory syndrome coronavirus 2
  REGION 1..13: note = Table B: HLA-DRB1*01:03L HLA-DRB1*04:02L HLA-DRB1*04:04L HLA-DRB1*04:05L HLA-DRB1*14:01L HLA-DRB1*04:10L HLA-DPA1*03:01-B1*105:01L HLA-DRB1*14:54L HLA-DQA1*05:05-B1*03:01L HLA-DRB1*04:08L
SKVITGLHPTQAP

SEQ ID NO: 15993 - protein, 15 aa, Severe acute respiratory syndrome coronavirus 2
  REGION 1..15: note = Table B: HLA-DRB1*01:03L HLA-DRB1*04:08L
LHPTQAPTHLSVDTK

SEQ ID NO: 15994 - protein, 16 aa, Severe acute respiratory syndrome coronavirus 2
  REGION 1..16: note = Table B: HLA-DRB1*01:03L HLA-DRB1*04:05L HLA-DRB1*12:01L HLA-DPA1*02:01-B1*13:01L HLA-DRB1*16:01L HLA-DRB1*04:08L
HPTQAPTHLSVDTKFK

SEQ ID NO: 15995 - protein, 14 aa, Severe acute respiratory syndrome coronavirus 2
  REGION 1..14: note = Table B: HLA-DRB1*01:03L HLA-DRB1*04:05L HLA-DRB1*01:02L HLA-DPA1*01:03-B1*03:01L HLA-DRB1*11:04L HLA-DRB1*08:01L HLA-DRB1*11:01L HLA-DPA1*01:03-B1*04:01L HLA-DRB1*12:01L HLA-DRB3*01:01L HLA-DPA1*02:01-B1*13:01L
  REGION 1..14: note = CONT. FROM ABOVE: HLA-DPA1*01:03-B1*02:01L HLA-DQA1*02:01-B1*03: 03L HLA-DRB1*15:03L
TKFKTEGLCVDIPG

SEQ ID NO: 15996 - protein, 13 aa, Severe acute respiratory syndrome coronavirus 2
  REGION 1..13: note = Table B: HLA-DRB1*01:03L HLA-DRB1*01:02L HLA-DRB1*16:01L
IPGIPKDMTYRRL

SEQ ID NO: 15997 - protein, 15 aa, Severe acute respiratory syndrome coronavirus 2
  REGION 1..15: note = Table B: HLA-DRB1*01:03L HLA-DRB1*04:05L HLA-DRB1*01:02L HLA-DRB1*08:04L HLA-DRB1*12:01L HLA-DPA1*02:01-B1*13:01L HLA-DPA1*03:01-B1*105:01L HLA-DRB1*16:01L HLA-DRB1*15:03L
IPKDMTYRRLISMMG

SEQ ID NO: 15998 - protein, 11 aa, Severe acute respiratory syndrome coronavirus 2
  REGION 1..11: note = Table B: HLA-DRB1*01:03L HLA-DRB1*01:02L HLA-DRB1*16:01L HLA-DRB1*04:08L
YRRLISMMGFK

SEQ ID NO: 15999 - protein, 12 aa, Severe acute respiratory syndrome coronavirus 2
  REGION 1..12: note = Table B: HLA-DRB1*01:03L HLA-DRB1*16:01L HLA-DRB1*04:08L HLA-DQA1*02:01-B1*03:03L
RRLISMMGFKMN

SEQ ID NO: 16000 - protein, 13 aa, Severe acute respiratory syndrome coronavirus 2
  REGION 1..13: note = Table B: HLA-DRB1*01:03L HLA-DRB1*04:08L
RLISMMGFKMNYQ

SEQ ID NO: 16001 - protein, 12 aa, Severe acute respiratory syndrome coronavirus 2
  REGION 1..12: note = Table B: HLA-DRB1*01:03L HLA-DRB1*04:05L HLA-DRB4*03:01NL HLA-DRB1*08:04L HLA-DRB1*08:77L HLA-DRB1*11:03L HLA-DRB1*08:01L HLA-DRB1*09:01L HLA-DRB1*12:02L HLA-DRB1*14:54L HLA-DPA1*01:03-B1*104:01L HLA-DQA1*05:05-B1*03:01L
  REGION 1..12: note = CONT. FROM ABOVE: HLA-DRB1*07:01L HLA-DRB1*04:08L
KMNYQVNGYPNM

SEQ ID NO: 16002 - protein, 11 aa, Severe acute respiratory syndrome coronavirus 2
  REGION 1..11: note = Table B: HLA-DRB1*01:03L HLA-DRB1*01:02L HLA-DRB1*08:01L HLA-DRB1*12:01L HLA-DQA1*02:01-B1*03:03L
ITREEAIRHVR

SEQ ID NO: 16003 - protein, 11 aa, Severe acute respiratory syndrome coronavirus 2
  REGION 1..11: note = Table B: HLA-DRB1*01:03L HLA-DQA1*01:03-B1*06:01L
REEAIRHVRAW

SEQ ID NO: 16004 - protein, 13 aa, Severe acute respiratory syndrome coronavirus 2
  REGION 1..13: note = Table B: HLA-DRB1*01:03L HLA-DRB1*04:02L HLA-DRB1*04:04L HLA-DPA1*01:03-B1*03:01L HLA-DPA1*03:01-B1*04:02L HLA-DRB1*14:01L HLA-DRB1*08:01L HLA-DPA1*03:01-B1*105:01L HLA-DQA1*03:01-B1*03:02L HLA-DQA1*01:03-B1*06:01L
  REGION 1..13: note = CONT. FROM ABOVE: HLA-DQA1*02:01-B1*03:03L HLA-DRB1*15:01L
IRHVRAWIGFDVE

SEQ ID NO: 16005 - protein, 14 aa, Severe acute respiratory syndrome coronavirus 2
  REGION 1..14: note = Table B: HLA-DRB1*01:03L HLA-DRB1*12:01L
VRAWIGFDVEGCHA

SEQ ID NO: 16006 - protein, 14 aa, Severe acute respiratory syndrome coronavirus 2
  REGION 1..14: note = Table B: HLA-DRB1*01:03L HLA-DRB1*01:02L HLA-DRB1*16:01L HLA-DRB1*04:08L HLA-DRB1*15:03L
RAWIGFDVEGCHAT

SEQ ID NO: 16007 - protein, 14 aa, Severe acute respiratory syndrome coronavirus 2
  REGION 1..14: note = Table B: HLA-DRB1*01:03L HLA-DRB1*04:05L HLA-DPA1*01:03-B1*03:01L HLA-DRB1*08:01L HLA-DPA1*01:03-B1*04:02L HLA-DRB1*12:01L HLA-DPA1*02:01-B1*13:01L HLA-DRB1*16:01L HLA-DRB1*15:03L
IGFDVEGCHATREA

SEQ ID NO: 16008 - protein, 13 aa, Severe acute respiratory syndrome coronavirus 2
  REGION 1..13: note = Table B: HLA-DRB1*01:03L HLA-DRB1*04:05L HLA-DRB1*01:02L HLA-DRB4*03:01NL HLA-DRB3*02:01L HLA-DPA1*03:01-B1*04:02L HLA-DRB1*14:02L HLA-DRB1*12:02L HLA-DPA1*02:01-B1*13:01L HLA-DRB1*14:54L
REAVGTNLPLQLG

SEQ ID NO: 16009 - protein, 18 aa, Severe acute respiratory syndrome coronavirus 2
  REGION 1..18: note = Table B: HLA-DRB1*01:03L HLA-DRB1*01:01L HLA-DRB1*14:02L HLA-DPA1*01:03-B1*104:01L
LPLQLGFSTGVNLVAVPT

SEQ ID NO: 16010 - protein, 10 aa, Severe acute respiratory syndrome coronavirus 2
  REGION 1..10: note = Table B: HLA-DRB1*01:03L
FSRVSAKPPP

SEQ ID NO: 16011 - protein, 10 aa, Severe acute respiratory syndrome coronavirus 2
  REGION 1..10: note = Table B: HLA-DRB1*01:03L HLA-DQA1*03:01-B1*03:02L
SRVSAKPPPG

SEQ ID NO: 16012 - protein, 10 aa, Severe acute respiratory syndrome coronavirus 2
  REGION 1..10: note = Table B: HLA-DRB1*01:03L HLA-DRB1*04:05L HLA-DQA1*01:02-B1*06:02L HLA-DPA1*01:03-B1*03:01L HLA-DRB1*03:01L HLA-DRB1*14:02L HLA-DQA1*05:05-B1*03:19L HLA-DQA1*05:01-B1*02:01L HLA-DRB4*01:01L
  REGION 1..10: note = CONT. FROM ABOVE: HLA-DPA1*01:03-B1*04:01L HLA-DPA1*01:03-B1*04: 02L HLA-DPA1*02:01-B1*13:01L HLA-DPA1*03:01-B1*105:01L HLA-DRB1* 16:01L HLA-DQA1*01:03-B1*06:01L HLA-DQA1*02:01-B1*03:03L HLA-DRB 1*15:03L
QFKHLIPLMY

SEQ ID NO: 16013 - protein, 13 aa, Severe acute respiratory syndrome coronavirus 2
  REGION 1..13: note = Table B: HLA-DRB1*01:03L HLA-DRB1*14:01L HLA-DPA1*02:01-B1*13:01L HLA-DRB1*04:08L
HLIPLMYKGLPWN

SEQ ID NO: 16014 - protein, 13 aa, Severe acute respiratory syndrome coronavirus 2
  REGION 1..13: note = Table B: HLA-DRB1*01:03L HLA-DRB1*01:02L HLA-DRB1*08:04L HLA-DPA1*01:03-B1*03:01L HLA-DPA1*03:01-B1*04:02L HLA-DRB1*14:01L HLA-DQA1*05:05-B1*03:19L HLA-DPA1*01:03-B1*04:01L HLA-DPA1*01:03-B1*04:02L
  REGION 1..13: note = CONT. FROM ABOVE: HLA-DPA1*02:01-B1*13:01L HLA-DPA1*03:01-B1*105 :01L HLA-DQA1*05:05-B1*03:01L HLA-DRB1*04:08L
IPLMYKGLPWNVV

SEQ ID NO: 16015 - protein, 14 aa, Severe acute respiratory syndrome coronavirus 2
  REGION 1..14: note = Table B: HLA-DRB1*01:03L HLA-DRB1*04:02L HLA-DRB1*04:04L HLA-DRB1*04:05L HLA-DRB1*01:02L HLA-DRB1*14:01L HLA-DRB1*08:01L HLA-DRB1*12:01L HLA-DRB3*01:01L HLA-DRB1*16:01L HLA-DRB1*04:08L
VQMLSDTLKNLSDR

SEQ ID NO: 16016 - protein, 12 aa, Severe acute respiratory syndrome coronavirus 2
  REGION 1..12: note = Table B: HLA-DRB1*01:03L HLA-DPA1*01:03-B1*04:01L HLA-DPA1*01:03-B1*02:01L HLA-DRB1*04:08L
LWAHGFELTSMK

SEQ ID NO: 16017 - protein, 12 aa, Severe acute respiratory syndrome coronavirus 2
  REGION 1..12: note = Table B: HLA-DRB1*01:03L HLA-DQA1*01:02-B1*06:02L HLA-DRB1*16:01L HLA-DRB1*04:08L
SMKYFVKIGPER

SEQ ID NO: 16018 - protein, 13 aa, Severe acute respiratory syndrome coronavirus 2
  REGION 1..13: note = Table B: HLA-DRB1*01:03L HLA-DRB1*04:05L HLA-DRB1*01:02L HLA-DPA1*01:03-B1*03:01L HLA-DRB1*14:01L HLA-DQA1*05:05-B1*03:01L HLA-DRB1*04:08L
IGFDYVYNPFMID

SEQ ID NO: 16019 - protein, 12 aa, Severe acute respiratory syndrome coronavirus 2
  REGION 1..12: note = Table B: HLA-DRB1*01:03L HLA-DRB1*04:08L
AHVASCDAIMTR

SEQ ID NO: 16020 - protein, 12 aa, Severe acute respiratory syndrome coronavirus 2
  REGION 1..12: note = Table B: HLA-DRB1*01:03L HLA-DQA1*01:02-B1*06:02L HLA-DRB1*01:02L HLA-DRB1*14:01L HLA-DRB1*11:04L HLA-DRB1*11:01L HLA-DRB3*01:01L HLA-DRB1*16:01L HLA-DRB1*04:08L
LKINAACRKVQH

SEQ ID NO: 16021 - protein, 14 aa, Severe acute respiratory syndrome coronavirus 2
  REGION 1..14: note = Table B: HLA-DRB1*01:03L HLA-DQA1*01:02-B1*06:02L HLA-DRB1*01:02L HLA-DRB1*08:01L
INAACRKVQHMVVK

SEQ ID NO: 16022 - protein, 11 aa, Severe acute respiratory syndrome coronavirus 2
  REGION 1..11: note = Table B: HLA-DRB1*01:03L HLA-DRB1*01:02L HLA-DRB3*02:01L HLA-DQA1*01-B1*05L HLA-DRB1*12:01L
AALLADKFPVL

SEQ ID NO: 16023 - protein, 10 aa, Severe acute respiratory syndrome coronavirus 2
  REGION 1..10: note = Table B: HLA-DRB1*01:03L HLA-DPA1*03:01-B1*04:02L HLA-DPA1*03:01-B1*105:01L HLA-DPA1*01:02-B1*04:01L HLA-DRB1*16:01L HLA-DQA1*01:03-B1*06:01L HLA-DRB1*04:08L
LLADKFPVLH

SEQ ID NO: 16024 - protein, 11 aa, Severe acute respiratory syndrome coronavirus 2
  REGION 1..11: note = Table B: HLA-DRB1*01:03L HLA-DRB1*04:04L HLA-DRB1*04:05L HLA-DRB1*01:02L HLA-DRB4*03:01NL HLA-DRB1*04:08L
LHDIGNPKAIK

SEQ ID NO: 16025 - protein, 14 aa, Severe acute respiratory syndrome coronavirus 2
  REGION 1..14: note = Table B: HLA-DRB1*01:03L HLA-DRB1*01:02L
HDIGNPKAIKCVPQ

SEQ ID NO: 16026 - protein, 14 aa, Severe acute respiratory syndrome coronavirus 2
  REGION 1..14: note = Table B: HLA-DRB1*01:03L HLA-DRB1*04:05L HLA-DPA1*01:03-B1*03:01L HLA-DRB1*08:01L HLA-DRB1*12:01L HLA-DPA1*02:01-B1*13:01L HLA-DRB1*16:01L
IGNPKAIKCVPQAD

SEQ ID NO: 16027 - protein, 12 aa, Severe acute respiratory syndrome coronavirus 2
  REGION 1..12: note = Table B: HLA-DRB1*01:03L HLA-DRB1*12:01L HLA-DQA1*01:03-B1*06:01L HLA-DRB1*04:08L HLA-DQA1*02:01-B1*03:03L
EWKFYDAQPCSD

SEQ ID NO: 16028 - protein, 11 aa, Severe acute respiratory syndrome coronavirus 2
  REGION 1..11: note = Table B: HLA-DRB1*01:03L HLA-DRB1*04:05L HLA-DRB1*16:01L HLA-DQA1*02:01-B1*03:03L
RYPANSIVCRF

SEQ ID NO: 16029 - protein, 16 aa, Severe acute respiratory syndrome coronavirus 2
  REGION 1..16: note = Table B: HLA-DRB1*01:03L HLA-DRB1*04:08L
YPANSIVCRFDTRVLS

SEQ ID NO: 16030 - protein, 14 aa, Severe acute respiratory syndrome coronavirus 2
  REGION 1..14: note = Table B: HLA-DRB1*01:03L
NSIVCRFDTRVLSN

SEQ ID NO: 16031 - protein, 10 aa, Severe acute respiratory syndrome coronavirus 2
  REGION 1..10: note = Table B: HLA-DRB1*01:03L HLA-DRB1*01:02L HLA-DRB1*16:01L HLA-DRB1*15:03L
SLYVNKHAFH

SEQ ID NO: 16032 - protein, 13 aa, Severe acute respiratory syndrome coronavirus 2
  REGION 1..13: note = Table B: HLA-DRB1*01:03L HLA-DPA1*01:02-B1*04:01L HLA-DRB1*04:08L HLA-DRB1*15:03L
NKHAFHTPAFDKS

SEQ ID NO: 16033 - protein, 13 aa, Severe acute respiratory syndrome coronavirus 2
  REGION 1..13: note = Table B: HLA-DRB1*01:03L HLA-DRB1*04:05L HLA-DQA1*01:02-B1*06:02L HLA-DRB1*12:01L HLA-DPA1*02:01-B1*13:01L HLA-DPA1*03:01-B1*105:01L HLA-DPA1*01:02-B1*04:01L HLA-DRB1*04:08L HLA-DRB1*15:03L
KHAFHTPAFDKSA

SEQ ID NO: 16034 - protein, 10 aa, Severe acute respiratory syndrome coronavirus 2
  REGION 1..10: note = Table B: HLA-DRB1*01:03L HLA-DPA1*03:01-B1*04:02L HLA-DPA1*03:01-B1*105:01L HLA-DPA1*01:02-B1*04:01L HLA-DRB1*16:01L HLA-DQA1*01:03-B1*06:01L
FDKSAFVNLK

SEQ ID NO: 16035 - protein, 13 aa, Severe acute respiratory syndrome coronavirus 2
  REGION 1..13: note = Table B: HLA-DRB1*01:03L HLA-DRB1*04:04L HLA-DRB1*04:05L HLA-DQA1*01:02-B1*06:02L HLA-DRB1*01:02L HLA-DPA1*03:01-B1*04:02L HLA-DRB1*14:01L HLA-DRB1*12:01L HLA-DPA1*03:01-B1*105:01L HLA-DQA1*01:03-B1*06:01L
  REGION 1..13: note = CONT. FROM ABOVE: HLA-DRB1*04:08L HLA-DRB1*15:01L
LPFFYYSDSPCES

SEQ ID NO: 16036 - protein, 13 aa, Severe acute respiratory syndrome coronavirus 2
  REGION 1..13: note = Table B: HLA-DRB1*01:03L HLA-DRB1*04:05L HLA-DPA1*02:01-B1*13:01L
SDIDYVPLKSATC

SEQ ID NO: 16037 - protein, 12 aa, Severe acute respiratory syndrome coronavirus 2
  REGION 1..12: note = Table B: HLA-DRB1*01:03L HLA-DQA1*01:02-B1*06:02L HLA-DPA1*03:01-B1*105:01L HLA-DRB1*04:08L
IDYVPLKSATCI

SEQ ID NO: 16038 - protein, 11 aa, Severe acute respiratory syndrome coronavirus 2
  REGION 1..11: note = Table B: HLA-DRB1*01:03L HLA-DRB1*01:02L HLA-DQA1*03:01-B1*03:02L HLA-DQA1*02:01-B1*03:03L
VPLKSATCITR

SEQ ID NO: 16039 - protein, 12 aa, Severe acute respiratory syndrome coronavirus 2
  REGION 1..12: note = Table B: HLA-DRB1*01:03L HLA-DRB1*01:02L HLA-DRB1*14:01L HLA-DRB1*08:01L HLA-DRB1*12:01L HLA-DRB1*16:01L HLA-DRB1*04:08L HLA-DRB1*15:03L
GAVCRHHANEYR

SEQ ID NO: 16040 - protein, 13 aa, Severe acute respiratory syndrome coronavirus 2
  REGION 1..13: note = Table B: HLA-DRB1*01:03L HLA-DRB1*04:02L HLA-DRB1*04:04L HLA-DRB4*03:01NL HLA-DRB1*08:77L HLA-DRB3*02:01L HLA-DPA1*01:03-B1*03:01L HLA-DRB1*11:03L HLA-DRB1*14:02L HLA-DQA1*01-B1*05L HLA-DRB4*01:01L HLA-DRB1*04:10L
  REGION 1..13: note = CONT. FROM ABOVE: HLA-DRB1*09:01L HLA-DRB1*12:02L HLA-DQA1*03:01 -B1*03:02L HLA-DRB1*14:54L HLA-DPA1*01:03-B1*104:01L HLA-DPA1*01 :02-B1*04:01L HLA-DRB1*07:01L HLA-DRB1*10:01L HLA-DRB1*04:08L
LDAYNMMISAGFS

SEQ ID NO: 16041 - protein, 12 aa, Severe acute respiratory syndrome coronavirus 2
  REGION 1..12: note = Table B: HLA-DRB1*01:03L HLA-DQA1*01:02-B1*06:02L HLA-DRB1*01:02L HLA-DRB1*14:01L HLA-DQA1*05:05-B1*03:19L HLA-DPA1*03:01-B1*105:01L HLA-DRB1*16:01L HLA-DRB1*04:08L
ENVAFNVVNKGH

SEQ ID NO: 16042 - protein, 11 aa, Severe acute respiratory syndrome coronavirus 2
  REGION 1..11: note = Table B: HLA-DRB1*01:03L HLA-DRB1*14:17L HLA-DRB1*16:01L
FNVVNKGHFDG

SEQ ID NO: 16043 - protein, 13 aa, Severe acute respiratory syndrome coronavirus 2
  REGION 1..13: note = Table B: HLA-DRB1*01:03L HLA-DRB1*04:02L HLA-DQA1*01:02-B1*06:02L HLA-DRB1*01:02L HLA-DPA1*03:01-B1*105:01L HLA-DRB1*14:17L HLA-DRB1*16:01L HLA-DQA1*01:03-B1*06:01L HLA-DRB1*04:08L
GHFDGQQGEVPVS

SEQ ID NO: 16044 - protein, 13 aa, Severe acute respiratory syndrome coronavirus 2
  REGION 1..13: note = Table B: HLA-DRB1*01:03L HLA-DPA1*01:03-B1*03:01L HLA-DQA1*01-B1*05L HLA-DRB1*12:01L HLA-DRB1*04:08L
DGQQGEVPVSIIN

SEQ ID NO: 16045 - protein, 13 aa, Severe acute respiratory syndrome coronavirus 2
  REGION 1..13: note = Table B: HLA-DRB1*01:03L HLA-DRB1*04:05L HLA-DRB1*12:01L HLA-DRB1*04:08L HLA-DRB1*15:03L
DGVDVELFENKTT

SEQ ID NO: 16046 - protein, 14 aa, Severe acute respiratory syndrome coronavirus 2
  REGION 1..14: note = Table B: HLA-DRB1*01:03L HLA-DRB1*01:02L HLA-DRB3*01:01L
AFELWAKRNIKPVP

SEQ ID NO: 16047 - protein, 11 aa, Severe acute respiratory syndrome coronavirus 2
  REGION 1..11: note = Table B: HLA-DRB1*01:03L HLA-DRB1*04:05L HLA-DRB1*01:02L HLA-DRB1*08:01L HLA-DRB1*12:01L HLA-DPA1*02:01-B1*13:01L HLA-DPA1*01:02-B1*04:01L HLA-DRB1*16:01L HLA-DQA1*02:01-B1*03:03L
WAKRNIKPVPE

SEQ ID NO: 16048 - protein, 10 aa, Severe acute respiratory syndrome coronavirus 2
  REGION 1..10: note = Table B: HLA-DRB1*01:03L HLA-DRB1*08:01L HLA-DRB1*12:01L HLA-DQA1*03:01-B1*03:02L HLA-DRB1*16:01L HLA-DQA1*02:01-B1*03:03L
RNIKPVPEVK

SEQ ID NO: 16049 - protein, 11 aa, Severe acute respiratory syndrome coronavirus 2
  REGION 1..11: note = Table B: HLA-DRB1*01:03L HLA-DRB1*04:05L HLA-DRB1*04:08L
IWDYKRDAPAH

SEQ ID NO: 16050 - protein, 14 aa, Severe acute respiratory syndrome coronavirus 2
  REGION 1..14: note = Table B: HLA-DRB1*01:03L HLA-DRB1*04:08L
DLFRNARNGVLITE

SEQ ID NO: 16051 - protein, 12 aa, Severe acute respiratory syndrome coronavirus 2
  REGION 1..12: note = Table B: HLA-DRB1*01:03L HLA-DRB1*04:02L HLA-DRB1*04:05L HLA-DQA1*01:02-B1*06:02L HLA-DRB1*01:02L HLA-DRB4*03:01NL HLA-DQA1*05:05-B1*03:19L HLA-DPA1*03:01-B1*105:01L HLA-DQA1*05:05-B1*03:01L HLA-DRB1*16:01L HLA-DRB1*04:08L
LITEGSVKGLQP

SEQ ID NO: 16052 - protein, 13 aa, Severe acute respiratory syndrome coronavirus 2
  REGION 1..13: note = Table B: HLA-DRB1*01:03L HLA-DRB1*04:04L HLA-DRB4*03:01NL HLA-DPA1*01:03-B1*03:01L HLA-DQA1*05:01-B1*02:01L HLA-DPA1*03:01-B1*105:01L HLA-DRB1*14:54L HLA-DRB1*16:01L HLA-DQA1*01:03-B1*06:01L HLA-DRB1*04:08L HLA-DRB1*15:03L
EGSVKGLQPSVGP

SEQ ID NO: 16053 - protein, 15 aa, Severe acute respiratory syndrome coronavirus 2
  REGION 1..15: note = Table B: HLA-DRB1*01:03L HLA-DRB1*01:02L HLA-DRB1*04:08L
QPSVGPKQASLNGVT

SEQ ID NO: 16054 - protein, 18 aa, Severe acute respiratory syndrome coronavirus 2
  REGION 1..18: note = Table B: HLA-DRB1*01:03L HLA-DRB1*04:05L HLA-DRB1*14:02L HLA-DPA1*01:03-B1*04:02L HLA-DRB1*16:01L
GPKQASLNGVTLIGEAVK

SEQ ID NO: 16055 - protein, 12 aa, Severe acute respiratory syndrome coronavirus 2
  REGION 1..12: note = Table B: HLA-DRB1*01:03L HLA-DRB4*03:01NL HLA-DRB1*08:04L HLA-DRB1*14:01L HLA-DRB1*04:10L HLA-DRB1*14:54L HLA-DRB1*08:03L
ETYFTQSRNLQE

SEQ ID NO: 16056 - protein, 12 aa, Severe acute respiratory syndrome coronavirus 2
  REGION 1..12: note = Table B: HLA-DRB1*01:03L HLA-DRB1*04:05L HLA-DRB1*01:02L HLA-DPA1*03:01-B1*04:02L HLA-DRB1*14:01L HLA-DRB1*08:01L HLA-DQA1*01-B1*05L HLA-DRB1*12:01L HLA-DPA1*02:01-B1*13:01L HLA-DPA1*03:01-B1*105:01L HLA-DQA1*03:01-B1*03:02L
  REGION 1..12: note = CONT. FROM ABOVE: HLA-DPA1*01:02-B1*04:01L HLA-DRB1*16:01L HLA-D RB1*04:08L HLA-DRB1*15:03L
IERYKLEGYAFE

SEQ ID NO: 16057 - protein, 12 aa, Severe acute respiratory syndrome coronavirus 2
  REGION 1..12: note = Table B: HLA-DRB1*01:03L HLA-DQA1*01:02-B1*06:02L HLA-DRB1*01:02L HLA-DPA1*01:03-B1*03:01L HLA-DRB1*08:01L HLA-DPA1*01:03-B1*04:01L HLA-DPA1*01:03-B1*04:02L HLA-DRB1*12:01L HLA-DPA1*02:01-B1*13:01L
  REGION 1..12: note = CONT. FROM ABOVE: HLA-DPA1*03:01-B1*105:01L HLA-DRB1*16:01L HLA- DQA1*01:03-B1*06:01L HLA-DRB1*04:08L HLA-DQA1*02:01-B1*03:03L HL A-DRB1*15:03L
YKLEGYAFEHIV

SEQ ID NO: 16058 - protein, 12 aa, Severe acute respiratory syndrome coronavirus 2
  REGION 1..12: note = Table B: HLA-DRB1*01:03L HLA-DPA1*03:01-B1*04:02L HLA-DPA1*01:03-B1*04:02L HLA-DQA1*03:01-B1*03:02L HLA-DRB1*04:08L
LEGYAFEHIVYG

SEQ ID NO: 16059 - protein, 12 aa, Severe acute respiratory syndrome coronavirus 2
  REGION 1..12: note = Table B: HLA-DRB1*01:03L HLA-DRB1*04:08L
YAFEHIVYGDFS

SEQ ID NO: 16060 - protein, 12 aa, Severe acute respiratory syndrome coronavirus 2
  REGION 1..12: note = Table B: HLA-DRB1*01:03L HLA-DRB1*01:02L HLA-DRB1*12:01L HLA-DRB1*16:01L HLA-DRB1*04:08L HLA-DQA1*02:01-B1*03:03L HLA-DRB1*15:03L
GGLHLLIGLAKR

SEQ ID NO: 16061 - protein, 14 aa, Severe acute respiratory syndrome coronavirus 2
  REGION 1..14: note = Table B: HLA-DRB1*01:03L HLA-DRB1*04:05L HLA-DRB1*04:08L
GLHLLIGLAKRFKE

SEQ ID NO: 16062 - protein, 15 aa, Severe acute respiratory syndrome coronavirus 2
  REGION 1..15: note = Table B: HLA-DRB1*01:03L HLA-DRB3*01:01L HLA-DRB1*04:08L
LHLLIGLAKRFKESP

SEQ ID NO: 16063 - protein, 13 aa, Severe acute respiratory syndrome coronavirus 2
  REGION 1..13: note = Table B: HLA-DRB1*01:03L HLA-DRB1*04:05L HLA-DQA1*01:02-B1*06:02L HLA-DRB1*14:01L HLA-DRB1*08:01L HLA-DQA1*01-B1*05L HLA-DPA1*02:01-B1*13:01L HLA-DQA1*03:01-B1*03:02L HLA-DPA1*01:02-B1*04:01L
  REGION 1..13: note = CONT. FROM ABOVE: HLA-DRB1*16:01L HLA-DRB1*04:08L HLA-DQA1*02:01 -B1*03:03L
IGLAKRFKESPFE

SEQ ID NO: 16064 - protein, 12 aa, Severe acute respiratory syndrome coronavirus 2
  REGION 1..12: note = Table B: HLA-DRB1*01:03L HLA-DRB1*01:02L HLA-DPA1*03:01-B1*04:02L HLA-DRB1*08:01L HLA-DPA1*01:03-B1*04:01L HLA-DRB1*12:01L HLA-DPA1*02:01-B1*13:01L HLA-DPA1*03:01-B1*105:01L
  REGION 1..12: note = CONT. FROM ABOVE: HLA-DRB1*04:08L HLA-DRB1*15:03L
AKRFKESPFELE

SEQ ID NO: 16065 - protein, 12 aa, Severe acute respiratory syndrome coronavirus 2
  REGION 1..12: note = Table B: HLA-DRB1*01:03L HLA-DPA1*03:01-B1*04:02L HLA-DRB1*08:01L HLA-DRB1*04:08L
KRFKESPFELED

SEQ ID NO: 16066 - protein, 11 aa, Severe acute respiratory syndrome coronavirus 2
  REGION 1..11: note = Table B: HLA-DRB1*01:03L HLA-DRB1*01:02L HLA-DPA1*01:03-B1*03:01L HLA-DRB1*08:01L HLA-DQA1*01-B1*05L HLA-DQA1*05:01-B1*02:01L HLA-DPA1*01:03-B1*04:01L HLA-DPA1*01:03-B1*04:02L HLA-DRB1*12:01L
  REGION 1..11: note = CONT. FROM ABOVE: HLA-DPA1*03:01-B1*105:01L HLA-DRB1*16:01L HLA- DQA1*01:03-B1*06:01L HLA-DRB1*04:08L HLA-DRB1*15:03L
SPFELEDFIPM

SEQ ID NO: 16067 - protein, 12 aa, Severe acute respiratory syndrome coronavirus 2
  REGION 1..12: note = Table B: HLA-DRB1*01:03L HLA-DPA1*01:03-B1*02:01L
PFELEDFIPMDS

SEQ ID NO: 16068 - protein, 12 aa, Severe acute respiratory syndrome coronavirus 2
  REGION 1..12: note = Table B: HLA-DRB1*01:03L HLA-DRB1*16:01L HLA-DQA1*01:03-B1*06:01L HLA-DRB1*04:08L
FELEDFIPMDST

SEQ ID NO: 16069 - protein, 11 aa, Severe acute respiratory syndrome coronavirus 2
  REGION 1..11: note = Table B: HLA-DRB1*01:03L HLA-DQA1*01:02-B1*06:02L HLA-DPA1*01:03-B1*03:01L HLA-DRB1*12:01L HLA-DPA1*01:03-B1*02:01L HLA-DRB1*04:08L HLA-DRB1*15:03L
LLLDDFVEIIK

SEQ ID NO: 16070 - protein, 11 aa, Severe acute respiratory syndrome coronavirus 2
  REGION 1..11: note = Table B: HLA-DRB1*01:03L HLA-DRB1*04:04L HLA-DRB1*08:04L HLA-DPA1*01:03-B1*03:01L HLA-DQA1*05:05-B1*03:19L HLA-DPA1*02:01-B1*13:01L HLA-DQA1*05:05-B1*03:01L HLA-DRB1*04:08L HLA-DRB1*08:03L
FVEIIKSQDLS

SEQ ID NO: 16071 - protein, 14 aa, Severe acute respiratory syndrome coronavirus 2
  REGION 1..14: note = Table B: HLA-DRB1*01:03L HLA-DRB1*16:01L
YTEISFMLWCKDGH

SEQ ID NO: 16072 - protein, 13 aa, Severe acute respiratory syndrome coronavirus 2
  REGION 1..13: note = Table B: HLA-DRB1*01:03L HLA-DRB1*04:05L HLA-DRB1*01:02L HLA-DRB1*08:04L HLA-DRB1*14:01L HLA-DRB1*08:01L HLA-DQA1*01-B1*05L HLA-DQA1*05:01-B1*02:01L HLA-DPA1*01:03-B1*04:01L HLA-DPA1*01:03-B1*04:02L
  REGION 1..13: note = CONT. FROM ABOVE: HLA-DRB1*12:01L HLA-DPA1*02:01-B1*13:01L HLA-D RB1*16:01L HLA-DQA1*01:03-B1*06:01L HLA-DRB1*04:08L HLA-DQA1*02: 01-B1*03:03L
ISFMLWCKDGHVE

SEQ ID NO: 16073 - protein, 13 aa, Severe acute respiratory syndrome coronavirus 2
  REGION 1..13: note = Table B: HLA-DRB1*01:03L HLA-DRB1*04:08L
SQAWQPGVAMPNL

SEQ ID NO: 16074 - protein, 12 aa, Severe acute respiratory syndrome coronavirus 2
  REGION 1..12: note = Table B: HLA-DRB1*01:03L HLA-DRB1*04:02L HLA-DRB1*01:02L HLA-DRB1*08:01L HLA-DRB1*11:01L HLA-DQA1*05:05-B1*03:116L HLA-DPA1*01:03-B1*04:02L HLA-DRB1*12:01L HLA-DRB1*04:08L
WQPGVAMPNLYK

SEQ ID NO: 16075 - protein, 11 aa, Severe acute respiratory syndrome coronavirus 2
  REGION 1..11: note = Table B: HLA-DRB1*01:03L HLA-DRB1*08:01L HLA-DRB1*16:01L HLA-DRB1*04:08L
LYKMQRMLLEK

SEQ ID NO: 16076 - protein, 14 aa, Severe acute respiratory syndrome coronavirus 2
  REGION 1..14: note = Table B: HLA-DRB1*01:03L HLA-DRB1*01:02L HLA-DRB1*08:01L HLA-DRB1*04:08L
QRMLLEKCDLQNYG

SEQ ID NO: 16077 - protein, 11 aa, Severe acute respiratory syndrome coronavirus 2
  REGION 1..11: note = Table B: HLA-DRB1*01:03L HLA-DRB1*04:05L HLA-DRB3*02:01L HLA-DPA1*01:03-B1*03:01L HLA-DRB1*08:01L HLA-DQA1*05:05-B1*03:116L HLA-DRB1*09:01L HLA-DPA1*02:01-B1*13:01L HLA-DPA1*01:03-B1*104:01L
  REGION 1..11: note = CONT. FROM ABOVE: HLA-DQA1*05:05-B1*03:01L HLA-DRB1*04:08L HLA-D RB1*08:03L
IMMNVAKYTQL

SEQ ID NO: 16078 - protein, 13 aa, Severe acute respiratory syndrome coronavirus 2
  REGION 1..13: note = Table B: HLA-DRB1*01:03L HLA-DRB1*04:05L HLA-DRB1*01:02L HLA-DRB1*08:04L HLA-DPA1*01:03-B1*04:01L HLA-DPA1*01:03-B1*04:02L HLA-DRB1*12:01L HLA-DPA1*02:01-B1*13:01L HLA-DPA1*01:03-B1*104:01L
  REGION 1..13: note = CONT. FROM ABOVE: HLA-DRB1*16:01L HLA-DRB1*04:08L HLA-DRB1*15:03 L
NVAKYTQLCQYLN

SEQ ID NO: 16079 - protein, 15 aa, Severe acute respiratory syndrome coronavirus 2
  REGION 1..15: note = Table B: HLA-DRB1*01:03L HLA-DRB1*04:05L HLA-DRB1*04:08L
NTLTLAVPYNMRVIH

SEQ ID NO: 16080 - protein, 13 aa, Severe acute respiratory syndrome coronavirus 2
  REGION 1..13: note = Table B: HLA-DRB1*01:03L HLA-DRB4*03:01NL
TGTLLVDSDLNDF

SEQ ID NO: 16081 - protein, 14 aa, Severe acute respiratory syndrome coronavirus 2
  REGION 1..14: note = Table B: HLA-DRB1*01:03L HLA-DRB1*04:05L HLA-DRB1*01:02L HLA-DPA1*01:03-B1*03:01L HLA-DRB1*12:01L HLA-DRB1*15:03L
ADSTLIGDCATVHT

SEQ ID NO: 16082 - protein, 14 aa, Severe acute respiratory syndrome coronavirus 2
  REGION 1..14: note = Table B: HLA-DRB1*01:03L HLA-DRB1*04:04L HLA-DRB1*04:05L HLA-DRB1*01:02L HLA-DRB1*08:04L HLA-DPA1*01:03-B1*03:01L HLA-DRB1*14:01L HLA-DQA1*05:01-B1*02:01L HLA-DRB1*04:10L HLA-DRB1*12:01L HLA-DRB1*14:17L HLA-DRB1*16:01L HLA-DRB1*04:08L
  REGION 1..14: note = CONT. FROM ABOVE: HLA-DRB1*15:03L
STLIGDCATVHTAN

SEQ ID NO: 16083 - protein, 14 aa, Severe acute respiratory syndrome coronavirus 2
  REGION 1..14: note = Table B: HLA-DRB1*01:03L HLA-DRB1*01:02L HLA-DQA1*01:01-B1*05:01L HLA-DRB1*12:01L HLA-DPA1*02:01-B1*13:01L HLA-DRB1*16:01L HLA-DQA1*01:03-B1*06:01L HLA-DRB1*04:08L
DPKTKNVTKENDSK

SEQ ID NO: 16084 - protein, 13 aa, Severe acute respiratory syndrome coronavirus 2
  REGION 1..13: note = Table B: HLA-DRB1*01:03L HLA-DPA1*01:03-B1*04:02L HLA-DRB1*12:01L HLA-DRB1*16:01L HLA-DRB1*04:08L
GFFTYICGFIQQK

SEQ ID NO: 16085 - protein, 11 aa, Severe acute respiratory syndrome coronavirus 2
  REGION 1..11: note = Table B: HLA-DRB1*01:03L HLA-DRB1*04:02L HLA-DRB1*14:17L HLA-DRB1*16:01L
FIQQKLALGGS

SEQ ID NO: 16086 - protein, 12 aa, Severe acute respiratory syndrome coronavirus 2
  REGION 1..12: note = Table B: HLA-DRB1*01:03L HLA-DRB1*01:02L HLA-DRB1*08:01L HLA-DRB1*04:08L
LGGSVAIKITEH

SEQ ID NO: 16087 - protein, 10 aa, Severe acute respiratory syndrome coronavirus 2
  REGION 1..10: note = Table B: HLA-DRB1*01:03L HLA-DQA1*01:02-B1*06:02L HLA-DRB1*14:02L HLA-DQA1*05:05-B1*03:19L HLA-DQA1*05:01-B1*02:01L HLA-DPA1*01:03-B1*04:01L HLA-DPA1*02:01-B1*13:01L HLA-DPA1*03:01-B1*105:01L
  REGION 1..10: note = CONT. FROM ABOVE: HLA-DQA1*01:03-B1*06:01L HLA-DQA1*02:01-B1*03: 03L HLA-DRB1*15:03L
VAIKITEHSW

SEQ ID NO: 16088 - protein, 12 aa, Severe acute respiratory syndrome coronavirus 2
  REGION 1..12: note = Table B: HLA-DRB1*01:03L HLA-DRB1*01:02L HLA-DPA1*01:03-B1*03:01L HLA-DRB1*14:02L HLA-DPA1*02:01-B1*13:01L HLA-DRB1*04:08L
EHSWNADLYKLM

SEQ ID NO: 16089 - protein, 13 aa, Severe acute respiratory syndrome coronavirus 2
  REGION 1..13: note = Table B: HLA-DRB1*01:03L HLA-DPA1*01:03-B1*02:01L
HSWNADLYKLMGH

SEQ ID NO: 16090 - protein, 13 aa, Severe acute respiratory syndrome coronavirus 2
  REGION 1..13: note = Table B: HLA-DRB1*01:03L HLA-DRB1*04:05L HLA-DRB1*01:02L HLA-DRB1*11:03L HLA-DQA1*01:01-B1*05:01L HLA-DRB1*04:10L HLA-DRB1*09:01L HLA-DPA1*01:02-B1*04:01L
VTNVNASSSEAFL

SEQ ID NO: 16091 - protein, 14 aa, Severe acute respiratory syndrome coronavirus 2
  REGION 1..14: note = Table B: HLA-DRB1*01:03L HLA-DRB1*04:04L HLA-DRB1*08:04L HLA-DRB1*12:01L HLA-DQA1*05:05-B1*03:01L
SEAFLIGCNYLGKP

SEQ ID NO: 16092 - protein, 12 aa, Severe acute respiratory syndrome coronavirus 2
  REGION 1..12: note = Table B: HLA-DRB1*01:03L HLA-DRB1*01:02L HLA-DPA1*03:01-B1*105:01L HLA-DRB1*16:01L HLA-DRB1*04:08L
FLIGCNYLGKPR

SEQ ID NO: 16093 - protein, 13 aa, Severe acute respiratory syndrome coronavirus 2
  REGION 1..13: note = Table B: HLA-DRB1*01:03L HLA-DRB1*04:05L HLA-DQA1*01:02-B1*06:02L HLA-DRB1*01:02L HLA-DRB1*14:01L HLA-DRB1*08:01L HLA-DRB1*12:01L HLA-DRB1*14:17L HLA-DRB1*04:08L
HANYIFWRNTNPI

SEQ ID NO: 16094 - protein, 14 aa, Severe acute respiratory syndrome coronavirus 2
  REGION 1..14: note = Table B: HLA-DRB1*01:03L HLA-DRB1*04:08L
LKLRGTAVMSLKEG

SEQ ID NO: 16095 - protein, 14 aa, Severe acute respiratory syndrome coronavirus 2
  REGION 1..14: note = Table B: HLA-DRB1*01:03L HLA-DRB1*12:01L HLA-DRB1*04:08L
KLRGTAVMSLKEGQ

SEQ ID NO: 16096 - protein, 12 aa, Severe acute respiratory syndrome coronavirus 2
  REGION 1..12: note = Table B: HLA-DRB1*01:03L HLA-DRB1*08:04L HLA-DPA1*01:03-B1*03:01L HLA-DRB1*11:03L HLA-DRB1*14:02L HLA-DRB1*09:01L HLA-DPA1*02:01-B1*13:01L
TAVMSLKEGQIN

SEQ ID NO: 16097 - protein, 11 aa, Severe acute respiratory syndrome coronavirus 2
  REGION 1..11: note = Table B: HLA-DRB1*01:03L HLA-DRB1*01:02L HLA-DRB4*03:01NL
VMSLKEGQIND

SEQ ID NO: 16098 - protein, 10 aa, Severe acute respiratory syndrome coronavirus 2
  REGION 1..10: note = Table B: HLA-DRB1*01:03L HLA-DRB1*14:01L HLA-DRB1*16:01L
LLSKGRLIIR

SEQ ID NO: 16099 - protein, 12 aa, Severe acute respiratory syndrome coronavirus 2
  REGION 1..12: note = Table B: HLA-DRB1*01:03L HLA-DRB1*01:02L HLA-DRB1*12:01L HLA-DRB1*16:01L HLA-DRB1*04:08L
KGRLIIRENNRV

SEQ ID NO: 16100 - protein, 11 aa, Severe acute respiratory syndrome coronavirus 2
  REGION 1..11: note = Table B: HLA-DRB1*01:03L HLA-DPA1*01:02-B1*04:01L
RGVYYPDKVFR

SEQ ID NO: 16101 - protein, 13 aa, Severe acute respiratory syndrome coronavirus 2
  REGION 1..13: note = Table B: HLA-DRB1*01:03L HLA-DPA1*01:03-B1*04:01L HLA-DPA1*01:03-B1*04:02L HLA-DPA1*01:03-B1*02:01L HLA-DRB1*16:01L HLA-DRB1*04:08L
PFFSNVTWFHAIH

SEQ ID NO: 16102 - protein, 11 aa, Severe acute respiratory syndrome coronavirus 2
  REGION 1..11: note = Table B: HLA-DRB1*01:03L HLA-DQA1*01:02-B1*06:02L
HVSGTNGTKRF

SEQ ID NO: 16103 - protein, 14 aa, Severe acute respiratory syndrome coronavirus 2
  REGION 1..14: note = Table B: HLA-DRB1*01:03L HLA-DRB1*04:04L
NGTKRFDNPVLPFN

SEQ ID NO: 16104 - protein, 11 aa, Severe acute respiratory syndrome coronavirus 2
  REGION 1..11: note = Table B: HLA-DRB1*01:03L HLA-DRB1*04:02L HLA-DRB4*03:01NL HLA-DRB1*14:01L HLA-DQA1*05:05-B1*03:116L HLA-DQA1*05:05-B1*03:01L HLA-DPA1*01:02-B1*04:01L HLA-DRB1*10:01L
NPVLPFNDGVY

SEQ ID NO: 16105 - protein, 13 aa, Severe acute respiratory syndrome coronavirus 2
  REGION 1..13: note = Table B: HLA-DRB1*01:03L HLA-DRB1*08:04L HLA-DRB1*14:02L HLA-DPA1*02:01-B1*13:01L
SNIIRGWIFGTTL

SEQ ID NO: 16106 - protein, 11 aa, Severe acute respiratory syndrome coronavirus 2
  REGION 1..11: note = Table B: HLA-DRB1*01:03L HLA-DRB1*04:05L HLA-DQA1*01-B1*05L HLA-DRB1*04:10L HLA-DRB1*12:02L HLA-DRB1*14:54L
LLIVNNATNVV

SEQ ID NO: 16107 - protein, 11 aa, Severe acute respiratory syndrome coronavirus 2
  REGION 1..11: note = Table B: HLA-DRB1*01:03L HLA-DQA1*01:02-B1*06:02L HLA-DPA1*01:03-B1*03:01L HLA-DRB1*11:03L HLA-DQA1*01-B1*05L HLA-DRB1*14:54L
LIVNNATNVVI

SEQ ID NO: 16108 - protein, 14 aa, Severe acute respiratory syndrome coronavirus 2
  REGION 1..14: note = Table B: HLA-DRB1*01:03L HLA-DRB1*01:02L HLA-DRB1*08:04L HLA-DPA1*01:03-B1*04:01L HLA-DPA1*01:03-B1*02:01L HLA-DRB1*16:01L HLA-DRB1*04:08L
VVIKVCEFQFCNDP

SEQ ID NO: 16109 - protein, 14 aa, Severe acute respiratory syndrome coronavirus 2
  REGION 1..14: note = Table B: HLA-DRB1*01:03L HLA-DPA1*01:03-B1*04:01L HLA-DPA1*01:03-B1*02:01L HLA-DRB1*16:01L HLA-DRB1*04:08L HLA-DRB1*15:03L
VIKVCEFQFCNDPF

SEQ ID NO: 16110 - protein, 14 aa, Severe acute respiratory syndrome coronavirus 2
  REGION 1..14: note = Table B: HLA-DRB1*01:03L HLA-DRB1*01:02L HLA-DRB1*12:01L HLA-DPA1*01:03-B1*02:01L
FQFCNDPFLGVYYH

SEQ ID NO: 16111 - protein, 11 aa, Severe acute respiratory syndrome coronavirus 2
  REGION 1..11: note = Table B: HLA-DRB1*01:03L HLA-DPA1*03:01-B1*04:02L HLA-DRB1*08:01L HLA-DPA1*01:03-B1*04:01L HLA-DPA1*01:03-B1*04:02L HLA-DPA1*03:01-B1*105:01L HLA-DRB1*16:01L HLA-DQA1*01:03-B1*06:01L HLA-DRB1*04:08L
DPFLGVYYHKN

SEQ ID NO: 16112 - protein, 12 aa, Severe acute respiratory syndrome coronavirus 2
  REGION 1..12: note = Table B: HLA-DRB1*01:03L HLA-DQA1*01:02-B1*06:02L HLA-DRB1*01:02L HLA-DRB1*11:04L HLA-DRB1*08:01L HLA-DRB1*11:01L HLA-DRB1*12:01L HLA-DPA1*01:03-B1*02:01L
PFLGVYYHKNNK

SEQ ID NO: 16113 - protein, 12 aa, Severe acute respiratory syndrome coronavirus 2
  REGION 1..12: note = Table B: HLA-DRB1*01:03L HLA-DRB1*16:01L HLA-DRB1*04:08L
FLGVYYHKNNKS

SEQ ID NO: 16114 - protein, 14 aa, Severe acute respiratory syndrome coronavirus 2
  REGION 1..14: note = Table B: HLA-DRB1*01:03L HLA-DRB1*04:05L HLA-DRB1*08:01L HLA-DRB1*12:01L HLA-DPA1*03:01-B1*105:01L HLA-DPA1*01:02-B1*04:01L HLA-DRB1*15:03L
YHKNNKSWMESEFR

SEQ ID NO: 16115 - protein, 12 aa, Severe acute respiratory syndrome coronavirus 2
  REGION 1..12: note = Table B: HLA-DRB1*01:03L HLA-DRB1*04:05L HLA-DRB1*01:02L HLA-DPA1*01:03-B1*03:01L HLA-DRB1*12:01L HLA-DPA1*02:01-B1*13:01L HLA-DPA1*03:01-B1*105:01L HLA-DRB1*16:01L HLA-DRB1*04:08L HLA-DQA1*02:01-B1*03:03L
  REGION 1..12: note = CONT. FROM ABOVE: HLA-DRB1*15:03L
EFRVYSSANNCT

SEQ ID NO: 16116 - protein, 12 aa, Severe acute respiratory syndrome coronavirus 2
  REGION 1..12: note = Table B: HLA-DRB1*01:03L HLA-DPA1*01:03-B1*03:01L
FEYVSQPFLMDL

SEQ ID NO: 16117 - protein, 11 aa, Severe acute respiratory syndrome coronavirus 2
  REGION 1..11: note = Table B: HLA-DRB1*01:03L HLA-DPA1*01:03-B1*03:01L HLA-DRB1*12:01L
YVSQPFLMDLE

SEQ ID NO: 16118 - protein, 12 aa, Severe acute respiratory syndrome coronavirus 2
  REGION 1..12: note = Table B: HLA-DRB1*01:03L HLA-DRB1*01:02L HLA-DQA1*05:01-B1*02:01L HLA-DRB1*16:01L HLA-DRB1*04:08L HLA-DQA1*02:01-B1*03:03L
PFLMDLEGKQGN

SEQ ID NO: 16119 - protein, 13 aa, Severe acute respiratory syndrome coronavirus 2
  REGION 1..13: note = Table B: HLA-DRB1*01:03L HLA-DRB1*04:05L HLA-DRB1*01:02L HLA-DRB1*12:01L HLA-DPA1*02:01-B1*13:01L HLA-DPA1*03:01-B1*105:01L HLA-DRB1*15:03L
KNLREFVFKNIDG

SEQ ID NO: 16120 - protein, 10 aa, Severe acute respiratory syndrome coronavirus 2
  REGION 1..10: note = Table B: HLA-DRB1*01:03L HLA-DQA1*01:02-B1*06:02L HLA-DPA1*01:03-B1*03:01L HLA-DRB1*03:01L HLA-DRB1*14:02L HLA-DQA1*05:05-B1*03:19L HLA-DQA1*05:01-B1*02:01L HLA-DPA1*01:03-B1*104:01L HLA-DRB1*16:01L
  REGION 1..10: note = CONT. FROM ABOVE: HLA-DQA1*02:01-B1*03:03L
KNIDGYFKIY

SEQ ID NO: 16121 - protein, 10 aa, Severe acute respiratory syndrome coronavirus 2
  REGION 1..10: note = Table B: HLA-DRB1*01:03L HLA-DRB1*14:01L HLA-DRB1*08:01L HLA-DQA1*03:01-B1*03:02L HLA-DRB1*16:01L HLA-DQA1*02:01-B1*03:03L
KIYSKHTPIN

SEQ ID NO: 16122 - protein, 10 aa, Severe acute respiratory syndrome coronavirus 2
  REGION 1..10: note = Table B: HLA-DRB1*01:03L HLA-DQA1*01:02-B1*06:02L HLA-DRB1*14:02L HLA-DPA1*02:01-B1*13:01L HLA-DPA1*03:01-B1*105:01L HLA-DQA1*01:03-B1*06:01L HLA-DQA1*02:01-B1*03:03L HLA-DRB1*15:03L
NLVRDLPQGF

SEQ ID NO: 16123 - protein, 10 aa, Severe acute respiratory syndrome coronavirus 2
  REGION 1..10: note = Table B: HLA-DRB1*01:03L HLA-DQA1*01:02-B1*06:02L HLA-DPA1*03:01-B1*04:02L HLA-DQA1*01-B1*05L HLA-DPA1*01:03-B1*04:01L HLA-DPA1*01:03-B1*04:02L HLA-DRB1*12:01L HLA-DPA1*03:01-B1*105:01L
  REGION 1..10: note = CONT. FROM ABOVE: HLA-DPA1*01:02-B1*04:01L HLA-DRB1*16:01L HLA-D QA1*01:03-B1*06:01L HLA-DRB1*04:08L HLA-DQA1*02:01-B1*03:03L HLA -DRB1*15:03L
INITRFQTLL

SEQ ID NO: 16124 - protein, 11 aa, Severe acute respiratory syndrome coronavirus 2
  REGION 1..11: note = Table B: HLA-DRB1*01:03L HLA-DRB1*04:05L HLA-DRB1*01:02L HLA-DRB1*08:01L HLA-DRB1*04:08L
TRFQTLLALHR

SEQ ID NO: 16125 - protein, 12 aa, Severe acute respiratory syndrome coronavirus 2
  REGION 1..12: note = Table B: HLA-DRB1*01:03L HLA-DPA1*03:01-B1*105:01L HLA-DRB1*04:08L HLA-DRB1*15:03L
RFQTLLALHRSY

SEQ ID NO: 16126 - protein, 12 aa, Severe acute respiratory syndrome coronavirus 2
  REGION 1..12: note = Table B: HLA-DRB1*01:03L HLA-DRB1*01:02L HLA-DRB1*14:01L HLA-DRB1*12:01L HLA-DRB1*16:01L HLA-DRB1*15:03L
LLALHRSYLTPG

SEQ ID NO: 16127 - protein, 14 aa, Severe acute respiratory syndrome coronavirus 2
  REGION 1..14: note = Table B: HLA-DRB1*01:03L HLA-DRB1*01:02L HLA-DQA1*01:01-B1*05:01L HLA-DQA1*05:05-B1*03:116L HLA-DRB1*04:08L
DSSSGWTAGAAAYY

SEQ ID NO: 16128 - protein, 12 aa, Severe acute respiratory syndrome coronavirus 2
  REGION 1..12: note = Table B: HLA-DRB1*01:03L HLA-DRB1*04:05L HLA-DRB1*08:01L HLA-DRB1*04:08L
VGYLQPRTFLLK

SEQ ID NO: 16129 - protein, 10 aa, Severe acute respiratory syndrome coronavirus 2
  REGION 1..10: note = Table B: HLA-DRB1*01:03L HLA-DQA1*01:02-B1*06:02L HLA-DRB1*03:01L HLA-DQA1*05:05-B1*03:19L HLA-DQA1*05:01-B1*02:01L HLA-DQA1*02:01-B1*03:03L
LQPRTFLLKY

SEQ ID NO: 16130 - protein, 10 aa, Severe acute respiratory syndrome coronavirus 2
  REGION 1..10: note = Table B: HLA-DRB1*01:03L HLA-DQA1*01:02-B1*06:02L HLA-DRB1*03:01L HLA-DRB1*14:02L HLA-DQA1*05:05-B1*03:19L HLA-DQA1*05:01-B1*02:01L HLA-DQA1*01:03-B1*06:01L HLA-DQA1*02:01-B1*03:03L
KSFTVEKGIY

SEQ ID NO: 16131 - protein, 12 aa, Severe acute respiratory syndrome coronavirus 2
  REGION 1..12: note = Table B: HLA-DRB1*01:03L HLA-DRB1*01:01L HLA-DRB1*01:02L HLA-DPA1*03:01-B1*105:01L HLA-DRB1*10:01L HLA-DRB1*04:08L HLA-DRB1*15:03L
SFTVEKGIYQTS

SEQ ID NO: 16132 - protein, 10 aa, Severe acute respiratory syndrome coronavirus 2
  REGION 1..10: note = Table B: HLA-DRB1*01:03L HLA-DQA1*01:02-B1*06:02L HLA-DRB1*14:02L HLA-DPA1*02:01-B1*13:01L HLA-DPA1*03:01-B1*105:01L HLA-DQA1*01:03-B1*06:01L HLA-DQA1*02:01-B1*03:03L HLA-DRB1*15:03L
VQPTESIVRF

SEQ ID NO: 16133 - protein, 11 aa, Severe acute respiratory syndrome coronavirus 2
  REGION 1..11: note = Table B: HLA-DRB1*01:03L HLA-DRB1*01:02L HLA-DRB1*16:01L HLA-DRB1*04:08L HLA-DQA1*02:01-B1*03:03L HLA-DRB1*15:03L
RFASVYAWNRK

SEQ ID NO: 16134 - protein, 10 aa, Severe acute respiratory syndrome coronavirus 2
  REGION 1..10: note = Table B: HLA-DRB1*01:03L HLA-DQA1*03:01-B1*03:02L
ASVYAWNRKR

SEQ ID NO: 16135 - protein, 10 aa, Severe acute respiratory syndrome coronavirus 2
  REGION 1..10: note = Table B: HLA-DRB1*01:03L HLA-DRB1*08:01L
YAWNRKRISN

SEQ ID NO: 16136 - protein, 12 aa, Severe acute respiratory syndrome coronavirus 2
  REGION 1..12: note = Table B: HLA-DRB1*01:03L HLA-DRB1*01:02L HLA-DRB1*14:01L HLA-DQA1*01-B1*05L HLA-DQA1*05:01-B1*02:01L HLA-DRB1*12:01L HLA-DQA1*03:01-B1*03:02L HLA-DRB1*14:54L HLA-DQA1*05:05-B1*03:01L HLA-DRB1*10:01L HLA-DRB1*15:03L
YSVLYNSASFST

SEQ ID NO: 16137 - protein, 12 aa, Severe acute respiratory syndrome coronavirus 2
  REGION 1..12: note = Table B: HLA-DRB1*01:03L HLA-DRB1*04:05L HLA-DQA1*01:02-B1*06:02L HLA-DRB1*01:02L HLA-DRB1*08:01L HLA-DRB1*12:01L HLA-DPA1*03:01-B1*105:01L HLA-DPA1*01:02-B1*04:01L HLA-DRB1*16:01L HLA-DRB1*04:08L
  REGION 1..12: note = CONT. FROM ABOVE: HLA-DQA1*02:01-B1*03:03L HLA-DRB1*15:03L
FSTFKCYGVSPT

SEQ ID NO: 16138 - protein, 10 aa, Severe acute respiratory syndrome coronavirus 2
  REGION 1..10: note = Table B: HLA-DRB1*01:03L HLA-DQA1*03:01-B1*03:02L
FKCYGVSPTK

SEQ ID NO: 16139 - protein, 12 aa, Severe acute respiratory syndrome coronavirus 2
  REGION 1..12: note = Table B: HLA-DRB1*01:03L HLA-DRB1*04:04L HLA-DRB1*04:05L HLA-DQA1*01:02-B1*06:02L HLA-DRB1*01:02L HLA-DPA1*01:03-B1*03:01L HLA-DRB1*04:10L HLA-DPA1*02:01-B1*13:01L HLA-DRB1*14:54L HLA-DRB1*04:08L
  REGION 1..12: note = CONT. FROM ABOVE: HLA-DRB1*15:03L
TNVYADSFVIRG

SEQ ID NO: 16140 - protein, 11 aa, Severe acute respiratory syndrome coronavirus 2
  REGION 1..11: note = Table B: HLA-DRB1*01:03L HLA-DRB4*03:01NL HLA-DRB1*14:54L HLA-DRB1*14:17L
QIAPGQTGKIA

SEQ ID NO: 16141 - protein, 11 aa, Severe acute respiratory syndrome coronavirus 2
  REGION 1..11: note = Table B: HLA-DRB1*01:03L HLA-DQA1*01:02-B1*06:02L HLA-DRB4*03:01NL HLA-DRB1*14:17L
IAPGQTGKIAD

SEQ ID NO: 16142 - protein, 13 aa, Severe acute respiratory syndrome coronavirus 2
  REGION 1..13: note = Table B: HLA-DRB1*01:03L HLA-DRB1*04:05L HLA-DQA1*01:02-B1*06:02L HLA-DPA1*01:03-B1*03:01L HLA-DRB1*14:01L HLA-DQA1*01:01-B1*05:01L HLA-DQA1*01-B1*05L HLA-DQA1*05:05-B1*03:19L HLA-DRB1*12:01L
  REGION 1..13: note = CONT. FROM ABOVE: HLA-DPA1*03:01-B1*105:01L HLA-DRB1*14:54L HLA- DQA1*05:05-B1*03:01L HLA-DRB1*16:01L
WNSNNLDSKVGGN

SEQ ID NO: 16143 - protein, 12 aa, Severe acute respiratory syndrome coronavirus 2
  REGION 1..12: note = Table B: HLA-DRB1*01:03L HLA-DRB1*01:02L HLA-DRB1*08:01L HLA-DRB1*16:01L HLA-DRB1*04:08L
NYNYLYRLFRKS

SEQ ID NO: 16144 - protein, 11 aa, Severe acute respiratory syndrome coronavirus 2
  REGION 1..11: note = Table B: HLA-DRB1*01:03L HLA-DRB1*08:01L
NYLYRLFRKSN

SEQ ID NO: 16145 - protein, 12 aa, Severe acute respiratory syndrome coronavirus 2
  REGION 1..12: note = Table B: HLA-DRB1*01:03L HLA-DRB1*01:02L HLA-DRB1*08:01L HLA-DRB1*16:01L HLA-DRB1*04:08L
LYRLFRKSNLKP

SEQ ID NO: 16146 - protein, 11 aa, Severe acute respiratory syndrome coronavirus 2
  REGION 1..11: note = Table B: HLA-DRB1*01:03L
RLFRKSNLKPF

SEQ ID NO: 16147 - protein, 13 aa, Severe acute respiratory syndrome coronavirus 2
  REGION 1..13: note = Table B: HLA-DRB1*01:03L HLA-DQA1*01:02-B1*06:02L HLA-DRB1*01:02L HLA-DRB1*12:01L HLA-DQA1*03:01-B1*03:02L HLA-DPA1*01:02-B1*04:01L HLA-DRB1*16:01L HLA-DRB1*04:08L HLA-DQA1*02:01-B1*03:03L
LFRKSNLKPFERD

SEQ ID NO: 16148 - protein, 13 aa, Severe acute respiratory syndrome coronavirus 2
  REGION 1..13: note = Table B: HLA-DRB1*01:03L HLA-DRB1*04:05L HLA-DRB1*01:02L HLA-DRB1*08:04L HLA-DRB1*11:04L HLA-DRB1*11:01L HLA-DRB1*04:08L
KSNLKPFERDIST

SEQ ID NO: 16149 - protein, 14 aa, Severe acute respiratory syndrome coronavirus 2
  REGION 1..14: note = Table B: HLA-DRB1*01:03L HLA-DRB1*04:02L HLA-DRB1*04:05L HLA-DRB1*01:02L HLA-DPA1*01:03-B1*03:01L HLA-DPA1*03:01-B1*04:02L HLA-DPA1*01:03-B1*04:02L HLA-DRB1*12:01L HLA-DPA1*01:03-B1*02:01L HLA-DRB1*14:17L
  REGION 1..14: note = CONT. FROM ABOVE: HLA-DPA1*01:02-B1*04:01L HLA-DRB1*16:01L HLA-D RB1*04:08L HLA-DRB1*15:03L
RDISTEIYQAGSTP

SEQ ID NO: 16150 - protein, 13 aa, Severe acute respiratory syndrome coronavirus 2
  REGION 1..13: note = Table B: HLA-DRB1*01:03L HLA-DPA1*01:03-B1*04:02L HLA-DPA1*03:01-B1*105:01L HLA-DQA1*03:01-B1*03:02L HLA-DRB1*04:08L
IYQAGSTPCNGVE

SEQ ID NO: 16151 - protein, 12 aa, Severe acute respiratory syndrome coronavirus 2
  REGION 1..12: note = Table B: HLA-DRB1*01:03L HLA-DRB1*08:01L HLA-DRB1*07:01L HLA-DRB1*04:08L
GVGYQPYRVVVL

SEQ ID NO: 16152 - protein, 12 aa, Severe acute respiratory syndrome coronavirus 2
  REGION 1..12: note = Table B: HLA-DRB1*01:03L HLA-DRB1*04:08L
VGYQPYRVVVLS

SEQ ID NO: 16153 - protein, 12 aa, Severe acute respiratory syndrome coronavirus 2
  REGION 1..12: note = Table B: HLA-DRB1*01:03L HLA-DQA1*01:02-B1*06:02L HLA-DRB1*01:02L HLA-DRB1*04:08L HLA-DQA1*02:01-B1*03:03L
LLHAPATVCGPK

SEQ ID NO: 16154 - protein, 16 aa, Severe acute respiratory syndrome coronavirus 2
  REGION 1..16: note = Table B: HLA-DRB1*01:03L HLA-DPA1*01:03-B1*03:01L HLA-DRB1*04:08L
STNLVKNKCVNFNFNG

SEQ ID NO: 16155 - protein, 12 aa, Severe acute respiratory syndrome coronavirus 2
  REGION 1..12: note = Table B: HLA-DRB1*01:03L HLA-DRB1*01:01L HLA-DRB1*11:03L HLA-DRB1*10:01L HLA-DRB1*16:01L HLA-DRB1*04:08L HLA-DRB1*15:03L
NFNGLTGTGVLT

SEQ ID NO: 16156 - protein, 14 aa, Severe acute respiratory syndrome coronavirus 2
  REGION 1..14: note = Table B: HLA-DRB1*01:03L HLA-DRB1*04:02L HLA-DRB1*04:05L HLA-DPA1*01:03-B1*03:01L HLA-DRB1*08:01L HLA-DQA1*05:01-B1*02:01L HLA-DPA1*01:03-B1*04:02L HLA-DRB1*12:01L HLA-DPA1*01:03-B1*104:01L HLA-DRB1*04:08L
FNGLTGTGVLTESN

SEQ ID NO: 16157 - protein, 13 aa, Severe acute respiratory syndrome coronavirus 2
  REGION 1..13: note = Table B: HLA-DRB1*01:03L HLA-DRB1*04:05L HLA-DRB1*01:02L HLA-DRB1*08:01L HLA-DRB1*12:01L HLA-DRB1*04:08L
SNKKFLPFQQFGR

SEQ ID NO: 16158 - protein, 14 aa, Severe acute respiratory syndrome coronavirus 2
  REGION 1..14: note = Table B: HLA-DRB1*01:03L HLA-DRB1*04:05L HLA-DRB1*14:01L HLA-DPA1*03:01-B1*105:01L HLA-DRB1*04:08L
GSNVFQTRAGCLIG

SEQ ID NO: 16159 - protein, 15 aa, Severe acute respiratory syndrome coronavirus 2
  REGION 1..15: note = Table B: HLA-DRB1*01:03L HLA-DRB1*04:08L
SNVFQTRAGCLIGAE

SEQ ID NO: 16160 - protein, 14 aa, Severe acute respiratory syndrome coronavirus 2
  REGION 1..14: note = Table B: HLA-DRB1*01:03L HLA-DPA1*01:03-B1*04:02L HLA-DRB1*04:08L
IPIGAGICASYQTQ

SEQ ID NO: 16161 - protein, 12 aa, Severe acute respiratory syndrome coronavirus 2
  REGION 1..12: note = Table B: HLA-DRB1*01:03L HLA-DRB1*04:05L HLA-DRB1*12:01L
SPRRARSVASQS

SEQ ID NO: 16162 - protein, 14 aa, Severe acute respiratory syndrome coronavirus 2
  REGION 1..14: note = Table B: HLA-DRB1*01:03L HLA-DRB1*04:04L HLA-DQA1*01:02-B1*06:02L HLA-DRB1*01:02L HLA-DRB1*08:04L HLA-DRB1*11:04L HLA-DQA1*05:05-B1*03:01L HLA-DRB1*04:08L HLA-DRB1*15:03L
ENSVAYSNNSIAIP

SEQ ID NO: 16163 - protein, 11 aa, Severe acute respiratory syndrome coronavirus 2
  REGION 1..11: note = Table B: HLA-DRB1*01:03L HLA-DRB1*04:05L HLA-DQA1*01:02-B1*06:02L HLA-DRB1*14:01L HLA-DQA1*01:01-B1*05:01L HLA-DQA1*05:05-B1*03:19L HLA-DRB1*04:10L HLA-DRB1*12:01L HLA-DRB1*14:54L
  REGION 1..11: note = CONT. FROM ABOVE: HLA-DQA1*05:05-B1*03:01L HLA-DPA1*01:02-B1*04: 01L
LPVSMTKTSVD

SEQ ID NO: 16164 - protein, 14 aa, Severe acute respiratory syndrome coronavirus 2
  REGION 1..14: note = Table B: HLA-DRB1*01:03L HLA-DQA1*05:05-B1*03:19L HLA-DRB1*12:01L HLA-DRB1*16:01L HLA-DRB1*04:08L HLA-DRB1*15:03L
YGSFCTQLNRALTG

SEQ ID NO: 16165 - protein, 13 aa, Severe acute respiratory syndrome coronavirus 2
  REGION 1..13: note = Table B: HLA-DRB1*01:03L HLA-DRB1*04:04L HLA-DRB1*01:02L HLA-DRB1*04:08L HLA-DRB1*15:03L
LTGIAVEQDKNTQ

SEQ ID NO: 16166 - protein, 14 aa, Severe acute respiratory syndrome coronavirus 2
  REGION 1..14: note = Table B: HLA-DRB1*01:03L HLA-DRB1*04:05L HLA-DRB1*04:08L
QDKNTQEVFAQVKQ

SEQ ID NO: 16167 - protein, 13 aa, Severe acute respiratory syndrome coronavirus 2
  REGION 1..13: note = Table B: HLA-DRB1*01:03L HLA-DRB1*08:01L HLA-DPA1*01:02-B1*04:01L
VFAQVKQIYKTPP

SEQ ID NO: 16168 - protein, 13 aa, Severe acute respiratory syndrome coronavirus 2
  REGION 1..13: note = Table B: HLA-DRB1*01:03L HLA-DRB1*04:05L HLA-DRB1*01:02L HLA-DRB3*02:01L HLA-DPA1*03:01-B1*04:02L HLA-DPA1*02:01-B1*13:01L HLA-DQA1*01:03-B1*06:01L HLA-DRB1*04:08L HLA-DRB1*15:01L
TPPIKDFGGFNFS

SEQ ID NO: 16169 - protein, 15 aa, Severe acute respiratory syndrome coronavirus 2
  REGION 1..15: note = Table B: HLA-DRB1*01:03L HLA-DRB1*04:05L HLA-DRB1*08:01L HLA-DRB1*04:08L
KPSKRSFIEDLLFNK

SEQ ID NO: 16170 - protein, 12 aa, Severe acute respiratory syndrome coronavirus 2
  REGION 1..12: note = Table B: HLA-DRB1*01:03L HLA-DPA1*01:03-B1*03:01L HLA-DRB1*04:08L
RSFIEDLLFNKV

SEQ ID NO: 16171 - protein, 14 aa, Severe acute respiratory syndrome coronavirus 2
  REGION 1..14: note = Table B: HLA-DRB1*01:03L HLA-DRB1*16:01L HLA-DRB1*15:03L
KQYGDCLGDIAARD

SEQ ID NO: 16172 - protein, 15 aa, Severe acute respiratory syndrome coronavirus 2
  REGION 1..15: note = Table B: HLA-DRB1*01:03L
DIAARDLICAQKFNG

SEQ ID NO: 16173 - protein, 13 aa, Severe acute respiratory syndrome coronavirus 2
  REGION 1..13: note = Table B: HLA-DRB1*01:03L HLA-DRB1*08:04L HLA-DRB1*11:04L HLA-DRB1*11:01L HLA-DRB1*15:03L
ARDLICAQKFNGL

SEQ ID NO: 16174 - protein, 12 aa, Severe acute respiratory syndrome coronavirus 2
  REGION 1..12: note = Table B: HLA-DRB1*01:03L HLA-DQA1*01:02-B1*06:02L HLA-DRB1*08:04L HLA-DRB1*14:01L HLA-DRB1*08:01L HLA-DPA1*01:03-B1*04:01L HLA-DPA1*01:03-B1*04:02L HLA-DRB1*12:01L HLA-DPA1*01:03-B1*02:01L HLA-DRB1*16:01L
  REGION 1..12: note = CONT. FROM ABOVE: HLA-DQA1*01:03-B1*06:01L HLA-DRB1*04:08L HLA-D RB1*15:03L
DLICAQKFNGLT

SEQ ID NO: 16175 - protein, 13 aa, Severe acute respiratory syndrome coronavirus 2
  REGION 1..13: note = Table B: HLA-DRB1*01:03L HLA-DRB1*04:04L HLA-DRB3*02:01L HLA-DQA1*05:05-B1*03:01L
EMIAQYTSALLAG

SEQ ID NO: 16176 - protein, 14 aa, Severe acute respiratory syndrome coronavirus 2
  REGION 1..14: note = Table B: HLA-DRB1*01:03L HLA-DRB1*01:02L HLA-DPA1*01:03-B1*03:01L HLA-DQA1*01:01-B1*05:01L HLA-DRB1*08:01L HLA-DQA1*05:01-B1*02:01L HLA-DPA1*01:03-B1*04:02L HLA-DRB1*16:01L HLA-DRB1*04:08L
GTITSGWTFGAGAA

SEQ ID NO: 16177 - protein, 12 aa, Severe acute respiratory syndrome coronavirus 2
  REGION 1..12: note = Table B: HLA-DRB1*01:03L HLA-DRB1*04:05L HLA-DQA1*01:02-B1*06:02L HLA-DRB1*01:02L HLA-DPA1*01:03-B1*03:01L HLA-DPA1*01:03-B1*04:02L HLA-DRB1*12:01L HLA-DPA1*02:01-B1*13:01L
  REGION 1..12: note = CONT. FROM ABOVE: HLA-DPA1*03:01-B1*105:01L HLA-DRB1*10:01L HLA- DRB1*16:01L HLA-DRB1*04:08L HLA-DRB1*15:03L
RFNGIGVTQNVL

SEQ ID NO: 16178 - protein, 13 aa, Severe acute respiratory syndrome coronavirus 2
  REGION 1..13: note = Table B: HLA-DRB1*01:03L HLA-DRB1*04:05L HLA-DRB1*01:02L HLA-DQA1*05:05-B1*03:19L HLA-DRB1*04:10L HLA-DPA1*01:02-B1*04:01L HLA-DRB1*16:01L HLA-DRB1*04:08L HLA-DRB1*15:03L
IGVTQNVLYENQK

SEQ ID NO: 16179 - protein, 11 aa, Severe acute respiratory syndrome coronavirus 2
  REGION 1..11: note = Table B: HLA-DRB1*01:03L HLA-DRB1*04:04L HLA-DRB1*04:05L HLA-DRB4*03:01NL HLA-DQA1*01-B1*05L HLA-DRB1*04:10L HLA-DRB1*14:54L HLA-DRB1*16:01L HLA-DRB1*04:08L HLA-DQA1*02:01-B1*03:03L
IGKIQDSLSST

SEQ ID NO: 16180 - protein, 15 aa, Severe acute respiratory syndrome coronavirus 2
  REGION 1..15: note = Table B: HLA-DRB1*01:03L HLA-DRB1*01:02L HLA-DPA1*01:03-B1*03:01L HLA-DPA1*03:01-B1*105:01L
GKIQDSLSSTASALG

SEQ ID NO: 16181 - protein, 11 aa, Severe acute respiratory syndrome coronavirus 2
  REGION 1..11: note = Table B: HLA-DRB1*01:03L HLA-DQA1*01:01-B1*05:01L
SSTASALGKLQ

SEQ ID NO: 16182 - protein, 11 aa, Severe acute respiratory syndrome coronavirus 2
  REGION 1..11: note = Table B: HLA-DRB1*01:03L HLA-DQA1*01:01-B1*05:01L
STASALGKLQD

SEQ ID NO: 16183 - protein, 13 aa, Severe acute respiratory syndrome coronavirus 2
  REGION 1..13: note = Table B: HLA-DRB1*01:03L HLA-DRB1*04:04L HLA-DRB1*10:01L HLA-DRB1*04:08L HLA-DRB1*15:03L
SALGKLQDVVNQN

SEQ ID NO: 16184 - protein, 13 aa, Severe acute respiratory syndrome coronavirus 2
  REGION 1..13: note = Table B: HLA-DRB1*01:03L HLA-DRB1*04:05L HLA-DRB1*01:02L HLA-DQA1*01:01-B1*05:01L HLA-DRB1*12:01L HLA-DRB1*14:17L HLA-DRB1*16:01L HLA-DRB1*04:08L
VNQNAQALNTLVK

SEQ ID NO: 16185 - protein, 14 aa, Severe acute respiratory syndrome coronavirus 2
  REGION 1..14: note = Table B: HLA-DRB1*01:03L HLA-DRB1*01:02L HLA-DRB1*12:01L HLA-DRB1*16:01L HLA-DRB1*04:08L
NAQALNTLVKQLSS

SEQ ID NO: 16186 - protein, 13 aa, Severe acute respiratory syndrome coronavirus 2
  REGION 1..13: note = Table B: HLA-DRB1*01:03L HLA-DRB1*11:03L HLA-DRB1*04:08L
QALNTLVKQLSSN

SEQ ID NO: 16187 - protein, 13 aa, Severe acute respiratory syndrome coronavirus 2
  REGION 1..13: note = Table B: HLA-DRB1*01:03L HLA-DRB1*04:04L HLA-DPA1*03:01-B1*105:01L HLA-DRB1*04:08L
TLVKQLSSNFGAI

SEQ ID NO: 16188 - protein, 12 aa, Severe acute respiratory syndrome coronavirus 2
  REGION 1..12: note = Table B: HLA-DRB1*01:03L HLA-DRB1*04:05L HLA-DRB1*01:02L HLA-DQA1*01:01-B1*05:01L HLA-DQA1*05:05-B1*03:19L HLA-DPA1*01:02-B1*04:01L HLA-DRB1*04:08L HLA-DRB1*15:03L
AISSVLNDILSR

SEQ ID NO: 16189 - protein, 12 aa, Severe acute respiratory syndrome coronavirus 2
  REGION 1..12: note = Table B: HLA-DRB1*01:03L HLA-DRB1*04:02L HLA-DRB1*04:04L HLA-DRB1*04:05L HLA-DQA1*01:02-B1*06:02L HLA-DRB1*01:02L HLA-DRB4*03:01NL HLA-DRB1*14:01L HLA-DRB1*04:10L HLA-DRB1*12:01L HLA-DQA1*03:01-B1*03:02L HLA-DRB1*14:54L HLA-DRB1*16:01L
  REGION 1..12: note = CONT. FROM ABOVE: HLA-DRB1*04:08L HLA-DQA1*02:01-B1*03:03L HLA-D RB1*15:03L
GRLQSLQTYVTQ

SEQ ID NO: 16190 - protein, 12 aa, Severe acute respiratory syndrome coronavirus 2
  REGION 1..12: note = Table B: HLA-DRB1*01:03L HLA-DRB1*04:05L HLA-DRB1*04:08L HLA-DRB1*15:01L
SLQTYVTQQLIR

SEQ ID NO: 16191 - protein, 13 aa, Severe acute respiratory syndrome coronavirus 2
  REGION 1..13: note = Table B: HLA-DRB1*01:03L HLA-DRB1*04:02L HLA-DRB1*04:05L HLA-DRB1*01:02L HLA-DRB1*14:01L HLA-DQA1*05:01-B1*02:01L HLA-DRB1*12:01L HLA-DPA1*03:01-B1*105:01L HLA-DRB1*14:54L HLA-DQA1*05:05-B1*03:01L HLA-DRB1*14:17L HLA-DRB1*16:01L
  REGION 1..13: note = CONT. FROM ABOVE: HLA-DRB1*04:08L HLA-DRB1*15:03L
TQQLIRAAEIRAS

SEQ ID NO: 16192 - protein, 13 aa, Severe acute respiratory syndrome coronavirus 2
  REGION 1..13: note = Table B: HLA-DRB1*01:03L HLA-DRB1*04:02L HLA-DRB1*14:17L HLA-DRB1*16:01L HLA-DRB1*15:03L
QQLIRAAEIRASA

SEQ ID NO: 16193 - protein, 12 aa, Severe acute respiratory syndrome coronavirus 2
  REGION 1..12: note = Table B: HLA-DRB1*01:03L HLA-DRB1*04:04L HLA-DRB4*03:01NL HLA-DRB1*14:01L HLA-DRB1*11:04L HLA-DRB1*12:01L HLA-DRB1*12:02L HLA-DRB1*04:08L
AAEIRASANLAA

SEQ ID NO: 16194 - protein, 12 aa, Severe acute respiratory syndrome coronavirus 2
  REGION 1..12: note = Table B: HLA-DRB1*01:03L HLA-DRB1*04:04L HLA-DQA1*01:02-B1*06:02L HLA-DRB1*01:02L HLA-DRB4*03:01NL HLA-DRB1*14:01L HLA-DRB1*11:04L HLA-DRB1*12:01L HLA-DQA1*05:05-B1*03:01L HLA-DRB1*10:01L HLA-DRB1*04:08L
  REGION 1..12: note = CONT. FROM ABOVE: HLA-DRB1*08:03L HLA-DQA1*02:01-B1*03:03L
AEIRASANLAAT

SEQ ID NO: 16195 - protein, 14 aa, Severe acute respiratory syndrome coronavirus 2
  REGION 1..14: note = Table B: HLA-DRB1*01:03L HLA-DRB1*04:05L HLA-DRB1*08:01L HLA-DRB1*12:01L
ATKMSECVLGQSKR

SEQ ID NO: 16196 - protein, 14 aa, Severe acute respiratory syndrome coronavirus 2
  REGION 1..14: note = Table B: HLA-DRB1*01:03L HLA-DRB1*04:04L HLA-DRB1*04:05L HLA-DQA1*01:02-B1*06:02L HLA-DRB1*01:02L HLA-DRB1*12:01L HLA-DPA1*02:01-B1*13:01L HLA-DRB1*07:01L HLA-DRB1*16:01L HLA-DRB1*04:08L
GQSKRVDFCGKGYH

SEQ ID NO: 16197 - protein, 16 aa, Severe acute respiratory syndrome coronavirus 2
  REGION 1..16: note = Table B: HLA-DRB1*01:03L HLA-DPA1*03:01-B1*105:01L HLA-DPA1*01:02-B1*04:01L HLA-DRB1*16:01L HLA-DRB1*04:08L
RVDFCGKGYHLMSFPQ

SEQ ID NO: 16198 - protein, 14 aa, Severe acute respiratory syndrome coronavirus 2
  REGION 1..14: note = Table B: HLA-DRB1*01:03L HLA-DRB1*08:04L HLA-DRB1*08:01L HLA-DRB1*11:01L HLA-DPA1*01:03-B1*04:02L HLA-DRB1*12:01L HLA-DPA1*02:01-B1*13:01L HLA-DPA1*01:02-B1*04:01L HLA-DQA1*02:01-B1*03:03L HLA-DRB1*15:03L
GKGYHLMSFPQSAP

SEQ ID NO: 16199 - protein, 12 aa, Severe acute respiratory syndrome coronavirus 2
  REGION 1..12: note = Table B: HLA-DRB1*01:03L HLA-DPA1*01:03-B1*04:01L HLA-DPA1*01:03-B1*04:02L HLA-DRB1*16:01L HLA-DRB1*04:08L
VFLHVTYVPAQE

SEQ ID NO: 16200 - protein, 12 aa, Severe acute respiratory syndrome coronavirus 2
  REGION 1..12: note = Table B: HLA-DRB1*01:03L HLA-DRB1*04:02L HLA-DRB1*01:02L HLA-DPA1*01:03-B1*03:01L HLA-DQA1*01:01-B1*05:01L HLA-DRB1*08:01L HLA-DQA1*05:01-B1*02:01L HLA-DPA1*01:03-B1*04:02L HLA-DRB1*12:01L HLA-DRB1*16:01L
  REGION 1..12: note = CONT. FROM ABOVE: HLA-DRB1*04:08L HLA-DRB1*15:03L
NFTTAPAICHDG

SEQ ID NO: 16201 - protein, 11 aa, Severe acute respiratory syndrome coronavirus 2
  REGION 1..11: note = Table B: HLA-DRB1*01:03L HLA-DRB1*16:01L
ICHDGKAHFPR

SEQ ID NO: 16202 - protein, 14 aa, Severe acute respiratory syndrome coronavirus 2
  REGION 1..14: note = Table B: HLA-DRB1*01:03L HLA-DRB1*04:04L HLA-DRB1*01:02L HLA-DPA1*01:03-B1*03:01L HLA-DRB1*08:01L HLA-DRB1*12:01L HLA-DPA1*02:01-B1*13:01L HLA-DRB1*07:01L HLA-DRB1*04:08L
HFPREGVFVSNGTH

SEQ ID NO: 16203 - protein, 12 aa, Severe acute respiratory syndrome coronavirus 2
  REGION 1..12: note = Table B: HLA-DRB1*01:03L HLA-DRB1*08:04L HLA-DRB1*12:02L HLA-DRB1*04:08L HLA-DRB1*15:03L
NASVVNIQKEID

SEQ ID NO: 16204 - protein, 13 aa, Severe acute respiratory syndrome coronavirus 2
  REGION 1..13: note = Table B: HLA-DRB1*01:03L HLA-DRB1*04:02L HLA-DRB1*08:04L HLA-DRB3*02:01L HLA-DPA1*03:01-B1*04:02L HLA-DQA1*01:01-B1*05:01L HLA-DQA1*05:05-B1*03:19L HLA-DRB1*12:02L HLA-DPA1*01:03-B1*104:01L
  REGION 1..13: note = CONT. FROM ABOVE: HLA-DQA1*05:05-B1*03:01L HLA-DRB1*04:08L
EIDRLNEVAKNLN

SEQ ID NO: 16205 - protein, 13 aa, Severe acute respiratory syndrome coronavirus 2
  REGION 1..13: note = Table B: HLA-DRB1*01:03L HLA-DRB1*12:01L HLA-DRB1*14:17L HLA-DRB1*04:08L HLA-DRB1*15:03L
AKNLNESLIDLQE

SEQ ID NO: 16206 - protein, 14 aa, Severe acute respiratory syndrome coronavirus 2
  REGION 1..14: note = Table B: HLA-DRB1*01:03L HLA-DRB1*01:02L HLA-DPA1*01:03-B1*03:01L HLA-DPA1*03:01-B1*04:02L HLA-DRB1*12:01L HLA-DQA1*05:05-B1*03:01L HLA-DRB1*04:08L HLA-DRB1*15:03L
KNLNESLIDLQELG

SEQ ID NO: 16207 - protein, 10 aa, Severe acute respiratory syndrome coronavirus 2
  REGION 1..10: note = Table B: HLA-DRB1*01:03L HLA-DQA1*01:02-B1*06:02L HLA-DQA1*05:05-B1*03:19L HLA-DQA1*02:01-B1*03:03L
PVLKGVKLHY

SEQ ID NO: 16208 - protein, 15 aa, Severe acute respiratory syndrome coronavirus 2
  REGION 1..15: note = Table B: HLA-DRB1*01:03L HLA-DRB1*10:01L
IVGVALLAVFQSASK

SEQ ID NO: 16209 - protein, 11 aa, Severe acute respiratory syndrome coronavirus 2
  REGION 1..11: note = Table B: HLA-DRB1*01:03L
SASKIITLKKR

SEQ ID NO: 16210 - protein, 14 aa, Severe acute respiratory syndrome coronavirus 2
  REGION 1..14: note = Table B: HLA-DRB1*01:03L HLA-DRB1*01:02L HLA-DRB1*08:04L HLA-DPA1*01:03-B1*03:01L HLA-DPA1*01:03-B1*04:01L HLA-DRB1*12:01L HLA-DPA1*01:03-B1*02:01L HLA-DRB1*04:08L
NPLLYDANYFLCWH

SEQ ID NO: 16211 - protein, 14 aa, Severe acute respiratory syndrome coronavirus 2
  REGION 1..14: note = Table B: HLA-DRB1*01:03L HLA-DRB1*04:05L HLA-DQA1*01:02-B1*06:02L HLA-DRB1*01:02L HLA-DPA1*01:03-B1*03:01L HLA-DQA1*01:01-B1*05:01L HLA-DRB1*08:01L HLA-DRB1*11:01L HLA-DQA1*05:05-B1*03:116L
  REGION 1..14: note = CONT. FROM ABOVE: HLA-DPA1*01:03-B1*04:02L HLA-DRB1*12:01L HLA-D PA1*03:01-B1*105:01L HLA-DRB1*16:01L HLA-DQA1*01:03-B1*06:01L HL A-DRB1*04:08L
IVITSGDGTTSPIS

SEQ ID NO: 16212 - protein, 11 aa, Severe acute respiratory syndrome coronavirus 2
  REGION 1..11: note = Table B: HLA-DRB1*01:03L HLA-DQA1*01:02-B1*06:02L HLA-DQA1*01-B1*05L
GDGTTSPISEH

SEQ ID NO: 16213 - protein, 11 aa, Severe acute respiratory syndrome coronavirus 2
  REGION 1..11: note = Table B: HLA-DRB1*01:03L HLA-DRB1*04:02L HLA-DRB1*04:05L HLA-DQA1*01:02-B1*06:02L HLA-DRB4*03:01NL HLA-DQA1*01-B1*05L HLA-DRB1*12:01L HLA-DRB1*04:08L
DGTTSPISEHD

SEQ ID NO: 16214 - protein, 13 aa, Severe acute respiratory syndrome coronavirus 2
  REGION 1..13: note = Table B: HLA-DRB1*01:03L HLA-DRB1*04:08L
GGYTEKWESGVKD

SEQ ID NO: 16215 - protein, 12 aa, Severe acute respiratory syndrome coronavirus 2
  REGION 1..12: note = Table B: HLA-DRB1*01:03L HLA-DQA1*01:02-B1*06:02L HLA-DPA1*03:01-B1*04:02L HLA-DQA1*01-B1*05L HLA-DQA1*05:01-B1*02:01L HLA-DPA1*01:03-B1*04:01L HLA-DPA1*01:03-B1*04:02L HLA-DPA1*03:01-B1*105:01M
  REGION 1..12: note = CONT. FROM ABOVE: HLA-DPA1*01:03-B1*02:01L HLA-DPA1*01:02-B1*04: 01L HLA-DRB1*16:01L HLA-DQA1*01:03-B1*06:01L HLA-DRB1*04:08L
FTSDYYQLYSTQ

SEQ ID NO: 16216 - protein, 13 aa, Severe acute respiratory syndrome coronavirus 2
  REGION 1..13: note = Table B: HLA-DRB1*01:03L HLA-DRB1*04:02L HLA-DRB1*04:05L HLA-DRB4*03:01NL HLA-DRB1*14:17L HLA-DRB1*07:01L HLA-DRB1*04:08L
TSDYYQLYSTQLS

SEQ ID NO: 16217 - protein, 12 aa, Severe acute respiratory syndrome coronavirus 2
  REGION 1..12: note = Table B: HLA-DRB1*01:03L HLA-DRB1*01:01L HLA-DQA1*05:05-B1*03:19L HLA-DRB1*12:01L HLA-DPA1*03:01-B1*105:01L HLA-DQA1*05:05-B1*03:01L HLA-DRB1*10:01L HLA-DRB1*04:08L HLA-DQA1*02:01-B1*03:03L
  REGION 1..12: note = CONT. FROM ABOVE: HLA-DRB1*15:03L
YYQLYSTQLSTD

SEQ ID NO: 16218 - protein, 12 aa, Severe acute respiratory syndrome coronavirus 2
  REGION 1..12: note = Table B: HLA-DRB1*01:03L HLA-DRB1*04:04L HLA-DRB1*04:05L HLA-DQA1*01:02-B1*06:02L HLA-DRB1*01:02L HLA-DRB4*03:01NL HLA-DRB1*14:01L HLA-DRB1*11:03L HLA-DQA1*05:01-B1*02:01L HLA-DRB1*04:10L HLA-DRB1*12:01L HLA-DPA1*03:01-B1*105:01L
  REGION 1..12: note = CONT. FROM ABOVE: HLA-DQA1*03:01-B1*03:02L HLA-DRB1*14:54L HLA-D RB1*10:01L HLA-DRB1*04:08L HLA-DQA1*02:01-B1*03:03L HLA-DRB1*15: 03L
YQLYSTQLSTDT

SEQ ID NO: 16219 - protein, 11 aa, Severe acute respiratory syndrome coronavirus 2
  REGION 1..11: note = Table B: HLA-DRB1*01:03L HLA-DQA1*01:02-B1*06:02L HLA-DQA1*01:01-B1*05:01L HLA-DRB1*08:01L HLA-DRB1*12:01L HLA-DPA1*02:01-B1*13:01L HLA-DRB1*14:54L
IYNKIVDEPEE

SEQ ID NO: 16220 - protein, 14 aa, Severe acute respiratory syndrome coronavirus 2
  REGION 1..14: note = Table B: HLA-DRB1*01:03L HLA-DRB1*08:01L HLA-DPA1*01:03-B1*04:02L HLA-DRB1*12:01L
DGSSGVVNPVMEPI

SEQ ID NO: 16221 - protein, 10 aa, Severe acute respiratory syndrome coronavirus 2
  REGION 1..10: note = Table B: HLA-DRB1*01:03L HLA-DQA1*01:02-B1*06:02L HLA-DRB1*14:01L HLA-DPA1*02:01-B1*13:01L HLA-DPA1*01:02-B1*04:01L HLA-DRB1*16:01L HLA-DQA1*01:03-B1*06:01L HLA-DQA1*02:01-B1*03:03L
  REGION 1..10: note = CONT. FROM ABOVE: HLA-DRB1*15:03L
QFAYANRNRF

SEQ ID NO: 16222 - protein, 10 aa, Severe acute respiratory syndrome coronavirus 2
  REGION 1..10: note = Table B: HLA-DRB1*01:03L HLA-DRB1*04:05L HLA-DQA1*01:02-B1*06:02L HLA-DRB1*03:01L HLA-DQA1*05:05-B1*03:19L HLA-DQA1*05:01-B1*02:01L HLA-DRB4*01:01L HLA-DPA1*01:03-B1*04:01L
  REGION 1..10: note = CONT. FROM ABOVE: HLA-DPA1*02:01-B1*13:01L HLA-DPA1*01:03-B1*104 :01L HLA-DRB1*16:01L HLA-DQA1*01:03-B1*06:01L HLA-DQA1*02:01-B1* 03:03L
AYANRNRFLY

SEQ ID NO: 16223 - protein, 10 aa, Severe acute respiratory syndrome coronavirus 2
  REGION 1..10: note = Table B: HLA-DRB1*01:03L HLA-DRB1*11:04L HLA-DRB1*08:01L HLA-DRB1*11:01L
FIASFRLFAR

SEQ ID NO: 16224 - protein, 11 aa, Severe acute respiratory syndrome coronavirus 2
  REGION 1..11: note = Table B: HLA-DRB1*01:03L HLA-DRB1*08:01L HLA-DPA1*01:02-B1*04:01L
IASFRLFARTR

SEQ ID NO: 16225 - protein, 10 aa, Severe acute respiratory syndrome coronavirus 2
  REGION 1..10: note = Table B: HLA-DRB1*01:03L HLA-DQA1*01:02-B1*06:02L HLA-DRB1*03:01L HLA-DPA1*02:01-B1*13:01L HLA-DQA1*01:03-B1*06:01L HLA-DQA1*02:01-B1*03:03L
RLFARTRSMW

SEQ ID NO: 16226 - protein, 14 aa, Severe acute respiratory syndrome coronavirus 2
  REGION 1..14: note = Table B: HLA-DRB1*01:03L HLA-DRB1*12:01L HLA-DPA1*03:01-B1*105:01L HLA-DRB1*04:08L
LFARTRSMWSFNPE

SEQ ID NO: 16227 - protein, 13 aa, Severe acute respiratory syndrome coronavirus 2
  REGION 1..13: note = Table B: HLA-DRB1*01:03L HLA-DRB1*04:05L HLA-DRB4*03:01NL HLA-DRB1*08:04L HLA-DRB1*03:01L HLA-DRB1*11:02L HLA-DRB1*11:03L HLA-DRB1*11:04L HLA-DQA1*01:01-B1*05:01L HLA-DRB1*08:01L HLA-DRB1*11:01L HLA-DRB4*01:01L HLA-DRB1*04:10L HLA-DRB1*12:02L
  REGION 1..13: note = CONT. FROM ABOVE: HLA-DRB3*01:01L HLA-DRB1*14:54L HLA-DPA1*01:03 -B1*104:01L HLA-DRB1*14:17L HLA-DRB1*10:01L HLA-DRB1*04:08L HLA- DRB1*08:03L
RSMWSFNPETNIL

SEQ ID NO: 16228 - protein, 13 aa, Severe acute respiratory syndrome coronavirus 2
  REGION 1..13: note = Table B: HLA-DRB1*01:03L HLA-DRB3*02:01L HLA-DQA1*05:05-B1*03:01L HLA-DRB1*04:08L
TNILLNVPLHGTI

SEQ ID NO: 16229 - protein, 12 aa, Severe acute respiratory syndrome coronavirus 2
  REGION 1..12: note = Table B: HLA-DRB1*01:03L HLA-DQA1*01:02-B1*06:02L HLA-DRB1*01:02L HLA-DRB1*08:04L HLA-DRB1*14:01L HLA-DRB1*08:01L HLA-DPA1*01:03-B1*04:01L HLA-DPA1*01:03-B1*04:02L HLA-DRB1*12:01L HLA-DRB1*15:03L
GTILTRPLLESE

SEQ ID NO: 16230 - protein, 14 aa, Severe acute respiratory syndrome coronavirus 2
  REGION 1..14: note = Table B: HLA-DRB1*01:03L HLA-DRB1*04:02L HLA-DRB1*04:04L HLA-DRB1*04:05L HLA-DRB1*01:02L HLA-DRB1*12:01L HLA-DQA1*05:05-B1*03:01L HLA-DRB1*14:17L HLA-DRB1*16:01L HLA-DRB1*04:08L
RPLLESELVIGAVI

SEQ ID NO: 16231 - protein, 14 aa, Severe acute respiratory syndrome coronavirus 2
  REGION 1..14: note = Table B: HLA-DRB1*01:03L HLA-DRB1*04:05L HLA-DRB1*16:01L HLA-DRB1*15:03L
ESELVIGAVILRGH

SEQ ID NO: 16232 - protein, 14 aa, Severe acute respiratory syndrome coronavirus 2
  REGION 1..14: note = Table B: HLA-DRB1*01:03L HLA-DRB1*15:03L
SELVIGAVILRGHL

SEQ ID NO: 16233 - protein, 12 aa, Severe acute respiratory syndrome coronavirus 2
  REGION 1..12: note = Table B: HLA-DRB1*01:03L HLA-DRB1*01:02L HLA-DRB1*08:01L HLA-DRB1*16:01L HLA-DRB1*04:08L
VIGAVILRGHLR

SEQ ID NO: 16234 - protein, 12 aa, Severe acute respiratory syndrome coronavirus 2
  REGION 1..12: note = Table B: HLA-DRB1*01:03L HLA-DQA1*01:02-B1*06:02L HLA-DRB1*01:02L HLA-DRB1*14:01L HLA-DRB1*16:01L HLA-DRB1*15:03L
AVILRGHLRIAG

SEQ ID NO: 16235 - protein, 12 aa, Severe acute respiratory syndrome coronavirus 2
  REGION 1..12: note = Table B: HLA-DRB1*01:03L HLA-DQA1*01:02-B1*06:02L HLA-DRB1*01:02L HLA-DRB1*11:04L HLA-DRB1*08:01L HLA-DRB1*11:01L HLA-DRB1*04:08L
ILRGHLRIAGHH

SEQ ID NO: 16236 - protein, 16 aa, Severe acute respiratory syndrome coronavirus 2
  REGION 1..16: note = Table B: HLA-DRB1*01:03L
IAGHHLGRCDIKDLPK

SEQ ID NO: 16237 - protein, 15 aa, Severe acute respiratory syndrome coronavirus 2
  REGION 1..15: note = Table B: HLA-DRB1*01:03L HLA-DRB1*01:02L HLA-DRB1*08:04L HLA-DRB1*04:08L
GRCDIKDLPKEITVA

SEQ ID NO: 16238 - protein, 14 aa, Severe acute respiratory syndrome coronavirus 2
  REGION 1..14: note = Table B: HLA-DRB1*01:03L HLA-DRB1*12:01L HLA-DRB1*15:03L
TSRTLSYYKLGASQ

SEQ ID NO: 16239 - protein, 12 aa, Severe acute respiratory syndrome coronavirus 2
  REGION 1..12: note = Table B: HLA-DRB1*01:03L HLA-DRB1*04:08L
LSYYKLGASQRV

SEQ ID NO: 16240 - protein, 10 aa, Severe acute respiratory syndrome coronavirus 2
  REGION 1..10: note = Table B: HLA-DRB1*01:03L HLA-DRB1*01:02L HLA-DRB1*16:01L HLA-DQA1*02:01-B1*03:03L
YKLGASQRVA

SEQ ID NO: 16241 - protein, 12 aa, Severe acute respiratory syndrome coronavirus 2
  REGION 1..12: note = Table B: HLA-DRB1*01:03L HLA-DQA1*01:02-B1*06:02L HLA-DRB1*08:01L HLA-DRB1*11:01L HLA-DRB1*16:01L HLA-DRB1*04:08L
GFAAYSRYRIGN

SEQ ID NO: 16242 - protein, 10 aa, Severe acute respiratory syndrome coronavirus 2
  REGION 1..10: note = Table B: HLA-DRB1*01:03L HLA-DQA1*03:01-B1*03:02L HLA-DPA1*01:02-B1*04:01L
YSRYRIGNYK

SEQ ID NO: 16243 - protein, 12 aa, Severe acute respiratory syndrome coronavirus 2
  REGION 1..12: note = Table B: HLA-DRB1*01:03L HLA-DQA1*01:02-B1*06:02L HLA-DRB1*01:02L HLA-DRB1*08:01L HLA-DPA1*01:02-B1*04:01L HLA-DRB1*16:01L HLA-DRB1*04:08L HLA-DQA1*02:01-B1*03:03L
YRIGNYKLNTDH

SEQ ID NO: 16244 - protein, 12 aa, Severe acute respiratory syndrome coronavirus 2
  REGION 1..12: note = Table B: HLA-DRB1*01:03L HLA-DRB1*16:01L
KLNTDHSSSSDN

SEQ ID NO: 16245 - protein, 11 aa, Severe acute respiratory syndrome coronavirus 2
  REGION 1..11: note = Table B: HLA-DRB1*01:03L HLA-DPA1*03:01-B1*04:02L HLA-DPA1*01:03-B1*04:01L HLA-DPA1*01:03-B1*04:02L HLA-DPA1*03:01-B1*105:01L HLA-DPA1*01:02-B1*04:01L HLA-DRB1*16:01L HLA-DRB1*04:08L
RTFKVSIWNLD

SEQ ID NO: 16246 - protein, 11 aa, Severe acute respiratory syndrome coronavirus 2
  REGION 1..11: note = Table B: HLA-DRB1*01:03L HLA-DQA1*01:02-B1*06:02L HLA-DRB1*08:04L HLA-DRB1*14:01L HLA-DRB1*11:04L HLA-DRB1*14:54L HLA-DRB1*04:08L
INLIIKNLSKS

SEQ ID NO: 16247 - protein, 13 aa, Severe acute respiratory syndrome coronavirus 2
  REGION 1..13: note = Table B: HLA-DRB1*01:03L HLA-DRB4*03:01NL HLA-DRB1*08:01L HLA-DRB1*12:01L HLA-DPA1*03:01-B1*105:01L HLA-DRB1*14:17L HLA-DRB1*04:08L HLA-DRB1*15:03L
TENKYSQLDEEQP

SEQ ID NO: 16248 - protein, 13 aa, Severe acute respiratory syndrome coronavirus 2
  REGION 1..13: note = Table B: HLA-DRB1*01:03L HLA-DRB1*01:02L HLA-DRB4*03:01NL HLA-DRB1*08:04L HLA-DRB1*08:01L HLA-DRB1*12:01L HLA-DPA1*03:01-B1*105:01L HLA-DRB1*14:54L HLA-DRB1*14:17L HLA-DRB1*04:08L HLA-DRB1*15:03L
ENKYSQLDEEQPM

SEQ ID NO: 16249 - protein, 12 aa, Severe acute respiratory syndrome coronavirus 2
  REGION 1..12: note = Table B: HLA-DRB1*01:03L HLA-DRB1*01:02L HLA-DRB1*08:01L HLA-DRB1*11:01L HLA-DPA1*03:01-B1*105:01L HLA-DRB1*16:01L HLA-DRB1*04:08L HLA-DRB1*15:03L
LYHYQECVRGTT

SEQ ID NO: 16250 - protein, 11 aa, Severe acute respiratory syndrome coronavirus 2
  REGION 1..11: note = Table B: HLA-DRB1*01:03L HLA-DQA1*03:01-B1*03:02L
GVKHVYQLRAR

SEQ ID NO: 16251 - protein, 13 aa, Severe acute respiratory syndrome coronavirus 2
  REGION 1..13: note = Table B: HLA-DRB1*01:03L HLA-DRB1*01:02L HLA-DRB1*12:01L HLA-DRB1*16:01L HLA-DRB1*04:08L HLA-DRB1*15:03L
VKHVYQLRARSVS

SEQ ID NO: 16252 - protein, 12 aa, Severe acute respiratory syndrome coronavirus 2
  REGION 1..12: note = Table B: HLA-DRB1*01:03L HLA-DRB1*01:02L HLA-DRB1*16:01L HLA-DRB1*04:08L
HVYQLRARSVSP

SEQ ID NO: 16253 - protein, 10 aa, Severe acute respiratory syndrome coronavirus 2
  REGION 1..10: note = Table B: HLA-DRB1*01:03L HLA-DQA1*01:02-B1*06:02L HLA-DQA1*01:03-B1*06:01L HLA-DQA1*02:01-B1*03:03L
RARSVSPKLF

SEQ ID NO: 16254 - protein, 14 aa, Severe acute respiratory syndrome coronavirus 2
  REGION 1..14: note = Table B: HLA-DRB1*01:03L HLA-DRB1*04:05L HLA-DRB1*01:02L HLA-DRB1*08:01L HLA-DRB1*16:01L HLA-DRB1*04:08L
ARSVSPKLFIRQEE

SEQ ID NO: 16255 - protein, 12 aa, Severe acute respiratory syndrome coronavirus 2
  REGION 1..12: note = Table B: HLA-DRB1*01:03L HLA-DRB1*04:05L HLA-DQA1*01:02-B1*06:02L HLA-DRB1*08:01L HLA-DPA1*02:01-B1*13:01L HLA-DRB1*04:08L
PKLFIRQEEVQE

SEQ ID NO: 16256 - protein, 13 aa, Severe acute respiratory syndrome coronavirus 2
  REGION 1..13: note = Table B: HLA-DRB1*01:03L HLA-DRB1*01:02L HLA-DPA1*01:03-B1*03:01L HLA-DPA1*01:03-B1*04:01L HLA-DPA1*01:03-B1*04:02L HLA-DRB1*12:01L HLA-DPA1*01:02-B1*04:01L HLA-DRB1*16:01L
  REGION 1..13: note = CONT. FROM ABOVE: HLA-DQA1*01:03-B1*06:01L HLA-DRB1*04:08L
VQELYSPIFLIVA

SEQ ID NO: 16257 - protein, 13 aa, Severe acute respiratory syndrome coronavirus 2
  REGION 1..13: note = Table B: HLA-DRB1*01:03L HLA-DQA1*01:02-B1*06:02L HLA-DRB1*12:01L HLA-DRB1*04:08L HLA-DRB1*15:03L
IVFITLCFTLKRK

SEQ ID NO: 16258 - protein, 14 aa, Severe acute respiratory syndrome coronavirus 2
  REGION 1..14: note = Table B: HLA-DRB1*01:03L HLA-DRB1*08:04L
LVFLGIITTVAAFH

SEQ ID NO: 16259 - protein, 12 aa, Severe acute respiratory syndrome coronavirus 2
  REGION 1..12: note = Table B: HLA-DRB1*01:03L HLA-DRB1*08:04L HLA-DPA1*01:03-B1*03:01L HLA-DRB1*11:04L HLA-DRB1*12:02L HLA-DPA1*03:01-B1*105:01L HLA-DQA1*05:05-B1*03:01L HLA-DRB1*10:01L HLA-DRB1*08:03L HLA-DRB1*15:03L
LGIITTVAAFHQ

SEQ ID NO: 16260 - protein, 14 aa, Severe acute respiratory syndrome coronavirus 2
  REGION 1..14: note = Table B: HLA-DRB1*01:03L HLA-DQA1*01:02-B1*06:02L HLA-DRB1*01:02L HLA-DPA1*03:01-B1*105:01L HLA-DRB1*04:08L HLA-DRB1*15:03L
VAAFHQECSLQSCT

SEQ ID NO: 16261 - protein, 12 aa, Severe acute respiratory syndrome coronavirus 2
  REGION 1..12: note = Table B: HLA-DRB1*01:03L HLA-DRB1*15:03L
IHFYSKWYIRVG

SEQ ID NO: 16262 - protein, 12 aa, Severe acute respiratory syndrome coronavirus 2
  REGION 1..12: note = Table B: HLA-DRB1*01:03L HLA-DRB1*08:01L
FYSKWYIRVGAR

SEQ ID NO: 16263 - protein, 12 aa, Severe acute respiratory syndrome coronavirus 2
  REGION 1..12: note = Table B: HLA-DRB1*01:03L HLA-DRB1*04:05L HLA-DRB1*01:02L HLA-DRB1*08:01L HLA-DRB1*12:01L HLA-DRB1*16:01L HLA-DRB1*04:08L HLA-DRB1*15:03L
SKWYIRVGARKS

SEQ ID NO: 16264 - protein, 12 aa, Severe acute respiratory syndrome coronavirus 2
  REGION 1..12: note = Table B: HLA-DRB1*01:03L HLA-DRB1*01:02L HLA-DRB1*12:01L HLA-DRB1*16:01L HLA-DRB1*04:08L HLA-DRB1*15:03L
WYIRVGARKSAP

SEQ ID NO: 16265 - protein, 13 aa, Severe acute respiratory syndrome coronavirus 2
  REGION 1..13: note = Table B: HLA-DRB1*01:03L HLA-DQA1*01:02-B1*06:02L HLA-DRB1*01:02L HLA-DRB1*16:01L HLA-DQA1*02:01-B1*03:03L
IRVGARKSAPLIE

SEQ ID NO: 16266 - protein, 10 aa, Severe acute respiratory syndrome coronavirus 2
  REGION 1..10: note = Table B: HLA-DRB1*01:03L HLA-DQA1*01:02-B1*06:02L HLA-DPA1*01:03-B1*03:01L HLA-DPA1*03:01-B1*04:02L HLA-DQA1*01-B1*05L HLA-DQA1*05:01-B1*02:01L HLA-DPA1*01:03-B1*04:01L HLA-DPA1*01:03-B1*04:02L
  REGION 1..10: note = CONT. FROM ABOVE: HLA-DPA1*03:01-B1*105:01L HLA-DPA1*01:02-B1*04 :01M HLA-DRB1*16:01L HLA-DQA1*01:03-B1*06:01L HLA-DRB1*04:08L HL A-DRB1*15:03L
FYEDFLEYHD

SEQ ID NO: 16267 - protein, 10 aa, Severe acute respiratory syndrome coronavirus 2
  REGION 1..10: note = Table B: HLA-DRB1*01:03L HLA-DQA1*01:02-B1*06:02L HLA-DQA1*02:01-B1*03:03L
NQRNAPRITF

SEQ ID NO: 16268 - protein, 15 aa, Severe acute respiratory syndrome coronavirus 2
  REGION 1..15: note = Table B: HLA-DRB1*01:03L
NGERSGARSKQRRPQ

SEQ ID NO: 16269 - protein, 15 aa, Severe acute respiratory syndrome coronavirus 2
  REGION 1..15: note = Table B: HLA-DRB1*01:03L HLA-DRB1*08:01L
GERSGARSKQRRPQG

SEQ ID NO: 16270 - protein, 16 aa, Severe acute respiratory syndrome coronavirus 2
  REGION 1..16: note = Table B: HLA-DRB1*01:03L HLA-DRB1*01:02L HLA-DPA1*01:03-B1*03:01L HLA-DPA1*03:01-B1*04:02L HLA-DQA1*05:01-B1*02:01L HLA-DPA1*01:03-B1*04:02L HLA-DRB1*12:01L HLA-DRB1*15:03L
LPNNTASWFTALTQHG

SEQ ID NO: 16271 - protein, 15 aa, Severe acute respiratory syndrome coronavirus 2
  REGION 1..15: note = Table B: HLA-DRB1*01:03L HLA-DRB1*01:02L HLA-DRB1*16:01L HLA-DQA1*02:01-B1*03:03L HLA-DRB1*15:03L
GKEDLKFPRGQGVPI

SEQ ID NO: 16272 - protein, 14 aa, Severe acute respiratory syndrome coronavirus 2
  REGION 1..14: note = Table B: HLA-DRB1*01:03L HLA-DQA1*01:02-B1*06:02L HLA-DRB1*01:02L HLA-DRB1*14:01L HLA-DRB1*08:01L HLA-DRB1*16:01L HLA-DRB1*04:08L HLA-DQA1*02:01-B1*03:03L
SPDDQIGYYRRATR

SEQ ID NO: 16273 - protein, 10 aa, Severe acute respiratory syndrome coronavirus 2
  REGION 1..10: note = Table B: HLA-DRB1*01:03L
IGYYRRATRR

SEQ ID NO: 16274 - protein, 12 aa, Severe acute respiratory syndrome coronavirus 2
  REGION 1..12: note = Table B: HLA-DRB1*01:03L HLA-DRB1*01:02L HLA-DRB1*08:01L HLA-DRB1*16:01L HLA-DRB1*04:08L
GYYRRATRRIRG

SEQ ID NO: 16275 - protein, 14 aa, Severe acute respiratory syndrome coronavirus 2
  REGION 1..14: note = Table B: HLA-DRB1*01:03L HLA-DRB1*01:02L HLA-DRB1*08:01L HLA-DRB1*11:01L HLA-DRB1*12:01L HLA-DRB3*01:01L HLA-DRB1*16:01L HLA-DRB1*04:08L
YYRRATRRIRGGDG

SEQ ID NO: 16276 - protein, 10 aa, Severe acute respiratory syndrome coronavirus 2
  REGION 1..10: note = Table B: HLA-DRB1*01:03L HLA-DQA1*03:01-B1*03:02L HLA-DQA1*02:01-B1*03:03L
DGKMKDLSPR

SEQ ID NO: 16277 - protein, 14 aa, Severe acute respiratory syndrome coronavirus 2
  REGION 1..14: note = Table B: HLA-DRB1*01:03L HLA-DRB1*01:02L
RWYFYYLGTGPEAG

SEQ ID NO: 16278 - protein, 14 aa, Severe acute respiratory syndrome coronavirus 2
  REGION 1..14: note = Table B: HLA-DRB1*01:03L HLA-DRB1*01:02L HLA-DPA1*01:03-B1*03:01L HLA-DPA1*01:03-B1*04:02L HLA-DRB1*15:03L
FYYLGTGPEAGLPY

SEQ ID NO: 16279 - protein, 12 aa, Severe acute respiratory syndrome coronavirus 2
  REGION 1..12: note = Table B: HLA-DRB1*01:03L HLA-DPA1*01:03-B1*04:02L HLA-DPA1*03:01-B1*105:01L
TGPEAGLPYGAN

SEQ ID NO: 16280 - protein, 17 aa, Severe acute respiratory syndrome coronavirus 2
  REGION 1..17: note = Table B: HLA-DRB1*01:03L
EGALNTPKDHIGTRNPA

SEQ ID NO: 16281 - protein, 15 aa, Severe acute respiratory syndrome coronavirus 2
  REGION 1..15: note = Table B: HLA-DRB1*01:03L HLA-DQA1*05:05-B1*03:01L
GTTLPKGFYAEGSRG

SEQ ID NO: 16282 - protein, 11 aa, Severe acute respiratory syndrome coronavirus 2
  REGION 1..11: note = Table B: HLA-DRB1*01:03L HLA-DRB1*04:02L HLA-DRB1*08:04L HLA-DRB1*12:01L HLA-DRB1*14:17L HLA-DRB1*16:01L HLA-DRB1*04:08L
LLLLDRLNQLE

SEQ ID NO: 16283 - protein, 12 aa, Severe acute respiratory syndrome coronavirus 2
  REGION 1..12: note = Table B: HLA-DRB1*01:03L HLA-DQA1*01:02-B1*06:02L HLA-DRB1*01:02L HLA-DRB1*16:01L HLA-DRB1*04:08L
LLLDRLNQLESK

SEQ ID NO: 16284 - protein, 13 aa, Severe acute respiratory syndrome coronavirus 2
  REGION 1..13: note = Table B: HLA-DRB1*01:03L HLA-DRB1*04:02L HLA-DRB1*04:04L HLA-DRB1*04:05L HLA-DRB1*14:01L HLA-DRB1*04:10L HLA-DRB1*12:01L HLA-DQA1*03:01-B1*03:02L HLA-DRB1*16:01L HLA-DRB1*04:08L HLA-DQA1*02:01-B1*03:03L HLA-DRB1*15:03L
LDRLNQLESKMSG

SEQ ID NO: 16285 - protein, 14 aa, Severe acute respiratory syndrome coronavirus 2
  REGION 1..14: note = Table B: HLA-DRB1*01:03L HLA-DRB1*04:05L HLA-DRB1*12:01L HLA-DRB1*16:01L HLA-DRB1*04:08L HLA-DRB1*15:03L
DRLNQLESKMSGKG

SEQ ID NO: 16286 - protein, 14 aa, Severe acute respiratory syndrome coronavirus 2
  REGION 1..14: note = Table B: HLA-DRB1*01:03L HLA-DRB1*04:02L HLA-DQA1*01:02-B1*06:02L HLA-DRB1*08:04L HLA-DRB1*14:01L HLA-DRB1*11:04L HLA-DRB1*11:01L HLA-DRB1*04:08L
NQLESKMSGKGQQQ

SEQ ID NO: 16287 - protein, 12 aa, Severe acute respiratory syndrome coronavirus 2
  REGION 1..12: note = Table B: HLA-DRB1*01:03L HLA-DRB1*04:02L HLA-DRB1*08:01L HLA-DRB1*14:17L HLA-DRB1*04:08L HLA-DQA1*02:01-B1*03:03L
TVTKKSAAEASK

SEQ ID NO: 16288 - protein, 10 aa, Severe acute respiratory syndrome coronavirus 2
  REGION 1..10: note = Table B: HLA-DRB1*01:03L HLA-DQA1*02:01-B1*03:03L
RQKRTATKAY

SEQ ID NO: 16289 - protein, 13 aa, Severe acute respiratory syndrome coronavirus 2
  REGION 1..13: note = Table B: HLA-DRB1*01:03L HLA-DRB1*04:05L
ATKAYNVTQAFGR

SEQ ID NO: 16290 - protein, 11 aa, Severe acute respiratory syndrome coronavirus 2
  REGION 1..11: note = Table B: HLA-DRB1*01:03L HLA-DRB1*01:02L HLA-DRB1*16:01L HLA-DQA1*02:01-B1*03:03L HLA-DRB1*15:03L
AYNVTQAFGRR

SEQ ID NO: 16291 - protein, 12 aa, Severe acute respiratory syndrome coronavirus 2
  REGION 1..12: note = Table B: HLA-DRB1*01:03L HLA-DQA1*01:02-B1*06:02L HLA-DRB1*01:02L HLA-DRB1*12:01L HLA-DRB1*16:01L HLA-DQA1*01:03-B1*06:01L HLA-DRB1*04:08L HLA-DQA1*02:01-B1*03:03L HLA-DRB1*15:03L
YNVTQAFGRRGP

SEQ ID NO: 16292 - protein, 13 aa, Severe acute respiratory syndrome coronavirus 2
  REGION 1..13: note = Table B: HLA-DRB1*01:03L HLA-DRB1*04:05L HLA-DQA1*01:01-B1*05:01L
GDQELIRQGTDYK

SEQ ID NO: 16293 - protein, 13 aa, Severe acute respiratory syndrome coronavirus 2
  REGION 1..13: note = Table B: HLA-DRB1*01:03L HLA-DRB1*04:04L HLA-DRB1*04:05L HLA-DRB1*01:02L HLA-DRB1*14:01L HLA-DRB1*04:10L HLA-DRB1*14:54L HLA-DRB1*14:17L HLA-DRB1*04:08L
DQELIRQGTDYKH

SEQ ID NO: 16294 - protein, 10 aa, Severe acute respiratory syndrome coronavirus 2
  REGION 1..10: note = Table B: HLA-DRB1*01:03L HLA-DRB1*04:05L HLA-DQA1*01:02-B1*06:02L HLA-DPA1*02:01-B1*13:01L HLA-DRB1*16:01L HLA-DQA1*01:03-B1*06:01L HLA-DQA1*02:01-B1*03:03L
YKHWPQIAQF

SEQ ID NO: 16295 - protein, 11 aa, Severe acute respiratory syndrome coronavirus 2
  REGION 1..11: note = Table B: HLA-DRB1*01:03L HLA-DRB4*03:01NL HLA-DPA1*03:01-B1*04:02L HLA-DRB1*14:01L HLA-DRB5*01:01L HLA-DQA1*05:05-B1*03:116L HLA-DPA1*01:03-B1*04:02L HLA-DRB1*12:01L HLA-DPA1*02:01-B1*13:01L HLA-DRB1*08:02L
EVTPSGTWLTY

SEQ ID NO: 16296 - protein, 13 aa, Severe acute respiratory syndrome coronavirus 2
  REGION 1..13: note = Table B: HLA-DRB1*01:03L HLA-DQA1*01:02-B1*06:02L HLA-DRB1*01:02L HLA-DRB1*08:01L HLA-DRB1*12:01L HLA-DPA1*03:01-B1*105:01L HLA-DRB1*16:01L HLA-DRB1*04:08L
PNFKDQVILLNKH

SEQ ID NO: 16297 - protein, 13 aa, Severe acute respiratory syndrome coronavirus 2
  REGION 1..13: note = Table B: HLA-DRB1*01:03L HLA-DRB1*04:04L HLA-DRB1*04:05L HLA-DRB1*01:02L HLA-DRB1*14:01L HLA-DRB1*08:01L HLA-DRB1*12:01L HLA-DQA1*03:01-B1*03:02L HLA-DRB1*14:17L HLA-DRB1*04:08L HLA-DQA1*02:01-B1*03:03L HLA-DRB1*15:01L
NKHIDAYKTFPPT

SEQ ID NO: 16298 - protein, 14 aa, Severe acute respiratory syndrome coronavirus 2
  REGION 1..14: note = Table B: HLA-DRB1*01:03L HLA-DRB1*01:02L HLA-DRB1*12:01L HLA-DRB1*04:08L
KHIDAYKTFPPTEP

SEQ ID NO: 16299 - protein, 14 aa, Severe acute respiratory syndrome coronavirus 2
  REGION 1..14: note = Table B: HLA-DRB1*01:03L HLA-DRB1*01:02L
TFPPTEPKKDKKKK

SEQ ID NO: 16300 - protein, 15 aa, Severe acute respiratory syndrome coronavirus 2
  REGION 1..15: note = Table B: HLA-DRB1*01:03L HLA-DRB1*08:01L HLA-DRB1*16:01L
DKKKKADETQALPQR

SEQ ID NO: 16301 - protein, 14 aa, Severe acute respiratory syndrome coronavirus 2
  REGION 1..14: note = Table B: HLA-DRB1*01:03L
LDDFSKQLQQSMSS

SEQ ID NO: 16302 - protein, 14 aa, Severe acute respiratory syndrome coronavirus 2
  REGION 1..14: note = Table B: HLA-DRB1*01:03L HLA-DRB1*01:02L HLA-DPA1*01:03-B1*04:02L HLA-DRB1*04:08L
TIYSLLLCRMNSRN

SEQ ID NO: 16303 - protein, 11 aa, Severe acute respiratory syndrome coronavirus 2
  REGION 1..11: note = Table B: HLA-DRB1*04:02L HLA-DRB3*02:01L HLA-DRB1*11:04L HLA-DRB1*08:01L HLA-DPA1*01:03-B1*04:02L HLA-DRB1*14:17L HLA-DQA1*01:03-B1*06:01L
DSVEEVLSEAR

SEQ ID NO: 16304 - protein, 12 aa, Severe acute respiratory syndrome coronavirus 2
  REGION 1..12: note = Table B: HLA-DRB1*04:02L HLA-DRB1*04:05L HLA-DRB1*11:04L HLA-DRB3*01:01L HLA-DRB1*14:54L HLA-DRB1*04:08L
EEVLSEARQHLK

SEQ ID NO: 16305 - protein, 12 aa, Severe acute respiratory syndrome coronavirus 2
  REGION 1..12: note = Table B: HLA-DRB1*04:02L HLA-DRB1*14:01L HLA-DRB1*14:17L
GVLVPHVGEIPV

SEQ ID NO: 16306 - protein, 12 aa, Severe acute respiratory syndrome coronavirus 2
  REGION 1..12: note = Table B: HLA-DRB1*04:02L HLA-DRB1*14:17L
VLVPHVGEIPVA

SEQ ID NO: 16307 - protein, 12 aa, Severe acute respiratory syndrome coronavirus 2
  REGION 1..12: note = Table B: HLA-DRB1*04:02L HLA-DRB1*08:01L
GHSYGADLKSFD

SEQ ID NO: 16308 - protein, 11 aa, Severe acute respiratory syndrome coronavirus 2
  REGION 1..11: note = Table B: HLA-DRB1*04:02L HLA-DRB1*01:02L HLA-DRB1*14:17L
LMRELNGGAYT

SEQ ID NO: 16309 - protein, 11 aa, Severe acute respiratory syndrome coronavirus 2
  REGION 1..11: note = Table B: HLA-DRB1*04:02L HLA-DRB1*04:05L HLA-DRB1*16:01L HLA-DQA1*02:01-B1*03:03L
EQLDFIDTKRG

SEQ ID NO: 16310 - protein, 14 aa, Severe acute respiratory syndrome coronavirus 2
  REGION 1..14: note = Table B: HLA-DRB1*04:02L HLA-DRB1*04:04L HLA-DRB1*04:05L HLA-DRB1*01:02L HLA-DRB1*04:10L HLA-DRB1*14:17L HLA-DRB1*04:08L
NSEVGPEHSLAEYH

SEQ ID NO: 16311 - protein, 14 aa, Severe acute respiratory syndrome coronavirus 2
  REGION 1..14: note = Table B: HLA-DRB1*04:02L HLA-DRB1*04:04L HLA-DRB1*04:05L HLA-DRB1*01:02L HLA-DRB1*04:10L HLA-DRB1*14:17L HLA-DRB1*04:08L
SEVGPEHSLAEYHN

SEQ ID NO: 16312 - protein, 12 aa, Severe acute respiratory syndrome coronavirus 2
  REGION 1..12: note = Table B: HLA-DRB1*04:02L HLA-DRB1*14:01L HLA-DRB1*08:01L HLA-DRB1*12:01L HLA-DRB1*14:54L HLA-DRB1*16:01L HLA-DRB1*15:03L
DNLLEILQKEKV

SEQ ID NO: 16313 - protein, 13 aa, Severe acute respiratory syndrome coronavirus 2
  REGION 1..13: note = Table B: HLA-DRB1*04:02L HLA-DRB1*04:04L HLA-DRB1*01:02L
EEIAIILASFSAS

SEQ ID NO: 16314 - protein, 12 aa, Severe acute respiratory syndrome coronavirus 2
  REGION 1..12: note = Table B: HLA-DRB1*04:02L
AIILASFSASTS

SEQ ID NO: 16315 - protein, 12 aa, Severe acute respiratory syndrome coronavirus 2
  REGION 1..12: note = Table B: HLA-DRB1*04:02L HLA-DQA1*01:02-B1*06:02L HLA-DQA1*05:05-B1*03:19L HLA-DQA1*05:05-B1*03:01L HLA-DQA1*02:01-B1*03:03L
IILASFSASTSA

SEQ ID NO: 16316 - protein, 11 aa, Severe acute respiratory syndrome coronavirus 2
  REGION 1..11: note = Table B: HLA-DRB1*04:02L
STSAFVETVKG

SEQ ID NO: 16317 - protein, 14 aa, Severe acute respiratory syndrome coronavirus 2
  REGION 1..14: note = Table B: HLA-DRB1*04:02L HLA-DRB1*01:02L
GAWNIGEQKSILSP

SEQ ID NO: 16318 - protein, 13 aa, Severe acute respiratory syndrome coronavirus 2
  REGION 1..13: note = Table B: HLA-DRB1*04:02L HLA-DRB1*04:04L HLA-DRB1*04:05L HLA-DRB1*01:02L HLA-DRB1*04:10L HLA-DRB1*12:01L HLA-DQA1*05:05-B1*03:01L HLA-DRB1*16:01L HLA-DRB1*04:08L
KSILSPLYAFASE

SEQ ID NO: 16319 - protein, 14 aa, Severe acute respiratory syndrome coronavirus 2
  REGION 1..14: note = Table B: HLA-DRB1*04:02L HLA-DRB1*01:02L HLA-DQA1*05:05-B1*03:19L HLA-DPA1*03:01-B1*105:01L HLA-DQA1*05:05-B1*03:01L HLA-DQA1*01:03-B1*06:01L HLA-DQA1*02:01-B1*03:03L HLA-DRB1*15:03L
SILSPLYAFASEAA

SEQ ID NO: 16320 - protein, 11 aa, Severe acute respiratory syndrome coronavirus 2
  REGION 1..11: note = Table B: HLA-DRB1*04:02L HLA-DRB1*04:05L HLA-DRB4*03:01NL HLA-DQA1*05:01-B1*02:01L HLA-DRB1*04:10L HLA-DRB1*12:01L HLA-DQA1*03:01-B1*03:02L HLA-DRB1*14:54L HLA-DRB1*16:01L HLA-DQA1*02:01-B1*03:03L
AAITILDGISQ

SEQ ID NO: 16321 - protein, 11 aa, Severe acute respiratory syndrome coronavirus 2
  REGION 1..11: note = Table B: HLA-DRB1*04:02L HLA-DRB1*04:04L HLA-DRB1*04:05L HLA-DRB1*01:02L HLA-DQA1*03:01-B1*03:02L HLA-DRB1*14:54L HLA-DRB1*14:17L HLA-DRB1*04:08L
ITILDGISQYS

SEQ ID NO: 16322 - protein, 13 aa, Severe acute respiratory syndrome coronavirus 2
  REGION 1..13: note = Table B: HLA-DRB1*04:02L HLA-DQA1*01:02-B1*06:02L HLA-DRB1*01:02L HLA-DRB1*08:01L HLA-DRB1*04:10L HLA-DQA1*03:01-B1*03:02L HLA-DRB1*14:17L HLA-DRB1*16:01L HLA-DRB1*04:08L HLA-DQA1*02:01-B1*03:03L HLA-DRB1*15:03L
EKLKPVLDWLEEK

SEQ ID NO: 16323 - protein, 12 aa, Severe acute respiratory syndrome coronavirus 2
  REGION 1..12: note = Table B: HLA-DRB1*04:02L HLA-DRB1*08:04L HLA-DRB3*02:01L HLA-DRB1*11:02L HLA-DRB1*08:01L HLA-DRB1*09:01L HLA-DRB1*14:54L
GETFVTHSKGLY

SEQ ID NO: 16324 - protein, 13 aa, Severe acute respiratory syndrome coronavirus 2
  REGION 1..13: note = Table B: HLA-DRB1*04:02L HLA-DRB1*04:05L HLA-DRB1*14:01L HLA-DRB1*12:01L HLA-DRB1*14:17L HLA-DRB1*16:01L HLA-DQA1*01:03-B1*06:01L HLA-DRB1*15:03L
TEEVVLKTGDLQP

SEQ ID NO: 16325 - protein, 13 aa, Severe acute respiratory syndrome coronavirus 2
  REGION 1..13: note = Table B: HLA-DRB1*04:02L HLA-DRB1*12:01L HLA-DQA1*05:05-B1*03:01L HLA-DRB1*16:01L
EEVVLKTGDLQPL

SEQ ID NO: 16326 - protein, 13 aa, Severe acute respiratory syndrome coronavirus 2
  REGION 1..13: note = Table B: HLA-DRB1*04:02L HLA-DRB1*04:04L HLA-DRB1*08:01L
GLMLLEIKDTEKY

SEQ ID NO: 16327 - protein, 13 aa, Severe acute respiratory syndrome coronavirus 2
  REGION 1..13: note = Table B: HLA-DRB1*04:02L HLA-DRB1*04:04L HLA-DPA1*03:01-B1*04:02L HLA-DPA1*01:03-B1*04:02L HLA-DPA1*02:01-B1*13:01L HLA-DRB1*14:17L HLA-DPA1*01:02-B1*04:01L HLA-DRB1*10:01L
NEFACVVADAVIK

SEQ ID NO: 16328 - protein, 14 aa, Severe acute respiratory syndrome coronavirus 2
  REGION 1..14: note = Table B: HLA-DRB1*04:02L HLA-DRB1*04:05L HLA-DQA1*01:02-B1*06:02L HLA-DRB1*01:02L HLA-DPA1*03:01-B1*105:01L HLA-DQA1*01:03-B1*06:01L HLA-DQA1*02:01-B1*03:03L
IKTLQPVSELLTPL

SEQ ID NO: 16329 - protein, 13 aa, Severe acute respiratory syndrome coronavirus 2
  REGION 1..13: note = Table B: HLA-DRB1*04:02L HLA-DRB1*04:04L HLA-DRB1*04:05L HLA-DQA1*01:02-B1*06:02L HLA-DRB1*04:10L HLA-DPA1*03:01-B1*105:01L HLA-DRB1*14:17L HLA-DRB1*16:01L
QPVSELLTPLGID

SEQ ID NO: 16330 - protein, 13 aa, Severe acute respiratory syndrome coronavirus 2
  REGION 1..13: note = Table B: HLA-DRB1*04:02L HLA-DRB1*04:05L HLA-DPA1*01:03-B1*03:01L HLA-DRB1*08:01L HLA-DPA1*01:03-B1*04:02L HLA-DRB1*12:01L
FGATSAALQPEEE

SEQ ID NO: 16331 - protein, 13 aa, Severe acute respiratory syndrome coronavirus 2
  REGION 1..13: note = Table B: HLA-DRB1*04:02L HLA-DRB1*04:05L HLA-DRB4*03:01NL HLA-DPA1*01:03-B1*03:01L HLA-DRB1*08:01L HLA-DQA1*01-B1*05L HLA-DRB1*04:10L HLA-DPA1*01:03-B1*04:02L HLA-DRB1*12:01L
GATSAALQPEEEQ

SEQ ID NO: 16332 - protein, 12 aa, Severe acute respiratory syndrome coronavirus 2
  REGION 1..12: note = Table B: HLA-DRB1*04:02L HLA-DQA1*05:01-B1*02:01L HLA-DQA1*01:03-B1*06:01L
TTIQTIVEVQPQ

SEQ ID NO: 16333 - protein, 13 aa, Severe acute respiratory syndrome coronavirus 2
  REGION 1..13: note = Table B: HLA-DRB1*04:02L HLA-DRB1*01:02L
PQLEMELTPVVQT

SEQ ID NO: 16334 - protein, 14 aa, Severe acute respiratory syndrome coronavirus 2
  REGION 1..14: note = Table B: HLA-DRB1*04:02L HLA-DRB1*01:02L HLA-DPA1*01:03-B1*03:01L HLA-DQA1*01-B1*05L HLA-DRB1*12:01L HLA-DRB1*04:08L
EMELTPVVQTIEVN

SEQ ID NO: 16335 - protein, 12 aa, Severe acute respiratory syndrome coronavirus 2
  REGION 1..12: note = Table B: HLA-DRB1*04:02L HLA-DRB1*01:02L HLA-DQA1*05:05-B1*03:01L HLA-DRB1*14:17L
PVVQTIEVNSFS

SEQ ID NO: 16336 - protein, 13 aa, Severe acute respiratory syndrome coronavirus 2
  REGION 1..13: note = Table B: HLA-DRB1*04:02L HLA-DRB1*08:01L
NADIVEEAKKVKP

SEQ ID NO: 16337 - protein, 12 aa, Severe acute respiratory syndrome coronavirus 2
  REGION 1..12: note = Table B: HLA-DRB1*04:02L HLA-DRB1*04:05L HLA-DRB1*01:02L HLA-DRB1*08:04L HLA-DRB1*11:03L HLA-DRB1*14:17L HLA-DRB1*07:01L
KPTVVVNAANVY

SEQ ID NO: 16338 - protein, 13 aa, Severe acute respiratory syndrome coronavirus 2
  REGION 1..13: note = Table B: HLA-DRB1*04:02L HLA-DRB1*04:10L HLA-DRB1*14:17L
NAMQVESDDYIAT

SEQ ID NO: 16339 - protein, 11 aa, Severe acute respiratory syndrome coronavirus 2
  REGION 1..11: note = Table B: HLA-DRB1*04:02L HLA-DRB1*04:05L HLA-DRB1*04:10L HLA-DQA1*03:01-B1*03:02L HLA-DRB1*14:54L
EDIQLLKSAYE

SEQ ID NO: 16340 - protein, 11 aa, Severe acute respiratory syndrome coronavirus 2
  REGION 1..11: note = Table B: HLA-DRB1*04:02L HLA-DRB1*14:17L
YLAVFDKNLYD

SEQ ID NO: 16341 - protein, 15 aa, Severe acute respiratory syndrome coronavirus 2
  REGION 1..15: note = Table B: HLA-DRB1*04:02L HLA-DRB1*01:02L HLA-DRB1*04:08L
TENLLLYIDINGNLH

SEQ ID NO: 16342 - protein, 12 aa, Severe acute respiratory syndrome coronavirus 2
  REGION 1..12: note = Table B: HLA-DRB1*04:02L HLA-DQA1*05:05-B1*03:01L HLA-DQA1*01:03-B1*06:01L
DVVQEGVLTAVV

SEQ ID NO: 16343 - protein, 13 aa, Severe acute respiratory syndrome coronavirus 2
  REGION 1..13: note = Table B: HLA-DRB1*04:02L HLA-DRB1*04:05L HLA-DRB1*01:02L HLA-DRB3*01:01L HLA-DRB1*04:08L
KALRKVPTDNYIT

SEQ ID NO: 16344 - protein, 11 aa, Severe acute respiratory syndrome coronavirus 2
  REGION 1..11: note = Table B: HLA-DRB1*04:02L HLA-DQA1*05:01-B1*02:01L HLA-DRB1*14:17L HLA-DQA1*01:03-B1*06:01L
GLNGYTVEEAK

SEQ ID NO: 16345 - protein, 11 aa, Severe acute respiratory syndrome coronavirus 2
  REGION 1..11: note = Table B: HLA-DRB1*04:02L HLA-DRB1*04:05L HLA-DRB4*03:01NL HLA-DQA1*05:01-B1*02:01L HLA-DRB1*04:10L HLA-DQA1*03:01-B1*03:02L
SLINTLNDLNE

SEQ ID NO: 16346 - protein, 13 aa, Severe acute respiratory syndrome coronavirus 2
  REGION 1..13: note = Table B: HLA-DRB1*04:02L HLA-DRB1*04:05L HLA-DRB1*01:02L HLA-DQA1*03:01-B1*03:02L HLA-DRB1*14:17L HLA-DRB1*04:08L
NETLVTMPLGYVT

SEQ ID NO: 16347 - protein, 13 aa, Severe acute respiratory syndrome coronavirus 2
  REGION 1..13: note = Table B: HLA-DRB1*04:02L HLA-DRB1*04:05L HLA-DRB3*02:01L HLA-DRB1*12:02L HLA-DRB1*14:54L HLA-DRB1*14:17L HLA-DRB1*04:08L
VTHGLNLEEAARY

SEQ ID NO: 16348 - protein, 13 aa, Severe acute respiratory syndrome coronavirus 2
  REGION 1..13: note = Table B: HLA-DRB1*04:02L HLA-DRB1*04:05L HLA-DRB1*01:02L HLA-DPA1*03:01-B1*04:02L HLA-DQA1*01:01-B1*05:01L HLA-DRB1*04:10L HLA-DRB1*14:54L HLA-DQA1*05:05-B1*03:01L HLA-DRB1*14:17L HLA-DRB1*04:08L HLA-DRB1*15:01L
SPDAVTAYNGYLT

SEQ ID NO: 16349 - protein, 13 aa, Severe acute respiratory syndrome coronavirus 2
  REGION 1..13: note = Table B: HLA-DRB1*04:02L
PDAVTAYNGYLTS

SEQ ID NO: 16350 - protein, 12 aa, Severe acute respiratory syndrome coronavirus 2
  REGION 1..12: note = Table B: HLA-DRB1*04:02L HLA-DQA1*01-B1*05L HLA-DRB1*16:01L HLA-DRB1*15:03L
VTAYNGYLTSSS

SEQ ID NO: 16351 - protein, 13 aa, Severe acute respiratory syndrome coronavirus 2
  REGION 1..13: note = Table B: HLA-DRB1*04:02L HLA-DPA1*03:01-B1*105:01L HLA-DRB1*14:17L
GSYKDWSYSGQST

SEQ ID NO: 16352 - protein, 13 aa, Severe acute respiratory syndrome coronavirus 2
  REGION 1..13: note = Table B: HLA-DRB1*04:02L HLA-DRB1*08:04L HLA-DRB1*04:08L
TFHLDGEVITFDN

SEQ ID NO: 16353 - protein, 14 aa, Severe acute respiratory syndrome coronavirus 2
  REGION 1..14: note = Table B: HLA-DRB1*04:02L HLA-DRB1*04:04L HLA-DRB1*08:04L HLA-DRB1*08:01L HLA-DPA1*02:01-B1*13:01L HLA-DPA1*01:03-B1*104:01L
LREVRTIKVFTTVD

SEQ ID NO: 16354 - protein, 11 aa, Severe acute respiratory syndrome coronavirus 2
  REGION 1..11: note = Table B: HLA-DRB1*04:02L HLA-DRB1*14:17L
RTIKVFTTVDN

SEQ ID NO: 16355 - protein, 11 aa, Severe acute respiratory syndrome coronavirus 2
  REGION 1..11: note = Table B: HLA-DRB1*04:02L HLA-DRB1*14:17L HLA-DQA1*02:01-B1*03:03L
PTYLDGADVTK

SEQ ID NO: 16356 - protein, 13 aa, Severe acute respiratory syndrome coronavirus 2
  REGION 1..13: note = Table B: HLA-DRB1*04:02L
DGADVTKIKPHNS

SEQ ID NO: 16357 - protein, 13 aa, Severe acute respiratory syndrome coronavirus 2
  REGION 1..13: note = Table B: HLA-DRB1*04:02L HLA-DRB1*04:04L HLA-DRB1*04:05L HLA-DRB1*14:01L HLA-DRB1*08:01L HLA-DRB1*12:01L HLA-DRB1*16:01L HLA-DQA1*01:03-B1*06:01L HLA-DRB1*15:03L
GADVTKIKPHNSH

SEQ ID NO: 16358 - protein, 12 aa, Severe acute respiratory syndrome coronavirus 2
  REGION 1..12: note = Table B: HLA-DRB1*04:02L HLA-DRB1*04:04L HLA-DRB1*04:05L HLA-DRB1*01:02L HLA-DRB1*14:01L HLA-DRB1*11:04L HLA-DRB1*08:01L HLA-DRB1*12:01L HLA-DRB3*01:01L HLA-DRB1*16:01L HLA-DRB1*04:08L HLA-DQA1*02:01-B1*03:03L HLA-DRB1*15:03L
KIKPHNSHEGKT

SEQ ID NO: 16359 - protein, 11 aa, Severe acute respiratory syndrome coronavirus 2
  REGION 1..11: note = Table B: HLA-DRB1*04:02L HLA-DRB1*11:04L HLA-DRB1*12:02L HLA-DPA1*01:03-B1*104:01L HLA-DRB1*04:08L
EYYHTTDPSFL

SEQ ID NO: 16360 - protein, 11 aa, Severe acute respiratory syndrome coronavirus 2
  REGION 1..11: note = Table B: HLA-DRB1*04:02L HLA-DRB4*03:01NL HLA-DRB1*14:17L
YYHTTDPSFLG

SEQ ID NO: 16361 - protein, 13 aa, Severe acute respiratory syndrome coronavirus 2
  REGION 1..13: note = Table B: HLA-DRB1*04:02L HLA-DRB1*04:05L HLA-DRB1*01:02L HLA-DRB3*02:01L HLA-DRB1*14:01L HLA-DRB1*04:10L HLA-DRB1*12:02L HLA-DRB1*14:54L HLA-DQA1*05:05-B1*03:01L HLA-DRB1*14:17L HLA-DPA1*01:02-B1*04:01L
VEAVMYMGTLSYE

SEQ ID NO: 16362 - protein, 12 aa, Severe acute respiratory syndrome coronavirus 2
  REGION 1..12: note = Table B: HLA-DRB1*04:02L HLA-DRB1*14:01L HLA-DRB1*14:54L
AVMYMGTLSYEQ

SEQ ID NO: 16363 - protein, 11 aa, Severe acute respiratory syndrome coronavirus 2
  REGION 1..11: note = Table B: HLA-DRB1*04:02L
TKYLVQQESPF

SEQ ID NO: 16364 - protein, 11 aa, Severe acute respiratory syndrome coronavirus 2
  REGION 1..11: note = Table B: HLA-DRB1*04:02L HLA-DQA1*03:01-B1*03:02L HLA-DRB1*14:17L
VMMSAPPAQYE

SEQ ID NO: 16365 - protein, 12 aa, Severe acute respiratory syndrome coronavirus 2
  REGION 1..12: note = Table B: HLA-DRB1*04:02L HLA-DRB1*01:02L HLA-DQA1*01-B1*05L HLA-DQA1*05:01-B1*02:01L HLA-DRB1*12:01L HLA-DPA1*03:01-B1*105:01L HLA-DQA1*03:01-B1*03:02L HLA-DRB1*14:17L HLA-DRB1*16:01L HLA-DQA1*02:01-B1*03:03L
  REGION 1..12: note = CONT. FROM ABOVE: HLA-DRB1*15:03L
DVFYKENSYTTT

SEQ ID NO: 16366 - protein, 12 aa, Severe acute respiratory syndrome coronavirus 2
  REGION 1..12: note = Table B: HLA-DRB1*04:02L HLA-DRB1*04:05L
TTIKPVTYKLDG

SEQ ID NO: 16367 - protein, 12 aa, Severe acute respiratory syndrome coronavirus 2
  REGION 1..12: note = Table B: HLA-DRB1*04:02L HLA-DQA1*01:02-B1*06:02L HLA-DRB1*01:02L HLA-DRB1*14:01L HLA-DRB1*04:08L
QLTGYKKPASRE

SEQ ID NO: 16368 - protein, 13 aa, Severe acute respiratory syndrome coronavirus 2
  REGION 1..13: note = Table B: HLA-DRB1*04:02L HLA-DRB1*04:05L HLA-DRB1*01:02L HLA-DRB1*12:01L HLA-DPA1*02:01-B1*13:01L
ELKVTFFPDLNGD

SEQ ID NO: 16369 - protein, 12 aa, Severe acute respiratory syndrome coronavirus 2
  REGION 1..12: note = Table B: HLA-DRB1*04:02L HLA-DRB1*04:05L HLA-DQA1*05:05-B1*03:01L HLA-DRB1*14:17L
STKPVETSNSFD

SEQ ID NO: 16370 - protein, 11 aa, Severe acute respiratory syndrome coronavirus 2
  REGION 1..11: note = Table B: HLA-DRB1*04:02L HLA-DQA1*01-B1*05L HLA-DQA1*05:01-B1*02:01L HLA-DQA1*02:01-B1*03:03L
SFDVLKSEDAQ

SEQ ID NO: 16371 - protein, 11 aa, Severe acute respiratory syndrome coronavirus 2
  REGION 1..11: note = Table B: HLA-DRB1*04:02L HLA-DRB1*14:17L HLA-DQA1*01:03-B1*06:01L HLA-DQA1*02:01-B1*03:03L
LKSEDAQGMDN

SEQ ID NO: 16372 - protein, 13 aa, Severe acute respiratory syndrome coronavirus 2
  REGION 1..13: note = Table B: HLA-DRB1*04:02L HLA-DRB1*01:02L HLA-DQA1*05:01-B1*02:01L HLA-DRB1*12:01L HLA-DRB1*16:01L
NNSLKITEEVGHT

SEQ ID NO: 16373 - protein, 13 aa, Severe acute respiratory syndrome coronavirus 2
  REGION 1..13: note = Table B: HLA-DRB1*04:02L HLA-DRB1*04:05L HLA-DRB1*01:02L HLA-DPA1*01:03-B1*03:01L HLA-DRB1*08:01L HLA-DPA1*01:03-B1*04:02L HLA-DRB1*12:01L HLA-DRB1*14:17L HLA-DRB1*04:08L
VGHTDLMAAYVDN

SEQ ID NO: 16374 - protein, 12 aa, Severe acute respiratory syndrome coronavirus 2
  REGION 1..12: note = Table B: HLA-DRB1*04:02L HLA-DRB1*04:05L HLA-DQA1*01:02-B1*06:02L HLA-DPA1*03:01-B1*04:02L HLA-DRB1*04:10L HLA-DRB1*12:01L HLA-DPA1*02:01-B1*13:01L HLA-DPA1*03:01-B1*105:01L HLA-DRB1*14:17L HLA-DRB1*16:01L
DLMAAYVDNSSL

SEQ ID NO: 16375 - protein, 11 aa, Severe acute respiratory syndrome coronavirus 2
  REGION 1..11: note = Table B: HLA-DRB1*04:02L HLA-DRB1*04:05L HLA-DRB4*03:01NL HLA-DRB1*04:10L HLA-DRB1*14:54L HLA-DRB1*14:17L HLA-DRB1*16:01L
MAAYVDNSSLT

SEQ ID NO: 16376 - protein, 12 aa, Severe acute respiratory syndrome coronavirus 2
  REGION 1..12: note = Table B: HLA-DRB1*04:02L HLA-DRB1*04:05L HLA-DQA1*01:02-B1*06:02L HLA-DRB4*03:01NL HLA-DQA1*05:01-B1*02:01L HLA-DRB1*04:10L HLA-DRB1*12:01L HLA-DQA1*03:01-B1*03:02L HLA-DRB1*14:54L
  REGION 1..12: note = CONT. FROM ABOVE: HLA-DQA1*02:01-B1*03:03L
LGSLIYSTAALG

SEQ ID NO: 16377 - protein, 12 aa, Severe acute respiratory syndrome coronavirus 2
  REGION 1..12: note = Table B: HLA-DRB1*04:02L HLA-DRB1*04:10L HLA-DRB1*14:54L
LGVLMSNLGMPS

SEQ ID NO: 16378 - protein, 12 aa, Severe acute respiratory syndrome coronavirus 2
  REGION 1..12: note = Table B: HLA-DRB1*04:02L HLA-DRB1*12:02L HLA-DRB1*14:54L
SDEVARDLSLQF

SEQ ID NO: 16379 - protein, 12 aa, Severe acute respiratory syndrome coronavirus 2
  REGION 1..12: note = Table B: HLA-DRB1*04:02L HLA-DRB1*08:04L HLA-DRB1*11:03L HLA-DRB1*11:04L HLA-DRB1*08:01L HLA-DRB1*11:01L HLA-DRB1*13:01L HLA-DRB1*12:02L HLA-DRB1*14:54L HLA-DRB1*14:17L HLA-DRB1*04:08L
DEVARDLSLQFK

SEQ ID NO: 16380 - protein, 13 aa, Severe acute respiratory syndrome coronavirus 2
  REGION 1..13: note = Table B: HLA-DRB1*04:02L HLA-DQA1*01:02-B1*06:02L HLA-DRB1*14:01L HLA-DRB1*08:01L HLA-DRB1*16:01L
DLSLQFKRPINPT

SEQ ID NO: 16381 - protein, 12 aa, Severe acute respiratory syndrome coronavirus 2
  REGION 1..12: note = Table B: HLA-DRB1*04:02L HLA-DRB1*14:17L
VKMFDAYVNTFS

SEQ ID NO: 16382 - protein, 13 aa, Severe acute respiratory syndrome coronavirus 2
  REGION 1..13: note = Table B: HLA-DRB1*04:02L
KMFDAYVNTFSST

SEQ ID NO: 16383 - protein, 13 aa, Severe acute respiratory syndrome coronavirus 2
  REGION 1..13: note = Table B: HLA-DRB1*04:02L
TAEAELAKNVSLD

SEQ ID NO: 16384 - protein, 12 aa, Severe acute respiratory syndrome coronavirus 2
  REGION 1..12: note = Table B: HLA-DRB1*04:02L HLA-DRB1*04:05L HLA-DRB1*14:17L
LAKNVSLDNVLS

SEQ ID NO: 16385 - protein, 12 aa, Severe acute respiratory syndrome coronavirus 2
  REGION 1..12: note = Table B: HLA-DRB1*04:02L HLA-DRB1*04:05L HLA-DRB4*03:01NL HLA-DQA1*05:01-B1*02:01L HLA-DRB1*04:10L HLA-DRB1*12:01L HLA-DRB1*14:54L HLA-DRB1*16:01L HLA-DQA1*02:01-B1*03:03L
AKNVSLDNVLST

SEQ ID NO: 16386 - protein, 11 aa, Severe acute respiratory syndrome coronavirus 2
  REGION 1..11: note = Table B: HLA-DRB1*04:02L HLA-DRB1*14:17L
HNIALIWNVKD

SEQ ID NO: 16387 - protein, 13 aa, Severe acute respiratory syndrome coronavirus 2
  REGION 1..13: note = Table B: HLA-DRB1*04:02L
VHVMSKHTDFSSE

SEQ ID NO: 16388 - protein, 14 aa, Severe acute respiratory syndrome coronavirus 2
  REGION 1..14: note = Table B: HLA-DRB1*04:02L HLA-DRB1*01:02L HLA-DRB1*04:08L
DTNVLEGSVAYESL

SEQ ID NO: 16389 - protein, 13 aa, Severe acute respiratory syndrome coronavirus 2
  REGION 1..13: note = Table B: HLA-DRB1*04:02L HLA-DQA1*01-B1*05L HLA-DPA1*01:03-B1*04:02L HLA-DRB1*04:08L
DAVNLLTNMFTPL

SEQ ID NO: 16390 - protein, 14 aa, Severe acute respiratory syndrome coronavirus 2
  REGION 1..14: note = Table B: HLA-DRB1*04:02L HLA-DRB1*04:04L HLA-DRB1*04:05L HLA-DRB1*01:02L HLA-DRB1*14:01L HLA-DPA1*01:03-B1*04:01L HLA-DPA1*01:03-B1*04:02L
VNLLTNMFTPLIQP

SEQ ID NO: 16391 - protein, 15 aa, Severe acute respiratory syndrome coronavirus 2
  REGION 1..15: note = Table B: HLA-DRB1*04:02L HLA-DRB1*01:02L HLA-DRB1*04:10L HLA-DRB1*12:01L HLA-DQA1*02:01-B1*03:03L
QPIGALDISASIVAG

SEQ ID NO: 16392 - protein, 14 aa, Severe acute respiratory syndrome coronavirus 2
  REGION 1..14: note = Table B: HLA-DRB1*04:02L HLA-DRB1*01:02L
IGALDISASIVAGG

SEQ ID NO: 16393 - protein, 14 aa, Severe acute respiratory syndrome coronavirus 2
  REGION 1..14: note = Table B: HLA-DRB1*04:02L HLA-DRB1*01:02L
GALDISASIVAGGI

SEQ ID NO: 16394 - protein, 13 aa, Severe acute respiratory syndrome coronavirus 2
  REGION 1..13: note = Table B: HLA-DRB1*04:02L HLA-DRB1*01:02L
LDISASIVAGGIV

SEQ ID NO: 16395 - protein, 15 aa, Severe acute respiratory syndrome coronavirus 2
  REGION 1..15: note = Table B: HLA-DRB1*04:02L
SASIVAGGIVAIVVT

SEQ ID NO: 16396 - protein, 14 aa, Severe acute respiratory syndrome coronavirus 2
  REGION 1..14: note = Table B: HLA-DRB1*04:02L HLA-DRB1*04:04L HLA-DRB1*11:02L HLA-DRB1*11:03L HLA-DQA1*01:01-B1*05:01L HLA-DRB1*09:01L HLA-DRB3*01:01L HLA-DRB1*07:01L HLA-DRB1*10:01L HLA-DRB1*08:02L HLA-DRB1*08:03L
RVVFNGVSFSTFEE

SEQ ID NO: 16397 - protein, 12 aa, Severe acute respiratory syndrome coronavirus 2
  REGION 1..12: note = Table B: HLA-DRB1*04:02L HLA-DRB1*08:04L HLA-DRB3*02:01L HLA-DRB1*11:03L HLA-DRB1*09:01L HLA-DRB1*12:02L HLA-DRB1*14:54L HLA-DRB1*07:01L HLA-DRB1*04:08L
DVLLPLTQYNRY

SEQ ID NO: 16398 - protein, 14 aa, Severe acute respiratory syndrome coronavirus 2
  REGION 1..14: note = Table B: HLA-DRB1*04:02L HLA-DRB1*01:01L HLA-DRB1*08:04L HLA-DRB1*11:03L HLA-DRB1*11:04L HLA-DRB1*13:01L HLA-DRB1*07:01L HLA-DRB1*15:01L
NRYLALYNKYKYFS

SEQ ID NO: 16399 - protein, 13 aa, Severe acute respiratory syndrome coronavirus 2
  REGION 1..13: note = Table B: HLA-DRB1*04:02L HLA-DRB1*04:05L HLA-DQA1*01:02-B1*06:02L HLA-DQA1*01-B1*05L HLA-DQA1*05:01-B1*02:01L HLA-DRB1*04:10L HLA-DQA1*03:01-B1*03:02L HLA-DRB1*14:17L HLA-DRB1*16:01L
  REGION 1..13: note = CONT. FROM ABOVE: HLA-DQA1*01:03-B1*06:01L HLA-DQA1*02:01-B1*03: 03L
HVICTSEDMLNPN

SEQ ID NO: 16400 - protein, 11 aa, Severe acute respiratory syndrome coronavirus 2
  REGION 1..11: note = Table B: HLA-DRB1*04:02L HLA-DRB1*14:01L HLA-DRB1*08:01L
VQLRVIGHSMQ

SEQ ID NO: 16401 - protein, 13 aa, Severe acute respiratory syndrome coronavirus 2
  REGION 1..13: note = Table B: HLA-DRB1*04:02L HLA-DRB1*01:02L HLA-DRB1*14:17L HLA-DRB1*16:01L HLA-DRB1*15:03L
FSVLACYNGSPSG

SEQ ID NO: 16402 - protein, 12 aa, Severe acute respiratory syndrome coronavirus 2
  REGION 1..12: note = Table B: HLA-DRB1*04:02L HLA-DRB1*04:05L HLA-DRB1*01:02L HLA-DRB1*08:04L HLA-DRB1*12:01L HLA-DRB1*16:01L HLA-DRB1*04:08L HLA-DRB1*08:03L
RPNFTIKGSFLN

SEQ ID NO: 16403 - protein, 13 aa, Severe acute respiratory syndrome coronavirus 2
  REGION 1..13: note = Table B: HLA-DRB1*04:02L HLA-DPA1*03:01-B1*105:01L HLA-DPA1*01:02-B1*04:01L HLA-DRB1*16:01L
LEGNFYGPFVDRQ

SEQ ID NO: 16404 - protein, 13 aa, Severe acute respiratory syndrome coronavirus 2
  REGION 1..13: note = Table B: HLA-DRB1*04:02L HLA-DRB1*04:05L HLA-DPA1*03:01-B1*105:01L
EPLTQDHVDILGP

SEQ ID NO: 16405 - protein, 11 aa, Severe acute respiratory syndrome coronavirus 2
  REGION 1..11: note = Table B: HLA-DRB1*04:02L HLA-DRB1*04:05L HLA-DQA1*01-B1*05L HLA-DRB1*04:10L
WLDMVDTSLSG

SEQ ID NO: 16406 - protein, 12 aa, Severe acute respiratory syndrome coronavirus 2
  REGION 1..12: note = Table B: HLA-DRB1*04:02L HLA-DRB1*01:02L HLA-DRB1*14:17L HLA-DRB1*16:01L HLA-DRB1*04:08L
GVVTTVMFLARG

SEQ ID NO: 16407 - protein, 11 aa, Severe acute respiratory syndrome coronavirus 2
  REGION 1..11: note = Table B: HLA-DRB1*04:02L HLA-DQA1*02:01-B1*03:03L
GLLPPKNSIDA

SEQ ID NO: 16408 - protein, 14 aa, Severe acute respiratory syndrome coronavirus 2
  REGION 1..14: note = Table B: HLA-DRB1*04:02L HLA-DPA1*03:01-B1*04:02L HLA-DQA1*05:05-B1*03:19L HLA-DRB1*12:01L HLA-DPA1*03:01-B1*105:01L HLA-DPA1*01:03-B1*02:01L HLA-DQA1*05:05-B1*03:01L
IDAFKLNIKLLGVG

SEQ ID NO: 16409 - protein, 11 aa, Severe acute respiratory syndrome coronavirus 2
  REGION 1..11: note = Table B: HLA-DRB1*04:02L HLA-DRB4*03:01NL HLA-DRB1*14:01L HLA-DQA1*03:01-B1*03:02L HLA-DRB1*16:01L HLA-DQA1*01:03-B1*06:01L HLA-DQA1*02:01-B1*03:03L
SVLQQLRVESS

SEQ ID NO: 16410 - protein, 11 aa, Severe acute respiratory syndrome coronavirus 2
  REGION 1..11: note = Table B: HLA-DRB1*04:02L
VLQQLRVESSS

SEQ ID NO: 16411 - protein, 12 aa, Severe acute respiratory syndrome coronavirus 2
  REGION 1..12: note = Table B: HLA-DRB1*04:02L HLA-DRB1*04:05L HLA-DRB4*03:01NL HLA-DRB1*08:04L HLA-DRB1*04:10L HLA-DRB1*14:54L HLA-DRB1*04:08L
TEAFEKMVSLLS

SEQ ID NO: 16412 - protein, 12 aa, Severe acute respiratory syndrome coronavirus 2
  REGION 1..12: note = Table B: HLA-DRB1*04:02L HLA-DQA1*01:02-B1*06:02L HLA-DRB1*14:17L
LSVLLSMQGAVD

SEQ ID NO: 16413 - protein, 13 aa, Severe acute respiratory syndrome coronavirus 2
  REGION 1..13: note = Table B: HLA-DRB1*04:02L HLA-DRB1*04:05L HLA-DQA1*01:02-B1*06:02L HLA-DRB1*01:02L HLA-DQA1*05:01-B1*02:01L HLA-DRB1*04:10L HLA-DRB1*12:01L HLA-DPA1*03:01-B1*105:01L HLA-DQA1*03:01-B1*03:02L
  REGION 1..13: note = CONT. FROM ABOVE: HLA-DQA1*05:05-B1*03:01L HLA-DRB1*14:17L HLA-D RB1*16:01L HLA-DQA1*02:01-B1*03:03L HLA-DRB1*15:03L
SVLLSMQGAVDIN

SEQ ID NO: 16414 - protein, 11 aa, Severe acute respiratory syndrome coronavirus 2
  REGION 1..11: note = Table B: HLA-DRB1*04:02L HLA-DRB1*04:05L HLA-DRB1*14:17L
AFATAQEAYEQ

SEQ ID NO: 16415 - protein, 13 aa, Severe acute respiratory syndrome coronavirus 2
  REGION 1..13: note = Table B: HLA-DRB1*04:02L HLA-DRB1*04:05L HLA-DRB4*03:01NL HLA-DRB1*04:10L HLA-DRB1*14:17L HLA-DRB1*16:01L
TAQEAYEQAVANG

SEQ ID NO: 16416 - protein, 11 aa, Severe acute respiratory syndrome coronavirus 2
  REGION 1..11: note = Table B: HLA-DRB1*04:02L HLA-DRB1*04:10L
SLNVAKSEFDR

SEQ ID NO: 16417 - protein, 11 aa, Severe acute respiratory syndrome coronavirus 2
  REGION 1..11: note = Table B: HLA-DRB1*04:02L HLA-DRB1*04:05L HLA-DPA1*01:03-B1*03:01L HLA-DRB1*11:04L HLA-DQA1*05:01-B1*02:01L HLA-DRB1*04:08L HLA-DQA1*02:01-B1*03:03L HLA-DRB1*15:03L
EFDRDAAMQRK

SEQ ID NO: 16418 - protein, 11 aa, Severe acute respiratory syndrome coronavirus 2
  REGION 1..11: note = Table B: HLA-DRB1*04:02L HLA-DQA1*01:03-B1*06:01L
DALNNIINNAR

SEQ ID NO: 16419 - protein, 11 aa, Severe acute respiratory syndrome coronavirus 2
  REGION 1..11: note = Table B: HLA-DRB1*04:02L
ALNNIINNARD

SEQ ID NO: 16420 - protein, 12 aa, Severe acute respiratory syndrome coronavirus 2
  REGION 1..12: note = Table B: HLA-DRB1*04:02L HLA-DRB1*04:05L HLA-DRB1*04:10L HLA-DRB1*14:17L
AKLMVVIPDYNT

SEQ ID NO: 16421 - protein, 14 aa, Severe acute respiratory syndrome coronavirus 2
  REGION 1..14: note = Table B: HLA-DRB1*04:02L HLA-DRB1*01:02L HLA-DRB1*08:04L HLA-DPA1*03:01-B1*04:02L HLA-DRB1*12:01L HLA-DPA1*02:01-B1*13:01L HLA-DQA1*05:05-B1*03:01L HLA-DRB1*16:01L HLA-DRB1*15:03L
ASALWEIQQVVDAD

SEQ ID NO: 16422 - protein, 11 aa, Severe acute respiratory syndrome coronavirus 2
  REGION 1..11: note = Table B: HLA-DRB1*04:02L
NSAVKLQNNEL

SEQ ID NO: 16423 - protein, 13 aa, Severe acute respiratory syndrome coronavirus 2
  REGION 1..13: note = Table B: HLA-DRB1*04:02L HLA-DRB1*01:02L HLA-DRB1*12:01L HLA-DQA1*05:05-B1*03:01L
LQNNELSPVALRQ

SEQ ID NO: 16424 - protein, 13 aa, Severe acute respiratory syndrome coronavirus 2
  REGION 1..13: note = Table B: HLA-DRB1*04:02L
NNELSPVALRQMS

SEQ ID NO: 16425 - protein, 17 aa, Severe acute respiratory syndrome coronavirus 2
  REGION 1..17: note = Table B: HLA-DRB1*04:02L HLA-DRB1*01:02L HLA-DRB1*08:01L HLA-DRB4*02:01NL HLA-DRB3*01:01L HLA-DPA1*02:01-B1*13:01L HLA-DPA1*01:03-B1*104:01L
FPKSDGTGTIYTELEPP

SEQ ID NO: 16426 - protein, 14 aa, Severe acute respiratory syndrome coronavirus 2
  REGION 1..14: note = Table B: HLA-DRB1*04:02L HLA-DRB4*03:01NL HLA-DPA1*03:01-B1*105:01L HLA-DRB1*16:01L
LQAGNATEVPANST

SEQ ID NO: 16427 - protein, 13 aa, Severe acute respiratory syndrome coronavirus 2
  REGION 1..13: note = Table B: HLA-DRB1*04:02L HLA-DQA1*01:02-B1*06:02L
AGNATEVPANSTV

SEQ ID NO: 16428 - protein, 19 aa, Severe acute respiratory syndrome coronavirus 2
  REGION 1..19: note = Table B: HLA-DRB1*04:02L HLA-DRB1*01:01L HLA-DRB1*11:02L HLA-DRB4*01:01L HLA-DRB1*09:01L HLA-DRB1*07:01L
VPANSTVLSFCAFAVDAAK

SEQ ID NO: 16429 - protein, 12 aa, Severe acute respiratory syndrome coronavirus 2
  REGION 1..12: note = Table B: HLA-DRB1*04:02L HLA-DRB1*04:05L HLA-DRB4*03:01NL HLA-DQA1*01-B1*05L HLA-DQA1*05:01-B1*02:01L HLA-DRB1*04:10L
TVTPEANMDQES

SEQ ID NO: 16430 - protein, 13 aa, Severe acute respiratory syndrome coronavirus 2
  REGION 1..13: note = Table B: HLA-DRB1*04:02L HLA-DRB1*14:17L
TPEANMDQESFGG

SEQ ID NO: 16431 - protein, 12 aa, Severe acute respiratory syndrome coronavirus 2
  REGION 1..12: note = Table B: HLA-DRB1*04:02L HLA-DRB1*04:04L HLA-DRB1*04:05L HLA-DQA1*01:02-B1*06:02L HLA-DRB1*04:10L HLA-DQA1*03:01-B1*03:02L HLA-DRB1*16:01L
YVQIPTTCANDP

SEQ ID NO: 16432 - protein, 11 aa, Severe acute respiratory syndrome coronavirus 2
  REGION 1..11: note = Table B: HLA-DRB1*04:02L HLA-DRB1*08:04L HLA-DRB3*02:01L HLA-DRB3*01:01L HLA-DRB1*14:54L HLA-DRB1*14:17L HLA-DRB1*04:08L
DIYNDKVAGFA

SEQ ID NO: 16433 - protein, 11 aa, Severe acute respiratory syndrome coronavirus 2
  REGION 1..11: note = Table B: HLA-DRB1*04:02L HLA-DRB1*01:01L HLA-DRB4*03:01NL HLA-DRB1*11:04L HLA-DRB1*11:01L HLA-DRB3*01:01L HLA-DQA1*05:05-B1*03:01L
RVYANLGERVR

SEQ ID NO: 16434 - protein, 13 aa, Severe acute respiratory syndrome coronavirus 2
  REGION 1..13: note = Table B: HLA-DRB1*04:02L HLA-DRB1*04:05L HLA-DRB4*03:01NL HLA-DQA1*05:01-B1*02:01L HLA-DRB1*04:10L HLA-DRB1*12:01L
NAGIVGVLTLDNQ

SEQ ID NO: 16435 - protein, 14 aa, Severe acute respiratory syndrome coronavirus 2
  REGION 1..14: note = Table B: HLA-DRB1*04:02L HLA-DRB1*01:02L HLA-DPA1*01:03-B1*03:01L HLA-DRB1*08:01L HLA-DRB1*11:01L HLA-DPA1*01:03-B1*04:02L HLA-DRB1*12:01L
IQTTPGSGVPVVDS

SEQ ID NO: 16436 - protein, 12 aa, Severe acute respiratory syndrome coronavirus 2
  REGION 1..12: note = Table B: HLA-DRB1*04:02L HLA-DRB1*14:01L
ILTLTRALTAES

SEQ ID NO: 16437 - protein, 11 aa, Severe acute respiratory syndrome coronavirus 2
  REGION 1..11: note = Table B: HLA-DRB1*04:02L HLA-DQA1*02:01-B1*03:03L
TLTRALTAESH

SEQ ID NO: 16438 - protein, 13 aa, Severe acute respiratory syndrome coronavirus 2
  REGION 1..13: note = Table B: HLA-DRB1*04:02L HLA-DQA1*01:01-B1*05:01L HLA-DRB1*16:01L HLA-DQA1*01:03-B1*06:01L
TAESHVDTDLTKP

SEQ ID NO: 16439 - protein, 11 aa, Severe acute respiratory syndrome coronavirus 2
  REGION 1..11: note = Table B: HLA-DRB1*04:02L HLA-DQA1*03:01-B1*03:02L HLA-DRB1*14:17L
AADPAMHAASG

SEQ ID NO: 16440 - protein, 11 aa, Severe acute respiratory syndrome coronavirus 2
  REGION 1..11: note = Table B: HLA-DRB1*04:02L HLA-DRB1*04:05L HLA-DQA1*01:02-B1*06:02L HLA-DRB1*01:02L HLA-DRB1*08:04L HLA-DRB3*02:01L HLA-DPA1*03:01-B1*04:02L HLA-DRB1*14:01L HLA-DRB1*11:03L HLA-DRB1*11:04L HLA-DRB1*14:02L HLA-DRB5*01:01L
  REGION 1..11: note = CONT. FROM ABOVE: HLA-DRB1*09:01L HLA-DRB1*12:02L HLA-DPA1*03:01 -B1*105:01L HLA-DRB1*14:54L HLA-DQA1*05:05-B1*03:01L HLA-DRB1*14 :17L HLA-DRB1*07:01L HLA-DQA1*01:03-B1*06:01L HLA-DRB1*04:08L
NLDKSAGFPFN

SEQ ID NO: 16441 - protein, 13 aa, Severe acute respiratory syndrome coronavirus 2
  REGION 1..13: note = Table B: HLA-DRB1*04:02L HLA-DRB1*01:02L HLA-DPA1*01:03-B1*03:01L HLA-DRB1*04:10L HLA-DPA1*02:01-B1*13:01L
KRNVIPTITQMNL

SEQ ID NO: 16442 - protein, 15 aa, Severe acute respiratory syndrome coronavirus 2
  REGION 1..15: note = Table B: HLA-DRB1*04:02L HLA-DRB1*04:04L HLA-DRB1*04:05L HLA-DRB1*01:01L HLA-DRB1*11:04L HLA-DRB3*01:01L HLA-DPA1*03:01-B1*105:01L HLA-DRB1*07:01L HLA-DQA1*02:01-B1*03:03L HLA-DRB1*15:01L
MPNMLRIMASLVLAR

SEQ ID NO: 16443 - protein, 14 aa, Severe acute respiratory syndrome coronavirus 2
  REGION 1..14: note = Table B: HLA-DRB1*04:02L HLA-DRB1*01:02L HLA-DRB1*08:04L HLA-DQA1*05:05-B1*03:19L HLA-DRB1*12:02L HLA-DQA1*05:05-B1*03:01L
QAVTANVNALLSTD

SEQ ID NO: 16444 - protein, 12 aa, Severe acute respiratory syndrome coronavirus 2
  REGION 1..12: note = Table B: HLA-DRB1*04:02L HLA-DRB1*14:17L HLA-DQA1*01:03-B1*06:01L HLA-DQA1*02:01-B1*03:03L
NVNALLSTDGNK

SEQ ID NO: 16445 - protein, 13 aa, Severe acute respiratory syndrome coronavirus 2
  REGION 1..13: note = Table B: HLA-DRB1*04:02L HLA-DRB1*08:04L HLA-DRB1*11:03L
ADKYVRNLQHRLY

SEQ ID NO: 16446 - protein, 13 aa, Severe acute respiratory syndrome coronavirus 2
  REGION 1..13: note = Table B: HLA-DRB1*04:02L HLA-DRB1*08:04L HLA-DRB1*09:01L HLA-DRB3*01:01L HLA-DRB1*14:54L HLA-DRB1*04:08L
NRDVDTDFVNEFY

SEQ ID NO: 16447 - protein, 13 aa, Severe acute respiratory syndrome coronavirus 2
  REGION 1..13: note = Table B: HLA-DRB1*04:02L HLA-DRB1*14:01L
ASQGLVASIKNFK

SEQ ID NO: 16448 - protein, 11 aa, Severe acute respiratory syndrome coronavirus 2
  REGION 1..11: note = Table B: HLA-DRB1*04:02L HLA-DRB1*14:01L HLA-DRB1*14:17L
GLVASIKNFKS

SEQ ID NO: 16449 - protein, 12 aa, Severe acute respiratory syndrome coronavirus 2
  REGION 1..12: note = Table B: HLA-DRB1*04:02L HLA-DRB1*04:08L HLA-DRB1*15:01L
SIKNFKSVLYYQ

SEQ ID NO: 16450 - protein, 12 aa, Severe acute respiratory syndrome coronavirus 2
  REGION 1..12: note = Table B: HLA-DRB1*04:02L HLA-DRB1*01:02L HLA-DRB1*14:17L
SVLYYQNNVFMS

SEQ ID NO: 16451 - protein, 13 aa, Severe acute respiratory syndrome coronavirus 2
  REGION 1..13: note = Table B: HLA-DRB1*04:02L HLA-DRB1*04:05L HLA-DRB1*14:01L HLA-DPA1*02:01-B1*13:01L
HTMLVKQGDDYVY

SEQ ID NO: 16452 - protein, 11 aa, Severe acute respiratory syndrome coronavirus 2
  REGION 1..11: note = Table B: HLA-DRB1*04:02L HLA-DRB1*08:01L
DAYPLTKHPNQ

SEQ ID NO: 16453 - protein, 13 aa, Severe acute respiratory syndrome coronavirus 2
  REGION 1..13: note = Table B: HLA-DRB1*04:02L HLA-DRB1*11:03L HLA-DRB1*12:01L HLA-DPA1*02:01-B1*13:01L HLA-DPA1*01:03-B1*02:01L HLA-DRB1*08:02L
HLYLQYIRKLHDE

SEQ ID NO: 16454 - protein, 12 aa, Severe acute respiratory syndrome coronavirus 2
  REGION 1..12: note = Table B: HLA-DRB1*04:02L HLA-DRB1*04:05L HLA-DQA1*05:01-B1*02:01L HLA-DRB1*04:10L
DMYSVMLTNDNT

SEQ ID NO: 16455 - protein, 12 aa, Severe acute respiratory syndrome coronavirus 2
  REGION 1..12: note = Table B: HLA-DRB1*04:02L HLA-DRB1*04:05L HLA-DRB1*04:10L HLA-DQA1*03:01-B1*03:02L HLA-DRB1*14:54L HLA-DRB1*14:17L HLA-DRB1*04:08L
AGDYILANTCTE

SEQ ID NO: 16456 - protein, 12 aa, Severe acute respiratory syndrome coronavirus 2
  REGION 1..12: note = Table B: HLA-DRB1*04:02L HLA-DRB1*01:02L HLA-DRB1*12:01L
YGIATVREVLSD

SEQ ID NO: 16457 - protein, 13 aa, Severe acute respiratory syndrome coronavirus 2
  REGION 1..13: note = Table B: HLA-DRB1*04:02L HLA-DRB1*04:04L HLA-DRB1*04:10L HLA-DRB1*12:01L HLA-DRB1*15:03L
ATVREVLSDRELH

SEQ ID NO: 16458 - protein, 13 aa, Severe acute respiratory syndrome coronavirus 2
  REGION 1..13: note = Table B: HLA-DRB1*04:02L HLA-DRB1*04:05L
EKGDYGDAVVYRG

SEQ ID NO: 16459 - protein, 13 aa, Severe acute respiratory syndrome coronavirus 2
  REGION 1..13: note = Table B: HLA-DRB1*04:02L HLA-DRB1*14:17L
GDYGDAVVYRGTT

SEQ ID NO: 16460 - protein, 13 aa, Severe acute respiratory syndrome coronavirus 2
  REGION 1..13: note = Table B: HLA-DRB1*04:02L
GTTTYKLNVGDYF

SEQ ID NO: 16461 - protein, 13 aa, Severe acute respiratory syndrome coronavirus 2
  REGION 1..13: note = Table B: HLA-DRB1*04:02L HLA-DRB1*08:04L HLA-DPA1*01:03-B1*04:02L HLA-DRB1*12:02L
DYFVLTSHTVMPL

SEQ ID NO: 16462 - protein, 12 aa, Severe acute respiratory syndrome coronavirus 2
  REGION 1..12: note = Table B: HLA-DRB1*04:02L HLA-DQA1*05:01-B1*02:01L HLA-DRB1*14:17L HLA-DQA1*01:03-B1*06:01L HLA-DQA1*02:01-B1*03:03L
NISDEFSSNVAN

SEQ ID NO: 16463 - protein, 12 aa, Severe acute respiratory syndrome coronavirus 2
  REGION 1..12: note = Table B: HLA-DRB1*04:02L HLA-DRB1*08:04L HLA-DRB3*02:01L HLA-DRB1*08:01L HLA-DRB1*12:02L HLA-DRB1*14:54L HLA-DRB1*14:17L HLA-DRB1*04:08L
LALYYPSARIVY

SEQ ID NO: 16464 - protein, 12 aa, Severe acute respiratory syndrome coronavirus 2
  REGION 1..12: note = Table B: HLA-DRB1*04:02L HLA-DRB1*08:04L HLA-DRB3*02:01L HLA-DRB1*08:01L HLA-DRB1*14:54L HLA-DRB1*14:17L HLA-DRB1*07:01L HLA-DRB1*04:08L
ALYYPSARIVYT

SEQ ID NO: 16465 - protein, 12 aa, Severe acute respiratory syndrome coronavirus 2
  REGION 1..12: note = Table B: HLA-DRB1*04:02L HLA-DRB1*04:04L HLA-DRB1*04:05L HLA-DRB1*08:04L HLA-DRB3*02:01L HLA-DRB1*11:03L HLA-DRB1*11:04L HLA-DRB1*09:01L HLA-DRB1*07:01L HLA-DRB1*04:08L
FKVNSTLEQYVF

SEQ ID NO: 16466 - protein, 12 aa, Severe acute respiratory syndrome coronavirus 2
  REGION 1..12: note = Table B: HLA-DRB1*04:02L HLA-DRB1*01:02L HLA-DPA1*03:01-B1*04:02L HLA-DRB1*14:01L HLA-DPA1*03:01-B1*105:01L
ADIVVFDEISMA

SEQ ID NO: 16467 - protein, 12 aa, Severe acute respiratory syndrome coronavirus 2
  REGION 1..12: note = Table B: HLA-DRB1*04:02L HLA-DRB1*01:02L HLA-DRB1*14:01L HLA-DPA1*03:01-B1*105:01L
DIVVFDEISMAT

SEQ ID NO: 16468 - protein, 11 aa, Severe acute respiratory syndrome coronavirus 2
  REGION 1..11: note = Table B: HLA-DRB1*04:02L HLA-DRB1*01:01L HLA-DRB4*03:01NL HLA-DRB1*11:04L HLA-DRB5*01:01L HLA-DRB1*12:02L HLA-DRB3*01:01L HLA-DQA1*05:05-B1*03:01L HLA-DRB1*16:01L
AINRPQIGVVR

SEQ ID NO: 16469 - protein, 11 aa, Severe acute respiratory syndrome coronavirus 2
  REGION 1..11: note = Table B: HLA-DRB1*04:02L HLA-DQA1*05:01-B1*02:01L HLA-DQA1*02:01-B1*03:03L
AVFISPYNSQN

SEQ ID NO: 16470 - protein, 11 aa, Severe acute respiratory syndrome coronavirus 2
  REGION 1..11: note = Table B: HLA-DRB1*04:02L
VFISPYNSQNA

SEQ ID NO: 16471 - protein, 14 aa, Severe acute respiratory syndrome coronavirus 2
  REGION 1..14: note = Table B: HLA-DRB1*04:02L HLA-DRB1*04:05L HLA-DRB1*01:02L HLA-DRB1*04:10L HLA-DRB1*12:01L HLA-DPA1*02:01-B1*13:01L HLA-DQA1*03:01-B1*03:02L HLA-DRB1*16:01L HLA-DRB1*04:08L
VGILCIMSDRDLYD

SEQ ID NO: 16472 - protein, 12 aa, Severe acute respiratory syndrome coronavirus 2
  REGION 1..12: note = Table B: HLA-DRB1*04:02L HLA-DRB1*01:02L HLA-DRB3*02:01L HLA-DRB1*15:01L
YQVNGYPNMFIT

SEQ ID NO: 16473 - protein, 14 aa, Severe acute respiratory syndrome coronavirus 2
  REGION 1..14: note = Table B: HLA-DRB1*04:02L HLA-DQA1*05:05-B1*03:01L
STGVNLVAVPTGYV

SEQ ID NO: 16474 - protein, 12 aa, Severe acute respiratory syndrome coronavirus 2
  REGION 1..12: note = Table B: HLA-DRB1*04:02L HLA-DQA1*03:01-B1*03:02L HLA-DRB1*16:01L HLA-DQA1*02:01-B1*03:03L
TDFSRVSAKPPP

SEQ ID NO: 16475 - protein, 18 aa, Severe acute respiratory syndrome coronavirus 2
  REGION 1..18: note = Table B: HLA-DRB1*04:02L HLA-DRB1*08:77L HLA-DRB1*11:02L HLA-DQA1*01-B1*05L HLA-DRB1*09:01L HLA-DPA1*01:03-B1*02:01L HLA-DRB1*14:17L HLA-DRB1*08:02L HLA-DRB1*08:03L HLA-DRB1*15:01L
KPPPGDQFKHLIPLMYKG

SEQ ID NO: 16476 - protein, 12 aa, Severe acute respiratory syndrome coronavirus 2
  REGION 1..12: note = Table B: HLA-DRB1*04:02L HLA-DRB1*01:02L HLA-DRB1*14:01L HLA-DQA1*05:01-B1*02:01L HLA-DRB1*12:01L HLA-DRB1*16:01L
DTLKNLSDRVVF

SEQ ID NO: 16477 - protein, 12 aa, Severe acute respiratory syndrome coronavirus 2
  REGION 1..12: note = Table B: HLA-DRB1*04:02L HLA-DQA1*01:02-B1*06:02L HLA-DRB1*14:01L HLA-DRB1*08:01L HLA-DQA1*03:01-B1*03:02L HLA-DRB1*16:01L HLA-DRB1*04:08L HLA-DQA1*02:01-B1*03:03L
TSMKYFVKIGPE

SEQ ID NO: 16478 - protein, 13 aa, Severe acute respiratory syndrome coronavirus 2
  REGION 1..13: note = Table B: HLA-DRB1*04:02L HLA-DPA1*03:01-B1*04:02L HLA-DRB1*11:01L HLA-DRB1*12:01L HLA-DRB1*15:03L
ASDTYACWHHSIG

SEQ ID NO: 16479 - protein, 15 aa, Severe acute respiratory syndrome coronavirus 2
  REGION 1..15: note = Table B: HLA-DRB1*04:02L HLA-DPA1*01:03-B1*04:02L HLA-DPA1*01:03-B1*104:01L HLA-DRB1*15:03L
DIGNPKAIKCVPQAD

SEQ ID NO: 16480 - protein, 12 aa, Severe acute respiratory syndrome coronavirus 2
  REGION 1..12: note = Table B: HLA-DRB1*04:02L HLA-DRB3*02:01L HLA-DRB1*14:17L
TRLQSLENVAFN

SEQ ID NO: 16481 - protein, 10 aa, Severe acute respiratory syndrome coronavirus 2
  REGION 1..10: note = Table B: HLA-DRB1*04:02L HLA-DQA1*03:01-B1*03:02L HLA-DQA1*02:01-B1*03:03L
NVVNKGHFDG

SEQ ID NO: 16482 - protein, 14 aa, Severe acute respiratory syndrome coronavirus 2
  REGION 1..14: note = Table B: HLA-DRB1*04:02L HLA-DRB1*04:05L HLA-DRB1*01:02L HLA-DRB1*08:01L HLA-DRB1*11:01L HLA-DPA1*01:03-B1*04:02L
FDGQQGEVPVSIIN

SEQ ID NO: 16483 - protein, 17 aa, Severe acute respiratory syndrome coronavirus 2
  REGION 1..17: note = Table B: HLA-DRB1*04:02L HLA-DRB1*14:02L HLA-DPA1*01:03-B1*02:01L HLA-DRB1*08:02L HLA-DRB1*08:03L
LPVNVAFELWAKRNIKP

SEQ ID NO: 16484 - protein, 16 aa, Severe acute respiratory syndrome coronavirus 2
  REGION 1..16: note = Table B: HLA-DRB1*04:02L HLA-DRB1*11:02L HLA-DRB1*14:02L HLA-DRB1*08:02L
NVAFELWAKRNIKPVP

SEQ ID NO: 16485 - protein, 13 aa, Severe acute respiratory syndrome coronavirus 2
  REGION 1..13: note = Table B: HLA-DRB1*04:02L
ELWAKRNIKPVPE

SEQ ID NO: 16486 - protein, 14 aa, Severe acute respiratory syndrome coronavirus 2
  REGION 1..14: note = Table B: HLA-DRB1*04:02L HLA-DRB1*04:04L HLA-DRB3*01:01L HLA-DRB1*15:01L
KRNIKPVPEVKILN

SEQ ID NO: 16487 - protein, 12 aa, Severe acute respiratory syndrome coronavirus 2
  REGION 1..12: note = Table B: HLA-DRB1*04:02L HLA-DRB1*04:05L HLA-DRB4*03:01NL HLA-DQA1*01-B1*05L HLA-DQA1*05:01-B1*02:01L HLA-DRB1*04:10L HLA-DQA1*03:01-B1*03:02L HLA-DRB1*14:54L HLA-DRB1*16:01L HLA-DQA1*02:01-B1*03:03L
LNNLGVDIAANT

SEQ ID NO: 16488 - protein, 11 aa, Severe acute respiratory syndrome coronavirus 2
  REGION 1..11: note = Table B: HLA-DRB1*04:02L HLA-DQA1*05:05-B1*03:01L HLA-DRB1*14:17L
LIGEAVKTQFN

SEQ ID NO: 16489 - protein, 11 aa, Severe acute respiratory syndrome coronavirus 2
  REGION 1..11: note = Table B: HLA-DRB1*04:02L HLA-DRB1*04:05L
NYYKKVDGVVQ

SEQ ID NO: 16490 - protein, 13 aa, Severe acute respiratory syndrome coronavirus 2
  REGION 1..13: note = Table B: HLA-DRB1*04:02L HLA-DRB1*04:05L HLA-DRB1*01:02L HLA-DRB1*08:01L HLA-DRB1*12:01L
FTQSRNLQEFKPR

SEQ ID NO: 16491 - protein, 13 aa, Severe acute respiratory syndrome coronavirus 2
  REGION 1..13: note = Table B: HLA-DRB1*04:02L HLA-DRB1*04:05L HLA-DRB3*01:01L
SPFELEDFIPMDS

SEQ ID NO: 16492 - protein, 12 aa, Severe acute respiratory syndrome coronavirus 2
  REGION 1..12: note = Table B: HLA-DRB1*04:02L HLA-DRB1*14:17L HLA-DRB1*16:01L
KNYFITDAQTGS

SEQ ID NO: 16493 - protein, 11 aa, Severe acute respiratory syndrome coronavirus 2
  REGION 1..11: note = Table B: HLA-DRB1*04:02L HLA-DRB1*04:05L HLA-DRB4*03:01NL HLA-DQA1*01-B1*05L HLA-DQA1*03:01-B1*03:02L HLA-DRB1*14:54L HLA-DRB1*16:01L
YFITDAQTGSS

SEQ ID NO: 16494 - protein, 11 aa, Severe acute respiratory syndrome coronavirus 2
  REGION 1..11: note = Table B: HLA-DRB1*04:02L HLA-DQA1*05:01-B1*02:01L HLA-DRB1*14:17L HLA-DRB1*16:01L HLA-DQA1*02:01-B1*03:03L
GSDKGVAPGTA

SEQ ID NO: 16495 - protein, 14 aa, Severe acute respiratory syndrome coronavirus 2
  REGION 1..14: note = Table B: HLA-DRB1*04:02L HLA-DRB1*04:05L HLA-DRB1*04:10L HLA-DRB1*12:01L
LPTGTLLVDSDLND

SEQ ID NO: 16496 - protein, 13 aa, Severe acute respiratory syndrome coronavirus 2
  REGION 1..13: note = Table B: HLA-DRB1*04:02L HLA-DQA1*05:01-B1*02:01L HLA-DRB1*14:54L HLA-DRB1*14:17L HLA-DRB1*16:01L
DSTLIGDCATVHT

SEQ ID NO: 16497 - protein, 13 aa, Severe acute respiratory syndrome coronavirus 2
  REGION 1..13: note = Table B: HLA-DRB1*04:02L
STLIGDCATVHTA

SEQ ID NO: 16498 - protein, 12 aa, Severe acute respiratory syndrome coronavirus 2
  REGION 1..12: note = Table B: HLA-DRB1*04:02L HLA-DRB1*08:04L HLA-DRB1*04:08L
DMYDPKTKNVTK

SEQ ID NO: 16499 - protein, 11 aa, Severe acute respiratory syndrome coronavirus 2
  REGION 1..11: note = Table B: HLA-DRB1*04:02L HLA-DRB1*04:05L HLA-DRB1*14:17L HLA-DQA1*02:01-B1*03:03L
NVTKENDSKEG

SEQ ID NO: 16500 - protein, 12 aa, Severe acute respiratory syndrome coronavirus 2
  REGION 1..12: note = Table B: HLA-DRB1*04:02L HLA-DRB1*04:05L HLA-DRB1*01:02L HLA-DQA1*01:01-B1*05:01L HLA-DPA1*02:01-B1*13:01L HLA-DPA1*03:01-B1*105:01L HLA-DQA1*01:03-B1*06:01L HLA-DRB1*04:08L
ITEHSWNADLYK

SEQ ID NO: 16501 - protein, 17 aa, Severe acute respiratory syndrome coronavirus 2
  REGION 1..17: note = Table B: HLA-DRB1*04:02L HLA-DRB1*14:02L HLA-DQA1*01:01-B1*05:01L HLA-DPA1*01:03-B1*04:01L HLA-DRB3*01:01L
FPLKLRGTAVMSLKEGQ

SEQ ID NO: 16502 - protein, 15 aa, Severe acute respiratory syndrome coronavirus 2
  REGION 1..15: note = Table B: HLA-DRB1*04:02L HLA-DRB1*04:04L HLA-DRB1*04:05L
EGQINDMILSLLSKG

SEQ ID NO: 16503 - protein, 11 aa, Severe acute respiratory syndrome coronavirus 2
  REGION 1..11: note = Table B: HLA-DRB1*04:02L HLA-DRB1*14:01L HLA-DQA1*05:01-B1*02:01L HLA-DRB1*12:01L HLA-DQA1*03:01-B1*03:02L HLA-DRB1*14:54L HLA-DRB1*16:01L
RVVISSDVLVN

SEQ ID NO: 16504 - protein, 12 aa, Severe acute respiratory syndrome coronavirus 2
  REGION 1..12: note = Table B: HLA-DRB1*04:02L HLA-DQA1*03:01-B1*03:02L
FHAIHVSGTNGT

SEQ ID NO: 16505 - protein, 13 aa, Severe acute respiratory syndrome coronavirus 2
  REGION 1..13: note = Table B: HLA-DRB1*04:02L HLA-DRB1*01:01L
DPFLGVYYHKNNK

SEQ ID NO: 16506 - protein, 14 aa, Severe acute respiratory syndrome coronavirus 2
  REGION 1..14: note = Table B: HLA-DRB1*04:02L HLA-DRB1*04:04L HLA-DRB1*11:02L HLA-DQA1*03:01-B1*03:02L HLA-DRB1*07:01L HLA-DRB1*08:02L HLA-DRB1*08:03L
LGVYYHKNNKSWME

SEQ ID NO: 16507 - protein, 13 aa, Severe acute respiratory syndrome coronavirus 2
  REGION 1..13: note = Table B: HLA-DRB1*04:02L HLA-DRB1*11:04L HLA-DRB1*08:03L
DGYFKIYSKHTPI

SEQ ID NO: 16508 - protein, 11 aa, Severe acute respiratory syndrome coronavirus 2
  REGION 1..11: note = Table B: HLA-DRB1*04:02L HLA-DRB1*14:17L
VDLPIGINITR

SEQ ID NO: 16509 - protein, 14 aa, Severe acute respiratory syndrome coronavirus 2
  REGION 1..14: note = Table B: HLA-DRB1*04:02L HLA-DRB1*04:05L HLA-DRB1*08:01L HLA-DRB1*11:01L
SSGWTAGAAAYYVG

SEQ ID NO: 16510 - protein, 15 aa, Severe acute respiratory syndrome coronavirus 2
  REGION 1..15: note = Table B: HLA-DRB1*04:02L HLA-DRB1*11:04L HLA-DRB1*11:01L HLA-DRB1*12:01L HLA-DPA1*02:01-B1*13:01L
QPRTFLLKYNENGTI

SEQ ID NO: 16511 - protein, 13 aa, Severe acute respiratory syndrome coronavirus 2
  REGION 1..13: note = Table B: HLA-DRB1*04:02L HLA-DRB1*04:05L HLA-DQA1*01:02-B1*06:02L HLA-DRB1*04:10L HLA-DQA1*03:01-B1*03:02L
TDAVDCALDPLSE

SEQ ID NO: 16512 - protein, 14 aa, Severe acute respiratory syndrome coronavirus 2
  REGION 1..14: note = Table B: HLA-DRB1*04:02L HLA-DRB1*11:03L HLA-DRB1*15:03L
VGGNYNYLYRLFRK

SEQ ID NO: 16513 - protein, 14 aa, Severe acute respiratory syndrome coronavirus 2
  REGION 1..14: note = Table B: HLA-DRB1*04:02L
GGNYNYLYRLFRKS

SEQ ID NO: 16514 - protein, 12 aa, Severe acute respiratory syndrome coronavirus 2
  REGION 1..12: note = Table B: HLA-DRB1*04:02L HLA-DRB1*08:01L
NLKPFERDISTE

SEQ ID NO: 16515 - protein, 13 aa, Severe acute respiratory syndrome coronavirus 2
  REGION 1..13: note = Table B: HLA-DRB1*04:02L HLA-DRB1*04:05L HLA-DRB4*03:01NL HLA-DRB1*11:03L HLA-DRB1*11:04L HLA-DRB1*08:01L HLA-DRB1*11:01L HLA-DRB1*09:01L
LKPFERDISTEIY

SEQ ID NO: 16516 - protein, 12 aa, Severe acute respiratory syndrome coronavirus 2
  REGION 1..12: note = Table B: HLA-DRB1*04:02L HLA-DQA1*01:01-B1*05:01L HLA-DRB1*16:01L
QPTNGVGYQPYR

SEQ ID NO: 16517 - protein, 14 aa, Severe acute respiratory syndrome coronavirus 2
  REGION 1..14: note = Table B: HLA-DRB1*04:02L HLA-DRB1*04:05L HLA-DRB1*01:02L HLA-DRB1*11:03L HLA-DRB1*11:04L HLA-DRB1*08:01L HLA-DRB1*11:01L HLA-DRB3*01:01L HLA-DRB1*04:08L
TGVLTESNKKFLPF

SEQ ID NO: 16518 - protein, 14 aa, Severe acute respiratory syndrome coronavirus 2
  REGION 1..14: note = Table B: HLA-DRB1*04:02L HLA-DRB1*04:05L HLA-DRB1*11:02L HLA-DRB1*11:03L HLA-DRB1*11:04L HLA-DRB1*11:01L HLA-DRB3*01:01L HLA-DRB1*14:54L HLA-DRB1*04:08L
GVLTESNKKFLPFQ

SEQ ID NO: 16519 - protein, 14 aa, Severe acute respiratory syndrome coronavirus 2
  REGION 1..14: note = Table B: HLA-DRB1*04:02L HLA-DRB1*04:05L HLA-DQA1*01:02-B1*06:02L HLA-DRB1*16:01L
FQQFGRDIADTTDA

SEQ ID NO: 16520 - protein, 11 aa, Severe acute respiratory syndrome coronavirus 2
  REGION 1..11: note = Table B: HLA-DRB1*04:02L HLA-DQA1*03:01-B1*03:02L
VITPGTNTSNQ

SEQ ID NO: 16521 - protein, 14 aa, Severe acute respiratory syndrome coronavirus 2
  REGION 1..14: note = Table B: HLA-DRB1*04:02L HLA-DRB1*01:02L
NQVAVLYQDVNCTE

SEQ ID NO: 16522 - protein, 13 aa, Severe acute respiratory syndrome coronavirus 2
  REGION 1..13: note = Table B: HLA-DRB1*04:02L
EVPVAIHADQLTP

SEQ ID NO: 16523 - protein, 11 aa, Severe acute respiratory syndrome coronavirus 2
  REGION 1..11: note = Table B: HLA-DRB1*04:02L HLA-DQA1*05:05-B1*03:01L HLA-DRB1*14:17L
IHADQLTPTWR

SEQ ID NO: 16524 - protein, 12 aa, Severe acute respiratory syndrome coronavirus 2
  REGION 1..12: note = Table B: HLA-DRB1*04:02L HLA-DRB1*08:04L HLA-DRB1*08:01L HLA-DRB1*14:54L
DQLTPTWRVYST

SEQ ID NO: 16525 - protein, 13 aa, Severe acute respiratory syndrome coronavirus 2
  REGION 1..13: note = Table B: HLA-DRB1*04:02L HLA-DRB1*04:05L
ARSVASQSIIAYT

SEQ ID NO: 16526 - protein, 12 aa, Severe acute respiratory syndrome coronavirus 2
  REGION 1..12: note = Table B: HLA-DRB1*04:02L HLA-DQA1*01:02-B1*06:02L HLA-DRB1*12:01L HLA-DRB1*15:03L
SIIAYTMSLGAE

SEQ ID NO: 16527 - protein, 14 aa, Severe acute respiratory syndrome coronavirus 2
  REGION 1..14: note = Table B: HLA-DRB1*04:02L HLA-DRB1*14:17L
TMSLGAENSVAYSN

SEQ ID NO: 16528 - protein, 14 aa, Severe acute respiratory syndrome coronavirus 2
  REGION 1..14: note = Table B: HLA-DRB1*04:02L
MSLGAENSVAYSNN

SEQ ID NO: 16529 - protein, 11 aa, Severe acute respiratory syndrome coronavirus 2
  REGION 1..11: note = Table B: HLA-DRB1*04:02L
TEILPVSMTKT

SEQ ID NO: 16530 - protein, 11 aa, Severe acute respiratory syndrome coronavirus 2
  REGION 1..11: note = Table B: HLA-DRB1*04:02L HLA-DRB1*14:17L
EVFAQVKQIYK

SEQ ID NO: 16531 - protein, 12 aa, Severe acute respiratory syndrome coronavirus 2
  REGION 1..12: note = Table B: HLA-DRB1*04:02L HLA-DQA1*01:02-B1*06:02L HLA-DRB1*01:02L HLA-DRB1*12:01L HLA-DRB1*16:01L HLA-DQA1*02:01-B1*03:03L HLA-DRB1*15:03L
FAQVKQIYKTPP

SEQ ID NO: 16532 - protein, 11 aa, Severe acute respiratory syndrome coronavirus 2
  REGION 1..11: note = Table B: HLA-DRB1*04:02L HLA-DQA1*03:01-B1*03:02L
VKQIYKTPPIK

SEQ ID NO: 16533 - protein, 11 aa, Severe acute respiratory syndrome coronavirus 2
  REGION 1..11: note = Table B: HLA-DRB1*04:02L HLA-DQA1*03:01-B1*03:02L HLA-DRB1*14:17L
IYKTPPIKDFG

SEQ ID NO: 16534 - protein, 11 aa, Severe acute respiratory syndrome coronavirus 2
  REGION 1..11: note = Table B: HLA-DRB1*04:02L HLA-DQA1*05:01-B1*02:01L HLA-DRB1*14:17L
FSQILPDPSKP

SEQ ID NO: 16535 - protein, 14 aa, Severe acute respiratory syndrome coronavirus 2
  REGION 1..14: note = Table B: HLA-DRB1*04:02L HLA-DRB1*04:04L HLA-DRB1*04:05L HLA-DPA1*03:01-B1*04:02L HLA-DRB1*14:01L HLA-DRB1*15:01L
AGFIKQYGDCLGDI

SEQ ID NO: 16536 - protein, 12 aa, Severe acute respiratory syndrome coronavirus 2
  REGION 1..12: note = Table B: HLA-DRB1*04:02L HLA-DRB1*12:01L HLA-DRB1*14:17L HLA-DRB1*16:01L
DEMIAQYTSALL

SEQ ID NO: 16537 - protein, 13 aa, Severe acute respiratory syndrome coronavirus 2
  REGION 1..13: note = Table B: HLA-DRB1*04:02L HLA-DQA1*05:05-B1*03:116L HLA-DRB1*12:01L HLA-DPA1*01:03-B1*104:01L HLA-DRB1*16:01L HLA-DRB1*15:03L
TFGAGAALQIPFA

SEQ ID NO: 16538 - protein, 13 aa, Severe acute respiratory syndrome coronavirus 2
  REGION 1..13: note = Table B: HLA-DRB1*04:02L HLA-DRB1*04:10L
FNGIGVTQNVLYE

SEQ ID NO: 16539 - protein, 13 aa, Severe acute respiratory syndrome coronavirus 2
  REGION 1..13: note = Table B: HLA-DRB1*04:02L HLA-DRB1*01:02L
NGIGVTQNVLYEN

SEQ ID NO: 16540 - protein, 12 aa, Severe acute respiratory syndrome coronavirus 2
  REGION 1..12: note = Table B: HLA-DRB1*04:02L HLA-DRB1*01:02L HLA-DQA1*05:05-B1*03:01L
YENQKLIANQFN

SEQ ID NO: 16541 - protein, 13 aa, Severe acute respiratory syndrome coronavirus 2
  REGION 1..13: note = Table B: HLA-DRB1*04:02L HLA-DRB1*04:04L HLA-DRB1*04:05L HLA-DRB4*03:01NL HLA-DRB1*04:10L HLA-DQA1*03:01-B1*03:02L HLA-DRB1*14:54L HLA-DRB1*16:01L
GKIQDSLSSTASA

SEQ ID NO: 16542 - protein, 11 aa, Severe acute respiratory syndrome coronavirus 2
  REGION 1..11: note = Table B: HLA-DRB1*04:02L HLA-DRB1*04:05L HLA-DQA1*01:01-B1*05:01L HLA-DRB1*04:10L HLA-DPA1*03:01-B1*105:01L HLA-DRB1*14:17L HLA-DRB1*16:01L
SALGKLQDVVN

SEQ ID NO: 16543 - protein, 11 aa, Severe acute respiratory syndrome coronavirus 2
  REGION 1..11: note = Table B: HLA-DRB1*04:02L HLA-DQA1*01-B1*05L HLA-DRB1*14:17L
LGKLQDVVNQN

SEQ ID NO: 16544 - protein, 12 aa, Severe acute respiratory syndrome coronavirus 2
  REGION 1..12: note = Table B: HLA-DRB1*04:02L HLA-DRB1*04:05L HLA-DRB1*01:02L HLA-DRB4*03:01NL HLA-DPA1*01:03-B1*03:01L HLA-DRB1*04:10L HLA-DRB1*12:01L HLA-DPA1*03:01-B1*105:01L HLA-DRB1*14:54L HLA-DRB1*16:01L HLA-DRB1*04:08L
SSNFGAISSVLN

SEQ ID NO: 16545 - protein, 12 aa, Severe acute respiratory syndrome coronavirus 2
  REGION 1..12: note = Table B: HLA-DRB1*04:02L HLA-DRB1*04:05L HLA-DRB1*01:02L HLA-DRB4*03:01NL HLA-DRB1*04:10L HLA-DRB1*12:01L HLA-DPA1*03:01-B1*105:01L HLA-DRB1*14:54L HLA-DRB1*10:01L HLA-DRB1*16:01L HLA-DRB1*04:08L
SNFGAISSVLND

SEQ ID NO: 16546 - protein, 12 aa, Severe acute respiratory syndrome coronavirus 2
  REGION 1..12: note = Table B: HLA-DRB1*04:02L HLA-DRB1*14:17L
GAISSVLNDILS

SEQ ID NO: 16547 - protein, 12 aa, Severe acute respiratory syndrome coronavirus 2
  REGION 1..12: note = Table B: HLA-DRB1*04:02L HLA-DRB1*04:05L HLA-DQA1*01:02-B1*06:02L HLA-DRB1*14:01L HLA-DRB1*08:01L HLA-DRB1*16:01L
LSRLDKVEAEVQ

SEQ ID NO: 16548 - protein, 12 aa, Severe acute respiratory syndrome coronavirus 2
  REGION 1..12: note = Table B: HLA-DRB1*04:02L HLA-DRB1*04:05L HLA-DRB1*04:10L HLA-DRB1*12:01L HLA-DRB1*14:54L
TGRLQSLQTYVT

SEQ ID NO: 16549 - protein, 13 aa, Severe acute respiratory syndrome coronavirus 2
  REGION 1..13: note = Table B: HLA-DRB1*04:02L HLA-DRB1*04:05L HLA-DRB1*08:04L HLA-DRB1*08:01L HLA-DQA1*05:05-B1*03:19L HLA-DPA1*01:03-B1*02:01L HLA-DQA1*05:05-B1*03:01L
VVFLHVTYVPAQE

SEQ ID NO: 16550 - protein, 12 aa, Severe acute respiratory syndrome coronavirus 2
  REGION 1..12: note = Table B: HLA-DRB1*04:02L HLA-DRB1*08:04L HLA-DRB1*11:04L HLA-DRB1*08:01L HLA-DRB1*04:10L HLA-DRB1*12:02L HLA-DRB3*01:01L HLA-DRB1*14:54L HLA-DRB1*14:17L HLA-DRB1*04:08L HLA-DRB1*08:03L
EGVFVSNGTHWF

SEQ ID NO: 16551 - protein, 13 aa, Severe acute respiratory syndrome coronavirus 2
  REGION 1..13: note = Table B: HLA-DRB1*04:02L HLA-DRB1*08:04L HLA-DRB1*12:02L HLA-DRB3*01:01L HLA-DRB1*14:54L
GVFVSNGTHWFVT

SEQ ID NO: 16552 - protein, 12 aa, Severe acute respiratory syndrome coronavirus 2
  REGION 1..12: note = Table B: HLA-DRB1*04:02L
FYEPQIITTDNT

SEQ ID NO: 16553 - protein, 11 aa, Severe acute respiratory syndrome coronavirus 2
  REGION 1..11: note = Table B: HLA-DRB1*04:02L HLA-DRB1*04:10L HLA-DRB1*14:54L HLA-DRB1*14:17L
VIGIVNNTVYD

SEQ ID NO: 16554 - protein, 14 aa, Severe acute respiratory syndrome coronavirus 2
  REGION 1..14: note = Table B: HLA-DRB1*04:02L HLA-DRB4*03:01NL HLA-DRB1*14:17L
SPDVDLGDISGINA

SEQ ID NO: 16555 - protein, 11 aa, Severe acute respiratory syndrome coronavirus 2
  REGION 1..11: note = Table B: HLA-DRB1*04:02L HLA-DQA1*02:01-B1*03:03L
LNEVAKNLNES

SEQ ID NO: 16556 - protein, 13 aa, Severe acute respiratory syndrome coronavirus 2
  REGION 1..13: note = Table B: HLA-DRB1*04:02L HLA-DRB1*01:02L HLA-DRB1*08:04L HLA-DRB1*14:01L HLA-DRB1*08:01L HLA-DQA1*03:01-B1*03:02L HLA-DPA1*01:02-B1*04:01L HLA-DQA1*01:03-B1*06:01L HLA-DRB1*04:08L
DLQELGKYEQYIK

SEQ ID NO: 16557 - protein, 12 aa, Severe acute respiratory syndrome coronavirus 2
  REGION 1..12: note = Table B: HLA-DRB1*04:02L HLA-DRB1*04:05L HLA-DRB1*04:08L
EIKDATPSDFVR

SEQ ID NO: 16558 - protein, 11 aa, Severe acute respiratory syndrome coronavirus 2
  REGION 1..11: note = Table B: HLA-DRB1*04:02L HLA-DRB1*08:77L HLA-DRB1*12:01L HLA-DRB1*14:17L HLA-DRB1*16:01L
RATATIPIQAS

SEQ ID NO: 16559 - protein, 11 aa, Severe acute respiratory syndrome coronavirus 2
  REGION 1..11: note = Table B: HLA-DRB1*04:02L HLA-DQA1*03:01-B1*03:02L
YQIGGYTEKWE

SEQ ID NO: 16560 - protein, 11 aa, Severe acute respiratory syndrome coronavirus 2
  REGION 1..11: note = Table B: HLA-DRB1*04:02L HLA-DQA1*01:01-B1*05:01L HLA-DQA1*01:03-B1*06:01L
LSTDTGVEHVT

SEQ ID NO: 16561 - protein, 11 aa, Severe acute respiratory syndrome coronavirus 2
  REGION 1..11: note = Table B: HLA-DRB1*04:02L HLA-DRB1*01:01L HLA-DRB1*11:03L HLA-DRB1*11:04L HLA-DRB1*11:01L HLA-DRB5*01:01L HLA-DRB1*09:01L HLA-DRB1*14:54L HLA-DQA1*05:05-B1*03:01L
STDTGVEHVTF

SEQ ID NO: 16562 - protein, 12 aa, Severe acute respiratory syndrome coronavirus 2
  REGION 1..12: note = Table B: HLA-DRB1*04:02L HLA-DQA1*05:05-B1*03:19L HLA-DQA1*05:05-B1*03:01L
IHTIDGSSGVVN

SEQ ID NO: 16563 - protein, 12 aa, Severe acute respiratory syndrome coronavirus 2
  REGION 1..12: note = Table B: HLA-DRB1*04:02L HLA-DRB1*04:05L HLA-DRB4*03:01NL HLA-DQA1*05:01-B1*02:01L HLA-DRB1*04:10L HLA-DRB1*12:01L HLA-DQA1*03:01-B1*03:02L HLA-DRB1*14:54L HLA-DRB1*14:17L HLA-DRB1*16:01L HLA-DQA1*02:01-B1*03:03L
NPVMEPIYDEPT

SEQ ID NO: 16564 - protein, 12 aa, Severe acute respiratory syndrome coronavirus 2
  REGION 1..12: note = Table B: HLA-DRB1*04:02L HLA-DRB1*04:05L HLA-DQA1*05:01-B1*02:01L HLA-DRB1*04:10L HLA-DRB1*14:17L
PVMEPIYDEPTT

SEQ ID NO: 16565 - protein, 13 aa, Severe acute respiratory syndrome coronavirus 2
  REGION 1..13: note = Table B: HLA-DRB1*04:02L
YSRVKNLNSSRVP

SEQ ID NO: 16566 - protein, 12 aa, Severe acute respiratory syndrome coronavirus 2
  REGION 1..12: note = Table B: HLA-DRB1*04:02L HLA-DRB1*04:05L HLA-DRB1*14:02L HLA-DRB1*08:01L HLA-DRB4*02:01NL HLA-DPA1*01:03-B1*04:02L HLA-DPA1*02:01-B1*13:01L HLA-DRB1*04:08L
DSNGTITVEELK

SEQ ID NO: 16567 - protein, 13 aa, Severe acute respiratory syndrome coronavirus 2
  REGION 1..13: note = Table B: HLA-DRB1*04:02L HLA-DPA1*01:03-B1*03:01L HLA-DRB1*11:03L HLA-DRB1*14:02L HLA-DQA1*05:05-B1*03:19L HLA-DPA1*01:03-B1*04:02L HLA-DRB1*14:54L HLA-DRB1*08:03L
LLQFAYANRNRFL

SEQ ID NO: 16568 - protein, 14 aa, Severe acute respiratory syndrome coronavirus 2
  REGION 1..14: note = Table B: HLA-DRB1*04:02L HLA-DRB1*04:05L HLA-DRB1*01:02L
ASQRVAGDSGFAAY

SEQ ID NO: 16569 - protein, 14 aa, Severe acute respiratory syndrome coronavirus 2
  REGION 1..14: note = Table B: HLA-DRB1*04:02L HLA-DRB1*04:04L HLA-DRB1*04:05L HLA-DRB1*01:02L HLA-DRB1*08:04L HLA-DRB1*11:04L HLA-DRB3*01:01L HLA-DQA1*03:01-B1*03:02L HLA-DRB1*14:54L HLA-DRB1*14:17L HLA-DRB1*04:08L
SQRVAGDSGFAAYS

SEQ ID NO: 16570 - protein, 11 aa, Severe acute respiratory syndrome coronavirus 2
  REGION 1..11: note = Table B: HLA-DRB1*04:02L HLA-DQA1*01:02-B1*06:02L HLA-DPA1*03:01-B1*04:02L HLA-DRB1*12:01L HLA-DRB1*16:01L HLA-DRB1*15:03L
LDYIINLIIKN

SEQ ID NO: 16571 - protein, 12 aa, Severe acute respiratory syndrome coronavirus 2
  REGION 1..12: note = Table B: HLA-DRB1*04:02L HLA-DRB1*08:04L HLA-DRB1*12:02L HLA-DRB1*14:54L HLA-DRB1*14:17L HLA-DRB1*04:08L
DYIINLIIKNLS

SEQ ID NO: 16572 - protein, 11 aa, Severe acute respiratory syndrome coronavirus 2
  REGION 1..11: note = Table B: HLA-DRB1*04:02L HLA-DRB1*04:05L HLA-DRB1*14:01L HLA-DRB1*11:04L
YQLRARSVSPK

SEQ ID NO: 16573 - protein, 13 aa, Severe acute respiratory syndrome coronavirus 2
  REGION 1..13: note = Table B: HLA-DRB1*04:02L HLA-DRB1*04:05L HLA-DPA1*03:01-B1*04:02L HLA-DRB1*14:01L HLA-DPA1*02:01-B1*13:01L HLA-DQA1*05:05-B1*03:01L HLA-DRB1*14:17L HLA-DPA1*01:02-B1*04:01L
IRQEEVQELYSPI

SEQ ID NO: 16574 - protein, 11 aa, Severe acute respiratory syndrome coronavirus 2
  REGION 1..11: note = Table B: HLA-DRB1*04:02L HLA-DRB1*04:05L HLA-DRB4*03:01NL HLA-DQA1*05:01-B1*02:01L HLA-DRB1*04:10L HLA-DQA1*03:01-B1*03:02L HLA-DRB1*14:54L HLA-DRB1*14:17L
VPINTNSSPDD

SEQ ID NO: 16575 - protein, 15 aa, Severe acute respiratory syndrome coronavirus 2
  REGION 1..15: note = Table B: HLA-DRB1*04:02L HLA-DRB1*04:05L HLA-DRB1*01:02L HLA-DPA1*01:03-B1*03:01L HLA-DQA1*01:01-B1*05:01L HLA-DRB1*08:01L HLA-DRB4*02:01NL HLA-DRB1*04:10L HLA-DPA1*01:03-B1*04:02L HLA-DRB1*12:01L
  REGION 1..15: note = CONT. FROM ABOVE: HLA-DPA1*02:01-B1*13:01L HLA-DPA1*01:03-B1*104 :01L HLA-DRB1*16:01L HLA-DRB1*15:03L
NPANNAAIVLQLPQG

SEQ ID NO: 16576 - protein, 12 aa, Severe acute respiratory syndrome coronavirus 2
  REGION 1..12: note = Table B: HLA-DRB1*04:02L HLA-DQA1*01:02-B1*06:02L HLA-DRB1*08:01L HLA-DRB1*12:01L HLA-DRB1*16:01L HLA-DRB1*04:08L HLA-DRB1*15:03L
ALALLLLDRLNQ

SEQ ID NO: 16577 - protein, 12 aa, Severe acute respiratory syndrome coronavirus 2
  REGION 1..12: note = Table B: HLA-DRB1*04:02L HLA-DQA1*01:02-B1*06:02L HLA-DRB1*08:01L HLA-DQA1*02:01-B1*03:03L
LNQLESKMSGKG

SEQ ID NO: 16578 - protein, 13 aa, Severe acute respiratory syndrome coronavirus 2
  REGION 1..13: note = Table B: HLA-DRB1*04:02L HLA-DRB1*14:01L HLA-DRB3*01:01L
TKAYNVTQAFGRR

SEQ ID NO: 16579 - protein, 11 aa, Severe acute respiratory syndrome coronavirus 2
  REGION 1..11: note = Table B: HLA-DRB1*04:02L HLA-DQA1*01:03-B1*06:01L
NFGDQELIRQG

SEQ ID NO: 16580 - protein, 12 aa, Severe acute respiratory syndrome coronavirus 2
  REGION 1..12: note = Table B: HLA-DRB1*04:02L HLA-DRB1*01:02L HLA-DRB1*08:04L HLA-DRB3*02:01L HLA-DRB1*11:03L HLA-DRB1*04:10L HLA-DRB1*09:01L HLA-DRB1*12:02L HLA-DRB1*14:54L HLA-DQA1*05:05-B1*03:01L HLA-DRB1*14:17L HLA-DRB1*07:01L HLA-DRB1*04:08L
IAQFAPSASAFF

SEQ ID NO: 16581 - protein, 12 aa, Severe acute respiratory syndrome coronavirus 2
  REGION 1..12: note = Table B: HLA-DRB1*04:02L HLA-DRB1*01:02L HLA-DRB3*02:01L HLA-DRB1*11:03L HLA-DRB1*04:10L HLA-DRB1*09:01L HLA-DRB1*12:02L HLA-DRB1*14:54L HLA-DQA1*05:05-B1*03:01L HLA-DRB1*14:17L HLA-DRB1*07:01L
AQFAPSASAFFG

SEQ ID NO: 16582 - protein, 12 aa, Severe acute respiratory syndrome coronavirus 2
  REGION 1..12: note = Table B: HLA-DRB1*04:02L HLA-DRB1*01:02L HLA-DPA1*01:03-B1*104:01L HLA-DQA1*05:05-B1*03:01L
RIGMEVTPSGTW

SEQ ID NO: 16583 - protein, 14 aa, Severe acute respiratory syndrome coronavirus 2
  REGION 1..14: note = Table B: HLA-DRB1*04:02L HLA-DRB1*04:05L HLA-DRB1*04:10L HLA-DPA1*02:01-B1*13:01L HLA-DPA1*01:03-B1*104:01L HLA-DRB1*04:08L
KQQTVTLLPAADLD

SEQ ID NO: 16584 - protein, 13 aa, Severe acute respiratory syndrome coronavirus 2
  REGION 1..13: note = Table B: HLA-DRB1*04:02L HLA-DRB1*04:04L HLA-DRB1*04:05L HLA-DRB4*03:01NL HLA-DQA1*01-B1*05L HLA-DRB1*04:10L HLA-DQA1*03:01-B1*03:02L HLA-DRB1*14:54L HLA-DRB1*16:01L HLA-DRB1*04:08L HLA-DQA1*02:01-B1*03:03L
SKQLQQSMSSADS

SEQ ID NO: 16585 - protein, 14 aa, Severe acute respiratory syndrome coronavirus 2
  REGION 1..14: note = Table B: HLA-DRB1*04:04L HLA-DRB1*08:04L HLA-DPA1*01:03-B1*03:01L HLA-DRB1*11:01L HLA-DRB3*01:01L HLA-DPA1*02:01-B1*13:01L HLA-DRB1*07:01L
ESLVPGFNEKTHVQ

SEQ ID NO: 16586 - protein, 16 aa, Severe acute respiratory syndrome coronavirus 2
  REGION 1..16: note = Table B: HLA-DRB1*04:04L
EKTHVQLSLPVLQVRD

SEQ ID NO: 16587 - protein, 13 aa, Severe acute respiratory syndrome coronavirus 2
  REGION 1..13: note = Table B: HLA-DRB1*04:04L
SLPVLQVRDVLVR

SEQ ID NO: 16588 - protein, 14 aa, Severe acute respiratory syndrome coronavirus 2
  REGION 1..14: note = Table B: HLA-DRB1*04:04L HLA-DPA1*02:01-B1*13:01L
GDSVEEVLSEARQH

SEQ ID NO: 16589 - protein, 15 aa, Severe acute respiratory syndrome coronavirus 2
  REGION 1..15: note = Table B: HLA-DRB1*04:04L HLA-DRB3*01:01L HLA-DRB1*07:01L HLA-DRB1*08:03L
VEVEKGVLPQLEQPY

SEQ ID NO: 16590 - protein, 17 aa, Severe acute respiratory syndrome coronavirus 2
  REGION 1..17: note = Table B: HLA-DRB1*04:04L
SGETLGVLVPHVGEIPV

SEQ ID NO: 16591 - protein, 13 aa, Severe acute respiratory syndrome coronavirus 2
  REGION 1..13: note = Table B: HLA-DRB1*04:04L HLA-DRB1*04:10L HLA-DRB3*01:01L HLA-DPA1*01:02-B1*04:01L
VPHVGEIPVAYRK

SEQ ID NO: 16592 - protein, 16 aa, Severe acute respiratory syndrome coronavirus 2
  REGION 1..16: note = Table B: HLA-DRB1*04:04L
RKVLLRKNGNKGAGGH

SEQ ID NO: 16593 - protein, 14 aa, Severe acute respiratory syndrome coronavirus 2
  REGION 1..14: note = Table B: HLA-DRB1*04:04L HLA-DRB1*08:01L
VTRELMRELNGGAY

SEQ ID NO: 16594 - protein, 12 aa, Severe acute respiratory syndrome coronavirus 2
  REGION 1..12: note = Table B: HLA-DRB1*04:04L HLA-DRB1*04:05L HLA-DRB1*04:10L HLA-DRB1*04:08L
ELMRELNGGAYT

SEQ ID NO: 16595 - protein, 13 aa, Severe acute respiratory syndrome coronavirus 2
  REGION 1..13: note = Table B: HLA-DRB1*04:04L HLA-DRB1*08:04L HLA-DRB3*02:01L HLA-DRB1*11:03L HLA-DRB1*11:04L HLA-DRB3*01:01L HLA-DRB1*14:54L HLA-DRB1*04:08L
EQLDFIDTKRGVY

SEQ ID NO: 16596 - protein, 13 aa, Severe acute respiratory syndrome coronavirus 2
  REGION 1..13: note = Table B: HLA-DRB1*04:04L HLA-DRB1*01:02L HLA-DPA1*02:01-B1*13:01L HLA-DPA1*01:02-B1*04:01L HLA-DRB1*07:01L
IDTKRGVYCCREH

SEQ ID NO: 16597 - protein, 14 aa, Severe acute respiratory syndrome coronavirus 2
  REGION 1..14: note = Table B: HLA-DRB1*04:04L HLA-DRB1*01:02L HLA-DPA1*02:01-B1*13:01L HLA-DRB1*07:01L HLA-DRB1*04:08L
DTKRGVYCCREHEH

SEQ ID NO: 16598 - protein, 12 aa, Severe acute respiratory syndrome coronavirus 2
  REGION 1..12: note = Table B: HLA-DRB1*04:04L HLA-DQA1*01:02-B1*06:02L HLA-DPA1*03:01-B1*04:02L HLA-DRB1*14:01L HLA-DRB1*08:01L HLA-DQA1*05:01-B1*02:01L HLA-DPA1*02:01-B1*13:01L HLA-DPA1*03:01-B1*105:01L
EIAWYTERSEKS

SEQ ID NO: 16599 - protein, 12 aa, Severe acute respiratory syndrome coronavirus 2
  REGION 1..12: note = Table B: HLA-DRB1*04:04L HLA-DRB1*11:04L HLA-DRB1*08:01L HLA-DRB1*11:01L HLA-DPA1*01:03-B1*04:01L HLA-DRB1*09:01L HLA-DRB3*01:01L HLA-DRB1*15:01L
KSYELQTPFEIK

SEQ ID NO: 16600 - protein, 14 aa, Severe acute respiratory syndrome coronavirus 2
  REGION 1..14: note = Table B: HLA-DRB1*04:04L HLA-DRB1*04:05L HLA-DRB1*01:02L HLA-DRB1*11:03L HLA-DRB1*11:01L HLA-DRB3*01:01L HLA-DRB1*16:01L
VFPLNSIIKTIQPR

SEQ ID NO: 16601 - protein, 12 aa, Severe acute respiratory syndrome coronavirus 2
  REGION 1..12: note = Table B: HLA-DRB1*04:04L HLA-DQA1*01:01-B1*05:01L HLA-DRB1*11:01L HLA-DRB3*01:01L HLA-DRB1*10:01L HLA-DRB1*08:03L
SIIKTIQPRVEK

SEQ ID NO: 16602 - protein, 12 aa, Severe acute respiratory syndrome coronavirus 2
  REGION 1..12: note = Table B: HLA-DRB1*04:04L HLA-DRB1*01:02L HLA-DRB1*08:04L HLA-DRB3*02:01L HLA-DPA1*01:03-B1*03:01L HLA-DRB1*11:03L HLA-DQA1*01:01-B1*05:01L HLA-DRB1*08:01L HLA-DPA1*02:01-B1*13:01L HLA-DPA1*01:03-B1*104:01L
  REGION 1..12: note = CONT. FROM ABOVE: HLA-DRB1*07:01L HLA-DRB1*04:08L HLA-DRB1*08:03 L HLA-DRB1*15:03L
IRSVYPVASPNE

SEQ ID NO: 16603 - protein, 14 aa, Severe acute respiratory syndrome coronavirus 2
  REGION 1..14: note = Table B: HLA-DRB1*04:04L HLA-DRB1*01:02L HLA-DPA1*01:03-B1*03:01L HLA-DPA1*02:01-B1*13:01L HLA-DRB1*04:08L HLA-DRB1*15:03L
RSVYPVASPNECNQ

SEQ ID NO: 16604 - protein, 14 aa, Severe acute respiratory syndrome coronavirus 2
  REGION 1..14: note = Table B: HLA-DRB1*04:04L HLA-DRB1*08:77L HLA-DQA1*01:01-B1*05:01L HLA-DPA1*01:03-B1*04:01L HLA-DRB1*04:10L HLA-DRB1*09:01L HLA-DPA1*01:03-B1*104:01L HLA-DRB1*10:01L
NDNLLEILQKEKVN

SEQ ID NO: 16605 - protein, 14 aa, Severe acute respiratory syndrome coronavirus 2
  REGION 1..14: note = Table B: HLA-DRB1*04:04L HLA-DRB1*03:01L HLA-DRB1*11:04L HLA-DRB1*14:02L HLA-DQA1*05:05-B1*03:19L HLA-DRB3*01:01L HLA-DRB1*04:08L
EILQKEKVNINIVG

SEQ ID NO: 16606 - protein, 13 aa, Severe acute respiratory syndrome coronavirus 2
  REGION 1..13: note = Table B: HLA-DRB1*04:04L HLA-DRB1*04:05L HLA-DRB1*14:54L HLA-DRB1*04:08L
VNINIVGDFKLNE

SEQ ID NO: 16607 - protein, 11 aa, Severe acute respiratory syndrome coronavirus 2
  REGION 1..11: note = Table B: HLA-DRB1*04:04L HLA-DRB1*08:04L HLA-DRB1*11:04L HLA-DRB1*08:01L HLA-DRB1*04:10L HLA-DRB3*01:01L HLA-DRB1*08:03L
FVETVKGLDYK

SEQ ID NO: 16608 - protein, 14 aa, Severe acute respiratory syndrome coronavirus 2
  REGION 1..14: note = Table B: HLA-DRB1*04:04L HLA-DRB1*04:05L
KQIVESCGNFKVTK

SEQ ID NO: 16609 - protein, 13 aa, Severe acute respiratory syndrome coronavirus 2
  REGION 1..13: note = Table B: HLA-DRB1*04:04L HLA-DQA1*01:01-B1*05:01L HLA-DRB1*04:10L HLA-DRB1*04:08L
IGEQKSILSPLYA

SEQ ID NO: 16610 - protein, 14 aa, Severe acute respiratory syndrome coronavirus 2
  REGION 1..14: note = Table B: HLA-DRB1*04:04L HLA-DPA1*01:03-B1*02:01L
VRSIFSRTLETAQN

SEQ ID NO: 16611 - protein, 15 aa, Severe acute respiratory syndrome coronavirus 2
  REGION 1..15: note = Table B: HLA-DRB1*04:04L HLA-DPA1*03:01-B1*105:01L HLA-DQA1*05:05-B1*03:01L
NSVRVLQKAAITILD

SEQ ID NO: 16612 - protein, 15 aa, Severe acute respiratory syndrome coronavirus 2
  REGION 1..15: note = Table B: HLA-DRB1*04:04L HLA-DRB3*02:01L HLA-DPA1*03:01-B1*04:02L HLA-DRB1*11:03L HLA-DRB1*14:02L HLA-DRB1*08:01L HLA-DRB3*01:01L
SVRVLQKAAITILDG

SEQ ID NO: 16613 - protein, 12 aa, Severe acute respiratory syndrome coronavirus 2
  REGION 1..12: note = Table B: HLA-DRB1*04:04L HLA-DRB1*08:04L HLA-DRB3*01:01L HLA-DPA1*01:03-B1*02:01L
NIFGTVYEKLKP

SEQ ID NO: 16614 - protein, 12 aa, Severe acute respiratory syndrome coronavirus 2
  REGION 1..12: note = Table B: HLA-DRB1*04:04L HLA-DRB3*02:01L HLA-DRB1*11:03L HLA-DRB3*01:01L HLA-DRB1*07:01L HLA-DRB1*08:03L
RDGWEIVKFIST

SEQ ID NO: 16615 - protein, 14 aa, Severe acute respiratory syndrome coronavirus 2
  REGION 1..14: note = Table B: HLA-DRB1*04:04L HLA-DPA1*02:01-B1*13:01L HLA-DPA1*01:03-B1*02:01L
IKESVQTFFKLVNK

SEQ ID NO: 16616 - protein, 15 aa, Severe acute respiratory syndrome coronavirus 2
  REGION 1..15: note = Table B: HLA-DRB1*04:04L HLA-DPA1*01:03-B1*104:01L
KALNLGETFVTHSKG

SEQ ID NO: 16617 - protein, 14 aa, Severe acute respiratory syndrome coronavirus 2
  REGION 1..14: note = Table B: HLA-DRB1*04:04L HLA-DRB1*04:05L HLA-DQA1*01:02-B1*06:02L HLA-DRB1*14:01L HLA-DQA1*03:01-B1*03:02L HLA-DQA1*01:03-B1*06:01L
PKEIIFLEGETLPT

SEQ ID NO: 16618 - protein, 14 aa, Severe acute respiratory syndrome coronavirus 2
  REGION 1..14: note = Table B: HLA-DRB1*04:04L HLA-DQA1*01:02-B1*06:02L
DERIDKVLNEKCSA

SEQ ID NO: 16619 - protein, 12 aa, Severe acute respiratory syndrome coronavirus 2
  REGION 1..12: note = Table B: HLA-DRB1*04:04L HLA-DRB1*01:02L HLA-DRB1*14:01L HLA-DRB1*15:03L
YGTEDDYQGKPL

SEQ ID NO: 16620 - protein, 13 aa, Severe acute respiratory syndrome coronavirus 2
  REGION 1..13: note = Table B: HLA-DRB1*04:04L HLA-DRB1*04:08L
QTIVEVQPQLEME

SEQ ID NO: 16621 - protein, 14 aa, Severe acute respiratory syndrome coronavirus 2
  REGION 1..14: note = Table B: HLA-DRB1*04:04L HLA-DRB1*11:03L HLA-DRB1*11:01L HLA-DRB1*04:10L HLA-DRB3*01:01L HLA-DPA1*01:03-B1*02:01L HLA-DRB1*08:03L
VQTIEVNSFSGYLK

SEQ ID NO: 16622 - protein, 15 aa, Severe acute respiratory syndrome coronavirus 2
  REGION 1..15: note = Table B: HLA-DRB1*04:04L HLA-DRB1*09:01L
IEVNSFSGYLKLTDN

SEQ ID NO: 16623 - protein, 12 aa, Severe acute respiratory syndrome coronavirus 2
  REGION 1..12: note = Table B: HLA-DRB1*04:04L HLA-DRB3*02:01L HLA-DRB1*11:03L HLA-DRB1*11:04L HLA-DRB1*08:01L HLA-DRB1*09:01L HLA-DRB1*12:02L HLA-DRB3*01:01L
GYLKLTDNVYIK

SEQ ID NO: 16624 - protein, 13 aa, Severe acute respiratory syndrome coronavirus 2
  REGION 1..13: note = Table B: HLA-DRB1*04:04L HLA-DRB1*11:03L
NVYIKNADIVEEA

SEQ ID NO: 16625 - protein, 13 aa, Severe acute respiratory syndrome coronavirus 2
  REGION 1..13: note = Table B: HLA-DRB1*04:04L HLA-DRB3*01:01L
PTVVVNAANVYLK

SEQ ID NO: 16626 - protein, 15 aa, Severe acute respiratory syndrome coronavirus 2
  REGION 1..15: note = Table B: HLA-DRB1*04:04L HLA-DPA1*01:03-B1*03:01L HLA-DQA1*01:01-B1*05:01L HLA-DRB3*01:01L HLA-DPA1*02:01-B1*13:01L HLA-DPA1*01:03-B1*104:01L
VVVNAANVYLKHGGG

SEQ ID NO: 16627 - protein, 14 aa, Severe acute respiratory syndrome coronavirus 2
  REGION 1..14: note = Table B: HLA-DRB1*04:04L HLA-DPA1*03:01-B1*04:02L HLA-DRB1*15:01L
AANVYLKHGGGVAG

SEQ ID NO: 16628 - protein, 11 aa, Severe acute respiratory syndrome coronavirus 2
  REGION 1..11: note = Table B: HLA-DRB1*04:04L HLA-DRB1*04:05L HLA-DRB1*01:01L HLA-DRB1*03:01L HLA-DRB1*11:01L HLA-DRB5*01:01L HLA-DRB1*04:10L HLA-DPA1*01:03-B1*04:02L HLA-DRB3*01:01L HLA-DPA1*01:03-B1*02:01L HLA-DRB1*04:08L
YIATNGPLKVG

SEQ ID NO: 16629 - protein, 12 aa, Severe acute respiratory syndrome coronavirus 2
  REGION 1..12: note = Table B: HLA-DRB1*04:04L HLA-DRB1*01:02L HLA-DRB1*14:01L HLA-DRB1*12:02L HLA-DPA1*03:01-B1*105:01L HLA-DQA1*05:05-B1*03:01L HLA-DRB1*04:08L
GEDIQLLKSAYE

SEQ ID NO: 16630 - protein, 14 aa, Severe acute respiratory syndrome coronavirus 2
  REGION 1..14: note = Table B: HLA-DRB1*04:04L
DIQLLKSAYENFNQ

SEQ ID NO: 16631 - protein, 14 aa, Severe acute respiratory syndrome coronavirus 2
  REGION 1..14: note = Table B: HLA-DRB1*04:04L HLA-DRB1*08:01L HLA-DPA1*01:03-B1*02:01L
IQLLKSAYENFNQH

SEQ ID NO: 16632 - protein, 11 aa, Severe acute respiratory syndrome coronavirus 2
  REGION 1..11: note = Table B: HLA-DRB1*04:04L HLA-DRB1*08:04L HLA-DRB5*01:01L HLA-DRB1*13:01L HLA-DRB1*04:10L HLA-DRB1*12:02L HLA-DRB3*01:01L HLA-DRB1*14:54L HLA-DRB1*08:02L HLA-DRB1*15:01L
GIFGADPIHSL

SEQ ID NO: 16633 - protein, 11 aa, Severe acute respiratory syndrome coronavirus 2
  REGION 1..11: note = Table B: HLA-DRB1*04:04L HLA-DRB1*08:04L HLA-DRB1*14:54L HLA-DPA1*01:03-B1*02:01L
IFGADPIHSLR

SEQ ID NO: 16634 - protein, 13 aa, Severe acute respiratory syndrome coronavirus 2
  REGION 1..13: note = Table B: HLA-DRB1*04:04L HLA-DRB1*11:03L HLA-DRB1*09:01L HLA-DRB3*01:01L HLA-DRB1*14:54L
NVYLAVFDKNLYD

SEQ ID NO: 16635 - protein, 14 aa, Severe acute respiratory syndrome coronavirus 2
  REGION 1..14: note = Table B: HLA-DRB1*04:04L HLA-DRB1*08:01L HLA-DPA1*01:03-B1*02:01L
DKLVSSFLEMKSEK

SEQ ID NO: 16636 - protein, 11 aa, Severe acute respiratory syndrome coronavirus 2
  REGION 1..11: note = Table B: HLA-DRB1*04:04L HLA-DRB1*01:02L HLA-DRB1*14:01L HLA-DRB1*12:01L HLA-DRB1*10:01L HLA-DRB1*08:03L
SSFLEMKSEKQ

SEQ ID NO: 16637 - protein, 14 aa, Severe acute respiratory syndrome coronavirus 2
  REGION 1..14: note = Table B: HLA-DRB1*04:04L HLA-DRB1*01:01L HLA-DRB1*03:01L HLA-DRB1*07:01L
VEQKIAEIPKEEVK

SEQ ID NO: 16638 - protein, 14 aa, Severe acute respiratory syndrome coronavirus 2
  REGION 1..14: note = Table B: HLA-DRB1*04:04L HLA-DRB1*03:01L HLA-DRB1*08:02L
EQKIAEIPKEEVKP

SEQ ID NO: 16639 - protein, 12 aa, Severe acute respiratory syndrome coronavirus 2
  REGION 1..12: note = Table B: HLA-DRB1*04:04L HLA-DRB1*04:05L HLA-DRB1*01:02L HLA-DRB1*08:04L HLA-DRB3*02:01L HLA-DRB1*11:03L HLA-DRB1*11:04L HLA-DRB1*08:01L HLA-DRB1*11:01L HLA-DRB3*01:01L HLA-DQA1*05:05-B1*03:01L HLA-DRB1*04:08L
IAEIPKEEVKPF

SEQ ID NO: 16640 - protein, 16 aa, Severe acute respiratory syndrome coronavirus 2
  REGION 1..16: note = Table B: HLA-DRB1*04:04L
TENLLLYIDINGNLHP

SEQ ID NO: 16641 - protein, 17 aa, Severe acute respiratory syndrome coronavirus 2
  REGION 1..17: note = Table B: HLA-DRB1*04:04L HLA-DRB3*02:01L HLA-DPA1*01:02-B1*04:01L
HPDSATLVSDIDITFLK

SEQ ID NO: 16642 - protein, 15 aa, Severe acute respiratory syndrome coronavirus 2
  REGION 1..15: note = Table B: HLA-DRB1*04:04L
IDITFLKKDAPYIVG

SEQ ID NO: 16643 - protein, 13 aa, Severe acute respiratory syndrome coronavirus 2
  REGION 1..13: note = Table B: HLA-DRB1*04:04L HLA-DRB1*11:01L HLA-DRB4*02:01NL
EGVLTAVVIPTKK

SEQ ID NO: 16644 - protein, 14 aa, Severe acute respiratory syndrome coronavirus 2
  REGION 1..14: note = Table B: HLA-DRB1*04:04L HLA-DRB1*08:04L HLA-DRB1*11:03L HLA-DRB1*11:04L HLA-DRB1*08:01L HLA-DRB1*04:10L HLA-DRB1*14:54L HLA-DRB1*14:17L HLA-DRB1*07:01L HLA-DRB1*08:03L
AKALRKVPTDNYIT

SEQ ID NO: 16645 - protein, 11 aa, Severe acute respiratory syndrome coronavirus 2
  REGION 1..11: note = Table B: HLA-DRB1*04:04L HLA-DRB1*04:05L HLA-DRB1*01:01L HLA-DRB1*08:77L HLA-DPA1*03:01-B1*04:02L HLA-DRB1*11:03L HLA-DRB1*11:04L HLA-DRB1*08:01L HLA-DRB1*04:10L HLA-DRB1*12:02L HLA-DRB1*14:54L HLA-DPA1*01:02-B1*04:01L HLA-DRB1*07:01L
  REGION 1..11: note = CONT. FROM ABOVE: HLA-DRB1*10:01L HLA-DRB1*08:03L
ITTYPGQGLNG

SEQ ID NO: 16646 - protein, 13 aa, Severe acute respiratory syndrome coronavirus 2
  REGION 1..13: note = Table B: HLA-DRB1*04:04L HLA-DRB1*08:04L HLA-DRB1*11:04L HLA-DRB1*04:10L HLA-DRB3*01:01L
LNGYTVEEAKTVL

SEQ ID NO: 16647 - protein, 11 aa, Severe acute respiratory syndrome coronavirus 2
  REGION 1..11: note = Table B: HLA-DRB1*04:04L HLA-DRB1*11:03L HLA-DRB1*11:04L HLA-DRB1*12:02L HLA-DRB3*01:01L HLA-DRB1*14:54L HLA-DRB1*04:08L
YTVEEAKTVLK

SEQ ID NO: 16648 - protein, 11 aa, Severe acute respiratory syndrome coronavirus 2
  REGION 1..11: note = Table B: HLA-DRB1*04:04L
FYILPSIISNE

SEQ ID NO: 16649 - protein, 12 aa, Severe acute respiratory syndrome coronavirus 2
  REGION 1..12: note = Table B: HLA-DRB1*04:04L HLA-DRB1*08:04L HLA-DPA1*01:03-B1*03:01L HLA-DRB1*14:01L HLA-DQA1*01:01-B1*05:01L HLA-DRB1*08:01L HLA-DQA1*01-B1*05L HLA-DQA1*05:05-B1*03:19L HLA-DRB1*04:10L
  REGION 1..12: note = CONT. FROM ABOVE: HLA-DPA1*02:01-B1*13:01L HLA-DRB1*14:54L HLA-D RB1*15:03L
YILPSIISNEKQ

SEQ ID NO: 16650 - protein, 13 aa, Severe acute respiratory syndrome coronavirus 2
  REGION 1..13: note = Table B: HLA-DRB1*04:04L HLA-DRB1*01:01L HLA-DRB1*08:04L HLA-DRB1*11:04L HLA-DRB1*14:02L HLA-DRB1*08:01L HLA-DRB3*01:01L HLA-DRB1*14:54L HLA-DRB1*10:01L HLA-DRB1*08:03L HLA-DRB1*15:01L
KQEILGTVSWNLR

SEQ ID NO: 16651 - protein, 13 aa, Severe acute respiratory syndrome coronavirus 2
  REGION 1..13: note = Table B: HLA-DRB1*04:04L HLA-DPA1*02:01-B1*13:01L HLA-DPA1*01:02-B1*04:01L
LREMLAHAEETRK

SEQ ID NO: 16652 - protein, 14 aa, Severe acute respiratory syndrome coronavirus 2
  REGION 1..14: note = Table B: HLA-DRB1*04:04L HLA-DRB1*08:04L HLA-DRB1*13:01L
TKAIVSTIQRKYKG

SEQ ID NO: 16653 - protein, 12 aa, Severe acute respiratory syndrome coronavirus 2
  REGION 1..12: note = Table B: HLA-DRB1*04:04L
KIQEGVVDYGAR

SEQ ID NO: 16654 - protein, 13 aa, Severe acute respiratory syndrome coronavirus 2
  REGION 1..13: note = Table B: HLA-DRB1*04:04L HLA-DRB1*04:05L HLA-DRB4*03:01NL HLA-DRB1*04:10L HLA-DRB1*16:01L HLA-DRB1*04:08L
KTTVASLINTLND

SEQ ID NO: 16655 - protein, 13 aa, Severe acute respiratory syndrome coronavirus 2
  REGION 1..13: note = Table B: HLA-DRB1*04:04L HLA-DRB1*12:01L HLA-DRB1*04:08L
VASLINTLNDLNE

SEQ ID NO: 16656 - protein, 14 aa, Severe acute respiratory syndrome coronavirus 2
  REGION 1..14: note = Table B: HLA-DRB1*04:04L HLA-DPA1*01:03-B1*02:01L
NETLVTMPLGYVTH

SEQ ID NO: 16657 - protein, 14 aa, Severe acute respiratory syndrome coronavirus 2
  REGION 1..14: note = Table B: HLA-DRB1*04:04L HLA-DRB1*04:05L HLA-DRB1*08:04L HLA-DPA1*01:03-B1*02:01L
ETLVTMPLGYVTHG

SEQ ID NO: 16658 - protein, 16 aa, Severe acute respiratory syndrome coronavirus 2
  REGION 1..16: note = Table B: HLA-DRB1*04:04L HLA-DRB1*01:01L HLA-DRB1*11:04L HLA-DRB1*07:01L
VTHGLNLEEAARYMRS

SEQ ID NO: 16659 - protein, 14 aa, Severe acute respiratory syndrome coronavirus 2
  REGION 1..14: note = Table B: HLA-DRB1*04:04L HLA-DRB3*02:01L
SPDAVTAYNGYLTS

SEQ ID NO: 16660 - protein, 14 aa, Severe acute respiratory syndrome coronavirus 2
  REGION 1..14: note = Table B: HLA-DRB1*04:04L HLA-DQA1*05:05-B1*03:19L
TAYNGYLTSSSKTP

SEQ ID NO: 16661 - protein, 13 aa, Severe acute respiratory syndrome coronavirus 2
  REGION 1..13: note = Table B: HLA-DRB1*04:04L HLA-DPA1*01:03-B1*03:01L HLA-DRB1*11:01L HLA-DPA1*02:01-B1*13:01L HLA-DRB1*07:01L
YNGYLTSSSKTPE

SEQ ID NO: 16662 - protein, 12 aa, Severe acute respiratory syndrome coronavirus 2
  REGION 1..12: note = Table B: HLA-DRB1*04:04L HLA-DPA1*01:03-B1*03:01L HLA-DPA1*03:01-B1*04:02L HLA-DQA1*01:01-B1*05:01L HLA-DRB1*11:01L HLA-DRB5*01:01L HLA-DRB1*09:01L HLA-DPA1*01:03-B1*04:02L HLA-DPA1*02:01-B1*13:01L
  REGION 1..12: note = CONT. FROM ABOVE: HLA-DRB1*07:01L HLA-DRB1*08:02L
GYLTSSSKTPEE

SEQ ID NO: 16663 - protein, 12 aa, Severe acute respiratory syndrome coronavirus 2
  REGION 1..12: note = Table B: HLA-DRB1*04:04L HLA-DPA1*02:01-B1*13:01L
YLTSSSKTPEEH

SEQ ID NO: 16664 - protein, 13 aa, Severe acute respiratory syndrome coronavirus 2
  REGION 1..13: note = Table B: HLA-DRB1*04:04L HLA-DRB1*08:04L HLA-DRB1*04:10L HLA-DRB1*04:08L
ETISLAGSYKDWS

SEQ ID NO: 16665 - protein, 11 aa, Severe acute respiratory syndrome coronavirus 2
  REGION 1..11: note = Table B: HLA-DRB1*04:04L HLA-DRB1*08:04L HLA-DPA1*01:03-B1*03:01L HLA-DRB1*11:04L HLA-DRB1*08:01L HLA-DRB1*04:10L HLA-DRB1*12:02L HLA-DRB1*14:54L HLA-DRB1*14:17L HLA-DRB1*07:01L HLA-DRB1*04:08L
VYYTSNPTTFH

SEQ ID NO: 16666 - protein, 12 aa, Severe acute respiratory syndrome coronavirus 2
  REGION 1..12: note = Table B: HLA-DRB1*04:04L HLA-DRB1*04:05L HLA-DQA1*01:02-B1*06:02L HLA-DRB1*01:02L HLA-DRB1*08:04L HLA-DRB1*11:04L HLA-DRB1*08:01L HLA-DRB1*11:01L HLA-DRB1*16:01L
TFDNLKTLLSLR

SEQ ID NO: 16667 - protein, 12 aa, Severe acute respiratory syndrome coronavirus 2
  REGION 1..12: note = Table B: HLA-DRB1*04:04L HLA-DQA1*01:02-B1*06:02L HLA-DRB1*01:02L HLA-DRB4*03:01NL HLA-DRB1*08:04L HLA-DRB1*14:01L HLA-DRB1*11:04L HLA-DRB1*08:01L HLA-DRB1*04:10L HLA-DRB1*16:01L HLA-DQA1*02:01-B1*03:03L HLA-DRB1*15:03L
FDNLKTLLSLRE

SEQ ID NO: 16668 - protein, 12 aa, Severe acute respiratory syndrome coronavirus 2
  REGION 1..12: note = Table B: HLA-DRB1*04:04L HLA-DRB1*08:04L HLA-DPA1*03:01-B1*04:02L HLA-DPA1*02:01-B1*13:01L
FTTVDNINLHTQ

SEQ ID NO: 16669 - protein, 14 aa, Severe acute respiratory syndrome coronavirus 2
  REGION 1..14: note = Table B: HLA-DRB1*04:04L HLA-DRB1*01:02L HLA-DQA1*05:05-B1*03:01L
HTQVVDMSMTYGQQ

SEQ ID NO: 16670 - protein, 15 aa, Severe acute respiratory syndrome coronavirus 2
  REGION 1..15: note = Table B: HLA-DRB1*04:04L HLA-DRB1*08:04L HLA-DRB1*03:01L HLA-DRB1*08:01L HLA-DRB1*11:01L HLA-DRB4*02:01NL HLA-DRB4*01:01L HLA-DPA1*01:03-B1*04:01L HLA-DRB3*01:01L HLA-DPA1*01:03-B1*104:01L HLA-DPA1*01:02-B1*04:01L
  REGION 1..15: note = CONT. FROM ABOVE: HLA-DRB1*10:01L HLA-DRB1*08:03L
VVDMSMTYGQQFGPT

SEQ ID NO: 16671 - protein, 14 aa, Severe acute respiratory syndrome coronavirus 2
  REGION 1..14: note = Table B: HLA-DRB1*04:04L
AFEYYHTTDPSFLG

SEQ ID NO: 16672 - protein, 14 aa, Severe acute respiratory syndrome coronavirus 2
  REGION 1..14: note = Table B: HLA-DRB1*04:04L HLA-DRB1*04:08L
YPQVNGLTSIKWAD

SEQ ID NO: 16673 - protein, 14 aa, Severe acute respiratory syndrome coronavirus 2
  REGION 1..14: note = Table B: HLA-DRB1*04:04L
PQVNGLTSIKWADN

SEQ ID NO: 16674 - protein, 18 aa, Severe acute respiratory syndrome coronavirus 2
  REGION 1..18: note = Table B: HLA-DRB1*04:04L HLA-DRB3*02:01L HLA-DPA1*03:01-B1*04:02L HLA-DRB1*11:02L HLA-DPA1*01:03-B1*04:01L HLA-DQA1*05:05-B1*03:116L HLA-DPA1*01:03-B1*104:01L HLA-DRB1*08:02L
NPPALQDAYYRARAGEAA

SEQ ID NO: 16675 - protein, 13 aa, Severe acute respiratory syndrome coronavirus 2
  REGION 1..13: note = Table B: HLA-DRB1*04:04L HLA-DPA1*01:03-B1*104:01L HLA-DRB1*07:01L
YRARAGEAANFCA

SEQ ID NO: 16676 - protein, 12 aa, Severe acute respiratory syndrome coronavirus 2
  REGION 1..12: note = Table B: HLA-DRB1*04:04L HLA-DPA1*02:01-B1*13:01L
KTVGELGDVRET

SEQ ID NO: 16677 - protein, 15 aa, Severe acute respiratory syndrome coronavirus 2
  REGION 1..15: note = Table B: HLA-DRB1*04:04L HLA-DRB1*08:04L HLA-DQA1*01:01-B1*05:01L HLA-DPA1*01:03-B1*04:01L HLA-DPA1*01:03-B1*04:02L HLA-DRB3*01:01L HLA-DRB1*07:01L
GDVRETMSYLFQHAN

SEQ ID NO: 16678 - protein, 15 aa, Severe acute respiratory syndrome coronavirus 2
  REGION 1..15: note = Table B: HLA-DRB1*04:04L
GKQATKYLVQQESPF

SEQ ID NO: 16679 - protein, 13 aa, Severe acute respiratory syndrome coronavirus 2
  REGION 1..13: note = Table B: HLA-DRB1*04:04L HLA-DRB1*08:77L HLA-DRB1*11:03L HLA-DPA1*01:03-B1*04:02L HLA-DRB3*01:01L HLA-DRB1*10:01L
ATKYLVQQESPFV

SEQ ID NO: 16680 - protein, 13 aa, Severe acute respiratory syndrome coronavirus 2
  REGION 1..13: note = Table B: HLA-DRB1*04:04L HLA-DRB1*08:77L HLA-DRB1*11:03L HLA-DRB1*11:04L HLA-DRB4*01:01L HLA-DRB3*01:01L HLA-DRB1*08:03L
TKYLVQQESPFVM

SEQ ID NO: 16681 - protein, 13 aa, Severe acute respiratory syndrome coronavirus 2
  REGION 1..13: note = Table B: HLA-DRB1*04:04L HLA-DPA1*03:01-B1*04:02L HLA-DQA1*05:05-B1*03:01L HLA-DRB1*10:01L
GHYKHITSKETLY

SEQ ID NO: 16682 - protein, 14 aa, Severe acute respiratory syndrome coronavirus 2
  REGION 1..14: note = Table B: HLA-DRB1*04:04L HLA-DRB1*08:04L HLA-DRB1*11:04L HLA-DRB1*08:01L HLA-DRB3*01:01L
KHITSKETLYCIDG

SEQ ID NO: 16683 - protein, 17 aa, Severe acute respiratory syndrome coronavirus 2
  REGION 1..17: note = Table B: HLA-DRB1*04:04L HLA-DRB3*02:01L HLA-DRB1*11:04L HLA-DRB1*07:01L HLA-DRB1*08:03L
IDGALLTKSSEYKGPIT

SEQ ID NO: 16684 - protein, 16 aa, Severe acute respiratory syndrome coronavirus 2
  REGION 1..16: note = Table B: HLA-DRB1*04:04L HLA-DRB3*02:01L HLA-DRB1*11:03L HLA-DRB1*14:02L HLA-DRB1*09:01L HLA-DRB3*01:01L HLA-DPA1*01:03-B1*02:01L HLA-DRB1*07:01L HLA-DRB1*08:02L
GPITDVFYKENSYTTT

SEQ ID NO: 16685 - protein, 11 aa, Severe acute respiratory syndrome coronavirus 2
  REGION 1..11: note = Table B: HLA-DRB1*04:04L HLA-DRB1*08:04L HLA-DRB1*04:08L
YTTTIKPVTYK

SEQ ID NO: 16686 - protein, 11 aa, Severe acute respiratory syndrome coronavirus 2
  REGION 1..11: note = Table B: HLA-DRB1*04:04L HLA-DRB1*01:02L HLA-DRB1*08:04L HLA-DRB3*02:01L HLA-DRB1*11:03L HLA-DRB1*11:04L HLA-DRB1*14:02L HLA-DRB1*10:01L HLA-DRB1*04:08L HLA-DRB1*08:03L HLA-DRB1*15:03L
IDLVPNQPYPN

SEQ ID NO: 16687 - protein, 14 aa, Severe acute respiratory syndrome coronavirus 2
  REGION 1..14: note = Table B: HLA-DRB1*04:04L HLA-DRB1*11:02L
LVPNQPYPNASFDN

SEQ ID NO: 16688 - protein, 15 aa, Severe acute respiratory syndrome coronavirus 2
  REGION 1..15: note = Table B: HLA-DRB1*04:04L HLA-DRB1*08:04L HLA-DRB3*02:01L HLA-DRB1*09:01L
VPNQPYPNASFDNFK

SEQ ID NO: 16689 - protein, 14 aa, Severe acute respiratory syndrome coronavirus 2
  REGION 1..14: note = Table B: HLA-DRB1*04:04L HLA-DRB1*11:04L HLA-DRB3*01:01L
SRELKVTFFPDLNG

SEQ ID NO: 16690 - protein, 14 aa, Severe acute respiratory syndrome coronavirus 2
  REGION 1..14: note = Table B: HLA-DRB1*04:04L HLA-DRB3*01:01L
HVNNATNKATYKPN

SEQ ID NO: 16691 - protein, 14 aa, Severe acute respiratory syndrome coronavirus 2
  REGION 1..14: note = Table B: HLA-DRB1*04:04L HLA-DPA1*01:03-B1*03:01L HLA-DRB1*14:01L HLA-DRB1*04:10L HLA-DPA1*01:03-B1*04:02L HLA-DPA1*02:01-B1*13:01L
TTEVVGDIILKPAN

SEQ ID NO: 16692 - protein, 11 aa, Severe acute respiratory syndrome coronavirus 2
  REGION 1..11: note = Table B: HLA-DRB1*04:04L HLA-DRB1*11:04L HLA-DRB1*04:10L HLA-DRB1*14:54L HLA-DRB1*04:08L
IILKPANNSLK

SEQ ID NO: 16693 - protein, 17 aa, Severe acute respiratory syndrome coronavirus 2
  REGION 1..17: note = Table B: HLA-DRB1*04:04L
ITEEVGHTDLMAAYVDN

SEQ ID NO: 16694 - protein, 12 aa, Severe acute respiratory syndrome coronavirus 2
  REGION 1..12: note = Table B: HLA-DRB1*04:04L HLA-DQA1*01:02-B1*06:02L HLA-DRB1*01:02L HLA-DRB1*12:01L HLA-DPA1*03:01-B1*105:01L HLA-DQA1*01:03-B1*06:01L HLA-DRB1*04:08L
LMAAYVDNSSLT

SEQ ID NO: 16695 - protein, 12 aa, Severe acute respiratory syndrome coronavirus 2
  REGION 1..12: note = Table B: HLA-DRB1*04:04L HLA-DQA1*01:02-B1*06:02L HLA-DRB1*08:01L HLA-DRB1*04:10L HLA-DPA1*02:01-B1*13:01L HLA-DRB1*08:03L
YVDNSSLTIKKP

SEQ ID NO: 16696 - protein, 14 aa, Severe acute respiratory syndrome coronavirus 2
  REGION 1..14: note = Table B: HLA-DRB1*04:04L HLA-DRB1*03:01L HLA-DRB1*11:03L HLA-DRB1*11:01L HLA-DRB1*13:01L
NSSLTIKKPNELSR

SEQ ID NO: 16697 - protein, 13 aa, Severe acute respiratory syndrome coronavirus 2
  REGION 1..13: note = Table B: HLA-DRB1*04:04L HLA-DQA1*01:02-B1*06:02L HLA-DRB1*11:04L HLA-DRB1*08:01L HLA-DRB1*04:10L HLA-DQA1*03:01-B1*03:02L HLA-DQA1*02:01-B1*03:03L HLA-DRB1*15:03L
LSRVLGLKTLATH

SEQ ID NO: 16698 - protein, 14 aa, Severe acute respiratory syndrome coronavirus 2
  REGION 1..14: note = Table B: HLA-DRB1*04:04L
SVPWDTIANYAKPF

SEQ ID NO: 16699 - protein, 13 aa, Severe acute respiratory syndrome coronavirus 2
  REGION 1..13: note = Table B: HLA-DRB1*04:04L HLA-DRB1*11:03L HLA-DRB1*11:04L HLA-DRB1*11:01L HLA-DRB1*04:10L HLA-DRB3*01:01L HLA-DRB1*07:01L HLA-DRB1*08:03L
DTIANYAKPFLNK

SEQ ID NO: 16700 - protein, 13 aa, Severe acute respiratory syndrome coronavirus 2
  REGION 1..13: note = Table B: HLA-DRB1*04:04L HLA-DRB1*01:01L HLA-DRB1*08:77L HLA-DPA1*01:03-B1*03:01L HLA-DRB1*11:03L HLA-DRB1*11:04L HLA-DRB1*12:02L HLA-DRB3*01:01L HLA-DPA1*03:01-B1*105:01L HLA-DRB1*14:54L HLA-DRB1*10:01L
SRIKASMPTTIAK

SEQ ID NO: 16701 - protein, 15 aa, Severe acute respiratory syndrome coronavirus 2
  REGION 1..15: note = Table B: HLA-DRB1*04:04L
IKASMPTTIAKNTVK

SEQ ID NO: 16702 - protein, 15 aa, Severe acute respiratory syndrome coronavirus 2
  REGION 1..15: note = Table B: HLA-DRB1*04:04L HLA-DRB1*03:01L HLA-DRB1*11:01L HLA-DRB1*13:01L
MPTTIAKNTVKSVGK

SEQ ID NO: 16703 - protein, 14 aa, Severe acute respiratory syndrome coronavirus 2
  REGION 1..14: note = Table B: HLA-DRB1*04:04L HLA-DRB1*01:02L HLA-DRB1*15:03L
TAALGVLMSNLGMP

SEQ ID NO: 16704 - protein, 13 aa, Severe acute respiratory syndrome coronavirus 2
  REGION 1..13: note = Table B: HLA-DRB1*04:04L HLA-DRB1*08:04L HLA-DRB1*08:01L HLA-DRB1*11:01L HLA-DRB5*01:01L HLA-DRB4*01:01L HLA-DRB1*04:10L HLA-DPA1*01:03-B1*04:02L HLA-DRB3*01:01L HLA-DRB1*10:01L
REGYLNSTNVTIA

SEQ ID NO: 16705 - protein, 13 aa, Severe acute respiratory syndrome coronavirus 2
  REGION 1..13: note = Table B: HLA-DRB1*04:04L HLA-DQA1*01:02-B1*06:02L HLA-DRB1*01:02L HLA-DRB1*12:01L HLA-DPA1*03:01-B1*105:01L HLA-DQA1*05:05-B1*03:01L HLA-DRB1*10:01L HLA-DRB1*04:08L
LSGLDSLDTYPSL

SEQ ID NO: 16706 - protein, 14 aa, Severe acute respiratory syndrome coronavirus 2
  REGION 1..14: note = Table B: HLA-DRB1*04:04L
IINLVQMAPISAMV

SEQ ID NO: 16707 - protein, 12 aa, Severe acute respiratory syndrome coronavirus 2
  REGION 1..12: note = Table B: HLA-DRB1*04:04L HLA-DRB1*04:05L HLA-DPA1*01:03-B1*03:01L HLA-DRB1*04:10L HLA-DRB1*14:54L HLA-DRB1*10:01L HLA-DRB1*04:08L
LVQMAPISAMVR

SEQ ID NO: 16708 - protein, 15 aa, Severe acute respiratory syndrome coronavirus 2
  REGION 1..15: note = Table B: HLA-DRB1*04:04L HLA-DRB3*02:01L HLA-DQA1*05:05-B1*03:116L HLA-DRB1*10:01L HLA-DRB1*15:01L
ASFYYVWKSYVHVVD

SEQ ID NO: 16709 - protein, 16 aa, Severe acute respiratory syndrome coronavirus 2
  REGION 1..16: note = Table B: HLA-DRB1*04:04L HLA-DRB1*15:01L
ISDEVARDLSLQFKRP

SEQ ID NO: 16710 - protein, 14 aa, Severe acute respiratory syndrome coronavirus 2
  REGION 1..14: note = Table B: HLA-DRB1*04:04L HLA-DRB1*08:01L HLA-DPA1*01:03-B1*04:01L HLA-DPA1*01:03-B1*04:02L HLA-DRB1*07:01L
DQSSYIVDSVTVKN

SEQ ID NO: 16711 - protein, 12 aa, Severe acute respiratory syndrome coronavirus 2
  REGION 1..12: note = Table B: HLA-DRB1*04:04L HLA-DRB1*04:05L HLA-DQA1*01:02-B1*06:02L HLA-DRB1*14:01L HLA-DRB1*08:01L HLA-DRB1*12:01L HLA-DQA1*02:01-B1*03:03L HLA-DRB1*15:01L
SIHLYFDKAGQK

SEQ ID NO: 16712 - protein, 12 aa, Severe acute respiratory syndrome coronavirus 2
  REGION 1..12: note = Table B: HLA-DRB1*04:04L HLA-DRB1*01:02L HLA-DRB1*08:01L HLA-DRB1*12:01L
LSHFVNLDNLRA

SEQ ID NO: 16713 - protein, 14 aa, Severe acute respiratory syndrome coronavirus 2
  REGION 1..14: note = Table B: HLA-DRB1*04:04L HLA-DRB1*04:05L HLA-DRB1*01:02L HLA-DRB1*08:04L HLA-DRB3*02:01L HLA-DQA1*01:01-B1*05:01L HLA-DRB1*08:01L HLA-DRB1*04:10L HLA-DRB1*04:08L
SAEVAVKMFDAYVN

SEQ ID NO: 16714 - protein, 14 aa, Severe acute respiratory syndrome coronavirus 2
  REGION 1..14: note = Table B: HLA-DRB1*04:04L HLA-DRB1*08:04L HLA-DRB3*02:01L HLA-DRB1*11:02L HLA-DRB1*11:04L HLA-DRB1*04:10L HLA-DQA1*05:05-B1*03:01L HLA-DRB1*04:08L HLA-DRB1*15:01L
VKMFDAYVNTFSST

SEQ ID NO: 16715 - protein, 11 aa, Severe acute respiratory syndrome coronavirus 2
  REGION 1..11: note = Table B: HLA-DRB1*04:04L HLA-DRB1*04:05L HLA-DQA1*01:02-B1*06:02L HLA-DRB1*01:02L HLA-DRB3*02:01L HLA-DPA1*01:03-B1*03:01L HLA-DRB1*14:01L HLA-DRB1*11:04L HLA-DQA1*05:05-B1*03:19L HLA-DRB1*04:10L
  REGION 1..11: note = CONT. FROM ABOVE: HLA-DPA1*01:03-B1*04:02L HLA-DRB1*14:54L HLA-D PA1*01:02-B1*04:01L HLA-DRB1*04:08L HLA-DRB1*15:03L
FSSTFNVPMEK

SEQ ID NO: 16716 - protein, 14 aa, Severe acute respiratory syndrome coronavirus 2
  REGION 1..14: note = Table B: HLA-DRB1*04:04L HLA-DRB1*01:01L HLA-DRB1*11:03L HLA-DRB1*11:04L HLA-DPA1*01:03-B1*04:01L HLA-DRB1*09:01L HLA-DPA1*01:03-B1*104:01L HLA-DRB1*10:01L HLA-DRB1*08:03L
LKTLVATAEAELAK

SEQ ID NO: 16717 - protein, 14 aa, Severe acute respiratory syndrome coronavirus 2
  REGION 1..14: note = Table B: HLA-DRB1*04:04L HLA-DRB1*03:01L HLA-DRB1*11:03L HLA-DRB1*11:04L HLA-DRB1*14:02L HLA-DRB1*08:01L HLA-DRB1*12:02L HLA-DRB3*01:01L HLA-DRB1*08:03L
AELAKNVSLDNVLS

SEQ ID NO: 16718 - protein, 16 aa, Severe acute respiratory syndrome coronavirus 2
  REGION 1..16: note = Table B: HLA-DRB1*04:04L HLA-DRB3*01:01L HLA-DRB1*07:01L
ISAARQGFVDSDVETK

SEQ ID NO: 16719 - protein, 13 aa, Severe acute respiratory syndrome coronavirus 2
  REGION 1..13: note = Table B: HLA-DRB1*04:04L HLA-DRB1*14:01L HLA-DPA1*02:01-B1*13:01L
ARHINAQVAKSHN

SEQ ID NO: 16720 - protein, 16 aa, Severe acute respiratory syndrome coronavirus 2
  REGION 1..16: note = Table B: HLA-DRB1*04:04L
LRKQIRSAAKKNNLPF

SEQ ID NO: 16721 - protein, 13 aa, Severe acute respiratory syndrome coronavirus 2
  REGION 1..13: note = Table B: HLA-DRB1*04:04L HLA-DRB1*04:05L HLA-DQA1*01:02-B1*06:02L HLA-DRB1*01:02L HLA-DPA1*01:03-B1*03:01L HLA-DPA1*02:01-B1*13:01L HLA-DRB1*16:01L
ATTRQVVNVVTTK

SEQ ID NO: 16722 - protein, 14 aa, Severe acute respiratory syndrome coronavirus 2
  REGION 1..14: note = Table B: HLA-DRB1*04:04L HLA-DRB3*02:01L HLA-DPA1*01:03-B1*03:01L HLA-DRB1*03:01L HLA-DRB1*11:02L HLA-DQA1*01-B1*05L HLA-DQA1*05:01-B1*02:01L HLA-DPA1*01:03-B1*04:01L HLA-DPA1*01:03-B1*04:02L
  REGION 1..14: note = CONT. FROM ABOVE: HLA-DPA1*01:03-B1*104:01L HLA-DRB1*07:01L HLA- DRB1*08:03L
GGKIVNNWLKQLIK

SEQ ID NO: 16723 - protein, 14 aa, Severe acute respiratory syndrome coronavirus 2
  REGION 1..14: note = Table B: HLA-DRB1*04:04L HLA-DPA1*03:01-B1*04:02L HLA-DRB1*14:02L HLA-DQA1*05:05-B1*03:19L HLA-DRB1*13:01L HLA-DPA1*01:03-B1*04:02L HLA-DPA1*03:01-B1*105:01L HLA-DPA1*01:03-B1*02:01L HLA-DPA1*01:03-B1*104:01L
  REGION 1..14: note = CONT. FROM ABOVE: HLA-DQA1*05:05-B1*03:01L HLA-DRB1*07:01L
ITPVHVMSKHTDFS

SEQ ID NO: 16724 - protein, 12 aa, Severe acute respiratory syndrome coronavirus 2
  REGION 1..12: note = Table B: HLA-DRB1*04:04L HLA-DQA1*01:02-B1*06:02L HLA-DRB1*03:01L HLA-DRB1*11:03L HLA-DRB1*11:04L HLA-DRB1*14:02L HLA-DRB1*08:01L HLA-DRB1*11:01L HLA-DRB5*01:01L HLA-DQA1*05:05-B1*03:19L HLA-DRB4*01:01L HLA-DRB1*04:10L
  REGION 1..12: note = CONT. FROM ABOVE: HLA-DRB1*09:01L HLA-DPA1*01:03-B1*04:02L HLA-D PA1*02:01-B1*13:01L HLA-DQA1*05:05-B1*03:01L HLA-DRB1*10:01L HLA -DQA1*01:03-B1*06:01L HLA-DRB1*08:03L
GGSYTNDKACPL

SEQ ID NO: 16725 - protein, 12 aa, Severe acute respiratory syndrome coronavirus 2
  REGION 1..12: note = Table B: HLA-DRB1*04:04L HLA-DPA1*02:01-B1*13:01L HLA-DPA1*01:03-B1*104:01L
PLIAAVITREVG

SEQ ID NO: 16726 - protein, 14 aa, Severe acute respiratory syndrome coronavirus 2
  REGION 1..14: note = Table B: HLA-DRB1*04:04L HLA-DRB1*11:04L HLA-DRB4*01:01L HLA-DPA1*01:03-B1*04:02L HLA-DRB3*01:01L HLA-DPA1*01:03-B1*104:01L HLA-DRB1*10:01L HLA-DRB1*08:03L
LPGTILRTTNGDFL

SEQ ID NO: 16727 - protein, 13 aa, Severe acute respiratory syndrome coronavirus 2
  REGION 1..13: note = Table B: HLA-DRB1*04:04L HLA-DQA1*01:02-B1*06:02L HLA-DRB3*02:01L HLA-DRB1*14:01L HLA-DRB1*08:01L HLA-DQA1*03:01-B1*03:02L HLA-DRB1*15:01L
PSKLIEYTDFATS

SEQ ID NO: 16728 - protein, 16 aa, Severe acute respiratory syndrome coronavirus 2
  REGION 1..16: note = Table B: HLA-DRB1*04:04L
AAECTIFKDASGKPVP

SEQ ID NO: 16729 - protein, 14 aa, Severe acute respiratory syndrome coronavirus 2
  REGION 1..14: note = Table B: HLA-DRB1*04:04L HLA-DRB1*04:05L HLA-DPA1*01:03-B1*03:01L HLA-DQA1*01:01-B1*05:01L HLA-DRB1*08:01L HLA-DRB1*12:01L HLA-DRB1*14:17L HLA-DRB1*16:01L HLA-DRB1*15:03L
NVLEGSVAYESLRP

SEQ ID NO: 16730 - protein, 12 aa, Severe acute respiratory syndrome coronavirus 2
  REGION 1..12: note = Table B: HLA-DRB1*04:04L HLA-DRB1*14:01L HLA-DRB1*04:10L HLA-DPA1*02:01-B1*13:01L HLA-DRB1*14:54L HLA-DRB1*15:03L
SVAYESLRPDTR

SEQ ID NO: 16731 - protein, 13 aa, Severe acute respiratory syndrome coronavirus 2
  REGION 1..13: note = Table B: HLA-DRB1*04:04L HLA-DRB1*04:05L HLA-DRB1*04:08L
VRVVTTFDSEYCR

SEQ ID NO: 16732 - protein, 13 aa, Severe acute respiratory syndrome coronavirus 2
  REGION 1..13: note = Table B: HLA-DRB1*04:04L HLA-DRB1*04:05L
RVVTTFDSEYCRH

SEQ ID NO: 16733 - protein, 14 aa, Severe acute respiratory syndrome coronavirus 2
  REGION 1..14: note = Table B: HLA-DRB1*04:04L HLA-DRB1*04:05L HLA-DQA1*05:05-B1*03:01L
VDAVNLLTNMFTPL

SEQ ID NO: 16734 - protein, 12 aa, Severe acute respiratory syndrome coronavirus 2
  REGION 1..12: note = Table B: HLA-DRB1*04:04L HLA-DRB1*01:01L HLA-DRB1*08:04L HLA-DRB1*11:02L HLA-DRB1*11:03L HLA-DRB1*11:04L HLA-DRB1*11:01L HLA-DRB5*02:02L HLA-DRB4*01:01L HLA-DRB1*04:10L HLA-DRB1*12:02L HLA-DRB3*01:01L
GEYSHVVAFNTL

SEQ ID NO: 16735 - protein, 14 aa, Severe acute respiratory syndrome coronavirus 2
  REGION 1..14: note = Table B: HLA-DRB1*04:04L HLA-DRB3*01:01L
RRVVFNGVSFSTFE

SEQ ID NO: 16736 - protein, 13 aa, Severe acute respiratory syndrome coronavirus 2
  REGION 1..13: note = Table B: HLA-DRB1*04:04L HLA-DRB1*11:04L HLA-DRB3*01:01L
SDVLLPLTQYNRY

SEQ ID NO: 16737 - protein, 15 aa, Severe acute respiratory syndrome coronavirus 2
  REGION 1..15: note = Table B: HLA-DRB1*04:04L HLA-DQA1*03:01-B1*03:02L HLA-DRB1*07:01L
LPLTQYNRYLALYNK

SEQ ID NO: 16738 - protein, 15 aa, Severe acute respiratory syndrome coronavirus 2
  REGION 1..15: note = Table B: HLA-DRB1*04:04L HLA-DRB3*02:01L HLA-DRB1*14:54L HLA-DPA1*01:03-B1*02:01L HLA-DQA1*05:05-B1*03:01L HLA-DRB1*08:02L
NRYLALYNKYKYFSG

SEQ ID NO: 16739 - protein, 14 aa, Severe acute respiratory syndrome coronavirus 2
  REGION 1..14: note = Table B: HLA-DRB1*04:04L HLA-DQA1*01:02-B1*06:02L HLA-DRB1*08:04L HLA-DRB1*11:04L HLA-DRB3*01:01L HLA-DRB1*15:03L
QSGFRKMAFPSGKV

SEQ ID NO: 16740 - protein, 14 aa, Severe acute respiratory syndrome coronavirus 2
  REGION 1..14: note = Table B: HLA-DRB1*04:04L HLA-DRB1*04:08L
RHVICTSEDMLNPN

SEQ ID NO: 16741 - protein, 14 aa, Severe acute respiratory syndrome coronavirus 2
  REGION 1..14: note = Table B: HLA-DRB1*04:04L HLA-DRB1*11:01L
YEDLLIRKSNHNFL

SEQ ID NO: 16742 - protein, 13 aa, Severe acute respiratory syndrome coronavirus 2
  REGION 1..13: note = Table B: HLA-DRB1*04:04L HLA-DRB1*11:04L HLA-DRB1*11:01L HLA-DPA1*02:01-B1*13:01L HLA-DPA1*01:03-B1*02:01L HLA-DRB1*10:01L
PKYKFVRIQPGQT

SEQ ID NO: 16743 - protein, 11 aa, Severe acute respiratory syndrome coronavirus 2
  REGION 1..11: note = Table B: HLA-DRB1*04:04L HLA-DRB1*04:08L
FVRIQPGQTFS

SEQ ID NO: 16744 - protein, 14 aa, Severe acute respiratory syndrome coronavirus 2
  REGION 1..14: note = Table B: HLA-DRB1*04:04L HLA-DRB1*08:04L HLA-DRB1*08:77L HLA-DRB1*11:03L HLA-DRB1*11:04L HLA-DRB1*14:02L HLA-DRB1*11:01L HLA-DQA1*05:05-B1*03:116L HLA-DRB1*12:02L HLA-DRB3*01:01L HLA-DRB1*07:01L HLA-DRB1*10:01L HLA-DRB1*08:03L HLA-DRB1*15:03L
VDRQTAQAAGTDTT

SEQ ID NO: 16745 - protein, 14 aa, Severe acute respiratory syndrome coronavirus 2
  REGION 1..14: note = Table B: HLA-DRB1*04:04L HLA-DRB1*10:01L
LNRFTTTLNDFNLV

SEQ ID NO: 16746 - protein, 14 aa, Severe acute respiratory syndrome coronavirus 2
  REGION 1..14: note = Table B: HLA-DRB1*04:04L HLA-DRB1*11:01L HLA-DRB3*01:01L
MKYNYEPLTQDHVD

SEQ ID NO: 16747 - protein, 13 aa, Severe acute respiratory syndrome coronavirus 2
  REGION 1..13: note = Table B: HLA-DRB1*04:04L HLA-DRB1*04:05L HLA-DQA1*01:02-B1*06:02L HLA-DRB1*04:10L HLA-DRB1*15:03L
QDHVDILGPLSAQ

SEQ ID NO: 16748 - protein, 14 aa, Severe acute respiratory syndrome coronavirus 2
  REGION 1..14: note = Table B: HLA-DRB1*04:04L
QTGIAVLDMCASLK

SEQ ID NO: 16749 - protein, 13 aa, Severe acute respiratory syndrome coronavirus 2
  REGION 1..13: note = Table B: HLA-DRB1*04:04L HLA-DRB1*11:04L
MSAFAMMFVKHKH

SEQ ID NO: 16750 - protein, 14 aa, Severe acute respiratory syndrome coronavirus 2
  REGION 1..14: note = Table B: HLA-DRB1*04:04L HLA-DRB1*01:02L HLA-DPA1*01:03-B1*04:02L HLA-DPA1*02:01-B1*13:01L
VMRIMTWLDMVDTS

SEQ ID NO: 16751 - protein, 13 aa, Severe acute respiratory syndrome coronavirus 2
  REGION 1..13: note = Table B: HLA-DRB1*04:04L
MTWLDMVDTSLSG

SEQ ID NO: 16752 - protein, 12 aa, Severe acute respiratory syndrome coronavirus 2
  REGION 1..12: note = Table B: HLA-DRB1*04:04L HLA-DRB1*04:05L HLA-DRB1*01:02L HLA-DPA1*01:03-B1*03:01L HLA-DRB1*04:10L HLA-DRB1*04:08L
LDMVDTSLSGFK

SEQ ID NO: 16753 - protein, 16 aa, Severe acute respiratory syndrome coronavirus 2
  REGION 1..16: note = Table B: HLA-DRB1*04:04L HLA-DRB1*08:04L HLA-DRB1*11:04L HLA-DRB3*01:01L
ARRVWTLMNVLTLVYK

SEQ ID NO: 16754 - protein, 15 aa, Severe acute respiratory syndrome coronavirus 2
  REGION 1..15: note = Table B: HLA-DRB1*04:04L HLA-DPA1*03:01-B1*04:02L HLA-DPA1*01:03-B1*04:02L HLA-DPA1*02:01-B1*13:01L HLA-DPA1*01:03-B1*02:01L
AFKLNIKLLGVGGKP

SEQ ID NO: 16755 - protein, 15 aa, Severe acute respiratory syndrome coronavirus 2
  REGION 1..15: note = Table B: HLA-DRB1*04:04L HLA-DRB1*08:01L HLA-DRB1*11:01L HLA-DQA1*03:01-B1*03:02L HLA-DPA1*01:03-B1*104:01L HLA-DPA1*01:02-B1*04:01L HLA-DRB1*07:01L HLA-DQA1*01:03-B1*06:01L HLA-DQA1*02:01-B1*03:03L
  REGION 1..15: note = CONT. FROM ABOVE: HLA-DRB1*15:03L
VGGKPCIKVATVQSK

SEQ ID NO: 16756 - protein, 12 aa, Severe acute respiratory syndrome coronavirus 2
  REGION 1..12: note = Table B: HLA-DRB1*04:04L HLA-DRB1*04:05L HLA-DRB1*01:02L HLA-DPA1*01:03-B1*03:01L HLA-DQA1*01-B1*05L HLA-DRB1*04:10L HLA-DPA1*02:01-B1*13:01L HLA-DRB1*14:54L HLA-DRB1*04:08L HLA-DRB1*15:03L
VATVQSKMSDVK

SEQ ID NO: 16757 - protein, 14 aa, Severe acute respiratory syndrome coronavirus 2
  REGION 1..14: note = Table B: HLA-DRB1*04:04L HLA-DQA1*05:05-B1*03:01L HLA-DPA1*01:02-B1*04:01L HLA-DRB1*07:01L HLA-DRB1*15:03L
SSSKLWAQCVQLHN

SEQ ID NO: 16758 - protein, 15 aa, Severe acute respiratory syndrome coronavirus 2
  REGION 1..15: note = Table B: HLA-DRB1*04:04L HLA-DRB1*01:02L HLA-DPA1*03:01-B1*105:01L HLA-DQA1*05:05-B1*03:01L HLA-DRB1*04:08L
VSLLSVLLSMQGAVD

SEQ ID NO: 16759 - protein, 14 aa, Severe acute respiratory syndrome coronavirus 2
  REGION 1..14: note = Table B: HLA-DRB1*04:04L HLA-DRB1*10:01L HLA-DRB1*04:08L
LSVLLSMQGAVDIN

SEQ ID NO: 16760 - protein, 14 aa, Severe acute respiratory syndrome coronavirus 2
  REGION 1..14: note = Table B: HLA-DRB1*04:04L HLA-DRB4*03:01NL HLA-DRB3*02:01L HLA-DRB1*08:01L HLA-DRB1*12:02L HLA-DRB1*07:01L HLA-DRB1*04:08L
DNRATLQAIASEFS

SEQ ID NO: 16761 - protein, 13 aa, Severe acute respiratory syndrome coronavirus 2
  REGION 1..13: note = Table B: HLA-DRB1*04:04L HLA-DRB1*01:02L HLA-DRB4*03:01NL HLA-DRB1*11:04L HLA-DRB1*12:02L HLA-DQA1*05:05-B1*03:01L HLA-DRB1*04:08L HLA-DRB1*08:03L
RATLQAIASEFSS

SEQ ID NO: 16762 - protein, 15 aa, Severe acute respiratory syndrome coronavirus 2
  REGION 1..15: note = Table B: HLA-DRB1*04:04L HLA-DRB1*04:08L
ATLQAIASEFSSLPS

SEQ ID NO: 16763 - protein, 14 aa, Severe acute respiratory syndrome coronavirus 2
  REGION 1..14: note = Table B: HLA-DRB1*04:04L HLA-DRB1*08:04L HLA-DRB1*11:03L HLA-DRB1*11:01L HLA-DQA1*05:05-B1*03:116L HLA-DRB1*09:01L HLA-DRB3*01:01L HLA-DPA1*01:03-B1*104:01L
EQAVANGDSEVVLK

SEQ ID NO: 16764 - protein, 12 aa, Severe acute respiratory syndrome coronavirus 2
  REGION 1..12: note = Table B: HLA-DRB1*04:04L HLA-DRB1*04:05L HLA-DRB1*01:02L HLA-DRB1*12:01L HLA-DPA1*02:01-B1*13:01L HLA-DRB1*16:01L HLA-DRB1*04:08L
KKLKKSLNVAKS

SEQ ID NO: 16765 - protein, 12 aa, Severe acute respiratory syndrome coronavirus 2
  REGION 1..12: note = Table B: HLA-DRB1*04:04L HLA-DRB1*04:05L HLA-DRB1*01:02L HLA-DRB1*12:01L HLA-DPA1*02:01-B1*13:01L HLA-DRB1*16:01L HLA-DRB1*04:08L
KLKKSLNVAKSE

SEQ ID NO: 16766 - protein, 13 aa, Severe acute respiratory syndrome coronavirus 2
  REGION 1..13: note = Table B: HLA-DRB1*04:04L HLA-DRB1*01:02L HLA-DRB1*12:01L
KKSLNVAKSEFDR

SEQ ID NO: 16767 - protein, 13 aa, Severe acute respiratory syndrome coronavirus 2
  REGION 1..13: note = Table B: HLA-DRB1*04:04L HLA-DRB1*01:02L HLA-DRB1*12:01L
KSLNVAKSEFDRD

SEQ ID NO: 16768 - protein, 14 aa, Severe acute respiratory syndrome coronavirus 2
  REGION 1..14: note = Table B: HLA-DRB1*04:04L HLA-DRB1*08:04L HLA-DRB1*08:77L HLA-DRB3*02:01L HLA-DRB1*03:01L HLA-DRB1*11:03L HLA-DRB1*11:04L HLA-DRB1*11:01L HLA-DPA1*01:03-B1*04:01L HLA-DRB1*04:10L HLA-DPA1*01:03-B1*04:02L HLA-DRB1*14:54L HLA-DRB1*07:01L
LRKLDNDALNNIIN

SEQ ID NO: 16769 - protein, 14 aa, Severe acute respiratory syndrome coronavirus 2
  REGION 1..14: note = Table B: HLA-DRB1*04:04L HLA-DRB1*03:01L HLA-DRB1*04:10L HLA-DPA1*01:03-B1*04:02L
RKLDNDALNNIINN

SEQ ID NO: 16770 - protein, 12 aa, Severe acute respiratory syndrome coronavirus 2
  REGION 1..12: note = Table B: HLA-DRB1*04:04L HLA-DRB1*04:05L HLA-DQA1*01:02-B1*06:02L HLA-DRB1*01:02L HLA-DQA1*05:01-B1*02:01L HLA-DRB1*04:10L HLA-DRB1*14:54L HLA-DRB1*16:01L HLA-DRB1*04:08L
DALNNIINNARD

SEQ ID NO: 16771 - protein, 12 aa, Severe acute respiratory syndrome coronavirus 2
  REGION 1..12: note = Table B: HLA-DRB1*04:04L HLA-DRB1*01:02L HLA-DRB1*14:01L HLA-DQA1*05:05-B1*03:19L HLA-DPA1*03:01-B1*105:01L HLA-DRB1*08:03L HLA-DRB1*15:03L
ALNNIINNARDG

SEQ ID NO: 16772 - protein, 12 aa, Severe acute respiratory syndrome coronavirus 2
  REGION 1..12: note = Table B: HLA-DRB1*04:04L HLA-DRB1*04:10L HLA-DRB1*04:08L
NIIPLTTAAKLM

SEQ ID NO: 16773 - protein, 16 aa, Severe acute respiratory syndrome coronavirus 2
  REGION 1..16: note = Table B: HLA-DRB1*04:04L HLA-DRB1*11:02L HLA-DRB1*11:03L HLA-DRB1*11:04L HLA-DRB1*11:01L HLA-DRB1*12:02L HLA-DRB3*01:01L HLA-DPA1*01:03-B1*02:01L HLA-DRB1*08:02L HLA-DRB1*08:03L
IIPLTTAAKLMVVIPD

SEQ ID NO: 16774 - protein, 13 aa, Severe acute respiratory syndrome coronavirus 2
  REGION 1..13: note = Table B: HLA-DRB1*04:04L HLA-DRB1*08:04L HLA-DRB1*12:02L HLA-DRB1*14:54L HLA-DRB1*04:08L
AKLMVVIPDYNTY

SEQ ID NO: 16775 - protein, 11 aa, Severe acute respiratory syndrome coronavirus 2
  REGION 1..11: note = Table B: HLA-DRB1*04:04L HLA-DRB1*01:02L HLA-DRB1*04:10L HLA-DRB1*04:08L
MVVIPDYNTYK

SEQ ID NO: 16776 - protein, 13 aa, Severe acute respiratory syndrome coronavirus 2
  REGION 1..13: note = Table B: HLA-DRB1*04:04L HLA-DRB1*01:01L HLA-DRB1*08:01L HLA-DRB4*02:01NL HLA-DPA1*02:01-B1*13:01L HLA-DQA1*05:05-B1*03:01L HLA-DRB1*15:01L
LSEISMDNSPNLA

SEQ ID NO: 16777 - protein, 13 aa, Severe acute respiratory syndrome coronavirus 2
  REGION 1..13: note = Table B: HLA-DRB1*04:04L HLA-DRB1*08:01L HLA-DPA1*02:01-B1*13:01L HLA-DPA1*01:03-B1*02:01L
LRANSAVKLQNNE

SEQ ID NO: 16778 - protein, 14 aa, Severe acute respiratory syndrome coronavirus 2
  REGION 1..14: note = Table B: HLA-DRB1*04:04L HLA-DRB1*04:05L HLA-DRB1*01:02L HLA-DPA1*01:03-B1*03:01L HLA-DRB1*12:01L HLA-DPA1*02:01-B1*13:01L HLA-DPA1*01:03-B1*104:01L HLA-DRB1*04:08L
VALRQMSCAAGTTQ

SEQ ID NO: 16779 - protein, 13 aa, Severe acute respiratory syndrome coronavirus 2
  REGION 1..13: note = Table B: HLA-DRB1*04:04L HLA-DRB1*14:01L HLA-DRB1*04:10L HLA-DRB1*14:54L HLA-DRB1*15:01L
NALAYYNTTKGGR

SEQ ID NO: 16780 - protein, 12 aa, Severe acute respiratory syndrome coronavirus 2
  REGION 1..12: note = Table B: HLA-DRB1*04:04L HLA-DRB1*08:04L HLA-DRB1*04:10L HLA-DRB1*12:02L HLA-DRB3*01:01L HLA-DRB1*14:54L
LAYYNTTKGGRF

SEQ ID NO: 16781 - protein, 12 aa, Severe acute respiratory syndrome coronavirus 2
  REGION 1..12: note = Table B: HLA-DRB1*04:04L
AYYNTTKGGRFV

SEQ ID NO: 16782 - protein, 14 aa, Severe acute respiratory syndrome coronavirus 2
  REGION 1..14: note = Table B: HLA-DRB1*04:04L HLA-DRB1*11:01L HLA-DRB1*07:01L
KGGRFVLALLSDLQ

SEQ ID NO: 16783 - protein, 12 aa, Severe acute respiratory syndrome coronavirus 2
  REGION 1..12: note = Table B: HLA-DRB1*04:04L HLA-DRB1*08:04L HLA-DRB1*08:77L HLA-DPA1*03:01-B1*04:02L HLA-DRB1*11:03L HLA-DRB1*11:04L HLA-DQA1*01-B1*05L HLA-DPA1*01:03-B1*04:01L HLA-DRB1*04:10L HLA-DRB1*09:01L HLA-DPA1*02:01-B1*13:01L HLA-DRB1*14:54L
  REGION 1..12: note = CONT. FROM ABOVE: HLA-DPA1*01:03-B1*104:01L HLA-DRB1*07:01L HLA- DRB1*10:01L
GMVLGSLAATVR

SEQ ID NO: 16784 - protein, 15 aa, Severe acute respiratory syndrome coronavirus 2
  REGION 1..15: note = Table B: HLA-DRB1*04:04L HLA-DRB1*04:10L HLA-DRB1*12:02L HLA-DPA1*01:03-B1*104:01L HLA-DRB1*07:01L HLA-DRB1*10:01L
ATVRLQAGNATEVPA

SEQ ID NO: 16785 - protein, 13 aa, Severe acute respiratory syndrome coronavirus 2
  REGION 1..13: note = Table B: HLA-DRB1*04:04L HLA-DRB1*04:05L HLA-DRB1*01:02L HLA-DRB1*04:10L HLA-DRB1*04:08L HLA-DRB1*15:01L
VDAAKAYKDYLAS

SEQ ID NO: 16786 - protein, 14 aa, Severe acute respiratory syndrome coronavirus 2
  REGION 1..14: note = Table B: HLA-DRB1*04:04L HLA-DRB1*11:04L HLA-DRB1*14:02L HLA-DRB1*08:01L HLA-DRB4*01:01L HLA-DPA1*02:01-B1*13:01L HLA-DPA1*01:03-B1*104:01L HLA-DPA1*01:02-B1*04:01L HLA-DRB1*10:01L
TGQAITVTPEANMD

SEQ ID NO: 16787 - protein, 13 aa, Severe acute respiratory syndrome coronavirus 2
  REGION 1..13: note = Table B: HLA-DRB1*04:04L HLA-DRB1*01:02L HLA-DRB1*08:04L HLA-DRB1*11:04L HLA-DQA1*01:01-B1*05:01L HLA-DRB1*08:01L HLA-DRB4*01:01L HLA-DRB1*09:01L HLA-DPA1*02:01-B1*13:01L HLA-DPA1*01:03-B1*104:01L HLA-DRB1*10:01L HLA-DRB1*04:08L
REPMLQSADAQSF

SEQ ID NO: 16788 - protein, 13 aa, Severe acute respiratory syndrome coronavirus 2
  REGION 1..13: note = Table B: HLA-DRB1*04:04L HLA-DRB1*01:02L HLA-DRB1*08:04L HLA-DRB1*11:03L HLA-DRB4*01:01L HLA-DRB1*09:01L HLA-DPA1*01:03-B1*04:02L HLA-DPA1*02:01-B1*13:01L HLA-DPA1*01:03-B1*104:01L HLA-DRB1*10:01L HLA-DRB1*04:08L
  REGION 1..13: note = CONT. FROM ABOVE: HLA-DRB1*08:03L
EPMLQSADAQSFL

SEQ ID NO: 16789 - protein, 13 aa, Severe acute respiratory syndrome coronavirus 2
  REGION 1..13: note = Table B: HLA-DRB1*04:04L HLA-DRB1*11:02L HLA-DRB1*13:01L
AFDIYNDKVAGFA

SEQ ID NO: 16790 - protein, 12 aa, Severe acute respiratory syndrome coronavirus 2
  REGION 1..12: note = Table B: HLA-DRB1*04:04L HLA-DRB1*13:01L HLA-DRB1*04:10L HLA-DRB1*12:02L HLA-DPA1*01:03-B1*02:01L
DIYNDKVAGFAK

SEQ ID NO: 16791 - protein, 14 aa, Severe acute respiratory syndrome coronavirus 2
  REGION 1..14: note = Table B: HLA-DRB1*04:04L HLA-DRB1*11:04L HLA-DRB1*11:01L HLA-DPA1*02:01-B1*13:01L HLA-DPA1*01:03-B1*02:01L
DDNLIDSYFVVKRH

SEQ ID NO: 16792 - protein, 14 aa, Severe acute respiratory syndrome coronavirus 2
  REGION 1..14: note = Table B: HLA-DRB1*04:04L HLA-DRB1*14:01L HLA-DRB1*08:01L HLA-DPA1*03:01-B1*105:01L
YNLLKDCPAVAKHD

SEQ ID NO: 16793 - protein, 14 aa, Severe acute respiratory syndrome coronavirus 2
  REGION 1..14: note = Table B: HLA-DRB1*04:04L HLA-DQA1*01-B1*05L HLA-DRB1*13:01L HLA-DRB1*07:01L HLA-DRB1*15:01L
DGDMVPHISRQRLT

SEQ ID NO: 16794 - protein, 16 aa, Severe acute respiratory syndrome coronavirus 2
  REGION 1..16: note = Table B: HLA-DRB1*04:04L HLA-DPA1*01:03-B1*104:01L
ISRQRLTKYTMADLVY

SEQ ID NO: 16795 - protein, 18 aa, Severe acute respiratory syndrome coronavirus 2
  REGION 1..18: note = Table B: HLA-DRB1*04:04L HLA-DRB1*03:01L HLA-DRB1*11:02L HLA-DRB1*11:03L HLA-DRB1*11:04L HLA-DRB1*13:01L HLA-DRB4*01:01L HLA-DQA1*05:05-B1*03:116L HLA-DRB1*09:01L HLA-DPA1*01:03-B1*02:01L HLA-DRB1*07:01L HLA-DRB1*10:01L
DDDYFNKKDWYDFVENPD

SEQ ID NO: 16796 - protein, 12 aa, Severe acute respiratory syndrome coronavirus 2
  REGION 1..12: note = Table B: HLA-DRB1*04:04L HLA-DRB1*03:01L HLA-DRB1*07:01L
RVYANLGERVRQ

SEQ ID NO: 16797 - protein, 14 aa, Severe acute respiratory syndrome coronavirus 2
  REGION 1..14: note = Table B: HLA-DRB1*04:04L HLA-DPA1*01:03-B1*03:01L HLA-DPA1*02:01-B1*13:01L
LGERVRQALLKTVQ

SEQ ID NO: 16798 - protein, 13 aa, Severe acute respiratory syndrome coronavirus 2
  REGION 1..13: note = Table B: HLA-DRB1*04:04L HLA-DRB1*01:02L HLA-DRB1*08:04L HLA-DRB1*14:01L HLA-DRB1*14:02L HLA-DRB1*08:01L HLA-DPA1*02:01-B1*13:01L HLA-DRB1*07:01L HLA-DQA1*01:03-B1*06:01L HLA-DRB1*08:03L HLA-DRB1*15:03L
DFGDFIQTTPGSG

SEQ ID NO: 16799 - protein, 13 aa, Severe acute respiratory syndrome coronavirus 2
  REGION 1..13: note = Table B: HLA-DRB1*04:04L HLA-DRB1*11:04L HLA-DRB1*14:02L HLA-DRB1*04:10L HLA-DRB1*12:02L HLA-DRB1*10:01L HLA-DRB1*04:08L
DFIQTTPGSGVPV

SEQ ID NO: 16800 - protein, 14 aa, Severe acute respiratory syndrome coronavirus 2
  REGION 1..14: note = Table B: HLA-DRB1*04:04L
TLTRALTAESHVDT

SEQ ID NO: 16801 - protein, 14 aa, Severe acute respiratory syndrome coronavirus 2
  REGION 1..14: note = Table B: HLA-DRB1*04:04L HLA-DRB1*08:03L
ESHVDTDLTKPYIK

SEQ ID NO: 16802 - protein, 14 aa, Severe acute respiratory syndrome coronavirus 2
  REGION 1..14: note = Table B: HLA-DRB1*04:04L HLA-DRB1*01:01L HLA-DRB5*01:01L HLA-DRB4*02:01NL HLA-DRB1*13:01L HLA-DRB1*04:10L HLA-DPA1*01:03-B1*02:01L HLA-DRB1*07:01L HLA-DRB1*08:02L HLA-DRB1*15:01L
VRKIFVDGVPFVVS

SEQ ID NO: 16803 - protein, 14 aa, Severe acute respiratory syndrome coronavirus 2
  REGION 1..14: note = Table B: HLA-DRB1*04:04L HLA-DRB1*01:01L HLA-DQA1*01:01-B1*05:01L HLA-DRB1*08:01L HLA-DPA1*01:03-B1*02:01L HLA-DRB1*07:01L HLA-DRB1*08:02L
KIFVDGVPFVVSTG

SEQ ID NO: 16804 - protein, 13 aa, Severe acute respiratory syndrome coronavirus 2
  REGION 1..13: note = Table B: HLA-DRB1*04:04L HLA-DRB1*15:01L
GVPFVVSTGYHFR

SEQ ID NO: 16805 - protein, 13 aa, Severe acute respiratory syndrome coronavirus 2
  REGION 1..13: note = Table B: HLA-DRB1*04:04L HLA-DRB1*15:01L
VPFVVSTGYHFRE

SEQ ID NO: 16806 - protein, 13 aa, Severe acute respiratory syndrome coronavirus 2
  REGION 1..13: note = Table B: HLA-DRB1*04:04L HLA-DRB1*08:04L HLA-DRB3*02:01L HLA-DPA1*03:01-B1*04:02L HLA-DRB1*14:01L HLA-DRB1*11:03L HLA-DRB1*11:04L HLA-DRB1*14:02L HLA-DPA1*01:03-B1*04:02L HLA-DPA1*01:02-B1*04:01L HLA-DRB1*07:01L HLA-DRB1*08:03L
FRELGVVHNQDVN

SEQ ID NO: 16807 - protein, 13 aa, Severe acute respiratory syndrome coronavirus 2
  REGION 1..13: note = Table B: HLA-DRB1*04:04L
ELGVVHNQDVNLH

SEQ ID NO: 16808 - protein, 12 aa, Severe acute respiratory syndrome coronavirus 2
  REGION 1..12: note = Table B: HLA-DRB1*04:04L HLA-DRB1*08:04L HLA-DRB1*08:77L HLA-DRB1*11:03L HLA-DRB1*11:04L HLA-DRB1*12:02L HLA-DRB1*10:01L HLA-DRB1*08:03L
GVVHNQDVNLHS

SEQ ID NO: 16809 - protein, 14 aa, Severe acute respiratory syndrome coronavirus 2
  REGION 1..14: note = Table B: HLA-DRB1*04:04L HLA-DRB1*04:05L HLA-DRB1*11:04L HLA-DRB1*08:01L HLA-DRB3*01:01L
NQDVNLHSSRLSFK

SEQ ID NO: 16810 - protein, 14 aa, Severe acute respiratory syndrome coronavirus 2
  REGION 1..14: note = Table B: HLA-DRB1*04:04L HLA-DRB1*11:04L HLA-DRB3*01:01L
QDVNLHSSRLSFKE

SEQ ID NO: 16811 - protein, 13 aa, Severe acute respiratory syndrome coronavirus 2
  REGION 1..13: note = Table B: HLA-DRB1*04:04L
FKELLVYAADPAM

SEQ ID NO: 16812 - protein, 12 aa, Severe acute respiratory syndrome coronavirus 2
  REGION 1..12: note = Table B: HLA-DRB1*04:04L HLA-DPA1*02:01-B1*13:01L
ELLVYAADPAMH

SEQ ID NO: 16813 - protein, 12 aa, Severe acute respiratory syndrome coronavirus 2
  REGION 1..12: note = Table B: HLA-DRB1*04:04L HLA-DRB5*01:01L HLA-DRB1*09:01L HLA-DPA1*02:01-B1*13:01L HLA-DRB1*08:03L
LLVYAADPAMHA

SEQ ID NO: 16814 - protein, 12 aa, Severe acute respiratory syndrome coronavirus 2
  REGION 1..12: note = Table B: HLA-DRB1*04:04L HLA-DRB1*01:01L HLA-DRB5*01:01L HLA-DRB1*13:01L HLA-DRB4*01:01L HLA-DRB1*07:01L
LVYAADPAMHAA

SEQ ID NO: 16815 - protein, 11 aa, Severe acute respiratory syndrome coronavirus 2
  REGION 1..11: note = Table B: HLA-DRB1*04:04L
YAADPAMHAAS

SEQ ID NO: 16816 - protein, 14 aa, Severe acute respiratory syndrome coronavirus 2
  REGION 1..14: note = Table B: HLA-DRB1*04:04L
DPAMHAASGNLLLD

SEQ ID NO: 16817 - protein, 12 aa, Severe acute respiratory syndrome coronavirus 2
  REGION 1..12: note = Table B: HLA-DRB1*04:04L HLA-DRB1*04:08L
FSVAALTNNVAF

SEQ ID NO: 16818 - protein, 12 aa, Severe acute respiratory syndrome coronavirus 2
  REGION 1..12: note = Table B: HLA-DRB1*04:04L HLA-DRB1*08:04L HLA-DRB3*02:01L HLA-DPA1*02:01-B1*13:01L HLA-DPA1*01:03-B1*104:01L
NNVAFQTVKPGN

SEQ ID NO: 16819 - protein, 13 aa, Severe acute respiratory syndrome coronavirus 2
  REGION 1..13: note = Table B: HLA-DRB1*04:04L HLA-DRB1*08:01L HLA-DRB1*08:03L
INANQVIVNNLDK

SEQ ID NO: 16820 - protein, 12 aa, Severe acute respiratory syndrome coronavirus 2
  REGION 1..12: note = Table B: HLA-DRB1*04:04L HLA-DRB1*01:02L HLA-DRB1*08:04L HLA-DRB1*08:77L HLA-DRB3*02:01L HLA-DPA1*01:03-B1*03:01L HLA-DRB1*11:03L HLA-DRB1*11:04L HLA-DRB1*14:02L HLA-DQA1*01:01-B1*05:01L HLA-DQA1*05:05-B1*03:19L
  REGION 1..12: note = CONT. FROM ABOVE: HLA-DRB1*12:02L HLA-DPA1*02:01-B1*13:01L HLA-D PA1*03:01-B1*105:01L HLA-DQA1*05:05-B1*03:01L HLA-DRB1*08:03L
ANQVIVNNLDKS

SEQ ID NO: 16821 - protein, 13 aa, Severe acute respiratory syndrome coronavirus 2
  REGION 1..13: note = Table B: HLA-DRB1*04:04L HLA-DRB1*01:01L HLA-DRB1*11:02L HLA-DQA1*01:01-B1*05:01L HLA-DRB1*11:01L HLA-DRB4*02:01NL HLA-DRB1*13:01L HLA-DRB4*01:01L HLA-DPA1*01:03-B1*04:02L HLA-DPA1*01:03-B1*104:01L HLA-DRB1*08:02L HLA-DRB1*15:01L
VNNLDKSAGFPFN

SEQ ID NO: 16822 - protein, 14 aa, Severe acute respiratory syndrome coronavirus 2
  REGION 1..14: note = Table B: HLA-DRB1*04:04L HLA-DRB1*04:05L HLA-DRB1*01:01L
SYEDQDALFAYTKR

SEQ ID NO: 16823 - protein, 14 aa, Severe acute respiratory syndrome coronavirus 2
  REGION 1..14: note = Table B: HLA-DRB1*04:04L HLA-DPA1*01:03-B1*104:01L HLA-DRB1*04:08L
TKRNVIPTITQMNL

SEQ ID NO: 16824 - protein, 12 aa, Severe acute respiratory syndrome coronavirus 2
  REGION 1..12: note = Table B: HLA-DRB1*04:04L HLA-DRB1*11:03L HLA-DPA1*02:01-B1*13:01L HLA-DPA1*01:02-B1*04:01L HLA-DRB1*07:01L HLA-DRB1*15:03L
LKYAISAKNRAR

SEQ ID NO: 16825 - protein, 15 aa, Severe acute respiratory syndrome coronavirus 2
  REGION 1..15: note = Table B: HLA-DRB1*04:04L HLA-DPA1*01:03-B1*04:02L HLA-DQA1*02:01-B1*03:03L
TNRQFHQKLLKSIAA

SEQ ID NO: 16826 - protein, 14 aa, Severe acute respiratory syndrome coronavirus 2
  REGION 1..14: note = Table B: HLA-DRB1*04:04L HLA-DRB1*01:01L HLA-DRB1*11:04L HLA-DRB1*11:01L HLA-DRB1*04:10L HLA-DRB3*01:01L HLA-DPA1*01:02-B1*04:01L HLA-DRB1*07:01L HLA-DRB1*15:03L
AATRGATVVIGTSK

SEQ ID NO: 16827 - protein, 14 aa, Severe acute respiratory syndrome coronavirus 2
  REGION 1..14: note = Table B: HLA-DRB1*04:04L HLA-DRB1*11:04L HLA-DRB1*11:01L HLA-DRB3*01:01L
TVVIGTSKFYGGWH

SEQ ID NO: 16828 - protein, 13 aa, Severe acute respiratory syndrome coronavirus 2
  REGION 1..13: note = Table B: HLA-DRB1*04:04L HLA-DRB1*07:01L
LARKHTTCCSLSH

SEQ ID NO: 16829 - protein, 13 aa, Severe acute respiratory syndrome coronavirus 2
  REGION 1..13: note = Table B: HLA-DRB1*04:04L HLA-DQA1*01:02-B1*06:02L HLA-DRB1*08:01L HLA-DRB1*07:01L HLA-DRB1*04:08L HLA-DQA1*02:01-B1*03:03L
ARKHTTCCSLSHR

SEQ ID NO: 16830 - protein, 13 aa, Severe acute respiratory syndrome coronavirus 2
  REGION 1..13: note = Table B: HLA-DRB1*04:04L HLA-DRB1*04:05L HLA-DRB1*01:02L HLA-DRB1*12:01L HLA-DPA1*02:01-B1*13:01L
LSHRFYRLANECA

SEQ ID NO: 16831 - protein, 13 aa, Severe acute respiratory syndrome coronavirus 2
  REGION 1..13: note = Table B: HLA-DRB1*04:04L HLA-DRB1*03:01L HLA-DRB1*11:01L HLA-DRB1*15:01L
NALLSTDGNKIAD

SEQ ID NO: 16832 - protein, 12 aa, Severe acute respiratory syndrome coronavirus 2
  REGION 1..12: note = Table B: HLA-DRB1*04:04L HLA-DQA1*01:02-B1*06:02L HLA-DRB1*08:04L HLA-DPA1*01:03-B1*03:01L HLA-DPA1*03:01-B1*04:02L HLA-DRB1*11:03L HLA-DRB1*14:02L HLA-DRB1*11:01L HLA-DQA1*05:05-B1*03:19L HLA-DRB1*04:10L
  REGION 1..12: note = CONT. FROM ABOVE: HLA-DRB1*12:02L HLA-DRB3*01:01L HLA-DPA1*03:01 -B1*105:01L HLA-DRB1*10:01L HLA-DRB1*04:08L
LLSTDGNKIADK

SEQ ID NO: 16833 - protein, 13 aa, Severe acute respiratory syndrome coronavirus 2
  REGION 1..13: note = Table B: HLA-DRB1*04:04L HLA-DRB1*01:02L HLA-DRB1*08:01L HLA-DPA1*02:01-B1*13:01L HLA-DPA1*01:02-B1*04:01L HLA-DRB1*07:01L HLA-DRB1*04:08L
LQHRLYECLYRNR

SEQ ID NO: 16834 - protein, 12 aa, Severe acute respiratory syndrome coronavirus 2
  REGION 1..12: note = Table B: HLA-DRB1*04:04L HLA-DRB1*04:05L HLA-DRB1*08:04L HLA-DRB3*02:01L HLA-DRB1*12:02L HLA-DRB1*14:54L HLA-DRB1*04:08L
VASIKNFKSVLY

SEQ ID NO: 16835 - protein, 13 aa, Severe acute respiratory syndrome coronavirus 2
  REGION 1..13: note = Table B: HLA-DRB1*04:04L HLA-DRB1*04:05L HLA-DRB3*02:01L HLA-DRB1*08:01L HLA-DRB3*01:01L
ASIKNFKSVLYYQ

SEQ ID NO: 16836 - protein, 15 aa, Severe acute respiratory syndrome coronavirus 2
  REGION 1..15: note = Table B: HLA-DRB1*04:04L HLA-DRB1*16:01L HLA-DRB1*15:03L
PHEFCSQHTMLVKQG

SEQ ID NO: 16837 - protein, 11 aa, Severe acute respiratory syndrome coronavirus 2
  REGION 1..11: note = Table B: HLA-DRB1*04:04L HLA-DQA1*01:02-B1*06:02L HLA-DRB1*01:02L HLA-DRB3*02:01L HLA-DRB1*14:01L HLA-DRB1*04:10L HLA-DPA1*01:03-B1*04:02L HLA-DRB1*12:02L HLA-DRB1*14:54L HLA-DRB1*15:03L
YVYLPYPDPSR

SEQ ID NO: 16838 - protein, 13 aa, Severe acute respiratory syndrome coronavirus 2
  REGION 1..13: note = Table B: HLA-DRB1*04:04L
TDGTLMIERFVSL

SEQ ID NO: 16839 - protein, 13 aa, Severe acute respiratory syndrome coronavirus 2
  REGION 1..13: note = Table B: HLA-DRB1*04:04L
DGTLMIERFVSLA

SEQ ID NO: 16840 - protein, 14 aa, Severe acute respiratory syndrome coronavirus 2
  REGION 1..14: note = Table B: HLA-DRB1*04:04L
SLAIDAYPLTKHPN

SEQ ID NO: 16841 - protein, 15 aa, Severe acute respiratory syndrome coronavirus 2
  REGION 1..15: note = Table B: HLA-DRB1*04:04L HLA-DRB1*11:03L
DAYPLTKHPNQEYAD

SEQ ID NO: 16842 - protein, 13 aa, Severe acute respiratory syndrome coronavirus 2
  REGION 1..13: note = Table B: HLA-DRB1*04:04L HLA-DRB4*03:01NL HLA-DRB1*14:54L HLA-DRB1*10:01L HLA-DRB1*16:01L HLA-DRB1*04:08L
DMYSVMLTNDNTS

SEQ ID NO: 16843 - protein, 15 aa, Severe acute respiratory syndrome coronavirus 2
  REGION 1..15: note = Table B: HLA-DRB1*04:04L
RYWEPEFYEAMYTPH

SEQ ID NO: 16844 - protein, 12 aa, Severe acute respiratory syndrome coronavirus 2
  REGION 1..12: note = Table B: HLA-DRB1*04:04L HLA-DRB1*08:04L HLA-DPA1*01:03-B1*03:01L HLA-DPA1*03:01-B1*04:02L HLA-DRB1*08:01L HLA-DQA1*05:01-B1*02:01L HLA-DPA1*01:03-B1*04:02L HLA-DQA1*05:05-B1*03:01L
MYTPHTVLQAVG

SEQ ID NO: 16845 - protein, 14 aa, Severe acute respiratory syndrome coronavirus 2
  REGION 1..14: note = Table B: HLA-DRB1*04:04L HLA-DPA1*03:01-B1*105:01L HLA-DQA1*05:05-B1*03:01L
SHKLVLSVNPYVCN

SEQ ID NO: 16846 - protein, 14 aa, Severe acute respiratory syndrome coronavirus 2
  REGION 1..14: note = Table B: HLA-DRB1*04:04L HLA-DPA1*03:01-B1*105:01L
LGGMSYYCKSHKPP

SEQ ID NO: 16847 - protein, 13 aa, Severe acute respiratory syndrome coronavirus 2
  REGION 1..13: note = Table B: HLA-DRB1*04:04L HLA-DRB1*08:77L HLA-DRB3*02:01L HLA-DRB1*03:01L HLA-DRB1*11:03L HLA-DRB1*11:04L HLA-DRB1*14:02L HLA-DRB1*11:01L HLA-DPA1*01:03-B1*04:02L HLA-DRB3*01:01L HLA-DPA1*02:01-B1*13:01L HLA-DRB1*14:54L HLA-DRB1*08:03L
DYILANTCTERLK

SEQ ID NO: 16848 - protein, 13 aa, Severe acute respiratory syndrome coronavirus 2
  REGION 1..13: note = Table B: HLA-DRB1*04:04L HLA-DRB1*04:05L HLA-DPA1*01:03-B1*02:01L
NRNYVFTGYRVTK

SEQ ID NO: 16849 - protein, 13 aa, Severe acute respiratory syndrome coronavirus 2
  REGION 1..13: note = Table B: HLA-DRB1*04:04L HLA-DRB1*04:05L HLA-DPA1*02:01-B1*13:01L
RNYVFTGYRVTKN

SEQ ID NO: 16850 - protein, 14 aa, Severe acute respiratory syndrome coronavirus 2
  REGION 1..14: note = Table B: HLA-DRB1*04:04L
NYVFTGYRVTKNSK

SEQ ID NO: 16851 - protein, 14 aa, Severe acute respiratory syndrome coronavirus 2
  REGION 1..14: note = Table B: HLA-DRB1*04:04L HLA-DRB1*08:04L HLA-DRB1*11:04L HLA-DRB1*11:01L HLA-DRB3*01:01L
RVTKNSKVQIGEYT

SEQ ID NO: 16852 - protein, 14 aa, Severe acute respiratory syndrome coronavirus 2
  REGION 1..14: note = Table B: HLA-DRB1*04:04L HLA-DRB1*04:05L HLA-DRB1*08:04L HLA-DRB1*15:03L
KGDYGDAVVYRGTT

SEQ ID NO: 16853 - protein, 14 aa, Severe acute respiratory syndrome coronavirus 2
  REGION 1..14: note = Table B: HLA-DRB1*04:04L HLA-DRB1*08:04L HLA-DRB1*11:01L HLA-DPA1*01:03-B1*104:01L HLA-DRB1*15:03L
GDYGDAVVYRGTTT

SEQ ID NO: 16854 - protein, 15 aa, Severe acute respiratory syndrome coronavirus 2
  REGION 1..15: note = Table B: HLA-DRB1*04:04L HLA-DRB1*01:01L HLA-DRB1*13:01L HLA-DPA1*01:03-B1*02:01L HLA-DRB1*07:01L HLA-DRB1*08:03L
APTLVPQEHYVRITG

SEQ ID NO: 16855 - protein, 13 aa, Severe acute respiratory syndrome coronavirus 2
  REGION 1..13: note = Table B: HLA-DRB1*04:04L HLA-DRB1*01:02L HLA-DQA1*01:01-B1*05:01L HLA-DRB1*08:01L HLA-DRB1*11:01L HLA-DRB5*01:01L HLA-DRB3*01:01L HLA-DPA1*02:01-B1*13:01L HLA-DRB1*07:01L HLA-DQA1*01:03-B1*06:01L HLA-DRB1*08:03L
ISDEFSSNVANYQ

SEQ ID NO: 16856 - protein, 13 aa, Severe acute respiratory syndrome coronavirus 2
  REGION 1..13: note = Table B: HLA-DRB1*04:04L HLA-DRB1*08:04L HLA-DRB1*11:03L HLA-DRB1*11:04L HLA-DRB3*01:01L
SNVANYQKVGMQK

SEQ ID NO: 16857 - protein, 14 aa, Severe acute respiratory syndrome coronavirus 2
  REGION 1..14: note = Table B: HLA-DRB1*04:04L
VANYQKVGMQKYST

SEQ ID NO: 16858 - protein, 15 aa, Severe acute respiratory syndrome coronavirus 2
  REGION 1..15: note = Table B: HLA-DRB1*04:04L HLA-DRB1*08:04L HLA-DQA1*03:01-B1*03:02L
GKSHFAIGLALYYPS

SEQ ID NO: 16859 - protein, 14 aa, Severe acute respiratory syndrome coronavirus 2
  REGION 1..14: note = Table B: HLA-DRB1*04:04L
IGLALYYPSARIVY

SEQ ID NO: 16860 - protein, 14 aa, Severe acute respiratory syndrome coronavirus 2
  REGION 1..14: note = Table B: HLA-DRB1*04:04L HLA-DRB1*15:01L
GLALYYPSARIVYT

SEQ ID NO: 16861 - protein, 13 aa, Severe acute respiratory syndrome coronavirus 2
  REGION 1..13: note = Table B: HLA-DRB1*04:04L HLA-DQA1*01:02-B1*06:02L HLA-DRB1*01:02L HLA-DPA1*01:03-B1*03:01L HLA-DRB1*12:01L HLA-DPA1*02:01-B1*13:01L HLA-DQA1*03:01-B1*03:02L HLA-DQA1*02:01-B1*03:03L
YPSARIVYTACSH

SEQ ID NO: 16862 - protein, 14 aa, Severe acute respiratory syndrome coronavirus 2
  REGION 1..14: note = Table B: HLA-DRB1*04:04L HLA-DPA1*01:03-B1*03:01L
PSARIVYTACSHAA

SEQ ID NO: 16863 - protein, 13 aa, Severe acute respiratory syndrome coronavirus 2
  REGION 1..13: note = Table B: HLA-DRB1*04:04L HLA-DPA1*01:03-B1*02:01L
DKFKVNSTLEQYV

SEQ ID NO: 16864 - protein, 15 aa, Severe acute respiratory syndrome coronavirus 2
  REGION 1..15: note = Table B: HLA-DRB1*04:04L
ISMATNYDLSVVNAR

SEQ ID NO: 16865 - protein, 14 aa, Severe acute respiratory syndrome coronavirus 2
  REGION 1..14: note = Table B: HLA-DRB1*04:04L HLA-DRB3*01:01L HLA-DRB1*07:01L
ATNYDLSVVNARLR

SEQ ID NO: 16866 - protein, 12 aa, Severe acute respiratory syndrome coronavirus 2
  REGION 1..12: note = Table B: HLA-DRB1*04:04L HLA-DQA1*01:02-B1*06:02L HLA-DRB1*01:02L HLA-DRB1*08:04L HLA-DPA1*02:01-B1*13:01L HLA-DPA1*03:01-B1*105:01L HLA-DRB1*15:03L
HYVYIGDPAQLP

SEQ ID NO: 16867 - protein, 13 aa, Severe acute respiratory syndrome coronavirus 2
  REGION 1..13: note = Table B: HLA-DRB1*04:04L HLA-DRB1*08:04L HLA-DRB1*11:01L HLA-DPA1*01:03-B1*104:01L HLA-DRB1*07:01L HLA-DRB1*08:03L
IGDPAQLPAPRTL

SEQ ID NO: 16868 - protein, 17 aa, Severe acute respiratory syndrome coronavirus 2
  REGION 1..17: note = Table B: HLA-DRB1*04:04L HLA-DRB1*04:10L HLA-DRB1*07:01L
LPAPRTLLTKGTLEPEY

SEQ ID NO: 16869 - protein, 13 aa, Severe acute respiratory syndrome coronavirus 2
  REGION 1..13: note = Table B: HLA-DRB1*04:04L HLA-DRB1*08:04L HLA-DRB1*11:04L HLA-DRB3*01:01L
GTLEPEYFNSVCR

SEQ ID NO: 16870 - protein, 13 aa, Severe acute respiratory syndrome coronavirus 2
  REGION 1..13: note = Table B: HLA-DRB1*04:04L HLA-DRB1*08:04L HLA-DRB3*02:01L HLA-DRB1*11:04L HLA-DQA1*01:01-B1*05:01L HLA-DRB1*11:01L HLA-DRB1*04:10L HLA-DRB3*01:01L HLA-DRB1*14:17L HLA-DRB1*07:01L HLA-DRB1*10:01L HLA-DRB1*08:03L
KMFYKGVITHDVS

SEQ ID NO: 16871 - protein, 15 aa, Severe acute respiratory syndrome coronavirus 2
  REGION 1..15: note = Table B: HLA-DRB1*04:04L HLA-DRB1*11:04L HLA-DRB1*11:01L HLA-DRB3*01:01L
IGVVREFLTRNPAWR

SEQ ID NO: 16872 - protein, 13 aa, Severe acute respiratory syndrome coronavirus 2
  REGION 1..13: note = Table B: HLA-DRB1*04:04L HLA-DRB4*03:01NL HLA-DPA1*01:03-B1*03:01L HLA-DRB1*14:01L
KAVFISPYNSQNA

SEQ ID NO: 16873 - protein, 13 aa, Severe acute respiratory syndrome coronavirus 2
  REGION 1..13: note = Table B: HLA-DRB1*04:04L HLA-DPA1*01:03-B1*03:01L HLA-DRB1*14:01L HLA-DRB3*01:01L HLA-DPA1*02:01-B1*13:01L HLA-DQA1*01:03-B1*06:01L
NVNRFNVAITRAK

SEQ ID NO: 16874 - protein, 12 aa, Severe acute respiratory syndrome coronavirus 2
  REGION 1..12: note = Table B: HLA-DRB1*04:04L HLA-DPA1*01:03-B1*03:01L HLA-DRB1*11:04L HLA-DRB1*11:01L HLA-DRB3*01:01L HLA-DPA1*02:01-B1*13:01L HLA-DRB1*07:01L
RFNVAITRAKVG

SEQ ID NO: 16875 - protein, 17 aa, Severe acute respiratory syndrome coronavirus 2
  REGION 1..17: note = Table B: HLA-DRB1*04:04L HLA-DRB1*11:02L HLA-DQA1*05:05-B1*03:01L HLA-DRB1*07:01L HLA-DRB1*10:01L HLA-DRB1*08:02L HLA-DRB1*08:03L
DRDLYDKLQFTSLEIPR

SEQ ID NO: 16876 - protein, 13 aa, Severe acute respiratory syndrome coronavirus 2
  REGION 1..13: note = Table B: HLA-DRB1*04:04L HLA-DRB1*04:08L
YQVNGYPNMFITR

SEQ ID NO: 16877 - protein, 12 aa, Severe acute respiratory syndrome coronavirus 2
  REGION 1..12: note = Table B: HLA-DRB1*04:04L HLA-DRB4*03:01NL HLA-DRB3*02:01L HLA-DRB1*11:03L HLA-DRB1*11:04L HLA-DRB1*11:01L HLA-DRB3*01:01L HLA-DRB1*10:01L
YVYNPFMIDVQQ

SEQ ID NO: 16878 - protein, 12 aa, Severe acute respiratory syndrome coronavirus 2
  REGION 1..12: note = Table B: HLA-DRB1*04:04L HLA-DRB1*04:05L HLA-DPA1*01:03-B1*03:01L HLA-DPA1*03:01-B1*04:02L HLA-DRB1*08:01L HLA-DRB1*04:10L HLA-DPA1*01:03-B1*02:01L HLA-DRB1*04:08L HLA-DRB1*15:03L
WGFTGNLQSNHD

SEQ ID NO: 16879 - protein, 15 aa, Severe acute respiratory syndrome coronavirus 2
  REGION 1..15: note = Table B: HLA-DRB1*04:04L HLA-DRB1*04:05L HLA-DRB1*01:01L HLA-DRB1*11:03L HLA-DRB1*11:04L HLA-DRB1*08:01L HLA-DRB1*11:01L HLA-DPA1*01:03-B1*02:01L HLA-DQA1*05:05-B1*03:01L
TGNLQSNHDLYCQVH

SEQ ID NO: 16880 - protein, 13 aa, Severe acute respiratory syndrome coronavirus 2
  REGION 1..13: note = Table B: HLA-DRB1*04:04L HLA-DRB1*04:05L HLA-DRB1*14:01L HLA-DRB1*08:01L HLA-DRB1*16:01L HLA-DRB1*15:03L
NAHVASCDAIMTR

SEQ ID NO: 16881 - protein, 15 aa, Severe acute respiratory syndrome coronavirus 2
  REGION 1..15: note = Table B: HLA-DRB1*04:04L HLA-DRB1*08:04L HLA-DRB3*02:01L
VDWTIEYPIIGDELK

SEQ ID NO: 16882 - protein, 14 aa, Severe acute respiratory syndrome coronavirus 2
  REGION 1..14: note = Table B: HLA-DRB1*04:04L HLA-DRB1*11:02L HLA-DRB1*13:01L HLA-DPA1*02:01-B1*13:01L HLA-DQA1*03:01-B1*03:02L HLA-DRB1*07:01L
DELKINAACRKVQH

SEQ ID NO: 16883 - protein, 13 aa, Severe acute respiratory syndrome coronavirus 2
  REGION 1..13: note = Table B: HLA-DRB1*04:04L HLA-DRB1*04:05L
KAALLADKFPVLH

SEQ ID NO: 16884 - protein, 15 aa, Severe acute respiratory syndrome coronavirus 2
  REGION 1..15: note = Table B: HLA-DRB1*04:04L HLA-DRB1*11:04L HLA-DRB3*01:01L HLA-DQA1*03:01-B1*03:02L
DKAYKIEELFYSYAT

SEQ ID NO: 16885 - protein, 15 aa, Severe acute respiratory syndrome coronavirus 2
  REGION 1..15: note = Table B: HLA-DRB1*04:04L HLA-DRB1*11:04L HLA-DRB1*11:01L HLA-DRB3*01:01L
KAYKIEELFYSYATH

SEQ ID NO: 16886 - protein, 13 aa, Severe acute respiratory syndrome coronavirus 2
  REGION 1..13: note = Table B: HLA-DRB1*04:04L
PAFDKSAFVNLKQ

SEQ ID NO: 16887 - protein, 13 aa, Severe acute respiratory syndrome coronavirus 2
  REGION 1..13: note = Table B: HLA-DRB1*04:04L HLA-DRB1*08:04L HLA-DRB3*01:01L HLA-DPA1*02:01-B1*13:01L
KQVVSDIDYVPLK

SEQ ID NO: 16888 - protein, 13 aa, Severe acute respiratory syndrome coronavirus 2
  REGION 1..13: note = Table B: HLA-DRB1*04:04L HLA-DRB3*01:01L HLA-DRB1*10:01L HLA-DRB1*08:03L
FSLWVYKQFDTYN

SEQ ID NO: 16889 - protein, 14 aa, Severe acute respiratory syndrome coronavirus 2
  REGION 1..14: note = Table B: HLA-DRB1*04:04L HLA-DRB1*08:04L HLA-DRB1*11:02L HLA-DRB3*01:01L HLA-DRB1*07:01L HLA-DRB1*10:01L
WVYKQFDTYNLWNT

SEQ ID NO: 16890 - protein, 13 aa, Severe acute respiratory syndrome coronavirus 2
  REGION 1..13: note = Table B: HLA-DRB1*04:04L HLA-DRB1*04:05L HLA-DRB1*08:04L HLA-DRB3*02:01L HLA-DPA1*01:03-B1*03:01L HLA-DRB1*11:02L HLA-DRB1*11:03L HLA-DRB1*11:01L HLA-DRB1*09:01L HLA-DRB3*01:01L HLA-DRB1*07:01L HLA-DRB1*08:03L HLA-DRB1*15:01L
DTYNLWNTFTRLQ

SEQ ID NO: 16891 - protein, 13 aa, Severe acute respiratory syndrome coronavirus 2
  REGION 1..13: note = Table B: HLA-DRB1*04:04L HLA-DRB1*04:05L HLA-DRB3*01:01L
QSLENVAFNVVNK

SEQ ID NO: 16892 - protein, 12 aa, Severe acute respiratory syndrome coronavirus 2
  REGION 1..12: note = Table B: HLA-DRB1*04:04L HLA-DRB1*04:05L HLA-DRB1*01:02L HLA-DRB1*08:04L HLA-DRB1*08:77L HLA-DRB3*02:01L HLA-DPA1*01:03-B1*03:01L HLA-DRB1*14:01L HLA-DRB1*11:03L HLA-DRB1*11:01L HLA-DQA1*05:05-B1*03:19L HLA-DRB1*04:10L
  REGION 1..12: note = CONT. FROM ABOVE: HLA-DRB3*01:01L HLA-DPA1*02:01-B1*13:01L HLA-D RB1*14:54L HLA-DPA1*01:03-B1*02:01L HLA-DPA1*01:03-B1*104:01L HL A-DRB1*15:03L
LENVAFNVVNKG

SEQ ID NO: 16893 - protein, 12 aa, Severe acute respiratory syndrome coronavirus 2
  REGION 1..12: note = Table B: HLA-DRB1*04:04L HLA-DRB1*08:04L HLA-DRB3*02:01L HLA-DRB1*11:03L HLA-DRB1*11:04L HLA-DRB1*04:10L HLA-DRB1*09:01L HLA-DRB1*12:02L HLA-DRB1*14:54L HLA-DRB1*07:01L HLA-DRB1*04:08L
VPVSIINNTVYT

SEQ ID NO: 16894 - protein, 15 aa, Severe acute respiratory syndrome coronavirus 2
  REGION 1..15: note = Table B: HLA-DRB1*04:04L
GVDVELFENKTTLPV

SEQ ID NO: 16895 - protein, 11 aa, Severe acute respiratory syndrome coronavirus 2
  REGION 1..11: note = Table B: HLA-DRB1*04:04L HLA-DPA1*01:03-B1*02:01L HLA-DRB1*08:02L
LFENKTTLPVN

SEQ ID NO: 16896 - protein, 12 aa, Severe acute respiratory syndrome coronavirus 2
  REGION 1..12: note = Table B: HLA-DRB1*04:04L HLA-DQA1*05:05-B1*03:116L HLA-DRB1*09:01L HLA-DPA1*01:03-B1*02:01L HLA-DPA1*01:03-B1*104:01L HLA-DRB1*07:01L
FENKTTLPVNVA

SEQ ID NO: 16897 - protein, 14 aa, Severe acute respiratory syndrome coronavirus 2
  REGION 1..14: note = Table B: HLA-DRB1*04:04L HLA-DRB1*01:01L HLA-DPA1*03:01-B1*04:02L HLA-DRB1*11:03L HLA-DRB3*01:01L HLA-DRB1*15:01L
RNIKPVPEVKILNN

SEQ ID NO: 16898 - protein, 13 aa, Severe acute respiratory syndrome coronavirus 2
  REGION 1..13: note = Table B: HLA-DRB1*04:04L HLA-DRB1*11:03L HLA-DRB1*11:04L HLA-DRB1*11:01L HLA-DRB1*09:01L HLA-DPA1*01:03-B1*02:01L HLA-DRB1*07:01L HLA-DRB1*10:01L HLA-DRB1*08:03L
VDIAANTVIWDYK

SEQ ID NO: 16899 - protein, 13 aa, Severe acute respiratory syndrome coronavirus 2
  REGION 1..13: note = Table B: HLA-DRB1*04:04L HLA-DRB1*08:77L HLA-DRB1*11:03L HLA-DRB1*14:02L HLA-DRB1*11:01L HLA-DQA1*05:01-B1*02:01L HLA-DPA1*02:01-B1*13:01L
NTVIWDYKRDAPA

SEQ ID NO: 16900 - protein, 15 aa, Severe acute respiratory syndrome coronavirus 2
  REGION 1..15: note = Table B: HLA-DRB1*04:04L HLA-DRB1*08:04L HLA-DRB1*04:08L
APAHISTIGVCSMTD

SEQ ID NO: 16901 - protein, 13 aa, Severe acute respiratory syndrome coronavirus 2
  REGION 1..13: note = Table B: HLA-DRB1*04:04L
VLITEGSVKGLQP

SEQ ID NO: 16902 - protein, 14 aa, Severe acute respiratory syndrome coronavirus 2
  REGION 1..14: note = Table B: HLA-DRB1*04:04L HLA-DRB1*11:04L HLA-DRB1*04:10L HLA-DRB1*04:08L
VKGLQPSVGPKQAS

SEQ ID NO: 16903 - protein, 17 aa, Severe acute respiratory syndrome coronavirus 2
  REGION 1..17: note = Table B: HLA-DRB1*04:04L
IGEAVKTQFNYYKKVDG

SEQ ID NO: 16904 - protein, 14 aa, Severe acute respiratory syndrome coronavirus 2
  REGION 1..14: note = Table B: HLA-DRB1*04:04L HLA-DRB1*08:04L HLA-DRB1*04:08L
DGVVQQLPETYFTQ

SEQ ID NO: 16905 - protein, 13 aa, Severe acute respiratory syndrome coronavirus 2
  REGION 1..13: note = Table B: HLA-DRB1*04:04L HLA-DRB1*11:04L HLA-DRB1*14:02L HLA-DQA1*01:01-B1*05:01L HLA-DRB1*11:01L HLA-DQA1*05:05-B1*03:116L HLA-DRB1*04:10L HLA-DRB3*01:01L HLA-DPA1*01:03-B1*02:01L HLA-DPA1*01:03-B1*104:01L
  REGION 1..13: note = CONT. FROM ABOVE: HLA-DRB1*10:01L HLA-DRB1*08:02L HLA-DRB1*08:03 L
LPETYFTQSRNLQ

SEQ ID NO: 16906 - protein, 14 aa, Severe acute respiratory syndrome coronavirus 2
  REGION 1..14: note = Table B: HLA-DRB1*04:04L HLA-DRB1*12:01L HLA-DQA1*01:03-B1*06:01L HLA-DRB1*15:03L
TQSRNLQEFKPRSQ

SEQ ID NO: 16907 - protein, 13 aa, Severe acute respiratory syndrome coronavirus 2
  REGION 1..13: note = Table B: HLA-DRB1*04:04L
HIVYGDFSHSQLG

SEQ ID NO: 16908 - protein, 14 aa, Severe acute respiratory syndrome coronavirus 2
  REGION 1..14: note = Table B: HLA-DRB1*04:04L HLA-DQA1*01:02-B1*06:02L HLA-DPA1*01:03-B1*03:01L
LAKRFKESPFELED

SEQ ID NO: 16909 - protein, 12 aa, Severe acute respiratory syndrome coronavirus 2
  REGION 1..12: note = Table B: HLA-DRB1*04:04L HLA-DRB1*08:04L HLA-DRB1*08:77L HLA-DRB3*02:01L HLA-DPA1*03:01-B1*04:02L HLA-DRB1*11:03L HLA-DRB1*11:04L HLA-DRB1*14:02L HLA-DQA1*01:01-B1*05:01L HLA-DRB1*08:01L HLA-DRB1*09:01L HLA-DRB1*12:02L
  REGION 1..12: note = CONT. FROM ABOVE: HLA-DPA1*02:01-B1*13:01L HLA-DRB1*07:01L HLA-D RB1*08:03L
EDFIPMDSTVKN

SEQ ID NO: 16910 - protein, 13 aa, Severe acute respiratory syndrome coronavirus 2
  REGION 1..13: note = Table B: HLA-DRB1*04:04L HLA-DQA1*01:02-B1*06:02L HLA-DRB1*01:01L HLA-DPA1*03:01-B1*04:02L HLA-DRB1*03:01L HLA-DRB1*08:01L HLA-DRB1*11:01L HLA-DRB5*01:01L HLA-DRB1*13:01L HLA-DRB4*01:01L HLA-DRB1*09:01L HLA-DPA1*02:01-B1*13:01L
  REGION 1..13: note = CONT. FROM ABOVE: HLA-DPA1*01:02-B1*04:01L HLA-DRB1*07:01L HLA-D RB1*08:03L
KNYFITDAQTGSS

SEQ ID NO: 16911 - protein, 13 aa, Severe acute respiratory syndrome coronavirus 2
  REGION 1..13: note = Table B: HLA-DRB1*04:04L HLA-DRB1*11:02L
LDDFVEIIKSQDL

SEQ ID NO: 16912 - protein, 15 aa, Severe acute respiratory syndrome coronavirus 2
  REGION 1..15: note = Table B: HLA-DRB1*04:04L HLA-DRB3*02:01L HLA-DPA1*01:03-B1*03:01L HLA-DRB1*11:03L HLA-DRB1*11:04L HLA-DQA1*01:01-B1*05:01L HLA-DRB1*11:01L HLA-DQA1*05:05-B1*03:19L HLA-DRB1*04:10L
  REGION 1..15: note = CONT. FROM ABOVE: HLA-DPA1*01:03-B1*04:02L HLA-DRB3*01:01L HLA-D PA1*01:03-B1*02:01L HLA-DPA1*01:03-B1*104:01L HLA-DQA1*05:05-B1* 03:01L HLA-DRB1*07:01L
DGHVETFYPKLQSSQ

SEQ ID NO: 16913 - protein, 12 aa, Severe acute respiratory syndrome coronavirus 2
  REGION 1..12: note = Table B: HLA-DRB1*04:04L HLA-DPA1*02:01-B1*13:01L HLA-DRB1*07:01L
QNYGDSATLPKG

SEQ ID NO: 16914 - protein, 13 aa, Severe acute respiratory syndrome coronavirus 2
  REGION 1..13: note = Table B: HLA-DRB1*04:04L HLA-DRB1*01:02L HLA-DRB1*04:10L HLA-DRB1*12:01L HLA-DPA1*02:01-B1*13:01L HLA-DPA1*01:02-B1*04:01L HLA-DRB1*15:03L
NMRVIHFGAGSDK

SEQ ID NO: 16915 - protein, 14 aa, Severe acute respiratory syndrome coronavirus 2
  REGION 1..14: note = Table B: HLA-DRB1*04:04L HLA-DRB1*01:01L HLA-DRB1*11:01L HLA-DRB1*04:10L HLA-DRB3*01:01L HLA-DRB1*10:01L
LRQWLPTGTLLVDS

SEQ ID NO: 16916 - protein, 11 aa, Severe acute respiratory syndrome coronavirus 2
  REGION 1..11: note = Table B: HLA-DRB1*04:04L HLA-DRB1*03:01L HLA-DRB1*11:04L HLA-DRB1*14:02L HLA-DQA1*01:01-B1*05:01L HLA-DRB1*11:01L HLA-DPA1*01:03-B1*04:01L HLA-DRB1*09:01L HLA-DPA1*01:03-B1*04:02L HLA-DRB3*01:01L HLA-DRB1*07:01L
  REGION 1..11: note = CONT. FROM ABOVE: HLA-DRB1*10:01L HLA-DRB1*08:03L
YIFWRNTNPIQ

SEQ ID NO: 16917 - protein, 13 aa, Severe acute respiratory syndrome coronavirus 2
  REGION 1..13: note = Table B: HLA-DRB1*04:04L HLA-DRB1*01:01L HLA-DRB5*02:02L HLA-DRB3*01:01L HLA-DPA1*01:03-B1*104:01L
IFWRNTNPIQLSS

SEQ ID NO: 16918 - protein, 13 aa, Severe acute respiratory syndrome coronavirus 2
  REGION 1..13: note = Table B: HLA-DRB1*04:04L HLA-DRB1*11:03L HLA-DPA1*01:03-B1*02:01L HLA-DRB1*08:03L
SYSLFDMSKFPLK

SEQ ID NO: 16919 - protein, 13 aa, Severe acute respiratory syndrome coronavirus 2
  REGION 1..13: note = Table B: HLA-DRB1*04:04L HLA-DRB1*10:01L HLA-DRB1*04:08L
TAVMSLKEGQIND

SEQ ID NO: 16920 - protein, 14 aa, Severe acute respiratory syndrome coronavirus 2
  REGION 1..14: note = Table B: HLA-DRB1*04:04L HLA-DRB1*08:04L HLA-DPA1*01:03-B1*03:01L HLA-DRB1*08:01L HLA-DQA1*05:05-B1*03:19L HLA-DPA1*02:01-B1*13:01L HLA-DPA1*01:03-B1*104:01L HLA-DRB1*07:01L
INDMILSLLSKGRL

SEQ ID NO: 16921 - protein, 14 aa, Severe acute respiratory syndrome coronavirus 2
  REGION 1..14: note = Table B: HLA-DRB1*04:04L HLA-DPA1*01:03-B1*03:01L HLA-DRB1*11:04L HLA-DRB3*01:01L HLA-DPA1*02:01-B1*13:01L
NDMILSLLSKGRLI

SEQ ID NO: 16922 - protein, 12 aa, Severe acute respiratory syndrome coronavirus 2
  REGION 1..12: note = Table B: HLA-DRB1*04:04L HLA-DRB1*04:05L HLA-DRB1*01:02L HLA-DRB1*04:10L HLA-DRB1*07:01L
TTRTQLPPAYTN

SEQ ID NO: 16923 - protein, 16 aa, Severe acute respiratory syndrome coronavirus 2
  REGION 1..16: note = Table B: HLA-DRB1*04:04L HLA-DRB1*11:01L
LPPAYTNSFTRGVYYP

SEQ ID NO: 16924 - protein, 12 aa, Severe acute respiratory syndrome coronavirus 2
  REGION 1..12: note = Table B: HLA-DRB1*04:04L HLA-DRB1*08:04L HLA-DRB1*11:01L HLA-DRB1*04:10L HLA-DRB3*01:01L HLA-DPA1*02:01-B1*13:01L
RGVYYPDKVFRS

SEQ ID NO: 16925 - protein, 14 aa, Severe acute respiratory syndrome coronavirus 2
  REGION 1..14: note = Table B: HLA-DRB1*04:04L HLA-DRB1*08:04L HLA-DRB1*04:10L HLA-DQA1*05:05-B1*03:01L HLA-DRB1*04:08L
SSVLHSTQDLFLPF

SEQ ID NO: 16926 - protein, 15 aa, Severe acute respiratory syndrome coronavirus 2
  REGION 1..15: note = Table B: HLA-DRB1*04:04L HLA-DRB1*01:01L HLA-DPA1*03:01-B1*04:02L HLA-DRB1*03:01L HLA-DRB1*14:01L HLA-DRB1*11:01L HLA-DRB3*01:01L HLA-DRB1*07:01L
GTKRFDNPVLPFNDG

SEQ ID NO: 16927 - protein, 14 aa, Severe acute respiratory syndrome coronavirus 2
  REGION 1..14: note = Table B: HLA-DRB1*04:04L HLA-DRB1*03:01L HLA-DRB1*11:02L HLA-DRB1*13:01L HLA-DPA1*01:03-B1*02:01L HLA-DRB1*07:01L HLA-DRB1*08:02L
GVYFASTEKSNIIR

SEQ ID NO: 16928 - protein, 14 aa, Severe acute respiratory syndrome coronavirus 2
  REGION 1..14: note = Table B: HLA-DRB1*04:04L HLA-DRB1*08:04L HLA-DPA1*01:03-B1*03:01L HLA-DQA1*05:05-B1*03:19L HLA-DQA1*05:01-B1*02:01L HLA-DPA1*01:03-B1*04:01L HLA-DPA1*01:03-B1*04:02L HLA-DPA1*02:01-B1*13:01L
  REGION 1..14: note = CONT. FROM ABOVE: HLA-DPA1*01:03-B1*02:01L HLA-DPA1*01:03-B1*104 :01L HLA-DRB1*15:03L
IIRGWIFGTTLDSK

SEQ ID NO: 16929 - protein, 13 aa, Severe acute respiratory syndrome coronavirus 2
  REGION 1..13: note = Table B: HLA-DRB1*04:04L HLA-DRB3*02:01L HLA-DQA1*01-B1*05L HLA-DRB1*07:01L
FRVYSSANNCTFE

SEQ ID NO: 16930 - protein, 16 aa, Severe acute respiratory syndrome coronavirus 2
  REGION 1..16: note = Table B: HLA-DRB1*04:04L HLA-DRB1*08:04L HLA-DPA1*03:01-B1*04:02L HLA-DRB1*11:02L HLA-DRB1*11:04L HLA-DRB1*11:01L HLA-DRB3*01:01L HLA-DPA1*01:03-B1*02:01L
VGYLQPRTFLLKYNEN

SEQ ID NO: 16931 - protein, 16 aa, Severe acute respiratory syndrome coronavirus 2
  REGION 1..16: note = Table B: HLA-DRB1*04:04L HLA-DRB1*11:02L HLA-DRB1*11:03L HLA-DQA1*05:05-B1*03:116L HLA-DPA1*01:03-B1*04:02L HLA-DRB3*01:01L HLA-DPA1*01:03-B1*104:01L HLA-DRB1*07:01L HLA-DRB1*08:02L
QPRTFLLKYNENGTIT

SEQ ID NO: 16932 - protein, 13 aa, Severe acute respiratory syndrome coronavirus 2
  REGION 1..13: note = Table B: HLA-DRB1*04:04L HLA-DQA1*01:02-B1*06:02L HLA-DPA1*03:01-B1*04:02L HLA-DRB1*11:04L HLA-DRB1*08:01L HLA-DRB1*09:01L HLA-DPA1*02:01-B1*13:01L HLA-DRB1*10:01L HLA-DQA1*01:03-B1*06:01L HLA-DRB1*04:08L HLA-DRB1*08:03L
LLKYNENGTITDA

SEQ ID NO: 16933 - protein, 14 aa, Severe acute respiratory syndrome coronavirus 2
  REGION 1..14: note = Table B: HLA-DRB1*04:04L HLA-DRB1*16:01L HLA-DRB1*04:08L
TDAVDCALDPLSET

SEQ ID NO: 16934 - protein, 11 aa, Severe acute respiratory syndrome coronavirus 2
  REGION 1..11: note = Table B: HLA-DRB1*04:04L HLA-DRB1*08:01L HLA-DPA1*03:01-B1*105:01L
ESIVRFPNITN

SEQ ID NO: 16935 - protein, 15 aa, Severe acute respiratory syndrome coronavirus 2
  REGION 1..15: note = Table B: HLA-DRB1*04:04L HLA-DPA1*01:03-B1*04:02L HLA-DQA1*05:05-B1*03:01L HLA-DRB1*07:01L HLA-DQA1*01:03-B1*06:01L HLA-DRB1*04:08L
SPTKLNDLCFTNVYA

SEQ ID NO: 16936 - protein, 13 aa, Severe acute respiratory syndrome coronavirus 2
  REGION 1..13: note = Table B: HLA-DRB1*04:04L HLA-DRB1*04:05L HLA-DRB1*08:04L HLA-DRB1*08:77L HLA-DRB3*02:01L HLA-DPA1*01:03-B1*03:01L HLA-DRB1*11:03L HLA-DRB1*04:10L HLA-DRB1*12:02L HLA-DRB1*07:01L HLA-DRB1*04:08L
VRQIAPGQTGKIA

SEQ ID NO: 16937 - protein, 14 aa, Severe acute respiratory syndrome coronavirus 2
  REGION 1..14: note = Table B: HLA-DRB1*04:04L HLA-DRB3*01:01L HLA-DRB1*08:03L
IADYNYKLPDDFTG

SEQ ID NO: 16938 - protein, 14 aa, Severe acute respiratory syndrome coronavirus 2
  REGION 1..14: note = Table B: HLA-DRB1*04:04L
NSNNLDSKVGGNYN

SEQ ID NO: 16939 - protein, 14 aa, Severe acute respiratory syndrome coronavirus 2
  REGION 1..14: note = Table B: HLA-DRB1*04:04L HLA-DRB1*03:01L HLA-DRB1*11:02L HLA-DRB1*13:01L HLA-DPA1*02:01-B1*13:01L HLA-DPA1*01:02-B1*04:01L
KSNLKPFERDISTE

SEQ ID NO: 16940 - protein, 15 aa, Severe acute respiratory syndrome coronavirus 2
  REGION 1..15: note = Table B: HLA-DRB1*04:04L HLA-DQA1*01:01-B1*05:01L HLA-DRB1*08:01L
ERDISTEIYQAGSTP

SEQ ID NO: 16941 - protein, 14 aa, Severe acute respiratory syndrome coronavirus 2
  REGION 1..14: note = Table B: HLA-DRB1*04:04L HLA-DRB3*01:01L
RDIADTTDAVRDPQ

SEQ ID NO: 16942 - protein, 15 aa, Severe acute respiratory syndrome coronavirus 2
  REGION 1..15: note = Table B: HLA-DRB1*04:04L HLA-DPA1*03:01-B1*105:01L HLA-DRB1*10:01L HLA-DRB1*15:03L
VSVITPGTNTSNQVA

SEQ ID NO: 16943 - protein, 18 aa, Severe acute respiratory syndrome coronavirus 2
  REGION 1..18: note = Table B: HLA-DRB1*04:04L HLA-DRB1*11:01L HLA-DRB1*09:01L HLA-DRB1*07:01L HLA-DRB1*08:03L
TPGTNTSNQVAVLYQDVN

SEQ ID NO: 16944 - protein, 12 aa, Severe acute respiratory syndrome coronavirus 2
  REGION 1..12: note = Table B: HLA-DRB1*04:04L HLA-DQA1*01:02-B1*06:02L HLA-DRB1*14:01L HLA-DQA1*01:03-B1*06:01L HLA-DRB1*15:03L
SYQTQTNSPRRA

SEQ ID NO: 16945 - protein, 13 aa, Severe acute respiratory syndrome coronavirus 2
  REGION 1..13: note = Table B: HLA-DRB1*04:04L HLA-DRB1*04:05L HLA-DRB1*01:02L HLA-DRB4*03:01NL HLA-DPA1*03:01-B1*04:02L HLA-DRB1*14:01L HLA-DQA1*01-B1*05L HLA-DQA1*05:01-B1*02:01L HLA-DRB1*04:10L HLA-DPA1*03:01-B1*105:01L HLA-DRB1*14:54L HLA-DRB1*16:01L
  REGION 1..13: note = CONT. FROM ABOVE: HLA-DRB1*04:08L
QSIIAYTMSLGAE

SEQ ID NO: 16946 - protein, 13 aa, Severe acute respiratory syndrome coronavirus 2
  REGION 1..13: note = Table B: HLA-DRB1*04:04L HLA-DRB1*01:02L HLA-DRB1*08:04L HLA-DRB1*08:77L HLA-DRB3*02:01L HLA-DPA1*01:03-B1*03:01L HLA-DRB1*14:01L HLA-DRB1*11:03L HLA-DRB1*11:04L HLA-DRB1*14:02L HLA-DQA1*01:01-B1*05:01L HLA-DRB1*08:01L HLA-DRB1*11:01L
  REGION 1..13: note = CONT. FROM ABOVE: HLA-DRB5*01:01L HLA-DQA1*05:05-B1*03:116L HLA- DRB1*09:01L HLA-DPA1*01:03-B1*04:02L HLA-DRB1*12:02L HLA-DPA1*02 :01-B1*13:01L HLA-DPA1*01:03-B1*104:01L HLA-DRB1*07:01L HLA-DRB1 *10:01L HLA-DRB1*04:08L HLA-DRB1*15:03L
VAYSNNSIAIPTN

SEQ ID NO: 16947 - protein, 14 aa, Severe acute respiratory syndrome coronavirus 2
  REGION 1..14: note = Table B: HLA-DRB1*04:04L HLA-DRB1*01:01L HLA-DRB3*02:01L HLA-DRB1*04:10L HLA-DRB1*07:01L HLA-DRB1*10:01L HLA-DRB1*04:08L
TQLNRALTGIAVEQ

SEQ ID NO: 16948 - protein, 14 aa, Severe acute respiratory syndrome coronavirus 2
  REGION 1..14: note = Table B: HLA-DRB1*04:04L HLA-DRB1*07:01L
QLNRALTGIAVEQD

SEQ ID NO: 16949 - protein, 15 aa, Severe acute respiratory syndrome coronavirus 2
  REGION 1..15: note = Table B: HLA-DRB1*04:04L HLA-DRB1*08:04L HLA-DRB1*11:03L HLA-DRB1*11:01L HLA-DRB1*07:01L
QEVFAQVKQIYKTPP

SEQ ID NO: 16950 - protein, 12 aa, Severe acute respiratory syndrome coronavirus 2
  REGION 1..12: note = Table B: HLA-DRB1*04:04L HLA-DRB1*08:01L HLA-DRB1*04:10L HLA-DPA1*02:01-B1*13:01L HLA-DRB1*14:54L
VKQIYKTPPIKD

SEQ ID NO: 16951 - protein, 14 aa, Severe acute respiratory syndrome coronavirus 2
  REGION 1..14: note = Table B: HLA-DRB1*04:04L
KQIYKTPPIKDFGG

SEQ ID NO: 16952 - protein, 14 aa, Severe acute respiratory syndrome coronavirus 2
  REGION 1..14: note = Table B: HLA-DRB1*04:04L HLA-DRB1*08:77L HLA-DRB1*03:01L HLA-DRB1*11:01L HLA-DRB1*04:10L HLA-DRB3*01:01L HLA-DPA1*01:03-B1*02:01L HLA-DRB1*07:01L HLA-DRB1*10:01L HLA-DRB1*08:02L HLA-DRB1*08:03L
IEDLLFNKVTLADA

SEQ ID NO: 16953 - protein, 13 aa, Severe acute respiratory syndrome coronavirus 2
  REGION 1..13: note = Table B: HLA-DRB1*04:04L HLA-DRB1*08:04L HLA-DPA1*03:01-B1*04:02L HLA-DRB1*11:04L HLA-DRB1*14:02L HLA-DRB1*08:01L HLA-DRB3*01:01L HLA-DPA1*01:03-B1*104:01L HLA-DPA1*01:02-B1*04:01L HLA-DRB1*10:01L HLA-DRB1*08:03L
FNKVTLADAGFIK

SEQ ID NO: 16954 - protein, 13 aa, Severe acute respiratory syndrome coronavirus 2
  REGION 1..13: note = Table B: HLA-DRB1*04:04L HLA-DRB1*01:01L HLA-DPA1*01:02-B1*04:01L HLA-DRB1*10:01L
NKVTLADAGFIKQ

SEQ ID NO: 16955 - protein, 14 aa, Severe acute respiratory syndrome coronavirus 2
  REGION 1..14: note = Table B: HLA-DRB1*04:04L HLA-DPA1*01:03-B1*104:01L HLA-DPA1*01:02-B1*04:01L HLA-DRB1*07:01L HLA-DRB1*16:01L HLA-DRB1*04:08L HLA-DRB1*15:03L
IAARDLICAQKFNG

SEQ ID NO: 16956 - protein, 13 aa, Severe acute respiratory syndrome coronavirus 2
  REGION 1..13: note = Table B: HLA-DRB1*04:04L HLA-DRB1*04:05L HLA-DRB1*01:02L HLA-DRB4*03:01NL HLA-DQA1*05:01-B1*02:01L HLA-DRB1*04:10L HLA-DRB1*12:01L HLA-DRB1*14:54L HLA-DRB1*16:01L HLA-DRB1*04:08L
AGTITSGWTFGAG

SEQ ID NO: 16957 - protein, 14 aa, Severe acute respiratory syndrome coronavirus 2
  REGION 1..14: note = Table B: HLA-DRB1*04:04L HLA-DRB3*02:01L HLA-DPA1*03:01-B1*04:02L HLA-DRB1*08:01L HLA-DPA1*02:01-B1*13:01L HLA-DRB1*07:01L
GIGVTQNVLYENQK

SEQ ID NO: 16958 - protein, 13 aa, Severe acute respiratory syndrome coronavirus 2
  REGION 1..13: note = Table B: HLA-DRB1*04:04L HLA-DRB1*11:01L HLA-DPA1*02:01-B1*13:01L
QNVLYENQKLIAN

SEQ ID NO: 16959 - protein, 13 aa, Severe acute respiratory syndrome coronavirus 2
  REGION 1..13: note = Table B: HLA-DRB1*04:04L HLA-DRB1*11:02L HLA-DQA1*05:05-B1*03:116L HLA-DPA1*02:01-B1*13:01L HLA-DRB1*10:01L HLA-DRB1*08:02L
NVLYENQKLIANQ

SEQ ID NO: 16960 - protein, 13 aa, Severe acute respiratory syndrome coronavirus 2
  REGION 1..13: note = Table B: HLA-DRB1*04:04L HLA-DRB1*11:03L HLA-DRB1*11:04L HLA-DRB1*14:02L HLA-DQA1*01:01-B1*05:01L HLA-DPA1*01:03-B1*04:02L HLA-DRB1*07:01L HLA-DRB1*10:01L HLA-DRB1*08:03L
ANQFNSAIGKIQD

SEQ ID NO: 16961 - protein, 12 aa, Severe acute respiratory syndrome coronavirus 2
  REGION 1..12: note = Table B: HLA-DRB1*04:04L
NSAIGKIQDSLS

SEQ ID NO: 16962 - protein, 12 aa, Severe acute respiratory syndrome coronavirus 2
  REGION 1..12: note = Table B: HLA-DRB1*04:04L HLA-DRB1*08:04L HLA-DRB1*11:04L HLA-DRB1*10:01L
SAIGKIQDSLSS

SEQ ID NO: 16963 - protein, 12 aa, Severe acute respiratory syndrome coronavirus 2
  REGION 1..12: note = Table B: HLA-DRB1*04:04L HLA-DRB1*04:05L HLA-DRB1*01:02L HLA-DPA1*01:03-B1*03:01L HLA-DRB1*04:10L HLA-DPA1*01:03-B1*04:02L HLA-DRB1*04:08L HLA-DRB1*15:03L
LSSTASALGKLQ

SEQ ID NO: 16964 - protein, 13 aa, Severe acute respiratory syndrome coronavirus 2
  REGION 1..13: note = Table B: HLA-DRB1*04:04L
ASALGKLQDVVNQ

SEQ ID NO: 16965 - protein, 12 aa, Severe acute respiratory syndrome coronavirus 2
  REGION 1..12: note = Table B: HLA-DRB1*04:04L HLA-DQA1*01:02-B1*06:02L HLA-DRB1*01:02L HLA-DQA1*01:01-B1*05:01L HLA-DRB1*12:01L HLA-DPA1*02:01-B1*13:01L HLA-DRB1*04:08L
GKLQDVVNQNAQ

SEQ ID NO: 16966 - protein, 14 aa, Severe acute respiratory syndrome coronavirus 2
  REGION 1..14: note = Table B: HLA-DRB1*04:04L HLA-DRB1*08:01L HLA-DPA1*01:03-B1*04:02L HLA-DPA1*02:01-B1*13:01L HLA-DPA1*01:03-B1*104:01L
VVNQNAQALNTLVK

SEQ ID NO: 16967 - protein, 13 aa, Severe acute respiratory syndrome coronavirus 2
  REGION 1..13: note = Table B: HLA-DRB1*04:04L HLA-DRB3*02:01L
QSLQTYVTQQLIR

SEQ ID NO: 16968 - protein, 13 aa, Severe acute respiratory syndrome coronavirus 2
  REGION 1..13: note = Table B: HLA-DRB1*04:04L
SLQTYVTQQLIRA

SEQ ID NO: 16969 - protein, 13 aa, Severe acute respiratory syndrome coronavirus 2
  REGION 1..13: note = Table B: HLA-DRB1*04:04L HLA-DRB1*08:04L HLA-DPA1*01:03-B1*03:01L HLA-DPA1*01:03-B1*04:01L HLA-DRB1*04:10L HLA-DPA1*01:03-B1*04:02L HLA-DRB1*14:54L HLA-DPA1*01:03-B1*02:01L HLA-DRB1*10:01L
LQTYVTQQLIRAA

SEQ ID NO: 16970 - protein, 14 aa, Severe acute respiratory syndrome coronavirus 2
  REGION 1..14: note = Table B: HLA-DRB1*04:04L
VVFLHVTYVPAQEK

SEQ ID NO: 16971 - protein, 13 aa, Severe acute respiratory syndrome coronavirus 2
  REGION 1..13: note = Table B: HLA-DRB1*04:04L HLA-DPA1*01:03-B1*03:01L
FLHVTYVPAQEKN

SEQ ID NO: 16972 - protein, 14 aa, Severe acute respiratory syndrome coronavirus 2
  REGION 1..14: note = Table B: HLA-DRB1*04:04L HLA-DPA1*01:03-B1*104:01L
LHVTYVPAQEKNFT

SEQ ID NO: 16973 - protein, 14 aa, Severe acute respiratory syndrome coronavirus 2
  REGION 1..14: note = Table B: HLA-DRB1*04:04L
HVTYVPAQEKNFTT

SEQ ID NO: 16974 - protein, 17 aa, Severe acute respiratory syndrome coronavirus 2
  REGION 1..17: note = Table B: HLA-DRB1*04:04L
FPREGVFVSNGTHWFVT

SEQ ID NO: 16975 - protein, 12 aa, Severe acute respiratory syndrome coronavirus 2
  REGION 1..12: note = Table B: HLA-DRB1*04:04L HLA-DRB1*08:04L HLA-DRB1*11:04L HLA-DRB1*04:10L HLA-DRB1*04:08L
DVVIGIVNNTVY

SEQ ID NO: 16976 - protein, 12 aa, Severe acute respiratory syndrome coronavirus 2
  REGION 1..12: note = Table B: HLA-DRB1*04:04L HLA-DRB1*04:08L
VVIGIVNNTVYD

SEQ ID NO: 16977 - protein, 13 aa, Severe acute respiratory syndrome coronavirus 2
  REGION 1..13: note = Table B: HLA-DRB1*04:04L HLA-DRB1*08:04L HLA-DRB1*11:03L HLA-DPA1*02:01-B1*13:01L HLA-DQA1*05:05-B1*03:01L HLA-DRB1*04:08L
VIGIVNNTVYDPL

SEQ ID NO: 16978 - protein, 14 aa, Severe acute respiratory syndrome coronavirus 2
  REGION 1..14: note = Table B: HLA-DRB1*04:04L HLA-DRB1*08:04L HLA-DRB1*08:77L HLA-DRB3*02:01L HLA-DRB1*14:01L HLA-DRB1*11:03L HLA-DRB1*14:02L HLA-DRB1*08:01L HLA-DPA1*01:03-B1*04:01L HLA-DPA1*01:03-B1*04:02L HLA-DRB1*12:02L
  REGION 1..14: note = CONT. FROM ABOVE: HLA-DPA1*01:03-B1*104:01L HLA-DRB1*07:01L HLA- DRB1*08:03L
GIVNNTVYDPLQPE

SEQ ID NO: 16979 - protein, 12 aa, Severe acute respiratory syndrome coronavirus 2
  REGION 1..12: note = Table B: HLA-DRB1*04:04L HLA-DRB1*08:04L HLA-DRB1*11:03L HLA-DRB1*11:04L HLA-DRB5*01:01L HLA-DRB1*12:02L
TVYDPLQPELDS

SEQ ID NO: 16980 - protein, 12 aa, Severe acute respiratory syndrome coronavirus 2
  REGION 1..12: note = Table B: HLA-DRB1*04:04L HLA-DRB1*11:04L HLA-DRB1*11:01L HLA-DRB3*01:01L HLA-DRB1*08:03L
KYFKNHTSPDVD

SEQ ID NO: 16981 - protein, 13 aa, Severe acute respiratory syndrome coronavirus 2
  REGION 1..13: note = Table B: HLA-DRB1*04:04L HLA-DRB4*03:01NL HLA-DRB1*11:03L HLA-DRB1*11:04L HLA-DRB1*11:01L HLA-DRB1*04:10L HLA-DRB3*01:01L HLA-DPA1*01:03-B1*104:01L HLA-DRB1*08:03L
IDRLNEVAKNLNE

SEQ ID NO: 16982 - protein, 15 aa, Severe acute respiratory syndrome coronavirus 2
  REGION 1..15: note = Table B: HLA-DRB1*04:04L HLA-DRB1*08:04L HLA-DPA1*01:03-B1*04:02L
VAKNLNESLIDLQEL

SEQ ID NO: 16983 - protein, 14 aa, Severe acute respiratory syndrome coronavirus 2
  REGION 1..14: note = Table B: HLA-DRB1*04:04L HLA-DQA1*01:01-B1*05:01L
NESLIDLQELGKYE

SEQ ID NO: 16984 - protein, 15 aa, Severe acute respiratory syndrome coronavirus 2
  REGION 1..15: note = Table B: HLA-DRB1*04:04L HLA-DPA1*01:03-B1*03:01L HLA-DPA1*01:03-B1*04:02L
TVTLKQGEIKDATPS

SEQ ID NO: 16985 - protein, 13 aa, Severe acute respiratory syndrome coronavirus 2
  REGION 1..13: note = Table B: HLA-DRB1*04:04L HLA-DRB1*08:01L HLA-DRB1*04:10L HLA-DRB1*14:54L
GEIKDATPSDFVR

SEQ ID NO: 16986 - protein, 11 aa, Severe acute respiratory syndrome coronavirus 2
  REGION 1..11: note = Table B: HLA-DRB1*04:04L HLA-DRB1*01:01L HLA-DRB1*08:04L HLA-DRB1*14:02L HLA-DRB1*08:01L HLA-DRB1*11:01L HLA-DPA1*01:03-B1*04:02L HLA-DPA1*01:03-B1*104:01L HLA-DRB1*10:01L HLA-DRB1*08:03L
FVRATATIPIQ

SEQ ID NO: 16987 - protein, 14 aa, Severe acute respiratory syndrome coronavirus 2
  REGION 1..14: note = Table B: HLA-DRB1*04:04L HLA-DRB1*01:01L
LAVFQSASKIITLK

SEQ ID NO: 16988 - protein, 17 aa, Severe acute respiratory syndrome coronavirus 2
  REGION 1..17: note = Table B: HLA-DRB1*04:04L HLA-DPA1*01:03-B1*104:01L
IPYNSVTSSIVITSGDG

SEQ ID NO: 16989 - protein, 13 aa, Severe acute respiratory syndrome coronavirus 2
  REGION 1..13: note = Table B: HLA-DRB1*04:04L HLA-DRB1*04:05L HLA-DRB1*11:03L HLA-DRB1*14:02L HLA-DRB1*15:01L
DYYQLYSTQLSTD

SEQ ID NO: 16990 - protein, 16 aa, Severe acute respiratory syndrome coronavirus 2
  REGION 1..16: note = Table B: HLA-DRB1*04:04L HLA-DRB1*09:01L HLA-DRB1*07:01L
SGVVNPVMEPIYDEPT

SEQ ID NO: 16991 - protein, 13 aa, Severe acute respiratory syndrome coronavirus 2
  REGION 1..13: note = Table B: HLA-DRB1*04:04L HLA-DQA1*03:01-B1*03:02L HLA-DRB1*16:01L HLA-DRB1*04:08L HLA-DRB1*15:03L
PVMEPIYDEPTTT

SEQ ID NO: 16992 - protein, 14 aa, Severe acute respiratory syndrome coronavirus 2
  REGION 1..14: note = Table B: HLA-DRB1*04:04L HLA-DRB1*01:01L HLA-DRB3*02:01L HLA-DPA1*01:03-B1*03:01L HLA-DRB1*11:02L HLA-DRB1*11:03L HLA-DRB1*14:02L HLA-DQA1*05:05-B1*03:19L HLA-DQA1*05:05-B1*03:116L HLA-DPA1*01:03-B1*104:01L
  REGION 1..14: note = CONT. FROM ABOVE: HLA-DQA1*05:05-B1*03:01L HLA-DRB1*07:01L HLA-D RB1*10:01L HLA-DRB1*08:02L
KPSFYVYSRVKNLN

SEQ ID NO: 16993 - protein, 14 aa, Severe acute respiratory syndrome coronavirus 2
  REGION 1..14: note = Table B: HLA-DRB1*04:04L HLA-DPA1*02:01-B1*13:01L HLA-DQA1*02:01-B1*03:03L
VYSRVKNLNSSRVP

SEQ ID NO: 16994 - protein, 14 aa, Severe acute respiratory syndrome coronavirus 2
  REGION 1..14: note = Table B: HLA-DRB1*04:04L
ADSNGTITVEELKK

SEQ ID NO: 16995 - protein, 14 aa, Severe acute respiratory syndrome coronavirus 2
  REGION 1..14: note = Table B: HLA-DRB1*04:04L HLA-DRB1*11:03L
GTITVEELKKLLEQ

SEQ ID NO: 16996 - protein, 14 aa, Severe acute respiratory syndrome coronavirus 2
  REGION 1..14: note = Table B: HLA-DRB1*04:04L HLA-DRB1*13:01L HLA-DPA1*01:03-B1*02:01L
TRSMWSFNPETNIL

SEQ ID NO: 16997 - protein, 16 aa, Severe acute respiratory syndrome coronavirus 2
  REGION 1..16: note = Table B: HLA-DRB1*04:04L HLA-DRB1*03:01L HLA-DRB1*11:02L HLA-DRB1*11:03L HLA-DRB1*11:04L HLA-DRB1*11:01L HLA-DRB4*01:01L HLA-DRB1*09:01L HLA-DRB3*01:01L HLA-DRB1*07:01L HLA-DRB1*10:01L
NPETNILLNVPLHGTI

SEQ ID NO: 16998 - protein, 16 aa, Severe acute respiratory syndrome coronavirus 2
  REGION 1..16: note = Table B: HLA-DRB1*04:04L HLA-DRB1*08:04L HLA-DRB3*01:01L HLA-DPA1*02:01-B1*13:01L
ESELVIGAVILRGHLR

SEQ ID NO: 16999 - protein, 14 aa, Severe acute respiratory syndrome coronavirus 2
  REGION 1..14: note = Table B: HLA-DRB1*04:04L HLA-DRB1*08:01L HLA-DRB3*01:01L
EITVATSRTLSYYK

SEQ ID NO: 17000 - protein, 14 aa, Severe acute respiratory syndrome coronavirus 2
  REGION 1..14: note = Table B: HLA-DRB1*04:04L HLA-DRB3*01:01L
SRTLSYYKLGASQR

SEQ ID NO: 17001 - protein, 14 aa, Severe acute respiratory syndrome coronavirus 2
  REGION 1..14: note = Table B: HLA-DRB1*04:04L HLA-DPA1*01:03-B1*04:02L HLA-DRB3*01:01L HLA-DPA1*02:01-B1*13:01L HLA-DPA1*01:03-B1*104:01L HLA-DRB1*08:02L HLA-DRB1*08:03L
YKLGASQRVAGDSG

SEQ ID NO: 17002 - protein, 14 aa, Severe acute respiratory syndrome coronavirus 2
  REGION 1..14: note = Table B: HLA-DRB1*04:04L HLA-DQA1*01-B1*05L HLA-DPA1*01:03-B1*02:01L HLA-DQA1*05:05-B1*03:01L HLA-DRB1*07:01L
IIMRTFKVSIWNLD

SEQ ID NO: 17003 - protein, 14 aa, Severe acute respiratory syndrome coronavirus 2
  REGION 1..14: note = Table B: HLA-DRB1*04:04L HLA-DRB1*03:01L HLA-DRB1*11:04L HLA-DRB1*08:01L HLA-DRB1*11:01L HLA-DRB3*01:01L HLA-DPA1*01:03-B1*02:01L HLA-DRB1*10:01L HLA-DRB1*08:02L
NLDYIINLIIKNLS

SEQ ID NO: 17004 - protein, 15 aa, Severe acute respiratory syndrome coronavirus 2
  REGION 1..15: note = Table B: HLA-DRB1*04:04L HLA-DRB1*14:01L HLA-DRB1*11:02L HLA-DRB1*10:01L HLA-DRB1*08:03L
ADNKFALTCFSTQFA

SEQ ID NO: 17005 - protein, 14 aa, Severe acute respiratory syndrome coronavirus 2
  REGION 1..14: note = Table B: HLA-DRB1*04:04L HLA-DRB1*08:04L HLA-DRB3*02:01L HLA-DRB1*08:01L HLA-DRB1*04:08L
FIRQEEVQELYSPI

SEQ ID NO: 17006 - protein, 11 aa, Severe acute respiratory syndrome coronavirus 2
  REGION 1..11: note = Table B: HLA-DRB1*04:04L HLA-DRB1*04:05L HLA-DQA1*01:02-B1*06:02L HLA-DRB1*01:02L HLA-DRB4*03:01NL HLA-DRB1*04:10L HLA-DRB1*12:01L HLA-DRB1*14:54L HLA-DRB1*16:01L HLA-DRB1*04:08L HLA-DQA1*02:01-B1*03:03L
LGIITTVAAFH

SEQ ID NO: 17007 - protein, 11 aa, Severe acute respiratory syndrome coronavirus 2
  REGION 1..11: note = Table B: HLA-DRB1*04:04L HLA-DRB1*01:02L HLA-DRB1*14:01L HLA-DQA1*05:01-B1*02:01L HLA-DRB1*04:08L
GIITTVAAFHQ

SEQ ID NO: 17008 - protein, 11 aa, Severe acute respiratory syndrome coronavirus 2
  REGION 1..11: note = Table B: HLA-DRB1*04:04L HLA-DRB1*08:04L HLA-DRB1*08:77L HLA-DRB3*02:01L HLA-DPA1*03:01-B1*04:02L HLA-DRB1*11:03L HLA-DRB1*11:04L HLA-DRB1*14:02L HLA-DRB1*08:01L HLA-DRB5*01:01L HLA-DPA1*01:03-B1*04:01L HLA-DRB1*09:01L
  REGION 1..11: note = CONT. FROM ABOVE: HLA-DPA1*01:03-B1*04:02L HLA-DRB1*12:02L HLA-D PA1*02:01-B1*13:01L HLA-DPA1*01:03-B1*02:01L HLA-DPA1*01:03-B1*1 04:01L HLA-DRB1*07:01L HLA-DRB1*10:01L HLA-DRB1*08:03L
IITTVAAFHQE

SEQ ID NO: 17009 - protein, 13 aa, Severe acute respiratory syndrome coronavirus 2
  REGION 1..13: note = Table B: HLA-DRB1*04:04L HLA-DRB1*04:05L HLA-DRB1*01:02L HLA-DRB1*04:08L
PLIELCVDEAGSK

SEQ ID NO: 17010 - protein, 13 aa, Severe acute respiratory syndrome coronavirus 2
  REGION 1..13: note = Table B: HLA-DRB1*04:04L HLA-DRB1*08:04L HLA-DRB1*08:01L HLA-DRB1*04:10L HLA-DRB1*12:02L
SKSPIQYIDIGNY

SEQ ID NO: 17011 - protein, 15 aa, Severe acute respiratory syndrome coronavirus 2
  REGION 1..15: note = Table B: HLA-DRB1*04:04L HLA-DPA1*01:03-B1*03:01L HLA-DQA1*02:01-B1*03:03L
SKQRRPQGLPNNTAS

SEQ ID NO: 17012 - protein, 13 aa, Severe acute respiratory syndrome coronavirus 2
  REGION 1..13: note = Table B: HLA-DRB1*04:04L HLA-DRB1*14:01L HLA-DRB1*11:04L HLA-DRB1*11:01L HLA-DPA1*02:01-B1*13:01L HLA-DRB1*15:03L
TASWFTALTQHGK

SEQ ID NO: 17013 - protein, 11 aa, Severe acute respiratory syndrome coronavirus 2
  REGION 1..11: note = Table B: HLA-DRB1*04:04L HLA-DRB1*01:01L HLA-DRB1*08:04L HLA-DRB1*08:77L HLA-DRB3*02:01L HLA-DPA1*01:03-B1*03:01L HLA-DPA1*03:01-B1*04:02L HLA-DRB1*11:03L HLA-DRB1*11:04L HLA-DRB1*14:02L HLA-DRB1*11:01L HLA-DPA1*01:03-B1*04:02L
  REGION 1..11: note = CONT. FROM ABOVE: HLA-DRB1*12:02L HLA-DPA1*02:01-B1*13:01L HLA-D RB1*07:01L HLA-DRB1*10:01L HLA-DRB1*08:03L
FTALTQHGKED

SEQ ID NO: 17014 - protein, 15 aa, Severe acute respiratory syndrome coronavirus 2
  REGION 1..15: note = Table B: HLA-DRB1*04:04L HLA-DRB1*01:01L HLA-DRB1*08:04L HLA-DRB1*08:77L HLA-DRB3*02:01L HLA-DRB1*11:03L HLA-DRB1*11:04L HLA-DRB1*12:02L HLA-DRB1*07:01L
AAIVLQLPQGTTLPK

SEQ ID NO: 17015 - protein, 17 aa, Severe acute respiratory syndrome coronavirus 2
  REGION 1..17: note = Table B: HLA-DRB1*04:04L HLA-DRB1*04:10L
TPGSSRGTSPARMAGNG

SEQ ID NO: 17016 - protein, 15 aa, Severe acute respiratory syndrome coronavirus 2
  REGION 1..15: note = Table B: HLA-DRB1*04:04L HLA-DRB1*08:04L HLA-DRB1*08:77L HLA-DRB3*02:01L HLA-DRB1*11:03L HLA-DRB1*11:04L HLA-DRB1*14:02L HLA-DQA1*01:01-B1*05:01L HLA-DRB5*01:01L HLA-DRB1*04:10L HLA-DRB1*12:02L HLA-DRB3*01:01L HLA-DPA1*03:01-B1*105:01L
  REGION 1..15: note = CONT. FROM ABOVE: HLA-DPA1*01:03-B1*104:01L HLA-DRB1*07:01L HLA- DRB1*10:01L HLA-DRB1*04:08L HLA-DRB1*15:03L
SPARMAGNGGDAALA

SEQ ID NO: 17017 - protein, 14 aa, Severe acute respiratory syndrome coronavirus 2
  REGION 1..14: note = Table B: HLA-DRB1*04:04L
ALALLLLDRLNQLE

SEQ ID NO: 17018 - protein, 15 aa, Severe acute respiratory syndrome coronavirus 2
  REGION 1..15: note = Table B: HLA-DRB1*04:04L HLA-DRB1*11:03L HLA-DRB1*12:01L HLA-DRB3*01:01L HLA-DRB1*14:17L HLA-DRB1*08:02L HLA-DRB1*15:03L
LNQLESKMSGKGQQQ

SEQ ID NO: 17019 - protein, 13 aa, Severe acute respiratory syndrome coronavirus 2
  REGION 1..13: note = Table B: HLA-DRB1*04:04L HLA-DRB1*04:05L HLA-DRB1*01:02L HLA-DRB1*07:01L
RQKRTATKAYNVT

SEQ ID NO: 17020 - protein, 14 aa, Severe acute respiratory syndrome coronavirus 2
  REGION 1..14: note = Table B: HLA-DRB1*04:04L HLA-DRB1*11:04L HLA-DRB1*11:01L HLA-DPA1*02:01-B1*13:01L HLA-DPA1*01:02-B1*04:01L
ATKAYNVTQAFGRR

SEQ ID NO: 17021 - protein, 14 aa, Severe acute respiratory syndrome coronavirus 2
  REGION 1..14: note = Table B: HLA-DRB1*04:04L HLA-DRB1*08:04L HLA-DRB1*04:08L
WPQIAQFAPSASAF

SEQ ID NO: 17022 - protein, 13 aa, Severe acute respiratory syndrome coronavirus 2
  REGION 1..13: note = Table B: HLA-DRB1*04:04L HLA-DRB1*11:04L HLA-DQA1*01:01-B1*05:01L HLA-DRB1*08:01L HLA-DRB5*01:01L HLA-DRB3*01:01L HLA-DPA1*01:03-B1*104:01L HLA-DRB1*08:03L
IAQFAPSASAFFG

SEQ ID NO: 17023 - protein, 16 aa, Severe acute respiratory syndrome coronavirus 2
  REGION 1..16: note = Table B: HLA-DRB1*04:04L HLA-DRB4*03:01NL HLA-DRB1*08:77L HLA-DRB1*11:02L HLA-DRB4*01:01L HLA-DRB1*09:01L HLA-DRB1*12:02L HLA-DRB3*01:01L HLA-DPA1*01:03-B1*02:01L HLA-DRB1*14:17L HLA-DRB1*07:01L HLA-DRB1*10:01L
APSASAFFGMSRIGME

SEQ ID NO: 17024 - protein, 12 aa, Severe acute respiratory syndrome coronavirus 2
  REGION 1..12: note = Table B: HLA-DRB1*04:04L HLA-DQA1*01:02-B1*06:02L HLA-DRB1*01:02L HLA-DPA1*01:03-B1*03:01L HLA-DQA1*05:01-B1*02:01L HLA-DPA1*02:01-B1*13:01L
MSRIGMEVTPSG

SEQ ID NO: 17025 - protein, 13 aa, Severe acute respiratory syndrome coronavirus 2
  REGION 1..13: note = Table B: HLA-DRB1*04:04L HLA-DRB1*14:01L HLA-DPA1*01:02-B1*04:01L
SRIGMEVTPSGTW

SEQ ID NO: 17026 - protein, 16 aa, Severe acute respiratory syndrome coronavirus 2
  REGION 1..16: note = Table B: HLA-DRB1*04:04L HLA-DRB1*04:08L
IGMEVTPSGTWLTYTG

SEQ ID NO: 17027 - protein, 14 aa, Severe acute respiratory syndrome coronavirus 2
  REGION 1..14: note = Table B: HLA-DRB1*04:04L HLA-DRB1*15:01L
TWLTYTGAIKLDDK

SEQ ID NO: 17028 - protein, 14 aa, Severe acute respiratory syndrome coronavirus 2
  REGION 1..14: note = Table B: HLA-DRB1*04:04L HLA-DRB1*01:02L
TLLPAADLDDFSKQ

SEQ ID NO: 17029 - protein, 16 aa, Severe acute respiratory syndrome coronavirus 2
  REGION 1..16: note = Table B: HLA-DRB1*04:04L HLA-DRB1*03:01L HLA-DRB1*11:02L HLA-DRB1*11:03L HLA-DRB1*14:02L HLA-DRB1*11:01L HLA-DPA1*01:03-B1*04:02L HLA-DPA1*01:03-B1*02:01L HLA-DQA1*05:05-B1*03:01L HLA-DRB1*08:03L
LPAADLDDFSKQLQQS

SEQ ID NO: 17030 - protein, 12 aa, Severe acute respiratory syndrome coronavirus 2
  REGION 1..12: note = Table B: HLA-DRB1*04:04L HLA-DRB1*08:04L HLA-DRB1*08:77L HLA-DRB1*11:03L HLA-DRB1*11:04L HLA-DQA1*01:01-B1*05:01L HLA-DRB3*01:01L HLA-DPA1*01:03-B1*02:01L HLA-DRB1*07:01L HLA-DRB1*04:08L
IAQVDVVNFNLT

SEQ ID NO: 17031 - protein, 14 aa, Severe acute respiratory syndrome coronavirus 2
  REGION 1..14: note = Table B: HLA-DRB1*04:05L HLA-DPA1*01:03-B1*03:01L HLA-DRB1*04:08L
THVQLSLPVLQVRD

SEQ ID NO: 17032 - protein, 13 aa, Severe acute respiratory syndrome coronavirus 2
  REGION 1..13: note = Table B: HLA-DRB1*04:05L HLA-DRB1*03:01L
EVLSEARQHLKDG

SEQ ID NO: 17033 - protein, 12 aa, Severe acute respiratory syndrome coronavirus 2
  REGION 1..12: note = Table B: HLA-DRB1*04:05L HLA-DRB1*01:02L HLA-DRB1*08:04L
PYVFIKRSDART

SEQ ID NO: 17034 - protein, 14 aa, Severe acute respiratory syndrome coronavirus 2
  REGION 1..14: note = Table B: HLA-DRB1*04:05L HLA-DRB1*12:01L HLA-DRB1*16:01L
RKVLLRKNGNKGAG

SEQ ID NO: 17035 - protein, 16 aa, Severe acute respiratory syndrome coronavirus 2
  REGION 1..16: note = Table B: HLA-DRB1*04:05L HLA-DQA1*01:02-B1*06:02L HLA-DRB1*11:04L HLA-DRB1*11:01L HLA-DRB3*01:01L HLA-DRB1*15:03L
KVLLRKNGNKGAGGHS

SEQ ID NO: 17036 - protein, 13 aa, Severe acute respiratory syndrome coronavirus 2
  REGION 1..13: note = Table B: HLA-DRB1*04:05L HLA-DQA1*01:02-B1*06:02L HLA-DPA1*02:01-B1*13:01L HLA-DPA1*03:01-B1*105:01L
ADLKSFDLGDELG

SEQ ID NO: 17037 - protein, 14 aa, Severe acute respiratory syndrome coronavirus 2
  REGION 1..14: note = Table B: HLA-DRB1*04:05L HLA-DRB1*04:08L
TDPYEDFQENWNTK

SEQ ID NO: 17038 - protein, 14 aa, Severe acute respiratory syndrome coronavirus 2
  REGION 1..14: note = Table B: HLA-DRB1*04:05L HLA-DRB1*15:03L
ENWNTKHSSGVTRE

SEQ ID NO: 17039 - protein, 12 aa, Severe acute respiratory syndrome coronavirus 2
  REGION 1..12: note = Table B: HLA-DRB1*04:05L HLA-DRB1*01:02L
RELMRELNGGAY

SEQ ID NO: 17040 - protein, 14 aa, Severe acute respiratory syndrome coronavirus 2
  REGION 1..14: note = Table B: HLA-DRB1*04:05L HLA-DRB1*01:02L HLA-DPA1*01:03-B1*03:01L HLA-DRB1*12:01L HLA-DPA1*02:01-B1*13:01L HLA-DPA1*01:03-B1*104:01L HLA-DQA1*05:05-B1*03:01L
LLARAGKASCTLSE

SEQ ID NO: 17041 - protein, 12 aa, Severe acute respiratory syndrome coronavirus 2
  REGION 1..12: note = Table B: HLA-DRB1*04:05L HLA-DRB1*12:01L
IDTKRGVYCCRE

SEQ ID NO: 17042 - protein, 12 aa, Severe acute respiratory syndrome coronavirus 2
  REGION 1..12: note = Table B: HLA-DRB1*04:05L HLA-DRB1*12:01L
DTKRGVYCCREH

SEQ ID NO: 17043 - protein, 12 aa, Severe acute respiratory syndrome coronavirus 2
  REGION 1..12: note = Table B: HLA-DRB1*04:05L HLA-DQA1*01:02-B1*06:02L HLA-DRB1*01:02L HLA-DRB1*12:01L HLA-DRB1*04:08L HLA-DRB1*15:03L
HEIAWYTERSEK

SEQ ID NO: 17044 - protein, 11 aa, Severe acute respiratory syndrome coronavirus 2
  REGION 1..11: note = Table B: HLA-DRB1*04:05L HLA-DRB1*01:01L HLA-DPA1*01:03-B1*03:01L HLA-DPA1*03:01-B1*04:02L HLA-DRB1*14:01L HLA-DRB1*14:02L HLA-DRB1*12:02L HLA-DRB1*07:01L HLA-DRB1*10:01L
SYELQTPFEIK

SEQ ID NO: 17045 - protein, 15 aa, Severe acute respiratory syndrome coronavirus 2
  REGION 1..15: note = Table B: HLA-DRB1*04:05L HLA-DRB1*11:04L
IKTIQPRVEKKKLDG

SEQ ID NO: 17046 - protein, 13 aa, Severe acute respiratory syndrome coronavirus 2
  REGION 1..13: note = Table B: HLA-DRB1*04:05L HLA-DRB1*08:04L HLA-DRB1*14:02L HLA-DRB1*11:01L HLA-DPA1*01:03-B1*104:01L
ETSWQTGDFVKAT

SEQ ID NO: 17047 - protein, 15 aa, Severe acute respiratory syndrome coronavirus 2
  REGION 1..15: note = Table B: HLA-DRB1*04:05L HLA-DRB1*01:02L HLA-DRB1*12:01L HLA-DRB1*16:01L HLA-DRB1*04:08L
LPQNAVVKIYCPACH

SEQ ID NO: 17048 - protein, 12 aa, Severe acute respiratory syndrome coronavirus 2
  REGION 1..12: note = Table B: HLA-DRB1*04:05L HLA-DRB1*01:02L HLA-DPA1*01:03-B1*03:01L HLA-DRB1*12:01L HLA-DPA1*02:01-B1*13:01L HLA-DRB1*15:03L
AVVKIYCPACHN

SEQ ID NO: 17049 - protein, 13 aa, Severe acute respiratory syndrome coronavirus 2
  REGION 1..13: note = Table B: HLA-DRB1*04:05L HLA-DQA1*01:02-B1*06:02L HLA-DRB1*01:02L HLA-DPA1*01:03-B1*03:01L HLA-DRB1*12:01L HLA-DPA1*02:01-B1*13:01L
VVKIYCPACHNSE

SEQ ID NO: 17050 - protein, 16 aa, Severe acute respiratory syndrome coronavirus 2
  REGION 1..16: note = Table B: HLA-DRB1*04:05L HLA-DRB1*08:04L HLA-DRB1*08:01L HLA-DPA1*02:01-B1*13:01L HLA-DRB1*04:08L
VKIYCPACHNSEVGPE

SEQ ID NO: 17051 - protein, 13 aa, Severe acute respiratory syndrome coronavirus 2
  REGION 1..13: note = Table B: HLA-DRB1*04:05L
VGPEHSLAEYHNE

SEQ ID NO: 17052 - protein, 14 aa, Severe acute respiratory syndrome coronavirus 2
  REGION 1..14: note = Table B: HLA-DRB1*04:05L
NESGLKTILRKGGR

SEQ ID NO: 17053 - protein, 14 aa, Severe acute respiratory syndrome coronavirus 2
  REGION 1..14: note = Table B: HLA-DRB1*04:05L HLA-DRB1*11:02L HLA-DRB1*13:01L HLA-DQA1*05:05-B1*03:116L HLA-DRB1*14:54L HLA-DRB1*08:02L HLA-DRB1*08:03L HLA-DRB1*15:03L
ESGLKTILRKGGRT

SEQ ID NO: 17054 - protein, 16 aa, Severe acute respiratory syndrome coronavirus 2
  REGION 1..16: note = Table B: HLA-DRB1*04:05L
LKTILRKGGRTIAFGG

SEQ ID NO: 17055 - protein, 13 aa, Severe acute respiratory syndrome coronavirus 2
  REGION 1..13: note = Table B: HLA-DRB1*04:05L HLA-DPA1*01:03-B1*03:01L HLA-DRB1*12:01L HLA-DPA1*02:01-B1*13:01L HLA-DPA1*01:03-B1*104:01L
QKEKVNINIVGDF

SEQ ID NO: 17056 - protein, 12 aa, Severe acute respiratory syndrome coronavirus 2
  REGION 1..12: note = Table B: HLA-DRB1*04:05L HLA-DRB1*12:01L HLA-DPA1*02:01-B1*13:01L
EKVNINIVGDFK

SEQ ID NO: 17057 - protein, 14 aa, Severe acute respiratory syndrome coronavirus 2
  REGION 1..14: note = Table B: HLA-DRB1*04:05L HLA-DQA1*05:05-B1*03:01L HLA-DRB1*04:08L
EEIAIILASFSAST

SEQ ID NO: 17058 - protein, 12 aa, Severe acute respiratory syndrome coronavirus 2
  REGION 1..12: note = Table B: HLA-DRB1*04:05L HLA-DRB1*01:02L HLA-DQA1*01-B1*05L HLA-DRB4*02:01NL HLA-DRB1*04:08L
SASTSAFVETVK

SEQ ID NO: 17059 - protein, 12 aa, Severe acute respiratory syndrome coronavirus 2
  REGION 1..12: note = Table B: HLA-DRB1*04:05L HLA-DRB1*01:02L HLA-DPA1*01:03-B1*03:01L HLA-DQA1*01-B1*05L HLA-DRB4*02:01NL HLA-DRB1*14:17L HLA-DPA1*01:02-B1*04:01L HLA-DRB1*04:08L HLA-DRB1*15:03L
ASTSAFVETVKG

SEQ ID NO: 17060 - protein, 13 aa, Severe acute respiratory syndrome coronavirus 2
  REGION 1..13: note = Table B: HLA-DRB1*04:05L HLA-DPA1*01:03-B1*03:01L HLA-DRB1*12:01L HLA-DPA1*02:01-B1*13:01L
KAFKQIVESCGNF

SEQ ID NO: 17061 - protein, 13 aa, Severe acute respiratory syndrome coronavirus 2
  REGION 1..13: note = Table B: HLA-DRB1*04:05L HLA-DRB1*01:02L HLA-DPA1*01:03-B1*03:01L HLA-DRB1*12:01L HLA-DPA1*02:01-B1*13:01L
AFKQIVESCGNFK

SEQ ID NO: 17062 - protein, 12 aa, Severe acute respiratory syndrome coronavirus 2
  REGION 1..12: note = Table B: HLA-DRB1*04:05L HLA-DRB1*01:02L HLA-DRB3*02:01L HLA-DRB1*12:02L HLA-DRB1*14:54L
IGEQKSILSPLY

SEQ ID NO: 17063 - protein, 14 aa, Severe acute respiratory syndrome coronavirus 2
  REGION 1..14: note = Table B: HLA-DRB1*04:05L
RVVRSIFSRTLETA

SEQ ID NO: 17064 - protein, 14 aa, Severe acute respiratory syndrome coronavirus 2
  REGION 1..14: note = Table B: HLA-DRB1*04:05L HLA-DRB1*08:01L HLA-DPA1*01:03-B1*04:02L HLA-DPA1*02:01-B1*13:01L HLA-DQA1*05:05-B1*03:01L
VVRSIFSRTLETAQ

SEQ ID NO: 17065 - protein, 12 aa, Severe acute respiratory syndrome coronavirus 2
  REGION 1..12: note = Table B: HLA-DRB1*04:05L HLA-DRB4*03:01NL HLA-DRB1*08:04L HLA-DPA1*01:03-B1*03:01L HLA-DQA1*01:01-B1*05:01L HLA-DRB1*08:01L HLA-DQA1*01-B1*05L HLA-DPA1*01:03-B1*04:01L HLA-DRB1*04:10L HLA-DPA1*01:03-B1*04:02L HLA-DRB1*12:01L
  REGION 1..12: note = CONT. FROM ABOVE: HLA-DPA1*02:01-B1*13:01L HLA-DRB1*14:54L HLA-D QA1*05:05-B1*03:01L HLA-DRB1*04:08L
SIFSRTLETAQN

SEQ ID NO: 17066 - protein, 12 aa, Severe acute respiratory syndrome coronavirus 2
  REGION 1..12: note = Table B: HLA-DRB1*04:05L HLA-DPA1*01:03-B1*03:01L HLA-DRB1*12:01L HLA-DPA1*02:01-B1*13:01L
IFSRTLETAQNS

SEQ ID NO: 17067 - protein, 12 aa, Severe acute respiratory syndrome coronavirus 2
  REGION 1..12: note = Table B: HLA-DRB1*04:05L HLA-DRB1*01:02L HLA-DRB1*12:01L HLA-DPA1*03:01-B1*105:01L HLA-DQA1*03:01-B1*03:02L HLA-DRB1*16:01L HLA-DRB1*04:08L
KPVLDWLEEKFK

SEQ ID NO: 17068 - protein, 13 aa, Severe acute respiratory syndrome coronavirus 2
  REGION 1..13: note = Table B: HLA-DRB1*04:05L HLA-DRB1*14:01L HLA-DRB1*11:04L HLA-DRB3*01:01L
LDWLEEKFKEGVE

SEQ ID NO: 17069 - protein, 12 aa, Severe acute respiratory syndrome coronavirus 2
  REGION 1..12: note = Table B: HLA-DRB1*04:05L HLA-DRB1*12:01L HLA-DPA1*02:01-B1*13:01L
EKFKEGVEFLRD

SEQ ID NO: 17070 - protein, 12 aa, Severe acute respiratory syndrome coronavirus 2
  REGION 1..12: note = Table B: HLA-DRB1*04:05L HLA-DRB1*12:01L HLA-DPA1*02:01-B1*13:01L HLA-DQA1*03:01-B1*03:02L HLA-DPA1*01:02-B1*04:01L HLA-DRB1*16:01L HLA-DRB1*15:03L
KEGVEFLRDGWE

SEQ ID NO: 17071 - protein, 11 aa, Severe acute respiratory syndrome coronavirus 2
  REGION 1..11: note = Table B: HLA-DRB1*04:05L HLA-DQA1*05:05-B1*03:19L
FLRDGWEIVKF

SEQ ID NO: 17072 - protein, 13 aa, Severe acute respiratory syndrome coronavirus 2
  REGION 1..13: note = Table B: HLA-DRB1*04:05L HLA-DRB1*11:04L HLA-DRB1*11:01L HLA-DRB3*01:01L
KESVQTFFKLVNK

SEQ ID NO: 17073 - protein, 13 aa, Severe acute respiratory syndrome coronavirus 2
  REGION 1..13: note = Table B: HLA-DRB1*04:05L
ADSIIIGGAKLKA

SEQ ID NO: 17074 - protein, 13 aa, Severe acute respiratory syndrome coronavirus 2
  REGION 1..13: note = Table B: HLA-DRB1*04:05L HLA-DRB1*11:03L HLA-DRB1*14:02L
SIIIGGAKLKALN

SEQ ID NO: 17075 - protein, 14 aa, Severe acute respiratory syndrome coronavirus 2
  REGION 1..14: note = Table B: HLA-DRB1*04:05L HLA-DPA1*01:03-B1*03:01L HLA-DRB1*12:01L HLA-DPA1*02:01-B1*13:01L HLA-DRB1*04:08L
KALNLGETFVTHSK

SEQ ID NO: 17076 - protein, 17 aa, Severe acute respiratory syndrome coronavirus 2
  REGION 1..17: note = Table B: HLA-DRB1*04:05L
VKSREETGLLMPLKAPK

SEQ ID NO: 17077 - protein, 15 aa, Severe acute respiratory syndrome coronavirus 2
  REGION 1..15: note = Table B: HLA-DRB1*04:05L
EGETLPTEVLTEEVV

SEQ ID NO: 17078 - protein, 12 aa, Severe acute respiratory syndrome coronavirus 2
  REGION 1..12: note = Table B: HLA-DRB1*04:05L HLA-DQA1*01:02-B1*06:02L HLA-DQA1*02:01-B1*03:03L
GLMLLEIKDTEK

SEQ ID NO: 17079 - protein, 12 aa, Severe acute respiratory syndrome coronavirus 2
  REGION 1..12: note = Table B: HLA-DRB1*04:05L HLA-DRB1*01:02L HLA-DRB1*08:04L HLA-DRB3*02:01L HLA-DQA1*05:05-B1*03:01L HLA-DRB1*04:08L
LMLLEIKDTEKY

SEQ ID NO: 17080 - protein, 14 aa, Severe acute respiratory syndrome coronavirus 2
  REGION 1..14: note = Table B: HLA-DRB1*04:05L HLA-DRB1*01:02L HLA-DRB1*08:01L HLA-DPA1*02:01-B1*13:01L HLA-DPA1*03:01-B1*105:01L HLA-DRB1*16:01L HLA-DQA1*01:03-B1*06:01L HLA-DRB1*04:08L
GYKSVNITFELDER

SEQ ID NO: 17081 - protein, 13 aa, Severe acute respiratory syndrome coronavirus 2
  REGION 1..13: note = Table B: HLA-DRB1*04:05L HLA-DRB1*01:02L HLA-DQA1*01:03-B1*06:01L HLA-DRB1*04:08L
ELDERIDKVLNEK

SEQ ID NO: 17082 - protein, 14 aa, Severe acute respiratory syndrome coronavirus 2
  REGION 1..14: note = Table B: HLA-DRB1*04:05L
RIDKVLNEKCSAYT

SEQ ID NO: 17083 - protein, 12 aa, Severe acute respiratory syndrome coronavirus 2
  REGION 1..12: note = Table B: HLA-DRB1*04:05L HLA-DQA1*01:01-B1*05:01L HLA-DQA1*05:05-B1*03:01L HLA-DRB1*14:17L
TVELGTEVNEFA

SEQ ID NO: 17084 - protein, 14 aa, Severe acute respiratory syndrome coronavirus 2
  REGION 1..14: note = Table B: HLA-DRB1*04:05L
LTPLGIDLDEWSMA

SEQ ID NO: 17085 - protein, 14 aa, Severe acute respiratory syndrome coronavirus 2
  REGION 1..14: note = Table B: HLA-DRB1*04:05L HLA-DQA1*03:01-B1*03:02L HLA-DRB1*16:01L
TPLGIDLDEWSMAT

SEQ ID NO: 17086 - protein, 10 aa, Severe acute respiratory syndrome coronavirus 2
  REGION 1..10: note = Table B: HLA-DRB1*04:05L HLA-DQA1*01:02-B1*06:02L HLA-DQA1*05:05-B1*03:19L HLA-DPA1*02:01-B1*13:01L HLA-DQA1*01:03-B1*06:01L HLA-DRB1*15:03L
YYLFDESGEF

SEQ ID NO: 17087 - protein, 15 aa, Severe acute respiratory syndrome coronavirus 2
  REGION 1..15: note = Table B: HLA-DRB1*04:05L
SHMYCSFYPPDEDEE

SEQ ID NO: 17088 - protein, 15 aa, Severe acute respiratory syndrome coronavirus 2
  REGION 1..15: note = Table B: HLA-DRB1*04:05L HLA-DPA1*02:01-B1*13:01L
QPEEEQEEDWLDDDS

SEQ ID NO: 17089 - protein, 13 aa, Severe acute respiratory syndrome coronavirus 2
  REGION 1..13: note = Table B: HLA-DRB1*04:05L HLA-DQA1*01:02-B1*06:02L HLA-DRB4*03:01NL HLA-DQA1*01-B1*05L HLA-DRB1*04:10L HLA-DRB1*12:01L HLA-DRB1*14:54L HLA-DRB1*16:01L
TTTIQTIVEVQPQ

SEQ ID NO: 17090 - protein, 11 aa, Severe acute respiratory syndrome coronavirus 2
  REGION 1..11: note = Table B: HLA-DRB1*04:05L HLA-DQA1*01:02-B1*06:02L HLA-DRB1*14:01L HLA-DRB1*04:10L HLA-DPA1*03:01-B1*105:01L HLA-DRB1*14:54L HLA-DQA1*05:05-B1*03:01L HLA-DRB1*15:03L
IVEVQPQLEME

SEQ ID NO: 17091 - protein, 13 aa, Severe acute respiratory syndrome coronavirus 2
  REGION 1..13: note = Table B: HLA-DRB1*04:05L HLA-DRB1*04:10L HLA-DPA1*03:01-B1*105:01L
MELTPVVQTIEVN

SEQ ID NO: 17092 - protein, 12 aa, Severe acute respiratory syndrome coronavirus 2
  REGION 1..12: note = Table B: HLA-DRB1*04:05L HLA-DRB1*01:02L HLA-DRB1*14:54L HLA-DRB1*04:08L
TIEVNSFSGYLK

SEQ ID NO: 17093 - protein, 12 aa, Severe acute respiratory syndrome coronavirus 2
  REGION 1..12: note = Table B: HLA-DRB1*04:05L HLA-DRB1*01:02L
IKNADIVEEAKK

SEQ ID NO: 17094 - protein, 14 aa, Severe acute respiratory syndrome coronavirus 2
  REGION 1..14: note = Table B: HLA-DRB1*04:05L HLA-DRB1*01:02L HLA-DRB1*14:01L HLA-DRB1*08:01L HLA-DRB1*12:01L HLA-DPA1*02:01-B1*13:01L HLA-DQA1*05:05-B1*03:01L HLA-DRB1*15:03L
VEEAKKVKPTVVVN

SEQ ID NO: 17095 - protein, 14 aa, Severe acute respiratory syndrome coronavirus 2
  REGION 1..14: note = Table B: HLA-DRB1*04:05L HLA-DRB1*01:02L HLA-DRB1*12:01L HLA-DPA1*02:01-B1*13:01L
EAKKVKPTVVVNAA

SEQ ID NO: 17096 - protein, 12 aa, Severe acute respiratory syndrome coronavirus 2
  REGION 1..12: note = Table B: HLA-DRB1*04:05L HLA-DQA1*05:05-B1*03:19L HLA-DPA1*03:01-B1*105:01L
KVKPTVVVNAAN

SEQ ID NO: 17097 - protein, 13 aa, Severe acute respiratory syndrome coronavirus 2
  REGION 1..13: note = Table B: HLA-DRB1*04:05L HLA-DQA1*01:01-B1*05:01L HLA-DRB1*14:17L
KATNNAMQVESDD

SEQ ID NO: 17098 - protein, 11 aa, Severe acute respiratory syndrome coronavirus 2
  REGION 1..11: note = Table B: HLA-DRB1*04:05L HLA-DQA1*01:02-B1*06:02L HLA-DRB1*04:08L
IATNGPLKVGG

SEQ ID NO: 17099 - protein, 13 aa, Severe acute respiratory syndrome coronavirus 2
  REGION 1..13: note = Table B: HLA-DRB1*04:05L HLA-DPA1*01:03-B1*03:01L HLA-DPA1*01:03-B1*04:01L HLA-DRB1*12:01L HLA-DPA1*02:01-B1*13:01L
LLKSAYENFNQHE

SEQ ID NO: 17100 - protein, 14 aa, Severe acute respiratory syndrome coronavirus 2
  REGION 1..14: note = Table B: HLA-DRB1*04:05L HLA-DRB3*02:01L HLA-DRB1*14:02L HLA-DRB3*01:01L HLA-DPA1*01:03-B1*02:01L HLA-DRB1*08:03L
YENFNQHEVLLAPL

SEQ ID NO: 17101 - protein, 13 aa, Severe acute respiratory syndrome coronavirus 2
  REGION 1..13: note = Table B: HLA-DRB1*04:05L HLA-DRB1*01:02L HLA-DRB1*12:01L HLA-DRB1*16:01L HLA-DRB1*15:03L
HSLRVCVDTVRTN

SEQ ID NO: 17102 - protein, 11 aa, Severe acute respiratory syndrome coronavirus 2
  REGION 1..11: note = Table B: HLA-DRB1*04:05L HLA-DRB1*04:08L HLA-DRB1*15:03L
LAVFDKNLYDK

SEQ ID NO: 17103 - protein, 11 aa, Severe acute respiratory syndrome coronavirus 2
  REGION 1..11: note = Table B: HLA-DRB1*04:05L HLA-DRB1*08:77L HLA-DRB1*03:01L HLA-DRB4*01:01L HLA-DQA1*05:05-B1*03:116L HLA-DRB1*09:01L
AVFDKNLYDKL

SEQ ID NO: 17104 - protein, 16 aa, Severe acute respiratory syndrome coronavirus 2
  REGION 1..16: note = Table B: HLA-DRB1*04:05L
ITESKPSVEQRKQDDK

SEQ ID NO: 17105 - protein, 14 aa, Severe acute respiratory syndrome coronavirus 2
  REGION 1..14: note = Table B: HLA-DRB1*04:05L HLA-DQA1*01:02-B1*06:02L HLA-DRB1*01:02L HLA-DRB1*12:01L HLA-DRB1*16:01L HLA-DQA1*02:01-B1*03:03L
SKPSVEQRKQDDKK

SEQ ID NO: 17106 - protein, 15 aa, Severe acute respiratory syndrome coronavirus 2
  REGION 1..15: note = Table B: HLA-DRB1*04:05L HLA-DRB1*16:01L
KPSVEQRKQDDKKIK

SEQ ID NO: 17107 - protein, 13 aa, Severe acute respiratory syndrome coronavirus 2
  REGION 1..13: note = Table B: HLA-DRB1*04:05L HLA-DQA1*01:02-B1*06:02L HLA-DRB1*12:01L HLA-DPA1*02:01-B1*13:01L HLA-DQA1*03:01-B1*03:02L
DDKKIKACVEEVT

SEQ ID NO: 17108 - protein, 15 aa, Severe acute respiratory syndrome coronavirus 2
  REGION 1..15: note = Table B: HLA-DRB1*04:05L
IKACVEEVTTTLEET

SEQ ID NO: 17109 - protein, 12 aa, Severe acute respiratory syndrome coronavirus 2
  REGION 1..12: note = Table B: HLA-DRB1*04:05L HLA-DRB1*08:04L HLA-DPA1*01:03-B1*03:01L HLA-DRB1*03:01L HLA-DRB1*14:02L HLA-DRB1*08:01L HLA-DPA1*03:01-B1*105:01L HLA-DRB1*04:08L
TFLKKDAPYIVG

SEQ ID NO: 17110 - protein, 11 aa, Severe acute respiratory syndrome coronavirus 2
  REGION 1..11: note = Table B: HLA-DRB1*04:05L HLA-DPA1*01:03-B1*03:01L HLA-DQA1*01:01-B1*05:01L HLA-DRB1*15:03L
GVLTAVVIPTK

SEQ ID NO: 17111 - protein, 13 aa, Severe acute respiratory syndrome coronavirus 2
  REGION 1..13: note = Table B: HLA-DRB1*04:05L HLA-DRB4*03:01NL HLA-DRB1*11:04L HLA-DRB1*11:01L HLA-DRB1*12:01L HLA-DRB1*16:01L HLA-DRB1*04:08L
TAVVIPTKKAGGT

SEQ ID NO: 17112 - protein, 14 aa, Severe acute respiratory syndrome coronavirus 2
  REGION 1..14: note = Table B: HLA-DRB1*04:05L HLA-DRB1*08:01L HLA-DRB1*12:01L HLA-DRB1*15:03L
AGGTTEMLAKALRK

SEQ ID NO: 17113 - protein, 13 aa, Severe acute respiratory syndrome coronavirus 2
  REGION 1..13: note = Table B: HLA-DRB1*04:05L
AKALRKVPTDNYI

SEQ ID NO: 17114 - protein, 13 aa, Severe acute respiratory syndrome coronavirus 2
  REGION 1..13: note = Table B: HLA-DRB1*04:05L HLA-DRB1*01:02L
ALRKVPTDNYITT

SEQ ID NO: 17115 - protein, 13 aa, Severe acute respiratory syndrome coronavirus 2
  REGION 1..13: note = Table B: HLA-DRB1*04:05L HLA-DRB1*04:10L HLA-DRB1*16:01L
GQGLNGYTVEEAK

SEQ ID NO: 17116 - protein, 11 aa, Severe acute respiratory syndrome coronavirus 2
  REGION 1..11: note = Table B: HLA-DRB1*04:05L HLA-DQA1*01:02-B1*06:02L HLA-DRB4*03:01NL HLA-DRB1*14:17L HLA-DRB1*16:01L
LNGYTVEEAKT

SEQ ID NO: 17117 - protein, 14 aa, Severe acute respiratory syndrome coronavirus 2
  REGION 1..14: note = Table B: HLA-DRB1*04:05L HLA-DRB1*01:02L HLA-DPA1*02:01-B1*13:01L HLA-DPA1*03:01-B1*105:01L HLA-DQA1*05:05-B1*03:01L HLA-DQA1*01:03-B1*06:01L
SNEKQEILGTVSWN

SEQ ID NO: 17118 - protein, 14 aa, Severe acute respiratory syndrome coronavirus 2
  REGION 1..14: note = Table B: HLA-DRB1*04:05L HLA-DRB1*08:04L HLA-DRB1*11:03L HLA-DRB1*11:04L HLA-DRB1*08:01L HLA-DRB1*11:01L HLA-DRB1*04:08L
LGTVSWNLREMLAH

SEQ ID NO: 17119 - protein, 14 aa, Severe acute respiratory syndrome coronavirus 2
  REGION 1..14: note = Table B: HLA-DRB1*04:05L HLA-DRB1*01:02L HLA-DRB1*12:01L HLA-DRB1*04:08L
SWNLREMLAHAEET

SEQ ID NO: 17120 - protein, 12 aa, Severe acute respiratory syndrome coronavirus 2
  REGION 1..12: note = Table B: HLA-DRB1*04:05L HLA-DQA1*01:02-B1*06:02L HLA-DRB1*01:02L HLA-DRB1*16:01L
LREMLAHAEETR

SEQ ID NO: 17121 - protein, 13 aa, Severe acute respiratory syndrome coronavirus 2
  REGION 1..13: note = Table B: HLA-DRB1*04:05L HLA-DRB1*12:01L HLA-DPA1*02:01-B1*13:01L
EETRKLMPVCVET

SEQ ID NO: 17122 - protein, 12 aa, Severe acute respiratory syndrome coronavirus 2
  REGION 1..12: note = Table B: HLA-DRB1*04:05L HLA-DRB1*01:02L HLA-DRB1*12:01L HLA-DPA1*02:01-B1*13:01L
TRKLMPVCVETK

SEQ ID NO: 17123 - protein, 12 aa, Severe acute respiratory syndrome coronavirus 2
  REGION 1..12: note = Table B: HLA-DRB1*04:05L
QRKYKGIKIQEG

SEQ ID NO: 17124 - protein, 14 aa, Severe acute respiratory syndrome coronavirus 2
  REGION 1..14: note = Table B: HLA-DRB1*04:05L HLA-DPA1*02:01-B1*13:01L HLA-DPA1*01:03-B1*104:01L HLA-DRB1*16:01L HLA-DRB1*04:08L
TSKTTVASLINTLN

SEQ ID NO: 17125 - protein, 14 aa, Severe acute respiratory syndrome coronavirus 2
  REGION 1..14: note = Table B: HLA-DRB1*04:05L
TTVASLINTLNDLN

SEQ ID NO: 17126 - protein, 13 aa, Severe acute respiratory syndrome coronavirus 2
  REGION 1..13: note = Table B: HLA-DRB1*04:05L
THGLNLEEAARYM

SEQ ID NO: 17127 - protein, 14 aa, Severe acute respiratory syndrome coronavirus 2
  REGION 1..14: note = Table B: HLA-DRB1*04:05L HLA-DRB3*01:01L HLA-DRB1*04:08L
HGLNLEEAARYMRS

SEQ ID NO: 17128 - protein, 13 aa, Severe acute respiratory syndrome coronavirus 2
  REGION 1..13: note = Table B: HLA-DRB1*04:05L HLA-DQA1*01:03-B1*06:01L
KVPATVSVSSPDA

SEQ ID NO: 17129 - protein, 13 aa, Severe acute respiratory syndrome coronavirus 2
  REGION 1..13: note = Table B: HLA-DRB1*04:05L HLA-DRB1*01:02L HLA-DRB3*02:01L HLA-DRB1*04:08L
ISLAGSYKDWSYS

SEQ ID NO: 17130 - protein, 17 aa, Severe acute respiratory syndrome coronavirus 2
  REGION 1..17: note = Table B: HLA-DRB1*04:05L HLA-DRB1*12:01L
EFLKRGDKSVYYTSNPT

SEQ ID NO: 17131 - protein, 11 aa, Severe acute respiratory syndrome coronavirus 2
  REGION 1..11: note = Table B: HLA-DRB1*04:05L
YYTSNPTTFHL

SEQ ID NO: 17132 - protein, 12 aa, Severe acute respiratory syndrome coronavirus 2
  REGION 1..12: note = Table B: HLA-DRB1*04:05L HLA-DQA1*01:02-B1*06:02L HLA-DRB1*01:02L HLA-DRB1*12:01L HLA-DRB1*16:01L HLA-DRB1*15:03L
LKTLLSLREVRT

SEQ ID NO: 17133 - protein, 14 aa, Severe acute respiratory syndrome coronavirus 2
  REGION 1..14: note = Table B: HLA-DRB1*04:05L
LSLREVRTIKVFTT

SEQ ID NO: 17134 - protein, 13 aa, Severe acute respiratory syndrome coronavirus 2
  REGION 1..13: note = Table B: HLA-DRB1*04:05L HLA-DRB1*01:02L HLA-DPA1*01:03-B1*03:01L HLA-DRB1*12:01L HLA-DQA1*03:01-B1*03:02L HLA-DRB1*16:01L HLA-DRB1*04:08L HLA-DRB1*15:03L
REVRTIKVFTTVD

SEQ ID NO: 17135 - protein, 12 aa, Severe acute respiratory syndrome coronavirus 2
  REGION 1..12: note = Table B: HLA-DRB1*04:05L HLA-DRB1*08:04L HLA-DPA1*01:03-B1*03:01L HLA-DRB1*03:01L HLA-DRB3*01:01L HLA-DRB1*04:08L
YVLPNDDTLRVE

SEQ ID NO: 17136 - protein, 11 aa, Severe acute respiratory syndrome coronavirus 2
  REGION 1..11: note = Table B: HLA-DRB1*04:05L HLA-DQA1*03:01-B1*03:02L HLA-DPA1*01:03-B1*104:01L HLA-DRB1*16:01L HLA-DQA1*01:03-B1*06:01L HLA-DQA1*02:01-B1*03:03L
KYPQVNGLTSI

SEQ ID NO: 17137 - protein, 12 aa, Severe acute respiratory syndrome coronavirus 2
  REGION 1..12: note = Table B: HLA-DRB1*04:05L HLA-DRB1*08:04L
QIELKFNPPALQ

SEQ ID NO: 17138 - protein, 11 aa, Severe acute respiratory syndrome coronavirus 2
  REGION 1..11: note = Table B: HLA-DRB1*04:05L HLA-DPA1*01:02-B1*04:01L
YRARAGEAANF

SEQ ID NO: 17139 - protein, 12 aa, Severe acute respiratory syndrome coronavirus 2
  REGION 1..12: note = Table B: HLA-DRB1*04:05L HLA-DRB1*01:02L HLA-DPA1*01:03-B1*03:01L
RARAGEAANFCA

SEQ ID NO: 17140 - protein, 15 aa, Severe acute respiratory syndrome coronavirus 2
  REGION 1..15: note = Table B: HLA-DRB1*04:05L HLA-DPA1*01:03-B1*03:01L HLA-DPA1*03:01-B1*04:02L HLA-DRB1*11:02L HLA-DRB1*11:04L HLA-DRB1*14:02L HLA-DRB1*11:01L HLA-DRB1*08:02L HLA-DRB1*08:03L
ALILAYCNKTVGELG

SEQ ID NO: 17141 - protein, 12 aa, Severe acute respiratory syndrome coronavirus 2
  REGION 1..12: note = Table B: HLA-DRB1*04:05L HLA-DQA1*01:02-B1*06:02L HLA-DRB1*04:10L
NKTVGELGDVRE

SEQ ID NO: 17142 - protein, 11 aa, Severe acute respiratory syndrome coronavirus 2
  REGION 1..11: note = Table B: HLA-DRB1*04:05L
TTLKGVEAVMY

SEQ ID NO: 17143 - protein, 13 aa, Severe acute respiratory syndrome coronavirus 2
  REGION 1..13: note = Table B: HLA-DRB1*04:05L HLA-DRB1*01:02L HLA-DRB1*04:10L
EAVMYMGTLSYEQ

SEQ ID NO: 17144 - protein, 15 aa, Severe acute respiratory syndrome coronavirus 2
  REGION 1..15: note = Table B: HLA-DRB1*04:05L HLA-DRB1*01:02L HLA-DRB1*12:01L HLA-DPA1*02:01-B1*13:01L
EQFKKGVQIPCTCGK

SEQ ID NO: 17145 - protein, 15 aa, Severe acute respiratory syndrome coronavirus 2
  REGION 1..15: note = Table B: HLA-DRB1*04:05L HLA-DRB1*12:01L HLA-DPA1*02:01-B1*13:01L
QFKKGVQIPCTCGKQ

SEQ ID NO: 17146 - protein, 14 aa, Severe acute respiratory syndrome coronavirus 2
  REGION 1..14: note = Table B: HLA-DRB1*04:05L HLA-DRB1*01:02L HLA-DPA1*02:01-B1*13:01L HLA-DRB1*16:01L
GKQATKYLVQQESP

SEQ ID NO: 17147 - protein, 16 aa, Severe acute respiratory syndrome coronavirus 2
  REGION 1..16: note = Table B: HLA-DRB1*04:05L HLA-DPA1*01:03-B1*03:01L HLA-DRB1*14:02L HLA-DRB1*11:01L HLA-DPA1*02:01-B1*13:01L
KHGTFTCASEYTGNYQ

SEQ ID NO: 17148 - protein, 13 aa, Severe acute respiratory syndrome coronavirus 2
  REGION 1..13: note = Table B: HLA-DRB1*04:05L HLA-DRB1*14:01L HLA-DRB1*12:01L HLA-DRB1*15:03L
HITSKETLYCIDG

SEQ ID NO: 17149 - protein, 13 aa, Severe acute respiratory syndrome coronavirus 2
  REGION 1..13: note = Table B: HLA-DRB1*04:05L
IDGALLTKSSEYK

SEQ ID NO: 17150 - protein, 13 aa, Severe acute respiratory syndrome coronavirus 2
  REGION 1..13: note = Table B: HLA-DRB1*04:05L HLA-DRB1*01:02L HLA-DPA1*03:01-B1*04:02L HLA-DRB1*15:03L
YKGPITDVFYKEN

SEQ ID NO: 17151 - protein, 13 aa, Severe acute respiratory syndrome coronavirus 2
  REGION 1..13: note = Table B: HLA-DRB1*04:05L HLA-DRB4*03:01NL HLA-DRB1*04:08L
TDVFYKENSYTTT

SEQ ID NO: 17152 - protein, 12 aa, Severe acute respiratory syndrome coronavirus 2
  REGION 1..12: note = Table B: HLA-DRB1*04:05L HLA-DQA1*01:02-B1*06:02L HLA-DRB1*01:02L HLA-DRB1*08:01L HLA-DQA1*01-B1*05L HLA-DPA1*03:01-B1*105:01L HLA-DPA1*01:02-B1*04:01L HLA-DRB1*16:01L HLA-DRB1*04:08L
FDNFKFVCDNIK

SEQ ID NO: 17153 - protein, 14 aa, Severe acute respiratory syndrome coronavirus 2
  REGION 1..14: note = Table B: HLA-DRB1*04:05L HLA-DPA1*02:01-B1*13:01L
DNFKFVCDNIKFAD

SEQ ID NO: 17154 - protein, 12 aa, Severe acute respiratory syndrome coronavirus 2
  REGION 1..12: note = Table B: HLA-DRB1*04:05L HLA-DQA1*01:02-B1*06:02L HLA-DRB1*12:01L HLA-DQA1*01:03-B1*06:01L HLA-DRB1*15:03L
TGYKKPASRELK

SEQ ID NO: 17155 - protein, 13 aa, Severe acute respiratory syndrome coronavirus 2
  REGION 1..13: note = Table B: HLA-DRB1*04:05L
RELKVTFFPDLNG

SEQ ID NO: 17156 - protein, 13 aa, Severe acute respiratory syndrome coronavirus 2
  REGION 1..13: note = Table B: HLA-DRB1*04:05L HLA-DRB3*02:01L HLA-DRB1*11:03L HLA-DRB1*11:04L HLA-DRB1*08:01L HLA-DRB1*11:01L HLA-DRB1*04:08L
GDVVAIDYKHYTP

SEQ ID NO: 17157 - protein, 12 aa, Severe acute respiratory syndrome coronavirus 2
  REGION 1..12: note = Table B: HLA-DRB1*04:05L HLA-DQA1*01:02-B1*06:02L HLA-DRB1*01:02L HLA-DRB1*12:01L HLA-DPA1*03:01-B1*105:01L HLA-DRB1*15:03L
AIDYKHYTPSFK

SEQ ID NO: 17158 - protein, 12 aa, Severe acute respiratory syndrome coronavirus 2
  REGION 1..12: note = Table B: HLA-DRB1*04:05L HLA-DRB1*01:02L HLA-DRB1*12:01L HLA-DRB1*15:03L
IDYKHYTPSFKK

SEQ ID NO: 17159 - protein, 13 aa, Severe acute respiratory syndrome coronavirus 2
  REGION 1..13: note = Table B: HLA-DRB1*04:05L HLA-DRB1*01:02L HLA-DRB1*08:01L HLA-DRB1*12:01L HLA-DPA1*02:01-B1*13:01L
KGAKLLHKPIVWH

SEQ ID NO: 17160 - protein, 14 aa, Severe acute respiratory syndrome coronavirus 2
  REGION 1..14: note = Table B: HLA-DRB1*04:05L HLA-DQA1*01:02-B1*06:02L HLA-DRB1*01:02L HLA-DRB1*08:01L HLA-DRB1*12:01L HLA-DPA1*02:01-B1*13:01L HLA-DRB1*16:01L HLA-DRB1*04:08L HLA-DRB1*15:03L
GAKLLHKPIVWHVN

SEQ ID NO: 17161 - protein, 16 aa, Severe acute respiratory syndrome coronavirus 2
  REGION 1..16: note = Table B: HLA-DRB1*04:05L HLA-DPA1*02:01-B1*13:01L HLA-DPA1*03:01-B1*105:01L
KPANNSLKITEEVGHT

SEQ ID NO: 17162 - protein, 13 aa, Severe acute respiratory syndrome coronavirus 2
  REGION 1..13: note = Table B: HLA-DRB1*04:05L HLA-DRB3*01:01L HLA-DRB1*04:08L HLA-DRB1*15:03L
SSLTIKKPNELSR

SEQ ID NO: 17163 - protein, 12 aa, Severe acute respiratory syndrome coronavirus 2
  REGION 1..12: note = Table B: HLA-DRB1*04:05L HLA-DRB1*01:02L HLA-DRB1*12:01L HLA-DRB1*16:01L
SRVLGLKTLATH

SEQ ID NO: 17164 - protein, 13 aa, Severe acute respiratory syndrome coronavirus 2
  REGION 1..13: note = Table B: HLA-DRB1*04:05L HLA-DRB4*03:01NL HLA-DRB1*14:01L HLA-DRB1*04:10L HLA-DRB1*14:54L
HGLAAVNSVPWDT

SEQ ID NO: 17165 - protein, 14 aa, Severe acute respiratory syndrome coronavirus 2
  REGION 1..14: note = Table B: HLA-DRB1*04:05L HLA-DRB1*01:02L HLA-DPA1*02:01-B1*13:01L HLA-DRB1*16:01L HLA-DRB1*04:08L HLA-DQA1*02:01-B1*03:03L HLA-DRB1*15:03L
YAKPFLNKVVSTTT

SEQ ID NO: 17166 - protein, 16 aa, Severe acute respiratory syndrome coronavirus 2
  REGION 1..16: note = Table B: HLA-DRB1*04:05L HLA-DRB1*12:01L HLA-DPA1*01:03-B1*104:01L
IVTRCLNRVCTNYMPY

SEQ ID NO: 17167 - protein, 10 aa, Severe acute respiratory syndrome coronavirus 2
  REGION 1..10: note = Table B: HLA-DRB1*04:05L HLA-DQA1*01:02-B1*06:02L HLA-DQA1*05:05-B1*03:19L HLA-DPA1*02:01-B1*13:01L HLA-DPA1*03:01-B1*105:01L HLA-DQA1*01:03-B1*06:01L HLA-DRB1*15:03L
NYMPYFFTLL

SEQ ID NO: 17168 - protein, 14 aa, Severe acute respiratory syndrome coronavirus 2
  REGION 1..14: note = Table B: HLA-DRB1*04:05L HLA-DPA1*02:01-B1*13:01L
TNSRIKASMPTTIA

SEQ ID NO: 17169 - protein, 12 aa, Severe acute respiratory syndrome coronavirus 2
  REGION 1..12: note = Table B: HLA-DRB1*04:05L HLA-DRB1*07:01L HLA-DRB1*04:08L HLA-DRB1*15:03L
RIKASMPTTIAK

SEQ ID NO: 17170 - protein, 12 aa, Severe acute respiratory syndrome coronavirus 2
  REGION 1..12: note = Table B: HLA-DRB1*04:05L HLA-DQA1*05:05-B1*03:01L HLA-DRB1*07:01L
FNYLKSPNFSKL

SEQ ID NO: 17171 - protein, 13 aa, Severe acute respiratory syndrome coronavirus 2
  REGION 1..13: note = Table B: HLA-DRB1*04:05L HLA-DRB1*11:03L
LGVLMSNLGMPSY

SEQ ID NO: 17172 - protein, 13 aa, Severe acute respiratory syndrome coronavirus 2
  REGION 1..13: note = Table B: HLA-DRB1*04:05L HLA-DRB1*01:02L HLA-DPA1*03:01-B1*105:01L HLA-DQA1*03:01-B1*03:02L HLA-DQA1*05:05-B1*03:01L HLA-DQA1*02:01-B1*03:03L HLA-DRB1*15:03L
SYVHVVDGCNSST

SEQ ID NO: 17173 - protein, 13 aa, Severe acute respiratory syndrome coronavirus 2
  REGION 1..13: note = Table B: HLA-DRB1*04:05L HLA-DRB1*01:02L HLA-DPA1*01:03-B1*03:01L HLA-DRB1*12:01L HLA-DPA1*02:01-B1*13:01L
RATRVECTTIVNG

SEQ ID NO: 17174 - protein, 14 aa, Severe acute respiratory syndrome coronavirus 2
  REGION 1..14: note = Table B: HLA-DRB1*04:05L HLA-DRB1*01:02L HLA-DRB1*12:01L HLA-DPA1*02:01-B1*13:01L
NGVRRSFYVYANGG

SEQ ID NO: 17175 - protein, 13 aa, Severe acute respiratory syndrome coronavirus 2
  REGION 1..13: note = Table B: HLA-DRB1*04:05L HLA-DRB1*01:02L HLA-DRB1*04:08L HLA-DQA1*02:01-B1*03:03L
AGQKTYERHSLSH

SEQ ID NO: 17176 - protein, 12 aa, Severe acute respiratory syndrome coronavirus 2
  REGION 1..12: note = Table B: HLA-DRB1*04:05L HLA-DQA1*01:02-B1*06:02L HLA-DRB1*01:02L HLA-DRB1*08:01L HLA-DPA1*02:01-B1*13:01L HLA-DRB1*04:08L
RHSLSHFVNLDN

SEQ ID NO: 17177 - protein, 14 aa, Severe acute respiratory syndrome coronavirus 2
  REGION 1..14: note = Table B: HLA-DRB1*04:05L HLA-DRB1*01:02L HLA-DPA1*01:03-B1*03:01L HLA-DRB1*14:01L HLA-DRB1*04:10L HLA-DRB1*12:01L HLA-DQA1*05:05-B1*03:01L HLA-DRB1*04:08L
GSLPINVIVFDGKS

SEQ ID NO: 17178 - protein, 14 aa, Severe acute respiratory syndrome coronavirus 2
  REGION 1..14: note = Table B: HLA-DRB1*04:05L HLA-DRB1*01:02L HLA-DRB1*12:01L HLA-DPA1*02:01-B1*13:01L
GKSKCEESSAKSAS

SEQ ID NO: 17179 - protein, 14 aa, Severe acute respiratory syndrome coronavirus 2
  REGION 1..14: note = Table B: HLA-DRB1*04:05L
ESSAKSASVYYSQL

SEQ ID NO: 17180 - protein, 12 aa, Severe acute respiratory syndrome coronavirus 2
  REGION 1..12: note = Table B: HLA-DRB1*04:05L HLA-DQA1*02:01-B1*03:03L
KLKTLVATAEAE

SEQ ID NO: 17181 - protein, 11 aa, Severe acute respiratory syndrome coronavirus 2
  REGION 1..11: note = Table B: HLA-DRB1*04:05L HLA-DRB1*01:02L HLA-DRB1*08:77L
LVATAEAELAK

SEQ ID NO: 17182 - protein, 12 aa, Severe acute respiratory syndrome coronavirus 2
  REGION 1..12: note = Table B: HLA-DRB1*04:05L HLA-DRB1*01:02L HLA-DQA1*01-B1*05L HLA-DRB1*12:01L HLA-DRB1*04:08L HLA-DRB1*15:03L
VLSTFISAARQG

SEQ ID NO: 17183 - protein, 12 aa, Severe acute respiratory syndrome coronavirus 2
  REGION 1..12: note = Table B: HLA-DRB1*04:05L HLA-DRB1*04:08L
RQGFVDSDVETK

SEQ ID NO: 17184 - protein, 14 aa, Severe acute respiratory syndrome coronavirus 2
  REGION 1..14: note = Table B: HLA-DRB1*04:05L HLA-DRB1*01:02L HLA-DRB1*12:01L HLA-DPA1*02:01-B1*13:01L
VETKDVVECLKLSH

SEQ ID NO: 17185 - protein, 14 aa, Severe acute respiratory syndrome coronavirus 2
  REGION 1..14: note = Table B: HLA-DRB1*04:05L
ETKDVVECLKLSHQ

SEQ ID NO: 17186 - protein, 13 aa, Severe acute respiratory syndrome coronavirus 2
  REGION 1..13: note = Table B: HLA-DRB1*04:05L HLA-DQA1*01:02-B1*06:02L HLA-DRB1*01:02L HLA-DRB1*16:01L HLA-DRB1*15:03L
LKLSHQSDIEVTG

SEQ ID NO: 17187 - protein, 11 aa, Severe acute respiratory syndrome coronavirus 2
  REGION 1..11: note = Table B: HLA-DRB1*04:05L HLA-DRB4*03:01NL HLA-DRB1*08:01L HLA-DRB1*12:01L HLA-DRB1*14:54L HLA-DPA1*01:02-B1*04:01L HLA-DRB1*16:01L HLA-DRB1*04:08L
TYNKVENMTPR

SEQ ID NO: 17188 - protein, 12 aa, Severe acute respiratory syndrome coronavirus 2
  REGION 1..12: note = Table B: HLA-DRB1*04:05L HLA-DRB1*01:02L HLA-DRB1*14:01L
NKVENMTPRDLG

SEQ ID NO: 17189 - protein, 14 aa, Severe acute respiratory syndrome coronavirus 2
  REGION 1..14: note = Table B: HLA-DRB1*04:05L HLA-DQA1*05:05-B1*03:01L HLA-DQA1*01:03-B1*06:01L
AQVAKSHNIALIWN

SEQ ID NO: 17190 - protein, 14 aa, Severe acute respiratory syndrome coronavirus 2
  REGION 1..14: note = Table B: HLA-DRB1*04:05L HLA-DRB1*01:02L HLA-DRB1*12:01L HLA-DPA1*02:01-B1*13:01L HLA-DPA1*03:01-B1*105:01L HLA-DQA1*03:01-B1*03:02L
VAKSHNIALIWNVK

SEQ ID NO: 17191 - protein, 12 aa, Severe acute respiratory syndrome coronavirus 2
  REGION 1..12: note = Table B: HLA-DRB1*04:05L HLA-DRB1*04:08L
KDFMSLSEQLRK

SEQ ID NO: 17192 - protein, 13 aa, Severe acute respiratory syndrome coronavirus 2
  REGION 1..13: note = Table B: HLA-DRB1*04:05L HLA-DRB1*14:01L HLA-DRB1*12:01L HLA-DRB1*04:08L
IRSAAKKNNLPFK

SEQ ID NO: 17193 - protein, 15 aa, Severe acute respiratory syndrome coronavirus 2
  REGION 1..15: note = Table B: HLA-DRB1*04:05L
KNNLPFKLTCATTRQ

SEQ ID NO: 17194 - protein, 13 aa, Severe acute respiratory syndrome coronavirus 2
  REGION 1..13: note = Table B: HLA-DRB1*04:05L HLA-DRB1*08:01L HLA-DRB3*01:01L
TTKIALKGGKIVN

SEQ ID NO: 17195 - protein, 14 aa, Severe acute respiratory syndrome coronavirus 2
  REGION 1..14: note = Table B: HLA-DRB1*04:05L HLA-DRB1*11:01L
IALKGGKIVNNWLK

SEQ ID NO: 17196 - protein, 12 aa, Severe acute respiratory syndrome coronavirus 2
  REGION 1..12: note = Table B: HLA-DRB1*04:05L HLA-DQA1*01:02-B1*06:02L HLA-DRB1*01:02L HLA-DRB1*12:01L HLA-DPA1*02:01-B1*13:01L HLA-DQA1*03:01-B1*03:02L HLA-DQA1*02:01-B1*03:03L
KGGKIVNNWLKQ

SEQ ID NO: 17197 - protein, 12 aa, Severe acute respiratory syndrome coronavirus 2
  REGION 1..12: note = Table B: HLA-DRB1*04:05L HLA-DQA1*01:01-B1*05:01L HLA-DRB1*12:01L HLA-DPA1*02:01-B1*13:01L HLA-DQA1*01:03-B1*06:01L HLA-DQA1*02:01-B1*03:03L HLA-DRB1*15:03L
SKHTDFSSEIIG

SEQ ID NO: 17198 - protein, 13 aa, Severe acute respiratory syndrome coronavirus 2
  REGION 1..13: note = Table B: HLA-DRB1*04:05L HLA-DRB1*14:17L HLA-DRB1*16:01L HLA-DRB1*04:08L HLA-DRB1*15:03L
HADFDTWFSQRGG

SEQ ID NO: 17199 - protein, 14 aa, Severe acute respiratory syndrome coronavirus 2
  REGION 1..14: note = Table B: HLA-DRB1*04:05L
NDKACPLIAAVITR

SEQ ID NO: 17200 - protein, 12 aa, Severe acute respiratory syndrome coronavirus 2
  REGION 1..12: note = Table B: HLA-DRB1*04:05L HLA-DPA1*02:01-B1*13:01L
SKLIEYTDFATS

SEQ ID NO: 17201 - protein, 14 aa, Severe acute respiratory syndrome coronavirus 2
  REGION 1..14: note = Table B: HLA-DRB1*04:05L HLA-DPA1*03:01-B1*04:02L HLA-DRB1*14:02L HLA-DRB1*08:01L HLA-DRB1*04:10L HLA-DPA1*02:01-B1*13:01L HLA-DPA1*01:03-B1*104:01L HLA-DRB1*16:01L
TNVLEGSVAYESLR

SEQ ID NO: 17202 - protein, 11 aa, Severe acute respiratory syndrome coronavirus 2
  REGION 1..11: note = Table B: HLA-DRB1*04:05L
SIIQFPNTYLE

SEQ ID NO: 17203 - protein, 12 aa, Severe acute respiratory syndrome coronavirus 2
  REGION 1..12: note = Table B: HLA-DRB1*04:05L HLA-DRB1*01:02L HLA-DRB3*02:01L
SVRVVTTFDSEY

SEQ ID NO: 17204 - protein, 14 aa, Severe acute respiratory syndrome coronavirus 2
  REGION 1..14: note = Table B: HLA-DRB1*04:05L HLA-DRB1*08:01L HLA-DPA1*01:03-B1*104:01L HLA-DRB1*15:03L
LDISASIVAGGIVA

SEQ ID NO: 17205 - protein, 13 aa, Severe acute respiratory syndrome coronavirus 2
  REGION 1..13: note = Table B: HLA-DRB1*04:05L HLA-DRB1*12:01L HLA-DRB1*15:03L
FMRFRRAFGEYSH

SEQ ID NO: 17206 - protein, 12 aa, Severe acute respiratory syndrome coronavirus 2
  REGION 1..12: note = Table B: HLA-DRB1*04:05L HLA-DRB1*01:02L HLA-DRB1*08:01L HLA-DRB1*12:01L HLA-DRB1*04:08L
RRAFGEYSHVVA

SEQ ID NO: 17207 - protein, 11 aa, Severe acute respiratory syndrome coronavirus 2
  REGION 1..11: note = Table B: HLA-DRB1*04:05L HLA-DPA1*02:01-B1*13:01L HLA-DQA1*01:03-B1*06:01L HLA-DQA1*02:01-B1*03:03L
AFGEYSHVVAF

SEQ ID NO: 17208 - protein, 12 aa, Severe acute respiratory syndrome coronavirus 2
  REGION 1..12: note = Table B: HLA-DRB1*04:05L HLA-DRB1*01:02L HLA-DRB4*03:01NL HLA-DPA1*01:03-B1*03:01L HLA-DRB1*14:01L HLA-DQA1*01-B1*05L HLA-DRB1*04:10L HLA-DRB1*12:01L HLA-DPA1*03:01-B1*105:01L HLA-DRB1*14:54L HLA-DRB1*04:08L HLA-DRB1*15:03L
FGEYSHVVAFNT

SEQ ID NO: 17209 - protein, 12 aa, Severe acute respiratory syndrome coronavirus 2
  REGION 1..12: note = Table B: HLA-DRB1*04:05L HLA-DQA1*01:02-B1*06:02L HLA-DRB1*08:01L HLA-DRB1*12:01L HLA-DPA1*03:01-B1*105:01L HLA-DQA1*02:01-B1*03:03L HLA-DRB1*15:01L
HFYWFFSNYLKR

SEQ ID NO: 17210 - protein, 12 aa, Severe acute respiratory syndrome coronavirus 2
  REGION 1..12: note = Table B: HLA-DRB1*04:05L HLA-DQA1*01:02-B1*06:02L HLA-DPA1*03:01-B1*105:01L HLA-DRB1*15:01L
FYWFFSNYLKRR

SEQ ID NO: 17211 - protein, 12 aa, Severe acute respiratory syndrome coronavirus 2
  REGION 1..12: note = Table B: HLA-DRB1*04:05L HLA-DRB1*15:03L
YNRYLALYNKYK

SEQ ID NO: 17212 - protein, 12 aa, Severe acute respiratory syndrome coronavirus 2
  REGION 1..12: note = Table B: HLA-DRB1*04:05L HLA-DRB1*04:10L HLA-DQA1*02:01-B1*03:03L
LAKALNDFSNSG

SEQ ID NO: 17213 - protein, 13 aa, Severe acute respiratory syndrome coronavirus 2
  REGION 1..13: note = Table B: HLA-DRB1*04:05L HLA-DPA1*01:03-B1*03:01L HLA-DRB1*04:10L HLA-DRB1*12:01L HLA-DRB1*14:17L
LPTGVHAGTDLEG

SEQ ID NO: 17214 - protein, 12 aa, Severe acute respiratory syndrome coronavirus 2
  REGION 1..12: note = Table B: HLA-DRB1*04:05L
NRFTTTLNDFNL

SEQ ID NO: 17215 - protein, 13 aa, Severe acute respiratory syndrome coronavirus 2
  REGION 1..13: note = Table B: HLA-DRB1*04:05L HLA-DRB1*01:02L HLA-DPA1*03:01-B1*04:02L HLA-DRB1*12:01L HLA-DRB1*16:01L
RFTTTLNDFNLVA

SEQ ID NO: 17216 - protein, 12 aa, Severe acute respiratory syndrome coronavirus 2
  REGION 1..12: note = Table B: HLA-DRB1*04:05L HLA-DRB1*01:02L HLA-DRB1*12:01L HLA-DPA1*03:01-B1*105:01L HLA-DRB1*15:03L
IAVLDMCASLKE

SEQ ID NO: 17217 - protein, 15 aa, Severe acute respiratory syndrome coronavirus 2
  REGION 1..15: note = Table B: HLA-DRB1*04:05L
ASLKELLQNGMNGRT

SEQ ID NO: 17218 - protein, 12 aa, Severe acute respiratory syndrome coronavirus 2
  REGION 1..12: note = Table B: HLA-DRB1*04:05L HLA-DPA1*02:01-B1*13:01L
LEDEFTPFDVVR

SEQ ID NO: 17219 - protein, 11 aa, Severe acute respiratory syndrome coronavirus 2
  REGION 1..11: note = Table B: HLA-DRB1*04:05L HLA-DPA1*01:03-B1*03:01L HLA-DQA1*01-B1*05L HLA-DRB4*01:01L HLA-DPA1*01:03-B1*04:01L HLA-DPA1*02:01-B1*13:01L HLA-DPA1*01:03-B1*104:01L HLA-DQA1*05:05-B1*03:01L
VLVQSTQWSLF

SEQ ID NO: 17220 - protein, 12 aa, Severe acute respiratory syndrome coronavirus 2
  REGION 1..12: note = Table B: HLA-DRB1*04:05L HLA-DQA1*01-B1*05L HLA-DRB1*10:01L HLA-DRB1*04:08L
NMVYMPASWVMR

SEQ ID NO: 17221 - protein, 14 aa, Severe acute respiratory syndrome coronavirus 2
  REGION 1..14: note = Table B: HLA-DRB1*04:05L
DMVDTSLSGFKLKD

SEQ ID NO: 17222 - protein, 11 aa, Severe acute respiratory syndrome coronavirus 2
  REGION 1..11: note = Table B: HLA-DRB1*04:05L HLA-DRB1*08:77L HLA-DRB3*02:01L HLA-DPA1*03:01-B1*04:02L HLA-DRB1*11:03L HLA-DRB1*14:02L HLA-DQA1*05:05-B1*03:01L HLA-DQA1*01:03-B1*06:01L HLA-DRB1*04:08L
LILMTARTVYD

SEQ ID NO: 17223 - protein, 12 aa, Severe acute respiratory syndrome coronavirus 2
  REGION 1..12: note = Table B: HLA-DRB1*04:05L HLA-DRB1*01:02L HLA-DRB1*04:08L
TARTVYDDGARR

SEQ ID NO: 17224 - protein, 12 aa, Severe acute respiratory syndrome coronavirus 2
  REGION 1..12: note = Table B: HLA-DRB1*04:05L HLA-DRB1*12:01L HLA-DPA1*02:01-B1*13:01L
ARRVWTLMNVLT

SEQ ID NO: 17225 - protein, 14 aa, Severe acute respiratory syndrome coronavirus 2
  REGION 1..14: note = Table B: HLA-DRB1*04:05L HLA-DRB1*11:02L HLA-DRB1*11:03L HLA-DRB1*11:04L HLA-DRB1*11:01L HLA-DRB3*01:01L HLA-DPA1*01:03-B1*02:01L
NVLTLVYKVYYGNA

SEQ ID NO: 17226 - protein, 10 aa, Severe acute respiratory syndrome coronavirus 2
  REGION 1..10: note = Table B: HLA-DRB1*04:05L HLA-DQA1*01:02-B1*06:02L HLA-DRB1*08:77L HLA-DQA1*05:05-B1*03:19L HLA-DQA1*05:01-B1*02:01L HLA-DRB4*01:01L HLA-DPA1*02:01-B1*13:01L HLA-DQA1*01:03-B1*06:01L
  REGION 1..10: note = CONT. FROM ABOVE: HLA-DRB1*15:03L
YDYLVSTQEF

SEQ ID NO: 17227 - protein, 13 aa, Severe acute respiratory syndrome coronavirus 2
  REGION 1..13: note = Table B: HLA-DRB1*04:05L HLA-DQA1*01:02-B1*06:02L HLA-DPA1*01:03-B1*03:01L HLA-DRB1*12:01L HLA-DPA1*02:01-B1*13:01L
VGGKPCIKVATVQ

SEQ ID NO: 17228 - protein, 12 aa, Severe acute respiratory syndrome coronavirus 2
  REGION 1..12: note = Table B: HLA-DRB1*04:05L HLA-DRB1*01:02L HLA-DRB1*14:01L HLA-DRB1*15:03L
IKVATVQSKMSD

SEQ ID NO: 17229 - protein, 12 aa, Severe acute respiratory syndrome coronavirus 2
  REGION 1..12: note = Table B: HLA-DRB1*04:05L HLA-DQA1*01:02-B1*06:02L HLA-DRB1*01:02L HLA-DPA1*01:03-B1*03:01L HLA-DRB1*08:01L HLA-DPA1*02:01-B1*13:01L HLA-DRB1*04:08L
SKLWAQCVQLHN

SEQ ID NO: 17230 - protein, 13 aa, Severe acute respiratory syndrome coronavirus 2
  REGION 1..13: note = Table B: HLA-DRB1*04:05L HLA-DQA1*01:02-B1*06:02L HLA-DQA1*05:05-B1*03:19L HLA-DQA1*05:01-B1*02:01L HLA-DRB1*04:08L
VLLSMQGAVDINK

SEQ ID NO: 17231 - protein, 12 aa, Severe acute respiratory syndrome coronavirus 2
  REGION 1..12: note = Table B: HLA-DRB1*04:05L HLA-DQA1*01:02-B1*06:02L HLA-DRB1*01:02L HLA-DPA1*01:03-B1*03:01L HLA-DRB1*12:01L HLA-DPA1*02:01-B1*13:01L HLA-DQA1*01:03-B1*06:01L HLA-DQA1*02:01-B1*03:03L HLA-DRB1*15:03L
INKLCEEMLDNR

SEQ ID NO: 17232 - protein, 11 aa, Severe acute respiratory syndrome coronavirus 2
  REGION 1..11: note = Table B: HLA-DRB1*04:05L HLA-DRB1*01:01L HLA-DRB1*01:02L HLA-DQA1*05:05-B1*03:01L
EFSSLPSYAAF

SEQ ID NO: 17233 - protein, 13 aa, Severe acute respiratory syndrome coronavirus 2
  REGION 1..13: note = Table B: HLA-DRB1*04:05L
LKKSLNVAKSEFD

SEQ ID NO: 17234 - protein, 14 aa, Severe acute respiratory syndrome coronavirus 2
  REGION 1..14: note = Table B: HLA-DRB1*04:05L HLA-DRB1*01:02L HLA-DRB1*04:08L
VAKSEFDRDAAMQR

SEQ ID NO: 17235 - protein, 13 aa, Severe acute respiratory syndrome coronavirus 2
  REGION 1..13: note = Table B: HLA-DRB1*04:05L HLA-DRB1*01:02L HLA-DRB1*12:01L HLA-DPA1*02:01-B1*13:01L
AMQRKLEKMADQA

SEQ ID NO: 17236 - protein, 12 aa, Severe acute respiratory syndrome coronavirus 2
  REGION 1..12: note = Table B: HLA-DRB1*04:05L HLA-DRB1*01:02L HLA-DRB1*12:01L HLA-DPA1*02:01-B1*13:01L HLA-DQA1*03:01-B1*03:02L HLA-DRB1*04:08L HLA-DRB1*15:03L
RKLEKMADQAMT

SEQ ID NO: 17237 - protein, 12 aa, Severe acute respiratory syndrome coronavirus 2
  REGION 1..12: note = Table B: HLA-DRB1*04:05L HLA-DRB1*08:01L HLA-DRB1*12:01L HLA-DQA1*03:01-B1*03:02L HLA-DRB1*04:08L HLA-DQA1*02:01-B1*03:03L HLA-DRB1*15:03L
QMYKQARSEDKR

SEQ ID NO: 17238 - protein, 13 aa, Severe acute respiratory syndrome coronavirus 2
  REGION 1..13: note = Table B: HLA-DRB1*04:05L HLA-DRB1*01:02L HLA-DRB1*12:01L HLA-DPA1*02:01-B1*13:01L HLA-DRB1*16:01L HLA-DQA1*01:03-B1*06:01L
DKRAKVTSAMQTM

SEQ ID NO: 17239 - protein, 13 aa, Severe acute respiratory syndrome coronavirus 2
  REGION 1..13: note = Table B: HLA-DRB1*04:05L HLA-DRB1*04:10L
DNDALNNIINNAR

SEQ ID NO: 17240 - protein, 11 aa, Severe acute respiratory syndrome coronavirus 2
  REGION 1..11: note = Table B: HLA-DRB1*04:05L HLA-DPA1*02:01-B1*13:01L HLA-DQA1*01:03-B1*06:01L
TYKNTCDGTTF

SEQ ID NO: 17241 - protein, 14 aa, Severe acute respiratory syndrome coronavirus 2
  REGION 1..14: note = Table B: HLA-DRB1*04:05L HLA-DRB1*08:04L HLA-DRB1*14:02L HLA-DRB1*08:01L HLA-DPA1*01:03-B1*104:01L HLA-DRB1*10:01L HLA-DRB1*08:03L
TTFTYASALWEIQQ

SEQ ID NO: 17242 - protein, 13 aa, Severe acute respiratory syndrome coronavirus 2
  REGION 1..13: note = Table B: HLA-DRB1*04:05L HLA-DQA1*01-B1*05L HLA-DRB1*04:10L
ASALWEIQQVVDA

SEQ ID NO: 17243 - protein, 13 aa, Severe acute respiratory syndrome coronavirus 2
  REGION 1..13: note = Table B: HLA-DRB1*04:05L HLA-DQA1*05:01-B1*02:01L HLA-DRB1*04:10L HLA-DRB1*14:17L HLA-DRB1*04:08L
SALWEIQQVVDAD

SEQ ID NO: 17244 - protein, 12 aa, Severe acute respiratory syndrome coronavirus 2
  REGION 1..12: note = Table B: HLA-DRB1*04:05L HLA-DQA1*05:01-B1*02:01L
LWEIQQVVDADS

SEQ ID NO: 17245 - protein, 12 aa, Severe acute respiratory syndrome coronavirus 2
  REGION 1..12: note = Table B: HLA-DRB1*04:05L HLA-DRB1*08:04L HLA-DPA1*01:03-B1*03:01L HLA-DRB1*13:01L HLA-DRB1*04:10L HLA-DRB1*12:02L HLA-DRB3*01:01L HLA-DRB1*04:08L
LSEISMDNSPNL

SEQ ID NO: 17246 - protein, 12 aa, Severe acute respiratory syndrome coronavirus 2
  REGION 1..12: note = Table B: HLA-DRB1*04:05L HLA-DRB1*01:02L HLA-DRB1*08:04L HLA-DPA1*01:03-B1*03:01L HLA-DRB1*03:01L HLA-DRB1*04:10L HLA-DRB1*12:02L HLA-DRB3*01:01L HLA-DRB1*04:08L
SEISMDNSPNLA

SEQ ID NO: 17247 - protein, 12 aa, Severe acute respiratory syndrome coronavirus 2
  REGION 1..12: note = Table B: HLA-DRB1*04:05L HLA-DQA1*01:02-B1*06:02L HLA-DRB1*08:04L
PLIVTALRANSA

SEQ ID NO: 17248 - protein, 12 aa, Severe acute respiratory syndrome coronavirus 2
  REGION 1..12: note = Table B: HLA-DRB1*04:05L HLA-DRB1*01:01L HLA-DPA1*01:03-B1*03:01L HLA-DPA1*03:01-B1*04:02L HLA-DRB1*03:01L HLA-DRB1*11:01L HLA-DQA1*05:05-B1*03:19L HLA-DQA1*05:01-B1*02:01L HLA-DRB3*01:01L
  REGION 1..12: note = CONT. FROM ABOVE: HLA-DQA1*05:05-B1*03:01L HLA-DPA1*01:02-B1*04: 01L
ALRANSAVKLQN

SEQ ID NO: 17249 - protein, 12 aa, Severe acute respiratory syndrome coronavirus 2
  REGION 1..12: note = Table B: HLA-DRB1*04:05L HLA-DRB1*01:01L HLA-DRB3*02:01L HLA-DPA1*01:03-B1*03:01L HLA-DPA1*03:01-B1*04:02L HLA-DRB1*03:01L HLA-DRB1*11:02L HLA-DRB1*11:01L HLA-DQA1*05:05-B1*03:19L HLA-DQA1*05:01-B1*02:01L
  REGION 1..12: note = CONT. FROM ABOVE: HLA-DRB1*04:10L HLA-DPA1*01:03-B1*04:02L HLA-D PA1*03:01-B1*105:01L HLA-DPA1*01:02-B1*04:01L HLA-DRB1*07:01L
LRANSAVKLQNN

SEQ ID NO: 17250 - protein, 12 aa, Severe acute respiratory syndrome coronavirus 2
  REGION 1..12: note = Table B: HLA-DRB1*04:05L HLA-DQA1*01:02-B1*06:02L HLA-DRB1*01:02L HLA-DPA1*01:02-B1*04:01L HLA-DQA1*01:03-B1*06:01L HLA-DRB1*04:08L HLA-DRB1*15:03L
ALAYYNTTKGGR

SEQ ID NO: 17251 - protein, 13 aa, Severe acute respiratory syndrome coronavirus 2
  REGION 1..13: note = Table B: HLA-DRB1*04:05L HLA-DQA1*01:02-B1*06:02L HLA-DRB1*04:10L HLA-DRB1*12:01L HLA-DRB1*16:01L HLA-DRB1*04:08L HLA-DRB1*15:03L
RFVLALLSDLQDL

SEQ ID NO: 17252 - protein, 15 aa, Severe acute respiratory syndrome coronavirus 2
  REGION 1..15: note = Table B: HLA-DRB1*04:05L HLA-DRB1*01:02L HLA-DRB1*14:01L HLA-DRB1*12:01L HLA-DPA1*02:01-B1*13:01L HLA-DQA1*03:01-B1*03:02L HLA-DRB1*15:03L
TPKGPKVKYLYFIKG

SEQ ID NO: 17253 - protein, 14 aa, Severe acute respiratory syndrome coronavirus 2
  REGION 1..14: note = Table B: HLA-DRB1*04:05L HLA-DQA1*01:02-B1*06:02L HLA-DRB1*01:02L HLA-DRB1*08:04L HLA-DPA1*03:01-B1*04:02L HLA-DRB1*14:01L HLA-DRB1*11:04L HLA-DRB1*11:01L HLA-DRB1*12:01L HLA-DPA1*02:01-B1*13:01L HLA-DPA1*03:01-B1*105:01L
  REGION 1..14: note = CONT. FROM ABOVE: HLA-DPA1*01:03-B1*02:01L HLA-DRB1*15:03L
GPKVKYLYFIKGLN

SEQ ID NO: 17254 - protein, 12 aa, Severe acute respiratory syndrome coronavirus 2
  REGION 1..12: note = Table B: HLA-DRB1*04:05L HLA-DRB1*01:02L
LYFIKGLNNLNR

SEQ ID NO: 17255 - protein, 11 aa, Severe acute respiratory syndrome coronavirus 2
  REGION 1..11: note = Table B: HLA-DRB1*04:05L HLA-DRB1*01:01L HLA-DRB1*08:04L HLA-DPA1*01:03-B1*03:01L HLA-DPA1*03:01-B1*04:02L HLA-DRB1*14:01L HLA-DRB1*14:02L HLA-DRB5*01:01L HLA-DPA1*01:03-B1*04:01L HLA-DRB1*04:10L
  REGION 1..11: note = CONT. FROM ABOVE: HLA-DPA1*03:01-B1*105:01L HLA-DQA1*03:01-B1*03 :02L HLA-DRB1*14:54L HLA-DQA1*05:05-B1*03:01L HLA-DRB1*14:17L HL A-DQA1*01:03-B1*06:01L HLA-DRB1*04:08L
DYLASGGQPIT

SEQ ID NO: 17256 - protein, 11 aa, Severe acute respiratory syndrome coronavirus 2
  REGION 1..11: note = Table B: HLA-DRB1*04:05L HLA-DRB1*01:01L HLA-DPA1*01:03-B1*03:01L HLA-DPA1*03:01-B1*04:02L HLA-DRB1*14:01L HLA-DRB1*14:02L HLA-DRB5*01:01L HLA-DPA1*03:01-B1*105:01L HLA-DRB1*14:54L
  REGION 1..11: note = CONT. FROM ABOVE: HLA-DPA1*01:02-B1*04:01L HLA-DRB1*10:01L HLA-D RB1*04:08L
YLASGGQPITN

SEQ ID NO: 17257 - protein, 14 aa, Severe acute respiratory syndrome coronavirus 2
  REGION 1..14: note = Table B: HLA-DRB1*04:05L
TPEANMDQESFGGA

SEQ ID NO: 17258 - protein, 13 aa, Severe acute respiratory syndrome coronavirus 2
  REGION 1..13: note = Table B: HLA-DRB1*04:05L HLA-DRB1*16:01L
LKGKYVQIPTTCA

SEQ ID NO: 17259 - protein, 12 aa, Severe acute respiratory syndrome coronavirus 2
  REGION 1..12: note = Table B: HLA-DRB1*04:05L HLA-DQA1*05:01-B1*02:01L HLA-DRB1*04:08L
YRAFDIYNDKVA

SEQ ID NO: 17260 - protein, 13 aa, Severe acute respiratory syndrome coronavirus 2
  REGION 1..13: note = Table B: HLA-DRB1*04:05L HLA-DRB3*01:01L
DNLIDSYFVVKRH

SEQ ID NO: 17261 - protein, 13 aa, Severe acute respiratory syndrome coronavirus 2
  REGION 1..13: note = Table B: HLA-DRB1*04:05L
NLIDSYFVVKRHT

SEQ ID NO: 17262 - protein, 13 aa, Severe acute respiratory syndrome coronavirus 2
  REGION 1..13: note = Table B: HLA-DRB1*04:05L
FVVKRHTFSNYQH

SEQ ID NO: 17263 - protein, 13 aa, Severe acute respiratory syndrome coronavirus 2
  REGION 1..13: note = Table B: HLA-DRB1*04:05L HLA-DRB1*08:01L HLA-DRB1*12:01L HLA-DPA1*02:01-B1*13:01L HLA-DQA1*03:01-B1*03:02L HLA-DPA1*01:02-B1*04:01L HLA-DRB1*15:03L
VVKRHTFSNYQHE

SEQ ID NO: 17264 - protein, 11 aa, Severe acute respiratory syndrome coronavirus 2
  REGION 1..11: note = Table B: HLA-DRB1*04:05L HLA-DRB4*03:01NL HLA-DQA1*01:01-B1*05:01L HLA-DRB1*04:10L HLA-DRB1*12:01L HLA-DRB1*14:54L HLA-DRB1*04:08L
SNYQHEETIYN

SEQ ID NO: 17265 - protein, 12 aa, Severe acute respiratory syndrome coronavirus 2
  REGION 1..12: note = Table B: HLA-DRB1*04:05L HLA-DRB1*16:01L HLA-DRB1*04:08L
TIYNLLKDCPAV

SEQ ID NO: 17266 - protein, 12 aa, Severe acute respiratory syndrome coronavirus 2
  REGION 1..12: note = Table B: HLA-DRB1*04:05L HLA-DRB1*01:02L HLA-DRB3*01:01L HLA-DRB1*04:08L HLA-DRB1*15:03L
GDMVPHISRQRL

SEQ ID NO: 17267 - protein, 13 aa, Severe acute respiratory syndrome coronavirus 2
  REGION 1..13: note = Table B: HLA-DRB1*04:05L HLA-DRB1*12:01L HLA-DPA1*02:01-B1*13:01L
SRQRLTKYTMADL

SEQ ID NO: 17268 - protein, 14 aa, Severe acute respiratory syndrome coronavirus 2
  REGION 1..14: note = Table B: HLA-DRB1*04:05L HLA-DRB1*01:02L HLA-DRB1*12:01L HLA-DPA1*02:01-B1*13:01L HLA-DRB1*16:01L
RQRLTKYTMADLVY

SEQ ID NO: 17269 - protein, 13 aa, Severe acute respiratory syndrome coronavirus 2
  REGION 1..13: note = Table B: HLA-DRB1*04:05L HLA-DRB1*01:02L HLA-DRB1*12:01L HLA-DPA1*02:01-B1*13:01L HLA-DRB1*16:01L
RLTKYTMADLVYA

SEQ ID NO: 17270 - protein, 14 aa, Severe acute respiratory syndrome coronavirus 2
  REGION 1..14: note = Table B: HLA-DRB1*04:05L HLA-DRB1*15:03L
KEILVTYNCCDDDY

SEQ ID NO: 17271 - protein, 11 aa, Severe acute respiratory syndrome coronavirus 2
  REGION 1..11: note = Table B: HLA-DRB1*04:05L HLA-DPA1*03:01-B1*105:01L HLA-DRB1*16:01L
DYFNKKDWYDF

SEQ ID NO: 17272 - protein, 13 aa, Severe acute respiratory syndrome coronavirus 2
  REGION 1..13: note = Table B: HLA-DRB1*04:05L HLA-DRB1*12:01L HLA-DRB1*04:08L HLA-DRB1*15:03L
GERVRQALLKTVQ

SEQ ID NO: 17273 - protein, 14 aa, Severe acute respiratory syndrome coronavirus 2
  REGION 1..14: note = Table B: HLA-DRB1*04:05L HLA-DRB1*08:77L HLA-DPA1*01:03-B1*03:01L HLA-DRB1*14:02L HLA-DRB1*08:01L HLA-DPA1*01:03-B1*04:02L HLA-DPA1*01:03-B1*104:01L HLA-DRB1*07:01L HLA-DRB1*15:03L
FIQTTPGSGVPVVD

SEQ ID NO: 17274 - protein, 14 aa, Severe acute respiratory syndrome coronavirus 2
  REGION 1..14: note = Table B: HLA-DRB1*04:05L HLA-DPA1*02:01-B1*13:01L
RALTAESHVDTDLT

SEQ ID NO: 17275 - protein, 15 aa, Severe acute respiratory syndrome coronavirus 2
  REGION 1..15: note = Table B: HLA-DRB1*04:05L HLA-DRB1*08:04L HLA-DPA1*03:01-B1*04:02L HLA-DRB1*11:01L HLA-DRB1*13:01L HLA-DPA1*03:01-B1*105:01L
ERLKLFDRYFKYWDQ

SEQ ID NO: 17276 - protein, 15 aa, Severe acute respiratory syndrome coronavirus 2
  REGION 1..15: note = Table B: HLA-DRB1*04:05L HLA-DPA1*01:03-B1*104:01L HLA-DRB1*04:08L
VLFSTVFPPTSFGPL

SEQ ID NO: 17277 - protein, 13 aa, Severe acute respiratory syndrome coronavirus 2
  REGION 1..13: note = Table B: HLA-DRB1*04:05L HLA-DRB1*08:01L HLA-DRB1*12:01L HLA-DRB1*04:08L
VFPPTSFGPLVRK

SEQ ID NO: 17278 - protein, 12 aa, Severe acute respiratory syndrome coronavirus 2
  REGION 1..12: note = Table B: HLA-DRB1*04:05L HLA-DRB1*01:02L HLA-DRB1*12:01L
GYHFRELGVVHN

SEQ ID NO: 17279 - protein, 12 aa, Severe acute respiratory syndrome coronavirus 2
  REGION 1..12: note = Table B: HLA-DRB1*04:05L HLA-DRB1*01:02L
YHFRELGVVHNQ

SEQ ID NO: 17280 - protein, 14 aa, Severe acute respiratory syndrome coronavirus 2
  REGION 1..14: note = Table B: HLA-DRB1*04:05L
MHAASGNLLLDKRT

SEQ ID NO: 17281 - protein, 15 aa, Severe acute respiratory syndrome coronavirus 2
  REGION 1..15: note = Table B: HLA-DRB1*04:05L HLA-DRB1*01:02L HLA-DRB1*12:01L HLA-DPA1*01:03-B1*104:01L HLA-DQA1*01:03-B1*06:01L
LDKRTTCFSVAALTN

SEQ ID NO: 17282 - protein, 15 aa, Severe acute respiratory syndrome coronavirus 2
  REGION 1..15: note = Table B: HLA-DRB1*04:05L HLA-DRB1*08:04L HLA-DPA1*01:03-B1*04:02L HLA-DPA1*02:01-B1*13:01L HLA-DRB1*04:08L
FQTVKPGNFNKDFYD

SEQ ID NO: 17283 - protein, 13 aa, Severe acute respiratory syndrome coronavirus 2
  REGION 1..13: note = Table B: HLA-DRB1*04:05L HLA-DRB1*12:01L HLA-DPA1*02:01-B1*13:01L HLA-DRB1*04:08L HLA-DRB1*15:03L
NFNKDFYDFAVSK

SEQ ID NO: 17284 - protein, 11 aa, Severe acute respiratory syndrome coronavirus 2
  REGION 1..11: note = Table B: HLA-DRB1*04:05L HLA-DQA1*01-B1*05L HLA-DQA1*03:01-B1*03:02L HLA-DRB1*14:17L
HFFFAQDGNAA

SEQ ID NO: 17285 - protein, 14 aa, Severe acute respiratory syndrome coronavirus 2
  REGION 1..14: note = Table B: HLA-DRB1*04:05L HLA-DRB3*01:01L
GNAAISDYDYYRYN

SEQ ID NO: 17286 - protein, 15 aa, Severe acute respiratory syndrome coronavirus 2
  REGION 1..15: note = Table B: HLA-DRB1*04:05L HLA-DRB1*08:04L
AAISDYDYYRYNLPT

SEQ ID NO: 17287 - protein, 12 aa, Severe acute respiratory syndrome coronavirus 2
  REGION 1..12: note = Table B: HLA-DRB1*04:05L
RQLLFVVEVVDK

SEQ ID NO: 17288 - protein, 12 aa, Severe acute respiratory syndrome coronavirus 2
  REGION 1..12: note = Table B: HLA-DRB1*04:05L HLA-DRB1*08:04L HLA-DRB3*02:01L HLA-DPA1*01:03-B1*03:01L HLA-DRB1*11:03L HLA-DQA1*01:01-B1*05:01L HLA-DQA1*01-B1*05L HLA-DQA1*05:05-B1*03:19L HLA-DRB1*04:10L
  REGION 1..12: note = CONT. FROM ABOVE: HLA-DPA1*01:03-B1*04:02L HLA-DRB1*12:02L HLA-D PA1*02:01-B1*13:01L HLA-DPA1*01:03-B1*104:01L HLA-DRB1*04:08L
INANQVIVNNLD

SEQ ID NO: 17289 - protein, 15 aa, Severe acute respiratory syndrome coronavirus 2
  REGION 1..15: note = Table B: HLA-DRB1*04:05L HLA-DRB1*12:01L
DKSAGFPFNKWGKAR

SEQ ID NO: 17290 - protein, 14 aa, Severe acute respiratory syndrome coronavirus 2
  REGION 1..14: note = Table B: HLA-DRB1*04:05L HLA-DRB1*11:01L HLA-DRB3*01:01L
AGFPFNKWGKARLY

SEQ ID NO: 17291 - protein, 13 aa, Severe acute respiratory syndrome coronavirus 2
  REGION 1..13: note = Table B: HLA-DRB1*04:05L HLA-DRB1*16:01L
KARLYYDSMSYED

SEQ ID NO: 17292 - protein, 13 aa, Severe acute respiratory syndrome coronavirus 2
  REGION 1..13: note = Table B: HLA-DRB1*04:05L HLA-DQA1*01:03-B1*06:01L
LYYDSMSYEDQDA

SEQ ID NO: 17293 - protein, 12 aa, Severe acute respiratory syndrome coronavirus 2
  REGION 1..12: note = Table B: HLA-DRB1*04:05L HLA-DRB1*01:02L HLA-DRB1*04:10L
NVIPTITQMNLK

SEQ ID NO: 17294 - protein, 13 aa, Severe acute respiratory syndrome coronavirus 2
  REGION 1..13: note = Table B: HLA-DRB1*04:05L HLA-DRB1*01:02L
VIPTITQMNLKYA

SEQ ID NO: 17295 - protein, 12 aa, Severe acute respiratory syndrome coronavirus 2
  REGION 1..12: note = Table B: HLA-DRB1*04:05L HLA-DQA1*01:02-B1*06:02L HLA-DRB1*01:02L HLA-DRB1*12:01L
QMNLKYAISAKN

SEQ ID NO: 17296 - protein, 13 aa, Severe acute respiratory syndrome coronavirus 2
  REGION 1..13: note = Table B: HLA-DRB1*04:05L HLA-DRB1*12:01L HLA-DPA1*02:01-B1*13:01L
AKNRARTVAGVSI

SEQ ID NO: 17297 - protein, 14 aa, Severe acute respiratory syndrome coronavirus 2
  REGION 1..14: note = Table B: HLA-DRB1*04:05L HLA-DRB1*14:01L HLA-DRB1*11:04L HLA-DRB1*11:01L HLA-DRB3*01:01L HLA-DPA1*01:03-B1*02:01L HLA-DRB1*15:03L
NRQFHQKLLKSIAA

SEQ ID NO: 17298 - protein, 12 aa, Severe acute respiratory syndrome coronavirus 2
  REGION 1..12: note = Table B: HLA-DRB1*04:05L HLA-DRB1*01:02L HLA-DPA1*03:01-B1*105:01L HLA-DRB1*04:08L
TRGATVVIGTSK

SEQ ID NO: 17299 - protein, 14 aa, Severe acute respiratory syndrome coronavirus 2
  REGION 1..14: note = Table B: HLA-DRB1*04:05L HLA-DRB1*12:01L
GTSKFYGGWHNMLK

SEQ ID NO: 17300 - protein, 14 aa, Severe acute respiratory syndrome coronavirus 2
  REGION 1..14: note = Table B: HLA-DRB1*04:05L HLA-DPA1*02:01-B1*13:01L HLA-DQA1*03:01-B1*03:02L HLA-DRB1*16:01L HLA-DRB1*04:08L HLA-DRB1*15:03L
HNMLKTVYSDVENP

SEQ ID NO: 17301 - protein, 12 aa, Severe acute respiratory syndrome coronavirus 2
  REGION 1..12: note = Table B: HLA-DRB1*04:05L HLA-DQA1*01:02-B1*06:02L HLA-DRB1*04:08L
LRIMASLVLARK

SEQ ID NO: 17302 - protein, 13 aa, Severe acute respiratory syndrome coronavirus 2
  REGION 1..13: note = Table B: HLA-DRB1*04:05L HLA-DRB1*12:01L HLA-DPA1*02:01-B1*13:01L
VLARKHTTCCSLS

SEQ ID NO: 17303 - protein, 12 aa, Severe acute respiratory syndrome coronavirus 2
  REGION 1..12: note = Table B: HLA-DRB1*04:05L HLA-DRB1*01:02L HLA-DRB1*12:01L HLA-DPA1*02:01-B1*13:01L
ARKHTTCCSLSH

SEQ ID NO: 17304 - protein, 12 aa, Severe acute respiratory syndrome coronavirus 2
  REGION 1..12: note = Table B: HLA-DRB1*04:05L HLA-DRB1*01:02L HLA-DRB1*12:01L
RKHTTCCSLSHR

SEQ ID NO: 17305 - protein, 15 aa, Severe acute respiratory syndrome coronavirus 2
  REGION 1..15: note = Table B: HLA-DRB1*04:05L HLA-DPA1*01:03-B1*03:01L HLA-DRB1*12:01L HLA-DRB1*16:01L HLA-DQA1*01:03-B1*06:01L
GSLYVKPGGTSSGDA

SEQ ID NO: 17306 - protein, 17 aa, Severe acute respiratory syndrome coronavirus 2
  REGION 1..17: note = Table B: HLA-DRB1*04:05L HLA-DRB1*14:17L
VKPGGTSSGDATTAYAN

SEQ ID NO: 17307 - protein, 13 aa, Severe acute respiratory syndrome coronavirus 2
  REGION 1..13: note = Table B: HLA-DRB1*04:05L HLA-DRB4*03:01NL HLA-DRB1*04:10L HLA-DRB1*14:54L
ANVNALLSTDGNK

SEQ ID NO: 17308 - protein, 11 aa, Severe acute respiratory syndrome coronavirus 2
  REGION 1..11: note = Table B: HLA-DRB1*04:05L HLA-DRB1*11:03L HLA-DRB1*14:02L HLA-DRB1*11:01L HLA-DQA1*05:05-B1*03:116L HLA-DRB1*14:54L HLA-DPA1*01:02-B1*04:01L HLA-DRB1*08:02L
STDGNKIADKY

SEQ ID NO: 17309 - protein, 12 aa, Severe acute respiratory syndrome coronavirus 2
  REGION 1..12: note = Table B: HLA-DRB1*04:05L HLA-DRB1*01:02L HLA-DRB1*12:01L HLA-DPA1*02:01-B1*13:01L HLA-DQA1*02:01-B1*03:03L
DGNKIADKYVRN

SEQ ID NO: 17310 - protein, 14 aa, Severe acute respiratory syndrome coronavirus 2
  REGION 1..14: note = Table B: HLA-DRB1*04:05L HLA-DRB1*12:01L HLA-DRB3*01:01L
NKIADKYVRNLQHR

SEQ ID NO: 17311 - protein, 12 aa, Severe acute respiratory syndrome coronavirus 2
  REGION 1..12: note = Table B: HLA-DRB1*04:05L HLA-DRB1*12:01L
LQHRLYECLYRN

SEQ ID NO: 17312 - protein, 12 aa, Severe acute respiratory syndrome coronavirus 2
  REGION 1..12: note = Table B: HLA-DRB1*04:05L HLA-DRB1*12:01L
QHRLYECLYRNR

SEQ ID NO: 17313 - protein, 14 aa, Severe acute respiratory syndrome coronavirus 2
  REGION 1..14: note = Table B: HLA-DRB1*04:05L HLA-DPA1*02:01-B1*13:01L HLA-DRB1*16:01L
LYECLYRNRDVDTD

SEQ ID NO: 17314 - protein, 12 aa, Severe acute respiratory syndrome coronavirus 2
  REGION 1..12: note = Table B: HLA-DRB1*04:05L HLA-DRB1*08:01L HLA-DPA1*02:01-B1*13:01L HLA-DRB1*16:01L HLA-DRB1*04:08L
YRNRDVDTDFVN

SEQ ID NO: 17315 - protein, 13 aa, Severe acute respiratory syndrome coronavirus 2
  REGION 1..13: note = Table B: HLA-DRB1*04:05L HLA-DRB1*01:02L HLA-DPA1*01:03-B1*03:01L HLA-DRB1*12:01L HLA-DPA1*02:01-B1*13:01L HLA-DPA1*03:01-B1*105:01L HLA-DQA1*03:01-B1*03:02L HLA-DPA1*01:02-B1*04:01L
  REGION 1..13: note = CONT. FROM ABOVE: HLA-DRB1*16:01L HLA-DQA1*01:03-B1*06:01L HLA-D QA1*02:01-B1*03:03L HLA-DRB1*15:03L
LRKHFSMMILSDD

SEQ ID NO: 17316 - protein, 13 aa, Severe acute respiratory syndrome coronavirus 2
  REGION 1..13: note = Table B: HLA-DRB1*04:05L HLA-DRB1*01:02L HLA-DRB1*08:01L HLA-DRB1*12:01L HLA-DPA1*02:01-B1*13:01L HLA-DRB1*16:01L HLA-DRB1*04:08L
RKHFSMMILSDDA

SEQ ID NO: 17317 - protein, 14 aa, Severe acute respiratory syndrome coronavirus 2
  REGION 1..14: note = Table B: HLA-DRB1*04:05L HLA-DPA1*02:01-B1*13:01L HLA-DRB1*15:03L
KHFSMMILSDDAVV

SEQ ID NO: 17318 - protein, 13 aa, Severe acute respiratory syndrome coronavirus 2
  REGION 1..13: note = Table B: HLA-DRB1*04:05L HLA-DPA1*01:03-B1*04:01L HLA-DPA1*01:03-B1*04:02L HLA-DQA1*05:05-B1*03:01L HLA-DRB1*04:08L
NFKSVLYYQNNVF

SEQ ID NO: 17319 - protein, 15 aa, Severe acute respiratory syndrome coronavirus 2
  REGION 1..15: note = Table B: HLA-DRB1*04:05L
EAKCWTETDLTKGPH

SEQ ID NO: 17320 - protein, 13 aa, Severe acute respiratory syndrome coronavirus 2
  REGION 1..13: note = Table B: HLA-DRB1*04:05L HLA-DRB1*08:01L HLA-DRB1*04:10L HLA-DPA1*03:01-B1*105:01L HLA-DRB1*04:08L
AGCFVDDIVKTDG

SEQ ID NO: 17321 - protein, 13 aa, Severe acute respiratory syndrome coronavirus 2
  REGION 1..13: note = Table B: HLA-DRB1*04:05L HLA-DPA1*01:03-B1*04:02L HLA-DPA1*01:03-B1*104:01L HLA-DPA1*01:02-B1*04:01L HLA-DRB1*04:08L
ERFVSLAIDAYPL

SEQ ID NO: 17322 - protein, 13 aa, Severe acute respiratory syndrome coronavirus 2
  REGION 1..13: note = Table B: HLA-DRB1*04:05L HLA-DRB3*01:01L HLA-DRB1*14:54L HLA-DRB1*04:08L
YPLTKHPNQEYAD

SEQ ID NO: 17323 - protein, 12 aa, Severe acute respiratory syndrome coronavirus 2
  REGION 1..12: note = Table B: HLA-DRB1*04:05L HLA-DRB1*04:10L
MYSVMLTNDNTS

SEQ ID NO: 17324 - protein, 14 aa, Severe acute respiratory syndrome coronavirus 2
  REGION 1..14: note = Table B: HLA-DRB1*04:05L HLA-DRB1*01:02L HLA-DRB1*12:01L HLA-DRB1*04:08L
IRRPFLCCKCCYDH

SEQ ID NO: 17325 - protein, 12 aa, Severe acute respiratory syndrome coronavirus 2
  REGION 1..12: note = Table B: HLA-DRB1*04:05L HLA-DRB1*01:02L HLA-DQA1*01:01-B1*05:01L
AETLKATEETFK

SEQ ID NO: 17326 - protein, 13 aa, Severe acute respiratory syndrome coronavirus 2
  REGION 1..13: note = Table B: HLA-DRB1*04:05L HLA-DRB1*04:08L
KLSYGIATVREVL

SEQ ID NO: 17327 - protein, 13 aa, Severe acute respiratory syndrome coronavirus 2
  REGION 1..13: note = Table B: HLA-DRB1*04:05L HLA-DRB1*14:01L HLA-DRB1*04:08L
LSYGIATVREVLS

SEQ ID NO: 17328 - protein, 13 aa, Severe acute respiratory syndrome coronavirus 2
  REGION 1..13: note = Table B: HLA-DRB1*04:05L HLA-DRB1*08:01L HLA-DRB1*04:08L
YGIATVREVLSDR

SEQ ID NO: 17329 - protein, 12 aa, Severe acute respiratory syndrome coronavirus 2
  REGION 1..12: note = Table B: HLA-DRB1*04:05L
ATVREVLSDREL

SEQ ID NO: 17330 - protein, 15 aa, Severe acute respiratory syndrome coronavirus 2
  REGION 1..15: note = Table B: HLA-DRB1*04:05L HLA-DRB1*01:02L HLA-DRB1*12:01L
LSDRELHLSWEVGKP

SEQ ID NO: 17331 - protein, 14 aa, Severe acute respiratory syndrome coronavirus 2
  REGION 1..14: note = Table B: HLA-DRB1*04:05L
ELHLSWEVGKPRPP

SEQ ID NO: 17332 - protein, 16 aa, Severe acute respiratory syndrome coronavirus 2
  REGION 1..16: note = Table B: HLA-DRB1*04:05L HLA-DRB1*11:04L HLA-DRB1*12:01L HLA-DPA1*02:01-B1*13:01L
KPRPPLNRNYVFTGYR

SEQ ID NO: 17333 - protein, 13 aa, Severe acute respiratory syndrome coronavirus 2
  REGION 1..13: note = Table B: HLA-DRB1*04:05L
YVFTGYRVTKNSK

SEQ ID NO: 17334 - protein, 13 aa, Severe acute respiratory syndrome coronavirus 2
  REGION 1..13: note = Table B: HLA-DRB1*04:05L HLA-DPA1*01:03-B1*03:01L HLA-DRB1*08:01L HLA-DRB1*04:10L HLA-DRB1*12:01L
DYGDAVVYRGTTT

SEQ ID NO: 17335 - protein, 12 aa, Severe acute respiratory syndrome coronavirus 2
  REGION 1..12: note = Table B: HLA-DRB1*04:05L HLA-DRB1*14:54L HLA-DRB1*04:08L
DAVVYRGTTTYK

SEQ ID NO: 17336 - protein, 12 aa, Severe acute respiratory syndrome coronavirus 2
  REGION 1..12: note = Table B: HLA-DRB1*04:05L HLA-DQA1*01:02-B1*06:02L HLA-DPA1*01:03-B1*03:01L HLA-DRB1*11:03L HLA-DRB1*14:02L HLA-DQA1*05:05-B1*03:19L HLA-DQA1*05:01-B1*02:01L HLA-DPA1*01:03-B1*04:01L HLA-DRB1*09:01L
  REGION 1..12: note = CONT. FROM ABOVE: HLA-DPA1*02:01-B1*13:01L
VVYRGTTTYKLN

SEQ ID NO: 17337 - protein, 13 aa, Severe acute respiratory syndrome coronavirus 2
  REGION 1..13: note = Table B: HLA-DRB1*04:05L HLA-DRB1*08:04L HLA-DRB3*02:01L HLA-DPA1*03:01-B1*04:02L HLA-DRB1*08:01L HLA-DRB1*12:02L
SSNVANYQKVGMQ

SEQ ID NO: 17338 - protein, 11 aa, Severe acute respiratory syndrome coronavirus 2
  REGION 1..11: note = Table B: HLA-DRB1*04:05L HLA-DRB1*14:17L
QKYSTLQGPPG

SEQ ID NO: 17339 - protein, 13 aa, Severe acute respiratory syndrome coronavirus 2
  REGION 1..13: note = Table B: HLA-DRB1*04:05L HLA-DRB1*01:02L HLA-DRB1*12:01L HLA-DPA1*02:01-B1*13:01L HLA-DRB1*04:08L
SARIVYTACSHAA

SEQ ID NO: 17340 - protein, 12 aa, Severe acute respiratory syndrome coronavirus 2
  REGION 1..12: note = Table B: HLA-DRB1*04:05L HLA-DRB1*01:02L HLA-DRB1*08:01L HLA-DRB1*12:01L HLA-DPA1*03:01-B1*105:01L HLA-DRB1*15:03L
ALKYLPIDKCSR

SEQ ID NO: 17341 - protein, 15 aa, Severe acute respiratory syndrome coronavirus 2
  REGION 1..15: note = Table B: HLA-DRB1*04:05L HLA-DQA1*05:05-B1*03:19L HLA-DRB1*12:01L HLA-DPA1*02:01-B1*13:01L HLA-DRB1*15:03L
LPIDKCSRIIPARAR

SEQ ID NO: 17342 - protein, 13 aa, Severe acute respiratory syndrome coronavirus 2
  REGION 1..13: note = Table B: HLA-DRB1*04:05L HLA-DQA1*01:02-B1*06:02L HLA-DRB3*02:01L
TADIVVFDEISMA

SEQ ID NO: 17343 - protein, 13 aa, Severe acute respiratory syndrome coronavirus 2
  REGION 1..13: note = Table B: HLA-DRB1*04:05L HLA-DRB1*01:02L HLA-DRB1*04:10L HLA-DQA1*05:05-B1*03:01L HLA-DQA1*01:03-B1*06:01L HLA-DRB1*04:08L
VVFDEISMATNYD

SEQ ID NO: 17344 - protein, 12 aa, Severe acute respiratory syndrome coronavirus 2
  REGION 1..12: note = Table B: HLA-DRB1*04:05L HLA-DQA1*01:02-B1*06:02L HLA-DRB1*01:02L HLA-DRB4*03:01NL HLA-DRB1*04:10L HLA-DRB1*14:54L HLA-DQA1*05:05-B1*03:01L HLA-DQA1*01:03-B1*06:01L
DEISMATNYDLS

SEQ ID NO: 17345 - protein, 13 aa, Severe acute respiratory syndrome coronavirus 2
  REGION 1..13: note = Table B: HLA-DRB1*04:05L HLA-DQA1*01:01-B1*05:01L HLA-DRB1*15:03L
TNYDLSVVNARLR

SEQ ID NO: 17346 - protein, 13 aa, Severe acute respiratory syndrome coronavirus 2
  REGION 1..13: note = Table B: HLA-DRB1*04:05L HLA-DRB1*14:01L
YDLSVVNARLRAK

SEQ ID NO: 17347 - protein, 13 aa, Severe acute respiratory syndrome coronavirus 2
  REGION 1..13: note = Table B: HLA-DRB1*04:05L HLA-DRB1*01:02L HLA-DRB1*12:01L
VVREFLTRNPAWR

SEQ ID NO: 17348 - protein, 12 aa, Severe acute respiratory syndrome coronavirus 2
  REGION 1..12: note = Table B: HLA-DRB1*04:05L HLA-DRB1*01:02L HLA-DRB1*14:01L HLA-DRB1*12:01L
REFLTRNPAWRK

SEQ ID NO: 17349 - protein, 12 aa, Severe acute respiratory syndrome coronavirus 2
  REGION 1..12: note = Table B: HLA-DRB1*04:05L HLA-DRB1*04:10L HLA-DRB1*16:01L HLA-DRB1*15:03L
AVFISPYNSQNA

SEQ ID NO: 17350 - protein, 14 aa, Severe acute respiratory syndrome coronavirus 2
  REGION 1..14: note = Table B: HLA-DRB1*04:05L
TQTTETAHSCNVNR

SEQ ID NO: 17351 - protein, 14 aa, Severe acute respiratory syndrome coronavirus 2
  REGION 1..14: note = Table B: HLA-DRB1*04:05L HLA-DRB1*08:04L HLA-DPA1*01:03-B1*03:01L HLA-DPA1*03:01-B1*04:02L HLA-DPA1*01:03-B1*04:02L HLA-DPA1*02:01-B1*13:01L HLA-DPA1*01:02-B1*04:01L HLA-DRB1*16:01L
TTETAHSCNVNRFN

SEQ ID NO: 17352 - protein, 13 aa, Severe acute respiratory syndrome coronavirus 2
  REGION 1..13: note = Table B: HLA-DRB1*04:05L HLA-DPA1*01:03-B1*03:01L HLA-DRB1*12:01L HLA-DPA1*02:01-B1*13:01L
TRAKVGILCIMSD

SEQ ID NO: 17353 - protein, 13 aa, Severe acute respiratory syndrome coronavirus 2
  REGION 1..13: note = Table B: HLA-DRB1*04:05L HLA-DRB1*01:02L HLA-DRB1*12:01L HLA-DPA1*02:01-B1*13:01L
RAKVGILCIMSDR

SEQ ID NO: 17354 - protein, 13 aa, Severe acute respiratory syndrome coronavirus 2
  REGION 1..13: note = Table B: HLA-DRB1*04:05L HLA-DQA1*01-B1*05L
KVGILCIMSDRDL

SEQ ID NO: 17355 - protein, 14 aa, Severe acute respiratory syndrome coronavirus 2
  REGION 1..14: note = Table B: HLA-DRB1*04:05L HLA-DRB1*11:03L HLA-DRB1*08:01L HLA-DRB1*11:01L HLA-DRB1*13:01L
PTHLSVDTKFKTEG

SEQ ID NO: 17356 - protein, 13 aa, Severe acute respiratory syndrome coronavirus 2
  REGION 1..13: note = Table B: HLA-DRB1*04:05L HLA-DQA1*01:02-B1*06:02L HLA-DRB1*14:01L HLA-DPA1*03:01-B1*105:01L
YRRLISMMGFKMN

SEQ ID NO: 17357 - protein, 13 aa, Severe acute respiratory syndrome coronavirus 2
  REGION 1..13: note = Table B: HLA-DRB1*04:05L HLA-DRB3*01:01L
PNMFITREEAIRH

SEQ ID NO: 17358 - protein, 13 aa, Severe acute respiratory syndrome coronavirus 2
  REGION 1..13: note = Table B: HLA-DRB1*04:05L HLA-DQA1*01:02-B1*06:02L HLA-DRB4*03:01NL HLA-DPA1*01:03-B1*03:01L HLA-DQA1*01:01-B1*05:01L HLA-DRB1*12:01L HLA-DQA1*05:05-B1*03:01L HLA-DRB1*16:01L
ATREAVGTNLPLQ

SEQ ID NO: 17359 - protein, 14 aa, Severe acute respiratory syndrome coronavirus 2
  REGION 1..14: note = Table B: HLA-DRB1*04:05L HLA-DRB1*11:04L HLA-DRB1*08:01L HLA-DRB3*01:01L HLA-DQA1*03:01-B1*03:02L
AHGFELTSMKYFVK

SEQ ID NO: 17360 - protein, 15 aa, Severe acute respiratory syndrome coronavirus 2
  REGION 1..15: note = Table B: HLA-DRB1*04:05L HLA-DRB1*12:01L
IGPERTCCLCDRRAT

SEQ ID NO: 17361 - protein, 15 aa, Severe acute respiratory syndrome coronavirus 2
  REGION 1..15: note = Table B: HLA-DRB1*04:05L HLA-DPA1*03:01-B1*105:01L HLA-DRB1*16:01L HLA-DRB1*15:03L
DRRATCFSTASDTYA

SEQ ID NO: 17362 - protein, 13 aa, Severe acute respiratory syndrome coronavirus 2
  REGION 1..13: note = Table B: HLA-DRB1*04:05L HLA-DRB1*01:02L HLA-DRB1*08:04L HLA-DRB1*11:04L HLA-DRB1*11:01L HLA-DPA1*03:01-B1*105:01L HLA-DQA1*05:05-B1*03:01L HLA-DPA1*01:02-B1*04:01L HLA-DRB1*16:01L
NHDLYCQVHGNAH

SEQ ID NO: 17363 - protein, 14 aa, Severe acute respiratory syndrome coronavirus 2
  REGION 1..14: note = Table B: HLA-DRB1*04:05L HLA-DRB1*01:02L HLA-DPA1*02:01-B1*13:01L HLA-DPA1*03:01-B1*105:01L HLA-DQA1*05:05-B1*03:01L HLA-DRB1*15:03L
MVVKAALLADKFPV

SEQ ID NO: 17364 - protein, 14 aa, Severe acute respiratory syndrome coronavirus 2
  REGION 1..14: note = Table B: HLA-DRB1*04:05L
VVKAALLADKFPVL

SEQ ID NO: 17365 - protein, 11 aa, Severe acute respiratory syndrome coronavirus 2
  REGION 1..11: note = Table B: HLA-DRB1*04:05L HLA-DRB4*03:01NL HLA-DRB1*08:01L HLA-DQA1*01-B1*05L HLA-DRB1*12:01L HLA-DRB1*14:54L HLA-DPA1*01:02-B1*04:01L HLA-DRB1*04:08L
FPVLHDIGNPK

SEQ ID NO: 17366 - protein, 11 aa, Severe acute respiratory syndrome coronavirus 2
  REGION 1..11: note = Table B: HLA-DRB1*04:05L
PVLHDIGNPKA

SEQ ID NO: 17367 - protein, 15 aa, Severe acute respiratory syndrome coronavirus 2
  REGION 1..15: note = Table B: HLA-DRB1*04:05L HLA-DRB1*12:01L HLA-DRB1*16:01L
PKAIKCVPQADVEWK

SEQ ID NO: 17368 - protein, 11 aa, Severe acute respiratory syndrome coronavirus 2
  REGION 1..11: note = Table B: HLA-DRB1*04:05L
AYKIEELFYSY

SEQ ID NO: 17369 - protein, 10 aa, Severe acute respiratory syndrome coronavirus 2
  REGION 1..10: note = Table B: HLA-DRB1*04:05L HLA-DPA1*02:01-B1*13:01M HLA-DQA1*01:03-B1*06:01L
KFTDGVCLFW

SEQ ID NO: 17370 - protein, 13 aa, Severe acute respiratory syndrome coronavirus 2
  REGION 1..13: note = Table B: HLA-DRB1*04:05L HLA-DRB1*14:01L HLA-DRB1*16:01L HLA-DRB1*04:08L HLA-DRB1*15:03L
SIVCRFDTRVLSN

SEQ ID NO: 17371 - protein, 12 aa, Severe acute respiratory syndrome coronavirus 2
  REGION 1..12: note = Table B: HLA-DRB1*04:05L HLA-DQA1*01:02-B1*06:02L HLA-DRB1*01:02L HLA-DRB1*12:01L HLA-DPA1*02:01-B1*13:01L HLA-DQA1*03:01-B1*03:02L HLA-DRB1*16:01L HLA-DQA1*02:01-B1*03:03L
VNKHAFHTPAFD

SEQ ID NO: 17372 - protein, 12 aa, Severe acute respiratory syndrome coronavirus 2
  REGION 1..12: note = Table B: HLA-DRB1*04:05L HLA-DRB1*12:01L HLA-DPA1*02:01-B1*13:01L
NKHAFHTPAFDK

SEQ ID NO: 17373 - protein, 14 aa, Severe acute respiratory syndrome coronavirus 2
  REGION 1..14: note = Table B: HLA-DRB1*04:05L HLA-DRB1*01:02L HLA-DRB1*12:01L HLA-DRB1*04:08L
AFHTPAFDKSAFVN

SEQ ID NO: 17374 - protein, 13 aa, Severe acute respiratory syndrome coronavirus 2
  REGION 1..13: note = Table B: HLA-DRB1*04:05L HLA-DRB1*14:02L HLA-DQA1*05:05-B1*03:19L HLA-DPA1*02:01-B1*13:01L HLA-DQA1*05:05-B1*03:01L HLA-DRB1*10:01L
DIDYVPLKSATCI

SEQ ID NO: 17375 - protein, 14 aa, Severe acute respiratory syndrome coronavirus 2
  REGION 1..14: note = Table B: HLA-DRB1*04:05L HLA-DRB1*01:02L HLA-DRB1*08:04L HLA-DPA1*01:03-B1*03:01L HLA-DRB1*08:01L HLA-DQA1*05:01-B1*02:01L HLA-DPA1*01:03-B1*04:02L HLA-DRB1*12:01L HLA-DQA1*05:05-B1*03:01L HLA-DRB1*04:08L
SAGFSLWVYKQFDT

SEQ ID NO: 17376 - protein, 13 aa, Severe acute respiratory syndrome coronavirus 2
  REGION 1..13: note = Table B: HLA-DRB1*04:05L HLA-DRB3*02:01L HLA-DPA1*01:03-B1*03:01L HLA-DQA1*05:01-B1*02:01L
ENVAFNVVNKGHF

SEQ ID NO: 17377 - protein, 14 aa, Severe acute respiratory syndrome coronavirus 2
  REGION 1..14: note = Table B: HLA-DRB1*04:05L HLA-DRB1*12:01L HLA-DRB1*15:03L
KGHFDGQQGEVPVS

SEQ ID NO: 17378 - protein, 13 aa, Severe acute respiratory syndrome coronavirus 2
  REGION 1..13: note = Table B: HLA-DRB1*04:05L HLA-DPA1*03:01-B1*04:02L HLA-DQA1*01:01-B1*05:01L HLA-DRB1*08:01L HLA-DQA1*05:05-B1*03:19L HLA-DPA1*02:01-B1*13:01L HLA-DQA1*05:05-B1*03:01L HLA-DRB1*15:03L
INNTVYTKVDGVD

SEQ ID NO: 17379 - protein, 14 aa, Severe acute respiratory syndrome coronavirus 2
  REGION 1..14: note = Table B: HLA-DRB1*04:05L HLA-DRB1*01:02L HLA-DRB1*12:01L HLA-DPA1*02:01-B1*13:01L HLA-DRB1*04:08L
GVDVELFENKTTLP

SEQ ID NO: 17380 - protein, 14 aa, Severe acute respiratory syndrome coronavirus 2
  REGION 1..14: note = Table B: HLA-DRB1*04:05L
NVAFELWAKRNIKP

SEQ ID NO: 17381 - protein, 15 aa, Severe acute respiratory syndrome coronavirus 2
  REGION 1..15: note = Table B: HLA-DRB1*04:05L
VAFELWAKRNIKPVP

SEQ ID NO: 17382 - protein, 12 aa, Severe acute respiratory syndrome coronavirus 2
  REGION 1..12: note = Table B: HLA-DRB1*04:05L HLA-DRB1*01:02L HLA-DPA1*02:01-B1*13:01L HLA-DRB1*04:08L
AKRNIKPVPEVK

SEQ ID NO: 17383 - protein, 15 aa, Severe acute respiratory syndrome coronavirus 2
  REGION 1..15: note = Table B: HLA-DRB1*04:05L HLA-DQA1*01-B1*05L HLA-DPA1*02:01-B1*13:01L
IAANTVIWDYKRDAP

SEQ ID NO: 17384 - protein, 12 aa, Severe acute respiratory syndrome coronavirus 2
  REGION 1..12: note = Table B: HLA-DRB1*04:05L
WDYKRDAPAHIS

SEQ ID NO: 17385 - protein, 14 aa, Severe acute respiratory syndrome coronavirus 2
  REGION 1..14: note = Table B: HLA-DRB1*04:05L HLA-DQA1*01:02-B1*06:02L HLA-DRB1*01:02L HLA-DPA1*01:03-B1*03:01L HLA-DRB1*12:01L HLA-DPA1*02:01-B1*13:01L HLA-DQA1*03:01-B1*03:02L HLA-DQA1*02:01-B1*03:03L
IAKKPTETICAPLT

SEQ ID NO: 17386 - protein, 13 aa, Severe acute respiratory syndrome coronavirus 2
  REGION 1..13: note = Table B: HLA-DRB1*04:05L HLA-DQA1*01:02-B1*06:02L HLA-DRB1*04:10L HLA-DRB1*16:01L HLA-DRB1*04:08L HLA-DQA1*02:01-B1*03:03L HLA-DRB1*15:03L
VDGQVDLFRNARN

SEQ ID NO: 17387 - protein, 12 aa, Severe acute respiratory syndrome coronavirus 2
  REGION 1..12: note = Table B: HLA-DRB1*04:05L HLA-DRB1*12:01L HLA-DQA1*03:01-B1*03:02L HLA-DQA1*02:01-B1*03:03L
RNARNGVLITEG

SEQ ID NO: 17388 - protein, 12 aa, Severe acute respiratory syndrome coronavirus 2
  REGION 1..12: note = Table B: HLA-DRB1*04:05L HLA-DQA1*01:02-B1*06:02L HLA-DRB1*01:02L HLA-DQA1*05:05-B1*03:19L HLA-DRB1*12:01L HLA-DQA1*05:05-B1*03:01L HLA-DQA1*01:03-B1*06:01L
VKGLQPSVGPKQ

SEQ ID NO: 17389 - protein, 11 aa, Severe acute respiratory syndrome coronavirus 2
  REGION 1..11: note = Table B: HLA-DRB1*04:05L HLA-DPA1*01:03-B1*03:01L HLA-DPA1*03:01-B1*04:02L HLA-DQA1*01-B1*05L HLA-DQA1*05:05-B1*03:19L HLA-DPA1*01:03-B1*04:02L HLA-DRB1*04:08L
VTLIGEAVKTQ

SEQ ID NO: 17390 - protein, 13 aa, Severe acute respiratory syndrome coronavirus 2
  REGION 1..13: note = Table B: HLA-DRB1*04:05L HLA-DRB1*01:02L
IGEAVKTQFNYYK

SEQ ID NO: 17391 - protein, 11 aa, Severe acute respiratory syndrome coronavirus 2
  REGION 1..11: note = Table B: HLA-DRB1*04:05L HLA-DRB1*01:02L HLA-DRB1*12:01L
YYKKVDGVVQQ

SEQ ID NO: 17392 - protein, 11 aa, Severe acute respiratory syndrome coronavirus 2
  REGION 1..11: note = Table B: HLA-DRB1*04:05L HLA-DRB1*08:01L
TYFTQSRNLQE

SEQ ID NO: 17393 - protein, 11 aa, Severe acute respiratory syndrome coronavirus 2
  REGION 1..11: note = Table B: HLA-DRB1*04:05L
YFTQSRNLQEF

SEQ ID NO: 17394 - protein, 12 aa, Severe acute respiratory syndrome coronavirus 2
  REGION 1..12: note = Table B: HLA-DRB1*04:05L HLA-DRB1*01:02L HLA-DRB1*08:01L HLA-DRB1*16:01L HLA-DRB1*04:08L
SRNLQEFKPRSQ

SEQ ID NO: 17395 - protein, 13 aa, Severe acute respiratory syndrome coronavirus 2
  REGION 1..13: note = Table B: HLA-DRB1*04:05L HLA-DRB1*08:04L
RYKLEGYAFEHIV

SEQ ID NO: 17396 - protein, 13 aa, Severe acute respiratory syndrome coronavirus 2
  REGION 1..13: note = Table B: HLA-DRB1*04:05L
LGGLHLLIGLAKR

SEQ ID NO: 17397 - protein, 14 aa, Severe acute respiratory syndrome coronavirus 2
  REGION 1..14: note = Table B: HLA-DRB1*04:05L
GGLHLLIGLAKRFK

SEQ ID NO: 17398 - protein, 13 aa, Severe acute respiratory syndrome coronavirus 2
  REGION 1..13: note = Table B: HLA-DRB1*04:05L HLA-DQA1*01-B1*05L
LAKRFKESPFELE

SEQ ID NO: 17399 - protein, 14 aa, Severe acute respiratory syndrome coronavirus 2
  REGION 1..14: note = Table B: HLA-DRB1*04:05L HLA-DPA1*02:01-B1*13:01L HLA-DPA1*03:01-B1*105:01L HLA-DRB1*16:01L HLA-DRB1*15:03L
DSTVKNYFITDAQT

SEQ ID NO: 17400 - protein, 14 aa, Severe acute respiratory syndrome coronavirus 2
  REGION 1..14: note = Table B: HLA-DRB1*04:05L
VIDLLLDDFVEIIK

SEQ ID NO: 17401 - protein, 12 aa, Severe acute respiratory syndrome coronavirus 2
  REGION 1..12: note = Table B: HLA-DRB1*04:05L HLA-DRB1*01:02L HLA-DRB1*04:10L HLA-DPA1*03:01-B1*105:01L HLA-DRB1*14:54L
SQDLSVVSKVVK

SEQ ID NO: 17402 - protein, 14 aa, Severe acute respiratory syndrome coronavirus 2
  REGION 1..14: note = Table B: HLA-DRB1*04:05L HLA-DRB1*01:02L HLA-DPA1*03:01-B1*04:02L
DLSVVSKVVKVTID

SEQ ID NO: 17403 - protein, 10 aa, Severe acute respiratory syndrome coronavirus 2
  REGION 1..10: note = Table B: HLA-DRB1*04:05L HLA-DQA1*01:02-B1*06:02L HLA-DPA1*02:01-B1*13:01M HLA-DPA1*03:01-B1*105:01L HLA-DQA1*01:03-B1*06:01L HLA-DRB1*15:03L
DYTEISFMLW

SEQ ID NO: 17404 - protein, 12 aa, Severe acute respiratory syndrome coronavirus 2
  REGION 1..12: note = Table B: HLA-DRB1*04:05L HLA-DQA1*01:02-B1*06:02L HLA-DRB1*08:04L HLA-DRB1*08:01L
ETFYPKLQSSQA

SEQ ID NO: 17405 - protein, 13 aa, Severe acute respiratory syndrome coronavirus 2
  REGION 1..13: note = Table B: HLA-DRB1*04:05L HLA-DRB4*03:01NL HLA-DRB1*10:01L
AWQPGVAMPNLYK

SEQ ID NO: 17406 - protein, 15 aa, Severe acute respiratory syndrome coronavirus 2
  REGION 1..15: note = Table B: HLA-DRB1*04:05L HLA-DRB1*16:01L HLA-DRB1*15:03L
MQRMLLEKCDLQNYG

SEQ ID NO: 17407 - protein, 16 aa, Severe acute respiratory syndrome coronavirus 2
  REGION 1..16: note = Table B: HLA-DRB1*04:05L HLA-DRB1*12:01L HLA-DPA1*02:01-B1*13:01L HLA-DRB1*16:01L
QRMLLEKCDLQNYGDS

SEQ ID NO: 17408 - protein, 12 aa, Severe acute respiratory syndrome coronavirus 2
  REGION 1..12: note = Table B: HLA-DRB1*04:05L HLA-DRB1*04:08L
MRVIHFGAGSDK

SEQ ID NO: 17409 - protein, 12 aa, Severe acute respiratory syndrome coronavirus 2
  REGION 1..12: note = Table B: HLA-DRB1*04:05L HLA-DRB1*01:02L HLA-DRB1*04:08L
RVIHFGAGSDKG

SEQ ID NO: 17410 - protein, 13 aa, Severe acute respiratory syndrome coronavirus 2
  REGION 1..13: note = Table B: HLA-DRB1*04:05L HLA-DRB1*01:02L HLA-DQA1*01:01-B1*05:01L HLA-DRB1*04:08L
SDKGVAPGTAVLR

SEQ ID NO: 17411 - protein, 12 aa, Severe acute respiratory syndrome coronavirus 2
  REGION 1..12: note = Table B: HLA-DRB1*04:05L
LLVDSDLNDFVS

SEQ ID NO: 17412 - protein, 11 aa, Severe acute respiratory syndrome coronavirus 2
  REGION 1..11: note = Table B: HLA-DRB1*04:05L HLA-DRB4*03:01NL HLA-DRB1*16:01L HLA-DQA1*02:01-B1*03:03L
ISDMYDPKTKN

SEQ ID NO: 17413 - protein, 14 aa, Severe acute respiratory syndrome coronavirus 2
  REGION 1..14: note = Table B: HLA-DRB1*04:05L HLA-DRB1*11:04L HLA-DRB1*08:01L HLA-DRB1*11:01L HLA-DPA1*01:03-B1*04:02L HLA-DRB1*15:03L
GFIQQKLALGGSVA

SEQ ID NO: 17414 - protein, 14 aa, Severe acute respiratory syndrome coronavirus 2
  REGION 1..14: note = Table B: HLA-DRB1*04:05L HLA-DPA1*01:03-B1*03:01L HLA-DPA1*01:03-B1*04:02L HLA-DPA1*02:01-B1*13:01L
LALGGSVAIKITEH

SEQ ID NO: 17415 - protein, 13 aa, Severe acute respiratory syndrome coronavirus 2
  REGION 1..13: note = Table B: HLA-DRB1*04:05L HLA-DRB1*01:02L HLA-DRB1*12:01L HLA-DPA1*02:01-B1*13:01L HLA-DQA1*03:01-B1*03:02L HLA-DRB1*16:01L
GKPREQIDGYVMH

SEQ ID NO: 17416 - protein, 15 aa, Severe acute respiratory syndrome coronavirus 2
  REGION 1..15: note = Table B: HLA-DRB1*04:05L HLA-DRB1*04:08L
KPREQIDGYVMHANY

SEQ ID NO: 17417 - protein, 12 aa, Severe acute respiratory syndrome coronavirus 2
  REGION 1..12: note = Table B: HLA-DRB1*04:05L HLA-DRB1*01:02L
LTTRTQLPPAYT

SEQ ID NO: 17418 - protein, 12 aa, Severe acute respiratory syndrome coronavirus 2
  REGION 1..12: note = Table B: HLA-DRB1*04:05L HLA-DRB1*01:02L HLA-DRB3*02:01L HLA-DRB1*14:17L HLA-DRB1*04:08L
DNPVLPFNDGVY

SEQ ID NO: 17419 - protein, 12 aa, Severe acute respiratory syndrome coronavirus 2
  REGION 1..12: note = Table B: HLA-DRB1*04:05L HLA-DRB1*15:03L
YFASTEKSNIIR

SEQ ID NO: 17420 - protein, 12 aa, Severe acute respiratory syndrome coronavirus 2
  REGION 1..12: note = Table B: HLA-DRB1*04:05L HLA-DQA1*05:01-B1*02:01L HLA-DRB1*15:03L
FASTEKSNIIRG

SEQ ID NO: 17421 - protein, 10 aa, Severe acute respiratory syndrome coronavirus 2
  REGION 1..10: note = Table B: HLA-DRB1*04:05L HLA-DPA1*02:01-B1*13:01L HLA-DQA1*01:03-B1*06:01L
NFKNLREFVF

SEQ ID NO: 17422 - protein, 14 aa, Severe acute respiratory syndrome coronavirus 2
  REGION 1..14: note = Table B: HLA-DRB1*04:05L HLA-DRB1*01:02L HLA-DRB1*12:01L
VFKNIDGYFKIYSK

SEQ ID NO: 17423 - protein, 15 aa, Severe acute respiratory syndrome coronavirus 2
  REGION 1..15: note = Table B: HLA-DRB1*04:05L
PQGFSALEPLVDLPI

SEQ ID NO: 17424 - protein, 13 aa, Severe acute respiratory syndrome coronavirus 2
  REGION 1..13: note = Table B: HLA-DRB1*04:05L HLA-DPA1*02:01-B1*13:01L
LHRSYLTPGDSSS

SEQ ID NO: 17425 - protein, 11 aa, Severe acute respiratory syndrome coronavirus 2
  REGION 1..11: note = Table B: HLA-DRB1*04:05L HLA-DRB1*01:02L HLA-DRB4*03:01NL
AYYVGYLQPRT

SEQ ID NO: 17426 - protein, 11 aa, Severe acute respiratory syndrome coronavirus 2
  REGION 1..11: note = Table B: HLA-DRB1*04:05L HLA-DRB1*01:02L HLA-DRB1*04:08L
KSFTVEKGIYQ

SEQ ID NO: 17427 - protein, 12 aa, Severe acute respiratory syndrome coronavirus 2
  REGION 1..12: note = Table B: HLA-DRB1*04:05L HLA-DRB1*01:02L HLA-DRB1*08:04L HLA-DPA1*01:03-B1*03:01L HLA-DRB1*14:01L HLA-DRB1*08:01L HLA-DQA1*05:05-B1*03:19L HLA-DPA1*02:01-B1*13:01L HLA-DPA1*01:03-B1*02:01L HLA-DQA1*05:05-B1*03:01L
  REGION 1..12: note = CONT. FROM ABOVE: HLA-DRB1*15:03L
YQTSNFRVQPTE

SEQ ID NO: 17428 - protein, 11 aa, Severe acute respiratory syndrome coronavirus 2
  REGION 1..11: note = Table B: HLA-DRB1*04:05L HLA-DQA1*01:02-B1*06:02L HLA-DRB1*01:02M HLA-DRB1*08:04L HLA-DRB1*08:77L HLA-DPA1*01:03-B1*03:01L HLA-DRB1*03:01L HLA-DRB1*11:03L HLA-DQA1*01:01-B1*05:01L HLA-DQA1*01-B1*05L
  REGION 1..11: note = CONT. FROM ABOVE: HLA-DQA1*05:05-B1*03:19L HLA-DQA1*05:01-B1*02: 01L HLA-DRB1*04:10L HLA-DPA1*02:01-B1*13:01L HLA-DPA1*03:01-B1*1 05:01L HLA-DRB1*14:54L HLA-DPA1*01:02-B1*04:01L HLA-DRB1*07:01L HLA-DRB1*10:01L HLA-DRB1*04:08M HLA-DRB1*15:03L
FRVQPTESIVR

SEQ ID NO: 17429 - protein, 15 aa, Severe acute respiratory syndrome coronavirus 2
  REGION 1..15: note = Table B: HLA-DRB1*04:05L HLA-DRB1*12:01L HLA-DPA1*02:01-B1*13:01L HLA-DRB1*16:01L HLA-DRB1*04:08L
ITNLCPFGEVFNATR

SEQ ID NO: 17430 - protein, 11 aa, Severe acute respiratory syndrome coronavirus 2
  REGION 1..11: note = Table B: HLA-DRB1*04:05L HLA-DQA1*01:02-B1*06:02L HLA-DPA1*02:01-B1*13:01L
PFGEVFNATRF

SEQ ID NO: 17431 - protein, 13 aa, Severe acute respiratory syndrome coronavirus 2
  REGION 1..13: note = Table B: HLA-DRB1*04:05L HLA-DRB1*01:02L HLA-DPA1*01:03-B1*03:01L HLA-DRB1*12:01L HLA-DPA1*02:01-B1*13:01L
WNRKRISNCVADY

SEQ ID NO: 17432 - protein, 12 aa, Severe acute respiratory syndrome coronavirus 2
  REGION 1..12: note = Table B: HLA-DRB1*04:05L HLA-DQA1*01-B1*05L HLA-DQA1*05:01-B1*02:01L HLA-DPA1*03:01-B1*105:01L HLA-DRB1*16:01L HLA-DRB1*04:08L
ADYSVLYNSASF

SEQ ID NO: 17433 - protein, 13 aa, Severe acute respiratory syndrome coronavirus 2
  REGION 1..13: note = Table B: HLA-DRB1*04:05L HLA-DRB1*01:02L HLA-DRB1*08:01L HLA-DRB1*04:08L
DSKVGGNYNYLYR

SEQ ID NO: 17434 - protein, 14 aa, Severe acute respiratory syndrome coronavirus 2
  REGION 1..14: note = Table B: HLA-DRB1*04:05L HLA-DQA1*01:02-B1*06:02L
NYLYRLFRKSNLKP

SEQ ID NO: 17435 - protein, 12 aa, Severe acute respiratory syndrome coronavirus 2
  REGION 1..12: note = Table B: HLA-DRB1*04:05L HLA-DRB1*01:02L HLA-DRB4*03:01NL HLA-DRB4*02:01NL HLA-DQA1*05:01-B1*02:01L HLA-DPA1*01:03-B1*04:02L HLA-DRB1*14:17L HLA-DRB1*16:01L HLA-DRB1*04:08L
LTGTGVLTESNK

SEQ ID NO: 17436 - protein, 13 aa, Severe acute respiratory syndrome coronavirus 2
  REGION 1..13: note = Table B: HLA-DRB1*04:05L HLA-DQA1*01:01-B1*05:01L HLA-DQA1*05:01-B1*02:01L
FGRDIADTTDAVR

SEQ ID NO: 17437 - protein, 12 aa, Severe acute respiratory syndrome coronavirus 2
  REGION 1..12: note = Table B: HLA-DRB1*04:05L HLA-DRB1*01:02L HLA-DRB1*08:77L HLA-DPA1*01:03-B1*03:01L HLA-DPA1*03:01-B1*04:02L HLA-DRB1*11:03L HLA-DQA1*01:01-B1*05:01L HLA-DQA1*01-B1*05L HLA-DQA1*05:01-B1*02:01L HLA-DQA1*05:05-B1*03:116L
  REGION 1..12: note = CONT. FROM ABOVE: HLA-DRB1*04:10L HLA-DRB1*09:01L HLA-DPA1*02:01 -B1*13:01L HLA-DPA1*01:03-B1*02:01L HLA-DPA1*01:03-B1*104:01L HL A-DPA1*01:02-B1*04:01L HLA-DRB1*07:01L HLA-DRB1*10:01L HLA-DRB1* 04:08L HLA-DRB1*15:03L
VYSTGSNVFQTR

SEQ ID NO: 17438 - protein, 12 aa, Severe acute respiratory syndrome coronavirus 2
  REGION 1..12: note = Table B: HLA-DRB1*04:05L HLA-DRB1*01:02L HLA-DPA1*01:03-B1*03:01L HLA-DQA1*05:01-B1*02:01L HLA-DRB1*04:08L
STGSNVFQTRAG

SEQ ID NO: 17439 - protein, 14 aa, Severe acute respiratory syndrome coronavirus 2
  REGION 1..14: note = Table B: HLA-DRB1*04:05L HLA-DRB1*01:02L HLA-DRB1*12:01L HLA-DPA1*02:01-B1*13:01L
PRRARSVASQSIIA

SEQ ID NO: 17440 - protein, 12 aa, Severe acute respiratory syndrome coronavirus 2
  REGION 1..12: note = Table B: HLA-DRB1*04:05L HLA-DRB1*01:02L HLA-DPA1*01:03-B1*03:01L HLA-DQA1*05:05-B1*03:19L HLA-DRB1*16:01L HLA-DRB1*15:03L
TEILPVSMTKTS

SEQ ID NO: 17441 - protein, 12 aa, Severe acute respiratory syndrome coronavirus 2
  REGION 1..12: note = Table B: HLA-DRB1*04:05L HLA-DQA1*01:02-B1*06:02L HLA-DPA1*01:03-B1*03:01L HLA-DQA1*05:05-B1*03:19L HLA-DRB1*12:01L HLA-DQA1*03:01-B1*03:02L HLA-DQA1*05:05-B1*03:01L HLA-DQA1*01:03-B1*06:01L
  REGION 1..12: note = CONT. FROM ABOVE: HLA-DQA1*02:01-B1*03:03L
LNRALTGIAVEQ

SEQ ID NO: 17442 - protein, 13 aa, Severe acute respiratory syndrome coronavirus 2
  REGION 1..13: note = Table B: HLA-DRB1*04:05L HLA-DRB1*08:04L HLA-DRB1*11:03L HLA-DRB1*11:01L HLA-DRB3*01:01L HLA-DRB1*04:08L HLA-DRB1*08:03L
TQEVFAQVKQIYK

SEQ ID NO: 17443 - protein, 12 aa, Severe acute respiratory syndrome coronavirus 2
  REGION 1..12: note = Table B: HLA-DRB1*04:05L HLA-DRB1*04:10L HLA-DRB1*12:01L
FNFSQILPDPSK

SEQ ID NO: 17444 - protein, 12 aa, Severe acute respiratory syndrome coronavirus 2
  REGION 1..12: note = Table B: HLA-DRB1*04:05L HLA-DRB1*11:04L HLA-DRB1*11:01L HLA-DRB3*01:01L
SFIEDLLFNKVT

SEQ ID NO: 17445 - protein, 13 aa, Severe acute respiratory syndrome coronavirus 2
  REGION 1..13: note = Table B: HLA-DRB1*04:05L HLA-DRB1*01:02L HLA-DRB1*08:01L HLA-DQA1*05:01-B1*02:01L HLA-DRB1*12:02L HLA-DRB1*14:17L HLA-DRB1*04:08L HLA-DQA1*02:01-B1*03:03L
EDLLFNKVTLADA

SEQ ID NO: 17446 - protein, 14 aa, Severe acute respiratory syndrome coronavirus 2
  REGION 1..14: note = Table B: HLA-DRB1*04:05L HLA-DRB1*07:01L
FNGIGVTQNVLYEN

SEQ ID NO: 17447 - protein, 14 aa, Severe acute respiratory syndrome coronavirus 2
  REGION 1..14: note = Table B: HLA-DRB1*04:05L HLA-DRB1*04:10L HLA-DRB1*07:01L
NGIGVTQNVLYENQ

SEQ ID NO: 17448 - protein, 11 aa, Severe acute respiratory syndrome coronavirus 2
  REGION 1..11: note = Table B: HLA-DRB1*04:05L HLA-DRB4*03:01NL HLA-DPA1*03:01-B1*04:02L HLA-DRB1*03:01L HLA-DRB1*14:01L HLA-DQA1*01-B1*05L HLA-DRB4*01:01L HLA-DQA1*05:05-B1*03:116L HLA-DPA1*01:03-B1*04:02L HLA-DRB1*12:01L
  REGION 1..11: note = CONT. FROM ABOVE: HLA-DPA1*01:03-B1*104:01L HLA-DPA1*01:02-B1*04 :01L HLA-DRB1*10:01L HLA-DRB1*16:01L HLA-DRB1*08:02L
YENQKLIANQF

SEQ ID NO: 17449 - protein, 12 aa, Severe acute respiratory syndrome coronavirus 2
  REGION 1..12: note = Table B: HLA-DRB1*04:05L HLA-DRB1*01:02L HLA-DRB1*04:08L HLA-DRB1*15:03L
QFNSAIGKIQDS

SEQ ID NO: 17450 - protein, 11 aa, Severe acute respiratory syndrome coronavirus 2
  REGION 1..11: note = Table B: HLA-DRB1*04:05L HLA-DRB4*03:01NL HLA-DRB1*04:10L
AIGKIQDSLSS

SEQ ID NO: 17451 - protein, 12 aa, Severe acute respiratory syndrome coronavirus 2
  REGION 1..12: note = Table B: HLA-DRB1*04:05L HLA-DRB1*01:02L HLA-DRB1*04:10L HLA-DRB1*12:01L HLA-DPA1*03:01-B1*105:01L
ALGKLQDVVNQN

SEQ ID NO: 17452 - protein, 12 aa, Severe acute respiratory syndrome coronavirus 2
  REGION 1..12: note = Table B: HLA-DRB1*04:05L HLA-DRB1*04:10L
LGKLQDVVNQNA

SEQ ID NO: 17453 - protein, 11 aa, Severe acute respiratory syndrome coronavirus 2
  REGION 1..11: note = Table B: HLA-DRB1*04:05L HLA-DRB1*11:03L HLA-DRB1*11:04L
VVNQNAQALNT

SEQ ID NO: 17454 - protein, 12 aa, Severe acute respiratory syndrome coronavirus 2
  REGION 1..12: note = Table B: HLA-DRB1*04:05L HLA-DRB1*01:02L HLA-DRB3*02:01L HLA-DPA1*01:03-B1*03:01L HLA-DPA1*03:01-B1*04:02L HLA-DRB1*14:01L HLA-DRB1*14:02L HLA-DQA1*05:05-B1*03:19L HLA-DPA1*02:01-B1*13:01L HLA-DPA1*01:03-B1*104:01L
  REGION 1..12: note = CONT. FROM ABOVE: HLA-DQA1*05:05-B1*03:01L HLA-DRB1*04:08L
FGAISSVLNDIL

SEQ ID NO: 17455 - protein, 12 aa, Severe acute respiratory syndrome coronavirus 2
  REGION 1..12: note = Table B: HLA-DRB1*04:05L HLA-DRB1*04:10L HLA-DRB1*14:17L HLA-DRB1*04:08L
SVLNDILSRLDK

SEQ ID NO: 17456 - protein, 14 aa, Severe acute respiratory syndrome coronavirus 2
  REGION 1..14: note = Table B: HLA-DRB1*04:05L HLA-DRB1*01:02L
DKVEAEVQIDRLIT

SEQ ID NO: 17457 - protein, 13 aa, Severe acute respiratory syndrome coronavirus 2
  REGION 1..13: note = Table B: HLA-DRB1*04:05L HLA-DRB1*08:04L HLA-DQA1*01:01-B1*05:01L HLA-DRB1*08:01L HLA-DRB1*04:10L HLA-DRB1*12:02L
VEAEVQIDRLITG

SEQ ID NO: 17458 - protein, 13 aa, Severe acute respiratory syndrome coronavirus 2
  REGION 1..13: note = Table B: HLA-DRB1*04:05L HLA-DRB1*08:04L HLA-DRB1*08:77L HLA-DPA1*01:03-B1*03:01L HLA-DRB1*03:01L HLA-DRB1*14:02L HLA-DRB1*04:08L
AEVQIDRLITGRL

SEQ ID NO: 17459 - protein, 12 aa, Severe acute respiratory syndrome coronavirus 2
  REGION 1..12: note = Table B: HLA-DRB1*04:05L HLA-DRB1*14:17L HLA-DRB1*16:01L HLA-DRB1*04:08L
GKGYHLMSFPQS

SEQ ID NO: 17460 - protein, 13 aa, Severe acute respiratory syndrome coronavirus 2
  REGION 1..13: note = Table B: HLA-DRB1*04:05L HLA-DRB1*01:02L HLA-DRB1*16:01L HLA-DRB1*04:08L
KGYHLMSFPQSAP

SEQ ID NO: 17461 - protein, 14 aa, Severe acute respiratory syndrome coronavirus 2
  REGION 1..14: note = Table B: HLA-DRB1*04:05L HLA-DQA1*01:02-B1*06:02L HLA-DPA1*01:03-B1*03:01L HLA-DRB1*12:01L HLA-DPA1*02:01-B1*13:01L HLA-DRB1*16:01L HLA-DQA1*01:03-B1*06:01L
VPAQEKNFTTAPAI

SEQ ID NO: 17462 - protein, 14 aa, Severe acute respiratory syndrome coronavirus 2
  REGION 1..14: note = Table B: HLA-DRB1*04:05L HLA-DRB1*12:01L
AQEKNFTTAPAICH

SEQ ID NO: 17463 - protein, 12 aa, Severe acute respiratory syndrome coronavirus 2
  REGION 1..12: note = Table B: HLA-DRB1*04:05L HLA-DRB1*04:10L
QIITTDNTFVSG

SEQ ID NO: 17464 - protein, 12 aa, Severe acute respiratory syndrome coronavirus 2
  REGION 1..12: note = Table B: HLA-DRB1*04:05L HLA-DQA1*01:02-B1*06:02L HLA-DRB1*08:01L HLA-DRB1*04:10L HLA-DRB1*16:01L HLA-DRB1*04:08L HLA-DRB1*15:03L
PELDSFKEELDK

SEQ ID NO: 17465 - protein, 14 aa, Severe acute respiratory syndrome coronavirus 2
  REGION 1..14: note = Table B: HLA-DRB1*04:05L HLA-DQA1*01:02-B1*06:02L HLA-DQA1*05:05-B1*03:01L
FKNHTSPDVDLGDI

SEQ ID NO: 17466 - protein, 14 aa, Severe acute respiratory syndrome coronavirus 2
  REGION 1..14: note = Table B: HLA-DRB1*04:05L HLA-DQA1*01:02-B1*06:02L HLA-DRB1*01:02L HLA-DRB1*08:01L HLA-DPA1*02:01-B1*13:01L HLA-DPA1*03:01-B1*105:01L
VNIQKEIDRLNEVA

SEQ ID NO: 17467 - protein, 14 aa, Severe acute respiratory syndrome coronavirus 2
  REGION 1..14: note = Table B: HLA-DRB1*04:05L HLA-DRB1*15:03L
NLNESLIDLQELGK

SEQ ID NO: 17468 - protein, 13 aa, Severe acute respiratory syndrome coronavirus 2
  REGION 1..13: note = Table B: HLA-DRB1*04:05L HLA-DRB1*11:04L HLA-DRB1*14:02L HLA-DRB1*11:01L HLA-DRB1*08:03L
LGKYEQYIKWPWY

SEQ ID NO: 17469 - protein, 13 aa, Severe acute respiratory syndrome coronavirus 2
  REGION 1..13: note = Table B: HLA-DRB1*04:05L HLA-DRB1*14:01L HLA-DRB1*08:01L HLA-DRB1*12:01L HLA-DRB1*04:08L HLA-DRB1*15:03L
SEPVLKGVKLHYT

SEQ ID NO: 17470 - protein, 13 aa, Severe acute respiratory syndrome coronavirus 2
  REGION 1..13: note = Table B: HLA-DRB1*04:05L HLA-DRB1*01:02L HLA-DRB4*03:01NL HLA-DRB1*14:01L HLA-DRB1*12:02L HLA-DRB1*14:54L HLA-DRB1*16:01L
TATIPIQASLPFG

SEQ ID NO: 17471 - protein, 10 aa, Severe acute respiratory syndrome coronavirus 2
  REGION 1..10: note = Table B: HLA-DRB1*04:05L HLA-DQA1*01:02-B1*06:02L HLA-DQA1*05:05-B1*03:19L HLA-DPA1*02:01-B1*13:01L HLA-DPA1*03:01-B1*105:01L HLA-DQA1*01:03-B1*06:01L HLA-DQA1*02:01-B1*03:03L HLA-DRB1*15:03L
PIQASLPFGW

SEQ ID NO: 17472 - protein, 12 aa, Severe acute respiratory syndrome coronavirus 2
  REGION 1..12: note = Table B: HLA-DRB1*04:05L HLA-DRB3*01:01L
SKIITLKKRWQL

SEQ ID NO: 17473 - protein, 13 aa, Severe acute respiratory syndrome coronavirus 2
  REGION 1..13: note = Table B: HLA-DRB1*04:05L HLA-DRB1*01:02L HLA-DRB1*12:01L HLA-DPA1*02:01-B1*13:01L
TLKKRWQLALSKG

SEQ ID NO: 17474 - protein, 12 aa, Severe acute respiratory syndrome coronavirus 2
  REGION 1..12: note = Table B: HLA-DRB1*04:05L HLA-DQA1*01-B1*05L HLA-DQA1*05:01-B1*02:01L
LVYFLQSINFVR

SEQ ID NO: 17475 - protein, 10 aa, Severe acute respiratory syndrome coronavirus 2
  REGION 1..10: note = Table B: HLA-DRB1*04:05L HLA-DPA1*02:01-B1*13:01L HLA-DQA1*01:03-B1*06:01L
NFVRIIMRLW

SEQ ID NO: 17476 - protein, 13 aa, Severe acute respiratory syndrome coronavirus 2
  REGION 1..13: note = Table B: HLA-DRB1*04:05L HLA-DRB4*03:01NL HLA-DRB1*04:10L HLA-DRB1*12:01L HLA-DRB1*14:54L HLA-DRB1*16:01L
TSSIVITSGDGTT

SEQ ID NO: 17477 - protein, 14 aa, Severe acute respiratory syndrome coronavirus 2
  REGION 1..14: note = Table B: HLA-DRB1*04:05L HLA-DRB1*01:02L HLA-DQA1*01:01-B1*05:01L HLA-DPA1*02:01-B1*13:01L HLA-DQA1*05:05-B1*03:01L
SPISEHDYQIGGYT

SEQ ID NO: 17478 - protein, 12 aa, Severe acute respiratory syndrome coronavirus 2
  REGION 1..12: note = Table B: HLA-DRB1*04:05L
FYVYSRVKNLNS

SEQ ID NO: 17479 - protein, 12 aa, Severe acute respiratory syndrome coronavirus 2
  REGION 1..12: note = Table B: HLA-DRB1*04:05L HLA-DQA1*01:02-B1*06:02L HLA-DRB1*01:02L HLA-DRB1*11:04L HLA-DRB1*08:01L HLA-DRB1*11:01L HLA-DRB1*12:01L
VYSRVKNLNSSR

SEQ ID NO: 17480 - protein, 12 aa, Severe acute respiratory syndrome coronavirus 2
  REGION 1..12: note = Table B: HLA-DRB1*04:05L HLA-DRB1*01:02L
SNGTITVEELKK

SEQ ID NO: 17481 - protein, 11 aa, Severe acute respiratory syndrome coronavirus 2
  REGION 1..11: note = Table B: HLA-DRB1*04:05L HLA-DRB1*01:02L HLA-DRB1*08:77L HLA-DRB3*02:01L HLA-DPA1*01:03-B1*03:01L HLA-DRB1*14:01L HLA-DRB1*14:02L HLA-DQA1*01-B1*05L HLA-DQA1*05:05-B1*03:19L HLA-DPA1*01:03-B1*04:01L HLA-DPA1*01:03-B1*04:02L
  REGION 1..11: note = CONT. FROM ABOVE: HLA-DPA1*02:01-B1*13:01L HLA-DPA1*01:03-B1*104 :01L HLA-DRB1*04:08L
GTITVEELKKL

SEQ ID NO: 17482 - protein, 15 aa, Severe acute respiratory syndrome coronavirus 2
  REGION 1..15: note = Table B: HLA-DRB1*04:05L HLA-DRB1*16:01L HLA-DRB1*15:03L
RLFARTRSMWSFNPE

SEQ ID NO: 17483 - protein, 13 aa, Severe acute respiratory syndrome coronavirus 2
  REGION 1..13: note = Table B: HLA-DRB1*04:05L HLA-DRB1*11:04L HLA-DPA1*01:03-B1*02:01L
HGTILTRPLLESE

SEQ ID NO: 17484 - protein, 15 aa, Severe acute respiratory syndrome coronavirus 2
  REGION 1..15: note = Table B: HLA-DRB1*04:05L HLA-DRB1*11:01L
SELVIGAVILRGHLR

SEQ ID NO: 17485 - protein, 12 aa, Severe acute respiratory syndrome coronavirus 2
  REGION 1..12: note = Table B: HLA-DRB1*04:05L HLA-DRB1*01:02L HLA-DRB3*02:01L
ITVATSRTLSYY

SEQ ID NO: 17486 - protein, 12 aa, Severe acute respiratory syndrome coronavirus 2
  REGION 1..12: note = Table B: HLA-DRB1*04:05L HLA-DQA1*01:02-B1*06:02L HLA-DRB1*14:02L HLA-DPA1*03:01-B1*105:01L HLA-DRB1*07:01L HLA-DRB1*10:01L
SYYKLGASQRVA

SEQ ID NO: 17487 - protein, 14 aa, Severe acute respiratory syndrome coronavirus 2
  REGION 1..14: note = Table B: HLA-DRB1*04:05L HLA-DRB1*01:02L HLA-DRB1*12:01L HLA-DRB1*16:01L
GASQRVAGDSGFAA

SEQ ID NO: 17488 - protein, 12 aa, Severe acute respiratory syndrome coronavirus 2
  REGION 1..12: note = Table B: HLA-DRB1*04:05L HLA-DRB1*01:02L HLA-DRB1*14:01L HLA-DRB1*08:01L HLA-DRB1*12:01L HLA-DRB1*16:01L HLA-DRB1*04:08L HLA-DRB1*15:03L
AAYSRYRIGNYK

SEQ ID NO: 17489 - protein, 13 aa, Severe acute respiratory syndrome coronavirus 2
  REGION 1..13: note = Table B: HLA-DRB1*04:05L HLA-DRB1*12:01L
RYRIGNYKLNTDH

SEQ ID NO: 17490 - protein, 15 aa, Severe acute respiratory syndrome coronavirus 2
  REGION 1..15: note = Table B: HLA-DRB1*04:05L HLA-DRB1*01:02L HLA-DRB1*12:01L
TDHSSSSDNIALLVQ

SEQ ID NO: 17491 - protein, 12 aa, Severe acute respiratory syndrome coronavirus 2
  REGION 1..12: note = Table B: HLA-DRB1*04:05L HLA-DQA1*05:01-B1*02:01L HLA-DRB1*16:01L
NKYSQLDEEQPM

SEQ ID NO: 17492 - protein, 12 aa, Severe acute respiratory syndrome coronavirus 2
  REGION 1..12: note = Table B: HLA-DRB1*04:05L HLA-DPA1*03:01-B1*105:01L
KYSQLDEEQPME

SEQ ID NO: 17493 - protein, 13 aa, Severe acute respiratory syndrome coronavirus 2
  REGION 1..13: note = Table B: HLA-DRB1*04:05L HLA-DRB1*11:04L HLA-DRB1*12:01L HLA-DPA1*01:02-B1*04:01L HLA-DQA1*02:01-B1*03:03L
ELYHYQECVRGTT

SEQ ID NO: 17494 - protein, 14 aa, Severe acute respiratory syndrome coronavirus 2
  REGION 1..14: note = Table B: HLA-DRB1*04:05L
LRARSVSPKLFIRQ

SEQ ID NO: 17495 - protein, 14 aa, Severe acute respiratory syndrome coronavirus 2
  REGION 1..14: note = Table B: HLA-DRB1*04:05L HLA-DRB1*08:04L
LFIRQEEVQELYSP

SEQ ID NO: 17496 - protein, 12 aa, Severe acute respiratory syndrome coronavirus 2
  REGION 1..12: note = Table B: HLA-DRB1*04:05L HLA-DPA1*01:03-B1*03:01L HLA-DPA1*02:01-B1*13:01L
EPKLGSLVVRCS

SEQ ID NO: 17497 - protein, 14 aa, Severe acute respiratory syndrome coronavirus 2
  REGION 1..14: note = Table B: HLA-DRB1*04:05L HLA-DQA1*01:02-B1*06:02L HLA-DRB1*01:02L HLA-DRB1*08:01L HLA-DRB1*12:01L HLA-DRB1*04:08L
IRGGDGKMKDLSPR

SEQ ID NO: 17498 - protein, 12 aa, Severe acute respiratory syndrome coronavirus 2
  REGION 1..12: note = Table B: HLA-DRB1*04:05L HLA-DQA1*01:02-B1*06:02L HLA-DRB1*01:02L HLA-DRB1*14:01L HLA-DQA1*05:05-B1*03:19L HLA-DRB1*04:10L HLA-DPA1*03:01-B1*105:01L HLA-DRB1*14:54L HLA-DQA1*05:05-B1*03:01L HLA-DQA1*01:03-B1*06:01L
  REGION 1..12: note = CONT. FROM ABOVE: HLA-DRB1*15:03L
AAIVLQLPQGTT

SEQ ID NO: 17499 - protein, 17 aa, Severe acute respiratory syndrome coronavirus 2
  REGION 1..17: note = Table B: HLA-DRB1*04:05L
LPQGTTLPKGFYAEGSR

SEQ ID NO: 17500 - protein, 15 aa, Severe acute respiratory syndrome coronavirus 2
  REGION 1..15: note = Table B: HLA-DRB1*04:05L HLA-DRB1*16:01L
GSRGGSQASSRSSSR

SEQ ID NO: 17501 - protein, 15 aa, Severe acute respiratory syndrome coronavirus 2
  REGION 1..15: note = Table B: HLA-DRB1*04:05L
ASSRSSSRSRNSSRN

SEQ ID NO: 17502 - protein, 13 aa, Severe acute respiratory syndrome coronavirus 2
  REGION 1..13: note = Table B: HLA-DRB1*04:05L HLA-DPA1*01:03-B1*03:01L HLA-DQA1*05:05-B1*03:19L HLA-DQA1*05:01-B1*02:01L
GGDAALALLLLDR

SEQ ID NO: 17503 - protein, 13 aa, Severe acute respiratory syndrome coronavirus 2
  REGION 1..13: note = Table B: HLA-DRB1*04:05L HLA-DRB1*01:02L
AALALLLLDRLNQ

SEQ ID NO: 17504 - protein, 13 aa, Severe acute respiratory syndrome coronavirus 2
  REGION 1..13: note = Table B: HLA-DRB1*04:05L HLA-DPA1*01:03-B1*02:01L
ALALLLLDRLNQL

SEQ ID NO: 17505 - protein, 13 aa, Severe acute respiratory syndrome coronavirus 2
  REGION 1..13: note = Table B: HLA-DRB1*04:05L HLA-DPA1*01:03-B1*03:01L HLA-DRB1*03:01L HLA-DPA1*01:03-B1*104:01L HLA-DQA1*05:05-B1*03:01L
LALLLLDRLNQLE

SEQ ID NO: 17506 - protein, 13 aa, Severe acute respiratory syndrome coronavirus 2
  REGION 1..13: note = Table B: HLA-DRB1*04:05L HLA-DRB1*03:01L
ALLLLDRLNQLES

SEQ ID NO: 17507 - protein, 14 aa, Severe acute respiratory syndrome coronavirus 2
  REGION 1..14: note = Table B: HLA-DRB1*04:05L HLA-DQA1*01:02-B1*06:02L HLA-DQA1*01:03-B1*06:01L HLA-DRB1*04:08L
SGKGQQQQGQTVTK

SEQ ID NO: 17508 - protein, 14 aa, Severe acute respiratory syndrome coronavirus 2
  REGION 1..14: note = Table B: HLA-DRB1*04:05L HLA-DRB1*04:08L
GKGQQQQGQTVTKK

SEQ ID NO: 17509 - protein, 16 aa, Severe acute respiratory syndrome coronavirus 2
  REGION 1..16: note = Table B: HLA-DRB1*04:05L HLA-DPA1*02:01-B1*13:01L HLA-DPA1*03:01-B1*105:01L HLA-DRB1*04:08L
GQQQQGQTVTKKSAAE

SEQ ID NO: 17510 - protein, 13 aa, Severe acute respiratory syndrome coronavirus 2
  REGION 1..13: note = Table B: HLA-DRB1*04:05L HLA-DRB1*08:01L
GQTVTKKSAAEAS

SEQ ID NO: 17511 - protein, 12 aa, Severe acute respiratory syndrome coronavirus 2
  REGION 1..12: note = Table B: HLA-DRB1*04:05L HLA-DRB1*01:02L HLA-DPA1*02:01-B1*13:01L
KRTATKAYNVTQ

SEQ ID NO: 17512 - protein, 14 aa, Severe acute respiratory syndrome coronavirus 2
  REGION 1..14: note = Table B: HLA-DRB1*04:05L HLA-DRB1*01:01L HLA-DRB3*01:01L HLA-DPA1*03:01-B1*105:01L HLA-DRB1*07:01L HLA-DRB1*15:01L
AYNVTQAFGRRGPE

SEQ ID NO: 17513 - protein, 16 aa, Severe acute respiratory syndrome coronavirus 2
  REGION 1..16: note = Table B: HLA-DRB1*04:05L HLA-DQA1*01:02-B1*06:02L HLA-DRB1*01:02L HLA-DRB1*12:01L HLA-DPA1*02:01-B1*13:01L
GRRGPEQTQGNFGDQE

SEQ ID NO: 17514 - protein, 14 aa, Severe acute respiratory syndrome coronavirus 2
  REGION 1..14: note = Table B: HLA-DRB1*04:05L HLA-DRB1*01:02L HLA-DPA1*02:01-B1*13:01L HLA-DQA1*03:01-B1*03:02L HLA-DQA1*02:01-B1*03:03L
DKKKKADETQALPQ

SEQ ID NO: 17515 - protein, 15 aa, Severe acute respiratory syndrome coronavirus 2
  REGION 1..15: note = Table B: HLA-DRB1*04:05L HLA-DRB1*12:01L HLA-DPA1*01:03-B1*104:01L
DDFSKQLQQSMSSAD

SEQ ID NO: 17516 - protein, 14 aa, Severe acute respiratory syndrome coronavirus 2
  REGION 1..14: note = Table B: HLA-DQA1*01:02-B1*06:02L
GFNEKTHVQLSLPV

SEQ ID NO: 17517 - protein, 14 aa, Severe acute respiratory syndrome coronavirus 2
  REGION 1..14: note = Table B: HLA-DQA1*01:02-B1*06:02L
FNEKTHVQLSLPVL

SEQ ID NO: 17518 - protein, 13 aa, Severe acute respiratory syndrome coronavirus 2
  REGION 1..13: note = Table B: HLA-DQA1*01:02-B1*06:02L HLA-DRB1*01:02L HLA-DRB1*12:01L HLA-DQA1*01:03-B1*06:01L HLA-DQA1*02:01-B1*03:03L HLA-DRB1*15:03L
EKTHVQLSLPVLQ

SEQ ID NO: 17519 - protein, 12 aa, Severe acute respiratory syndrome coronavirus 2
  REGION 1..12: note = Table B: HLA-DQA1*01:02-B1*06:02L HLA-DPA1*03:01-B1*105:01L
HVQLSLPVLQVR

SEQ ID NO: 17520 - protein, 12 aa, Severe acute respiratory syndrome coronavirus 2
  REGION 1..12: note = Table B: HLA-DQA1*01:02-B1*06:02L HLA-DPA1*03:01-B1*105:01L
VQLSLPVLQVRD

SEQ ID NO: 17521 - protein, 12 aa, Severe acute respiratory syndrome coronavirus 2
  REGION 1..12: note = Table B: HLA-DQA1*01:02-B1*06:02L HLA-DQA1*01:03-B1*06:01L HLA-DQA1*02:01-B1*03:03L
VRDVLVRGFGDS

SEQ ID NO: 17522 - protein, 12 aa, Severe acute respiratory syndrome coronavirus 2
  REGION 1..12: note = Table B: HLA-DQA1*01:02-B1*06:02L HLA-DPA1*03:01-B1*04:02L HLA-DRB1*12:01L HLA-DPA1*02:01-B1*13:01L HLA-DPA1*03:01-B1*105:01L HLA-DQA1*01:03-B1*06:01L HLA-DRB1*15:03L
VRGFGDSVEEVL

SEQ ID NO: 17523 - protein, 12 aa, Severe acute respiratory syndrome coronavirus 2
  REGION 1..12: note = Table B: HLA-DQA1*01:02-B1*06:02L HLA-DRB1*01:02L HLA-DRB1*14:01L HLA-DRB1*11:04L HLA-DRB1*08:01L HLA-DRB1*12:01L HLA-DRB3*01:01L HLA-DRB1*16:01L HLA-DRB1*04:08L HLA-DRB1*15:03L
VLSEARQHLKDG

SEQ ID NO: 17524 - protein, 12 aa, Severe acute respiratory syndrome coronavirus 2
  REGION 1..12: note = Table B: HLA-DQA1*01:02-B1*06:02L
LKDGTCGLVEVE

SEQ ID NO: 17525 - protein, 11 aa, Severe acute respiratory syndrome coronavirus 2
  REGION 1..11: note = Table B: HLA-DQA1*01:02-B1*06:02L HLA-DQA1*02:01-B1*03:03L
DGTCGLVEVEK

SEQ ID NO: 17526 - protein, 12 aa, Severe acute respiratory syndrome coronavirus 2
  REGION 1..12: note = Table B: HLA-DQA1*01:02-B1*06:02L
LEQPYVFIKRSD

SEQ ID NO: 17527 - protein, 12 aa, Severe acute respiratory syndrome coronavirus 2
  REGION 1..12: note = Table B: HLA-DQA1*01:02-B1*06:02L HLA-DQA1*01:03-B1*06:01L
SDARTAPHGHVM

SEQ ID NO: 17528 - protein, 12 aa, Severe acute respiratory syndrome coronavirus 2
  REGION 1..12: note = Table B: HLA-DQA1*01:02-B1*06:02L
MVELVAELEGIQ

SEQ ID NO: 17529 - protein, 13 aa, Severe acute respiratory syndrome coronavirus 2
  REGION 1..13: note = Table B: HLA-DQA1*01:02-B1*06:02L
GRSGETLGVLVPH

SEQ ID NO: 17530 - protein, 12 aa, Severe acute respiratory syndrome coronavirus 2
  REGION 1..12: note = Table B: HLA-DQA1*01:02-B1*06:02L HLA-DQA1*01:03-B1*06:01L
LGVLVPHVGEIP

SEQ ID NO: 17531 - protein, 14 aa, Severe acute respiratory syndrome coronavirus 2
  REGION 1..14: note = Table B: HLA-DQA1*01:02-B1*06:02L HLA-DRB1*11:04L HLA-DRB1*11:01L HLA-DRB1*13:01L
IPVAYRKVLLRKNG

SEQ ID NO: 17532 - protein, 15 aa, Severe acute respiratory syndrome coronavirus 2
  REGION 1..15: note = Table B: HLA-DQA1*01:02-B1*06:02L HLA-DPA1*03:01-B1*105:01L HLA-DQA1*03:01-B1*03:02L
LKSFDLGDELGTDPY

SEQ ID NO: 17533 - protein, 13 aa, Severe acute respiratory syndrome coronavirus 2
  REGION 1..13: note = Table B: HLA-DQA1*01:02-B1*06:02L HLA-DPA1*02:01-B1*13:01L
ELGTDPYEDFQEN

SEQ ID NO: 17534 - protein, 13 aa, Severe acute respiratory syndrome coronavirus 2
  REGION 1..13: note = Table B: HLA-DQA1*01:02-B1*06:02L
SSGVTRELMRELN

SEQ ID NO: 17535 - protein, 14 aa, Severe acute respiratory syndrome coronavirus 2
  REGION 1..14: note = Table B: HLA-DQA1*01:02-B1*06:02L
SGVTRELMRELNGG

SEQ ID NO: 17536 - protein, 14 aa, Severe acute respiratory syndrome coronavirus 2
  REGION 1..14: note = Table B: HLA-DQA1*01:02-B1*06:02L
GVTRELMRELNGGA

SEQ ID NO: 17537 - protein, 10 aa, Severe acute respiratory syndrome coronavirus 2
  REGION 1..10: note = Table B: HLA-DQA1*01:02-B1*06:02L HLA-DQA1*03:01-B1*03:02L HLA-DQA1*01:03-B1*06:01L HLA-DQA1*02:01-B1*03:03L
NGGAYTRYVD

SEQ ID NO: 17538 - protein, 11 aa, Severe acute respiratory syndrome coronavirus 2
  REGION 1..11: note = Table B: HLA-DQA1*01:02-B1*06:02L
GGAYTRYVDNN

SEQ ID NO: 17539 - protein, 14 aa, Severe acute respiratory syndrome coronavirus 2
  REGION 1..14: note = Table B: HLA-DQA1*01:02-B1*06:02L
RYVDNNFCGPDGYP

SEQ ID NO: 17540 - protein, 13 aa, Severe acute respiratory syndrome coronavirus 2
  REGION 1..13: note = Table B: HLA-DQA1*01:02-B1*06:02L HLA-DQA1*01:03-B1*06:01L
VDNNFCGPDGYPL

SEQ ID NO: 17541 - protein, 13 aa, Severe acute respiratory syndrome coronavirus 2
  REGION 1..13: note = Table B: HLA-DQA1*01:02-B1*06:02L HLA-DQA1*01:03-B1*06:01L
DNNFCGPDGYPLE

SEQ ID NO: 17542 - protein, 13 aa, Severe acute respiratory syndrome coronavirus 2
  REGION 1..13: note = Table B: HLA-DQA1*01:02-B1*06:02L HLA-DRB1*01:02L
PLECIKDLLARAG

SEQ ID NO: 17543 - protein, 13 aa, Severe acute respiratory syndrome coronavirus 2
  REGION 1..13: note = Table B: HLA-DQA1*01:02-B1*06:02L
ECIKDLLARAGKA

SEQ ID NO: 17544 - protein, 13 aa, Severe acute respiratory syndrome coronavirus 2
  REGION 1..13: note = Table B: HLA-DQA1*01:02-B1*06:02L
DLLARAGKASCTL

SEQ ID NO: 17545 - protein, 13 aa, Severe acute respiratory syndrome coronavirus 2
  REGION 1..13: note = Table B: HLA-DQA1*01:02-B1*06:02L
LARAGKASCTLSE

SEQ ID NO: 17546 - protein, 13 aa, Severe acute respiratory syndrome coronavirus 2
  REGION 1..13: note = Table B: HLA-DQA1*01:02-B1*06:02L
ARAGKASCTLSEQ

SEQ ID NO: 17547 - protein, 12 aa, Severe acute respiratory syndrome coronavirus 2
  REGION 1..12: note = Table B: HLA-DQA1*01:02-B1*06:02L HLA-DQA1*01:03-B1*06:01L
GKASCTLSEQLD

SEQ ID NO: 17548 - protein, 15 aa, Severe acute respiratory syndrome coronavirus 2
  REGION 1..15: note = Table B: HLA-DQA1*01:02-B1*06:02L HLA-DRB1*01:01L HLA-DRB1*11:01L HLA-DQA1*03:01-B1*03:02L HLA-DPA1*01:03-B1*104:01L HLA-DRB1*15:03L
IDTKRGVYCCREHEH

SEQ ID NO: 17549 - protein, 12 aa, Severe acute respiratory syndrome coronavirus 2
  REGION 1..12: note = Table B: HLA-DQA1*01:02-B1*06:02L HLA-DRB1*01:02L HLA-DRB1*08:01L HLA-DRB1*04:08L
RGVYCCREHEHE

SEQ ID NO: 17550 - protein, 13 aa, Severe acute respiratory syndrome coronavirus 2
  REGION 1..13: note = Table B: HLA-DQA1*01:02-B1*06:02L HLA-DRB1*08:01L
GVYCCREHEHEIA

SEQ ID NO: 17551 - protein, 12 aa, Severe acute respiratory syndrome coronavirus 2
  REGION 1..12: note = Table B: HLA-DQA1*01:02-B1*06:02L HLA-DRB1*01:02L HLA-DRB1*12:01L HLA-DPA1*02:01-B1*13:01L HLA-DPA1*03:01-B1*105:01L HLA-DQA1*01:03-B1*06:01L HLA-DRB1*15:03L
YTERSEKSYELQ

SEQ ID NO: 17552 - protein, 12 aa, Severe acute respiratory syndrome coronavirus 2
  REGION 1..12: note = Table B: HLA-DQA1*01:02-B1*06:02L HLA-DQA1*01:03-B1*06:01L
LQTPFEIKLAKK

SEQ ID NO: 17553 - protein, 12 aa, Severe acute respiratory syndrome coronavirus 2
  REGION 1..12: note = Table B: HLA-DQA1*01:02-B1*06:02L HLA-DRB1*08:04L HLA-DRB1*14:01L HLA-DRB1*08:01L
EIKLAKKFDTFN

SEQ ID NO: 17554 - protein, 10 aa, Severe acute respiratory syndrome coronavirus 2
  REGION 1..10: note = Table B: HLA-DQA1*01:02-B1*06:02L HLA-DPA1*02:01-B1*13:01L HLA-DPA1*03:01-B1*105:01L HLA-DQA1*02:01-B1*03:03L HLA-DRB1*15:03L
DTFNGECPNF

SEQ ID NO: 17555 - protein, 12 aa, Severe acute respiratory syndrome coronavirus 2
  REGION 1..12: note = Table B: HLA-DQA1*01:02-B1*06:02L HLA-DQA1*01:03-B1*06:01L
NGECPNFVFPLN

SEQ ID NO: 17556 - protein, 12 aa, Severe acute respiratory syndrome coronavirus 2
  REGION 1..12: note = Table B: HLA-DQA1*01:02-B1*06:02L
PNFVFPLNSIIK

SEQ ID NO: 17557 - protein, 12 aa, Severe acute respiratory syndrome coronavirus 2
  REGION 1..12: note = Table B: HLA-DQA1*01:02-B1*06:02L
PLNSIIKTIQPR

SEQ ID NO: 17558 - protein, 12 aa, Severe acute respiratory syndrome coronavirus 2
  REGION 1..12: note = Table B: HLA-DQA1*01:02-B1*06:02L HLA-DQA1*01:03-B1*06:01L
DGFMGRIRSVYP

SEQ ID NO: 17559 - protein, 12 aa, Severe acute respiratory syndrome coronavirus 2
  REGION 1..12: note = Table B: HLA-DQA1*01:02-B1*06:02L
GFMGRIRSVYPV

SEQ ID NO: 17560 - protein, 13 aa, Severe acute respiratory syndrome coronavirus 2
  REGION 1..13: note = Table B: HLA-DQA1*01:02-B1*06:02L
SPNECNQMCLSTL

SEQ ID NO: 17561 - protein, 14 aa, Severe acute respiratory syndrome coronavirus 2
  REGION 1..14: note = Table B: HLA-DQA1*01:02-B1*06:02L
PNECNQMCLSTLMK

SEQ ID NO: 17562 - protein, 13 aa, Severe acute respiratory syndrome coronavirus 2
  REGION 1..13: note = Table B: HLA-DQA1*01:02-B1*06:02L
NQMCLSTLMKCDH

SEQ ID NO: 17563 - protein, 14 aa, Severe acute respiratory syndrome coronavirus 2
  REGION 1..14: note = Table B: HLA-DQA1*01:02-B1*06:02L
MKCDHCGETSWQTG

SEQ ID NO: 17564 - protein, 12 aa, Severe acute respiratory syndrome coronavirus 2
  REGION 1..12: note = Table B: HLA-DQA1*01:02-B1*06:02L HLA-DQA1*05:05-B1*03:01L HLA-DQA1*01:03-B1*06:01L
DHCGETSWQTGD

SEQ ID NO: 17565 - protein, 13 aa, Severe acute respiratory syndrome coronavirus 2
  REGION 1..13: note = Table B: HLA-DQA1*01:02-B1*06:02L HLA-DQA1*01:03-B1*06:01L
DFVKATCEFCGTE

SEQ ID NO: 17566 - protein, 12 aa, Severe acute respiratory syndrome coronavirus 2
  REGION 1..12: note = Table B: HLA-DQA1*01:02-B1*06:02L HLA-DQA1*01:03-B1*06:01L
VKATCEFCGTEN

SEQ ID NO: 17567 - protein, 12 aa, Severe acute respiratory syndrome coronavirus 2
  REGION 1..12: note = Table B: HLA-DQA1*01:02-B1*06:02L HLA-DQA1*03:01-B1*03:02L HLA-DQA1*05:05-B1*03:01L HLA-DQA1*02:01-B1*03:03L
EFCGTENLTKEG

SEQ ID NO: 17568 - protein, 11 aa, Severe acute respiratory syndrome coronavirus 2
  REGION 1..11: note = Table B: HLA-DQA1*01:02-B1*06:02L HLA-DQA1*02:01-B1*03:03L
LTKEGATTCGY

SEQ ID NO: 17569 - protein, 12 aa, Severe acute respiratory syndrome coronavirus 2
  REGION 1..12: note = Table B: HLA-DQA1*01:02-B1*06:02L
EGATTCGYLPQN

SEQ ID NO: 17570 - protein, 12 aa, Severe acute respiratory syndrome coronavirus 2
  REGION 1..12: note = Table B: HLA-DQA1*01:02-B1*06:02L
GATTCGYLPQNA

SEQ ID NO: 17571 - protein, 12 aa, Severe acute respiratory syndrome coronavirus 2
  REGION 1..12: note = Table B: HLA-DQA1*01:02-B1*06:02L
ATTCGYLPQNAV

SEQ ID NO: 17572 - protein, 14 aa, Severe acute respiratory syndrome coronavirus 2
  REGION 1..14: note = Table B: HLA-DQA1*01:02-B1*06:02L
IYCPACHNSEVGPE

SEQ ID NO: 17573 - protein, 10 aa, Severe acute respiratory syndrome coronavirus 2
  REGION 1..10: note = Table B: HLA-DQA1*01:02-B1*06:02L HLA-DQA1*05:05-B1*03:19L HLA-DRB4*01:01L HLA-DPA1*01:03-B1*04:01L
IAFGGCVFSY

SEQ ID NO: 17574 - protein, 14 aa, Severe acute respiratory syndrome coronavirus 2
  REGION 1..14: note = Table B: HLA-DQA1*01:02-B1*06:02L HLA-DRB1*01:02L
YVGCHNKCAYWVPR

SEQ ID NO: 17575 - protein, 15 aa, Severe acute respiratory syndrome coronavirus 2
  REGION 1..15: note = Table B: HLA-DQA1*01:02-B1*06:02L
VGCHNKCAYWVPRAS

SEQ ID NO: 17576 - protein, 13 aa, Severe acute respiratory syndrome coronavirus 2
  REGION 1..13: note = Table B: HLA-DQA1*01:02-B1*06:02L
NKCAYWVPRASAN

SEQ ID NO: 17577 - protein, 12 aa, Severe acute respiratory syndrome coronavirus 2
  REGION 1..12: note = Table B: HLA-DQA1*01:02-B1*06:02L HLA-DQA1*01:03-B1*06:01L
WVPRASANIGCN

SEQ ID NO: 17578 - protein, 12 aa, Severe acute respiratory syndrome coronavirus 2
  REGION 1..12: note = Table B: HLA-DQA1*01:02-B1*06:02L HLA-DQA1*01:03-B1*06:01L
IGCNHTGVVGEG

SEQ ID NO: 17579 - protein, 14 aa, Severe acute respiratory syndrome coronavirus 2
  REGION 1..14: note = Table B: HLA-DQA1*01:02-B1*06:02L HLA-DPA1*03:01-B1*105:01L HLA-DQA1*02:01-B1*03:03L
VGEGSEGLNDNLLE

SEQ ID NO: 17580 - protein, 13 aa, Severe acute respiratory syndrome coronavirus 2
  REGION 1..13: note = Table B: HLA-DQA1*01:02-B1*06:02L
EGLNDNLLEILQK

SEQ ID NO: 17581 - protein, 12 aa, Severe acute respiratory syndrome coronavirus 2
  REGION 1..12: note = Table B: HLA-DQA1*01:02-B1*06:02L HLA-DPA1*03:01-B1*105:01L HLA-DQA1*02:01-B1*03:03L
LNDNLLEILQKE

SEQ ID NO: 17582 - protein, 11 aa, Severe acute respiratory syndrome coronavirus 2
  REGION 1..11: note = Table B: HLA-DQA1*01:02-B1*06:02L HLA-DPA1*01:02-B1*04:01L HLA-DQA1*01:03-B1*06:01L HLA-DQA1*02:01-B1*03:03L
DNLLEILQKEK

SEQ ID NO: 17583 - protein, 14 aa, Severe acute respiratory syndrome coronavirus 2
  REGION 1..14: note = Table B: HLA-DQA1*01:02-B1*06:02L HLA-DRB1*01:02L
LQKEKVNINIVGDF

SEQ ID NO: 17584 - protein, 12 aa, Severe acute respiratory syndrome coronavirus 2
  REGION 1..12: note = Table B: HLA-DQA1*01:02-B1*06:02L HLA-DRB1*08:04L HLA-DRB1*08:77L HLA-DRB3*02:01L HLA-DPA1*03:01-B1*04:02L HLA-DRB1*03:01L HLA-DRB1*11:04L HLA-DQA1*01:01-B1*05:01L HLA-DRB1*08:01L HLA-DRB4*01:01L HLA-DPA1*01:03-B1*04:01L
  REGION 1..12: note = CONT. FROM ABOVE: HLA-DRB1*04:10L HLA-DPA1*01:03-B1*04:02L HLA-D RB3*01:01L HLA-DPA1*02:01-B1*13:01L HLA-DQA1*05:05-B1*03:01L HLA -DRB1*08:03L
IVGDFKLNEEIA

SEQ ID NO: 17585 - protein, 14 aa, Severe acute respiratory syndrome coronavirus 2
  REGION 1..14: note = Table B: HLA-DQA1*01:02-B1*06:02L HLA-DPA1*01:03-B1*03:01L HLA-DQA1*05:05-B1*03:19L HLA-DQA1*05:05-B1*03:01L HLA-DRB1*16:01L
DFKLNEEIAIILAS

SEQ ID NO: 17586 - protein, 13 aa, Severe acute respiratory syndrome coronavirus 2
  REGION 1..13: note = Table B: HLA-DQA1*01:02-B1*06:02L
EIAIILASFSAST

SEQ ID NO: 17587 - protein, 14 aa, Severe acute respiratory syndrome coronavirus 2
  REGION 1..14: note = Table B: HLA-DQA1*01:02-B1*06:02L HLA-DPA1*02:01-B1*13:01L HLA-DPA1*03:01-B1*105:01L
DYKAFKQIVESCGN

SEQ ID NO: 17588 - protein, 12 aa, Severe acute respiratory syndrome coronavirus 2
  REGION 1..12: note = Table B: HLA-DQA1*01:02-B1*06:02L
FKQIVESCGNFK

SEQ ID NO: 17589 - protein, 11 aa, Severe acute respiratory syndrome coronavirus 2
  REGION 1..11: note = Table B: HLA-DQA1*01:02-B1*06:02L HLA-DQA1*01:03-B1*06:01L
IVESCGNFKVT

SEQ ID NO: 17590 - protein, 12 aa, Severe acute respiratory syndrome coronavirus 2
  REGION 1..12: note = Table B: HLA-DQA1*01:02-B1*06:02L HLA-DQA1*01:03-B1*06:01L
VESCGNFKVTKG

SEQ ID NO: 17591 - protein, 12 aa, Severe acute respiratory syndrome coronavirus 2
  REGION 1..12: note = Table B: HLA-DQA1*01:02-B1*06:02L
VTKGKAKKGAWN

SEQ ID NO: 17592 - protein, 10 aa, Severe acute respiratory syndrome coronavirus 2
  REGION 1..10: note = Table B: HLA-DQA1*01:02-B1*06:02L HLA-DQA1*05:05-B1*03:19L HLA-DQA1*05:01-B1*02:01L HLA-DPA1*02:01-B1*13:01L HLA-DPA1*03:01-B1*105:01L HLA-DQA1*01:03-B1*06:01L HLA-DQA1*02:01-B1*03:03L HLA-DRB1*15:03L
KSILSPLYAF

SEQ ID NO: 17593 - protein, 12 aa, Severe acute respiratory syndrome coronavirus 2
  REGION 1..12: note = Table B: HLA-DQA1*01:02-B1*06:02L HLA-DRB1*12:01L
VVRSIFSRTLET

SEQ ID NO: 17594 - protein, 11 aa, Severe acute respiratory syndrome coronavirus 2
  REGION 1..11: note = Table B: HLA-DQA1*01:02-B1*06:02L
TLETAQNSVRV

SEQ ID NO: 17595 - protein, 12 aa, Severe acute respiratory syndrome coronavirus 2
  REGION 1..12: note = Table B: HLA-DQA1*01:02-B1*06:02L HLA-DQA1*01:03-B1*06:01L
AQNSVRVLQKAA

SEQ ID NO: 17596 - protein, 14 aa, Severe acute respiratory syndrome coronavirus 2
  REGION 1..14: note = Table B: HLA-DQA1*01:02-B1*06:02L HLA-DPA1*01:03-B1*104:01L
SVRVLQKAAITILD

SEQ ID NO: 17597 - protein, 12 aa, Severe acute respiratory syndrome coronavirus 2
  REGION 1..12: note = Table B: HLA-DQA1*01:02-B1*06:02L HLA-DQA1*01:03-B1*06:01L
QKAAITILDGIS

SEQ ID NO: 17598 - protein, 10 aa, Severe acute respiratory syndrome coronavirus 2
  REGION 1..10: note = Table B: HLA-DQA1*01:02-B1*06:02L HLA-DQA1*01:03-B1*06:01L
QYSLRLIDAM

SEQ ID NO: 17599 - protein, 12 aa, Severe acute respiratory syndrome coronavirus 2
  REGION 1..12: note = Table B: HLA-DQA1*01:02-B1*06:02L
NNLVVMAYITGG

SEQ ID NO: 17600 - protein, 13 aa, Severe acute respiratory syndrome coronavirus 2
  REGION 1..13: note = Table B: HLA-DQA1*01:02-B1*06:02L HLA-DRB1*12:01L HLA-DRB1*15:03L
NLVVMAYITGGVV

SEQ ID NO: 17601 - protein, 10 aa, Severe acute respiratory syndrome coronavirus 2
  REGION 1..10: note = Table B: HLA-DQA1*01:02-B1*06:02L
GGVVQLTSQW

SEQ ID NO: 17602 - protein, 13 aa, Severe acute respiratory syndrome coronavirus 2
  REGION 1..13: note = Table B: HLA-DQA1*01:02-B1*06:02L HLA-DPA1*03:01-B1*04:02L HLA-DQA1*05:05-B1*03:19L HLA-DPA1*01:03-B1*04:02L
VVQLTSQWLTNIF

SEQ ID NO: 17603 - protein, 12 aa, Severe acute respiratory syndrome coronavirus 2
  REGION 1..12: note = Table B: HLA-DQA1*01:02-B1*06:02L
QLTSQWLTNIFG

SEQ ID NO: 17604 - protein, 12 aa, Severe acute respiratory syndrome coronavirus 2
  REGION 1..12: note = Table B: HLA-DQA1*01:02-B1*06:02L HLA-DQA1*01-B1*05L HLA-DQA1*05:01-B1*02:01L HLA-DPA1*01:03-B1*04:01L HLA-DPA1*01:03-B1*04:02L HLA-DPA1*03:01-B1*105:01L HLA-DPA1*01:02-B1*04:01L HLA-DRB1*16:01L
  REGION 1..12: note = CONT. FROM ABOVE: HLA-DQA1*01:03-B1*06:01L HLA-DRB1*15:03L
TSQWLTNIFGTV

SEQ ID NO: 17605 - protein, 10 aa, Severe acute respiratory syndrome coronavirus 2
  REGION 1..10: note = Table B: HLA-DQA1*01:02-B1*06:02L HLA-DRB1*08:77L HLA-DPA1*01:03-B1*03:01L HLA-DPA1*03:01-B1*04:02L HLA-DRB1*03:01L HLA-DRB1*11:02L HLA-DRB1*14:02L HLA-DQA1*01-B1*05L HLA-DQA1*05:05-B1*03:19M
  REGION 1..10: note = CONT. FROM ABOVE: HLA-DQA1*05:01-B1*02:01L HLA-DRB4*01:01L HLA-D PA1*01:03-B1*04:01L HLA-DQA1*05:05-B1*03:116L HLA-DPA1*01:03-B1* 04:02L HLA-DPA1*02:01-B1*13:01L HLA-DPA1*03:01-B1*105:01L HLA-DP A1*01:03-B1*104:01L HLA-DRB1*10:01L HLA-DRB1*16:01L
  REGION 1..10: note = CONT. FROM ABOVE: HLA-DRB1*15:03L
WLTNIFGTVY

SEQ ID NO: 17606 - protein, 11 aa, Severe acute respiratory syndrome coronavirus 2
  REGION 1..11: note = Table B: HLA-DQA1*01:02-B1*06:02L HLA-DRB1*12:01L HLA-DQA1*02:01-B1*03:03L
IFGTVYEKLKP

SEQ ID NO: 17607 - protein, 10 aa, Severe acute respiratory syndrome coronavirus 2
  REGION 1..10: note = Table B: HLA-DQA1*01:02-B1*06:02L HLA-DPA1*02:01-B1*13:01L HLA-DQA1*01:03-B1*06:01L HLA-DQA1*02:01-B1*03:03L HLA-DRB1*15:03L
PVLDWLEEKF

SEQ ID NO: 17608 - protein, 10 aa, Severe acute respiratory syndrome coronavirus 2
  REGION 1..10: note = Table B: HLA-DQA1*01:02-B1*06:02L HLA-DPA1*03:01-B1*105:01L
EGVEFLRDGW

SEQ ID NO: 17609 - protein, 12 aa, Severe acute respiratory syndrome coronavirus 2
  REGION 1..12: note = Table B: HLA-DQA1*01:02-B1*06:02L HLA-DPA1*03:01-B1*105:01L
KFISTCACEIVG

SEQ ID NO: 17610 - protein, 12 aa, Severe acute respiratory syndrome coronavirus 2
  REGION 1..12: note = Table B: HLA-DQA1*01:02-B1*06:02L
FISTCACEIVGG

SEQ ID NO: 17611 - protein, 12 aa, Severe acute respiratory syndrome coronavirus 2
  REGION 1..12: note = Table B: HLA-DQA1*01:02-B1*06:02L HLA-DPA1*03:01-B1*105:01L HLA-DQA1*05:05-B1*03:01L HLA-DQA1*01:03-B1*06:01L
ISTCACEIVGGQ

SEQ ID NO: 17612 - protein, 14 aa, Severe acute respiratory syndrome coronavirus 2
  REGION 1..14: note = Table B: HLA-DQA1*01:02-B1*06:02L
STCACEIVGGQIVT

SEQ ID NO: 17613 - protein, 12 aa, Severe acute respiratory syndrome coronavirus 2
  REGION 1..12: note = Table B: HLA-DQA1*01:02-B1*06:02L HLA-DQA1*01:03-B1*06:01L
VTCAKEIKESVQ

SEQ ID NO: 17614 - protein, 13 aa, Severe acute respiratory syndrome coronavirus 2
  REGION 1..13: note = Table B: HLA-DQA1*01:02-B1*06:02L HLA-DPA1*03:01-B1*04:02L HLA-DRB1*14:01L HLA-DRB1*12:01L HLA-DPA1*03:01-B1*105:01L HLA-DRB1*16:01L HLA-DQA1*01:03-B1*06:01L HLA-DRB1*04:08L HLA-DRB1*15:03L
IKESVQTFFKLVN

SEQ ID NO: 17615 - protein, 12 aa, Severe acute respiratory syndrome coronavirus 2
  REGION 1..12: note = Table B: HLA-DQA1*01:02-B1*06:02L HLA-DRB1*01:02L HLA-DRB1*14:01L
ESVQTFFKLVNK

SEQ ID NO: 17616 - protein, 12 aa, Severe acute respiratory syndrome coronavirus 2
  REGION 1..12: note = Table B: HLA-DQA1*01:02-B1*06:02L HLA-DPA1*03:01-B1*04:02L HLA-DPA1*01:03-B1*04:02L HLA-DPA1*03:01-B1*105:01L HLA-DPA1*01:02-B1*04:01L
LVNKFLALCADS

SEQ ID NO: 17617 - protein, 12 aa, Severe acute respiratory syndrome coronavirus 2
  REGION 1..12: note = Table B: HLA-DQA1*01:02-B1*06:02L
LCADSIIIGGAK

SEQ ID NO: 17618 - protein, 10 aa, Severe acute respiratory syndrome coronavirus 2
  REGION 1..10: note = Table B: HLA-DQA1*01:02-B1*06:02L HLA-DQA1*01:03-B1*06:01L HLA-DQA1*02:01-B1*03:03L
LKALNLGETF

SEQ ID NO: 17619 - protein, 12 aa, Severe acute respiratory syndrome coronavirus 2
  REGION 1..12: note = Table B: HLA-DQA1*01:02-B1*06:02L HLA-DQA1*01:03-B1*06:01L
ALNLGETFVTHS

SEQ ID NO: 17620 - protein, 14 aa, Severe acute respiratory syndrome coronavirus 2
  REGION 1..14: note = Table B: HLA-DQA1*01:02-B1*06:02L HLA-DRB1*14:01L HLA-DRB1*12:01L HLA-DRB3*01:01L
SKGLYRKCVKSREE

SEQ ID NO: 17621 - protein, 12 aa, Severe acute respiratory syndrome coronavirus 2
  REGION 1..12: note = Table B: HLA-DQA1*01:02-B1*06:02L
YRKCVKSREETG

SEQ ID NO: 17622 - protein, 11 aa, Severe acute respiratory syndrome coronavirus 2
  REGION 1..11: note = Table B: HLA-DQA1*01:02-B1*06:02L
ETGLLMPLKAP

SEQ ID NO: 17623 - protein, 10 aa, Severe acute respiratory syndrome coronavirus 2
  REGION 1..10: note = Table B: HLA-DQA1*01:02-B1*06:02L HLA-DQA1*01:03-B1*06:01L HLA-DQA1*02:01-B1*03:03L
PLKAPKEIIF

SEQ ID NO: 17624 - protein, 13 aa, Severe acute respiratory syndrome coronavirus 2
  REGION 1..13: note = Table B: HLA-DQA1*01:02-B1*06:02L HLA-DPA1*02:01-B1*13:01L
KAPKEIIFLEGET

SEQ ID NO: 17625 - protein, 14 aa, Severe acute respiratory syndrome coronavirus 2
  REGION 1..14: note = Table B: HLA-DQA1*01:02-B1*06:02L HLA-DQA1*05:05-B1*03:01L
LEGETLPTEVLTEE

SEQ ID NO: 17626 - protein, 12 aa, Severe acute respiratory syndrome coronavirus 2
  REGION 1..12: note = Table B: HLA-DQA1*01:02-B1*06:02L HLA-DQA1*05:01-B1*02:01L HLA-DPA1*03:01-B1*105:01L HLA-DQA1*01:03-B1*06:01L HLA-DQA1*02:01-B1*03:03L
LTEEVVLKTGDL

SEQ ID NO: 17627 - protein, 12 aa, Severe acute respiratory syndrome coronavirus 2
  REGION 1..12: note = Table B: HLA-DQA1*01:02-B1*06:02L HLA-DQA1*02:01-B1*03:03L
TEEVVLKTGDLQ

SEQ ID NO: 17628 - protein, 11 aa, Severe acute respiratory syndrome coronavirus 2
  REGION 1..11: note = Table B: HLA-DQA1*01:02-B1*06:02L HLA-DPA1*03:01-B1*105:01L HLA-DQA1*03:01-B1*03:02L HLA-DQA1*02:01-B1*03:03L
VVLKTGDLQPL

SEQ ID NO: 17629 - protein, 10 aa, Severe acute respiratory syndrome coronavirus 2
  REGION 1..10: note = Table B: HLA-DQA1*01:02-B1*06:02L HLA-DPA1*03:01-B1*105:01L HLA-DQA1*01:03-B1*06:01M HLA-DQA1*02:01-B1*03:03L
LKTGDLQPLE

SEQ ID NO: 17630 - protein, 13 aa, Severe acute respiratory syndrome coronavirus 2
  REGION 1..13: note = Table B: HLA-DQA1*01:02-B1*06:02L
PLVGTPVCINGLM

SEQ ID NO: 17631 - protein, 10 aa, Severe acute respiratory syndrome coronavirus 2
  REGION 1..10: note = Table B: HLA-DQA1*01:02-B1*06:02L HLA-DPA1*03:01-B1*04:02L HLA-DPA1*03:01-B1*105:01L HLA-DPA1*01:02-B1*04:01L HLA-DQA1*01:03-B1*06:01L
INGLMLLEIK

SEQ ID NO: 17632 - protein, 12 aa, Severe acute respiratory syndrome coronavirus 2
  REGION 1..12: note = Table B: HLA-DQA1*01:02-B1*06:02L HLA-DPA1*03:01-B1*105:01L HLA-DQA1*01:03-B1*06:01L HLA-DQA1*02:01-B1*03:03L
NGLMLLEIKDTE

SEQ ID NO: 17633 - protein, 11 aa, Severe acute respiratory syndrome coronavirus 2
  REGION 1..11: note = Table B: HLA-DQA1*01:02-B1*06:02L HLA-DQA1*01:03-B1*06:01L
EKYCALAPNMM

SEQ ID NO: 17634 - protein, 13 aa, Severe acute respiratory syndrome coronavirus 2
  REGION 1..13: note = Table B: HLA-DQA1*01:02-B1*06:02L HLA-DQA1*01:03-B1*06:01L
VTNNTFTLKGGAP

SEQ ID NO: 17635 - protein, 12 aa, Severe acute respiratory syndrome coronavirus 2
  REGION 1..12: note = Table B: HLA-DQA1*01:02-B1*06:02L HLA-DRB1*08:04L HLA-DRB1*14:01L HLA-DRB1*11:01L HLA-DRB1*04:08L HLA-DRB1*15:03L
NTFTLKGGAPTK

SEQ ID NO: 17636 - protein, 11 aa, Severe acute respiratory syndrome coronavirus 2
  REGION 1..11: note = Table B: HLA-DQA1*01:02-B1*06:02L HLA-DQA1*05:05-B1*03:19L
TLKGGAPTKVT

SEQ ID NO: 17637 - protein, 12 aa, Severe acute respiratory syndrome coronavirus 2
  REGION 1..12: note = Table B: HLA-DQA1*01:02-B1*06:02L HLA-DQA1*05:05-B1*03:19L
LKGGAPTKVTFG

SEQ ID NO: 17638 - protein, 13 aa, Severe acute respiratory syndrome coronavirus 2
  REGION 1..13: note = Table B: HLA-DQA1*01:02-B1*06:02L
GYKSVNITFELDE

SEQ ID NO: 17639 - protein, 13 aa, Severe acute respiratory syndrome coronavirus 2
  REGION 1..13: note = Table B: HLA-DQA1*01:02-B1*06:02L HLA-DQA1*02:01-B1*03:03L
YKSVNITFELDER

SEQ ID NO: 17640 - protein, 12 aa, Severe acute respiratory syndrome coronavirus 2
  REGION 1..12: note = Table B: HLA-DQA1*01:02-B1*06:02L HLA-DRB1*12:01L HLA-DPA1*02:01-B1*13:01L
VNITFELDERID

SEQ ID NO: 17641 - protein, 12 aa, Severe acute respiratory syndrome coronavirus 2
  REGION 1..12: note = Table B: HLA-DQA1*01:02-B1*06:02L
LDERIDKVLNEK

SEQ ID NO: 17642 - protein, 10 aa, Severe acute respiratory syndrome coronavirus 2
  REGION 1..10: note = Table B: HLA-DQA1*01:02-B1*06:02L HLA-DQA1*05:05-B1*03:19L HLA-DQA1*02:01-B1*03:03L
KVLNEKCSAY

SEQ ID NO: 17643 - protein, 12 aa, Severe acute respiratory syndrome coronavirus 2
  REGION 1..12: note = Table B: HLA-DQA1*01:02-B1*06:02L
VLNEKCSAYTVE

SEQ ID NO: 17644 - protein, 12 aa, Severe acute respiratory syndrome coronavirus 2
  REGION 1..12: note = Table B: HLA-DQA1*01:02-B1*06:02L HLA-DQA1*01:03-B1*06:01L
NEKCSAYTVELG

SEQ ID NO: 17645 - protein, 13 aa, Severe acute respiratory syndrome coronavirus 2
  REGION 1..13: note = Table B: HLA-DQA1*01:02-B1*06:02L HLA-DPA1*03:01-B1*105:01L
TEVNEFACVVADA

SEQ ID NO: 17646 - protein, 13 aa, Severe acute respiratory syndrome coronavirus 2
  REGION 1..13: note = Table B: HLA-DQA1*01:02-B1*06:02L
EVNEFACVVADAV

SEQ ID NO: 17647 - protein, 13 aa, Severe acute respiratory syndrome coronavirus 2
  REGION 1..13: note = Table B: HLA-DQA1*01:02-B1*06:02L
VNEFACVVADAVI

SEQ ID NO: 17648 - protein, 12 aa, Severe acute respiratory syndrome coronavirus 2
  REGION 1..12: note = Table B: HLA-DQA1*01:02-B1*06:02L HLA-DQA1*03:01-B1*03:02L HLA-DQA1*01:03-B1*06:01L HLA-DQA1*02:01-B1*03:03L
VADAVIKTLQPV

SEQ ID NO: 17649 - protein, 14 aa, Severe acute respiratory syndrome coronavirus 2
  REGION 1..14: note = Table B: HLA-DQA1*01:02-B1*06:02L
PVSELLTPLGIDLD

SEQ ID NO: 17650 - protein, 14 aa, Severe acute respiratory syndrome coronavirus 2
  REGION 1..14: note = Table B: HLA-DQA1*01:02-B1*06:02L
LDEWSMATYYLFDE

SEQ ID NO: 17651 - protein, 14 aa, Severe acute respiratory syndrome coronavirus 2
  REGION 1..14: note = Table B: HLA-DQA1*01:02-B1*06:02L HLA-DPA1*03:01-B1*04:02L HLA-DPA1*03:01-B1*105:01L
DEWSMATYYLFDES

SEQ ID NO: 17652 - protein, 15 aa, Severe acute respiratory syndrome coronavirus 2
  REGION 1..15: note = Table B: HLA-DQA1*01:02-B1*06:02L HLA-DPA1*01:03-B1*04:02L
EFKLASHMYCSFYPP

SEQ ID NO: 17653 - protein, 15 aa, Severe acute respiratory syndrome coronavirus 2
  REGION 1..15: note = Table B: HLA-DQA1*01:02-B1*06:02L HLA-DPA1*01:03-B1*04:02L
FKLASHMYCSFYPPD

SEQ ID NO: 17654 - protein, 12 aa, Severe acute respiratory syndrome coronavirus 2
  REGION 1..12: note = Table B: HLA-DQA1*01:02-B1*06:02L
SHMYCSFYPPDE

SEQ ID NO: 17655 - protein, 14 aa, Severe acute respiratory syndrome coronavirus 2
  REGION 1..14: note = Table B: HLA-DQA1*01:02-B1*06:02L HLA-DQA1*05:05-B1*03:01L
FEPSTQYEYGTEDD

SEQ ID NO: 17656 - protein, 10 aa, Severe acute respiratory syndrome coronavirus 2
  REGION 1..10: note = Table B: HLA-DQA1*01:02-B1*06:02L
QPEEEQEEDW

SEQ ID NO: 17657 - protein, 14 aa, Severe acute respiratory syndrome coronavirus 2
  REGION 1..14: note = Table B: HLA-DQA1*01:02-B1*06:02L HLA-DPA1*01:03-B1*03:01L HLA-DRB1*03:01L HLA-DPA1*03:01-B1*105:01L HLA-DQA1*05:05-B1*03:01L
DWLDDDSQQTVGQQ

SEQ ID NO: 17658 - protein, 14 aa, Severe acute respiratory syndrome coronavirus 2
  REGION 1..14: note = Table B: HLA-DQA1*01:02-B1*06:02L HLA-DQA1*05:05-B1*03:19L
DDSQQTVGQQDGSE

SEQ ID NO: 17659 - protein, 12 aa, Severe acute respiratory syndrome coronavirus 2
  REGION 1..12: note = Table B: HLA-DQA1*01:02-B1*06:02L HLA-DQA1*05:05-B1*03:01L HLA-DQA1*02:01-B1*03:03L
EDNQTTTIQTIV

SEQ ID NO: 17660 - protein, 10 aa, Severe acute respiratory syndrome coronavirus 2
  REGION 1..10: note = Table B: HLA-DQA1*01:02-B1*06:02L HLA-DQA1*03:01-B1*03:02L HLA-DQA1*01:03-B1*06:01L HLA-DQA1*02:01-B1*03:03L
QTTTIQTIVE

SEQ ID NO: 17661 - protein, 12 aa, Severe acute respiratory syndrome coronavirus 2
  REGION 1..12: note = Table B: HLA-DQA1*01:02-B1*06:02L HLA-DQA1*01:03-B1*06:01L
TIQTIVEVQPQL

SEQ ID NO: 17662 - protein, 12 aa, Severe acute respiratory syndrome coronavirus 2
  REGION 1..12: note = Table B: HLA-DQA1*01:02-B1*06:02L HLA-DQA1*05:01-B1*02:01L HLA-DQA1*05:05-B1*03:01L
ELTPVVQTIEVN

SEQ ID NO: 17663 - protein, 10 aa, Severe acute respiratory syndrome coronavirus 2
  REGION 1..10: note = Table B: HLA-DQA1*01:02-B1*06:02L HLA-DRB1*14:02L HLA-DPA1*02:01-B1*13:01L HLA-DPA1*03:01-B1*105:01L HLA-DQA1*01:03-B1*06:01L HLA-DQA1*02:01-B1*03:03L HLA-DRB1*15:03L
VVQTIEVNSF

SEQ ID NO: 17664 - protein, 12 aa, Severe acute respiratory syndrome coronavirus 2
  REGION 1..12: note = Table B: HLA-DQA1*01:02-B1*06:02L HLA-DPA1*03:01-B1*105:01L HLA-DRB1*16:01L HLA-DRB1*15:03L
VNSFSGYLKLTD

SEQ ID NO: 17665 - protein, 12 aa, Severe acute respiratory syndrome coronavirus 2
  REGION 1..12: note = Table B: HLA-DQA1*01:02-B1*06:02L HLA-DQA1*01-B1*05L HLA-DQA1*05:05-B1*03:01L HLA-DQA1*01:03-B1*06:01L
YLKLTDNVYIKN

SEQ ID NO: 17666 - protein, 13 aa, Severe acute respiratory syndrome coronavirus 2
  REGION 1..13: note = Table B: HLA-DQA1*01:02-B1*06:02L HLA-DPA1*03:01-B1*105:01L HLA-DQA1*01:03-B1*06:01L
LKLTDNVYIKNAD

SEQ ID NO: 17667 - protein, 12 aa, Severe acute respiratory syndrome coronavirus 2
  REGION 1..12: note = Table B: HLA-DQA1*01:02-B1*06:02L HLA-DQA1*03:01-B1*03:02L HLA-DQA1*02:01-B1*03:03L
EAKKVKPTVVVN

SEQ ID NO: 17668 - protein, 12 aa, Severe acute respiratory syndrome coronavirus 2
  REGION 1..12: note = Table B: HLA-DQA1*01:02-B1*06:02L
VVVNAANVYLKH

SEQ ID NO: 17669 - protein, 12 aa, Severe acute respiratory syndrome coronavirus 2
  REGION 1..12: note = Table B: HLA-DQA1*01:02-B1*06:02L
VNAANVYLKHGG

SEQ ID NO: 17670 - protein, 13 aa, Severe acute respiratory syndrome coronavirus 2
  REGION 1..13: note = Table B: HLA-DQA1*01:02-B1*06:02L HLA-DPA1*03:01-B1*105:01L HLA-DQA1*01:03-B1*06:01L
VYLKHGGGVAGAL

SEQ ID NO: 17671 - protein, 12 aa, Severe acute respiratory syndrome coronavirus 2
  REGION 1..12: note = Table B: HLA-DQA1*01:02-B1*06:02L HLA-DQA1*03:01-B1*03:02L HLA-DQA1*01:03-B1*06:01L HLA-DQA1*02:01-B1*03:03L
LNKATNNAMQVE

SEQ ID NO: 17672 - protein, 16 aa, Severe acute respiratory syndrome coronavirus 2
  REGION 1..16: note = Table B: HLA-DQA1*01:02-B1*06:02L HLA-DQA1*01:03-B1*06:01L HLA-DQA1*02:01-B1*03:03L
AMQVESDDYIATNGPL

SEQ ID NO: 17673 - protein, 13 aa, Severe acute respiratory syndrome coronavirus 2
  REGION 1..13: note = Table B: HLA-DQA1*01:02-B1*06:02L HLA-DQA1*05:05-B1*03:01L HLA-DQA1*01:03-B1*06:01L
GPLKVGGSCVLSG

SEQ ID NO: 17674 - protein, 12 aa, Severe acute respiratory syndrome coronavirus 2
  REGION 1..12: note = Table B: HLA-DQA1*01:02-B1*06:02L
LAKHCLHVVGPN

SEQ ID NO: 17675 - protein, 12 aa, Severe acute respiratory syndrome coronavirus 2
  REGION 1..12: note = Table B: HLA-DQA1*01:02-B1*06:02L
HVVGPNVNKGED

SEQ ID NO: 17676 - protein, 13 aa, Severe acute respiratory syndrome coronavirus 2
  REGION 1..13: note = Table B: HLA-DQA1*01:02-B1*06:02L
GPNVNKGEDIQLL

SEQ ID NO: 17677 - protein, 11 aa, Severe acute respiratory syndrome coronavirus 2
  REGION 1..11: note = Table B: HLA-DQA1*01:02-B1*06:02L HLA-DPA1*03:01-B1*105:01L HLA-DQA1*03:01-B1*03:02L HLA-DQA1*02:01-B1*03:03L
VNKGEDIQLLK

SEQ ID NO: 17678 - protein, 10 aa, Severe acute respiratory syndrome coronavirus 2
  REGION 1..10: note = Table B: HLA-DQA1*01:02-B1*06:02L HLA-DQA1*01:03-B1*06:01L HLA-DQA1*02:01-B1*03:03L
QLLKSAYENF

SEQ ID NO: 17679 - protein, 12 aa, Severe acute respiratory syndrome coronavirus 2
  REGION 1..12: note = Table B: HLA-DQA1*01:02-B1*06:02L HLA-DRB1*01:02L HLA-DPA1*03:01-B1*04:02L HLA-DPA1*01:03-B1*04:02L HLA-DRB1*16:01L HLA-DRB1*04:08L HLA-DRB1*15:03L
LLKSAYENFNQH

SEQ ID NO: 17680 - protein, 12 aa, Severe acute respiratory syndrome coronavirus 2
  REGION 1..12: note = Table B: HLA-DQA1*01:02-B1*06:02L
LKSAYENFNQHE

SEQ ID NO: 17681 - protein, 12 aa, Severe acute respiratory syndrome coronavirus 2
  REGION 1..12: note = Table B: HLA-DQA1*01:02-B1*06:02L HLA-DPA1*03:01-B1*105:01L HLA-DQA1*01:03-B1*06:01L
FNQHEVLLAPLL

SEQ ID NO: 17682 - protein, 12 aa, Severe acute respiratory syndrome coronavirus 2
  REGION 1..12: note = Table B: HLA-DQA1*01:02-B1*06:02L HLA-DQA1*01:03-B1*06:01L
NQHEVLLAPLLS

SEQ ID NO: 17683 - protein, 12 aa, Severe acute respiratory syndrome coronavirus 2
  REGION 1..12: note = Table B: HLA-DQA1*01:02-B1*06:02L
HEVLLAPLLSAG

SEQ ID NO: 17684 - protein, 14 aa, Severe acute respiratory syndrome coronavirus 2
  REGION 1..14: note = Table B: HLA-DQA1*01:02-B1*06:02L HLA-DRB1*12:01L HLA-DPA1*03:01-B1*105:01L
EVLLAPLLSAGIFG

SEQ ID NO: 17685 - protein, 13 aa, Severe acute respiratory syndrome coronavirus 2
  REGION 1..13: note = Table B: HLA-DQA1*01:02-B1*06:02L HLA-DQA1*01:03-B1*06:01L
LAPLLSAGIFGAD

SEQ ID NO: 17686 - protein, 12 aa, Severe acute respiratory syndrome coronavirus 2
  REGION 1..12: note = Table B: HLA-DQA1*01:02-B1*06:02L HLA-DQA1*01:01-B1*05:01L
SAGIFGADPIHS

SEQ ID NO: 17687 - protein, 12 aa, Severe acute respiratory syndrome coronavirus 2
  REGION 1..12: note = Table B: HLA-DQA1*01:02-B1*06:02L
DPIHSLRVCVDT

SEQ ID NO: 17688 - protein, 11 aa, Severe acute respiratory syndrome coronavirus 2
  REGION 1..11: note = Table B: HLA-DQA1*01:02-B1*06:02L HLA-DPA1*01:03-B1*03:01L HLA-DRB1*03:01L HLA-DQA1*05:01-B1*02:01L HLA-DPA1*01:03-B1*104:01L HLA-DRB1*16:01L HLA-DQA1*02:01-B1*03:03L
VCVDTVRTNVY

SEQ ID NO: 17689 - protein, 13 aa, Severe acute respiratory syndrome coronavirus 2
  REGION 1..13: note = Table B: HLA-DQA1*01:02-B1*06:02L HLA-DPA1*03:01-B1*105:01L HLA-DQA1*01:03-B1*06:01L HLA-DRB1*15:03L
VDTVRTNVYLAVF

SEQ ID NO: 17690 - protein, 12 aa, Severe acute respiratory syndrome coronavirus 2
  REGION 1..12: note = Table B: HLA-DQA1*01:02-B1*06:02L HLA-DPA1*03:01-B1*105:01L HLA-DPA1*01:02-B1*04:01L
VRTNVYLAVFDK

SEQ ID NO: 17691 - protein, 12 aa, Severe acute respiratory syndrome coronavirus 2
  REGION 1..12: note = Table B: HLA-DQA1*01:02-B1*06:02L
KLVSSFLEMKSE

SEQ ID NO: 17692 - protein, 12 aa, Severe acute respiratory syndrome coronavirus 2
  REGION 1..12: note = Table B: HLA-DQA1*01:02-B1*06:02L HLA-DPA1*01:03-B1*04:01L HLA-DPA1*01:03-B1*04:02L HLA-DQA1*02:01-B1*03:03L
LVSSFLEMKSEK

SEQ ID NO: 17693 - protein, 14 aa, Severe acute respiratory syndrome coronavirus 2
  REGION 1..14: note = Table B: HLA-DQA1*01:02-B1*06:02L
EMKSEKQVEQKIAE

SEQ ID NO: 17694 - protein, 14 aa, Severe acute respiratory syndrome coronavirus 2
  REGION 1..14: note = Table B: HLA-DQA1*01:02-B1*06:02L HLA-DRB1*01:02L HLA-DRB1*12:01L HLA-DPA1*02:01-B1*13:01L HLA-DRB1*16:01L HLA-DRB1*04:08L
SEKQVEQKIAEIPK

SEQ ID NO: 17695 - protein, 14 aa, Severe acute respiratory syndrome coronavirus 2
  REGION 1..14: note = Table B: HLA-DQA1*01:02-B1*06:02L HLA-DRB1*01:02L HLA-DRB1*16:01L HLA-DRB1*04:08L
EKQVEQKIAEIPKE

SEQ ID NO: 17696 - protein, 12 aa, Severe acute respiratory syndrome coronavirus 2
  REGION 1..12: note = Table B: HLA-DQA1*01:02-B1*06:02L HLA-DQA1*01:03-B1*06:01L
EVKPFITESKPS

SEQ ID NO: 17697 - protein, 12 aa, Severe acute respiratory syndrome coronavirus 2
  REGION 1..12: note = Table B: HLA-DQA1*01:02-B1*06:02L HLA-DRB1*04:08L
FITESKPSVEQR

SEQ ID NO: 17698 - protein, 14 aa, Severe acute respiratory syndrome coronavirus 2
  REGION 1..14: note = Table B: HLA-DQA1*01:02-B1*06:02L
ITESKPSVEQRKQD

SEQ ID NO: 17699 - protein, 14 aa, Severe acute respiratory syndrome coronavirus 2
  REGION 1..14: note = Table B: HLA-DQA1*01:02-B1*06:02L HLA-DRB1*01:02L HLA-DQA1*02:01-B1*03:03L
ESKPSVEQRKQDDK

SEQ ID NO: 17700 - protein, 12 aa, Severe acute respiratory syndrome coronavirus 2
  REGION 1..12: note = Table B: HLA-DQA1*01:02-B1*06:02L
KKIKACVEEVTT

SEQ ID NO: 17701 - protein, 12 aa, Severe acute respiratory syndrome coronavirus 2
  REGION 1..12: note = Table B: HLA-DQA1*01:02-B1*06:02L
KIKACVEEVTTT

SEQ ID NO: 17702 - protein, 12 aa, Severe acute respiratory syndrome coronavirus 2
  REGION 1..12: note = Table B: HLA-DQA1*01:02-B1*06:02L
IKACVEEVTTTL

SEQ ID NO: 17703 - protein, 12 aa, Severe acute respiratory syndrome coronavirus 2
  REGION 1..12: note = Table B: HLA-DQA1*01:02-B1*06:02L HLA-DRB1*08:04L HLA-DPA1*01:03-B1*03:01L HLA-DPA1*03:01-B1*04:02L HLA-DRB1*14:02L HLA-DRB1*08:01L HLA-DPA1*01:03-B1*04:02L HLA-DRB3*01:01L HLA-DQA1*01:03-B1*06:01L
LYIDINGNLHPD

SEQ ID NO: 17704 - protein, 13 aa, Severe acute respiratory syndrome coronavirus 2
  REGION 1..13: note = Table B: HLA-DQA1*01:02-B1*06:02L HLA-DQA1*02:01-B1*03:03L
PDSATLVSDIDIT

SEQ ID NO: 17705 - protein, 12 aa, Severe acute respiratory syndrome coronavirus 2
  REGION 1..12: note = Table B: HLA-DQA1*01:02-B1*06:02L HLA-DQA1*03:01-B1*03:02L HLA-DPA1*01:02-B1*04:01L HLA-DQA1*01:03-B1*06:01L HLA-DQA1*02:01-B1*03:03L
DIDITFLKKDAP

SEQ ID NO: 17706 - protein, 14 aa, Severe acute respiratory syndrome coronavirus 2
  REGION 1..14: note = Table B: HLA-DQA1*01:02-B1*06:02L
FLKKDAPYIVGDVV

SEQ ID NO: 17707 - protein, 14 aa, Severe acute respiratory syndrome coronavirus 2
  REGION 1..14: note = Table B: HLA-DQA1*01:02-B1*06:02L HLA-DPA1*02:01-B1*13:01L HLA-DQA1*01:03-B1*06:01L HLA-DQA1*02:01-B1*03:03L
LKKDAPYIVGDVVQ

SEQ ID NO: 17708 - protein, 13 aa, Severe acute respiratory syndrome coronavirus 2
  REGION 1..13: note = Table B: HLA-DQA1*01:02-B1*06:02L HLA-DRB1*08:04L HLA-DPA1*01:03-B1*03:01L HLA-DPA1*03:01-B1*04:02L HLA-DRB1*14:01L HLA-DRB1*14:02L HLA-DQA1*05:05-B1*03:19L HLA-DQA1*05:05-B1*03:01L HLA-DRB1*15:03L
APYIVGDVVQEGV

SEQ ID NO: 17709 - protein, 12 aa, Severe acute respiratory syndrome coronavirus 2
  REGION 1..12: note = Table B: HLA-DQA1*01:02-B1*06:02L
KAGGTTEMLAKA

SEQ ID NO: 17710 - protein, 12 aa, Severe acute respiratory syndrome coronavirus 2
  REGION 1..12: note = Table B: HLA-DQA1*01:02-B1*06:02L
LAKALRKVPTDN

SEQ ID NO: 17711 - protein, 12 aa, Severe acute respiratory syndrome coronavirus 2
  REGION 1..12: note = Table B: HLA-DQA1*01:02-B1*06:02L
QGLNGYTVEEAK

SEQ ID NO: 17712 - protein, 14 aa, Severe acute respiratory syndrome coronavirus 2
  REGION 1..14: note = Table B: HLA-DQA1*01:02-B1*06:02L
TVEEAKTVLKKCKS

SEQ ID NO: 17713 - protein, 14 aa, Severe acute respiratory syndrome coronavirus 2
  REGION 1..14: note = Table B: HLA-DQA1*01:02-B1*06:02L
VEEAKTVLKKCKSA

SEQ ID NO: 17714 - protein, 14 aa, Severe acute respiratory syndrome coronavirus 2
  REGION 1..14: note = Table B: HLA-DQA1*01:02-B1*06:02L HLA-DRB1*01:02L HLA-DRB1*15:03L
VLKKCKSAFYILPS

SEQ ID NO: 17715 - protein, 13 aa, Severe acute respiratory syndrome coronavirus 2
  REGION 1..13: note = Table B: HLA-DQA1*01:02-B1*06:02L HLA-DQA1*01:03-B1*06:01L HLA-DQA1*02:01-B1*03:03L
ISNEKQEILGTVS

SEQ ID NO: 17716 - protein, 14 aa, Severe acute respiratory syndrome coronavirus 2
  REGION 1..14: note = Table B: HLA-DQA1*01:02-B1*06:02L
TVSWNLREMLAHAE

SEQ ID NO: 17717 - protein, 12 aa, Severe acute respiratory syndrome coronavirus 2
  REGION 1..12: note = Table B: HLA-DQA1*01:02-B1*06:02L
WNLREMLAHAEE

SEQ ID NO: 17718 - protein, 14 aa, Severe acute respiratory syndrome coronavirus 2
  REGION 1..14: note = Table B: HLA-DQA1*01:02-B1*06:02L HLA-DRB1*01:02L
MLAHAEETRKLMPV

SEQ ID NO: 17719 - protein, 14 aa, Severe acute respiratory syndrome coronavirus 2
  REGION 1..14: note = Table B: HLA-DQA1*01:02-B1*06:02L
HAEETRKLMPVCVE

SEQ ID NO: 17720 - protein, 14 aa, Severe acute respiratory syndrome coronavirus 2
  REGION 1..14: note = Table B: HLA-DQA1*01:02-B1*06:02L HLA-DRB1*01:02L
AEETRKLMPVCVET

SEQ ID NO: 17721 - protein, 14 aa, Severe acute respiratory syndrome coronavirus 2
  REGION 1..14: note = Table B: HLA-DQA1*01:02-B1*06:02L HLA-DPA1*01:03-B1*03:01L HLA-DRB1*08:01L HLA-DRB1*11:01L HLA-DPA1*01:03-B1*104:01L HLA-DPA1*01:02-B1*04:01L HLA-DRB1*04:08L HLA-DQA1*02:01-B1*03:03L HLA-DRB1*15:03L
EETRKLMPVCVETK

SEQ ID NO: 17722 - protein, 14 aa, Severe acute respiratory syndrome coronavirus 2
  REGION 1..14: note = Table B: HLA-DQA1*01:02-B1*06:02L HLA-DPA1*01:03-B1*03:01L HLA-DRB1*04:08L HLA-DQA1*02:01-B1*03:03L HLA-DRB1*15:03L
ETRKLMPVCVETKA

SEQ ID NO: 17723 - protein, 14 aa, Severe acute respiratory syndrome coronavirus 2
  REGION 1..14: note = Table B: HLA-DQA1*01:02-B1*06:02L
KLMPVCVETKAIVS

SEQ ID NO: 17724 - protein, 14 aa, Severe acute respiratory syndrome coronavirus 2
  REGION 1..14: note = Table B: HLA-DQA1*01:02-B1*06:02L
LMPVCVETKAIVST

SEQ ID NO: 17725 - protein, 11 aa, Severe acute respiratory syndrome coronavirus 2
  REGION 1..11: note = Table B: HLA-DQA1*01:02-B1*06:02L HLA-DRB1*14:01L
IVSTIQRKYKG

SEQ ID NO: 17726 - protein, 11 aa, Severe acute respiratory syndrome coronavirus 2
  REGION 1..11: note = Table B: HLA-DQA1*01:02-B1*06:02L HLA-DQA1*01:03-B1*06:01L
YKGIKIQEGVV

SEQ ID NO: 17727 - protein, 10 aa, Severe acute respiratory syndrome coronavirus 2
  REGION 1..10: note = Table B: HLA-DQA1*01:02-B1*06:02L HLA-DPA1*01:03-B1*03:01L HLA-DRB1*03:01L HLA-DRB1*11:02L HLA-DQA1*01-B1*05L HLA-DQA1*05:05-B1*03:19M HLA-DQA1*05:01-B1*02:01L HLA-DRB4*01:01L HLA-DPA1*01:03-B1*04:01L
  REGION 1..10: note = CONT. FROM ABOVE: HLA-DPA1*01:03-B1*104:01L HLA-DRB1*16:01L
VDYGARFYFY

SEQ ID NO: 17728 - protein, 14 aa, Severe acute respiratory syndrome coronavirus 2
  REGION 1..14: note = Table B: HLA-DQA1*01:02-B1*06:02L
DYGARFYFYTSKTT

SEQ ID NO: 17729 - protein, 12 aa, Severe acute respiratory syndrome coronavirus 2
  REGION 1..12: note = Table B: HLA-DQA1*01:02-B1*06:02L HLA-DQA1*05:05-B1*03:01L HLA-DQA1*02:01-B1*03:03L
TVASLINTLNDL

SEQ ID NO: 17730 - protein, 12 aa, Severe acute respiratory syndrome coronavirus 2
  REGION 1..12: note = Table B: HLA-DQA1*01:02-B1*06:02L HLA-DRB1*01:02L HLA-DRB1*14:01L HLA-DRB1*11:04L HLA-DPA1*03:01-B1*105:01L HLA-DRB1*10:01L HLA-DRB1*08:03L HLA-DRB1*15:03L
SLINTLNDLNET

SEQ ID NO: 17731 - protein, 14 aa, Severe acute respiratory syndrome coronavirus 2
  REGION 1..14: note = Table B: HLA-DQA1*01:02-B1*06:02L HLA-DPA1*03:01-B1*105:01L
LNDLNETLVTMPLG

SEQ ID NO: 17732 - protein, 11 aa, Severe acute respiratory syndrome coronavirus 2
  REGION 1..11: note = Table B: HLA-DQA1*01:02-B1*06:02L
LVTMPLGYVTH

SEQ ID NO: 17733 - protein, 12 aa, Severe acute respiratory syndrome coronavirus 2
  REGION 1..12: note = Table B: HLA-DQA1*01:02-B1*06:02L
GYVTHGLNLEEA

SEQ ID NO: 17734 - protein, 10 aa, Severe acute respiratory syndrome coronavirus 2
  REGION 1..10: note = Table B: HLA-DQA1*01:02-B1*06:02L HLA-DPA1*01:03-B1*03:01L HLA-DQA1*05:05-B1*03:19L HLA-DQA1*05:01-B1*02:01L HLA-DPA1*01:03-B1*104:01L HLA-DRB1*16:01L
PDAVTAYNGY

SEQ ID NO: 17735 - protein, 14 aa, Severe acute respiratory syndrome coronavirus 2
  REGION 1..14: note = Table B: HLA-DQA1*01:02-B1*06:02L HLA-DRB1*12:01L
DAVTAYNGYLTSSS

SEQ ID NO: 17736 - protein, 12 aa, Severe acute respiratory syndrome coronavirus 2
  REGION 1..12: note = Table B: HLA-DQA1*01:02-B1*06:02L HLA-DRB3*02:01L HLA-DQA1*01:01-B1*05:01L HLA-DRB5*01:01L HLA-DQA1*05:05-B1*03:19L HLA-DRB1*09:01L HLA-DPA1*03:01-B1*105:01L HLA-DQA1*01:03-B1*06:01L
NGYLTSSSKTPE

SEQ ID NO: 17737 - protein, 11 aa, Severe acute respiratory syndrome coronavirus 2
  REGION 1..11: note = Table B: HLA-DQA1*01:02-B1*06:02L HLA-DRB3*02:01L HLA-DRB1*08:01L HLA-DQA1*05:05-B1*03:19L HLA-DPA1*03:01-B1*105:01L HLA-DQA1*01:03-B1*06:01L
YLTSSSKTPEE

SEQ ID NO: 17738 - protein, 14 aa, Severe acute respiratory syndrome coronavirus 2
  REGION 1..14: note = Table B: HLA-DQA1*01:02-B1*06:02L HLA-DQA1*01:03-B1*06:01L
SSKTPEEHFIETIS

SEQ ID NO: 17739 - protein, 11 aa, Severe acute respiratory syndrome coronavirus 2
  REGION 1..11: note = Table B: HLA-DQA1*01:02-B1*06:02L HLA-DPA1*01:03-B1*03:01L HLA-DQA1*05:01-B1*02:01L HLA-DPA1*01:03-B1*104:01L HLA-DRB1*16:01L
FIETISLAGSY

SEQ ID NO: 17740 - protein, 10 aa, Severe acute respiratory syndrome coronavirus 2
  REGION 1..10: note = Table B: HLA-DQA1*01:02-B1*06:02L HLA-DQA1*05:05-B1*03:19L HLA-DQA1*01:03-B1*06:01L HLA-DQA1*02:01-B1*03:03L HLA-DRB1*15:03L
ISLAGSYKDW

SEQ ID NO: 17741 - protein, 11 aa, Severe acute respiratory syndrome coronavirus 2
  REGION 1..11: note = Table B: HLA-DQA1*01:02-B1*06:02L HLA-DQA1*01-B1*05L HLA-DQA1*02:01-B1*03:03L
SLAGSYKDWSY

SEQ ID NO: 17742 - protein, 12 aa, Severe acute respiratory syndrome coronavirus 2
  REGION 1..12: note = Table B: HLA-DQA1*01:02-B1*06:02L
STQLGIEFLKRG

SEQ ID NO: 17743 - protein, 12 aa, Severe acute respiratory syndrome coronavirus 2
  REGION 1..12: note = Table B: HLA-DQA1*01:02-B1*06:02L HLA-DRB1*08:01L HLA-DRB1*04:08L
QLGIEFLKRGDK

SEQ ID NO: 17744 - protein, 14 aa, Severe acute respiratory syndrome coronavirus 2
  REGION 1..14: note = Table B: HLA-DQA1*01:02-B1*06:02L HLA-DQA1*02:01-B1*03:03L
TSNPTTFHLDGEVI

SEQ ID NO: 17745 - protein, 12 aa, Severe acute respiratory syndrome coronavirus 2
  REGION 1..12: note = Table B: HLA-DQA1*01:02-B1*06:02L HLA-DRB1*01:02L HLA-DRB1*15:03L
TLLSLREVRTIK

SEQ ID NO: 17746 - protein, 11 aa, Severe acute respiratory syndrome coronavirus 2
  REGION 1..11: note = Table B: HLA-DQA1*01:02-B1*06:02L
SLREVRTIKVF

SEQ ID NO: 17747 - protein, 13 aa, Severe acute respiratory syndrome coronavirus 2
  REGION 1..13: note = Table B: HLA-DQA1*01:02-B1*06:02L
LREVRTIKVFTTV

SEQ ID NO: 17748 - protein, 11 aa, Severe acute respiratory syndrome coronavirus 2
  REGION 1..11: note = Table B: HLA-DQA1*01:02-B1*06:02L HLA-DQA1*01:03-B1*06:01L
VRTIKVFTTVD

SEQ ID NO: 17749 - protein, 14 aa, Severe acute respiratory syndrome coronavirus 2
  REGION 1..14: note = Table B: HLA-DQA1*01:02-B1*06:02L HLA-DPA1*03:01-B1*105:01L HLA-DQA1*05:05-B1*03:01L HLA-DQA1*01:03-B1*06:01L HLA-DQA1*02:01-B1*03:03L
YGQQFGPTYLDGAD

SEQ ID NO: 17750 - protein, 13 aa, Severe acute respiratory syndrome coronavirus 2
  REGION 1..13: note = Table B: HLA-DQA1*01:02-B1*06:02L HLA-DPA1*01:03-B1*03:01L HLA-DPA1*03:01-B1*105:01L HLA-DQA1*01:03-B1*06:01L HLA-DRB1*15:03L
FGPTYLDGADVTK

SEQ ID NO: 17751 - protein, 12 aa, Severe acute respiratory syndrome coronavirus 2
  REGION 1..12: note = Table B: HLA-DQA1*01:02-B1*06:02L
DVTKIKPHNSHE

SEQ ID NO: 17752 - protein, 13 aa, Severe acute respiratory syndrome coronavirus 2
  REGION 1..13: note = Table B: HLA-DQA1*01:02-B1*06:02L
TKIKPHNSHEGKT

SEQ ID NO: 17753 - protein, 15 aa, Severe acute respiratory syndrome coronavirus 2
  REGION 1..15: note = Table B: HLA-DQA1*01:02-B1*06:02L
PHNSHEGKTFYVLPN

SEQ ID NO: 17754 - protein, 13 aa, Severe acute respiratory syndrome coronavirus 2
  REGION 1..13: note = Table B: HLA-DQA1*01:02-B1*06:02L HLA-DQA1*01:03-B1*06:01L
HEGKTFYVLPNDD

SEQ ID NO: 17755 - protein, 11 aa, Severe acute respiratory syndrome coronavirus 2
  REGION 1..11: note = Table B: HLA-DQA1*01:02-B1*06:02L HLA-DRB1*01:02L HLA-DPA1*03:01-B1*04:02L HLA-DRB1*11:02L HLA-DRB1*14:02L HLA-DQA1*05:01-B1*02:01L HLA-DRB1*09:01L HLA-DPA1*01:03-B1*104:01L HLA-DPA1*01:02-B1*04:01L
  REGION 1..11: note = CONT. FROM ABOVE: HLA-DRB1*10:01L HLA-DRB1*08:03L
YVLPNDDTLRV

SEQ ID NO: 17756 - protein, 13 aa, Severe acute respiratory syndrome coronavirus 2
  REGION 1..13: note = Table B: HLA-DQA1*01:02-B1*06:02L HLA-DPA1*03:01-B1*105:01L
VLPNDDTLRVEAF

SEQ ID NO: 17757 - protein, 10 aa, Severe acute respiratory syndrome coronavirus 2
  REGION 1..10: note = Table B: HLA-DQA1*01:02-B1*06:02L HLA-DPA1*01:03-B1*03:01L HLA-DPA1*03:01-B1*04:02L HLA-DQA1*05:05-B1*03:19L HLA-DQA1*05:01-B1*02:01L HLA-DPA1*01:03-B1*04:01L HLA-DPA1*03:01-B1*105:01L HLA-DPA1*01:02-B1*04:01L
  REGION 1..10: note = CONT. FROM ABOVE: HLA-DRB1*16:01L
TLRVEAFEYY

SEQ ID NO: 17758 - protein, 14 aa, Severe acute respiratory syndrome coronavirus 2
  REGION 1..14: note = Table B: HLA-DQA1*01:02-B1*06:02L HLA-DQA1*01:03-B1*06:01L HLA-DRB1*15:03L
LRVEAFEYYHTTDP

SEQ ID NO: 17759 - protein, 13 aa, Severe acute respiratory syndrome coronavirus 2
  REGION 1..13: note = Table B: HLA-DQA1*01:02-B1*06:02L HLA-DPA1*03:01-B1*04:02L HLA-DPA1*01:03-B1*04:01L HLA-DPA1*01:03-B1*04:02L HLA-DPA1*03:01-B1*105:01L HLA-DPA1*01:02-B1*04:01L HLA-DQA1*01:03-B1*06:01L
DPSFLGRYMSALN

SEQ ID NO: 17760 - protein, 11 aa, Severe acute respiratory syndrome coronavirus 2
  REGION 1..11: note = Table B: HLA-DQA1*01:02-B1*06:02L
YMSALNHTKKW

SEQ ID NO: 17761 - protein, 15 aa, Severe acute respiratory syndrome coronavirus 2
  REGION 1..15: note = Table B: HLA-DQA1*01:02-B1*06:02L
NHTKKWKYPQVNGLT

SEQ ID NO: 17762 - protein, 10 aa, Severe acute respiratory syndrome coronavirus 2
  REGION 1..10: note = Table B: HLA-DQA1*01:02-B1*06:02L HLA-DQA1*03:01-B1*03:02L HLA-DQA1*01:03-B1*06:01L HLA-DQA1*02:01-B1*03:03L
GLTSIKWADN

SEQ ID NO: 17763 - protein, 10 aa, Severe acute respiratory syndrome coronavirus 2
  REGION 1..10: note = Table B: HLA-DQA1*01:02-B1*06:02L HLA-DQA1*05:05-B1*03:19L HLA-DQA1*05:01-B1*02:01L
SIKWADNNCY

SEQ ID NO: 17764 - protein, 13 aa, Severe acute respiratory syndrome coronavirus 2
  REGION 1..13: note = Table B: HLA-DQA1*01:02-B1*06:02L
KWADNNCYLATAL

SEQ ID NO: 17765 - protein, 14 aa, Severe acute respiratory syndrome coronavirus 2
  REGION 1..14: note = Table B: HLA-DQA1*01:02-B1*06:02L
WADNNCYLATALLT

SEQ ID NO: 17766 - protein, 14 aa, Severe acute respiratory syndrome coronavirus 2
  REGION 1..14: note = Table B: HLA-DQA1*01:02-B1*06:02L HLA-DPA1*01:03-B1*04:02L
DNNCYLATALLTLQ

SEQ ID NO: 17767 - protein, 10 aa, Severe acute respiratory syndrome coronavirus 2
  REGION 1..10: note = Table B: HLA-DQA1*01:02-B1*06:02L HLA-DPA1*03:01-B1*105:01L HLA-DQA1*01:03-B1*06:01L
LATALLTLQQ

SEQ ID NO: 17768 - protein, 10 aa, Severe acute respiratory syndrome coronavirus 2
  REGION 1..10: note = Table B: HLA-DQA1*01:02-B1*06:02L HLA-DQA1*05:05-B1*03:19L HLA-DQA1*01:03-B1*06:01L HLA-DQA1*02:01-B1*03:03L
LTLQQIELKF

SEQ ID NO: 17769 - protein, 12 aa, Severe acute respiratory syndrome coronavirus 2
  REGION 1..12: note = Table B: HLA-DQA1*01:02-B1*06:02L
TLQQIELKFNPP

SEQ ID NO: 17770 - protein, 12 aa, Severe acute respiratory syndrome coronavirus 2
  REGION 1..12: note = Table B: HLA-DQA1*01:02-B1*06:02L
QDAYYRARAGEA

SEQ ID NO: 17771 - protein, 14 aa, Severe acute respiratory syndrome coronavirus 2
  REGION 1..14: note = Table B: HLA-DQA1*01:02-B1*06:02L HLA-DPA1*01:03-B1*03:01L HLA-DPA1*02:01-B1*13:01L HLA-DPA1*03:01-B1*105:01L
ARAGEAANFCALIL

SEQ ID NO: 17772 - protein, 14 aa, Severe acute respiratory syndrome coronavirus 2
  REGION 1..14: note = Table B: HLA-DQA1*01:02-B1*06:02L
AGEAANFCALILAY

SEQ ID NO: 17773 - protein, 14 aa, Severe acute respiratory syndrome coronavirus 2
  REGION 1..14: note = Table B: HLA-DQA1*01:02-B1*06:02L HLA-DPA1*03:01-B1*105:01L
AANFCALILAYCNK

SEQ ID NO: 17774 - protein, 14 aa, Severe acute respiratory syndrome coronavirus 2
  REGION 1..14: note = Table B: HLA-DQA1*01:02-B1*06:02L
ANFCALILAYCNKT

SEQ ID NO: 17775 - protein, 11 aa, Severe acute respiratory syndrome coronavirus 2
  REGION 1..11: note = Table B: HLA-DQA1*01:02-B1*06:02L HLA-DQA1*01:03-B1*06:01L HLA-DRB1*15:03L
LILAYCNKTVG

SEQ ID NO: 17776 - protein, 12 aa, Severe acute respiratory syndrome coronavirus 2
  REGION 1..12: note = Table B: HLA-DQA1*01:02-B1*06:02L HLA-DRB1*15:03L
ILAYCNKTVGEL

SEQ ID NO: 17777 - protein, 12 aa, Severe acute respiratory syndrome coronavirus 2
  REGION 1..12: note = Table B: HLA-DQA1*01:02-B1*06:02L
LAYCNKTVGELG

SEQ ID NO: 17778 - protein, 14 aa, Severe acute respiratory syndrome coronavirus 2
  REGION 1..14: note = Table B: HLA-DQA1*01:02-B1*06:02L
AYCNKTVGELGDVR

SEQ ID NO: 17779 - protein, 11 aa, Severe acute respiratory syndrome coronavirus 2
  REGION 1..11: note = Table B: HLA-DQA1*01:02-B1*06:02L HLA-DRB1*01:02L HLA-DPA1*01:03-B1*03:01L HLA-DQA1*05:05-B1*03:19L HLA-DPA1*03:01-B1*105:01L HLA-DRB1*15:03L
TVGELGDVRET

SEQ ID NO: 17780 - protein, 10 aa, Severe acute respiratory syndrome coronavirus 2
  REGION 1..10: note = Table B: HLA-DQA1*01:02-B1*06:02L HLA-DPA1*03:01-B1*105:01L
DVRETMSYLF

SEQ ID NO: 17781 - protein, 12 aa, Severe acute respiratory syndrome coronavirus 2
  REGION 1..12: note = Table B: HLA-DQA1*01:02-B1*06:02L HLA-DPA1*03:01-B1*04:02L HLA-DPA1*01:03-B1*04:02L HLA-DRB1*04:08L
YLFQHANLDSCK

SEQ ID NO: 17782 - protein, 14 aa, Severe acute respiratory syndrome coronavirus 2
  REGION 1..14: note = Table B: HLA-DQA1*01:02-B1*06:02L HLA-DRB1*08:04L HLA-DRB1*11:04L HLA-DRB1*11:01L
HANLDSCKRVLNVV

SEQ ID NO: 17783 - protein, 12 aa, Severe acute respiratory syndrome coronavirus 2
  REGION 1..12: note = Table B: HLA-DQA1*01:02-B1*06:02L
VLNVVCKTCGQQ

SEQ ID NO: 17784 - protein, 12 aa, Severe acute respiratory syndrome coronavirus 2
  REGION 1..12: note = Table B: HLA-DQA1*01:02-B1*06:02L
LNVVCKTCGQQQ

SEQ ID NO: 17785 - protein, 12 aa, Severe acute respiratory syndrome coronavirus 2
  REGION 1..12: note = Table B: HLA-DQA1*01:02-B1*06:02L
NVVCKTCGQQQT

SEQ ID NO: 17786 - protein, 12 aa, Severe acute respiratory syndrome coronavirus 2
  REGION 1..12: note = Table B: HLA-DQA1*01:02-B1*06:02L
VVCKTCGQQQTT

SEQ ID NO: 17787 - protein, 14 aa, Severe acute respiratory syndrome coronavirus 2
  REGION 1..14: note = Table B: HLA-DQA1*01:02-B1*06:02L
VCKTCGQQQTTLKG

SEQ ID NO: 17788 - protein, 12 aa, Severe acute respiratory syndrome coronavirus 2
  REGION 1..12: note = Table B: HLA-DQA1*01:02-B1*06:02L HLA-DQA1*01:03-B1*06:01L
LKGVEAVMYMGT

SEQ ID NO: 17789 - protein, 12 aa, Severe acute respiratory syndrome coronavirus 2
  REGION 1..12: note = Table B: HLA-DQA1*01:02-B1*06:02L HLA-DPA1*03:01-B1*105:01L HLA-DPA1*01:02-B1*04:01L HLA-DQA1*01:03-B1*06:01L
KGVEAVMYMGTL

SEQ ID NO: 17790 - protein, 12 aa, Severe acute respiratory syndrome coronavirus 2
  REGION 1..12: note = Table B: HLA-DQA1*01:02-B1*06:02L
GVEAVMYMGTLS

SEQ ID NO: 17791 - protein, 10 aa, Severe acute respiratory syndrome coronavirus 2
  REGION 1..10: note = Table B: HLA-DQA1*01:02-B1*06:02L HLA-DQA1*05:05-B1*03:19L HLA-DPA1*02:01-B1*13:01L HLA-DPA1*03:01-B1*105:01L HLA-DQA1*01:03-B1*06:01L HLA-DRB1*15:03L
YMGTLSYEQF

SEQ ID NO: 17792 - protein, 12 aa, Severe acute respiratory syndrome coronavirus 2
  REGION 1..12: note = Table B: HLA-DQA1*01:02-B1*06:02L HLA-DRB1*08:04L HLA-DRB1*14:01L HLA-DRB1*11:01L HLA-DPA1*01:03-B1*04:02L HLA-DRB1*16:01L HLA-DRB1*04:08L
SYEQFKKGVQIP

SEQ ID NO: 17793 - protein, 12 aa, Severe acute respiratory syndrome coronavirus 2
  REGION 1..12: note = Table B: HLA-DQA1*01:02-B1*06:02L HLA-DQA1*01:03-B1*06:01L
EQFKKGVQIPCT

SEQ ID NO: 17794 - protein, 12 aa, Severe acute respiratory syndrome coronavirus 2
  REGION 1..12: note = Table B: HLA-DQA1*01:02-B1*06:02L
GVQIPCTCGKQA

SEQ ID NO: 17795 - protein, 12 aa, Severe acute respiratory syndrome coronavirus 2
  REGION 1..12: note = Table B: HLA-DQA1*01:02-B1*06:02L
VQIPCTCGKQAT

SEQ ID NO: 17796 - protein, 12 aa, Severe acute respiratory syndrome coronavirus 2
  REGION 1..12: note = Table B: HLA-DQA1*01:02-B1*06:02L HLA-DQA1*01:03-B1*06:01L HLA-DQA1*02:01-B1*03:03L
QATKYLVQQESP

SEQ ID NO: 17797 - protein, 14 aa, Severe acute respiratory syndrome coronavirus 2
  REGION 1..14: note = Table B: HLA-DQA1*01:02-B1*06:02L HLA-DQA1*01:03-B1*06:01L HLA-DQA1*02:01-B1*03:03L
VQQESPFVMMSAPP

SEQ ID NO: 17798 - protein, 13 aa, Severe acute respiratory syndrome coronavirus 2
  REGION 1..13: note = Table B: HLA-DQA1*01:02-B1*06:02L
YELKHGTFTCASE

SEQ ID NO: 17799 - protein, 13 aa, Severe acute respiratory syndrome coronavirus 2
  REGION 1..13: note = Table B: HLA-DQA1*01:02-B1*06:02L
ELKHGTFTCASEY

SEQ ID NO: 17800 - protein, 13 aa, Severe acute respiratory syndrome coronavirus 2
  REGION 1..13: note = Table B: HLA-DQA1*01:02-B1*06:02L
LKHGTFTCASEYT

SEQ ID NO: 17801 - protein, 12 aa, Severe acute respiratory syndrome coronavirus 2
  REGION 1..12: note = Table B: HLA-DQA1*01:02-B1*06:02L
HGTFTCASEYTG

SEQ ID NO: 17802 - protein, 12 aa, Severe acute respiratory syndrome coronavirus 2
  REGION 1..12: note = Table B: HLA-DQA1*01:02-B1*06:02L
GTFTCASEYTGN

SEQ ID NO: 17803 - protein, 12 aa, Severe acute respiratory syndrome coronavirus 2
  REGION 1..12: note = Table B: HLA-DQA1*01:02-B1*06:02L
TFTCASEYTGNY

SEQ ID NO: 17804 - protein, 12 aa, Severe acute respiratory syndrome coronavirus 2
  REGION 1..12: note = Table B: HLA-DQA1*01:02-B1*06:02L HLA-DQA1*01:03-B1*06:01L
FTCASEYTGNYQ

SEQ ID NO: 17805 - protein, 10 aa, Severe acute respiratory syndrome coronavirus 2
  REGION 1..10: note = Table B: HLA-DQA1*01:02-B1*06:02L HLA-DQA1*05:05-B1*03:19L HLA-DQA1*05:01-B1*02:01L
YTGNYQCGHY

SEQ ID NO: 17806 - protein, 14 aa, Severe acute respiratory syndrome coronavirus 2
  REGION 1..14: note = Table B: HLA-DQA1*01:02-B1*06:02L HLA-DRB1*01:02L
NYQCGHYKHITSKE

SEQ ID NO: 17807 - protein, 14 aa, Severe acute respiratory syndrome coronavirus 2
  REGION 1..14: note = Table B: HLA-DQA1*01:02-B1*06:02L
YQCGHYKHITSKET

SEQ ID NO: 17808 - protein, 12 aa, Severe acute respiratory syndrome coronavirus 2
  REGION 1..12: note = Table B: HLA-DQA1*01:02-B1*06:02L HLA-DRB1*01:01L HLA-DRB1*11:04L HLA-DRB1*11:01L HLA-DRB3*01:01L HLA-DPA1*03:01-B1*105:01L HLA-DRB1*07:01L
GHYKHITSKETL

SEQ ID NO: 17809 - protein, 12 aa, Severe acute respiratory syndrome coronavirus 2
  REGION 1..12: note = Table B: HLA-DQA1*01:02-B1*06:02L HLA-DQA1*01-B1*05L HLA-DQA1*01:03-B1*06:01L HLA-DQA1*02:01-B1*03:03L
LTKSSEYKGPIT

SEQ ID NO: 17810 - protein, 13 aa, Severe acute respiratory syndrome coronavirus 2
  REGION 1..13: note = Table B: HLA-DQA1*01:02-B1*06:02L HLA-DPA1*01:02-B1*04:01L
YKENSYTTTIKPV

SEQ ID NO: 17811 - protein, 13 aa, Severe acute respiratory syndrome coronavirus 2
  REGION 1..13: note = Table B: HLA-DQA1*01:02-B1*06:02L
TIKPVTYKLDGVV

SEQ ID NO: 17812 - protein, 17 aa, Severe acute respiratory syndrome coronavirus 2
  REGION 1..17: note = Table B: HLA-DQA1*01:02-B1*06:02L HLA-DPA1*03:01-B1*105:01L
KPVTYKLDGVVCTEIDP

SEQ ID NO: 17813 - protein, 12 aa, Severe acute respiratory syndrome coronavirus 2
  REGION 1..12: note = Table B: HLA-DQA1*01:02-B1*06:02L HLA-DQA1*01-B1*05L HLA-DQA1*05:01-B1*02:01L HLA-DPA1*03:01-B1*105:01L HLA-DQA1*03:01-B1*03:02L
GVVCTEIDPKLD

SEQ ID NO: 17814 - protein, 10 aa, Severe acute respiratory syndrome coronavirus 2
  REGION 1..10: note = Table B: HLA-DQA1*01:02-B1*06:02L HLA-DQA1*05:05-B1*03:19L HLA-DQA1*02:01-B1*03:03L
DNYYKKDNSY

SEQ ID NO: 17815 - protein, 13 aa, Severe acute respiratory syndrome coronavirus 2
  REGION 1..13: note = Table B: HLA-DQA1*01:02-B1*06:02L HLA-DPA1*02:01-B1*13:01L HLA-DRB1*15:03L
KKDNSYFTEQPID

SEQ ID NO: 17816 - protein, 10 aa, Severe acute respiratory syndrome coronavirus 2
  REGION 1..10: note = Table B: HLA-DQA1*01:02-B1*06:02L HLA-DQA1*05:05-B1*03:19L HLA-DPA1*02:01-B1*13:01L HLA-DQA1*01:03-B1*06:01L HLA-DQA1*02:01-B1*03:03L
PNASFDNFKF

SEQ ID NO: 17817 - protein, 13 aa, Severe acute respiratory syndrome coronavirus 2
  REGION 1..13: note = Table B: HLA-DQA1*01:02-B1*06:02L HLA-DRB1*01:02L HLA-DPA1*03:01-B1*105:01L HLA-DRB1*16:01L HLA-DRB1*15:03L
FKFVCDNIKFADD

SEQ ID NO: 17818 - protein, 13 aa, Severe acute respiratory syndrome coronavirus 2
  REGION 1..13: note = Table B: HLA-DQA1*01:02-B1*06:02L HLA-DPA1*03:01-B1*105:01L
FVCDNIKFADDLN

SEQ ID NO: 17819 - protein, 12 aa, Severe acute respiratory syndrome coronavirus 2
  REGION 1..12: note = Table B: HLA-DQA1*01:02-B1*06:02L HLA-DRB1*01:02L HLA-DRB1*12:01L HLA-DRB1*04:08L HLA-DRB1*15:03L
LTGYKKPASREL

SEQ ID NO: 17820 - protein, 12 aa, Severe acute respiratory syndrome coronavirus 2
  REGION 1..12: note = Table B: HLA-DQA1*01:02-B1*06:02L HLA-DRB1*04:08L HLA-DRB1*15:03L
ELKVTFFPDLNG

SEQ ID NO: 17821 - protein, 10 aa, Severe acute respiratory syndrome coronavirus 2
  REGION 1..10: note = Table B: HLA-DQA1*01:02-B1*06:02L HLA-DQA1*05:05-B1*03:19L HLA-DQA1*05:01-B1*02:01L
LNGDVVAIDY

SEQ ID NO: 17822 - protein, 12 aa, Severe acute respiratory syndrome coronavirus 2
  REGION 1..12: note = Table B: HLA-DQA1*01:02-B1*06:02L HLA-DRB1*08:04L HLA-DRB1*14:01L HLA-DRB1*11:04L
HYTPSFKKGAKL

SEQ ID NO: 17823 - protein, 14 aa, Severe acute respiratory syndrome coronavirus 2
  REGION 1..14: note = Table B: HLA-DQA1*01:02-B1*06:02L HLA-DRB1*01:02L HLA-DRB1*08:01L HLA-DRB1*16:01L HLA-DRB1*04:08L HLA-DRB1*15:03L
AKLLHKPIVWHVNN

SEQ ID NO: 17824 - protein, 14 aa, Severe acute respiratory syndrome coronavirus 2
  REGION 1..14: note = Table B: HLA-DQA1*01:02-B1*06:02L HLA-DPA1*03:01-B1*105:01L HLA-DQA1*05:05-B1*03:01L
PIVWHVNNATNKAT

SEQ ID NO: 17825 - protein, 11 aa, Severe acute respiratory syndrome coronavirus 2
  REGION 1..11: note = Table B: HLA-DQA1*01:02-B1*06:02L HLA-DRB1*08:01L
NATNKATYKPN

SEQ ID NO: 17826 - protein, 10 aa, Severe acute respiratory syndrome coronavirus 2
  REGION 1..10: note = Table B: HLA-DQA1*01:02-B1*06:02L HLA-DQA1*02:01-B1*03:03L
NKATYKPNTW

SEQ ID NO: 17827 - protein, 14 aa, Severe acute respiratory syndrome coronavirus 2
  REGION 1..14: note = Table B: HLA-DQA1*01:02-B1*06:02L
PNTWCIRCLWSTKP

SEQ ID NO: 17828 - protein, 14 aa, Severe acute respiratory syndrome coronavirus 2
  REGION 1..14: note = Table B: HLA-DQA1*01:02-B1*06:02L HLA-DQA1*05:05-B1*03:01L HLA-DQA1*01:03-B1*06:01L HLA-DQA1*02:01-B1*03:03L
SEDAQGMDNLACED

SEQ ID NO: 17829 - protein, 14 aa, Severe acute respiratory syndrome coronavirus 2
  REGION 1..14: note = Table B: HLA-DQA1*01:02-B1*06:02L HLA-DQA1*05:05-B1*03:01L HLA-DQA1*01:03-B1*06:01L
EDAQGMDNLACEDL

SEQ ID NO: 17830 - protein, 14 aa, Severe acute respiratory syndrome coronavirus 2
  REGION 1..14: note = Table B: HLA-DQA1*01:02-B1*06:02L
DAQGMDNLACEDLK

SEQ ID NO: 17831 - protein, 14 aa, Severe acute respiratory syndrome coronavirus 2
  REGION 1..14: note = Table B: HLA-DQA1*01:02-B1*06:02L
AQGMDNLACEDLKP

SEQ ID NO: 17832 - protein, 13 aa, Severe acute respiratory syndrome coronavirus 2
  REGION 1..13: note = Table B: HLA-DQA1*01:02-B1*06:02L HLA-DPA1*03:01-B1*105:01L HLA-DQA1*01:03-B1*06:01L
GMDNLACEDLKPV

SEQ ID NO: 17833 - protein, 11 aa, Severe acute respiratory syndrome coronavirus 2
  REGION 1..11: note = Table B: HLA-DQA1*01:02-B1*06:02L
NLACEDLKPVS

SEQ ID NO: 17834 - protein, 12 aa, Severe acute respiratory syndrome coronavirus 2
  REGION 1..12: note = Table B: HLA-DQA1*01:02-B1*06:02L
LACEDLKPVSEE

SEQ ID NO: 17835 - protein, 11 aa, Severe acute respiratory syndrome coronavirus 2
  REGION 1..11: note = Table B: HLA-DQA1*01:02-B1*06:02L
DVLECNVKTTE

SEQ ID NO: 17836 - protein, 12 aa, Severe acute respiratory syndrome coronavirus 2
  REGION 1..12: note = Table B: HLA-DQA1*01:02-B1*06:02L
VLECNVKTTEVV

SEQ ID NO: 17837 - protein, 12 aa, Severe acute respiratory syndrome coronavirus 2
  REGION 1..12: note = Table B: HLA-DQA1*01:02-B1*06:02L HLA-DRB1*01:02L
LKITEEVGHTDL

SEQ ID NO: 17838 - protein, 11 aa, Severe acute respiratory syndrome coronavirus 2
  REGION 1..11: note = Table B: HLA-DQA1*01:02-B1*06:02L HLA-DPA1*01:03-B1*04:01L
ITEEVGHTDLM

SEQ ID NO: 17839 - protein, 11 aa, Severe acute respiratory syndrome coronavirus 2
  REGION 1..11: note = Table B: HLA-DQA1*01:02-B1*06:02L
NSSLTIKKPNE

SEQ ID NO: 17840 - protein, 12 aa, Severe acute respiratory syndrome coronavirus 2
  REGION 1..12: note = Table B: HLA-DQA1*01:02-B1*06:02L
SSLTIKKPNELS

SEQ ID NO: 17841 - protein, 14 aa, Severe acute respiratory syndrome coronavirus 2
  REGION 1..14: note = Table B: HLA-DQA1*01:02-B1*06:02L HLA-DRB1*01:02L HLA-DRB1*15:03L
LTIKKPNELSRVLG

SEQ ID NO: 17842 - protein, 12 aa, Severe acute respiratory syndrome coronavirus 2
  REGION 1..12: note = Table B: HLA-DQA1*01:02-B1*06:02L HLA-DQA1*01:03-B1*06:01L
PNELSRVLGLKT

SEQ ID NO: 17843 - protein, 11 aa, Severe acute respiratory syndrome coronavirus 2
  REGION 1..11: note = Table B: HLA-DQA1*01:02-B1*06:02L HLA-DQA1*01:03-B1*06:01L HLA-DRB1*15:03L
HGLAAVNSVPW

SEQ ID NO: 17844 - protein, 13 aa, Severe acute respiratory syndrome coronavirus 2
  REGION 1..13: note = Table B: HLA-DQA1*01:02-B1*06:02L HLA-DQA1*03:01-B1*03:02L
YAKPFLNKVVSTT

SEQ ID NO: 17845 - protein, 10 aa, Severe acute respiratory syndrome coronavirus 2
  REGION 1..10: note = Table B: HLA-DQA1*01:02-B1*06:02L HLA-DPA1*03:01-B1*105:01L HLA-DQA1*01:03-B1*06:01L
STTTNIVTRC

SEQ ID NO: 17846 - protein, 10 aa, Severe acute respiratory syndrome coronavirus 2
  REGION 1..10: note = Table B: HLA-DQA1*01:02-B1*06:02L HLA-DPA1*03:01-B1*105:01L HLA-DQA1*01:03-B1*06:01L
TTTNIVTRCL

SEQ ID NO: 17847 - protein, 12 aa, Severe acute respiratory syndrome coronavirus 2
  REGION 1..12: note = Table B: HLA-DQA1*01:02-B1*06:02L
IVTRCLNRVCTN

SEQ ID NO: 17848 - protein, 10 aa, Severe acute respiratory syndrome coronavirus 2
  REGION 1..10: note = Table B: HLA-DQA1*01:02-B1*06:02L
RVCTNYMPYF

SEQ ID NO: 17849 - protein, 13 aa, Severe acute respiratory syndrome coronavirus 2
  REGION 1..13: note = Table B: HLA-DQA1*01:02-B1*06:02L HLA-DPA1*03:01-B1*105:01L HLA-DRB1*15:03L
TLLLQLCTFTRST

SEQ ID NO: 17850 - protein, 11 aa, Severe acute respiratory syndrome coronavirus 2
  REGION 1..11: note = Table B: HLA-DQA1*01:02-B1*06:02L HLA-DQA1*01:03-B1*06:01L
LQLCTFTRSTN

SEQ ID NO: 17851 - protein, 14 aa, Severe acute respiratory syndrome coronavirus 2
  REGION 1..14: note = Table B: HLA-DQA1*01:02-B1*06:02L
PTTIAKNTVKSVGK

SEQ ID NO: 17852 - protein, 14 aa, Severe acute respiratory syndrome coronavirus 2
  REGION 1..14: note = Table B: HLA-DQA1*01:02-B1*06:02L HLA-DRB1*01:02L HLA-DRB1*14:01L HLA-DPA1*02:01-B1*13:01L
NTVKSVGKFCLEAS

SEQ ID NO: 17853 - protein, 12 aa, Severe acute respiratory syndrome coronavirus 2
  REGION 1..12: note = Table B: HLA-DQA1*01:02-B1*06:02L
SVGKFCLEASFN

SEQ ID NO: 17854 - protein, 12 aa, Severe acute respiratory syndrome coronavirus 2
  REGION 1..12: note = Table B: HLA-DQA1*01:02-B1*06:02L HLA-DPA1*03:01-B1*105:01L HLA-DQA1*01:03-B1*06:01L
LEASFNYLKSPN

SEQ ID NO: 17855 - protein, 10 aa, Severe acute respiratory syndrome coronavirus 2
  REGION 1..10: note = Table B: HLA-DQA1*01:02-B1*06:02L HLA-DPA1*03:01-B1*04:02L HLA-DQA1*05:05-B1*03:19L HLA-DQA1*05:01-B1*02:01L HLA-DPA1*02:01-B1*13:01L HLA-DPA1*03:01-B1*105:01L HLA-DQA1*01:03-B1*06:01L HLA-DQA1*02:01-B1*03:03L
  REGION 1..10: note = CONT. FROM ABOVE: HLA-DRB1*15:03L
FSKLINIIIW

SEQ ID NO: 17856 - protein, 10 aa, Severe acute respiratory syndrome coronavirus 2
  REGION 1..10: note = Table B: HLA-DQA1*01:02-B1*06:02L HLA-DRB1*15:03L
KLINIIIWFL

SEQ ID NO: 17857 - protein, 13 aa, Severe acute respiratory syndrome coronavirus 2
  REGION 1..13: note = Table B: HLA-DQA1*01:02-B1*06:02L
SVCLGSLIYSTAA

SEQ ID NO: 17858 - protein, 10 aa, Severe acute respiratory syndrome coronavirus 2
  REGION 1..10: note = Table B: HLA-DQA1*01:02-B1*06:02L HLA-DRB1*08:77L HLA-DPA1*01:03-B1*03:01L HLA-DQA1*05:05-B1*03:19L HLA-DQA1*05:01-B1*02:01L HLA-DRB4*01:01L HLA-DPA1*01:03-B1*04:01L HLA-DPA1*01:03-B1*104:01L
  REGION 1..10: note = CONT. FROM ABOVE: HLA-DRB1*16:01L HLA-DQA1*02:01-B1*03:03L HLA-D RB1*15:03L
LMSNLGMPSY

SEQ ID NO: 17859 - protein, 12 aa, Severe acute respiratory syndrome coronavirus 2
  REGION 1..12: note = Table B: HLA-DQA1*01:02-B1*06:02L HLA-DQA1*05:05-B1*03:19L HLA-DQA1*05:05-B1*03:01L HLA-DQA1*01:03-B1*06:01L
MSNLGMPSYCTG

SEQ ID NO: 17860 - protein, 12 aa, Severe acute respiratory syndrome coronavirus 2
  REGION 1..12: note = Table B: HLA-DQA1*01:02-B1*06:02L HLA-DQA1*05:05-B1*03:19L HLA-DQA1*01:03-B1*06:01L
SNLGMPSYCTGY

SEQ ID NO: 17861 - protein, 12 aa, Severe acute respiratory syndrome coronavirus 2
  REGION 1..12: note = Table B: HLA-DQA1*01:02-B1*06:02L HLA-DQA1*01:03-B1*06:01L
NLGMPSYCTGYR

SEQ ID NO: 17862 - protein, 13 aa, Severe acute respiratory syndrome coronavirus 2
  REGION 1..13: note = Table B: HLA-DQA1*01:02-B1*06:02L
LGMPSYCTGYREG

SEQ ID NO: 17863 - protein, 11 aa, Severe acute respiratory syndrome coronavirus 2
  REGION 1..11: note = Table B: HLA-DQA1*01:02-B1*06:02L HLA-DQA1*05:05-B1*03:19L
PSYCTGYREGY

SEQ ID NO: 17864 - protein, 14 aa, Severe acute respiratory syndrome coronavirus 2
  REGION 1..14: note = Table B: HLA-DQA1*01:02-B1*06:02L
IATYCTGSIPCSVC

SEQ ID NO: 17865 - protein, 12 aa, Severe acute respiratory syndrome coronavirus 2
  REGION 1..12: note = Table B: HLA-DQA1*01:02-B1*06:02L
SIPCSVCLSGLD

SEQ ID NO: 17866 - protein, 15 aa, Severe acute respiratory syndrome coronavirus 2
  REGION 1..15: note = Table B: HLA-DQA1*01:02-B1*06:02L
SVCLSGLDSLDTYPS

SEQ ID NO: 17867 - protein, 12 aa, Severe acute respiratory syndrome coronavirus 2
  REGION 1..12: note = Table B: HLA-DQA1*01:02-B1*06:02L HLA-DPA1*03:01-B1*105:01L HLA-DQA1*05:05-B1*03:01L HLA-DQA1*01:03-B1*06:01L HLA-DQA1*02:01-B1*03:03L
GLDSLDTYPSLE

SEQ ID NO: 17868 - protein, 12 aa, Severe acute respiratory syndrome coronavirus 2
  REGION 1..12: note = Table B: HLA-DQA1*01:02-B1*06:02L HLA-DRB1*01:02L HLA-DRB1*12:01L HLA-DPA1*03:01-B1*105:01L HLA-DRB1*16:01L HLA-DRB1*15:03L
SLDTYPSLETIQ

SEQ ID NO: 17869 - protein, 10 aa, Severe acute respiratory syndrome coronavirus 2
  REGION 1..10: note = Table B: HLA-DQA1*01:02-B1*06:02L HLA-DQA1*05:05-B1*03:19L HLA-DRB4*01:01L HLA-DPA1*01:03-B1*04:01L HLA-DPA1*02:01-B1*13:01L HLA-DPA1*03:01-B1*105:01L HLA-DQA1*01:03-B1*06:01L HLA-DQA1*02:01-B1*03:03L
  REGION 1..10: note = CONT. FROM ABOVE: HLA-DRB1*15:03L
IQITISSFKW

SEQ ID NO: 17870 - protein, 12 aa, Severe acute respiratory syndrome coronavirus 2
  REGION 1..12: note = Table B: HLA-DQA1*01:02-B1*06:02L HLA-DPA1*01:03-B1*04:02L HLA-DRB1*15:03L
ITISSFKWDLTA

SEQ ID NO: 17871 - protein, 10 aa, Severe acute respiratory syndrome coronavirus 2
  REGION 1..10: note = Table B: HLA-DQA1*01:02-B1*06:02L
LTAFGLVAEW

SEQ ID NO: 17872 - protein, 10 aa, Severe acute respiratory syndrome coronavirus 2
  REGION 1..10: note = Table B: HLA-DQA1*01:02-B1*06:02L HLA-DPA1*02:01-B1*13:01L HLA-DPA1*03:01-B1*105:01L HLA-DQA1*01:03-B1*06:01L HLA-DRB1*15:03L
TAFGLVAEWF

SEQ ID NO: 17873 - protein, 10 aa, Severe acute respiratory syndrome coronavirus 2
  REGION 1..10: note = Table B: HLA-DQA1*01:02-B1*06:02L HLA-DPA1*01:03-B1*03:01L HLA-DPA1*03:01-B1*04:02L HLA-DRB1*11:02L HLA-DRB1*14:02L HLA-DQA1*05:05-B1*03:19L HLA-DQA1*05:01-B1*02:01L HLA-DRB4*01:01L HLA-DPA1*01:03-B1*04:01L
  REGION 1..10: note = CONT. FROM ABOVE: HLA-DPA1*01:03-B1*04:02L HLA-DPA1*02:01-B1*13: 01L HLA-DPA1*03:01-B1*105:01L HLA-DPA1*01:03-B1*104:01L HLA-DRB1 *16:01L HLA-DQA1*01:03-B1*06:01L HLA-DQA1*02:01-B1*03:03L HLA-DR B1*15:03L
GLVAEWFLAY

SEQ ID NO: 17874 - protein, 11 aa, Severe acute respiratory syndrome coronavirus 2
  REGION 1..11: note = Table B: HLA-DQA1*01:02-B1*06:02L HLA-DPA1*01:03-B1*04:02L HLA-DQA1*01:03-B1*06:01L
EWFLAYILFTR

SEQ ID NO: 17875 - protein, 10 aa, Severe acute respiratory syndrome coronavirus 2
  REGION 1..10: note = Table B: HLA-DQA1*01:02-B1*06:02L HLA-DPA1*03:01-B1*04:02L HLA-DPA1*01:03-B1*04:01L HLA-DRB1*12:01L HLA-DPA1*02:01-B1*13:01L HLA-DPA1*03:01-B1*105:01L HLA-DPA1*01:02-B1*04:01L HLA-DQA1*01:03-B1*06:01L
  REGION 1..10: note = CONT. FROM ABOVE: HLA-DRB1*15:03L
LAYILFTRFF

SEQ ID NO: 17876 - protein, 10 aa, Severe acute respiratory syndrome coronavirus 2
  REGION 1..10: note = Table B: HLA-DQA1*01:02-B1*06:02L HLA-DPA1*03:01-B1*04:02L HLA-DQA1*05:05-B1*03:19L HLA-DPA1*02:01-B1*13:01L HLA-DPA1*01:03-B1*104:01L HLA-DQA1*01:03-B1*06:01L HLA-DRB1*15:03L
YILFTRFFYV

SEQ ID NO: 17877 - protein, 14 aa, Severe acute respiratory syndrome coronavirus 2
  REGION 1..14: note = Table B: HLA-DQA1*01:02-B1*06:02L HLA-DRB1*01:02L HLA-DPA1*01:03-B1*04:02L HLA-DRB1*15:03L
TRFFYVLGLAAIMQ

SEQ ID NO: 17878 - protein, 11 aa, Severe acute respiratory syndrome coronavirus 2
  REGION 1..11: note = Table B: HLA-DQA1*01:02-B1*06:02L
VLGLAAIMQLF

SEQ ID NO: 17879 - protein, 10 aa, Severe acute respiratory syndrome coronavirus 2
  REGION 1..10: note = Table B: HLA-DQA1*01:02-B1*06:02L HLA-DRB1*15:03L
GLAAIMQLFF

SEQ ID NO: 17880 - protein, 10 aa, Severe acute respiratory syndrome coronavirus 2
  REGION 1..10: note = Table B: HLA-DQA1*01:02-B1*06:02L HLA-DQA1*05:05-B1*03:19L HLA-DQA1*05:01-B1*02:01L HLA-DPA1*03:01-B1*105:01L HLA-DPA1*01:03-B1*104:01L HLA-DRB1*15:03L
AAIMQLFFSY

SEQ ID NO: 17881 - protein, 10 aa, Severe acute respiratory syndrome coronavirus 2
  REGION 1..10: note = Table B: HLA-DQA1*01:02-B1*06:02L
RMYIFFASFY

SEQ ID NO: 17882 - protein, 10 aa, Severe acute respiratory syndrome coronavirus 2
  REGION 1..10: note = Table B: HLA-DQA1*01:02-B1*06:02L HLA-DRB4*01:01L
MYIFFASFYY

SEQ ID NO: 17883 - protein, 10 aa, Severe acute respiratory syndrome coronavirus 2
  REGION 1..10: note = Table B: HLA-DQA1*01:02-B1*06:02L HLA-DPA1*01:03-B1*03:01L HLA-DQA1*01-B1*05L HLA-DQA1*05:05-B1*03:19L HLA-DQA1*05:01-B1*02:01L HLA-DPA1*01:03-B1*04:01L HLA-DPA1*01:03-B1*104:01L HLA-DQA1*01:03-B1*06:01L
  REGION 1..10: note = CONT. FROM ABOVE: HLA-DQA1*02:01-B1*03:03L
ASFYYVWKSY

SEQ ID NO: 17884 - protein, 12 aa, Severe acute respiratory syndrome coronavirus 2
  REGION 1..12: note = Table B: HLA-DQA1*01:02-B1*06:02L
YVHVVDGCNSST

SEQ ID NO: 17885 - protein, 12 aa, Severe acute respiratory syndrome coronavirus 2
  REGION 1..12: note = Table B: HLA-DQA1*01:02-B1*06:02L
HVVDGCNSSTCM

SEQ ID NO: 17886 - protein, 12 aa, Severe acute respiratory syndrome coronavirus 2
  REGION 1..12: note = Table B: HLA-DQA1*01:02-B1*06:02L
VVDGCNSSTCMM

SEQ ID NO: 17887 - protein, 13 aa, Severe acute respiratory syndrome coronavirus 2
  REGION 1..13: note = Table B: HLA-DQA1*01:02-B1*06:02L
DGCNSSTCMMCYK

SEQ ID NO: 17888 - protein, 12 aa, Severe acute respiratory syndrome coronavirus 2
  REGION 1..12: note = Table B: HLA-DQA1*01:02-B1*06:02L HLA-DQA1*01:03-B1*06:01L
NSSTCMMCYKRN

SEQ ID NO: 17889 - protein, 10 aa, Severe acute respiratory syndrome coronavirus 2
  REGION 1..10: note = Table B: HLA-DQA1*01:02-B1*06:02L HLA-DQA1*01:03-B1*06:01L HLA-DQA1*02:01-B1*03:03L
ECTTIVNGVR

SEQ ID NO: 17890 - protein, 11 aa, Severe acute respiratory syndrome coronavirus 2
  REGION 1..11: note = Table B: HLA-DQA1*01:02-B1*06:02L HLA-DRB1*08:01L HLA-DQA1*05:05-B1*03:19L HLA-DRB1*04:10L HLA-DPA1*03:01-B1*105:01L HLA-DQA1*05:05-B1*03:01L
SFYVYANGGKG

SEQ ID NO: 17891 - protein, 12 aa, Severe acute respiratory syndrome coronavirus 2
  REGION 1..12: note = Table B: HLA-DQA1*01:02-B1*06:02L
GGKGFCKLHNWN

SEQ ID NO: 17892 - protein, 14 aa, Severe acute respiratory syndrome coronavirus 2
  REGION 1..14: note = Table B: HLA-DQA1*01:02-B1*06:02L
WNCVNCDTFCAGST

SEQ ID NO: 17893 - protein, 14 aa, Severe acute respiratory syndrome coronavirus 2
  REGION 1..14: note = Table B: HLA-DQA1*01:02-B1*06:02L HLA-DQA1*05:05-B1*03:01L HLA-DQA1*01:03-B1*06:01L
DTFCAGSTFISDEV

SEQ ID NO: 17894 - protein, 14 aa, Severe acute respiratory syndrome coronavirus 2
  REGION 1..14: note = Table B: HLA-DQA1*01:02-B1*06:02L HLA-DQA1*01:03-B1*06:01L
TFCAGSTFISDEVA

SEQ ID NO: 17895 - protein, 12 aa, Severe acute respiratory syndrome coronavirus 2
  REGION 1..12: note = Table B: HLA-DQA1*01:02-B1*06:02L HLA-DQA1*01:01-B1*05:01L HLA-DPA1*03:01-B1*105:01L HLA-DQA1*05:05-B1*03:01L
ISDEVARDLSLQ

SEQ ID NO: 17896 - protein, 13 aa, Severe acute respiratory syndrome coronavirus 2
  REGION 1..13: note = Table B: HLA-DQA1*01:02-B1*06:02L
PTDQSSYIVDSVT

SEQ ID NO: 17897 - protein, 13 aa, Severe acute respiratory syndrome coronavirus 2
  REGION 1..13: note = Table B: HLA-DQA1*01:02-B1*06:02L HLA-DRB1*01:01L HLA-DRB1*08:01L HLA-DRB4*01:01L HLA-DPA1*01:03-B1*04:02L HLA-DPA1*02:01-B1*13:01L HLA-DRB1*07:01L
SSYIVDSVTVKNG

SEQ ID NO: 17898 - protein, 12 aa, Severe acute respiratory syndrome coronavirus 2
  REGION 1..12: note = Table B: HLA-DQA1*01:02-B1*06:02L HLA-DQA1*05:05-B1*03:19L
YIVDSVTVKNGS

SEQ ID NO: 17899 - protein, 12 aa, Severe acute respiratory syndrome coronavirus 2
  REGION 1..12: note = Table B: HLA-DQA1*01:02-B1*06:02L HLA-DQA1*05:05-B1*03:19L HLA-DPA1*03:01-B1*105:01L HLA-DQA1*05:05-B1*03:01L HLA-DQA1*01:03-B1*06:01L
IVDSVTVKNGSI

SEQ ID NO: 17900 - protein, 11 aa, Severe acute respiratory syndrome coronavirus 2
  REGION 1..11: note = Table B: HLA-DQA1*01:02-B1*06:02L
VKNGSIHLYFD

SEQ ID NO: 17901 - protein, 12 aa, Severe acute respiratory syndrome coronavirus 2
  REGION 1..12: note = Table B: HLA-DQA1*01:02-B1*06:02L
KNGSIHLYFDKA

SEQ ID NO: 17902 - protein, 12 aa, Severe acute respiratory syndrome coronavirus 2
  REGION 1..12: note = Table B: HLA-DQA1*01:02-B1*06:02L HLA-DQA1*03:01-B1*03:02L HLA-DRB1*16:01L HLA-DRB1*15:03L
NGSIHLYFDKAG

SEQ ID NO: 17903 - protein, 13 aa, Severe acute respiratory syndrome coronavirus 2
  REGION 1..13: note = Table B: HLA-DQA1*01:02-B1*06:02L HLA-DRB1*01:02L HLA-DQA1*02:01-B1*03:03L
FDKAGQKTYERHS

SEQ ID NO: 17904 - protein, 15 aa, Severe acute respiratory syndrome coronavirus 2
  REGION 1..15: note = Table B: HLA-DQA1*01:02-B1*06:02L HLA-DRB1*14:01L HLA-DRB1*11:04L HLA-DRB1*11:01L HLA-DPA1*02:01-B1*13:01L HLA-DRB1*15:03L
DKAGQKTYERHSLSH

SEQ ID NO: 17905 - protein, 12 aa, Severe acute respiratory syndrome coronavirus 2
  REGION 1..12: note = Table B: HLA-DQA1*01:02-B1*06:02L
SLSHFVNLDNLR

SEQ ID NO: 17906 - protein, 13 aa, Severe acute respiratory syndrome coronavirus 2
  REGION 1..13: note = Table B: HLA-DQA1*01:02-B1*06:02L HLA-DRB1*14:01L
LRANNTKGSLPIN

SEQ ID NO: 17907 - protein, 10 aa, Severe acute respiratory syndrome coronavirus 2
  REGION 1..10: note = Table B: HLA-DQA1*01:02-B1*06:02L HLA-DRB1*14:02L HLA-DQA1*05:05-B1*03:19L HLA-DPA1*02:01-B1*13:01L HLA-DPA1*03:01-B1*105:01L HLA-DQA1*01:03-B1*06:01L HLA-DQA1*02:01-B1*03:03L HLA-DRB1*15:03L
GSLPINVIVF

SEQ ID NO: 17908 - protein, 12 aa, Severe acute respiratory syndrome coronavirus 2
  REGION 1..12: note = Table B: HLA-DQA1*01:02-B1*06:02L HLA-DRB1*01:02L
PINVIVFDGKSK

SEQ ID NO: 17909 - protein, 12 aa, Severe acute respiratory syndrome coronavirus 2
  REGION 1..12: note = Table B: HLA-DQA1*01:02-B1*06:02L HLA-DQA1*01:03-B1*06:01L
DGKSKCEESSAK

SEQ ID NO: 17910 - protein, 14 aa, Severe acute respiratory syndrome coronavirus 2
  REGION 1..14: note = Table B: HLA-DQA1*01:02-B1*06:02L HLA-DPA1*03:01-B1*105:01L
SASVYYSQLMCQPI

SEQ ID NO: 17911 - protein, 12 aa, Severe acute respiratory syndrome coronavirus 2
  REGION 1..12: note = Table B: HLA-DQA1*01:02-B1*06:02L HLA-DRB1*01:02L HLA-DPA1*03:01-B1*04:02L HLA-DQA1*05:05-B1*03:19L HLA-DRB1*12:01L HLA-DPA1*03:01-B1*105:01L HLA-DQA1*05:05-B1*03:01L HLA-DRB1*15:03L
VYYSQLMCQPIL

SEQ ID NO: 17912 - protein, 12 aa, Severe acute respiratory syndrome coronavirus 2
  REGION 1..12: note = Table B: HLA-DQA1*01:02-B1*06:02L HLA-DPA1*03:01-B1*105:01L
QLMCQPILLLDQ

SEQ ID NO: 17913 - protein, 12 aa, Severe acute respiratory syndrome coronavirus 2
  REGION 1..12: note = Table B: HLA-DQA1*01:02-B1*06:02L HLA-DPA1*03:01-B1*105:01L
LMCQPILLLDQA

SEQ ID NO: 17914 - protein, 12 aa, Severe acute respiratory syndrome coronavirus 2
  REGION 1..12: note = Table B: HLA-DQA1*01:02-B1*06:02L
TFNVPMEKLKTL

SEQ ID NO: 17915 - protein, 14 aa, Severe acute respiratory syndrome coronavirus 2
  REGION 1..14: note = Table B: HLA-DQA1*01:02-B1*06:02L
FNVPMEKLKTLVAT

SEQ ID NO: 17916 - protein, 13 aa, Severe acute respiratory syndrome coronavirus 2
  REGION 1..13: note = Table B: HLA-DQA1*01:02-B1*06:02L HLA-DRB1*01:02L
KLKTLVATAEAEL

SEQ ID NO: 17917 - protein, 13 aa, Severe acute respiratory syndrome coronavirus 2
  REGION 1..13: note = Table B: HLA-DQA1*01:02-B1*06:02L HLA-DRB1*01:02L HLA-DQA1*05:05-B1*03:19L HLA-DQA1*05:05-B1*03:01L
LKTLVATAEAELA

SEQ ID NO: 17918 - protein, 12 aa, Severe acute respiratory syndrome coronavirus 2
  REGION 1..12: note = Table B: HLA-DQA1*01:02-B1*06:02L HLA-DRB1*14:01L HLA-DRB1*12:01L HLA-DPA1*03:01-B1*105:01L HLA-DRB1*16:01L HLA-DRB1*15:03L
ELAKNVSLDNVL

SEQ ID NO: 17919 - protein, 11 aa, Severe acute respiratory syndrome coronavirus 2
  REGION 1..11: note = Table B: HLA-DQA1*01:02-B1*06:02L
VLSTFISAARQ

SEQ ID NO: 17920 - protein, 14 aa, Severe acute respiratory syndrome coronavirus 2
  REGION 1..14: note = Table B: HLA-DQA1*01:02-B1*06:02L HLA-DRB1*08:01L HLA-DRB3*01:01L HLA-DPA1*01:02-B1*04:01L
ARQGFVDSDVETKD

SEQ ID NO: 17921 - protein, 12 aa, Severe acute respiratory syndrome coronavirus 2
  REGION 1..12: note = Table B: HLA-DQA1*01:02-B1*06:02L HLA-DPA1*01:03-B1*03:01L HLA-DPA1*02:01-B1*13:01L HLA-DRB1*15:03L
FVDSDVETKDVV

SEQ ID NO: 17922 - protein, 12 aa, Severe acute respiratory syndrome coronavirus 2
  REGION 1..12: note = Table B: HLA-DQA1*01:02-B1*06:02L HLA-DQA1*01:03-B1*06:01L
DVETKDVVECLK

SEQ ID NO: 17923 - protein, 12 aa, Severe acute respiratory syndrome coronavirus 2
  REGION 1..12: note = Table B: HLA-DQA1*01:02-B1*06:02L HLA-DRB1*14:01L HLA-DRB1*08:01L
KDVVECLKLSHQ

SEQ ID NO: 17924 - protein, 12 aa, Severe acute respiratory syndrome coronavirus 2
  REGION 1..12: note = Table B: HLA-DQA1*01:02-B1*06:02L
DVVECLKLSHQS

SEQ ID NO: 17925 - protein, 12 aa, Severe acute respiratory syndrome coronavirus 2
  REGION 1..12: note = Table B: HLA-DQA1*01:02-B1*06:02L HLA-DQA1*01:03-B1*06:01L
VVECLKLSHQSD

SEQ ID NO: 17926 - protein, 13 aa, Severe acute respiratory syndrome coronavirus 2
  REGION 1..13: note = Table B: HLA-DQA1*01:02-B1*06:02L
VECLKLSHQSDIE

SEQ ID NO: 17927 - protein, 15 aa, Severe acute respiratory syndrome coronavirus 2
  REGION 1..15: note = Table B: HLA-DQA1*01:02-B1*06:02L
VTGDSCNNYMLTYNK

SEQ ID NO: 17928 - protein, 14 aa, Severe acute respiratory syndrome coronavirus 2
  REGION 1..14: note = Table B: HLA-DQA1*01:02-B1*06:02L HLA-DPA1*03:01-B1*105:01L
DSCNNYMLTYNKVE

SEQ ID NO: 17929 - protein, 13 aa, Severe acute respiratory syndrome coronavirus 2
  REGION 1..13: note = Table B: HLA-DQA1*01:02-B1*06:02L
YMLTYNKVENMTP

SEQ ID NO: 17930 - protein, 12 aa, Severe acute respiratory syndrome coronavirus 2
  REGION 1..12: note = Table B: HLA-DQA1*01:02-B1*06:02L HLA-DRB1*01:02L HLA-DQA1*01-B1*05L HLA-DPA1*03:01-B1*105:01L
TYNKVENMTPRD

SEQ ID NO: 17931 - protein, 11 aa, Severe acute respiratory syndrome coronavirus 2
  REGION 1..11: note = Table B: HLA-DQA1*01:02-B1*06:02L HLA-DQA1*01:03-B1*06:01L
DLGACIDCSAR

SEQ ID NO: 17932 - protein, 12 aa, Severe acute respiratory syndrome coronavirus 2
  REGION 1..12: note = Table B: HLA-DQA1*01:02-B1*06:02L
GACIDCSARHIN

SEQ ID NO: 17933 - protein, 13 aa, Severe acute respiratory syndrome coronavirus 2
  REGION 1..13: note = Table B: HLA-DQA1*01:02-B1*06:02L
ACIDCSARHINAQ

SEQ ID NO: 17934 - protein, 14 aa, Severe acute respiratory syndrome coronavirus 2
  REGION 1..14: note = Table B: HLA-DQA1*01:02-B1*06:02L HLA-DRB1*01:02L
IDCSARHINAQVAK

SEQ ID NO: 17935 - protein, 11 aa, Severe acute respiratory syndrome coronavirus 2
  REGION 1..11: note = Table B: HLA-DQA1*01:02-B1*06:02L HLA-DQA1*02:01-B1*03:03L
VAKSHNIALIW

SEQ ID NO: 17936 - protein, 12 aa, Severe acute respiratory syndrome coronavirus 2
  REGION 1..12: note = Table B: HLA-DQA1*01:02-B1*06:02L
KSHNIALIWNVK

SEQ ID NO: 17937 - protein, 12 aa, Severe acute respiratory syndrome coronavirus 2
  REGION 1..12: note = Table B: HLA-DQA1*01:02-B1*06:02L
MSLSEQLRKQIR

SEQ ID NO: 17938 - protein, 14 aa, Severe acute respiratory syndrome coronavirus 2
  REGION 1..14: note = Table B: HLA-DQA1*01:02-B1*06:02L HLA-DRB1*08:04L HLA-DRB1*11:04L HLA-DRB1*11:01L HLA-DRB3*01:01L
RKQIRSAAKKNNLP

SEQ ID NO: 17939 - protein, 10 aa, Severe acute respiratory syndrome coronavirus 2
  REGION 1..10: note = Table B: HLA-DQA1*01:02-B1*06:02L HLA-DQA1*02:01-B1*03:03L
SAAKKNNLPF

SEQ ID NO: 17940 - protein, 16 aa, Severe acute respiratory syndrome coronavirus 2
  REGION 1..16: note = Table B: HLA-DQA1*01:02-B1*06:02L
AAKKNNLPFKLTCATT

SEQ ID NO: 17941 - protein, 14 aa, Severe acute respiratory syndrome coronavirus 2
  REGION 1..14: note = Table B: HLA-DQA1*01:02-B1*06:02L
NNLPFKLTCATTRQ

SEQ ID NO: 17942 - protein, 14 aa, Severe acute respiratory syndrome coronavirus 2
  REGION 1..14: note = Table B: HLA-DQA1*01:02-B1*06:02L HLA-DQA1*01:03-B1*06:01L
LPFKLTCATTRQVV

SEQ ID NO: 17943 - protein, 10 aa, Severe acute respiratory syndrome coronavirus 2
  REGION 1..10: note = Table B: HLA-DQA1*01:02-B1*06:02L HLA-DQA1*01:03-B1*06:01L
TCATTRQVVN

SEQ ID NO: 17944 - protein, 12 aa, Severe acute respiratory syndrome coronavirus 2
  REGION 1..12: note = Table B: HLA-DQA1*01:02-B1*06:02L
VVNVVTTKIALK

SEQ ID NO: 17945 - protein, 12 aa, Severe acute respiratory syndrome coronavirus 2
  REGION 1..12: note = Table B: HLA-DQA1*01:02-B1*06:02L
NVVTTKIALKGG

SEQ ID NO: 17946 - protein, 14 aa, Severe acute respiratory syndrome coronavirus 2
  REGION 1..14: note = Table B: HLA-DQA1*01:02-B1*06:02L HLA-DRB3*02:01L HLA-DPA1*01:03-B1*03:01L HLA-DPA1*02:01-B1*13:01L HLA-DPA1*03:01-B1*105:01L HLA-DPA1*01:02-B1*04:01L HLA-DQA1*01:03-B1*06:01L
VTTKIALKGGKIVN

SEQ ID NO: 17947 - protein, 10 aa, Severe acute respiratory syndrome coronavirus 2
  REGION 1..10: note = Table B: HLA-DQA1*01:02-B1*06:02L HLA-DQA1*01:03-B1*06:01L HLA-DQA1*02:01-B1*03:03L
LKGGKIVNNW

SEQ ID NO: 17948 - protein, 13 aa, Severe acute respiratory syndrome coronavirus 2
  REGION 1..13: note = Table B: HLA-DQA1*01:02-B1*06:02L HLA-DPA1*03:01-B1*105:01L
IVNNWLKQLIKVT

SEQ ID NO: 17949 - protein, 10 aa, Severe acute respiratory syndrome coronavirus 2
  REGION 1..10: note = Table B: HLA-DQA1*01:02-B1*06:02L
WLKQLIKVTL

SEQ ID NO: 17950 - protein, 12 aa, Severe acute respiratory syndrome coronavirus 2
  REGION 1..12: note = Table B: HLA-DQA1*01:02-B1*06:02L HLA-DQA1*01:03-B1*06:01L HLA-DRB1*04:08L
YLITPVHVMSKH

SEQ ID NO: 17951 - protein, 12 aa, Severe acute respiratory syndrome coronavirus 2
  REGION 1..12: note = Table B: HLA-DQA1*01:02-B1*06:02L HLA-DRB1*01:02L HLA-DRB1*16:01L HLA-DQA1*01:03-B1*06:01L HLA-DRB1*15:03L
LITPVHVMSKHT

SEQ ID NO: 17952 - protein, 12 aa, Severe acute respiratory syndrome coronavirus 2
  REGION 1..12: note = Table B: HLA-DQA1*01:02-B1*06:02L HLA-DRB1*08:04L HLA-DRB1*11:04L HLA-DRB1*11:01L HLA-DRB1*04:08L
TPVHVMSKHTDF

SEQ ID NO: 17953 - protein, 12 aa, Severe acute respiratory syndrome coronavirus 2
  REGION 1..12: note = Table B: HLA-DQA1*01:02-B1*06:02L HLA-DRB1*08:04L HLA-DRB1*08:01L
PVHVMSKHTDFS

SEQ ID NO: 17954 - protein, 13 aa, Severe acute respiratory syndrome coronavirus 2
  REGION 1..13: note = Table B: HLA-DQA1*01:02-B1*06:02L
MSKHTDFSSEIIG

SEQ ID NO: 17955 - protein, 12 aa, Severe acute respiratory syndrome coronavirus 2
  REGION 1..12: note = Table B: HLA-DQA1*01:02-B1*06:02L
FSSEIIGYKAID

SEQ ID NO: 17956 - protein, 12 aa, Severe acute respiratory syndrome coronavirus 2
  REGION 1..12: note = Table B: HLA-DQA1*01:02-B1*06:02L HLA-DRB1*01:02L HLA-DRB1*12:01L HLA-DPA1*03:01-B1*105:01L
EIIGYKAIDGGV

SEQ ID NO: 17957 - protein, 12 aa, Severe acute respiratory syndrome coronavirus 2
  REGION 1..12: note = Table B: HLA-DQA1*01:02-B1*06:02L HLA-DQA1*01:03-B1*06:01L
STDTCFANKHAD

SEQ ID NO: 17958 - protein, 12 aa, Severe acute respiratory syndrome coronavirus 2
  REGION 1..12: note = Table B: HLA-DQA1*01:02-B1*06:02L HLA-DQA1*01:03-B1*06:01L
TDTCFANKHADF

SEQ ID NO: 17959 - protein, 12 aa, Severe acute respiratory syndrome coronavirus 2
  REGION 1..12: note = Table B: HLA-DQA1*01:02-B1*06:02L HLA-DRB1*08:01L HLA-DQA1*01:03-B1*06:01L
DTCFANKHADFD

SEQ ID NO: 17960 - protein, 10 aa, Severe acute respiratory syndrome coronavirus 2
  REGION 1..10: note = Table B: HLA-DQA1*01:02-B1*06:02L HLA-DQA1*02:01-B1*03:03L
ANKHADFDTW

SEQ ID NO: 17961 - protein, 15 aa, Severe acute respiratory syndrome coronavirus 2
  REGION 1..15: note = Table B: HLA-DQA1*01:02-B1*06:02L HLA-DPA1*02:01-B1*13:01L
NKHADFDTWFSQRGG

SEQ ID NO: 17962 - protein, 13 aa, Severe acute respiratory syndrome coronavirus 2
  REGION 1..13: note = Table B: HLA-DQA1*01:02-B1*06:02L HLA-DQA1*05:05-B1*03:01L
WFSQRGGSYTNDK

SEQ ID NO: 17963 - protein, 13 aa, Severe acute respiratory syndrome coronavirus 2
  REGION 1..13: note = Table B: HLA-DQA1*01:02-B1*06:02L HLA-DQA1*05:05-B1*03:01L HLA-DQA1*01:03-B1*06:01L
FSQRGGSYTNDKA

SEQ ID NO: 17964 - protein, 14 aa, Severe acute respiratory syndrome coronavirus 2
  REGION 1..14: note = Table B: HLA-DQA1*01:02-B1*06:02L
YTNDKACPLIAAVI

SEQ ID NO: 17965 - protein, 10 aa, Severe acute respiratory syndrome coronavirus 2
  REGION 1..10: note = Table B: HLA-DQA1*01:02-B1*06:02L HLA-DPA1*03:01-B1*105:01L HLA-DQA1*01:03-B1*06:01L HLA-DQA1*02:01-B1*03:03L
AAVITREVGF

SEQ ID NO: 17966 - protein, 13 aa, Severe acute respiratory syndrome coronavirus 2
  REGION 1..13: note = Table B: HLA-DQA1*01:02-B1*06:02L
TREVGFVVPGLPG

SEQ ID NO: 17967 - protein, 13 aa, Severe acute respiratory syndrome coronavirus 2
  REGION 1..13: note = Table B: HLA-DQA1*01:02-B1*06:02L HLA-DQA1*05:05-B1*03:01L
VPGLPGTILRTTN

SEQ ID NO: 17968 - protein, 12 aa, Severe acute respiratory syndrome coronavirus 2
  REGION 1..12: note = Table B: HLA-DQA1*01:02-B1*06:02L HLA-DQA1*03:01-B1*03:02L HLA-DQA1*02:01-B1*03:03L
LPGTILRTTNGD

SEQ ID NO: 17969 - protein, 10 aa, Severe acute respiratory syndrome coronavirus 2
  REGION 1..10: note = Table B: HLA-DQA1*01:02-B1*06:02L HLA-DQA1*05:05-B1*03:19L HLA-DQA1*05:01-B1*02:01L HLA-DRB4*01:01L HLA-DPA1*01:03-B1*04:01L HLA-DPA1*02:01-B1*13:01L HLA-DQA1*01:03-B1*06:01L
VFSAVGNICY

SEQ ID NO: 17970 - protein, 12 aa, Severe acute respiratory syndrome coronavirus 2
  REGION 1..12: note = Table B: HLA-DQA1*01:02-B1*06:02L HLA-DQA1*01:03-B1*06:01L HLA-DQA1*02:01-B1*03:03L
SAVGNICYTPSK

SEQ ID NO: 17971 - protein, 11 aa, Severe acute respiratory syndrome coronavirus 2
  REGION 1..11: note = Table B: HLA-DQA1*01:02-B1*06:02L HLA-DPA1*01:03-B1*03:01L HLA-DRB1*03:01L HLA-DRB1*14:02L HLA-DQA1*01-B1*05L HLA-DRB4*01:01L HLA-DPA1*01:03-B1*04:01L HLA-DPA1*01:03-B1*04:02L HLA-DPA1*02:01-B1*13:01L
  REGION 1..11: note = CONT. FROM ABOVE: HLA-DPA1*03:01-B1*105:01L HLA-DPA1*01:03-B1*10 4:01L HLA-DQA1*05:05-B1*03:01L HLA-DQA1*01:03-B1*06:01L
ICYTPSKLIEY

SEQ ID NO: 17972 - protein, 12 aa, Severe acute respiratory syndrome coronavirus 2
  REGION 1..12: note = Table B: HLA-DQA1*01:02-B1*06:02L HLA-DPA1*03:01-B1*04:02L HLA-DQA1*05:01-B1*02:01L HLA-DRB1*12:01L HLA-DPA1*03:01-B1*105:01L HLA-DPA1*01:02-B1*04:01L HLA-DRB1*15:03L
YTPSKLIEYTDF

SEQ ID NO: 17973 - protein, 14 aa, Severe acute respiratory syndrome coronavirus 2
  REGION 1..14: note = Table B: HLA-DQA1*01:02-B1*06:02L HLA-DQA1*05:05-B1*03:01L
IEYTDFATSACVLA

SEQ ID NO: 17974 - protein, 11 aa, Severe acute respiratory syndrome coronavirus 2
  REGION 1..11: note = Table B: HLA-DQA1*01:02-B1*06:02L HLA-DQA1*01:03-B1*06:01L
FATSACVLAAE

SEQ ID NO: 17975 - protein, 12 aa, Severe acute respiratory syndrome coronavirus 2
  REGION 1..12: note = Table B: HLA-DQA1*01:02-B1*06:02L HLA-DQA1*01:03-B1*06:01L
ATSACVLAAECT

SEQ ID NO: 17976 - protein, 14 aa, Severe acute respiratory syndrome coronavirus 2
  REGION 1..14: note = Table B: HLA-DQA1*01:02-B1*06:02L
TSACVLAAECTIFK

SEQ ID NO: 17977 - protein, 10 aa, Severe acute respiratory syndrome coronavirus 2
  REGION 1..10: note = Table B: HLA-DQA1*01:02-B1*06:02L HLA-DQA1*01:03-B1*06:01L
AAECTIFKDA

SEQ ID NO: 17978 - protein, 10 aa, Severe acute respiratory syndrome coronavirus 2
  REGION 1..10: note = Table B: HLA-DQA1*01:02-B1*06:02L HLA-DQA1*05:05-B1*03:19L HLA-DQA1*05:05-B1*03:01L HLA-DQA1*01:03-B1*06:01L
DASGKPVPYC

SEQ ID NO: 17979 - protein, 10 aa, Severe acute respiratory syndrome coronavirus 2
  REGION 1..10: note = Table B: HLA-DQA1*01:02-B1*06:02L HLA-DQA1*05:05-B1*03:19L
ASGKPVPYCY

SEQ ID NO: 17980 - protein, 12 aa, Severe acute respiratory syndrome coronavirus 2
  REGION 1..12: note = Table B: HLA-DQA1*01:02-B1*06:02L
SGKPVPYCYDTN

SEQ ID NO: 17981 - protein, 12 aa, Severe acute respiratory syndrome coronavirus 2
  REGION 1..12: note = Table B: HLA-DQA1*01:02-B1*06:02L
CYDTNVLEGSVA

SEQ ID NO: 17982 - protein, 11 aa, Severe acute respiratory syndrome coronavirus 2
  REGION 1..11: note = Table B: HLA-DQA1*01:02-B1*06:02L
EGSVAYESLRP

SEQ ID NO: 17983 - protein, 11 aa, Severe acute respiratory syndrome coronavirus 2
  REGION 1..11: note = Table B: HLA-DQA1*01:02-B1*06:02L
SVAYESLRPDT

SEQ ID NO: 17984 - protein, 11 aa, Severe acute respiratory syndrome coronavirus 2
  REGION 1..11: note = Table B: HLA-DQA1*01:02-B1*06:02L HLA-DRB1*01:02L HLA-DQA1*01:01-B1*05:01L HLA-DRB1*08:01L HLA-DRB1*12:01L HLA-DQA1*05:05-B1*03:01L HLA-DRB1*04:08L
VAYESLRPDTR

SEQ ID NO: 17985 - protein, 14 aa, Severe acute respiratory syndrome coronavirus 2
  REGION 1..14: note = Table B: HLA-DQA1*01:02-B1*06:02L
LRPDTRYVLMDGSI

SEQ ID NO: 17986 - protein, 14 aa, Severe acute respiratory syndrome coronavirus 2
  REGION 1..14: note = Table B: HLA-DQA1*01:02-B1*06:02L HLA-DPA1*02:01-B1*13:01L HLA-DRB1*16:01L
RPDTRYVLMDGSII

SEQ ID NO: 17987 - protein, 10 aa, Severe acute respiratory syndrome coronavirus 2
  REGION 1..10: note = Table B: HLA-DQA1*01:02-B1*06:02L HLA-DQA1*02:01-B1*03:03L
EGSVRVVTTF

SEQ ID NO: 17988 - protein, 12 aa, Severe acute respiratory syndrome coronavirus 2
  REGION 1..12: note = Table B: HLA-DQA1*01:02-B1*06:02L
DSEYCRHGTCER

SEQ ID NO: 17989 - protein, 13 aa, Severe acute respiratory syndrome coronavirus 2
  REGION 1..13: note = Table B: HLA-DQA1*01:02-B1*06:02L
YCRHGTCERSEAG

SEQ ID NO: 17990 - protein, 11 aa, Severe acute respiratory syndrome coronavirus 2
  REGION 1..11: note = Table B: HLA-DQA1*01:02-B1*06:02L HLA-DQA1*05:05-B1*03:01L HLA-DQA1*01:03-B1*06:01L
EAGVCVSTSGR

SEQ ID NO: 17991 - protein, 12 aa, Severe acute respiratory syndrome coronavirus 2
  REGION 1..12: note = Table B: HLA-DQA1*01:02-B1*06:02L
AGVCVSTSGRWV

SEQ ID NO: 17992 - protein, 12 aa, Severe acute respiratory syndrome coronavirus 2
  REGION 1..12: note = Table B: HLA-DQA1*01:02-B1*06:02L HLA-DQA1*02:01-B1*03:03L
VSTSGRWVLNND

SEQ ID NO: 17993 - protein, 11 aa, Severe acute respiratory syndrome coronavirus 2
  REGION 1..11: note = Table B: HLA-DQA1*01:02-B1*06:02L HLA-DQA1*05:01-B1*02:01L
TSGRWVLNNDY

SEQ ID NO: 17994 - protein, 10 aa, Severe acute respiratory syndrome coronavirus 2
  REGION 1..10: note = Table B: HLA-DQA1*01:02-B1*06:02L HLA-DPA1*01:03-B1*03:01L HLA-DQA1*05:05-B1*03:19L HLA-DQA1*05:01-B1*02:01L HLA-DRB1*16:01L HLA-DQA1*02:01-B1*03:03L
GRWVLNNDYY

SEQ ID NO: 17995 - protein, 14 aa, Severe acute respiratory syndrome coronavirus 2
  REGION 1..14: note = Table B: HLA-DQA1*01:02-B1*06:02L HLA-DPA1*03:01-B1*105:01L HLA-DQA1*01:03-B1*06:01L
RSLPGVFCGVDAVN

SEQ ID NO: 17996 - protein, 13 aa, Severe acute respiratory syndrome coronavirus 2
  REGION 1..13: note = Table B: HLA-DQA1*01:02-B1*06:02L HLA-DQA1*01-B1*05L HLA-DQA1*05:01-B1*02:01L HLA-DPA1*03:01-B1*105:01L HLA-DRB1*16:01L HLA-DQA1*01:03-B1*06:01L HLA-DRB1*04:08L
VNLLTNMFTPLIQ

SEQ ID NO: 17997 - protein, 13 aa, Severe acute respiratory syndrome coronavirus 2
  REGION 1..13: note = Table B: HLA-DQA1*01:02-B1*06:02L
LLTNMFTPLIQPI

SEQ ID NO: 17998 - protein, 13 aa, Severe acute respiratory syndrome coronavirus 2
  REGION 1..13: note = Table B: HLA-DQA1*01:02-B1*06:02L
QPIGALDISASIV

SEQ ID NO: 17999 - protein, 15 aa, Severe acute respiratory syndrome coronavirus 2
  REGION 1..15: note = Table B: HLA-DQA1*01:02-B1*06:02L
PIGALDISASIVAGG

SEQ ID NO: 18000 - protein, 11 aa, Severe acute respiratory syndrome coronavirus 2
  REGION 1..11: note = Table B: HLA-DQA1*01:02-B1*06:02L HLA-DQA1*01:03-B1*06:01L
DISASIVAGGI

SEQ ID NO: 18001 - protein, 11 aa, Severe acute respiratory syndrome coronavirus 2
  REGION 1..11: note = Table B: HLA-DQA1*01:02-B1*06:02L
IVAGGIVAIVV

SEQ ID NO: 18002 - protein, 11 aa, Severe acute respiratory syndrome coronavirus 2
  REGION 1..11: note = Table B: HLA-DQA1*01:02-B1*06:02L
VVTCLAYYFMR

SEQ ID NO: 18003 - protein, 13 aa, Severe acute respiratory syndrome coronavirus 2
  REGION 1..13: note = Table B: HLA-DQA1*01:02-B1*06:02L
YYFMRFRRAFGEY

SEQ ID NO: 18004 - protein, 10 aa, Severe acute respiratory syndrome coronavirus 2
  REGION 1..10: note = Table B: HLA-DQA1*01:02-B1*06:02L HLA-DQA1*05:05-B1*03:19L HLA-DQA1*05:01-B1*02:01L
FGEYSHVVAF

SEQ ID NO: 18005 - protein, 14 aa, Severe acute respiratory syndrome coronavirus 2
  REGION 1..14: note = Table B: HLA-DQA1*01:02-B1*06:02L HLA-DPA1*01:03-B1*04:02L
LMSFTVLCLTPVYS

SEQ ID NO: 18006 - protein, 14 aa, Severe acute respiratory syndrome coronavirus 2
  REGION 1..14: note = Table B: HLA-DQA1*01:02-B1*06:02L HLA-DRB1*01:02L HLA-DRB1*12:01L HLA-DPA1*03:01-B1*105:01L HLA-DRB1*15:03L
TVLCLTPVYSFLPG

SEQ ID NO: 18007 - protein, 10 aa, Severe acute respiratory syndrome coronavirus 2
  REGION 1..10: note = Table B: HLA-DQA1*01:02-B1*06:02L HLA-DQA1*05:05-B1*03:19L HLA-DQA1*05:01-B1*02:01L HLA-DPA1*01:03-B1*04:01L HLA-DPA1*02:01-B1*13:01L HLA-DPA1*03:01-B1*105:01L HLA-DRB1*16:01L HLA-DQA1*01:03-B1*06:01L
  REGION 1..10: note = CONT. FROM ABOVE: HLA-DQA1*02:01-B1*03:03L HLA-DRB1*15:03L
PVYSFLPGVY

SEQ ID NO: 18008 - protein, 10 aa, Severe acute respiratory syndrome coronavirus 2
  REGION 1..10: note = Table B: HLA-DQA1*01:02-B1*06:02L HLA-DQA1*05:05-B1*03:19L
PGVYSVIYLY

SEQ ID NO: 18009 - protein, 10 aa, Severe acute respiratory syndrome coronavirus 2
  REGION 1..10: note = Table B: HLA-DQA1*01:02-B1*06:02L
SVIYLYLTFY

SEQ ID NO: 18010 - protein, 10 aa, Severe acute respiratory syndrome coronavirus 2
  REGION 1..10: note = Table B: HLA-DQA1*01:02-B1*06:02L HLA-DPA1*03:01-B1*04:02L HLA-DPA1*03:01-B1*105:01L HLA-DPA1*01:02-B1*04:01L HLA-DQA1*01:03-B1*06:01L HLA-DRB1*15:03L
FLAHIQWMVM

SEQ ID NO: 18011 - protein, 13 aa, Severe acute respiratory syndrome coronavirus 2
  REGION 1..13: note = Table B: HLA-DQA1*01:02-B1*06:02L HLA-DPA1*01:02-B1*04:01L
LAHIQWMVMFTPL

SEQ ID NO: 18012 - protein, 14 aa, Severe acute respiratory syndrome coronavirus 2
  REGION 1..14: note = Table B: HLA-DQA1*01:02-B1*06:02L HLA-DPA1*01:03-B1*04:02L HLA-DRB1*12:01L HLA-DPA1*01:02-B1*04:01L
AHIQWMVMFTPLVP

SEQ ID NO: 18013 - protein, 10 aa, Severe acute respiratory syndrome coronavirus 2
  REGION 1..10: note = Table B: HLA-DQA1*01:02-B1*06:02L
MVMFTPLVPF

SEQ ID NO: 18014 - protein, 10 aa, Severe acute respiratory syndrome coronavirus 2
  REGION 1..10: note = Table B: HLA-DQA1*01:02-B1*06:02L HLA-DQA1*05:05-B1*03:116L HLA-DPA1*02:01-B1*13:01L HLA-DPA1*03:01-B1*105:01L HLA-DRB1*15:03L
TPLVPFWITI

SEQ ID NO: 18015 - protein, 12 aa, Severe acute respiratory syndrome coronavirus 2
  REGION 1..12: note = Table B: HLA-DQA1*01:02-B1*06:02L HLA-DPA1*03:01-B1*105:01L HLA-DQA1*01:03-B1*06:01L
ITIAYIICISTK

SEQ ID NO: 18016 - protein, 10 aa, Severe acute respiratory syndrome coronavirus 2
  REGION 1..10: note = Table B: HLA-DQA1*01:02-B1*06:02L HLA-DRB1*12:01L HLA-DQA1*01:03-B1*06:01L HLA-DRB1*15:03L
YIICISTKHF

SEQ ID NO: 18017 - protein, 10 aa, Severe acute respiratory syndrome coronavirus 2
  REGION 1..10: note = Table B: HLA-DQA1*01:02-B1*06:02L HLA-DPA1*01:03-B1*03:01L HLA-DRB1*03:01L HLA-DRB1*14:01L HLA-DRB1*14:02L HLA-DQA1*05:05-B1*03:19L HLA-DQA1*05:01-B1*02:01L HLA-DRB1*12:01L HLA-DPA1*03:01-B1*105:01L HLA-DRB1*16:01L
  REGION 1..10: note = CONT. FROM ABOVE: HLA-DQA1*01:03-B1*06:01L HLA-DQA1*02:01-B1*03: 03L HLA-DRB1*15:03L
IICISTKHFY

SEQ ID NO: 18018 - protein, 10 aa, Severe acute respiratory syndrome coronavirus 2
  REGION 1..10: note = Table B: HLA-DQA1*01:02-B1*06:02L HLA-DQA1*05:05-B1*03:19L HLA-DQA1*05:01-B1*02:01L HLA-DPA1*02:01-B1*13:01L HLA-DQA1*01:03-B1*06:01L HLA-DQA1*02:01-B1*03:03L
KHFYWFFSNY

SEQ ID NO: 18019 - protein, 13 aa, Severe acute respiratory syndrome coronavirus 2
  REGION 1..13: note = Table B: HLA-DQA1*01:02-B1*06:02L HLA-DRB1*14:01L HLA-DPA1*03:01-B1*105:01L
YWFFSNYLKRRVV

SEQ ID NO: 18020 - protein, 14 aa, Severe acute respiratory syndrome coronavirus 2
  REGION 1..14: note = Table B: HLA-DQA1*01:02-B1*06:02L
WFFSNYLKRRVVFN

SEQ ID NO: 18021 - protein, 12 aa, Severe acute respiratory syndrome coronavirus 2
  REGION 1..12: note = Table B: HLA-DQA1*01:02-B1*06:02L HLA-DQA1*05:01-B1*02:01L HLA-DPA1*01:03-B1*04:02L HLA-DRB1*16:01L
NGVSFSTFEEAA

SEQ ID NO: 18022 - protein, 10 aa, Severe acute respiratory syndrome coronavirus 2
  REGION 1..10: note = Table B: HLA-DQA1*01:02-B1*06:02L HLA-DPA1*02:01-B1*13:01L HLA-DQA1*01:03-B1*06:01L HLA-DRB1*15:03L
TFEEAALCTF

SEQ ID NO: 18023 - protein, 12 aa, Severe acute respiratory syndrome coronavirus 2
  REGION 1..12: note = Table B: HLA-DQA1*01:02-B1*06:02L HLA-DQA1*01:03-B1*06:01L
EEAALCTFLLNK

SEQ ID NO: 18024 - protein, 10 aa, Severe acute respiratory syndrome coronavirus 2
  REGION 1..10: note = Table B: HLA-DQA1*01:02-B1*06:02L HLA-DPA1*03:01-B1*105:01L HLA-DPA1*01:02-B1*04:01L HLA-DQA1*01:03-B1*06:01L
ALCTFLLNKE

SEQ ID NO: 18025 - protein, 12 aa, Severe acute respiratory syndrome coronavirus 2
  REGION 1..12: note = Table B: HLA-DQA1*01:02-B1*06:02L HLA-DRB1*08:01L
FLLNKEMYLKLR

SEQ ID NO: 18026 - protein, 13 aa, Severe acute respiratory syndrome coronavirus 2
  REGION 1..13: note = Table B: HLA-DQA1*01:02-B1*06:02L HLA-DPA1*01:03-B1*04:02L
LLNKEMYLKLRSD

SEQ ID NO: 18027 - protein, 14 aa, Severe acute respiratory syndrome coronavirus 2
  REGION 1..14: note = Table B: HLA-DQA1*01:02-B1*06:02L
LNKEMYLKLRSDVL

SEQ ID NO: 18028 - protein, 11 aa, Severe acute respiratory syndrome coronavirus 2
  REGION 1..11: note = Table B: HLA-DQA1*01:02-B1*06:02L HLA-DPA1*03:01-B1*04:02L HLA-DPA1*01:03-B1*04:02L HLA-DQA1*01:03-B1*06:01L HLA-DQA1*02:01-B1*03:03L
LRSDVLLPLTQ

SEQ ID NO: 18029 - protein, 12 aa, Severe acute respiratory syndrome coronavirus 2
  REGION 1..12: note = Table B: HLA-DQA1*01:02-B1*06:02L HLA-DRB1*01:02L HLA-DRB1*08:04L HLA-DPA1*03:01-B1*04:02L HLA-DRB1*08:01L HLA-DQA1*01-B1*05L HLA-DPA1*01:03-B1*04:01L HLA-DRB1*12:01L HLA-DPA1*03:01-B1*105:01L HLA-DRB1*16:01L HLA-DRB1*04:08L
  REGION 1..12: note = CONT. FROM ABOVE: HLA-DRB1*15:03L
LPLTQYNRYLAL

SEQ ID NO: 18030 - protein, 14 aa, Severe acute respiratory syndrome coronavirus 2
  REGION 1..14: note = Table B: HLA-DQA1*01:02-B1*06:02L
ALYNKYKYFSGAMD

SEQ ID NO: 18031 - protein, 14 aa, Severe acute respiratory syndrome coronavirus 2
  REGION 1..14: note = Table B: HLA-DQA1*01:02-B1*06:02L HLA-DPA1*01:03-B1*03:01L HLA-DRB1*12:01L HLA-DPA1*02:01-B1*13:01L HLA-DPA1*03:01-B1*105:01L
DTTSYREAACCHLA

SEQ ID NO: 18032 - protein, 12 aa, Severe acute respiratory syndrome coronavirus 2
  REGION 1..12: note = Table B: HLA-DQA1*01:02-B1*06:02L
YREAACCHLAKA

SEQ ID NO: 18033 - protein, 10 aa, Severe acute respiratory syndrome coronavirus 2
  REGION 1..10: note = Table B: HLA-DQA1*01:02-B1*06:02L
AACCHLAKAL

SEQ ID NO: 18034 - protein, 14 aa, Severe acute respiratory syndrome coronavirus 2
  REGION 1..14: note = Table B: HLA-DQA1*01:02-B1*06:02L HLA-DRB1*01:02L
KALNDFSNSGSDVL

SEQ ID NO: 18035 - protein, 12 aa, Severe acute respiratory syndrome coronavirus 2
  REGION 1..12: note = Table B: HLA-DQA1*01:02-B1*06:02L HLA-DQA1*03:01-B1*03:02L HLA-DQA1*01:03-B1*06:01L HLA-DQA1*02:01-B1*03:03L
NSGSDVLYQPPQ

SEQ ID NO: 18036 - protein, 14 aa, Severe acute respiratory syndrome coronavirus 2
  REGION 1..14: note = Table B: HLA-DQA1*01:02-B1*06:02L
YQPPQTSITSAVLQ

SEQ ID NO: 18037 - protein, 14 aa, Severe acute respiratory syndrome coronavirus 2
  REGION 1..14: note = Table B: HLA-DQA1*01:02-B1*06:02L
VLQSGFRKMAFPSG

SEQ ID NO: 18038 - protein, 14 aa, Severe acute respiratory syndrome coronavirus 2
  REGION 1..14: note = Table B: HLA-DQA1*01:02-B1*06:02L
LQSGFRKMAFPSGK

SEQ ID NO: 18039 - protein, 12 aa, Severe acute respiratory syndrome coronavirus 2
  REGION 1..12: note = Table B: HLA-DQA1*01:02-B1*06:02L
MAFPSGKVEGCM

SEQ ID NO: 18040 - protein, 11 aa, Severe acute respiratory syndrome coronavirus 2
  REGION 1..11: note = Table B: HLA-DQA1*01:02-B1*06:02L
GKVEGCMVQVT

SEQ ID NO: 18041 - protein, 12 aa, Severe acute respiratory syndrome coronavirus 2
  REGION 1..12: note = Table B: HLA-DQA1*01:02-B1*06:02L
KVEGCMVQVTCG

SEQ ID NO: 18042 - protein, 12 aa, Severe acute respiratory syndrome coronavirus 2
  REGION 1..12: note = Table B: HLA-DQA1*01:02-B1*06:02L
VEGCMVQVTCGT

SEQ ID NO: 18043 - protein, 14 aa, Severe acute respiratory syndrome coronavirus 2
  REGION 1..14: note = Table B: HLA-DQA1*01:02-B1*06:02L
VQVTCGTTTLNGLW

SEQ ID NO: 18044 - protein, 12 aa, Severe acute respiratory syndrome coronavirus 2
  REGION 1..12: note = Table B: HLA-DQA1*01:02-B1*06:02L HLA-DRB1*12:01L HLA-DRB1*14:54L HLA-DPA1*01:02-B1*04:01L HLA-DRB1*16:01L HLA-DRB1*15:03L
LDDVVYCPRHVI

SEQ ID NO: 18045 - protein, 15 aa, Severe acute respiratory syndrome coronavirus 2
  REGION 1..15: note = Table B: HLA-DQA1*01:02-B1*06:02L
DVVYCPRHVICTSED

SEQ ID NO: 18046 - protein, 11 aa, Severe acute respiratory syndrome coronavirus 2
  REGION 1..11: note = Table B: HLA-DQA1*01:02-B1*06:02L HLA-DPA1*03:01-B1*04:02L HLA-DRB1*12:01L HLA-DPA1*02:01-B1*13:01L HLA-DPA1*01:02-B1*04:01L HLA-DRB1*16:01L
DMLNPNYEDLL

SEQ ID NO: 18047 - protein, 12 aa, Severe acute respiratory syndrome coronavirus 2
  REGION 1..12: note = Table B: HLA-DQA1*01:02-B1*06:02L HLA-DQA1*01:03-B1*06:01L
PNYEDLLIRKSN

SEQ ID NO: 18048 - protein, 10 aa, Severe acute respiratory syndrome coronavirus 2
  REGION 1..10: note = Table B: HLA-DQA1*01:02-B1*06:02L HLA-DQA1*02:01-B1*03:03L
LLIRKSNHNF

SEQ ID NO: 18049 - protein, 12 aa, Severe acute respiratory syndrome coronavirus 2
  REGION 1..12: note = Table B: HLA-DQA1*01:02-B1*06:02L HLA-DQA1*03:01-B1*03:02L HLA-DQA1*01:03-B1*06:01L HLA-DQA1*02:01-B1*03:03L
KSNHNFLVQAGN

SEQ ID NO: 18050 - protein, 12 aa, Severe acute respiratory syndrome coronavirus 2
  REGION 1..12: note = Table B: HLA-DQA1*01:02-B1*06:02L HLA-DRB1*14:01L
GNVQLRVIGHSM

SEQ ID NO: 18051 - protein, 12 aa, Severe acute respiratory syndrome coronavirus 2
  REGION 1..12: note = Table B: HLA-DQA1*01:02-B1*06:02L HLA-DRB1*01:02L HLA-DPA1*03:01-B1*105:01L HLA-DQA1*01:03-B1*06:01L HLA-DQA1*02:01-B1*03:03L
VIGHSMQNCVLK

SEQ ID NO: 18052 - protein, 12 aa, Severe acute respiratory syndrome coronavirus 2
  REGION 1..12: note = Table B: HLA-DQA1*01:02-B1*06:02L
SMQNCVLKLKVD

SEQ ID NO: 18053 - protein, 12 aa, Severe acute respiratory syndrome coronavirus 2
  REGION 1..12: note = Table B: HLA-DQA1*01:02-B1*06:02L
MQNCVLKLKVDT

SEQ ID NO: 18054 - protein, 12 aa, Severe acute respiratory syndrome coronavirus 2
  REGION 1..12: note = Table B: HLA-DQA1*01:02-B1*06:02L HLA-DPA1*01:03-B1*03:01L HLA-DRB1*03:01L HLA-DRB3*01:01L HLA-DRB1*15:03L
LKVDTANPKTPK

SEQ ID NO: 18055 - protein, 10 aa, Severe acute respiratory syndrome coronavirus 2
  REGION 1..10: note = Table B: HLA-DQA1*01:02-B1*06:02L HLA-DQA1*02:01-B1*03:03L
ANPKTPKYKF

SEQ ID NO: 18056 - protein, 10 aa, Severe acute respiratory syndrome coronavirus 2
  REGION 1..10: note = Table B: HLA-DQA1*01:02-B1*06:02L HLA-DQA1*01:03-B1*06:01L
YKFVRIQPGQ

SEQ ID NO: 18057 - protein, 16 aa, Severe acute respiratory syndrome coronavirus 2
  REGION 1..16: note = Table B: HLA-DQA1*01:02-B1*06:02L HLA-DPA1*03:01-B1*105:01L HLA-DPA1*01:03-B1*104:01L HLA-DQA1*05:05-B1*03:01L
QPGQTFSVLACYNGSP

SEQ ID NO: 18058 - protein, 14 aa, Severe acute respiratory syndrome coronavirus 2
  REGION 1..14: note = Table B: HLA-DQA1*01:02-B1*06:02L HLA-DRB1*01:02L HLA-DPA1*03:01-B1*105:01L HLA-DQA1*05:05-B1*03:01L HLA-DRB1*10:01L HLA-DRB1*04:08L
QTFSVLACYNGSPS

SEQ ID NO: 18059 - protein, 14 aa, Severe acute respiratory syndrome coronavirus 2
  REGION 1..14: note = Table B: HLA-DQA1*01:02-B1*06:02L
TFSVLACYNGSPSG

SEQ ID NO: 18060 - protein, 11 aa, Severe acute respiratory syndrome coronavirus 2
  REGION 1..11: note = Table B: HLA-DQA1*01:02-B1*06:02L HLA-DQA1*05:05-B1*03:19L HLA-DQA1*05:01-B1*02:01L
ACYNGSPSGVY

SEQ ID NO: 18061 - protein, 14 aa, Severe acute respiratory syndrome coronavirus 2
  REGION 1..14: note = Table B: HLA-DQA1*01:02-B1*06:02L
NGSPSGVYQCAMRP

SEQ ID NO: 18062 - protein, 10 aa, Severe acute respiratory syndrome coronavirus 2
  REGION 1..10: note = Table B: HLA-DQA1*01:02-B1*06:02L
GVYQCAMRPN

SEQ ID NO: 18063 - protein, 10 aa, Severe acute respiratory syndrome coronavirus 2
  REGION 1..10: note = Table B: HLA-DQA1*01:02-B1*06:02L HLA-DQA1*01:03-B1*06:01L
VYQCAMRPNF

SEQ ID NO: 18064 - protein, 10 aa, Severe acute respiratory syndrome coronavirus 2
  REGION 1..10: note = Table B: HLA-DQA1*01:02-B1*06:02L HLA-DQA1*01:03-B1*06:01L
YQCAMRPNFT

SEQ ID NO: 18065 - protein, 12 aa, Severe acute respiratory syndrome coronavirus 2
  REGION 1..12: note = Table B: HLA-DQA1*01:02-B1*06:02L HLA-DQA1*01:03-B1*06:01L
FTIKGSFLNGSC

SEQ ID NO: 18066 - protein, 11 aa, Severe acute respiratory syndrome coronavirus 2
  REGION 1..11: note = Table B: HLA-DQA1*01:02-B1*06:02L HLA-DQA1*01:03-B1*06:01L
IKGSFLNGSCG

SEQ ID NO: 18067 - protein, 12 aa, Severe acute respiratory syndrome coronavirus 2
  REGION 1..12: note = Table B: HLA-DQA1*01:02-B1*06:02L HLA-DQA1*05:05-B1*03:01L
FLNGSCGSVGFN

SEQ ID NO: 18068 - protein, 13 aa, Severe acute respiratory syndrome coronavirus 2
  REGION 1..13: note = Table B: HLA-DQA1*01:02-B1*06:02L
LNGSCGSVGFNID

SEQ ID NO: 18069 - protein, 14 aa, Severe acute respiratory syndrome coronavirus 2
  REGION 1..14: note = Table B: HLA-DQA1*01:02-B1*06:02L
NGSCGSVGFNIDYD

SEQ ID NO: 18070 - protein, 10 aa, Severe acute respiratory syndrome coronavirus 2
  REGION 1..10: note = Table B: HLA-DQA1*01:02-B1*06:02L HLA-DQA1*05:05-B1*03:19L HLA-DPA1*02:01-B1*13:01L HLA-DPA1*03:01-B1*105:01L HLA-DQA1*01:03-B1*06:01L HLA-DRB1*15:03L
FNIDYDCVSF

SEQ ID NO: 18071 - protein, 12 aa, Severe acute respiratory syndrome coronavirus 2
  REGION 1..12: note = Table B: HLA-DQA1*01:02-B1*06:02L HLA-DPA1*01:03-B1*04:01L HLA-DPA1*01:03-B1*04:02L HLA-DRB1*16:01L HLA-DRB1*04:08L
IDYDCVSFCYMH

SEQ ID NO: 18072 - protein, 10 aa, Severe acute respiratory syndrome coronavirus 2
  REGION 1..10: note = Table B: HLA-DQA1*01:02-B1*06:02L HLA-DQA1*01:03-B1*06:01L
VSFCYMHHME

SEQ ID NO: 18073 - protein, 12 aa, Severe acute respiratory syndrome coronavirus 2
  REGION 1..12: note = Table B: HLA-DQA1*01:02-B1*06:02L HLA-DQA1*05:05-B1*03:19L
MELPTGVHAGTD

SEQ ID NO: 18074 - protein, 10 aa, Severe acute respiratory syndrome coronavirus 2
  REGION 1..10: note = Table B: HLA-DQA1*01:02-B1*06:02L HLA-DPA1*03:01-B1*105:01L HLA-DQA1*01:03-B1*06:01L HLA-DQA1*02:01-B1*03:03L
HAGTDLEGNF

SEQ ID NO: 18075 - protein, 13 aa, Severe acute respiratory syndrome coronavirus 2
  REGION 1..13: note = Table B: HLA-DQA1*01:02-B1*06:02L HLA-DPA1*03:01-B1*105:01L HLA-DQA1*03:01-B1*03:02L
TDLEGNFYGPFVD

SEQ ID NO: 18076 - protein, 12 aa, Severe acute respiratory syndrome coronavirus 2
  REGION 1..12: note = Table B: HLA-DQA1*01:02-B1*06:02L HLA-DQA1*01:03-B1*06:01L
LEGNFYGPFVDR

SEQ ID NO: 18077 - protein, 12 aa, Severe acute respiratory syndrome coronavirus 2
  REGION 1..12: note = Table B: HLA-DQA1*01:02-B1*06:02L HLA-DQA1*05:05-B1*03:19L HLA-DQA1*05:05-B1*03:01L HLA-DQA1*01:03-B1*06:01L
DRQTAQAAGTDT

SEQ ID NO: 18078 - protein, 14 aa, Severe acute respiratory syndrome coronavirus 2
  REGION 1..14: note = Table B: HLA-DQA1*01:02-B1*06:02L
AAGTDTTITVNVLA

SEQ ID NO: 18079 - protein, 10 aa, Severe acute respiratory syndrome coronavirus 2
  REGION 1..10: note = Table B: HLA-DQA1*01:02-B1*06:02L HLA-DPA1*01:03-B1*03:01L HLA-DQA1*05:05-B1*03:19L HLA-DQA1*05:01-B1*02:01L HLA-DRB4*01:01L HLA-DPA1*01:03-B1*04:01L HLA-DPA1*01:03-B1*104:01L
ITVNVLAWLY

SEQ ID NO: 18080 - protein, 13 aa, Severe acute respiratory syndrome coronavirus 2
  REGION 1..13: note = Table B: HLA-DQA1*01:02-B1*06:02L HLA-DRB1*01:02L HLA-DPA1*01:03-B1*03:01L HLA-DPA1*03:01-B1*04:02L HLA-DRB1*12:01L HLA-DPA1*03:01-B1*105:01L HLA-DRB1*16:01L
VNVLAWLYAAVIN

SEQ ID NO: 18081 - protein, 13 aa, Severe acute respiratory syndrome coronavirus 2
  REGION 1..13: note = Table B: HLA-DQA1*01:02-B1*06:02L
VINGDRWFLNRFT

SEQ ID NO: 18082 - protein, 11 aa, Severe acute respiratory syndrome coronavirus 2
  REGION 1..11: note = Table B: HLA-DQA1*01:02-B1*06:02L HLA-DQA1*05:01-B1*02:01L
DFNLVAMKYNY

SEQ ID NO: 18083 - protein, 12 aa, Severe acute respiratory syndrome coronavirus 2
  REGION 1..12: note = Table B: HLA-DQA1*01:02-B1*06:02L HLA-DPA1*03:01-B1*04:02L HLA-DRB1*12:01L HLA-DPA1*03:01-B1*105:01L HLA-DPA1*01:02-B1*04:01L HLA-DRB1*15:03L
FNLVAMKYNYEP

SEQ ID NO: 18084 - protein, 12 aa, Severe acute respiratory syndrome coronavirus 2
  REGION 1..12: note = Table B: HLA-DQA1*01:02-B1*06:02L HLA-DPA1*03:01-B1*105:01L
NLVAMKYNYEPL

SEQ ID NO: 18085 - protein, 13 aa, Severe acute respiratory syndrome coronavirus 2
  REGION 1..13: note = Table B: HLA-DQA1*01:02-B1*06:02L HLA-DPA1*03:01-B1*04:02L HLA-DQA1*05:01-B1*02:01L HLA-DPA1*02:01-B1*13:01L HLA-DPA1*03:01-B1*105:01L HLA-DPA1*01:02-B1*04:01L HLA-DRB1*16:01L HLA-DRB1*15:03L
VAMKYNYEPLTQD

SEQ ID NO: 18086 - protein, 12 aa, Severe acute respiratory syndrome coronavirus 2
  REGION 1..12: note = Table B: HLA-DQA1*01:02-B1*06:02L HLA-DRB1*01:02L HLA-DRB1*08:04L HLA-DPA1*03:01-B1*04:02L HLA-DRB1*12:01L HLA-DPA1*02:01-B1*13:01L HLA-DRB1*08:03L HLA-DRB1*15:03L
MKYNYEPLTQDH

SEQ ID NO: 18087 - protein, 12 aa, Severe acute respiratory syndrome coronavirus 2
  REGION 1..12: note = Table B: HLA-DQA1*01:02-B1*06:02L
LDMCASLKELLQ

SEQ ID NO: 18088 - protein, 12 aa, Severe acute respiratory syndrome coronavirus 2
  REGION 1..12: note = Table B: HLA-DQA1*01:02-B1*06:02L
DMCASLKELLQN

SEQ ID NO: 18089 - protein, 12 aa, Severe acute respiratory syndrome coronavirus 2
  REGION 1..12: note = Table B: HLA-DQA1*01:02-B1*06:02L HLA-DQA1*01:03-B1*06:01L
LQNGMNGRTILG

SEQ ID NO: 18090 - protein, 12 aa, Severe acute respiratory syndrome coronavirus 2
  REGION 1..12: note = Table B: HLA-DQA1*01:02-B1*06:02L HLA-DPA1*03:01-B1*105:01L HLA-DQA1*05:05-B1*03:01L HLA-DQA1*01:03-B1*06:01L
GMNGRTILGSAL

SEQ ID NO: 18091 - protein, 14 aa, Severe acute respiratory syndrome coronavirus 2
  REGION 1..14: note = Table B: HLA-DQA1*01:02-B1*06:02L
MNGRTILGSALLED

SEQ ID NO: 18092 - protein, 11 aa, Severe acute respiratory syndrome coronavirus 2
  REGION 1..11: note = Table B: HLA-DQA1*01:02-B1*06:02L HLA-DQA1*05:01-B1*02:01L HLA-DPA1*03:01-B1*105:01L
ILGSALLEDEF

SEQ ID NO: 18093 - protein, 12 aa, Severe acute respiratory syndrome coronavirus 2
  REGION 1..12: note = Table B: HLA-DQA1*01:02-B1*06:02L
PFDVVRQCSGVT

SEQ ID NO: 18094 - protein, 12 aa, Severe acute respiratory syndrome coronavirus 2
  REGION 1..12: note = Table B: HLA-DQA1*01:02-B1*06:02L HLA-DRB1*01:02L HLA-DRB1*12:01L HLA-DRB1*16:01L HLA-DRB1*15:03L
DVVRQCSGVTFQ

SEQ ID NO: 18095 - protein, 13 aa, Severe acute respiratory syndrome coronavirus 2
  REGION 1..13: note = Table B: HLA-DQA1*01:02-B1*06:02L HLA-DRB1*01:02L HLA-DQA1*01:03-B1*06:01L HLA-DRB1*15:03L
VVRQCSGVTFQSA

SEQ ID NO: 18096 - protein, 12 aa, Severe acute respiratory syndrome coronavirus 2
  REGION 1..12: note = Table B: HLA-DQA1*01:02-B1*06:02L
QCSGVTFQSAVK

SEQ ID NO: 18097 - protein, 14 aa, Severe acute respiratory syndrome coronavirus 2
  REGION 1..14: note = Table B: HLA-DQA1*01:02-B1*06:02L HLA-DRB1*11:04L HLA-DRB1*11:01L HLA-DRB3*01:01L
FQSAVKRTIKGTHH

SEQ ID NO: 18098 - protein, 15 aa, Severe acute respiratory syndrome coronavirus 2
  REGION 1..15: note = Table B: HLA-DQA1*01:02-B1*06:02L
IKGTHHWLLLTILTS

SEQ ID NO: 18099 - protein, 12 aa, Severe acute respiratory syndrome coronavirus 2
  REGION 1..12: note = Table B: HLA-DQA1*01:02-B1*06:02L HLA-DPA1*03:01-B1*105:01L
LTSLLVLVQSTQ

SEQ ID NO: 18100 - protein, 10 aa, Severe acute respiratory syndrome coronavirus 2
  REGION 1..10: note = Table B: HLA-DQA1*01:02-B1*06:02L HLA-DQA1*05:05-B1*03:19L HLA-DPA1*03:01-B1*105:01L HLA-DRB1*15:03L
LLVLVQSTQW

SEQ ID NO: 18101 - protein, 10 aa, Severe acute respiratory syndrome coronavirus 2
  REGION 1..10: note = Table B: HLA-DQA1*01:02-B1*06:02L HLA-DPA1*03:01-B1*105:01L HLA-DQA1*01:03-B1*06:01L HLA-DQA1*02:01-B1*03:03L HLA-DRB1*15:03L
LVQSTQWSLF

SEQ ID NO: 18102 - protein, 10 aa, Severe acute respiratory syndrome coronavirus 2
  REGION 1..10: note = Table B: HLA-DQA1*01:02-B1*06:02L HLA-DQA1*05:05-B1*03:19L HLA-DPA1*02:01-B1*13:01L HLA-DPA1*03:01-B1*105:01L HLA-DQA1*01:03-B1*06:01L HLA-DRB1*15:03L
VQSTQWSLFF

SEQ ID NO: 18103 - protein, 11 aa, Severe acute respiratory syndrome coronavirus 2
  REGION 1..11: note = Table B: HLA-DQA1*01:02-B1*06:02L HLA-DQA1*05:01-B1*02:01L HLA-DPA1*03:01-B1*105:01L
YENAFLPFAMG

SEQ ID NO: 18104 - protein, 10 aa, Severe acute respiratory syndrome coronavirus 2
  REGION 1..10: note = Table B: HLA-DQA1*01:02-B1*06:02L HLA-DQA1*05:05-B1*03:19L HLA-DPA1*03:01-B1*105:01L HLA-DQA1*01:03-B1*06:01L HLA-DRB1*15:03L
AMGIIAMSAF

SEQ ID NO: 18105 - protein, 12 aa, Severe acute respiratory syndrome coronavirus 2
  REGION 1..12: note = Table B: HLA-DQA1*01:02-B1*06:02L HLA-DPA1*03:01-B1*105:01L HLA-DQA1*01:03-B1*06:01L
IAMSAFAMMFVK

SEQ ID NO: 18106 - protein, 12 aa, Severe acute respiratory syndrome coronavirus 2
  REGION 1..12: note = Table B: HLA-DQA1*01:02-B1*06:02L HLA-DRB1*01:02L
MSAFAMMFVKHK

SEQ ID NO: 18107 - protein, 10 aa, Severe acute respiratory syndrome coronavirus 2
  REGION 1..10: note = Table B: HLA-DQA1*01:02-B1*06:02L HLA-DQA1*01:03-B1*06:01L HLA-DQA1*02:01-B1*03:03L
MMFVKHKHAF

SEQ ID NO: 18108 - protein, 15 aa, Severe acute respiratory syndrome coronavirus 2
  REGION 1..15: note = Table B: HLA-DQA1*01:02-B1*06:02L HLA-DPA1*01:03-B1*03:01L HLA-DPA1*03:01-B1*04:02L HLA-DRB1*12:01L HLA-DPA1*02:01-B1*13:01L HLA-DPA1*03:01-B1*105:01L HLA-DPA1*01:03-B1*104:01L HLA-DRB1*15:03L
VKHKHAFLCLFLLPS

SEQ ID NO: 18109 - protein, 14 aa, Severe acute respiratory syndrome coronavirus 2
  REGION 1..14: note = Table B: HLA-DQA1*01:02-B1*06:02L HLA-DPA1*01:03-B1*04:02L HLA-DRB1*04:08L
KHAFLCLFLLPSLA

SEQ ID NO: 18110 - protein, 14 aa, Severe acute respiratory syndrome coronavirus 2
  REGION 1..14: note = Table B: HLA-DQA1*01:02-B1*06:02L HLA-DPA1*01:03-B1*04:02L
HAFLCLFLLPSLAT

SEQ ID NO: 18111 - protein, 10 aa, Severe acute respiratory syndrome coronavirus 2
  REGION 1..10: note = Table B: HLA-DQA1*01:02-B1*06:02L HLA-DPA1*03:01-B1*105:01L
LPSLATVAYF

SEQ ID NO: 18112 - protein, 13 aa, Severe acute respiratory syndrome coronavirus 2
  REGION 1..13: note = Table B: HLA-DQA1*01:02-B1*06:02L
TVAYFNMVYMPAS

SEQ ID NO: 18113 - protein, 10 aa, Severe acute respiratory syndrome coronavirus 2
  REGION 1..10: note = Table B: HLA-DQA1*01:02-B1*06:02L HLA-DQA1*05:05-B1*03:19L
FNMVYMPASW

SEQ ID NO: 18114 - protein, 10 aa, Severe acute respiratory syndrome coronavirus 2
  REGION 1..10: note = Table B: HLA-DQA1*01:02-B1*06:02L
ASWVMRIMTW

SEQ ID NO: 18115 - protein, 12 aa, Severe acute respiratory syndrome coronavirus 2
  REGION 1..12: note = Table B: HLA-DQA1*01:02-B1*06:02L
VDTSLSGFKLKD

SEQ ID NO: 18116 - protein, 13 aa, Severe acute respiratory syndrome coronavirus 2
  REGION 1..13: note = Table B: HLA-DQA1*01:02-B1*06:02L
TSLSGFKLKDCVM

SEQ ID NO: 18117 - protein, 11 aa, Severe acute respiratory syndrome coronavirus 2
  REGION 1..11: note = Table B: HLA-DQA1*01:02-B1*06:02L
KLKDCVMYASA

SEQ ID NO: 18118 - protein, 12 aa, Severe acute respiratory syndrome coronavirus 2
  REGION 1..12: note = Table B: HLA-DQA1*01:02-B1*06:02L
LKDCVMYASAVV

SEQ ID NO: 18119 - protein, 14 aa, Severe acute respiratory syndrome coronavirus 2
  REGION 1..14: note = Table B: HLA-DQA1*01:02-B1*06:02L HLA-DPA1*03:01-B1*105:01L
ASAVVLLILMTART

SEQ ID NO: 18120 - protein, 10 aa, Severe acute respiratory syndrome coronavirus 2
  REGION 1..10: note = Table B: HLA-DQA1*01:02-B1*06:02L HLA-DQA1*05:05-B1*03:19L HLA-DQA1*05:01-B1*02:01L HLA-DRB1*12:01L HLA-DRB1*15:03L
LILMTARTVY

SEQ ID NO: 18121 - protein, 14 aa, Severe acute respiratory syndrome coronavirus 2
  REGION 1..14: note = Table B: HLA-DQA1*01:02-B1*06:02L
DGARRVWTLMNVLT

SEQ ID NO: 18122 - protein, 11 aa, Severe acute respiratory syndrome coronavirus 2
  REGION 1..11: note = Table B: HLA-DQA1*01:02-B1*06:02L HLA-DPA1*03:01-B1*04:02L HLA-DRB1*12:01L HLA-DPA1*03:01-B1*105:01L HLA-DRB1*15:03L
RVWTLMNVLTL

SEQ ID NO: 18123 - protein, 10 aa, Severe acute respiratory syndrome coronavirus 2
  REGION 1..10: note = Table B: HLA-DQA1*01:02-B1*06:02L HLA-DQA1*05:05-B1*03:19L HLA-DQA1*05:01-B1*02:01L
VLTLVYKVYY

SEQ ID NO: 18124 - protein, 14 aa, Severe acute respiratory syndrome coronavirus 2
  REGION 1..14: note = Table B: HLA-DQA1*01:02-B1*06:02L HLA-DPA1*03:01-B1*105:01L
DQAISMWALIISVT

SEQ ID NO: 18125 - protein, 10 aa, Severe acute respiratory syndrome coronavirus 2
  REGION 1..10: note = Table B: HLA-DQA1*01:02-B1*06:02L HLA-DQA1*05:05-B1*03:19L HLA-DPA1*02:01-B1*13:01L HLA-DPA1*03:01-B1*105:01L HLA-DQA1*01:03-B1*06:01L HLA-DQA1*02:01-B1*03:03L HLA-DRB1*15:03L
YSGVVTTVMF

SEQ ID NO: 18126 - protein, 10 aa, Severe acute respiratory syndrome coronavirus 2
  REGION 1..10: note = Table B: HLA-DQA1*01:02-B1*06:02L HLA-DPA1*03:01-B1*105:01L HLA-DQA1*01:03-B1*06:01L HLA-DQA1*02:01-B1*03:03L
VTTVMFLARG

SEQ ID NO: 18127 - protein, 12 aa, Severe acute respiratory syndrome coronavirus 2
  REGION 1..12: note = Table B: HLA-DQA1*01:02-B1*06:02L
FLARGIVFMCVE

SEQ ID NO: 18128 - protein, 12 aa, Severe acute respiratory syndrome coronavirus 2
  REGION 1..12: note = Table B: HLA-DQA1*01:02-B1*06:02L
LARGIVFMCVEY

SEQ ID NO: 18129 - protein, 14 aa, Severe acute respiratory syndrome coronavirus 2
  REGION 1..14: note = Table B: HLA-DQA1*01:02-B1*06:02L HLA-DRB1*15:03L
ARGIVFMCVEYCPI

SEQ ID NO: 18130 - protein, 13 aa, Severe acute respiratory syndrome coronavirus 2
  REGION 1..13: note = Table B: HLA-DQA1*01:02-B1*06:02L HLA-DPA1*03:01-B1*105:01L
VEYCPIFFITGNT

SEQ ID NO: 18131 - protein, 11 aa, Severe acute respiratory syndrome coronavirus 2
  REGION 1..11: note = Table B: HLA-DQA1*01:02-B1*06:02L HLA-DPA1*03:01-B1*105:01L HLA-DQA1*01:03-B1*06:01L
FITGNTLQCIM

SEQ ID NO: 18132 - protein, 10 aa, Severe acute respiratory syndrome coronavirus 2
  REGION 1..10: note = Table B: HLA-DQA1*01:02-B1*06:02L HLA-DQA1*05:05-B1*03:19L
NTLQCIMLVY

SEQ ID NO: 18133 - protein, 10 aa, Severe acute respiratory syndrome coronavirus 2
  REGION 1..10: note = Table B: HLA-DQA1*01:02-B1*06:02L HLA-DQA1*05:05-B1*03:19L
FGLFCLLNRY

SEQ ID NO: 18134 - protein, 10 aa, Severe acute respiratory syndrome coronavirus 2
  REGION 1..10: note = Table B: HLA-DQA1*01:02-B1*06:02L HLA-DQA1*05:05-B1*03:19L HLA-DQA1*05:01-B1*02:01L
FRLTLGVYDY

SEQ ID NO: 18135 - protein, 14 aa, Severe acute respiratory syndrome coronavirus 2
  REGION 1..14: note = Table B: HLA-DQA1*01:02-B1*06:02L
RLTLGVYDYLVSTQ

SEQ ID NO: 18136 - protein, 12 aa, Severe acute respiratory syndrome coronavirus 2
  REGION 1..12: note = Table B: HLA-DQA1*01:02-B1*06:02L HLA-DPA1*03:01-B1*105:01L HLA-DQA1*02:01-B1*03:03L
VSTQEFRYMNSQ

SEQ ID NO: 18137 - protein, 12 aa, Severe acute respiratory syndrome coronavirus 2
  REGION 1..12: note = Table B: HLA-DQA1*01:02-B1*06:02L HLA-DQA1*05:05-B1*03:01L HLA-DQA1*01:03-B1*06:01L HLA-DQA1*02:01-B1*03:03L
SQGLLPPKNSID

SEQ ID NO: 18138 - protein, 12 aa, Severe acute respiratory syndrome coronavirus 2
  REGION 1..12: note = Table B: HLA-DQA1*01:02-B1*06:02L HLA-DRB1*11:04L HLA-DRB1*08:01L HLA-DRB1*11:01L
AFKLNIKLLGVG

SEQ ID NO: 18139 - protein, 12 aa, Severe acute respiratory syndrome coronavirus 2
  REGION 1..12: note = Table B: HLA-DQA1*01:02-B1*06:02L HLA-DRB1*11:04L HLA-DRB1*11:01L HLA-DRB1*04:08L
FKLNIKLLGVGG

SEQ ID NO: 18140 - protein, 12 aa, Severe acute respiratory syndrome coronavirus 2
  REGION 1..12: note = Table B: HLA-DQA1*01:02-B1*06:02L HLA-DRB1*01:02L HLA-DRB1*12:01L HLA-DRB1*16:01L HLA-DQA1*02:01-B1*03:03L HLA-DRB1*15:03L
LNIKLLGVGGKP

SEQ ID NO: 18141 - protein, 13 aa, Severe acute respiratory syndrome coronavirus 2
  REGION 1..13: note = Table B: HLA-DQA1*01:02-B1*06:02L HLA-DRB1*01:01L HLA-DRB1*12:01L HLA-DRB1*16:01L HLA-DRB1*04:08L HLA-DQA1*02:01-B1*03:03L HLA-DRB1*15:03L
IKLLGVGGKPCIK

SEQ ID NO: 18142 - protein, 14 aa, Severe acute respiratory syndrome coronavirus 2
  REGION 1..14: note = Table B: HLA-DQA1*01:02-B1*06:02L HLA-DRB1*01:02L
KPCIKVATVQSKMS

SEQ ID NO: 18143 - protein, 14 aa, Severe acute respiratory syndrome coronavirus 2
  REGION 1..14: note = Table B: HLA-DQA1*01:02-B1*06:02L HLA-DPA1*02:01-B1*13:01L
VQSKMSDVKCTSVV

SEQ ID NO: 18144 - protein, 14 aa, Severe acute respiratory syndrome coronavirus 2
  REGION 1..14: note = Table B: HLA-DQA1*01:02-B1*06:02L
DVKCTSVVLLSVLQ

SEQ ID NO: 18145 - protein, 14 aa, Severe acute respiratory syndrome coronavirus 2
  REGION 1..14: note = Table B: HLA-DQA1*01:02-B1*06:02L
VKCTSVVLLSVLQQ

SEQ ID NO: 18146 - protein, 12 aa, Severe acute respiratory syndrome coronavirus 2
  REGION 1..12: note = Table B: HLA-DQA1*01:02-B1*06:02L HLA-DRB1*01:02L HLA-DRB1*14:01L HLA-DPA1*03:01-B1*105:01L
VLLSVLQQLRVE

SEQ ID NO: 18147 - protein, 10 aa, Severe acute respiratory syndrome coronavirus 2
  REGION 1..10: note = Table B: HLA-DQA1*01:02-B1*06:02L HLA-DQA1*01:03-B1*06:01L HLA-DQA1*02:01-B1*03:03L HLA-DRB1*15:03L
LRVESSSKLW

SEQ ID NO: 18148 - protein, 12 aa, Severe acute respiratory syndrome coronavirus 2
  REGION 1..12: note = Table B: HLA-DQA1*01:02-B1*06:02L
RVESSSKLWAQC

SEQ ID NO: 18149 - protein, 12 aa, Severe acute respiratory syndrome coronavirus 2
  REGION 1..12: note = Table B: HLA-DQA1*01:02-B1*06:02L HLA-DPA1*03:01-B1*105:01L
ESSSKLWAQCVQ

SEQ ID NO: 18150 - protein, 12 aa, Severe acute respiratory syndrome coronavirus 2
  REGION 1..12: note = Table B: HLA-DQA1*01:02-B1*06:02L
KLWAQCVQLHND

SEQ ID NO: 18151 - protein, 12 aa, Severe acute respiratory syndrome coronavirus 2
  REGION 1..12: note = Table B: HLA-DQA1*01:02-B1*06:02M HLA-DPA1*03:01-B1*105:01L HLA-DQA1*05:05-B1*03:01L HLA-DQA1*01:03-B1*06:01L
WAQCVQLHNDIL

SEQ ID NO: 18152 - protein, 12 aa, Severe acute respiratory syndrome coronavirus 2
  REGION 1..12: note = Table B: HLA-DQA1*01:02-B1*06:02L HLA-DQA1*03:01-B1*03:02L HLA-DQA1*01:03-B1*06:01L HLA-DQA1*02:01-B1*03:03L
LHNDILLAKDTT

SEQ ID NO: 18153 - protein, 12 aa, Severe acute respiratory syndrome coronavirus 2
  REGION 1..12: note = Table B: HLA-DQA1*01:02-B1*06:02L HLA-DPA1*01:03-B1*03:01L HLA-DPA1*03:01-B1*04:02L HLA-DRB1*14:02L HLA-DPA1*02:01-B1*13:01L HLA-DPA1*03:01-B1*105:01L HLA-DRB1*15:03L
LAKDTTEAFEKM

SEQ ID NO: 18154 - protein, 14 aa, Severe acute respiratory syndrome coronavirus 2
  REGION 1..14: note = Table B: HLA-DQA1*01:02-B1*06:02L HLA-DRB1*01:02L HLA-DPA1*03:01-B1*105:01L
EKMVSLLSVLLSMQ

SEQ ID NO: 18155 - protein, 14 aa, Severe acute respiratory syndrome coronavirus 2
  REGION 1..14: note = Table B: HLA-DQA1*01:02-B1*06:02L HLA-DRB1*01:02L HLA-DPA1*03:01-B1*105:01L
KMVSLLSVLLSMQG

SEQ ID NO: 18156 - protein, 12 aa, Severe acute respiratory syndrome coronavirus 2
  REGION 1..12: note = Table B: HLA-DQA1*01:02-B1*06:02L HLA-DQA1*01:03-B1*06:01L
QGAVDINKLCEE

SEQ ID NO: 18157 - protein, 12 aa, Severe acute respiratory syndrome coronavirus 2
  REGION 1..12: note = Table B: HLA-DQA1*01:02-B1*06:02L HLA-DPA1*03:01-B1*105:01L HLA-DQA1*01:03-B1*06:01L
GAVDINKLCEEM

SEQ ID NO: 18158 - protein, 12 aa, Severe acute respiratory syndrome coronavirus 2
  REGION 1..12: note = Table B: HLA-DQA1*01:02-B1*06:02L HLA-DRB1*12:01L HLA-DQA1*01:03-B1*06:01L HLA-DRB1*15:03L
DINKLCEEMLDN

SEQ ID NO: 18159 - protein, 13 aa, Severe acute respiratory syndrome coronavirus 2
  REGION 1..13: note = Table B: HLA-DQA1*01:02-B1*06:02L HLA-DRB1*01:02L HLA-DRB1*04:08L
NKLCEEMLDNRAT

SEQ ID NO: 18160 - protein, 12 aa, Severe acute respiratory syndrome coronavirus 2
  REGION 1..12: note = Table B: HLA-DQA1*01:02-B1*06:02L HLA-DPA1*03:01-B1*105:01L HLA-DQA1*05:05-B1*03:01L HLA-DQA1*01:03-B1*06:01L HLA-DQA1*02:01-B1*03:03L
MLDNRATLQAIA

SEQ ID NO: 18161 - protein, 11 aa, Severe acute respiratory syndrome coronavirus 2
  REGION 1..11: note = Table B: HLA-DQA1*01:02-B1*06:02L
IASEFSSLPSY

SEQ ID NO: 18162 - protein, 12 aa, Severe acute respiratory syndrome coronavirus 2
  REGION 1..12: note = Table B: HLA-DQA1*01:02-B1*06:02L HLA-DQA1*05:05-B1*03:19L HLA-DRB1*12:01L HLA-DQA1*01:03-B1*06:01L
YEQAVANGDSEV

SEQ ID NO: 18163 - protein, 13 aa, Severe acute respiratory syndrome coronavirus 2
  REGION 1..13: note = Table B: HLA-DQA1*01:02-B1*06:02L HLA-DQA1*05:05-B1*03:01L HLA-DRB1*16:01L
EQAVANGDSEVVL

SEQ ID NO: 18164 - protein, 12 aa, Severe acute respiratory syndrome coronavirus 2
  REGION 1..12: note = Table B: HLA-DQA1*01:02-B1*06:02L
NGDSEVVLKKLK

SEQ ID NO: 18165 - protein, 12 aa, Severe acute respiratory syndrome coronavirus 2
  REGION 1..12: note = Table B: HLA-DQA1*01:02-B1*06:02L HLA-DRB1*08:01L
DSEVVLKKLKKS

SEQ ID NO: 18166 - protein, 12 aa, Severe acute respiratory syndrome coronavirus 2
  REGION 1..12: note = Table B: HLA-DQA1*01:02-B1*06:02L HLA-DRB1*14:01L HLA-DRB1*08:01L HLA-DRB1*16:01L
EVVLKKLKKSLN

SEQ ID NO: 18167 - protein, 14 aa, Severe acute respiratory syndrome coronavirus 2
  REGION 1..14: note = Table B: HLA-DQA1*01:02-B1*06:02L HLA-DRB1*08:01L HLA-DRB3*01:01L
LKKLKKSLNVAKSE

SEQ ID NO: 18168 - protein, 12 aa, Severe acute respiratory syndrome coronavirus 2
  REGION 1..12: note = Table B: HLA-DQA1*01:02-B1*06:02L HLA-DRB1*12:01L HLA-DPA1*03:01-B1*105:01L HLA-DQA1*01:03-B1*06:01L HLA-DRB1*04:08L HLA-DQA1*02:01-B1*03:03L HLA-DRB1*15:03L
FDRDAAMQRKLE

SEQ ID NO: 18169 - protein, 12 aa, Severe acute respiratory syndrome coronavirus 2
  REGION 1..12: note = Table B: HLA-DQA1*01:02-B1*06:02L
DRDAAMQRKLEK

SEQ ID NO: 18170 - protein, 14 aa, Severe acute respiratory syndrome coronavirus 2
  REGION 1..14: note = Table B: HLA-DQA1*01:02-B1*06:02L HLA-DRB1*01:02L HLA-DRB1*14:01L
DAAMQRKLEKMADQ

SEQ ID NO: 18171 - protein, 14 aa, Severe acute respiratory syndrome coronavirus 2
  REGION 1..14: note = Table B: HLA-DQA1*01:02-B1*06:02L
AAMQRKLEKMADQA

SEQ ID NO: 18172 - protein, 12 aa, Severe acute respiratory syndrome coronavirus 2
  REGION 1..12: note = Table B: HLA-DQA1*01:02-B1*06:02L HLA-DQA1*02:01-B1*03:03L
ADQAMTQMYKQA

SEQ ID NO: 18173 - protein, 12 aa, Severe acute respiratory syndrome coronavirus 2
  REGION 1..12: note = Table B: HLA-DQA1*01:02-B1*06:02L HLA-DRB1*14:01L
QAMTQMYKQARS

SEQ ID NO: 18174 - protein, 14 aa, Severe acute respiratory syndrome coronavirus 2
  REGION 1..14: note = Table B: HLA-DQA1*01:02-B1*06:02L HLA-DRB1*08:01L
YKQARSEDKRAKVT

SEQ ID NO: 18175 - protein, 12 aa, Severe acute respiratory syndrome coronavirus 2
  REGION 1..12: note = Table B: HLA-DQA1*01:02-B1*06:02L
DKRAKVTSAMQT

SEQ ID NO: 18176 - protein, 10 aa, Severe acute respiratory syndrome coronavirus 2
  REGION 1..10: note = Table B: HLA-DQA1*01:02-B1*06:02L HLA-DPA1*03:01-B1*105:01L HLA-DQA1*01:03-B1*06:01L HLA-DQA1*02:01-B1*03:03L
VTSAMQTMLF

SEQ ID NO: 18177 - protein, 12 aa, Severe acute respiratory syndrome coronavirus 2
  REGION 1..12: note = Table B: HLA-DQA1*01:02-B1*06:02L
AMQTMLFTMLRK

SEQ ID NO: 18178 - protein, 13 aa, Severe acute respiratory syndrome coronavirus 2
  REGION 1..13: note = Table B: HLA-DQA1*01:02-B1*06:02L
MQTMLFTMLRKLD

SEQ ID NO: 18179 - protein, 10 aa, Severe acute respiratory syndrome coronavirus 2
  REGION 1..10: note = Table B: HLA-DQA1*01:02-B1*06:02L HLA-DRB1*08:01L HLA-DPA1*01:02-B1*04:01L HLA-DRB1*04:08L
LFTMLRKLDN

SEQ ID NO: 18180 - protein, 13 aa, Severe acute respiratory syndrome coronavirus 2
  REGION 1..13: note = Table B: HLA-DQA1*01:02-B1*06:02L HLA-DPA1*03:01-B1*105:01L
FTMLRKLDNDALN

SEQ ID NO: 18181 - protein, 13 aa, Severe acute respiratory syndrome coronavirus 2
  REGION 1..13: note = Table B: HLA-DQA1*01:02-B1*06:02L HLA-DQA1*01:03-B1*06:01L
IINNARDGCVPLN

SEQ ID NO: 18182 - protein, 15 aa, Severe acute respiratory syndrome coronavirus 2
  REGION 1..15: note = Table B: HLA-DQA1*01:02-B1*06:02L
INNARDGCVPLNIIP

SEQ ID NO: 18183 - protein, 13 aa, Severe acute respiratory syndrome coronavirus 2
  REGION 1..13: note = Table B: HLA-DQA1*01:02-B1*06:02L
ARDGCVPLNIIPL

SEQ ID NO: 18184 - protein, 14 aa, Severe acute respiratory syndrome coronavirus 2
  REGION 1..14: note = Table B: HLA-DQA1*01:02-B1*06:02L
RDGCVPLNIIPLTT

SEQ ID NO: 18185 - protein, 14 aa, Severe acute respiratory syndrome coronavirus 2
  REGION 1..14: note = Table B: HLA-DQA1*01:02-B1*06:02L
DGCVPLNIIPLTTA

SEQ ID NO: 18186 - protein, 12 aa, Severe acute respiratory syndrome coronavirus 2
  REGION 1..12: note = Table B: HLA-DQA1*01:02-B1*06:02L
PLNIIPLTTAAK

SEQ ID NO: 18187 - protein, 14 aa, Severe acute respiratory syndrome coronavirus 2
  REGION 1..14: note = Table B: HLA-DQA1*01:02-B1*06:02L HLA-DRB1*14:01L HLA-DQA1*05:05-B1*03:19L HLA-DPA1*03:01-B1*105:01L HLA-DQA1*05:05-B1*03:01L
IPLTTAAKLMVVIP

SEQ ID NO: 18188 - protein, 12 aa, Severe acute respiratory syndrome coronavirus 2
  REGION 1..12: note = Table B: HLA-DQA1*01:02-B1*06:02L HLA-DPA1*03:01-B1*105:01L HLA-DQA1*05:05-B1*03:01L HLA-DQA1*02:01-B1*03:03L
TAAKLMVVIPDY

SEQ ID NO: 18189 - protein, 13 aa, Severe acute respiratory syndrome coronavirus 2
  REGION 1..13: note = Table B: HLA-DQA1*01:02-B1*06:02L HLA-DRB1*08:04L HLA-DRB1*15:03L
YNTYKNTCDGTTF

SEQ ID NO: 18190 - protein, 10 aa, Severe acute respiratory syndrome coronavirus 2
  REGION 1..10: note = Table B: HLA-DQA1*01:02-B1*06:02L HLA-DRB1*08:77L HLA-DPA1*01:03-B1*03:01L HLA-DRB1*03:01L HLA-DRB1*14:02L HLA-DQA1*05:05-B1*03:19L HLA-DQA1*05:01-B1*02:01L HLA-DRB4*01:01L HLA-DPA1*01:03-B1*04:01L
  REGION 1..10: note = CONT. FROM ABOVE: HLA-DPA1*02:01-B1*13:01L HLA-DPA1*03:01-B1*105 :01L HLA-DPA1*01:03-B1*104:01L HLA-DQA1*02:01-B1*03:03L HLA-DRB1 *15:03L
NTCDGTTFTY

SEQ ID NO: 18191 - protein, 10 aa, Severe acute respiratory syndrome coronavirus 2
  REGION 1..10: note = Table B: HLA-DQA1*01:02-B1*06:02L
TTFTYASALW

SEQ ID NO: 18192 - protein, 11 aa, Severe acute respiratory syndrome coronavirus 2
  REGION 1..11: note = Table B: HLA-DQA1*01:02-B1*06:02L HLA-DPA1*03:01-B1*105:01L HLA-DQA1*01:03-B1*06:01L
FTYASALWEIQ

SEQ ID NO: 18193 - protein, 10 aa, Severe acute respiratory syndrome coronavirus 2
  REGION 1..10: note = Table B: HLA-DQA1*01:02-B1*06:02L HLA-DPA1*03:01-B1*04:02L HLA-DPA1*01:03-B1*04:02L HLA-DPA1*03:01-B1*105:01L HLA-DPA1*01:02-B1*04:01L HLA-DQA1*01:03-B1*06:01L
YASALWEIQQ

SEQ ID NO: 18194 - protein, 12 aa, Severe acute respiratory syndrome coronavirus 2
  REGION 1..12: note = Table B: HLA-DQA1*01:02-B1*06:02L HLA-DQA1*05:01-B1*02:01L HLA-DPA1*03:01-B1*105:01L HLA-DQA1*01:03-B1*06:01L HLA-DQA1*02:01-B1*03:03L
ASALWEIQQVVD

SEQ ID NO: 18195 - protein, 12 aa, Severe acute respiratory syndrome coronavirus 2
  REGION 1..12: note = Table B: HLA-DQA1*01:02-B1*06:02L HLA-DPA1*03:01-B1*105:01L
ALWEIQQVVDAD

SEQ ID NO: 18196 - protein, 12 aa, Severe acute respiratory syndrome coronavirus 2
  REGION 1..12: note = Table B: HLA-DQA1*01:02-B1*06:02L HLA-DPA1*03:01-B1*105:01L HLA-DQA1*05:05-B1*03:01L
SKIVQLSEISMD

SEQ ID NO: 18197 - protein, 14 aa, Severe acute respiratory syndrome coronavirus 2
  REGION 1..14: note = Table B: HLA-DQA1*01:02-B1*06:02L HLA-DQA1*05:05-B1*03:01L
SEISMDNSPNLAWP

SEQ ID NO: 18198 - protein, 15 aa, Severe acute respiratory syndrome coronavirus 2
  REGION 1..15: note = Table B: HLA-DQA1*01:02-B1*06:02L HLA-DQA1*05:05-B1*03:01L HLA-DQA1*01:03-B1*06:01L
ISMDNSPNLAWPLIV

SEQ ID NO: 18199 - protein, 10 aa, Severe acute respiratory syndrome coronavirus 2
  REGION 1..10: note = Table B: HLA-DQA1*01:02-B1*06:02L HLA-DPA1*03:01-B1*105:01L HLA-DQA1*03:01-B1*03:02L HLA-DPA1*01:02-B1*04:01L HLA-DQA1*01:03-B1*06:01L HLA-DQA1*02:01-B1*03:03L
LSPVALRQMS

SEQ ID NO: 18200 - protein, 14 aa, Severe acute respiratory syndrome coronavirus 2
  REGION 1..14: note = Table B: HLA-DQA1*01:02-B1*06:02L HLA-DRB1*01:02L
SPVALRQMSCAAGT

SEQ ID NO: 18201 - protein, 12 aa, Severe acute respiratory syndrome coronavirus 2
  REGION 1..12: note = Table B: HLA-DQA1*01:02-B1*06:02L
ALRQMSCAAGTT

SEQ ID NO: 18202 - protein, 13 aa, Severe acute respiratory syndrome coronavirus 2
  REGION 1..13: note = Table B: HLA-DQA1*01:02-B1*06:02L HLA-DQA1*05:05-B1*03:01L
RQMSCAAGTTQTA

SEQ ID NO: 18203 - protein, 16 aa, Severe acute respiratory syndrome coronavirus 2
  REGION 1..16: note = Table B: HLA-DQA1*01:02-B1*06:02L HLA-DQA1*05:05-B1*03:01L
QMSCAAGTTQTACTDD

SEQ ID NO: 18204 - protein, 14 aa, Severe acute respiratory syndrome coronavirus 2
  REGION 1..14: note = Table B: HLA-DQA1*01:02-B1*06:02L
AGTTQTACTDDNAL

SEQ ID NO: 18205 - protein, 14 aa, Severe acute respiratory syndrome coronavirus 2
  REGION 1..14: note = Table B: HLA-DQA1*01:02-B1*06:02L
NTTKGGRFVLALLS

SEQ ID NO: 18206 - protein, 14 aa, Severe acute respiratory syndrome coronavirus 2
  REGION 1..14: note = Table B: HLA-DQA1*01:02-B1*06:02L
TTKGGRFVLALLSD

SEQ ID NO: 18207 - protein, 12 aa, Severe acute respiratory syndrome coronavirus 2
  REGION 1..12: note = Table B: HLA-DQA1*01:02-B1*06:02L HLA-DPA1*01:03-B1*03:01L HLA-DPA1*03:01-B1*04:02L HLA-DPA1*01:03-B1*04:01L HLA-DPA1*01:03-B1*04:02L HLA-DRB1*12:01L HLA-DPA1*02:01-B1*13:01L HLA-DPA1*03:01-B1*105:01L
  REGION 1..12: note = CONT. FROM ABOVE: HLA-DPA1*01:03-B1*104:01L HLA-DPA1*01:02-B1*04 :01L HLA-DRB1*16:01L HLA-DQA1*01:03-B1*06:01L HLA-DRB1*15:03L
GGRFVLALLSDL

SEQ ID NO: 18208 - protein, 12 aa, Severe acute respiratory syndrome coronavirus 2
  REGION 1..12: note = Table B: HLA-DQA1*01:02-B1*06:02L HLA-DQA1*01-B1*05L HLA-DPA1*01:03-B1*04:01L HLA-DPA1*01:03-B1*04:02L HLA-DRB1*16:01L HLA-DQA1*01:03-B1*06:01L HLA-DRB1*04:08L HLA-DRB1*15:03L
GRFVLALLSDLQ

SEQ ID NO: 18209 - protein, 10 aa, Severe acute respiratory syndrome coronavirus 2
  REGION 1..10: note = Table B: HLA-DQA1*01:02-B1*06:02L
DLQDLKWARF

SEQ ID NO: 18210 - protein, 12 aa, Severe acute respiratory syndrome coronavirus 2
  REGION 1..12: note = Table B: HLA-DQA1*01:02-B1*06:02L HLA-DPA1*03:01-B1*04:02L HLA-DPA1*03:01-B1*105:01L HLA-DRB1*16:01L HLA-DRB1*04:08L
QDLKWARFPKSD

SEQ ID NO: 18211 - protein, 14 aa, Severe acute respiratory syndrome coronavirus 2
  REGION 1..14: note = Table B: HLA-DQA1*01:02-B1*06:02L
PKSDGTGTIYTELE

SEQ ID NO: 18212 - protein, 11 aa, Severe acute respiratory syndrome coronavirus 2
  REGION 1..11: note = Table B: HLA-DQA1*01:02-B1*06:02L HLA-DQA1*02:01-B1*03:03L
TPKGPKVKYLY

SEQ ID NO: 18213 - protein, 11 aa, Severe acute respiratory syndrome coronavirus 2
  REGION 1..11: note = Table B: HLA-DQA1*01:02-B1*06:02L HLA-DPA1*03:01-B1*04:02L HLA-DPA1*03:01-B1*105:01L HLA-DQA1*03:01-B1*03:02L HLA-DPA1*01:02-B1*04:01L HLA-DRB1*15:03L
YLYFIKGLNNL

SEQ ID NO: 18214 - protein, 12 aa, Severe acute respiratory syndrome coronavirus 2
  REGION 1..12: note = Table B: HLA-DQA1*01:02-B1*06:02L
GLNNLNRGMVLG

SEQ ID NO: 18215 - protein, 10 aa, Severe acute respiratory syndrome coronavirus 2
  REGION 1..10: note = Table B: HLA-DQA1*01:02-B1*06:02L HLA-DQA1*01:03-B1*06:01L HLA-DQA1*02:01-B1*03:03L
LNRGMVLGSL

SEQ ID NO: 18216 - protein, 12 aa, Severe acute respiratory syndrome coronavirus 2
  REGION 1..12: note = Table B: HLA-DQA1*01:02-B1*06:02L
NRGMVLGSLAAT

SEQ ID NO: 18217 - protein, 14 aa, Severe acute respiratory syndrome coronavirus 2
  REGION 1..14: note = Table B: HLA-DQA1*01:02-B1*06:02L HLA-DRB1*01:02L HLA-DPA1*03:01-B1*04:02L HLA-DQA1*01-B1*05L HLA-DRB1*12:01L HLA-DRB1*16:01L
STVLSFCAFAVDAA

SEQ ID NO: 18218 - protein, 12 aa, Severe acute respiratory syndrome coronavirus 2
  REGION 1..12: note = Table B: HLA-DQA1*01:02-B1*06:02L HLA-DPA1*03:01-B1*04:02L HLA-DPA1*01:03-B1*04:02L HLA-DPA1*03:01-B1*105:01L HLA-DPA1*01:02-B1*04:01L HLA-DRB1*04:08L HLA-DQA1*02:01-B1*03:03L
LSFCAFAVDAAK

SEQ ID NO: 18219 - protein, 12 aa, Severe acute respiratory syndrome coronavirus 2
  REGION 1..12: note = Table B: HLA-DQA1*01:02-B1*06:02L
SFCAFAVDAAKA

SEQ ID NO: 18220 - protein, 11 aa, Severe acute respiratory syndrome coronavirus 2
  REGION 1..11: note = Table B: HLA-DQA1*01:02-B1*06:02L HLA-DPA1*03:01-B1*04:02L HLA-DRB1*04:10L HLA-DPA1*01:03-B1*04:02L
FAVDAAKAYKD

SEQ ID NO: 18221 - protein, 13 aa, Severe acute respiratory syndrome coronavirus 2
  REGION 1..13: note = Table B: HLA-DQA1*01:02-B1*06:02L
QPITNCVKMLCTH

SEQ ID NO: 18222 - protein, 14 aa, Severe acute respiratory syndrome coronavirus 2
  REGION 1..14: note = Table B: HLA-DQA1*01:02-B1*06:02L
PITNCVKMLCTHTG

SEQ ID NO: 18223 - protein, 14 aa, Severe acute respiratory syndrome coronavirus 2
  REGION 1..14: note = Table B: HLA-DQA1*01:02-B1*06:02L HLA-DRB1*01:02L
TNCVKMLCTHTGTG

SEQ ID NO: 18224 - protein, 13 aa, Severe acute respiratory syndrome coronavirus 2
  REGION 1..13: note = Table B: HLA-DQA1*01:02-B1*06:02L
VKMLCTHTGTGQA

SEQ ID NO: 18225 - protein, 12 aa, Severe acute respiratory syndrome coronavirus 2
  REGION 1..12: note = Table B: HLA-DQA1*01:02-B1*06:02L HLA-DQA1*01-B1*05L HLA-DRB1*12:01L HLA-DQA1*05:05-B1*03:01L
ITVTPEANMDQE

SEQ ID NO: 18226 - protein, 14 aa, Severe acute respiratory syndrome coronavirus 2
  REGION 1..14: note = Table B: HLA-DQA1*01:02-B1*06:02L HLA-DPA1*03:01-B1*105:01L HLA-DQA1*05:05-B1*03:01L HLA-DQA1*01:03-B1*06:01L HLA-DQA1*02:01-B1*03:03L
PEANMDQESFGGAS

SEQ ID NO: 18227 - protein, 11 aa, Severe acute respiratory syndrome coronavirus 2
  REGION 1..11: note = Table B: HLA-DQA1*01:02-B1*06:02L HLA-DQA1*05:05-B1*03:19L
ESFGGASCCLY

SEQ ID NO: 18228 - protein, 12 aa, Severe acute respiratory syndrome coronavirus 2
  REGION 1..12: note = Table B: HLA-DQA1*01:02-B1*06:02L
SFGGASCCLYCR

SEQ ID NO: 18229 - protein, 17 aa, Severe acute respiratory syndrome coronavirus 2
  REGION 1..17: note = Table B: HLA-DQA1*01:02-B1*06:02L
IDHPNPKGFCDLKGKYV

SEQ ID NO: 18230 - protein, 12 aa, Severe acute respiratory syndrome coronavirus 2
  REGION 1..12: note = Table B: HLA-DQA1*01:02-B1*06:02L HLA-DQA1*03:01-B1*03:02L HLA-DQA1*02:01-B1*03:03L
DLKGKYVQIPTT

SEQ ID NO: 18231 - protein, 13 aa, Severe acute respiratory syndrome coronavirus 2
  REGION 1..13: note = Table B: HLA-DQA1*01:02-B1*06:02L HLA-DQA1*01:03-B1*06:01L
IPTTCANDPVGFT

SEQ ID NO: 18232 - protein, 12 aa, Severe acute respiratory syndrome coronavirus 2
  REGION 1..12: note = Table B: HLA-DQA1*01:02-B1*06:02L HLA-DPA1*03:01-B1*105:01L
FTLKNTVCTVCG

SEQ ID NO: 18233 - protein, 13 aa, Severe acute respiratory syndrome coronavirus 2
  REGION 1..13: note = Table B: HLA-DQA1*01:02-B1*06:02L
LKNTVCTVCGMWK

SEQ ID NO: 18234 - protein, 12 aa, Severe acute respiratory syndrome coronavirus 2
  REGION 1..12: note = Table B: HLA-DQA1*01:02-B1*06:02L
NTVCTVCGMWKG

SEQ ID NO: 18235 - protein, 10 aa, Severe acute respiratory syndrome coronavirus 2
  REGION 1..10: note = Table B: HLA-DQA1*01:02-B1*06:02L HLA-DQA1*01:03-B1*06:01L
TVCGMWKGYG

SEQ ID NO: 18236 - protein, 13 aa, Severe acute respiratory syndrome coronavirus 2
  REGION 1..13: note = Table B: HLA-DQA1*01:02-B1*06:02L
MWKGYGCSCDQLR

SEQ ID NO: 18237 - protein, 12 aa, Severe acute respiratory syndrome coronavirus 2
  REGION 1..12: note = Table B: HLA-DQA1*01:02-B1*06:02L
GYGCSCDQLREP

SEQ ID NO: 18238 - protein, 13 aa, Severe acute respiratory syndrome coronavirus 2
  REGION 1..13: note = Table B: HLA-DQA1*01:02-B1*06:02L
QLREPMLQSADAQ

SEQ ID NO: 18239 - protein, 11 aa, Severe acute respiratory syndrome coronavirus 2
  REGION 1..11: note = Table B: HLA-DQA1*01:02-B1*06:02L HLA-DPA1*03:01-B1*04:02L HLA-DQA1*05:05-B1*03:116L HLA-DPA1*02:01-B1*13:01L HLA-DPA1*03:01-B1*105:01L HLA-DPA1*01:02-B1*04:01L HLA-DRB1*15:03L
SADAQSFLNRV

SEQ ID NO: 18240 - protein, 12 aa, Severe acute respiratory syndrome coronavirus 2
  REGION 1..12: note = Table B: HLA-DQA1*01:02-B1*06:02L
ADAQSFLNRVCG

SEQ ID NO: 18241 - protein, 13 aa, Severe acute respiratory syndrome coronavirus 2
  REGION 1..13: note = Table B: HLA-DQA1*01:02-B1*06:02L
DAQSFLNRVCGVS

SEQ ID NO: 18242 - protein, 14 aa, Severe acute respiratory syndrome coronavirus 2
  REGION 1..14: note = Table B: HLA-DQA1*01:02-B1*06:02L
AQSFLNRVCGVSAA

SEQ ID NO: 18243 - protein, 10 aa, Severe acute respiratory syndrome coronavirus 2
  REGION 1..10: note = Table B: HLA-DQA1*01:02-B1*06:02L HLA-DQA1*01:03-B1*06:01L
NRVCGVSAAR

SEQ ID NO: 18244 - protein, 12 aa, Severe acute respiratory syndrome coronavirus 2
  REGION 1..12: note = Table B: HLA-DQA1*01:02-B1*06:02L HLA-DQA1*05:05-B1*03:01L
RLTPCGTGTSTD

SEQ ID NO: 18245 - protein, 14 aa, Severe acute respiratory syndrome coronavirus 2
  REGION 1..14: note = Table B: HLA-DQA1*01:02-B1*06:02L HLA-DQA1*05:05-B1*03:01L HLA-DQA1*01:03-B1*06:01L
LTPCGTGTSTDVVY

SEQ ID NO: 18246 - protein, 11 aa, Severe acute respiratory syndrome coronavirus 2
  REGION 1..11: note = Table B: HLA-DQA1*01:02-B1*06:02L HLA-DPA1*03:01-B1*04:02L HLA-DPA1*03:01-B1*105:01L HLA-DPA1*01:02-B1*04:01L
AFDIYNDKVAG

SEQ ID NO: 18247 - protein, 12 aa, Severe acute respiratory syndrome coronavirus 2
  REGION 1..12: note = Table B: HLA-DQA1*01:02-B1*06:02L HLA-DPA1*02:01-B1*13:01L HLA-DQA1*01:03-B1*06:01L
IYNDKVAGFAKF

SEQ ID NO: 18248 - protein, 12 aa, Severe acute respiratory syndrome coronavirus 2
  REGION 1..12: note = Table B: HLA-DQA1*01:02-B1*06:02L
FLKTNCCRFQEK

SEQ ID NO: 18249 - protein, 12 aa, Severe acute respiratory syndrome coronavirus 2
  REGION 1..12: note = Table B: HLA-DQA1*01:02-B1*06:02L
LKTNCCRFQEKD

SEQ ID NO: 18250 - protein, 12 aa, Severe acute respiratory syndrome coronavirus 2
  REGION 1..12: note = Table B: HLA-DQA1*01:02-B1*06:02L
KTNCCRFQEKDE

SEQ ID NO: 18251 - protein, 14 aa, Severe acute respiratory syndrome coronavirus 2
  REGION 1..14: note = Table B: HLA-DQA1*01:02-B1*06:02L
TNCCRFQEKDEDDN

SEQ ID NO: 18252 - protein, 13 aa, Severe acute respiratory syndrome coronavirus 2
  REGION 1..13: note = Table B: HLA-DQA1*01:02-B1*06:02L HLA-DQA1*01:03-B1*06:01L
EDDNLIDSYFVVK

SEQ ID NO: 18253 - protein, 13 aa, Severe acute respiratory syndrome coronavirus 2
  REGION 1..13: note = Table B: HLA-DQA1*01:02-B1*06:02L HLA-DQA1*02:01-B1*03:03L
YNLLKDCPAVAKH

SEQ ID NO: 18254 - protein, 10 aa, Severe acute respiratory syndrome coronavirus 2
  REGION 1..10: note = Table B: HLA-DQA1*01:02-B1*06:02L HLA-DQA1*01:03-B1*06:01L HLA-DQA1*02:01-B1*03:03L
DCPAVAKHDF

SEQ ID NO: 18255 - protein, 10 aa, Severe acute respiratory syndrome coronavirus 2
  REGION 1..10: note = Table B: HLA-DQA1*01:02-B1*06:02L HLA-DQA1*01:03-B1*06:01L HLA-DQA1*02:01-B1*03:03L
AVAKHDFFKF

SEQ ID NO: 18256 - protein, 14 aa, Severe acute respiratory syndrome coronavirus 2
  REGION 1..14: note = Table B: HLA-DQA1*01:02-B1*06:02L HLA-DQA1*05:01-B1*02:01L HLA-DPA1*03:01-B1*105:01L HLA-DPA1*01:02-B1*04:01L
DFFKFRIDGDMVPH

SEQ ID NO: 18257 - protein, 11 aa, Severe acute respiratory syndrome coronavirus 2
  REGION 1..11: note = Table B: HLA-DQA1*01:02-B1*06:02L HLA-DQA1*05:01-B1*02:01L HLA-DPA1*02:01-B1*13:01L HLA-DQA1*01:03-B1*06:01L
FRIDGDMVPHI

SEQ ID NO: 18258 - protein, 11 aa, Severe acute respiratory syndrome coronavirus 2
  REGION 1..11: note = Table B: HLA-DQA1*01:02-B1*06:02L
DMVPHISRQRL

SEQ ID NO: 18259 - protein, 10 aa, Severe acute respiratory syndrome coronavirus 2
  REGION 1..10: note = Table B: HLA-DQA1*01:02-B1*06:02L HLA-DQA1*05:05-B1*03:19L HLA-DQA1*05:01-B1*02:01L HLA-DQA1*02:01-B1*03:03L
TKYTMADLVY

SEQ ID NO: 18260 - protein, 12 aa, Severe acute respiratory syndrome coronavirus 2
  REGION 1..12: note = Table B: HLA-DQA1*01:02-B1*06:02L HLA-DRB1*08:04L HLA-DRB1*16:01L HLA-DRB1*04:08L
LVYALRHFDEGN

SEQ ID NO: 18261 - protein, 13 aa, Severe acute respiratory syndrome coronavirus 2
  REGION 1..13: note = Table B: HLA-DQA1*01:02-B1*06:02L HLA-DQA1*01:03-B1*06:01L
FDEGNCDTLKEIL

SEQ ID NO: 18262 - protein, 14 aa, Severe acute respiratory syndrome coronavirus 2
  REGION 1..14: note = Table B: HLA-DQA1*01:02-B1*06:02L HLA-DPA1*03:01-B1*105:01L HLA-DQA1*01:03-B1*06:01L HLA-DRB1*15:03L
DEGNCDTLKEILVT

SEQ ID NO: 18263 - protein, 14 aa, Severe acute respiratory syndrome coronavirus 2
  REGION 1..14: note = Table B: HLA-DQA1*01:02-B1*06:02L HLA-DPA1*02:01-B1*13:01L HLA-DPA1*03:01-B1*105:01L HLA-DRB1*15:03L
ILVTYNCCDDDYFN

SEQ ID NO: 18264 - protein, 12 aa, Severe acute respiratory syndrome coronavirus 2
  REGION 1..12: note = Table B: HLA-DQA1*01:02-B1*06:02L HLA-DRB1*08:01L HLA-DQA1*01-B1*05L HLA-DQA1*03:01-B1*03:02L
DDDYFNKKDWYD

SEQ ID NO: 18265 - protein, 10 aa, Severe acute respiratory syndrome coronavirus 2
  REGION 1..10: note = Table B: HLA-DQA1*01:02-B1*06:02L HLA-DPA1*02:01-B1*13:01L HLA-DQA1*01:03-B1*06:01L
YFNKKDWYDF

SEQ ID NO: 18266 - protein, 13 aa, Severe acute respiratory syndrome coronavirus 2
  REGION 1..13: note = Table B: HLA-DQA1*01:02-B1*06:02L HLA-DQA1*01:01-B1*05:01L HLA-DPA1*03:01-B1*105:01L HLA-DPA1*01:02-B1*04:01L HLA-DQA1*01:03-B1*06:01L HLA-DRB1*04:08L HLA-DQA1*02:01-B1*03:03L HLA-DRB1*15:03L
NKKDWYDFVENPD

SEQ ID NO: 18267 - protein, 12 aa, Severe acute respiratory syndrome coronavirus 2
  REGION 1..12: note = Table B: HLA-DQA1*01:02-B1*06:02L HLA-DPA1*03:01-B1*04:02L HLA-DRB1*12:01L HLA-DPA1*02:01-B1*13:01L HLA-DPA1*03:01-B1*105:01L HLA-DRB1*16:01L HLA-DQA1*01:03-B1*06:01L HLA-DRB1*15:03L
DWYDFVENPDIL

SEQ ID NO: 18268 - protein, 10 aa, Severe acute respiratory syndrome coronavirus 2
  REGION 1..10: note = Table B: HLA-DQA1*01:02-B1*06:02L
NLGERVRQAL

SEQ ID NO: 18269 - protein, 10 aa, Severe acute respiratory syndrome coronavirus 2
  REGION 1..10: note = Table B: HLA-DQA1*01:02-B1*06:02L HLA-DPA1*03:01-B1*105:01L HLA-DPA1*01:02-B1*04:01L HLA-DQA1*01:03-B1*06:01L HLA-DQA1*02:01-B1*03:03L
VRQALLKTVQ

SEQ ID NO: 18270 - protein, 12 aa, Severe acute respiratory syndrome coronavirus 2
  REGION 1..12: note = Table B: HLA-DQA1*01:02-B1*06:02L HLA-DPA1*03:01-B1*04:02L HLA-DPA1*01:03-B1*04:01L HLA-DPA1*01:03-B1*04:02L HLA-DPA1*01:02-B1*04:01L HLA-DQA1*01:03-B1*06:01L
ALLKTVQFCDAM

SEQ ID NO: 18271 - protein, 12 aa, Severe acute respiratory syndrome coronavirus 2
  REGION 1..12: note = Table B: HLA-DQA1*01:02-B1*06:02L HLA-DQA1*01:03-B1*06:01L HLA-DRB1*04:08L
LLKTVQFCDAMR

SEQ ID NO: 18272 - protein, 12 aa, Severe acute respiratory syndrome coronavirus 2
  REGION 1..12: note = Table B: HLA-DQA1*01:02-B1*06:02L HLA-DQA1*03:01-B1*03:02L HLA-DQA1*01:03-B1*06:01L HLA-DQA1*02:01-B1*03:03L
NAGIVGVLTLDN

SEQ ID NO: 18273 - protein, 11 aa, Severe acute respiratory syndrome coronavirus 2
  REGION 1..11: note = Table B: HLA-DQA1*01:02-B1*06:02L HLA-DQA1*05:01-B1*02:01L
TPGSGVPVVDS

SEQ ID NO: 18274 - protein, 11 aa, Severe acute respiratory syndrome coronavirus 2
  REGION 1..11: note = Table B: HLA-DQA1*01:02-B1*06:02L HLA-DQA1*05:01-B1*02:01L HLA-DQA1*02:01-B1*03:03L
PGSGVPVVDSY

SEQ ID NO: 18275 - protein, 12 aa, Severe acute respiratory syndrome coronavirus 2
  REGION 1..12: note = Table B: HLA-DQA1*01:02-B1*06:02L HLA-DRB1*01:02L HLA-DPA1*03:01-B1*105:01L
YSLLMPILTLTR

SEQ ID NO: 18276 - protein, 12 aa, Severe acute respiratory syndrome coronavirus 2
  REGION 1..12: note = Table B: HLA-DQA1*01:02-B1*06:02L
SLLMPILTLTRA

SEQ ID NO: 18277 - protein, 12 aa, Severe acute respiratory syndrome coronavirus 2
  REGION 1..12: note = Table B: HLA-DQA1*01:02-B1*06:02L HLA-DRB1*12:01L HLA-DRB1*15:03L
LMPILTLTRALT

SEQ ID NO: 18278 - protein, 12 aa, Severe acute respiratory syndrome coronavirus 2
  REGION 1..12: note = Table B: HLA-DQA1*01:02-B1*06:02L
LTAESHVDTDLT

SEQ ID NO: 18279 - protein, 11 aa, Severe acute respiratory syndrome coronavirus 2
  REGION 1..11: note = Table B: HLA-DQA1*01:02-B1*06:02L
DTDLTKPYIKW

SEQ ID NO: 18280 - protein, 14 aa, Severe acute respiratory syndrome coronavirus 2
  REGION 1..14: note = Table B: HLA-DQA1*01:02-B1*06:02L
TDLTKPYIKWDLLK

SEQ ID NO: 18281 - protein, 10 aa, Severe acute respiratory syndrome coronavirus 2
  REGION 1..10: note = Table B: HLA-DQA1*01:02-B1*06:02L HLA-DQA1*01:03-B1*06:01L
DFTEERLKLF

SEQ ID NO: 18282 - protein, 12 aa, Severe acute respiratory syndrome coronavirus 2
  REGION 1..12: note = Table B: HLA-DQA1*01:02-B1*06:02L HLA-DRB1*01:02L HLA-DRB1*08:04L HLA-DPA1*03:01-B1*04:02L HLA-DRB1*14:01L HLA-DRB1*12:01L HLA-DPA1*02:01-B1*13:01L HLA-DRB1*15:03L
YFKYWDQTYHPN

SEQ ID NO: 18283 - protein, 12 aa, Severe acute respiratory syndrome coronavirus 2
  REGION 1..12: note = Table B: HLA-DQA1*01:02-B1*06:02L HLA-DPA1*03:01-B1*105:01L HLA-DQA1*05:05-B1*03:01L HLA-DQA1*01:03-B1*06:01L
YWDQTYHPNCVN

SEQ ID NO: 18284 - protein, 14 aa, Severe acute respiratory syndrome coronavirus 2
  REGION 1..14: note = Table B: HLA-DQA1*01:02-B1*06:02L HLA-DRB1*01:02L HLA-DRB1*14:01L HLA-DRB1*15:03L
DQTYHPNCVNCLDD

SEQ ID NO: 18285 - protein, 12 aa, Severe acute respiratory syndrome coronavirus 2
  REGION 1..12: note = Table B: HLA-DQA1*01:02-B1*06:02L
YHPNCVNCLDDR

SEQ ID NO: 18286 - protein, 12 aa, Severe acute respiratory syndrome coronavirus 2
  REGION 1..12: note = Table B: HLA-DQA1*01:02-B1*06:02L
DDRCILHCANFN

SEQ ID NO: 18287 - protein, 10 aa, Severe acute respiratory syndrome coronavirus 2
  REGION 1..10: note = Table B: HLA-DQA1*01:02-B1*06:02L HLA-DPA1*03:01-B1*04:02L HLA-DQA1*01-B1*05L HLA-DPA1*01:03-B1*04:01L HLA-DPA1*01:03-B1*04:02L HLA-DRB1*12:01L HLA-DPA1*03:01-B1*105:01L HLA-DPA1*01:02-B1*04:01L
  REGION 1..10: note = CONT. FROM ABOVE: HLA-DRB1*16:01L HLA-DQA1*01:03-B1*06:01L HLA-D RB1*04:08L HLA-DRB1*15:03L
ILHCANFNVL

SEQ ID NO: 18288 - protein, 14 aa, Severe acute respiratory syndrome coronavirus 2
  REGION 1..14: note = Table B: HLA-DQA1*01:02-B1*06:02L HLA-DRB1*01:02L HLA-DRB1*14:01L HLA-DQA1*05:01-B1*02:01L HLA-DQA1*05:05-B1*03:01L HLA-DRB1*16:01L HLA-DQA1*02:01-B1*03:03L
ANFNVLFSTVFPPT

SEQ ID NO: 18289 - protein, 12 aa, Severe acute respiratory syndrome coronavirus 2
  REGION 1..12: note = Table B: HLA-DQA1*01:02-B1*06:02L HLA-DPA1*03:01-B1*04:02L HLA-DPA1*03:01-B1*105:01L HLA-DPA1*01:02-B1*04:01L HLA-DQA1*01:03-B1*06:01L
NVLFSTVFPPTS

SEQ ID NO: 18290 - protein, 10 aa, Severe acute respiratory syndrome coronavirus 2
  REGION 1..10: note = Table B: HLA-DQA1*01:02-B1*06:02L HLA-DQA1*05:05-B1*03:19L HLA-DPA1*02:01-B1*13:01L HLA-DPA1*03:01-B1*105:01L HLA-DQA1*01:03-B1*06:01L HLA-DQA1*02:01-B1*03:03L HLA-DRB1*15:03L
FSTVFPPTSF

SEQ ID NO: 18291 - protein, 10 aa, Severe acute respiratory syndrome coronavirus 2
  REGION 1..10: note = Table B: HLA-DQA1*01:02-B1*06:02L HLA-DQA1*05:05-B1*03:19L HLA-DQA1*02:01-B1*03:03L
TSFGPLVRKI

SEQ ID NO: 18292 - protein, 12 aa, Severe acute respiratory syndrome coronavirus 2
  REGION 1..12: note = Table B: HLA-DQA1*01:02-B1*06:02L HLA-DRB1*14:01L HLA-DRB1*08:01L
FGPLVRKIFVDG

SEQ ID NO: 18293 - protein, 14 aa, Severe acute respiratory syndrome coronavirus 2
  REGION 1..14: note = Table B: HLA-DQA1*01:02-B1*06:02L HLA-DRB1*01:02L HLA-DRB1*12:01L HLA-DPA1*03:01-B1*105:01L HLA-DRB1*15:03L
VSTGYHFRELGVVH

SEQ ID NO: 18294 - protein, 13 aa, Severe acute respiratory syndrome coronavirus 2
  REGION 1..13: note = Table B: HLA-DQA1*01:02-B1*06:02L HLA-DRB1*11:01L HLA-DPA1*03:01-B1*105:01L HLA-DRB1*15:03L
TGYHFRELGVVHN

SEQ ID NO: 18295 - protein, 12 aa, Severe acute respiratory syndrome coronavirus 2
  REGION 1..12: note = Table B: HLA-DQA1*01:02-B1*06:02L HLA-DRB1*01:01L HLA-DRB1*08:01L HLA-DRB1*11:01L HLA-DRB1*12:01L HLA-DPA1*03:01-B1*105:01L
HFRELGVVHNQD

SEQ ID NO: 18296 - protein, 12 aa, Severe acute respiratory syndrome coronavirus 2
  REGION 1..12: note = Table B: HLA-DQA1*01:02-B1*06:02L
VHNQDVNLHSSR

SEQ ID NO: 18297 - protein, 12 aa, Severe acute respiratory syndrome coronavirus 2
  REGION 1..12: note = Table B: HLA-DQA1*01:02-B1*06:02L
HNQDVNLHSSRL

SEQ ID NO: 18298 - protein, 11 aa, Severe acute respiratory syndrome coronavirus 2
  REGION 1..11: note = Table B: HLA-DQA1*01:02-B1*06:02L HLA-DQA1*01:03-B1*06:01L
DVNLHSSRLSF

SEQ ID NO: 18299 - protein, 12 aa, Severe acute respiratory syndrome coronavirus 2
  REGION 1..12: note = Table B: HLA-DQA1*01:02-B1*06:02L HLA-DQA1*01:03-B1*06:01L
NLHSSRLSFKEL

SEQ ID NO: 18300 - protein, 10 aa, Severe acute respiratory syndrome coronavirus 2
  REGION 1..10: note = Table B: HLA-DQA1*01:02-B1*06:02L HLA-DRB1*03:01L HLA-DQA1*05:05-B1*03:19L HLA-DQA1*02:01-B1*03:03L
RLSFKELLVY

SEQ ID NO: 18301 - protein, 12 aa, Severe acute respiratory syndrome coronavirus 2
  REGION 1..12: note = Table B: HLA-DQA1*01:02-B1*06:02L HLA-DRB1*01:01L HLA-DRB1*08:04L HLA-DPA1*01:03-B1*03:01L HLA-DRB1*11:04L HLA-DRB1*14:02L HLA-DQA1*01:01-B1*05:01L HLA-DRB1*08:01L HLA-DRB1*11:01L HLA-DRB5*01:01L HLA-DRB4*02:01NL HLA-DRB4*01:01L
  REGION 1..12: note = CONT. FROM ABOVE: HLA-DPA1*01:03-B1*04:01L HLA-DRB1*04:10L HLA-D PA1*01:03-B1*04:02L HLA-DRB3*01:01L HLA-DPA1*02:01-B1*13:01L HLA -DPA1*03:01-B1*105:01L HLA-DRB1*14:54L HLA-DPA1*01:03-B1*104:01L HLA-DRB1*14:17L HLA-DRB1*10:01L HLA-DRB1*04:08L HLA-DRB1*08:03L
DPAMHAASGNLL

SEQ ID NO: 18302 - protein, 14 aa, Severe acute respiratory syndrome coronavirus 2
  REGION 1..14: note = Table B: HLA-DQA1*01:02-B1*06:02L HLA-DPA1*01:03-B1*03:01L HLA-DPA1*02:01-B1*13:01L
LDKRTTCFSVAALT

SEQ ID NO: 18303 - protein, 14 aa, Severe acute respiratory syndrome coronavirus 2
  REGION 1..14: note = Table B: HLA-DQA1*01:02-B1*06:02L HLA-DPA1*01:03-B1*03:01L HLA-DPA1*02:01-B1*13:01L
DKRTTCFSVAALTN

SEQ ID NO: 18304 - protein, 13 aa, Severe acute respiratory syndrome coronavirus 2
  REGION 1..13: note = Table B: HLA-DQA1*01:02-B1*06:02L
RTTCFSVAALTNN

SEQ ID NO: 18305 - protein, 12 aa, Severe acute respiratory syndrome coronavirus 2
  REGION 1..12: note = Table B: HLA-DQA1*01:02-B1*06:02L HLA-DPA1*03:01-B1*105:01L HLA-DQA1*03:01-B1*03:02L HLA-DQA1*01:03-B1*06:01L HLA-DQA1*02:01-B1*03:03L
LTNNVAFQTVKP

SEQ ID NO: 18306 - protein, 12 aa, Severe acute respiratory syndrome coronavirus 2
  REGION 1..12: note = Table B: HLA-DQA1*01:02-B1*06:02L HLA-DQA1*01-B1*05L HLA-DQA1*05:01-B1*02:01L HLA-DPA1*03:01-B1*105:01L
PGNFNKDFYDFA

SEQ ID NO: 18307 - protein, 12 aa, Severe acute respiratory syndrome coronavirus 2
  REGION 1..12: note = Table B: HLA-DQA1*01:02-B1*06:02L HLA-DQA1*01:03-B1*06:01L
AVSKGFFKEGSS

SEQ ID NO: 18308 - protein, 12 aa, Severe acute respiratory syndrome coronavirus 2
  REGION 1..12: note = Table B: HLA-DQA1*01:02-B1*06:02L HLA-DRB1*08:01L HLA-DRB1*12:01L HLA-DRB1*04:08L
FFKEGSSVELKH

SEQ ID NO: 18309 - protein, 10 aa, Severe acute respiratory syndrome coronavirus 2
  REGION 1..10: note = Table B: HLA-DQA1*01:02-B1*06:02L HLA-DQA1*01:03-B1*06:01L HLA-DQA1*02:01-B1*03:03L
GSSVELKHFF

SEQ ID NO: 18310 - protein, 10 aa, Severe acute respiratory syndrome coronavirus 2
  REGION 1..10: note = Table B: HLA-DQA1*01:02-B1*06:02L HLA-DQA1*05:05-B1*03:19L HLA-DQA1*05:01-B1*02:01L HLA-DQA1*01:03-B1*06:01L HLA-DQA1*02:01-B1*03:03L
SSVELKHFFF

SEQ ID NO: 18311 - protein, 13 aa, Severe acute respiratory syndrome coronavirus 2
  REGION 1..13: note = Table B: HLA-DQA1*01:02-B1*06:02L HLA-DQA1*01-B1*05L HLA-DPA1*03:01-B1*105:01L HLA-DQA1*03:01-B1*03:02L HLA-DPA1*01:02-B1*04:01L HLA-DQA1*01:03-B1*06:01L
VELKHFFFAQDGN

SEQ ID NO: 18312 - protein, 10 aa, Severe acute respiratory syndrome coronavirus 2
  REGION 1..10: note = Table B: HLA-DQA1*01:02-B1*06:02L HLA-DQA1*05:05-B1*03:19L HLA-DQA1*05:01-B1*02:01L
GNAAISDYDY

SEQ ID NO: 18313 - protein, 12 aa, Severe acute respiratory syndrome coronavirus 2
  REGION 1..12: note = Table B: HLA-DQA1*01:02-B1*06:02L HLA-DPA1*03:01-B1*105:01L HLA-DQA1*01:03-B1*06:01L
YNLPTMCDIRQL

SEQ ID NO: 18314 - protein, 10 aa, Severe acute respiratory syndrome coronavirus 2
  REGION 1..10: note = Table B: HLA-DQA1*01:02-B1*06:02L HLA-DQA1*01:03-B1*06:01L
PTMCDIRQLL

SEQ ID NO: 18315 - protein, 14 aa, Severe acute respiratory syndrome coronavirus 2
  REGION 1..14: note = Table B: HLA-DQA1*01:02-B1*06:02L HLA-DQA1*05:05-B1*03:01L
FDCYDGGCINANQV

SEQ ID NO: 18316 - protein, 14 aa, Severe acute respiratory syndrome coronavirus 2
  REGION 1..14: note = Table B: HLA-DQA1*01:02-B1*06:02L
DCYDGGCINANQVI

SEQ ID NO: 18317 - protein, 13 aa, Severe acute respiratory syndrome coronavirus 2
  REGION 1..13: note = Table B: HLA-DQA1*01:02-B1*06:02L HLA-DQA1*05:05-B1*03:01L HLA-DQA1*01:03-B1*06:01L
YDGGCINANQVIV

SEQ ID NO: 18318 - protein, 12 aa, Severe acute respiratory syndrome coronavirus 2
  REGION 1..12: note = Table B: HLA-DQA1*01:02-B1*06:02L
IVNNLDKSAGFP

SEQ ID NO: 18319 - protein, 13 aa, Severe acute respiratory syndrome coronavirus 2
  REGION 1..13: note = Table B: HLA-DQA1*01:02-B1*06:02L HLA-DRB1*01:02L
SAGFPFNKWGKAR

SEQ ID NO: 18320 - protein, 13 aa, Severe acute respiratory syndrome coronavirus 2
  REGION 1..13: note = Table B: HLA-DQA1*01:02-B1*06:02L
PFNKWGKARLYYD

SEQ ID NO: 18321 - protein, 12 aa, Severe acute respiratory syndrome coronavirus 2
  REGION 1..12: note = Table B: HLA-DQA1*01:02-B1*06:02L HLA-DQA1*01:03-B1*06:01L
NKWGKARLYYDS

SEQ ID NO: 18322 - protein, 14 aa, Severe acute respiratory syndrome coronavirus 2
  REGION 1..14: note = Table B: HLA-DQA1*01:02-B1*06:02L
WGKARLYYDSMSYE

SEQ ID NO: 18323 - protein, 14 aa, Severe acute respiratory syndrome coronavirus 2
  REGION 1..14: note = Table B: HLA-DQA1*01:02-B1*06:02L HLA-DPA1*03:01-B1*04:02L HLA-DRB1*08:01L HLA-DPA1*02:01-B1*13:01L HLA-DRB1*16:01L HLA-DRB1*04:08L HLA-DRB1*15:03L
RLYYDSMSYEDQDA

SEQ ID NO: 18324 - protein, 12 aa, Severe acute respiratory syndrome coronavirus 2
  REGION 1..12: note = Table B: HLA-DQA1*01:02-B1*06:02L HLA-DQA1*01:03-B1*06:01L HLA-DQA1*02:01-B1*03:03L
DQDALFAYTKRN

SEQ ID NO: 18325 - protein, 11 aa, Severe acute respiratory syndrome coronavirus 2
  REGION 1..11: note = Table B: HLA-DQA1*01:02-B1*06:02L HLA-DPA1*03:01-B1*04:02L HLA-DRB1*14:01L HLA-DRB1*14:02L HLA-DQA1*05:05-B1*03:19L HLA-DQA1*05:01-B1*02:01L HLA-DQA1*05:05-B1*03:116L HLA-DRB1*09:01L HLA-DPA1*03:01-B1*105:01L
  REGION 1..11: note = CONT. FROM ABOVE: HLA-DPA1*01:02-B1*04:01L HLA-DRB1*16:01L
NVIPTITQMNL

SEQ ID NO: 18326 - protein, 11 aa, Severe acute respiratory syndrome coronavirus 2
  REGION 1..11: note = Table B: HLA-DQA1*01:02-B1*06:02L
ITQMNLKYAIS

SEQ ID NO: 18327 - protein, 11 aa, Severe acute respiratory syndrome coronavirus 2
  REGION 1..11: note = Table B: HLA-DQA1*01:02-B1*06:02L
TVAGVSICSTM

SEQ ID NO: 18328 - protein, 12 aa, Severe acute respiratory syndrome coronavirus 2
  REGION 1..12: note = Table B: HLA-DQA1*01:02-B1*06:02L HLA-DQA1*05:05-B1*03:01L HLA-DQA1*01:03-B1*06:01L
VAGVSICSTMTN

SEQ ID NO: 18329 - protein, 11 aa, Severe acute respiratory syndrome coronavirus 2
  REGION 1..11: note = Table B: HLA-DQA1*01:02-B1*06:02L
SICSTMTNRQF

SEQ ID NO: 18330 - protein, 11 aa, Severe acute respiratory syndrome coronavirus 2
  REGION 1..11: note = Table B: HLA-DQA1*01:02-B1*06:02L
ICSTMTNRQFH

SEQ ID NO: 18331 - protein, 13 aa, Severe acute respiratory syndrome coronavirus 2
  REGION 1..13: note = Table B: HLA-DQA1*01:02-B1*06:02L HLA-DRB1*01:02L HLA-DPA1*03:01-B1*04:02L HLA-DRB1*08:01L HLA-DRB1*12:01L HLA-DPA1*03:01-B1*105:01L
NRQFHQKLLKSIA

SEQ ID NO: 18332 - protein, 13 aa, Severe acute respiratory syndrome coronavirus 2
  REGION 1..13: note = Table B: HLA-DQA1*01:02-B1*06:02L
QFHQKLLKSIAAT

SEQ ID NO: 18333 - protein, 13 aa, Severe acute respiratory syndrome coronavirus 2
  REGION 1..13: note = Table B: HLA-DQA1*01:02-B1*06:02L HLA-DQA1*02:01-B1*03:03L HLA-DRB1*15:03L
TSKFYGGWHNMLK

SEQ ID NO: 18334 - protein, 10 aa, Severe acute respiratory syndrome coronavirus 2
  REGION 1..10: note = Table B: HLA-DQA1*01:02-B1*06:02L HLA-DQA1*05:05-B1*03:19L HLA-DQA1*01:03-B1*06:01L HLA-DQA1*02:01-B1*03:03L
GWHNMLKTVY

SEQ ID NO: 18335 - protein, 13 aa, Severe acute respiratory syndrome coronavirus 2
  REGION 1..13: note = Table B: HLA-DQA1*01:02-B1*06:02L HLA-DRB1*08:04L HLA-DPA1*03:01-B1*04:02L HLA-DRB1*12:01L HLA-DPA1*02:01-B1*13:01L HLA-DRB1*16:01L HLA-DQA1*01:03-B1*06:01L HLA-DRB1*15:03L
WHNMLKTVYSDVE

SEQ ID NO: 18336 - protein, 13 aa, Severe acute respiratory syndrome coronavirus 2
  REGION 1..13: note = Table B: HLA-DQA1*01:02-B1*06:02L HLA-DRB1*08:01L
GWDYPKCDRAMPN

SEQ ID NO: 18337 - protein, 14 aa, Severe acute respiratory syndrome coronavirus 2
  REGION 1..14: note = Table B: HLA-DQA1*01:02-B1*06:02L HLA-DRB1*01:02L
DYPKCDRAMPNMLR

SEQ ID NO: 18338 - protein, 11 aa, Severe acute respiratory syndrome coronavirus 2
  REGION 1..11: note = Table B: HLA-DQA1*01:02-B1*06:02L HLA-DQA1*05:01-B1*02:01L HLA-DQA1*03:01-B1*03:02L
MPNMLRIMASL

SEQ ID NO: 18339 - protein, 11 aa, Severe acute respiratory syndrome coronavirus 2
  REGION 1..11: note = Table B: HLA-DQA1*01:02-B1*06:02L
IMASLVLARKH

SEQ ID NO: 18340 - protein, 12 aa, Severe acute respiratory syndrome coronavirus 2
  REGION 1..12: note = Table B: HLA-DQA1*01:02-B1*06:02L
HTTCCSLSHRFY

SEQ ID NO: 18341 - protein, 12 aa, Severe acute respiratory syndrome coronavirus 2
  REGION 1..12: note = Table B: HLA-DQA1*01:02-B1*06:02L HLA-DRB1*01:02L HLA-DPA1*01:03-B1*03:01L HLA-DRB1*12:01L HLA-DPA1*02:01-B1*13:01L HLA-DPA1*03:01-B1*105:01L HLA-DRB1*15:03L
FYRLANECAQVL

SEQ ID NO: 18342 - protein, 12 aa, Severe acute respiratory syndrome coronavirus 2
  REGION 1..12: note = Table B: HLA-DQA1*01:02-B1*06:02L HLA-DRB1*01:02L HLA-DQA1*01:03-B1*06:01L HLA-DQA1*02:01-B1*03:03L HLA-DRB1*15:03L
RLANECAQVLSE

SEQ ID NO: 18343 - protein, 10 aa, Severe acute respiratory syndrome coronavirus 2
  REGION 1..10: note = Table B: HLA-DQA1*01:02-B1*06:02L HLA-DQA1*01:03-B1*06:01L
NECAQVLSEM

SEQ ID NO: 18344 - protein, 12 aa, Severe acute respiratory syndrome coronavirus 2
  REGION 1..12: note = Table B: HLA-DQA1*01:02-B1*06:02L
VLSEMVMCGGSL

SEQ ID NO: 18345 - protein, 14 aa, Severe acute respiratory syndrome coronavirus 2
  REGION 1..14: note = Table B: HLA-DQA1*01:02-B1*06:02L HLA-DRB1*01:02L HLA-DRB1*15:03L
SEMVMCGGSLYVKP

SEQ ID NO: 18346 - protein, 12 aa, Severe acute respiratory syndrome coronavirus 2
  REGION 1..12: note = Table B: HLA-DQA1*01:02-B1*06:02L HLA-DQA1*01:03-B1*06:01L
VMCGGSLYVKPG

SEQ ID NO: 18347 - protein, 14 aa, Severe acute respiratory syndrome coronavirus 2
  REGION 1..14: note = Table B: HLA-DQA1*01:02-B1*06:02L
GSLYVKPGGTSSGD

SEQ ID NO: 18348 - protein, 12 aa, Severe acute respiratory syndrome coronavirus 2
  REGION 1..12: note = Table B: HLA-DQA1*01:02-B1*06:02L HLA-DPA1*03:01-B1*105:01L HLA-DQA1*01:03-B1*06:01L
ANSVFNICQAVT

SEQ ID NO: 18349 - protein, 13 aa, Severe acute respiratory syndrome coronavirus 2
  REGION 1..13: note = Table B: HLA-DQA1*01:02-B1*06:02L
ICQAVTANVNALL

SEQ ID NO: 18350 - protein, 13 aa, Severe acute respiratory syndrome coronavirus 2
  REGION 1..13: note = Table B: HLA-DQA1*01:02-B1*06:02L HLA-DQA1*03:01-B1*03:02L HLA-DQA1*05:05-B1*03:01L HLA-DQA1*01:03-B1*06:01L HLA-DQA1*02:01-B1*03:03L
VTANVNALLSTDG

SEQ ID NO: 18351 - protein, 13 aa, Severe acute respiratory syndrome coronavirus 2
  REGION 1..13: note = Table B: HLA-DQA1*01:02-B1*06:02L HLA-DRB1*11:04L HLA-DPA1*01:02-B1*04:01L
QHRLYECLYRNRD

SEQ ID NO: 18352 - protein, 10 aa, Severe acute respiratory syndrome coronavirus 2
  REGION 1..10: note = Table B: HLA-DQA1*01:02-B1*06:02L HLA-DRB1*08:77L HLA-DPA1*01:03-B1*03:01L HLA-DRB1*03:01L HLA-DRB1*11:02L HLA-DQA1*01-B1*05L HLA-DQA1*05:05-B1*03:19M HLA-DQA1*05:01-B1*02:01M HLA-DRB4*01:01L
  REGION 1..10: note = CONT. FROM ABOVE: HLA-DPA1*01:03-B1*04:01L HLA-DPA1*01:03-B1*104 :01M HLA-DRB1*10:01L HLA-DRB1*16:01L
TDFVNEFYAY

SEQ ID NO: 18353 - protein, 12 aa, Severe acute respiratory syndrome coronavirus 2
  REGION 1..12: note = Table B: HLA-DQA1*01:02-B1*06:02L
RKHFSMMILSDD

SEQ ID NO: 18354 - protein, 12 aa, Severe acute respiratory syndrome coronavirus 2
  REGION 1..12: note = Table B: HLA-DQA1*01:02-B1*06:02L HLA-DQA1*03:01-B1*03:02L
KHFSMMILSDDA

SEQ ID NO: 18355 - protein, 10 aa, Severe acute respiratory syndrome coronavirus 2
  REGION 1..10: note = Table B: HLA-DQA1*01:02-B1*06:02L
ILSDDAVVCF

SEQ ID NO: 18356 - protein, 10 aa, Severe acute respiratory syndrome coronavirus 2
  REGION 1..10: note = Table B: HLA-DQA1*01:02-B1*06:02L
DAVVCFNSTY

SEQ ID NO: 18357 - protein, 14 aa, Severe acute respiratory syndrome coronavirus 2
  REGION 1..14: note = Table B: HLA-DQA1*01:02-B1*06:02L HLA-DPA1*03:01-B1*105:01L
VVCFNSTYASQGLV

SEQ ID NO: 18358 - protein, 11 aa, Severe acute respiratory syndrome coronavirus 2
  REGION 1..11: note = Table B: HLA-DQA1*01:02-B1*06:02L
SQGLVASIKNF

SEQ ID NO: 18359 - protein, 12 aa, Severe acute respiratory syndrome coronavirus 2
  REGION 1..12: note = Table B: HLA-DQA1*01:02-B1*06:02L
LVASIKNFKSVL

SEQ ID NO: 18360 - protein, 11 aa, Severe acute respiratory syndrome coronavirus 2
  REGION 1..11: note = Table B: HLA-DQA1*01:02-B1*06:02L HLA-DPA1*03:01-B1*04:02L HLA-DPA1*03:01-B1*105:01L HLA-DQA1*01:03-B1*06:01L HLA-DQA1*02:01-B1*03:03L
NFKSVLYYQNN

SEQ ID NO: 18361 - protein, 13 aa, Severe acute respiratory syndrome coronavirus 2
  REGION 1..13: note = Table B: HLA-DQA1*01:02-B1*06:02L HLA-DPA1*03:01-B1*04:02L HLA-DPA1*03:01-B1*105:01L
NNVFMSEAKCWTE

SEQ ID NO: 18362 - protein, 12 aa, Severe acute respiratory syndrome coronavirus 2
  REGION 1..12: note = Table B: HLA-DQA1*01:02-B1*06:02L HLA-DPA1*03:01-B1*105:01L HLA-DQA1*01:03-B1*06:01L
VFMSEAKCWTET

SEQ ID NO: 18363 - protein, 12 aa, Severe acute respiratory syndrome coronavirus 2
  REGION 1..12: note = Table B: HLA-DQA1*01:02-B1*06:02L HLA-DPA1*03:01-B1*105:01L HLA-DQA1*01:03-B1*06:01L
FMSEAKCWTETD

SEQ ID NO: 18364 - protein, 12 aa, Severe acute respiratory syndrome coronavirus 2
  REGION 1..12: note = Table B: HLA-DQA1*01:02-B1*06:02L HLA-DQA1*01:03-B1*06:01L
MSEAKCWTETDL

SEQ ID NO: 18365 - protein, 14 aa, Severe acute respiratory syndrome coronavirus 2
  REGION 1..14: note = Table B: HLA-DQA1*01:02-B1*06:02L
DLTKGPHEFCSQHT

SEQ ID NO: 18366 - protein, 12 aa, Severe acute respiratory syndrome coronavirus 2
  REGION 1..12: note = Table B: HLA-DQA1*01:02-B1*06:02L
GPHEFCSQHTML

SEQ ID NO: 18367 - protein, 10 aa, Severe acute respiratory syndrome coronavirus 2
  REGION 1..10: note = Table B: HLA-DQA1*01:02-B1*06:02L HLA-DQA1*03:01-B1*03:02L HLA-DQA1*01:03-B1*06:01L HLA-DQA1*02:01-B1*03:03L
HTMLVKQGDD

SEQ ID NO: 18368 - protein, 13 aa, Severe acute respiratory syndrome coronavirus 2
  REGION 1..13: note = Table B: HLA-DQA1*01:02-B1*06:02L
QGDDYVYLPYPDP

SEQ ID NO: 18369 - protein, 12 aa, Severe acute respiratory syndrome coronavirus 2
  REGION 1..12: note = Table B: HLA-DQA1*01:02-B1*06:02L
PYPDPSRILGAG

SEQ ID NO: 18370 - protein, 14 aa, Severe acute respiratory syndrome coronavirus 2
  REGION 1..14: note = Table B: HLA-DQA1*01:02-B1*06:02L HLA-DQA1*05:05-B1*03:19L HLA-DQA1*05:05-B1*03:01L
DPSRILGAGCFVDD

SEQ ID NO: 18371 - protein, 11 aa, Severe acute respiratory syndrome coronavirus 2
  REGION 1..11: note = Table B: HLA-DQA1*01:02-B1*06:02L
GAGCFVDDIVK

SEQ ID NO: 18372 - protein, 14 aa, Severe acute respiratory syndrome coronavirus 2
  REGION 1..14: note = Table B: HLA-DQA1*01:02-B1*06:02L
AGCFVDDIVKTDGT

SEQ ID NO: 18373 - protein, 12 aa, Severe acute respiratory syndrome coronavirus 2
  REGION 1..12: note = Table B: HLA-DQA1*01:02-B1*06:02L HLA-DQA1*01:01-B1*05:01L HLA-DPA1*03:01-B1*105:01L HLA-DRB1*16:01L HLA-DQA1*01:03-B1*06:01L
FVDDIVKTDGTL

SEQ ID NO: 18374 - protein, 12 aa, Severe acute respiratory syndrome coronavirus 2
  REGION 1..12: note = Table B: HLA-DQA1*01:02-B1*06:02L HLA-DRB1*03:01L HLA-DRB1*08:01L HLA-DRB1*11:01L HLA-DRB4*02:01NL HLA-DRB4*01:01L HLA-DPA1*01:03-B1*04:02L HLA-DPA1*02:01-B1*13:01L HLA-DRB1*10:01L HLA-DRB1*08:03L
VDDIVKTDGTLM

SEQ ID NO: 18375 - protein, 12 aa, Severe acute respiratory syndrome coronavirus 2
  REGION 1..12: note = Table B: HLA-DQA1*01:02-B1*06:02L HLA-DRB1*01:01L HLA-DRB1*08:04L HLA-DRB1*03:01L HLA-DRB1*11:01L HLA-DRB1*13:01L HLA-DRB4*01:01L HLA-DRB1*04:10L HLA-DRB3*01:01L HLA-DPA1*02:01-B1*13:01L HLA-DRB1*10:01L HLA-DRB1*04:08L
  REGION 1..12: note = CONT. FROM ABOVE: HLA-DRB1*08:03L
DIVKTDGTLMIE

SEQ ID NO: 18376 - protein, 12 aa, Severe acute respiratory syndrome coronavirus 2
  REGION 1..12: note = Table B: HLA-DQA1*01:02-B1*06:02L HLA-DRB1*01:02L
LMIERFVSLAID

SEQ ID NO: 18377 - protein, 10 aa, Severe acute respiratory syndrome coronavirus 2
  REGION 1..10: note = Table B: HLA-DQA1*01:02-B1*06:02L HLA-DQA1*05:05-B1*03:19L HLA-DPA1*01:03-B1*04:01L HLA-DPA1*02:01-B1*13:01L
RFVSLAIDAY

SEQ ID NO: 18378 - protein, 12 aa, Severe acute respiratory syndrome coronavirus 2
  REGION 1..12: note = Table B: HLA-DQA1*01:02-B1*06:02L
VSLAIDAYPLTK

SEQ ID NO: 18379 - protein, 12 aa, Severe acute respiratory syndrome coronavirus 2
  REGION 1..12: note = Table B: HLA-DQA1*01:02-B1*06:02L HLA-DPA1*03:01-B1*04:02L HLA-DQA1*01-B1*05L HLA-DQA1*05:01-B1*02:01L HLA-DPA1*01:02-B1*04:01L HLA-DRB1*04:08L
LAIDAYPLTKHP

SEQ ID NO: 18380 - protein, 13 aa, Severe acute respiratory syndrome coronavirus 2
  REGION 1..13: note = Table B: HLA-DQA1*01:02-B1*06:02L HLA-DRB1*08:01L HLA-DRB1*12:01L
VFHLYLQYIRKLH

SEQ ID NO: 18381 - protein, 14 aa, Severe acute respiratory syndrome coronavirus 2
  REGION 1..14: note = Table B: HLA-DQA1*01:02-B1*06:02L
QYIRKLHDELTGHM

SEQ ID NO: 18382 - protein, 10 aa, Severe acute respiratory syndrome coronavirus 2
  REGION 1..10: note = Table B: HLA-DQA1*01:02-B1*06:02L HLA-DPA1*03:01-B1*105:01L HLA-DQA1*01:03-B1*06:01M HLA-DQA1*02:01-B1*03:03L
LTGHMLDMYS

SEQ ID NO: 18383 - protein, 14 aa, Severe acute respiratory syndrome coronavirus 2
  REGION 1..14: note = Table B: HLA-DQA1*01:02-B1*06:02L HLA-DPA1*03:01-B1*105:01L HLA-DRB1*04:08L
GHMLDMYSVMLTND

SEQ ID NO: 18384 - protein, 10 aa, Severe acute respiratory syndrome coronavirus 2
  REGION 1..10: note = Table B: HLA-DQA1*01:02-B1*06:02L HLA-DQA1*05:05-B1*03:19L HLA-DQA1*05:01-B1*02:01L HLA-DRB1*16:01L HLA-DQA1*02:01-B1*03:03L
TSRYWEPEFY

SEQ ID NO: 18385 - protein, 12 aa, Severe acute respiratory syndrome coronavirus 2
  REGION 1..12: note = Table B: HLA-DQA1*01:02-B1*06:02L HLA-DRB1*08:01L HLA-DPA1*01:03-B1*04:02L HLA-DRB1*12:01L HLA-DRB1*15:03L
PEFYEAMYTPHT

SEQ ID NO: 18386 - protein, 12 aa, Severe acute respiratory syndrome coronavirus 2
  REGION 1..12: note = Table B: HLA-DQA1*01:02-B1*06:02L
QAVGACVLCNSQ

SEQ ID NO: 18387 - protein, 11 aa, Severe acute respiratory syndrome coronavirus 2
  REGION 1..11: note = Table B: HLA-DQA1*01:02-B1*06:02L
VGACVLCNSQT

SEQ ID NO: 18388 - protein, 13 aa, Severe acute respiratory syndrome coronavirus 2
  REGION 1..13: note = Table B: HLA-DQA1*01:02-B1*06:02L
NSQTSLRCGACIR

SEQ ID NO: 18389 - protein, 15 aa, Severe acute respiratory syndrome coronavirus 2
  REGION 1..15: note = Table B: HLA-DQA1*01:02-B1*06:02L
SQTSLRCGACIRRPF

SEQ ID NO: 18390 - protein, 17 aa, Severe acute respiratory syndrome coronavirus 2
  REGION 1..17: note = Table B: HLA-DQA1*01:02-B1*06:02L HLA-DPA1*02:01-B1*13:01L
IRRPFLCCKCCYDHVIS

SEQ ID NO: 18391 - protein, 13 aa, Severe acute respiratory syndrome coronavirus 2
  REGION 1..13: note = Table B: HLA-DQA1*01:02-B1*06:02L
VISTSHKLVLSVN

SEQ ID NO: 18392 - protein, 11 aa, Severe acute respiratory syndrome coronavirus 2
  REGION 1..11: note = Table B: HLA-DQA1*01:02-B1*06:02L HLA-DQA1*05:05-B1*03:19L HLA-DQA1*03:01-B1*03:02L HLA-DRB1*16:01L
SHKLVLSVNPY

SEQ ID NO: 18393 - protein, 13 aa, Severe acute respiratory syndrome coronavirus 2
  REGION 1..13: note = Table B: HLA-DQA1*01:02-B1*06:02L
SVNPYVCNAPGCD

SEQ ID NO: 18394 - protein, 13 aa, Severe acute respiratory syndrome coronavirus 2
  REGION 1..13: note = Table B: HLA-DQA1*01:02-B1*06:02L
NPYVCNAPGCDVT

SEQ ID NO: 18395 - protein, 10 aa, Severe acute respiratory syndrome coronavirus 2
  REGION 1..10: note = Table B: HLA-DQA1*01:02-B1*06:02L HLA-DPA1*01:03-B1*03:01L HLA-DRB1*03:01L HLA-DRB1*11:02L HLA-DQA1*05:05-B1*03:19M HLA-DQA1*05:01-B1*02:01L HLA-DPA1*01:03-B1*104:01L HLA-DRB1*16:01L
CDVTDVTQLY

SEQ ID NO: 18396 - protein, 12 aa, Severe acute respiratory syndrome coronavirus 2
  REGION 1..12: note = Table B: HLA-DQA1*01:02-B1*06:02L HLA-DQA1*01:03-B1*06:01L
YLGGMSYYCKSH

SEQ ID NO: 18397 - protein, 14 aa, Severe acute respiratory syndrome coronavirus 2
  REGION 1..14: note = Table B: HLA-DQA1*01:02-B1*06:02L
KPPISFPLCANGQV

SEQ ID NO: 18398 - protein, 15 aa, Severe acute respiratory syndrome coronavirus 2
  REGION 1..15: note = Table B: HLA-DQA1*01:02-B1*06:02L
PPISFPLCANGQVFG

SEQ ID NO: 18399 - protein, 14 aa, Severe acute respiratory syndrome coronavirus 2
  REGION 1..14: note = Table B: HLA-DQA1*01:02-B1*06:02L HLA-DPA1*03:01-B1*105:01L
FPLCANGQVFGLYK

SEQ ID NO: 18400 - protein, 12 aa, Severe acute respiratory syndrome coronavirus 2
  REGION 1..12: note = Table B: HLA-DQA1*01:02-B1*06:02L HLA-DPA1*03:01-B1*105:01L HLA-DPA1*01:02-B1*04:01L
ANGQVFGLYKNT

SEQ ID NO: 18401 - protein, 13 aa, Severe acute respiratory syndrome coronavirus 2
  REGION 1..13: note = Table B: HLA-DQA1*01:02-B1*06:02L HLA-DRB1*01:02L HLA-DQA1*01-B1*05L HLA-DRB1*12:01L HLA-DRB1*16:01L
VFGLYKNTCVGSD

SEQ ID NO: 18402 - protein, 14 aa, Severe acute respiratory syndrome coronavirus 2
  REGION 1..14: note = Table B: HLA-DQA1*01:02-B1*06:02L
LYKNTCVGSDNVTD

SEQ ID NO: 18403 - protein, 15 aa, Severe acute respiratory syndrome coronavirus 2
  REGION 1..15: note = Table B: HLA-DQA1*01:02-B1*06:02L
YKNTCVGSDNVTDFN

SEQ ID NO: 18404 - protein, 14 aa, Severe acute respiratory syndrome coronavirus 2
  REGION 1..14: note = Table B: HLA-DQA1*01:02-B1*06:02L HLA-DPA1*03:01-B1*105:01L HLA-DQA1*05:05-B1*03:01L HLA-DQA1*01:03-B1*06:01L HLA-DRB1*15:03L
SDNVTDFNAIATCD

SEQ ID NO: 18405 - protein, 13 aa, Severe acute respiratory syndrome coronavirus 2
  REGION 1..13: note = Table B: HLA-DQA1*01:02-B1*06:02L HLA-DPA1*03:01-B1*105:01L
VTDFNAIATCDWT

SEQ ID NO: 18406 - protein, 12 aa, Severe acute respiratory syndrome coronavirus 2
  REGION 1..12: note = Table B: HLA-DQA1*01:02-B1*06:02L
DFNAIATCDWTN

SEQ ID NO: 18407 - protein, 12 aa, Severe acute respiratory syndrome coronavirus 2
  REGION 1..12: note = Table B: HLA-DQA1*01:02-B1*06:02L HLA-DPA1*03:01-B1*105:01L HLA-DQA1*01:03-B1*06:01L
NAIATCDWTNAG

SEQ ID NO: 18408 - protein, 12 aa, Severe acute respiratory syndrome coronavirus 2
  REGION 1..12: note = Table B: HLA-DQA1*01:02-B1*06:02L HLA-DPA1*03:01-B1*105:01L HLA-DQA1*05:05-B1*03:01L HLA-DQA1*01:03-B1*06:01L HLA-DQA1*02:01-B1*03:03L
IATCDWTNAGDY

SEQ ID NO: 18409 - protein, 13 aa, Severe acute respiratory syndrome coronavirus 2
  REGION 1..13: note = Table B: HLA-DQA1*01:02-B1*06:02L
NAGDYILANTCTE

SEQ ID NO: 18410 - protein, 11 aa, Severe acute respiratory syndrome coronavirus 2
  REGION 1..11: note = Table B: HLA-DQA1*01:02-B1*06:02L HLA-DRB1*01:02L HLA-DQA1*01:03-B1*06:01L HLA-DQA1*02:01-B1*03:03L
ILANTCTERLK

SEQ ID NO: 18411 - protein, 11 aa, Severe acute respiratory syndrome coronavirus 2
  REGION 1..11: note = Table B: HLA-DQA1*01:02-B1*06:02L HLA-DQA1*01-B1*05L HLA-DPA1*01:03-B1*04:01L HLA-DQA1*02:01-B1*03:03L
VLSDRELHLSW

SEQ ID NO: 18412 - protein, 11 aa, Severe acute respiratory syndrome coronavirus 2
  REGION 1..11: note = Table B: HLA-DQA1*01:02-B1*06:02L HLA-DQA1*05:05-B1*03:01L
WEVGKPRPPLN

SEQ ID NO: 18413 - protein, 10 aa, Severe acute respiratory syndrome coronavirus 2
  REGION 1..10: note = Table B: HLA-DQA1*01:02-B1*06:02L
RPPLNRNYVF

SEQ ID NO: 18414 - protein, 12 aa, Severe acute respiratory syndrome coronavirus 2
  REGION 1..12: note = Table B: HLA-DQA1*01:02-B1*06:02L HLA-DRB1*08:04L HLA-DRB1*11:01L HLA-DRB1*14:54L
YRVTKNSKVQIG

SEQ ID NO: 18415 - protein, 13 aa, Severe acute respiratory syndrome coronavirus 2
  REGION 1..13: note = Table B: HLA-DQA1*01:02-B1*06:02L
KLNVGDYFVLTSH

SEQ ID NO: 18416 - protein, 13 aa, Severe acute respiratory syndrome coronavirus 2
  REGION 1..13: note = Table B: HLA-DQA1*01:02-B1*06:02L
LNVGDYFVLTSHT

SEQ ID NO: 18417 - protein, 12 aa, Severe acute respiratory syndrome coronavirus 2
  REGION 1..12: note = Table B: HLA-DQA1*01:02-B1*06:02L
LTSHTVMPLSAP

SEQ ID NO: 18418 - protein, 10 aa, Severe acute respiratory syndrome coronavirus 2
  REGION 1..10: note = Table B: HLA-DQA1*01:02-B1*06:02L
EHYVRITGLY

SEQ ID NO: 18419 - protein, 12 aa, Severe acute respiratory syndrome coronavirus 2
  REGION 1..12: note = Table B: HLA-DQA1*01:02-B1*06:02L HLA-DQA1*05:05-B1*03:01L HLA-DQA1*01:03-B1*06:01L
TGLYPTLNISDE

SEQ ID NO: 18420 - protein, 15 aa, Severe acute respiratory syndrome coronavirus 2
  REGION 1..15: note = Table B: HLA-DQA1*01:02-B1*06:02L HLA-DPA1*03:01-B1*105:01L
PTLNISDEFSSNVAN

SEQ ID NO: 18421 - protein, 13 aa, Severe acute respiratory syndrome coronavirus 2
  REGION 1..13: note = Table B: HLA-DQA1*01:02-B1*06:02L
YQKVGMQKYSTLQ

SEQ ID NO: 18422 - protein, 14 aa, Severe acute respiratory syndrome coronavirus 2
  REGION 1..14: note = Table B: HLA-DQA1*01:02-B1*06:02L
YSTLQGPPGTGKSH

SEQ ID NO: 18423 - protein, 10 aa, Severe acute respiratory syndrome coronavirus 2
  REGION 1..10: note = Table B: HLA-DQA1*01:02-B1*06:02L HLA-DQA1*05:05-B1*03:19L HLA-DRB4*01:01L HLA-DPA1*01:03-B1*04:01L HLA-DPA1*02:01-B1*13:01L
HFAIGLALYY

SEQ ID NO: 18424 - protein, 11 aa, Severe acute respiratory syndrome coronavirus 2
  REGION 1..11: note = Table B: HLA-DQA1*01:02-B1*06:02L
IVYTACSHAAV

SEQ ID NO: 18425 - protein, 10 aa, Severe acute respiratory syndrome coronavirus 2
  REGION 1..10: note = Table B: HLA-DQA1*01:02-B1*06:02L HLA-DQA1*01:03-B1*06:01L
YTACSHAAVD

SEQ ID NO: 18426 - protein, 14 aa, Severe acute respiratory syndrome coronavirus 2
  REGION 1..14: note = Table B: HLA-DQA1*01:02-B1*06:02L
TACSHAAVDALCEK

SEQ ID NO: 18427 - protein, 12 aa, Severe acute respiratory syndrome coronavirus 2
  REGION 1..12: note = Table B: HLA-DQA1*01:02-B1*06:02L
SHAAVDALCEKA

SEQ ID NO: 18428 - protein, 12 aa, Severe acute respiratory syndrome coronavirus 2
  REGION 1..12: note = Table B: HLA-DQA1*01:02-B1*06:02L
HAAVDALCEKAL

SEQ ID NO: 18429 - protein, 12 aa, Severe acute respiratory syndrome coronavirus 2
  REGION 1..12: note = Table B: HLA-DQA1*01:02-B1*06:02L HLA-DRB1*01:02L HLA-DQA1*01:03-B1*06:01L
AAVDALCEKALK

SEQ ID NO: 18430 - protein, 10 aa, Severe acute respiratory syndrome coronavirus 2
  REGION 1..10: note = Table B: HLA-DQA1*01:02-B1*06:02L HLA-DQA1*05:05-B1*03:19L
DALCEKALKY

SEQ ID NO: 18431 - protein, 11 aa, Severe acute respiratory syndrome coronavirus 2
  REGION 1..11: note = Table B: HLA-DQA1*01:02-B1*06:02L HLA-DQA1*01-B1*05L
EKALKYLPIDK

SEQ ID NO: 18432 - protein, 13 aa, Severe acute respiratory syndrome coronavirus 2
  REGION 1..13: note = Table B: HLA-DQA1*01:02-B1*06:02L HLA-DRB1*08:01L
YLPIDKCSRIIPA

SEQ ID NO: 18433 - protein, 10 aa, Severe acute respiratory syndrome coronavirus 2
  REGION 1..10: note = Table B: HLA-DQA1*01:02-B1*06:02L HLA-DQA1*01:03-B1*06:01L HLA-DQA1*02:01-B1*03:03L
DKCSRIIPAR

SEQ ID NO: 18434 - protein, 12 aa, Severe acute respiratory syndrome coronavirus 2
  REGION 1..12: note = Table B: HLA-DQA1*01:02-B1*06:02L
IIPARARVECFD

SEQ ID NO: 18435 - protein, 14 aa, Severe acute respiratory syndrome coronavirus 2
  REGION 1..14: note = Table B: HLA-DQA1*01:02-B1*06:02L
VECFDKFKVNSTLE

SEQ ID NO: 18436 - protein, 12 aa, Severe acute respiratory syndrome coronavirus 2
  REGION 1..12: note = Table B: HLA-DQA1*01:02-B1*06:02L
VFCTVNALPETT

SEQ ID NO: 18437 - protein, 12 aa, Severe acute respiratory syndrome coronavirus 2
  REGION 1..12: note = Table B: HLA-DQA1*01:02-B1*06:02L HLA-DQA1*03:01-B1*03:02L HLA-DQA1*02:01-B1*03:03L
PETTADIVVFDE

SEQ ID NO: 18438 - protein, 12 aa, Severe acute respiratory syndrome coronavirus 2
  REGION 1..12: note = Table B: HLA-DQA1*01:02-B1*06:02L HLA-DPA1*03:01-B1*105:01L
TNYDLSVVNARL

SEQ ID NO: 18439 - protein, 11 aa, Severe acute respiratory syndrome coronavirus 2
  REGION 1..11: note = Table B: HLA-DQA1*01:02-B1*06:02L
YDLSVVNARLR

SEQ ID NO: 18440 - protein, 11 aa, Severe acute respiratory syndrome coronavirus 2
  REGION 1..11: note = Table B: HLA-DQA1*01:02-B1*06:02L HLA-DRB1*03:01L HLA-DRB1*14:01L HLA-DQA1*02:01-B1*03:03L HLA-DRB1*15:03L
VVNARLRAKHY

SEQ ID NO: 18441 - protein, 15 aa, Severe acute respiratory syndrome coronavirus 2
  REGION 1..15: note = Table B: HLA-DQA1*01:02-B1*06:02L HLA-DRB1*11:04L HLA-DRB1*11:01L HLA-DRB3*01:01L HLA-DRB1*15:03L
ARLRAKHYVYIGDPA

SEQ ID NO: 18442 - protein, 15 aa, Severe acute respiratory syndrome coronavirus 2
  REGION 1..15: note = Table B: HLA-DQA1*01:02-B1*06:02L
LPAPRTLLTKGTLEP

SEQ ID NO: 18443 - protein, 13 aa, Severe acute respiratory syndrome coronavirus 2
  REGION 1..13: note = Table B: HLA-DQA1*01:02-B1*06:02L HLA-DPA1*01:03-B1*03:01L HLA-DPA1*02:01-B1*13:01L HLA-DQA1*01:03-B1*06:01L
LEPEYFNSVCRLM

SEQ ID NO: 18444 - protein, 12 aa, Severe acute respiratory syndrome coronavirus 2
  REGION 1..12: note = Table B: HLA-DQA1*01:02-B1*06:02L
FNSVCRLMKTIG

SEQ ID NO: 18445 - protein, 12 aa, Severe acute respiratory syndrome coronavirus 2
  REGION 1..12: note = Table B: HLA-DQA1*01:02-B1*06:02L HLA-DQA1*01:03-B1*06:01L
NSVCRLMKTIGP

SEQ ID NO: 18446 - protein, 12 aa, Severe acute respiratory syndrome coronavirus 2
  REGION 1..12: note = Table B: HLA-DQA1*01:02-B1*06:02L HLA-DQA1*01:03-B1*06:01L
SVCRLMKTIGPD

SEQ ID NO: 18447 - protein, 14 aa, Severe acute respiratory syndrome coronavirus 2
  REGION 1..14: note = Table B: HLA-DQA1*01:02-B1*06:02L
IGPDMFLGTCRRCP

SEQ ID NO: 18448 - protein, 14 aa, Severe acute respiratory syndrome coronavirus 2
  REGION 1..14: note = Table B: HLA-DQA1*01:02-B1*06:02L HLA-DRB1*01:02L HLA-DQA1*01:03-B1*06:01L
GPDMFLGTCRRCPA

SEQ ID NO: 18449 - protein, 12 aa, Severe acute respiratory syndrome coronavirus 2
  REGION 1..12: note = Table B: HLA-DQA1*01:02-B1*06:02L
MFLGTCRRCPAE

SEQ ID NO: 18450 - protein, 13 aa, Severe acute respiratory syndrome coronavirus 2
  REGION 1..13: note = Table B: HLA-DQA1*01:02-B1*06:02L
AHKDKSAQCFKMF

SEQ ID NO: 18451 - protein, 12 aa, Severe acute respiratory syndrome coronavirus 2
  REGION 1..12: note = Table B: HLA-DQA1*01:02-B1*06:02L HLA-DQA1*01:03-B1*06:01L
DKSAQCFKMFYK

SEQ ID NO: 18452 - protein, 14 aa, Severe acute respiratory syndrome coronavirus 2
  REGION 1..14: note = Table B: HLA-DQA1*01:02-B1*06:02L HLA-DRB1*08:01L
SAQCFKMFYKGVIT

SEQ ID NO: 18453 - protein, 13 aa, Severe acute respiratory syndrome coronavirus 2
  REGION 1..13: note = Table B: HLA-DQA1*01:02-B1*06:02L HLA-DRB1*03:01L HLA-DQA1*05:05-B1*03:19L
VITHDVSSAINRP

SEQ ID NO: 18454 - protein, 13 aa, Severe acute respiratory syndrome coronavirus 2
  REGION 1..13: note = Table B: HLA-DQA1*01:02-B1*06:02L
PAWRKAVFISPYN

SEQ ID NO: 18455 - protein, 13 aa, Severe acute respiratory syndrome coronavirus 2
  REGION 1..13: note = Table B: HLA-DQA1*01:02-B1*06:02L HLA-DQA1*01-B1*05L HLA-DPA1*02:01-B1*13:01L HLA-DQA1*02:01-B1*03:03L
WRKAVFISPYNSQ

SEQ ID NO: 18456 - protein, 12 aa, Severe acute respiratory syndrome coronavirus 2
  REGION 1..12: note = Table B: HLA-DQA1*01:02-B1*06:02L
VASKILGLPTQT

SEQ ID NO: 18457 - protein, 14 aa, Severe acute respiratory syndrome coronavirus 2
  REGION 1..14: note = Table B: HLA-DQA1*01:02-B1*06:02L HLA-DQA1*05:05-B1*03:19L HLA-DQA1*01:03-B1*06:01L
GLPTQTVDSSQGSE

SEQ ID NO: 18458 - protein, 12 aa, Severe acute respiratory syndrome coronavirus 2
  REGION 1..12: note = Table B: HLA-DQA1*01:02-B1*06:02L HLA-DQA1*05:05-B1*03:19L HLA-DPA1*03:01-B1*105:01L HLA-DQA1*05:05-B1*03:01L
FTQTTETAHSCN

SEQ ID NO: 18459 - protein, 11 aa, Severe acute respiratory syndrome coronavirus 2
  REGION 1..11: note = Table B: HLA-DQA1*01:02-B1*06:02L
ETAHSCNVNRF

SEQ ID NO: 18460 - protein, 10 aa, Severe acute respiratory syndrome coronavirus 2
  REGION 1..10: note = Table B: HLA-DQA1*01:02-B1*06:02L HLA-DQA1*01:03-B1*06:01L
AHSCNVNRFN

SEQ ID NO: 18461 - protein, 10 aa, Severe acute respiratory syndrome coronavirus 2
  REGION 1..10: note = Table B: HLA-DQA1*01:02-B1*06:02L HLA-DQA1*05:05-B1*03:19L HLA-DRB1*16:01L HLA-DQA1*01:03-B1*06:01L HLA-DQA1*02:01-B1*03:03L
VAITRAKVGI

SEQ ID NO: 18462 - protein, 14 aa, Severe acute respiratory syndrome coronavirus 2
  REGION 1..14: note = Table B: HLA-DQA1*01:02-B1*06:02L HLA-DRB1*01:02L HLA-DPA1*01:03-B1*104:01L
ITRAKVGILCIMSD

SEQ ID NO: 18463 - protein, 12 aa, Severe acute respiratory syndrome coronavirus 2
  REGION 1..12: note = Table B: HLA-DQA1*01:02-B1*06:02L
AKVGILCIMSDR

SEQ ID NO: 18464 - protein, 12 aa, Severe acute respiratory syndrome coronavirus 2
  REGION 1..12: note = Table B: HLA-DQA1*01:02-B1*06:02L HLA-DQA1*05:01-B1*02:01L HLA-DPA1*03:01-B1*105:01L
IMSDRDLYDKLQ

SEQ ID NO: 18465 - protein, 11 aa, Severe acute respiratory syndrome coronavirus 2
  REGION 1..11: note = Table B: HLA-DQA1*01:02-B1*06:02L HLA-DRB1*01:02L HLA-DPA1*03:01-B1*105:01L HLA-DRB1*16:01L
QFTSLEIPRRN

SEQ ID NO: 18466 - protein, 12 aa, Severe acute respiratory syndrome coronavirus 2
  REGION 1..12: note = Table B: HLA-DQA1*01:02-B1*06:02L HLA-DRB1*01:02L
FTSLEIPRRNVA

SEQ ID NO: 18467 - protein, 10 aa, Severe acute respiratory syndrome coronavirus 2
  REGION 1..10: note = Table B: HLA-DQA1*01:02-B1*06:02L HLA-DQA1*05:01-B1*02:01L HLA-DQA1*03:01-B1*03:02L
EIPRRNVATL

SEQ ID NO: 18468 - protein, 10 aa, Severe acute respiratory syndrome coronavirus 2
  REGION 1..10: note = Table B: HLA-DQA1*01:02-B1*06:02L HLA-DQA1*02:01-B1*03:03L
LQAENVTGLF

SEQ ID NO: 18469 - protein, 12 aa, Severe acute respiratory syndrome coronavirus 2
  REGION 1..12: note = Table B: HLA-DQA1*01:02-B1*06:02L HLA-DPA1*03:01-B1*105:01L
AENVTGLFKDCS

SEQ ID NO: 18470 - protein, 12 aa, Severe acute respiratory syndrome coronavirus 2
  REGION 1..12: note = Table B: HLA-DQA1*01:02-B1*06:02L HLA-DPA1*03:01-B1*105:01L HLA-DQA1*02:01-B1*03:03L
ENVTGLFKDCSK

SEQ ID NO: 18471 - protein, 13 aa, Severe acute respiratory syndrome coronavirus 2
  REGION 1..13: note = Table B: HLA-DQA1*01:02-B1*06:02L
FKDCSKVITGLHP

SEQ ID NO: 18472 - protein, 11 aa, Severe acute respiratory syndrome coronavirus 2
  REGION 1..11: note = Table B: HLA-DQA1*01:02-B1*06:02L HLA-DQA1*01:03-B1*06:01L HLA-DQA1*02:01-B1*03:03L
VITGLHPTQAP

SEQ ID NO: 18473 - protein, 12 aa, Severe acute respiratory syndrome coronavirus 2
  REGION 1..12: note = Table B: HLA-DQA1*01:02-B1*06:02L HLA-DQA1*03:01-B1*03:02L HLA-DQA1*01:03-B1*06:01L HLA-DQA1*02:01-B1*03:03L
HPTQAPTHLSVD

SEQ ID NO: 18474 - protein, 12 aa, Severe acute respiratory syndrome coronavirus 2
  REGION 1..12: note = Table B: HLA-DQA1*01:02-B1*06:02L HLA-DQA1*03:01-B1*03:02L HLA-DQA1*01:03-B1*06:01L HLA-DQA1*02:01-B1*03:03L
PTQAPTHLSVDT

SEQ ID NO: 18475 - protein, 11 aa, Severe acute respiratory syndrome coronavirus 2
  REGION 1..11: note = Table B: HLA-DQA1*01:02-B1*06:02L HLA-DQA1*02:01-B1*03:03L
APTHLSVDTKF

SEQ ID NO: 18476 - protein, 12 aa, Severe acute respiratory syndrome coronavirus 2
  REGION 1..12: note = Table B: HLA-DQA1*01:02-B1*06:02L HLA-DRB1*01:02L HLA-DRB1*08:04L HLA-DPA1*01:03-B1*03:01L HLA-DRB1*11:04L HLA-DRB1*12:01L HLA-DRB1*15:03L
HLSVDTKFKTEG

SEQ ID NO: 18477 - protein, 13 aa, Severe acute respiratory syndrome coronavirus 2
  REGION 1..13: note = Table B: HLA-DQA1*01:02-B1*06:02L HLA-DPA1*03:01-B1*04:02L HLA-DPA1*01:03-B1*04:01L HLA-DPA1*01:03-B1*04:02L HLA-DPA1*02:01-B1*13:01L HLA-DPA1*03:01-B1*105:01L HLA-DPA1*01:02-B1*04:01L HLA-DRB1*04:08L
VDTKFKTEGLCVD

SEQ ID NO: 18478 - protein, 13 aa, Severe acute respiratory syndrome coronavirus 2
  REGION 1..13: note = Table B: HLA-DQA1*01:02-B1*06:02L HLA-DPA1*01:03-B1*04:02L HLA-DRB1*16:01L HLA-DRB1*04:08L
KFKTEGLCVDIPG

SEQ ID NO: 18479 - protein, 13 aa, Severe acute respiratory syndrome coronavirus 2
  REGION 1..13: note = Table B: HLA-DQA1*01:02-B1*06:02L
TEGLCVDIPGIPK

SEQ ID NO: 18480 - protein, 12 aa, Severe acute respiratory syndrome coronavirus 2
  REGION 1..12: note = Table B: HLA-DQA1*01:02-B1*06:02L HLA-DRB1*08:01L HLA-DRB1*04:08L
DMTYRRLISMMG

SEQ ID NO: 18481 - protein, 12 aa, Severe acute respiratory syndrome coronavirus 2
  REGION 1..12: note = Table B: HLA-DQA1*01:02-B1*06:02L HLA-DRB1*01:01L HLA-DRB1*08:01L HLA-DRB1*11:01L HLA-DRB1*12:01L HLA-DRB1*15:03L
TYRRLISMMGFK

SEQ ID NO: 18482 - protein, 10 aa, Severe acute respiratory syndrome coronavirus 2
  REGION 1..10: note = Table B: HLA-DQA1*01:02-B1*06:02L HLA-DPA1*01:03-B1*03:01L HLA-DRB1*03:01L HLA-DRB1*11:02L HLA-DQA1*05:05-B1*03:19M HLA-DQA1*05:01-B1*02:01L HLA-DPA1*01:03-B1*104:01L HLA-DRB1*16:01L
ISMMGFKMNY

SEQ ID NO: 18483 - protein, 12 aa, Severe acute respiratory syndrome coronavirus 2
  REGION 1..12: note = Table B: HLA-DQA1*01:02-B1*06:02L
SMMGFKMNYQVN

SEQ ID NO: 18484 - protein, 12 aa, Severe acute respiratory syndrome coronavirus 2
  REGION 1..12: note = Table B: HLA-DQA1*01:02-B1*06:02L
MMGFKMNYQVNG

SEQ ID NO: 18485 - protein, 12 aa, Severe acute respiratory syndrome coronavirus 2
  REGION 1..12: note = Table B: HLA-DQA1*01:02-B1*06:02L HLA-DRB1*01:02L HLA-DRB1*15:01L
QVNGYPNMFITR

SEQ ID NO: 18486 - protein, 12 aa, Severe acute respiratory syndrome coronavirus 2
  REGION 1..12: note = Table B: HLA-DQA1*01:02-B1*06:02L HLA-DRB1*01:02L
VNGYPNMFITRE

SEQ ID NO: 18487 - protein, 12 aa, Severe acute respiratory syndrome coronavirus 2
  REGION 1..12: note = Table B: HLA-DQA1*01:02-B1*06:02L HLA-DQA1*01-B1*05L
NGYPNMFITREE

SEQ ID NO: 18488 - protein, 11 aa, Severe acute respiratory syndrome coronavirus 2
  REGION 1..11: note = Table B: HLA-DQA1*01:02-B1*06:02L
IRHVRAWIGFD

SEQ ID NO: 18489 - protein, 15 aa, Severe acute respiratory syndrome coronavirus 2
  REGION 1..15: note = Table B: HLA-DQA1*01:02-B1*06:02L HLA-DRB1*01:01L
VRAWIGFDVEGCHAT

SEQ ID NO: 18490 - protein, 13 aa, Severe acute respiratory syndrome coronavirus 2
  REGION 1..13: note = Table B: HLA-DQA1*01:02-B1*06:02L
WIGFDVEGCHATR

SEQ ID NO: 18491 - protein, 12 aa, Severe acute respiratory syndrome coronavirus 2
  REGION 1..12: note = Table B: HLA-DQA1*01:02-B1*06:02L
GFDVEGCHATRE

SEQ ID NO: 18492 - protein, 11 aa, Severe acute respiratory syndrome coronavirus 2
  REGION 1..11: note = Table B: HLA-DQA1*01:02-B1*06:02L HLA-DQA1*02:01-B1*03:03L
DVEGCHATREA

SEQ ID NO: 18493 - protein, 12 aa, Severe acute respiratory syndrome coronavirus 2
  REGION 1..12: note = Table B: HLA-DQA1*01:02-B1*06:02L
TNLPLQLGFSTG

SEQ ID NO: 18494 - protein, 14 aa, Severe acute respiratory syndrome coronavirus 2
  REGION 1..14: note = Table B: HLA-DQA1*01:02-B1*06:02L
QLGFSTGVNLVAVP

SEQ ID NO: 18495 - protein, 10 aa, Severe acute respiratory syndrome coronavirus 2
  REGION 1..10: note = Table B: HLA-DQA1*01:02-B1*06:02L HLA-DQA1*05:05-B1*03:19L HLA-DQA1*05:01-B1*02:01L HLA-DQA1*02:01-B1*03:03L
VNLVAVPTGY

SEQ ID NO: 18496 - protein, 15 aa, Severe acute respiratory syndrome coronavirus 2
  REGION 1..15: note = Table B: HLA-DQA1*01:02-B1*06:02L
TPNNTDFSRVSAKPP

SEQ ID NO: 18497 - protein, 13 aa, Severe acute respiratory syndrome coronavirus 2
  REGION 1..13: note = Table B: HLA-DQA1*01:02-B1*06:02L HLA-DRB4*03:01NL HLA-DRB1*14:01L HLA-DRB1*15:03L
TDFSRVSAKPPPG

SEQ ID NO: 18498 - protein, 14 aa, Severe acute respiratory syndrome coronavirus 2
  REGION 1..14: note = Table B: HLA-DQA1*01:02-B1*06:02L HLA-DPA1*01:03-B1*04:02L HLA-DRB1*12:01L HLA-DRB1*16:01L HLA-DRB1*04:08L HLA-DRB1*15:03L
FKHLIPLMYKGLPW

SEQ ID NO: 18499 - protein, 10 aa, Severe acute respiratory syndrome coronavirus 2
  REGION 1..10: note = Table B: HLA-DQA1*01:02-B1*06:02L HLA-DQA1*05:05-B1*03:116L HLA-DPA1*02:01-B1*13:01L HLA-DPA1*03:01-B1*105:01L HLA-DQA1*01:03-B1*06:01L HLA-DRB1*15:03L
LPWNVVRIKI

SEQ ID NO: 18500 - protein, 12 aa, Severe acute respiratory syndrome coronavirus 2
  REGION 1..12: note = Table B: HLA-DQA1*01:02-B1*06:02L HLA-DPA1*03:01-B1*105:01L
MLSDTLKNLSDR

SEQ ID NO: 18501 - protein, 11 aa, Severe acute respiratory syndrome coronavirus 2
  REGION 1..11: note = Table B: HLA-DQA1*01:02-B1*06:02L HLA-DQA1*01:03-B1*06:01L HLA-DRB1*15:03L
TLKNLSDRVVF

SEQ ID NO: 18502 - protein, 10 aa, Severe acute respiratory syndrome coronavirus 2
  REGION 1..10: note = Table B: HLA-DQA1*01:02-B1*06:02L HLA-DPA1*01:03-B1*03:01L HLA-DRB1*11:02L HLA-DQA1*05:05-B1*03:19M HLA-DQA1*05:01-B1*02:01L HLA-DPA1*01:03-B1*104:01L HLA-DRB1*16:01L
LSDRVVFVLW

SEQ ID NO: 18503 - protein, 12 aa, Severe acute respiratory syndrome coronavirus 2
  REGION 1..12: note = Table B: HLA-DQA1*01:02-B1*06:02L HLA-DPA1*03:01-B1*105:01L HLA-DQA1*02:01-B1*03:03L
SDRVVFVLWAHG

SEQ ID NO: 18504 - protein, 10 aa, Severe acute respiratory syndrome coronavirus 2
  REGION 1..10: note = Table B: HLA-DQA1*01:02-B1*06:02L HLA-DPA1*03:01-B1*04:02L HLA-DPA1*02:01-B1*13:01L HLA-DQA1*01:03-B1*06:01L HLA-DRB1*15:03L
VVFVLWAHGF

SEQ ID NO: 18505 - protein, 14 aa, Severe acute respiratory syndrome coronavirus 2
  REGION 1..14: note = Table B: HLA-DQA1*01:02-B1*06:02L
IGPERTCCLCDRRA

SEQ ID NO: 18506 - protein, 14 aa, Severe acute respiratory syndrome coronavirus 2
  REGION 1..14: note = Table B: HLA-DQA1*01:02-B1*06:02L HLA-DRB1*01:02L
GPERTCCLCDRRAT

SEQ ID NO: 18507 - protein, 13 aa, Severe acute respiratory syndrome coronavirus 2
  REGION 1..13: note = Table B: HLA-DQA1*01:02-B1*06:02L HLA-DQA1*03:01-B1*03:02L HLA-DQA1*01:03-B1*06:01L HLA-DQA1*02:01-B1*03:03L
DRRATCFSTASDT

SEQ ID NO: 18508 - protein, 14 aa, Severe acute respiratory syndrome coronavirus 2
  REGION 1..14: note = Table B: HLA-DQA1*01:02-B1*06:02L HLA-DPA1*02:01-B1*13:01L
RRATCFSTASDTYA

SEQ ID NO: 18509 - protein, 12 aa, Severe acute respiratory syndrome coronavirus 2
  REGION 1..12: note = Table B: HLA-DQA1*01:02-B1*06:02L HLA-DQA1*05:05-B1*03:01L
FSTASDTYACWH

SEQ ID NO: 18510 - protein, 12 aa, Severe acute respiratory syndrome coronavirus 2
  REGION 1..12: note = Table B: HLA-DQA1*01:02-B1*06:02L HLA-DQA1*02:01-B1*03:03L
STASDTYACWHH

SEQ ID NO: 18511 - protein, 12 aa, Severe acute respiratory syndrome coronavirus 2
  REGION 1..12: note = Table B: HLA-DQA1*01:02-B1*06:02L HLA-DQA1*01:03-B1*06:01L HLA-DQA1*02:01-B1*03:03L
TASDTYACWHHS

SEQ ID NO: 18512 - protein, 11 aa, Severe acute respiratory syndrome coronavirus 2
  REGION 1..11: note = Table B: HLA-DQA1*01:02-B1*06:02L HLA-DRB1*08:01L HLA-DQA1*01:03-B1*06:01L
DTYACWHHSIG

SEQ ID NO: 18513 - protein, 12 aa, Severe acute respiratory syndrome coronavirus 2
  REGION 1..12: note = Table B: HLA-DQA1*01:02-B1*06:02L
TYACWHHSIGFD

SEQ ID NO: 18514 - protein, 10 aa, Severe acute respiratory syndrome coronavirus 2
  REGION 1..10: note = Table B: HLA-DQA1*01:02-B1*06:02L HLA-DPA1*01:03-B1*03:01L HLA-DRB1*03:01L HLA-DRB1*14:02L HLA-DQA1*05:05-B1*03:19L HLA-DQA1*05:01-B1*02:01L HLA-DRB1*16:01L HLA-DQA1*02:01-B1*03:03L
HHSIGFDYVY

SEQ ID NO: 18515 - protein, 12 aa, Severe acute respiratory syndrome coronavirus 2
  REGION 1..12: note = Table B: HLA-DQA1*01:02-B1*06:02L HLA-DPA1*03:01-B1*105:01L HLA-DQA1*01:03-B1*06:01L
MIDVQQWGFTGN

SEQ ID NO: 18516 - protein, 13 aa, Severe acute respiratory syndrome coronavirus 2
  REGION 1..13: note = Table B: HLA-DQA1*01:02-B1*06:02L
LQSNHDLYCQVHG

SEQ ID NO: 18517 - protein, 13 aa, Severe acute respiratory syndrome coronavirus 2
  REGION 1..13: note = Table B: HLA-DQA1*01:02-B1*06:02L HLA-DQA1*01:03-B1*06:01L
SNHDLYCQVHGNA

SEQ ID NO: 18518 - protein, 11 aa, Severe acute respiratory syndrome coronavirus 2
  REGION 1..11: note = Table B: HLA-DQA1*01:02-B1*06:02L HLA-DQA1*01:03-B1*06:01L HLA-DQA1*02:01-B1*03:03L
DLYCQVHGNAH

SEQ ID NO: 18519 - protein, 12 aa, Severe acute respiratory syndrome coronavirus 2
  REGION 1..12: note = Table B: HLA-DQA1*01:02-B1*06:02L
VHGNAHVASCDA

SEQ ID NO: 18520 - protein, 12 aa, Severe acute respiratory syndrome coronavirus 2
  REGION 1..12: note = Table B: HLA-DQA1*01:02-B1*06:02L HLA-DQA1*01:03-B1*06:01L
GNAHVASCDAIM

SEQ ID NO: 18521 - protein, 11 aa, Severe acute respiratory syndrome coronavirus 2
  REGION 1..11: note = Table B: HLA-DQA1*01:02-B1*06:02L HLA-DQA1*01:03-B1*06:01L HLA-DQA1*02:01-B1*03:03L
DAIMTRCLAVH

SEQ ID NO: 18522 - protein, 14 aa, Severe acute respiratory syndrome coronavirus 2
  REGION 1..14: note = Table B: HLA-DQA1*01:02-B1*06:02L
IMTRCLAVHECFVK

SEQ ID NO: 18523 - protein, 10 aa, Severe acute respiratory syndrome coronavirus 2
  REGION 1..10: note = Table B: HLA-DQA1*01:02-B1*06:02L HLA-DQA1*01:03-B1*06:01L
VHECFVKRVD

SEQ ID NO: 18524 - protein, 11 aa, Severe acute respiratory syndrome coronavirus 2
  REGION 1..11: note = Table B: HLA-DQA1*01:02-B1*06:02L HLA-DRB4*03:01NL HLA-DRB1*12:01L HLA-DPA1*01:02-B1*04:01L
MVVKAALLADK

SEQ ID NO: 18525 - protein, 12 aa, Severe acute respiratory syndrome coronavirus 2
  REGION 1..12: note = Table B: HLA-DQA1*01:02-B1*06:02L
VVKAALLADKFP

SEQ ID NO: 18526 - protein, 13 aa, Severe acute respiratory syndrome coronavirus 2
  REGION 1..13: note = Table B: HLA-DQA1*01:02-B1*06:02L
LLADKFPVLHDIG

SEQ ID NO: 18527 - protein, 14 aa, Severe acute respiratory syndrome coronavirus 2
  REGION 1..14: note = Table B: HLA-DQA1*01:02-B1*06:02L HLA-DPA1*02:01-B1*13:01L
ADKFPVLHDIGNPK

SEQ ID NO: 18528 - protein, 12 aa, Severe acute respiratory syndrome coronavirus 2
  REGION 1..12: note = Table B: HLA-DQA1*01:02-B1*06:02L
VLHDIGNPKAIK

SEQ ID NO: 18529 - protein, 12 aa, Severe acute respiratory syndrome coronavirus 2
  REGION 1..12: note = Table B: HLA-DQA1*01:02-B1*06:02L
IGNPKAIKCVPQ

SEQ ID NO: 18530 - protein, 12 aa, Severe acute respiratory syndrome coronavirus 2
  REGION 1..12: note = Table B: HLA-DQA1*01:02-B1*06:02L
GNPKAIKCVPQA

SEQ ID NO: 18531 - protein, 11 aa, Severe acute respiratory syndrome coronavirus 2
  REGION 1..11: note = Table B: HLA-DQA1*01:02-B1*06:02L HLA-DQA1*01:03-B1*06:01L
AIKCVPQADVE

SEQ ID NO: 18532 - protein, 12 aa, Severe acute respiratory syndrome coronavirus 2
  REGION 1..12: note = Table B: HLA-DQA1*01:02-B1*06:02L
IKCVPQADVEWK

SEQ ID NO: 18533 - protein, 10 aa, Severe acute respiratory syndrome coronavirus 2
  REGION 1..10: note = Table B: HLA-DQA1*01:02-B1*06:02L HLA-DPA1*01:03-B1*03:01L HLA-DRB1*03:01L HLA-DQA1*05:05-B1*03:19L HLA-DQA1*05:01-B1*02:01L HLA-DPA1*01:03-B1*104:01L HLA-DRB1*16:01L
PQADVEWKFY

SEQ ID NO: 18534 - protein, 10 aa, Severe acute respiratory syndrome coronavirus 2
  REGION 1..10: note = Table B: HLA-DQA1*01:02-B1*06:02L
DAQPCSDKAY

SEQ ID NO: 18535 - protein, 12 aa, Severe acute respiratory syndrome coronavirus 2
  REGION 1..12: note = Table B: HLA-DQA1*01:02-B1*06:02L HLA-DRB1*08:01L
SYATHSDKFTDG

SEQ ID NO: 18536 - protein, 13 aa, Severe acute respiratory syndrome coronavirus 2
  REGION 1..13: note = Table B: HLA-DQA1*01:02-B1*06:02L HLA-DPA1*03:01-B1*105:01L
SDKFTDGVCLFWN

SEQ ID NO: 18537 - protein, 14 aa, Severe acute respiratory syndrome coronavirus 2
  REGION 1..14: note = Table B: HLA-DQA1*01:02-B1*06:02L
DKFTDGVCLFWNCN

SEQ ID NO: 18538 - protein, 14 aa, Severe acute respiratory syndrome coronavirus 2
  REGION 1..14: note = Table B: HLA-DQA1*01:02-B1*06:02L
TDGVCLFWNCNVDR

SEQ ID NO: 18539 - protein, 12 aa, Severe acute respiratory syndrome coronavirus 2
  REGION 1..12: note = Table B: HLA-DQA1*01:02-B1*06:02L HLA-DPA1*03:01-B1*04:02L HLA-DPA1*01:03-B1*04:02L HLA-DQA1*01:03-B1*06:01L HLA-DRB1*15:03L
LFWNCNVDRYPA

SEQ ID NO: 18540 - protein, 11 aa, Severe acute respiratory syndrome coronavirus 2
  REGION 1..11: note = Table B: HLA-DQA1*01:02-B1*06:02L
WNCNVDRYPAN

SEQ ID NO: 18541 - protein, 10 aa, Severe acute respiratory syndrome coronavirus 2
  REGION 1..10: note = Table B: HLA-DQA1*01:02-B1*06:02M HLA-DPA1*02:01-B1*13:01L HLA-DPA1*03:01-B1*105:01L HLA-DQA1*01:03-B1*06:01L HLA-DRB1*15:03L
YPANSIVCRF

SEQ ID NO: 18542 - protein, 12 aa, Severe acute respiratory syndrome coronavirus 2
  REGION 1..12: note = Table B: HLA-DQA1*01:02-B1*06:02L
PANSIVCRFDTR

SEQ ID NO: 18543 - protein, 14 aa, Severe acute respiratory syndrome coronavirus 2
  REGION 1..14: note = Table B: HLA-DQA1*01:02-B1*06:02L HLA-DRB1*01:02L HLA-DRB1*08:04L HLA-DRB1*14:01L HLA-DRB1*04:08L
DTRVLSNLNLPGCD

SEQ ID NO: 18544 - protein, 14 aa, Severe acute respiratory syndrome coronavirus 2
  REGION 1..14: note = Table B: HLA-DQA1*01:02-B1*06:02L
SNLNLPGCDGGSLY

SEQ ID NO: 18545 - protein, 14 aa, Severe acute respiratory syndrome coronavirus 2
  REGION 1..14: note = Table B: HLA-DQA1*01:02-B1*06:02L
PGCDGGSLYVNKHA

SEQ ID NO: 18546 - protein, 12 aa, Severe acute respiratory syndrome coronavirus 2
  REGION 1..12: note = Table B: HLA-DQA1*01:02-B1*06:02L HLA-DRB1*01:02L HLA-DRB1*08:04L HLA-DRB1*14:01L HLA-DRB1*11:04L HLA-DRB1*08:01L HLA-DRB1*11:01L HLA-DRB1*12:01L
LYVNKHAFHTPA

SEQ ID NO: 18547 - protein, 11 aa, Severe acute respiratory syndrome coronavirus 2
  REGION 1..11: note = Table B: HLA-DQA1*01:02-B1*06:02L HLA-DPA1*01:03-B1*04:01L HLA-DPA1*01:03-B1*04:02L HLA-DQA1*03:01-B1*03:02L HLA-DRB1*04:08L HLA-DQA1*02:01-B1*03:03L
FDKSAFVNLKQ

SEQ ID NO: 18548 - protein, 10 aa, Severe acute respiratory syndrome coronavirus 2
  REGION 1..10: note = Table B: HLA-DQA1*01:02-B1*06:02L HLA-DPA1*01:03-B1*03:01L HLA-DRB1*03:01L HLA-DQA1*05:05-B1*03:19L HLA-DQA1*05:01-B1*02:01L HLA-DPA1*01:03-B1*04:01L HLA-DPA1*01:03-B1*104:01L HLA-DRB1*16:01L
  REGION 1..10: note = CONT. FROM ABOVE: HLA-DQA1*02:01-B1*03:03L HLA-DRB1*15:03L
VNLKQLPFFY

SEQ ID NO: 18549 - protein, 12 aa, Severe acute respiratory syndrome coronavirus 2
  REGION 1..12: note = Table B: HLA-DQA1*01:02-B1*06:02L HLA-DPA1*01:03-B1*04:02L
SDIDYVPLKSAT

SEQ ID NO: 18550 - protein, 12 aa, Severe acute respiratory syndrome coronavirus 2
  REGION 1..12: note = Table B: HLA-DQA1*01:02-B1*06:02L HLA-DPA1*01:03-B1*03:01L HLA-DRB1*14:01L HLA-DRB1*04:08L
DIDYVPLKSATC

SEQ ID NO: 18551 - protein, 12 aa, Severe acute respiratory syndrome coronavirus 2
  REGION 1..12: note = Table B: HLA-DQA1*01:02-B1*06:02L HLA-DRB1*14:02L HLA-DQA1*01-B1*05L HLA-DRB1*12:01L HLA-DPA1*03:01-B1*105:01L HLA-DQA1*05:05-B1*03:01L HLA-DRB1*10:01L HLA-DQA1*02:01-B1*03:03L
DYVPLKSATCIT

SEQ ID NO: 18552 - protein, 13 aa, Severe acute respiratory syndrome coronavirus 2
  REGION 1..13: note = Table B: HLA-DQA1*01:02-B1*06:02L HLA-DPA1*03:01-B1*105:01L HLA-DQA1*01:03-B1*06:01L
VPLKSATCITRCN

SEQ ID NO: 18553 - protein, 12 aa, Severe acute respiratory syndrome coronavirus 2
  REGION 1..12: note = Table B: HLA-DQA1*01:02-B1*06:02L
KSATCITRCNLG

SEQ ID NO: 18554 - protein, 14 aa, Severe acute respiratory syndrome coronavirus 2
  REGION 1..14: note = Table B: HLA-DQA1*01:02-B1*06:02L
SATCITRCNLGGAV

SEQ ID NO: 18555 - protein, 11 aa, Severe acute respiratory syndrome coronavirus 2
  REGION 1..11: note = Table B: HLA-DQA1*01:02-B1*06:02L HLA-DQA1*01:03-B1*06:01L
LGGAVCRHHAN

SEQ ID NO: 18556 - protein, 10 aa, Severe acute respiratory syndrome coronavirus 2
  REGION 1..10: note = Table B: HLA-DQA1*01:02-B1*06:02L HLA-DRB4*01:01L HLA-DPA1*02:01-B1*13:01L HLA-DPA1*03:01-B1*105:01L HLA-DQA1*01:03-B1*06:01L HLA-DQA1*02:01-B1*03:03L HLA-DRB1*15:03L
MMISAGFSLW

SEQ ID NO: 18557 - protein, 10 aa, Severe acute respiratory syndrome coronavirus 2
  REGION 1..10: note = Table B: HLA-DQA1*01:02-B1*06:02L HLA-DQA1*05:05-B1*03:19L
ISAGFSLWVY

SEQ ID NO: 18558 - protein, 12 aa, Severe acute respiratory syndrome coronavirus 2
  REGION 1..12: note = Table B: HLA-DQA1*01:02-B1*06:02L HLA-DPA1*03:01-B1*04:02L HLA-DPA1*03:01-B1*105:01L
AGFSLWVYKQFD

SEQ ID NO: 18559 - protein, 12 aa, Severe acute respiratory syndrome coronavirus 2
  REGION 1..12: note = Table B: HLA-DQA1*01:02-B1*06:02L HLA-DPA1*03:01-B1*04:02L HLA-DPA1*03:01-B1*105:01L
GFSLWVYKQFDT

SEQ ID NO: 18560 - protein, 10 aa, Severe acute respiratory syndrome coronavirus 2
  REGION 1..10: note = Table B: HLA-DQA1*01:02-B1*06:02L HLA-DPA1*03:01-B1*04:02L HLA-DQA1*01-B1*05L HLA-DQA1*05:05-B1*03:19L HLA-DQA1*05:01-B1*02:01L HLA-DPA1*01:03-B1*04:01L HLA-DPA1*01:03-B1*04:02L HLA-DPA1*03:01-B1*105:01L
  REGION 1..10: note = CONT. FROM ABOVE: HLA-DPA1*01:02-B1*04:01L HLA-DRB1*16:01L HLA-D QA1*01:03-B1*06:01L HLA-DRB1*15:03L
LWVYKQFDTY

SEQ ID NO: 18561 - protein, 10 aa, Severe acute respiratory syndrome coronavirus 2
  REGION 1..10: note = Table B: HLA-DQA1*01:02-B1*06:02L HLA-DPA1*02:01-B1*13:01L HLA-DQA1*01:03-B1*06:01L HLA-DRB1*15:03L
YKQFDTYNLW

SEQ ID NO: 18562 - protein, 11 aa, Severe acute respiratory syndrome coronavirus 2
  REGION 1..11: note = Table B: HLA-DQA1*01:02-B1*06:02L HLA-DQA1*01-B1*05L HLA-DQA1*05:01-B1*02:01L HLA-DPA1*01:03-B1*04:01L HLA-DPA1*02:01-B1*13:01L HLA-DRB1*16:01L
TYNLWNTFTRL

SEQ ID NO: 18563 - protein, 11 aa, Severe acute respiratory syndrome coronavirus 2
  REGION 1..11: note = Table B: HLA-DQA1*01:02-B1*06:02L HLA-DRB1*01:02L HLA-DQA1*01-B1*05L HLA-DPA1*01:03-B1*04:01L HLA-DPA1*01:03-B1*04:02L HLA-DRB1*16:01L
YNLWNTFTRLQ

SEQ ID NO: 18564 - protein, 12 aa, Severe acute respiratory syndrome coronavirus 2
  REGION 1..12: note = Table B: HLA-DQA1*01:02-B1*06:02L HLA-DRB1*11:01L HLA-DPA1*01:03-B1*04:02L HLA-DRB1*04:08L
NLWNTFTRLQSL
